United States Patent Application Publication US 2011/0183924 A1 - sequence listing, part 222

SEQ ID NO: 572191 - DNA, 1439 bp, Homo sapiens
gtcctaagtcctcgttgtacccagttctattcgcgagtggctttcactaatagcattcaccgaacgaggaatgcctaggctatagtaccatctactggaattcggccccaaacgtgggtaccggtgccgtgagtaggcgctagctagcataggccgtgtccgccttgatgccagattaaatcttctgtcaacgcaacatgacgccacctaagagaaccctgcacatagtctagccactcacccgtcgtagatcaccgaccccggagcctgacggtctcaggcatcggctctgtgctactagtgattcccgctcgatctgtgataccccagaccccccgtggcatcaaatgtgttcggagactatgactctgcgctgagtagtaatggctaagggcgattcctgcttagccctaatgttgtgttcatgtcatatttgctgctggagtaccgtggtgtagatgttcaggacccccacagactatcgtgccccaggcactcggggtcgtggagaatggtgcagttcacagtgggccgccacatgccaatacatacggctactgtatagtctcaacaccgtagaggcagtccagtggctatagctagtcagaacgaaataccagatttcccgggtggtgctccgtgttgacgccattttggaccccggttatcagaaccacaccagtagagcaaacatcgtgacctttaactccactgcaaccacgggtgaccgccgtttggtaccctgtgttatgcagtgtacatctacccgaaccggtggaccagatagcaaccgagacggaaaaccctcgctgtcgtacagcaagtggcgaaagcccgcagtctccctaaatgaaaaaacttgggaacctctgagagcaggacctgtacagcgaaggtgccggtcagggcgaaaacctgcgtaggcccagtagggtgggacgtgattagggcaccaaggggccctgacgcggcacggactccacagcagaccctaagacgggaagacacgccggaggggtcacgcagcagaacacacgcgcgcagaagaaccccgggtctacagcgccggggcgccacaaagtcgaagccacaaagcgcgggcaacgggctcacaccccataggtcgcgacaagaagagcgaccaaactcataggcaaacaagcaacatcgcgtcagtggagccgacccacactcctatgcaagcaaacaacaaccgggggagacacatctcgacagacgcagtagcaagtcacgaacgcgaccacccaggcatacgacaacacacgtcatcgacctcatcacttgctgtgtctgcggtcctctgttgtttaaccaatcgtcagcgaaggcagcacgtacaacaccgcgacgcgaacgcagcagaacataaagcagcgaaacacaagaccacacgaaccgaacagaagcacaacaacggt

SEQ ID NO: 572192 - DNA, 755 bp, Homo sapiens
  misc_feature (755)..(755): n is a, c, g, or t
cgggtcactggacacacccgggcctggagctggatgccggggatcccagagacgagcccggggtttagtgtgcgcgacgggctcgcctgaccgtggccggccctgcacctgtggggcgcccgcctgactggagcaacgctggcagagcggttttcctgacgcggcgctgtgtctcgatgtctgtgctgggagctaaaccggcagctgcggggctgctgggcgctgacgatggcgctgctggctgaatgcagatggctgccgcacgctgaagaaccgcggctacgcgcaggcctgtcgctccaagcggcttgcagcatgctgtgctgctgtgtgctgtgatggcctgatgctgctgccctgccttggcctgcccagctggactgcggcttgctgtgggccgatgggtgtgccctgcctgtgccctgtggagctgcgatctctacaaggctctgctgtgacctgggctaaccctcgagcggccccgtggtccggggacccctcccacctcttcctctgagccgttcagagcaccttgtggtgtagtgggggctgggtggggtggctccgcccaggaggcggctgcacggttctctgccatctgttaccagagcgccttctggtcctagccacgcctgtatgaccgcgcaaatatcccaaagctttgggtcctcaagtcatgccggaatttagatgctggtcattttctggagaaggggtccccttcccttagaacacaaaaacccagccacataatn

SEQ ID NO: 572193 - DNA, 168 bp, Homo sapiens
aggatccgtaatgaagcaagcggcagtggacttatcgtagtgggggaaaggggtgtccgaataatatccgggaagtgatcaggacacctattttaaatataggccggaatttggtaaagtactatttaagggtggtccgtgtatacttaaataaacatgcttaatggt

SEQ ID NO: 572194 - DNA, 102 bp, Homo sapiens
aatcttgcactttgaaaccgcgggaccgaggcagggtgcgcgcgtgtggttgtgtgcctttttttttttcttcccctccctaaacccttctgtcgtcttctc

SEQ ID NO: 572195 - DNA, 465 bp, Homo sapiens
atgctccttccccccggcactgagccctcccagctgtgctgtgctgggaacaggccaggcgtttgtgaaatcctcgggtgagcctgacccactgtcatgaggacttgcctgtggaagctggtgccgggagggggatggggggctgttcccagaagcgggtagaactctggacttcccactcctgagcgctctgattgcagcacagccttaagcaacagtagcggcctggaaggctgggctgcaggctggaaggctgggatgcagcctggaaggaaggctgcgctgcaggctggaacactgggttgtaggcttcaggctttttttcagaaaagaaattagggttctgaatgctaagacgttgggctcttccagttaacaccatcactgccggtattcacagcactattcaggcccagcctcaggaagcgactgcaaacccagatataaaaaataaaaataaataaa

SEQ ID NO: 572196 - DNA, 211 bp, Homo sapiens
gactcgcgggctgcgacatctgtcaccccattgatcgccagggttgattcggctgatctggctggctaggcgggtgtccccttcctccctcaccgctccatgtgcgtccctcccgaagctgcgcgctcggtcgaagaggacgaccatccccgatagaggaggaccggtcttcggtcaagggtatacgagtagctgcgctcccctgctagtc

SEQ ID NO: 572197 - DNA, 282 bp, Homo sapiens
ttcattcacctgctgaagaacatccagtttttcaatattaagctgctatgaacatttgtgcacaggtttttattggaaggttagttttcatttatctgggataaatacagagtgcaactgctaggtcatatggtaattgcatgtttcacgtcataagaaaccaccagccaggggatgacggctcatgcctgttaatcccagcactttggggaggccgaggcgggcttgatccaccttgagggtccagggagtttcaaaaccagccttgacccaacatgggtt

SEQ ID NO: 572198 - DNA, 831 bp, Homo sapiens
tggtcctggccctgtgctcagtgaccgaaggctctggcttgctggtggatgagccccagctctgcaacgtggcacatggggggagcctcccggcgggttgagatgtggggcatgggcatacctgaaccccctggtgcgtgcgtaaggagctggagtctgcttggtagagaccgagggcatgtgaggtgctggcagttgccatgagctggctcttctgtcccgaccgccatcatcgtacgtggagaccattttgtggtatatcgcgatatcggctactgtccttgccctatgtattcttagccaggcactggtgcgtgtgcctccttgtgattgggcctttcgacattcccatggcccctatgtctcctttgaggtaaccccgtgatcctagccgtctgtttcagggtacgggatgcgtgtgaggtatgtacctgaccacctgaaccgctaactagcttgcccacactcttctagtgtgcatcaggatgggtccacgagtgcagtcttggtatttaggcctgggtggcggatgggtgggtcccataccccagaggggctcagtgattctggtggccttctttccgtttcatccatggccgagatcccccagcgagtggtatggccatggcccgtgtacctgcattcccttagctgttggcatcgtgttcgtgagtcagtgctgcgccactgtgggactcaatgacagtgcacaaggctgaggggctccttgctggaaagctctagggccggctaacaaaatgggctgacctgcagaggggaatctaccagggagatcattattcctgacaatggctgctctgggcaagggac

SEQ ID NO: 572199 - DNA, 180 bp, Homo sapiens
tcctgtccgcatgtttaggcgggttgcttgttcccgaggatgcgggagctcagggccaggccgtgttgcgactggctacagcagacagcgggtaaccgacattctcgcgagtaggaggcatgcgtcgcagtactgctttcgggtgaatttgtctgtatgctacggagctggttttgactc

SEQ ID NO: 572200 - DNA, 115 bp, Homo sapiens
gacttatatcgcaacgagataactccaggtttctccatcataatggcgatgatgggtacttgaagaataacacatagtagatattccccaagatagtcccagtccaaccaaaagt

SEQ ID NO: 572201 - DNA, 140 bp, Homo sapiens
tcaacagggccattgggcatagccaactggcaccagttgggctgcattcatctcctcaggcacagcaggctgcacattctgcaacacaccattttgtcatcatgccacatgcccccggcataggttcaacaggcagcagc

SEQ ID NO: 572202 - DNA, 477 bp, Homo sapiens
gtgactctgaggatcgtacgctctcacccaccccgtataggactataaatcctgaggaaaaaaagcacttaaaagaacaggctggaaatgtttcaggaaacccctttctctacttactctccacttgttcattcaacaaaggcccaaaggtgacaggaagagaagcaaggagcagcagacattagctctctgtagcttttccctggccatcaactagcttctctattaccactctgagatgactgagagagacaacggcaaggagacaagaaccctggactgtcagacaaatccagggaatgcagcagagaaagcaaaagcagcgagaaagcaaaagcagcaggggcctggtcagggagcaaagatggaaatgaggagagcaactgggaacccctgtgagaaagcatggccagagaggaaactaggacatgggaccggacggacagcaaattgtattggggggtgggtggagagcgg

SEQ ID NO: 572203 - DNA, 245 bp, Homo sapiens
  misc_feature (227)..(227): n is a, c, g, or t
ttacgaatcgagctcggaccgaatgcgagagctgtgcactaccacacccagctgaatttttagatttctagtggagatgaggtctcagtatgttcccaggctagagtagaactcctaaggctcaagaaatcctccggcctgagtctctgcaacagtgctgggattagcaggcgtgagccaccacacatggcctgattgcacaactgtgtcgatgattgcggggatcnctctagaagtcgaccgtg

SEQ ID NO: 572204 - DNA, 645 bp, Homo sapiens
  misc_feature (116)..(116): n is a, c, g, or t
ccaaccactgcttaggcctcccacttctccccaggccaagtatgggccctgctgtgttctggaagttccagacacttagtcctcccaccagtgggtggaagagctgccaggtctcnccggtccagatggagaccgccagatacctgctggtggccagactggggccaggtcctgacccacctgcatcaggggatgccctgagctccacaggtcttcatgggccggggttttgggtcctggtgaaggaagtgcatcctcaggcctgggctgtagccagctgtctgcccttgggttccagaacccgactgtggagcccaaggtgaccccacgggggcccccgggctggagcccccaggataccctcactttgcatgaggagctgaaactgacccgtgtcccgtgttagcccccccctggggctgctcttgcttctactataaagataccgccgttacccccttatcccccggggatacccgtggatatctaaacccgaccccccgtggatgtctaaaccccagataataaccaaccttatacatactgttttttcctatgcatacatacctgtgattaagtttatgaattaggccccttaagagattgaccaccataactaataataaatgtaacggttatactgta

SEQ ID NO: 572205 - DNA, 111 bp, Homo sapiens
cacgaggtgacatcctgtctgcctctccatgttgtcaggcccgcctgacctgtaagcactgtgggaattcggtgatcgacttgaggatcgggatgcactacttctccgaaa

SEQ ID NO: 572206 - DNA, 387 bp, Homo sapiens
tcccgggtggaattttttccacaataaaatggttaaacccccgtccctcttgggactccataactctcctgtgggcctaatccttggagagttctctcctctcctctccgcgaattcttcgaaggtgtgagagggtgcgtctcgcgcgcaaaaactgtggtgcccgcgaaaacctgtggtctccccctctccggttctcctatacttctgcggggcgcgaacacagctgtggcccgcgaagagcgtctcctctcgaggggacacacacgcgcggaacaaccgagtgtataccccagcgtgcgcgcgagagaagagagggagagccgagagagcgaaagcgtggcgagttctcgtgaacacgccccacaagagcgagagggtataaga

SEQ ID NO: 572207 - DNA, 349 bp, Homo sapiens
  misc_feature (299)..(299): n is a, c, g, or t
  misc_feature (340)..(340): n is a, c, g, or t
agagagctagcagaatagaaaggattaaaatctaactagcagccccagggtaggccggcgtgagtcacctatgagctgggcctgggctggactatcccctaggtttcctcttggcgctcttctcccttccctcagggctctgtgcagtggtctccacacagagaggtcttcctggacacatgccctaagatagcgttctcagcactgttgctccttgccctgccttatagcagcaacgtcaccacttcgtagatgaaggactcagctctgatttgctccctgcgtgatccccagtaccngggcatcccccaggccttaggagtaggtgctgttcttgatnacattgggt

SEQ ID NO: 572208 - DNA, 150 bp, Homo sapiens
cgccgctatagacattctcttttcttttcttttatgttattttgcttgaagaaataaaaatttatttctgtaaactgttttgagtgcagatgttttcaccaccccaacacagcacagacgccccctgacgaaatgagcaaggacctcgtt

SEQ ID NO: 572209 - DNA, 530 bp, Homo sapiens
catagctgtttcttgagggttaaactacgtcctgacacaccataaccttgaaaatagtttttccccagaggaaaaaagaactccttagcaatcagatctactgcccacctgagactgccggggtataaagatcctacgctgtgcaggccatttttgttgactacaacaaagaagtcacaagtctggctacctcagctctgagcggctgatccctcaaagagtgatggaccagcacaaacttaccagggaccagtgggaggaccggatccaggtgtggcatgcggaacaccgtgggatgctcaaagataatgctatgttggaatacctgaagattgctcaggacctggaaatgtatggaatcaactatttcgagataaaaaacaagaaaggaacagacctttggcttggagttgatgcccttggactgaatatttatgagaaagatgataagtttaaccccaaagattggctttccttggagtgaaatcaggaacatctctttcaatgacaaaaagtttgtcattaaacct

SEQ ID NO: 572210 - DNA, 284 bp, Homo sapiens
catgtggacaattgaatgtcccacataaaatggtacaagcatgcagtctcaatgagtcagtcatcgttgcaactattacaaccaaagctcccatttgcattgtaatcttgccaaacatcatcaatggatgtctccatgcaacttggggtataagcaataatatccactagtgttgttatcagctactgtaaccaagtggctggttccatttgtgttgatgctgcattcatggccattaaaccatggtggataatgatagatgtgtaataacatttccaccattt

SEQ ID NO: 572211 - DNA, 132 bp, Homo sapiens
atagtggtgcttcaggctacagcattgggggcaaattgggcaaatggggcagtgactgctcaatgggtcatagggcttctttttgggcagcatgcaacaatgtcctgcaagttgactgccgtgcatggctgc

SEQ ID NO: 572212 - DNA, 820 bp, Homo sapiens
  misc_feature (38)..(38): n is a, c, g, or t
  misc_feature (128)..(128): n is a, c, g, or t
  misc_feature (539)..(539): n is a, c, g, or t
  misc_feature (542)..(542): n is a, c, g, or t
  misc_feature (545)..(545): n is a, c, g, or t
  misc_feature (556)..(556): n is a, c, g, or t
  misc_feature (558)..(558): n is a, c, g, or t
  misc_feature (569)..(569): n is a, c, g, or t
  misc_feature (573)..(573): n is a, c, g, or t
  misc_feature (602)..(602): n is a, c, g, or t
  misc_feature (610)..(610): n is a, c, g, or t
  misc_feature (624)..(624): n is a, c, g, or t
  misc_feature (632)..(632): n is a, c, g, or t
  misc_feature (636)..(636): n is a, c, g, or t
gccgcggggggaaaatggcggacgggaaggcgggagangagaagcctgaaaagtcgcagcgagctggagccgcggagacctgaagaagaagcagaaaaactgtgaaaataagatgtttcttccagtantggaggggaaagttccagtcgcagcgttgaggaagggatcagtgaagaagaagtgccggactcccaaaaaaagcctaaagagatctccaagtttgtgattttgccataggtagtcagaggaaaagaaggcatcagccatatccatcaaattgtggatcaggtaggcctaaagaaatgttccaattctggttccaaaaatctttcagtagcagcagttttaatgaagatgagatagtgaaccagaggaagatgctccagaagcaaagatgaggatgaagaattatgggagggatacaccaaatcagttgacaaattcttcaataaaggaaagcatgggtttctgataacagaagctgtgggagggaatataaaatctcatctgtgcgaattgtccatgaccaaggacaattnacntgntgtttgaaatngngggtgtgcggntggntgtacagttaaacaggaacagttcctttnttaacgantgcttaagactatntgtggagncggntttaattacttttgcatttttacacgatggggtggtacctaattacatggaaggttgacttcgacggtatatggtcatttcagattcagcattggcattgggttcatgtatagtccaggtgacgtataaccggaaggctttaagaatgtttttgacattaaataagggaattgtttaaagagat

SEQ ID NO: 572213 - DNA, 322 bp, Homo sapiens
  misc_feature (13)..(14): n is a, c, g, or t
  misc_feature (162)..(162): n is a, c, g, or t
  misc_feature (191)..(191): n is a, c, g, or t
  misc_feature (231)..(232): n is a, c, g, or t
  misc_feature (236)..(236): n is a, c, g, or t
  misc_feature (250)..(251): n is a, c, g, or t
ccggttttacttnntttttttccctttaagttaatttcttttttggtgtgggcaaacggcccatccagatggtagaatttcacctgtaagcaatctgaaacgataggttaatcctgacatttaatagagcttttttaatttccttttcacacagtacaactnaagtgcagaataacggctcaagataatgnttccttttttttttattctctttaaaaggcggcttctggnngggnatggggtctttttnncccccaaattttgagattgggggccccattaaaaattcctggggctttaagggcatcttggcgtggtattg

SEQ ID NO: 572214 - DNA, 259 bp, Homo sapiens
  misc_feature (57)..(57): n is a, c, g, or t
  misc_feature (132)..(132): n is a, c, g, or t
  misc_feature (141)..(141): n is a, c, g, or t
  misc_feature (175)..(175): n is a, c, g, or t
  misc_feature (179)..(179): n is a, c, g, or t
  misc_feature (192)..(192): n is a, c, g, or t
  misc_feature (204)..(204): n is a, c, g, or t
  misc_feature (224)..(224): n is a, c, g, or t
  misc_feature (246)..(246): n is a, c, g, or t
  misc_feature (251)..(251): n is a, c, g, or t
tcggagccaaggcagtgtgagtccattcattattctgtcttgagatctaaggcaaanccccgggccccttggagcagcaccaaggttcccgacacccccaccgacagggtcgaacgtgcacaggctgggacnacgccgganttcattaaaccctcgtgggggagggcaataccanggancaggaagggattnccgtccagtgtnaggttatccacctcgggcanctcgtcaggctgcggcgccctnttcantctttttc

SEQ ID NO: 572215 - DNA, 427 bp, Homo sapiens
gacaggattccaggacagtgtttgatgaagctaggactgaggagccgcgagcaatcagagttcgtggtgaatataggaaaagagtccgacgtgagccagtgcgatttgtgtgaaggaagctaggaagaaggaaggagcgctaacgatttggtggtgaagctagtgatataggattccaggaatgagcgattgccattcgttgatgcacgtcagcaggcggtttggtttgaaaaccacacggaggaggcgagcaggcgttgtgcgtagaggatcctagaccagcatgccagtgtgccaaggccacagggaaagcgagtggttggtaaaaatccgtgaggtcggcaatatgttgtttttctggaacttacttatggtaaccttttatttattttctaatataatgggggagtttcgtactgaggtgtaa

SEQ ID NO: 572216 - DNA, 247 bp, Homo sapiens
tgctgtgaaaatatacatccgctgagagtggaaagagagtgagcgagacactacaggaggtgtcttgagattatcatccgctgagggtggaaggggagtgagcacacactcgggaggtgtcttgagattatcatccgctgagggtggaaggggagtgagcacacactcgggaggtgtcttgagcattatcatccgctagagggtggcaaggggcagttgagcagcacactcgaggcaggtgtacttg

SEQ ID NO: 572217 - DNA, 216 bp, Homo sapiens
aaggaaaccaaaggttttaaaactggggtttgggggaaggtttcacctttcccccctccccttgccccacacccttttttccccagcccagagaggcgcggttttttccaggaaagactattgaaaaatgtttttttttttttttttttgccctttccccccttgaaaaaatggggaaaaaagaagaaaaaagccaaatttgcccttaaaaggcca

SEQ ID NO: 572218 - DNA, 190 bp, Homo sapiens
aaacttcctctcctcccacctcgaggctgaggcaagagaaccgtttgaggctgaaaggcgggttgagagagccgagatcacaccactgcactccagcctgagcgacagaatgagactctgtcacatacacacacacacacacatgaatgacatgaggctggcacagtggctcactcctgtaatcccagca

SEQ ID NO: 572219 - DNA, 835 bp, Homo sapiens
  misc_feature (74)..(74): n is a, c, g, or t
ggacaactctgctcctcctctatggaaacacacacccccacccacgcccagcccacaaaatttttatttctatngcgccgcgggcctttttctgtgccacaaaacttttttggaaacacacactccgggggctgtttctaaatttatctttgttgggtgtccacctcaaacacctttttttcctgaaaaaggagcccccacacccagcgggtctcctctctccttttaagacttttcaacagatttttttgtggaacaaacaccacaaggggcccggccccctttacaaaattggggcgggaagaaataaaaaaccacaccccccttctcttctttttccaagggtctttaaaccaagaaatttaaattttttttggtccccaagggggggggggggggggggggaacccccccacagttatttccccttttccaccaccttaggtcctcccagggcgggggggtgaaaggttgggattccgcttccccccacccttccccaagggtggtttgggacaccccacaccccctttttttttttccccggaaaattaaaccgggtccccccccctttttcaaaatcaaaaatttaaatgggggggtttcgggggggagggttttttccttaccccccctttccccaaaccgttttttggggagcccccggggattttaccccttcccttcccctttccccccaaaaattttttttgttgcccttttcctaccgggcccatccttggcccccgcaaataaaaaaaattaacccaaatcccccccccccggggggttttttttttttgggggggaaaaatttttaaccacccaaattcca

SEQ ID NO: 572220 - DNA, 231 bp, Homo sapiens
  misc_feature (144)..(144): n is a, c, g, or t
  misc_feature (153)..(153): n is a, c, g, or t
  misc_feature (157)..(157): n is a, c, g, or t
  misc_feature (193)..(193): n is a, c, g, or t
  misc_feature (223)..(223): n is a, c, g, or t
agtccttgtatcagtcaaacatgctttggagctcccctagagcgaccagcctaccttctgtctttcagctgcattcaagtgccttcatgtagaaatgctgctcttccaggaatgattaatttccattcttgtgttgtctgctgnatgaacgtntaangtcacaaactgccatctttatgcttcctttgctccntttgcaaacatcatcttgtgaatcatagtnggataaga

SEQ ID NO: 572221 - DNA, 404 bp, Homo sapiens
acccttaagaaaagctgcatcatttaagtctgtattctccaatgcttcttaaggtgcttgaatcaaggagacaatcaataagagtttgtttgagaagtacactgagcccctgtagcttttttctatctgtgcctggcacccatcagtcctgtgacagctgcttgaacagtacaaatatgcccagagttaaagaactgatatcttccacttccccaacatctgttatgctcttccacatcttcgcccctttaaaacaaacaactgaaatttccatccctgaagtacactttactcaatgataaaatcaaccaataattactgagcactttttatgggctcagcattctttcaagtgctttgcctatattgactcatttcatctactgagcaactctataaggtag

SEQ ID NO: 572222 - DNA, 461 bp, Homo sapiens
ggctgcaggaatccggaccagcttgagactgatagcatttggtgggaatcagtacacggtaataagtgataaattataactgagtgctttgtacactccaggtgctgagctgtttcgcatgtgacgcacctcgtctgcattgatatcgacgtacgtaattatccccaattgaccgatgatgaaaggcagattgacaccacccgtaggctgcacagctgatactcacagagctgaatatcgccacatgctaagattctagctaatcctaacatctgtttttcaccagacgacaccggacgttacggcttgtcgtgcaacacggcattatctggaacccaccatttgtatcccggcctcatatatcttctccctaccttgttgccaaggcacgtatgggtccctaacggatggacaccatttatgtacgacatcctatgggataccagacggtcgatatttcg

SEQ ID NO: 572223 - DNA, 835 bp, Homo sapiens
cctgtgaccgctgccccctcctcgagtctcgcccgccgcgatactgttgtcacgattaattgtgagctgggggccaaaccgctgtggggggaaacaaccaccaacagtgggggaagaggagtctcccccggcgctgctgacaaaaaagcggtggctctgcgcggaaaaacctgggggtgccccccacatatcggttaggaacgcgctggaaacagggggggcccgctctctcgcgtggtgccgccgttgaaccggcggaactccgtttctcacagccaggggggaccatcggaaagctgcccctaacgcacgtgtagagccgctctctagcccccgttgtcagctcccccttcgggggacgtcagaacccctcttgcggcccccttacctccgttcccctgtgccctatttaagtcccccggggggaacacaaccaatgtcctatagtattctcaataaccgcccccgccccacccgatgggcgggcctcaccaagatccccctacacttgggacccactccagtgggggcccttccacttgtagtattctttcatggaaagctcatgttggcctcccccccgcaggaccatcccaccctgcggtctgcccgctcaccgccccccgagagtggggcaaatagttgtcgcgcagccccacttatagtgcgcacacaatggggtataagagcacgatatgttaccgcagctggcccgcccggcatgttagcgcgcaattgaacaggcgcactcgcccgcccacagatacacgtggggcgtgggagacaccacacggccgccttttcatcacaaaaaaactttttccccccacatgtc

SEQ ID NO: 572224 - DNA, 259 bp, Homo sapiens
cccctttttggaaatttaaatttttttcttattttttgggggggacaaaaaaggggtaaaaatttatgccaatcgggcattttttgataggggcaccccataggtaataattcccccaattcccccgggggaaattagggaccccttccttggaccctttattttttcccacccccccaattaggcccttttggtttttttaaaggggccaattaaattgctattggcggcagggttatttttgggggaaaaaaattta

SEQ ID NO: 572225 - DNA, 323 bp, Homo sapiens
aggcccacctaggattggactttcccaggactaaccagactaaaagaatcgagcctttttgtctggactaaccagacataaagaatgacaaaagcccgctatggacgggacttaagacaaactctcctgaggtcttggcatattcagaacaaagagtaggctgcttaatatgttacatgtctcggagttcccagtcttttcaggctggccaccagacatgaccgaaaaatcatgtcccctagagggtggaaaccaagagcaggtattcctgtttggtcacaaagcaagctctcaaggatgtaaaataagatgagagggacgct

SEQ ID NO: 572226 - DNA, 168 bp, Homo sapiens
  misc_feature (26)..(26): n is a, c, g, or t
  misc_feature (87)..(87): n is a, c, g, or t
  misc_feature (168)..(168): n is a, c, g, or t
ggtgtgggtgcagtgatttggatcantgcccctactcctcatagcctcttcccaaacgaaccgggtgtggcgtgctgggcctttatncttctgggacacaaacacgggactgctgattggtctctgatatagaccctggagtctgctccttttgtctggggcaaaaan

SEQ ID NO: 572227 - DNA, 153 bp, Homo sapiens
taggcagggatatgcctacaggacggggtctcactgaggccatgatggacgcctgtgtgcaatgatgctgtccagcagtacctgacagaagatgcgctggctgaaggcggaggggcctgtggcgcggggtcgagcacccccgatacagcgaca

SEQ ID NO: 572228 - DNA, 110 bp, Homo sapiens
gaggatcccggctatcacattatcctaagcgaaattacacaggaacagaaaaccacataccctgtgttctcacttataagtgagaactacagcattgtgtatacacgaac

SEQ ID NO: 572229 - DNA, 211 bp, Homo sapiens
  misc_feature (9)..(9): n is a, c, g, or t
tccgtctgntctgttcttggctaagcgtaacagcggtcgcgcatgtcttccttgacctcattcaggagggcaacctcggtctcattctggaagcgcacgatggcgctgtctcatgtttccagtcttcgattccgcccgctttccgagtgagaaacgcaggcctctctcttccgtgaagcagcgtcttgtcctcttgcaccatcctctgtgc

SEQ ID NO: 572230 - DNA, 167 bp, Homo sapiens
ggccggcggggacggggaaaacggagactgtcaaagatctagcaaaatccttaggcaaacattgtgtggtcttcaactgttttgaggatttggattataagatagtgagaaaatttttctttggactagttcagtcaggcgccttgggctgcttcgacgaatttaac

SEQ ID NO: 572231 - DNA, 116 bp, Homo sapiens
ggggttccttttcttttttaaaaaccctggggtaatcccccatacttaaaggaacagtttgttttccaaaagcccgataaaaaatatttttaaaaaaagttttccttttctaatta

SEQ ID NO: 572232 - DNA, 287 bp, Homo sapiens
aaagagactctagaatcaggaaagaagtgcatctgccctgtaatcacaccttcctaccatcattcactccacaagcactagatcccagagttcaggctgcatcaactatgcattaggtgaggcaagaacatcgaacagtgctgacagaacgcagccggacagttcagaaagacttgccaatacgcagaactcttctacactgtgtggtggacagaattattgctcctaattcctcacctctccttgtgctccgcatatgtttaagacatgccaagccccagctgcgg

SEQ ID NO: 572233 - DNA, 511 bp, Homo sapiens
  misc_feature (108)..(108): n is a, c, g, or t
tagctgtggaagacgggccagatgactacgacgaggaagatgaggatgaggtggaagaggaggagaccaacaggctccctggtggcaggagcagagtgctgctgcggngctacacctgcaagtccctgcccagggacgagcgctgcaacctgacgcagaactgctcacatggccagacctgcacaaccctcattgcccacgggaacaccgagtcaggcctcctgaccacccactccacgtggtgcacagacagctgccagcccatcaccaagacggtggaggggacccaggtgaccatgacctgctgccagtccagcctgtgcaatgtcccaccctggcaaagctcccgagtccaggacccaacaggcaagggggcaggcggcccccggggcagctccgaaactgtgggcgcagccctcctgctcaacctccttgccggccttggagcaatgggggccaggagaccctgacccacggcccctccccacccccaaccgcatcacccgttcgg

SEQ ID NO: 572234 - DNA, 115 bp, Homo sapiens
actctaaggatcccgctccctggttgctgtattaaatgtccaagcgcggatagggccggggaatggttgagcctctggagatcacttgtaaccaaatcctgctctagaacctgtt

SEQ ID NO: 572235 - DNA, 1712 bp, Homo sapiens
cctgtattgtggggagaatggtgtgggtgggttgttcccctgagacacagccgcgcggttgtatgggggttggcccaccacctggtggtgcgccccgtcgtaggtgcaagacagttgtttctccctcccgcggggtggtaggtgtgatatatcctgtggttccggtgttagtgggtcgccccctcctggtggggacgctcgtttttttggtgagagtgtcgagcaccttggtttttctcctcctcggggcggggcaccacctatatagtgggggcccggtcttcctcacaagtgggctccccagagggagataatgggtggtttgcttctgttgtccacagccacagggtaatgtagttgtgttcttgtttcggttgggtgccctagaacccgtgtttgtgctcgctgtgggggttgttcaccacaagcgccccgttgaagttgtgggggcccccccccgccccccgactgtgggggggaagcgccctacagtccttgtggcgcttttttccataacattggggctttctcacaaggggttgggagattgtaatgcttctcccgtgggtgcacccccaccgtgtcccttctgtgggccgccccaactatttattattggcccccctcctcgggccgttttattattgccggccccccctctgggtggatttatttttggggaggatttttcgcccccccacaccccaccaggagccgcttccgtccacaccaaagtgtggccacatatacgacgcccaaggatgttgtttggtcgtctggtgtggacctttgtgtactatggagggagtaataataaggatgaaggtttggtggagttctccccgccccgctgttcttcttggggggttatcaataataataggaccctcgtggtataaagatattagcggccgctcccctcatgagtagtattctcgtgtggagataaggttctctggggttgatatgcgccgccgcccccactgtgggtgtgagatattgtgtggttgtcctctctgggccacacaggccccccactgggtgtgtgtgtttgagagagagcctttcttctcacagacacctatatgtcccccccccccctcttgggggttctcgcgctgtgtgcctctctgtgttctgtggagattattttgagagacccacacacccacactgtgtgcgcgcgtgtgggtggtgtgtcactctcacacaagcccacactggggagagcccacacagagagagagcttctgtctcgggagagtctctgcgccacaaaggttgtcaccccacaagtgttctcggcccacagcagagaaggctccacgagagagcggctatataatgagaataattatatccctgctaatatacctcgccacaccccacactctctgtataatccacgctgggtggagaagaaccgcgttctcacgagaactcgcttgtggttgtcacaatgtggcccactcttaaagtttagtatgttaaaagactcggttatatgagtaacccactgcacttcgtataaccctctcacgaaaggaaaaggagaattgttttgtggagcccctcttggtttttctctttttgcgctgtggcacgcttttatagagttattaggtttttataaatccgtactttttaatgggaaccacctgtggccccaaatttgtccccgaaattttgagaccccctttaaaaagtttaat

SEQ ID NO: 572236 - DNA, 865 bp, Homo sapiens
  misc_feature (244)..(244): n is a, c, g, or t
aaagaggcaaactgtggggcagccaaaggtggacagtggcccgtgcaggggggtgtgaagagcatgccggtaaaaaagggttttccccctgcgggctcagtgaaaatagtgcccgcgtttttggaatatagagaaccgttcgatcttcgccccgccaggcgttgtttcccccctatgttgtgaagcgagcgttcgtgtcccgctataccacccccttcttgttaaacagagacttcgttgtccncgcgagaacactcaattcgaccaacagtgcgggcatatctccttgcgagacaaattattagacccccctgttggcccacacccttagatcaccatcagcgcggggaatttgcgctccaatatgagagggggaacaactttctgcgtgtataatcccctccttttcaaatgattgcgtttttctattactagggggatcacgcacaccacacactgtggtatggttcagaaatagtggcgagaggatcgtcacacatctctagttcttagggatcaatgggagcgctccgctcgctcccaccataaatgttccgccttttacatagttgggcgaccgtcttcccccaccagagcgtctatttaccaccgcgcgacacttcgacacaccgatggtttattagttttcacgatcgaggtacttcttgtcactcgaataacagatgttttttgtttcgtgtagcacatgtgcttctataaaactcgttctgatcccccttgcttaaatcccgactttttttcgcgcgccgcatatccgcctcctcaagcacgaaccgccgcccaacgtcgtaaacaacttcgtgcttccctataaacaaatctacccttttcccccaaaataaca

SEQ ID NO: 572237 - DNA, 234 bp, Homo sapiens
ggagtcggtacccaattccattccagcgtactactcaaagctcaaaatatcttactggtcaggtgcagtggctataagcccagcactctgggaggctgaggcaggaggactgtttgagcccaggaatttaacaacagtttggtcgacatggaaaggcccccatctctacaaaaaattttaaaaaaactagccaggcatggccggacacagtggctcatgcctgtaatcccagca

SEQ ID NO: 572238 - DNA, 244 bp, Homo sapiens
ggacctgtttgagcctgctgaggatgctgtgcctctgcccataacatatatagagtatgctttcaaaacaatataggccgggtgtggtggctcacacctgtaatcccagcacttgtggaggccaaggcgggcggatcacgaggtcaagagattcagatcatctggccagcatggtgaaaccccatctctactaaaactacaaaaattagctgggcgtggtggtgcatgcttgtagtcccagcta

SEQ ID NO: 572239 - DNA, 339 bp, Homo sapiens
ttcacatgatgttgagctattcagacagataaagtgatcttggaggtatacggatgagtgccgcagccactcaattccctacgcgtcggcatccgagcacatttatgcatacccatactccttgcatgtgccatgacgcagatgatgataaaatgttctcttattcttgtttaatcagtagtggtagtgatgccagaaactgtgaaaggcaaggctttcagttcactttcttctttccattttccaataatccattccccatccccagctgaagaaaggggtgttactgagtccagctgataccacacattgaaaggtaaacattaatatttcaaatct

SEQ ID NO: 572240 - DNA, 503 bp, Homo sapiens
atcatagtgttttggcctgggggagaagtattaaaatggctaagaaaatagcaagtgttcattatagtttatttcaagtctgtcttgaccagtttcaagtgacttatttgtaaaatgcattttaaaataattctaagtagattatattgccaattcatcacttaatagatacctacatttgtgagattcttttcaatctgtgtctatcattggcatagtgttttcttagagacaatcatgatgtaaatataatttgttctccactttttggataacagtttagataaatttttgtatgtgtctaaatcacttattgcttaccattttattgctgcaggctttgattttttaaaggtttactactgtattatctttgaattgaggggcagtagttcttgatgcttatgtattttgaattagctcccaagaacaagtagaattagtttaaaagacttctctctggtttctgttgatccaagcacaataaacttatctgcaatgga

SEQ ID NO: 572241 - DNA, 182 bp, Homo sapiens
aggtggtgtgatctcgactcactgcaacctctgcctcccgagttcaagcaatactcttgcctcagcctctcgagtagctggaattataccgtccaccaccatgcattgctgattttttttttttttttgaaattagagttttcgcctcgctgcccagcgctgaagttgcaagtggcacagat

SEQ ID NO: 572242 - DNA, 111 bp, Homo sapiens
  misc_feature (40)..(40): n is a, c, g, or t
  misc_feature (106)..(106): n is a, c, g, or t
tgacacagtcgctggtgactctggcggaggacaacatagnccttcttctcgagtccagggtcctggggaaacggtcccagcggctgttcaggcgtttttgccggtntacgg

SEQ ID NO: 572243 - DNA, 153 bp, Homo sapiens
tccctgtctcgtttcgggacgttcatgtttttttaatgttttttatgtcactaattattttaacatgtctgtacttgatagacactgtacatagttctattaaactttacgttcctgctgtttatatctgttgatttttgtatttgataggct

SEQ ID NO: 572244 - DNA, 945 bp, Homo sapiens
agcgggggggcggtccgcccgaggaggctttgtgaagacagcagctagggggcctggcgtgtcgtgaggggagccggtgagaagacccgctgccgtgtcccagcgtgaacaagggtcggtgggcaccatgtgctgcaggtccagaacatctcacgtcatgaacaatatctagctcgctcatcgtttgatctgggcaaggatagaccagcgaaaggagaccttagtgcgaagcgtgctggctttggatggtggagatccgcaaagtggcccacgattgcgtcgaagcgcgaccctctaggctacagttgggggtcgcgaagatcctacatctggctcggtaccagcctcgtgtactcacacggagggaggcatcggatgaggtgacggtctgtttgaggatgcttagatccagactgcctcgagatggcacatagtcccctttggcgtccatccttcctctgaactggtacaagtctacttttggactcttgtttgatctagatcctatgtacagagacgccaagtttaccacaacaaggatataattcgatatccttatagaccatacttttaggcctcttagtttaatcccaagttgtaacgtttgcgtattcggagaaaagggtaagatatcgccaatactcaggaggttagttgccataacaaattttaccttaaaatagtgagggtttcagcaacttactctttaaatttatagggcgtgagggttatataggagagaaatactcgttaaaggaaattagaggttggagggtaccaaattggctatcgtcaaagggtaacttggctttctgttaaggttataccttgttcaacttaattttaacgcttggttgtattttgggtacaagaaagagagaagatataacttaatgattgattaagaggatcagggagaaaataggcaagtggagctatttggtg

SEQ ID NO: 572245 - DNA, 672 bp, Homo sapiens
  misc_feature (110)..(110): n is a, c, g, or t
ttcgaggaggtgagcgtgctgggcttcgaggagttcgacaaggcagtgaaggagcatgagggcaagaccattttcgcctacttcagcggttctaaggataccgaaggaangagctggtgtccggactgcgtggaagctgagccagtcattcgagaggggctgaagcatgttaccgaagactgtgtgttcatctactgccaagtaggagacaaaccttactggaaagacccaaataatgacttcagacaaaaactgaaaataacccgcagtgcctacactacttaaatatggaacacctcaaaaacttgtggagtctgagtgctgtcaatccagccttgtggagatgatcttctctgaagattaagatttgatgaccttgccggactgtggtggcacatgcctttagtcccagcactcgggagacagaggcagctggatctctttgagtttgaggctacctggtctacaagttgagttcaaggacagccagagctacagagtaaaaccctgtctggaaaaaccaaaccaacccaaaaaagcctgatgattgcaattttgtattgattgcctggtttgtttaaaagcagccacattattgctttgaattgatgagtaaatgatgttattaaatcagtgtatatctaaacaataaagaattgaaatacaaaccaa

SEQ ID NO: 572246 - DNA, 407 bp, Homo sapiens
taaatttcaagcaaatttaagataaaacttgtaatggctatgccattgaaaaacttaattttttatttttgaggcccatgggccaaggtaacccctaaggggttttcttaggcttcttggagcttagatttgtatgtacatcaaaatgtctttaaaatgttaagttgggcagaaggcagttgaagtgagctttcaaggtatgggaggttttctacattttatactatttcaatctatgcctttaaagttgcttatgattttagctgtacactcattttttaaggggaagaagtttccttgcaccattcgccttttttagatgtcctcactccctgtgatttcataaaactgcctatttgacatctctctctagacatttcattaaagctcacactcaaaataaaaaa

SEQ ID NO: 572247 - DNA, 168 bp, Homo sapiens
ttcaatccatgctagcttcagccctctcagcttattaaaacatataaaagctgaaccactcagaatatatatatcagctagctgaacatttacacagatggtaataccattcaatccgggacatctctctgagttcagtcttatggtattaagatcaaaaccccattt

SEQ ID NO: 572248 - DNA, 673 bp, Homo sapiens
cgctcgttgactctagcatgatccccttaacaggcggatgcgcagcgaatggatcaacgaacgggagtcatccggccagtctcggagaaagaagagagagtatctcgcagggtactggaggctcggctgcaagctgtactggggcgacatctaacagactccgccgagagaatgctgccctccggcggcggctggaggccctgctggctgaaaacagcgagctcaagttagggtctggaaacaggaaggtggtctgcatcatggtcttccttctcttcattgcctacaactttggacctgtcagcatcagtgagcctccttcagctcccatctctcctcggatgaacaagggggagcctcaaccccggagacacttgctggggttctcagagcaagagccagttcagggagttgaacctctccaggggtcctcccagggccctaaggagccccagcccagccccacagaccagcccagtttcagcaacctgacagccttccctgggggcgccaaggagctactactaagagacctagaccagctcttcctctcctctgattgacggacttcaaccgcactgagtccctgaggcttgctgacgagttgagtggctgggtccagcgccaccagagaggccggaggaagatccctcagagaggccaggagagacag

SEQ ID NO: 572249 - DNA, 247 bp, Homo sapiens
  misc_feature (165)..(165): n is a, c, g, or t
ttttttttagaaactaaaactgtcataatccagcaatcccactaatgagtatatatccaaaggaaaggaaattcacattttgatacctgcactccccttttcactgcagcactattcacaatgaccaagatatggaatcaacctacgtgtccatcaataaatgantggatttaaaaatttaatacacacacacacacacacacacacacacacacacacacacaaatactatctggctaaatttaga

SEQ ID NO: 572250 - DNA, 468 bp, Homo sapiens
gatggcaacacaataatagtgagggacttcaatactccactgacagcactagacaggtcattaagacagaacgtcaacaaaggaacaatggatttaaactacaccctagaacaaatggacttaacagatatttacagaacattctacccaacaactgaagaatatatattcttctcatcagcacgtggaacattctccaagatagaccatatgataggccacaaaacaattctcaataaatttaagaaaattgaaatcatatcaagtatcttctcagaccacagtggaataaaactggaaataaactccaaaaggaactctcaaaacaatgcagatacatgaaaattaaataatctgcgcttgaatgatctttgagttaacaatgaaatcaagacggaaattaaaaaattttttgagctgaatgacgttagtgacacaacttatcaaaacctttgggacaacagcaaa

SEQ ID NO: 572251 - DNA, 101 bp, Homo sapiens
agcagattcgggacttgtatgaagactaataagtgaaggcatggtacgatgtgatagagcggtaggaacacctgattatatttcccctgaatgtatcgtga

SEQ ID NO: 572252 - DNA, 118 bp, Homo sapiens
ctgtcagtatctcatgttaggaatttttgagttgctgcttgtgcggtgggtaaatgccaagataaaggggtgctggcctgtggggatttgggagaaacgagagtcgactttagactgg

SEQ ID NO: 572253 - DNA, 1629 bp, Homo sapiens
  misc_feature (417)..(417): n is a, c, g, or t
  misc_feature (1629)..(1629): n is a, c, g, or t
tggccttttgaacccaaatttttaatattttcattaattggtttcaatacaatcttcaggcaatatgccaatcgggaaaaccaagcccagaaaatttcagaggaaattaattctttccaaacaaggaacaccaagggtgatcttcttctccattctccagccacaattacgtggtgtgactcataagtgggtgcatagctcagtattctccagatttattcgagtgtgttttcaccacatctcaattctatattttctcagaaatgtgcctccgaaacgagtttctcagttgtgcaagaagtctcagaagcccacgtgacgtgaattaccaacgagagaggcgtggacacaccagttctccctccaaagatgtgttgtggaaatataccacccctttctgcggacattaaaatgtgnccgtgacaagatttatttctctccctgtgggacatttgtcgcgagtttctctatagatctctgttgtataccgtgagtaaaaaatgtggagattctcagggcgcggaccatttttctcaaggcatatgtgtgtgtagaatgtggacatgtgagcctctcacatataggacatctctgtgcgacaaaagccaagcagaaacgcgccaagtatagagaattctcacatataacacaacagtcaggtgtgttccagggtggaaatatattctcaacgtgatgaaaactcaggatagaggggggcccaaacttccatatttgttttctgtggaaaaggacaccacaaacactttccctgtgcacaatatagagagacgcccccctctcctgtttctttatacacaacttataacacaacagcggaaattttaaggcaccaatctagcggggggccatcttcatgtagaaaccgttgtgaagcccggccactaccagagacataattcgtgatcaaaagtcacaccccacggtttgtgtgcttctaataacccccagagagaaaaggaccaacacatgttgttgtaaccccgtggatttatctacccccacggggggaagtgtggacaagcacagcgacgcttgtgataaaatttcgtgtggaacagcaagtgttgtgtggcccaagaaaaaccctatatattataacgattttgtgaacgcattccccactcaaagaatttaaatcaatcaaaggagtaagaaaaacacccactcactgttttgttttcaagccagcactacaatactgtgcgggccatcattatatattaacgcagccacacatgtgggtcgtctgatgtagttcccccaaatgttgggtcttttcaacaaccggtaataaattcgccaggagcgtacgcttcttgtaaacaaaaaccccattaataacccaccagagataactcatacgctatttattagttacagcaaccaagcgtatattgtgaagagaatactaacttaggaaaaccacctctttgagcagagaaactttcgtgatgagaacaagaggcaactaaccacgctgtgatatagatatcggtcagctaccacagactatacaaaacatagaggctcctttccgaagcaacatagcatactgggtgttagtacaacaccaagcagtagtacttacgtagtcgagagggaagcacn

SEQ ID NO: 572254 - DNA, 486 bp, Homo sapiens
  misc_feature (196)..(196): n is a, c, g, or t
  misc_feature (302)..(302): n is a, c, g, or t
  misc_feature (348)..(348): n is a, c, g, or t
  misc_feature (358)..(358): n is a, c, g, or t
  misc_feature (406)..(406): n is a, c, g, or t
  misc_feature (465)..(465): n is a, c, g, or t
  misc_feature (476)..(477): n is a, c, g, or t
acagtgcaaggagctcccctcaagtggtaggaaatgaatggcccagccatgccttccaaagaaccctctgagaggcgcccagtccctcttctgtgcttccaaacaatccccccgcccagcgtccacatcctcgcattgtggggtggtaggcgacccggtgtctgtctcccccagtgagctgtggaggccttgagancaagggtctcagtcgcccgagtgtctgcccttgggcacaggacagaggatgcgtcgccatcccctgaatgaaaggcccagctggacctggcttgagaagaggcttntattgaccactcagtgcccacaaaacctttgaggttaactttagtntgccctgttnttagcagactgtatttcattttgagcaaccccaggagaggaaaatccnaatttctctctcaaatattgaattaatccatacatgagcagttagtgatttttataaanagattcgccanngaaaaaaaa

SEQ ID NO: 572255 - DNA, 87 bp, Homo sapiens
aaggaacctgattcggactagttttctgttcctgttttttttttttatctaattttgcaaataaaaatttattttgaaaccttaaaa

SEQ ID NO: 572256 - DNA, 968 bp, Homo sapiens
  misc_feature (45)..(45): n is a, c, g, or t
  misc_feature (158)..(158): n is a, c, g, or t
  misc_feature (205)..(205): n is a, c, g, or t
cttgagacaggttctcactctgttacccaggctggagtgcaacgncatggtcttagctcactgcaatctctgcctcccaggctaaagcaattagtgtgcctcagccttccaagtagcttgtaccacaggcatgtgccaccatgttcagctaatgtttntctgttttgttttggtttggtttggtttggttttggtagagacaggnttttgccatgttgcctaggctggtctcgaactcccaaagtgctgggattacaggcgtgagacatcgtgcccagcctatgatattttctagtttatttcatcttgttttaaatgctgataattgcctaatttcataacccactagtgggttatgacctgtagtttaaaaactactgtaggaaagaatatagacaaaccaatgattagagcacagtttaatagcctctatgatagatgaaatgcagaacacttagtactaagagagaataaaggaatacccaagccagttctaagcagttagaagtagtgctcagaaaaaaacttcttggaggacatgctatcaaagttgagttaaagtttgaacaaaaaattttaaaatactttatccattatacaaaaaaaatgtttattttgcatctctttatgaagacacaatgaagggacaaaagtagtaggtgcaataaagaataagcctagagaaaagcttcaatatatagaatagcggtcagcaaactttttttaaaggaccagatagtaatatttttggcttgagtgcccaagttgcctttgtagtagtcacagacaataagtaaaagaatgagcatggctgtgttctaataaaactttgtttacaaaaactgaagccaggcacagtagcatgtgcctatggtcccaggtatgcaggaggctgaggcaggaggatcccttgagtctaccagttcaagaccagcctgggcaacatagcgagaccctgtcttatttaa

SEQ ID NO: 572257 - DNA, 130 bp, Homo sapiens
  misc_feature (8)..(8): n is a, c, g, or t
tcaatatntgttagtgtacagtgcaggactgaagtggtgggggaggatgggggcgcaaagacctcagccttgtcatcggggggagggggcacgagatctgctctcaagaaatgtatgtgacaaagtctca

SEQ ID NO: 572258 - DNA, 220 bp, Homo sapiens
gggtcttagggagcacactgggtcagaagggagcctgagactctgggagcagaaatggcaagggtggccaacgcgtgcactggtttactggttcaacccttccgttaacaggccaggaaactcctccaggccgtgtggccagctgaaccacagttccttgcgtggaagaggtttacttggaacattgttgtaggcacgggcttattgaggagggccagcc

SEQ ID NO: 572259 - DNA, 161 bp, Homo sapiens
ctcaccaccattctaccttctgtctctatgaatctgacaactctaagcccctcatatgagtggaatcatacagtctttgtccttccgggcctggcttatatgacgtttacgataacgtcctgaagaaataactaacatttgcttgatgcttgaaagtttac

SEQ ID NO: 572260 - DNA, 84 bp, Homo sapiens
ttggtttttttcccccccccccccccttttttcccccaaggttttgcccttttgattttttttaaaatggttggggggctgcca

SEQ ID NO: 572261 - DNA, 517 bp, Homo sapiens
cgttatgttctgacccacccactccatgttaccaagaagacgcgagtctgtccattttcagaacgtgggcccttaatcactttcagagctagtctttcagtgagggctgggccaagaatacacaaacaacaaaagcaaagcaaacaaccgaataggctagtgatggggaaggacccggggttgggtctggacggatgagcaggccatgcagctagcacaagagaaggccatcgatgagtatcgcccggcgattttccctgacatctaggcccgctccgtcagagagtctcatctccctcgttctgcctccctcttccatcacagaggtctccataggaacagtgctagtatcagcctgtgggtccttccccagattgctgacatcgcatgaaccagaccctggaagatcagtgggccagggtatatgtgagtgaggtgggaagcaggagcacagaggggccagctcctcaggtttcagtagcaggagcttcaggtgtctggtgggtcagaacataag

SEQ ID NO: 572262 - DNA, 175 bp, Homo sapiens
agagagccgtatcaactatcatgtatgtgagcctgtgaaagtgacttcccgtctcagtgcccggttcttcagctagagaaggaaactgatactcacatccagcgaggattaactgcaggaatgcatgcaagatgctgaatctaagatgctggcacagagtgagcgctttaaaatg

SEQ ID NO: 572263 - DNA, 335 bp, Homo sapiens
agaggatcccctggcaggctctctacctcagcccaaagaaaagcaaaatctccatggtaaggggaagaagcacggagacgatctctggatatattaaaaggtagatcacaattataagtatcaagacaaaccagggtgtcatcgaagggttcatcttcttcttcaacggggggctgaggagattgggctcggctagtactggttctctgtcaaggtactcaaaattatccagggaccagtgatcttcgtcggggtcttttaacaccccttctttttatctccgccgtttcggttcggtcgtggccgtcccctaaaacacacaggaggcccttggg

SEQ ID NO: 572264 - DNA, 806 bp, Homo sapiens
catctcagacacattgtaagcctaccattgaagcgcattgatgtttaagctgcctgaatcttcaggacccctatctattccagtcctatccattttgctgattgagtcgatatgtattgcagcctcttacgtaggagcataagatgacttttggattgtgaatactgatttaagatagctgaatgttctcctaagtaaagcattcccagaggagagaagaaagtttgtactactgggtggtcatacacattatcagatggtgcagcattaacatagggcacatgagatttgtcggagactagctttcagaatccttttagatgatccaatgcatcgaaaaccctctataacatacttctcaagtaatacctgtactaccagttaactactagatgttgtatatactttcttttctggtggtcttagaactttagacgaaggcgatggaacatgccattcggtgagtaccgttggaagctatttcaatttctaggtacaagcccgcatatatcagtccgaaatagatttcgtttgcagatctcagtttcagaaatgctcactgaacactacatatcataactcaaagatacggactcagtaacactcaacatcagtaagaaagagcattattcttatcataagtagataaaagttgagtacttgatgtggccaacaagaaccaacagtagactggtagtagtaattaaacacgtggaaacgggccagtatttctactgagagtccaccttgggacagacgcctcaaaagcagaaacaaaagtaggccgtaacgtacgaattcgtaga

SEQ ID NO: 572265 - DNA, 363 bp, Homo sapiens
ggctgtctgcaacaagtaagactgattgctggtcaagtcttcatttgcaaagaagtataactttgtaacttcatcctagcctctgattggttgctttttgcaactcatcagattgtttgcacaggagtgtgacttttgtaacttcacttcagcctctggttggctgctttctgcaaccaatcagactgattgcggctaccatttcagttacatgaggtgagcatgaagtggccgatgggaaaattctggtgggtatttggaccaggaagattctgtatccaggcccctgagctgctgctcaggcccactcccacactgtggagtgtacttttgttttcaataaattcctgctttggttaaaaa

SEQ ID NO: 572266 - DNA, 346 bp, Homo sapiens
actcaaaacagagattgtggttatggcaaaaaggtcgggggatggtgtttatcttttctcttcatggcacaggggttagcagccttatagataaaggcagtcctgatcatatgtctgactgcatttgcacaaaatagtagagttaatttatcccttcatggagtaaatcctgatgctgacttttctccttactaacatatgtaatgttattttatttttagtggagatgagatctcactatgttgccatggctggtctcaaattcctaagctcaagccatccttcctcctcggtctcccaaagtgctgagattacaggtatgagccaccatgcccagcctccacaa

SEQ ID NO: 572267 - DNA, 758 bp, Homo sapiens
agggatcgtaccttgcctcatggcttccttgtttcgcggtccgattttataaaggtggtgattccactcggagcctggcacctgcgcattttttcttgatttttggctcctgtgcttcgcaatacttcgctgcagttctttgtgattcgagaggacatatggtccttggcaggcttcgacgggctggcgcattcgcaactgtagttatcgctgagcgtttgtgctatttatcactcgtggtgcagagtctttttgtaggtcttttgtgcatttgtttgatgccattatcgccacaatggtttgtaccaaggtgccattgtaggcactgcacatgaccatgtgttggtgtcccatctccagcggcagcccgtcctcgtcacgttgcctgacgagctacaggcgtgacgccacagcattggcagatacttgtacactttaaatgtagtgaacttaggatagaagtgttatatcatcaatataagcacattgagttaaaaatgactgtgaagtgagtctgggacgtcggtgggtcatattcaatactgcagacactgtcttgggaggtataggtgggaggatcacctgaggtccggagttacaagaccagctaggccaaaatggtgaaaccccatctgtattaacaaaaaaaatacaaaaattagcacgcgtgcattagcacgcctgtaatcccagctactactcaggaggcttacgtgggagatcacctgaacctgagatagcagggttgcagtgagcca

SEQ ID NO: 572268 - DNA, 380 bp, Homo sapiens
aaaaaaaaggaaaaattgaaggatgcataaaaatattagttcattttcaacccaacttgttttaaattttgatgaggtaatttcctgtttgattatagtcgtaaaattcaaactacgcttcggctgattcggttttgttaaataatacaatgagtaaaacaaataagtttgtagtttagcttttacttcaagacggaaaaaatctttgtacgtacaacacccaaatattcaaaacttgtacttttggtgtttttagttttgcagtttccgaaatattagcagactttgtgtacatttttgcctaactagggatctaaatatgtccaaaatgtgtccctaccagtttgtcaataaagcatagtttttcttttacagcctta

SEQ ID NO: 572269 - DNA, 167 bp, Homo sapiens
gtactctaccgatcttatggagaccaggctgagtggggcgggaagtaaggatattacttaaagagaaggcgcctccttctaatataaatctttttttctttttgagacggggttttgctcttgttgcccaggctggagtgcagtggcgcgaatctggctcactgcaa

SEQ ID NO: 572270 - DNA, 301 bp, Homo sapiens
gcatcaataggaaggtcccagcgtggggaagccccagtgaaacattataacaattgtgtatgacacttattcgatgatcgctgatcatcaacacctgtgtgtacattattccttataaacgtagcacccttcagcaggaccctataaaactttcctccagcccttgcctctttgcaggtagccccttctctgctgagctgcccactgcaacatattttcacaatttctctaataaatctgcccttctttacctacaactatcttggtaaatggctttaccacctgcaaaactgaccctagg

SEQ ID NO: 572271 - DNA, 263 bp, Homo sapiens
cgtcttgaggatccccttcactgacggggtggtgaggagcccctgttagcactgcctgttacccctgaacacttggcctgttttggaagggtcgtgactccctcccctgtcttgtgggtgcatctgctcaaactctgtcggcccctcaagcaaaatggtgtgatctgcaaccctcttggagtgacaagccgccagccctactggagggatggggcatggggtggatggcccctagcctttcccttctgagctggtttgtatca

SEQ ID NO: 572272 - DNA, 1032 bp, Homo sapiens
caaatagagtggtgacagtggactcacatgttacaaagtaagacatgtattagacacacatactcatgtgtagtgggctaccaaaatgtcgcagggacatgtgattggttgactaagtatgattattatcagggtatatttaacttgttctgttcatgtggcagaaggtgtacataagcgagttcccatcaaaaagggctttataactgtacgagttatatatctaatatattatgacatcccctatggcgggtagaatgcgcttatactgttttacaagccgtgttcggcgctcgcgtgaggtacaatgtcatctttgtttcaccaaatgatgtcatggagttagatgctaagctctctatctctctcagggcaactctcggggtaagatttcccccaaacatgctgatgcatatgatggtacatctccagttgcaagaggatggactgccagggcacaatacggagattgatataacatgtcggggtgtggatgtggggatacgacgcattgtgcgtgtcgggagaacctagtgtgagactgaatggagggatgaagggtcgtgacctaatggtgcctcctcaataaggaggatgacgcaatgcataagtgagggtatggttatgaacagtgtggtggaggagaatcctatgatcctatttgtactgtcgagtaatggtacagtataaacagttttgggacggcaagaataagctcgagttgtccactccccccctgggtgttcctctaatatgcgtaaatccttttgtttggccaacatggacgagagaaacagcactcacgtttggggacggctccgtactataagttacaaaacagggcggtatgggcggccagtagaaggaacccggacaaggcttattagaggcccgcgaacagagtggctcgcaccgaacacgggggcaggcgtctaaacccagggagggtacggcaacagatctgacagcaagtagccacggagtacagaccaataggcgcgacaacaagagcaaacaagcaaaagacaacga

SEQ ID NO: 572273 - DNA, 108 bp, Homo sapiens
  misc_feature (17)..(17): n is a, c, g, or t
  misc_feature (26)..(26): n is a, c, g, or t
  misc_feature (39)..(39): n is a, c, g, or t
  misc_feature (43)..(43): n is a, c, g, or t
  misc_feature (68)..(68): n is a, c, g, or t
aacagtaaaaattatancatttacgnaagctaacccaanaagntcatttaaaccaaaaattagctaantacattatccatctataaatacaggttgaattctgggatc

SEQ ID NO: 572274 - DNA, 271 bp, Homo sapiens
gtggctcaatggctctcgaagaccgacagaccagattaacagacatcgcttgctctttttactactcaatgaactctaccccttttttaccccggttactgaactctatacctgacatctgcccatcctaccttgtgaccaccacaccagaggtccgagccaccctgaggacttatactaactttgcctggctatactagagtgcatcatatgagcttattgatatcacttgcggccacggaactaataacattgaatgtgctcttctata

SEQ ID NO: 572275 - DNA, 826 bp, Homo sapiens
agcgggaggatggagaccaacgagtctacggagggatcgcggtcgcggtcgcgatctttagacatacagcccagctccgaaggactggggcccacttcggaaccgtgtccgttcattcagatgacagtccacagggtcggccctggcagatgcaagcggagcagctgcagcggctgcatcagctgctgcagcgtacggcagccgttcaccacgtgaccagaagtcagctggacgattcatctaacaaatgactcccagcgaccctgttctgagttcatggagccgtgcctctgacgcaccagccttcttgagggagccctgtgcgggacccggctttatccacaagtgatagcccatggtggagtcgtgggcgtttgagacccggtctatgttatccatgtatttgctcgagagacacatttgcaacgtaacaaactggagccagtagattcgtaagtgcctggaccctgattcgcaggtctctagcatctgggtcctgttcttggtttccagctcaggtgctggccatgggtctggctctggctctggtcctgggcgtgtggctctgtccctggctctgggtctggtcctggtcctggctctggtcctggcatctggtcctggtcatggctctggctctcatcctggtcctgcctctgggcctggtccagacgactggccctgactctgagctcagcccctgtgattcctccagggttcagaaatctggtggcagatcgggtgcctaagtaatagctcctgggagtcagtactgcccctgggagccccataaacaacaacttggggaattttgcaagtcttagaa

SEQ ID NO: 572276 - DNA, 195 bp, Homo sapiens
  misc_feature (118)..(118): n is a, c, g, or t
tcatgagcagtttctgtatgttaagactgtgggtgttattaaggtactggttgataaatgtgtacgggtccttttgcaataaaactggttagattgatccaggtttaacaattggggntttaagttgaccaatcactggtgatggggctttttcaggggagtacattttaacccgtgtaaaaacgtttcctttta

SEQ ID NO: 572277 - DNA, 252 bp, Homo sapiens
ggggggttttttttttcccaaggccaaaccccgggaggcccccttttggggggttttttcaccccttagaaatatatattaattttttttttttagccccctgggaaaaataaaaaacttgtttgaaagccctttttcccctttcccttaggtaaggggggggggggggattccccccccggggaaaaaggggttcccgtttttttattaaaaaggccccccttgggaattaaattaaattttcttgggcca

SEQ ID NO: 572278 - DNA, 352 bp, Homo sapiens
  misc_feature (68)..(68): n is a, c, g, or t
  misc_feature (248)..(248): n is a, c, g, or t
  misc_feature (321)..(321): n is a, c, g, or t
  misc_feature (341)..(341): n is a, c, g, or t
  misc_feature (345)..(345): n is a, c, g, or t
atcgggggtgggggaagatggtggccaaaaagcaggccgtcccttggatagggcagctgggacagctntcccggagcagctgctgtacctcacccttatttcctgacaatcattaaaattcaatttcaaagtttctgtctttaacaatttcctaaggggcctatgaaggatgccaaaagggtgggcctcctttccagtggcagtgctttggcagcaagtagacactggtcaggttgcctgaggctgtncccttctcacaatagtcctgtggagagtgtctagaatggacactgcaggacagctctgggaaagttttaaggngggccaagaagtggacaagnccancacctct

SEQ ID NO: 572279 - DNA, 589 bp, Homo sapiens
gaatctgggtgctcctgtatgggtgcatatatatttaggatagttaggacttcttatgcattgatccctttaccattatgtaatgcccttcttgtcttttttgttttttttaaatcttgttagtttaaagtctattttatcagagaatagaattgcaacccctgcttttatttttttgctttccattgcttggtaaatattcctctatccttttatttgagccaagatggctgaataggaacagctccggtctacagctcccagcgtgagccacgcagaacacggtgatttctgcatttccatctgaggtaccaggttcatctcactagggagtgccagacagtgggcacaggtcagtgggtgcgcgcacagtgcgtgagccgaagcagggcgaggcattgcctcactcgggaagtgcaaggggtgagggatttccctttccgagtcaaagaaaggggtgacagacggcacctggaaaaatcgggtcactcccacccgaatactgcgcttttccgacgggcttaaaaaacggacaccacgagattatatttccgaccggtcctccagcctggccaccccggtctccctt

SEQ ID NO: 572280 - DNA, 427 bp, Homo sapiens
ggcctgctgttctcctcctcggacctccatattccctgagacacaacaacactgaaatcaggtcaattaataaccagtagtgttgaagtgaaaggaagagtcacatctcttaaaagctagaaatgagtcagcttagtggggaaggcatgtgctcagacaggctaaaagccaggcctctcatgccaaacagttagccaaggtgcaaatgcaaatgaaaagttcttgaaggaaattaaaagtgctgctccagtaaacacaccaatgataagaaagcaaaacagccttttggctgttacaaagaaagtttgaatggtctggattagaagatcaaaccagccaccacattcccttaagccaaagcctaatccagagcaaggccctaactctcttcaattctgtgcagactcagcgaggaggagaagcagca

SEQ ID NO: 572281 - DNA, 117 bp, Homo sapiens
ccgggtgctgtgattagcaggatctgaagctctacaggagaagaggctacttagatggtacttattttctttctatggcagatgtcatggagcggtattcaggctcatattctacgg

SEQ ID NO: 572282 - DNA, 570 bp, Homo sapiens
  misc_feature (3)..(3): n is a, c, g, or t
  misc_feature (31)..(31): n is a, c, g, or t
  misc_feature (41)..(42): n is a, c, g, or t
  misc_feature (152)..(152): n is a, c, g, or t
  misc_feature (155)..(155): n is a, c, g, or t
  misc_feature (158)..(158): n is a, c, g, or t
  misc_feature (214)..(214): n is a, c, g, or t
  misc_feature (220)..(220): n is a, c, g, or t
ccntgggtatggggggggggtataaaccatnctcttcaggnngccagtcttaccggtcaggggcttcctgagaggactaaacctgaaggaaaagattatgcccttcatgggctagtgcgtggggactcatacgtctgatgagcaaaatcatnctngtngttggggggggggcatattcccaagggtgatgcacaggagggtgcttcccatgggnacaggnacaagggtgaatttggtggctttggttctgtaacaggaaaaattggatgggaaattaaaatcaatcacgaaggagaaggaaaccgggctcggtacatggcggagaatcctcacatcattggtacaaaaacaccatcttctgatgggtggggttttgactatacaaaacaccctggtaaaccagacccaaggggagaatggaatcctgatctcagattaagagggcaccagaggggagggtaggggctctcctgggattcaaatttgagggacatctcctaagggcatctgatgaccatactggttggctgggggatataaacgcaggggcaaaagaaggcggggcctggc

SEQ ID NO: 572283 - DNA, 1004 bp, Homo sapiens
gagagcctgtcattaggaccaatgaaagcttatgtacctcatcccctcaggtgactaagaatgtgcagtatattaagaggtcgcaggaatggtgctgcgagtggttgttcgcgtttctccatccatgaagggcacagctttcagtctagatctggggtatcactgagctgaagacgaacagaagggggtcgaataacctagtcagtaccgacactaagttgtgtctatgaggtaatggtgtgcaacggtatgtcaatcagtgatcaatttcttcctagtggtcggaggcttctgaccacatcacctgatgctattctgactggacttagattattttattgctctttacgtatttgctcaccacatgggggcatacaaccagaaattgtatttggcactcgcgtgatgaataccaaccattctagacactgacttcagatcgcttgggttactcttatgtctggacaatcgatagggacgagtagcgaccgtgacattgactgactcccgtgctcacagcaatatctgtactctccctttgtggcgctggagacatgtgactgatctggcgtcgctgtgcatgcttggtggctccattgtaaaaacttggtggccaaaatcggattgttgctgattggcattatcccttccttgtagttgggctaggctcttcaattttggaacattgcagggaatcctcgggcctcactcgctgctccatctggtagagacacagaccactttggtggcttcagcaacgcaaagggagccacttatggtcctttggattcccctcggacccagctggggaaccttaccaaccattgtggcccaagcaaccggaagagggccagttacaccttcctgcgagtacccttcaccacatggttccgagttggcacatgaaacgccagagcaaaattgtgggacatggcgcatgctttcatcctgaattagctatcactccttgggctccttgggcacgacatctgcattcaatcttc

SEQ ID NO: 572284 - DNA, 107 bp, Homo sapiens
tacgcaaagaagcgaaaagtcctactagtagacgaacccaccataaacctggagtgactatatggatgcaccccacactaccacacattcgaagacaaccgtataca

SEQ ID NO: 572285 - DNA, 157 bp, Homo sapiens
caagggggggacccaggtgttcccccccaacccccgggcgccttttttttttttgggggggtttttttcccgggggccccccggggggggttttttttggggggtttttttaattttttttcccgggccccccttaagattgggggggttgggggga

SEQ ID NO: 572286 - DNA, 1403 bp, Homo sapiens
  misc_feature (220)..(220): n is a, c, g, or t
  misc_feature (497)..(497): n is a, c, g, or t
  misc_feature (546)..(546): n is a, c, g, or t
  misc_feature (593)..(593): n is a, c, g, or t
  misc_feature (814)..(814): n is a, c, g, or t
gagggagtggtactcggtgtcctaagaggtgcgccgttcagcaggccggcgcggggggtaggtggaagggaccggggtcgggagatgtgcgtgcgggctgccgcgcgtcgctgcggcaggcgtgcacagggcgccgccgggcgcctgggcattgaggaccggttgcccgggcggcctggagcgatgtgtagacagggctccggtgctcgacgcttgttancgtcgtcgttcatagttctgagtctgctctacggcaccgtggtggctgtctcagttcgcatggcgcgcggacggaggtatgcgaaggccggccagaggagcatgcgacagtatgacgaaaataggcctggtgtcgacctgtgtgccttgggagctgtgagcaaggctggagtgtacacgtcgcgggccgcttctgcatgctcgccttccattgttgtcggcacgtcacacgagtgcagcacacggacgagcactggtgcccaaccctagtcgagacntgggcggcactcttggcatgcgtagacgatgtcgccttgttgatggcangtggcagtggacttgaccacacacatgactgagtgctctccacctgncacgcttctccactgagtgagcacctcatagacagtgccaccgtgggtcagagcaatcgtgtcacgtaggaaatgggttgcggcgcggttcacaacacgcgtacgcccacgtggcgactcctgcgcatggacaaatgcgcatgggagtgcatgaccatgatcctcgcgaatacccagcgatgaaaccgcagagcatggtggtgcacgttgtgggcaaacanctcactatgggggaccggcaggcgagcgccccttaggggacacacttctcatgagcggtcaccaatgcaacacatatctaaggaacggtgggttgcggttgcgcaagtagcgacataagctttgtgcacattcctctccagtagtccaaaacctagtgtagaaagatatcgctctgggtcggtggacttttcgaacaacacagagttgatgcacaattacccggctttgggccattctcgactcgagatttgtgggcccctgggtggaattggaaggcaaggggggactcaaccggactccaccagggttttgcgttcgtcggaggagtaggagagaagtggggcgcacaaacggcacccctaggtgaaaccaagaaaggggttgccccatcgtcgaggggatacccacacaaaggggacccccaaccgggaacacgtgggggggcaccactcttttgggacatgtgacccaacatggggggatatgtttcaacagcggggcgcgcaagtcgacactgtggccagcgacactactattagggcccacaaagacccagcatgggagagaccattgtggacgcgcccgatg

SEQ ID NO: 572287 - DNA, 410 bp, Homo sapiens
  misc_feature (153)..(153): n is a, c, g, or t
  misc_feature (217)..(217): n is a, c, g, or t
agtgccccttacaaaaaggggcccagagaccctagcctagttcctccttcctgcccatgtgaggatacaatgagaagtagacagttggtgatatggtttggctgtgtccccaatcccaagtctcatcttgaattgtagttcccacaattcccnacgtgtggtgggaaggacccagcgggaggtaactgaatcaagggggcagtttccctcatgctantcttgtgatagtaagttctcacgagatctgatggttttagaaggggcttcccccttcagtcggctctcattctccttcctgctgccctgtgaagaagaacatatttgcttccccttctgccatgaatgtaagtttcttgaggcgtccccagccatgccaaactgtgagccaattaaacctctttcctgtacaa

SEQ ID NO: 572288 - DNA, 105 bp, Homo sapiens
gagtggtacccggtgatgtgatctggaatctcggcacgatgcgccactttcaaatggagcccctgccccatttccgtgccgccatggttcatatgcaccgagccg

SEQ ID NO: 572289 - DNA, 217 bp, Homo sapiens
ggcaggcactgaagcgtcaggctgtgcggcatactgaggctttagttccttaagctgtgagccctagaaagccagtggagaaagctgatcctatgtagggcagtctctcatttcaactgcaagggaccgatgtgtgctagaagtggcagatggcctgttttagcagtgggtcagccctgtgagagagacgtcaggctttctgagctcacacacccat

SEQ ID NO: 572290 - DNA, 1747 bp, Homo sapiens
ctgacgttcctgcgaaggcctgaccaatgacgcagactaacgcgctgcgtggacatccagtctagtggcctgagccaatgggagcttctgggccgaggttcctgcgtgcgtgtgcaggccatgtgaggaatgcgcgagagcagggagcagggagacagggtgagagcggccgccggtccaggtccccgttccaccttgcacatcgaaacgtggagactgcttaggaggtgtgtcttaccgtggatgctcatgtcgattgcctccttggggatcaataccgcactatcaatggactcgacccgcatgcatgcagcggaatgactcctgatcgtactgtcattgcatcgacgccaaatgcaaggtgtcactacacgaaagcaatcatgtcggactgttgcgtgcgatggcggaaggaggatacctcttgccatggggggattcgcacgcgcttgaaggtacacaattgcagtgggcacaccatgggtagggatacggcctgggacctcgcttaaagcggcccactagggagggcatgcggagtggaactagggggacggaatccctgggttagacaaagttctgtgtagtcccattaccaacttggcaggcacaggaattgcagagttggcgggaacgacgggtgatggaggaaggccttatataaacccgcacgggaatgagcctcggagcccgagacgtttcccgggcaagcgcaatgtgccttgtgctttcagctggcgaagcgcaatccccaggaggcaacagggaatgttgcaccttgaacgatggaaccggtaaacacttgtcgttttaccattccctggaccgaggggacacagagtgggtccttaattgggaacttgcccccacttccaagaggcattggtgtcaccggtactcggcctaagttcgaaggaaccaatgatctaccctggagcgaggcccggggcgaatctcctgtagggccaccaaaggcttagagtaggcacacattatcaccagacattacatatttacaaaaggcccaaagaagagtgggaacttccgattggtgtcaacaatttggaggggggcaaagcgccatttagaattcggggggccgttacacgctttatggggaaacaccgcacgttcgaccataaccacacatgaatgataacgccagggtgaggggataggaaaatgagcccagcccacggtaggaacctattggatcggcccaccaaagttgtgcccgcagagggcatgggaaacaccatgggggcataccctgtgagagaatataggagaccggacgaaacagagtctgggtgcggacacagtccttgtgggttgcgacacggaaccacataccagaacaccgcgagcgcaggtatttagaacgccgagaaagaacgcacgccaggaggaccaccccttaacacgggaggggaggcaaaagcgtattctcgggaagaacacccgagcaagacggccacgatgacgaacgacggggtcaaacatacgaaaagcagcgaactacaaattacgaacacccctgggaggcacagaccgagcgcaccagcaagggcacaggtgcgcaagcacagcgggcccataaaggagaggccatgataccacaacacagtagagagtgccacagggatgacaacagcccagcacacaactaacagagcataacaacagcagacagcagcaagcgcagacacaaagaagctggaacgacagaaagacaacgactaagcaa

SEQ ID NO: 572291 - DNA, 1038 bp, Homo sapiens
ccgcgctggcggtcactgctgccggtggtagatgggccccagatgttgcgctactctggcctgttccattacacttatgcttcaggctccagtgccagggtgctgtagtgggatcatggccaactcgtggctgcaaggactgtcacagggtccagatgcaggagagttttctagtactaatgcctacggcagcaacctgctgacagcagaggatccaacatccgaaaccccatcgcgcggctgtccttctgctgtggccctgcatgcaaggcattttcaagcttgactattggccaatttccccaaggcgacaccacacgctcacaaccttgcgccatgcgcagcgcggctcacgcccacacaattacaaacacgaacgtccctggacgccctgcaaacgtagatggcgcgcgcacgctacgctcactgcgcacacccctggaaaccaacaccacgcccgacacccccacaccttccctccccgcgcatcgccagcccccacgcacacgccgcgggtccacaccaacgtggccacatggtactggtgccgggacactcccgcacagtccaccccggcgcgcacaacgatcgcaacgccaaggggaaaccagaaccaaaaacaccaccggacacggaaacgcctacatccgcggcagtgagcccgacaagtacacacgaccacacccgacctaccaccgcacccaagcaccgccgccaccaggccacctacacaacgacgcacatgcaccagcgcggcaccgagggcgcctggccaacaaaggggacaacagcgggcgcccgcgcccagcgccatgggccagctatcacaccgcgcaggaaaacgacgcgacaccaacaacacacgaaagaagaagccacgcaaagcgtgacgacaaactaccaccgggacacacgcgggcccacacaggcacagcacacaccccgccccaaaccacacaatgcaacagcaacaacaccaggcggggcgacacaaacgccccacagcaatcccataacagacaacacacgcaccacaca

SEQ ID NO: 572292 - DNA, 210 bp, Homo sapiens
attagtagatacctccctagtatttttattcatgaacactaacgttctttctcccaaagcaatcacatatgcctcaatggtataaataatctattagtgttacttaacttagtccatcatattcatctggcgatgttaaaaaacaaaaacaaaaaaacactagtactatgagagccaatttgccaacaaatcaatatgaggaatataggt

SEQ ID NO: 572293 - DNA, 107 bp, Homo sapiens
ttttgtatccactttaatgtctacaagccacagcttcattaatttgatgccttttgattgacaggtaaacaatagcaaaggaatgagtttccatccagtgtggagag

SEQ ID NO: 572294 - DNA, 1231 bp, Homo sapiens
  misc_feature (20)..(20): n is a, c, g, or t
cgcccacgcgtccgcccacngcgtcgcccacgcgtcgcccacgcgtcgaaaaaaaaaaaaaaaaaaaaaaaaaaaaaaaaaaaaaaaaaaaaaaaaaaaaaaaaaaaaaaaaaaaaaaaaaaaaaaaaaaaaaaaaaaaaaaagagagaggagggggggggcgagcgacaaaagaaaacacagcagagcagagagagcgagcacgcgcagaaaaaacaacctacccaacgagagagcaaaaaaaagaaacaaacaaaaaacacagacaaatcgcaaagaaacaaagagggcgcgccacaacaaaagagagcagacgaaatataataacacacaaaaacagaacggagggacacagcaagcaaaaaacaacaaaagcagagagaaaaaaagcagagagcgaacacaaaacagacaacagcagaggagagacaccaaaacgagaaagaaagaagaaaacagccaaacaacaagacaagcaagagagagcgacaaaaccacgaagagcgggcgaagaccacacaaaaccagccacacacaacgaaaaaaaacacggacgcacacacgagacagaccgaacaacaacacgacagacaacgcacacaaccaagacgacgcagtaacaaaaaacaaaggagagcggagccacaaaacacaaaccaaacaacaggaccaacacaaaacacgcagaccgcaaaacagagaaagaaaaacaaagagaaagaaagaacaacaagcacgacacagagcagacaaaaaaacacaacaaaaaggaaagaaagaaacaacagccgagacacgacacccgccagcaacagcagcacacaaccaaataaaagcacacggcggggaggaataaaacaacagaaaacaggaaaaagaagaaaaaaaaaaaagaaaaaacaacagcaaacagaacaccaccaccaacagccacgaccagcgacgacacaagcacaaggagagggcagacgaggacacacgcgaggggaaggaggcggggagcgcgacggagggaaagcggcgggacgggagagagaaaccgagagacggcacgggacacgagagaggggccggcccagggaccgacgaacgagcggaagaggagcgagacggaggacacggcggacagggcagggacgagaggagacgcgaggacagcagaaaaccgagggacaagaaccaacagcaggagccacgcagacaacaacaaggcaggcgagcggcgaccggg

SEQ ID NO: 572295 - DNA, 131 bp, Homo sapiens
ggcaggatttcttttctcacaaggttaatgacagaaaatcagaggacagaacaggcacagtggctcatgcctgtaatcccagtactttgaaaggcagaggtgggaggattacttgagctcaggagttcaag

SEQ ID NO: 572296 - DNA, 638 bp, Homo sapiens
caggggaaacccaagtgtacagggtgcgcacagctccttccatcagaactacagctccacagaccagcaggatatctccactcgcgggggcccctcgtggtaatccagcgtgcgctctctggtgacagagtggtcattgccttgaaccctgagcgtgcgtctgctgtcatctaatgctgctgaagttccccagagcacctcctggtaaaactggccaagggtccttccaacgtgtctggagaagcggtcagtgtcacgcagaagaacccgaagcccctccccgcggccatcccagaccaacaggccaatggtcactttgtctgggtctctgagcagcagaagacctgtcttgtccatggtcatcttcaggccgggcatcattgagaatagcgtctccttccacttgtacgcagagcttcttcggttccaagtcaccaccacgtgttcagggaatgcgtgaacccataccagggggttcttagaggcctcttcgatccttgagaacccagccttctccctctcatactggccagtcacctcaaccccttgcacagggtctgagagcaggttctctggcccctggctgtgtctggggtccacacagaggcgctccactctctgcacagacagtgacagca

SEQ ID NO: 572297 - DNA, 730 bp, Homo sapiens
gcagcggctgcttgggggagcgcgggagcattgagtcgggggcagagagcctggggcgccggggctgggcgcagcgaggcgcggctggactccgggcttggtggcgcggttgagagagacgcgcagctggcgaaatgccccgcgtctaaggccttcggagaccatagtctccgcggacccctgtgctggatgcccaaagccggtcggacctcctccctgcgtctccccttccgctggctcggagaggaaggcaggagagcccccaaatatacccctcccgcccttctagggaaacttgaagctgaaagaaccacgcgaaatgacaaacagaaatgtctcggacgtggggcgtgccgagcgacctaatgggacggggcatgttggcagcgaccgagggacaattacgtcggcgggtgggggacacaggggacgacaagccccccagaatttacgggaaactcctaaattctactaaaaatacacaaaattacctgggcatggtggcgggtgcctgtaatcccagctacttggggaggctgaggcaggagaatcgcttgaacccgggaggcggagggttgcggtgagccaaggatccatgccattgcactaccagcctggagaacaacgagtgacactaacgtctcacacagaacacaggagacatagaggacgcattgcagtcaacgcgggattggtagcatgtggtgtgaaagggttgaagccagagaac

SEQ ID NO: 572298 - DNA, 359 bp, Homo sapiens
agtacgcttaatatatttaaataaagcacaatttatattaacgaagaactagtcttacagtagatctagcatattttctaagaaatagtgaagaaagcgtggatttgcagaacaagtaccaaaactacagaacttaagttgcctcataagacaactaaagggatatactataaaacctagatgatcgaggccgggcgcggtggctcacgcctgtaatcccagcactgtgggaggccgaggtgggcggatcacgaggtcaggagatcgagaccatcctggctaacatggtgaaagcccgtctctactaagaatacaaaaaattagtcgagcgtggtggcgggtgcctgtggttcgcagct

SEQ ID NO: 572299 - DNA, 527 bp, Homo sapiens
gtatcaacgcagagtgcccattatgggggaaggttcgttgtaaaaaaaaaaaaaaaaaaaaaaaaaaaaaaaaacgaaaataaacaaaccaaacaaaaaactacaaacaccaaaaaatacgtcgtcggcggcgccccgcgccaccagaaaaaaaggtttcttcatacaccctctcctgtgggcgggcgcgcagccgccccagtcagttgtcgtccgcgacgacctcgtgtcctccacggtgtacccatgagaagaaccccgcgaacagacacgagggcggcgcggggcgtcctttcccaacccaccaataaaaaatagaaaccgcgcgcccgcggggagaaaaccacccgaccggcgcgttgcaacaaaaacacacacccccccaacgagaggagccgtcaccggaagcagcgaccacacacaaccgcggcgtccacctacaaacccacacaggagcgaagcacccacacaagagggcagagcccccaacacaaccacaaaatatcccccgccccgcccacagagga

SEQ ID NO: 572300 - DNA, 399 bp, Homo sapiens
  misc_feature (9)..(9): n is a, c, g, or t
  misc_feature (12)..(12): n is a, c, g, or t
  misc_feature (70)..(70): n is a, c, g, or t
  misc_feature (74)..(74): n is a, c, g, or t
  misc_feature (94)..(94): n is a, c, g, or t
  misc_feature (104)..(105): n is a, c, g, or t
  misc_feature (127)..(127): n is a, c, g, or t
  misc_feature (154)..(154): n is a, c, g, or t
  misc_feature (174)..(174): n is a, c, g, or t
  misc_feature (193)..(193): n is a, c, g, or t
  misc_feature (201)..(201): n is a, c, g, or t
  misc_feature (212)..(214): n is a, c, g, or t
  misc_feature (242)..(243): n is a, c, g, or t
  misc_feature (256)..(257): n is a, c, g, or t
  misc_feature (283)..(283): n is a, c, g, or t
  misc_feature (334)..(334): n is a, c, g, or t
  misc_feature (357)..(357): n is a, c, g, or t
  misc_feature (368)..(368): n is a, c, g, or t
gcacgaganganctttcacaagagattttatgagaaaaaacagcttttctcatattatgagcacaaagcntganactttaagtcagcaaatgangctcatactnngggttattttatgacacggtanggtcaaaagagaaaaggtgggaaatgnaaagtggaggagaaaaacangaaacagtggaataaaggnaaaaggcngcacttaaagnnnagaagttcaaaggaggcgaaagagagcnnaaacgttccatgnngaaagctgagctgtgttcttcacatntagcattctgttgagcacaggatagcccagaaattttcatgtgttcaaagntctctgaaatttaaattagcagncttgaaccagncctgcgtttttttttcggtgggttttttctg

SEQ ID NO: 572301 - DNA, 267 bp, Homo sapiens
gtagctgttctagagtgataccagatgatggctcacgcgtccaagaatagaaaacgggaggcggggcgcagtggctcacgcctgtaatcccagaggctgaggcaggcggatcaccgtgaggtcaggagttcgggatcagcctgagcaacatggagaaaccctgctgaaaatacagagttagccaggcatggtggtgcatgcctgtagtcccagctgctcaggagcctggcaacaagagcaaaactccagctcaaaaaaaaaaagaaa

SEQ ID NO: 572302 - DNA, 354 bp, Homo sapiens
ggggggagcatgggctttaattatttcttaaaaaatgggccggttgtaaatggaaaaggctgaattttggtaattgtaaaaattggggatggggccctgaattcattattttaggggctctgaaaaaagctcatgtttttttttttaagccagcccctttttaaaagccatatatgtgcccgggcctttgaacctcaaatgaatgggagttatcccggggttttctttttaacctaaattcatctttttggaattaaaacttaattggtacctcccgtatatgaaaattcactttatgggataaaacaaaggcttcctttcctataggaaagattcatgcttgtttttcaaatt

SEQ ID NO: 572303 - DNA, 379 bp, Homo sapiens
  misc_feature (1)..(1): n is a, c, g, or t
  misc_feature (44)..(46): n is a, c, g, or t
  misc_feature (319)..(319): n is a, c, g, or t
  misc_feature (337)..(337): n is a, c, g, or t
  misc_feature (347)..(347): n is a, c, g, or t
nggccagtaactacaaggaggtgcctattaatttatttattgannnggggggtctcactttgtcacccaggctggagtgcagtgacgcgatcacgagtcactgaagtctcaactgcctgtgctcaggtgatcctcccacctcggcctcccgagtagctaggactgcagatgcgtgccaccacacccagctgatttttaaatattttgtaaagatgttgtcttgctgtgttgccctggctgatctcgaactcctgcactcaagcaatcttcctgcctcaagcgtcccaagtgctgaaattacaggcatcagctaccgagnctgggagggtcgttactnaagtgaaaangtgcaggacagagatgtaggagctcaggcttc

SEQ ID NO: 572304 - DNA, 223 bp, Homo sapiens
cgggtgggggcaagggatcaacactgtgtgtgtgtgtgtgtgtgtgtgtgtgtgtgtgtgtgtgtgtgtgtgtgtgtgtgtgtgtgtgtgtagagagatagagtctcacttgttgcgtatgtgtgtgtgtagagagatagagtcacactcttccacaggggagatgaggaggggtgcaactctcctcatcatgtgacgcgcgtaatcacgctgcacacgatga

SEQ ID NO: 572305 - DNA, 195 bp, Homo sapiens
ccagtacggattaggaagcggcgccaatgtcaccacggagaagcgggaggtgctggcggaccagtgactgcagatggctgcgtgtatgctgcctgtcccctgtggcatgctggccgacaatgactgttttattcgcagtatgctgttactcttgcagagtcgtggctgggtgcgccatctatcccgtctcgccca

SEQ ID NO: 572306 - DNA, 1043 bp, Homo sapiens
aatcagagcaggtccgtacttctcctatctctcccagttcctggtctgctggcatcaccttatactactttaacagaccagcaaccatcgaataccgaccgttcattcgatccactgccagcgagggcaggagaccgccattcatataccgaacaccttattctgatttttcaggtcaccctgaatgtttatatggcttatcctaccaggcttcggaataatctcccatattgtaacttactactccgtgaaacaagaggaaccattttggatacatatggtatagtgactagatgctactgatatcaattgggcttcctagggtttatcgtgtgagcacaccagttattctacagtcaggaatagacgtagagcgcacgagcatattccaactccgactaccataatcatcgttatcagacaccggcgttcaaagtatttaggctgactcgcccatactccgacggaaggcgatatgaaatgatctgctgcagtgctctgagccctatggattcatcgttgctttacaccggaaggtaggcctgactggccatagtgttcagccaactctgtcactagaccatcggaactacccgacgcacgtacaaaagtttgtatggcccacttccaatgatgtcctatcaattgggcaggcggattaggccaccatcagggcggtacattccacggatataccctaatactcaggcaacaccctggaccagagtaacccaaatccactcgcgatactatttaacggggagacaatgaggtgcatcgccaaacatttctggccattgtaagacgcagccttcggacacaggatgacccgataagacatgctaggggcaattcgacagcacaacaatttgacacggcaggacgcgagtacacaggtggttgctgcttcatcatatgagtcaacagtcatttgttgcgtgacggtactggcagcgcgacacgacaataaacgaactccatgcatgtcacagacgactcacgcagacacaagcatcgaagacacgagcaacgacagcatcaga

SEQ ID NO: 572307 - DNA, 708 bp, Homo sapiens
tatggttctgtccaaataactcagttcttaaaattcttaaaatgatcgtaaaccattatcctttaaaggtttatttgaagatgctgttaaagtacagaatttgtgtacaggtagatttttccgtccctcattaatagtgccttcttaattaatacagacctggtgttagctataacaaaactccagtaaggccaaagaatcccaagttcttggtggaaaaaaaaaaaattctttatagggtcagattttccctttcctaatatcatggaagatgatgtggcattggattatattcataaaggtatttataacttatgggaactcttagaagataatgggttaggcaagtgatttttttttaaaatatgggtgggcgtaagtggtatttggaaatccacttattttaaaaatcgaagagggatggtaactcagtggacactagactgtgggtatctacctgcccacattttcttaaaaagatatttcatatacagataattgaagaccaagctagtggtgcactgtaggtctgggtaatgggtatgggggctcgtggtatgtggtagaaggtgaaattctagcacatggttcaattctgtattgggatacttatgaaatgtgttaggttactatttggtgtttgtgaaagcataattctaaaactttggttggcatatgtgtggaattttatttattaactcaaactgt

SEQ ID NO: 572308 - DNA, 623 bp, Homo sapiens
agatatcggtatggatggaattttaggtaggcacttggcttccgtagcatcgataggatctcttattgatccttcccattcaggcgtaagtgcatcaccagtaccatactgcggcaacgcaactgacttcatttgtattacgtctttgttgtcttgataaggctcagaaataaagataattgctttcgcaccatattcttgagcagtcaacatttgttggaaaacataatctccgtaatgcactagtaaaataaagtcaccgtttaacagcccttgatcttgcatagaagccatatcgtccaacgatgctttattagcataaatcaccggtatgttgttcaattgaccattatggctcattgggttaaagttctcctcatttaagggaatatcaaacccttctgtatcatcctttgaatatacacgaagtgagacatttcctgggtaattcgaatacgccatgaactcctcttccccagctagccttataccatttttgtcgaacgactctttaatataatgtctaatagcggcatcaccacttgttcctgacatgtggggcatactactaatatactgtaaatctctttctatctttgaaaggtctatcgatttccgagcat

SEQ ID NO: 572309 - DNA, 230 bp, Homo sapiens
cacaagtagagtcagaacgtaggagagagaacgctgccgaaggtcgggttgggtcatccgagatcataaaaaaggggtgaccctaacaataggtacaagaatataaaatgtggaataagaagaatacaaacaaatttcctttttagagtacttttaagaaaaaaagcagggccttggaagttatggttctttagtgctcccctgttgcaaattctcatggttcgggttgg

SEQ ID NO: 572310 - DNA, 154 bp, Homo sapiens
gtctaacacatgatctatctgtgcctgtcatggtacactgtaccttagatgattgaagtagttcttagataatttagtttcctgccattagaatataagcttataaagacaagtttactgtttgtcttgtgcattcctatatccccatcaccca

SEQ ID NO: 572311 - DNA, 201 bp, Homo sapiens
cgaggcttaacctgcagcctctctctgctgtcatcattatttggaggttcttctatgacggcagggcaggtccaccacgtgacactgttggcatgtggggacacggagagggcactgcagatagctccccgttcagctcagggatgaccttgcttacagccttggaagcgcatgtcgaggcaggcatgatgttctggagag

SEQ ID NO: 572312 - DNA, 245 bp, Homo sapiens
tctgcatgtactctcaggatctccggtgtttcctttgtctaccaaaaatataaaattacctaggtgtggtggcacgcatctgtaatcccatgctactcggagtagtgctgactgctgtggagtgactggcgtgaacctggatggcagatgttgcagtgatgctgaggatcgcaccactggcactcgcagcctgggacaacatgagcgatgactcctgactcaatacaatacaaacaaatcagaca

SEQ ID NO: 572313 - DNA, 127 bp, Homo sapiens
actagagatacgcgatttttttttctctttctttatagagcgcggcgggttgattcgagctgtagagatgctatttgagatgagagagaactcagaatgcagtgtggtaaggattgctgagtaactg

SEQ ID NO: 572314 - DNA, 419 bp, Homo sapiens
cacccaaatatgtaggctgtctactagaacgctgcgccattgcacgctgtactcgaatctacgaacacacacactagaccacgtccacacaatcgtatgtttatactgaacacatatattcagacatattccggaaactacgaaacaagaaaataggtaggacactacacatatggaactacagcttgtacaatcatttagagcccatacttctaacggtgtacatatgtagacgtgactgagtaaagaagcaccacatgtgtgtctacactcaagcatcttcctcttaatactctgctgaggataacggacactaagtaataaaggaaatatcatgcaggctacttatagagtatctaagtgtgcgtagtgacttaagaggtcaggtttaagagaagtagcaacctacttctattata

SEQ ID NO: 572315 - DNA, 152 bp, Homo sapiens
attcgcggccgcgtcgactggaaaaacagtttttgctctcacatcatgacaatcaacacaaaagacttctgtgaccaaatgtgtggagttttcttccaccaacaagcaagcaatcaattcttgctagccccggggggggaaaacccaaatcc

SEQ ID NO: 572316 - DNA, 719 bp, Homo sapiens
  misc_feature (327)..(327): n is a, c, g, or t
  misc_feature (481)..(481): n is a, c, g, or t
  misc_feature (506)..(506): n is a, c, g, or t
  misc_feature (508)..(509): n is a, c, g, or t
  misc_feature (545)..(545): n is a, c, g, or t
tattttaaaactttttattgatgtttaataaacacacaagaagtgacagcttactggatttccaccagttggatacagtctgtcaccagcaaccaaaacgtactaccagcaccccagaaatcttccacatgcccctttctaatcactgttcaccctccaagggtaacctctatcttgaccatagattggttctgcctgtttttgaacatgatgtaaatggtatcagtcagtcttactttatatatataatttattttactcaacagtttgtgggattaatccatgttattcgtgtagttatactcaattctcattggtatatagtgntccatttgtgaatatcctatagtttattccactgttggtggaaatttgtatacttctaatttggggctatcaagaatattgctctgtgaaagtagagaggatatagtaaggtgttgtgtaaacagatttacctgaggctttatgttctaaagancaccagtcttataagtatcaccttngnngcagtccatgattttgaactggtcttctatcattgngctctttaggtattttagccagtaccatgtgcattgatagcaagtctccatcctctgcagttagctcttctagttataacattgaaataactagtagttatagagcaatgtctgttggcaggcattgtgccatgaacttttatacactatttcatcttaatcctcacagtcctg

SEQ ID NO: 572317 - DNA, 465 bp, Homo sapiens
  misc_feature (149)..(149): n is a, c, g, or t
  misc_feature (259)..(259): n is a, c, g, or t
  misc_feature (266)..(266): n is a, c, g, or t
  misc_feature (283)..(283): n is a, c, g, or t
tgccagttagccatgacccagcattgtcttcttgtttaattaagctttaaaaagaaagggggggagccaaatggccactattttgataccaaacccatagttggacttgaagttgggtgttagaattgctgcaagctagacacataggntattcatatacgccctcaaaagtgtgtgtgtgtgcaatgtaatgtgcacatagtgtctgttgtggatatatttggtgtaatgtgtatttgtatgtacgtgttattgaaanatatatnttaatacctttggaaanaatcttgggcaaagatgacctactatgttttcccttgaaaaaaaagttgctttgtttattaaatattgtgcgttaaaattattttatatacaccattgttccttacctttacataattgcaatatttccccctcactacttcttggaaaaaaattacaaaatgaagttttatagaaaagaaa

SEQ ID NO: 572318 - DNA, 466 bp, Homo sapiens
  misc_feature (4)..(4): n is a, c, g, or t
attnaccactttgggaaagtttaaaaaccccctttgggcttgcctttggaaaaaatgaatggcatgccttggtaattcccatttggaataaatcaggaaagcctcccctagtcccatcccatattgtgtccagaagtgggattaacaacccctggaagagtcccactgcccaaaagagtagttgctttccctggaatttcccaaagcttttggattttctggatcaagtaacccactttttaaaacctgaggtcaggagttcgagaccagccctggtaacatggtgaaaccccgtctctattaaaaatagaaaaaattagccaggcatggtggcgggcacctatagtcccagctactcaggaggctgaggtaggagaattgcttgaacccaggagacagaggctgcattgagccaagatcacaccactgcactccagcctgggcagcagagcaagactccatctca

SEQ ID NO: 572319 - DNA, 221 bp, Homo sapiens
  misc_feature (53)..(53): n is a, c, g, or t
tggtgggaggcctgaaacacctccatctcctcataggtcgctggactcagccntccgtccgcatgaaatgagaacagcttcacaaatgcccctgaacgacagacatggatctggggcaaggctggagaagattcctaccaaaccacagacccaaagaaaccacagagcatttggtaacaaagagaccagaccacaaagagcaaacagtaagggccgttcac

SEQ ID NO: 572320 - DNA, 275 bp, Homo sapiens
tgggaacccctatttttcagggacaccaatgagttgtatatttggtctctacatatcccatatttctcagaggtgttcattctttattttctttatttttgtctgagttattttggagagctggtctttgagctctgggattctttcctcagtttggtcaattctgttgtttattttgaaattctttttttttttttttttttttttttttttttttttttttggtgggggggcccccgggggcccccccccggattttttttttgggttttttt

SEQ ID NO: 572321 - DNA, 475 bp, Homo sapiens
caggaaataataacatacttttttatttttattttttattgagacagggtctcactttgtcacccaggctggagtgcagtggtacaatctcagctcactccagcctccgcctcctgggctcaagtgttaatttttgtatttttactacagacagggtttcactatgttggccaggcaggtctccaactcctaacctcaagtgatccgcccacttcagcctctcaaagtcagggattacaggtgtgagccactgtgcccggcctcctcagtccatttttaatactgaaggtataaattgtataaagatgtttagaaagttctaattcattttatgcatttttgcaaatttgactccatgaaagtgcattatcacgaagctgaatttgtgtaagcattgtgcatgtatgtaaaaacattgcaacttcctcaataaaatatcttctttttgtaaaaataaaaaaaaaccgcggccgct

SEQ ID NO: 572322 - DNA, 246 bp, Homo sapiens
  misc_feature (6)..(6): n is a, c, g, or t
tcccgntctcttggggttttaaaggttttaaaatttgttttgaaggtacattgccttctacagtataattgtaatataaaattaaatatatatgaaaaaattgtcattttagcttagggttgaaggaaatcacagcttttattgttatgtgataataaaattacattgtaggttttactatcagtcaaaacaaatttcaaattgaaaaacatgagaccgagaaaagcaaaaggagaaggaaggtag

SEQ ID NO: 572323 - DNA, 147 bp, Homo sapiens
cccactctcctctttccggtgtggagtctggagactacgtgcagaaattgcacctcgaaaggggaaggaaaacgaaggaagatacaggtcattcagcctcggatcctcatgtgtggctagaacggagagaattgtattacagtgtct

SEQ ID NO: 572324 - DNA, 375 bp, Homo sapiens
ccctcctagcatcactccccgatcagccctctgttaatctgcgttccttacagtagaaattggcatcatatagtattctcatggaactttcctttgtcaaagtccctacagttcagagacttacacatttaatgtgagatatgacaggcttaaaaagaaacgttgggggccgggcgcggtggctcacgcctgtcatccccgcactttcggaggccaaggcgggcggatcacgaggtcagcatattgagaccatcctggctaacatggtgaaaccccatctctactacaaatacaaaacattagccgggtgtggtggcagatgcctgtagtcccagctactccggggactgaggcaggagaatgaggtgaacctgg

SEQ ID NO: 572325 - DNA, 103 bp, Homo sapiens
ttcccatgaagcacatggaaccaacataagcacatggcttggtgaccaggaagtcaccccacggctatggggaaattagcccgaggggtggcttccctggtca

SEQ ID NO: 572326 - DNA, 184 bp, Homo sapiens
  misc_feature (30)..(30): n is a, c, g, or t
  misc_feature (60)..(60): n is a, c, g, or t
  misc_feature (128)..(128): n is a, c, g, or t
aaatatttttattggttctgagataacagngctgaggcgagctgggacgggccagagcgnaggtgggagctttgccctggggcggacatgctgtgtggggtctgctggcggctccctggcccacccangcagcagcagctggcacatggcccttggcgcctggcatgacctctgccggcttggc

SEQ ID NO: 572327 - DNA, 318 bp, Homo sapiens
ggcctctgagaccttaaaatgacagcctcctctcctggaactgggctctacgtggggacatcaacaaggccctgactggaaagcacatagaaaaagggcagatggaggctgggcacagtggctcacgcctgtaatcccagaaccttgggaggctgaggtgggcagatcacctgaggtcgggagttcgagatcagcctgaccagcatggagaaaccccgtttctaccaaaaatacaaaattagccgtgcatggtggcacatgcccgtaatcccagccactcagaaggctgaggcaggagaatcgcccgaacccaggagg

SEQ ID NO: 572328 - DNA, 1648 bp, Homo sapiens
  misc_feature (1177)..(1177): n is a, c, g, or t
ataccacgtttcatttcacaggtagtcggctaaggacatgatctactcccccgtgcagctcggttccctctaccctaataaggtttatggtgcctctcccagaactcgtggtcctggggtaaatgctcgtattgccctggtccagtccccgacaatacgtggtctgagaacatcggagacgcgtgaataaccgcggagcatgattcctccgaacgtcgtgcggagcgtctgctgtcgcgcgttcgctgctttcgtgcttgcgtgtgtggttgctctcctcttgcggctgctcggatggaggagagggtgcggcatagcaacgtggcggtagccggtcccctgtgtcctctggtggctcctcgggtcgcttcctcagtcccgacgcatggactgcagtgcgatcgtggcaggcgatccgtggtgccctgtccccgtgaggcctgcgagagcgggagcaggcggatgccttggtgcgtgcgtctgcgaggagccctggaacggggcggtgcgccactcaggttgctcgccttactcggcgggggcaaatccttggatgcgcgctgcggcaggacttatcggccgaggtacgcgccggcaccgccaactttcttggcaaaagtcgccggttgcgtgccagtatggggcttggggcatttgactgccgggtgcgtcgccatgtattggacgatccccccgtgcgccgtcttcccaatggccccgttttatgtggcgctgtgggcgcgatgcatgggtgggtcctcgcgtacgtcacggagccttgccggacttaggctgccccctcgtttgtggttcactctagataccgcggatgggcccaccgatgccgttgcgccgggaaatttcagggcaggcggagatagatccaaaagtccgccgggggcgtgcacgggaatgcgcgggggggagacgtgtaccccccgtgtgaacacgcatgcgttgccggaacccaattcacagcgttggggaacaccctgcggatcacgacagagtagcaggccatcctgcgtcgagaagaaaaagttccccttgatagagggggacacaatcgaacaagtgggcacacgcacggaaatgggggcgctataaggttccccagacaaaacggcaggcgaaaccccgtcgggtgaacccggggacccggccccaagcgattgtnggctccgcaacaaggaacactgacggagcagcacaggagaacccccatatagcgcagacagacaaaggagtggaaccccccaatatgagagctccattatggaaaaactatggacagggcagaagaataagcttccgccggatagcacagaagatgaaaggcgcgggagacgcacggcaaccacggagccccacaaccggcgtaagcgacaaaaacgaagagagagaagacaaccatcaaacgagagcgagagcagcgacaaaagaaaagcaagagacagcacaagcacagcagacacaatgctataccgcacagacgcaccgcagcacgacgaacgagagaacgacggagaacaaggactgcacgcgactaaacacgagcaacaacgatgccacagcccaagcgagtatcataggatgcaacaatcagcaacgcaaggccagcacatacagcacagaaagagatgacaca

SEQ ID NO: 572329 - DNA, 439 bp, Homo sapiens
  misc_feature (253)..(253): n is a, c, g, or t
tgcagggtcacgaataaaggaaaaaggctgaagtttcttgttactgcagctactgtggcatgccatcctgctttcccgctgaccacagcgctacagctctgttgcctaaggcagaaaataaacagaaaacattctggaatctgcattttagattgacgagtaaaagaatctgaataggcttatggaggaggcgactggttagggcataaacaaagcagcgagatcaccaaaatagaaactgagtcaagagagnaggaagtaagattgaatatatttagtagctctcaaattcaaagcagaaagaacacctgaaaaagaagaatgaaaaatgacgagacagcagactgaaaaggaggcaaatagtatattggtaagactatggcaatgtgactagatagaagaatttccagttaacatcttaggaaaaacagattgatgg

SEQ ID NO: 572330 - DNA, 244 bp, Homo sapiens
tgtcagaggactcgtgacggtacttggtagctataatttcagacaaaacactttaaaacaacaaagatcacaaaagacaaaaagggcattacataatggtaaagagctcaattcaagaagaggacttaactgccctaaatatatatgcagtcaacacagaagcacccagatataatacacacgatgttcttaacctacaatgcgattaagatagtcatcgatactcatacaatcactggaaacc

SEQ ID NO: 572331 - DNA, 223 bp, Homo sapiens
  misc_feature (67)..(67): n is a, c, g, or t
  misc_feature (73)..(73): n is a, c, g, or t
  misc_feature (79)..(79): n is a, c, g, or t
  misc_feature (128)..(128): n is a, c, g, or t
atcaggagcaaacagaccttgcaaggtcttccagccctgggacagaaagctattgaccaaccgggangaaaanccaggnagcctccctggcccagggcagcccttttccctccagtggcacctcctgnaacagtccacttggcgcaaaacccagtccttccaaatgaggctgcagccccagccatgagctcccgggaatgtttaataaaggcctggccacctc

SEQ ID NO: 572332 - DNA, 1022 bp, Homo sapiens
  misc_feature (51)..(51): n is a, c, g, or t
  misc_feature (137)..(137): n is a, c, g, or t
  misc_feature (159)..(159): n is a, c, g, or t
  misc_feature (163)..(163): n is a, c, g, or t
  misc_feature (165)..(165): n is a, c, g, or t
  misc_feature (172)..(172): n is a, c, g, or t
  misc_feature (190)..(190): n is a, c, g, or t
  misc_feature (196)..(196): n is a, c, g, or t
gcctcccacgagatctggaggtcagaaactctgctccaggttttgttgaantgtggcttcatcactattccttggagatgtatcaaaaaatgcagtcccctcatgccaagctggaggttctgcactaccgactcagntgtctccagcgccctctacagncccngnccaaccnagcctccaggccctccangcctancaagagtcgttcacgcctactgaggagcatgtgttaggtggtgcgcctgctgctgaagcacctgacacgcctattgccaacagcctgaagccagagcaggcctcaccctccgaaccacatccacacgccagacagacccctggaggagttcaaacgggctgctgtcccgaggttcgtaccagcagaaactctacctcttcttgcagcattgcttaggacactggcccctggacgcatcgtacagaggctgtccaggagatgtggctgagctacctgaagccgtggcggtacgcgcctgacaagcaggcatccgggaaagagaatccacagacccgggagtgtagacaggagaaatgggcaccttatgtccaggagaacactgctgatgtacaccaagttgataagtgggcctactgaaccgagcgctccgaacagagcatggtcagacccaagcacgcgctcataggtgtacgagtgggcacagtcataggccagaccaaacctgctctgagatgcatcaaaaaaggtgagcaagctatacatggagccagagtggataatcaccaacagacagaacgaatataaagggcccaacatacagtgggagcagacatgcaaccatggcaacaaggaaatgatgcacccttcaagggacaaagcaagattacaaggctggaaaggcaaaggactgcaaaaacaccccgaaaagtagagcagaagcacgaacactagcacaacacacacaagtcaagacacgccaaacaaaggcaagacatcacgacaatagagaacacagacgacaccagcaccagaggcgtagccaagc

SEQ ID NO: 572333 - DNA, 443 bp, Homo sapiens
cgttcgcaatgtgtgtttaaggcagagccagaagatccgtgtccacccatgtgccataagacagtgggcaacgttacaaatggcatgagaaaaatgggactataaatgcgtgtggaaaagggccttaatagttaagttacggctaagaatgtcatgtctggggtaagaatttccatttttagcaccgtaaatgtaatccacttaaatctatgtaagcaccttgtctccaggcagaacaacaaaccatccaaacattttaaacattggggggaaacactgaaggggaagggtcaacagagagaatcccgggtactgttgggaacggagtggatttccagatcagaagatccttgtcggatatccttctggcttaatgccggaagcagaccggcccaagtcatccaggggcgatgtaacttttcatttgcaacacgggtctcaca

SEQ ID NO: 572334 - DNA, 664 bp, Homo sapiens
tcttcgttcctggaaagtttcaaaaacctgcaaaactggctccaatgtgtaaactccttaaccaaattatgccctggcgaacccatctatcggggtccttacccgctaagggtgtgcataaaagggccagcaatgcaaatcagcgatctgcacggatcctggtgacagcgacgaagctctcagtgtgatagcagattaacatacgttcgacagagtctataggtaacagttcaccttcctgcgaagatatgcactctctctctaaggagaggttttcaagagacaaaatgccttgttgagctcgtggactccaagcgctaggccacaaaaggtcaccttaaaggtgctatggacgatttcacaggttttgtagagcagagccgccagcttgcctgtaaggaggcgtgctttttcaagcagggtaaaaaaattgagtcgtgcaagtcaagccgcctctagggttataacttcctatttataaacaatcccagccgcgcgtcagaataaggaagagcaaatgtagctcaaaactttatgcaactgttgttgtttttgggtggtgtaaagccaacagtttgtcgaaaaaacatatatgtctttaatcgttctccctgttttctctgtgctcagctgttccttgttggaaagaaaaatggaaacagca

SEQ ID NO: 572335 - DNA, 399 bp, Homo sapiens
gacctggagaggggaagttaaggatcttgagatgagtgggttatcgtggattatccagttgggcccaaagcacagttgtctctcagtatcctggagggattcgttccaggaccccccaggaataccaaaatctttggaagctcaaatccctgatagaaaatggcatagtgtttgcaaggaacctacacacattctcccgtattgttcaaatcacttctagattacttataataccaaatacaatgtaaatgctatgtaaggaatttttatattgtttgttgttgttttgttttgtttgagaccgagtctcactccctcgcccaggctggagtctcactttgtcgcccaggctggagtgcactggtgcgatcttggctcactgtaatctcctcctctcca

SEQ ID NO: 572336 - DNA, 1538 bp, Homo sapiens
  misc_feature (498)..(498): n is a, c, g, or t
gctcctcgccaggcagccgtccgggagccagccaagcgagcgtttcgctctgtgttgcccaggctggagtgcaacgggccacgtatctcggctcaccgtaacactctgcctaccgtggttcaagcgattctcctgcgctcatgcctcgccgagtagctgggattacaggcatgcgccaccatgcccggctaattttgtattgtttcgtgcgtgcgtggtgggggggcgcggggtcccgtcgctgtgttgaggcctgggcgtggtccctagaccaccctggccttcgcgtgtgacaccgcacgtgccctcggaccttccttacaggtgcgggctgcttatcgccgcgtgtggccgccggtgtgcccccgtgggcccttgcgcctcagggttgtactcacgccgttgtccgtgacctctggagacatgggtggtgctttcgcatgtaacatgggtacacatctgggcgaagactgctgttgtccgctggtcccattgcantggcgagtatgatcgctggggggtccttgggcaatacatgggcaaaactctctctccacggttgtgttgggccgtggtcttgcgttgagggaggagcagccagaggccttcgtttggggcgtccacggggggggccttagcccaggggggcgcgtttcgcgttatttccctggtgggggggctgtacccccccgggggggggctatgggggcgccggccaagaggggaggtttgatatttccctgggggacgcaggggccgactcctccccagggggctggcctttaccccttgggggcgcggagacctcttggtgggggctgtgtacttccgccggggggggacccgtttgcgccgcgcccctggtcgatgttccttaccgccacgcgaggcccccccacccaatggggtgccctctggggggggggccttacacgcaagcttttgtcttggaggacagggcgcttagtgtggccccctcctgggagggccatagcggctttgtgccatcattgggcgggccccttattgtgcgggtgccccctcgtggtgggcggggcccccttgtggtttgttggcgctctttattaagaccttgtgccttgtggagccatgagaggcgaggaagtgggacgaccccccgggatggtcgtgacttgagaccaccttgttgtgtgtgtcacggtgatggttaatgcccccaataggtgcttgacgacacaaacgtgtgctgtgtcaacagtttcccccacaaggcgggagagtacattgttgctgcacttccccaattttatcccccaggctttcgttgtcaggcgacaccgcgggacgagcaccatgttgttgtgcgacaaacaggcggcgccacaacaggtcggagcgggctaacacaaaaacagggggagttccgatcatcaagcgcggcgagacagctataacatatcacttgcttgagttggaccacacagcagcacgtggataagtattaaccagtctggtatcattcgtcgatcatatactgcacatgacgaccatgtgca

SEQ ID NO: 572337 - DNA, 182 bp, Homo sapiens
gatctagccgatccttatgcggtgcctttcaagagtcgaaacatgaagtctgtaaagtgacagactgctgtgttttgagttatgaaaatgatttcccatatttaaattgccacaagtctagtgggttgcttacatagatgatcaaactaagaaacctgttacaggccgggccctgtggctca

SEQ ID NO: 572338 - DNA, 325 bp, Homo sapiens
atttaatttttgttacatatgaacattcaatgatgatatgctcagtctcaaaagtcaaagaaatatgtgtgatcagcatacttatacctcctatccacacatatgtctccatgtaaaaagtacataaaattactatcatttaataagtgttacatatgaacattcattttggaagtgctgcagcctacaagatgccgtgcatgtgtgcgagtggcctgattacatattcctcccagcagcaagtcgcgtcactcctggaagatgtcgatattataagtcaaagagtctagagagaacgttcttataaacaaacgtcaaagaacag

SEQ ID NO: 572339 - DNA, 142 bp, Homo sapiens
aggtgcagttgacggaattgttgctggatggatttggtatttcagaggaaactggtacatactacagaaacggctttcccaaaggaaaaatgaaatgctgccaggtgcggtggatcacgcctgtaatcccagcagtttgggt

SEQ ID NO: 572340 - DNA, 438 bp, Homo sapiens
acttaaaatagtgtgaatttgtatatgttgggagttgatcctgtgctggacgggtatgctggctagtagctggaatcccaggactaagggaggccgaggcgagtggatcgcctgagatcgggagtccgagaccagcctgggcaacatggtagaatccagtctctactaaaaatatgagaaatagacgccaggtgtagtggcgcgcgtctgaaatcccagctactcgggaggctgaggcaggagaatagcttgaatccgggaggtggaggtagcagtgagccatagagtcgtgccacgtgccactccagcctgggtgacagagcgactgcgtctccagaaaaacaaaaaaggtaaaacataaaagtgaaagaaaaagtgaagaagataaccagcaataggcgttaacgtgaaaataaaagtgaccttggtcaaagaaag

SEQ ID NO: 572341 - DNA, 114 bp, Homo sapiens
gtgactctcacctctcagacaactaagacagatgacccccaattgaaaagagaattaaggttattgaaacacagagaggctctctcgagatttgcgcagagagaggagagtata

SEQ ID NO: 572342 - DNA, 222 bp, Homo sapiens
gaaggcggagattgcagtgagccgagatggcaccactgcactccagtctgggcaacagagcaagattctgtctcaaaaataaaataaaataaaaaacaaaaagcatctccagtgatgctcatgcctgtcatgtaaaggttccagccttgaggccaggcgcggtggctcacacctgtaatcccagcactttgggagggcgaggcgggcgagaagctgtggcgg

SEQ ID NO: 572343 - DNA, 103 bp, Homo sapiens
tgacctccaggattcatgcgttgtcagtgaaccactattacgaaaaaactctacctctctatactaatctccctacaaatctccttaattattacatttcaca

SEQ ID NO: 572344 - DNA, 568 bp, Homo sapiens
tcctcggcttgccccttggtgcaacgctggtggcgtttcgtggcctggccatctggcaggcgatcatcgtcgcgattcttggcgccgcgggctcctttgccgtagtgggcatcatctccatcgccggtcgccgtggtcgtgcgcccagcctgaccttgtcccgcgccattttcggtgtgcgcggcaatatcggcccgacattggtgtcgctgatgtcccgcctgggttgggaaaccgtcaacaccaccaccgcagccttcgtattgttgtcgttgagctccatcctgttcggctcggcagtggaggccaagagcgtgccggtgctcaccctgatcttcattgccatcttcgtgctgttgaccctggccgtatcgggcctgggccacgccacgttgctggtgatccagaagtgggccacctacgtattcggcggcctgaacattctggtgggcggctttctgtgtgccaccatcgactggagcgcggtgttcaacgccaccccggcgcccgtgagcgcgatgatcattggcgtaggcccatggctggggtaccggatcgggtggccaag

SEQ ID NO: 572345 - DNA, 202 bp, Homo sapiens
  misc_feature (202)..(202): n is a, c, g, or t
tcaaagacttaaatcgtgaccttataaggagcccccatatcagaactttgacgggtaaagccctcaaacttgctagggaatgaataaagccaaaggacggccctaaggccctgaaatttacgggccacctggcctaacaccaaacctctggcttaatccctttaagcccgccgggcactttcgggttcgccgaccctttctn

SEQ ID NO: 572346 - DNA, 1245 bp, Homo sapiens
  misc_feature (645)..(645): n is a, c, g, or t
ggggactccgcccagatttaactggcgacccgtgaccagtattcttgactactctattgctgatctgtgaatgcttcgagtctgggcaccgtcatgacgtctggggcgagaaaagtccacaccctgtgtctgtgtgcgtgtctttcagcctctggtctctgtagcattcaacagcatgagcacgagcaatagtagccatcccattcgggcctatttgaggttttcgtgcatgcgcgcaagccttcgcaccgtgtgctgcggtgcaatgactgcattcccaggacgtcgagcaattgtcgggtaaccatcctgtctggacgctacgcgaaaggcagacgtccaaaccgacgggcccactccaaccctactcgggcgctagcataacgctgatgtggtctccccacgctgcgagtctggctcgcgttgacgttgcgatttgctataccgaatcacttcacggcctaaatgccatatcctttgtagcacctcagtgcacgaacatggctgcgtaagtgggtctgcgccgtgcaaccgtgatgactttgccgtggaccgcatcgtcacaatccatgtccaactggtaacgtactgttagctggctagcgtgcgcggcaaatacaagaagcttgatcgcctgctgaccanccctggtaggggactgctttccctagctttgcactttattgcctcggcatccatatcggacgagcaagtaggaacccaacttctagtttcctttccatccagcaatacctcatccaattgccttcttcgtggatttccatttgtacatcctgtcaccaaagtcatagcccaattccaatcccccaccaataccgtctagcagcaacatcataaccggttcagtccgttgggctgcaagcgaagaccacacggggatctcggccaggtaacccgctgacttggcgcgcatcggtaacccttagggtctcgccggagggtgatagcgaaatcggtgtgatgtgggagcagttcctgcccagatgtcccgcgcgctaagccaacgcgaatcgggggaggcgaggaaatgcccggccaatggaacggtcgtgcaacgcttgccttgaccgagggatacccgttgggtggaggcccccttgtgggcccattctctatcctatgcggggtgcgttttcaactttttcctttgcggggcctccgtggcctccctttacattcggtttagtgccatgttgggcggttgttccccctttgatggttacc

SEQ ID NO: 572347 - DNA, 122 bp, Homo sapiens
atacagtgagcgagatgcgcacggtactccagggcacagcgagactccgtcgtcacagcaaaacaaaaacacaagccccattaattgaaaacaggcatcaaatggcaatccaccaacacaaa

SEQ ID NO: 572348 - DNA, 908 bp, Homo sapiens
caattctagaggttgtgcccagtccgtgtagcgctagccgattctcgtgcttctagatgcccgaacaatttaaggtagtggccgaggcattcgaagatgaccttggaggtcactgcattgagagagcaggcccagccaatgtgtcgactatcatgtttctgactaagaaatacaaaaatacttaatgcgctgtacgcatcgccgtgtacgctccccatgtctgactagcgtgtagtgtcctgagccgacgagagcaggcatcgcttggacccaggcaagtggatacgtgcaaaggctggatgccggataatcagcgccctagtagacgtcgttcctagcacttgcggtcagatagatgtgaggagtccatctcgtgagcaaatctcgatatctggttgtactaacaggagagcaaatgtcgcattcccatatagtagactcctagaatcaagcaatgtgaagatcacttcggatggaagctacatctccaagttgctaagggcaagcacaatatccgaagcagcaccgacaaactacaatataactaaaggttagagcaaacagagttatattatcgtaattagcaagaaaaaggggcctctctaggccagcagagattaaaaagactggcccaacgttccatttccataaccttcagggaaccacgcaaagttgaggatttacttatctaggacttgaattccttcttttgggaccaagttaataaaaatgagcaagaaactcctgaattaaactggataactgaaggattctgttagcaccagggctgcacgtatcggcctattgttttgaccttcctcctttttctcaggttaaccaatctcaagaggcttaagaaacattccacataaccccaggaagcggtgtgggggcttgactaaagttaa

SEQ ID NO: 572349 - DNA, 633 bp, Homo sapiens
  misc_feature (213)..(213): n is a, c, g, or t
  misc_feature (310)..(310): n is a, c, g, or t
acaacaatcctaaactctttttcgggagtggggacaggggtggggaacgcataaaattcatcggggacagaccggaggggggggcccgaaggaaaccaaaattcctttttgtttctcacggagggggtaacggggaaaagaaagtctgcacaagtcggggcactccatgcccaaacagaacgtggtacccaccgtgttggctttgggcaaaanagtgaacatgaacgtgctcaccacgttaagcttgggtgcccgcccccccgtgttccacgaaaaggattatgacagcctggggcaacccggttttttngaccgtttaatccgttggatttgatagcccccccgcccgggccccccagttaagggttgtgagcccaccccgtccatggtgttaagggggccggggtcccacagggccagcaccgttgttcaatgggaaaagccctggggcttgcacttttcaagttcttcccagggggtcccggaagcccgggcccccgccaagcccaaggtttccccaggccctccgaagggggccgggcctccctccccctgaagccatcccaaggttcttgacctactgggcccttgagttttggagcaagccctgacccaataaaggttttgacccca

SEQ ID NO: 572350 - DNA, 661 bp, Homo sapiens
tttggtcctttcccctggaactgtctccccctgaaaggtcgaacctgtcccagttttaccggggtaccaagatcttacccccggaccaccgggaagcccttaccgcccggagcccgaccggaaggtttttccccaatttttcctaaataggcgcaaataccgcaatttccgcttttcctctgtcccacaggaggaattctcctccggcccagtattaaatctgtggacttgttcctcctaaaccaggaaggaagccccacaaaaagggcaccacatccggaagaaaattccacaaaggaaatagacaccccccggacgccagtccaaattcccgagaggcgcccattaacatggtgccatcttcttgctgaataattaatggcccacagagggagattcacgaaacccctgaaagttatagaaaaggcctccaccgcaggaaccacaagctattcacagggctgctataaggaacgccacaaaaaggctaagccagcatcttaaaaagactgccatggctgctgctaaggccacctcaccaaggccagccacctaagccaaagattgtgaagcctgtgtaaagtttccagctccccgagttggtggaaaacgctaaactggccagattagatttttaaataaagattggattataactcta

SEQ ID NO: 572351 - DNA, 934 bp, Homo sapiens
  misc_feature (925)..(925): n is a, c, g, or t
aaatgaaaccaggactggacctactgattcaaacttggacatgagcgggtctgtcctcttcacgccggagacaggtgtgatgcttctgaccccgtagagtcatccctgtattgggccttaataaatctgctgtcggaaagaatccgctatacctatgaagagttattcccaagtgtcacttgtggtgatgataatgcaagggagcccgaaaatgcagttgacaagctcttctcttcagagacagcatggcgtccttcttgcatggttgttcgacctcaacaggcaatctactatagaattggaaagttaccgattgcttcgtgtaagaaggtccttcagtattcgtagagcccagaagaagacttctggtgcccattgtcaggaattcagaagacgtgtgatgacttgtgcccttgttcacaacgtattccgacggtcccggtgcaacgttctgtgaactccatactttgtcccacacgactgccgggatgcctacagccatgtcacgcgtcaaacacggtaccgtgagaaaagctgcttaaagcctgtcccttgaagcagaacgacttagggcagataaaagagttaaaatcgatcgcaaggactcgacgaatgctggggtcacttgagcgtaattgcacagtgctgcctgggccacaacgtgcgttggctcaggagagaaaataccccatatcagtatttgaaaggtaggcggtgtcctctgttctaagtgtagaaacagtggtgaactgggcccagagttaaaaagataacagggtctgggacatggtaccattcctatgtaccgccgggtggaaaacctttaacacctctcgacgaacgcagtatatgtagacacatcgagtacgaaccttgttgccgccccccccccctcttctctcctcctcaatcataacattttctngaagaaaga

SEQ ID NO: 572352 - DNA, 372 bp, Homo sapiens
tatctcccagtaaagggagaaataggcaacgaagaaaggggtactggtcccagttaagtccaaaacacaaaagggaaaacaacattaagacttaatgacggagaatgatctcctttgactccatgtctcaaatcctaggcacggtgggacagacatggggcctccagtgcctgaggcagccctgctgtctgcgtgtgaactaacaggaagtgggctgaagtcatcctttttctcaggaccccacttctgaaataactaatccattcctgcgataatggcgttaatccattcatgaaggcaaagctctcaagacctcatcacctcttaaaggtcccaactctgttgcattaaggactaagtttccaacacatg

SEQ ID NO: 572353 - DNA, 167 bp, Homo sapiens
tgcggacccttaaggctgtacccctgcgcaggtcgactacacctccagtggtgccagcgcccctttgaaatagccacgacgcgggttatgatagtgaacctagcacaccactctactttaagtttctcgcgcaagccccacatgggaaagtttgctgacggtgtcaa

SEQ ID NO: 572354 - DNA, 693 bp, Homo sapiens
  misc_feature (217)..(218): n is a, c, g, or t
  misc_feature (221)..(221): n is a, c, g, or t
  misc_feature (278)..(278): n is a, c, g, or t
  misc_feature (288)..(288): n is a, c, g, or t
  misc_feature (500)..(500): n is a, c, g, or t
  misc_feature (522)..(522): n is a, c, g, or t
  misc_feature (693)..(693): n is a, c, g, or t
cattcctttcatcttccagctcttagtggctgccagtattgcttgacttgtggccacatcactctaatctctgctctctctctttacatctctttctcctctgtgtgtctctctagcctccctttgcctttctttcacaggacgaagagggcaagttcagattacgtggattgctgccgggatgtgtgtaccacgttcagctcaaggcagaaggcanngancacattgagcgggcgctcccccaccatagggtgattgaggttgggaataatgacatngatgatgtanacatcatagttttccggcagattaatcaatttgatttaagtggaaatgtgatcacttctctctgaataccttcctacattatgggtcaagcgttacgaaagcgatttcccccccgctcagagacggcgagaactatgttgtgcttttgaagaccacacttcccagatcccagtatgactacatcttgcctcaagtttctttcaccgcagtgngctaccataaacacatcacctngatttttaatcccacgaggaagctgcctgaacaggacatcggacaaagatcctaccattgcctgccattgacgcttgctgttctgcttggccggtaccaccatgacaagctcatcccttgcttctgcagttgacaagccggctacaggcagtccgcttccttgcccagccn

SEQ ID NO: 572355 - DNA, 210 bp, Homo sapiens
gcttccctcctttcagtagaattctttctctaataaaattacacagaaataacacaattctttttttattacattgtttatttccaggaaataatttgggctatatgtaacttgtaaaataaggggattaggcatcaatattatattaggagtgagaggtgtggttataataataattcccaggctttcacaggttgccgcagtattaca

SEQ ID NO: 572356 - DNA, 294 bp, Homo sapiens
tggctgcccccacaggggctttaggctggtttgggtcatggggaagcgtccctcttatcgcggtctgtgttctccggatttgggatctaggtgggggggcctccggcccttttatttaaagggctttggcttttgtaaatcccaagccaataatagacttttttctccccctcggttttttgctgggtcatttctgccttgagactgccttgagacagggcttgccttgagagagtgagccaattaacagcggcctaattttgaatatatatatatatatttcttttcccccta

SEQ ID NO: 572357 - DNA, 748 bp, Homo sapiens
  misc_feature (217)..(218): n is a, c, g, or t
  misc_feature (221)..(221): n is a, c, g, or t
  misc_feature (278)..(278): n is a, c, g, or t
  misc_feature (288)..(288): n is a, c, g, or t
  misc_feature (555)..(555): n is a, c, g, or t
  misc_feature (577)..(577): n is a, c, g, or t
  misc_feature (748)..(748): n is a, c, g, or t
cattcctttcatcttccagctcttagtggctgccagtattgcttgacttgtggccacatcactctaatctctgctctctctctttacatctctttctcctctgtgtgtctctctagcctccctttgcctttctttcacaggacgaagagggcaagttcagattacgtggattgctgccgggatgtgtgtaccacgttcagctcaaggcagaaggcanngancacattgagcgggcgctcccccaccatagggtgattgaggttgggaataatgacatngatgatgtanacatcatagttttccggcagattaatcaatttgatttaagtggaaatgtgatcacttctctctgaataccttcctacattatgggtcaagcgttacgaaagcgaaaacctcgacaatccagtccagacagtttcccgttggccagtcgcggttctgccatttcccccccgctcagagacggcgagaactatgttgtgcttttgaagaccacacttcccagatcccagtatgactacatcttgcctcaagtttctttcaccgcagtgngctaccataaacacatcacctngatttttaatcccacgaggaagctgcctgaacaggacatcggacaaagatcctaccattgcctgccattgacgcttgctgttctgcttggccggtaccaccatgacaagctcatcccttgcttctgcagttgacaagccggctacaggcagtccgcttccttgcccagccn

SEQ ID NO: 572358 - DNA, 105 bp, Homo sapiens
gcgctcagctggaacttccgatctattttttcttggtctcatactcagtttttttatgtagtcacttagtaaaataaacctaaaaaaaaacattgattttttctg

SEQ ID NO: 572359 - DNA, 1483 bp, Homo sapiens
ggagagacctagtctcgtaatcgcgggagcgaagatgccattcctgcacgggaactgggtcagtctgcaaaacttatgtgacccgcgcgccaaatccgttggcaccaaatctggtctcgtaactaatggttagctgaagcctggatcgtgccgaagcctatggggctccggtaacaagagggtacaggctacaggaaggggtctgaatttagccttggcgcatagtacttccgacattggagcgcgtctccgcggagagctgacgtgtacgtcgtcgcactgcagcacagggactccgagtggacgtctgtgagtcgcagggtgccaactggtactgccctgtgctggcgtcagttgggtcccgtctctgggcgaggtgtcttgtcactggacgcgggcaaggacttgacagctttggcagtgatcatcactgggtcgctggagagactaagctgggagtcccaagagagacacctatccgactatgataggagcccgagaagtcatgtgatggactggcgggttggcgtgcaaatgatcgcagtcagacacaggtatggtcgtagagttacctggatgcgcggaggagcgagacacgggtgagtgcgagtggagtcctgacacacacccagtgctgcgtgtgtagacaatcacgggatcggtgtctattgggtccggggcgttggacaattccgctataaaatggcgagcgagtcgagaaccgtgttcgttctcaatgacagcattctttcccgcgtgacgagagagagtagggcgcggcacccagggggcgctggcagttagacacgaacgggaacagaaaattggcgcaacacggacacgggagcccaaggggggtcttgcgcggcagccttaggcaggggctagggaaggaacagactgcacgggacgagaagcagaccttacagagagcgcaagacagtgaggacgcggagcacccatatggaacacgatcggctggagataggggatacgaacgacacaaagacgagcgtaggcaacaaaaaagaaaaaggacacgagacataaagagcagggccgttgacacgaaagcacatagaacgcaaccaggagcacagaacaaaaagctaggcacgcgcacgcatccgataaaccagacgcgaatgggcggatggcacgagaagccaaaaaccgcaacccgagatagaccgggagaacgggtaacctaaccacgagaaggcaaacgaaagccaagacggtaaaacaaaccaaacacaagtaatagccagcacccacaaagagaggatagcacacacgcagcacaacaaagacacccaaacaagcgaagcaagaacgaactacaaagtcgccatagaccgccggaagaaaaatgagcgcccgacgaacatcaagacgaggggaaaacacaaagaatagtagcacgcagagagcaagacaagacgcccgagggaacaacaaaagagagagagagaaacagcct

SEQ ID NO: 572360 - DNA, 236 bp, Homo sapiens
tgtgacttcaagactttgaaatttggggtgcaatgatcccaaaaaataagttaagcagttactatggagtgtgtgtgtgtgtgtgtgtgtgtgtgtgtgtgtgtgtgtgtatgtgtgtgtgtgtgtgtgtacatgtgcacaaaacagagagtgtattctacataaaatctctctctggcgccagagcgcacatgaggagtaactcagacatacaggagacatacatcgtcgtctcg

SEQ ID NO: 572361 - DNA, 130 bp, Homo sapiens
gtgtcgctcgtaccactctctcgtgtaccctggactcctttctaccgatcgcctctggtccccggacctacctcccacgctcccttcgctgtcggcccccctggtgttttttttttttcttttttttttt

SEQ ID NO: 572362 - DNA, 1028 bp, Homo sapiens
ggagcggcgggggcggcgcgcgcgcgcgcgcgtgtggtgtgcgtcggagggcggcggcggcggcggctggcgggggtgtggggtcctttcctcctcgagcaaaacaatcacgcctattaacttcttgctgcacgtcgcaatatcatatctcccatgactgcgagtagaccttggacccagcatgtccgtacatggaacgtgcagagacatgtgtaccgttccgcgcgtccctgtaagacgagtgcacagtccgcaagacaccggactacagagacacgatcggtctcgcctcttctcaacgaacactcgcgactgctcgggccacatatcacttgatcggcggcttcccactcgcaccaccagcacacacggaatcaggactacctcgggccagcgacgtaaggaacccgactacattccgccatctgacaacagtgctaacagctggctcgaaacgcatctcgtacccacagactcaccccagtgggtttgaaccacgtcctctttaacggactttcactctaaccggcccaaacgataatatatccacacccatcaacgcggctcacaatcgattaatggatgtggcgattaagatcttccctacgcgtccccagaccgaaaccccacagacgctggcgccttgatcccatggcccgcttccccacagccgcatccacacgaatccaccatcgttcacccaactccctcccaacctgggcaatggcaaaccttccgcaacactaacgccatgggaaaactaacacgaccacggtccctccattccacacgaaacagccagcacgagctgtttacaagacttcctacacgactctcgacgacactggagaacacaccaaagcgcgaagagagccaactgggcgttgcagcctggaaccacgctctaaagcccatacctggcccccccacgctatacatcggtcgcgcccaaacacccccattgtcactctcactaaacactaccaagagctagctacgacggcattggttcccactccacacgtgaa

SEQ ID NO: 572363 - DNA, 118 bp, Homo sapiens
tgtgcatccccccacctcgagtatccctcctgtctccagtactctccacagacaataacctctttagtgagactggccatatgctgaagaaactggaagtgagttgtctcaatgttta

SEQ ID NO: 572364 - DNA, 136 bp, Homo sapiens
agtgtctcaacgaggtctgcttctacagcctccgccgtgtgtacgtcattaacatggagatctgtgttcgtacagtgtgttccacgaggagcttctccgagctgacctctgtcgggacaagttctccaaatgtggc

SEQ ID NO: 572365 - DNA, 666 bp, Homo sapiens
  misc_feature (431)..(431): n is a, c, g, or t
ggtgatctcgatataagaatcacgaccctcgtctctgtaccaattttagtgattacatttttaaatttatctttaaaatttaaatttaaatttaatgggcatttattttgatggaaattataaatctaattttttgtaaattactatctgattatctaaataccatgtaatcattaatttttctcatgtttgtgaggttgagttattattattattttttttttttggagcatggagctctcgctctgtcgcagaggctgaagtgcaggggcgcgatctgggctcactgcaacctccggtctcccaggttcgaggtgatttccgttgcctcagcctcctgagtgggcgggggactacagggcgtgcaccaccaggctcagctaattttggtattttaagtaggagacggggtttcaccgtgtgggccaggnagggtctcgatctttggacctcgtgatctggcccgcctcggcctcccaggggtgctggggttgcaggcgtgagccatggtgcccggccatgatttttttttattacactttaagtccggggatactgggtgcagaaggtgtcacattggttacataggtatacatgtgtcatgggggttggctgcgccataaagccgcatctaggttaaagccccaatgcataagtattggtcat

SEQ ID NO: 572366 - DNA, 325 bp, Homo sapiens
aatagtcatttttaaagtaattataaaaaatttgttgttggccgggcgcggtggctcacgctggtaatcccagcactttgggaggccgaggcaggcggatccctgaagtcaggagttggagaacagcctggccaacatggtgaaacccgtctttactgaaaatacaaaaaattagctgggcaaggtggtgggcacctgtagtcccagctattcaggaggctgaggcaggagaattgcttcaacccaggaggcagaggttgcagtgagctgagatcgtgccactgcactccagcctgggtgacagagcaagactccatgtcggtaa

SEQ ID NO: 572367 - DNA, 1455 bp, Homo sapiens
ggatgatgttcatggtagaaagtactgctctttgcacaggagcctgtatctacagaaacccatggtgtgcacatagagcacttttctactgatcatcatcacactctgatatctgaggcagatgagtaccgaaccacgatctgaagtcaacagacagaatccaagttctcaaaattgcctgcggacatgtgtagcagtatctagcaaacacatgcaaccagaacagtatcaggttattttttacaaatacaagcacagtccatgttagtattctagcacattatcatcacatacacacagccatcggaacagcaaaatatcatctatcaggtaagagccacattagtcacaccacatatatctgaagcacacagtcagaaacccaattatacgagtcattataggcaaaactcaccttaggccacatacacatgcgtatagtacatatattcaaacaacacaaaaaaacaagcaaacatagtacacatagtaaaacagggtaatagcactataagagacaaaacataggcatgaatcgcatcatccataaatactcaacaattccacaattaaaataaatagttaaagaatagcaaaagatagagataactggaatataataactaaagaggaataggtatagaaaaaaagatagggcaattaacttaaaaaatataagtagaatcagataaaaccttagaaaaccaaaaaattaatagagaattaaagctacaaaaacataggtcatggtaagtgagagaccactcacccacacaatactaacaaaacaccaaaaaccaaacaagcggcgatagcacaacggcagaaaagaaaaataggaagcaaacagacacaactgacccagtcataactaagaaacagacaataggttaaaagaggaaagcaaacaacgcaagcgataaacaccaagacaatcggcaaacacacaaaacacaaaaaaccaccaaccaaagagaaaacacaacaacaggccaaacatcagggcccacaaccagccacacaccactggcgcaacataacgcacaaccaaaaaaagactaggcaaaggcgccaggcagtgcacccacacctaaagcacaccaagcacagagacaaacgaccaaaacacaaaacacacaacagaaagcaaagacagaccgccaaaacgagagaaaccaagcgcacacgcacggacaaaagccacgccgactcgagagcaaggagagagaacgacaacagaaggaacacaaccacgagacgagccgagagcgaaagcagacaaaagcgacacacaaccagcagaaaacagcggccgacgcagaagaggcgagcgaaaccaagtgacggcaagccacacaacaaacaaaaaggagaagaaaagacacacagctaccaagcaagaaaaaagaaacaagaacaacacgccaccaagcaacagaaagaacgatgcgaaag

SEQ ID NO: 572368 - DNA, 398 bp, Homo sapiens
actgactcatgcgtaaatgacaaatttgagaagtctcccagtaaagctggaacttactggttaggttaacaacaaggttactggatgagtttcaagatttaaagccaaagcgtgtgggtccatgacttaggtgtcattgcgtgtgggtcacaatatttatatatggcgaattcagataaacatgggcctagcatggactctgggaaaacaaaatagaggctgcattacggagataagatttttggtctgttccctgggacatgcttaaaaaatacaatagctattatgtatggtttttattttcatgtggtttcggggaaacaacacggttttaaggatggtttctaaagatgcaattaaaaattgttccacaagggttaagtgtctggtggtaaagt

SEQ ID NO: 572369 - DNA, 1775 bp, Homo sapiens
gggtccgccgccgtgaacgtggagcctgtggtgtgcgtgtggacgtcctggactcgctgggagactgatcgcgactgacacacggctgcctgatcgcgcggcgagactcacgtgcttcgccctttctcgcctgcagccgctgactgtgcaggcagcctccagcctttcgagccatgcctctcactcacccagccgccccactcgagaaggaaccaggcagccgctccccgtgctggcgcgcctggccgccgctcctcgtcgcgcactcaatgccttcaacacaacactgggctccaacagtccacttctcaccctgggccaccacactaggaagccaagcaggaccagccggacctcctggcgcacctttctactccaccgacttacctggcactcactagagcctggccctggaactccttaacaaacgcaccgtcactacctccctggcacccagggggcaactggctgcacacgcccacgcgtccggcctctctcccttccgcacttctgcacctccaacgggccacagcaccctccacctttcccaaccccccaccacaccacgccccttacaccttgggccctccctggacacaccccgacacgccttcggctcccccttaccttgcggcccaaccaagcgcaactacgtgctccccttctgggacgcgcaacggggccctgggcaccttcaccacttccccccgtcacaacggccgtatggccccttggccccttcggccacatatcgcccacctcacctcggccacgcaacacaccccccgcacccacttaacctcatcatgtttccccccctgcctctcggcacccctgccctgggggccacaccagatgtgccgccaccctttccaagcacggtggctgtcaacacacggccaccggtgcaaacccactgtgcctacgaacgcactactgcgggcacacccccccaatgtgaccacccctgctggcgcgcacgaacccggcggcttcctgacatacacccccacagaccgcgcctttgtgcccccttgggggccacccaactatctccgtctacacccccaccctccccaccagtgccgcttggggacacacccaaagcaggacacctccaccaaaggccgcacacccccgaccgcgcgctcccactctcccctggtgggagctacccccaccccccacgattgaccacacaccccaacggcacaatcttacgacccaccctccaacctattcacaaccccaacctatacaacaccccgcacgcaccacccacacagcactcttccaccattttccaactcccacccttcccatacttttatacccttgtccaacacccaccttcattcctggccccaacccacccccacaccaccctcccctcaccctctccccctacctccaccacttccacccgcccttctacacactcccctcgcgccacccacctctcacgggccaaacaagtactccctgttgccccaccatttctgtcacacaaccatctcagcccctacgccctctgcacgcgcccccgccttattacaccacaccagctttacacggttatacagcacccgtgtggcgacctgacgtctcatccgcgggaggcatcaatgggcacgtgcatcatcatcggtgggcacgcccgtccctcacacctactcgtgggccggccgtcactcactaccctttcgctagcgacgcgcacacataccatcgccccagctccttcgcagtgcgtcatacccatcacatcaaacgcc

SEQ ID NO: 572370 - DNA, 459 bp, Homo sapiens
gtgcttcttcgccctgtacaggacggagatcgactgcgtcctctaagcccaagggaagggggccagcgcacccttagcccgagttgcgcaacaacgccccttatactattcaacttcgagatcagctgccaagaggccaaggcgctgaaatgtgacttcgtcccagtgacgctgcgggagggcaaaccggtcttggactgctagatcgaagactataacgagacctcgctttcaggactggaaatgctctgacctcgcgaggtcatcacaggtcaaaccgcaatcgcttgagtgcccgatgaaccgggacaaggtcagctgaagtagagcgaccaaacattcttaagtggagccacagtttctaaccgaggcattaatggcatacctgcacaggatcgacgatacaaacgtgggcgaccagttatgcgctccatatctttacatggatgtattcccagg

SEQ ID NO: 572371 - DNA, 1019 bp, Homo sapiens
  misc_feature (161)..(161): n is a, c, g, or t
  misc_feature (163)..(163): n is a, c, g, or t
  misc_feature (165)..(165): n is a, c, g, or t
  misc_feature (168)..(168): n is a, c, g, or t
  misc_feature (170)..(170): n is a, c, g, or t
  misc_feature (173)..(173): n is a, c, g, or t
  misc_feature (175)..(175): n is a, c, g, or t
  misc_feature (183)..(183): n is a, c, g, or t
  misc_feature (260)..(260): n is a, c, g, or t
  misc_feature (1019)..(1019): n is a, c, g, or t
ctgcagctccagcaggtggcgctgcagcagcagcatgcaacagcatgcagttccatgcagcagcagcaggcggcgctacagcagcagcagcagcagcagcaacagcagcagttccaggctcagcagagtgccatgcagcagcagttccaagcagtagtgcngnancancngcngntccagcancagcagcagcagcagcagcatctaattaaattgcatcatcaaaatcagcaacagatacagcagcagcaacagcagcngcagcgaatagcacagctgcagctccaacaacagcaacagcagcagcagcagcagcagcagcagcagcagcaggctttgcaggaccagccacacaattcagcagccaccgatgcagcagccacagcctccgtcctcccaggctctgccccagcagctgcagcaagatgcatcacacacagcaccagcagccgccaacacagccccagcagcctccagttgctcagaaccaatcatcacaactcccgcaacagtcgcagaccagcctttggtgtcacaggcgcaagctctcccttgacaaatgtagtatacccaacaccactgaaatttgtccgagctccgatggtggtgcagcagcacccagtgagccccaggtgcagccagcaagaagacaggcagtacttaatgccagccgctcctggaattgccgtctggaacaatattccgatcacctggtcttcaacaatttccattggtaacgatcatttccgttccagcattgactgccattcaggggccacacacaataaggaccccagttgtgtctccccaggaagacgcatcgttgaacgataataccaccgaaagtcttcacacgatgttgtcccagggaacaaggtggccaggctgaacccaaggtcttgtaacactgggacctcttatatagaacaatcgctgaccacctaattcgcagtggagaaaagggaccacaagtgcaccatgtacacagtgcaccgacaatacgccaacacaccgtaagn

SEQ ID NO: 572372 - DNA, 752 bp, Homo sapiens
  misc_feature (1)..(1): n is a, c, g, or t
natattgatgggcaaccggaacacgtgctgtagccactgtggaggtactaaaatgtgaaggtacaaccgggagtgagtcatcctttctgaaggaatcattgtccgttgcccagcgttgtgttccagaataaaaggaaatattttgaaaccccgttataggacctaaaatcctgagtttccgtgaccacgttaaattggtagcatcactgtgtagctgataatttatcagaagtacagcttgggccagattttcccttgttatcttaaaagatctgccttagccatggctcctttttcaatggtgatctttagattttcccaccccataagagaggagccaaggaaattacccgtttagactaagttaccgtatgtgtttcataagtgattaaagctatatcaacttccccggtattagttaacacccaattcagccacccttctgagtattgtttgttcaacctttcagacttggtgatactggacacctgtccgtgtaaataaccctaaggttaggatcttctaagtgtataactgtctcctaagcccatcacctgtggcaaccctgtagagtgagcttatagtttaattgagatatttatcttgtggaaatattaaaaagcctatgcttgtgtaagtgaaaaaaaatcacattcatttgtttaaaaatgtaaagctattttgtagaggctcagtacttttcccatgccctgttgtatgaatgccttaaaaattctaaagtaccatgctta

SEQ ID NO: 572373 - DNA, 393 bp, Homo sapiens
gcgagaaccttgtggggctgtcttagcctaacccgggagcaagtccacacggcgtgtcacacacacacacacacacacacacacacacacacacacacacacagtgaggtgctcacatctccacagccgcgggcgcgtatatatctctgtgcacacgatacacacactctctatggcacacacacacacactccgagccatatggagcacacgactctcaggcacgtgcacccacacatatcacacataggcagtctcttgtacagagacacagtcatatcttgtgtacacacagatataggatttcgctgtcgcacacatatagagacttgcactctcgagacacagcgaaaacgcaaaatctcacatactctctctctaacatctcacagt

SEQ ID NO: 572374 - DNA, 777 bp, Homo sapiens
gctctttccctgccgccgcgagtcgcgcggaggcggaggtggggtgcgtcaagattcagcttcaccgcgtaacccaccgccatgccgaggaaggcatggtgctggaggtgtaatggacgtaatactgctttacaagaggttctgaagatgccctcatccacgatggcctagcacggtggaattcgcgaagtggccaaagccttagacaagcgcaggcccaatcttggttgtgctgtgcttccaaatgtgatgagcctatgtatgtcaagtggggtggaggcccttggtgctgaacaccaaatcaacctacttacggttgatgacacacaagaaactaggagactgcgtaggccctggtacaattggacagagaggggaaccccgttaaagggttggctcgcagttgtgtagtagtacaggcctatggcaaaggacgtccagggccacggcctgtcattgccgacgtattcaaatgcgagaacgtgacgaactcaaatctgggctcaccagaagacggaacacacacacaacaacaatgtgtcggccgctaagaaagctttaaaaaccattgttggggccggccaacgagaagaacgcggccacgggccaagaaccgggcaagaatggcggtggctcacaaaaaaacggccgggaacggcggtggacacacccgcagcgctcgcgccacggactccacggccaggctgaaaaccccgccgcgcgacccaccccgcaccgcgctcccaccgctccgcccgcgcgagacgcaccgccgcg

SEQ ID NO: 572375 - DNA, 968 bp, Homo sapiens
  misc_feature (495)..(495): n is a, c, g, or t
cgcggcgccgagcgagccgaggcgaggtcccggggagggcgcggcggcgcggggcgcaggggcggcgcggtggggccgcgggccgggcgggtgggaggagagcgcgaaggggctgacggcccgtttgcatggtgccgcttcggcccggggaccgcccgtcgccccgactcagtccttgacatagccccggcgcccggagcattctcccgtggaggaacggatgacaaatggagcgattcagtgtccagaagggctcccaagagagccaggacgtgacgcatgccatgtcagagcttggtgccttgatgcccagtgccttaagcacagcggttgccctatgaaggcccattgaggcatcaagttccaagcctgcttgggcttacatcgggcatcgagaccattcatcagagcagattgcgcgaatgaagacgcattgaagaccgggttatcgaacttcaagcatcagtggtcggtatggccacgagttggacctgnggcaatatcaaccgcgtgagtcaaacgacggcttcttcagaatcccaaagttgagcccggcaggggctctccatgctggaaaccggggaaggacaggaagattcccgaaggaccatgttggagatttcaaagcttatcgtgggcaatgttgatcagaggaacggcggtgttcaaaacatgaaagctgaccggtcatcgacaccccaggcttttggagacccaaatcaacaattgaaaactgcttgggagcccattgaggaagtacaatcaattgaagcaggtaccgagaaagttccctgaaaggagggaggtcaaccatcggccaggaacgaacgggattcccttgaaccactcgtgtcccactggctggccttttacttcaatctgtacccacagggacacttccttgaggacctccttggattcttggcggttcattgaagcaccttcggcaaggttgtgaaccattatcc

SEQ ID NO: 572376 - DNA, 112 bp, Homo sapiens
agtactcgggccgggatcgagacctggttctagacctacggtgccttttgctgccttcaattaattttatttttctcccatttatttcctttccagaaagttaaacaataag

SEQ ID NO: 572377 - DNA, 1328 bp, Homo sapiens
actagttctagatcgcgagcggccgccctttttttattttttttgggcttgaaccaggatttaaaaatctgggaacggtgaaggtagacagacagtcggtgggagcagagcatccccacaaagttcaaccaggtggccgaggacttgcgatgtgcccattgcggtggtcatactactactagatcataccaacatatgaaaagtgcattgtgatctacaggaagttccctgacacatccataaaagcacaccccacattctctcataaggagaaagtggcccagtccgtctcccaagttcacacaccagggggaaggggtggaacttacacccaattggcgtataccgggtgatcaactgtcatagtgctaacagtgccacaaactcttactaacacactcatgtaccgccataaacaatacctttttacaacaccttctggcataaacagctagcgggaacgtgagtagacccacattacgggaccccccacatatctaccaccacatatattgatgagccccgcacccacagagctcgcaaacagcggtcgtcaacagcggctctatgggaacatccacgggcaaaacggaggctgagaaggacaagccaacgggagcaataacaccagtgcaacacaacccaagaacatcgaacaacaacacggagcggaaaacaacccagagggagcaaccgacctgataacacaaacagtgcaaacacaaaaaaaaacaaaaagaaaaacaaacaagagggacaacaccgacgcacaacacaagagactacaccacccaccacaagaggagcgacaccaaaaagaaaatccagccagactgacacccaccgcaagaaggcgggacaaccacacgggacgggaccacacatacaagagacgacaaacacgagcccccatcaaccagcagcgagaccaaatacacccggacacaaagacacccaccacaacactaaaaacccgacctcggaccaacacaaaaggccaagacccacatccgcaacaacacaagagggacagcaacacacaccacaacaacacaacacagccgcggcaggagagcagaaacccaaaaagatgagccaggacacacaacagccaccgaaaagacacaaaaacaacacccgcacaacagcaagaaaacacagaaacaacacaacacgaaacgaggcaacaaacacggcggagcaaaaccacaacagaagcaaacacggaggcagcggcacgacagaacacaagcaagagccacaaagggaagaacacagcagagagaaacaaacaccatcaaacccagagcgcgcaacacaaagaacca

SEQ ID NO: 572378 - DNA, 256 bp, Homo sapiens
acagccatatactcagcatgagccacgaatatcagggacgagacagatgtcaatgtacagcatccccatcaggtcgtgaaaagctgctgctattggagtcaaatatgaaggtctccataatgttcttttggccactctggtccagaagcatcagggtcaccctctgcctgaatggccactgcaacagtgagtcgacctctcctcgcatgaccacaaagtataaggacaggtgtgactcgtggaaatgtccacggat

SEQ ID NO: 572379 - DNA, 1075 bp, Homo sapiens
gcggcctccgtgtcctcgtggggactcgcaccgcctgcgctactagactccgacttgttacagatccccctgtagacatcggccatgcaggacggtgtcagctgacgagggacttgaagcgtgtggcgtacaggtgggtcaagtgagggactcgtggagaacagccgggatcactaatattagcgacagaatcgtatatcctgaatgaccgaattctacgaaagcatcgcgtgcggccagctcgcgtgtccataatggtgtgagttctttacactgcacatgggtgcgtagaattgcggtcgactgatggtcgtcatttcatagctatctgacgctggaccgtgtgggtgctgctgtatcgaacattaccccgtacctctacagtcgatggcttccatgatgctcaaggtctcggctgcaggtacatattgagactccattgaaggccctcccgagactgacgaaggggtgatctcaggcccaccggatccaagaacagtgaaagcatgagggacagaagtaagggcctcctcgtggcatcctgcctggcacaaagtgcagcaggccggaggaggtgactcgtacaaacgtagtcatgcagtccttaacgacgaggaatgcgtagggcccttgggctgagatgcaccctcctggatgaataaagcctgtggtttgatggaaacattcacaaagtgaggcattatcacgtggaaatgagacaaggatccgagcggtgatggcctcttggcttcacagttggcgggccagtgcttccatatgtgagagaatccagtaagaagacatccaggctcaggcagccactccgagcaccgccgggggtctgtccctgtccacagagggtaagtcgggtgtctgcaatgggtcaagctctgcggcgccaactggctgagagaggtgccgctgagcacaaacgacaagagcccaagacgacgggtttataaacgcatgtactaaatgcgcattgattccggtcacccaggggtcaggggtgagttttaaccctcgacatcacttagaggggtcagcagtgagagaaaatctaccgaacagttca

SEQ ID NO: 572380 - DNA, 262 bp, Homo sapiens
tgaaatcagcttctgttggtttgcggttgtgtttggctttgtgtgaggccaaggcaggcggttcacgaggtcaggagattgagaccatcctatctaacacgctgaaaccccgtgtctactaaaaatacaaaaaaattagtcaggcgtgatggcaggcacctgtagttccaggtactcgggaggctgttgcattagaatggcgtgaacccggcaggtggagtgtgcatttagccgaaattcctgcactgaacttcagtctggg

SEQ ID NO: 572381 - DNA, 532 bp, Homo sapiens
gggaggattgcttgagcctgggaggtaaaggctgcagttagccatgattgtgccactgcactccagcctgagtgacagagggagaccccgtctcaaaaaacaaaacaaaacaaaagaaaaaaaccttaaatggaatactaacatatgaagcagattaagcctttttgcatatttataaattacaattataattatgataggcttataaatataaaactaggtacatagtcttaaaattgtctatcaaacatttattgattatgagctttgtgtcaaacattatgctaagtactagagttgcagtggtgaacaaattagcccctgcctatggtgaacaaattagcccctgcctatggtgaacaaattagcccctgcctatatagaactatcctcctttcttgttttgtcataaaagaggtatctctcctatcttaggccaatacctgtgcttttatcttaatgcttcccatttcagaagcctgaaaactattaattacccctttcctttcttgtgtaagaatcaacattttcc

SEQ ID NO: 572382 - DNA, 1175 bp, Homo sapiens
  misc_feature (873)..(873): n is a, c, g, or t
  misc_feature (1008)..(1008): n is a, c, g, or t
ggccaacatggtgaaaccccatctctactaaaaatacgaaagagagaatacaaagaattacctggggtgtagtggcgggcgccctgataatccgtagcatactcgcgagaggctgaggccagagaactgtcttgaacccgggtaggcggagggtgcagtgcagctgagctgacattagccagcatctgcattccagcctgggcgatcagatgcgagactccgtctctataaaaaattagaacaataaatatttccacagatcgcagcccaccagaatataggggggagtctggcattgatcgcaggatgtcaaaactgtcctgcgacgaaaggattattgcatgcctgcacaaagtggtcctggtcacgttggctaccaaatggctcgggagctccatatccacatgtattgacctattgtttattttactgcacgccctccattagaaagaggacccttccaggggaccgagacgaactcacttttggtcgccacgaggcaaggaaacctgatgggggcagagagcatacgcatggggagcatgtatgaacgccgcatgtacgagggggctcatgccgacacccgagaaaggcggatagcgccgcgcttgaagccacaaaaggactgtttcgcgtagtccttgcagaaatgcctccactgcatctaggagcggtctctaccccagcgaccgctgaccacctataggggggcgacacaaaggcaattccccgtgaggaggtgggggccaacgggaaaataccgctaggcgatatgccagcgcgaatatgaatagacggcgctcccacaggtgtgaggaagcgcggacccagaattggcccatgagagcctaaggggccgtggcatgcacatangggcggggcgatattgtcgtatatcacctcggtggtcagcttggtaaagaccatttctgtcttgtctgccggcaacagacacgcccttgtgtaccctttctccattggcggtacccggagtaaaaaacccgcgcnagccgatgatactagtttcccactccagggaaggtgtacgtccaaggtggtgcccatatggacacagccgctatataacccaatgggtgtgcagaaccggatatcgtgcccacagttttatctcccttacatatactaggagtcccttccccccgcggtacggatct

SEQ ID NO: 572383 - DNA, 202 bp, Homo sapiens
ttgggaaagagcacatgacttgggggctcaggtatgatgtgtgggccacagacacggaccaggtggaggcaacacagtcctcaggcttctgtctctgcctctgcctcctctcgcctgtgtgacctcatgtcacgcgagtgcttccagaccatgttgcaacaactggagtcctacgaacgcatccgggggctgtatcactcct

SEQ ID NO: 572384 - DNA, 220 bp, Homo sapiens
cgggagcccacgagtgaaggttggcaaagctgccctgacccgcgacccaaagccccgatctgcctccccaaaagcctcgtgaccccgaggcgcgtcccacctctgggcctggcgcctagaatatttaggccaggtaagaggaagggctaaattggggaaggggccggggtcgctgccctcaccagtcctggtggtccaggcaccaacccatggcgcccaa

SEQ ID NO: 572385 - DNA, 1048 bp, Homo sapiens
  misc_feature (7)..(7): n is a, c, g, or t
  misc_feature (72)..(72): n is a, c, g, or t
tctgggntcagggatgtccccgctcctgtgtcgcccctggcacctgctcgggggcgcccctaactggactgngctaacaggaggagcctgaacccgcgcagaaggggagccggggccgagcctccgggcctgaatacgggccagccgccgaggccgccagagcagggccgcctggtcccaccggcgtcgctgggttcttcggtgcttctggccgagcaggcggcctacttgggcagggctggacgctgggacctggagctgccgccgtctcttcaaagccatgataccccctcgtgggaagaaggaccgacgcgcgagtcgcgctccgcagtcgagccgggaggaacccaggctgctgccctgcccagcccgaccctgccccggccccgcttccaccttgcgcatttggtactggcttttgtgatacttaggaaccctggcatcttttctatattatccagtgtgataatcttttcacgttttatagagcaaagacagagcagttactcttcatattgcaatatctgtgtttgactaggaataatagtatttttatggaacatttacaaaattatattttttaagaaaacaatcaaaacaagcattgggggattggggcaaggatggaaggagcagtggggcagctgccagagctcaggcgagccatggggtctgctgtggggtctgccctggccacccactgtgtgtctgggtccttgaggtttgtacgtttctctttgatgaccaggaagaaatcccagcaccccagccacaggctgtggctgctcccagcagaggcggggccggcagagaaggggcctcctccacccagagtcctggccttggcccgctgtcaccttcaaagctgactgtgccccgctgcgggaggggacggcaccccagtggtggcagagcttgggggcctgggcaggggcccgcttggcgggccgggcaacacgtcaacattcttttctgttcttggcattaattattgctgtctttttttaaaaaaaaaaagtttaaataaaatgtctcagagcatctctaa

SEQ ID NO: 572386 - DNA, 476 bp, Homo sapiens
  misc_feature (8)..(8): n is a, c, g, or t
  misc_feature (16)..(16): n is a, c, g, or t
  misc_feature (91)..(91): n is a, c, g, or t
  misc_feature (100)..(100): n is a, c, g, or t
  misc_feature (330)..(330): n is a, c, g, or t
  misc_feature (376)..(376): n is a, c, g, or t
  misc_feature (460)..(460): n is a, c, g, or t
ttccccgngagaccancttacataaattaagaatgaatacatttacaggcgttaatgcataccgcttccaactcaaagcaagggacagccnggggtgttntggccaaagacatcagctaagaaaggaaactgggtcctacggcttggactttccaaccctgacagacccgcaagacaaaacaactggttcttgccagcctctagagaaatcccagaacactcagccctgacacgttaataccctgcacagatcagaggctgctggccacacagactcaccaagccacagacttgtcttccgcaagcacgttcttaccttagccacgaagngaccaagccacacgtactaaaggttgaactcaaagatatgtacagngtattaaacaaataccaaggggaacagttaacttcaatacaaggtcaaaatcagcaacaagttctacaatccagtgctgatatnagatacaagcttcaag

SEQ ID NO: 572387 - DNA, 224 bp, Homo sapiens
cacgaggactgatccaacccggtgaagattttttttccggggaggttaggcttacttccgaattcgacaagatatccaccccctccagtacgggagttccaaggcacttgttttccagcatatcagcctaacctcagtgccttgaaagatggctttaagcctttgacaactgagatttcccgaaaccacaggcccttgccccagggggttctccagatccgggt

SEQ ID NO: 572388 - DNA, 318 bp, Homo sapiens
  misc_feature (6)..(6): n is a, c, g, or t
  misc_feature (63)..(63): n is a, c, g, or t
cctttngtcctgcctgaaggtccaggagcaaatggccaactgccccaagtttgtccccgtggngcccacatcacagcctatccccagcaacatccccaacagagtcctggccttggcccgctgtcaccttcaaagctgactgtgccccgctgcgggaggggacggcaccccagtggtggcagagcttgggggcctgggcaggggcccgcttggcgggccgggcaacacgtcaacattcttttctgttcttggcattaattattgctgtctttttttaaaaaaaaaaagtttaaataaaatgtctcagagcatctctaa

SEQ ID NO: 572389 - DNA, 785 bp, Homo sapiens
  misc_feature (7)..(7): n is a, c, g, or t
  misc_feature (72)..(72): n is a, c, g, or t
tctgggntcagggatgtccccgctcctgtgtcgcccctggcacctgctcgggggcgcccctaactggactgngctaacaggaggagcctgaacccgcgcagaaggggagccggggccgagcctccgggcctgaatacgggccagccgccgaggccgccagagcagggccgcctggtcccaccggcgtcgctgggttcttcggtgcttctggccgagcaggcggcctacttgggcagggctggacgctgggacctggagctgccgccgtctcttcaaagccatgataccccctcgtgggaagaaggaccgacgcgcgagtcgcgctccgcagtcgagccgggaggaacccaggctgctgccctgcccagcccgaccctgccccggccccgcttccaccttgcgcatttggtactggcttttgtgatacttaggaaccctggcatcttttctatattatccagtgtgataatcttttcacgttttatagagcaaagacagagcagttactcttcatattgcaatatctgtgtttgactaggaataatagtatttttatggaacatttacaaaattatattttttaagaaaacaatcaaaacaagcattgggggattggggcaaggatggaagggcaccccagtggtggcagagcttgggggcctgggcaggggcccgcttggcgggccgggcaacacgtcaacattcttttctgttcttggcattaattattgctgtctttttttaaaaaaaaaaagtttaaataaaatgtctcagagcatctctaa

SEQ ID NO: 572390 - DNA, 878 bp, Homo sapiens
tgggtaaaaatgggggtctcgctatgtgggccaggctggtctcaaattccgggcctcaacgatcgtcctgtctcggcctcccaaagtgccgggatgacagggcttgagccaccgcgctcgggccccttcttttggaatggggcctccttgcgttcccgtttcaatgccccgtgctacttttttggggagccccaaggctgtactggtttggattggactcctttttttctcccctttcttttaaacctaaatttaaagcgtgccacgtgcaaagccccgccatgtggaaaacacgccgctggggtgatatcgaagcaaaaaacggagggtggtgtgcggggtccccacccagggtgggtgtgttacgggccttctcgagcgagttcacattccgtgggtgggtgggtgacccagtttggggaaagaatgggcacccgtggttctcccgtggaagcccagcagcgtgtggccagttgacgtcagcaagccgtggtgctcaccacaaaagtccttcgtggggcaggatgagcctctcatccagtgtcttggcaaagaaaccgggtagcgttgggtgtctcaaaaagcggtggaaacagagcagtcctcctcgccggtggccgggaaaggacaaaagcttggaggggctaaaggcgctagagggaggtaacccgggtgtgccaggtgtggtgacctggaggcagccgccccgagctgctcagcaggacacgtgaacacccaaaaacccactcagggactcaagtctacacctccctccccggtggaggggaggaccttggggcacaagccctgggagccggaaacaaagactcgggtctcaggcaaactctaacgccggtaaccaagatcatctgggcaga

SEQ ID NO: 572391 - DNA, 1208 bp, Homo sapiens
gctgggcactgttgccctggcgactgctccggcgctgggtcccgatggcccggcccctccccgggagtgacggtgggcttcgagtcacgtgaccctgtgccctacgggagggtggtgcggtcgtgggacccggcatggagtgctgtgctgagaagagaggacctgtgggtggctgttctgcgtggctcccagcccgggaccccacccccgcttgtgacagtgggggaaactgagtgcctgagctgggcctgtgcctggccacctctgtcccctgtccctctgcaggcccacacatggaccatgaaggttgcttctcctcacacgggcctgggctggccctgttcttcggcctattacttcggggatgacaaccttcgacccaggcctccagcggagctgcgagtgctgctgacacgggggccaaacgctggtgtacgcgtgacggacgcttggcctatccactacgcgcggtcttgggctcacaaccatggcttgctcactgacccacgactgagagctctccttgcaaaaaggcggggctgggacatacctcgttgctgaaaccacattcgggcggacagcaccgggaccggaaacgagaagccccgaaggcgcccaggacaactcggcatggactcaattgcaagggtacacgtttgtcggacactacgctcgcaactggaccgtccgcacggggagcgcttgcaccagcccttgacggagcacgcaacggcgctccctgggtggcatggaggtccccatccccttacttcacgaacaccactaccaacaaataccagctacatccaaaatccccatacctaccgagacgtggacaacacttctgccacccttgccacccgccttcacatacagacacccctcacacacacgcacccctagcacgctttccacagcacacgctcgaaacaccgcgatgcgaccgacatcccagccaccatcgatcaccgctatacaagcgacacacataccccgaccgaacttgcaacagcgaccttcaccgcacgcggccgcgcaagccagaggaaaaaagctgtcgaaagctacacgcaagcgcggacttatagggcgagggccaccatgggagcgccagaacggctaggacacgatgtcaccattgcaatacctcacagacgactgcacggagatacgagggcggacgaaggctacataacaagcacgctgcg

SEQ ID NO: 572392 - DNA, 156 bp, Homo sapiens
tttttttcccgttcccctaccagcccccccggttccttagaattagggggtttcggggtgggaatgggcctttaggcctggcccccctccctcccccctggtggtggggttgttttatggtttgggtggggggataaaaataatttccctttggga

SEQ ID NO: 572393 - DNA, 224 bp, Homo sapiens
gcgtggtgtgccccatctgctcggcaatgccctggggggaccccagctacaagagcgccaacttcctgcagcaccccagtggtggcagagcttgggggcctgggcaggggcccgcttggcgggccgggcaacacgtcaacattcttttctgttcttggcattaattattgctgtctttttttaaaaaaaaaaagtttaaataaaatgtctcagagcatctctaa

SEQ ID NO: 572394 - DNA, 304 bp, Homo sapiens
  misc_feature (1)..(1): n is a, c, g, or t
  misc_feature (108)..(108): n is a, c, g, or t
  misc_feature (163)..(163): n is a, c, g, or t
nacgccacgagcaaggagctcttataccactgtctcttcctctgtgattgggggggctccatgcctctagctgggatgatgatgtccagacctgggaggagcccaggnctacccacctctaaacatcagagggcaggaagcaagaaacagtcataggactgcnctggagggtgctggggtcacctgccctcaggctgcagctgcctctgtcctggcacctccccttcccagaggctggtgactgcctcccagccattattggatgggtcacaggttaccgtctctttcagctcaccaagcttca

SEQ ID NO: 572395 - DNA, 102 bp, Homo sapiens
gcacgctacatgaggaggctccctgcagaatcacgacagctgaaggctgcgtatgaggcccgaatggcgcggctagaccccagccagacctgagcaagccag

SEQ ID NO: 572396 - DNA, 242 bp, Homo sapiens
atttttggagaaaaaaaacccgtttatttcatcttgccttttgggtttgagttatttttaaaattttcccgtaaaaattttgtaatattttacttgtaatgaaatgggtccccatgtcctttcctaataccaggccggatatgtgggaagaatatgtcccattatttgattaaaattttttccccctgccctaaactttcagtgatttgtgggaaaaataaataaatgttttcccccccgga

SEQ ID NO: 572397 - DNA, 800 bp, Homo sapiens
  misc_feature (175)..(175): n is a, c, g, or t
ggattctgaggctctttgcaatggctgtagaaaacggacagatgctgtaccctatggataaaggtaacctcaaggaagatcagtcgcgactattagaaggtagttgccaagtccacttggttcgcccatagtatttccagtacgactggtggtgttggcgcagtaaacttgcggntgaaccgaatcactggtacttgaacttcgtgaagggcacagtagagattgagaatctgtatctattacggaatgcctaaaacacatgaacagactaatacgatactgtgagtcgatgcgcacccaagtcatatgcaaggagacagccaaacgctactgggcatggtaccaaaactgcttttcgtgtgcaaaaccccttttctattaaccaattagtaccctagagattaatctcgcccaagagtaaaataagagatcaatctcgaaaattcatgcgaggctggaacccaacccgttgaagtcagcggagtaaaattctaacctaggattggccctccaaaggccatctgtggtcccgtcaattgaaagggaagttccgctgaatgaccgtattgctacgagcgcacacacgaggcatgacacgaggatcctaattcccaataaaaggggagatgacaacaaaactcggtcgacaccgacccttgggctttcattccacctccatattgcctaaataacgaagaacggtctgtgaacccaagtctttgccctcccgtagggccaaattgggaagccgtgaacccttgtgaaatcactccaccaaggggaagtgacactcgaagcct

SEQ ID NO: 572398 - DNA, 163 bp, Homo sapiens
ttgcgaacaatatagagtgctgaacgggtacattctacggggataatgatgttattattatcaatggttttatacgcatcatcgtattttcaaaaaatcgatcctcttttttatcagatagataggcattaaatatatgtggtgccatatcccaaaactctct

SEQ ID NO: 572399 - DNA, 165 bp, Homo sapiens
actagtgtcatatttacgaagctcaaagaaaagatgtagagtaacatccttcagggcacacctgttacatgaatcaccacctttctagcacaggggtatcaggatcttgtgcaaaaatcaccaccggagacattaggatccctgaaaacaactgcctcactcact

SEQ ID NO: 572400 - DNA, 155 bp, Homo sapiens
cctcgcattgcttccttttttttttttaaaaaattaatattattttttttaaattggcaacataatataatattactagtagaaacccgacagcttcgccagccgcaaataattatttcattgggccaatattattcttcctaaatatttatctt

SEQ ID NO: 572401 - DNA, 979 bp, Homo sapiens
gaggaaggcgttcgcgctggttcagagatgatgctgagcactcttcttcctcatatcaatgtcctggcagcaaaactcattggagtggtcgatgaccgcaaatttcgcatgttctatgagaagcgtatggacatggaagttgttgttgacgctctggttgacgaatggaagggttatgtgcggtgcgaaatcaaggtgggtgttgacactgaccagagcaaaggttatcacccatgaacgcagagggtgtcctgtgaacgcaatggcactgtagtcaccgcctgttgaaggtgatgttaaggcgggcgactttctctggtaatggagactcaaggaggacatgtggataaattgacatcgagatacttcagttctgtggctcgcatgtgcgtggtgcaggagtctgagcgttctcaacattgcgccattagtgtatgaacggatcgacggataattcctagtgtactagagttgcattctaaggatctcgtctcgcgccggcgttgagtccctcaagaaagttgctcaagcatgtaaatctcgaaaaatatctttgttcgatcctctgctagaatgagaacatagatagtcccggccattcatcgtttgtcatagagtggagcttttttactgaagacatcgtttccgaacgcgtaggacctaaatcgctactgaacgtatgctaggtcgtgcattgttactactgctgtagtacttgggatgcaacgaaccgggaagtcccgctaattggatctgaaccaggcagcgtacgcagagcacgatcgcgacggcaggctgactgggagtatgctacaggttgtgggcgacgcacgatgactgacgcttagggccaacgcgccgggaacatgtggacgaaatcgcggatgttcgtcgtctgcgaggttttcatcctaagctgcacggtctcagagagtggattttgctccccaacgattgagggccgggacagaggaacttg

SEQ ID NO: 572402 - DNA, 115 bp, Homo sapiens
gtaggaggacgcggtggaatgggcgctcggagagcgacggtcgcttcaataagcctagtggacccattggatgaagggcccagatctttgatctaggcccaacctttagatcccc

SEQ ID NO: 572403 - DNA, 191 bp, Homo sapiens
ccctggtcttcagtagatgttgctaaggagggagttggtggggctcagggaggttaggtgaggacaggtggatctggtgtctccaagctcccaggcacccctacagctcctcttcctgctcccgccaactcctcctctcacttcgtccccagtcctctgccacaccccaaagcccacaaacctgcccagtg

SEQ ID NO: 572404 - DNA, 258 bp, Homo sapiens
  misc_feature (207)..(207): n is a, c, g, or t
acatcaaacccctccacacgctcgcccgcccgcgcgccggacgcagcaatggccgccctcgccgcctccatggccacctccacggccttcgccgccaagccgcgcctggcccgcccgccggcgcgcctctccgtctcctgctccgcgtccagcggcgacaacaacaccccctccctctccgcctccatcaagaccttctcggcggcnctggcgctctcgtccgtgctcctctcctccgccgccacctccccgccgccg

SEQ ID NO: 572405 - DNA, 1731 bp, Homo sapiens
  misc_feature (672)..(672): n is a, c, g, or t
  misc_feature (761)..(761): n is a, c, g, or t
  misc_feature (1188)..(1188): n is a, c, g, or t
  misc_feature (1344)..(1344): n is a, c, g, or t
ggtgtgctttgttgttgttcgggtgtgtgttgttgccgtttgtttattgttttgttgtctgcttgcttgtctgtttttgtttttctctctttctcttgctcttttcttctgtgtcttctttttctttgttcgtctctttctcttctgcgtttcttcgtcgctgttgttctcttggtcttctctgtgtctttgttttctgtctgttttctgccttctttgttccctatctcttctttcttcctgtcgttgtgttttctctgtgtgtctggcctttgttgtttgcgtcttgctcgctcgttctggctctgctgctcttgccgcttcctcgttcgctcgccgtttcatcgccggcgtctcgctctctcttgctcccgctctctcgtccgcgtcggtcgtctcgtgcttggttctgtctctgtcgcgtctcgtcctcttcctctcttactcgttcggtcttgtgttgtgtccgtctgtcgcgtggcggtctcgcgtctccgtcatgtctcttcgtcgcgtccgtgctctcggtgtcgctcttgttgccctcgcgtcgtcgctctgctcctctctgtgtctttggttctggttgtcgtgtgtggggggttgtttctgtttgtgcgttttgtgtgtgtgtggtttttcttgtgtgtggtggtggcgttgtttgtagtnagaggggggagcggaggggcgtcgggggggcggacgaggccgccgacggcgcgggacagcgcagagcgatcctttcgttttgtgcagtnctcgctgtggtggtagacttacttggtgtgccgctcatcgacagaggtgggggttcgtccctcgtgtggtccgcgctcgtgttctacttcccccgattggtggcggtgggaggctctgccacgaaggtgtgtccgcgccctcttcttcttgggtcgcgggcactcttctggagtctctgtgtggggcgctgggggccccccttgcggtggcggcccgactatttctttctccatccaggtggttgtcccgagagcgcgcggccgctgtggtttgtcttggggagagccccctccccgtttattctcccttgtgggggggcgcgactacaccactgttggggaaagaaagatgtggtggtccgccgcccctctgcttggggcgtggccatccaaaaggtgggccccctgtcgcgccgaagtgttggcnccgccccgctttggtgggggagcacttctcgcttcgaggacgccacactgttcgcctggtgagtggtacgcgcacgcggtgtgaacaccgcctctctaaagagaatttgggtgggagcagccacacgtggggcaccagacagtgtgcgcggccganagaaatgtggggggcgccccccgcttgaatctctgggtgctttgtgcgacgcgaaatatatctctctctgttggacgaagacgcaccaccccccctgtggggacacccccggtgtagatatgaagtgtataagaccttatatactcctctggcgcgtaatattgtctccgccgatatgacgcctgtgggggttacatcttctccctggggctcgcccgaaggcgcaccggagacgaccacttttggggggtttcctgctaagcctcttgttatacaagagtgtgtggtgggccccacaagactcccccgtcttaatgtgttctgttagagttgtgggagcctctctctctctcccacaataaaaaaaattgttggggggcctctcta

SEQ ID NO: 572406 - DNA, 211 bp, Homo sapiens
ttgttgcatgaacatgcaatacaggtatttttccagatcctgatgtcagttcttttggatatacaccaggagtgggattgctgggcatatcgtaattctatttttaatttttttggggaacctgtatactttttccataaatggttacattcatcatacattcccaacctgcagggccccagggttctaatttttccactttctcatcgaa

SEQ ID NO: 572407 - DNA, 175 bp, Homo sapiens
gcgagcgaacggaccaggccagtgctgaatttcactagcagaacctttggaaagaggtgccatagcgggtgacagcccgtatgcgaaagtgagaattcaggacttgagtagggcgggcacgtgtaatcctgtctgaacatagggggacaccctctaagcctaaatactcgtatgc

SEQ ID NO: 572408 - DNA, 1205 bp, Homo sapiens
agaaaaatatatatcaatgttttccaataaaatacagtgactacctgaaaaaaaaaaaaaaaaaaaaaaaaaaaaaaaaaaaaaaaaaaaaaaaaaaaaaaaaaaaaaaaaaaaaaaaaaaaaaaaaaaaaaaaaaaaaaaaaaaaagaaaaaaaaaaaaaaaaaaaaaaagaaaaagagagagagaggcgggggggggaagtatattagtttccgggggagggatagcaggaaggcgccagtgtgagaaggaagaggggagcggagagggatcgagagaggaggcggtcagcataacatatgatagacagagcaaaaagagagaggagagagcgaaataaaatatcagacacagagcagagaagagaggcaggagagagcaagacaagaggcggaagaaaacggcaaaacaggagaagaaaaaacacaaccaaatactggggtagtcgggtagtggagaggcgggcgacagcggtgtgaggagcgaacgataatcaccacgagaatagaatataataacaaaataagagtaggcgctatccttccctttatttcgacgacgagcagcagagcggtggaggtgccgggccaccacacagagaagtcacgataagtagggccggaaggatgagaacgcacgatcaaagaggggccgaaaaaaaaacagatagaaaaaacaattaagaagaagaaggagaagataataaattcgacaagaagacgggacacagagagaagaagacgagacaagggacaaagaagaagaccgagaaaacaaagggggcgagagaggcagagggaggcaaaagggaggcaacaagaagggccggaaaagacggaagaagaagggggaggaaggggaaaagacaaaggaagccaagaaagaggcgcggacggagagcacgagggaaagacacacagacaagggcagagaagagagaagcgaagaagaggagggagagagaggacaagaggggaaggaagcagggaaaaagaggacagaaaaggaaaagcaggagcgagaacagagaaaaacacaggacaaaaaaatagaagagaagaaagcacgacaaaaagagaagaaatagaacgcaaaaagcaaagaaggcaggaaaagcaaataggaacaaaaggcgaaaggcggaagacagggacaaacagagggggaggaacagagcaaaacagaaggtacagaaagaaagcag

SEQ ID NO: 572409 - DNA, 592 bp, Homo sapiens
cccttggggcctaagtttaggaaggcgggcctgaaatccacgagacagaaatgtctccaagccttccaaccggatattaagtcctccactttggaaggagggcaaccgttgggcccaaaacctggtggaggttatggccctctaagcgaggagttcagcaaaggtgatcttgtttccaccaaccatggcgtcttcccaagtactgtaaaaagtccttcttctgtgtaggaagttcctccaagtattctggcggcagtttatcaaagcgagggctgtagcagactctggccagttgattggagacgtacatagtctggttctctaaaatgtccgctcgaatcttcacgtattgtgtctcgccacacgtgatgtgcttgcgggcaatgtagcccaggatggcgatgctgtgggtgatgttgtcatcattcagccactggtttctgtcatagtcaggagcgtcccccgtcgaatacttcttttcctcgtagcatgagtctgtgtattccaggagcaggtgcatggcgtaggccaggctgtgtatgtcccagtaccccagtgtcatgtacatgatgctggttggtgtcgattgagc

SEQ ID NO: 572410 - DNA, 1073 bp, Homo sapiens
  misc_feature (339)..(339): n is a, c, g, or t
  misc_feature (413)..(413): n is a, c, g, or t
  misc_feature (434)..(434): n is a, c, g, or t
  misc_feature (610)..(610): n is a, c, g, or t
  misc_feature (617)..(617): n is a, c, g, or t
  misc_feature (651)..(651): n is a, c, g, or t
  misc_feature (690)..(690): n is a, c, g, or t
  misc_feature (699)..(699): n is a, c, g, or t
  misc_feature (709)..(709): n is a, c, g, or t
  misc_feature (713)..(714): n is a, c, g, or t
  misc_feature (731)..(732): n is a, c, g, or t
  misc_feature (735)..(735): n is a, c, g, or t
  misc_feature (745)..(745): n is a, c, g, or t
  misc_feature (773)..(773): n is a, c, g, or t
  misc_feature (779)..(779): n is a, c, g, or t
  misc_feature (830)..(830): n is a, c, g, or t
cgcgcaggaccgctgaggcgggagccccgaatgcggttctcgcttgctgcgtggcggtaaaggaccgcagtgtcgtaaaagggccgcagtggcagcgccctggccgacggctagtagcccattttggataccgtcctcgctgcggaaagttggggcaacctgttgctagtctggtcgttggtgacagcgaggcttccgcgctcgctgctggtgagcagccccggcgtgccccgcgggctggaagaggcggcggcgtgatgcggcccgtggacgcggacgaggcgcgggagccccgcgaggagccgggcagcccgctgagccccgcgccccgcgccggcngcgagaacctggcctccctggagcgcgagcgcgcccgggcgcactggcgggcccgcaggaagctgctggagatncagagcctgcttgacgccatnaagagtgaggtggaggcagaggagcggggcgcccgggccccagcaccccgcccgcgtgacggaggctgaggagcgggtggctcggctgtgcgccgaagcagagaggaaggctgcggaggcggcgcggatgggcaggcggatcgtggatgctgcaccagcggatcgccggctgcgangtgctgnctgagccggcgaggccgcgcgggtctggagcggnacgcgggcggggagtgtcccgcgtggaaggcgctgggtnagcagggangggagcgcanagcnngtgccacgttctccgcnnganttggtttcanttcttttggccaactgacgaactgtgtncacctnataaggagtcgtggtgcttggacaggctcaaaccaagagagcctttcgttngtctcccctgtttttctgcctgcgttttctccacatttaggcactcaattttccaggtaacaatcctggcgagaattacacttcagcacttagatgggccacgggtatttcgacatacatagggcgccttcggttggacaacaaaaggcttcactaatgtccccggaaacgaacaatgggcgacaaagacagtaccgcggacgagacaagggcgggaccaagatattcaaagagcgaatacac

SEQ ID NO: 572411 - DNA, 1884 bp, Homo sapiens
  misc_feature (339)..(339): n is a, c, g, or t
cgcgcaggaccgctgaggcgggagccccgaatgcggttctcgcttgctgcgtggcggtaaaggaccgcagtgtcgtaaaagggccgcagtggcagcgccctggccgacggctagtagcccattttggataccgtcctcgctgcggaaagttggggcaacctgttgctagtctggtcgttggtgacagcgaggcttccgcgctcgctgctggtgagcagccccggcgtgccccgcgggctggaagaggcggcggcgtgatgcggcccgtggacgcggacgaggcgcgggagccccgcgaggagccgggcagcccgctgagccccgcgccccgcgccggcngcgagaacctggcctccctggagcgcgagcgcgccctgtgtgctgcagctgcgctgtgcgccctgccatgtgaacgcttcgccttgtgacgactccacgatgccttgctctgactgcccatcacagatgtgacgtgtgcgacggccagcaggatgctggcgcgcgccctgtgtgctcctcatgccagccctctgctccgctgttgctgggcacgtgctagacgcgacgcggcggcttggcctcgcgcctttgctgccgccctgacaggcctcgcatgcacggcaccaggccttgccgtgcacgggctgggctcgccgcgcatttgtgtgccagggctgcgcacttcggctgggcaccgccctggccacccctagtcccggggcacttcgcccatgtgccctggcggcaaggttgccctgcccttgtcacgcccctcgggcgggagcggccccggcgtgcccggcggcgtccgtggggcacgcccgcgcagtgcccgcgcgcccgtcgcgccacccttgcttccgcggcccgggcttgggcccacgcggcccgcccctgtgcggctctcgcgcgcccggttcggtccgtgtgccggcaagtccgtggcacgtgcaggccccctggttgtctccaacgggcaccattctttccccgccccgtctggcagtgctactgccggcttctctccagactctgtgccgtttcctctctcctccgcttcgtgcggcctccactctctacgcgcactgcacccgtcgtagttcacacctactcggggaccctaccattggccctcggcaccacggggacacacaaacggcagggcttaccacgtttcgacgcccacaacctattggtgagcaacaccgagtatcctttaccacccacggcgtgcaacccgggcctactggccaccccccatgccgcttggggtcgcattccccacaccttaaccgggctctgtcgcgccccgcggccaagaacagcacacgcgacttgtcgacaccacgccgcgccagcgggggtacacagtttgcgctctgcgcaccacacaccgcggttcggctacgacaacactggctacttggtcaacaagcgcacggcacattttgtgcaagtgcaggctcagtctggtcgctgaagctggaacacccgtcctctccagccttgccaccagctcgcttccgcgaccacacgccccaacttattgtgtatgacacacacacaacaccgactggctgctaatgagtaggggcctaattgtggctctcattggtcaccataccccacgaaggacattattgtacagcacaaccaactctctcgaccagcctccaacacagacaataactctgatacgctcggaatatgagcatctaaacttttccactcccccacccctatctcgcctcatcaccccatgcgaccccactgtgacgcacacagtgtggatttagcaccacgtcaacacagagcactaatatcctagctcgttcataagtcaaacagagccatctcacgccacccacgcagagacactcatgt

SEQ ID NO: 572412 - DNA, 108 bp, Homo sapiens
tactaggggttcatcgaatggtggtgaatgaggtcagatggtggacggtctgtctatcacgatcatctccatggttcttggaggtcggcaaatgctatggcctcctgg

SEQ ID NO: 572413 - DNA, 1010 bp, Homo sapiens
  misc_feature (339)..(339): n is a, c, g, or t
  misc_feature (413)..(413): n is a, c, g, or t
  misc_feature (434)..(434): n is a, c, g, or t
  misc_feature (610)..(610): n is a, c, g, or t
  misc_feature (617)..(617): n is a, c, g, or t
  misc_feature (651)..(651): n is a, c, g, or t
  misc_feature (710)..(710): n is a, c, g, or t
  misc_feature (716)..(716): n is a, c, g, or t
  misc_feature (767)..(767): n is a, c, g, or t
cgcgcaggaccgctgaggcgggagccccgaatgcggttctcgcttgctgcgtggcggtaaaggaccgcagtgtcgtaaaagggccgcagtggcagcgccctggccgacggctagtagcccattttggataccgtcctcgctgcggaaagttggggcaacctgttgctagtctggtcgttggtgacagcgaggcttccgcgctcgctgctggtgagcagccccggcgtgccccgcgggctggaagaggcggcggcgtgatgcggcccgtggacgcggacgaggcgcgggagccccgcgaggagccgggcagcccgctgagccccgcgccccgcgccggcngcgagaacctggcctccctggagcgcgagcgcgcccgggcgcactggcgggcccgcaggaagctgctggagatncagagcctgcttgacgccatnaagagtgaggtggaggcagaggagcggggcgcccgggccccagcaccccgcccgcgtgacggaggctgaggagcgggtggctcggctgtgcgccgaagcagagaggaaggctgcggaggcggcgcggatgggcaggcggatcgtggatgctgcaccagcggatcgccggctgcgangtgctgnctgagccggcgaggccgcgcgggtctggagcggnacgcgggcggggagtgtcccgcgtggaaggcgctgggtggccaactgacgaactgtgtncacctnataaggagtcgtggtgcttggacaggctcaaaccaagagagcctttcgttngtctcccctgtttttctgcctgcgttttctccacatttaggcactcaattttccaggtaacaatcctggcgagaattacacttcagcacttagatgggccacgggtatttcgacatacatagggcgccttcggttggacaacaaaaggcttcactaatgtccccggaaacgaacaatgggcgacaaagacagtaccgcggacgagacaagggcgggaccaagatattcaaagagcgaatacac

SEQ ID NO: 572414 - DNA, 169 bp, Homo sapiens
gaagatggcggacattcagactgagcgtccctaccaaaagcagccgaccatctttcaaaccaagaagagggtcctcctggagaaacttgcacgagagctccgcggtacttcaagacatcggtcttggcttaagcaaccaagagcatttaggacctcattgcagaatccc

SEQ ID NO: 572415 - DNA, 229 bp, Homo sapiens
  misc_feature (210)..(210): n is a, c, g, or t
  misc_feature (213)..(213): n is a, c, g, or t
ttgaacacaggcttcagaccctacatgtgaggcttctcctgtggaaaataaaccaagcagcatatgccttcacagagtttttattcacatcagtattcttgctttgagttttcactggagagaccatcgcagctttgactgactgatatgctgactaacttggttgtgtcttcagcacaatacgttagtatactattaaggggacctagntcntaggcaccacagcaag

SEQ ID NO: 572416 - DNA, 182 bp, Homo sapiens
  misc_feature (5)..(5): n is a, c, g, or t
cgtangaagctcagtgggaagctgtatctggtggactggcaggagtgagaaggtcagcaagactggagcagagggagccgtgctggacgaggcaaagaatatcaacaagtcactgtcagcttttgggcgtacagggggaagggtacccggagctccggaattccggtaaatcattgggtcca

SEQ ID NO: 572417 - DNA, 543 bp, Homo sapiens
  misc_feature (339)..(339): n is a, c, g, or t
  misc_feature (413)..(413): n is a, c, g, or t
  misc_feature (434)..(434): n is a, c, g, or t
cgcgcaggaccgctgaggcgggagccccgaatgcggttctcgcttgctgcgtggcggtaaaggaccgcagtgtcgtaaaagggccgcagtggcagcgccctggccgacggctagtagcccattttggataccgtcctcgctgcggaaagttggggcaacctgttgctagtctggtcgttggtgacagcgaggcttccgcgctcgctgctggtgagcagccccggcgtgccccgcgggctggaagaggcggcggcgtgatgcggcccgtggacgcggacgaggcgcgggagccccgcgaggagccgggcagcccgctgagccccgcgccccgcgccggcngcgagaacctggcctccctggagcgcgagcgcgcccgggcgcactggcgggcccgcaggaagctgctggagatncagagcctgcttgacgccatnaagagtgaggtggaggcagaggagcggggcgcccgtgctctaatacctacggccgcgtgcctgaggctgaggatgatctaggctcgactgtgccccgaaagaggggctc

SEQ ID NO: 572418 - DNA, 173 bp, Homo sapiens
acacagggtttgcgttttaggcccgcggggactccttttggtttgcggaaagagggtagtagaagctggcgttttgacaaggatggtggcgcaggggggggcgggagaggggcgggcccgggcggttggccaaagctgcggggggaacggtgcggggagggagggggaggggg

SEQ ID NO: 572419 - DNA, 132 bp, Homo sapiens
gtcactggctcattcagagacaaacagcttctccgttcctcctctcagagtggctcaggcccttcctcaccagactctgtcctgagacctcggcggtacccccaggttccagatgagaaggacttaatgact

SEQ ID NO: 572420 - DNA, 230 bp, Homo sapiens
tttggggcctgaactgcctttgcttccccccctgaggggcccctcccttttacccaagattttggattgttgcagggcacccccctcccccatggcattgttcagcaaatatttttcccttcccggcccccctgtgccccctttttggtcccaacgccagccctttatccttcctccctcagcagccaggcagacataacaacaaaactattaaaaggagcttccctgca

SEQ ID NO: 572421 - DNA, 837 bp, Homo sapiens
  misc_feature (340)..(340): n is a, c, g, or t
  misc_feature (695)..(695): n is a, c, g, or t
tctgagcagctgggaaacagtacagaatatcaggcattagattctcataaggagtacacaacctagatccctcgcatgcacacttcacaacagttgtgcttctatgagaataatgctgctgctgatctgacaggacatggagctcaggtggtcatgcaagcgatgggaggggctagaaatacagatgaagtttcccttcactcgcctgctgctcacctccagctctgtggccctgtggttggagaccgctgctcaagtgcatttgaaaggaaccatcccacgccattcttcagagtcatctttactgctgcagtggtcaacttgtagcacccctaagctngcaggacatatgcttcaactggcatttcacaatcaacagtatgtggcagcttgagtcattgtgagctcacttcctggaaatcaccagcatcccatatcccattgcaaggagctcagcactgctccttggataaccaaacctattcccaaatcccatctgtgtgcgtctatctcctggtacccttcctagcatcaattctgtatttgtaggagtccaatcaggagacacaaaccactcaaaagtttaaactagaatgagcaagatggctcacacctgtaatcccagaactctgggaggccaaggtgggtggactgctttgagctcaggagtttgagaacagtctgggaaacatggngacctcgtctctacaaaaaacacaaaaatcagctgggtgtggtggcacttacctgtaatcccagctactcgggaggctgaggcaggagaattgcttgagcctggcaaatggaggctgcagtgagcagaggttgtgccactgt

SEQ ID NO: 572422 - DNA, 877 bp, Homo sapiens
tagggaggaggctggcgccaatcggacaggggcctgctgttatctacaagcagagcgggctgctccgctcccaggctccgcctctgctgctgaagtactgctgcgcactggcactgccaacggcttccagatggtcaccagcggtgtacatgagcaaggcccgtgagtgactggctgattgccagcgtgaggtggcggtgacgtgtgctgtgcggtattgaccttcccaccatcgtcatcgtggcccactacgacgcctttgagtggcccctgtctgtcgctgggcgcggactccaacgggacggctgtctctgtgctgctggagctggcacgcctcttctccctggctctacacctacaagcggcacgcacgccgctacaacctcctgttctttgcgtctggaggaggcaagtttaactaccaggaaccaagcgctggctggaaggacaacctggaccacacagactccagcctgcttcaggacaatgtggcctcgtgctgtgcctgacaccgtgggcccgtggcagcagcctgcacctgcacgtgtccaaggccgctcgggagtggcaccctgcagcacgctttctgcgggaactgagacggtggccggcgcaccagtttcccctaaggtaccggttctccattggtgcacacacgccggatctacctgcgggggagtcctggcctgtgagcacagcgttcgagccaatccgccgaatgccggccttaggctgtccagccttgagagccacgtggacggcagccgcaggagcatccatgacgtcgcgcccgggtgatctaagaccctgacccgtaacaggaggattattggaaggcctcactcgagtattacaacctgacagagagggaacccga

SEQ ID NO: 572423 - DNA, 854 bp, Homo sapiens
gcgaggggaggcccaggaagggggcggcgagtcgtgcgaggctgcccttctcactcagcattatggatccaagcctgttgagagacagggagctgttcaaaaaagagctctttctactcctgtagttagacaaaacgtcagcatctcctgagtcatcatcatcatcgtcaacagacagaggaaaacaacaggtagaccatggaggatcgtcgagggctctaaacaaaaattctgatcatagcaatggatcatttacccttgaacagctttgtcaggaagctcgtggattaataacaggtctgggtgtcctggctaaccgattggtggacattcaccatgactgaccagcgccatcagcgaggagataacgcatcctctaaccttcagattgccacatttcgtggattgaaacacaaacatttaggattatgggactcaccgcagacacccaatggttaatgactggagggcttttagtccaacaaatcccaaaatttgaacgtacactaggatgggaagttatgctttcaaggccagttacaaccggtgggacgataaggaagggcctaactttaagcgctcttagattcaagaattgaccaagcgacggcatcagggaagcgaattcttcttaagaagaaccttagaagaaagcattggcccaatttcccaagaaagctggcgcacggcttttgggggacccgatactaatttgtacactcgtcccgataaggaagaaaatactttccttccatgctcagcagcggccgttctgtcgcttgaacacctcacaactgcgggcgggtccgggattccctggccggcactcgacaattgacggccaggattccagg

SEQ ID NO: 572424 - DNA, 516 bp, Homo sapiens
ccctctctctgtcgcccacacacactctttcccacacgcggggtccccccgccggcttatatggttatagtggcgcccccccccgcgccccgctcggcgagagtgtgtctgtcgaccccacgctctcctccctctctgagaggacactcctcgtctctctgcgcaccagaacactcccccacttgttgtcccccctcctggggggaggccccccttcgctaggccagcgcttgcttcccagggctggttgtggcccggctcctcgtcttgtcggggtataccatgtggggcgccccacgcactgcccctgtttgtgtttttttttcgcccctcccgtctgtcccccgccacagtctgttctatgggagggtctctcacttggagagacctctcgcgtgtgttacatctctctccgcgggggtgtggcccacccagcgtgatgccccccgcgggtgtttttggctgctccccaaatagaaagccgccctcttggccccaccaccaatagaacaaaac

SEQ ID NO: 572425 - DNA, 265 bp, Homo sapiens
gtgaatttaaaggtaaagttcttgaagggaaattaaaactactactccagtaaacatgtgaattataagaagtaaaacaaccttattgctgataattgagaaagtttcagtggtctggatagaatatcaaaccagccacaacgttccttatgccaagcctacccagagcaggccttgctctcttcagttgtattaagctgagagagttaggagctgcagagaaagttggcagtacaaggtggttgcttattaggttaggaaatgc

SEQ ID NO: 572426 - DNA, 458 bp, Homo sapiens
  misc_feature (298)..(298): n is a, c, g, or t
  misc_feature (433)..(433): n is a, c, g, or t
  misc_feature (439)..(439): n is a, c, g, or t
acagttcggatcttagtccacttagtctatcttagtcagcttgggctgctataacaaataccatacactgggtggcttacacaacagaaacttacttctattaaaggttggaagttcgagatcaggatgccagcattgttgggctctggtgaagtctctctccctggcttgccaatggccacattctcaccctctcactcatgtgtcatcacttgatgccgagagagagcaagcaagctctctggtgtctcttcttataagggtactctaatcacagcatgagggccctaccctcatngacctcatccaaatctaaattgccttcccaaatcctcatatctgaaatgacatgcacattgggaagttaagggctttcaacatatggaatgtgtgggggaagggacataatttcagtccctgaaaagaagtgtcntatttnccaagggacagtatatttc

SEQ ID NO: 572427 - DNA, 117 bp, Homo sapiens
tcagctcggtcctagaggtttgaactactgacagtcttaaaggtgaataaaaactgttcatactttttatggtgtaaatttcccttgctcgatgtcagtgattcagataactcttga

SEQ ID NO: 572428 - DNA, 667 bp, Homo sapiens
  misc_feature (534)..(534): n is a, c, g, or t
actgaagaatatgtattgaataaaaataatattataatctatcctgaactgaataaaaagtacagcacagtatttttagttatttacaaaactgcgtacagtgtaacttgcgcattgagatcaccattctataaatatggccacataccaagatgtgaacatattcctgacttatataacaaaaggctcacgttggctgccacaaactttgaatgaaaattcacgggaacattgctttgggaacatgaacaaaatgcaccacattccatgaaaaaacgatttaataaaatacctcaaacagcacttttctacttgtttaggagtacactcttgccaaagtagcacaaacaattcatagcatgctttgaaatgcggacacaatgtgaaatgaaggccgctactttgatgatatcacttacctttaccttacttagctagagagcatttctttccatgatagaaaggatgggtgatagaaaatgacctatcctaatacatccaattgttttaagattctgctaaaacacaaaagcntgtgaatttgtaacctgacacactttattaacactgggcagaagaggcattgtacaaaggtattccctgggtaaagggactatctagaatgtcttaagattaagcacaaaatcagcttcaaatagatttaagg

SEQ ID NO: 572429 - DNA, 541 bp, Homo sapiens
  misc_feature (32)..(32): n is a, c, g, or t
  misc_feature (115)..(115): n is a, c, g, or t
cttaaatccgaatggctaacctaaaagcaaangccgcttgctcccgaaggcctgcgctcggaaccggcttccaccccacaagccgcctccgcggcacctccgccccaccaacttnatttcctctgggccgggttctcacctcccaggagtccccgcgctgagagcccggatgtgagcccaagtggccatgcgcacaagccagcgccgctgccattggtcgctggtgaggaacagattgatgacacatccgaaaaataggaagtggccactacggaagctgttctgggccagaaagacttccagtttggagtcgtttgctgcggggagggaatgaatgggcgctgggaacacgcccgcgaggtggggacgcgccggccgtagcgaggtccttagcgtgtgagtggccggggtcgggtcgcttccccgcagcatggaggacgatgcaccagtgatctacgggctggagttccaggcacgtgccttaacacctcaaactgcagaaacagatgccattcggtttttggttgggacgcatttctta

SEQ ID NO: 572430 - DNA, 221 bp, Homo sapiens
gacgagtgtgctgtatccaggagttcatctcacatgcaaagacacgtgctctaaataaaggaatggaggaagatttaccaagcaaatggaaagcaaaaaaaaaaaaggcggggagtggcaacccaggttctctgataaaaacagaatttataacccaggcgaaagtatcaaaaagagacaagaaaggggcttaccatataaggggaataaaggggatctca

SEQ ID NO: 572431 - DNA, 122 bp, Homo sapiens
ttgctacgcgcaccatggctggagcgcccacggtctcgcttcctgaacgggctgacttggtgaattgggcaactccttatagtgttgtgcacacaaaagcatcaaataaagaacatttaatc

SEQ ID NO: 572432 - DNA, 141 bp, Homo sapiens
ctgtatagctagggtcagtgctcaagccatgttgctacagggtgaagctctaatagtggatctgactggcaagctgaagacagatgtcctgtgcgtgttcttcactgacaggctgtaggagtgctgaggactgagcagtct

SEQ ID NO: 572433 - DNA, 1440 bp, Homo sapiens
gagatacctcagcgctacctggcgtgaactggatatctctcccgcctgccgggccatgtcctgccaacagtccgtgactccgccacatcctggtagcctcaatggcttgcaaacctgtgtagattagctaacgatattttagcgaacttacttcagtgcagatgtactagcatcggaggactcacacctctggcctctgttcccacctgcgtgccgacctttggggccgatggacttggtgactgatccctcgatggcaaccccccagatagtcattagcgaggggtacagatgatagggccatgcttggattcgtgtgtggaaacaagcactcatgcttcatcggctccgaaaggacgcacgtggatatctcggacctggcgatcatggatatccataagttgagatagaattgacacagaaggtatcctagcggcgacaagcggccccattctgcacattgcgttctagcgattgatgacctacttgggagtggggtaagcaccatccacttactagtcggatcttgttgcccactaatagaccgagaggcctagctgctcttgtgatctttattgtgtgcactcgattgggggagaacccgagatcttcccatttgcaccatggcttgaccattaaacgcatccagactttccacaaggaccgtcatttcgtgagaagtcgagtgcttccaatgcctagcggcattcgcagttgccgaaagcgatggcctcggcctatgactatgggagtttgggcattctcggccctttcgctaggctgaaatgtggccccattagggaacttcgcaaaggagggctcacttttgtggacccccactgtggggtcgagaggttccccaccctgttatggtgcgccgccttgtggacagacctgtgcacatgaggacctcagactggggggtctcaatcggtgcaaagttggaccttaatggcggttcacatttataacttcaaacacgccacgaagggggtccgtccatgggtatggacatccaaaggaaagaatagtcccgcccgtccttccacctccatattggtgtgcaggacgcatccaatatgaccggttgtgctgacaaagagcccagggaggactgggtccacatcatgtgggtgggccattacaatccaagatattagcccaaccccctaacgtgcgcgttacacgtacacgtgaccacgtggcagggtcaaaagttgatacccggttgtgaaaccagtgtttgagctccccaagtaggacgctcggcacagctcctactctcgcccaccaacttcgcaatgcgctatggcataactgtgaccatgtcccagcgaacatgggtgtaaatactctagaggacacagggttgaaagtcgtgaattaacgacgacgtgaccggggcgcacagcacaacactacgaaccatgctacgagagc

SEQ ID NO: 572434 - DNA, 1283 bp, Homo sapiens
  misc_feature (374)..(374): n is a, c, g, or t
  misc_feature (420)..(420): n is a, c, g, or t
  misc_feature (454)..(454): n is a, c, g, or t
  misc_feature (1042)..(1042): n is a, c, g, or t
gggcccataccactaccaaagggggcgtacgccaaaggcccccgctatatgttgggacccctggcaccccccccccccttggcgaatatttggggcacgccgttgccccgccgctgtgatcgatgatcgccgcccctagttggaatttttggggttggggtgcttattattagatgtgccgtcgccccctcacgcgcgtctcgccaagccactgtcgccgacagggtgtctccgcgttgtgcaaagccaacagtggtgccagatagccacttgcgcgacgggggggggccccccccgcgccacgaggtgccacaggatgggagccccccttgggggggcgttcttttgttggccccgcccccacaggagaggcnttgtgagccacaggccgcccatagcccgcgtcccaccagaaagcgngtgtcacgccacaccacaatagggcgacacaatngggggcgcgcacaagttcctccccacaggccgaagtttttctctttgtttgggagatagtttatatagttgagacccccacactctgtgtgggggcgcccacggagctctggggcccccggggcgcgctctctctctggtttggttgttggcacatctgggggttttgtccctctgcgcgcccgtttccatcatgtgtgcgtctttgcgttgtctttacacacagtgcgcccctctgggggcgtccacgcgccttatgaccacagtctcggtcttgtgcccactacccacagcgagagagtattgtgtgcgcccccctctgtgtgagctctctgtcacaccacagacacagtgtgccctctggtgtgcgctctccccctgctgcccctctcacagggggtaagacacacacagggagcctctctggattatattttttaagctcttgtgttgttttatagaaagcctctcttttggggggttataaaaaaagaggtgtttcttacactatattttgggaacttttttaaatataggcactcttccttcttttaataatgaaagaaattcccacatcccacttgggccnccttttataaccccacgagaatgtgaacctccctccctcccacagttatacccccacggccctgccctttgcacgggttgggggtggttacagcggtaaccccggggttaggcactcctatgacacgcacgcctgaggaaggctgggagaatttgggccacatgtaagctgcctttgttaactctaatttattttagtcacttgtattaaacccccaataaagccatagaggccaactcca

SEQ ID NO: 572435 - DNA, 167 bp, Homo sapiens
ccccctcagagatgtctcattcaattcatgcatgagtctggctcccagataatgacaggaatttctcttctgaacattgctggaacccaccttgagtgcctgccagaaagcagggccctcaaaaaatctgtcaatacatttctacgacttctgctggaagggagcag

SEQ ID NO: 572436 - DNA, 369 bp, Homo sapiens
  misc_feature (56)..(56): n is a, c, g, or t
  misc_feature (75)..(75): n is a, c, g, or t
  misc_feature (99)..(99): n is a, c, g, or t
  misc_feature (152)..(152): n is a, c, g, or t
catcgcagtacagccagaaagagagaacactaaaggacagagcaggctgccctcantcggtaaatccatccatcntgctcacacaagccatcccgaggnaacgcgtgggccatgagattgcagcgatcctgagggaagaaggaatgacgcanaacagtatatggtgctgatttagtgcatggagggggacacagagagacagggggggaggggaaggaggaggaagacagagagacagagacaaagatagacagagaaacagagaagacagtcacagagagccagtgacaaaggagagacagagacaaagagaggagagacagagacacacacacagagtgacacacaaagagaccaaaaggtcgacgc

SEQ ID NO: 572437 - DNA, 130 bp, Homo sapiens
cggcctctggttcctcctcttccagtgatcaagctcagcaaattcctgctgccatgtaccatctacatccaaggagcatccatctgaaggcggaccggcaggagccacaggcagccgactgtggatcaca

SEQ ID NO: 572438 - DNA, 548 bp, Homo sapiens
tatggaatgtttggcgggggccggttcgctccaccacctattatctagtcctccgccggaccatttatccaaccccataattaaggaccccccctctgtttgtggcttcttggttactgcctggtgattgtttgttgtggatgaagaggtggaggggtgtcatcttcttcagcccagtgaggcgtctctctgtgtatgagaccacagttgatttatcactttactgtacatttaggcgagagagagagttggttgttgaggagttctcttctcccttcatctgcattaggcccagttgttggttgttggtcttggttgttcactgccacctcctccttcggcttcatccccttctgcggtaccgaagatgagccgtcttctctaatatagaaacaaccccatcacattattactctccacgagggtctcctcccgcggggaggcaaaaaaccgcccatgcctgagtgttggtcccagacacaacaatacatagatataaatagaaagacaatagagaacaaaacagacaaaacaatgaacaagacaaa

SEQ ID NO: 572439 - DNA, 220 bp, Homo sapiens
atgaagcctatgatgtgcagaggcagggtaaggcgcgggtgctacccactacgagaaggtgcaggcctggtcatattacagatgctgtgcacagagcgtggcgactcgcgactggctcagcactctggagccccggaatgtgcgggccgacatgaagcgggtggtggaggataccaacggcactcgacgtgcagggtggggctccatgtacgaagcaggg

SEQ ID NO: 572440 - DNA, 231 bp, Homo sapiens
  misc_feature (27)..(27): n is a, c, g, or t
  misc_feature (69)..(69): n is a, c, g, or t
  misc_feature (142)..(142): n is a, c, g, or t
  misc_feature (182)..(182): n is a, c, g, or t
  misc_feature (223)..(223): n is a, c, g, or t
tcaagctgtgtcggcaaaagccctcanaccgactgagtctgccctgtataaagaagatgaagtgcccanacccctcacccctcactttttaagtttctaaatgtattccacataaacttttatttccccagaactcaaacanccacaaagctcagaatttattttacagttttattcaaggnaaaaggtgatgtttttgtactgtggggaggagggggctggntcatattt

SEQ ID NO: 572441 - DNA, 175 bp, Homo sapiens
ctgtagttccggctacttgggggactgaggtgggaggattgcttgagccggaggtggaagttgcagtgagctgatatcacgccaccgcactccatcctaggtaacagagcaagacccagtctcaaaataaataaataaaataaacgcaggtactgaatgagccgggtaccgagct

SEQ ID NO: 572442 - DNA, 331 bp, Homo sapiens
gctgccgctactactacggggggcgcggcccgtcgacaaaacaatcaatcctgtgttggtatgttggctcacgcctataatcccagcactttgggaggctgaggtgggaagatcacgaggtcaagagatggagaccatcctggccaacatggtgaaaccttatctctactaaaaatacaaaaattagccaggtgtgatggcacgcacctatagtcccagctactcaggaggctgaggcaggagaatcgctagaaccctggaggtggaggttgcagtgagccaagatcgtgccactgcactccagcctggcgacagagtaagactccatgtc

SEQ ID NO: 572443 - DNA, 391 bp, Homo sapiens
  misc_feature (60)..(60): n is a, c, g, or t
  misc_feature (305)..(305): n is a, c, g, or t
  misc_feature (308)..(308): n is a, c, g, or t
  misc_feature (344)..(344): n is a, c, g, or t
gttttattttaattttaaccaccaatggtctttcccaaagtcccaatttccatggttgcntccaaaaggaacgtgatttcaattcttttatggctgagtagtattccaacgtgtaaatatatcactttttaaaatccaattcatctgttgatgaacacttaggttgattctctatatttgtgaatattgtgaatagtgcttcacttcaaaatagcttagaagtgaggacttgaaaagttcccaacacatagaaatgataaatgctcatggtaacggatatcctaaatacctcaacttgataattntanattctctgcatgtaacaaagtaccacatgtaccccnataaatttgtttaaatattatgtatctgtacaaacagttacaaaatt

SEQ ID NO: 572444 - DNA, 327 bp, Homo sapiens
tgacaggtctgtacagctgcgtactgtgtcgatcctctacaggttgatctggaggtgatgtgaatttgtccctgaccgacgatgtagaacgtcatgatcgtggacgatccctggggactcgtcggtctctggagtgtttcggatgcggcccacgaacagctcacgcacttccttccagcagatatggctgcctgtctcatgcagtagtagtcaccgtaatccgtcactggatgccctggtggaggaggaagtccccatgcatggcatgcccccaattggcttctaccacgtccagaaaatcgcagtggcggtgaccaagtccttcat

SEQ ID NO: 572445 - DNA, 1174 bp, Homo sapiens
  misc_feature (726)..(726): n is a, c, g, or t
ccccgatgcaggtgcagcttgctgggaggatcgaccgacagacggacgcacgcctgaggcactgcgccccgcagcccggcgcgggtgccaccgcagcccggaccccgtgtctgccagtccgagccgcccctcgcccggtgcctaggtgcccggccccacaccgccagctgctcggcgcccgggtccgcatgcgctccgtcgtctgtcctggctcttctgctctgcgcccgggcaagtcaactggcggcttcccttgtgcaccaggcccttattgacttaaagggggattaccggagggtgatgaaattgcattcggttgagggctcatcttccgatcagcagcgttttccaaggtcccatgcccacatgttgccttgttcgagccaagggaattgtttatctgaagaagcgacttcgcgagagtgcagtcacttgacctcggggagttcccgtttgtcgcaggtctcgatggaggtagcgagttccaggacacaatgtgctacccgtggcacacgcgtagtcttcaccaaaaggaagcgcattcgtgccttacttacgccagactgggggcccggtcccgaaagcgtgggaacagtaccgacggggtccaatctaagttcgagggccgactgcagcagctggacgacaatgcaagccgcacggactggtggcttctgttcgggaacacggcaacgttgaaaaagccgttcgttccacgcacagcgnggtttccgttctgccacgtaaagagtccccaaggggtaatgtgcctaacgtgtcgccaatgtgggggcacccccagggtgcagtgggcccgcttggtcgcccagagtcagtacgtgcaacgggggtgggccctaagttggtgtataatgtgatgtgtgacagtatatgtggaaaagtgtgccctctcacatgcttatagtctcagatagttttttgccgtccctccgatatagactatggtgggtggtacacactgtttttggtgagtcttttgttactacgttttgggggtgggcaaatcggggtgcaaactcaatgcagtagtggtggctaaagtgtgtcaaaatgtgtgggggaaacatttatttccacgacctaatataaataatgggggtggtaacaactagtcgttggggtcaccccatgctctggtgtcgcaattgtgtta

SEQ ID NO: 572446 - DNA, 166 bp, Homo sapiens
agcgggttgctgtgaccggcgggggactccggtggtgtgcggcagctgtgggtgggggggcatcgggccgcggtgccaccatggcggtgcgactgtgcagctgagaccgacggccttgcaactgggatcagaggcgcttgctagctgtggctttcacccgggcaga

SEQ ID NO: 572447 - DNA, 1534 bp, Homo sapiens
tatctgcgttccctcctttatagtatagaccgcgtgtctttaaaggttcactcgagctctctggggtgtcgcaaatatcgtgcccatacgaagggtctacattaccaggatcactttttgtgagaggtaatatttgtgagattccacttgggcgtctttgcgggaatttgtctgtagaaagacacgcaccacccatggggtggcggttaaactagttgtttgccgcgtcccatgcgatattttcgtggcactctttttctccgccgcggtatgttgtttagccggttggccgagacacacccaagctaggttttctcaatttgggaagagggttcctaacattgggatgtggtggcccacacagagttttccaaataaatgtcccccgaaaagagggttgggcgaaaaaaatttgggccgcgcgacacacaagacatcggttgggggggagacgtggcgcagagtagattgtgttgctgtcccgcacgtgcgcagacggttgtgcgaaaaacacccacataatactgtggggggggtacacactccccaaaaaaagtttggtacctttgggcccacaaacgcagtgatgggggagaaaagaggcccacatgttggtaggtgtataactcccctatagaggagctcacagtctgttatagaatcctctctttttaggagcgcgctattctcacgggatttaccctctccttctggagagttccacggggcgcccccaaaaaccctggagagagagagttgcgtgttcttcatattttggtgcgacagaaaaagagaataggtgtggtttgaggagtaaacatggtgggggcggatatatttttctcgggcaagagcctcttttttttgtcgctatgtgcccaatagggcgcatactctcttaaaaggagtgagaagagagaggacaccttctcagagtttgtccagaagggtgtctcgtgtggtgtttttttctccagacgcacagccagcgctgttgtgacacacagctctcatttaatagagaggacacatctggagagtctcccttctctctccctgttctttgtgtgtctcccaaggcgcgcttttgtgtgccccccgcgctcatggcgcaaattattgggagatggcgttcttcttaagacgcatacttgtcgtggggcacacaagatctcaataggtggcgcacaccagtaggagcgtttcatggggcgccagaaagaagaagccacataagatctcctgttagcgatcttctctctctcccagttcacacaccccttcattggcccagatttgttaggcccacaccaagaaagagttctcttttacacccccatagccaagaaccacatttataggagagacacaccatttacaagaataggctggaccctgggagaggataggagatgggataccctgaaaaggtgtccccaactgttgaattgggaaagaaataagccacctagataaaccctattgtgtgctgcatggaaagggacctgaaaaccattgccctttaagccatgga

SEQ ID NO: 572448 - DNA, 366 bp, Homo sapiens
  misc_feature (85)..(85): n is a, c, g, or t
  misc_feature (124)..(124): n is a, c, g, or t
  misc_feature (154)..(154): n is a, c, g, or t
  misc_feature (321)..(321): n is a, c, g, or t
  misc_feature (340)..(340): n is a, c, g, or t
  misc_feature (360)..(360): n is a, c, g, or t
ttaaaaacgtttgcacacccccctctcttttttaaatataagcttgaaaataaaactaaagtcctttcaggtaataaaaccaaanaaaaactttgtgttgttggtcctcccccccccccctttnggaggtcaagtctagctcacctgccctagnattcttccaccaaaaagagttttagagtgggaagaagaggcttttccttctgcattagtataaagagtctgtatttttaataaatgttaaataagctaacaatgtttgtacttatgcattccccatgggtaaaaataaataatagcattgttaaagatagttattcncaaaaaaagagagttattncaaataaatatgtctctttnttttta

SEQ ID NO: 572449 - DNA, 758 bp, Homo sapiens
  misc_feature (1)..(1): n is a, c, g, or t
  misc_feature (273)..(273): n is a, c, g, or t
  misc_feature (282)..(282): n is a, c, g, or t
  misc_feature (304)..(304): n is a, c, g, or t
  misc_feature (432)..(432): n is a, c, g, or t
  misc_feature (460)..(460): n is a, c, g, or t
  misc_feature (476)..(476): n is a, c, g, or t
  misc_feature (530)..(530): n is a, c, g, or t
  misc_feature (533)..(533): n is a, c, g, or t
  misc_feature (537)..(537): n is a, c, g, or t
  misc_feature (559)..(560): n is a, c, g, or t
  misc_feature (566)..(566): n is a, c, g, or t
  misc_feature (677)..(677): n is a, c, g, or t
  misc_feature (689)..(689): n is a, c, g, or t
  misc_feature (753)..(753): n is a, c, g, or t
nagcacagtcctatactactccattgaaaaaatgataaaaaataactaaaaaatcaattcaatatttatcagtatcaaataaaactactatcacctttcctgaaatacaaagaaacaacagatgtatctatacctatttaaagtttaattcagaatcttgcgtcttaaagcagatgattattagttagcttgacaacagtttaaaactgatggtcccagttaaatctgtacaactgtatgagaaaatgaaaagcttgagttatcagtgtacgngagattttnaactactttatctctgtcaganattccaaactaaaccccctccaaagtctgttttcctcttacctttcagaaccatttcatgcgaaatctaaccagttttgctcgttattttccttttttaggggatggggggccggcgtgcgtttggcnaaagatttagttgttggttatttaacgntgcccaacatgggtcncattgcgaaagtaaaacccccaagtgtgacaatggaaacccaaacatttgtgcnggnggtntacggggtattcgtttccctgnngtatgnagacattttgtttctttttcaaatacttaaatattttatgaaatctggcaatgatcttaagactgttgacatacttccactgggaaatcatccatttcacttatttttaanagtttcattttntaccagagttaaatgtaaactaatgaaatatttattgatattttcataatgaagactctaaacnttttc

SEQ ID NO: 572450 - DNA, 250 bp, Homo sapiens
tctctcatgccacggtggtggcacatcagctggctgtggccagctaagtccttaaggttgaagatgaaagttaatgcagactcattatcctggtgtcacagtgcatatttttttttcgcttggcacaatatagaacgtgcagttcattcaatgaaatcctgaggcttggataaagtcaacaaactgaaatggatgcttcgtaccatctactgatgcggaagatctgaggtcctagttgtgaatcatgaaa

SEQ ID NO: 572451 - DNA, 541 bp, Homo sapiens
cttcatatttcagtgtgtctgcatagagggccgagctccgtatgtcagcgtgtctgcatagaggcctgtgggtgtcttcatatttcagtgtgtctgcatagagggctgagctccgtatgtcagcgtgtctgcatagaggctgtgtgtgtccccttaatctttgttactctagttttcagatattgtctggaactggagaagccccacattttatgatggataaataaataaaggttaaacgcagggctgcggagctccattgccttcctcgtaattctgcgagactctgcgatatacttttcagggagcatcacattagctgtcacacactgagtgtcaaccaaagccacgcaaggtggcctaaaattaacgagctcgttgtggaggagcctccactaacgaagtcaacaaatgcaaactggtttggtaaccttctgtaaagaaaagatccatcattggttaatacttattgtatagattatggcaaaatttaaaaaataaacagtccttcccggaattttaaaaaaaaaaaagaataaaa

SEQ ID NO: 572452 - DNA, 340 bp, Homo sapiens
cactatataagatctatgacgtcgcatgcactcgtacttaagcttggatcctctatagcggacggcctaagttcattgggcttattactcttgtgccctcaaaatggtccgctctctattcaacgtctacacagggctgtaccattcgcccaattgcatcggctgactctaggggcagataactgagggattatggtgactaaattgtacactaaacgcaaactctgtacacaatcttactctctagcttcagctttctacaaacctttataaagatagtgaatgttatatctaaaactctagcaactagcaatagtcgaatacctaaggacatgctatc

SEQ ID NO: 572453 - DNA, 312 bp, Homo sapiens
tcaaatacccggaccgctctccagctgaccagaggtcccgcgggtcaggaagcaggcacggatgcgggccaggtgtgggatccagccctcctgcctcagttgggtcatgatggcatcaatccaagggaagcctgtcttgccctcagcccacttggccagggcctcaggattgcggtcccaggggatctggatgcagatggggttcccctccatgcggtcaaacctggggttgttggtagctgccgtgtagaagaactctcgccataggagttgcccaaatagggagaggggaggtgtgctgttccgcttccc

SEQ ID NO: 572454 - DNA, 1056 bp, Homo sapiens
ctggctctacggctggagccagatggactggaggaggtgatcacagaatgctgtggctgggctgcctatgcttgtacgagctcagttgcccgggacattgctagatgctggtgcctggagtcactctggagcccggaggcctgggtgaacgtccgagcactgggcaccaatacgcacaggagataccagctatggggcgtgcagcctacgacgtggcgagtccacgatggctggacgcctcgagggttgcgtgcatgcctcctgtttcggttccacacgagccctaccgcgttgcaggacgcacgagcccgtcggcgtacgtgtgatttcacgagggaatctcgtggtggtacggcgagcggtagccgtgtgcctgggctgtcgtttgggcaatcgcgtttctttgtccgtggggatctggtggtcttgggggcccctgggtccctggagggttctggggtagagatggacttggtcgattatggggtctccgatcagggcgcttcttgaattccctacacatcatatgcgtcgttgaaattgcacgtagataagactccatcagtttcacttctactaatccgtttcgatgatctgccccttgcctgaaaaccctggttactgagttcttgcgaaactatgcatcgcgccagtagcgctcctatcccgcccatgccaccgaactttgagatgaacgaatagaatatccctcttctttgacccttgttggctaagataaagccgcttttgggcgggcagacccctgagataaccgcacatgtgtgttgggggcgcagaacgaggcttgcctttattctaatgcaccccagggcgtgaggcattgacgacgggaggtggcgaaaggatggattcctccacaagcactggggttcttgcgcctccaggggaatttcgagtgggacacggcggtccaatggagctcccaaactgtagaaggaccccaaggaagggctttcggagattccaactataattcttgacatgctgggttgatagaaccagggaggaccaggagatcccaatggtggacccaga

SEQ ID NO: 572455 - DNA, 1156 bp, Homo sapiens
tccgcccgcgagcacagagcctcgcctttgcctgatccgccgacccgtccacacccgccgccagctcaccatggatgatgatatctgccgcgctcgtcgtcagacaacgtgctccgtgcatgtgcaaggcctggcttctgctggtgcgactgatgcccccctgggccgtcttcccctccatctgtggtggcgccccagtgcaccagtggctgtgatgtgtcgggcatgggtcacgaaggattcctatgtgggcgaccgaggcccatgagcaagacgaggcatcctcaccctgaagtaccaccatacgagcacggcatcgtcaccaacatggagacgacatggagaaaatctggcaccacaccttctacaatgagactgcgtgtggctccctgaggagcaccccgtgctgctgaccgaggcccccctgaaccccaaggccaaccgcgagaagatgacccagaatcatgtatgagaccttcaacaccaccagccaagtacgtagctatccaggctggtgctatccctgatacgcctactggacagtaccattggcatcgtgactggcctccggttgacggaggtcacccacacctgtgccacatctacgaaagaggtactgccactacccccatgcacatccatgcgtatggacctgtgctgggccgggacacggacctggagtaccatcctgaagaatcgtcacccggagcgcggcatacaggcccaccaagcacggggcgcgcagaggcaagccgagcgtggccactaaaggagaacggcgctcaccgtcagccctgcaactccacgcaccaaaaggggcaacggtggagacccagacccccccggcaagacagcccaacccacgccggaacggacacggcaccccatggtaaaggcggacacgggccaccagcacaccaaccgcccccccacagggaaggcagcccagcgagtaccaagcaccacaacacaccatggcaggggaagggcccccgcacaccgccacccccaggagagcgcgcgcacaccgcaccggcgacgagaggacacaccacagccccgccgcacgacgcgcaccacagcgacgcacgagcgcccaacgacaacatacaaaggccgcgaccacgacagccacgcggcgacaagccacgacccg

SEQ ID NO: 572456 - DNA, 1554 bp, Homo sapiens
  misc_feature (9)..(9): n is a, c, g, or t
  misc_feature (11)..(11): n is a, c, g, or t
gaccacgancnctcttccgctacggctcccagaaggggccagcccgcgcctttcgcgcttctgccgtggccctctgcgggccgctccgccggtgctgtccctgggcgcctccgtgctctcagccaaccgcctctgagagcgcccactcgagcgccccgggagccagagggcgggggtcctcgccgggaccctcctgtgggcccagggggacaaaagtggctctcaatccagcacatgcacattgaagcaagttaaaggatttaatatgaagcacagaagcagatagtgccaaatagcaagcagtagttgttacacatttggctggaaaagcagtgtccgtgttgttatgtacacctccaaaaaaagttcaaatgtgtaggggaattgttgtgtaaagtaaactgaactgcagggtagcagtattttaatagctattatagacctgtatttactgtatttaaatgagtaaaggaacaagcagtgacacatcactaggaagggtgagcagggcagcatttccttctcccactgctgctgagatggcagaaattagtcgaattcagtacgaaatggaatatactgaaggcattagtcagcgaatgagggtcccagaaaagttaaaagtagcaccgccaaacgctgacctggaacaaggattccaagaaggagttccaaatgctagtgtgataatgcaagttccggagaggattgttgtagcaggaaataatgaagatgtttcattttcaagaccagcagatcttgaccttattcagtcaactccctttaaacccctggcactgaaaacaccacctcgtgtacttacgctgagtgaaagaccactagattttctggatttagaaagacctcctacaacccctcaaaatgaagaaatccgagcagttggcagactaaaaagagagcggtctatgagtgaaaatgctgttcgccaaaatggacagctggtcagaaatgattctctgtggcacagatcagattctgccccaagaaataaaatttcaaggttccaggcaccgatttctgcaccggagtacactgtgacaccatcgccacaacaggctcgggtctgtcctccccatatgttacctgaagatggagctaatctttcctctgctcgtggcattttgtcgcttatccagtcttctactcgtagggcataccagcagatcttggatgtgctggatgaaaatcgcagacctgtgttgcgtggtgggtctgctgccgccacttctaatcctcatcatgacaacgtcaggtatggcatttcaaatatagatacaaccattgaaggaacgtcagatgacctgactgttgtagatgcagcttcactaagacgacagataatcaaactaaatagacgtctacaacttctggaagaggagaacaaagaacgtgctaaaagagaaatggtcatgtattcaattactgtagctttctggctgcttaatagctggctctggtttcgccgctagaggtaacatcagccctcaaaaatactgtctcaacagctggaaatataaaagatttgcaaacttc

SEQ ID NO: 572457 - DNA, 418 bp, Homo sapiens
  misc_feature (21)..(21): n is a, c, g, or t
  misc_feature (110)..(110): n is a, c, g, or t
  misc_feature (149)..(149): n is a, c, g, or t
  misc_feature (152)..(152): n is a, c, g, or t
  misc_feature (160)..(160): n is a, c, g, or t
accaagaacgctccaacgatnacaacagagcagaagacagttaatgagaccattcattatcaaggcgctggtaatcaaactcctgctgataacaccgctcaagtgacctntacgcgtcaagtctcaactgatacggttacaggtgaaanganctatggtnttggtcagctgatcaaagctttgggcagtgactagcccagttattaagggttatacgccagatcagctgaaattggggcacaaactgtgagtggtgacgctagtgatcttgactttacggtgatttataccaaggatgcgccaacaaacccgttaatccaagtcaaccaacgacgccagcaaacccggttcaggctggtcaagcggcggctacttattttgtggacccacagttgcctgaacctggtgaactgaggca

SEQ ID NO: 572458 - DNA, 1418 bp, Homo sapiens
  misc_feature (9)..(9): n is a, c, g, or t
  misc_feature (11)..(11): n is a, c, g, or t
gaccacgancnctcttccgctacggctcccagaaggggccagcccgcgcctttcgcgcttctgccgtggccctctgcgggccgctccgccggtgctgtccctgggcgcctccgtgctctcagccaaccgcctctgagagcgcccactcgagcgccccgggagccagagggcgggggtcctcgccgggaccctcctgtgggcccagggggacaaaagtggctctcaatccagcacatgcacattgaagcaagttaaaggatttaatatgaagcacagaagcagatagtgccaaatagcaagcagtagttgttacacatttggtgagcagggcagcatttccttctcccactgctgctgagatggcagaaattagtcgaattcagtacgaaatggaatatactgaaggcattagtcagcgaatgagggtcccagaaaagttaaaagtagcaccgccaaacgctgacctggaacaaggattccaagaaggagttccaaatgctagtgtgataatgcaagttccggagaggattgttgtagcaggaaataatgaagatgtttcattttcaagaccagcagatcttgaccttattcagtcaactccctttaaacccctggcactgaaaacaccacctcgtgtacttacgctgagtgaaagaccactagattttctggatttagaaagacctcctacaacccctcaaaatgaagaaatccgagcagttggcagactaaaaagagagcggtctatgagtgaaaatgctgttcgccaaaatggacagctggtcagaaatgattctcttgtgacaccatcgccacaacaggctcgggtctgtcctccccatatgttacctgaagatggagctaatctttcctctgctcgtggcattttgtcgcttatccagtcttctactcgtagggcataccagcagatcttggatgtgctggatgaaaatcgcagacctgtgttgcgtggtgggtctgctgccgccacttctaatcctcatcatgacaacgtcaggtatggcatttcaaatatagatacaaccattgaaggaacgtcagatgacctgactgttgtagatgcagcttcactaagacgacagataatcaaactaaatagacgtctacaacttctggaagaggagaacaaagaacgtgctaaaagagaaatggtcatgtattcaattactgtagctttctggctgcttaatagctggctctggtttcgccgctagaggtaacatcagccctcaaaaatactgtctcaacagctggaaatataaaagatttgcaaacttctttgtttctgtctctgcattgtatgccattttatagtccacaccctgaaaatgtatttcttccagaaagtctggaggaaggacctatatttgtagaagtaaaggtatattctgtcactc

SEQ ID NO: 572459 - DNA, 869 bp, Homo sapiens
  misc_feature (9)..(9): n is a, c, g, or t
  misc_feature (11)..(11): n is a, c, g, or t
gaccacgancnctcttccgctacggctcccagaaggggccagcccgcgcctttcgcgcttctgccgtggccctctgcgggccgctccgccggtgctgtccctgggcgcctccgtgctctcagccaaccgcctctgagagcgcccactcgagcgccccgggagccagagggcgggggtcctcgccgggaccctcctgtgggcccagggggggaaataatgaagatgtttcattttcaagaccagcagatcttgaccttattcagtcaactccctttaaacccctggcactgaaaacaccacctcgtgtacttacgctgagtgaaagaccactagattttctggatttagaaagacctcctacaacccctcaaaatgaagaaatccgagcagttggcagactaaaaagagagcggtctatgagtgaaaatgctgttcgccaaaatggacagctggtcagaaatgattctctgtatggcatttcaaatatagatacaaccattgaaggaacgtcagatgacctgactgttgtagatgcagcttcactaagacgacagataatcaaactaaatagacgtctacaacttctggaagaggagaacaaagaacgtgctaaaagagaaatggtcatgtattcaattactgtagctttctggctgcttaatagctggctctggtttcgccgctagaggtaacatcagccctcaaaaatactgtctcaacagctggaaatataaaagatttgcaaacttctttgtttctgtctctgcattgtatgccattttatagtccacaccctgaaaatgtatttcttccagaaagtctggaggaaggacctatatttgtagaagtaaaggtatattctgtcactc

SEQ ID NO: 572460 - DNA, 408 bp, Homo sapiens
agagaactagtctcgagtctgacagggtgaccgccatttgttcctaataggaaatcaaggataggcaagggacacccatgtttggtcttattcctgatgcaatgaaacttctagttccacagactgtgcatgctgggttctctaaccctgtgtgctgcatgagcctgatactcatctttaatcctatgtaaactgcatgcttgactactgtgggataataactgtatgcagatctagttaaatcatactcatgactatgtccttatattccactctatgcttttggtattgatgatctttacatattaaatggcctttgataatggatctctagtgtatggtcttattaagacctacttgtagtcatcccattctttatgcgctactttcatggttgatatcgatgtt

SEQ ID NO: 572461 - DNA, 808 bp, Homo sapiens
  misc_feature (9)..(9): n is a, c, g, or t
  misc_feature (11)..(11): n is a, c, g, or t
  misc_feature (223)..(223): n is a, c, g, or t
gaccacgancnctcttccgctacggctcccagaaggggccagcccgcgcctttcgcgcttctgccgtggccctctgcgggccgctccgccggtgctgtccctgggcgcctccgtgctctcagccaaccgcctctgagagcgcccactcgagcgccccgggagccagagggcgggggtcctcgccgggaccctcctgtgggcccagggggacccgcgacctgcngcccgagctggctgccaggcctatcgccgccgccgagaccctccggccaacagggacccgcggtggccccggccccccggtagtgtctccctgacccgagtcccgtccccgggcctcttgccttcaaccctggtctttcctcctccccgggaccttgagtccccgaggagagcgagggagaggagcgccttctgcagggttattgggcgaacctcttcaccttgtgtggttcggcgtctcctttagtgtattaacccggacttttccgactggaaaataggggtatgggaagcagcgggagtcccgtgagcgtgaacgccgggctttgcaggtcttcactcatccttccctgccaaggccctgacaccttacaggctgaccttaaacctgccttgtgtaaaaggaggtaaagagtagaaagtggcaagtacatttgggaaaagaaggcgcttgatggaagcccaggttgtggcatcgcgggtggctgcgtggccacacatgtccggctgtgagcatccctgttcgcagatgtggctgcaggcagttgctcacagggttcttccaggaactgggagccgagggaag

SEQ ID NO: 572462 - DNA, 359 bp, Homo sapiens
cacaaagcatgatgtggcgcgccatttactttgagttctactttactattcatttgtatttctatcttttatctgcaggtatggcatttcaaatatagatacaaccattgaaggaacgtcagatgacctgactgttgtagatgcagcttcactaagacgacagataatcaaactaaatagacgtctacaacttctggaagaggagaacaaagaacgtgctaaaagagaaatggtcatgtattcaattactgtagctttctggctgcttaatagctggctctggtttcgccgctagaggtaacatcagccctcaaaaatactgtctcaacagctggaaatataaaagatttgcaaacttc

SEQ ID NO: 572463 - DNA, 377 bp, Homo sapiens
gcatggggtcatcgactttgtgcccaggcagctagagcctgtgcagctcctgctgggagagaacccaatactgaccacacctgcgatgtttgacacgcttctttgtgctatgagagtggcgtgtgcgcgccaagctgtccacccatccgcgtgccctggcggatgatgctcatccaccctctgtccctgacggaactgaggctgggcagcttttgggcttgaagtcaccctgttgagaagcagctgtctgccccagtgccacctcctgtccatcttgtgcagcagctccctcttcccgtggcgcatggtgggaccaggtcattgcttgctggctgtcacctgtgccaggttccaggtggtgaagggcagggtggccc

SEQ ID NO: 572464 - DNA, 863 bp, Homo sapiens
  misc_feature (31)..(31): n is a, c, g, or t
ttttttttaattgttatattattctttaaanaaatttcacaactcactacatgttggtggcaggatttaaaggacagaaggttcaagatgtaaagaagactattcagaaaagttgattggcgctggaaatgcacttatttacatggaaccagagaaacaagtgatgtccaggtcgtcagatgtatgtgttgtagctctgtgtgaccagtggtacttggattatggagaagagaattggaaaaaacagacatctcagtgcttgaagaacctggtaacattctgtgaggagaccatgaggaatttgcgaagttcttttttgttggctacaagaacatgcttgctcaagaacttatggggggggcgctcacttgccttgagatgagctgtggataaataaaatcactttctgacttactatttacacggcatttgtcacaggtgttcacctattgtaggtgggtaactttgtttgtcacgccttcgtttcccctgggttccctacccgtccagtacgacccacaaaacaatgtattttaggagtatcagaggtggtccgtttttctaaaatttttacggagcttgttactctcctacccgcccgctcttggtcgcttccctccacaccaccatcatgttcgtgcatcctatggttctactccgctctaccctcgctccgccagtttcgtcttgacgacttgtaacccatctctctgtcctcctgtcttttttctcctggttttcttcacgatgatccgacccagtgataacacaggaatgacaacctcaccatcctctcgttgtgtatatctcccccttcttgtacatctctatatccttcaaattttaacaccgctgttgcgacg

SEQ ID NO: 572465 - DNA, 1742 bp, Homo sapiens
  misc_feature (9)..(9): n is a, c, g, or t
  misc_feature (11)..(11): n is a, c, g, or t
gaccacgancnctcttccgctacggctcccagaaggggccagcccgcgcctttcgcgcttctgccgtggccctctgcgggccgctccgccggtgctgtccctgggcgcctccgtgctctcagccaaccgcctctgagagcgcccactcgagcgccccgggagccagagggcgggggtcctcgccgggaccctcctgtgggcccagggggacaaaagtggctctcaatccagcacatgcacattgaagcaagttaaaggatttaatatgaagcacagaagcagatagtgccaaatagcaagcagtagttgttacacatttggtgagcagggcagcatttccttctcccactgctgctgagatggcagaaattagtcgaattcagtacgaaatggaatatactgaaggcattagtcagcgaatgagggtcccagaaaagttaaaagtagcaccgccaaacgctgacctggaacaaggattccaagaaggagttccaaatgctagtgtgataatgcaagttccggagaggattgttgtagcaggaaataatgaagatgtttcattttcaagaccagcagatcttgaccttattcagtcaactccctttaaacccctggcactgaaaacaccacctcgtgtacttacgctgagtgaaagaccactagattttctggatttagaaagacctcctacaacccctcaaaatgaagaaatccgagcagttggcagactaaaaagagagcggtctatgagtgaaaatgctgttcgccaaaatggacagctggtcagaaatgattctctgtatggcatttcaaatatagatacaaccattgaaggaacgtcagatgacctgactgttgtagatgcagcttcactaagacgacagataatcaaactaaatagacgtctacaacttctggaagaggagaacaaagaacgtgctaaaagagaaatggtcatgtattcaattactgtagctttctggctgcttaatagctggctctggtttcgccgctagaggtaacatcagccctcaaaaatactgtctcaacagctggaaatataaaagatttgcaaacttctttgtttctgtctctgcattgtatgccattttatagtccacaccctgaaaatgtatttcttccagaaagtctggaggaaggacctatatttgtagaagtaaaggtatattctgtcactcagctgtattcacgtctgagcagttctgcagtaacacctgcttaaaattctccctttgcatgttttgtaaataggctccagttttgttttttaaaaggaatttattttttgcctcatcagtccacccaactgattctgaatgggagagagtctgtagagaattgattcagaaaagtgtctgtgaaagaaaaacaattattttgtcctgtttctcaaacagtgttaagcagttttgttaatagacatttttgcatcgacacttcaacattaacactttgaaagtcatggtctggtgccagatttaagaaactcgaaccacctaatatttcataaccttcttcattaggtacttgtacagattaatttctaacattgcagcagtttcatatgtgtgcaatatgtgcattctttcattttagttttgcacttggttttctataaagtacgtttttactcagttcatgcgtgaacaatttaaaaaacgacagaataaggtacaaatgtagtgtatttaataaactgtcaaccaaagaaaaaaaaggaa

SEQ ID NO: 572466 - DNA, 348 bp, Homo sapiens
tagcatcatgcaaattactggtgagcgttataaacacacatcccttgagggttgtcattcagtcctacaatacaggcatgataaccggcaggcctagagaattccttgctctaagcgccagtccggcttttggggctatgtgtatattctgagcgtttagcgcagttgagctcaggcaatctctcctctcctcggtcgctgtgtttaaacaagtaagacttagagcgcttagctttcgtactcatagataaagatctggtctgagttctgacacaaaggtcggtcttcagatctctcgttagccagactccctcacgtgactctatgaggccttctgaaaaaggtcat

SEQ ID NO: 572467 - DNA, 160 bp, Homo sapiens
ggatccggcgctaggacgccgaagggcgtaccggatgtcggtagtctgtatgacatgcagacacgccagacctgactgcgccaatacgagcagcagcagaaaaaatcgatgtgtccaagtttcccctcgccgacgcgttcacgcgttgtgcaaaggtgag

SEQ ID NO: 572468 - DNA, 268 bp, Homo sapiens
ggcacagagttgaaacctttattttagatgagagtttttttcccctccatcccaaaccttgggcggaaagcaagcgtccttgtaacttctttgggcaggctggggggattgttcagcctccttttgtggcctgcgcaaaccttaaagaattccagcttggtgcaaaaattttacttctaacaggggcccaaggcaattgtctatcatctttgcccagggattaaaatgaccgccccttcccttgaggactttgctcaagtgaaagtac

SEQ ID NO: 572469 - DNA, 2216 bp, Homo sapiens
  misc_feature (9)..(9): n is a, c, g, or t
  misc_feature (11)..(11): n is a, c, g, or t
gaccacgancnctcttccgctacggctcccagaaggggccagcccgcgcctttcgcgcttctgccgtggccctctgcgggccgctccgccggtgctgtccctgggcgcctccgtgctctcagccaaccgcctctgagagcgcccactcgagcgccccgggagccagagggcgggggtcctcgccgggaccctcctgtgggcccagggggacaaaagtggctctcaatccagcacatgcacattgaagcaagttaaaggatttaatatgaagcacagaagcagatagtgccaaatagcaagcagtagttgttacacatttggctggaaaagcagtgtccgtgttgttatgtacacctccaaaaaaagttcaaatgtgtaggggaattgttgtgtaaagtaaactgaactgcagggtagcagtattttaatagctattatagacctgtatttactgtatttaaatgagtaaaggaacaagcagtgacacatcactaggaagggtgagcagggcagcatttccttctcccactgctgctgagatggcagaaattagtcgaattcagtacgaaatggaatatactgaaggcattagtcagcgaatgagggtcccagaaaagttaaaagtagcaccgccaaacgctgacctggaacaaggattccaagaaggagttccaaatgctagtgtgataatgcaagttccggagaggattgttgtagcaggaaataatgaagatgtttcattttcaagaccagcagatcttgaccttattcagtcaactccctttaaacccctggcactgaaaacaccacctcgtgtacttacgctgagtgaaagaccactagattttctggatttagaaagacctcctacaacccctcaaaatgaagaaatccgagcagttggcagactaaaaagagagcggtctatgagtgaaaatgctgttcgccaaaatggacagctggtcagaaatgattctctgtggcacagatcagattctgccccaagaaataaaatttcaaggttccaggcaccgatttctgcaccggagtacactgtgacaccatcgccacaacaggctcgggtctgtcctccccatatgttacctgaagatggagctaatctttcctctgctcgtggcattttgtcgcttatccagtcttctactcgtagggcataccagcagatcttggatgtgctggatgaaaatcgcagacctgtgttgcgtggtgggtctgctgccgccacttctaatcctcatcatgacaacgtcaggtatggcatttcaaatatagatacaaccattgaaggaacgtcagatgacctgactgttgtagatgcagcttcactaagacgacagataatcaaactaaatagacgtctacaacttctggaagaggagaacaaagaacgtgctaaaagagaaatggtcatgtattcaattactgtagctttctggctgcttaatagctggctctggtttcgccgctagaggtaacatcagccctcaaaaatactgtctcaacagctggaaatataaaagatttgcaaacttctttgtttctgtctctgcattgtatgccattttatagtccacaccctgaaaatgtatttcttccagaaagtctggaggaaggacctatatttgtagaagtaaaggtatattctgtcactcagctgtattcacgtctgagcagttctgcagtaacacctgcttaaaattctccctttgcatgttttgtaaataggctccagttttgttttttaaaaggaatttattttttgcctcatcagtccacccaactgattctgaatgggagagagtctgtagagaattgattcagaaaagtgtctgtgaaagaaaaacaattattttgtcctgtttctcaaacagtgttaagcagttttgttaatagacatttttgcatcgacacttcaacattaacactttgaaagtcatggtctggtgccagatttaagaaactcgaaccacctaatatttcataaccttcttcattaggtacttgtacagattaatttctaacattgcagcagtttcatatgtgtgcaatatgtgcattctttcattttagttttgcacttggttttctataaagtacgtttttactcagttcatgcgtgaacaatttaaaaaacgacagaataaggtacaaatgtagtgtatttaataaactgtcaaccaaagaaaaaaaaggaa

SEQ ID NO: 572470 - DNA, 877 bp, Homo sapiens
agtggtccgcgtgcgcgtgccccgccgcggcctagtggaaagcggcccttccaagagggcgggcaaccccccaacccggggggacccggcacgctagccccaaagtgcggtgccgcgaggagacccccagatgttgcgacgaagaactgttgcgtccgctccggaatggagacaaatggactggtgccccacgtgggcccacccccccagccccaagaaggggacaaccccgtcttccacccgccgctgtgccggtataatgccttccggggtggtgattggcccccaagggcgaaatgtgccccgccgactgtttctcacaccaaaggggccacgcccccggtggtaaaagtcagggggttccccccccctggggcaaagagtcctaccctggtaactaccagcacgctgtcagttccgcccccaagttccccccaaaaagacgggggcacccacagcgggggggccccacgacaccaggagcaacaccagaattcattgggaaaaccagtcttatggacaataggaacaatctgcaggcgccgacacagccgcagtgggtgcaccaccccgtgagaccccgccacacctcggtgaagggcaacagaggggccgaaaccaacaaatgacccagaggtaaggcacacacgctgggaaaaccaccggggtaaacgcccgccctgtctctacaaacgccgccaacattgtccccgcccgagtgtgggggtatcctaaagacccatcggactccagagacgtggtaagccatacgagcacatggtgctgaaaccacgagagggcgcaggggagccgcaagcccggtggtatggtccccaccccccccaccggggggacaagggggcctgcccacaaaaca

SEQ ID NO: 572471 - DNA, 140 bp, Homo sapiens
cacgaggaggagagaaaaaagctgttatggaacagttccgccacttgccaatgcctttccactggaagcaggaataactcaagtttaagacaggcttgcggaggatgcagcaccgagtaggggagatccaccttctccga

SEQ ID NO: 572472 - DNA, 1802 bp, Homo sapiens
  misc_feature (9)..(9): n is a, c, g, or t
  misc_feature (11)..(11): n is a, c, g, or t
gaccacgancnctcttccgctacggctcccagaaggggccagcccgcgcctttcgcgcttctgccgtggccctctgcgggccgctccgccggtgctgtccctgggcgcctccgtgctctcagccaaccgcctctgagagcgcccactcgagcgccccgggagccagagggcgggggtcctcgccgggaccctcctgtgggcccagggggacaaaagtggctctcaatccagcacatgcacattgaagcaagttaaaggatttaatatgaagcacagaagcagatagtgccaaatagcaagcagtagttgttacacatttggtgagcagggcagcatttccttctcccactgctgctgagatggcagaaattagtcgaattcagtacgaaatggaatatactgaaggcattagtcagcgaatgagggtcccagaaaagttaaaagtagcaccgccaaacgctgacctggaacaaggattccaagaaggagttccaaatgctagtgtgataatgcaagttccggagaggattgttgtagcaggaaataatgaagatgtttcattttcaagaccagcagatcttgaccttattcagtcaactccctttaaacccctggcactgaaaacaccacctcgtgtacttacgctgagtgaaagaccactagattttctggatttagaaagacctcctacaacccctcaaaatgaagaaatccgagcagttggcagactaaaaagagagcggtctatgagtgaaaatgctgttcgccaaaatggacagctggtcagaaatgattctctacctgtgttgcgtggtgggtctgctgccgccacttctaatcctcatcatgacaacgtcaggtatggcatttcaaatatagatacaaccattgaaggaacgtcagatgacctgactgttgtagatgcagcttcactaagacgacagataatcaaactaaatagacgtctacaacttctggaagaggagaacaaagaacgtgctaaaagagaaatggtcatgtattcaattactgtagctttctggctgcttaatagctggctctggtttcgccgctagaggtaacatcagccctcaaaaatactgtctcaacagctggaaatataaaagatttgcaaacttctttgtttctgtctctgcattgtatgccattttatagtccacaccctgaaaatgtatttcttccagaaagtctggaggaaggacctatatttgtagaagtaaaggtatattctgtcactcagctgtattcacgtctgagcagttctgcagtaacacctgcttaaaattctccctttgcatgttttgtaaataggctccagttttgttttttaaaaggaatttattttttgcctcatcagtccacccaactgattctgaatgggagagagtctgtagagaattgattcagaaaagtgtctgtgaaagaaaaacaattattttgtcctgtttctcaaacagtgttaagcagttttgttaatagacatttttgcatcgacacttcaacattaacactttgaaagtcatggtctggtgccagatttaagaaactcgaaccacctaatatttcataaccttcttcattaggtacttgtacagattaatttctaacattgcagcagtttcatatgtgtgcaatatgtgcattctttcattttagttttgcacttggttttctataaagtacgtttttactcagttcatgcgtgaacaatttaaaaaacgacagaataaggtacaaatgtagtgtatttaataaactgtcaaccaaagaaaaaaaaggaa

SEQ ID NO: 572473 - DNA, 96 bp, Homo sapiens
  misc_feature (53)..(53): n is a, c, g, or t
gttagggatattataagtagagtccagaatcctaatagtccagtgtctacatnatcttcatttttcaaattctcagcatgcaactctttaacgatc

SEQ ID NO: 572474 - DNA, 1982 bp, Homo sapiens
  misc_feature (9)..(9): n is a, c, g, or t
  misc_feature (11)..(11): n is a, c, g, or t
gaccacgancnctcttccgctacggctcccagaaggggccagcccgcgcctttcgcgcttctgccgtggccctctgcgggccgctccgccggtgctgtccctgggcgcctccgtgctctcagccaaccgcctctgagagcgcccactcgagcgccccgggagccagagggcgggggtcctcgccgggaccctcctgtgggcccagggggacaaaagtggctctcaatccagcacatgcacattgaagcaagttaaaggatttaatatgaagcacagaagcagatagtgccaaatagcaagcagtagttgttacacatttggctggaaaagcagtgtccgtgttgttatgtacacctccaaaaaaagttcaaatgtgtaggggaattgttgtgtaaagtaaactgaactgcagggtagcagtattttaatagctattatagacctgtatttactgtatttaaatgagtaaaggaacaagcagtgacacatcactaggaagggtgagcagggcagcatttccttctcccactgctgctgagatggcagaaattagtcgaattcagtacgaaatggaatatactgaaggcattagtcagcgaatgagggtcccagaaaagttaaaagtagcaccgccaaacgctgacctggaacaaggattccaagaaggagttccaaatgctagtgtgataatgcaagttccggagaggattgttgtagcaggaaataatgaagatgtttcattttcaagaccagcagatcttgaccttattcagtcaactccctttaaacccctggcactgaaaacaccacctcgtgtacttacgctgagtgaaagaccactagattttctggatttagaaagacctcctacaacccctcaaaatgaagaaatccgagcagttggcagactaaaaagagagcggtctatgagtgaaaatgctgttcgccaaaatggacagctggtcagaaatgattctctacctgtgttgcgtggtgggtctgctgccgccacttctaatcctcatcatgacaacgtcaggtatggcatttcaaatatagatacaaccattgaaggaacgtcagatgacctgactgttgtagatgcagcttcactaagacgacagataatcaaactaaatagacgtctacaacttctggaagaggagaacaaagaacgtgctaaaagagaaatggtcatgtattcaattactgtagctttctggctgcttaatagctggctctggtttcgccgctagaggtaacatcagccctcaaaaatactgtctcaacagctggaaatataaaagatttgcaaacttctttgtttctgtctctgcattgtatgccattttatagtccacaccctgaaaatgtatttcttccagaaagtctggaggaaggacctatatttgtagaagtaaaggtatattctgtcactcagctgtattcacgtctgagcagttctgcagtaacacctgcttaaaattctccctttgcatgttttgtaaataggctccagttttgttttttaaaaggaatttattttttgcctcatcagtccacccaactgattctgaatgggagagagtctgtagagaattgattcagaaaagtgtctgtgaaagaaaaacaattattttgtcctgtttctcaaacagtgttaagcagttttgttaatagacatttttgcatcgacacttcaacattaacactttgaaagtcatggtctggtgccagatttaagaaactcgaaccacctaatatttcataaccttcttcattaggtacttgtacagattaatttctaacattgcagcagtttcatatgtgtgcaatatgtgcattctttcattttagttttgcacttggttttctataaagtacgtttttactcagttcatgcgtgaacaatttaaaaaacgacagaataaggtacaaatgtagtgtatttaataaactgtcaaccaaagaaaaaaaaggaa

SEQ ID NO: 572475 - DNA, 392 bp, Homo sapiens
ttttagtcatggatattgactttaagcaccactaatctgtattttgggggagtttacatctacctccttaggtacctattagtaccaagcataataggaaaaaataggctggcatggtggctcatgcctatagtcccaacactttgagaggctgaggcgggcagatcccttgagcccaagaagttcgagaccagcctcagcaacatggtcaaaccctgtctttagcaaaaaaatacaaaaattatctgggcttggtggtgcatgcctgtggtcccagctgctcgggaggctgaggtgggagaatcgcttgggcctaggaggttgaggctgcagtgagctgtaatcagtgccactgcacttcagcctgggcagcagagtgagacgctgtctca

SEQ ID NO: 572476 - DNA, 2141 bp, Homo sapiens
  misc_feature (9)..(9): n is a, c, g, or t
  misc_feature (11)..(11): n is a, c, g, or t
gaccacgancnctcttccgctacggctcccagaaggggccagcccgcgcctttcgcgcttctgccgtggccctctgcgggccgctccgccggtgctgtccctgggcgcctccgtgctctcagccaaccgcctctgagagcgcccactcgagcgccccgggagccagagggcgggggtcctcgccgggaccctcctgtgggcccagggggacaaaagtggctctcaatccagcacatgcacattgaagcaagttaaaggatttaatatgaagcacagaagcagatagtgccaaatagcaagcagtagttgttacacatttggctggaaaagcagtgtccgtgttgttatgtacacctccaaaaaaagttcaaatgtgtaggggaattgttgtgtaaagtaaactgaactgcagggtagcagtattttaatagctattatagacctgtatttactgtatttaaatgagtaaaggaacaagcagtgacacatcactaggaagggtgagcagggcagcatttccttctcccactgctgctgagatggcagaaattagtcgaattcagtacgaaatggaatatactgaaggcattagtcagcgaatgagggtcccagaaaagttaaaagtagcaccgccaaacgctgacctggaacaaggattccaagaaggagttccaaatgctagtgtgataatgcaagttccggagaggattgttgtagcaggaaataatgaagatgtttcattttcaagaccagcagatcttgaccttattcagtcaactccctttaaacccctggcactgaaaacaccacctcgtgtacttacgctgagtgaaagaccactagattttctggatttagaaagacctcctacaacccctcaaaatgaagaaatccgagcagttggcagactaaaaagagagcggtctatgagtgaaaatgctgttcgccaaaatggacagctggtcagaaatgattctcttgtgacaccatcgccacaacaggctcgggtctgtcctccccatatgttacctgaagatggagctaatctttcctctgctcgtggcattttgtcgcttatccagtcttctactcgtagggcataccagcagatcttggatgtgctggatgaaaatcgcagacctgtgttgcgtggtgggtctgctgccgccacttctaatcctcatcatgacaacgtcaggtatggcatttcaaatatagatacaaccattgaaggaacgtcagatgacctgactgttgtagatgcagcttcactaagacgacagataatcaaactaaatagacgtctacaacttctggaagaggagaacaaagaacgtgctaaaagagaaatggtcatgtattcaattactgtagctttctggctgcttaatagctggctctggtttcgccgctagaggtaacatcagccctcaaaaatactgtctcaacagctggaaatataaaagatttgcaaacttctttgtttctgtctctgcattgtatgccattttatagtccacaccctgaaaatgtatttcttccagaaagtctggaggaaggacctatatttgtagaagtaaaggtatattctgtcactcagctgtattcacgtctgagcagttctgcagtaacacctgcttaaaattctccctttgcatgttttgtaaataggctccagttttgttttttaaaaggaatttattttttgcctcatcagtccacccaactgattctgaatgggagagagtctgtagagaattgattcagaaaagtgtctgtgaaagaaaaacaattattttgtcctgtttctcaaacagtgttaagcagttttgttaatagacatttttgcatcgacacttcaacattaacactttgaaagtcatggtctggtgccagatttaagaaactcgaaccacctaatatttcataaccttcttcattaggtacttgtacagattaatttctaacattgcagcagtttcatatgtgtgcaatatgtgcattctttcattttagttttgcacttggttttctataaagtacgtttttactcagttcatgcgtgaacaatttaaaaaacgacagaataaggtacaaatgtagtgtatttaataaactgtcaaccaaagaaaaaaaaggaa

SEQ ID NO: 572477 - DNA, 445 bp, Homo sapiens
  misc_feature (223)..(223): n is a, c, g, or t
cgtagccgttaacacatacaacgcttaagaccgcctgccgtccacatgaacctccgacacattactattgaacgcgaccgacctgggttttgaaaaaggcaagagaaataaacgaaaaacaaggaaagcgccacagccaaaacaaaaaacaaaaaacaaaaaaaaaaggcgcgggtgaaagaggtaccgagctgaactgcacgggctgctaacccgacaaccnctaggacttgctacaaagagtactataaatggcgtgcttatttaaagaacggaacctgaagcccggagggtggcttaaagggtcacgaggggcgatgggggttaccaagcgtgacttgcttaaactggcctgccaagcatgttgggcgtaggttattggcacctaaagaccgtctactgagagcgcggccttaggcacagctggttgatactatgtgcgact

SEQ ID NO: 572478 - DNA, 418 bp, Homo sapiens
acggaatgggcttttctttgtggcactgtggtagtaacaccaccaccaggctccgaatgtgagtcttcttcctgtattgctgggactcagtacagaacatattattgcatttcaaaaatactttcacaatggacatgatttaatttgaaagttcagcttaagctttcattttcatgagttaaaaaaaggaggcaaaaatgttgcaattaaagccaagccaagcatatgcactctcttgccatctagtgagcatacagggtattgcaacagtgtgtgatcttaataatatggggtatcctgttaattaaattatgtatatgggctaacaatgagttatttaatcagccatttaattatcttgaataacatttttattacagtgaaataaataccaatttaacttaataaaaaaaaaaaa

SEQ ID NO: 572479 - DNA, 491 bp, Homo sapiens
  misc_feature (463)..(463): n is a, c, g, or t
gggtagtagtgcttgcttactacaccttctgaaattcaaagcacacagggcaaaataagtgttacctttctttatatattccccccatttggaatacgtctacctttaaagtttttttaaatgggcagagcgcagtggctcaagcctgtaatcccagcactttgggaggccgaggcgggcggatcacctgaggtcagaagttcgagaccagcctgggcaacatgatgaaacctcatctctactaaaaatacataaattagccgggcgtggtggtgggagcccagctactcagggctcctcagctactcagctattcagctactcaggaggctgaggcaggagaattgcttgaacccaggaggcggaggtttcggtgagcgaagattgcgccactgcactccagcctgggcaagagtgagattccatctcaaataaataaataaataaataaaaaccaaaaaanaaaatacatagtttttccaaaatcttga

SEQ ID NO: 572480 - DNA, 1025 bp, Homo sapiens
cggacgcgtgggtcgacccacgcgtccggggagacgaaagaaagaggctgtgcctcagaaataataacgccgcatatctacaactatctgatctttgacaaacctgagaaaaacaagcaatggggaaaggattccctatttaataaatggtgctgggaaaactggccaaccatatgtagaaagctgaaactggatcccttccttgcaccttatacaaaaatcagttcaagatggattaaagacttaaacgttagacctaaaaccataacctaggcattaccattcaggacataggcatgggcaaggacttcatgtctaaaacaccaaaaccaatggcaaccaaaggcaaaattgacaaatgggatctaattaaactaaagagcttctgcacagcaaaagaaactaccatcagagtgaacaggcaacctacaaaatgggagaaaattttcgcaacctactcatctgacaaagggctaatatccagaatctacaatgaactcaaacaaatttacaagaaaaaaacaaccccatcaacaagtgggtgaaggatatgaacagacacttctcaaaagcaagacatcttatgcagccaaaaaacacatgaccacaatgctcatcatcactggccatcagagaaatgcaaatcaaaaccacaatgagataccatctcacaccagttagaatgggcgatcattcaaaagtcaggaaacaacaggtgctggaagaagatgctggcgaaattagaacccttttacactgtatggtaggactggtacactaagttagccattgttgcacacacgggtgccgatcctcacggattagaacttccaattccacttttaccacagcaattcacttaacgggggatatacccaaagggcataaaacagcggcattacaatcaccgcgcggttgttcatagggaaaattacgcagccaaactgtgaccccacagtgttcaataagagcgtagtcaaacatgccaactacacgagatatcccaaacaagattctctagaaag

SEQ ID NO: 572481 - DNA, 861 bp, Homo sapiens
ctcccgggtttttggggtggcgtgtcctggtcgcccatctttccccgccaacggcatgtctgttgtccatagtttctgtgtcagggtgacccgcccctgcagttggtatggggctctctggggtcccccccgtcgtggccggccctccttgttagtggtgtctcggcgcgcagccgcattttccttgcgggcgcgcgcccccatggcagttgcatcttctggtgtgacttgctctttcctttctgtattctcttgctccggtactttctgttgcaggctcgtggcgcagcccgtgtgggtgtgcccctcccgcctgttttagcgtgcgggccgacggcccatgccttttttgcgcattgctgctcatccccgtggtggtgtcaccccaccctgcttgtgttcgcaggatccccgcgcggtatcctttttggcggtcccccgcgctggtctttatccgctgttggctcgccttgctggcgtcccgcctcggtctgcgcgctctctctactcccgcaggtgttgcgctcccccctcccgcgcccctgcgtaactaacggctggttcctccccggcccgatgttgacacaccctcctttgttgtggtatctctaccacctcattcattcgcgcttatctgccatcagccgctcagaatagtttcatcgatgtccctcgcagcacgacgtgcctctcttactcacctgattcttcgtctgcggtgcggcgcctccttttactgccgccgtagaccctacgaaggggttgttccaggcggcaacagaaataatgactgatgccagttctgtccaccaggtctgcaccaaaaaagaaacatagacaaacacacacaaacaaaacaca

SEQ ID NO: 572482 - DNA, 699 bp, Homo sapiens
  misc_feature (2)..(2): n is a, c, g, or t
  misc_feature (620)..(621): n is a, c, g, or t
  misc_feature (643)..(643): n is a, c, g, or t
  misc_feature (654)..(654): n is a, c, g, or t
cntgatggagtctccttctgtctctcaggctgtagtgcagtggcacgatctcagctcactgcaacctctgcctcccgggttcaagtgattcttctgactcagcttcctgagtagcttggactacagacacttgccaccacacccagttaattttttgtatttttagtagggatggggtttcaccatgttagccaggatggtctcgatctcctgacctcgtgataaaaccaccctagcctcccaaagtgctgggtttaggcgtgagccaccccactgggtcctcattcttgtatcttaaaagtcagtgatgttgagtaatttctcatgccaccacctccaaggttgcctttcttctgccttcttctttcacttaaaaggaaggttgtgatttcattgatcccacccatttaagacaatctctctatcattgttctgcaaccttaatttcacttgaaatctaatttcacactgccgtgcaacctaacatatttgtatgttagactctgggaattaggacatgaaaatttttgggaggccattctttggcctacagcagacatagtctatttacctgcagattaaagctttctatatgtttctgactccctctcttaattttnnaaaataatattaattgcagtanagagaccgaangaaaagaaaaccaacaaaaaaaaaaaatgggcctctttggcctca

SEQ ID NO: 572483 - DNA, 427 bp, Homo sapiens
ttagtgtcactgtgtgtcaactgttggagttcaactgtagcatttgagtcatgacctactctctccctatcttcttggacacatctttttggaatggagtttctttgaactgtggggcaggggagggaggatagggagagagtaggtcatgactcaaatgctacagatgctcattgttcttaataagatttagtcgatttaaaaaaatatttcatcatctgctatatgccattataacaatttcagagactttagcttcttaaaaaaatattttttatcaattatggttgttccactgggcagagagccacagagctcctcacattgtcatttcggaagcagattctaagttcgatttcaaatacctttagtcacagcagttactatccagttgaccacctggcctactacaccctattatcttatg

SEQ ID NO: 572484 - DNA, 286 bp, Homo sapiens
tctaggatcccggtatactgagcttagagcatacagcccctgtatgggactgtgtgcttaccatcctgtgctgggggagcggggacactagggtcagtgaccccctagctctcaaggccactccgtgctcatgcagctgcatccacagttgcagagccttgaaaacaaggaccaggagcaagaagctggtggcgggcatgtagaggccgatggagacgaagcgggacagagtggggagcaggtagaggaagaacagctggtgcgggtgtccaaggtcgtcataccg

SEQ ID NO: 572485 - DNA, 449 bp, Homo sapiens
gttacactttaaaattaggattttaaatttctatctaatgttctttaccaggtatcataatttatttaaacatgttgagtcttttccattttttgctattatgaactatgaccaatgcatcccataggcaggtgtaatggagaaattttagaaggatcgactccaatcctttgtttcacaataataacctctaaaaggtgttgttcagtcaccttcagtcatagaaaccagtgtgtgaaaatggacattggatcctcctggctataaatgggctctgcagctccacccattgctctccaccataagcagaatggccaccactatggggtgggagggagattacaagcaggctctcagctgtgctctggtctgcagtccgcagggcacctcgtcacctttgttttttctcccctgatcataggatagagtcacatttcctcatttgggag

SEQ ID NO: 572486 - DNA, 136 bp, Homo sapiens
taagtgtggtacaaacgttggggagcatgtatcctctgtcaaaatggtactagtaacagattcaaggtagtaccatatcgtatcagactgatgtgggggttattatgtttgacatcagttggtcagcctgttaagg

SEQ ID NO: 572487 - DNA, 694 bp, Homo sapiens
ttggcgctgtcgatggcgcggcgttagtttggtgcacaagcgggtgtctactaccccccttggggttgctcccgcccttgctcggtgtgtagtcgtccttccccccctgcttgtggccgccgtgctgtggaggccccctcgtggttaatttttctattcgcgttttttctctttatgtacacgctgactcactcttttgttgtccgcgagcgcttctttgtgggtgccgcaccatcatgtttttatcccttttcgcacgcccccttttaaaccccctccctccctcttctagcgcgcgagtgtgtgtttcctgaattgtggcgtacaccacatgttgacggctgcctggctgctgaccaactcgtgggggggcgtgtcccttctgcctcgttgtgttttgtcgctgctcgtcattttccttgcgcgtagttgttccccacgtcctcgctcaccgattttcgctaccacccacggtggttgtttgtttcgtccactagggcgctccacgtcttttttttgggctgcttgcgcgccggcggccctctctttcctcttctttttccacacgggggggccccccctacccccttttccacccttggcaaattgaccccggttttttttccccccatttttttttttttaccccctttttcctctttgtgtacaaccaaaaattccaaggggggcttta

SEQ ID NO: 572488 - DNA, 536 bp, Homo sapiens
  misc_feature (298)..(298): n is a, c, g, or t
tagttttattcttcattctgactttctagctgtttgacttcagttagtttgaatgagagtaataggttttttttttctacatggactcagagggtaagagcattagctctcatcattgtgatgtgtgtgctctcctctcccccttggatgtcacagccattgatttctttgtgggcctcatggacttggtcttgttagtctaatgaaagccagacttcaaagagacaaggcaaccatgcagccagttcaccagtaaatgtggtaacacccacttaaaaatttgttttctcctcaaggncggtgtatgaagttgatcataaaagttctattactttatcctaaattaaattgagaaaaagatgtgttcttctaatcagacactgcattaatagggaaagattggtatagaaaagattttctttcctttttacttaatgtatatagtttaactcttttctttgttacatttaaactatgctcatgggtatcagtctgttttggactagtattaaagatggaaataaaacaatttgaac

SEQ ID NO: 572489 - DNA, 102 bp, Homo sapiens
gccgcggacacggccgtgtattactgtgcgaggagggggtacggtattttgactacttatcgcgcatctggtgacgacgatatggacgtctggggccaaggg

SEQ ID NO: 572490 - DNA, 2487 bp, Homo sapiens
ggcacgaggcagcagtggggcggggatggaggcggccgtggcgccggggagggatgcgccggcacccgcggcgagtcagcccagcggctgcgggaaacacaactcgccggagaggaaagtttatatggactataatgcaacgactcccctggagccagaagttatccaggccatgaccaaggccatgtgggaagcctggggaaatcccagcagcccgtattcagcaggaagaaaggccaaggatattataaatgcagctcgggaaagcctcgcgaagatgataggggggaaacctcaagatataatcttcacttccgggggcactgagtcaaataatttagtaatccattctgtggtgaaacatttccacgcaaaccagacctcaaagggacacacaggtgggcaccacagcccagtgaagggggccaagccccatttcattacttcctcggtggaacacgactccatccggctgcccctggagcacctggtggaagaacaagtggcagcggtcacctttgtcccggtgtccaaggtgagcgggcagacagaggtggacgacatcctcgcggcagtccgcccgaccacacgcctcgtgaccatcatgctggccaacaatgagactggcattgtcatgcctgtccctgaaatcagtcagcgcattaaagccctgaaccaggaacgggtggcagctgggctacctcccatcctcgtgcacacggatgctgcacaggccttggggaagcagcgcgtggatgtggaggacctgggcgtggacttccttacaatcgtggggcacaagttttatggtcccaggattggcgcactttatatacgaggacttggtgaatttacccctctctaccctatgctatttggaggtggacaagaacggaatttcaggccagggacagagaacaccccaatgattgctggccttgggaaggccgcggagctggtgacccagaactgcgaggcttatgaggcccacatgagggacgtccgcgactacctggaagagaggctggaagctgaattcggtcagaagagaatccatctgaatagccagtttccaggcacccagcggcttcccaatacctgtaacttttccatccggggaccccggcttcaaggccacgtggtgcttgcgcagtgccgagtgctgatggccagtgtgggggccgcgtgccactcggaccacggggaccagccgtccccagtgctgctgagctacggtgtccccttcgacgtggccaggaacgcgctccggctcagcgtgggccgcagcaccaccagggccgaggtggacctcgtcgtgcaggacctgaagcaggccgtggcgcagctggaggaccaggcctagcactggggccgccttccccaccccgcttctgggaagcccgtggcagggcacagggttgtccctccagttccctcctgagggctgtgccaggatgactgtctcatgccccctctgcattttgtcctggagtgccagcgagtgtgcacccccagtttccttccctggaaccctgcagagctcacagggcccaggacaccaacgccgcataggaccgcccacatgggaacgcccacatgggaccgcccacataggaccgcccacataggaccgcccacatgggaccgcccacatagaaccgcccacataggaccgcccacatgggaacgcccacatgggaccgcccacatgggaccgcccacatgggaccgcccacatagaaccgtcctccagtggtgaagcggaaacacttagctttatccaccctccccactgggaactgggcacgcctgttgtgagtgccctttcctggaaggtgtttttatctggaagatagaatccaagtatttataactcattgtcagccaaatgctatcatgaacgtaggaaacttgatttttttgttttgatcatggcctctacatgcacctttccagagtggtctcttctcgggccctttttagtccctttccaaagctgcccccaccaccctgctcctctggcctcagtgcacagtggcccccagcctcggccaggcctgctctgctcagcgcccaccgcccaccacccctcctgcttccccgagcctgaccctgttccgcccactggcaatcagggctgcgcacttccctgtccacggtccccaggccttcctgtcttgtcccttttgatcattaactcagggtttcagctccaacctcgctgagttggtgcagctccgggtcattcctggggtgggaatcggatcatccctgactcagcttataccttaattttatttgcagaggattcttttctcaaaatgctctggcatttggacacacatcacatgtcgatatttgcataggagtcattttcagtggaataacatttttaatgtgtggttttacggttcaaggaactacatgatgattttgaggaaacacttgccagaaactaaattaacgaataaaagatttcagtgcccg

SEQ ID NO: 572491 - DNA, 168 bp, Homo sapiens
tacttatacacacgagtatccaccgaccacacctcacaaagcggataaaaggtaaaaacttataacaaagcctgaaagccaaaatgaacgaaaatctgtacgcttcattcattgcccccacaatctctaggcctacccgccgcaaaaactgagtcattctatgtgtag

SEQ ID NO: 572492 - DNA, 215 bp, Homo sapiens
tcttttgccaaagaatgcaatatcaaaaatgggacagtggttttaattaactgtttaggaggatatgtgtaaaaagttgctttttttgcaggccaagaaattatattccttattcagtcagttatgtttaatctttttcctgaatataaaatcttgttaaatgccttaggccctcttaaaaagggtccaaaaatttaaagtttcgttaaatatgt

SEQ ID NO: 572493 - DNA, 234 bp, Homo sapiens
gctagcagcgattagttatttttctatttctgaacttttacattaatggaacaaggaaggacatataaagtgtacattattttggtccacgctctcttgcatactacatatgttagtgagatttggccatactcatatctagcggtatgttcatttacattgctgtactgtgttacattttaagaatacaccagtttcgccaggcgcggtgcctcatgtcagctctcccagcag

SEQ ID NO: 572494 - DNA, 2583 bp, Homo sapiens
  misc_feature (1718)..(1718): n is a, c, g, or t
  misc_feature (1728)..(1728): n is a, c, g, or t
ggcacgaggcagcagtggggcggggatggaggcggccgtggcgccggggagggatgcgccggcacccgcggcgagtcagcccagcggctgcgggaaacacaactcgccggagaggaaagtttatatggactataatgcaacgactcccctggagccagaagttatccaggccatgaccaaggccatgtgggaagcctggggaaatcccagcagcccgtattcagcaggaagaaaggccaaggatattataaatgcagctcgggaaagcctcgcgaagatgataggggggaaacctcaagatataatcttcacttccgggggcactgagtcaaataatttagtaatccattctgtggtgaaacatttccacgcaaaccagacctcaaagggacacacaggtgggcaccacagcccagtgaagggggccaagccccatttcattacttcctcggtggaacacgactccatccggctgcccctggagcacctggtggaagaacaagtggcagcggtcacctttgtcccggtgtccaaggtgagcgggcagacagaggtggacgacatcctcgcggcagtccgcccgaccacacgcctcgtgaccatcatgctggccaacaatgagactggcattgtcatgcctgtccctgaaatcagtcagcgcattaaagccctgaaccaggaacgggtggcagctgggctacctcccatcctcgtgcacacggatgctgcacaggccttggggaagcagcgcgtggatgtggaggacctgggcgtggacttccttacaatcgtggggcacaagttttatggtcccaggattggcgcactttatatacgaggacttggtgaatttacccctctctaccctatgctatttggaggtggacaagaacggaatttcaggccagggacagagaacaccccaatgattgctggccttgggaaggccgcggagctggtgacccagaactgcgaggcttatgaggcccacatgagggacgtccgcgactacctggaagagaggctggaagctgaattcggtcagaagagaatccatctgaatagccagtttccaggcacccagcggcttcccaatacctgtaacttttccatccggggaccccggcttcaaggccacgtggtgcttgcgcagtgccgagtgctgatggccagtgtgggggccgcgtgccactcggaccacggggaccagccgtccccagtgctgctgagctacggtgtccccttcgacgtggccaggaacgcgctccggctcagcgtgggccgcagcaccaccagggccgaggtggacctcgtcgtgcaggacctgaagcaggccgtggcgcagctggaggaccaggcctagcactggggccgccttccccaccccgcttctgggaagcccgtggcagggcacagggttgtccctccagttccctcctgagggctgtgccaggatgactgtctcatgccccctctgcattttgtcctggagtgccagcgagtgtgcacccccagtttccttccctggaaccctgcagagctcacagggcccaggacaccaacgccgcataggaccgcccacatgggaacgcccacatgggaccgcccacataggaccgcccacataggaccgcccacatgggaccgcccacatagaaccgcccacataggaccgcccacatgggaacgcccacatagaaccgtccacatgggaccgnccacatgggnacgcccacatagaaccgccacataggaccgcccacatgggaacgcccacatgggaccgccacatgggaacgcccacatagaaccgtccacatgggaccgcccacatagaaccgtcctccagtggtgaagcggaaacacttagctttatccaccctccccactgggaactgggcacgcctgttgtgagtgccctttcctggaaggtgtttttatctggaagatagaatccaagtatttataactcattgtcagccaaatgctatcatgaacgtaggaaacttgatttttttgttttgatcatggcctctacatgcacctttccagagtggtctcttctcgggccctttttagtccctttccaaagctgcccccaccaccctgctcctctggcctcagtgcacagtggcccccagcctcggccaggcctgctctgctcagcgcccaccgcccaccacccctcctgcttccccgagcctgaccctgttccgcccactggcaatcagggctgcgcacttccctgtccacggtccccaggccttcctgtcttgtcccttttgatcattaactcagggtttcagctccaacctcgctgagttggtgcagctccgggtcattcctggggtgggaatcggatcatccctgactcagcttataccttaattttatttgcagaggattcttttctcaaaatgctctggcatttggacacacatcacatgtcgatatttgcataggagtcattttcagtggaataacatttttaatgtgtggttttacggttcaaggaactacatgatgattttgaggaaacacttgccagaaactaaattaacgaataaaagatttcagtgcccg

SEQ ID NO: 572495 - DNA, 826 bp, Homo sapiens
  misc_feature (513)..(513): n is a, c, g, or t
atgacccaccaattcacatgcctatcatatatctaaaacccagcccatgtaccccataacagggggcccatctcagactcctcctaatgaccgtcacgagccttatgccagtgtgatttcatcttccactcgccataatcggctcctcgattactatggcctacgtaaccaaacatgacttaaccatataccaatgatgtgcggcgatgtaatcacgagagagtgcgtcatatccaaggacgcaccatacaacagctgtctaaacaaggccttcgatacgggaataagtcctattttagttaccttcagaaatatttgtctcctctcgcaaggagttgtgtcccctggatgccttcttatcgcagcatccccatggtccggtagccctccatagactccacgcaaagttaccgaggcgtgccactggggggacaccccctagcgtggcagtacttgcccagccttcaatcgcgcaatgatgtcccaagacactaaaaagagctggcgcgcatntaaactcctgcagtgcctgggatggttttctatgcacgatagacgtcttctccaattgttgtcctagatcaatgagagtccaggtcggatagggccaacaaattaattgttcaacgtcgaacattgtctccaagtggatcaaatgtatttgcctcgcgtgccttgcaactttgaacacctcctaagtgcgaccatacacgtagatctcttgcgaagcgtttgcccgtatctaccatttgttgccgaatggcaatcctaatgtgcccacgaactttgcttgggataagcgcatctgggcttccaccggtactca

SEQ ID NO: 572496 - DNA, 1030 bp, Homo sapiens
atcaccagataccagagatgtgtatctttatgtgaataatcttgatgatggtattggatgatgaacgtctccggaaagagttcgctcccatttaggtacaatcactagctgcaaaggttatgatggagggtggtcgctataaagggttcgattctgtatgttcctcctccccagaataagtcctaactaaatcatatccagaaatgaacggtacaaacttcgtggtccgatccaaacatgtccattatgtcactgttagcttatagactcagtcgtcgagaatggacagtagcgttcctaggtctcaactcattaaatagatatgtgcagagaatggcaagtgtgctgagctgtgcccacaaatactctgataatcaagcacactataccataccagacacctacctttatgttacttcatggaagactattccacagaatcagaaccgtggctgcatattatcctcttagtccaaattgctcaactaagaccaagtcctcggtggagtggtcagggtgtcagacctcatcacattcctaaatatgcccggtgcgtatccgtcgcagtgtgctccgtagtaccaccatttagtactatgagacgagacttcttcgacaggttccacgaggtcatgtcaacaacagcgtgtggctaacacatcaacgcagactatgggtccactggttctgcagctgagccgatgagctatattcctgctgtccgcaccggtgacacagtattaaatatgctgcaggagttcgcaatcctcagtagggtcttattgcaaagtcacagttcaaagtacaggctgctgtcgtgttccggccggaacttgaatgctcatgttggcttggcctctccagagcaatgcatgttgggtgacgggggccctattaaccatgccctattgggtaaacaggcgtgtgggaggaaaaaacctctgggaggcaagccccgcgagaggaaagtttaccaccaagaggggaggaccgcggcgtaggcaagcggatccttaaaagcgcgggttat

SEQ ID NO: 572497 - DNA, 217 bp, Homo sapiens
ctcagagggcataagccaagtcgcacagtgtatttattgtgtgtctggcttcttcagtttaggagaccatgtctagaaaatgcattcatgttgttctgtgtgtcagaaattcactctttttttactgccaggccgttgccttgtatgagtcactacaattagtttatctattcatctgcagcataggcaacagcagctgtttcttgtagggggccaa

SEQ ID NO: 572498 - DNA, 438 bp, Homo sapiens
  misc_feature (98)..(98): n is a, c, g, or t
  misc_feature (346)..(346): n is a, c, g, or t
gatggaacctagctctgtcgccaggctggagtgcagtggtgcgacctcagctcactgcaacttccgcctcccaggttcaagcaattctcctgcgtcanctcctgagtagctgggactacaggcacctgccaccacacccagctaatttttgtatttttagtagagatggggtttcaccatgttggccaggatggtcttgatctcttgaccttgtgatcggcccgcctcggcctcctaaagtgctgggattacagacatgagccaccgtgcccagcctgttttgtttttgtttttgttttagttttgttttgtttgggagacagagtttcactcacttgcccagggntgggagcataaatggatggcaattttcggtttcactggcaaccttccaccttcccgggtttcaaggcaatttttcctggcctcagttttttt

SEQ ID NO: 572499 - DNA, 228 bp, Homo sapiens
  misc_feature (74)..(74): n is a, c, g, or t
ccacatagctgggactacagtcactccactatgcccagctattttttttctaaagacaggtctccctatgttgnctagggtggtctcaaacttctggggttcaagcaattctacctgcctatggccttcccaaagtgctattagattttaggcatagagccatcatgctctggcctacagataggtgtttaagtggggataacatttttaagaaagggggaaactaac

SEQ ID NO: 572500 - DNA, 1717 bp, Homo sapiens
cttgtgtgtctttggtggatgagtggtcaggtggatgctgtttgcgacgctttgactcgtcggccggtggtagcgctgctgcgtgtacgtgtgggtcgtgctcttcgtgctgtggtgagtcgtccttcgattgtgtgtcgtgcgggctcggcgcgctgtgggttgctggcatgtgtgtgctgatgtttcgatcgtatacatctatgtggtactacacgcgggtgttgggtgacccatgttgatgccgcggtggtgcccacctcggttggctccgctaacgccgcgggtcgttgtgaccgctgctcgcgtcctccgtttggtcgtcgccctgtgcttcaaggggttgcggaggtcaccttgggagtgtggtcgtacgtcttcgtagtcgcgaggggggcgcactcgaccacctcgcacgtggccgggggtggtgcaacagtcgccaccaagtgctcctgctggtttccgagttgggcgttggtccctataatagggggaggcccctcaaggtagaaaaagagttgggtgttgacccaccactgtttgttcgtaaagagaaatgaattgtgtggttatgtagaaagtgtggaaacagcaccctcgctgccctatatgtggttcccaacatatgtaaagcgagcaaagtatatttggtgggaaaaagacaccgtcgtttcgtgttcaccaccccaggggattccccccatagggagtagcgcccacaaagtttggccaactgcttgaatagcgtctcttctaccaggggtttccctggtggttgtgaaaagtggaggatgtctcttgcgtgagatttgccacggaagtagagtggagagctgttgccacatcttagagggaagagttgccacagggctggaattgagcctgagaagaatggtgctctcacgcgcgtgtaatataaccgtgccccgtgaatctataacgcgttcaccatgggccacatcgggagtttgtttgaccccgcgtgacgacacacaaagtggtgggtgtacccacagtgggctcccacaaaatgttgggcacaagacacccacatgtaggtttgagatgcactcccacacgcgtttgagaatggttcacacgagacctagttctcgacttggggtttatactgtgcgtgtctgcgtatgtgttgtctgttggttgtggtgtttgtatactatataaataaacgccgcaccacactcacgaatgatcgggagaagagcctttcttaatgggctgcacggcacacccacacacgcgtctcgcccacacatttccgcgcgaagagaagatggagatggagaaattcactgagcccgcaggagaggtggcacgaccacaatggagacttgagaaagaaggtgggtccaatataaattgagttcccacgagcagcacattggagaaaagaacactatggaataagggcgttgccacactctattgttatttccttctccactgatagttcttcgcttcagataaagattaataatgctgtaagaaagacccacagatttgaatatgggataagagcttcactggagactttcactggtgtaaggcccgctagatttctggaaaagacccctcggggaaccaaaccacggtgctataaattgtaacgagctgatggatatgagacccccccccccagaatctgttttaagttcagacttccaatagtggccaattaaaagtgctatttgtg

SEQ ID NO: 572501 - DNA, 562 bp, Homo sapiens
ggagtaaactagagcactcatgttacatagtctcccactataagggtggctcctgagcaaacgaagtctaggtgacacttgaggttgccatagaagcaataacgacagggaaagctgagtttcactttatagtttgcattccatgaaaaacaaagtcctgactcttactagcctgggctcaatgttaactgcttcacagaaccaaaggcccactgcctccataacacacagtaactgaggcctggcacattgcagatgcttgcggaccaccctcccgtttgcctgcctgctactgttgccaccatgctgaccggtggtcaactgtaccagtgtatgtgttcccaactgcatatcagcataatcatgtaagttgattacatattatataaagggataaaatgcaattgcaaaagtaaatatttaaatttatatggtgaaaactaagctgaaacctttgcaaaaacttaaagtgaattgctacaaaacagaattgtcaggctggccatggtagctcacacctgtaatcccagaacttggggaggcaaggcgggcggatcacttg

SEQ ID NO: 572502 - DNA, 966 bp, Homo sapiens
tgcaggctgtacggcccggaggttagggatgctggtttgatgtcccatatagagaggtggcacagccaggctgtttatcccagtcccgtgtcgtgtccagcattttagtgcagactcacatgcacatcaaatgcacaaccatgcaatgacagacaagcagctccacaggaggagtgcacaaccagaggggagaggagagagcctggacagcctctgtcctcacctcctcagtggccatgtggtgacggctgggttttttatttttttctccctagatgagcttcacatctcaggtcttctgctcaactcaggtaccagctgacacccacccagtccctggtgttgccttcaggagcagtggcaagatgggagctggttggggaaggggatcctagcgcaggggggaggaggagagaatggaatggctggactttgagatgagaagacagttggatggggaggaggcaccatttgctggaactgaagggttctcagtaggggctcgaggcaggatgtatctgtgatatctggacctctggagtcccttaagcacaaggaggcaagtgtgtggcagtgaagacattctgccttgggcccaagcccaagacaggtctcccttcctgagccctgggcagaccatccgactatggtcattggaaggaccactcctccctatccaggctgtgtaaagccaggaagcacgtccctttctccatgcagggcctgaaactggggcagtcagcaccattaaagttcttcctcctctgaggctttcctgggtcaacaactttcgagggctgtgtagttggagggcagggaagcctgagcccacgaggacgtctttcctgttcagggtttgaattcgccccaacttgacggctagtgggggggccacggttgggttatactggtgactggcgaggaaaatcaccttgagggtgagtgcctcagagaaaaaaggcgccg

SEQ ID NO: 572503 - DNA, 152 bp, Homo sapiens
acagctagggggaggattgctggagcccaggaggttgaggctgcactgagccatgactgcgacactgcactcctgcctgggcaacagagtgagaccctgtcttaaaaaaaaaacagaaaacatgaccaggcatggtggctcacgtctgtcat

SEQ ID NO: 572504 - DNA, 126 bp, Homo sapiens
gtgaagtgagaactccatcagaaaaccaaagggtgctaggaggtgtgggtgccttccatactgtttgcccatttcatctggaataatattaattttcaaccccagagaaaaagttggttaaacaac

SEQ ID NO: 572505 - DNA, 564 bp, Homo sapiens
tatagtaaaagcccagaccatgacccctaacaggagccctctcagccctcctaatgacctccggctagccatgtgatttcacttccactccataacgctcctcatactaggcctactaaccaacacactaagcatataccaatgatggcgcgatgtaacacgagaaagcacataccaagggccaccactacaccacctgctccaagacaaggccttcgcatacgggataatcctatttattacctcagaagtttttttcttcgcaggattttttctgagcctttttaccaacatcccagcccttagcacccgtacgccccacaattaggaagggcacgtgtggccccaaccaggcatcaccccgcgtaacatcccctagaaagtcccacctccttaaagcacattccgctatttactcgcccattccaggcagttactcaaactccacctttgagcttcacccatcagtcttaatcagcacacaacaaccggcaaaccccacaatcaattccaagccactggctttcattcaccaatttccaactgcggtctccctcatctctc

SEQ ID NO: 572506 - DNA, 335 bp, Homo sapiens
cccgtcctacatcgtgttgttggacccagagacatgttgaaacacatgatgccagtttggtgcggtggctcacaccggtaatcccagcactttaggaggctgaggtcggtggatcacctgaggttgggagttcgagaccagcctgaccaacatggaaaaaccctgtctctgctaaaaatacaaaaaattagccaggtatagtggcacgtgcctgtaatcccagctgctcgggaggctgaggcgggagaatcgcttgaacccaggaggtggaggttgtggtgagctgagatcacaccgttgcactccagtctgggcaacaagagtgaaactctgtc

SEQ ID NO: 572507 - DNA, 131 bp, Homo sapiens
tactggtttcaggatcttggtgaggaggtacaggggttaatccttgctgagtggtcttggatgaggccgtctgcaaaccagatacgttagtccttgcatgagggtcttggtgaggcctgctgcaaaccagt

SEQ ID NO: 572508 - DNA, 1174 bp, Homo sapiens
  misc_feature (319)..(319): n is a, c, g, or t
  misc_feature (330)..(330): n is a, c, g, or t
  misc_feature (336)..(336): n is a, c, g, or t
ggtctctcgccaggcgtcctcgttggtagatgacatcgactgtattacataccctgccgatggccatattccctggatcgacataactgacctgatgcatggcccttacgagttacatgtactagggtcgaaccatggtaaggtgccatacgtacatttccctatatagtattctagtcgcaactacttgtgattgaatctatcctgaaaatgtcttcattggtcgggagctggtacggattgtgtggcttccatacgacagcattgctgcaggcatccgacaatgcttgcgcttcgctggagtgaaggacctggtggnctgtcctgacntgcggncgacgtaaacaacgcattgaacctggcgacgagggtccatctaccggagtgtgtcagccctgcgtaaaatagatcccacaggctgcctgagtagattacagctggtatgtgccttgcacatacctaccgaggtcgaagacctgttgtgggcttcttgtatggtgtgaccccaaagagaatgggaatcgccgttcatcatgtacgtacttccacggggtatcaatttgtttttgccctcagggctacaatatttagaggaggttcggctcaacgtattgacgttgtcacactgattgactttgtgttgtcgctatggtcggtcacacaccagttggctggacatgttctctattgtttggttcgatgtcacccacagaaaagcgaattagggtatcccatcggtgtggccccactgtaggagaaacggtaacacatctctatttattgttgcaccaaggcgcccttcttaaagcgtagctctaaccccaacgataaaagaaactcttttcgcaaatgtgggtgggctaacctccaaatttggaaattatattctccgcgggcaaaggtggtaaattcgctggcgtgtgtttagaatcctcatgggcatacatgggtaagcatcttataaagtgttgggaaagtcgctagttaggaaaattgtcccatcaggcctgtgctggaaaaaccaatggactttcaaagccaattcattcaccgccccccatgtaccttcccctttttggggagacatgggggttccaattcccaaggcacaagcggttgctttccggaaacaaaattttggggcaagagccattctttatcagaaaccccttgg

SEQ ID NO: 572509 - DNA, 1559 bp, Homo sapiens
  misc_feature (240)..(240): n is a, c, g, or t
  misc_feature (411)..(411): n is a, c, g, or t
ggcctcgttgcgatggatatccggaggttcattctccggcttgagaagccagacgtagatgattacaccaacgtgtcctcactatcagaggacgcatgtcttggactcctctgaagcgagacgtcgcatgctcaatagagaggattaatcgacacctggatatgttagttaccaccagggagacgtgttcctccctgaatcgtcctgcactgaaaacgaacacaaagcctggatggcttnccactcgcgcagtacggtatcgctctaatagccatgccctcatgacccgaaggtgacaaggtcgccatgatatactgaagacaggactcgtggtgcgagtgccgaagaggatcttagccttctgacagtccatccttactcaggtgcacttgagaaacagcgagagactgntcacgcagacagtgtgacacgggcagatgcaggagaggcatttttggttccagcggaaagctatgcgtcggttggtcaacaacgcaggatgttgtcccctatgagaaggctcttttccctggtaactctaagcctacttagtgggacgaattgacgtgtgccgcgcccgtgatgagcaagttgagactgtatggtgcgccagtgggagttaccgcaaacgaggtgagttgtgctcaagaaggcaagtggcataacgattcacctgtgctgaatgagaaaccaacgagaaactcattgagcggaagaacgcggaccttcgttggtcgcccgggttgagcacaggtggtgtttgccccctttgtggggcatgtttctcgttgagaggcgacaggttcatgtgtggagcacatacatgggggggaaaacgtaccagggggtctactcgcgtttggagaagcacaccagtttataattgtaactctcataaagcctaacccttccttcgaagagcgggaggaaccatcccactttgagcccctggtggatagccacactatttcacggttcggaccatacatcacagttttctacaacagagggggcgcataagaagtccgagagcaaatcgtgaaaaggaaacgaccataacttggggaaggtggcaggcgagggaaacattttttccgaaggcggcccactattaaacactctggccatgtaaccttggccgagagatgaataagttctttgctaggggttcggcgctagggcatagaaaaggtcgcaacgcaaccgttccaacattaggatggccccaccattgtggcgcacttggttagaggggttgttgtcggagccgtttgaatacggtcggtttacagccattattatgtggccatactgtgtggacacctatgcaccaagtttaagtaacacatttgcccgaggtccaattgtggctacccaagacccacgagggggtgtactaccctacgtgacagcgctccacaatagagagtccgttaatgagatactcacctcagggaaaatgtgtaatattgggtaggagtgccagaatagacccacaacacttctgcctcaccgaagtgtggccaggacgattacaacaaacgaatgaacacgtgcga

SEQ ID NO: 572510 - DNA, 388 bp, Homo sapiens
catgctgatcgtcacgatagcgatccatgtgggcatggatcgcgtacatgtgcggatgacggctccatcgcaacagcatccccaccatcgatggatagtagttcggctggaagaactccgatggaatgttctctttccatttcccgcagtcgacagcgtcatcttcgctatggtcgacatggccctggacgcggaatacacagtactccacatccgggatccaccagcgcgtgtagttcacccgatacaccaggcgctcagacacaatgacagctctctactctctctacatactaactattacacaacgaggaaaatacacccaccacattaacaacatcaaaccctcattcacacgagaaaacgccctccgttgagatcagcatgt

SEQ ID NO: 572511 - DNA, 1016 bp, Homo sapiens
agaatcaagtatggagtaaatcggtggagtcgagagatggggctcgtgacggggcgccctgcaccgtctcccaggcgcacctcccccgtgcccggcgatcgctctccggaaccgtgcaattgggcgccagggcggtaatgttagatcatatcgtacttcaggccctaaatcgagcgaagagtaccgtggggactatactgtaccggatgcccatagtctggctgaatcccgactttgaatcacgcagccttcagccaggctctagatcgggtgtgagtggtgagactctcgaagcctcaaacatgtcaacgaagagactcagcaaagcacccgccatgactcggagactgaggacatgttatgggaacgaccatgctacatggccagagtgcctggtcatctgtcaccagtgtaacagctgagggggccccatgtgaatacccattcagtcagggaaccaaaacagtggaaaccaaaagaaggaatgtcttaccaggccagaattcatttaattctggcttagcaattctaggtaccttgcctctgatcgacgttactgcacataactcctggacagcgggaattgaagtgcatacgaggatggaatatgtctgctgtggaaataaagtggcaatcattcactgagcagcggtcaaatgcctctcctagcaacgaccgtagggcaatcgagacttgctgcggacacgagaccactgatggaattaccactccaccaattctgcacccttggagctgcacgatgagaacgaccacgcgacagagcagaggccagtccccctccgagcccgcaccgccctaggggtgacacccggacaaacccagatcgagcgcaaagcgatcacgcacaggtggtacagccaaatgatgcccacagcccgaggcgacaacgatcacagcgacctaggagcaatcaagccacaaaaatgtgcagacagaacatgaagcaccgactctcaaggcacaaaacacgagaaccacaacactcacagctagta

SEQ ID NO: 572512 - DNA, 178 bp, Homo sapiens
ctggagctgtgcctcagtgaaggggcccagcctgaggaaatactggtctcaggagccacacggcgcgacaagatggcggatagggagaagaagaaaaaggagagcatcttggacttgtccaagtacatcgacaagacgatccatgaacggatccgttcatggatagtcgacgtcggta

SEQ ID NO: 572513 - DNA, 940 bp, Homo sapiens
ttatttatatatgggctggtcttgttggtactggttgtgctccgaagacagaagcaatgggaaggtttcatgcttttgtttaacaggccctttgaacgctatcgaatagttcgcgattgaaatagatggaggtaatattttgagtgcttaagatctggttgtctaggcttgtcttcaaagagtgagttaacagtcgtggtattcacacaaatttggtataattgcctggttatgaaccgattcaattttaacttaatcgactatagaattagaagatactataggatcgtatttggcacatattcaagtggtatattttaatagctgttcaccgagattctttggatatatatgaaggacgtggctttgtgacccaacgcaggggtgcactagtctatttagggaatcaacagcagggttaaactattgcaacctttatcataatactcgctatgtgcctcgtacaaaacttcggtacgtggttctcacggtgtactctaatccctaggaaattttttgttcccaccttcaacacctggggcggcctatggcgtgcgcgtcaaacttcatctggaactcttgccgagacggaaaatatattgtaacgcggcctgaaatatataccttcctaaagtttattaggcacctgggcataattaatggttcgccacctcagtggagtgatacttactggtcattattcactccaatgtacaagcgttaaggggtactgggacacgagcggcggattgtggccatttcggcagccgtccccggcaaatctggatatgtgtcgaactggataccgcacaagactgtgggctgcacggggagaacctatgggcaagaagtacagaacgagcctaactaccgaacttttgcaccgttttgtataacggttgtgcctggcgttaacaaccaaatcggacacaagggaaac

SEQ ID NO: 572514 - DNA, 851 bp, Homo sapiens
ggcacaggtccccctagaccctgtgccgggactgtgtcgcgacgagttcgctaaggggcaacaaggtagccttctgcgggacccgattgtccgcggcgggacaaagcgttgttcccaatccttccgagacgagattgggtaagcattccgggcccaggaatccgaagtgtcctccttatacccgggtgttcgtcgccgcggccattttcccccctggtggaacacaatgggcagcctgtgctccgcacctctcaacatggctggaaactcccttggcctcggattctcgagtcgttgtgcccgcgtctgggtccaatatggggccccggtttgtgaatgacacgcccagacttttcccgctcgtggcgtaggattatttcccccggaatctttcctgcgcccgccggtgggtgcagtttgagtaatccacccaggtacgccgcacaggatttttccctctttataggagccccaattcgttgtggccccggccctttcttagagcttgttgccccattggcccttcgcccccggtgcggtccacccccggtgggtcctctgggcgcgtgcacggcatcccccgcgggcctctcctacacaagcccgggccgcaatggggaaaccccctgtccccaagggaatgacacaaacaatgtaatccaccgcgtgcggggacaccccccccggtgggccccccgacattggcgccggcggagaggcacacagaggagattcaccactggaaccaccaccggagagggaagaaggtttcccctcgtgcccggatcgaagtccgagctctgtcctccctgacgcctgagcagcactggcaatatcctcgcccacatgac

SEQ ID NO: 572515 - DNA, 635 bp, Homo sapiens
caggcaaaatctgatatatcaccattaaagaaagaacttattcatgtgttggttcgcctgttcgcccaaaagctattgaaataaaccacaacaaaacaaaacaaaacaaaaaaccttttccactctcctcaaaccatggtatctatctactacgtctccccttcctctcaacagatttcacttttgcaaaatcaaaagccacaaaccttctggctaccaaaccatcacacttactaatacctacatctaccctttttccatcttgtcacagtggaacgagtgactgcctctgatatgggttggctctgtgtccctacccaaatctcatgtgacattgtaatcctcagtgttggaggtggggcctggtgggaggtgattaaatcatggggacatatttcccctttggggctggtctcgtgatagggagttatcgagagatctgggtggttaaaagttcacctcccctctctttcttcttctgctcgaccatgaagatgggcctgctatgtgcttggttctcttaacttacatatgaatggagtttccgagggctcccagcactctttctgttcaagcgttgaaccggaaggcaattctctttctttctaattacccgccatggattttttttctgg

SEQ ID NO: 572516 - DNA, 395 bp, Homo sapiens
cccctttttggcgggggggggggggcaaataaaacccccccttttttttttccaagagcccccgttttttttttggggaaacctggaccccgggggggtgggtcttttttttggcccccgggggggtggggtgcccccccttttgttttttttttagggtggttttggatgggggaattttttcccattttggccctttttttgggttttcccccccccccccaaacggggttttgggtttccccccccccccccccgggttttgggccaagggggggggtttcttcttggggccttttttttttttgggttttgtttttttggggggggggcctttttttttgggaaaccctttcttttgggttgttttaaaacaaaatccctttttcccccca

SEQ ID NO: 572517 - DNA, 249 bp, Homo sapiens
ggtccgggatcggcatagggattgggggtggatggggtgtgagagaaaggagggagagtgcctgggcagctgggatgatagggcatccccgagcttcatttcctgcccagacgctcccctctgtggcctcctttcctccaaggcctcgccagctctcaccctcccttccctctacctcccctcctctggaagatgtcggagtctagggcagcctgcagttgcgggagcccacactcccatcccctctcg

SEQ ID NO: 572518 - DNA, 424 bp, Homo sapiens
tgcggcatcattgccatttcacatgtgagcatactgtacaccagactatgctgaactgactttctgttaacatggtaaggagggatgtagggaaatacatgtatctgcccaccctagctagctacaattctgcctatagtcttccaaattgtacaggacgaggaaaagtctgtccatagatagatactgcaaacagcgcactgtgttactagcttatcgcctgtttaaacaagagaaagctttcccacactggtgagctggagataatctcgcagcccctgggcatgtgaggtctggtgataggagtgttgcttgatgtcttggtcctgttcttacggatattgggtttcatgtttggcctaaattccagccagtttttaaacagaaaattatggatgtaggcagcctttctgtttgtctaacc

SEQ ID NO: 572519 - DNA, 316 bp, Homo sapiens
agctttgattgaattcgagcagccacatgtgttattgcactgagcaagtactcgtgacaccatgcaacagacagtgcttataatcacagattaggaaatggattcccaggaggggacctgcccaggatcacagcatgacaaagctgggactcaggggtcttgagtctgaccaagaatatacccaattaccaatttatctaatactctcctggggtgataaggccccaaacccactcctcccataggtgataccatgggaaaggggtgcaggaagggcaaagaagtacggtgggcataaggtactagggatacttag

SEQ ID NO: 572520 - DNA, 734 bp, Homo sapiens
  misc_feature (292)..(292): n is a, c, g, or t
acacaaggtcagattgacactatgaagctcaagctaccaaggggaaagtggcatatattggactcaggatctcaacagctgggtgtttcagcattacgttgtgtaaagacttgagagggacagtaccagtgaagacaaataagctgcaatgtcgtgacagataccaacttctgaggaagctggtgtttgtacaagctagcattgaatgctagtcgcaattgtgcgaggtaggtcaatcgttcgaagtagacaagcgagctttgttggctggcctttatggacatgggtaccnaattgcctttggtaatgatggtaaataatgtgagctagcactgtctgctgttccttttgattgtctctttatgaacatgtcattcacatggagaaatatgattcgagatgcttgaattctcactgtaagttcggttcttgaatgttcaacgcaagagatcttagctgtacttgaatgtgccgctggtgtaggttagacacacctagacttgctgtagactgtactcaggtcccaggttgtacgttctttctatggagaagagaaaaacacgtaatcttaaattgatatccagcaagtgtttctggtatcctttaagaaaagttagagactattatttccttcccttccctgtgcagcattcgaaaagtcacccctagaaaaagtgagtgtttaaatgagacttcctaggaagggatgcactgtaacaacaaaagtattctgg

SEQ ID NO: 572521 - DNA, 567 bp, Homo sapiens
  misc_feature (435)..(435): n is a, c, g, or t
cacgaggggctgcgtcgtcgctcaccggcacgtcaaagaactgaagaggcgtaaggctgtcgtagcaatactgagggctcacctgtatccgccagccggcaatattcctcatggcccaccaaaccttcgatgactgggaatgatttgggggcaagtccgtacagaaatcaaacgtcgcagaaaaagaatgtaaacggagcttgtctttaacgccctaacgcaaacgactttccgtcgtttaatttgacctgtggcaagttgggctgctgctccgcgtgtacatccgaaaaaggtttttgttctggatgatatgcaatgcagctaacccgctctcagagttttgtggcgtgccagaagcccattttcgggatcgacaagcaactcgccctctaccgcaagatgctgctcatccggaaggtcgaggaaatgctcggnaacgcctcgctcgccgcggagctgccggggccggtgcatctctatgtggggcaagaggccatcgcggtgggcgtctgccatcacctcgcggagacagactggattgcgagcacgcatcccgggcacgggcat

SEQ ID NO: 572522 - DNA, 646 bp, Homo sapiens
cataatcactgaccagccttgacactccccttgcaaaccatcccagcactgcaccccaggcagcactcctagccttgggctttggcatgagatgcgggctccttagttccgccataatggatacaagcgtcagttaaacagtatgagatggttgcacgtggaagtgagataatgacagagtgaaacgaagtattggagcgaaattagggtagaaaaagtagattgagagtaagagggtaaagcatagaggaaacgtaataaggaatagactataagaaggggacagcattgatagtacaagacagaatcgaagcaaggaacagaagtgaaagacacgcgtagccgcaacgacaattcgatccaagggaactatacgacaacaagcagtacttgcccctgaatggtacggcccatggaccgtgtacggagtacccaaggcccgggaacgaaattaacgggcagatagtacaagaattgctgacaccccctggcaaagcactgaccaaccaagcgggactcacccgagataacacaccccgtgacaggcatgggacggaaaagaacaaagaaaaggggcggccccaatgataacaacaagatgaaggcggcagcacaaagaaacaaacgacaccagcccctgcaccaa

SEQ ID NO: 572523 - DNA, 743 bp, Homo sapiens
ctgcggcagacggcgacagtggcggcggtgctgccattgcagggcttgcaggatccctgctgccttggtgatccctgggctgacagccagagagcacagcggctcagcttcctggagagtgagggttgaaggaaatgctgtgagtggcatgcctgcctgctgccctgctgtgctccctattagtgtcgtgttcctgcagctgtgtgccctggtcagctctttgtgttgaatgtgccgctgccctgtgcagaggatcattgtactttgcacctcgcgaggttgtgcgttgcgattgcacccgtggtcccatcccttcattacgcgccgaaggcccgcccttcgaaccgccactggtccccctttgattgagggtttccatgggccccgacagttcccaggtttggtttcaaggttgggtaggcgttatccgttacgcggcgttagggccatccaactgggcgagtttcgccgtttctccgtttggggagatacactctgtgtgactaatgggccgccgattttttggcggaagccagagaggtactattagtttggcatttggacgcaccgcttttttgggaggagtatacttagtttaatccaccgcgttttaggtggcgccaaggtggcagacccaccgcgatttgagtattctcccccggttattagggttccgcattcggccgtttagcttacgggccgatttggccagttagatgacgcagcaacacaaatctgtttgg

SEQ ID NO: 572524 - DNA, 244 bp, Homo sapiens
cgcatggggtctgtacaaagacagttagatttggcctagtgaggttttactggccctcaaatccgaaagcaagagtgaggggtttagtttaagagacaaatgagcacttctcaccaactctggatggaatctagaatgcaaatgctgagctgggttggtagtgctttttcgatgttcagagagcggattttttcagaggctaaagggtccagtagcaaaaggaggtgtcagcggatgtcatcaa

SEQ ID NO: 572525 - DNA, 263 bp, Homo sapiens
tggatcgagaggctgctactacgagggctatgtggctgattgaagagtatgctatgagcgattgcaggtctgtctgtcgctagccgcatgagcatgttataacttatgcctcactagggatagtacaaggtaaggggtaggctatgtgtgttgtcatgggggttgagaatgagtgtgaggcgtattataccatatccgcctagttttaagagttctgcggcgagtactattgacccagcgatgggggcatcagcattgtctga

SEQ ID NO: 572526 - DNA, 243 bp, Homo sapiens
accgttgctaggtggcggatcactgcggtcacggacgttcggaccacgctggcaacatagtgaaaccccatgtctactaaaaatacaaaaaattagctgggcgtggtgtcaggcgcccgtaattccagtgactcaggaggctgacggacggagaatctgcttgaacgtggggaggcggacggttgcagtgacgctgagatcgcgccgttgcacctccacgcctacggaaccgggggactcctc

SEQ ID NO: 572527 - DNA, 100 bp, Homo sapiens
tgctgggattatagacgtgagccactgcgcccagcccccctgatctttagaactgccctgctcgcctatgttacaccaaccccacggtgcgttggcccaa

SEQ ID NO: 572528 - DNA, 251 bp, Homo sapiens
cctcctggcctcaccctccctacccagagccccttcacatcccaatgcacagtccctctgcctgttgtacattcttcttgcaccggggatttaagagccttggctctttggagtcttgccttgggggttccgcttagccattcaccccttggggtgtttatagcgttttgagaaggtgtctgtccttagggcccaccattggagaggaacccccagacttctttctagaagccagggcttcagcttggggg

SEQ ID NO: 572529 - DNA, 472 bp, Homo sapiens
gtgagtcgcgcaggaagtctactttctatctcatatagatttgcctgtgttgggtggttcacatcaatgatatgtttgaatatgtaagttgtcgtgagtggcttctttgctgtgagcagagagctctctatgttggagcagatatcattacttcattcatttgtattgttgaataatatcccattgtacggctatcccacatcttatttatctattcactgatcgatggacattgatgtgtgtggattgctctataggatatacatgaataatgctgctgtgaacatgtgtgtacaggcttaagtgtagacatgtattttcatttcattgagtgtatacctaggagtagaattgctaggttatatggcagtcctatgtttaaccattcgaggaattgccagacaatttttcaaagggatttgctccatttcatagtcccaaccagctgtgtacaagggttctcatttctcca

SEQ ID NO: 572530 - DNA, 667 bp, Homo sapiens
  misc_feature (47)..(47): n is a, c, g, or t
  misc_feature (482)..(482): n is a, c, g, or t
  misc_feature (538)..(538): n is a, c, g, or t
  misc_feature (590)..(590): n is a, c, g, or t
  misc_feature (667)..(667): n is a, c, g, or t
atgtcctgccacatagttagctgccctgtgccaattactttgcacanaagaccttgttggaaataatgatgtgacccttcacaatgtagttcagcaccctccttcttgtcctttcctcatctttaggcagaaggcatctgcctaaaacgtacatgtgattttatcactcccttgcttccatgtcttacaaaggctagacagcatggcatgtgcctggacaacagccacagtaactcaccacagtagtgtgacaactcctgagcttgtctatactctgtccagcgaaatgagaccactgattaaatggcagtgtcatttatgctatgtttctagatgcttactcttcatttttgtacttatcttgtagcagaccagtaacaaacagtccatggtctggttctgttccatggaccacacttggagtagcactgggttagaaagtcacctagtatgtagtgtatgcccagtaaatatctgttcantgagtgagtagtggtgacggtggcttcattgaggtagtgtgaagcatctcctgctntgggggtccacggtacctgtgcctgagtggacacatttgtctgaaagctagntttaaaattatagtactatgatattatatatcaaaaatatcttctttctacccaaaacctttggtggaagcataaan

SEQ ID NO: 572531 - DNA, 286 bp, Homo sapiens
cccccccccggttttttttcttctcttgtaattccccgggggcgggaccccccccggcgttttatctttgggccgggggggggtaacccttttcccccaggaccccctttttcccccttgggcccttttgggggcccctttttccccctttgttccaaaaaacccggtggggcccggccggggttccccgggttttttttcccccccgggccccccccccgccccccggccggggggggtttttggggtttttttttttggccttttttggggaagaaaagaagga

SEQ ID NO: 572532 - DNA, 328 bp, Homo sapiens
  misc_feature (168)..(168): n is a, c, g, or t
gggggggggggccccttggggtccccccccccccccccggggggtttttttcacccccctcccccccggtttttttccccggggggcccggggcccccccccccccccttgggtttttttggggggggggcccccccacccggggaaagggtttttcccccccccaanttttttttctcccggggggggggggttcccccccccaattatagaccggggggggggggggtcccccccccctttccccccgggggggggggggggggcccccccggggttttttttttttttggggggtttttttttaattacccgggggggggcccca

SEQ ID NO: 572533 - DNA, 113 bp, Homo sapiens
gacatgtcaggttctggaaaaaaatagaagcagggaattgaattgtataaacattttcgtcgtcgacctgggagtaatggagagtattgcagttaggggtacctgagctcgaa

SEQ ID NO: 572534 - DNA, 1307 bp, Homo sapiens
tgtgcgtcggcctgtctgttttggtgcatgctgtgtgtgttgtgcttccactcttcgttgtttctctcgtacggcactctcctggttggtgtcgtaccgtgtggtttgttcttcctgtttttttgtgtgggggtgttttcatatgagtagttcgtgcttgttatgtttcgtcttgtattcctcatcgtatttctgtcttgtcttgtttgtatcctcctgccgctgcgtggttgtttaggtatattcgcgcccctcctataattgtttcttcccgggggtttttgttgggttcctctctacgtttgtgtgtcacatggagatcgcccacagggtgtctccacagcggggtcgcctagagtgtccccctctttttgtgttcagagatgttccctcttggggccgcaaagatccgacacttgtgaaccatgtccaggtgtgaacaccccaagtgtatcacgcggggggacataccctgggatgttagttcgggagacccatgacccaaactggattaacttgggtcttttttctgagaacttttccttgttagccccaaatatgcgttagaccccaccccagtatgcgccgtgacatgactttgtaaagattttccacgattcttcctatccgtacccgtattggttacttcctttccacggaatgccaaaggtcttatttatcccctcccgtgagaggaaaataatttgtaaaaatttaaaggagttattgctcgccctgtgactacccaaaattgtaagtactcttgttttgtgtgtttctcttgtttaaaagagaagtgggaaaatgtttactattaccacgggagcctcacacacctgccctcccaatacacggctggaattaaacctcgtttttaagtccacgggagttttagagctgagcctcccactttaaattaatggtttaaaaaatgagaactttaactcctgagacctcgtgatcacatgtttcacggaaggaatgaaagaggagttctttcttaataaaaggaaaacacctcaaggagctttgttcactttcccaagctaacttgtttaacacattgtacacctgcgagccacccttgccgcttttcactcacacagcttgaataatttaaattctgtgacttataatctgtaaaatagcccggaatttcctcgtttgtggatctattatagcccttttaccaaaaaaatggctgtgaaattattgtgaaataattaaagggactttccttacttccttcccttttttcaggctttttttgactgttcctttccctacccactcaggccttcttatta

SEQ ID NO: 572535 - DNA, 320 bp, Homo sapiens
tgcgcattggcagcaacactcgaatcagacacagccacaccggaaacaaccttggcaacgcccacagcctccgtactggacattgataccggcttggaagcactgagagtagacgcagcggcccccgccgcaagattgctattcacattcacgcgatgatcaatatcagtgaccttaccatccagcgccttgagcgctgcacccacactgccgtaactactgccctgtatttgatacaccggcgcaaccaacaccccttgcgcacctactgccgcaccaccgcctaaaatactggccatgctacttagggtctggaagag

SEQ ID NO: 572536 - DNA, 185 bp, Homo sapiens
cccggacaacattgctgtttgatgactgcctgatcgatatgagccggttattacttctgtttaggagactgtgccctctgtggtgcctctcttggctctactccacatattccagacctcttctaagaggatgagctgagcagctttgtggttgagctgtttctctttgtctgccttcccaaagc

SEQ ID NO: 572537 - DNA, 797 bp, Homo sapiens
  misc_feature (151)..(151): n is a, c, g, or t
  misc_feature (200)..(200): n is a, c, g, or t
  misc_feature (206)..(206): n is a, c, g, or t
  misc_feature (232)..(232): n is a, c, g, or t
  misc_feature (274)..(274): n is a, c, g, or t
  misc_feature (470)..(471): n is a, c, g, or t
  misc_feature (546)..(546): n is a, c, g, or t
  misc_feature (616)..(616): n is a, c, g, or t
tctgaccctggccccgtgtaagaggccgggcatttaccccccgccgagtctgtagtgtcagtaccccctgttgggagcgtctttaatttattttatccgccggcacccgtgactcgttgacccaacacgccccccaggtcctccttagacnttctcccgactcctcgccatgtttagaagatttctcggttgggggagcngactcnctctggagcgccaggcagacgcctcncacccttctcccgaggccaccgttatcacttggctataagancttctacaccaccgcgtcacaaatgccggatctatcttatatatctcctcacttggttagtccctcagctatagcttgtagccccaaccgcggaaccacacgtctatccccttcatgcggtagatttacgcacgcgccgcacttcctcatttttctatagaggtccaccatatccacaccacacatatagggtttnnatacgacgcctctcgacatgtgtggggagtcacaggagcactacccacacttgcgtgcgcacaccccgcgtaatnttacaaggtgttcgttttgtgttcacacacgagttttaaaagtgcctaaccgtggagttctctgaggttncacgacccccgggttatcccacaggtgctggtgttctctaatttaacttgccaaatttcctccccccgtgtccgcaaggacctaagagaaataaggcctacttccccaagcgcctttccccctaaatgaaatcatttccactttgttttaaaccccccccccccccaggaccagggtttta

SEQ ID NO: 572538 - DNA, 335 bp, Homo sapiens
tccaggtaaagttatgaggacttttgttagtaatacaaggttaagaacaccttattgtggacaaccctgaatgctgaacttagactttcaattttcaaacaggtaggttctttatttcctatcgtgccatcatgaataagtattgagttaggggcataaaattaattttcttaattaaagaggttagcaaattggaaatggggtcacttggagaaaacgaacgttgttggcaaggtggtgtttccttctggctgctctatgaattgatttgttccctctctttacccagttttagagacccttgcattccttgcctcatggctctgtatgtatct

SEQ ID NO: 572539 - DNA, 220 bp, Homo sapiens
tgagctcggtaccgcacgtgcacacacctggcttattttttgtttgttgtctttaagagaggaggtttcactatgttgccggctagtttcaaactcctgggctcaagcagtcctccttcctgggcctcccaaagtgctgggattatagatgtgagccaccatgtccagctgcatcgctgctttggatcagctataactacctgaagaaaagagtgcttgg

SEQ ID NO: 572540 - DNA, 208 bp, Homo sapiens
aaactgaagctcaatgtattgtggcaggtctgtggtcctgaagcatccatgcctcggaatgctgagatcagccacagaccaggtcacacttctgttgcacattgatgggcaccctcggccacctaccaatggttccgagatgggaccccctttctgatggtcagagcaaccacacagtcagcagcaaggagtggaaactgatgctctg

SEQ ID NO: 572541 - DNA, 484 bp, Homo sapiens
acatgacaaaggcatgtggccacatccatctgcatctggacagtgtgatggtctggcgcccatggggcctctgctcagtggttctcatgctggagctgcgccagagtacctgctgtagggcttcttgcaacatggattgctggccctgccccaggcatttctgattcagtaagttttgggtggggcccaagaacctacatttctaacaagtttcctgatggtgctgctactgctgggaccccactgcgagaacctctgccccagtgcaaccctggctcccctgtctgttgatgtgggaagttactggctgcctctaagccagtctacccatgtgggaggtggggcgctgtccacttcatgggtggatataggatcacatgcagccctaaaatttgcaggagccaggaagaggatgaaagcccacacatccaaatatttaaatattgtgacatcccgaaaataaaaacaaacaacaaaaaaaaag

SEQ ID NO: 572542 - DNA, 190 bp, Homo sapiens
agtcacactgcttgggcatatatctggacaaaacttgcctgagaaaagacgcatgcacccacatgttcattgtagctctatacacaatagccaagacatggaaacaacccaaatgttcattgacagatgattggattaggcagaaatggtatatatacaaaacggaatactactccgtaattagggttgc

SEQ ID NO: 572543 - DNA, 651 bp, Homo sapiens
gtgtgtgtgtgtgtgcacgtacatactgtatagtcttaaaaatagcattatactggccagggtggtggctaacgcctgtaatcccagcacttgggaggccgaggcgggtggatcaactgtggtcaggagtttgagatcagccaggccaacctggtgaaaccccgtctctactaaaaatacaaaaattagctgggcgtgatggtgggcgcctgtaatcccagctacttgggaggctgaggcaggagaatcacttgaacccgggaggcggaggttgcagtgagccgagatcgcaccattgcactccagtctgggcaacagagggagattccgtctcaaaaaaaaaaaaaggaaaagggaaaaaaaaataagctattatacctccttcctgggtctcaaccggccatggaaatatttctggaaccatctccaaattccaggtgcggaatatatccaataacaaattttctatcaaggtattaagaactaatttttagcttcttactaggtaactagtatcactttaaaaagcgcctcagggggtatattatccttctaaacaggttacaatttcaggggcagctactttagccaactatggtcctctagttggagaacaacttaggggcctatttcactggtggtggtaggcct

SEQ ID NO: 572544 - DNA, 777 bp, Homo sapiens
aaactggtttttttcaaaaaaaaaaaaaaaagcaaaaccaaaaaaaaaacccaaaagcggcttgtttaaaatccggtgggaggtaaggtggtctatacttttttccccttttgggcgagcaactttacacaggcatttttataacacctttttttttcttagttttttgggtccgggttgggtttcccattcagggaatttggaggttctcttcttaacccagtttacgggggggacattagggaaaccttcagtagaaatacctgggggagatctggtaggaggttaaaggtcgtggatctggatctttaaacttcaagtaaggccacttattcgtggcaattttgggtacatttattattagtgatatttgggaaagatttgtgggaccctttattgacaaaaaaaatttaggcaaattttcggtctcttttttccccaaaggggggaaaaggttattggtgcgtggcaaattaggtgggggtggtcttataatattaacctgtggctgtagaacaccagcgccaattgggggctatctagtatattcttttatatattgcggccctatagaaaatttctcatcccattggttgtggtatataggggaaatctcccgtggtatgtcgcccacttattatgcttaaaattggccagaaatttccttcatcctgtgggattgggttaacccttttcaaaaacctttctaggtaccaccttggtgttgcttttcccccgttggtgtttcagcggggcgacaagggttttcacacagag

SEQ ID NO: 572545 - DNA, 122 bp, Homo sapiens
accccatgtaatcacgggttccttaaacatatgaaagaggtaagagctagtgtcagagaaagactcagccagccattactggtttttgtggatgtaaagagtccacatgccacaggaatgca

SEQ ID NO: 572546 - DNA, 503 bp, Homo sapiens
  misc_feature (19)..(19): n is a, c, g, or t
  misc_feature (31)..(31): n is a, c, g, or t
ctttagccaaacgctgccnaggatggcttcnactcggagctcccagccctgcctccctacatcctacactggagctcctagcacagcaaccctaactggaacaagcctcagtgcaggcccccggatccttctggaagaaatgtaatgggcctcagaaagtcctgtgatagaacagcactggatatgtgaaggagaggaaaacagtctggagccccatttgggggaaagggaaccaaagccaaaaataacctgtcacagcctcaaagataactgcacagaagacctggatcttaaaactcctcatgattctcatcccagtcattccacttctgggattctgttttagaaaataatctaaaagtaatcaagcgtaggcacaattattcatcaccatattatttagaactgaaaacagcctgaatgtggaagttagtaaattatagtgcaacttgataaaaactatgatgaaaatatttataaagcatcttaaagagaaaaaaaaa

SEQ ID NO: 572547 - DNA, 396 bp, Homo sapiens
cagtgtcccgaacaatggtttgacccagtgatgtgctggtctgagtcagctcattccactatgtcgggaacatgctggtaacagagcatgtgccacggacagcagcgctggctgccgcctccctggtggggccgagggtccctgagacagaggcgccgggcccttgaccatcaaggggtaagaagctgcagccgtttggcggcgtcccacccccgcaggtgccctccatctcccgggcccaggaccaagatccctggaccaagcacctgggtgacgccacgcccacaagaaggagccagacatccgcaggcccgtggagacaaggcgcgctgctcacctgcgggatgccgtactggtcgatgacctgccagatgtaccagtcttccttccgggaca

SEQ ID NO: 572548 - DNA, 1489 bp, Homo sapiens
cttgtgggataatctctctggtggaaaaccggaaggctttactacataatcattgtggggctaaacagaggattcgccatcggttctggaggggaaatctcagacggctgttttttaaccccctctgctatgagtggcagaacattatggtgtcctacagaagatgttgtttctaacaatgctttctgttccccgaggacctatccgcgggtttgttattaactttgctgtgcaacatatcagaagatattgtgaatgggaggaccttattatctcactttggggagggcacctctgctctctggtgagtactatttttttcacgggtataccaacgggtacacatgggtggtgtccaacacacatcaaaccgccctttgcgtttgggcgcccctctggattgttgttgccccaccgggcggggtgtgttgcccactttggccacgtttttcacgccccgggcaagtttgccactgggggcgttttttctatagacacccggcctcgttcttcggggattgtttctgtcgggggggaagcctcctcctccgcctcagggtggtgtttcctccgggagttttaaacaagtgttcacacacatttgtcgccgggaaaaaaacattttcacggtcgccccacacagtatatcctctgcctactttagggattttcccggagaggtcttcttgggagagaatttttggttggcaaaagtacataccttgtagagtggggagttttttctacacacgggcggttgtccacaacgcacacgcgttggtggttattaagaccatgggggctttacaatgggcccacaaggggccaacatatttttttccccaccgttctaaatgtgcgttcttttgtcgcacctgtggggtattgaaatgtgttgagaaagagagcaacatcttgacaaggggggagattctacagagagacttgtcgtgtgagcgaaagatggccccctcgccggctcttgtgacgcacacaggagggcgtttttttcaaaggctctctgtgaggaaatcgaaggacgaaaagtaggcaccccccaaggtgggtcgccaaacaccagagaccttcggtgcaacatcccccgacacacccacagtggggtgttaaataatagtcgccacaccggcgggatacacaacagaattggggcttagaatacccccagcacgtggcccaccgagatatttgggtggccctctcaggcgtctttctgttttggagactgatagaccacgtgatgccagcctggggagccaccatttctcagacccccatctatttggaaggatgccccaagagagcacacatggccagagtacaatcttctcatcccggaggcacaagcaatccttgcgatcctccagaatccgtggttctctgtccagattttattcccctttttttccttcccaggggttaagtaaaaccttgtttaaatttttattaatttaaaagatgggaatttgga

SEQ ID NO: 572549 - DNA, 413 bp, Homo sapiens
tcgagccggtaccagttctggtcccccactccgtcctgtcaacagtttgcaggccttctccgcctgggttggcagcaagaacagtaccaaccacagaaaagttgccctggttcctcacaccaaagttcctagatgaaaactctctcggctcagggggccttgggtagacattatggtccccatcagtgccagcctcacctgtactgcacgacttcctgtgtaccatgggtttcaatgggaacgcccggtccactccaactcgtttctttgtaaaggggataaagtcctggttattggctttgggataccaggattgagggcctgacgagtaaaacaaagcatttccttggccctgggaatcactttctggatcttgctggctgattccagtacagtgggggaccaggaactgc

SEQ ID NO: 572550 - DNA, 347 bp, Homo sapiens
gatcccaaagggcctggccaggggcttgggcacccggctcaaaagggatttttggtcagcccccggttttttccgcctccctggtaaagccagcagggccccaaaaggcagtgccttgggcatgtcccaaaggactgttccaggggagcgggctttttagggcccctttcagagagtcaaatatcccactctttctttaggtggaaagaaacccttcccggggtccagcttttgatggggggggtcagtattgggggccgcgggcatttttgggactttgccaagcaactgtgggcggctcatgttgagaaggggtttccgggaaccccgttgttttgtatttttta

SEQ ID NO: 572551 - DNA, 247 bp, Homo sapiens
  misc_feature (28)..(28): n is a, c, g, or t
ggaagtgcacatgcggaagaccagcacnaagagaaaaggccttgcgtgcgaacggcttcacagtacgtctcgaggatacctccaacaacaaaaccacttactgctcgtaaattcattttgacgaaccgtgagattcaacgtgactggcaccccagaacaatatgtaccttattctaccactagaaagaagattcaggagtggatcccaccttcaacaccttacaagtaaagacaatgaagaacagtt

SEQ ID NO: 572552 - DNA, 432 bp, Homo sapiens
acgactgttcgaccagggttgtacgagatatcgccctcagtctgatctagtctaattgctggtatagggacaatgatggaggatgggttcggcgagacaggtaggactggccatctcccatctatccgatctagttgcaggacggaaggatggcttcagccgaaggtggaatggttgtcctcctctggcgcatgctgacctctgggcggcgttccctcgagcagagatccctccttatttattgctagctcattcattcccggatctttgtctttttctttatgatctatcttttcactcgcagttctctttgggtggacagttgtcttgtttgggttgtgtgttcattgtgtgtctgttccgtcggcatgtccgctccaagttactcattttctgctattctgatacctcctttctttgtgcattccagag

SEQ ID NO: 572553 - DNA, 192 bp, Homo sapiens
  misc_feature (3)..(3): n is a, c, g, or t
gtncagccaatatgccgagccgcatctgcaacctacaccacagctcacggtaacaccggatccttaacccaccgagcaaggctaggaattgaacccacaacctcatggttcctagtcggattcattaattactgtgccacgacgggaactccctaagtatgtctttatccttagtaacctgataacctaacc

SEQ ID NO: 572554 - DNA, 695 bp, Homo sapiens
  misc_feature (295)..(295): n is a, c, g, or t
  misc_feature (302)..(302): n is a, c, g, or t
  misc_feature (306)..(306): n is a, c, g, or t
  misc_feature (311)..(312): n is a, c, g, or t
  misc_feature (332)..(332): n is a, c, g, or t
  misc_feature (350)..(350): n is a, c, g, or t
  misc_feature (513)..(513): n is a, c, g, or t
  misc_feature (524)..(524): n is a, c, g, or t
agttacttcagtaatctgttccatgagatatgatctgcctatgcgagtggtgaactaggcttgctatgtaatatagaacgtggctcaagtacatatcttgatatgtatgggcatactcttagtgatattgtatcctgtcctatctgcttgctcatgctagtccctgtgcacggctgagatctcagcactcttctcgttcatagctacagcaaaataatccaccgtctcttacatgaccctagctcaaagggttaccaacaaattaagattgctttccatgtttgaaatttaccantgagagncaangaagnngctattttgagtttagcatngatattgtgaaaataagngcaatttggatttcatgtttcttaatattcattcttgtttcacaaatgaatgattaaggaattatgcatcataaaggaacctaagtgaggtatatgatgagtgtattgtctttgcacacacatataggtatattctgaatacaagcttattcacattttgctncctaatctttntgtgtacagggattcaggtttcttattcttacaacatgatgtttatatgtgaagcacatcttgctgttgccttatttttgatgcttttattcatgacaagaattgtcaatataagaatgtatatcttttttgcaaccaatttaataaaggagttgaaagaaaaaaaaaaaa

SEQ ID NO: 572555 - DNA, 200 bp, Homo sapiens
tgggtggtgcgaaagctgctcaaggtgtatgtaccgctgctcaacggcgctctgcggcgcgagaaggtcatgtacgtcgtggccgttgcaatgttggtcgtggcgggcctcgtctatacacaggtcggcaagacctttttgccgacgatggacgagggagatctcatcgttggcatcgagaagctgccctcggtcagcct

SEQ ID NO: 572556 - DNA, 560 bp, Homo sapiens
  misc_feature (10)..(10): n is a, c, g, or t
  misc_feature (64)..(64): n is a, c, g, or t
  misc_feature (66)..(66): n is a, c, g, or t
  misc_feature (68)..(68): n is a, c, g, or t
  misc_feature (70)..(70): n is a, c, g, or t
  misc_feature (74)..(74): n is a, c, g, or t
  misc_feature (79)..(79): n is a, c, g, or t
  misc_feature (84)..(84): n is a, c, g, or t
  misc_feature (93)..(93): n is a, c, g, or t
  misc_feature (95)..(95): n is a, c, g, or t
  misc_feature (97)..(97): n is a, c, g, or t
  misc_feature (99)..(99): n is a, c, g, or t
  misc_feature (102)..(103): n is a, c, g, or t
  misc_feature (106)..(106): n is a, c, g, or t
  misc_feature (108)..(108): n is a, c, g, or t
  misc_feature (110)..(111): n is a, c, g, or t
  misc_feature (117)..(120): n is a, c, g, or t
  misc_feature (129)..(129): n is a, c, g, or t
  misc_feature (135)..(135): n is a, c, g, or t
  misc_feature (150)..(150): n is a, c, g, or t
  misc_feature (154)..(155): n is a, c, g, or t
  misc_feature (160)..(160): n is a, c, g, or t
  misc_feature (167)..(167): n is a, c, g, or t
  misc_feature (171)..(171): n is a, c, g, or t
  misc_feature (176)..(177): n is a, c, g, or t
  misc_feature (197)..(197): n is a, c, g, or t
  misc_feature (215)..(215): n is a, c, g, or t
  misc_feature (378)..(378): n is a, c, g, or t
  misc_feature (389)..(389): n is a, c, g, or t
tagtgatatntgtcccctgccctctgtcgcccacgccgcccaagcgcaggccgagacccagccncncngnaagnacagnaaaanaacccaccncncncnacnnacncnanncaaagnnnnaaaaaaaanaagaangcgggccacgggggngagnnaccantgagagncaangaagnngctattttgagtttagcatngatattgtgaaaataagngcaatttggatttcatgtttcttaatattcattcttgtttcacaaatgaatgattaaggaattatgcatcataaaggaacctaagtgaggtatatgatgagtgtattgtctttgcacacacatataggtatattctgaatacaagcttattcacattttgctncctaatctttntgtgtacagggattcaggtttcttattcttacaacatgatgtttatatgtgaagcacatcttgctgttgccttatttttgatgcttttattcatgacaagaattgtcaatataagaatgtatatcttttttgcaaccaatttaataaaggagttgaaagaaaaaaaaaaaa

SEQ ID NO: 572557 - DNA, 179 bp, Homo sapiens
  misc_feature (21)..(21): n is a, c, g, or t
tgtatctagaggatccttcgngtggctgattggattatatgaggaatccaaaagtgttgtcagagtctgtgggcatgcactgggtgagggctgactctcctcgcagcccctccagccctgtgtgtggctttaggctgcggcatgcacaccctaagttgtcagtcagcagacttccaggg

SEQ ID NO: 572558 - DNA, 835 bp, Homo sapiens
  misc_feature (552)..(552): n is a, c, g, or t
gattgtctgtccaaccaaacagccgatctggagacgggagccaaccagggtgcagttggaggttgaaatcaacaacagattagacaccgttttatagataggtgttctatcagcgaccatgtgacaagcacggtctctgacagtcagtttcatgacgaatggatgcgtgacagttcttacaacgagaatgcgttctcaactaggaatctctgcagactatattggagaggaagtcagttatgttatcacagcctctatgatgatacatgaggactagcatgtaatgatcatgaagacccaaatggttcaataagaaagtttcaggagaacaagatatatatcttccaagtagcagaacgtggtctaggataatgaaaaatgccatacctcaaaatcgggaataggattgcaaaagatgcgaaagaaatgtgttcacagaatgtgtaagtgagttcatcagttttataacatctgaaggaagtgaaaggtgggcatcaagagaaatggaaaagaatcaatggaggaagatattctctttgtctatgtctactnttaggcttagacagttatgtggaacctctgaagatgataccttcagaaatgtcagagaggctatgaaaggagaaacggggagcttggtggagtcagtgcacggctatccagatggactaagtgaaagagcttacagaggaggcatttactaagccagttaccagctggttaataaccacagacggtcaagcaaccacactgttatggtttacaacaaaatcatatcaaccagatttctggtgttccagaacatcagttcatgatcttgaaagcaactgatgga

SEQ ID NO: 572559 - DNA, 250 bp, Homo sapiens
aaacaccgcaatctccttcaatgccagttatagagggtgtttttttttaacatgaagagatgttcaattttatggaagccttttctgtgtctgtaagatgatcttgtggtttgtttaattctgcttatgtgatgaatcacatttattgatttgcatatgttgacccaactttgcatcccagaaataaagcctacttggtcatagtggattagctttttgacatacggctagattcagattgcggtgtttg

SEQ ID NO: 572560 - DNA, 102 bp, Homo sapiens
atcatgtaatatgaggccgcaatatagagtgtgacgaagactctggaatacgagccaactttgagcatgcacttaaaatttacaaaagggctgggcgttaat

SEQ ID NO: 572561 - DNA, 145 bp, Homo sapiens
agatgctgcgatctgcatccagcgcgcgcaccaggtcgcgcagggccgccaggctgtgcacggtccaggtgttggccggcgggttgctcaaggtcacgatggcgacgtgcccatcgcgctcgacctgcagaccggtatggaggcg

SEQ ID NO: 572562 - DNA, 980 bp, Homo sapiens
  misc_feature (404)..(404): n is a, c, g, or t
  misc_feature (428)..(428): n is a, c, g, or t
  misc_feature (476)..(476): n is a, c, g, or t
  misc_feature (517)..(517): n is a, c, g, or t
  misc_feature (542)..(542): n is a, c, g, or t
ggcgggtgcgggcgggaccggatttcgtactgtgggcccgggggcggcgggggccgggggagtgaggggccggtgtgagcccatcgtcgactgggccctccctggcgccccgacgttgggcgggcggcggagcggcgctgggccgtccaatgatcgttacatgctcccgctactctgctaccaacgtgctgtgtcgaggtgtgagccagtgccgatcgctcattcggagagatggacctgccgttgtgtctgctcatgcctgacttctggcctagcgagtgggtatccgtaccgtgccatgatacgactgagaccgacgggtccttggtacaggacatcggccagacgaaaggatagcgtgcgcattaaaggaatcgcggttgagtgcttcacgactccttgcntcgcccggcaagcttcggacggcntaagcgagtggcactaggaaagaatagatgcacgtggcgcggtattgntcgctcggaatcatactaatccgggcaaggccaccgaggcntcccagtccgagagcaatgcctctntttaagacataacgggcacagaacgaggaatttctcaatgctggcttcaaactcgtttacagcaacattttccgccagggttcatcttaatcgtttgggtggcaattattcaccacgcaagttgctcgtggaaattccaagcaaagaagttgtatgacgtttagtacggaatccaatgtagctggtcaatggtattatctccttacagggaaaacaaggctacaattcacttgcatttgacctttagggggcactagtcgcgaaccaaaccaaaccataggcatctaagacttgggtgcccaagtgcgacgggaacacatgcccagagagcgaatcgcgtagggaacattcactccgcaacgaacgccgtagtaacacagacgggggtgccccgctagaaagggcccgcgtgtgcctagggatgggtatgttccgcca

SEQ ID NO: 572563 - DNA, 368 bp, Homo sapiens
gcttggtgatctctgcaggatcccgcacgcgctaccaagataggttctagtctctttatgacagaggggttctttgttagtgagggctgtggcgtattgcccaccatactacgagcatgtcactaaaataagattccccttctgttgtttgctggctatcatcctctctcatgacatatactaaacccggacctctgtgatgattaattttccttagatttccttccaacgtcttaacccttaatcatgttcccctttcaattcaaatatgtttcaggcagctttccacaaggaagactgatttgaggattgaagtgatttgccaacattctgagaaagcttattttaaaatagcacggctttataga

SEQ ID NO: 572564 - DNA, 419 bp, Homo sapiens
  misc_feature (4)..(4): n is a, c, g, or t
  misc_feature (8)..(10): n is a, c, g, or t
gcgntctnnncgatcccgtgaaaggtagctgttactgaataaaatgctgagaaatcaaggataaaggtggcagactgggaattcccactgaaaacatttaattagattcacagcaaagcatcatttctggaaattttaaaaacttacatgtacctaccactctagactaaaaaataatatacacaaaggccatttccaaagagaattttcccccacctacttaaaaagtttataaaggataattagcatccatattaagaaactgcctcatgaaattttaaaaagtgagaaagaaataagctcaattaaaaagcttattcaagtgtacccaaactccccttgacttacagagggttaccctaaggttgagataggtcaaggcactatttacaaaatttatgccagtacagcttccttcc

SEQ ID NO: 572565 - DNA, 656 bp, Homo sapiens
  misc_feature (122)..(122): n is a, c, g, or t
  misc_feature (162)..(162): n is a, c, g, or t
  misc_feature (249)..(249): n is a, c, g, or t
gtctctatgaatctgactgctccaggggccacataagagtggaatcacacaggactagtcctttttttttttgagttggagtctcactctgtcacccaggctggagtgctgtggtgcgatcntggctcactgcagcctctgcctccccggttccagcgagtntcctgcctcagcctcccgagtagctgggattacaggtgcgcgccaccacgcctgtctaatttttgtatttttagtagagatggggtntcatcatgttggtcaggctggtttcgaactcctggcctcaagtgatctgcccgcctcgacctcccaaagtgctgggattacaggcgtgagccaccgagcccggccccccttttgtgtccttacttcactcagcacaatgtcctcagggttaaccatatgctgtagcacgagtcagaacttccctcctcttcagggctgactcatattccagtggatggatgggccccgtattttgcttctccatattcatccgtcagtgggcacttgggttgctgctaccctttggctgttgtgaataaagctgctatgaacatgggtgtttaaggacacttgttcttttagtctcactctgttgcccaagctggagtgcagtggtgtgatctcggctcactgcaaactccacctcc

SEQ ID NO: 572566 - DNA, 448 bp, Homo sapiens
  misc_feature (52)..(52): n is a, c, g, or t
  misc_feature (203)..(203): n is a, c, g, or t
cagctctgtagtttatcccattattgtatgtcccctcacctaatcctcatgnagtgtctggccccatattagggtatgtaataaatattacttgaggaatgaatgaatttaacatactaccaattctctgagtgactctttttaaagccttcatcatcatttcacactttcttgtctttcatatgggcatgtccaatcacccnttccatgaatatctgtacctgttacaaagagaggactaggttcctggagttcatagatgtaaacaacatcctaggggtagcaaactggtgggccctgagccaaatcctggcctgcacatgtattttgtttgagttgtacaatgtttgttataaatgaactggctgataatattttttaattggaaatgtttacattaaaaacctagacttctagctgctcttaaaaaataaaaatacggctgggc

SEQ ID NO: 572567 - DNA, 342 bp, Homo sapiens
tggctgctccccacaaatgatccttcctttcaccattgcattgactcgctggggggaaccttctgcaacacattgcctgccattgccgtatagccagcgacacagctgcaggagaatgccgtggtgtagtcgctgcactctgcgtgacccgagcactgttgtctgtggtcagcacacgtctggcgggaatccgtgtcatagctgaacacaactcctgttacctcaatttcatccacatctcttacctgagggtgctgctggtgacacgtctccactgccaactggcctgacctggtcctctctgtggcaggtccaagtggcctatcttgacctggcctggga

SEQ ID NO: 572568 - DNA, 205 bp, Homo sapiens
gattcaggcacgaggctaggtccaagcgcacgcccagagcaggcagtccgctgtcgccgccagtagcagccttcgccagcagcgccgcgcgaaccgggcgaggggagcgagcgccccgccagcccagcccagcccagccctactccctccccaagccagggcagcagcgctttctcacaaagaaaatgttggaggaggaatccag

SEQ ID NO: 572569 - DNA, 3710 bp, Homo sapiens
gaattcttagttgttttctttagaagaacatttctagggaataatacaagaagatttaggaatcattgaagttataaatctttggaatgagcaaactcagaatggtgctacttgaagactctggatctgctgacttcagaagacattttgtcaacctgagtcccttcaccattactgtggtcttacttctcagtgcctgttttgtcaccagttctcttggaggaacagacaaggagctgaggctagtggatggtgaaaacaagtgtagcgggagagtggaagtgaaagtccaggaggagtggggaacggtgtgtaataatggctggagcatggaagcggtctctgtgatttgtaaccagctgggatgtccaactgctatcaaagcccctggatgggctaattccagtgcaggttctggacgcatttggatggatcatgtttcttgtcgtgggaatgagtcagctctttgggattgcaaacatgatggatggggaaagcatagtaactgtactcaccaacaagatgctggagtgacctgctcagatggatccaatttggaaatgaggctgacgcgtggagggaatatgtgttctggaagaatagagatcaaattccaaggacggtggggaacagtgtgtgatgataacttcaacatagatcatgcatctgtcatttgtagacaacttgaatgtggaagtgctgtcagtttctctggttcatctaattttggagaaggctctggaccaatctggtttgatgatcttatatgcaacggaaatgagtcagctctctggaactgcaaacatcaaggatggggaaagcataactgtgatcatgctgaggatgctggagtgatttgctcaaagggagcagatctgagcctgagactggtagatggagtcactgaatgttcaggaagattagaagtgagattccaaggagaatgggggacaatatgtgatgacggctgggacagttacgatgctgctgtggcatgcaagcaactgggatgtccaactgccgtcacagccattggtcgagttaacgccagtaagggatttggacacatctggcttgacagcgtttcttgccagggacatgaacctgctgtctggcaatgtaaacaccatgaatggggaaagcattattgcaatcacaatgaagatgctggcgtgacatgttctgatggatcagatctggagctaagacttagaggtggaggcagccgctgtgctgggacagttgaggtggagattcagagactgttagggaaggtgtgtgacagaggctggggactgaaagaagctgatgtggtttgcaggcagctgggatgtggatctgcactcaaaacatcttatcaagtgtactccaaaatccaggcaacaaacacatggctgtttctaagtagctgtaacggaaatgaaacttctctttgggactgcaagaactggcaatggggtggacttacctgtgatcactatgaagaagccaaaattacctgctcagcccacagggaacccagactggttggaggggacattccctgttctggacgtgttgaagtgaagcatggtgacacgtggggctccatctgtgattcggacttctctctggaagctgccagcgttctatgcagggaattacagtgtggcacagttgtctctatcctggggggagctcactttggagagggaaatggacagatctgggctgaagaattccagtgtgagggacatgagtcccatctttcactctgcccagtagcaccccgcccagaaggaacttgtagccacagcagggatgttggagtagtctgctcaagatacacagaaattcgcttggtgaatggcaagaccccgtgtgagggcagagtggagctcaaaacgcttggtgcctggggatccctctgtaactctcactgggacatagaagatgcccatgttctttgccagcagcttaaatgtggagttgccctttctaccccaggaggagcacgttttggaaaaggaaatggtcagatctggaggcatatgtttcactgcactgggactgagcagcacatgggagattgtcctgtaactgctctaggtgcttcattatgtccttcagagcaagtggcctctgtaatctgctcaggaaaccagtcccaaacactgtcctcgtgcaattcatcgtctttgggcccaacaaggcctaccattccagaagaaagtgctgtggcctgcatagagagtggtcaacttcgcctggtaaatggaggaggtcgctgtgctgggagagtagagatctatcatgagggctcctggggcaccatctgtgatgacagctgggacctgagtgatgcccacgtggtttgcagacagctgggctgtggagaggccattaatgccactggttctgctcattttggggaaggaacagggcccatctggctggatgagatgaaatgcaatggaaaagaatcccgcatttggcagtgccattcacacggctgggggcagcaaaattgcaggcacaaggaggatgcgggagttatctgctcagaattcatgtctctgagactgaccagtgaagccagcagagaggcctgtgcagggcgtctggaagttttttacaatggagcttggggcactgttggcaagagtagcatgtctgaaaccactgtgggtgtggtgtgcaggcagctgggctgtgcagacaaagggaaaatcaaccctgcatctttagacaaggccatgtccattcccatgtgggtggacaatgttcagtgtccaaaaggacctgacacgctgtggcagtgcccatcatctccatgggagaagagactggccagcccctcggaggagacctggatcacatgtgacaacaagataagacttcaggaaggacccacttcctgttctggacgtgtggagatctggcatggaggttcctgggggacagtgtgtgatgactcttgggacttggacgatgctcaggtggtgtgtcaacaacttggctgtggtccagctttgaaagcattcaaagaagcagagtttggtcaggggactggaccgatatggctcaatgaagtgaagtgcaaagggaatgagtcttccttgtgggattgtcctgccagacgctggggccatagtgagtgtgggcacaaggaagacgctgcagtgaattgcacagatatttcagtgcagaaaaccccacaaaaagccacaacaggtcgctcatcccgtcagtcatcctttattgcagtcgggatccttggggttgttctgttggccattttcgtcgcattattcttcttgactaaaaagcgaagacagagacagcggcttgcagtttcctcaagaggagagaacttagtccaccaaattcaataccgggagatgaattcttgcctgaatgcagatgatctggacctaatgaattcctcaggaggccattctgagccacactgaaaaggaaaatgggaatttataacccagtgagttcagcctttaagataccttgatgaagacctggactattgaatggagcagaaattcacctctctcactgactattacagttgcatttttatggagttcttcttctcctaggattcctaagactgctgctgaatttataaaaattaagtttgtgaatgtgactacttagtggtgtatatgagactttcaagggaattaaataaataaataagaatgttattgatttga

SEQ ID NO: 572570 - DNA, 3809 bp, Homo sapiens
gaattcttagttgttttctttagaagaacatttctagggaataatacaagaagatttaggaatcattgaagttataaatctttggaatgagcaaactcagaatggtgctacttgaagactctggatctgctgacttcagaagacattttgtcaacctgagtcccttcaccattactgtggtcttacttctcagtgcctgttttgtcaccagttctcttggaggaacagacaaggagctgaggctagtggatggtgaaaacaagtgtagcgggagagtggaagtgaaagtccaggaggagtggggaacggtgtgtaataatggctggagcatggaagcggtctctgtgatttgtaaccagctgggatgtccaactgctatcaaagcccctggatgggctaattccagtgcaggttctggacgcatttggatggatcatgtttcttgtcgtgggaatgagtcagctctttgggattgcaaacatgatggatggggaaagcatagtaactgtactcaccaacaagatgctggagtgacctgctcagatggatccaatttggaaatgaggctgacgcgtggagggaatatgtgttctggaagaatagagatcaaattccaaggacggtggggaacagtgtgtgatgataacttcaacatagatcatgcatctgtcatttgtagacaacttgaatgtggaagtgctgtcagtttctctggttcatctaattttggagaaggctctggaccaatctggtttgatgatcttatatgcaacggaaatgagtcagctctctggaactgcaaacatcaaggatggggaaagcataactgtgatcatgctgaggatgctggagtgatttgctcaaagggagcagatctgagcctgagactggtagatggagtcactgaatgttcaggaagattagaagtgagattccaaggagaatgggggacaatatgtgatgacggctgggacagttacgatgctgctgtggcatgcaagcaactgggatgtccaactgccgtcacagccattggtcgagttaacgccagtaagggatttggacacatctggcttgacagcgtttcttgccagggacatgaacctgctgtctggcaatgtaaacaccatgaatggggaaagcattattgcaatcacaatgaagatgctggcgtgacatgttctgatggatcagatctggagctaagacttagaggtggaggcagccgctgtgctgggacagttgaggtggagattcagagactgttagggaaggtgtgtgacagaggctggggactgaaagaagctgatgtggtttgcaggcagctgggatgtggatctgcactcaaaacatcttatcaagtgtactccaaaatccaggcaacaaacacatggctgtttctaagtagctgtaacggaaatgaaacttctctttgggactgcaagaactggcaatggggtggacttacctgtgatcactatgaagaagccaaaattacctgctcagcccacagggaacccagactggttggaggggacattccctgttctggacgtgttgaagtgaagcatggtgacacgtggggctccatctgtgattcggacttctctctggaagctgccagcgttctatgcagggaattacagtgtggcacagttgtctctatcctggggggagctcactttggagagggaaatggacagatctgggctgaagaattccagtgtgagggacatgagtcccatctttcactctgcccagtagcaccccgcccagaaggaacttgtagccacagcagggatgttggagtagtctgctcaagtaagacccagaaaacatctttaattggttcttatactgtgaaagggacagggttagggagtcatagctgtctttttctaaagccctgtctccttccaggatacacagaaattcgcttggtgaatggcaagaccccgtgtgagggcagagtggagctcaaaacgcttggtgcctggggatccctctgtaactctcactgggacatagaagatgcccatgttctttgccagcagcttaaatgtggagttgccctttctaccccaggaggagcacgttttggaaaaggaaatggtcagatctggaggcatatgtttcactgcactgggactgagcagcacatgggagattgtcctgtaactgctctaggtgcttcattatgtccttcagagcaagtggcctctgtaatctgctcaggaaaccagtcccaaacactgtcctcgtgcaattcatcgtctttgggcccaacaaggcctaccattccagaagaaagtgctgtggcctgcatagagagtggtcaacttcgcctggtaaatggaggaggtcgctgtgctgggagagtagagatctatcatgagggctcctggggcaccatctgtgatgacagctgggacctgagtgatgcccacgtggtttgcagacagctgggctgtggagaggccattaatgccactggttctgctcattttggggaaggaacagggcccatctggctggatgagatgaaatgcaatggaaaagaatcccgcatttggcagtgccattcacacggctgggggcagcaaaattgcaggcacaaggaggatgcgggagttatctgctcagaattcatgtctctgagactgaccagtgaagccagcagagaggcctgtgcagggcgtctggaagttttttacaatggagcttggggcactgttggcaagagtagcatgtctgaaaccactgtgggtgtggtgtgcaggcagctgggctgtgcagacaaagggaaaatcaaccctgcatctttagacaaggccatgtccattcccatgtgggtggacaatgttcagtgtccaaaaggacctgacacgctgtggcagtgcccatcatctccatgggagaagagactggccagcccctcggaggagacctggatcacatgtgacaacaagataagacttcaggaaggacccacttcctgttctggacgtgtggagatctggcatggaggttcctgggggacagtgtgtgatgactcttgggacttggacgatgctcaggtggtgtgtcaacaacttggctgtggtccagctttgaaagcattcaaagaagcagagtttggtcaggggactggaccgatatggctcaatgaagtgaagtgcaaagggaatgagtcttccttgtgggattgtcctgccagacgctggggccatagtgagtgtgggcacaaggaagacgctgcagtgaattgcacagatatttcagtgcagaaaaccccacaaaaagccacaacaggtcgctcatcccgtcagtcatcctttattgcagtcgggatccttggggttgttctgttggccattttcgtcgcattattcttcttgactaaaaagcgaagacagagacagcggcttgcagtttcctcaagaggagagaacttagtccaccaaattcaataccgggagatgaattcttgcctgaatgcagatgatctggacctaatgaattcctcaggaggccattctgagccacactgaaaaggaaaatgggaatttataacccagtgagttcagcctttaagataccttgatgaagacctggactattgaatggagcagaaattcacctctctcactgactattacagttgcatttttatggagttcttcttctcctaggattcctaagactgctgctgaatttataaaaattaagtttgtgaatgtgactacttagtggtgtatatgagactttcaagggaattaaataaataaataagaatgttattgatttga

SEQ ID NO: 572571 - DNA, 4958 bp, Homo sapiens
gaattcttagttgttttctttagaagaacatttctagggaataatacaagaagatttaggaatcattgaagttataaatctttggaatgagcaaactcagaatggtgctacttgaagactctggatctgctgacttcagaagacattttgtcaacctgagtcccttcaccattactgtggtcttacttctcagtgcctgttttgtcaccagttctcttggaggaacagacaaggagctgaggctagtggatggtgaaaacaagtgtagcgggagagtggaagtgaaagtccaggaggagtggggaacggtgtgtaataatggctggagcatggaagcggtctctgtgatttgtaaccagctgggatgtccaactgctatcaaagcccctggatgggctaattccagtgcaggttctggacgcatttggatggatcatgtttcttgtcgtgggaatgagtcagctctttgggattgcaaacatgatggatggggaaagcatagtaactgtactcaccaacaagatgctggagtgacctgctcagatggatccaatttggaaatgaggctgacgcgtggagggaatatgtgttctggaagaatagagatcaaattccaaggacggtggggaacagtgtgtgatgataacttcaacatagatcatgcatctgtcatttgtagacaacttgaatgtggaagtgctgtcagtttctctggttcatctaattttggagaaggctctggaccaatctggtttgatgatcttatatgcaacggaaatgagtcagctctctggaactgcaaacatcaaggatggggaaagcataactgtgatcatgctgaggatgctggagtgatttgctcaaagggagcagatctgagcctgagactggtagatggagtcactgaatgttcaggaagattagaagtgagattccaaggagaatgggggacaatatgtgatgacggctgggacagttacgatgctgctgtggcatgcaagcaactgggatgtccaactgccgtcacagccattggtcgagttaacgccagtaagggatttggacacatctggcttgacagcgtttcttgccagggacatgaacctgctgtctggcaatgtaaacaccatgaatggggaaagcattattgcaatcacaatgaagatgctggcgtgacatgttctgatggatcagatctggagctaagacttagaggtggaggcagccgctgtgctgggacagttgaggtggagattcagagactgttagggaaggtgtgtgacagaggctggggactgaaagaagctgatgtggtttgcaggcagctgggatgtggatctgcactcaaaacatcttatcaagtgtactccaaaatccaggcaacaaacacatggctgtttctaagtagctgtaacggaaatgaaacttctctttgggactgcaagaactggcaatggggtggacttacctgtgatcactatgaagaagccaaaattacctgctcagcccacagggaacccagactggttggaggggacattccctgttctggacgtgttgaagtgaagcatggtgacacgtggggctccatctgtgattcggacttctctctggaagctgccagcgttctatgcagggaattacagtgtggcacagttgtctctatcctggggggagctcactttggagagggaaatggacagatctgggctgaagaattccagtgtgagggacatgagtcccatctttcactctgcccagtagcaccccgcccagaaggaacttgtagccacagcagggatgttggagtagtctgctcaagatacacagaaattcgcttggtgaatggcaagaccccgtgtgagggcagagtggagctcaaaacgcttggtgcctggggatccctctgtaactctcactgggacatagaagatgcccatgttctttgccagcagcttaaatgtggagttgccctttctaccccaggaggagcacgttttggaaaaggaaatggtcagatctggaggcatatgtttcactgcactgggactgagcagcacatgggagattgtcctgtaactgctctaggtgcttcattatgtccttcagagcaagtggcctctgtaatctgctcaggaaaccagtcccaaacactgtcctcgtgcaattcatcgtctttgggcccaacaaggcctaccattccagaagaaagtgctgtggcctgcatagagagtggtcaacttcgcctggtaaatggaggaggtcgctgtgctgggagagtagagatctatcatgagggctcctggggcaccatctgtgatgacagctgggacctgagtgatgcccacgtggtttgcagacagctgggctgtggagaggccattaatgccactggttctgctcattttggggaaggaacagggcccatctggctggatgagatgaaatgcaatggaaaagaatcccgcatttggcagtgccattcacacggctgggggcagcaaaattgcaggcacaaggaggatgcgggagttatctgctcagaattcatgtctctgagactgaccagtgaagccagcagagaggcctgtgcagggcgtctggaagttttttacaatggagcttggggcactgttggcaagagtagcatgtctgaaaccactgtgggtgtggtgtgcaggcagctgggctgtgcagacaaagggaaaatcaaccctgcatctttagacaaggccatgtccattcccatgtgggtggacaatgttcagtgtccaaaaggacctgacacgctgtggcagtgcccatcatctccatgggagaagagactggccagcccctcggaggagacctggatcacatgtgacaacaagataagacttcaggaaggacccacttcctgttctggacgtgtggagatctggcatggaggttcctgggggacagtgtgtgatgactcttgggacttggacgatgctcaggtggtgtgtcaacaacttggctgtggtccagctttgaaagcattcaaagaagcagagtttggtcaggggactggaccgatatggctcaatgaagtgaagtgcaaagggaatgagtcttccttgtgggattgtcctgccagacgctggggccatagtgagtgtgggcacaaggaagacgctgcagtgaattgcacagatatttcagtgcagaaaaccccacaaaaagccacaacaggtcgctcatcccgtcagtcatcctttattgcagtcgggatccttggggttgttctgttggccattttcgtcgcattattcttcttgactaaaaagcgaagacagagacagcggcttgcagtttcctcaagaggagagaacttagtccaccaaattcaataccgggagatgaattcttgcctgaatgcagatgatctggacctaatgaattcctccaggtctgtgggttcttggagggtctattgcccaggggttcagatcagtggctgcagttgaggcacagacattctactttgataaacagttaaaaaagtctaaaaatgtaataggaagcttagatgcatataatggacaagaatgactgaaaattattcttggagaatatcaaaattgcaatcatagggaggcctttagcttaagaggcctgtgattattcctgatagaggtatggaaagaaccatgcagaggaatattatgacttggacctcattttattaaaacagaaattaatcttacaaaagattgtcataagtgacagtttaacttttttctttaaattttgttgtgtatatttaaggtatacaacatgattttatgggatgtatatagatagtaaaaagcttactaaagcaaagcaaatgaacacacccatcatctgacatagttacccttttttgtgttgttcttgtggcaagagcagctaaaacctactcacttagcatgaatcctacatacagcacaatgttattacctataatcctcatgttgtacattagacctctagactggttcattctacgtatctgctactttgtatcctctgacctacatacgtctttcacagtttcttccattcccatttcctgtcattttttttctctagcttgatatttattatatttttccctaaaagtctaaaaccttaaactttcaatatctttattgcatgagaagccatacaaatccacagaactagccttatttctcatcacatcatgctgttttatccttgaacttctatttagcaccagtgcactaattctgcatctgggcaggatgactttactgggttggaagaaatatcccaaaacccattgtctttactccatgaagggtccctgaccttctgagaggggcctgcctcacttcttccatccaaagaattatgcatctgctactgtgtcagggaacatatttaaggaacatgtactgttactgtgtcaggaaacatatttaagaaataggaaagactttctctgccccttaaatcacacatgcttttcttcctagttatgggtggtgtttttagttgctcaaagagcctcacagttacgtgagaagaggtctggtttatttcccagtaattattttcttcctttcagaaaattcccatgagtcagctgatttcagtgctgctgaactaatttctgtgtctaaatttcttcctatttctggaatggaaaaggaggccattctgagccacactgaaaaggaaaatgggaatttataacccagtgagttcagcctttaagataccttgatgaagacctggactattgaatggagcagaaattcacctctctcactgactattacagttgcatttttatggagttcttcttctcctaggattcctaagactgctgctgaatttataaaaattaagtttgtgaatgtgactacttagtggtgtatatgagactttcaagggaattaaataaataaataagaatgttattgatttga

SEQ ID NO: 572572 - DNA, 154 bp, Homo sapiens
gtttcacaatacacacagttctatgtttataaataacaggtttcaaaagaaactcaggccagtatttaaacaagttcttaacttttattgaccatggcatttttaatatgtaacccagcggattcgtgtttccctaccagagctttaccaacca

SEQ ID NO: 572573 - DNA, 419 bp, Homo sapiens
gcagactatggtgatgcagtggccatggagaatgtgtagaaactcatataattacacctgcaactgtgatgtggggtactatgggccccagtgtcagtttgtgacttcacgctgtgacgcctttggaggccccagagctgggtaccactggactgtactcactcatttgggaaacttcagccttcagactcacagctgctgccttcagactgcctctgcaaggaacaaaccttacactgcggattgaacgaaaccaccatgtggaccactttggaaatctggtcactctccaagaaccaatcctgtcaagctgattcagctgtgagccctctatcgagcaccagacttcggcggatcatgacactgtagccatccccctggccaagcttcagactttacactgacatgtacgcttcatc

SEQ ID NO: 572574 - DNA, 3793 bp, Homo sapiens
gaattcttagttgttttctttagaagaacatttctagggaataatacaagaagatttaggaatcattgaagttataaatctttggaatgagcaaactcagaatggtgctacttgaagactctggatctgctgacttcagaagacattttgtcaacctgagtcccttcaccattactgtggtcttacttctcagtgcctgttttgtcaccagttctcttggaggaacagacaaggagctgaggctagtggatggtgaaaacaagtgtagcgggagagtggaagtgaaagtccaggaggagtggggaacggtgtgtaataatggctggagcatggaagcggtctctgtgatttgtaaccagctgggatgtccaactgctatcaaagcccctggatgggctaattccagtgcaggttctggacgcatttggatggatcatgtttcttgtcgtgggaatgagtcagctctttgggattgcaaacatgatggatggggaaagcatagtaactgtactcaccaacaagatgctggagtgacctgctcagatggatccaatttggaaatgaggctgacgcgtggagggaatatgtgttctggaagaatagagatcaaattccaaggacggtggggaacagtgtgtgatgataacttcaacatagatcatgcatctgtcatttgtagacaacttgaatgtggaagtgctgtcagtttctctggttcatctaattttggagaaggctctggaccaatctggtttgatgatcttatatgcaacggaaatgagtcagctctctggaactgcaaacatcaaggatggggaaagcataactgtgatcatgctgaggatgctggagtgatttgctcaaagggagcagatctgagcctgagactggtagatggagtcactgaatgttcaggaagattagaagtgagattccaaggagaatgggggacaatatgtgatgacggctgggacagttacgatgctgctgtggcatgcaagcaactgggatgtccaactgccgtcacagccattggtcgagttaacgccagtaagggatttggacacatctggcttgacagcgtttcttgccagggacatgaacctgctgtctggcaatgtaaacaccatgaatggggaaagcattattgcaatcacaatgaagatgctggcgtgacatgttctgatggatcagatctggagctaagacttagaggtggaggcagccgctgtgctgggacagttgaggtggagattcagagactgttagggaaggtgtgtgacagaggctggggactgaaagaagctgatgtggtttgcaggcagctgggatgtggatctgcactcaaaacatcttatcaagtgtactccaaaatccaggcaacaaacacatggctgtttctaagtagctgtaacggaaatgaaacttctctttgggactgcaagaactggcaatggggtggacttacctgtgatcactatgaagaagccaaaattacctgctcagcccacagggaacccagactggttggaggggacattccctgttctggacgtgttgaagtgaagcatggtgacacgtggggctccatctgtgattcggacttctctctggaagctgccagcgttctatgcagggaattacagtgtggcacagttgtctctatcctggggggagctcactttggagagggaaatggacagatctgggctgaagaattccagtgtgagggacatgagtcccatctttcactctgcccagtagcaccccgcccagaaggaacttgtagccacagcagggatgttggagtagtctgctcaagatacacagaaattcgcttggtgaatggcaagaccccgtgtgagggcagagtggagctcaaaacgcttggtgcctggggatccctctgtaactctcactgggacatagaagatgcccatgttctttgccagcagcttaaatgtggagttgccctttctaccccaggaggagcacgttttggaaaaggaaatggtcagatctggaggcatatgtttcactgcactgggactgagcagcacatgggagattgtcctgtaactgctctaggtgcttcattatgtccttcagagcaagtggcctctgtaatctgctcaggaaaccagtcccaaacactgtcctcgtgcaattcatcgtctttgggcccaacaaggcctaccattccagaagaaagtgctgtggcctgcatagagagtggtcaacttcgcctggtaaatggaggaggtcgctgtgctgggagagtagagatctatcatgagggctcctggggcaccatctgtgatgacagctgggacctgagtgatgcccacgtggtttgcagacagctgggctgtggagaggccattaatgccactggttctgctcattttggggaaggaacagggcccatctggctggatgagatgaaatgcaatggaaaagaatcccgcatttggcagtgccattcacacggctgggggcagcaaaattgcaggcacaaggaggatgcgggagttatctgctcagaattcatgtctctgagactgaccagtgaagccagcagagaggcctgtgcagggcgtctggaagttttttacaatggagcttggggcactgttggcaagagtagcatgtctgaaaccactgtgggtgtggtgtgcaggcagctgggctgtgcagacaaagggaaaatcaaccctgcatctttagacaaggccatgtccattcccatgtgggtggacaatgttcagtgtccaaaaggacctgacacgctgtggcagtgcccatcatctccatgggagaagagactggccagcccctcggaggagacctggatcacatgtgacaacaagataagacttcaggaaggacccacttcctgttctggacgtgtggagatctggcatggaggttcctgggggacagtgtgtgatgactcttgggacttggacgatgctcaggtggtgtgtcaacaacttggctgtggtccagctttgaaagcattcaaagaagcagagtttggtcaggggactggaccgatatggctcaatgaagtgaagtgcaaagggaatgagtcttccttgtgggattgtcctgccagacgctggggccatagtgagtgtgggcacaaggaagacgctgcagtgaattgcacagatatttcagtgcagaaaaccccacaaaaagccacaacaggtcgctcatcccgtcagtcatcctttattgcagtcgggatccttggggttgttctgttggccattttcgtcgcattattcttcttgactaaaaagcgaagacagagacagcggcttgcagtttcctcaagaggagagaacttagtccaccaaattcaataccgggagatgaattcttgcctgaatgcagatgatctggacctaatgaattcctcagaaaattcccatgagtcagctgatttcagtgctgctgaactaatttctgtgtctaaatttcttcctatttctggaatggaaaaggaggccattctgagccacactgaaaaggaaaatgggaatttataacccagtgagttcagcctttaagataccttgatgaagacctggactattgaatggagcagaaattcacctctctcactgactattacagttgcatttttatggagttcttcttctcctaggattcctaagactgctgctgaatttataaaaattaagtttgtgaatgtgactacttagtggtgtatatgagactttcaagggaattaaataaataaataagaatgttattgatttga

SEQ ID NO: 572575 - DNA, 353 bp, Homo sapiens
actctaccggtaccaatttcctgtattattccattttcacactgctataaagacataactgagacttactaatatataaatataaaaggtttaattgactcacagctccgcatggctcagataacttacaatcatgggggaaggcaaaggagaagcaagcaccttcttcacaaggtggcgagagagagagtgaaggggaagtgccacactttgaaaccatcaactctcatgagagctccctcactatcacgagaaccatgtatttgatgtcttttgaagtggcagatgtttaaatgtgtgtatttttctacataaaattgaaaaaatcctctacattttctacaaagtatctg

SEQ ID NO: 572576 - DNA, 322 bp, Homo sapiens
  misc_feature (42)..(42): n is a, c, g, or t
  misc_feature (46)..(46): n is a, c, g, or t
tcaaagttcagtgatggcagatgtccctccccccgaccaagntgantgtccgagttcgacttcagactgcagtgctagcatcgagaatttcaaagttcagcctttaagataccttgatgaagacctggactattgaatggagcagaaattcacctctctcactgactattacagttgcatttttatggagttcttcttctcctaggattcctaagactgctgctgaatttataaaaattaagtttgtgaatgtgactacttagtggtgtatatgagactttcaagggaattaaataaataaataagaatgttattgatttga

SEQ ID NO: 572577 - DNA, 439 bp, Homo sapiens
gaattcttagttgttttctttagaagaacatttctagggaataatacaagaagatttaggaatcattgaagttataaatctttggaatgagcaaactcagaatggtgctacttgaagactctggatctgctgacttcagaagacattttgtcaacctgagtcccttcaccattactgtggtcttacttctcagtgcctgttttgtcaccagttctcttggaggaacagacaaggagctgaggctagtggatggtgaaaacaagtgtagcgggagagtggaagtgaaagtccaggaggagtggggaacggtgtgtaataatggctggagcatggaagcggtctctgtgatttgtaaccagctgggatgtccaactgcgtccagaacctgcactggaattagcccatccaggggctttgatagcagttggacatcccagct

SEQ ID NO: 572578 - DNA, 2476 bp, Homo sapiens
gtaggtcggtacctccagagtatagagactgttagggaaggtgtgtgacagaggctggggactgaaagaagctgatgtggtttgcaggcagctgggatgtggatctgcactcaaaacatcttatcaagtgtactccaaaatccaggcaacaaacacatggctgtttctaagtagctgtaacggaaatgaaacttctctttgggactgcaagaactggcaatggggtggacttacctgtgatcactatgaagaagccaaaattacctgctcagcccacagggaacccagactggttggaggggacattccctgttctggacgtgttgaagtgaagcatggtgacacgtggggctccatctgtgattcggacttctctctggaagctgccagcgttctatgcagggaattacagtgtggcacagttgtctctatcctggggggagctcactttggagagggaaatggacagatctgggctgaagaattccagtgtgagggacatgagtcccatctttcactctgcccagtagcaccccgcccagaaggaacttgtagccacagcagggatgttggagtagtctgctcaagatacacagaaattcgcttggtgaatggcaagaccccgtgtgagggcagagtggagctcaaaacgcttggtgcctggggatccctctgtaactctcactgggacatagaagatgcccatgttctttgccagcagcttaaatgtggagttgccctttctaccccaggaggagcacgttttggaaaaggaaatggtcagatctggaggcatatgtttcactgcactgggactgagcagcacatgggagattgtcctgtaactgctctaggtgcttcattatgtccttcagagcaagtggcctctgtaatctgctcaggaaaccagtcccaaacactgtcctcgtgcaattcatcgtctttgggcccaacaaggcctaccattccagaagaaagtgctgtggcctgcatagagagtggtcaacttcgcctggtaaatggaggaggtcgctgtgctgggagagtagagatctatcatgagggctcctggggcaccatctgtgatgacagctgggacctgagtgatgcccacgtggtttgcagacagctgggctgtggagaggccattaatgccactggttctgctcattttggggaaggaacagggcccatctggctggatgagatgaaatgcaatggaaaagaatcccgcatttggcagtgccattcacacggctgggggcagcaaaattgcaggcacaaggaggatgcgggagttatctgctcagaattcatgtctctgagactgaccagtgaagccagcagagaggcctgtgcagggcgtctggaagttttttacaatggagcttggggcactgttggcaagagtagcatgtctgaaaccactgtgggtgtggtgtgcaggcagctgggctgtgcagacaaagggaaaatcaaccctgcatctttagacaaggccatgtccattcccatgtgggtggacaatgttcagtgtccaaaaggacctgacacgctgtggcagtgcccatcatctccatgggagaagagactggccagcccctcggaggagacctggatcacatgtgacaacaagataagacttcaggaaggacccacttcctgttctggacgtgtggagatctggcatggaggttcctgggggacagtgtgtgatgactcttgggacttggacgatgctcaggtggtgtgtcaacaacttggctgtggtccagctttgaaagcattcaaagaagcagagtttggtcaggggactggaccgatatggctcaatgaagtgaagtgcaaagggaatgagtcttccttgtgggattgtcctgccagacgctggggccatagtgagtgtgggcacaaggaagacgctgcagtgaattgcacagatatttcagtgcagaaaaccccacaaaaagccacaacaggtcgctcatcccgtcagtcatcctttattgcagtcgggatccttggggttgttctgttggccattttcgtcgcattattcttcttgactaaaaagcgaagacagagacagcggcttgcagtttcctcaagaggagagaacttagtccaccaaattcaataccgggagatgaattcttgcctgaatgcagatgatctggacctaatgaattcctcaggaggccattctgagccacactgaaaaggaaaatgggaatttataacccagtgagttcagcctttaagataccttgatgaagacctggactattgaatggagcagaaattcacctctctcactgactattacagttgcatttttatggagttcttcttctcctaggattcctaagactgctgctgaatttataaaaattaagtttgtgaatgtgactacttagtggtgtatatgagactttcaagggaattaaataaataaataagaatgttattgatttga

SEQ ID NO: 572579 - DNA, 131 bp, Homo sapiens
agtttctctgatcgctccacggctgtgcagagacgggcggctaatagtaggtttccttctccaaccagcacgcaggggatcgcctgatgatgagttttctgacttcgtacatatacgaaagatgagaaaga

SEQ ID NO: 572580 - DNA, 212 bp, Homo sapiens
  misc_feature (28)..(28): n is a, c, g, or t
cccccccttttttttttcccctggggtnttttagtaagggggcccggggagggccccctgggtttttttggcccccaagccccccccttttttcccggccaggggggggccccctttttttttttttttaggggggggggccccccaaagttttgggttttttaaggggggtttttttccctttaaaaaaaaaaatttttttgggcccccca

SEQ ID NO: 572581 - DNA, 3733 bp, Homo sapiens
gaattcttagttgttttctttagaagaacatttctagggaataatacaagaagatttaggaatcattgaagttataaatctttggaatgagcaaactcagaatggtgctacttgaagactctggatctgctgacttcagaagacattttgtcaacctgagtcccttcaccattactgtggtcttacttctcagtgcctgttttgtcaccagttctcttggaggaacagacaaggagctgaggctagtggatggtgaaaacaagtgtagcgggagagtggaagtgaaagtccaggaggagtggggaacggtgtgtaataatggctggagcatggaagcggtctctgtgatttgtaaccagctgggatgtccaactgctatcaaagcccctggatgggctaattccagtgcaggttctggacgcatttggatggatcatgtttcttgtcgtgggaatgagtcagctctttgggattgcaaacatgatggatggggaaagcatagtaactgtactcaccaacaagatgctggagtgacctgctcagatggatccaatttggaaatgaggctgacgcgtggagggaatatgtgttctggaagaatagagatcaaattccaaggacggtggggaacagtgtgtgatgataacttcaacatagatcatgcatctgtcatttgtagacaacttgaatgtggaagtgctgtcagtttctctggttcatctaattttggagaaggctctggaccaatctggtttgatgatcttatatgcaacggaaatgagtcagctctctggaactgcaaacatcaaggatggggaaagcataactgtgatcatgctgaggatgctggagtgatttgctcaaagggagcagatctgagcctgagactggtagatggagtcactgaatgttcaggaagattagaagtgagattccaaggagaatgggggacaatatgtgatgacggctgggacagttacgatgctgctgtggcatgcaagcaactgggatgtccaactgccgtcacagccattggtcgagttaacgccagtaagggatttggacacatctggcttgacagcgtttcttgccagggacatgaacctgctgtctggcaatgtaaacaccatgaatggggaaagcattattgcaatcacaatgaagatgctggcgtgacatgttctgatggatcagatctggagctaagacttagaggtggaggcagccgctgtgctgggacagttgaggtggagattcagagactgttagggaaggtgtgtgacagaggctggggactgaaagaagctgatgtggtttgcaggcagctgggatgtggatctgcactcaaaacatcttatcaagtgtactccaaaatccaggcaacaaacacatggctgtttctaagtagctgtaacggaaatgaaacttctctttgggactgcaagaactggcaatggggtggacttacctgtgatcactatgaagaagccaaaattacctgctcagcccacagggaacccagactggttggaggggacattccctgttctggacgtgttgaagtgaagcatggtgacacgtggggctccatctgtgattcggacttctctctggaagctgccagcgttctatgcagggaattacagtgtggcacagttgtctctatcctggggggagctcactttggagagggaaatggacagatctgggctgaagaattccagtgtgagggacatgagtcccatctttcactctgcccagtagcaccccgcccagaaggaacttgtagccacagcagggatgttggagtagtctgctcaagatacacagaaattcgcttggtgaatggcaagaccccgtgtgagggcagagtggagctcaaaacgcttggtgcctggggatccctctgtaactctcactgggacatagaagatgcccatgttctttgccagcagcttaaatgtggagttgccctttctaccccaggaggagcacgttttggaaaaggaaatggtcagatctggaggcatatgtttcactgcactgggactgagcagcacatgggagattgtcctgtaactgctctaggtgcttcattatgtccttcagagcaagtggcctctgtaatctgctcaggaaaccagtcccaaacactgtcctcgtgcaattcatcgtctttgggcccaacaaggcctaccattccagaagaaagtgctgtggcctgcatagagagtggtcaacttcgcctggtaaatggaggaggtcgctgtgctgggagagtagagatctatcatgagggctcctggggcaccatctgtgatgacagctgggacctgagtgatgcccacgtggtttgcagacagctgggctgtggagaggccattaatgccactggttctgctcattttggggaaggaacagggcccatctggctggatgagatgaaatgcaatggaaaagaatcccgcatttggcagtgccattcacacggctgggggcagcaaaattgcaggcacaaggaggatgcgggagttatctgctcagaattcatgtctctgagactgaccagtgaagccagcagagaggcctgtgcagggcgtctggaagttttttacaatggagcttggggcactgttggcaagagtagcatgtctgaaaccactgtgggtgtggtgtgcaggcagctgggctgtgcagacaaagggaaaatcaaccctgcatctttagacaaggccatgtccattcccatgtgggtggacaatgttcagtgtccaaaaggacctgacacgctgtggcagtgcccatcatctccatgggagaagagactggccagcccctcggaggagacctggatcacatgtgacagctacatgtctctgatttttcagacaagataagacttcaggaaggacccacttcctgttctggacgtgtggagatctggcatggaggttcctgggggacagtgtgtgatgactcttgggacttggacgatgctcaggtggtgtgtcaacaacttggctgtggtccagctttgaaagcattcaaagaagcagagtttggtcaggggactggaccgatatggctcaatgaagtgaagtgcaaagggaatgagtcttccttgtgggattgtcctgccagacgctggggccatagtgagtgtgggcacaaggaagacgctgcagtgaattgcacagatatttcagtgcagaaaaccccacaaaaagccacaacaggtcgctcatcccgtcagtcatcctttattgcagtcgggatccttggggttgttctgttggccattttcgtcgcattattcttcttgactaaaaagcgaagacagagacagcggcttgcagtttcctcaagaggagagaacttagtccaccaaattcaataccgggagatgaattcttgcctgaatgcagatgatctggacctaatgaattcctcaggaggccattctgagccacactgaaaaggaaaatgggaatttataacccagtgagttcagcctttaagataccttgatgaagacctggactattgaatggagcagaaattcacctctctcactgactattacagttgcatttttatggagttcttcttctcctaggattcctaagactgctgctgaatttataaaaattaagtttgtgaatgtgactacttagtggtgtatatgagactttcaagggaattaaataaataaataagaatgttattgatttga

SEQ ID NO: 572582 - DNA, 292 bp, Homo sapiens
cagcagtcaagagatgattcctgctaatattcttaccaaagaatatcccttatatggccaataatatcacaaagacataatagaaatgttttggtcctagatcactaatctaaagtagaagcaatgaatacattagtgtctgttcagcgtgtagaacggatttaggacaaggttgaacatggaaaacactcctatctgtcatacatggtgatcaatatcattcaaatagttctggctaatatacacaagaatcttcccatcttctcttcaaatattatacccaggtatttat

SEQ ID NO: 572583 - DNA, 4066 bp, Homo sapiens
gaattcttagttgttttctttagaagaacatttctagggaataatacaagaagatttaggaatcattgaagttataaatctttggaatgagcaaactcagaatggtgctacttgaagactctggatctgctgacttcagaagacattttgtcaacctgagtcccttcaccattactgtggtcttacttctcagtgcctgttttgtcaccagttctcttggaggaacagacaaggagctgaggctagtggatggtgaaaacaagtgtagcgggagagtggaagtgaaagtccaggaggagtggggaacggtgtgtaataatggctggagcatggaagcggtctctgtgatttgtaaccagctgggatgtccaactgctatcaaagcccctggatgggctaattccagtgcaggttctggacgcatttggatggatcatgtttcttgtcgtgggaatgagtcagctctttgggattgcaaacatgatggatggggaaagcatagtaactgtactcaccaacaagatgctggagtgacctgctcagatggatccaatttggaaatgaggctgacgcgtggagggaatatgtgttctggaagaatagagatcaaattccaaggacggtggggaacagtgtgtgatgataacttcaacatagatcatgcatctgtcatttgtagacaacttgaatgtggaagtgctgtcagtttctctggttcatctaattttggagaaggctctggaccaatctggtttgatgatcttatatgcaacggaaatgagtcagctctctggaactgcaaacatcaaggatggggaaagcataactgtgatcatgctgaggatgctggagtgatttgctcaaagggagcagatctgagcctgagactggtagatggagtcactgaatgttcaggaagattagaagtgagattccaaggagaatgggggacaatatgtgatgacggctgggacagttacgatgctgctgtggcatgcaagcaactgggatgtccaactgccgtcacagccattggtcgagttaacgccagtaagggatttggacacatctggcttgacagcgtttcttgccagggacatgaacctgctgtctggcaatgtaaacaccatgaatggggaaagcattattgcaatcacaatgaagatgctggcgtgacatgttctgatggatcagatctggagctaagacttagaggtggaggcagccgctgtgctgggacagttgaggtggagattcagagactgttagggaaggtgtgtgacagaggctggggactgaaagaagctgatgtggtttgcaggcagctgggatgtggatctgcactcaaaacatcttatcaagtgtactccaaaatccaggcaacaaacacatggctgtttctaagtagctgtaacggaaatgaaacttctctttgggactgcaagaactggcaatggggtggacttacctgtgatcactatgaagaagccaaaattacctgctcagcccacagggaacccagactggttggaggggacattccctgttctggacgtgttgaagtgaagcatggtgacacgtggggctccatctgtgattcggacttctctctggaagctgccagcgttctatgcagggaattacagtgtggcacagttgtctctatcctggggggagctcactttggagagggaaatggacagatctgggctgaagaattccagtgtgagggacatgagtcccatctttcactctgcccagtagcaccccgcccagaaggaacttgtagccacagcagggatgttggagtagtctgctcaagatacacagaaattcgcttggtgaatggcaagaccccgtgtgagggcagagtggagctcaaaacgcttggtgcctggggatccctctgtaactctcactgggacatagaagatgcccatgttctttgccagcagcttaaatgtggagttgccctttctaccccaggaggagcacgttttggaaaaggaaatggtcagatctggaggcatatgtttcactgcactgggactgagcagcacatgggagattgtcctgtaactgctctaggtgcttcattatgtccttcagagcaagtggcctctgtaatctgctcaggaaaccagtcccaaacactgtcctcgtgcaattcatcgtctttgggcccaacaaggcctaccattccagaagaaagtgctgtggcctgcatagagagtggtcaacttcgcctggtaaatggaggaggtcgctgtgctgggagagtagagatctatcatgagggctcctggggcaccatctgtgatgacagctgggacctgagtgatgcccacgtggtttgcagacagctgggctgtggagaggccattaatgccactggttctgctcattttggggaaggaacagggcccatctggctggatgagatgaaatgcaatggaaaagaatcccgcatttggcagtgccattcacacggctgggggcagcaaaattgcaggcacaaggaggatgcgggagttatctgctcagaattcatgtctctgagactgaccagtgaagccagcagagaggcctgtgcagggcgtctggaagttttttacaatggagcttggggcactgttggcaagagtagcatgtctgaaaccactgtgggtgtggtgtgcaggcagctgggctgtgcagacaaagggaaaatcaaccctgcatctttagacaaggccatgtccattcccatgtgggtggacaatgttcagtgtccaaaaggacctgacacgctgtggcagtgcccatcatctccatgggagaagagactggccagcccctcggaggagacctggatcacatgtgacaacaagataagacttcaggaaggacccacttcctgttctggacgtgtggagatctggcatggaggttcctgggggacagtgtgtgatgactcttgggacttggacgatgctcaggtggtgtgtcaacaacttggctgtggtccagctttgaaagcattcaaagaagcagagtttggtcaggggactggaccgatatggctcaatgaagtgaagtgcaaagggaatgagtcttccttgtgggattgtcctgccagacgctggggccatagtgagtgtgggcacaaggaagacgctgcagtgaattgcacagatatttcagtgcagaaaaccccacaaaaagccacaacaggtcgctcatcccgtcagtcatcctttattgcagtcgggatccttggggttgttctgttggccattttcgtcgcattattcttcttgactaaaaagcgaagacagagacagcggcttgcagtttcctcaagaggagagaacttagtccaccaaattcaataccgggagatgaattcttgcctgaatgcagatgatctggacctaatgaattcctcaggaggccattctgagccacactgaaaaggaaaatgggaatttataacccagtgagttcagcctttaagataccttgatgaagacctggactattgaatggagcagaaattcacctctctcactgactattacagttgcatttttatggagttcttcttctcctaggattcctaagactgctgctgaatttataaaaattaagtttgtgaatgtgactacttagtggtgtatatgagactttcaagggaattaaataaataaataagaatgttattgatttgagtttgctttaattacttgtccttaattctattaatttctaaatgggcttcctaattttttgtagagtttcctagatgtattataatgtgttttatttgacagtgtttcaatttgcatatacagtactgtatattttttcttatttggtttgaataattttcctattaccaaataaaaataaatttatttttactttagtttttctaagacaggaaaagttaatgatattgaagggtctgtaaataatatatggctaactttataaggcatgactcacaacgattctttaactgctttttgttactgtaattctgttcactagaataaaatgcagagccacacctggtgggggccca

SEQ ID NO: 572584 - DNA, 141 bp, Homo sapiens
cattattttacaagatacaatctgaatcttcagtagctgaaggcagtggattaaaacagtttacatcttctgactttgttcagatcatggtagggaacacactttgatggatgcctttctgtgagggtattcttattttta

SEQ ID NO: 572585 - DNA, 3882 bp, Homo sapiens
  misc_feature (3751)..(3751): n is a, c, g, or t
  misc_feature (3756)..(3756): n is a, c, g, or t
  misc_feature (3771)..(3771): n is a, c, g, or t
  misc_feature (3820)..(3820): n is a, c, g, or t
  misc_feature (3833)..(3833): n is a, c, g, or t
  misc_feature (3849)..(3849): n is a, c, g, or t
  misc_feature (3871)..(3871): n is a, c, g, or t
  misc_feature (3882)..(3882): n is a, c, g, or t
gaattcttagttgttttctttagaagaacatttctagggaataatacaagaagatttaggaatcattgaagttataaatctttggaatgagcaaactcagaatggtgctacttgaagactctggatctgctgacttcagaagacattttgtcaacctgagtcccttcaccattactgtggtcttacttctcagtgcctgttttgtcaccagttctcttggaggaacagacaaggagctgaggctagtggatggtgaaaacaagtgtagcgggagagtggaagtgaaagtccaggaggagtggggaacggtgtgtaataatggctggagcatggaagcggtctctgtgatttgtaaccagctgggatgtccaactgctatcaaagcccctggatgggctaattccagtgcaggttctggacgcatttggatggatcatgtttcttgtcgtgggaatgagtcagctctttgggattgcaaacatgatggatggggaaagcatagtaactgtactcaccaacaagatgctggagtgacctgctcagatggatccaatttggaaatgaggctgacgcgtggagggaatatgtgttctggaagaatagagatcaaattccaaggacggtggggaacagtgtgtgatgataacttcaacatagatcatgcatctgtcatttgtagacaacttgaatgtggaagtgctgtcagtttctctggttcatctaattttggagaaggctctggaccaatctggtttgatgatcttatatgcaacggaaatgagtcagctctctggaactgcaaacatcaaggatggggaaagcataactgtgatcatgctgaggatgctggagtgatttgctcaaagggagcagatctgagcctgagactggtagatggagtcactgaatgttcaggaagattagaagtgagattccaaggagaatgggggacaatatgtgatgacggctgggacagttacgatgctgctgtggcatgcaagcaactgggatgtccaactgccgtcacagccattggtcgagttaacgccagtaagggatttggacacatctggcttgacagcgtttcttgccagggacatgaacctgctgtctggcaatgtaaacaccatgaatggggaaagcattattgcaatcacaatgaagatgctggcgtgacatgttctgatggatcagatctggagctaagacttagaggtggaggcagccgctgtgctgggacagttgaggtggagattcagagactgttagggaaggtgtgtgacagaggctggggactgaaagaagctgatgtggtttgcaggcagctgggatgtggatctgcactcaaaacatcttatcaagtgtactccaaaatccaggcaacaaacacatggctgtttctaagtagctgtaacggaaatgaaacttctctttgggactgcaagaactggcaatggggtggacttacctgtgatcactatgaagaagccaaaattacctgctcagcccacagggaacccagactggttggaggggacattccctgttctggacgtgttgaagtgaagcatggtgacacgtggggctccatctgtgattcggacttctctctggaagctgccagcgttctatgcagggaattacagtgtggcacagttgtctctatcctggggggagctcactttggagagggaaatggacagatctgggctgaagaattccagtgtgagggacatgagtcccatctttcactctgcccagtagcaccccgcccagaaggaacttgtagccacagcagggatgttggagtagtctgctcaagatacacagaaattcgcttggtgaatggcaagaccccgtgtgagggcagagtggagctcaaaacgcttggtgcctggggatccctctgtaactctcactgggacatagaagatgcccatgttctttgccagcagcttaaatgtggagttgccctttctaccccaggaggagcacgttttggaaaaggaaatggtcagatctggaggcatatgtttcactgcactgggactgagcagcacatgggagattgtcctgtaactgctctaggtgcttcattatgtccttcagagcaagtggcctctgtaatctgctcaggaaaccagtcccaaacactgtcctcgtgcaattcatcgtctttgggcccaacaaggcctaccattccagaagaaagtgctgtggcctgcatagagagtggtcaacttcgcctggtaaatggaggaggtcgctgtgctgggagagtagagatctatcatgagggctcctggggcaccatctgtgatgacagctgggacctgagtgatgcccacgtggtttgcagacagctgggctgtggagaggccattaatgccactggttctgctcattttggggaaggaacagggcccatctggctggatgagatgaaatgcaatggaaaagaatcccgcatttggcagtgccattcacacggctgggggcagcaaaattgcaggcacaaggaggatgcgggagttatctgctcagaattcatgtctctgagactgaccagtgaagccagcagagaggcctgtgcagggcgtctggaagttttttacaatggagcttggggcactgttggcaagagtagcatgtctgaaaccactgtgggtgtggtgtgcaggcagctgggctgtgcagacaaagggaaaatcaaccctgcatctttagacaaggccatgtccattcccatgtgggtggacaatgttcagtgtccaaaaggacctgacacgctgtggcagtgcccatcatctccatgggagaagagactggccagcccctcggaggagacctggatcacatgtgacaacaagataagacttcaggaaggacccacttcctgttctggacgtgtggagatctggcatggaggttcctgggggacagtgtgtgatgactcttgggacttggacgatgctcaggtggtgtgtcaacaacttggctgtggtccagctttgaaagcattcaaagaagcagagtttggtcaggggactggaccgatatggctcaatgaagtgaagtgcaaagggaatgagtcttccttgtgggattgtcctgccagacgctggggccatagtgagtgtgggcacaaggaagacgctgcagtgaattgcacagatatttcagtgcagaaaaccccacaaaaagccacaacaggtcgctcatcccgtcagtcatcctttattgcagtcgggatccttggggttgttctgttggccattttcgtcgcattattcttcttgactaaaaagcgaagacagagacagcggcttgcagtttcctcaagaggagagaacttagtccaccaaattcaataccgggagatgaattcttgcctgaatgcagatgatctggacctaatgaattcctcaggaggccattctgagccacactgaaaaggaaaatgggaatttataacccagtgagttcagcctttaagataccttgatgaagacctggactattgaatggagcagaaattcacctctctcactgactattacagttgcatttttatggagttcttcttctcctaggattcctaagactgctgctgaatttataaaaattaagtttgtgaatgtgactacttagtggtgtatatgagactttcaagggaattaaataaataaataagaatgttattgatttgaaaaaaaaaaaaaaaaaaaaaaaaaaaaaaaaaaaaaaaatncctgnggccgcaggcttttnccctttggtggggggttaattttgggcttggccctggccctccgttttncaccgtcgtgccnggggaaccccgggggnttcccccactttatccccctgncggcatccccn

SEQ ID NO: 572586 - DNA, 110 bp, Homo sapiens
ctgcgcgaatacactagtgatatgtgagctgagatactgcaccaagtacctttctgtaatgtgggctgtggggagaacctatcgtgaacagatattccaatggcctcttt

SEQ ID NO: 572587 - DNA, 182 bp, Homo sapiens
tcgaagcggacccccggacagtggctctgacggcgtctgatggtgctgctcacatctgtggtccgggaacggggccttgaacgccggaccgccctgatattgcaccggctccggctggccgatggtgaagttgaccggcacgccgcgcagcgaggccgaaatcgcgttttcctcggcttcca

SEQ ID NO: 572588 - DNA, 310 bp, Homo sapiens
tggctcaggttacttctgtagccattgttataggaatcagccactcggctaggggggtggtaacaaggcacccctgtgaattccatccttagagtggctgcctggctccagatgaagggatgctgtcctggtggggggtagggtcgccctaggagggcactgtctgcgggaaggtggcaatatggtgcgtaggcccccgcacacatggacccccatgccaacgtgcctccgggcgctccagcgcagcggactccgcgccccagagcggccgaggcgatagtaacagtccccagggctagccagatggaaa

SEQ ID NO: 572589 - DNA, 303 bp, Homo sapiens
cagcgatgacgtcttaaccatcgcactcaagagacggtagctaacaaacagaaacactgaccttttgtttggaatgtgcacggccttgcagcaatccaggtctgctgagttcagccttttcctgtgcaccttgttaggcctggcgaatttcccttgggcgaggctggccgtgactgctccgtcttgcgcctccctcgtcagtgtgctggatcagtggtggatgtctgtgggctggagggagcctctgagggcactagtgctggatgctcatgccccggattgtgaggtgcctactggcgcctc

SEQ ID NO: 572590 - DNA, 814 bp, Homo sapiens
ggtgtgcctggcctgatgtgtggggcgcgggcgtgtggcctggctggcggccgctgcagagcaccgagctgtgtccgggcgggggagccctgcgttgtgtgcagtgtgctgtgcgctccgaggcctgcctggtgtggtgcgaggagcggccagtgccctgggccgagtggccctgtccagtggtctgccagcagccctgctttcagccacctgtgtgtgcgtccggcactctggagcccagcggggaagctagcaccagcctgggcctgcacacacgctctgctgcaccagctgccctgccttcgggctgcatggcctcctgcagacaactcttcctggtgcccactgccaccacctggcctggcgtggcccacgttactactcactctggagcccaggcaagggcaaagtgatggtggcttgcccacggcttggtctctcctacagtaagagtctgaatcctggcacgaggggacacatgggacttccggacctgctccgaggccttcctggcgttgctgtcccccagggagccactggttgtaccacacctgggacccaagtcgccagggacctgctgttgcttgacttcgggggcactgtgcaggctattgcagtcccaggttggtacgcgggctgatgggcacccgtgcaggacggcacccttgtagggccccgataggaggtcattgaagggccctaaggcacaattatcaggggcacgtcctggcctagtgtggctggtgctccaaaattgggaaccgtgttgaacattgggccagtgaggaagctgcttgcagacggaagggtccca

SEQ ID NO: 572591 - DNA, 345 bp, Homo sapiens
  misc_feature (329)..(329): n is a, c, g, or t
gggcagggttcagaaagtcactgccttaggagtttcccagtttgcaagaggcaccatctctgatggtggtagttgaagggggtagtgagtagatggaaggaagccagtggtcctggagaggaggagcccagaggaggccagcatgtgtccctgtccccagacttcctgcctccttgacttccggccacccttgccctgcctctctttcctttggctcttcttggcttcttccatctcctccagaaccatgcctgaaactgagtctaggcagctgggctccatctccttcccccactcccatcatccttaagccccatctctttctgaancctgccctagccgtat

SEQ ID NO: 572592 - DNA, 589 bp, Homo sapiens
agcgggagaaagtgtcggtctccaagatggcggccaccttgccgtctggtccgtcatgctccggaggccgtgacggccagactcgttgagtgtccatgtggttcgtctcagatcacgtacaggagccctggggggctgtagccaacatccgaacgggggcagaggaagtcgcatgtaagtgcgaggaccgtcaaagtgggacaatatattatgtaaagatccgaagaaactacaagtgaacgcgtagcgcgaaggccaagccaagttgtaccacgtggtacagaagcgtacagcacgcatccaatggtctgtccgtggttgggcgccaggaagaacagcaagaccacgtaacccgtggggtgacagggagtgcgcaaggtgcgcccaaagggcacacaccaacgcactacaagcaacatgccgcgaaacacgcacaaggcactcagcgacgtggacaacgacacccaacaggaccacgcaaaggtaaatcctcggccccggcacagacccgggtaaacaacctggggccaccacaatgcccgcttcaacacaccaacggcggggaccaaggcatcagccacaatgcgga

SEQ ID NO: 572593 - DNA, 300 bp, Homo sapiens
aagggggcccctttttttttttgggttttaacccctctttttcccgcccaaaaatttttttccccggaaaagcgggaattaagggtgttttggggggggtgggccctttaaaaaaaacctttgttaaaaaaaaaaaatttttccggggggcctcctttcttttgggggttttccttaggcctttcccccccaactggggattttaaagtaaaccccccccaaatttttcccaaggttgttttttgggccctggttttcccctaaatttgggttcccccgaaattaaccccccccttttta

SEQ ID NO: 572594 - DNA, 456 bp, Homo sapiens
ggctaggctggaagttcccgcacgtttccggtatctccgctgggtccagcctgaccgcaaactacatctcccgcgatcctgaacgtacccgtctcagcttcactgacttcgctgcggacccccgattcggcaacctcggtacctggctggcagggcgtggatattttgacggcgagtacatctaccagcgaaccgccgagccccatcaagccctcccctttgatttcctcaccttctgcgcgtcaagtcaggctttccgcatcggcgcgacccgtaccagcgacggcgagcaggaatggttcactcgcgaggatatgaaaacaatggacgacctcatggcgcggatacgagtctcctcaaccatgcccggattcatgccgccggtaaccatcgagggcgtcgagtacgtcgacggagccttggggacacaggtggcattcctatcgacggcgctca

SEQ ID NO: 572595 - DNA, 840 bp, Homo sapiens
tttttttttcccgggcgttcaaaatgtcaaagcgaggacgtggggggccctcgtggtgcaaaatcccggattccctgtgggtctcccggtaggagctgtaatcaatggtgctgacaacacaggacccaaaaaccgtgtatatcactcctccgttgaaggggactcaagggacggcttgaacagacttctcccgcgtgcgtggtgtgggtgacagtggtgagtggccacagctcaaaaaaggcaacaccagagcctcagaaaaaaggtacactccagcaggtggctcatctcgacaacgaaagagtctcatcaccgttagaaaaagaagtggcgtgtgtttctcctctataattgtgtgaagaataagtgcaggagtctcattagtgtaaacaattaagaggcgagaattgaagaggtctcgtcgccatttacgaggaaccagttaccaagagcgagttgggtgcacacactgtgtgtgtggcgcccccgggaattgtgtcatctccaatgtggcgtgcgccacgcatgtgtgcatgtgaaaatctcctcccagctatattatttgtgtctttaacacaacattctaaaccaaaaaaaaaatcttttaaagcacccccaaaaaaacaaaaacaaatatacaaacaaaaaactccctcggggacggcctcttcttatgtgcccgcggcgggctgcgcggcggacacacagaggcggggtctatctgcaaaaactttcggcccacatttgtgcctcaatatagcccggtgttttcccccttgaccccccccagccttttttttttgttccccccagctggtcgtcacaactcggccgcgggac

SEQ ID NO: 572596 - DNA, 141 bp, Homo sapiens
gcatctgttgaaatgctcaagacttaattatttgccttttgaaatccctgtaaatgcccccatccggttccttttcttcccaggtgtgccaaggaattaattttggtttccctacaattaaaattccctcctttccaatca

SEQ ID NO: 572597 - DNA, 219 bp, Homo sapiens
cgattgcagggcttcatttctatcaatcaccaccaccgagaactacctcacaccttcctcccaggttcacttctttgatcaccaccaccaagaccacctcacacagtcctcccagcgtcacttctttggtcaccagaactgagaccacctcacacagtcctcccagcttcacttcttcaagcaccaccactgagaccccttcacacagtacgtcccggg

SEQ ID NO: 572598 - DNA, 175 bp, Homo sapiens
gacctccttatgctgcttcagcagaagaagtggccaaagaccttaagtcaaaatctggggatcgaagtcctctcctatgtcttcagacgggccctgctgaaaccgagtatgccccaggagacgccgctccccagatgaccggaccagggtacgcaggccccacgcactttaagtc

SEQ ID NO: 572599 - DNA, 261 bp, Homo sapiens
tatcctgaataaaactgcaataaacaggggagttcagacttctctttgatatactgaagccctattaactgaagataagcctctgcgtctgttttgaccgggggaaaaccccaacccggggggggggggaaaaaaagggggcctcttttttaagctttgggggaaacccaaaaccggcccccaaaggggatcccttaaaagcgaccctggggccttccaacttggacccgggcggggtttaaaaaagggggggtggggaaa

SEQ ID NO: 572600 - DNA, 385 bp, Homo sapiens
  misc_feature (328)..(328): n is a, c, g, or t
ctttctttctttctttctttttctttccttctttctttcttttctttttcttttcgagacagatcttgctctgttgcccaggctggagtgcagtggtgcgatctcggctcaccgcagcctctgcctcccaggttcaggtgattctcttgcctcagactccagagcagctgggattacaggcgcccgcatccacacacggctaatttttctatttttagtagagacggggtttcaccatgttggccaggctggtctcaaactcctgtctctaccaaaaacacaaaaaccagcctgacatggttgttgcatgcctttgggtcccagctanttggggagcctgagggagggaggaattgctgggagccccagaagttgtcgttgtagt

SEQ ID NO: 572601 - DNA, 547 bp, Homo sapiens
  misc_feature (139)..(139): n is a, c, g, or t
  misc_feature (182)..(182): n is a, c, g, or t
  misc_feature (190)..(190): n is a, c, g, or t
  misc_feature (195)..(195): n is a, c, g, or t
  misc_feature (241)..(241): n is a, c, g, or t
  misc_feature (266)..(266): n is a, c, g, or t
  misc_feature (274)..(274): n is a, c, g, or t
  misc_feature (388)..(388): n is a, c, g, or t
  misc_feature (484)..(485): n is a, c, g, or t
  misc_feature (489)..(489): n is a, c, g, or t
  misc_feature (494)..(494): n is a, c, g, or t
  misc_feature (505)..(505): n is a, c, g, or t
  misc_feature (512)..(512): n is a, c, g, or t
ccgcccgggttgcactctgcaatagtatgatgaggccaggtgagggcacactgaggcactatgatgaggctgggtgagcgcacagtgggacactatgatgaggccaggtgagtgcacactgagacactatgatgaggcnaggtgagcgcacactgggacactatgatgaggctaggtgagcncacactgngacantatgatgaggctaggtgagcgcacactgggacactatgatgaggcnaggtgagcgcacactgggacactangatgaggntaggtgagcgcacactgggacactgatgaggctaggtgagcgcacactgggacactatgatgaggccgggtgagtgcacactgggacactatgatgaggctacctgagtgcacnctggggcactatgatgaggtcgggtgagcgcacactgggacactataatgaggctaggtgagcgcacactggggcactatgatgaggctaggtganngcanactgnggcactatgangaggccnggtgagcgcacagtgggacactatgtgagggggtc

SEQ ID NO: 572602 - DNA, 675 bp, Homo sapiens
gatcagagtatataaatcccatgcaaacatatctcagcataactgatatttgtttctaaataattacacaggataccatgttatttgttgtaagctcgttgacatttgctaaggaaattttgtttcactgaatatgttctagacgatgccgccagaacgattaaccagttgtgctcattttgtatgtaagctgaagaaaaatgaaactagatagcatgttctccatttcgcagtctacaaaggggaagttcttcatttgcttaaagttcaagatctcattttctggccagtgcaagagacttttatatctacaatatggatgtacgtttttcatatttctagagttcattgtatggaaaacataccatcaaagttgatccgaaagatgttgcaaatccgtttacacagttgtttgtcataccattaaagtcttatggttaattttatgtattctatcttgttctcttgtctaggttagttggcagatctcagtctttctgtctttcgacaaagaactctatgaagaggacgatcagggaaacccacgtatgcctttgaggctagggactatgttgtaagttcacctgtgatggccaggtcattcagtcagtggcacagccactaaccccattcacagcaccaagactggtaccccgatggcttgtaggcggtctt

SEQ ID NO: 572603 - DNA, 103 bp, Homo sapiens
aggtatgacagtcgagaattctgcgcatgtgagtgcgtctgtggagagcagctgtggcttctaggtgccgagtagcatctgtgaaccctccccagtgctctcc

SEQ ID NO: 572604 - DNA, 477 bp, Homo sapiens
  misc_feature (26)..(26): n is a, c, g, or t
cccggggtgttgctggcacctgtggncctagctactttgggccgtctgaagtgggaggatcacttgagcctgggagttcaaggatatagtgagccatgattgtgcccactgcactccagcgtgggggccagagcaagaccctgtctcagaaaaataagaacgtcaacaaaggatagtagaactggaaaaggggccgggtgcggtggctcatgcctgtaatcccagcacattgggaggccaaggtgggcggatcacgaggtcaagagatcgagaccatcttggccaacatggtgaaaccccatctctactaaaaatacaaaaattacctgggcctggtgacacatgcctgtaatcccagctactcagaagactaaggcaagtgaatcgcttgaacccgagacgtggaggttgcagtgaagtgagccaagatcgcgccgttgcactccagccttggtgacagagtgagagtctttctca

SEQ ID NO: 572605 - DNA, 229 bp, Homo sapiens
tggaaacggagtttccgcttttggtggcccaggcgggaagggcaagggcttgatctcggctcaccgaaacctctgtctccggggttcaagcagctctgcttcagcgtccggagtagcggggattacgggcgtgtgccaccacacctagctaatttggtatggtaagtaaagagggggttcctccatgtggtccaggctcgtctcaaactcccagccggggcgaaagaag

SEQ ID NO: 572606 - DNA, 285 bp, Homo sapiens
ggccgtgcctgaagcctggatagagcgggattttctcttcaatacgcagtaagttacttgccccgtggttgcctatatctgtagctaggggcaaagacaataagagagctttctcggccgggtgcagtggctcatgcctgtaaccacaatgaacatacctattaaaacagctgaaatgaaagagactgtacacaccaaaatgctggtgaagatgtgcaggaattagtaactttatatactgctgatgagaatgtaaaatggtacaaccatttgggaaaataatgt

SEQ ID NO: 572607 - DNA, 424 bp, Homo sapiens
atgcacttgtatgtgtctaaacacgagtcttgctctgtcgcccaggctgtagtatatctgatgtgatctcagctccctgggaggctgcgcctccctccaggcttcaagcgattctcctgcctcagcctcccaagtagctgggactacaggtgcactccaccacacctgtctaatttttgtatttttagtagagacagggtttcaccatgctggccaggctggtctccgactcctgacctcaagtgatctgcctgcctcaacctccccaaagtgctgggattacaggcgtgagccactgcacctggcctgtttttttggttgttgttttgttttgtgttttttgttttgttttgtgtttctttttgttttgccttgtgtttttgtgttcttgttttgttttgtgtttctgtgtttttcttttgtt

SEQ ID NO: 572608 - DNA, 710 bp, Homo sapiens
aaaactcctgcagctagctcggtgtttgcccaaacagccacccagctttgagcttgaaaggcaggccctggtggtgtaggcacccgagggaatctcctggtctgcgggttgtgaatgaccgtgggaagaagcatagtatctgggccgagagtgcaccgttcctcgacggcgacgagtatctcatggcttcccgttgtgctaggggagggagttccctggcttcccttggcttccctgggctaggggagggagttccctaacgctttgtgcttcccaggtgaggcaacaccccacccttcttctgctccccatccatgggctgtacccactgtctaaccagtcccaatgaggtgagctgggtacctcagttggaaatgcagaaatcgcttgccttctgcgttgatctcgctgggagctgcagaccggagttgttcctatttggccatcttgccagccagccgagagatcacttgttactgctgataggcaatttactgcagcagaggaactgttcacacagagatgattagtgtcacatggtatcgtgagtagatacttgcaacagcgagctcagtcgcaatagcaacaggaggtgaccacaaagcttattacagtactagagttaagtttcatgcagttatgatttaactactgtgtcttggcattggtagcattctttcaactgcaaatggtactaggtaccgtctata

SEQ ID NO: 572609 - DNA, 685 bp, Homo sapiens
cagggtctcttacatcgaccgtctaagagtcgcgctgtgagacgcaacaacctctcctgttcgtctccgccatcagctcgtaagtcgtagaagcattagccatgcgtgagtgcatttccatccacgttggccaggctgcagaccagattggcaatgcctgaggtgagctgtactgactgcaacacggaatccagtccgatggtcagatgccacgtgacaagaccattgggggaggagatgattacttcaacacctagtgtagcgagacgtgggctggaaagcatgtgccctgtgcagggatagtagacttggaacccacaggcattgatgaagattgcactgtaacgtaccgtcagctattctacgctgagcatcttatcacaggcagggaagatgctgccaaatgctatgcccgagggcactacagcattggcaaggagagcattgacctcgagtcggaccgaaatgctaagctggccgagcagtgcactggactgcagggctgcttggcatagcacagctgtggtgactgaacttggtctgggttcactgctctgctatggaacgtatctgagttgagtatggcatgaaagccaagcttgagtattatatcgacacggagccccaggattgcacaagtggagttgagcactacaattctcatctcaccaaccacactacagtt

SEQ ID NO: 572610 - DNA, 134 bp, Homo sapiens
ttgacacttcgtccgccgatgacagtgtactcgtaggtccgtccccttggtggccacttgatttgctggtaagggagggatcgttgacctcgtctgtaatcgactgcttagcttcccaggcgggtcccgagaca

SEQ ID NO: 572611 - DNA, 2157 bp, Homo sapiens
  misc_feature (198)..(198): n is a, c, g, or t
  misc_feature (310)..(310): n is a, c, g, or t
  misc_feature (328)..(328): n is a, c, g, or t
  misc_feature (380)..(380): n is a, c, g, or t
  misc_feature (387)..(387): n is a, c, g, or t
  misc_feature (518)..(518): n is a, c, g, or t
  misc_feature (711)..(711): n is a, c, g, or t
  misc_feature (722)..(722): n is a, c, g, or t
  misc_feature (925)..(925): n is a, c, g, or t
  misc_feature (2043)..(2043): n is a, c, g, or t
acgatgcatgcggccggcatggactcatatcagtatctagagaattgctgagatatatgcgctacacacactcagtatcctaccactactatgaccatacaataggtgatagattacgtagtcgtctatgctatcagtctataagcgatactatcgtcgatagacgctctctagagcgagtcacatcgtccactcgtntaggcgcgaatctagttgttgccatagattggtcagatacgtagggtcgtgtagtcagccctgtcgatggcacacgggtggtggccatggagcacacatcatgtgtagttcntgccgagatacgtgcccngaacataggtattcatgcgggccctaaagccaataaacaagcttagagattngacaccncgtattagagagccattcacgtacagccagattgggcatacacaacaaacattccacatacagtacacgcggataaacagactctattcattgtacctttaggccaactgtggggacgtatggccattctnatgtccccattaaacacaaaagcaccacattcgagattcttattgggtaattctaaaacagacgttacacactcaggctcataactgagacgcggtaaacggtttccatttcgagagcaacatttcccactctcctcacggcgttaaccgtatatgctatagtgctattaaaacacggattaagttacagcanagcataaacgnaaacgccataaattatatctaagacgaggtgattggtcactcgcgtaaaaagacggctattccctcctcatttacacgagaaaaaccctcctcataaaagacccaataggcggccacactcggtactcaattcacaaattaacagttaggaggctctttacacttgtgccaatctctcgtaaacccgccacaattcgaaacgnacactcctgagtcggggccaaaggagcgcccaaaacaggtcgcaagacattttacactcggctcgagggtcgggaaaacactcaaccaataagcttcgaccacggaaggcgacaccacaaggtatgtctattatccacattccttacgttatatcatcggttacgagagatactattctccccggtggatacaattcacaagttcaatcccccgggttctccacattttctcaacgtaaacaccagcatgatttcgccacgcagtggcggcaacaagatatagaaaatcctgtaagaagttcaacatcatctggtatgaacgtcaaatacgatgtgtcggatataggcagagaataatactccgagacacgagcctttataggtgttcctccccgaagagcactaggggtgggcacgtatggtggagaaggtcacaacgacccaggaacatgggacagggtcgtcatagagccaaaggtctggccaaagaagagtcgcgctattggacaacgagggtacaggggtcaacgaggacgtagacacaagttcacgcggtaaaatgagcgttaaaaccatcgcccggtaaggttaagaggggctacgccagtttacgccctctaacaggaagatttcagcgcaccgaaactgtcgtataccacacattcgagacaaacacaggaccgagtaagggaatatacgtaagcaaaccagtttacgtacacagacaacgaccacatgtacatacacaagcgcacgccaaagagacaccaaatgatgacagcctcccttgtaggacagccagcagccattagagtaactcgaagccatgaggggtaagcaccacagaaagagtattgagatacgcaatgggaatcacatcgtgaacaggagacagctcagaacatgaagaccgacataaggccacagaggctagagaagcgaagcaacaggcgagatacatagaagcgagtgggcagaaaagaatcaagcaagagagaggacagaagagtaaaacgcgacagacacatagtcaacgcagcgacacaagagaggagtagcatcgggataggaatcaatcgagagagcaaaaagacaggcgtgtgagagcgaagaaacanagggaagtgcaagcgaagagacggagaagtgaagcaggatggacgaaaggagagaaaagtagcacatgacagctgctcacactcgcatcctatagtagaagacagaagtaggac

SEQ ID NO: 572612 - DNA, 174 bp, Homo sapiens
gtgaaacttatcgcactggcgagtcttcacggcattacttagtcgtaaaggcgtagctgactcaatagcagaggtgggaccacccctcattggtccctacatgggcttcccatccaccctccaggtggtcttccatggctggggtggggtgcaagtggggtccttcataagctg

SEQ ID NO: 572613 - DNA, 280 bp, Homo sapiens
  misc_feature (131)..(131): n is a, c, g, or t
cccgctgggccaggaccacccaaggtggcccaattactcgagatgatcatcacaaccaagatgatgctaacctaatatcctctaacccttcgcggtgctttgtctgggaaaagtcttttggccccatgtcnaatttctattgcattgagagcccaagagccccctggtcagtcaggcttccatttagcatggcgtttgcaaggtttacccatgttgtagcatgtgtcagaatttcattcctttctatggctgaataaaattccattgtatgaatataccc

SEQ ID NO: 572614 - DNA, 392 bp, Homo sapiens
aagcctgcactgtccaaagtcttggaaacttgctggatatgatgtaccgggagccatcacgatggtcctacacattccagacattttcctttttgagccgcctgaaagtacagctggagcccttccctgagaaactcttacaggccagtgaagccagtccagatctttgagaggtctgggtactgtgacaggtatatctttgtaaagaatctttttgaaaatggtgccctcaatgacattcaccggcatatctttcaggactggcattctttttctctcgcgggagtttgcacacccgaatcaaattacaatggctttatctaccctccaggtttattcacaaagtttttatgaagaaaactgttccctttatgccacggttttctgagcaa

SEQ ID NO: 572615 - DNA, 263 bp, Homo sapiens
  misc_feature (211)..(211): n is a, c, g, or t
  misc_feature (219)..(219): n is a, c, g, or t
  misc_feature (258)..(258): n is a, c, g, or t
caggctggagattttcacataggttagattttcattcccggggctagttagctttaagccccctaaaggactagggtaatttgacttctcccttcctaagttcccttttatatccccaaggtagaaatgtttatgttttttactcccattcataaatctattcataagtttttggggcaagtttacatgataaaaaaaaatgtgatttgtnttcccttntttgcccttttgaaataaagtatttatttcctgtttccngttta

SEQ ID NO: 572616 - DNA, 128 bp, Homo sapiens
ctctagaggctccccgcgtttcaggcgcacttctgtacgtctaccatcatcacagaccaaaggtagtataaaatgcacaaagcatgtggaagaaaacagatcacgaaaaactggaatactcataaaga

SEQ ID NO: 572617 - DNA, 1564 bp, Homo sapiens
  misc_feature (379)..(379): n is a, c, g, or t
gcatcacctccaatgtgtgagcagtacgagcatccagcctgaccatatatgcgctagaatacagcttatctcgtagcataagaaaattatcgaaacacttgagcgtgaaccggtatattgaggctcacgtccatggtgaaatcccagacataaccctagtgaagcgcctgacggtcaagcgaatgaaactcaggtatgtacaccacgcgtaatggcatgtacgtggttagtcaagtggaagtccgacgtattagcatccacttgtgacctaccgaaggcactcgcgcaagcatgaaagtagcacactcgtacatacacaagaacagaagacataacactaaaaaggagaccacggtagacaaggagtgcatcaccccgntgttatagtcacgccaacacattatgtggggggagaaggactgtcggagtaacggggtaggactgccgactgagagaagccttaaccgagaagtctctacgagtacgcatacaggcttgggagtcaagtccctacaagaaatcagccaatctgtgtgcaggtatacgcaaacgtgtgttattacaattattgcacacaaactatagacacacaccatcttacacacatgcgcgcgctatatagggtgtagagagtgtgtggagcacactcgtatgaagttccctcacagaagcaagtgggacactactgagcgatacggtcttgtgacgagccacgttggagggacactacacgaggcactctgtttgcactccagtcgagccaggacgaagtttcgaaccacgacgatattgcccaaacgggacacgccgctttgaaagattatatgggccgccgttcacacaacatgggtccaatgtctctcaccccgacactacgtgtgtagaagggcaaaacacgctggttctccccaggcgtttccaaaaagaaacagcgggacaatatatctttaacacaaacaattaccttccgcaaaaccgagttgggttatcccgcgtgcagattatgcccggtggcactcaaaccttgccacacttttgggtatttctcatccgtccgtaaatccaaccctctttgatgtaaggcagacggcacaaccgcgaagtggggtcaccagggaattcacacgggtagggccactagggagacaggacacttctgtgagttaccagttcacggcgcgagtgaaacagacacattggtcggtttgagaaaatccccaccggcgcattgtttgttaagctatgagctccaagttaaaccggaagtaccccatggtatgctgtatcggaaaatcccgagcacaggcccatgtgtaaatatcacttacccacacatataggtgagacgtagacgccgccagccaagcaggcgaaattgatctatattaaaccgcacgaggagggtcacacaacacagtctgtttgatcgagcgaaagcacagcggcgggccaactgtttatacaccccgagagctcactaaccggagggaacagtacgacgcgataaagaattcggcagtcatagacagaggacacgactacgaccatggactacaatgcggcg

SEQ ID NO: 572618 - DNA, 294 bp, Homo sapiens
atacgatagttgatgaagtataaattgatatagccactttggaaactgtttagcaatatctactaaggcgacacatgcatacttcataacccagcagttctacttttaggtatgtgcccatccaaaatgcatatatattgtttaccaaaagacattgtggtaatgttcataaaagcactatttgtaacagtgcaaactggaaacaacccaaataccatcaataggagaatgaaaaataaattgtggtatatttgcacattggaatagtatacatcaatgagaagaagtgactta

SEQ ID NO: 572619 - DNA, 233 bp, Homo sapiens
ggacgaccctagaggatcccgaatatacaccataagccactataattataggaaggcctgtgtaactgatagatagatccaagttaaacttactccattaactagccgaatgatcttaataggacagctcccacctctggttgagaaacttttaacttacttcttcttcttcctcctcatcaggctgtgtttctgagtcttcctcaggtgtgggtggatcagggtggtatcag

SEQ ID NO: 572620 - DNA, 985 bp, Homo sapiens
gggggtcaggttatgtgctggtatttctcccacctactgtatcatagagagcttagattcccagctagcttgctctacagctgcagttactctgatggacttgcacagggtggaccagcaccccttcctctatgtgtgtgtctgctgctgacctgtggatttgccgaggcagggaagctactggtagatgcccatggatgggagccactggttcaccatgagagtcggtggtggagaaactcattactcagggggcatgaggtggttagtagtcatgccagaggtgagttaggcaactgggaagatcactgaattgcacagatgaagacttattcaacttcatataccctggaggatctggcaccgggcagttcaaggacttaatgcccatgctcaatggaaagcacgaagtaccgaagtatcatattctctattaatgggttcatacaatgacactcaacgacttatcagaataccaaaatagccagcaagtcgtaaaagcacaaaacaattagtagaaactacttacacgggagagtacttgaggaagcaagagataacatcgaatccctaatgataaactgtggcattacattgctaggcccaaatattatctaccatacactccgagactcaaccagaccagggggcactacttgcgggcaacaaatcaggacgaaagggtgcacaagaggcacatggatcccacttagcgaactgtacccaagaaacacctccagaaggggaacacaagatgcacagactcccaaaggagaagagaaaagggaacgaaaataaaagcacatgggagagaaaaagataaaagtagacaacaggaaaaacaaaaaaagtgccgaaaaactagagctaggaaaagtacgcccaacaccagacaacagaacaagaaccgaaagcacaaaagcaaaagggagcaggcgaaggaccaagaacggccaacaccaccaccggaagcagacagaagaaa

SEQ ID NO: 572621 - DNA, 130 bp, Homo sapiens
aactcttcaatctcttgcactcaaagcttgttaagatagttaagcgtgcataagttaacttccaatttacatactctgcttaggaatttgggggaaaatttaggaattttatttgccaggttttttggaa

SEQ ID NO: 572622 - DNA, 675 bp, Homo sapiens
cccacccgccctgaggcctccgccgcgagtttgcctcgttcaaggaggtggcagagctaagaagcaggtggagagtcccaagttaagaaccaacggctccaagagggttttccagaccaagattcgaagttccgcaaggccttctacacctctaccggcttccagattgacatcccacggagaaacagttccggctgacctcgctgtacgccgagcacccaggcgactgcctcattttcaaggcccccagcccctcgggtttcaaaatgcagctactggaaacaaagttttcccaccccgtgggcgagctcatcgaggtgccccttcggggccaggacagcattcctgccttcctcaggttggtcaccctcgagcttttcaaccgccaaaccgtggggtaacctgcaggctcgggggcataaccggaacccctttggttggccttacctgcaggttccctgcccccccaaccacagggtggggggcacgttctgcctttccagccccccagggcaacagcatgacttacaaacccgctgggacctacgtcggggttcctgctggggcggccagccccctttccccgggcagaccccatgggtcccggagcctggggtgtgggggtcggcccccagcctgggttcctccccttgtgaaataaaattttttccccta

SEQ ID NO: 572623 - DNA, 458 bp, Homo sapiens
caaagtggaaaatgacttaatttcattattctagcttagaaagtttgttttgctttttattttgtttggcgatagaatggaaatgacaatttcccaggagaatgcctacctttgggggtgctgaacgactcggataatatgtgacctcaaatgactggtcatccttagtcgtcgcagataggaaggtcatgcccttcgcattcactccgagcggtgggcaggctcggcctcggccatcggcgcataggggccagtaaccatgacgacgcccgttggcaaggccgagatccaatagaggcgtagccggggctgcttcatggacttaaagccagcattgaaaaacgttacatcgttgggggaggggaaagtcctgagaggacccggggcccctccctgaggttcagaccaggcatggcggccccggccgacacgctcacttgcggcccttgggcactttg

SEQ ID NO: 572624 - DNA, 755 bp, Homo sapiens
  misc_feature (89)..(92): n is a, c, g, or t
  misc_feature (383)..(383): n is a, c, g, or t
  misc_feature (523)..(523): n is a, c, g, or t
  misc_feature (526)..(526): n is a, c, g, or t
  misc_feature (541)..(541): n is a, c, g, or t
  misc_feature (558)..(558): n is a, c, g, or t
  misc_feature (581)..(581): n is a, c, g, or t
  misc_feature (591)..(591): n is a, c, g, or t
  misc_feature (678)..(678): n is a, c, g, or t
ttcgccgagctttcggaattcggcttgagaccccaattagctgaattcgcgtgtggcagagggaggaaaaggaggcaaacgtgggctgnnnnatggcctcacataggaaacagggtcttcctggagatttggtgatggagatgtcaagcaggtggcctctggacgtcaccgttgccctgcatggtggccccagagcagcctctatgaacaacctcgtttccaaaccacagcccacagccggagagtccaggaagacttgcgcactcagagcagaagggtaggagtcctctagacagcctcgcagccgcgccagtcgcccatagacactggctgtgaccgggcgtgctggcagcggcagtgcacagtggccagcactaaccctncctgagaagataaccggctcattcacttcctcccagaagacgcgtggtagcgagtaggcacaggcgtgcacctgctcccgaattactcaccgagacacacgggctgagcagacggccccgtggatggagacaaagagctnttntgaccatatccttcntaacacccgttggcatnttctttcgcgcttccgtacttanctactgaccncactttggatttagcgcacctgtgattgataggccttccaagagtcccacgctggcattgccctcccgaggacgagatgaagagtancaacggaagccaaacgcgttttctaaccaatcctaatctgggttggggggccttatacctggtatttataccccgtg

SEQ ID NO: 572625 - DNA, 199 bp, Homo sapiens
tagaggttgggacacggtgcacagaataggaaggtattctgtagtgtgaggagggagttagaggcagagcactgtcagccagggttttcaaaatgttctaattcggacgccctctgtgcaaacaatcatatataggagtgtgaacaaacaaaacttaaaaaggcagcactctggagccacggccagtccttcccctctt

SEQ ID NO: 572626 - DNA, 714 bp, Homo sapiens
  misc_feature (89)..(92): n is a, c, g, or t
  misc_feature (383)..(383): n is a, c, g, or t
  misc_feature (523)..(523): n is a, c, g, or t
  misc_feature (526)..(526): n is a, c, g, or t
  misc_feature (541)..(541): n is a, c, g, or t
  misc_feature (558)..(558): n is a, c, g, or t
  misc_feature (581)..(581): n is a, c, g, or t
  misc_feature (591)..(591): n is a, c, g, or t
ttcgccgagctttcggaattcggcttgagaccccaattagctgaattcgcgtgtggcagagggaggaaaaggaggcaaacgtgggctgnnnnatggcctcacataggaaacagggtcttcctggagatttggtgatggagatgtcaagcaggtggcctctggacgtcaccgttgccctgcatggtggccccagagcagcctctatgaacaacctcgtttccaaaccacagcccacagccggagagtccaggaagacttgcgcactcagagcagaagggtaggagtcctctagacagcctcgcagccgcgccagtcgcccatagacactggctgtgaccgggcgtgctggcagcggcagtgcacagtggccagcactaaccctncctgagaagataaccggctcattcacttcctcccagaagacgcgtggtagcgagtaggcacaggcgtgcacctgctcccgaattactcaccgagacacacgggctgagcagacggccccgtggatggagacaaagagctnttntgaccatatccttcntaacacccgttggcatnttctttcgcgcttccgtacttanctactgaccncactttggatttagcgcacctgtgattgataggccttccaagagtcccacgctggcattgccctcccgaggacgagatgaagagtattcagcgtgatgcccatgcttataatttttagcccct

SEQ ID NO: 572627 - DNA, 150 bp, Homo sapiens
actctcggctgtctcctcgcgacgagtacaagccactggatctgtcctattccacattgtcttacacttaaacggaggctaccaactccctcatcacttctccgggtgaatactcagacgccagcatgtctccggagctacaatgcctag

SEQ ID NO: 572628 - DNA, 270 bp, Homo sapiens
  misc_feature (7)..(8): n is a, c, g, or t
  misc_feature (10)..(10): n is a, c, g, or t
  misc_feature (30)..(30): n is a, c, g, or t
  misc_feature (43)..(43): n is a, c, g, or t
  misc_feature (87)..(87): n is a, c, g, or t
  misc_feature (165)..(165): n is a, c, g, or t
  misc_feature (187)..(187): n is a, c, g, or t
  misc_feature (215)..(215): n is a, c, g, or t
  misc_feature (217)..(218): n is a, c, g, or t
  misc_feature (255)..(256): n is a, c, g, or t
  misc_feature (265)..(266): n is a, c, g, or t
tcctagnngnctgaaaagaatgcaaaaganggcctgaaagccntgttaaatatctgacgagcaagtagcggaagagattcttttccnccggtcattggaggatagaactaggaagcagatttcagcttccggtgaagaagttaaaggatatatagcttcctctcncgttttccgatccagtatcccngggttctgacctgatatttcatagctgngnngcactgcaggagttgctccactattctaagcctcagnntttcgtctnnaaaa

SEQ ID NO: 572629 - DNA, 103 bp, Homo sapiens
ctatgggaactgctggtatcaacccagaaccatctgacttaagagtctaaatgttaaatcacactctgctccttccttagatactcgaaaacaccctagaaca

SEQ ID NO: 572630 - DNA, 637 bp, Homo sapiens
  misc_feature (89)..(92): n is a, c, g, or t
  misc_feature (383)..(383): n is a, c, g, or t
  misc_feature (523)..(523): n is a, c, g, or t
  misc_feature (526)..(526): n is a, c, g, or t
  misc_feature (541)..(541): n is a, c, g, or t
ttcgccgagctttcggaattcggcttgagaccccaattagctgaattcgcgtgtggcagagggaggaaaaggaggcaaacgtgggctgnnnnatggcctcacataggaaacagggtcttcctggagatttggtgatggagatgtcaagcaggtggcctctggacgtcaccgttgccctgcatggtggccccagagcagcctctatgaacaacctcgtttccaaaccacagcccacagccggagagtccaggaagacttgcgcactcagagcagaagggtaggagtcctctagacagcctcgcagccgcgccagtcgcccatagacactggctgtgaccgggcgtgctggcagcggcagtgcacagtggccagcactaaccctncctgagaagataaccggctcattcacttcctcccagaagacgcgtggtagcgagtaggcacaggcgtgcacctgctcccgaattactcaccgagacacacgggctgagcagacggccccgtggatggagacaaagagctnttntgaccatatccttcntaacacccgttggcatatcctatggcgcgatccatcgcgaacgtactgtcttacttcttgattatctagcgcacctagtggtagctatgcaatcac

SEQ ID NO: 572631 - DNA, 256 bp, Homo sapiens
  misc_feature (225)..(225): n is a, c, g, or t
gcgggatgcatgataatgtccccgacgtgtctgtcgatgatctttcgtcccaatgctccagattcatatacccatggcgcccattacgctggatcaattcacgatgtttaacagtgcatccctgcacgtcgcatttccacgctacgacgtcgctgttccaccgtatgatgtcgtctttccacgctagactgtcgactttccacgctagcacgtcgactttccacnaggggataccgagactcgacattcgataatc

SEQ ID NO: 572632 - DNA, 104 bp, Homo sapiens
acttccatatacacgcatctggcgtaccagggactcattggttccttcacgggcatccacttcacaggtgagggactgcacctgtctaacagatactcagtgaa

SEQ ID NO: 572633 - DNA, 534 bp, Homo sapiens
  misc_feature (204)..(204): n is a, c, g, or t
cagcgaccttgaacagctttttcatgcagtctcctcagaatgacgggccatggtagcgaggcaaggcccccgccaacatcgcggtaagtacctaacgcgaaagtagtagcctgacgcgaaagctgcgcatcttaaggacattgggcgccaaatcctcgataaaggccgacaacttgcatggccatggggcgccgccctgccgcnttcttgatgcagcgcaagccgtccgggtgggacggcagcggcgcgcgcccgctgcgaatggcgcccccatccacgtggctagaagctctcccaatcgccggtgctggtcttcgcggcgggcgtttcggcggccggcaggcgcacaacgggggtggcatggcgcaggccgatgcgctcggggctggcgtacggcttgcccccatggtgaggggggcggcgggctacgggggtgggtgccgtagcggccggtgctgcgcccggggcgagtttgaacacggccacggcctgcaccaggtcctgggcctgctggttcaggctggaggcggccgc

SEQ ID NO: 572634 - DNA, 378 bp, Homo sapiens
cgatgagtctcaagctgccgcccgtttgggactcatcgatgagtctcaagctgccgcccgtttggtgcgacgaacacgcggtgcagaaagcttgcgaccagcggtgcatgcggtgaggtcagtaaccgccaggcggggtgcctctcacgcaaggtggtcagggtggcatggtccatctcggtcaggcctggatgctagggaatctgttgcagtgagcacgatgcttgggcggcgcgtcttcccgtggtcgggtgctgtcagcgcaatgcggttgccagcgcttgcggtggtatcggctgtggctggctaaggcggtgccgcgggtgcgtctggtgtcgtgtgtctgccacaggacacgtgcagtgccgcaggccggat

SEQ ID NO: 572635 - DNA, 1096 bp, Homo sapiens
  misc_feature (387)..(387): n is a, c, g, or t
gtgtgtacagcttgttgtgttagttgggctaggttttacgtattagcgctactatcgcctggaatgagtgcgcgggtggtgtctcgtggtcgcgagcgtgtgtgtggtggggagaaaagccggcctgtgggagacagttttctcgccgcgactttgttttgcagcgggctgataataaagacttcgggtgcaacaattttggctcacagagttgttacatggggaaacaaccaccaggggtgtgttggcgaagaatttcgcgaattcgtctaaaccttagtatgggtgatatgtgaggtgtgtgttttttcttgcctctcgggggcatgtaatgtggggttgcatctgtaggtattatttggggatttttcaaaccataggatcccncccatctgccagattgagatcactttgttttctggttcaggaagtacgtgttcgtcagaggtaaagttttaaaagataattgggccaggtgtagaattgtagggcaccgtttgtctttttcttaagttctttattcgccaacttcttgtttgtatgagaaatcttaggccccccctatatttagtgctctgtaagtaacacagttctttccctcttttattcctctttaggatttcccttttaacacctggttttgatggatttgattaaggtgttccctctggtgaagattttcttcacagtttcttgttcttagaataatcataatttctgtaataatttgaagatttataggtttcccatggagcttctaaatctttcatcccagtatagttttaaataatactttgtctctcttctcccctacacgcccttcagggattccactttagccctatactggggggtttaaagttttgaatgctgatggtctttttaagttttcaagtcacatttgttactgtgtgtttcatttatgttagtttcaacttctattccttctagttcaataatcttctcttctgcacaatgtttaatcccctgccttcttccactttcacgactgtaaatcataactttttaatttgcagaaatttgatatttaaaaaattttcaacctcccccatttaattaaaataccattatacta

SEQ ID NO: 572636 - DNA, 609 bp, Homo sapiens
acctgcgaaaccgtctgtctgcaagcccattaagtccgtaacgcagatgtttgccagtttggacgttgtatactacgtccagtgaagtgtaccggtttcttagagctctatagatacctttgcatagctgctcatcagttacagactgtctactaatcagattctaatgcagagttcattaaaacacatagcatgcgtccggttttctggtatcgatgcttcctgtctactaagatcacaagtatgggctagtctaccaagctcagaatccaggtctccggtttcgcagtagtatgctgccatgtccgagtactgtgatcctatttcccagtcgtgtgcactctcctttgccagtactgtggactcgcatttcacagtcctgtgtgtcgtcatttataaggcctgcatgcccatttgcgagcactgtgctcccatttctcagtagtggactcgcgtttatcagcactgtgctcccgcttctcagaactgtgctctcgcttcccagtgctgtgctcccatttccctatactgtgctcccattttacagtgctgtgagccctcatttcccagtactgtgctcccatttcccactactgagctcccatttcc

SEQ ID NO: 572637 - DNA, 334 bp, Homo sapiens
gcccacatgagcagccattgtcggtcctcatgtccatattgttgaacagcagaggcgtacaggtcattcgccggtccgatcaaagctcactgactgctgcacatcaccattgcatgactcgcagcagtgtagtccatcagtaaggatccggcagcagtcgacaccgaccggtgcacgcgcccgtgcccaaggggccaggcccggagcagcctcagcgccaggggtccgcgctggttcgcagggcaggcccgggcgcgggagctgcgctctctggctgggccacttatcacgctcgcgcggttcacagtcctctgccccagtgccagcggcgccc

SEQ ID NO: 572638 - DNA, 331 bp, Homo sapiens
  misc_feature (127)..(127): n is a, c, g, or t
gctgccgcagcctcctgagaagttggaaccactgatgcgtgccgcgacacctggctaattttaaagaaatttttttgtggagacagggtctctcactgtgttgcccagggtggtctcaaactcctgntcttgggtgatccttccgtctcagcctcccaaagcactggagttacaggcatgagccactgtgtccagctcggctttaatttataaagttccaaggctctgttcccctacgctcaactgactcccttgcggtgttgggggtggcccctttccccaaaagactggagttgctttttctgacctgagcataacagaggccccagta

SEQ ID NO: 572639 - DNA, 809 bp, Homo sapiens
cacggctgcaaactgatctggcgcgcggggaggagtgagagctgcagtgcgagcgaacccgcgagagagggagagagcgagcgagcaacagcgagagcgagagcgagagagccgggagtgcagagtggagtagtgacctgccttcctggagcctgggattcatgcctgtcctcggtgaccagctgaagtgggactttacggctgagtatgagccaggctgctaggagccaggtacccccacgcctgcagtccccgcgcctgtgcccggaatgcgagctggacgcagtggctctcccaagttcccacctgatgccgaataaaaagcgtccagccctgcagctctccgccaaagactggacatttgactccaggactccacagaatggagcaagaatgagagtgaaaaatggcctggcagaaaagcatcgcaactggacggttttgtatgagcatcctctacttccttgttatatataggggccgtaatctcaggtgcaggccctcaccaccaggaacccagctgggacaggaccaaagatgtctccaaggaaatctgattggcatcatatcaggacacgggggccgtttccaccaagtccagagagctacctatcctttgtggaaagagacacgtcacaaggattgacaaacagatataagaatctacaagggagatcagagccgcgttcggaaaggcatgacggaacacaggccaatcgaagaggacgagatcctggacacagagcaaccagtgacccagtcatggcggagtaacaaagaggagcatccgcatgattgagagtgataac

SEQ ID NO: 572640 - DNA, 118 bp, Homo sapiens
tagaccagacccggcaatggagcgagactccccaccttctacaaataaaaagagggtaaaagtagccagatgtgatgacgtttgcctttagtcccagctactccagaggctgacgaag

SEQ ID NO: 572641 - DNA, 724 bp, Homo sapiens
  misc_feature (434)..(434): n is a, c, g, or t
gttcatagagccacgaccaactgggttggtatcatgggagcaaggggacgcacaataaacaacgtgagacagctgggacctgaggctggaagaaccccctcccctccccataacatgcccactgccccaaataaaaaaaaaaccaaatatgggtagagcatggcctaaacagaactaggggcaggtgaaagagacatggaactcgagggacagcggtgaatgagaccatgcgtgtgctgggagggcccacaggcagcggtgggacattaacagagcaggtacgatgctctctgtgtcttccccggggatgatgctataaaatagtagcatgagatgaggcctgtcctactgcctctggtctcccttgcagctcacgaactggctcaacagctgatctcctgctcctctttcgcatatcgatgaggcataaaagnggaaagagagaggtggacttgacacaatgatcgactacaaaccgagagatgcgtcttgcaacgacccgacggtacgagatctagaatctatcgcgagtgcttaatcgtcgctgatcaacgagaggaaatgcgacccaaggctgttccacgcatgaaaggtcgccattgagagaggatccgcttacttggcctcatagtacccttgaataagtggccagcactggccatagcgttgaacgccatgaatctgcatgcaaccaccccctcgcacatcgggatcatgatgaccc

SEQ ID NO: 572642 - DNA, 793 bp, Homo sapiens
  misc_feature (669)..(669): n is a, c, g, or t
  misc_feature (793)..(793): n is a, c, g, or t
ctttatttctacctaatttttctcttcttttttcttttaagtggagtttcactctcttgcccatgctggagtgcagtgagccaagattgcaccactgcactccagccgtgggggacaagagcgagacttcgcctcagaaaaaaaacaaaaataaataaataaacaattcggggatttgaagaacgcaggttcttctctgagaccacagtgagagcccacaaactcttctctcgagtgtccccccctcgagatattcctccatgatgagctcctcccgccagggggaccctcttgggccagttgtcctggagagaacattttgggaagcgtggcgcacactatcatctaagggggggcgggcgtggagaagactggcgtaccgtgggacatttcatagagggagaaatagagaggcgccacagtgagtgtcgctcgcgattaaccactatcctccaccacctttttgtttttttgagaataacgccgcccgaaaggaccacacccaatagagaaatttgcacccagggccccccaaagtgttgtcctaatgaagcgccacgcgagagggcgccccatagataaagcgccacagctttctttgtgtgtgtgcttaagagacacacagagagacagtagagcgagaaccaggagtgataacgccccgttagnagacatcgggttccggccatcctgtgtgtggcgtacccccccgcttgtggagagtgattgtgcgcctcttgcggtcccatactttgtttcttttgaggagacagatgtccctctcttatataan

SEQ ID NO: 572643 - DNA, 442 bp, Homo sapiens
tcatttgttacttcttatagcattcttatattcgtgagctgctgctgtttgtttagtgtgtactagagatagtgatcagggaactttagttggtgcatatatcctttctctgtagggcgtcttaggctatctagatatggaacatctaagcaagctgaagggagaagggggttcgcagaagtcacatcgtgtgcagggaacggtggacttagttagtcatgccgtactggagggggatcaactgcttgtacaattacgtttcacttttaattaattgtgcttaaggctttaattaaatttgggggttcccttcttagagcagctcgtactgacgaaggtgcatgcgctgaatgatgtcacggcagtcgttgaacacacggcggatattctcagtgtccacagcgcaggtgaaatgagggtagcagtagtgacgcccatctcc

SEQ ID NO: 572644 - DNA, 170 bp, Homo sapiens
aaacaccacatgctggtattcgatctgcatgcatgtttcttccgtatcacacttaaatcagaaagcaaaaattaaatactgctaagtatttgccacgaactcaaaggtgaataataagataaaattcagccaggtgctccagcagccaggttgtatgaaagcaagactgg

SEQ ID NO: 572645 - DNA, 310 bp, Homo sapiens
tctatcattatcattgcaggtttttggtttaagtccttaatcttgtcttgaattgatttttgtattacagtgtgacgatgaggatccaatttcattctcctacatgttggttagcccagttatcctagcaccaattgttgaaaagggtatcctttccccatttgttttctgttggcttcactgctacagtttctctgtcagctttgatgccttgagcttccaaagtcaattcttccagttctttcatgatatcatcttcatcaaagtcctgctttgtgtctcttttttattttacattatgtgatagcct

SEQ ID NO: 572646 - DNA, 293 bp, Homo sapiens
cacgaggtgtgtagactctcttggggcacaacgtcacagttctcacctacgtcattttgggcaactactcacagctcatacacatagaggccctcgattcagtgaggtacacctggatcatcaacaatggttatatgggtgggatacagttttacaccgccctcagcagctccacagggaaatgagtgtgatctctatgcatatcatacaacgggcaggatattggtggctctgcattacatcctcgtctgcatcattgggatctcgagaaaattactagccttgtcctccag

SEQ ID NO: 572647 - DNA, 844 bp, Homo sapiens
  misc_feature (77)..(82): n is a, c, g, or t
  misc_feature (84)..(86): n is a, c, g, or t
agcggggacgcaaccatctgcggaaaggataggggggaggaagacttaacactgcaacaacaggtacaaaaaagaannnnnntnnntaacaggacccagaggaccattatatattgctctatattctaggtcgcccactttacacttccttctcatgcacttggtcaataccacgcccgctgaccacactggcgacttccctctctgtcgcccctccgtgaagtcagacccactctgcgggccaagaaaggtgaccgggcttccttccggcttgctaagcagaggccggaagcggtggtttttagcggctctctgggtagcagggtggtgtgatagcggcagcgaggggctcggagaggtgctcggattctcgtagctgtgccggcccacaatgattctgagctaaaacacaaaataaaaaccagattcattgccaccagcgctcacctcgcctgacttaaaaaaaagtttcgtacaacagacactccttgacaccaaggatctttcacttaatccctcaaaaataaagactcgagctgggtgcggtggctcacgcctgtaattccagcactttgggaggccgaggcaggtggatcacgaagtcaggagttcaagaccagcctgcacaaggtggtgaaaccccgtctctactaaaaatacaaaaattagctgggcatggtggtgggtgcctgtaatcccagctactccagaggctgaggcagagaattgcttgaaccctggaggtggaggttgagatcgcgccactgcactccaccctgggcgacagagcaagactccgtctcaaaaataaataaataaaaataaataagtaaataaaaaaaaa

SEQ ID NO: 572648 - DNA, 145 bp, Homo sapiens
  misc_feature (145)..(145): n is a, c, g, or t
ttccccgacgtggattggtcgtcgctctcgcagagccctgctccctgcagtacaagcggccccgggtcgggtgggaggaggggactccgggaggaggaacatgcggttggggacctcgctctcattcctgatgttggcttcgatn

SEQ ID NO: 572649 - DNA, 927 bp, Homo sapiens
  misc_feature (44)..(44): n is a, c, g, or t
  misc_feature (100)..(100): n is a, c, g, or t
  misc_feature (156)..(156): n is a, c, g, or t
  misc_feature (162)..(163): n is a, c, g, or t
  misc_feature (168)..(168): n is a, c, g, or t
  misc_feature (172)..(173): n is a, c, g, or t
  misc_feature (175)..(176): n is a, c, g, or t
  misc_feature (182)..(182): n is a, c, g, or t
  misc_feature (185)..(185): n is a, c, g, or t
  misc_feature (196)..(196): n is a, c, g, or t
  misc_feature (199)..(199): n is a, c, g, or t
  misc_feature (209)..(209): n is a, c, g, or t
  misc_feature (212)..(212): n is a, c, g, or t
  misc_feature (214)..(214): n is a, c, g, or t
  misc_feature (233)..(233): n is a, c, g, or t
  misc_feature (244)..(244): n is a, c, g, or t
  misc_feature (252)..(252): n is a, c, g, or t
  misc_feature (260)..(260): n is a, c, g, or t
  misc_feature (262)..(262): n is a, c, g, or t
  misc_feature (264)..(264): n is a, c, g, or t
  misc_feature (269)..(269): n is a, c, g, or t
  misc_feature (271)..(271): n is a, c, g, or t
  misc_feature (274)..(274): n is a, c, g, or t
  misc_feature (284)..(284): n is a, c, g, or t
  misc_feature (286)..(286): n is a, c, g, or t
  misc_feature (289)..(289): n is a, c, g, or t
  misc_feature (299)..(299): n is a, c, g, or t
  misc_feature (309)..(309): n is a, c, g, or t
  misc_feature (318)..(320): n is a, c, g, or t
  misc_feature (324)..(324): n is a, c, g, or t
  misc_feature (327)..(328): n is a, c, g, or t
  misc_feature (330)..(332): n is a, c, g, or t
  misc_feature (334)..(334): n is a, c, g, or t
  misc_feature (340)..(340): n is a, c, g, or t
  misc_feature (353)..(353): n is a, c, g, or t
  misc_feature (359)..(359): n is a, c, g, or t
  misc_feature (379)..(379): n is a, c, g, or t
  misc_feature (381)..(382): n is a, c, g, or t
  misc_feature (386)..(386): n is a, c, g, or t
  misc_feature (390)..(391): n is a, c, g, or t
  misc_feature (404)..(404): n is a, c, g, or t
  misc_feature (415)..(416): n is a, c, g, or t
  misc_feature (445)..(447): n is a, c, g, or t
  misc_feature (482)..(482): n is a, c, g, or t
  misc_feature (508)..(508): n is a, c, g, or t
  misc_feature (510)..(510): n is a, c, g, or t
  misc_feature (513)..(513): n is a, c, g, or t
  misc_feature (516)..(516): n is a, c, g, or t
  misc_feature (523)..(523): n is a, c, g, or t
  misc_feature (527)..(527): n is a, c, g, or t
  misc_feature (550)..(550): n is a, c, g, or t
  misc_feature (595)..(595): n is a, c, g, or t
  misc_feature (662)..(662): n is a, c, g, or t
  misc_feature (906)..(906): n is a, c, g, or t
aaaaaatttaacaagtttcacttagcaaaatacacccaaaaggnaatcacagtacaaagaaagttttaagtcaaggcctcaccaattcctacagtaaaantattgtgtctcaattctcaaaactaacttttaaaaagcttaaacttaacctaaagncttttnnatganaatnnannccagantgnccaaacatganccncccccccctnccncngggggctagcacctttgtnttttccaaatntgctcgtntccccggngngngcacngnggnggggggtaangngtncacatttaanatacttaagntggttgggnnngggnggnntnnntntggggngtgctgccggggngggggngggggggggggggggggggngnngggntggnnattatcacatgcnagaggggggtnntgggtgggagaacactgaggaggtaattnnntaatccagattttttacaaactcatggtgcaaaangggtcccccagcttcctctattaggncngcnctnaattgcntgtnggctgcctgtgaaaatgattgangtaactcaaatgttcctaacaaaactggtcatagccacccatgcngttctgcccactgtagccggccccgtaacagccactcactgactggctctccaggccactgtaagtntggggcaagcagacacccccatgccttgcatcacctggctgctatacgccccattgctggcccctgttgttgaattcaagaagagttctatatatctgtgctgcatattggccctgtctttggacatagctgccacagcttcttcatgagtagcaaactcaacatctgcttcacccgtcactcttccatctgggccaatctcaatatggactctcacagggttgagaggagagaagaagttgtnaatgtcgttctcggtcgcttt

SEQ ID NO: 572650 - DNA, 1034 bp, Homo sapiens
  misc_feature (668)..(668): n is a, c, g, or t
  misc_feature (718)..(718): n is a, c, g, or t
  misc_feature (860)..(860): n is a, c, g, or t
tggaaaaagtagttagcattaaaggaaactccctccatgtgtgggcttaaaggccaccagggacacagggcccccccaacattgcttgaattctttctcctgcagtctctttctggctgagaaaaattggggccttacacagatgagacagggctggctatggggagagctttccctattccccaagaaacttgtggtgatgtaaccgccggatgcggccaccaacatatcaaatggtatgggagacgaaggccccagagtctggggtgtttaacacgccacgcatattcaacccgcggtggtgcgtggtgctccacgtggcaccacaaaaatgtcacacaccaacatgtgtggtcacagagtgggtgtgagaccagtgtgtgtgggccacagaacgtctctcctggtgttcctctctcttgtataagtgtgccggtaaaactgtgtctttaacaaataaaccacaaaatctatattcccacacacagctgataacgctcgtgggtgtgcggttactcttgtgtgtcgcgagaccaatgtatgagaatcacgccgggtgtggtgagacatagacaagaaaccccaccccagagggactataataacagcgcagggcggagccggcgctctactctaaagagagattatatcaccctcgtagcgagagngggggcgcctacaagaggtctataaagcggcgtaacacccccgaggtctntatctcttgggtgacaccacagggtggggtcacctctataaaataaggggtgagagggctcgatgtaattatataaattaaagggcattagcggagcatctttgggtgcgcgtggctacgtgatgttttactaacacaaaantgtggttgcgttggtgtagcaacttggggggagacacaacaatgtttgggcgataaccggctattagcggggagaactcacttatgtgaggttacgacaaggtggggaaacccccttttatacctatttctcatgtgtgtgggtggtggttcggacctattattattgtggggg

SEQ ID NO: 572651 - DNA, 321 bp, Homo sapiens
gtggcttctctctgaaaacggcagatgtctctggatctcgagataaaacatcagctatggaataccctgggtgtgtgcaattacactggtcagggatgagagccactcagagtgggtgtcttgtgtccgcttctgcccaacagcagcaccctatatcgtcttcctgtggctggacaagctggtcaggtatggaacctggctaactgcaagctgaagaccaaccacattggccacacaggctatctgaacacggtgactgtctctccagatggatccctctgtgcttctggaggcaaggatggccaggccatgttatgggat

SEQ ID NO: 572652 - DNA, 152 bp, Homo sapiens
  misc_feature (2)..(2): n is a, c, g, or t
gnaccccatgaaggatccttggatctgtccagcgagatgggaaccgtgtcggtgggagtgcctgagggaactgcggtcctggccgactgccactccgacttcggtcgagtcgcaaccgacctgccccgccaggaccaccccgatgccctcga

SEQ ID NO: 572653 - DNA, 1296 bp, Homo sapiens
tggaccgcgggccccggctgggggccactgctgccaccgccgcgccacctcgtctcctccccgtcccagtacagtcacaggtctcacgaaacactcgagccgtggtgggtaataccaggggcacatgagggaatgccagaaagttgataggagcgagtaatgaggccggagcgcgtggaggatcagcaacaagatagcgtagaccagtgagtcgtgaacgaacgacgagagaggaaaataatcgaagcacctgagttgaaggaaagaaacgaaaaaagacacaagtgtgtgacagccaaatcacagcatgagatattgagaagaagcaaaagaaaatgggtgtgtagaggaagaagggagaagataacgaagtgagagcagaggaatgatatagatgaaggaagagatagagggataggaaaaggggatatagaataagtgagtagagggaggagagatgaagaggtggggagaagaagaaaagagaaacacagaaaggatagaggtagagagaagctggaaagatacgaatagtgacggagaaagataccgcggaacaacgcgcacggaagaacagggagagtgcgcaaaaaagccgaagacaagggagaggggaacaggaaccgaacaggaagagcaaagaaggcgagcaggagaagacacgagggaagacgaaaggaaaaaacgaaggacagcaaagcagagagaaaggagggcagagccggcgggggcagaagaaaggagagggcgaagcggagaagcagagagaacaagaagagcagcaagggagcgagaaaagagcacgccgcgcggagaaaaagggcaaaggcagaagaccgggggaaagagacgaggaaagaggagagaacaccgagagcaggggcgacgacaaggccagaaaaacaacgcgcaagcacgggagcagagaggaaacaggcaagagaaggcaaagaagcggaaaagaagaaggagagaagacaagaagagcgcaagagcaaaggaaaacacagaggagacgaaggcaggacgagagagagaaagcagaggaagaggacggaggagagagagaggggagaaagaagagaaaagcagagagagggaagcggacgggagagaggagaagaagcgagagaaagaagaagacaaacaggagagcgaaaaaagagagcgcgagaagacagagaaagaggaagggaaagggagaggagagaagcaagccagggaagaggcagaggggacgagagaagaggcgcgagagacagacgggagaacgaagagagagagaggcaagagagg

SEQ ID NO: 572654 - DNA, 100 bp, Homo sapiens
tatttctcaaatttgccctcctagctcatcccctctgacagatataatccgcccaatttggctccctacttccacagtttctcaggctcttggtattcag

SEQ ID NO: 572655 - DNA, 772 bp, Homo sapiens
  misc_feature (448)..(448): n is a, c, g, or t
aaatcatagtcaatggtgcctcaaacatagcaccttaagttaaaggctgctagtgctctagcggaaagcttagctgattatcttcctggatctactcacccccaaaaggcagaacaagcaacacagtgcactgggtggtggtcattttgtaattgtgaaagatacagttatatcatatatcatttgtaattgaagagcaaggtatatacgtcattatatgaatcacatttaacgacaatttcaaaattaaacccaagaagtagacatattctataatactaggtctatggtattattttccatagaactatattgcagagtaaatataccatataacatttcacacattgacaagatatcaatctcgagaagactacagaagaccatagtgtatatcctgtacacacggagtagaaacttgtctacctggtgggttttgggcacaaanggtaatacaaaacaaactggcttgcaggtatttgtgttgttgacaattacactacattcaatcattctgaggctaaccttctaaaatggtattcgagcgagtctgtggaacatgcggtaagtgggcccaaaagtaacaactatttgctcgacttgtgcttatttaattaaacacgtaacattttccgtcatataaggccacacctaggcgttctaggtaagtcacaggtggcttataatcttcacggagattttcattatggagctgggtggttaaaggatatggaaggagtttggtggctccactattgtggggaggggatat

SEQ ID NO: 572656 - DNA, 404 bp, Homo sapiens
atagaatttctgttatctcctttggaaaactgccccagactgggaatgcccaggctttcagagccatattttgtatatctgtgttcacagccacttacacagaaacatacatccacctccaatgtaaagtttaaccacatataggacatataagattcctgctttcacatcataaggtgaaagaaacctcggaaattctaaggtaaagtaatatgaactataatattttattgtgttggggactttattttgttatattttgcagttataaattatcaaaattaagtccatgtgcggtggctcacacctgtaatcccagcacattgggaggctgaggtgagaggatcacttgagcccaggagtttgtgaccggcctgggcaatatggcaaaaccccatctttac

SEQ ID NO: 572657 - DNA, 287 bp, Homo sapiens
tgagagaccgtgtgcaatggtcatgcctgttatcttagcacttggggaggcgagacaggcaagatcacttgaggtcaggagtttgagaccaacctggccagcatggtgaagcctcatcttactaaaagtacaaaaattagctgggcatggtggtaggcaccctgtaatcccagctactcaggaggctgaggcaggagaatttcttgaatccaggaggcaaaggttgcagtgagccgacattgcgctactggactccagcctgggcaacattgcaacagggtctctca

SEQ ID NO: 572658 - DNA, 172 bp, Homo sapiens
gatcgcgcctacgtatcggtactgggtttccctcacatgctcttcatgttgcatccgagtaccggcccaagagacctgccaaccagtttgtgcgcaggctctacggtattcaatgatccatccgtatggcctaccagtctgcagctccacagccgccagtcaacttcaacga

SEQ ID NO: 572659 - DNA, 302 bp, Homo sapiens
  misc_feature (23)..(23): n is a, c, g, or t
  misc_feature (120)..(120): n is a, c, g, or t
  misc_feature (149)..(149): n is a, c, g, or t
  misc_feature (180)..(180): n is a, c, g, or t
  misc_feature (194)..(195): n is a, c, g, or t
  misc_feature (218)..(218): n is a, c, g, or t
gcacgaggtgaagttgctcgcangggtcgttgggccctgtcgacctgtaggcgggcgagcgagccagcgggacaagactgcgggtgaggctgagctagcgagcggccggcagggggggcncccgggctgcgagccgctgagcccagccncgctgccgccgccggcgttcgtggggccganatgggcaaggcttnngtggcgcgggcctacggctgtgngctgccgggtagagtcctgtccccgcccctcgccttgcgcctgacgccggccgtgctgcccggggaccgagcggcgggcccttt

SEQ ID NO: 572660 - DNA, 303 bp, Homo sapiens
  misc_feature (34)..(34): n is a, c, g, or t
  misc_feature (64)..(64): n is a, c, g, or t
  misc_feature (67)..(67): n is a, c, g, or t
  misc_feature (75)..(75): n is a, c, g, or t
  misc_feature (98)..(98): n is a, c, g, or t
  misc_feature (101)..(101): n is a, c, g, or t
  misc_feature (109)..(110): n is a, c, g, or t
  misc_feature (124)..(124): n is a, c, g, or t
  misc_feature (136)..(136): n is a, c, g, or t
  misc_feature (145)..(145): n is a, c, g, or t
  misc_feature (150)..(151): n is a, c, g, or t
  misc_feature (168)..(168): n is a, c, g, or t
  misc_feature (171)..(171): n is a, c, g, or t
  misc_feature (177)..(177): n is a, c, g, or t
  misc_feature (199)..(199): n is a, c, g, or t
  misc_feature (202)..(202): n is a, c, g, or t
  misc_feature (297)..(297): n is a, c, g, or t
gctggggtggaagaactggaaagtgaaacaaganacctgccacgcaaaaaagttgaaggttgcnaanaatttatnctggaaactggcatttttccaanccnagagaagnncgaatggccttttncagctaactacnatgtgtagncaggnnttatattataaagtatncantcttancacctagtatatagttagtttntanagtgatttccccccagtttcttgaacatggtatcttcacatcttggaccttggtcagttgtgctattcattattaaacactaaaactttggcggntcttgc

SEQ ID NO: 572661 - DNA, 221 bp, Homo sapiens
ttaggcgactcccaagatggggacacagtgttcactgcatcatcttcctgcttggtgagaccgtgggcaggggacaaagaggaggcccagataatcaaccgtcttctgcttccaagctcacacggctgtctgctgtgcacacggggccgaccccagcagagtgcccagcccacgacgtccctcacccacattctgcctgaatgagctttaaacgtgcactt

SEQ ID NO: 572662 - DNA, 163 bp, Homo sapiens
aaaaaaaaattttgtgttattaacaaaaatttatatttggggtgggttaacggtatttcaaaaggtcatcagattgtgagactgcttccctgaaacatttttggggtattgttttaaaaaaaaaattaaaaaacagttggggttaataaaaatgtcaatgtga

SEQ ID NO: 572663 - DNA, 174 bp, Homo sapiens
tgtgtatctagcggatcttacgaggccagttcgctggggggcttaaggcagcaggtctcaaggaggctgcagtgctctgtgggctggcacagtttccgggacgagcacccgcttcagcagctgctggtccccctccgagtagccaggccagtccttctggcacatctcttgtac

SEQ ID NO: 572664 - DNA, 119 bp, Homo sapiens
cgagactacccgtgctgagacgccatattcttcgaagctatcgctatctgtatgcctgtcacatacctcaagctcatcacattcagaacaaaattcttcttcctcaagccagtagtggg

SEQ ID NO: 572665 - DNA, 774 bp, Homo sapiens
ctgagcccagccagaccccgcgccgcccgcgccccgctcgactccggaggctcccgcagccccgagcgtccagcaccgttgacgctcctctcccacggtgggccatgtggggcgccccctgggctactggccctcgacttgaggtgcactcgtccatccacctagcatgccccgtcgccagacttccatgctcgcgcccggtgcccagcgatattctgcgccccgacagtagcacggaagtaccagtcaggccttgatttgctggatggcggccttggctgggcctgggcttgggcctgagcctcattttcatctgctgtctacctcatccgcttctgctgctgccggcccccgagccccccgggtccaagatcccctcgcccagggggaggctgcgtcacctggagctgcattgtcgaccttctcgccggatgcaactggcattggcaatcggatttactatggacaacaagtgagaccagtgatggggatgtcaccagctcagcatctgcgctgcatgcaccgccaagccacacacatcagcaaccaattgaccaaccctggtggatggagacaggtggaacaaggctgacgcgagagcaggtgaggaccaaagcttgaccaaaccttggaagaggtgctcgaaccgagcacggtagcatgaatggcatgcacgaacacgatgggactcgaatgagaaaggcgaaggcctgaagcaccaacagataaaaaaggcatggacattcatacaaaggagtgcaccctgaaccacaa

SEQ ID NO: 572666 - DNA, 141 bp, Homo sapiens
gcgggttacgctgggcaggctgactgtgggaagatcgctattatggcccaaaaccgtcaaggttgcagtgagctgaaatcgcaccactgcactccagcctgtggtgacaaatgtgagaccctagtctcaacaaaaaaaaaa

SEQ ID NO: 572667 - DNA, 129 bp, Homo sapiens
agtcccagtgtggcctggcacccaccatgtaatgtggtcaaggcactatctgccctgtcaacgagatcctttggcttcaccgactgaccatgaggtccaactacgggctggccacggctgattccccca

SEQ ID NO: 572668 - DNA, 260 bp, Homo sapiens
acttagaggatccccttcaaatgcgccagaagttatactctcaattttggcgggatgaggtgagtgtaacagctttatagagatatattcctgtaccatacgattcacttaaagtgtacaagtcagtggttcacagtttattcactaaattgtgcaactctcacctgataaattttagaactttctcttgccttcgaaaactcttttcttcaagaacaccctttgactgtcataccctgaatatatctgtgcccattgca

SEQ ID NO: 572669 - DNA, 182 bp, Homo sapiens
caagtgtgtctctggccaggaggagctgacgttctgcaggacattggtcctgcccgcggccagtccactccgcggggatttctctggatacggacctcctctacagtggtgcggtcacagccccttggagccctccctcttcccacccctcctgttcccgggtctcctttggcctgggatac

SEQ ID NO: 572670 - DNA, 363 bp, Homo sapiens
  misc_feature (44)..(44): n is a, c, g, or t
  misc_feature (104)..(105): n is a, c, g, or t
  misc_feature (179)..(179): n is a, c, g, or t
  misc_feature (262)..(262): n is a, c, g, or t
  misc_feature (319)..(319): n is a, c, g, or t
  misc_feature (341)..(341): n is a, c, g, or t
tgcagtgatgcaatttcggctcattgcaagctccgcctcccggnttcacgccgttctcctgcctcagcctcccgagtggctgggactacaggcgccctccaccnntcccggcccgtttacatcttaagacaagatctcactccttacaacaattctgaggcaggtacttcctacaggtnaagaaaccgagactgagacttggccaaggcaaccgagctaatcatagttcccccaagaaagggcgacctcggcaagcaagttnacctccgtattccgatcacctgggcacatagtagccgcccaaatggcaaccctgggnatttgaacccagggtagttggntcagcgggcaattcaccattcg

SEQ ID NO: 572671 - DNA, 411 bp, Homo sapiens
gcatagaaaataacaccccaattaggagggactggacaccaagaggaatcacccagataaatccccatagaagtcccactcctaaacacatccgtattactcgcctcaggagtctcaatcccctgagctcaccatagtctaatagaaaacaaccgaaaccaaataattcaagcactgcttattacaattttactgggtctctattataccctcctacaagcctcagagtacttcgagtctccctacaccatatccgaaggcatctgcggctccacatatatagtaaccacaggcttccacggacttcacgtcattctaggctccactttcctcactatctgcttcatccgccaactaatctttcactttacatccaaacatcactttggcttcgaagccgccgcctgatac

SEQ ID NO: 572672 - DNA, 613 bp, Homo sapiens
gcctgaggagtaagcggctggatgtggaccctgagagccactggcaggtaggtggggtcttccagttgtgaagacaccgtggccccggtgccctacgagacgctgaacaaacgctttcgccgccgctcagaagaacattgaccgggagaccagccacgtcaccatggtggtggccgagctggagaagacgttgagcggctgcccggcgtggactccggggtcagcctgctggacggcgtggatggagaagctcagcgtcctcaagaggaaggcggtggaaatccatccaggccgaggacgaggagcggccaggctggtgcacaagcgccggatcgagcacctcaaagaagcatagcagggaacagcccgcggcggcagcgtggtggaagaaggaatgcgcatggatcgcctgatggtggagcactgctgcggtgcaggatactacaacacggctggtcaaggctggctgcgcaaagcgggaatcgaggacctagtgaatattgagatgttcctgacgggcaacagacggtggatgagtccctggagaggcgttgagacgggcacctgccttggcctgggtgccatgacaacaagttcacggctccgagaaatc

SEQ ID NO: 572673 - DNA, 438 bp, Homo sapiens
tgagcatctcaggcatagctggatctgataacccttatgtccaaaaccatagatggtcaaatactgctttggttgttaggtgtaaataccagaaatttgttcttaccacttttcctattgctaggtgctaatgctgataaaacaccaaaagctgaagaagtcaaatcaagtgatagtttcttaaaactcactacacgtgctcagcttggtgcaaaatcagaacagttgctgaagaaaggaaagagcattcctgatgtgctgcttgttgacatcatagtaaatgctattaagtatgtattgcatttttcttcctctcatctatttaatatattctttatcacacaaagatgtataaagaataatacggattttttgttgtaatatctcatacatttcactcatctgtatatgaaaatatacagcaatgaaaaggtaaaa

SEQ ID NO: 572674 - DNA, 387 bp, Homo sapiens
aggaggaggaggggggcgaggaggaggcgcgggaggagcccctcaagagctccaagaacgcagagcccgtgggcaacagaggagaaggagctggagcttagtgacttgtgatgacttctgacccgctggaagctagagcctgcctggctgttgcgagctgaatgcctgcccattccagctccctgtgactggctggtctaggagctgcagtccctcgcctgctgcctcgacggccgcggtcaagggaggccatcaggcagcagctcctgcgatgtctctggcacgcggcgtggcggcagctgctctggaacgaggacgctggagacgggcccaggacgctgtctccgcagctgcggcggccgggccggagccactgccgggcgcaga

SEQ ID NO: 572675 - DNA, 267 bp, Homo sapiens
ttatcgtgttgcactgccgtcgcagttacttgggaagctgagatgtgaggattgcttgagcctgggaggctgaggctgtggtgagccaagatcatgccactgcaccacagcctgggtgacagagggagaccctgtctcaaaaaagaaaaagaaagagagaagagaagagaacgtgtgtgtgtgtgtgtgtgtgtgtgtgtgtgtatgtgtgtgtgtgtgtgtgtaaggggcgggtatatatagatagagaaactcacttagaagtca

SEQ ID NO: 572676 - DNA, 143 bp, Homo sapiens
gaattacgggagggctttctctgtgccggtcacttgcacaggcatctcagtcatttacagcccataggaaaatataatcacctccgttttacggatgaggaactggaggtttaccgagcttaagtaacttgggccttatcgag

SEQ ID NO: 572677 - DNA, 267 bp, Homo sapiens
  misc_feature (170)..(170): n is a, c, g, or t
  misc_feature (247)..(247): n is a, c, g, or t
  misc_feature (253)..(253): n is a, c, g, or t
aaaaacagagttagtattcaaacatgggcatcagactccactagaaacattaaataacttgccagtgttaatacggctagtaaaaaacagagttagtattcaaacatgggcatcagactccactagaggcattaaataacttgccagtgttaatacggctagtgaaaaancagagttagtattcaaacatgggcatcagactccactagagacattaaataacttgccagtgttaatacagctagtnaaaaancagagttagtattc

SEQ ID NO: 572678 - DNA, 366 bp, Homo sapiens
cgctagtggtactcatgcgatagttttcttttagttttttgcttttggaatactaggaattctttctaagtagcctcatttgatagctgttaattttatacaattataaaatatttttttctagggccaggcatggtgactcatgcctgtaatcccaggacttggggaggccaaggctggtggcgtctcttgagcccaggagttccagaccagcctggggcaatatggagaaacctcattcctactaaaaatacagaaaatgggtgggggcatggtggtgcgcgcctgtagtcccagctactcagtaggctgaggtgggaggatcgcctgagcctgggacttagaggccgcaatgagtacagatta

SEQ ID NO: 572679 - DNA, 135 bp, Homo sapiens
actctagaggctcccaaagtattcggcctatcccccctcgaggatatcgcggtggattcagagagaggtcgtagagggccgggacgtatagcggataatgaatatagagaaaaccacagctctttggaccctaaa

SEQ ID NO: 572680 - DNA, 495 bp, Homo sapiens
  misc_feature (350)..(350): n is a, c, g, or t
ctcgaggccaagaattcgctgaccaacctgacattggcgcagctgtactacaagcgccgcgaatattcgcgtgccatgccgtttatcgagcgtgtgaatggccgcggcaatccgacggcagaaagcctatggctgggcgcgcgcatcgcacggcgcctcggcgacacttcgcagcagaacgcatggagcgcgcaattgcagcgccgcttccccaatgcgcccgaagaggcggcattcgaacgaggagcctgggatgactgaccgcgacgtggcaagcgctgccgatttttctcatggcgcggcgcctgtctcgaatccgcctgccgccccttcgtcggagcgcgacgatncgctgcgcgagattgccgaacgcctgcgtgccggccgtgagcgtcaacggctgactgtcgacgatctggccacgcgcctgaaggtggcgccgggcaagttgttggcggtggaatcggcggatgtcagtgcgttgcctgacatgac

SEQ ID NO: 572681 - DNA, 125 bp, Homo sapiens
  misc_feature (6)..(6): n is a, c, g, or t
catcancagttggcagtgttggggttgttggctacttaccccattgtccaacactttgcagtgtcaggtggcagccacgtcccagtgcctgcgcatgcaggcacatcgtgggcgtcctgctagtc

SEQ ID NO: 572682 - DNA, 265 bp, Homo sapiens
cacgattagtgttgtctgtagtagcaacctactactctactatagcacccacaacggtgctgtccaataagtgcaactcaatgtcagtgacagcaaagattacggtgcagattccaccttctcagtccacacctgtcaaaccagttcctgcaacaactgcagttcaaaatgttctgattaatccttcattgattgggcccaaaatattcttattaccaccaacatggtttcgtcacagaacacagccattgaggcaaacccactg

SEQ ID NO: 572683 - DNA, 969 bp, Homo sapiens
  misc_feature (196)..(196): n is a, c, g, or t
tggactcctcttccaggttccatgccgtgaactgtctggccccgtgatctgcgagcgatttatctgatgtgtccaaatcggggcatgatgtgcccgtgcttcctggaagctacgggagagtcgtctcactctatcagctacatcgctctgacaagcgtgcatggtaacatgtgagtgactcactgattgcgctganatgggacggcacttggccggctcgtgttgagccatttggtaagtgcgatcccggccctacttcacttgtagagatatttccatacgatctatcaagccagaccggattgagggaccctcttatgtacaattcatttcccggtgtgtacctgcactaactgataactcaacgtatggcgcacgccacctccacagtaaaccctcggttattcgcttatgaaacatgaactttgcgaagacgcgtttgacaagaacctcgagagggcgccctcccgtgaacctaggctatgggagagagtggaggaagctcatggcggtgtgagtgacttgggtgcacaaggtcgccccaaattcccgtattccaacgtgggcacctccctttgtaatctccccattacaatcgcaaggaaacttcgtggggtgccctttcataataattatacccggaaggatactttaggaggaacttcggacattttgtggaccttgcacttgcgccttgtggggttatgtgcgcaggcgattgttctttctgtggaccccaacctccttgcaggatatttagcatagttaactccacttacttttgactttttaacactttccttctcctagcgcagaattcccttgcaatagcaacatgctaactttttggtaggagggttattccgatccacccctttagagtactggcccacggtagaaagagcttatttattagcgccatatgaaacaactgagcaacacttaggaatttatataagggccctgtac

SEQ ID NO: 572684 - DNA, 695 bp, Homo sapiens
tgatgatggcattcctccaagatgcagagtctgagggctcagaagtacctggttagtcttgagtacttgcttctcaatggccagactggcatgcagtctgtccaagtctttttaactttgcctggcacttattttcagagcccagggcttgtagttagtatttgtctgattaacgatgaggttggttaagagttagaatggggagggtgggaagtaagtgatttaacttgaggcttgaacctggaagttcatctagaaatagacataaacattgcccagggaaagtatcaccaatgtggattttcgtatctttcaaggctactgagctgtcatgactttgtcattactcttttctggcccttttagaaatgtactgaggttgactgtttttttgcacatcttcctgttttgacatacccacggtatgcattctgccaggttcatctttatagcctctgaccctggcccagagccgcctagctaaccattcacgggcacatttcttggttcttgattacctctttccactaagtccaccacccattcatgtgcctataacttctaaggtggacccagctggattgtcatgcccaaccgcctctgctcggtctagacccttgcttacatatcttttctttcgaccccttggctccagccagcactcctatcctctctcttcctctctcacctattcc

SEQ ID NO: 572685 - DNA, 162 bp, Homo sapiens
ggagctgggggaaggggacagtaccgtgaaggcagataaaggggcagcagctccaggttttctgcccccccatcccccctgggttttttcccaagcccaaaagccctggcaaactttaccttttaaaaaagggagaaagggagaaaaaaagccactttaggg

SEQ ID NO: 572686 - DNA, 208 bp, Homo sapiens
gagtcttgatgttgccttctgccaggcgtgtcggacatcttctggtgggcactgtgcggaacacttgcaggatgaaatcagttgagctgcactgcactttaaccggcatggcctgtctcctcacattgagtgcaaggttccactcgaccacaagccctgattctgactcaattaactcactgtacatgccagggagtaccgagcctcg

SEQ ID NO: 572687 - DNA, 177 bp, Homo sapiens
cccagaatccccgaccccctatgtcaattctcctgctgatgcaccacctggctccttctctgcagcattcatcatggttttgtttatcctgatttgtgcaattacatgcacaagggttacctatccgtagggtaaccatacaattcatctttcaaatcagaacaattttgagagaga

SEQ ID NO: 572688 - DNA, 135 bp, Homo sapiens
  misc_feature (2)..(2): n is a, c, g, or t
  misc_feature (10)..(10): n is a, c, g, or t
tnagcatttncagcagcgacctctgttctacagccctatccctttctattcctctgaccctgcctcctttctaaatgcagcgactctgttcttcacccctatccctttctattcctctgaccccgcctcctttct

SEQ ID NO: 572689 - DNA, 612 bp, Homo sapiens
attcatatgtagtagggaatattagctgactgaaaccttttgaagttgttccaaaatcaaatgtgatagttccgttacagaaggttttactgaatagggtggaggtgctaattaattgaggcctgaagtaggagggaacagcttattacagatcttaatgtgtccacacagaggtattatttatgggtttcaacaatcctttctcaaggtgtagttagaaaaaataagttcactatatttaacacaaagatgatgttgcaaagtctctttcatgaggaagaagagcaagtggaaagctttatatgaaatcttcaaccataattagagaggtaataataaaattctcactgaatacataggaggagataccagttcaataataattacatagtgtgtcttagtaacactctacaatcactaattaaataatccaaatatctttcctatgaagtagggtgagtatagtcaatcttgtttggtcaatgagaaaataaaatgcagagtggttccatgacctgcccaaagtcatacaagtgagttatggcaaattgagattagaatccacagctctgattcttttattcctagaaatcattaatcttctctatccca

SEQ ID NO: 572690 - DNA, 314 bp, Homo sapiens
ccttcccagcagagggcagtacagtgtcttgtcccagcagaaaaggtccttcaggccacccctctaaacacaggagccaagggtgttgacagagggcaccttgcacccccagactctatgcttatagtgtctgatgaagagcggagcaggatgatcatgagtgctgctctagaggcgcaagcagcatcgagacctgtgcagccaggagcggaagttcatgttctgcagggcgcccagcccactgtgcccccagccgtcacttcttctgcacgtggccacagtcgtacttgccacgcacaacggtgactggacgc

SEQ ID NO: 572691 - DNA, 854 bp, Homo sapiens
ctagcgctgctgtgcgtggcctgcgcgctggcgctgggggcgcccaatacgaacgctacagtttccgagtttcccacgggacgagctgatgccgctcgatttggcctacctggcacgcggctggccctgtacagcggcggagcacttgggccgagagcgtgggctacctggagatcagcctgcgggttgcacctgttttgcttgcgccggacaggggaggggtccctttcttgcccacccgtgaattttgaggcggcccggttcccggatgccctggaagccccgtgtccgtgcctcgtgggcgttcgcacaaggtttattccccggaaggctttgccgcctttcttacggggggggcctttgatttgccagccgggtggccggccatgttggccgtctccaagtgcggcctaggcaacaaggcgagtgggcgcccttggccaagggctgttttttcccgagggcccggagggtttccccccagaggccctccagaagttgctcccgcggaggggatgtttcggctgtaggagcgcgagccgggaacctttttttccgcagcaagcggtgctgccccacaaggagatgaagagccccctagtctgaaacaagaggggttttcccgcctctgtagacaagagtaattacgcacggggagtattatacagacggttttttcaaccagaaggggtgggcgggccgagaatacattattataaaatgcttctgctttgccggcgccaacacgaaaaataatcgggcgccacataagatttccgacgcggcccaggtggatattggacctctacaagaacgacacgccgctatgattatattatcgacgcactaatacg

SEQ ID NO: 572692 - DNA, 101 bp, Homo sapiens
gctgcaggtatggttgaagaatagcacacaccatgctagattggattcactattattttatattatacttacttatagagacaaggtatatgctctgtcac

SEQ ID NO: 572693 - DNA, 1317 bp, Homo sapiens
ttactctttcaagtggttaccattgacttaacctattgagttacctggtcagacactgtgatcttatataattctctccaaaggacctgcgttggacaacaataacgaacaatttaacctatcatgcactgtacacatttcctgtatcataagtacggcgattatacataacccgcaaccaccagtgtccttgtgtatatgatgcagcagccactacaatgtaagcttatcatatcataagatactgggtcatttccagtcacattctggacacatacacgcgatatacatctccatggaggacaccacattactttaccatatctcgtgtgcccccaaacgattggcggctggtaagcacattatctagcaaaacatgtactcctatgacaaggtttcatcaagtaccttgaaatggaggtttgaattctgaccatcttaactaccctgtagccaccgactcttccacactaacacacatgcatagcacaccagacaagagtaagggcaaccccataggaggatcagggcaacaactccaagcaacacggccaggacgtaacccacaacacaagttgccacaaacaaaaacaccagcatcccgtggcacactcaacggtgcactagacacaaaacgtaataacacataacgcaataccatcagagccacgacagcgacagcacaatggacagctaacacaaaaaattctaacaaggacgttgtcactacacaccagtggctcactgcaggaagacacgaacgcagctctaacacacttatcacacaccagtgcactcttgtgaagaacgaacgatcggggcgcaacgtcataccttcgaatgcacatacccttggctacggacagtggactctggcctaggaagaggcccacccatcacaaatgtgtatcaattagacaacaccaccggacacacccagtgaacacgcataaacccccactgcgacacacccaacacaaacatgtggcaacaacacaggcaaaacagacaccacgaaacgaacgcacaagagggacaaacaagggcgagaggcatacgctcaactgggaaggcacaaacgaaccagaaccgtgacacaactagcgcaacacggacacgagaccaatagcaccgacaagatagataggacgcaaggaacagacacatacagacccagcaacacacaagacaacaactacaaaacgagcaggaaagcacaccacacaaagtagaaagtgaccgcaaccacagaggaggaacacaacacacaacgacgaggacgagacacacagaagagatcaaccgtacgctatgcac

SEQ ID NO: 572694 - DNA, 1726 bp, Homo sapiens
cgagaacctttgcacgcgcacaaactacggggacgatttctgattgatttttggcgctttcgatccaccctcctcccttctcatgggactttggggacaaagcgtcccgaccgcctcgagcgctcgagcagggcgctatccaggagccaggacagcgtcgggaaccagaccatggctcctggaccccaagatccttaagttcgtcgtcttcatcgtcgcggttctgctgccggtccgggttgactctgccaccatcccccggcaggacgaagttccccagcagacagtggccccacagcaacagaggcgcagcctcaaggaggaggagtgtccagcaggatctcatagatcagaacatactggagcctgtaacccgtgcacagagggtgtggattacaccattgcttccaacaatttgccttcttgcctgctatgtacagtttgtaaatcaggtcaaacaaataaaagttcctgtaccacgaccagagacaccgtgtgtcagtgtgaaaaaggaagcttccaggataaaaactcccctgagatgtgccggacgtgtagaacagggtgtcccagagggatggtcaaggtcagtaattgtacgccccggagtgacatcaagtgcaaaaatgaatcagctgccagttccactgggaaaaccccagcagcggaggagacagtgaccaccatcctggggatgcttgcctctccctatcactaccttatcatcatagtggttttagtcatcattttagctgtggttgtggttggcttttcatgtcggaagaaattcatttcttacctcaaaggcatctgctcaggtggtggaggaggtcccgaacgtgtgcacagagtccttttccggcggcgttcatgtccttcacgagttcctggggcggaggacaatgcccgcaacgagaccctgagtaacagatacttgcagcccacccaggtctctgagcaggaaatccaaggtcaggagctggcagagctaacaggtgtgactgtagagtcgccagaggagccacagcgtctgctggaacaggcagaagctgaagggtgtcagaggaggaggctgctggttccagtgaatgacgctgactccgctgacatcagcaccttgctggatgcctcggcaacactggaagaaggacatgcaaaggaaacaattcaggaccaactggtgggctccgaaaagctcttttatgaagaagatgaggcaggctctgctacgtcctgcctgtgaaagaatctcttcaggaaaccagagcttccctcatttaccttttctcctacaaagggaagcagcctggaagaaacagtccagtacttgacccatgccccaacaaactctactatccaatatggggcagcttaccaatggtcctagaactttgttaacgcacttggagtaatttttatgaaatactgcgtgtgataagcaaacgggagaaatttatatcagattcttggctgcatagttatacgattgtgtattaagggtcgttttaggccacatgcggtggctcatgcctgtaatcccagcactttgataggctgaggcaggtggattgcttgagctcgggagtttgagaccagcctcatcaacacagtgaaactccatctcaatttaaaaagaaaaaaagtggttttaggatgtcattctttgcagttcttcatcatgagacaagtctttttttctgcttcttatattgcaagctccatctct

SEQ ID NO: 572695 - DNA, 1223 bp, Homo sapiens
  misc_feature (43)..(43): n is a, c, g, or t
acgtggaggggaggcagccacagtcctggagaggcctgggccngaacaacatggcttcccccagcgtgagactcgcttgtcctcccaccgcctgctctctcctgatgaccaggttccaggagttatcaaagaacagcctctgagctgcgtggagaaagccatggagacagccagaagaaaacggcaggattagattaacctgtgattcctggctggccacgaggtcacccatggcatggagctgcccacaacgcccttctcagcatgaagcatcctgaaagatccagggccaggttccccaggattggggagttggaagctcattggcactgtcaaatttgaagaagaggcgtgctctgactgcctggacaggacccggaatcaaaccgcaggccctgggtcaccgctgccggaaagagccagttcctgtccgtccatgcacccaccaccaaaacccaggccttcctggaggtgctaggggaggccatgccccttttctgagtgcttggaagtgactgctgcaagtgacaagtgaccacgccttttcccccgcgggtataaattcagaggcgctgcgctccgattctggcagtgcagctgtgggaacctctccacgcgcacgaactcagccaacgatttctgatagatttttgggagtttgaccagagatgcaaggggtgaaggagcgcttcctaccgttagggaactctggggacagagcgccccggccgcctgatggccgaggcagggtgcgacccaggacccaggacggcgtcgggaaccataccatggcccggatccccaagaccctaaagttcgtcgtcgtcatcgtcgcggtcctgctgccagtgagtccccgccgcggtccctggctggggaagagcgcacctggcgccgggagggggcagggagacggggacacggcagggatgcctggccctggtcacctgcggccgggcatgtccgggcaggacgaactcgccgtcggagtcaggggaagaactgggtccccgggctgggcaggagggacccggccgcgagggagcagagaggcggtccccctggctgccccgagcccgcgaagggagggaagttccagaatcgagagagggagggagtcaaggtggaacccatagagtgagcctcctgaagacacagagcggttgcctctctcattaattaattaattagttaataaaattaaccccatgtttacattctta

SEQ ID NO: 572696 - DNA, 500 bp, Homo sapiens
aagaaagagaactctctgcccccaggattggaggctgcagtaagccaaggtcgagccactgcactccagcctgggtgacagagtgagactttttctcaaaaaaaaaaaaaaggcaaaaaaacaaacctccattgccagtgtacaattaaaaaaataaaacaaagggaaccataaaccgctcctaagggaaaaaaaaaaggagtggaggagcgaacattgccgcttcctccagccaagcagacgtttccgtgtttcttctctctctctccttcccaaattcacccacaaacgccatcgacccccttctggttcccattacagaggccacagttcaggcccccctcgcttcactcgatttactgtcaaatgcctcccgcggggttccccgtggattctctcccaaagccagggggctcccctagttgcagcctgacattttttacaaaagcacaaaaacctcattgcccacctgaaataatttctttacatgatgctttacc

SEQ ID NO: 572697 - DNA, 1274 bp, Homo sapiens
  misc_feature (76)..(77): n is a, c, g, or t
  misc_feature (121)..(121): n is a, c, g, or t
gcacgatagatttgaatttgcatagaatttgaatttgtattatatttctgtcagcagtgccagtcaaaggtatgtnntagatgctgaatggatgacaagaccaagcctggaagagtggatntctctgtctcaattccagtgagggccaaaaaagaagtttccccaccactgtcagcctctgggaattctgtggtgactcattcattggcttttctcttccttccggaggagtgtccagcaggatctcatagatcagaacatactggagcctgtaacccgtgcacagagggtgtggattacaccaacgcttccaacaatgaaccttcttgcttcccatgtacagtttgtaaatcagatcaaaaacataaaagttcctgcaccatgaccagagacacagtgtgtcagtgtaaagaaggcaccttccggaatgaaaactccccagagatgtgccggaagtgtagcaggtgccctagtggggaagtccaagtcagtaattgtacgtcctgggatgatatccagtgtgttgaagaatttggtgccaatgccactgtggaaaccccagctgctgaagagacaatgaacaccagcccggggactcctgccccagctgctgaagagacaatgaacaccagcccagggactcctgccccagctgctgaagagacaatgaccaccagcccggggactcctgccccagctgctgaagagacaatgaccaccagcccggggactcctgccccagctgctgaagagacaatgaccaccagcccggggactcctgcctcttctcattacctctcatgcaccatcgtagggatcatagttctaattgtgcttctgattgtgtttgtttgaaagacttcactgtggaagaaattccttccttacctgaaaggttcaggtaggcgctggctgagggcggggggcgctggacactctctgccctgcctccctctgctgtgttcccacagacagaaacgcctgcccctgccccaagtcctggtgtctccagcctggctctatcttcctccttgtgatcgtcccatccccacatcccgtgcaccccccaggaccctggtctcatcagtccctctcctggagctgggggtccacacatctcccagccaagtccaagagggcagggccagttcctcccatcttcaggcccagccaggcagggggcagtcggctcctcaactgggtgacaagggtgaggatgagaagtggtcacgggatttattcagccttggtcagagcagaacacagagattttc

SEQ ID NO: 572698 - DNA, 631 bp, Homo sapiens
  misc_feature (27)..(27): n is a, c, g, or t
  misc_feature (138)..(138): n is a, c, g, or t
  misc_feature (145)..(145): n is a, c, g, or t
  misc_feature (244)..(244): n is a, c, g, or t
  misc_feature (253)..(253): n is a, c, g, or t
  misc_feature (327)..(327): n is a, c, g, or t
  misc_feature (334)..(334): n is a, c, g, or t
  misc_feature (339)..(339): n is a, c, g, or t
  misc_feature (348)..(348): n is a, c, g, or t
  misc_feature (364)..(364): n is a, c, g, or t
  misc_feature (409)..(409): n is a, c, g, or t
  misc_feature (411)..(411): n is a, c, g, or t
  misc_feature (433)..(433): n is a, c, g, or t
  misc_feature (564)..(564): n is a, c, g, or t
  misc_feature (573)..(573): n is a, c, g, or t
  misc_feature (627)..(627): n is a, c, g, or t
aaaccttaaaaactatcataatagtangaatgcatgttaagatttgataactttctttagctagagttttcaacccacagttaggagcaaagttgtaaagtgagtaggtgtgaagaagggacactcttttgagaaaanatattanctacttctaaaatgattcaattattttccctattttcattttccataatatttcctcctgttttatacctctaactaccctcctgatttctctgatgtnaaaaacagnatataagagcaggatcaaaaaaaagcagagacttatcactttagccttttagaaatactgttttgtagcagatnacctcanattanacttccgangtttcatcacccttgnagaatattgtgtttactgccctgtagcagtaattagtatgctttnangcatctctgtagctgattatantagtagtcataaatcagtcttccattttgcactactatactactctcagtgtcccagtcacgtctagtttctgtgtcatattagtgtgcagcagtatctgtacatctcatgctcacattactgtgctgagnctttcggtntgtgtgacgatgataataatactgactcactctgcgatctcacacacacacatngtga

SEQ ID NO: 572699 - DNA, 981 bp, Homo sapiens
  misc_feature (333)..(333): n is a, c, g, or t
gcatattacaaggggtgtgatacgtgcgatatttgtgtgtaacaaatgctctggttaagttgtaaatgcgtggcatgttgtagatacggcggcatacacaatcatcatataccgggggtgattacacccacttatgttggagtattaaatgcgacaaccgcggttttcccacacagcaccttgttggggggcgccccccctaaagaagtaggggcccgctattatgttgtcaaaaggaaattgctgcggggtccgatgcgtcccgacgtggtatgtttgcccgacacgcccttttgggggcctgcggcgcaatgtccaccacacattggtggngagcaccaacgccacgccgacataaattagctcggggagaaatggtggaccacccctgcgatttttgctcaagtacttaaagaagaacatggggccgcaaattttctgttagcagggaaaaaataaatgtggcaggcggtttacaactctggtatgactgtgtggagagacacacaccgtggtcgtgtgtttgtccggagcctcccgacggccctggttttttatataaagagggttggtcccccaagaaacacattttgcgcgcagaatggctggtccccccgcggcgatatgcgccgcaccataggtgttcgcgccgccgccgacgactctatcattaagaagggaccaccccccccggcggcacacacacacgggggagaaccccccgtttgcacccgaaaagaaaccccccacaaacaatttgtcccggcgacctctggggggggacacaccacccccgttgagccggcacagctcctgccggcgcgggtcagacgcaagaactaggaagtgcattgccccggtgaaaagacatcgggcgcgacgcggcacccagagtcagacactcccgctcgacctccccccccgtgctggcctcccagaggaaccccgtttccaacaaacaacataccaaacaaacatacg

SEQ ID NO: 572700 - DNA, 479 bp, Homo sapiens
  misc_feature (43)..(43): n is a, c, g, or t
  misc_feature (339)..(340): n is a, c, g, or t
acgtggaggggaggcagccacagtcctggagaggcctgggccngaacaacatggcttcccccagcgtgagactcgcttgtcctcccaccgcctgctctctcctgatgaccaggttccaggagttatcaaagaacagcctctgagctgcgtggagaaagccatggagacagccagaagaaaacggcaggattagattaacctgtgattcctggctggccacgaggtcacccatggcatggagctgcccacaacgcccttctcagcatgaagcatcctgaaagatccagggccaggttccccaggattggggagttgacgacacagcagtagaactgatcnnctatctttgcaacgagtgtgttgttaacatcaagcataagaagacagtaataggggtaaaatcctgaggtgatcagcccacattgaaatgtgaccctcagagtagaagcgtatgtgtggtggactgaggtgatagagga

SEQ ID NO: 572701 - DNA, 1987 bp, Homo sapiens
  misc_feature (43)..(43): n is a, c, g, or t
acgtggaggggaggcagccacagtcctggagaggcctgggccngaacaacatggcttcccccagcgtgagactcgcttgtcctcccaccgcctgctctctcctgatgaccaggttccaggagttatcaaagaacagcctctgagctgcgtggagaaagccatggagacagccagaagaaaacggcaggattagattaacctgtgattcctggctggccacgaggtcacccatggcatggagctgcccacaacgcccttctcagcatgaagcatcctgaaagatccagggccaggttccccaggattggggagttggaagctcattggcactgtcaaatttgaagaagaggcgtgctctgactgcctggacaggacccggaatcaaaccgcaggccctgggtcaccgctgccggaaagagccagttcctgtccgtccatgcacccaccaccaaaacccaggccttcctggaggtgctaggggaggccatgccccttttctgagtgcttggaagtgactgctgcaagtgacaagtgaccacgccttttcccccgcgggtataaattcagaggcgctgcgctccgattctggcagtgcagctgtgggaacctctccacgcgcacgaactcagccaacgatttctgatagatttttgggagtttgaccagagatgcaaggggtgaaggagcgcttcctaccgttagggaactctggggacagagcgccccggccgcctgatggccgaggcagggtgcgacccaggacccaggacggcgtcgggaaccataccatggcccggatccccaagaccctaaagttcgtcgtcgtcatcgtcgcggtcctgctgccagtcctagcttactctgccaccactgcccggcaggaggaagttccccagcagacagtggccccacagcaacagaggcacagcttcaagggggaggagtgtccagcaggatctcatagatcagaacatactggagcctgtaacccgtgcacagagggtgtggattacaccaacgcttccaacaatgaaccttcttgcttcccatgtacagtttgtaaatcagatcaaaaacataaaagttcctgcaccatgaccagagacacagtgtgtcagtgtaaagaaggcaccttccggaatgaaaactccccagagatgtgccggaagtgtagcaggtgccctagtggggaagtccaagtcagtaattgtacgtcctgggatgatatccagtgtgttgaagaatttggtgccaatgccactgtggaaaccccagctgctgaagagacaatgaacaccagcccggggactcctgccccagctgctgaagagacaatgaacaccagcccagggactcctgccccagctgctgaagagacaatgaccaccagcccggggactcctgccccagctgctgaagagacaatgaccaccagcccggggactcctgccccagctgctgaagagacaatgaccaccagcccggggactcctgcctcttctcattacctctcatgcaccatcgtagggatcatagttctaattgtgcttctgattgtgtttgtttgaaagacttcactgtggaagaaattccttccttacctgaaaggttcaggtaggcgctggctgagggcggggggcgctggacactctctgccctgcctccctctgctgtgttcccacagacagaaacgcctgcccctgccccaagtcctggtgtctccagcctggctctatcttcctccttgtgatcgtcccatccccacatcccgtgcaccccccaggaccctggtctcatcagtccctctcctggagctgggggtccacacatctcccagccaagtccaagagggcagggccagttcctcccatcttcaggcccagccaggcagggggcagtcggctcctcaactgggtgacaagggtgaggatgagaagtggtcacgggatttattcagccttggtcagagcagaacacagagattttc

SEQ ID NO: 572702 - DNA, 104 bp, Homo sapiens
tcaagcttctaacgatgtacggggacatggagacttattgttctaatatttctacttttgtatgtgtttgaaatttcaataataaaatgtttaaaatcaaaaaa

SEQ ID NO: 572703 - DNA, 244 bp, Homo sapiens
tcagtcggtaccagtgctactccacaaacagacatacacagacacacacacagaacacaatcacacacatcctccccgccacagagacacaccattacatacacagacacacacacacacacaatcacacacacaccccccgccactagagacacaccgttacatacacagacatacacacacacacagacatacacagacacacacattccactggctatacactgtttgtggatgtagcact

SEQ ID NO: 572704 - DNA, 192 bp, Homo sapiens
gcctatgtttaccttcacttccactctttattcttcccactccgtcctaaccctactccgtaatcacataacctatgtcctccaagacattctcatttcacaatatatactccaacgaacaatgttctactcggtatctactatctgattcaacgcctattttacactaatccctgttcggttgagcgtaga

SEQ ID NO: 572705 - DNA, 428 bp, Homo sapiens
  misc_feature (61)..(61): n is a, c, g, or t
  misc_feature (117)..(117): n is a, c, g, or t
aacgcgctgatacctcattagacatgaaagaactgaaacttagagtagttagcgacttgtntaggtcacactgtttattaaaaaggtgaagccagcacatggtaacagcactggggnccacgcagaccccaagacaccccaggcagctgggatttcaaacagactgtcccattgtcaaacatttggtttgaaataaaaggactcttagtataactctgggccagaggggaagaaggggtgagggcagctagcgtggcaccctgggtccaactccaaccccttctgttgccagcaatgtgaccaaatacttacacctcccagcaagtttctgtttctttaatgtaaatgtaagccctaccccatgggacagagagttcagtcctcacgggtagggcttacatttacattaaagaaacagaaacttgctg

SEQ ID NO: 572706 - DNA, 268 bp, Homo sapiens
ggatcttagttctacaccacccccaccaggactggataatcagaatgacagacggtgacactgtgggcaaggcatgtggagaaattggggccctcgaacacaggctggcaggacggtgacgtagggaccagcttgctctagcaacgaacagctatggcagcctcctgggaaactgtcacacaataaattcacaacttgcaccccagccaattaccactacctgcggtaatctgcccaacgagcaaatgaacaacatccaatccagcac

SEQ ID NO: 572707 - DNA, 399 bp, Homo sapiens
gaccagcctggccaacatggtgaaacaccatctctactaaaaatacaaaaattagctgggtatggtgataggtgcctgtaatcccagctacttgggaggctgaggcaggagaatcacttgaacctgggaggcagaggttgcagtgagctgagatcaggtcattgcactccagcctgggtaacaagagtgagactccatctaaaacaaacaaacaaacaaacaaacaaaaaacaaaaaaaaatacctgcctgagatttgatagatttgtttataaggatttaatgaaattagctttaggattaataatatactgatgcaaaagtaaaatttggttttctcttttgaataagatttttaagtatttttaagaaacagtaaaaaaaaggtcaccttttaagt

SEQ ID NO: 572708 - DNA, 430 bp, Homo sapiens
  misc_feature (5)..(5): n is a, c, g, or t
  misc_feature (9)..(9): n is a, c, g, or t
caatntaanagattttataatgggacacccgtatagggcccttaccatgaatggagtttgcaggactggaagttgctctgagtgagtcagtgagtgaatgtgaagacctaggacattattgtacgctactgtagaccttgtacacactggacgcttaggcgacattaaatctacaaaagaatatttttctttcccttggcttactatatcttttttattactattttataaactttttgactcttatgtattaacacttagcttacaacacaaacacattgtacagctatacaaaaatattttctttcttggcaaggcatggtggctcacacctgtgatcccagcactttgagaggcagaggcgggaggatcatttgaggtcaggagttcaagaccagcctgaccaacatggtgaaatcccatgtccact

SEQ ID NO: 572709 - DNA, 904 bp, Homo sapiens
ctcgtggattatgctcagccactctcaaagagctgggtaatgttctgtttactgattcgtagcttgcagcgtgcaagtatcggagtgtggtggtggagtatcagagtgcgagtcagaaattgggtacaatcacggcggctctttaaggagatgaccaagattaacgacgtgatcgtagctgtaccatggcttgtagtgtgatagattgtgtgctctcggatgagcttaagtaccaactaataattggtgggctatagggaaattagagtggtgcacactagatatggcggtatccccagatgtaggcgattcccacgagttccagtgatatctagtaatatttgagcttcctaactcacacatacgatttactaccttctcctagcatcatcaataagtagaagcgggagcaggaacaggatgaacagtctagccatctcatagccggaaatctagccgcaagtgcaggtagctatcagtagaccctaactaattttctcccttcatttagcgtggagtgtcgatctatcttctaggtgcaattgtgaattttagttaccacttattatcgaagcgatgaaacgccccagccagtaagcagagtatcaaaggtccactatttgtgtctgatccgtacttattatcctgccgtactgctcctattatcactacacagtgctaagccgcaggcggttactatactacctaacagagcggcaaactaaaacacaaagttttctttgatacccggcctggacggagggggacccaagttcttctaccagcatctgtcgtgattcttggggcacccaggaaagtttatatttccttatccctcccaggatttggcacttcttggcggtggaagttagcggtactaatccgggaagagagaaccttcgga

SEQ ID NO: 572710 - DNA, 401 bp, Homo sapiens
gccataccaatggacaacacacaccacctgtccaaagaaggcctacagatacgggataatcctatatattacctcagaagtaatatctacgcaggattacctgagccttattaccactccagcctagcccctaccccccaataaggagggcactggcccacaagaggcatcaccccgctaaatcccctagaagtcacactcctaaacacatccgtattactcgcatcaggagtatcaaacacctgagctcaccatagtctactagaataataaccgaaaccaaatcatccaagcactgcatataacaatattacggggtctctatataaccctcctaaaagccttagagtaattcgagtctcccttcaacatttccgacggaatctacggatcaacatatt

SEQ ID NO: 572711 - DNA, 403 bp, Homo sapiens
  misc_feature (261)..(261): n is a, c, g, or t
  misc_feature (335)..(335): n is a, c, g, or t
ggaactgtgtctccctgagaaagctgcatgcacacgacaggccatcggtgatagtcatcttgtgctcttatcctcacagctgatacatactgagcactcatctcttattttgagaaaaattcacataaaatttactgttttaaccatttaaagtgcacatttcagccagatgcggtagttcacaccttgtaatcccagcacttggggaggccaaggcaggcggatcacctgaggtagggagttcgagaccagcctgaccanaaatgcagaaactccgtctctacttaaaaatacaaaattagccaggcgtggtggcgcatgccttgtaatcccangccactcaggaggctgagactacaggcacgcaccaccacccccggctaattttggtattttcgagtag

SEQ ID NO: 572712 - DNA, 314 bp, Homo sapiens
agtgttcccagtaaacatagtttggtttcaaacttctggctcaaaccaccctcccacctcagcctcctgagtagctgggaatacaagtgcaagccacagtgcctggctaatttttaaatctttttgtagagatggggtctcgctctgtcacccaggctagagtgcagtggcacaattatagctcaccgcaggcttgaactcccagcctcaagcaattctcccggcccagcctcctgagtagctggaactacagctgtgtgccaccacacccggctaatttttttggctgtctaagctggtctcagattcctgac

SEQ ID NO: 572713 - DNA, 343 bp, Homo sapiens
  misc_feature (70)..(70): n is a, c, g, or t
gatgagtttgctgaattctataatagactcaagcaaataaaggaatttcacccgaagcacccaaatgagntctgttgttgccaatgtcagtggcatttgaggactcctgaaggctcgagagaatccaagtgaagagggcacaaaactttgtgggagttcacagatgaggaggggatatcgtcgttatctcgatctccatgactgttacctcaagtacattaacctggagggcatctgagaaggctggattatatcacatacctctccatctttgaccacttatttgacattcctcaagagagggagagtgcagagtataagagatacctagagatgctgcttg

SEQ ID NO: 572714 - DNA, 315 bp, Homo sapiens
ttgactaaagaatatatgaatcaagacaatgaaggcacagcattaaaccgaagtgttaatgccttgctatgcacaggccctgggacagctgcatgggttgcacatttatgaagctattgctgccgtgtaattcctgaaacaatcccccaaattgatttcccaaagcacagctttttaataatgatgtttcagtatctaagaatcttatcaaaagaaacatttctggaatgaggttccagctaggtgtagtcttctgttactggtccgtcttttacatcctgcaagtcaaagcttaaccccaaagtactatagatt

SEQ ID NO: 572715 - DNA, 494 bp, Homo sapiens
ctagagcatccggtgaagtagatcctctctctaaaataaagaccctttttcctctgattgaagccaagaaaaaggatcaaggtgactgctcagtgaaatcgaccatagaacaagcatgaggatggacctacacgcctaaataaataaaagactgagcaagggggagcccacttcagcgtctccagtctggctgaaggcagtgtcacctctgttggaagcgtgaatcctgctgaaaacttccgtgttctagtgaaacagaagaaggccagctttgaggaagcgagtaaccagctcataaatcacatcgaacagtttttggatactaatgaaacaccgtattttatgaagagcatagactgcatccgagccttccgggaagaagccattaagttttcagaagagcagcgctttaacaacttcctgaaagcccttcaagagaaagtggaaattaaacaattaaatcatttctgggaaattgttgtccaggatggaat

SEQ ID NO: 572716 - DNA, 719 bp, Homo sapiens
  misc_feature (321)..(321): n is a, c, g, or t
tgtccctgcgggagacaggcgacgtcggttgttctggagaagacgtgacccgtctactaatcgtagcagctctgtgctccctcctattattataggagtagatgaagaaaggtcaaaggcgtgctcccgtcttcactccccaatctctaagaggtggatgggtgtgcctagatctgtatcatatccctgacctctagtgcacggcagagagagatacaactactgtggcgctaaagatgatttcatctcgctcatctatggggtacgtgagatataccaccgtatgtcaagaactgcaaccacttgattcgagcacacgcntccgcacatcctccatgacctggaccacactatcaccttgtgaacgaccagatatcgcgccccactcgcacctcaggcacatatatatctcctcgatgtaaatcgaccatgcgacatcttcctccttgatgggatcaacaagacacgctggggggacagagagtctcatgaggacaaagtagacaaagtgttggagggaccaggagcccatatgcccctgtggtgaggacctaccagacaaagcccgcccattacacagtgacgcataggagatcgtggagtgacttgagtcatcttccctgctgtgtctatcacagacaccttatagcgagtaggtgagacagacagccttccaacaactacctccttggtgctggacactccagcgggtgttgcgc

SEQ ID NO: 572717 - DNA, 606 bp, Homo sapiens
tgttccacgccccgatgcggcccccgtggttttttctccgcggcccgtgttttttacgcccctgggtcccggagggttcaccccgccgcagaagatttcttttttctcttccccttgcatgagagccttttttattgggccctccggaaacacattggtgggaaccccctcttcttgtccacatatgaggaggaaccgcccatttatccatctggcgctgaagccaaaaaaattctccacatagcctggggggggacatcatgtaagctgcccccaaaggggcagccggggttctgtgggcgcccagaaacgatacaacccatacccccagaggagaataatcccgcaagagtctttggccacgaggtgggaaggaagaccctggcgcttaatcaaaagccgccccataaatatgggccacggaatgggccaagaacaccccgaccaactgcggcagctctggccgccgccggaggaaatactgagacggtccccttccaccatcgctccccgagagatactggccgtgagccccccggccgggaaaccaaaccgggggagggaccccaaggggtttttaaaaaaaatttaaggggcccaaaaaaa

SEQ ID NO: 572718 - DNA, 587 bp, Homo sapiens
  misc_feature (259)..(259): n is a, c, g, or t
  misc_feature (308)..(308): n is a, c, g, or t
atcttagcactttgggacaccgaggtgatggagtgcttgaggtcaggagttcgagaccagccgggtccaaacatggtgctactaaaaatacaaaaattagccaggcgtggtggcacacacctgtaatccaagctactcaggaggctgaggctaggaggctcccttgaaccccgaaggcagaggttgcacgtgatgcagagactgctagtcactgtcgactccaggcctgggcggacagatgtgacgtaagagtccatcntcaaagaataaataaactaaggccaggctacggtgtgctcatgccagtnaatcccagcactttggaaggcctgaggacgggtggacttcctaaggtcaggagttcgagaccagtctgacaacatggtgaagaccccgtttctactagatataccacagaatcaattagccgggggaggtggcaggatcctggtgggaggctgaggccaggcagaatcgcctgaaaccaggcaggcggaggttgtggtgagccgagatcgcgccattgcactccagcctggctgacagagcaagactctgattcacagcctgactgaactacatgaata

SEQ ID NO: 572719 - DNA, 760 bp, Homo sapiens
gggacgcggtgggagaagggcaaccgtgctagctggaaagtgaagaactgaagtatcctcatcaggtgtttgtaaggatttccaacgtgcggcgggctgaaccaagatggagctgcgaaaagcagcacgaagatgtgagtgtggtccagtcgcactgaggtttaactgtgcgtcaggcatcgggtggcgcctgacagaggaagatggacgagctgggaattgctgaattagaactgcagaggttcctctacgagcgaaggtgtaataagtctgatgacacaggaggaacatcttctggagttgggctggtttaccatgaacaagctcctccccaatgctgtctataaaggtagtactggtgggcccagagctcctgcagtctgggcgatagctagatctccgcactcttcagcaaagttcgggccccgtgttgggggtagtctcgtgttaaggaagcattatgaggtaaatgtggtgcctctcacccatccaggtgagcacatccagttcttccacacgaatgatgggctttttctttcctggtcgaatgtgtggcagatgatgaagatggtgatgaaagaggataagtccagaaagtggtgactacttggaattaccaggtggtgaagactcgggagtgtggatttgggacagatgatgcggtaacacgtgggtcctgggaaaggtgtggggcacagggtggactcggagtcctggggtcacgaagagtcttgttgcaatcggagaaaacctgtggttc

SEQ ID NO: 572720 - DNA, 112 bp, Homo sapiens
gaacaaaatcgcgtgcctgaagttttggcggcgctcgctattgaactgaatcgtcgcggcttcaaggagatacctatgactggaaacataagtgagtttgtcctgttacagc

SEQ ID NO: 572721 - DNA, 1012 bp, Homo sapiens
taaagggggtggccctttaattcaagtgggttctcaagtcagggtacaggtaagcccgggtgggtttccacccatctccccggggaaaccaaaagcccttcataaatttctcaatgtggggggacaacaaaagggggaagggggggcaacaaaggtctcatcatttcaaaataaaaaccaaattaaaaaaaggttattaaagggcgggaacgaattaacacaaaatatttgcggcgatttacaataattcaaccacagaaaagcaatggcgttatcactctccccccggtggtggagcctcggggagaagaggagatctggggccatacctcctcttgagagaagaaagtgggggtggcgctttatacgagatggggcagggagatctatctctgggtgaaaccaacgggctatctcccatatatttggggaaatgcgagtttattaacaacgacaaccacacgacaatatgggttggccaaatccaaaaatgtcctttcggggcccacttatttgggtgcgaacacctctgtggggaggagatgcgatcgagggtccaaaaacccggaaagtggcgtgggtccacctttcacccggtgcccccaagttctttcaaaaaactcccttgggggtgctccaaagcgcaccaatacagaaaaaacacatgaaaaacacaacaccccctgacaacgacatacagacacaaacgaaagagaaagaacacactaccatatataagcgcgccatgttgtggcccaaacactcatctaataatatcatgttgtgtggaacacctcgtcgcgccgcgccaaagtttcacgggaggactctgtgcggcgccacccaaaacacggtggtgggtctaaccccgcgcacacaataagaaggacatctaaagtatcgcgcgcgcgcgctaacaaaaacaagcctacattcgtcgagcggggggggcgccgcaaccacctatgtgcgagcgggggcccacgaggaaacatctgtaaccaacaacccc

SEQ ID NO: 572722 - DNA, 143 bp, Homo sapiens
gaatccggtgatggtgcggtatattgtctgctccgggcaagtacccccacgtctggtaggcgcagcgcttgattggaaaacaaattcagcctgggcgcgcgtcagcacatcagtacccattgaatggccttcgccaaagggac

SEQ ID NO: 572723 - DNA, 292 bp, Homo sapiens
  misc_feature (261)..(261): n is a, c, g, or t
  misc_feature (287)..(287): n is a, c, g, or t
ccgtctctactaaaaatacaaaaattagctgggcgtggtcgtgggtgcctgtaatcccagctacttgggaggctgaggcaggagaatcgcttgaacctgggaggcagaagttgcagtgagccaagatcgtgccactgcacttccagcctgggcaacagagcaagactccctctcaaaaaagaagcttgcctgaggccacgcagctgggtaagtaggaaagttacctgggctccagagaccttcaactgttgaagcaggaantaagttcaggaaggttcagagctggntgaga

SEQ ID NO: 572724 - DNA, 89 bp, Homo sapiens
ggatttgctggtgcagtacaactaggcttaatagggactcgaattcgaggcctgggcaacaaagcaagacttcgtctcaaaaaaaaaaa

SEQ ID NO: 572725 - DNA, 112 bp, Homo sapiens
ccggaccgtatggacctcgggtgtgcagtctggatcttcggcgtgtgcagcgagagtcatgcacacgccgagactccacaccgccgcgaatgcgttgtcgccgatcttcacg

SEQ ID NO: 572726 - DNA, 429 bp, Homo sapiens
  misc_feature (84)..(84): n is a, c, g, or t
ttgttttgaggcacaatgaaactttagccaaactctgcaagagggtcccatctcctgccatggccaggtgtgagagaccaaacngagaaaacagcatactctccatcctagccttgggtagaatgggaattctttaccctgggtaaacgttttaacaaaaaaatggaacttaacttcggtttggactgtggtagaatgtagacaggagtggggttgccctcttggggctgaatctccaggcctcacgaggtcccctgtggggatgctgctatttctaagatgcaggccttcttgaaacacatcctaagcgtctgagttttgcataagggaggggaacacggacaaattgcttgtacaatttgaaatgggcctcaatggtacttcaaaccttttgattattcctaaataaaaacataaataaattaaaaa

SEQ ID NO: 572727 - DNA, 196 bp, Homo sapiens
tctttgcccagtaattggccaccacagattctagcagcatttcctgagcatctaatctgggccagccctcctatggcgtgccatgacacacacatgacaaggaccagccccagaccaggccctagcagcttcatagcctgatacgctggctctcagccagggcctgattttgatccccagccaatatttaacatgg

SEQ ID NO: 572728 - DNA, 441 bp, Homo sapiens
accgcacagggccctgagcttgggaaggccctgcattcggaagggccccaagctcgttttaattcacaccatcgtcaccaccttgtaattctcaggcattttcaaaccagggggccacattttcttcttaccctgggccctgcaaactctatagccgatcctggcgaggaaccctgggcctccggacaccttgacttttctctccagtttcctgaatgccgcagccagctttctgggggtacggaaacaagtgccagaaggtggtgaggtaagcgatgcaaagttgacatgagatgtaggagagttcctgagctgcccagaagcaggtgatgtgcgagaggccagcagccacgggcccctggagcagcagccgctgatactgagtgcctgccgtgtgctggcggagtgatcgatgttcacagcgattgtcaccgttctccc

SEQ ID NO: 572729 - DNA, 135 bp, Homo sapiens
tcgtccttaaacaatagtgttgtcaagacactatactcacttatcccaggtgaaccacggaatttcatcacaacactgatcgaaattaaaccccctgccataacccaataccaaacgccccttctgtcgtcttct

SEQ ID NO: 572730 - DNA, 688 bp, Homo sapiens
gggatatcgtcgaccgcgccgtcgccatctccacaaaaacgagtttagttgaatgctcaaggcgttacaaaatcttcatttaaggctgagtgtggtggctcatgcctgtaattccagcactttgggaggccgaggcaggaagactgcttgagcccaggagttcaagaccagcctgggcaacgtaggaagactccgtctctacatagaaattttattataaaagtagctggggatggtggcacacacctgtagtcccagctactcaggaggttgaggtgggaagattgcttgagcccaggagtttgaggttgcagtgagctgatcatgccactgcactctagcctaggctacagagcaggaccccatctccaaaaaaaaaaaaaaaacaggctatttaaaaacgtgaagaatgtttcctcttctggctcaggttccctaaataagcgggggggatgggatacttacaactcttcacatccctccaactttcggacagaattggtctcaaacttacctgggtaatggcacttcctactgaactgaccaactttcgcagctctttttgaccacggatggtggcacacttcgggaaaatatccttatactatacatccaattccaagaggactttaatacttaaaagccattcaggtcctcactaaacttatctcccggttcccataaaatg

SEQ ID NO: 572731 - DNA, 253 bp, Homo sapiens
tgacgtagcactgtgtgctcgctaccgtgcacccttctactacagcacggaacgcaccgccttatgtgccactgctgtggtgatccccagtgcagtgactggcacacgccgggcatcgtcctttgactacacgcttgtaccacctggcaactttttgcccctgcttttgacccacagcaacatgcctgcacatgcgatcccacccacgcactggacctgcacatgctgtgcccatgcattatcaggaatttgg

SEQ ID NO: 572732 - DNA, 723 bp, Homo sapiens
ggttaacttgaggatagaaatgtgcccccgcagaggcacacacgtcatgctagcctcacgggaactggataagcccttcggcaaagaaattgtccctgaagcttgtatctgatatcagcactggattgtagaactgtgttgctgattttgaccttgtattgaagtttactggtccccctggtatttggttaataccccggacctatctttgagtgtcaacccctctagtacgtgtggctatggtcaccttcagtggctaacggtatagaacgtgcttgtggaaagacccacgtctgtggcttggtgaggtctctgtggggcccggcagcctctgatctgtgccacgggtattcacctgtcacgggctgagtgttctgggatttctctaagaggctggcacagagacccgttgttttgtcattgcgggtctgtcagggttggaaagtcccagccgtaggaccccgtttcctgttctttaactgatgtctttggcccaggacaccctgggctgattacctctgctttgaggttgggagcggtcttgcatttacccccctgtggagtgtattcattcttaatttatcgtaaggttttattttgtaagacaattctcgattctttgaagagatgaccaccaattttggttttctactgttacgtgagacattaggccccagccacacctcattgggtaaggaaaaattaaactggtgccgtaaccca

SEQ ID NO: 572733 - DNA, 503 bp, Homo sapiens
  misc_feature (71)..(71): n is a, c, g, or t
  misc_feature (162)..(162): n is a, c, g, or t
  misc_feature (178)..(179): n is a, c, g, or t
  misc_feature (208)..(209): n is a, c, g, or t
  misc_feature (225)..(225): n is a, c, g, or t
  misc_feature (239)..(239): n is a, c, g, or t
  misc_feature (242)..(242): n is a, c, g, or t
  misc_feature (244)..(244): n is a, c, g, or t
  misc_feature (248)..(248): n is a, c, g, or t
  misc_feature (264)..(264): n is a, c, g, or t
tgtggttccgggtcgtgtgcggctcggggtaatagggctgctgctcggccggccgcgcggcgagcacaggnggcatgagggctaaccgggaagcgcactgagcggccggcgagagcgccggtccccgtggatcccgagagtgcagagctcagtgggcagggngcccgggaacggctgnnggggaagcacgggcccgtccccctcaagnngaacgtgtcccagggngccggaccacgcgnatnangatngatggagagcaagctntcgaggctaaaggtgaggccctcggtgaaacagatagtgagagaacggacgaaaataggcctctttagaggaagatttggcccaacacgagaaggagttggcgcttctgtgggacaaattcaaactagtcgattctaggctcaatattcgacaggtcacattgtgagccagtgatgacacgggaatgtgtgagatggttctcattgatcatgatgttgacctagagaagattcatcctc

SEQ ID NO: 572734 - DNA, 113 bp, Homo sapiens
ttgttggtgatctacaggatcttatcgaggtaccaacatgctacaacacttatgaccgtgaaaacactgttaagtgtaaagatagggtttaggttggtgttttcttaatgtga

SEQ ID NO: 572735 - DNA, 905 bp, Homo sapiens
cacctggttgcccaccctgatcgaacaccgctgcagctacgaagagcgcggcggcttcgtgcgccgcctgcacgaaggcacctggcccggccacatcctggaacacgtcaccctggaactgcagaacctggccgggctgcccggcggcttcggcaaggcgcgcgagaccaacgtgcgcggcgtctacaaggtggtggtgcgtgcccgccatgaaacggtcacgcgcgcagcgctctttgccgcacgcgacctggtgatggccgccatggaaaaccagccctacgatctcgacaccaccctgcgcaagctgcgccgcatggtggaccggctgtgcctgggccccagcaccgcttgcatcgtggacgccgccgacgagcgccgcatcccgaccatccgcctgtccgaaggcaacctggtgcagctgggccacggctgcaagtcgcgccgcatctggacggccgaatccgaccagaccggcgcgattgccgagggcatctcgcgtgacaaggatctcaccaagtcgctgctggaaacctgtggcgtgccggtgcccgaaggccgtctggtggacagccccgcagacgcctgggatgccgccaggacatcggccttgccggtggtggtcaaggccctgcgatgccaatcatgggccggggcgtttcatcgacctgaacacccgggaaagaaatcgagaccgctacaaggtcgcgctggaagaaggcaggcggcgtgctggtcgaccgcttcgtgcgggctggaacaccgctgctgatcgtcggcggaagctggcgtgcgccgtggtgaccgtcttatcgtcggcgaggcatcccggccggctgtgcgagccatccgaccggcggcgtgaaaaactgtgcccgttgtggccgacggcggtgatggccacg

SEQ ID NO: 572736 - DNA, 638 bp, Homo sapiens
gggggggcacatgttctcagggcctcgagagggctgtatcacaggctgtggttactcgtatttggctcacaataaatctcttcaaataaaaaaaaaaaaaaaaaaaaaaaaaaaaaaaaaaaaaaaaaaaaaaaaaaaaaaaaaaaaaaaaaaaaaaaaaaaaaaaaaaaaaaaaaaaaaaaaaaaaaaaaaaaaaaaaaaaaaaaaaaaaaaaaaaaacattgtggcccccttggcccaaaccaatttaaaactggaccaagtttttcaatggggcccaaattggggcaacttggccaaattcccctttaggggggcggtttaaaaatcaatggcccgggttttaaaaacttgggaatgggaaaaacctggggtttcccaaattaaatcctttggaaaaaaatccccttttccccaattgggaaaaaacaaaaaaggccccaccaaatggcttttccaaaaattggccaaccctaaaggcaaatgggaaatggaaagggtaaaaatttggtaaaaaacccggtaaaattttgggaaacacaccctatttttaaacaaatgggccaaattggcaaaatccctttataaaccaaaaaaattcccccgaaaggggtcgggttttcccatttgggccctcg

SEQ ID NO: 572737 - DNA, 753 bp, Homo sapiens
tagtctcgagtatttttttttatttcttgatggtgtaaaagggcttaatttcgcgggggaccaggaattaaaccaaaaaggccaaaccccatgtcatcatctgactctatcaaacccctccttcttctcaatctttcttctcctctgctcgcagcagggcgcagacaccacgcagcagggcgctcgcagacgcctgggggcagcatgagcctggctacacgcccccaccagcagtgtcacactgggcaatgcttgccatctcccctggggcaatgactgtctccaattgtattttccctattcagctcactgattaccccttgttgtgacccggtcgttcgctccgccttcgatcccccacgctgctccaagaatctctctggatgcctccttggcgctgggggaggaagttgccccccttagggcaccccagcaggtaggaggcgacgtagcgcatcgcgggcggcgatctggcgcgcggaaaaatgtctcacgcgtgcccctcagtcccagaaatctcggcacagagggctccatatacggcaggtccatgggacttcattctcggctacgcggaaatggcctctagctgccccctgtgttggttggacatacttctctgggcccacagcccgtaatgtttgcccaagcacttctctcaaagggcagtgacggaccccccccgaacgttcatgtaaggcccctcttcccgtgtctccacagcactggaagtcatcctgaagggtacaccct

SEQ ID NO: 572738 - DNA, 378 bp, Homo sapiens
  misc_feature (83)..(83): n is a, c, g, or t
  misc_feature (189)..(189): n is a, c, g, or t
  misc_feature (365)..(365): n is a, c, g, or t
acaagatgcagatctctggtatgacagctcccatgatgaggcaatcttgtgagtttcatgtctctagacttgcacagatattnagaaaaacaagtttatggccggtcacagtgactgacgcctgtaatcccagcacttcgggaggccgaggtgggcggatcacaaggtcaggagatcgagaccatctgntaacgcggtgaaaccccgtctctactacaaatacaaaaaattagctgggtgtggtggcgggtgcctgtagtcccagctactcaggagactgaggcaggagaatggcgtgaacctgggaggcggagcttgcagtgagccgagatcgcgccactgcactccagcctaggcgacagagncaagctccgtctc

SEQ ID NO: 572739 - DNA, 395 bp, Homo sapiens
ccggtcccagggaacagcaaaagacctctctggagtgtagacacctaaggagaaggggtaggaggtggccatggtgacctgtggcatggtgtgtggatatcagtgggggcaagagacttggcagaaaatgagaaaaatgtaatttgttatttaaaagatgattctttttactgaaaactacataacagagaatgagagctattcttaaaatgtctcagtgtgctgctcagtgttataaatgcatatatgaagtatgtctgcatatctgaataaccacagtattttttagaataaccttgacttttggtagcctgtggttaccaaacatttaacttttaaaaattccgcaagaacatttgtaaacatttttattatatcagttgctggttccgctg

SEQ ID NO: 572740 - DNA, 117 bp, Homo sapiens
tgaggatccgccccgactagcccgacgggggatacacgttcgcgagagaaggatagcacattgaagaagtgcggaagaacaaagaatccaaagaccctgctgtcgggctagtcgggg

SEQ ID NO: 572741 - DNA, 120 bp, Homo sapiens
ggattggagggtttcacaccaataccctgtgtatacaagaatcagatttataaaacttccccttttttgttaggtatgaacactataaaccaaattattttgaaaactggtgcaaaaaaa

SEQ ID NO: 572742 - DNA, 843 bp, Homo sapiens
tagttcagcctgaggcgcacactcgcagctctcagagcacatcccagttcccgtcgaacatgtctatgtagcactaaatcactgtgcaaggcatcacctctgaggatgatcatcagagaccccaagtgctatgttctgtcaaagacgtatagtatgctttgcatgcgtgagcgtgcatgcattagaaacgagtcgaacattatgctcggatcaaagcatccaaagggtgtgggagtgagcgctcagcctaattggtccaaactatgtttgacgcaacgccgctaggcgaattgctacgatgagacgagcggtactagttgcgccttttgcccatacccatgagatacggtaccaaacccacatgcgaactttgtagtctgcacatgtaccaagtcagcctttatctgggccacacgaggaaatggcagatatgtgtcggcctgtagtagcaagaggacctgcctcaagtatgacgcttgcttgagcgtatcaacgccttgccatgaaaggggctgggaaccgagccgaaggacgtcctctccaattgagaatcatcatgcatacgaggaaaccgaagcccagaggatgcttgcagtgatgattgtagacgagatgtcatacaaagggagaatgtaccaaggacttgagtctggacgaatggacatttaatttcggacagagttggtgcagtttcccaggaaagcgtggatggatagcgccatggcaaaggggtaagaaagagacaaaggcataagctcgtggtcaatttggatatatggaggtggcttgagcaagtatgctacggggacatggtccaatgagggctggaagtgataggaagga

SEQ ID NO: 572743 - DNA, 902 bp, Homo sapiens
taaacacccttaattcacttaatttttcttgtataaaaaccctattttgtacccacatctggaccctgatccgtgcacggaaactctggtgtgggtcttgacaaggtggtcagtgaactcctgatagggaaacttggtgaatacagtctccttccaaaggtcggcgtgtcacggaagctggtaggttctaaaaaatgggcatcaaatggtgggccttgggagaatgttgcccagggtcggcatgtcgaacgccccgaggctagagtgtttgtacacagtccatcagataccacgcgatcatcgacgcacgtcttcctataggcacagtgttgcagcgaagacagatagccatgtcgccctatgagtgtcgcacgagagaatagataggcgagatccccaagacaaacaaaaacgccagcaatgagagaagactatgatcaaccttgtgcaagggagaacatgttagtggtgcgtgccatcagcacgaaaatccatgtgatctcccccccaaaaataagccctttaagtgcaagacaactgagggagaccagatgttgagaagacatctttgtgcgcccagcgagattagaattggccccccaacagataatatggcagtggcggcccacccactcctgtgggggagcaactatttaaaacccacacagaaccagactgtgctccacttgtgatatctcgcccggaataggcaaaccaatacgtgccttagaccccgtggtagagcaggcccaggaaaccggggacatgacacatcagcccgcagggagcaatacaatcttctaaaaaacgccacaactcatgaaaaagaaggcccccccaggaaaaaaaacatcaacggacctacggtaatcccataaaaaagggacgggaaacaagaccgc

SEQ ID NO: 572744 - DNA, 832 bp, Homo sapiens
acatcaaagctacagcctatagctgtgaccatattctaccatgatatttgcaaaggtgaagattagctattgagattatctacaaagaacaagcttacagtaaagtaccaaccaaaaagtgggggtggaaggacaaaaggcaaaggcgccgtttctgagcatcaaaaggaccaggtattaatgtgccggggtagggttattcttaacctggggcgacattgttgtgtgtactcagagtgtatatacttagtgtagaacagaagtgtacacattatagcagctcgccatagtgttgcatttgttatacgaagtacactgtgttaacttggtatacagcaagaaatgtcatatctcttgagtttggtaatggaagaaccaggcacagaaacagacagaaatgatactgtatgtgtgtgtatttatgtctgaagaaagtccccttgaattctgatatctctttgaatctaagagatcctgatagcttcatgtaaaagagcattgacaggtggggccacctctgaggggagtccatggtttctcatgcatcatttgccatatactattattcaaagttgcttgcttagatcagacctatgacgggggaccaggataatctgtaagggccagagattagatgatttcacgtgaataatttggagcactaactaagaaacattcattattaattaataaacaacgtaggtaattagccttataactggttctggactttttaacagcccgggttatgagcagtgggcccttggattatccccataaaaaaagagaacgccttcaatcaaattgggaccagtgaagcgaaccctttcga

SEQ ID NO: 572745 - DNA, 215 bp, Homo sapiens
  misc_feature (61)..(61): n is a, c, g, or t
  misc_feature (68)..(68): n is a, c, g, or t
  misc_feature (79)..(79): n is a, c, g, or t
gcgttctagaggatcaccggagtgtgaatatcgatgtagtgaaggtatagctgccaggaanttaagantgtcagtcagntgcatatgcgcctccaactccaagccctgggagcgcacagttcctaccgcgcgatagaagttgtcctgtggcagtttggtcgccaggtcttcctgatcgatacggaacagcgaaggggtgaacaggttgtcggtag

SEQ ID NO: 572746 - DNA, 539 bp, Homo sapiens
tggaaacggagtctggcccggtccccaggcgggagtgcaggggcgcgaatctcggttcactacaacctcgtgcctcccgggttgcgaggcgattctccggggcctcggccttccgcgagtaacggggctctacaggcccggtgctaccacgcccagcataattttggtctttttagtagagacggggtttaaccatgttggcccaggatgggtctccatctctggacctcgtgatccggcccgcctcggcctcccaaacttctggggattacagggcgtgagccaccggacccagccaccatttaatctctctaaagtctgggtcccagtattaaacctattcttgagtaacctcatattacgggttctaacatggaagaaattatttataactcgggtacttctagaactcaaaattcgtttatcaagagatagtctcaagagaggtagtcacaagtccgggttaaacggccctttttcactttcccgagggcttcctcggatatcttcccttacttcattatacacggtggatatca

SEQ ID NO: 572747 - DNA, 314 bp, Homo sapiens
gggcccagggaaggggcccccaggggggtggcccccccccttgttatttccaaaaactttttttttaaaaggggtggtttttttttcaaaactttaataaatacctttttttttttaaggggaaggtttcctcccagggtttttttttcaggaacccagtgggtgaggtttttaaaactcaaaagggttttttttaacaaaccctgggggggtttacccctggaactggcctacggaaaaagggatttccttttggaccggtttccggcccaattttttttttaaagtgaataaaaggccccccccccccccca

SEQ ID NO: 572748 - DNA, 596 bp, Homo sapiens
tcttaacttggcttatggtagggggggtgaagataaggcctggggttgagaaactcatggtcataaagttataaacggggaaatggggtcagaaggcttagaaacaattgtcatcgccacatccgtccctttctggggatgacggcgggacaaggccggccccctggttggggcccggggacggcgagggctctcagagctgggagaaggtgacggtttacagttcctgtgtctcagtcgtggccgggaccgacttcacgaggtctggggtctgcagcaggcccaggtcccaggacgccacgtaggtgaggctctgcggccaccgaagtggtcgcgggaatacgagcaggtggacctgggggctcggcaagcgccagggggccctggggggaaatctgggcgccaggcaaaggcaagcatccagagtgaccctactggtcggagaaacacccgggttggacaggccaagggccaggggcccccggcaaagccatacatctggggggcgccggaaaagcgcaagctcggaggaccaagcgccggggccccggaatgaccctgggcagggcctgcagggtcccaaactgggggagcaa

SEQ ID NO: 572749 - DNA, 120 bp, Homo sapiens
gccgcgcgaatgagtggcacattctagaaggggtacactctcactcctgtaccgtctgtcccatctgtgtacaagaaaagctctgcgtcaaagaactaagtaaataaaaaaacatccttc

SEQ ID NO: 572750 - DNA, 116 bp, Homo sapiens
ggtgatcttcgctgtgaaacagcttgaaattgacgcaccctgttacttcgatatccagaagagtccagtctgtacctgtgctccgttttacaggtgggattcagatcttcgtgaag

SEQ ID NO: 572751 - DNA, 150 bp, Homo sapiens
gccgcccacgatatagcgtacttctggatgcagtaaaaaccaacaataagatgaaatgtatagctactaacgcatacattaaggaagaagaaagatctcaaataataacctaacttcacgtcttaagaaactgaagaaaagagtgcttgg

SEQ ID NO: 572752 - DNA, 875 bp, Homo sapiens
agcggggcccggcgtgtcggcccgtgctgcggtgcgggcgttcgctgtgctgcccctgtgtgagcttgcatgtggtgcccctgggcgtgctgtgctgatggcctggaagtgggtgtgctgtgcgcccgtgtgacacctggtcacccctggctgcacctcgtgatgcctaaatggctgctgctgtgctgttgacactggctggtgtgccctcgctgctgcctggagactgattgccaaaatgctgcagtggacttctgagttctggatgcctgcactcctgcgaggtggccctgccactgtcgttgtgccccatgtgtgtgaccaggagccgagcttggccttgtgacgggcctgctgatgccgggcgctcacgtgggctaccatgctctgcctacactggcccattgcttgcagtgccccaggatctctatgtccggctgagcgcccaagcatacccgggacaggacagaacccctttgtaacttgagcgcaggtgttgccccctgaggcaccaggaccccctccagtccgtggcagatatcttgttcgccagattggatccccgggcacgacgtggttcaggctctccatggccggtgctctcattccattgaggcctacacgggacatttacgtctggtggaacaggcccactttggcaccccttgcacacatctggagtgcgcttggccccaactaggtatctggacttcaggccccaacagcaagaacggttccactcaatagggacgccccctctctgcctggccagagacacgaatgttgtgctcgacccccttggctccccccgcagcactttggattctttagctttgggccactactcgaagaacaccctcctccttgttaccctg

SEQ ID NO: 572753 - DNA, 320 bp, Homo sapiens
ggctgacttagaggaccccgcattgctcccatcaggtttgtcaagatcagatagctgtagatatgtggtgttatttctgagacttctgttctgtaccattggtctatatatctagttttggtaccagtaccatgctgttattggttactgtagcctcgtagtatagtttgaagtcaggcagcgtgatgcctccagctttgttctttttgcttaggattgtcttggcaatgtgagcttttttttggttccatatgaactttaaagtagttttttccaattctgtgaaggaagtcattggtagcctgatgggagaagatgcg

SEQ ID NO: 572754 - DNA, 169 bp, Homo sapiens
cgaatcgagctcggtaccttcgttgtctgccagatcccttcacacatgcagtgccctggaccccgcacccccaaaacactacatgcatggtagctgccagatgcctacagcctcgttttccagagacttgccctctacgtgaagtcacttgccttcaaatggacacgaa

SEQ ID NO: 572755 - DNA, 458 bp, Homo sapiens
taagtctctgagattagtttcattcagaaatgatcactgtaatcgcacaccccttcctctgatctcacccacattttagggcagaggggaggatatgaaaaggccaccatgttcaggcctcccaacagcagaagagcaagcatggcagatagaggacctctcccttaacacttttgcctactcgtgtggcctctagatttccagaaaataaagtgaataaaattaaataaggagagaacaatgttcattataagtatatggtagtttaaaaaagtgtcagctctaatgcatttccatcagctggaggcttagagggagaatgatggtacgtacaatgctgcaggaattgtacattatctgggttttgcctttgaatatatttgtaacaaactctaaaatgtctgagtagtacctataggagggtatgtccttgagtgacagtctctagtatgtcataa

SEQ ID NO: 572756 - DNA, 350 bp, Homo sapiens
aatgctggactcacagaaggctatgagaagtaaataacagatggagttttacttttgatgcccaggctggagtacgatggtgcgatctcagctcactgcaacctccgcatcctggattcaagcgattctcctgctacagccttcccaagtagttgggggctgggctaatatatatatatattttttagtagaaacggggtttctccatgttggtcagggtggtctcaaactatgacctcaggtgatccacccgcctaggcctcccaaagtgctgggattacaggcatgagccaccacagccggcccaaatattacatttaaaagcaaaaataaaaacaaacccacgagtg

SEQ ID NO: 572757 - DNA, 427 bp, Homo sapiens
agggcatgagaaggccattcagacgacgacaaggatgtccaagttatcagaagcagtataagtctggggaagaagatgtgaacgagaatctcacctggagaaaaatgtagataatatacaatgaatatacttttcttctatgtaacaggcagagaaggtaccaggcacacaaggtgagttggatgttgagtttagtgaaataggcaccggcagccattgttggtagggtacaacctgggacagctgttctgtgtccgtcctggtatttgagacagcctcattctgtcgccaaggctggagtgcagtggcagtatcttggctcaaggcgagctcagtctcccaggttcaagctatcgtctgggcttagccaccctgagtagctgggatcacaggtgcccgaccaacagaactggcagatttctgtgcc

SEQ ID NO: 572758 - DNA, 479 bp, Homo sapiens
atgtgctgtgtgtagtaagttacgtcgttcgcttgctaccatgtatctgccggcgaaattctgactgcgtgaatcgccgcctcgactatagttaatagtaatagaagctacttaggactatcatgcgaaggtgaaagcgccgaggatttagtcttgtgcgtgcacgtgcggccgcccgactaagagagctctgaggcggacaagcgaggcataggaagctagcaagaaagtaaaggacaaagaacggaggacaggcgagaccatcccccgttgtcttcgcgtgtgtctgagtccaacccctcatcgtctccatctcctgggtgtactcggggatcacgtcctctgcccggccaattctcatcatttgcgtaatatgctcctcacaagtccgcgcccattactgaacttggggtgtgtgggcccctccgtgattatttctttgtggctccatttttgggtgacatgaggggtgagggttt

SEQ ID NO: 572759 - DNA, 484 bp, Homo sapiens
cacgccctggggctatttttaaacatagaggtcacacgtttgcccaaaaaggccggttttttcccaccaagccccgagtccccttacacgccattgaaacagcgggtgttctacatggagggactacccttccccgtaagacgggcgaggagattttttgggcaccatcggcatgcggcccaacgcccaagaacaacccgggcttggatttcccccatcgaccggacttcaagggccagctgtgggagttgtcctgctcccccgaataccggatgggttaaggcccggttttccccccctgcacaagcccagggggtgagggttcctagggggttttgggggtccccctctcctttccctccctcccccaaaagggggttttaggggcctgggctggggggatggggagggcccatcgtgactgtgtttttcaaaacttatgtttttaaatgggggcatttacgccaataaatcctcagctgga

SEQ ID NO: 572760 - DNA, 436 bp, Homo sapiens
  misc_feature (385)..(385): n is a, c, g, or t
  misc_feature (391)..(391): n is a, c, g, or t
  misc_feature (411)..(412): n is a, c, g, or t
  misc_feature (426)..(427): n is a, c, g, or t
  misc_feature (434)..(434): n is a, c, g, or t
aaaaaaacccccccccccccggggaaaaaaaaaatctttccggggcgggggggggaaaacaaaaacgcgggggggttttttaggagggggggggaaaaaaatttttttataaaaaaaccgcccgggggggggaacatttttttgacaaacaagggaggcccccccctttaaaacggcgccgtggggggaggttttttatttttttggggggttttcttttttggggtgtcggggtccccccttaaggggggggagggtgttttcctttggaaaaccccccgggcttggggaaaaaccccccctttttttgggcccccccccggcctttggggcccccaaaacccccctaaaacgggaagggcccattaaaaccatgccaggattnaagcanccccgcctgccatgggctgnnttccctcgtccganntccgcanga

SEQ ID NO: 572761 - DNA, 1159 bp, Homo sapiens
  misc_feature (73)..(73): n is a, c, g, or t
  misc_feature (784)..(784): n is a, c, g, or t
  misc_feature (805)..(805): n is a, c, g, or t
  misc_feature (857)..(857): n is a, c, g, or t
  misc_feature (973)..(973): n is a, c, g, or t
  misc_feature (1080)..(1080): n is a, c, g, or t
tcctccaacaacctacttatctcttttctttcgaggatgtagctattgctggaggacacattcacacagttgnaacagatgacactaggagcaatgaaacccagaatcctaataaaccatcacctagcatgctgtcaacaggttgcatcttgcttgatgctcgtctagggataataggcatttgatgatgctctatttttatagaagctactcgaagatgctagaattagctcgaagcatgcagcagaacacgacttctccacgttataacattagaagatggatcgaaaatttcttgatgacactaacttatatgaagtacttaccaagtagtagactagattacatctcatgacacaccttcttagtacatactacaacctatatagtttacgccctcgaatgtcgtcgttgaagacttctgcatataatattaatacatgtctatactcttgtctccatcatccaaccacatacgttctctatgtcactttttagctgcttcctaagtgcaatccgcattatctccacattatttagcacctccgactatcttgaatatttacaagtattcttagctctgatctgtccgcgatactactatatgactatctcaagacttacagagcacctttctctgtgctcctctctcatgcccacgtgtgtctatctcatgtctccgcatcctattcttaccctctactactcgtacgcggtctcccactctccaacgcacaccgttcatccttcatcctggagtattatgttctcttcctctaccgtntaacgtccaggactcaccganccattgcacgcacatctaacctatacactccacaagtgttgtatttataatntggctcctccttctcctgtaattctctcgttcattgctttcacttgtatcgatcactgttcgtctgcgcatgtaatatctccctctccccgctcctacccatcctacgtattatangtctcatcctactgatactatgctcatgtatctccgcacgcacgccaacctcgacatcttcacctaactctatacattactatgatgctctcttcctccacgtccantcacgcccatctctatctcctcatcctagcgatctatactacgatgtcactcatgatgttaatagcatgtagtgtatat

SEQ ID NO: 572762 - DNA, 122 bp, Homo sapiens
cagacatacaacaattagctgggtgtggtggtgcactgcctatagtaccagactacttagtggaggctgagtgtagtgagaattgcttgcaggcagaggctggggagcagcacggaacgaca

SEQ ID NO: 572763 - DNA, 154 bp, Homo sapiens
ctagagcacgagatcctttttgaggttgactaggtgagagatgattagagagagagagaggctctgagcgtggacaagatcatgtactgcacactgggatatgatgttgatcgcagagagatcgttccgatcatgcttgtactgtcggattatg

SEQ ID NO: 572764 - DNA, 989 bp, Homo sapiens
aactgatacaaaaaatagatattttgtgctttcaatcaacagtcacatcatgcagacagtaataatgcacattctatacaattgtcccatattctaatagttatgcattaatgctttaagacttgtatacttgtgctttcttacatagtattttagcttatcttcagaagtataacataatctattagtttataattcacttgacacactactagttacacatccatctattacacactacttcactcccacttcactatcgctccacaacccatgtgcgaccttatactcttacgacaacaacttactactgcatctaacaaggtatacctcctttacactacgcagttctacaaggttacaactttaggagacatctggacgtattacattcgtagccattacttccgaacttctacttggggaccttaaagattcacttaatcgcgaattatttccccaagatcattcttctaaaacattctcacagtttggccaaagggttcccacactttcacccagcacactccatggtccacgctcatttccaagggtttccttcgttttacaagcgaacatttttaacaaccaacactccaccctgtctccggaagccagggctcccaacgcccctaacaccgcacacgggaacacacccaaccggaaccaagaaacaacatttcacttctcacacacaccgggggctaccaattcgtacacaacattacaacagacacttatataggattccgattaaccgcgttaaaaaaccaccccaaattcacgaaaaaggcgaaacacctttaccaacatcttattgatttaaaaagcagccaagcaacgagattcattacggcctacacacacacgcaacttttagtacacaaactattaaacaagggcttatactttcacacaaggccctccgcgggtaacaggccccactgaggcatagggcaacctccccaatatacaaccagtggcttaat

SEQ ID NO: 572765 - DNA, 278 bp, Homo sapiens
atagccggaccatcattgcggtgagcatcatcatgccactgcacttcagctgggtgacaaagcaaggctctgtctctaaataaataaataaaactatcacatctccaaggcaaaatgagaatcaggaactttaataacgagagtgatgcgtagaggggaagtgcattagagttaaatttattcaagatgagacttcactggacaacaccattttgatacttccatgaaagttaactagctgattgatttttctttggttaaaatgtccaactgcgccc

SEQ ID NO: 572766 - DNA, 472 bp, Homo sapiens
attaaacaggtgactatcagtaagaacagtggcctttgtgggttgtagctttccctggttcaaccctgccctccagctcagtggtaatcttggaaataagaacctacattcctagttactgtgggagcaaaatgccctcattcgcacagaacctccgttattgaacgtgtctgatggctgcctagaagactcctaccacattggctcagggcttgcccagtgccagctgcctgaggtgatggataacagttgccacaaacaatagactaaacaaaaagctaaaaaggaagagcaagggaatgagatgtccacaggcgctttgaaaagcccaaaacatttttgggaatacaggtcatatacacacggaggactatggatatatactcaggagagacctgaaaaagccctaaactctcacctctggctgaccttgaggctctatacaaagggaagtctgaggaagagaaattta

SEQ ID NO: 572767 - DNA, 190 bp, Homo sapiens
gccgtcatctactctaccatctttgcaggcacactcatcacagcgctaagctccgcactgattttttacctgggtgggcctggaattaaacatgctagcttttatttccagttcttaaccaaaaaaataaaccttcggttccacagagggtgccatcaaggtattttcctcaggcaggcaaccgcaatcc

SEQ ID NO: 572768 - DNA, 159 bp, Homo sapiens
cggccctagctattgtttggctgaatccttgatttatatatggcttttcatgggcctgctcacaacaccaacgactgtgtgatggtatggtagtcagctgcgaataattcataaaccgctactcgttccatcaactccaagtgctacttggctctcgta

SEQ ID NO: 572769 - DNA, 1620 bp, Homo sapiens
  misc_feature (1620)..(1620): n is a, c, g, or t
gggaacatcgtgcacatccatgctgctcagtgtggcaaacagatcggtgcctaggttctggagagagtgatcagtgatgaacatggcaatcgacacccaccgatcaccgtaccacgggagacaagcgacctgcaggctcgtaccagaatcctctagtgtactacaatagaaagccacatggttggcaaaatatgcttccttcgtgccaatcctctggatgcgatactacgaaacctgcgcgaacaatggacattgtgtatacgactctagagtcacgttctaaaggccgagaatcattaataaactcagaactgaacttctagatatttgtgtccagaacgtggagagcaaggttaaccaacagtggattccacaagggccacatacacatgcatagagctccgatcatggattagaatagccgttggttccatcggaaacctgttcggattaactgtggagaattgcaggggcaacaatcacgccctagttgggacgtcgacgcctcggcctgaggtcatataccgattcctggtaacgcgcaacttcaactagtgttacaggggtggccaaccagtggcatcttggaagtttgggagcaacctgcctccttataataccaagcgaaaggaagttccgcaaagatcttaacttatccaacatagtatcccgtcccttcggttgaacgttaacacgtgtcccagattggatggagctgtaccttgggcaactaccatatacaggggatactgtgcaggccaactctgattgacactggagaaaaggacctcggatatattacattggccgctacacaccgttcatgctctggtttcacatatcccacgagacagggcacaagaacgccaaattgacatcgaaggtggaaggaacgccttcataggcacaattaggaacacaacagaagggacacccagccgtaagggaagcaatcataggaatatacaagggaaaccacatagaacaaggagtgaccacaacaaagccaaaaacacataacagagcgacaatcatgaaacgccgcccccatagagacgatcgagcgccaaaacaaaggcagagggagacgtcaaacaaaactaggaaagacacggagagccccatgggtcagaacgcacaaatcgggatcacccgcgagcaaaagtgtagggaggtcacaaagcaaagagtgtacccaatgagagaaggaattacacaacttaagtaagataagcacataggagagatgagcaccctatcaacacaagaagaggtaacacacgcaaatataacaattaaaaaaagtagaagaaacaaaccgaacacaagactacaacataacacacaacaatagtaaataaattattataccacacaaatatctaacaatacaacatatgataaataacaaaaaacagtaacaaatcaatataatatcatataatactaaactgacaacacaacataaagtaaaaagcacatactaaaaagaatgagaactacaaatactaaaacaataatatcaacacaatctactaaaacacacacatacaaacacagaaagaaacaaatacaaacgcaatactaaatacgagtaacagcaatcaacaagcaaactan

SEQ ID NO: 572770 - DNA, 393 bp, Homo sapiens
  misc_feature (12)..(12): n is a, c, g, or t
  misc_feature (16)..(16): n is a, c, g, or t
  misc_feature (19)..(19): n is a, c, g, or t
  misc_feature (265)..(265): n is a, c, g, or t
  misc_feature (285)..(285): n is a, c, g, or t
  misc_feature (292)..(292): n is a, c, g, or t
  misc_feature (309)..(309): n is a, c, g, or t
  misc_feature (335)..(335): n is a, c, g, or t
  misc_feature (363)..(363): n is a, c, g, or t
ctggccgcgcgnctgncancgcgtgaagccgctgatcgacgcgatcagcgctggttgcgacatcgctcgcgcactgacgcacgcgtcgcctcaaatgctgaactccgccgcgacctcggcacggtttcaagaaacgcaccgagtaccgccgacgtatcgtccgcacggtagcgcgcctgcagcgacacttccagcgccggcgcaacaacggcacgaacgtgacgccgcccgtcgaaatctgccgtgacgacgcaggcagcagcgnaacccccagccctttcacgnaccagcnacagagcgtatgggacnttgacgacttcattgcggcgattttngggcgttgaagcgggcatttcggacggnaatttttgttggcagggaaaacgtggccat

SEQ ID NO: 572771 - DNA, 519 bp, Homo sapiens
  misc_feature (519)..(519): n is a, c, g, or t
acatacattgcctgatgacagagttttgtttcttttttctttttgagacagagtctcattctgtcgcccaggctggaatgcagtggtacaatcacagctcagtggcaacctctgcttcaggggctcaaacgaccctcccacctcagcctcccaagtagctgggactacaggcatgtgccaccacgcccagctaatttttgtgtttcttgtagaggtagggtgttgccatttgcctaagctggtctcaaattaaagagctcaagtggtccacctgcctgccttcacctcccaatgtgctgggattataggcatgagccacactgtgcctggccccttgagcatttcttgtaaggccagtctaagagtgattagaattcccttagtttttgcttatctatgaaatattttatttctccttcttttctgaaagatagcttttctgggtatagtatttttgactgttaagttttttatctttcagtactttgagtatgtcatcagacaatgtatgggtaccgn

SEQ ID NO: 572772 - DNA, 169 bp, Homo sapiens
aagtagagatggggtttcaccatattggccaggctggtcttgaactcctgacctcaagtgatccacccacctcagccttacaaagtgctagggttacaggtgtgagccactgcgcctggccccttccctcttctttaacaccaccttccatcccttctgttgtcttctc

SEQ ID NO: 572773 - DNA, 312 bp, Homo sapiens
atgtagatacaggtgagccatcatttccctttaatcagcttttaaggcagtagtatccatttatagctctgatgatctttttcagtgttcatggccacccctataaattttggtggaatttgcatttgaaaaatcagtgcacgtatgggactacagatttaatcataatgtatagaaaaacagtaaaagcagtgttgggtgtgcggctaggtagaaattttccagttgtattttgaaaatgtcttgattttttcatattttattaattaggcaatacaatcagatcttttgatcaatgtaatataccacagc

SEQ ID NO: 572774 - DNA, 199 bp, Homo sapiens
caaaaaagggccaaaggaacggcgttgcccgggaccaaggcaccgggtccgcgggaaccccggcccacaaccgccctcctcctgaagccccgtttgggggccctatagccccaggggccggcacatccctccatctcgcgccgtaatttgcaccccctcctaaaggacgcggcttggaccccccgccccctcccccgca

SEQ ID NO: 572775 - DNA, 247 bp, Homo sapiens
gctctctaggtctgtcttcgtcccatcagtcaggtctcacccaatcctgggccacgcgttcagattttgaacgaaatcttcccagtttcatcatcatcaaagagctgaaagctttcaggatttcttctttagatatctttctcagacattttctgggtcatcacagttaaaaagtcaccaaagttcatgtgtcctgtcccttccttatcaatttcacttatcattttcctgatgggagcaagatgcg

SEQ ID NO: 572776 - DNA, 325 bp, Homo sapiens
aaaaccctaacagatctgtcctagtgattttacctttgttctagaaggcgctcctttcagggttgtggtattcttaggttagcggcttttttcctcttttccccacccatcttccccaatattgcccattattaattaacccctttctttggttggaccctggaagttcttctccctccaaggatctcccccccatttaaggtccttaacggggcacttctccttttccaaaggctcaatttaggggtggccgagtcttctttaagagaaacccatccaataaatcgacaagccattaaaaaaaaaaaacctcggggtcttttgg

SEQ ID NO: 572777 - DNA, 224 bp, Homo sapiens
gggggggggcccccccaaaaaaacgggttttttctcaaaaaaggcctttttgcttttaaaaggggtttaaaaaggaacagggaaccccccttttaaaaaaccccccaaaaaacccccccctttttgggtgggcccctaacccgttttaccccccttaaattttttttggttaaccccaaagttcccggggggaactggttttccttaaaaaattttttttccca

SEQ ID NO: 572778 - DNA, 257 bp, Homo sapiens
tgcgtgccgggccctccaaatcaccacaggactattcctagccatgccctactcaccagcacgcctcaacctgccttttccatccaatctgccccacatcactcgagacgtcaacattcatggcttgcaatccatccgctcaccttccacgcccacatggcggcctccaatcattcttccatcttgccatcttccttcaccaccatctgtggctgcaggcccttatcattcacgggcatccatttcctctcactcca

SEQ ID NO: 572779 - DNA, 139 bp, Homo sapiens
tgcatggcgtattcactcgccatggttcttctattcatcattcctcatcccttagaactctgaactatctgaccatcaactttttcaggaagctttttgttctattttctcattataaggggtgggagtgaaattacgg

SEQ ID NO: 572780 - DNA, 259 bp, Homo sapiens
ctgcctcagcctcccgagtagctaggactacaggagtgcactaccacgcccagctaattaatttttctttttttttgagatagcatcttgctctgtcaccaaggctggaatgcagtggtgctctctcaggtcactgcaacctctgcctcctgggttcaagcaatcttccctccttggcctcttgagtagctgggattacaagcattcaccacaacacaacacctggctaatttttttttcttcaattgagtacaacctg

SEQ ID NO: 572781 - DNA, 528 bp, Homo sapiens
gccggttgggcctgatgcatcggttgacaaacagctggaatgttgcggatagatggatggtaattacgccccgaccctgaaaaaaaacaaaaacaaaaaaaaaacaaaaaaaaaacgacgagaacgttgcgaccagaaaagaacgacgaagcacggaagacgcgcgaggggaacggagagcacgaagcggagagagcgacgcgagagagcaaaagagacaaccacaggagaaacagaaaagagagagagaacgaacacgagcagaacacagagagaagaaggagacaagcaaataaagcgaaaagcaagcaagacaaaggcgccggaggagagaacgtgaagaaacagagaaaagcgagaagaagcgaagagagaaagatagagaaaagagaacgagcaccagcgaggcgcagactacaatgaagaggaggagacaaagaaagtggacaaggagagcaggagggagaagtagcagaagaggacgaggacgggccccggaggaaaagacgaagaagcccggaaggaagt

SEQ ID NO: 572782 - DNA, 432 bp, Homo sapiens
cgaccacgtgtgatggagggagtttacaggaagtcagacagggccaacgtcgaagccgtaattcctgtgtctgcggcaccaacgtccaaaggggccacatcgatgataggcaggcggaagagtcttggtgtttaggtattcgatcactgtcttgatccatgctccggtgatgactcgtgcacccgtctgcacgagtgatcgctgttgtgtccagtcggcgtgtagccctcgtgcgcggatctctcatctcggttgctgccctggaagtaacatagccttcttgaagttgcctgtctgctgttccctgtcggccaggctgtttcttgcagggctaggtcatgtcctgggcggcctcggtcgacatcaggcccgggagggtcagctggatggcctcatcggtcagtgtcggatccctggccgacttactcgaac

SEQ ID NO: 572783 - DNA, 928 bp, Homo sapiens
gcggagactctggtgtccctgagggtccacactgtggatgacatccagcagatcgcattgctgcgctggcccagtgcatggggcccagcagggagctcgtatgccgctcgtgcctgaagcatgacgctgtcatcagagctggaggccatgatgcgcatcctgcaggaccagagaccaaccgtcgtgggctaccgtgacagcgccaccgctcgatcggagaaagctatcctcaacatcacaggagacctcatccacctggccagctcagacgtgcgggcaaccgacaagactgctcagagctgggagccggagtcaccatctgcggatggtggcgtccaggctacaacctgacctctgccctcacgcccatcctcacgcgctcccgcgtgctcaaggaggagcccctgactgctggcgggccgttacctgtcttgatggaacgccagagcccctaccctggcagtctaactggaactcggagccccggcccaatgagcgcaaacttgctcagggtagcaggaggatccggccagagtccctccagggtgacagaccaccgggcctacacacttcgttcatttccccggggaccagagaccgagtggggagataaacgtctgaacctctccagacagttccgctggtcggagctggagtgtgtcccggtggggctttggtacaccgttccctgtgccagtacttaatgcgaggaggacttgggtgtcgcggacagaagggggcaggggcccctggaaggagccttgcacggccaggggcgtttggcataaacggcacctaacaggcttagggacaaactatttgaggcccaagaatgtccgtatgtgtcctgaacaaagcggatgtagacatagatgaaattggttgcagagacaaatgaagcagaacaggaaatgaaaatgaacacagg

SEQ ID NO: 572784 - DNA, 81 bp, Homo sapiens
  misc_feature (25)..(25): n is a, c, g, or t
  misc_feature (32)..(32): n is a, c, g, or t
aatatgcaggtggatggacatgggnatttggncctttttgattaaattccgctcccctgcaaataaagcctttttacacgt

SEQ ID NO: 572785 - DNA, 248 bp, Homo sapiens
agggtgcgagtggatgtgggtctgactcagcttctcccaaggctgctgccggatcatcttccttatactcactatacacattctcatcttcctcctcttccgtgttctctcctggccgatacacccaggcgcttcaaggaagcacttgcagggtggtgtggaagcagaagtctcagcttctctcatcatcctcggcagatggggtatcactgtccctcatctacctcctcctcttgtgtcctctcctg

SEQ ID NO: 572786 - DNA, 993 bp, Homo sapiens
ggtgggttggttgtgggtgtgtgttttctgtttattctctgtgctgtgttgtggtgtgtggtggtgctgccgcgcgcggcgacggtactttcaccgtggccatgacggcgcggtccaacgcgtgtgcgcgcgttttccgcttgagtcgggcctggtgcgatcgcccgggggagtgccgctctcctgcatactgttcggggcacgcgcccccccgcttggccggagcatcactgcaagctgggaaccgagagtttccctgcgcccatatcatgccgggcagttgacgggctgttttctgcgggcggactccagagcaaccctgtgtcctacatcgcccactcgagtgtgctgacacacgtgacacctattcgacgaccgccttttctgctgtcgctcaggctccaactgctgataccccggccgttagctgatgctgtcacctacccagctccgggttcccccagccttggactggatgagcctcccctgggcccaccccagccagcccgcctcgtttaaaggagatgtgttaccgatgtacccgggaagaccctgatggccgggaatctcatccatctgccaggcgtgggaccctccaagaaggagggccaagtgtacatccagtgcctatggggggtatgatggtaagcgccagtccctttgcccacttggaggctcccgggagctccctacaatcttatggctatgttgatgctacctaccgggaaggccatgacccaggaagagtgtcttgccaattctactgcccatgctctctgctttggccctggagcgggatggctccccatggaggagtgatccccctggccagcccttgccagagatccggggtagagccggccagatacttttgggagacccagatacccccattcgcccttgcccctttaccccccccctgaatcccgggattttagtatgccataagagatgcccctgtactgatgccaaatttaataaagtttgtccccg

SEQ ID NO: 572787 - DNA, 359 bp, Homo sapiens
atcaagacgcggggaccggtagtggtcccagagggctaggcccactgatatttattgcatacaagacaagggggcagggtaaggagggtgaatcttctcagtgattgacaaggtgaagtaagtcatgtgattacaggatagggggcccttcccttttaggtagccgaagcagagacggaaggcagcaaacgtcagcattttcttctctgcacttataagaaagatcaaagactttaagactttcactatttgttttaccgctatctgctacgaacttcaaagaggaaccaggagtacaggaggagtatgaaatgcaacaaagagtaatattaaaagctaatgattaataatgtttataa

SEQ ID NO: 572788 - DNA, 401 bp, Homo sapiens
  misc_feature (133)..(133): n is a, c, g, or t
  misc_feature (262)..(262): n is a, c, g, or t
  misc_feature (323)..(323): n is a, c, g, or t
gcgacagtccggatcgcgtgttgtcgtagcgtggtgtgaaacgatgcgtggcgttggaatgcgggctgcagccgttggctctgaaagcgggcatgagcgctctggcggtcatgctgatggccggacttcctcngtctgccgctgaagacacgccggcagcttcagccgaggcaaaggccgacgcgccgcgcaggccgactattatacgcgccgcgccaagtcgatcctggaagccgagaagagcagtatcgagaaaccgcantcctggccgcgtcctatccgggcatggacgttgtggtatgcgaagccgggtgcacgaccantcgcaagcctgaggtcgtctgagcaaagcgccatgccgaggccgccaagacggtgacgcaaggtttgctcgttcccac

SEQ ID NO: 572789 - DNA, 775 bp, Homo sapiens
  misc_feature (134)..(134): n is a, c, g, or t
agaatagggtcttgctctgggggggagggtggtctcggacttctgggcttctccagtcctccctccttagcctcccaaaatgctcgggattacagtgtgtgagccactagtgcctggcccacatttattttagnggaatttttttttttgagatggagtctcgctgtgtcacccaggctagaggggaggggcatgatcttggcttattgcaacctatgcctcctgggttcaagcaattcttccacctcaccctactgagtacctgggattactggcacccgccaccacgcccagctaatttttgtattttttggtagacacaggattttaccatgttggccaagctggtcttgaactcctgatagcaaatgatctacctgccttacccttccaaagtgctgggattataggcatgaaccattgcacctggcctgaattaaggaatttttaaagagtctcttgtgaccaatcaggggatttattagtacagttgaccctttaacaaatgggtgttagagatgccaattccctaagtacttgatatccacatataacttattgatgtcctaaaaacctaactactagtagcctagtggggaccagaaaccttaccataccagttgcttaacacgaatgtccgattttatgcttattatgaatataaccggatttttacaataaggtatggtgaaaaagaatatttcttcacaatcatgttgaaattccaacttttggaagctgaaggggggggctaccagacaacttggcctatggg

SEQ ID NO: 572790 - DNA, 615 bp, Homo sapiens
cggtgcctgactgaatcccaatcaagaaaacagcgacatattggtacttgatgatctattcgaaaataagctacctgaaaactacgacccgcatatcgttcaagtctatcgtttcatgaatcctgaaatgtatgacacctgtattgatcttgtagctgtaggtgatagaacagaaagcagttttcgaagtctccatagccgtgataatccatttgaaaattcaccgcatgactacaccaaaagttatagcatatcgacagatttcttcgccacaaaagaaacagcaatgcagtttgttcagcaaggaatgaatctgctgaatgcgaaagatttgagtgacgtttcgcaagctaagagcggcattgagcgctggtatacattggctaagaaagaagaaatttcaaaatgaattccatagacgacatcaaacagcaactcattatgtcatcagactggagtgcactgaatgcgtatgagatgacaaagcgagcctgtgccgaattaaccaagcatgggcaccgtgtcccttcatggaacgtgatacgcgacatcatcggcaaaggtagtgccggggatatcaaccgtggtaaggatgattttcgtaaagagcacggt

SEQ ID NO: 572791 - DNA, 599 bp, Homo sapiens
  misc_feature (34)..(34): n is a, c, g, or t
  misc_feature (66)..(66): n is a, c, g, or t
  misc_feature (68)..(68): n is a, c, g, or t
  misc_feature (73)..(74): n is a, c, g, or t
  misc_feature (76)..(76): n is a, c, g, or t
  misc_feature (80)..(80): n is a, c, g, or t
  misc_feature (117)..(117): n is a, c, g, or t
  misc_feature (124)..(124): n is a, c, g, or t
  misc_feature (127)..(127): n is a, c, g, or t
  misc_feature (159)..(159): n is a, c, g, or t
  misc_feature (173)..(173): n is a, c, g, or t
  misc_feature (193)..(193): n is a, c, g, or t
  misc_feature (236)..(236): n is a, c, g, or t
  misc_feature (280)..(280): n is a, c, g, or t
  misc_feature (340)..(340): n is a, c, g, or t
  misc_feature (343)..(343): n is a, c, g, or t
  misc_feature (499)..(499): n is a, c, g, or t
  misc_feature (563)..(563): n is a, c, g, or t
  misc_feature (596)..(596): n is a, c, g, or t
aaatcaatatggggcagtacaaaaaaagtttggnccatgaaaaaaacaattcagttaataaaaacngntaggnngngggnggggggggggggggggggcttccttctcatggttccngccaggnggnggccagggctcagttgccccaaggttgtccantgtcaacctttcangggagggaaaatggcagggnggggaagacggggagaaaattctgctgtccccagtgtagaacngggagggatttgggggtgggggtgtgctcgcaggagcctggggngggggtggggaagcaggggctttgtcagttctgtgggtttagagcccatgctgaacgganttncccctttgcccagctgtctcccacccttgctgtgttgagtctgcgagcctgggatatgctaactcgggggtgatacaacctggaagaagaatgtgaggctctcctggaaagatgcaaaaaccatctcagatccaaggggccaagatcacaaggtcnttttgctacctggggggtctgaagctttgggggcaggggctggggagtcacaatcctgtgaggnggggggagggaagagtcacaaacccaattcagngct

SEQ ID NO: 572792 - DNA, 384 bp, Homo sapiens
catcattccaaatatgtggacgaccttcttcttagcagcccctctctaaaagactctcaaactcacacggccactgctctcttaaactttctcgctatcaaagggtatagggtctccccctccaaggcccaactctccatctccatgatgacttacttaggaattcaactttcccctggggcccaggctatgactccagccagggcagcattaatagaaaatctacccccaccctcctccaaaagcgaaatcctttccttcccagggctagcaggcttctttagaatatggatttccaactttgccctcctagctcatcccctctatgaagtggccaaaggccctcccaatgaacccctaaacccctcacataacatactcccc

SEQ ID NO: 572793 - DNA, 1470 bp, Homo sapiens
tataaggtgggggccaaagcacttaactgcaggggcagggggggaggaaaaaacttataaattattcatcttaaataaaaaggagggaggggcatgtgggagggggaaaccccattccacaccagccgtgttccccttctgttcacatgggctcccttcgagcgtttccctcgggtgggggcataccacaggcatgtgggcattcttcattgtgtacctcgttcacaaccccctctccgcgcgctctcataacaaaacacgcgggcctcgtgccctcgttatagaacatctcacaaacaattttacactcttctcttcggggcggggaaaaatataggggtggaacacccaccacccagtgcgcggagcgcgcgcaccgtgagagaggagatataagagagaagagacagggcgagacaagcgcgcacgcgcgacggagaccggcgtgtgcgagacacaatatgacacgggccacacacacaccaggggggcacacagcgccacacacacaccgccgtgacacgcgccccgcgcgagacacacacgcgagtgccacctccccgcgagcgcggcgctcccccagacacactatcaactacgcacgcgactacacgcagacacacactccgcgcgcggtgcgaggactcaggcgcgccgcgccaaatgagaccccccgccacacacgtgccacgccgcggccacccaaataaacacaccgtgagaacctccacgcgactcacacagcgagaacgaggcaaacacccactccacgcgtctcccacggcgacacaccactctaccaccaaaaaacgcacaacaccgagcaccacgggcgggcacacaccccccgcccgcgcgaacgaccacgacccacactcgccaccgcgaagacaaaaagcagcgtgatcagcgagcacgcagacgcggggccccagccaaccaagcagcaccacgcacgcgcacacaacagaccccaccgacgacgccaacacagcccacccgcgcaggctacaaagccgccgcgcagacggcagcgcacacacctccggaggaagcaaagccaccagcaggacacacacccacgactaggccgacggcagctaaggacaccaccacgaacagcgggcagtatgcaccacaaaccgaacagccactctacgtcgccacacgcaacatcgaaacccagcaacgaaaacccgagcggcaccacaactcggcaccgccacgacttcaggcaagcccaacgagacaccacccaacgatcccgcacaacacacaacgccggcgcggccccgcgcgccagcaccgcgacaacacacaagcggcgcgccgcgcgcccccactcaaacacaaggagggcagccaccaacagatacggcagcgcccgcccaccatagcgaccgcccccccaacgtgcagcaccctcgccaggcagagccaccccgcgccgacgccgacccgcgccggacg

SEQ ID NO: 572794 - DNA, 832 bp, Homo sapiens
cctcatcctgctgctctcgggagccctggcctgatcgagacctgggctgctcccactccatgcaggtatttctacaccgccgctgtcccggcccggccgcggagagccccgcttcatcgcagtgggctacgtggacgacacgcagttcgtgcggttcgacagcagacgcctgcgagtccaaatgaggtggacgcctgtctgggctgcctgtggagtggatgcagtgatggtggcctggaggtatttgtggacctgtggagacacagaagtacaagcgccaggcaacaggctgactcggagtgagcctgcggaacctgctgcggctactaccaaccagatgcgatggcctgtgggtctcacaccctccagtgtgatgtatggctgcgacctggtggcccgacgggcgcctcctccgcggtgtatgaccagtccgcctacgactggcaaggattacgatcggccctgatagcgaggacctgcgctcctggactgcctgcggacactggctggctcatgatcacccagctgcaacgtgggaggctggcccgtgaggcggtagcagtggagagcctacctggagggcacgtgcgtggagtgcgatccagcagaatacccgcgacgaacgggaaaggatgaccgctgcagcgcgcggaacaccacaaaaggacaagactgtgaccaacatcccgtctctgacagtgaaggcaacctggaggtgctgggcctggggttataccctgcggaatatcaaaactgacctggcaggggaatgggaagaacaaactcaaggacagcgaagctgtggagaccaggcagaggagatgaaccgtca

SEQ ID NO: 572795 - DNA, 1012 bp, Homo sapiens
  misc_feature (35)..(36): n is a, c, g, or t
  misc_feature (38)..(38): n is a, c, g, or t
  misc_feature (64)..(64): n is a, c, g, or t
  misc_feature (69)..(69): n is a, c, g, or t
  misc_feature (95)..(95): n is a, c, g, or t
  misc_feature (108)..(108): n is a, c, g, or t
  misc_feature (123)..(123): n is a, c, g, or t
  misc_feature (729)..(729): n is a, c, g, or t
  misc_feature (966)..(966): n is a, c, g, or t
  misc_feature (972)..(972): n is a, c, g, or t
gggggggcgccctggccgcagagttggtattaaanngnttttcgaggcctggctcttgttatgntcaanattaccgtctatccctgtttgtttgngatacaccagtgnacgtccactttctanaagacaaagttatattacttaaacaaccaaagagatgaataagtggtctgaagagatgaataagtggtctgaagagattaagtgccttgcccgaggatacaatactactctatgaaggagctagaatttaaatcaccttgccttcttttaaataactgtgataagcgtgtatattttaatcagaaaaaacagttattggctgggcctggtagctcacacctgtgatcccagcactctgggaggctggagtaggtagatccttgaacccagcagctggagaccaggctgggggatgtgggggaaacttgtgtgtggcggctgtgccccctcagtccacgttgcggcggcgtgagtctcctcctcccccggcccgtccggggtcggccccgcgttgccctttcgccgccggggtcctttggcgcgcttccttcgccccgccgtctcgttttccccgcggggcgccgacccgctccccgcgtgccgtttggcagcctgcgcctccgttgcggagccagcgcgccggtcccgcctccccccgacgggcctgaaactcgtgggcatcttgcccgcccctccccctgtcttgatcacgccgcgttcgccccncacccgaaattcgcccgctttatccccaccttccgcctctccgcttctctgtttttttgcactccacatctcgcctcgccttattgtgttgcccgccgctctctcatatctacggttcgcctcctcgtcgtgctccccgacctcaggtacccatcttgcttcgcggcgcgctcattgcgcgttcaccagcgcccgcccacccatccactacgttcaccccccccgcttcgtgatttntgtcgngcgctttgccgcacgcccccgcgcaccctatcgtattcaa

SEQ ID NO: 572796 - DNA, 131 bp, Homo sapiens
gctcacatttagcactgccgagtgctgctttccacagtgccacccattcctggcctagctcttccaggatcagccaggctgtgtgcaatggcacctgattaaggcacagcatgtgcaatacaatgcatcaa

SEQ ID NO: 572797 - DNA, 101 bp, Homo sapiens
cgtcctttgaccactgtcttgtttcttaccctacttctcttatctttgatcgtatatgtctcataatgtgaaatatgatgagagtacttaggggcagcatg

SEQ ID NO: 572798 - DNA, 623 bp, Homo sapiens
  misc_feature (72)..(72): n is a, c, g, or t
agcgggagcgagcgcggggtgtttgggatgcggcacggcgagggggagcaggctggctcgggcgtagggaantggttttttgttttagctatccaggttgtgactggtttacataattacacgattaagccatcattgtaggaaaggcttgcaggagaaaaatgtcttaactggaggtctttgagacagaaaaaccctgcctcagcccttgggtcctgagagtcgcgtttcttctccccttcgcttaaatatgtaaaccagaatcattatgtttggttcatggaacggaggaaaaaaatccgtgtgcagggtcgagactgtcgtggcggaagccgcagcacccgggaggcaggaaaaggaaacctggacacaggcacgtatgagggaagacaatgtggagaggcaaggagaagatggccacctgcaagccaaggagagaggcctggaacacactcttacttcatggccctcagaaggaggccaccctgtcaacaccttgagctcagacttcagcctccagagctgtgaaaaaagaaatttttgttgtttaagcccctcagtttggggtaatttcttatggtggccctagccaatgaatacaggtcccaaataactcttcaaaa

SEQ ID NO: 572799 - DNA, 381 bp, Homo sapiens
  misc_feature (53)..(53): n is a, c, g, or t
  misc_feature (240)..(240): n is a, c, g, or t
  misc_feature (356)..(356): n is a, c, g, or t
  misc_feature (368)..(368): n is a, c, g, or t
ttcttttttgagatagggtcttgctctgttgcccaggctagagtgcaatggcngttctcagctcactgcagtcctcgcacctcaacctcctgagtagcacaggtgtctccaccacaccaggctaatttttgtatttttagtagagacagggatttgccatgtttcccaggctggtctccaactcctggggctgacgcaatccacccgctgtggcctcccaaagtgctgggattacaggtntgagccaccacctgggcccattgggtaagttttaatgtctccagggagcccttatagagccacttcattcttgaactttccccacagctgggtgaaataaattcaaagggagtganggggacagaggnctgtcaagaaggt

SEQ ID NO: 572800 - DNA, 847 bp, Homo sapiens
  misc_feature (72)..(72): n is a, c, g, or t
  misc_feature (533)..(533): n is a, c, g, or t
  misc_feature (656)..(656): n is a, c, g, or t
  misc_feature (699)..(699): n is a, c, g, or t
agcgggagcgagcgcggggtgtttgggatgcggcacggcgagggggagcaggctggctcgggcgtagggaantggttttttgttttagctatccaggttgtgactggtttacataattacacgattaagccatcattgtaggaaaggcttgcaggagaaaaatgtcttaactggaggtctttgagacagaaaaaccctgcctcagcccttgggtcctgagagtcgcgtttcttctccccttcgcttaaatatgtaaaccagaatcattatgtttggttcatggaacggaggaaaaaaatccgtgtgcagggtcgagactgtcgtggcggaagccgcagcacccgggaggcaggtggggagaaaaaacgggacctgctgccggggacccctcccgctttctggcagttttctattcagcgtcctcggctgtgagaaaacatcccagatgctgaaaccaatagtcttagcccagaatctcaaacgccgtggcaaagagggagtgacgacggcctgtggaaaaacctgaggagttntgggcttagcgccttcatgtagaggggacgtggaggcggggagggcgttctagggtcggctgcgtaattatacgaggcactggaaagtgatgggttagtgtccttggagtagacccctgggtnttattgaactgatctgaaaggctgggccctgagccacacaggngacctgtcaaacagctcaagcggaagatggggctcacgggactggacttctctctgcagccagctgtaattaacacaaaagcagaagagttgggtagatcatagaatgccagttttgaacatctttgggggacaaggcactcctggga

SEQ ID NO: 572801 - DNA, 324 bp, Homo sapiens
atgaaaacctaggatcatcttatgatgattacccaacagggcatccacgtcgaactccttcaaatccattttctccacaatccagtctgtcccggagaaggcatcctccttgactgttgttggcgggactgaccaacccatccacagccagacattcggaagagcccgacatcgccttgtcgctggagaacccatgaggtttgacgtgcttggacacctccaggtaaatcatctacgagacctaagctctcttcaggccccaaaaccgccgggtcgaacggggacatcaagtccccccccaacccctcgatgctccggacgctc

SEQ ID NO: 572802 - DNA, 209 bp, Homo sapiens
  misc_feature (27)..(27): n is a, c, g, or t
  misc_feature (33)..(33): n is a, c, g, or t
  misc_feature (35)..(35): n is a, c, g, or t
  misc_feature (115)..(115): n is a, c, g, or t
gacacggcagtcggcccgtccccggcngccgtngngatcgccccatcccagagcgcgtgcagctcgccgctcttgccgtaccagatcgagtttcccccctcgtcgcccttggganactggtcgttgacgagcaccgcgcaatgcagcggctgatgcagatcacccacgagatgcaggacgaaggcgagcccctcgaggcgctcgatcgc

SEQ ID NO: 572803 - DNA, 400 bp, Homo sapiens
gggaacagatgcagcagcaagataagacaccgtgatacgccgaggatcaaagctggcaacatagcctgggatgcaacgctggttcaacatacgcaaataaatcatgtaatccagcatataaacagaaccaaagacaaaaaccacatgattatctcactagatgcagaaaaggccttctacaaaattcaacagcccttcattctaacgaagtctcaataaattaggtatacatgggaagtatctaaaaataataagagctatttatgacaaacccacagccaacatcatactgaataggcaaaaactggaagcattccctttgaaaacgggcacaagacagggatgctctctctcaccactcctattcaacacagtgttggaatttctgtgcccatttcaa

SEQ ID NO: 572804 - DNA, 819 bp, Homo sapiens
aagctcgtcgactgattttttagcctgagtaggcctagaaagtgaactaatgctagcttttattccagttctaaccaaagaaaataaaccgctcgttccacagaagctgccagttcaagtattatcctcatgcaagcaaccgcatccataatccttctaatagctatcctcttcaacaatatactctccggaccaatgaaccatagaccaatactaccaatgcaatactcatcattaataatcataatggctatagcaataaaaataggaatagccccctttgcactttctgagtgcccagtagtgttagcccaaggcgaaccctctgacatccggcctgcttcttctcactaatgacgaaaaactaggacccccatctcaatcatatagccaagagtcttctccgctcagcataaagcgtaagccttcgtcctcacgtctcgtcaatcttatccagtcatagtgaggcagttgaggtggattaaacgcaaacccagtctacgcaaaatcttagcatactcctcaattaccgcacataggatgaataatagcagttctaccgtacaatgcctaagataagacagttcttaagtttaactatttatattatcgcgtaaggtactaccgattcctactacgtcaactttaaactccagcacacgagccgtactactatctcgcacctgaaacaagctaacatgactaacaccttaattcatacacctcctctcctaggagggctgccccgtaacgtttttgccaatgggcatttcgagaattcccaaaaaaatagctctgatcccccaattaaacatactc

SEQ ID NO: 572805 - DNA, 178 bp, Homo sapiens
tcttggacatcagcttactcagctaagtaaagtcatttaccatcatcacagtctacctgactgcatgaactctacctaactgcagtcctgcgccttcttctggattggaaaaccctgggggactgaatagtatccgctgtttcaagattgatcagccttctacaggagacgcttccgg

SEQ ID NO: 572806 - DNA, 400 bp, Homo sapiens
gagacagtggctctaagaccaatgtgcttcctgttcccaccacctcccacctcaactgagagatgcagagcccatcagcaggactgagcttctaccttggtcatccctctgaattccctcctttccacccacctccctttcctccagttgttaaattctgtccccaggatttctcacaagacaagcatgcctcatccacttgctttcatccccaattccagctcttcatctgtctcatgtctgagtactcttgtctccacgccatgagaatgcaggctttactttgcaattttataaaaagttcttgcatctatgactctgttcacagtcctgggctggctggcagccgggacactcagagaatctaaatgtgacttattacctctttcccaggcttctc

SEQ ID NO: 572807 - DNA, 258 bp, Homo sapiens
gagaggaggatctggcttgtgagcgtgagatcggatcagtcgcggttgtaaatgtccccacatagcagatattccagggtggcctgagttatgtaaatcaagtgagcaacacagcttttaatttcatggaggaatcaaagctgcacactggtattaaaactacttgatttgcgcacacagttgcatgcatggcaagctgtaacctctgggtggcattctcataggattgtcaccacctttcacctaggcaatattcga

SEQ ID NO: 572808 - DNA, 128 bp, Homo sapiens
ctgttctagaggatctcatcagtttacacaagtgtaatattattcaacgattaaaaagaagtgagctatcaagccatgaaaagacatgggggggcagggcatggtggctcatccctgtaatccgagca

SEQ ID NO: 572809 - DNA, 940 bp, Homo sapiens
gcggtggcgttcagctgcttcaagatgaagctgaacatctccttcccagtgcactggctgccatatgctcattgaagtgaacgatgaacgcctactacgtactttctatgagaactcgtatgggcacagaagttgctggtgacgctctgtgtgaagaatgggaacgggttactgtagctccgaatcagatgctgggaacgacccatcgaaggtcgccccatgtccgcagggtgtcattcgagccactgcgacgggttcggctcgcctacggagctaagcgggcattcctgctgacacgaccgaacggatgaactgcgagcaatcgataatgagaatgatcagcttagtggttgcgatggtatataccgatctcgagcgtcttcaaattgtctattgccatgaaaagatagagagggattatacgccgagatgtgatctgacttgtccatgtgacctctccagccatggagtacacccaacagcacgtcatcaatagatcttgtaacactattatccatactcaacgcaggaagattaccttgcggacacgatgtccgttggagagctgttgagatagaagaaaggctataaaaacctagcgactcaaaggcaggcgcaggattacagacgtggcgtgtcactccacgtgtattgagtcgagaaacctgtgcaggctttagctgctacttgtaccataggaaagtatgcccccgaaaatctcatgtaaggaggctctcaaaattgtctggtactttgttggagcagagagtactcgtaggggatcgaaagggaggaaaagtcgcaagcaggaaattccgggcaaagaccatgcagagtttccttcctccaaaaaaacgtttaagatctaaggttctggaaccaccggactctattgcgacattcggagttctaggcagaaatagaaccagccgtgaaactg

SEQ ID NO: 572810 - DNA, 197 bp, Homo sapiens
ctaggcacagtagatgtaagatctgaaggtggcgactgagttgccctgggctttgaatccaagaaagacagatattacgaccatgataagtgaaatagataaggaagggacaggaaaaatgaactttggtgacttgttaactgtgatgacccagaaattgtctgagacagatactaaagaagacatccgtgacagct

SEQ ID NO: 572811 - DNA, 134 bp, Homo sapiens
  misc_feature (24)..(24): n is a, c, g, or t
  misc_feature (111)..(111): n is a, c, g, or t
gaatgcttgggatcatccaggtgnctctatttataggcacctgtgttcaccagcagtctctctattagaatgcttggtgtgccaatgtttcttgaattagaagcctggggncacctaggtgtttctattataaa

SEQ ID NO: 572812 - DNA, 503 bp, Homo sapiens
  misc_feature (52)..(52): n is a, c, g, or t
  misc_feature (128)..(128): n is a, c, g, or t
gagggggaggaaaccgggttggtgtttgggatcccgacatgggtttttatanaaagaccaccacgggttatgcaggtggtttgggctgggcctttgggggcctcacaagccccggcctaaaatacagnttgggttccaattttggttttggggggggttccagttccttaaaccgccccagttcctccagggccggggttgtgaaaaagatcaaaacccgtgatgggaagggggggtttgggtcttttgaggtccggcccaagtgaaaagttgggggagcccctcccagcctacccctcttggggtgccccaaagcttgggaagggggcccttttgcagggtagccttgggaacaggaaaccccctttgggtttagcccttgcccctcaccccccctggggggttttttactgggggcccccccttgcccaggcccccaggtacaaaacaattcaattgttttttttttttggtccaaaataaacccccgggtggttttgcca

SEQ ID NO: 572813 - DNA, 383 bp, Homo sapiens
gcaggcagtccagacctgatgtggagacacatgggattttggaaatcagattttggaggaatgcatgtgacaagcgggactttcttcagagagtggtgcaccgccagacattttgcacatatgggaccaaacagaccaagactgtcgagactctggccgcccgaaggagactgctttggtactatggaacttttcttatgggacacgttctcctttcacagattctaaagtgtccagtgcattgggatgggttttcaagcaagggactcggccaatacgcatattagacctcttaaggagcagtcttccatcatgctgaattttgtctttcaagagctgtccctattgggcggggccgcaaggccaggcttttttctctaacc

SEQ ID NO: 572814 - DNA, 191 bp, Homo sapiens
ggtttccaggttttttcccaggtgacgctgttagcccctcagctggcggtgacaaccggcccagggtggcgcccccacaccccgcaaagctgtccaggcacagctccgtccccagcgctcatggtgttgaaactgtttgtcatgccccccggggtttgtgtccccccagtaataaacggtttcctgtcccc

SEQ ID NO: 572815 - DNA, 112 bp, Homo sapiens
atcctgagttaccacggtgaaacatcatctctactaaaagtacaaaaaaaacaaaaattagccgggccttggtgggcaggcccctggtagtcccaggcaactctggagaggc

SEQ ID NO: 572816 - DNA, 823 bp, Homo sapiens
cccccgcgagcgccgagatcaatgtatgcggcggcacccgggggggacgcttaaaagactacccccttctaggcttcctgcgaccctcacccctaccttccactttgggctttgcctcagccagccgctcctggaatttcttcttgaagaagagggcttgcagtcgctgctggtagtggtcaatcctgtagacaaggaggtcaatgtcactcttctctgggatgaacttgaggagctgctaagagcaggcgcaagtcacacaagcaactgggttccctttgatccaaagggctgagagggaacagattgggggaagaggtcacttttcctcatctgactttgccttggaatcccatgggacaatgactcctgaagaacacttaggcttttccagctgtccccacgaagggccgcgccaaggagggttctataacccttctccctacagaacgatatcatttggccgctctgccctcatcgggggtagcttctcaggcggttaatttgggtcgcggtagattcataatcccgacgccctgcctccggtcgcccgtcccgcggttccgatgagcgggtccagctcactctcgtgccgcggcattgggagcgcttaggcggccgatcgccccggggcacctttgaacccgcgcgccattgtccatgcataccccttgttgtcgcagtggtgggcggcagtttcacgctccgctcggcgggctgtaatgaccgaagctcgttgtgtctcgcggttgacggccgcctcccgatattagtgtgcccacttcaccccggtcacacgcccctctggtatgagcgcgcccgg

SEQ ID NO: 572817 - DNA, 168 bp, Homo sapiens
ttgtcgatgcccatccaaaggtggggtggcgaaagcggtatacgcagcggacttaaaaatccgcggagggtaaatccctcgtacgggttcgagtcccgtccccagcacacaaggtaggcattgtcgccaaggagcaatgatgtctaacctgccaagtactgagcgatt

SEQ ID NO: 572818 - DNA, 177 bp, Homo sapiens
  misc_feature (148)..(148): n is a, c, g, or t
tcttaaatccggttcgagcctacgcagcaagcattggtagcattacgttttcagagataatgcttaaagcagtatttgtaatagatacgtttacttattcagattctatttttcataaatctttatagaggaaccttaaataatttgncaaagaatttgttttcaagcctaggataa

SEQ ID NO: 572819 - DNA, 168 bp, Homo sapiens
ggctctgaaaaatcaggtgccctccctgtatggctctaaggacgtagctccatgagggcattgtgggggccagaaatgtgcacgatctgagctttctaccgtggagcattgatgctatgagttttggaaacgttcgctcttctgagcagacccctttaccagagcctt

SEQ ID NO: 572820 - DNA, 212 bp, Homo sapiens
  misc_feature (34)..(34): n is a, c, g, or t
cgtctggggaggctggttggcagggcagcccctncgggaccgtggctgggcgggggccgagcaagcgctcagagaagggctgctggggacaccagagacacggggccgtcacggcaggcttgggtgggggcagagcaagggacccgagaggggccgggacttgctcaaggtgatcctgcccgtcctggcagacccgtaagacataaccgcgg

SEQ ID NO: 572821 - DNA, 170 bp, Homo sapiens
  misc_feature (100)..(100): n is a, c, g, or t
tcgcaggagaaggaacctatacaccctttatagagctttaaatcgactgtagagttttgtggtcttccagtcccaaatgtttaattttccatttgcattntgaaatcacataactcatgtctgaaaagtccacctgacaagcatacctgctaccatatgcccttaaaaat

SEQ ID NO: 572822 - DNA, 263 bp, Homo sapiens
tccctgaacgcagcctgctgaggaccgccattgcgggcacgggtgtgaggtggctgtttaaattagctttgctgtactgggattgaagtgccatgaaacatcagctagagatgggcagctagtcgtgacaggcattttagtataggggtttggggctagaggcttcaaggaggctgttgctgcagacagccatataaataggggttggatgaggtcccttagagagtgtgtgaagtttcagatgacagccccagacagaccct

SEQ ID NO: 572823 - DNA, 133 bp, Homo sapiens
catggtcagatttgaactcttcatatcatcttgcacacatagcttgttaagatagttaagcgtgcatagttaacttccaatttacatactactgcttagaatttgggggaaaatatagaaatataattgacag

SEQ ID NO: 572824 - DNA, 147 bp, Homo sapiens
ccggaacagatagataatagtggtgagggtggtggtggtggtgatgacaatagttgtggttgtggtagcaatgatggtggtggtagtgataatggtgatggtgattatagtagtgatggtgatgctgatgctgtggtgatggtgatg

SEQ ID NO: 572825 - DNA, 1090 bp, Homo sapiens
agcgggagtgcgccgagcatggggctgagcctggtgtggtggagtgggtatctgcaggaggccggacgtgaactcccagcttagccgcgggcgcggggtacggggggctccgctgcgtgtggatcgtgcagcatgttgagcgcgtgtgcgcgtctcctggcggggcgtcctgctgcatggccccctcatgccccgatgggagtcgagtactctggctcttcagtgggccgtgaccatgggatgcgtgtggagggctaccatcacgtctcgcgcctaggtcccttcgctggggtgacgtggcttgctctggtcgtgcatgtgcacactcgtgacgtagtcccttgggcccagagacgcccgaagaatggacatggatatctgcgttgaaggttatcaagggcattgatggcttgttggagcttctcacgctcacgtgaaagcgcatgctgggggggttccaaatcgtaggcacctttgccacgcgtccaggaacgagggcgctttgatgagcgccgcgtgcaattgctggacttgtctgggatgcacacttacccaaggaaaccctttttacttttgtccctcgtaaagggaattgcatcccaacgttgtagagcaaaagcacaggattgcttggatcttctccaattctcgtggaaaccggaagtggcagaacgtgcacgtccctatcgggaagcgaattgccacgcacgtgcgaaaggtccccgctcagcaaggggggccgccttggtcccgaaggtacgacgatgggcattcgtcgcacggtcttttgtgcgaccacacaggtcttgggacgtcgttgcgttgccctgggaggctccagctcggcttccaagcatcgccatgctcgtaccgaaaacctttggttgcggggcttcaagggtagaataccttgtccttcaatggtgcttccctggaagttagcaatgtgtgacttgtcgtggaccaggacttcggaacatattgcctggggagggtgtgcaaggtcttggcatcccaagggtgggaagtacaggtgggtgggcattggggggagtcaatgtagggtgaatcctcctggaggttccagttg

SEQ ID NO: 572826 - DNA, 221 bp, Homo sapiens
gcgcgagcggacgcggcagcgcctctggtctcgcttttcttatttttcccccctttccccttctttttttctttctttctcccctcacctaaaatccaatagatgggtcccggaaagggagacgatacgagttaaaggagcatttgaaatcggtgtggtggtggtggttgtagtgtgtgtgggtggttctttgtgttgtgtgttggtgtgttgttgggtgt

SEQ ID NO: 572827 - DNA, 146 bp, Homo sapiens
  misc_feature (21)..(21): n is a, c, g, or t
gcaaaaggtgatctagagatnaacacctgttcatctaggcgtggcataggggacagaacgtagctgaatatctttattttattttatttcctttcagattcagttaaaacttatttccattcccttcctgtcgagtttattttccc

SEQ ID NO: 572828 - DNA, 132 bp, Homo sapiens
tcgctctagaggatcctgatgttatcccaacacccaacacatgaggtctgcacacacagctgcctggttgcctcggtgcactcgagctccagttacaaggaatccaagttctcaggatcttgaagactctgg

SEQ ID NO: 572829 - DNA, 142 bp, Homo sapiens
attcgcggccgcgtcgactacaattcatttataataactaacaagcatgaaacactttatggaggatacgacagaatatatagaactagaatgctgaaaactacaaaatgctatacaaaagaagtcaaagaagacctaaata

SEQ ID NO: 572830 - DNA, 1229 bp, Homo sapiens
ctcttcttttgtcggtcgccagccgagccacatcgtcgtcagacaccactggaggaatggtagaatggtcggagatcaacggactttggtcgtattgggcgcctggctcaccaggggctgcttttaacatctggctaaagctggatattgcttgccatctgaatgtacccccttcattgacctcaacgtacatggattctacatgttccagatactgattcgcacccgatgggcaaagttccagtggcaccgctctacaaggctagagaacagggaagcttagtcgatcaaataggcacaatccctatcaccgatctatcctaggggatccgacgatcccttccaacaaatcgaaggtaggggctgattgcgtcggcggcgtcgcatgttacagtcgtgtgagtcccacgtggcgctcttccaccaaccagatggaagcataggcgtgtgggctctcattgtgctgagcggtgggcacgccgagagacagcggtcgatctcatcgtctttgccccactcgtgcttgtgatgccctcgctatgttgcgtgctatggcgtgttgaactcatgaagaatgtatagagaagcgaggcctcataggactccatcgagcaattggcctccgtggagccagcctaactgtcgtatagcacccgctgcgccacaggtcgatccagtgcacaatctttcggtagtcgtcggaagggaactccattgaccacatgtcctatgccatctactgtgcacccagatagactgtgtgatggcccctccgggaaactgtggcgtgatggccgctggggctctccagaacatcatccctgccttctactggcgctgcaaggttgtgggcaagtcatccctgagctgaacgggaagctcactggcattggccttccgtgtcccactgcaacgtgtcagtggtggacctgaactggccgtttagaaaaacctgcccaattttgatgactccagaaacggggttgaaaccagccgtttgagggccccccagggcctccgggccttaattgagcccccagggggtgtccccgtagtttacaggggaacccatctctccctttagcacgggcgcgatggcccccaaaccttgtgacgcctcctggctccacacttgttgtcgacaccggggtgtctgcgtcagtgcccggtgtgactggtctcgccccacacgaaagaagtcctgtggttgcctcccactcactcttgtg

SEQ ID NO: 572831 - DNA, 358 bp, Homo sapiens
gatcgaaagaacagtgagtgggctagctttttagatttcaggtaccctcactaaggcacgaaggcttaagtagacaacatggagccttcctgtggcaggagagacaacagagcgctattatcctaaggtcaagagaagtgtcagcctcacctgatttttattagtaatgaggacttgcctcaactccctctttctggagtgaagcatccgaaggaatgcttgaagtacccctgggcttctcttaacatttaagcaagctgtttttatagcagctcttaataataaagcccaaatctcaagcggtgcttgaaggggagggaaagggggaaagcgggcaaccaacttttcccctagcttt

SEQ ID NO: 572832 - DNA, 81 bp, Homo sapiens
accgaggacacagccgtttattattgtgccacagggagtgacattgttggagccgatgcttttgatatctggggccaaggg

SEQ ID NO: 572833 - DNA, 1410 bp, Homo sapiens
  misc_feature (107)..(107): n is a, c, g, or t
  misc_feature (337)..(337): n is a, c, g, or t
gaaagcggctgcctttccgccaggctttaggcagttctcggagattaacaaataacacgagcggcgacgacttaagtgttcatcgtcgtgtggtaaacgaggcagcnagcctggtaagggcaagaaagttgtgcatggtcacatgcaatagacaatctttaggagaagaagatgagcggctcttcggctgcatgatagggcttccgccgaacagcctggtgtcccgagagaccacttgactaacctaggcggagtagtatggatggtaaaccacacgtaggacccctaatgtgagtgaacgacggtcgctctatattgactgaatgcgtacgatgantagaatttgcattcttatacgttcaatcaagatcacgactttcgtcgccacatgattcctcgatcacagacatctagaatatagacgcgtcatggaggacgatacacagtgatctgatcttctcgtgagaaacatgacttctcacaccacgttgataaccgaagagtctcttacattgtcttattaagcgacgaaagaacgtgagctgaggactctggaaacataaatgtattttccgacgagatgggctatcgcgataggaaggattttcacccagaagccatgtatgctgtctatctagatcgcacagagtcggtatagagacgcccgaaaatggtaccttatctttggtacgtccacattgtcgcaatatcggacccattactggcatcattctttcaatcagaatgaagtcagtgttccgtcgtgtcgggtaagagacaacttacagacagacggcaaaggtgaccctcaacagagacaagcattaccctgagccataagtcccgtgaagtacattctttacgaacagcggctggggtcatttccatatggaccgtatggtagcaatctctcgtgttccgtgataatccctccaattgtatcggaaggacagtggtgccacagttccacaatcaaggggatgttcttattcgttcagaattcgccagaattctattccgggagtgaaaccaaacgtgcgacaattgcagggcaccctgtgggcccccggtttttccccttaacaaatctagggggctctttcgaaagggagccatggacaatttcacaatggggggagacatgacaagggggcccccaacacccccgcggaaacagggtaacgggcgagaaaacgaccgcctcatacacagcgcctcggcaacaacacctggagagtcgcgagagacacaccacgcatagaagagggagagaaaatatgttagcgacaaacccatccacgacgagcaggtagccacaccacccgcgcggcggaccacacccgcagcccgaggtcgtcgtactaacaaaacagccagtggctagtataaacacaaaaacagaaatcgcgg

SEQ ID NO: 572834 - DNA, 876 bp, Homo sapiens
  misc_feature (2)..(2): n is a, c, g, or t
  misc_feature (72)..(72): n is a, c, g, or t
  misc_feature (102)..(102): n is a, c, g, or t
  misc_feature (115)..(115): n is a, c, g, or t
  misc_feature (169)..(169): n is a, c, g, or t
  misc_feature (184)..(184): n is a, c, g, or t
  misc_feature (190)..(191): n is a, c, g, or t
  misc_feature (195)..(195): n is a, c, g, or t
  misc_feature (215)..(215): n is a, c, g, or t
  misc_feature (228)..(228): n is a, c, g, or t
  misc_feature (236)..(236): n is a, c, g, or t
  misc_feature (246)..(246): n is a, c, g, or t
  misc_feature (259)..(259): n is a, c, g, or t
  misc_feature (263)..(263): n is a, c, g, or t
  misc_feature (726)..(726): n is a, c, g, or t
angtgtatttcccattcagaaaaattcaaagcatagaattgtttagcatatttgaagtgttttcccccaganttgagaatcaagtgactttcatcttgcagntggcttcaatgangtggagatgaagatcccttcctttccaaaataagatgcacattatttggataanttagggagggctcangaaggnnttangacttggaggtcttgttcantaatttggatgantttcaaangatgattcangagagcattcaangccntggccttaatgaagtaaaaagaagaaaaaaaattttttttaagtagaatttgcaatttttattttttcttccagagaagtttttcttctagtccttaacaacttccgctccttatatgggctttggtggaggtcatggggcagcacctgcaggtctacgttggggtggaggtgttcggtccttgcctgcttcatgagctcaattcctcaccactgtgctgtgaatggcacaactcacatggtaatgtagcttcacatccagcctgggaagtacacaggcgtcaaggatgctcatttcagaaacatcgctgactgctgcggcctctacgtttcaaatgatgaatttcttagtagccttgtcattgggcacacaacaaccacagttcatacagcaaatgggctgcagtgaacagtgcacacctggttgtggacctctttggcacgaccattgctgcttctttgtnatcttggaggtgcaggcccaagaaagatgaagtaaaaatcttaatttgagggtgactaaatgaatccttcaagaccacttaccccaaatccacattctgcagacagttcaagaagaaaggcaaggtagccatctatctcaaggggctatg

SEQ ID NO: 572835 - DNA, 120 bp, Homo sapiens
agtcagggctgcctgggtggccaggcctcgcaagaggctgtccttgacttgcgtgctggcttcctgtcagcggctctgctttaaccacttgtgccctccgtagttatgcaaaaaacaccc

SEQ ID NO: 572836 - DNA, 326 bp, Homo sapiens
gtaaattttttataaatgaatttcaaaatgttataatggggctgtagggtgtttttctacatcttcattatttgggcctaaaaccagtttttaataaaaaagtttatctttcctctttctgaaattatggctccagaaaaagaaaaaaaaaatcccagtcatggaatcacccatttggtaaaaaatgctgccaaaaatgtggcagtagctgtcctgacaaactccaactgtttttactatttgaaaaatcctaggctccccatgaaaggcaaaaatggatcagttttattcttttctaaaaatggttatctgtagtttggtagcca

SEQ ID NO: 572837 - DNA, 1865 bp, Homo sapiens
  misc_feature (52)..(52): n is a, c, g, or t
cggtgtgttctccccgggtggtgtgctgctgtgtttgttggtgctggctgancgcttgtggatgcgagcatgtcgttcgtgtgattgacctcctcgctggtggagttgttggtagttctgctttcggttatcatgacggtgtgtctgattcttatggtcctgcctgtgctttcttcagtctgctggattttgttttgggggttatgtctggcgtggactcttagatgggcccgaccttgttggtttgtgagggatggtgtagccctgcgtttgtgctgcgctccgcgtgatttgtggttcgtcatgcggtggctatgcagtgggggagctctccctgcttggcctgacttgtaccttgtttgatatgtgtagatgtgtgggcgtgggagttttactttggtcgtattgtctcttgtctagctatgggtcctgcgtttgtccgctcagggtgagatgcgtctgttcccctccttgtggggatgttgtttttttttttctgttcgtctgttgatctgtgttgttgatcgccgtcactggctgtgtggtacaccacctgctgtttgttgtgataatggcacctgtctggtgtctgtcggcccctctgtgtgttggtgggcggcactatcgtcttgtgggggggagcccgcgtttgtggttgttgtggacgactgcttgttgtttggtctctttgtgttgaatatggtggtgcctttcgtttgtctcccgcggttgtttgagtgtttgtggatcgttgtgtgaacgtggtggggtgtcctgcggtcacctcgtcgtggtgtccgctttttattagaagtctcgccgccttgtgccccccttctccgcgaaagaggaggtggtgacactatgtcactactagtgtgatgtcccccacaatgaggcgcgacaccaaaagaagtgtggtgtggttgggagaggagacaacgagattggtgtgtgatgtggcaccaggagagttgtggtgttgtgaaatatattgtccgctcccacgagagaagtgcttcaccaatagtagaggggccgccttctgttcggagagcacctctctaccgccaagagagaagagagtggcgcacttcgtcggaacaacagagatttgtcgtctgattaaaagatgagaggataacccctcccgcgtgtgaggtatataaacgtcttttgagagataattttctattgtggtgtgtgatatagtcttgtgattatacgcgctactgtatagtgtccctacaattgggccctacattgcgcgcgcccgcgagtacacacacacatttgtgtgtgtgcgcgcacagggctccacacgcgagatcttctccacacgtcgtcgcgcggggtgggagatatataggccacacgcgttgctgtttcctccgcacgcgctcggcgctgcttatgcacacagtgcgccacatagtgctctcgatttgagagataatgtcgccgccgcgcggcgtgtgcgcacaagcggcactatatatatagcgctctgtgtgttgtagaggtgtaatagataaataggatatatatatatagagcttgtcgctcgtgtgtgtgtgtggtgtctttttatatatatctctctagataagagatagctctctctgggtggtgagatatatataggccacgaccagcgttaccccagagatacccacgcccccctgtgataagaaagccctgccagtagtatagaaaaccctactcaccagtaggtaaaatatatatatcccatgcgtgcgcatatatacatgtgtttaatttgattagttcccttaaaggtctcatatccttttggaccacacgtttttttgtattaataccctgattataccggcccgtggaga

SEQ ID NO: 572838 - DNA, 879 bp, Homo sapiens
gcgtggtgtgctgtgtgtactcctaaactccctgctgcccctgttagggatgctgaggtgtttatgcagcagtgtgtctggtggtgtttgctgaatcctggtgtagagaccgatggatgatggtaggcagagctggaggttggggagggacttgtgtttgcttgaacaggtcagagagtcaaagctgatttgagctggcttgtgaattgtcatctatttgcttaatcgtctcgtttggcaacgacagtagatccttgctgtgagtgcagattgcccctacgttgggttttgtgtgcattatggtacccagtgttcaggcgaagagtaagtttgtggaggtggcgtagtgagagaagatagagagcggtctggtggtttatgggttgtggaaggatggtttcagagcgttgtcgtggtagtagagatgttgacgctacgttggcagttgctattttgcttttagttggtgaggtgtggaagttgccacaggtacactctttctggcttttacatgcccgccggtgttcccaatagcaccgcgcaatttgccacgcggccggtcgccagcacttcacccttaggcgcagccgcctggccaacggcggagaatagcacaggcccggtcgccccacccgcgccatccgtcacctggcacaccatctcgcgcctctcagcgctcgcatgtttagattcgaatcggccgcatggcgggtcgtggcttcatctggtgcgagtcgcgataacattcctggtcagtcagagagaggtcacaggcgattaggccgcctgcatgggcggagacattggtggtttgacgcgcctgaacctcgcgcgtgcgcgccgctatcgagagactgggcagacatttgcttttgcggc

SEQ ID NO: 572839 - DNA, 576 bp, Homo sapiens
acagagacccaccctcccaggcactgactcccttccctgtagtcccccagtctcctaattgcctactactcaggcagaccctatggccccctagaactccctcacccaagtgctgcccattccagtaggaaatcccctcacaagcccatgcccccagatccctcagatgtctaacggttcagagtctaagccccactccctttttccccaagccctgtaccccagcagtgcagagcctttgcctggccatggctgtccaggacctcagtccacaacacggctacgcaccggacaacgactactgcgcgcgcccacgcgacaccctgggcccaccgacgcgcacctcggcgggccccataccactgcgcgttggcccctcgacacactgaactattacccagatgcataccctgtatcactcccatagcaagcacttgcccaactactaccactgacacgcaccattcacgccgatgcaccccaaggctcataccgacaaaggtccctggcattccatagcccccaagcaacaaaaggctcatggaaccctccagaccaccaccgagcgccctccaa

SEQ ID NO: 572840 - DNA, 295 bp, Homo sapiens
cagctatccgggcatacagatgtacagaactgaaattcgaatggcgaggatggcaaccaaagcgcatacttctatgtacctgcagaacccaaattggcgtaagtcatcagaatcagcaggtatcaattacagtgagcccaaaggtacgaaaggtgtagcagcttcttcgacttcgtcaaatcttcaaaggaacctatgtgcagctcacacaggctacgcattaacgatgctgaggcatagtagattcatatattgcatgggggtacccacactgcaagtcagtaaatgcaactaa

SEQ ID NO: 572841 - DNA, 280 bp, Homo sapiens
actatgcaaaactattagtacacaaatgaatatacaccaaggtacatacaccaaaacatacacaaggatgttagccataatattaatagccctaaaatgaaaataccacctgtaatcctagcactttgagacggcgaggcagtaggactgcttgaggccaagagtttaagaccagcctgggcaatacagcaagaccctgtctccacaaaaaaatgtaataattcgccaggccatgggagtgcatacctgtaagtctcagcttctcgggcggatgaggcag

SEQ ID NO: 572842 - DNA, 715 bp, Homo sapiens
gaggaacgatatggtggttctctgaaggctgagtgccgtattgcagtgccctaggcaggcctagctctgttgcttctacactccattggtcaaacctgctcatatctcaccatttactatcagagaccgaactatcccctagaatggttgtgtgtagtgcagttcacggatacacttgtcatccgagccaacctattctggctccgagcgtctgcatctctctccatctggactatgctcagaagggttgtcacgatgttttgctcctggagtctgcttccgtgctgtcttatttgaatccttgctctgcgtatggtactattccctgtggtgcagccttcattcttcatgttcacggggaccttggatcgaagcttgttgactagatctatgttcatggcgtgatgccgtatgctggacatagctgcctagatgccagggcatttaaggcctagcattatcagactttatacctttgctgggctttgctatatcaactatcacgaatgtggagcagtctgacaaaccactgtttgcgcatgtcctgttgtgaagcgctgtaccttgttatgactttcagtagctttgaagcaacttgatgtctgcctctatatgtcctctgcatttagtctatgccatttaagctgcacaataaaggaagaaaataaccagataaagtccattggtgggacaggccttctactgcttgaactca

SEQ ID NO: 572843 - DNA, 87 bp, Homo sapiens
gatggggtgtcccctcccccccccggtgtcacccccgtcttttattttgtagagtgggggcggcagtggttaaaaatgttctttcgg

SEQ ID NO: 572844 - DNA, 524 bp, Homo sapiens
  misc_feature (485)..(485): n is a, c, g, or t
ccagacctgtctcacactaaagcatgtaagaagtgcctttgcctcctgccatgattctgaggcctcctcagccatgtggaactagctgtgtaatattccacaacccagaggagcagcttgaagccagctaaactgtcattggttggacacagtgatcctcgggtctcttgtgttttcacatgtcttgggaacagaagtgctggcagctttggtttcaggccatctttccaaggaacgttgtctagcaaagaaacttgcaaggtacagatagtgtctccctcaggagcagaggacaggatggctttctttccagtataataaagacagtgcctccttccaggacaacggtttggcagatttgcttgataaaggttggggtttgtaagcttggggctcctcagccatgactgaaacgtactatgagcacggcatctaccgggctgttccacatcctccctgtgggactaggggccagggcaatgggnatcagtgcagaaataaagctcatgctgtttgctctgaaa

SEQ ID NO: 572845 - DNA, 141 bp, Homo sapiens
caagataagggctttagtatgttgctcggactggtctgaattcctgggctcaagccatctgctgcctgcactcccaaagtgatgggattacaggcctgggccactgtgcctagggccgaacatctccactttctgatctca

SEQ ID NO: 572846 - DNA, 414 bp, Homo sapiens
  misc_feature (145)..(145): n is a, c, g, or t
  misc_feature (353)..(353): n is a, c, g, or t
  misc_feature (369)..(369): n is a, c, g, or t
catgcctgtaatcccagcactttgaggggctgaggcgggtggttcacttgaggtcgggagttggggaccggcctggctagcatggtgaagccccgtctctactaaaagtgcaaaaattggctgggagtggtggcgggtgcctgtnattccagctgcttgggaggctgaggtaggagagtcgcttgggcccgggaggtggtggttgcggtgagccgagattgtgccactgcactccagcctgggtaacagagtgagactctgtctcaggaaaaaaaaggttagagcccagaaacctgtattttttacaagcgtctcagttcagaagttcattgttactaaaacaacttgtgagnaccattggggcatggnccaattaaagttgagtttgatccattttttcagttccctattttt

SEQ ID NO: 572847 - DNA, 380 bp, Homo sapiens
agtcccttccctcttactaagagtctgtgaacccaggagcccctcgctctggcaagatgctatgactaagacgtgacaaggcacagtggctcatgcctataattccagcaccgtgggaggccgaggtgggaggatcacttgagcctaggagttcaagaccagcctggacaacatggcaaaacccatctctactaaatatacagaaaaattagccgggcatggtgttgcatgcctgtagttcccgctacttgaaaggctgaggcaggaggatcccttgagcagggtgagactacagtgaaccatgattgcaccactgcactccagcctgaatgacagtgaaaccctgtctcaaacacacacacacacacacaaccagtccc

SEQ ID NO: 572848 - DNA, 165 bp, Homo sapiens
  misc_feature (20)..(20): n is a, c, g, or t
  misc_feature (25)..(25): n is a, c, g, or t
agcagaaactgagagtagantgcanttgaacgggcctgaagcgcgtacacaccgccgtcacctcctcagtatacttcaaggacatttaactaaaaccctacgcatttatatagaggagacaagtcgtaactggtaagtgtactggaaagtgccacttggacgaac

SEQ ID NO: 572849 - DNA, 359 bp, Homo sapiens
  misc_feature (8)..(8): n is a, c, g, or t
  misc_feature (11)..(11): n is a, c, g, or t
  misc_feature (85)..(85): n is a, c, g, or t
  misc_feature (94)..(94): n is a, c, g, or t
  misc_feature (129)..(129): n is a, c, g, or t
  misc_feature (242)..(242): n is a, c, g, or t
  misc_feature (355)..(355): n is a, c, g, or t
agaccagnaanaatcctttacagctgctaggcttccttcaatccaatcaagttgacacttaatattaaccatcacaagcctcttngggaactcnaggggctcatggctttgtgattgaaatagcatcantcaaagcctgacactgtggaaagatacaaacgtgtgtggacctggttatctctggaccactggtggtttgctgggggctctcgggcccctggccacaggctaaaggccgcacngtcggcctccttgcctccgaggcttccggacccggaccgagccactactggcctctttcctccccagcccgcagatgggtcatcatgggactttgccctgtgatcgtggggtngtaa

SEQ ID NO: 572850 - DNA, 238 bp, Homo sapiens
cctaagttgaatgctccggaaactcgttggcgcgattggacctgcatgaactctacaagtacatcaacaagtactactgaccagatcatcactgccctggaggaggatggcactggaccatgtagatgcagctgggctatctggctccatgctgattgcagcatgttgtggaaaacaatggtcacaggactctactaggaacccagtgaatgccactggccttgcttgtatgctttca

SEQ ID NO: 572851 - DNA, 325 bp, Homo sapiens
ttttttttctttttggcggggggacgagtctcgctcgctctgtcgcctagctggagtgcagtgacataatctcggctcacggcaacctccgcttcccgggttaagcgattctcctggctcagcctcccaagtagctgggactacaggcatgcgcaccacgcccggctaattttgtatttttagtagagtactgggtttgaacgtgttggccaggctggtctcggactcctgatctcaggtggtcacccgccccgcatcccaaatgctgggattacaggcttatacaccctgcccgccaagatcatgtttttatttaagttattaa

SEQ ID NO: 572852 - DNA, 160 bp, Homo sapiens
gtcgtattagaggatccccccgactagccgacagcaggcgagcagagtacagccccaccccaggaggcagcaggacggggctcgtctggatccccatgacggagcgcttttcctccaccacctgacaagccgacagatccccctgtcgggctagtcgggg

SEQ ID NO: 572853 - DNA, 471 bp, Homo sapiens
  misc_feature (389)..(389): n is a, c, g, or t
  misc_feature (411)..(411): n is a, c, g, or t
  misc_feature (438)..(438): n is a, c, g, or t
  misc_feature (457)..(457): n is a, c, g, or t
taaagaactgtcaaaactcaacagctaaaaaattctaattagaaaatggagcacatgaacagacatttcactgcagaggatataaaaatggcaaataagcgcatgaaaagacatgaaaagacagtcaacagcactagtcactaggggaactgcaaactaatactacaatgagatatcactacatagctaccaaaattgctaaaataaaaaataatgataacaccaaacgctgacaaggatgcagataaaccgggtcagtcatacactagtggtgggaatagaaaatgggaacagccactccgcaaaaccatttgccagtttctcataaaactaaacatacaactgccatactgaccctcaattgctcctgggctttattacaagaggantgaaaggggttcacacaaaaantgtggctggatgtttcttttcgttttnttccttatgtttcaaaaantgggggaattcggt

SEQ ID NO: 572854 - DNA, 108 bp, Homo sapiens
ggattacaggcgtgagcccccgcgcctggccagggactatactctttttaaaatagacatttgtggggctcacccaatatatgaaatagtaccctctaaaaaaaaaaa

SEQ ID NO: 572855 - DNA, 161 bp, Homo sapiens
tatcgagcaatacattgacatgatcagatgggtgagtacagccccaatttcaagagccactgcaatcctcttactatagtcacacaaagatccggaagtagtgccaccacatccacgtaaactcctccccactgtactccactgtgtgtgtagtaagagca

SEQ ID NO: 572856 - DNA, 254 bp, Homo sapiens
  misc_feature (83)..(83): n is a, c, g, or t
tttataaaatagaaaaaaaattaaagtatattgagtgtgctttacacattttgagtgggctgggtgggtgaatttaatattanttcaaataaacattgttatttaaaaaatgctgagtacacgattaagctgaattttgttttccatcagaaaaagaacttcaggagtatataatgggctacaggggcttcccatccaaaacactgggggttcatcttttgggtcttagaccactcaggggcttcttttttagt

SEQ ID NO: 572857 - DNA, 952 bp, Homo sapiens
tctctctccctgttaagatagaagagagagagcagcacagatagacaagagagaaccagagaccaagttggcggtcactggtgacaacctgatgtgaccagaggattggcgccggggtcgtacacccgcgcaaaagttttgccgcagtccattagggtcgcgggccccccaagggggccgtctctctggccgaggatgatggtccccaaaccataccgccatggtcgggcaatccccgggccaacatagggttcccagcccggcaaattccaagtacgtccctgcaatacgcgggtgaacccccaccccctcggtttggaaagggacatacataggaattcccagggttcgcaaccccacagggaggaaacagcaggtctgccccccacgatccgagggcaggatttaatggggaacatggacaaatcacaacatgcgagcagattgagccgactgcgaaacgcggccccggcggtcgttcccccggcgagtggaaacaaccaacaattgggagaccgcgccagagacaacagggataatccggaggcgaaccacaaaaaatagggggctgaaagaaaccctgctgacagtgcccgcagatgcacagcagatcccccctggggcttattggaccaaaagcagtcgcgcagtcgcaggatacacccacgtcctgagaactttatcacgcgaggttgatacgccgctcgaccactaggcaaaagggacaacacgcgcctcagcagagaataaaaattgtctcggaaactctcccacgtagtccgcccaacaccggggggcaatgaccggcgggcttcaacgcaccaccaccataaagcacaggagagaggtccgccctcctgccaagaacatacggcacaacaaatccccgccggggaaacccaaaggacctgcaagaccctctcggaggtccttggccggacaaacaataaca

SEQ ID NO: 572858 - DNA, 112 bp, Homo sapiens
  misc_feature (78)..(78): n is a, c, g, or t
  misc_feature (83)..(83): n is a, c, g, or t
ttcaatgtgccaacaccagtggggagcccgcagccttatgtggcagcgtcaccacaggagttgtgggcctaggagagnctttngacctgggagccacacctaggagcaaagt

SEQ ID NO: 572859 - DNA, 413 bp, Homo sapiens
tcatgagacccacaacaaatagcccttttaaacggtaatccaagcctcacccccctattaggcctcctcctaacagcagcaggcaaatcagcccaattaggtttccacccctgactcccctcagccatagaaggccccaccccagtttcagccctactccactcaagccctatagttgtagcaggaatttttttacttatccgcttcccccccctagcagaaaatagccccctaatccaaactttaaccctatggttaggggctatccccactttgtttgcagcagtttgggcccttacccaaaatgacatcaaaaaaattgtagccttttccccttcaagtcaactaggactcataaaagttacaatgggcatcaaccaaccccacccccccaaaaacagggtttgttaaga

SEQ ID NO: 572860 - DNA, 367 bp, Homo sapiens
ctctctctctctctctctgtctctctctgtctctctctctctctatggctgaggatctcattgtcacgaggagcctgtcggtcatgctctcgatgctgagcgcctgcctggccgtgagcgctagacctgtgccaacgacagacgacaacattcaagtacaggccacctgcgcctgactgaacaatatcatggacaggatgacagataacacgctggtgctgggagagggcgctacagaggcggagatcagcatgaccagcactcgttggcggaaaggagtgtgtaaggcgtctggaacttatgataccacagatactgacggtaagtctcactatcccagatcctcatggaacatatcctggtcctt

SEQ ID NO: 572861 - DNA, 321 bp, Homo sapiens
gggaaatccttggggtattttaaaaggtgacatcccacctaagtttaatcattggtctctaaaaagtaaatttcaaatttttggggttaatcacttcaaatttggatagcaaaaaatgggggcttgcttacttttaaaaactggggttaagatataggtagtgtttgaacggccctccttaaagtaagttccaaatgtaaaaccctccttaagttccaaatgttttccgctaatagtttgtcctaaagcctttgccattcctaataatcgttttgtaataattgctgtatttctgtgtaataaaatttaaaaataaattta

SEQ ID NO: 572862 - DNA, 408 bp, Homo sapiens
  misc_feature (403)..(403): n is a, c, g, or t
ctaatgtagatagtctgaaattctagcctgaactttgtcttgaatttcttttgtaaaatttctaaaagtaataataaagccctttccttcatttgttccttcctttgttctttccttccttcattcattcgttcattccttccttccttccttcattctttccttcctttctcctttcgtttcatttgttcactattcttgtgctggtcacagtgctgtaagatttcatttttattgcttcatattctctttttttttttttccttttctttttttattatactttaggttttagggtacatgtgcacattgtgagggttagttacatatgtatacatgtgccatgctggtgcgctgcaccactaactcgtcatctagcattaggtatatctcccaatgctangcctg

SEQ ID NO: 572863 - DNA, 283 bp, Homo sapiens
ggataaagaaagctctataacaggtgtaggctgtatgccacttggaacataggatctagcagatccagtggtgcttgcaggttcagtgacagataggaatgcatttggagacatttgcagctggcatagatgaactgcagcacagacctttaggattttggagcacagctctgccatcatctgcagataagtactctccttttgagagacagctctttgactgctactgggagttaggagaagccaaacacttgaccatgggctatcaagttaccacacaacc

SEQ ID NO: 572864 - DNA, 157 bp, Homo sapiens
ttttctggacaaattaaagaaattcacctttgggcacgtccacttctatatttggacattttcatgtggtttctggggacttctctcttcttcattcctcttgggttttttcctgggttatttttacattagtggggcaattttaaaaggtcctgag

SEQ ID NO: 572865 - DNA, 508 bp, Homo sapiens
  misc_feature (11)..(11): n is a, c, g, or t
  misc_feature (207)..(207): n is a, c, g, or t
cctcaccctcngcggtagtggttctcctgcttcagctccttcagttctggactgccattcatgaccacccaatgcagtaatttggtctatttttttggtacagacgggggttctccgtgtgttcaggctgatcttcgagctcctgacctcgagtgatccggacccctccgcctccctgggtgctgggattgcaggcgtgagccaccngcggccccggtcaatttagtaaccaggaaggaatacatctgcctggcgtggtgcctccccccttgtgatcccaggactttggaaggccgagtgtggcagatcgcttgagcctaggagttccagaccgcctgggcaacatggtgaaacccggtctctgttttgagacggagtttcacccttgttgtccaggctggagtgcaatggtgcgatctttgcccaccgcaacctcggcctcccggatttaggtgattctcctgcctgggcctccctagtagctggggtcgacgcggccgcgaattta

SEQ ID NO: 572866 - DNA, 984 bp, Homo sapiens
  misc_feature (807)..(807): n is a, c, g, or t
  misc_feature (836)..(836): n is a, c, g, or t
  misc_feature (840)..(840): n is a, c, g, or t
  misc_feature (845)..(846): n is a, c, g, or t
  misc_feature (866)..(866): n is a, c, g, or t
ggggggcggggaatccttccgcccttcttaggaggggctgcattgcagggggagagtgaactgacagactcagtcactgaagagggaaaaggagtgagaagacaaagccgtcaaagccccaacagctttgtatttctccagcccggcgcagaccccggagctcccgaggcactccctccatctttggaacacgccagtaattgattgataacaggaagctatgagggaccctgtgagtagccagtacagttcctttcttttcctggaggatgcccatcccagaactggatctgtcggagctggaaggcctgggtctgtcagattaccaggccacctacaaaggtcaaaagacagcagcgttgggcaaacatgatcgggcaagcaactgcagcagaccaggagaaaaaccctgaaggtgatggcctccttgagtacagcaccttcaacttctggagagctcccatgtgccagcatccactccttcgaactggacttgctctaaggccaagacttctctctcccatcaccttgccctcatggtcttccctctcaagccccttcctttccactcctttcccattttaaatctgtgttctctcccctaatgtgttggttggtgctgatgaatctgccagagtgaggtccatgtattcattaatctatctggctactccatttctctcaaaaagcctcaagtcacaaagtaaatggtcaagcaatggagtactgggtcacagggattcctcttttcccccaaatttaatcagaaataggctgtgggacctgggagttgtctggtgtgcacanggcacaccggttggcgcataaaaaggcanaagnctacnncaatctggccgggacacaantcttaagggggagcccaggatggcgtcgcacacagttacagaagaatcactgtgcccatttcaaccaggggcagcaatacacagaaattcactcatcgtggtggtcacatacttatga

SEQ ID NO: 572867 - DNA, 1040 bp, Homo sapiens
  misc_feature (767)..(768): n is a, c, g, or t
  misc_feature (779)..(779): n is a, c, g, or t
  misc_feature (801)..(801): n is a, c, g, or t
  misc_feature (810)..(810): n is a, c, g, or t
  misc_feature (845)..(846): n is a, c, g, or t
  misc_feature (877)..(877): n is a, c, g, or t
  misc_feature (923)..(923): n is a, c, g, or t
  misc_feature (928)..(928): n is a, c, g, or t
  misc_feature (943)..(943): n is a, c, g, or t
  misc_feature (947)..(947): n is a, c, g, or t
  misc_feature (974)..(974): n is a, c, g, or t
  misc_feature (976)..(976): n is a, c, g, or t
  misc_feature (1003)..(1003): n is a, c, g, or t
  misc_feature (1019)..(1019): n is a, c, g, or t
  misc_feature (1032)..(1032): n is a, c, g, or t
  misc_feature (1035)..(1036): n is a, c, g, or t
ggggggcggggaatccttccgcccttcttaggaggggctgcattgcagggggagagtgaactgacagactcagtcactgaagagggaaaaggagtgagaagacaaagccgtcaaagccccaacagctttgtatttctccagcccggcgcagaccccggagctcccgaggcactccctccatctttggaacacgccagtaattgattgataacaggaagctatgagggaccctgtgagtagccagtacagttcctttcttttcctggaggatgcccatcccagaactggatctgtcggagctggaaggcctgggtctgtcagattaccaggccacctacaaaggtcaaaagacagcagcgttgggcaaacatgatcgggcaagcaactgcagcagaccaggagaaaaaccctgaaggtgatggcctccttgagtacagcaccttcaacttctggagagctcccatgtgccagcatccactccttcgaactggacttgctctaaggccaagacttctctctcccatcaccttgccctcatggtcttccctctcaagccccttcctttccactcctttcccattttaaatctgtgttctctcccctaatgtgttggttggtgctgatgaatctgccagagtgaggtccatgtattcattaatctatctggctactccatttctctcaaaaagcctcaagtcacaaagtaaatggtcaagcaatggagtactgggtcacagggattcctcttttcccccaaaatcttacanngcaactagtcntacttggtcacctagagcactnacactcaangagactattttactcatatacactcatcatcttanntctattctctcagcagtacacaatatctcanggtatcaactgtagttaattagtactctcaacagtatctaagctantatantcttcttttttactncttnatcttttactagtatagagtgtagttnangagtaattagcaataatgtaatattanattgagtctatctttnaacgttcctttanctnnctta

SEQ ID NO: 572868 - DNA, 434 bp, Homo sapiens
tcctcaccattcagagcgggggatgcacctgtgtgccgatgtctgcgccatcgcgcgtgataggagcctgggccacccagaacgctggcctcacccttacccaagtttcagtatacccattctggaataggacaaatctgcagacaaaagcaaggatgggaataaaggagctgaataatgcaaagcacacactccatttaattatgtgcagagagaggacttatctatttaagtccatgaaatattcgcacaaaaaatcatgtattgtgccacacaatagtcacacaaattgccagatgtgacacatgattcgattacacatcaaatacaatcctagggctacaaactgtagcaacaccgttgatgggctatgagcttgcgctaccgtgagacccatttcggccagcttttacattattactatgcgcagacgc

SEQ ID NO: 572869 - DNA, 483 bp, Homo sapiens
  misc_feature (414)..(414): n is a, c, g, or t
  misc_feature (452)..(452): n is a, c, g, or t
ctgctccgcccctctctggaccccatgtgatgggaggatgtgctctcctgtgtgaattaaggaaaggactcgatggtgtgtggggatggcaagaaaccgagatggtacaaagagcactgtcctgagttggcagtccttgctgccactcccagctgcccttcacccagctctgctggctttgggccataatgtcccatctttggaaatcagagccagattgaatgattcctgggggccttccagtttttctagtttatgaatctgtgaagtagagcccacatagagaagggaaggtttcaccctagttaccaagcagttttgacttagccctgaagggccacgggaatgggagattttggggttgaggaatacctgcttatacttttaggcagaggaaggacagagcagagaggnggaatttgaagatgcaaaagagacggtaactggcaggngcaccatggcgggtagaaagccaagggttag

SEQ ID NO: 572870 - DNA, 230 bp, Homo sapiens
ggtcgacaagtgactaaaattttgaatttcttatagagaaatatctgtgaggcagggtgtggtggctcatccctgtaatccttgctacttgggaggctgaggcaggaggcttgcttgagcccaggtgtttgaggttacagtgagctatgatcatgccactgcactctccagcctgggcagcagaaagagaccctgtctcttaacaaaaacaaaaaaaaaagtcgacgcgg

SEQ ID NO: 572871 - DNA, 204 bp, Homo sapiens
agagatatatgcaatctggtagtccattaaatgagagttacacttaaaatattttagttcttttaaagaaaaagtctccatgtgctatttgggaaaaccttcattgcctaaagacccacttgcataattaaggcagatgatgatgatctttatatatgcgcacacacacacacacacgacacgacgacacacacacacactcta

SEQ ID NO: 572872 - DNA, 537 bp, Homo sapiens
  misc_feature (2)..(2): n is a, c, g, or t
  misc_feature (88)..(88): n is a, c, g, or t
  misc_feature (93)..(93): n is a, c, g, or t
  misc_feature (96)..(96): n is a, c, g, or t
  misc_feature (141)..(141): n is a, c, g, or t
  misc_feature (148)..(148): n is a, c, g, or t
  misc_feature (156)..(156): n is a, c, g, or t
  misc_feature (179)..(179): n is a, c, g, or t
  misc_feature (187)..(187): n is a, c, g, or t
  misc_feature (215)..(215): n is a, c, g, or t
  misc_feature (253)..(253): n is a, c, g, or t
  misc_feature (280)..(280): n is a, c, g, or t
  misc_feature (295)..(295): n is a, c, g, or t
  misc_feature (301)..(301): n is a, c, g, or t
  misc_feature (310)..(310): n is a, c, g, or t
  misc_feature (316)..(316): n is a, c, g, or t
  misc_feature (321)..(321): n is a, c, g, or t
  misc_feature (327)..(327): n is a, c, g, or t
  misc_feature (370)..(370): n is a, c, g, or t
  misc_feature (402)..(402): n is a, c, g, or t
  misc_feature (436)..(436): n is a, c, g, or t
  misc_feature (440)..(440): n is a, c, g, or t
  misc_feature (453)..(453): n is a, c, g, or t
  misc_feature (468)..(468): n is a, c, g, or t
  misc_feature (470)..(470): n is a, c, g, or t
  misc_feature (476)..(476): n is a, c, g, or t
  misc_feature (518)..(518): n is a, c, g, or t
tnttttttggggaagttcaaccttaacagaggtgacaattttaaaggttggtttaagaaaatagaacctgaggggaattgagacggangggtncantgcaagaagggttttgtgtgtgtggtttttttgtgttttgttaanttaaaantgtctttntcgcgcgtgctcctttacacganttcaaaanctaaccgaaaactcggaggaaaggtgcntgttaaactgctgggaaaacgggtttgttggtttcgcncttttatgtattttcccactacgccgnacaattgcggtgtcncgggcnaactcgaantggcgngactncgaacnacgttttgtttttcttttgtttttggggggggtagtggtattngtgcgcggccttcttttttctttttattgctntttatttggttggtctggttgggtcttcggtggntttnatccaagaagttntccagttgttctatnanaattcnttttttaaaccttgatgcttctttaatgacattttgtaaaantattagtcttgtttgtaaa

SEQ ID NO: 572873 - DNA, 107 bp, Homo sapiens
cctccagggacgatgtgtctctccaggtctgcacccaccttgggacgccctaaagtagcaaggcgggagccgcttccccagctcagagcccctgccccaccccgcct

SEQ ID NO: 572874 - DNA, 200 bp, Homo sapiens
tttggcgtgccgaacccagaaaaggtgggctgtaggaactgaggacggaacttagggagaaacagctaggggggaggtagggcctgggggagcgccccttgccccaatgagaaggagccagaacccctggatctgcatgcaaggcttgctccaaatgcctcgttcacagcaggcccatcccacagcccgcccctggtgcg

SEQ ID NO: 572875 - DNA, 967 bp, Homo sapiens
ggagagaactagtctcgagttttttatattttttttgggaagccccggcacacgggccaaatctgcagggcccggagcagggcgccttcgtccacgaatccctccaggggcacagttcaccacacgcacccccttcttgcacggggcaaaggtgttgtcattcagcaagcctgtcgtggagggcaggaaaggcgtgtgcacaggtgatgaaatcacagagaggccagatctcctccaggggcagcgtgattgaacacccaaaggaggccgaaacctctgtggggacacgtgagtggggctcaatacccttattagtctttcatcccaagaggaacgtgcatccgggatagcataccgtcttcttcccaatcacgtggcccgaggccagagaaattcccgagggctcgttgaccagttcagactcgtgttcccagtgaaccttcttgcgcgctacccattgtgccgcgatccttcaccgaaagaccgtcgaccgtggggaaactcgtcgcctgtgcccaagggccccattgaactcatttccacaaaaggtgacgtccatgacggacacatgaaggcatagtaccccatggggggagtgtcacataacccaaagatgcccattcctttgaatagcgggacctccaagtattcccaacaatgttggggtcccaacaaccccgtggggttgcacaaagcccctgtggcccccacacacaccgtggggagtactaacatacagcacgtgcggatgcagactggacccattacaagaggggcgacaccccctatggggtgggccaccaaacggcgaacacacatataaagggcgcgctctgaacaaacggtcctgtggcacgatctccaggcctaatcgagggccaccaccgcatatggccaaaaagcggtacaccggcttatatgcccaacacaaccctgcggaagcccctcacaatctgtggagaagaga

SEQ ID NO: 572876 - DNA, 180 bp, Homo sapiens
ggggttgtcggggatgctgtggagacggtgaccagtgatgccctggccagacttggaagaactcggcggcactaccatcaaaggtgatcccaacggctcccagttctacgagatcctgaccgacccctcggacgacaccaagggcttctttgaccctattactatccatcctcatcctag

SEQ ID NO: 572877 - DNA, 1112 bp, Homo sapiens
  misc_feature (172)..(172): n is a, c, g, or t
agcggaggacgtcttcaacacggtgggcgccgacatcatccagcatgccttctaaagtcgtctgtagttgggaacgcaggagcagcggaaagagctccgttgctagcaaagtccttggtgtgggagggacctgcttcccagaggtactggaattgtcacccggaggaccatntcagttctgcaactggtccatgtttcacaagaatgatatagacggtaataacatgtaggacgaagaaaatggagtggaagcagaagaatggggtacatttcttcacaccaaaaataagctttacacggatttcgatgaagttcgacacagaacattgaagaactgaagacaggaagagaacttctctaggaatagtaagtaacgggacgtaagccctgaaccagattcatcttaagattttttcagccaacgtagtcaattggacacttgtggatgtgccaggaatgaccaaggtgcctgtaggtgatcaagctacggctattgagcttcgaatcagagagctcattcttcggttcatcagtgatcctaattccattatccgtcgctgtcactgctgctaatacagatatggcaagcatcagaggcacttaaactttcaagagaggtagatccagatggtcgcagaaccctagcttgtaatcactagagttgatctcatggcatgcggggtacctgattgccatggctgtttttcgaagggaacggggtaatcccaggtgcaatttgcgatattcgggagacgtacaggagagcccataacatttacaccagcaacaagggcaggagaacccccgagaaaaatactcttctcaaaaattttccggtgggccaagaaagcggcacagcgtcgcgggagatctccgagggcgtgagcccacacacgcagtttctcacaagtgacgacaaatacgagtagcgaggtacaaactcaaataacgacgcaccagtaaaactaccccaactacacaaatacaagaaacaacgtgcactcaacaagaagacgagaacatatctgaacaagacacccaaacatcgaactcctttgcttcttgttttctcttgtcttctcctcgccacttacacaacagcagaacaaaag

SEQ ID NO: 572878 - DNA, 105 bp, Homo sapiens
tccacacaggagagaagcatacaagtgtgaggcgtgtgggaaatgctttacccgtattacagatctgcatattcatttcagagttcacactggcttaagttagca

SEQ ID NO: 572879 - DNA, 2408 bp, Homo sapiens
atcatgtaatttcacatatttcgcagaataatcttgggaaatattattttcatccgttttctgtaagtaacaggacccagcaagagaccagggtccgtgagggccttgtgcagggagggcccttgaaatcagggcccccagcagctgcccacgctggagcctctcttgtgttctgggtgcacgccatgacggtgctgataggacacacaggtggcccagagcctcttactacgtcaagacagcgggagatgcatgcagtagcaagtgcacagaaagtgggcactgggtggaaagtgttgctttataaatagccagatctcaatcatgactaagaagaatgtagaaaaatgataaaattaccagcctcaaaaccttggtgcgtcaccgggttccccacttcagctggctgccctagctgcactgtacagctcattactggaacgtcgtccaggcctgtcatatgcagagcccttgggactcacaagacgctcaaatacttaccatcctcagtctgattctttcatataaacttgcagtcgtttttgtgaaaagaaaaaatgtgtctgaaatatgagaccaaaaataagcttaaatgatgagtgatggcaaattggggaggcagtcagttgactcaccatgcagtggaacgacttgctctctcactgctgcaggtgggcacactacgagaattgctcttctgtgtcacctggttattgtgttttttgcattaactgaggacagaaagggaggaaaaatctctttttgtgcacatactcctttgaattgtatgtttggctttttttgttttgtcaaaggttgcaaaacttcctcaagttgttcaacagcaaacacccgtggccagcatccagcaagttgcctctgcttcccagcaggcttctccacagactgtggcgctcacgcaggcgacggcggccgggcagcaggtgcagatgatccctgcagtgaccgcgactgcccaggtggttcagcagaaactcattcagcagcaggtggtgaccacggcgtcggccccgctccagactccaggcgctcccaacccagcccaggtgcccgccagctccgacagcccaagccagcagcccaagttacagatgagggtccctgctgtcaggctaaagacacctactaagcctccgtgccagtagtcagggcagcagggctgcctctcatctaaagcaaaactaccttcctcacagaaaacgctttattagtgaaccttgggaccatgtcacgcaagagattcagcactgggaaagatataattgaaacaaaatagtgtaatcattttattaaaatgcatcccacactgcaggacaaatggtccttatggagtgccgcgttctctgtactacgtggctcatggaaaaagtgacaacatggcttcctctaaatcatttcacctttcagtccccacccgcacccgtcccctagagccatagtactgtgttctgaaagccatttagaatttctttgtgagcatgtagtgctttgcacgccacagaagccgtctgccgtgtgtgaggagcatacaatggactttctaaagataaggcgtgggcttccacagtgtctgccagagtttagttctttataccttactgaaaaatgcctcgtggtcttcgcagaggggaaggcctgtctaaagtcaatcatccgagatgggttttccattccaaagaaaggcaatatggttccttccttccctcctaaaatatgacttaacttttaagagaaatgttctgacacccacctaaacacacaaggcacgttcctggcctgtgttcaagggaaatgatcagtcattgcattgttattccaaagagcagccaacagtggcctcccccaggccctaccctgcaatgggattcgctttcatttaatggaaacttctgggactgatgcccaactcagtgcactcaagacgcatctccagttttcgggggaagctggtatttgacatagtgtgttaaacagctcctgagaacctttgggacactctgccatggctggcgtgaggcccagaggaccacgcagaggcaatggtagtacagatgtcacagctgagggtacgatgaggcctgggctcagtgagccaggacgaatgtgacagacaccccttgctgccacagtcagccctttgacgaaggtgggctggtgattctggaagtattggctatagcggtgggcccagtcaactcttccttgtggacttacgacagcagattttctctaggataagcttgtgtggttctgccagtgaagcagagaaccacctgtgctgttgtggaaggcgtgccgttgagggggaaaacgaagcccagtatttgctactgtttttcctttttttactatgacaggaaaataaatgcaattttagtggaattgat

SEQ ID NO: 572880 - DNA, 210 bp, Homo sapiens
tggccatttggtccaataagggagagacgggagtttgggagccccatccccatcccctccttcctgggtttccctaatagggcacagccctctggccaggagctggggtttatgctggggtagcctctcagtcaccatggccatttcatttgctgtgtggttagacttccaggaggctgtttagctctaatgaagatgatttggtgctta

SEQ ID NO: 572881 - DNA, 1768 bp, Homo sapiens
agcggggcggcggcgcggcttccatcctcccgccctcctgacgcggccggagcgcagccctgaggcccagggagaacgacacattggatacagaagggaggtgatcatgcaccatggcactggcccccagaacgtccagcatcagctgcagaggtccagggcctgccctggcagcgagggtgaggagcagccggcccaccccaacccacccccgtcccccgcagctcccttcgctccctcagcaagcccgtcggcaccccagtctcccagttatcaaatacagcagctgatgaataggagccctgcaaccgggcagaacgtgaacatcaccctgcagagcgtgggccctgtcgtcgggggaaaccagcagatcacactggccccactgccgctccccagccccacctctccaggcttccagttcagcgctcagcctcggcggtttgagcatgggtctccatcatacattcaggtcacgtcccccttgtcccagcaggtccagacccagagtcccacgcagcccagtccggggccggggcaggccttgcagaatgtgcgtgcaggtgcccctggccctgggctgggcctctgcagcagcagccctacaggggacttcgtggatgccagcgtgctggtgaggcagatcagcttgagcccctccagtggtggacactttgtgtttcaggatgggtcagggctcacccagatcgcccagggagcccaggttcagctccagcacccgggtacgcccatcacagtccgagagcggagaccctcccagccccacacacagtcagggggcaccatccaccacctgggaccccagagccctgcagccgcgggtggggccggcctgcagcccctggccagcccaagccacatcaccacggctaacttgccaccgcagatcagcagcatcatccagggccagctggttcagcagcagcaggtgctgcaggggccgccgctgccccggcccctgggcttcgagaggacgcccggcgtgctgctccccggggctgggggcgcagcggggtttgggatgacgtccccacccccgcccaccagcccttccaggactgccgtgcccccaggcctttccagcctcccactcacgtctgtggggaacacgggaatgaagaaggttcccaagaagttagaggagattcccccagcctctccggagatggcacagatgaggaagcagtgcctggactatcattaccaggagatgcaggctctgaaggaggtcttcaaggagtatttgattgaactgtttttcttgcaacactttcaagggaacatgatggatttcttagctttcaaggagagactgtatggaccattacaagcatatcttaggcagaatgatttggacattgaagaagaggaagaggagcactttgaagtcattaatgatgaggtaaaggttgtggccagaaagcacgggcagcctgggactcctgttgccatagcaacccagctaccgccgaggacttctgcggcttttccagcccagcagcagccgctccaggtactttctgatggctccacagtgcagctccccagactttcctcactcggatttgaggactcgatgtgctgaggcaggacccagaggggtcccaagagcctgtcctcttttgttcaaaatacatcttgaaacgtctttgtgaaggctcttagttttaatgcatggatgctgttatttttccctactgttactgaaattaaaaagtgtttgtctctgaaaacaacaaaaaaaaaa

SEQ ID NO: 572882 - DNA, 401 bp, Homo sapiens
  misc_feature (11)..(11): n is a, c, g, or t
  misc_feature (26)..(26): n is a, c, g, or t
  misc_feature (45)..(45): n is a, c, g, or t
  misc_feature (58)..(58): n is a, c, g, or t
  misc_feature (87)..(87): n is a, c, g, or t
  misc_feature (101)..(101): n is a, c, g, or t
  misc_feature (127)..(127): n is a, c, g, or t
  misc_feature (175)..(175): n is a, c, g, or t
  misc_feature (184)..(184): n is a, c, g, or t
ccccacccttnttattataaaatagntgatgtgtttaattctagnaacccattttatntttggtcacaaaacaacactgcccaaaanaatcgcatttaagnatttagaaaattggcccatatgcggntactgacgcctgtaatattagcactttgggaggccaaggaggttggantgcttgagnctcaggagttctagaccagcctggacatcatggtgaaatcccatctctacaaaaaatacaaaaagaaaattagttgggcatggtggtgtgcggtgtattcctgtggtcccagctgctcaggatgctgaggtgggagaatcacctaagcccgggaagtcaaggcttctgtgagccgtgattggccactgcactctaacctgggtgacagagcaagact

SEQ ID NO: 572883 - DNA, 822 bp, Homo sapiens
  misc_feature (6)..(6): n is a, c, g, or t
  misc_feature (34)..(34): n is a, c, g, or t
gggctntggtagaatgtaatgtatgtctttcagngagaaacgccaacgctagtcgtcaggaatttccagcgagcaggatccctagactatgagctcatagtgaaaatcacagcacacctagagaaggggcctcagaagttatggcgaaagatagcacacctgcaaagactcagatgttagaataggagatgcaaatatgtttaatgtgtttgaagaaacaaaggagaagctaaggagcataaataagcaagagagtatcagaggctaagcagataataaatgaaccaaatagaacgtctaaaaatgaaaaatgtaataattgaaattcaaaacttaatggaagtaatcttgatccctacctcacacaccatagaaaattaactcaatgaatcatagacccaaacatgaaattcaaaactatgaaacataggaaaaaagttttgtgactataggttaagtaaacatttcttagatatgacaccaaaaatagagcctataaaaggaaaaaaattggcaagtcatactttaataaaattaaaccttcttgctatgtgaaaaccattgtttagagaatgaaaagacaagttaccaggagaaaacctttgccagtcatgtagctgattaaggacgtgtaaccagaacatacaaaaaactgtcaaagctcactaatacaaaaacaacttattttgtacagtgggcaacagatttgagcagacactccaccaaagaagctctctaggtggcaaataagcactgtcctctgggaaatgcaaataaaaatcacaatgagaaactactgcacacccgtgagaatgccttaaa

SEQ ID NO: 572884 - DNA, 659 bp, Homo sapiens
tggcgttgttccacgccccccttgggaggccccacgttgcatcggttttgctgctattgtgttggcccggcccccggttatcagcgcggtgacccgttccccacacaagcgcggtcggccgcaccagacagtagctttttcgtcgtgaggttggctacggcgtcttccctcgcggtggattgcctcacgttagctgatcggtagccgggggaccaagactgacagttctattgctcccctttgcttgccgctcgctcacccgcccgtccgtccaggttcgcacggcgcgggaagaagagcgcgcgtctccagcgaactctatggttggttttcacaacatgcgcacctcgtgataaggtccatgatagggttcataacctccgctggaatacaggcgaccacctactgtcgggacggattaacccgccccccacaagtgtgcaagcagagcaacactttctgtcgggcccccaccgtgtgcaagttatcatgtttctatgcgcgtggatgaccgccctcttgagtctattggagttctataaaactcctcagtttctttgtgggcgatcacactgattagcgccccaatagtgcgtccgcaggatcgtctggagacccccactaggagatatcaaacagggagaacatagcaagaaaac

SEQ ID NO: 572885 - DNA, 451 bp, Homo sapiens
ggctgaggccgccagctgcatgggatgtgcaggcggtgatcaactttgcaaagcttaaacattattttcccttcttcctcccttccctttgaatattccctctcaggtaaaggttgtggccagaaagcacgggcagcctgggactcctgttgccatagcaacccagctaccgccgaggacttctgcggcttttccagcccagcagcagccgctccaggtactttctgatggctccacagtgcagctccccagactttcctcactcggatttgaggactcgatgtgctgaggcaggacccagaggggtcccaagagcctgtcctcttttgttcaaaatacatcttgaaacgtctttgtgaaggctcttagttttaatgcatggatgctgttatttttccctactgttactgaaattaaaaagtgtttgtctctgaaaacaacaaaaaaaaaa

SEQ ID NO: 572886 - DNA, 331 bp, Homo sapiens
agtttatctgattacagaacaggctcctctagagtggatatgaagcaccgccagtgtcatttgagttttaacgctgtggctcgtagtgttctggcgagcagttaagtagatttaactgcttgaggttcagggctacgcatagtggggtatctaatcacagttcgggtcttacctatcgtgtgtaccagatatgttcaagccacttacgtagtctatctttgtgtcaactggagtatcacctacaactcaggtgagttccacgctatatatgggaagggggtgactctaaaacactcttatacgccggcttctatctgacttgggttaatcg

SEQ ID NO: 572887 - DNA, 813 bp, Homo sapiens
  misc_feature (6)..(6): n is a, c, g, or t
  misc_feature (34)..(34): n is a, c, g, or t
gggctntggtagaatgtaatgtatgtctttcagngagaaacgccaacgctagtcgtcaggaatttccagcgagcaggatccctagactatgagctcatagtgaaaatcacagcacacctagagaaggggcctcagaagttatggcgaaagatagcacacctgcaaagactcagatgttagaataggagatgcaaatatgtttaatgtgtttgaagaaacaaaggagaagctaaggagcataaataagcaagagagtatcagaggctaagcagataataaatgaaccaaatagaacgtctaaaaatgaaaaatgtaataattgaaattcaaaacttaatggaagtaatcttgatccctacctcacacaccatagaaaattaactcaatgaatcatagacccaaacatgaaattcaaaactatgaaacataggaaaaaagttttgtgactataggttaagtaaacatttcttagatatgacaccaaaaatagagcctataaaaggaaaaaaattggcaagtcatactttaataaaattaaaccttcttgctatgtgaaaaccattgtttagagaatgaaaagacaagttaccaggagaaaacctttgccagtcatgtagctgattaaggacgtgtaaccagaacatacaaaaaactgtcaaagctcactaatacaaaaacaacttattttgtacagtgggcaacagatttgagcagacactccaccaaagaagctctctaggtgggggggggcccggtccctaaacaatcaacatccccggcggtgagaaaaggggttacgccttgggggcgtta

SEQ ID NO: 572888 - DNA, 940 bp, Homo sapiens
tccccaactccggtcgtgcggccgcccgggagggctctgcagttgcgcagtttgctccccggcccttttcccctccgtccccgcgctcctgacgccgggcgtgacggtcaccacgcccggcggccgccattacagagagccgagctctggagcctcagcgacgaaggaggaggcgcagcgggccgaccgccggattacctgcggtgaagagccagcggcccaggcgcccagccttaaaggaggccgccaggaaggtacacggaggaaacccggcgccgttgttgtgcttttgttagcccccgtgtgtgcgcgtgcccccgataagggaagcggcagatagcggaacagccggatttggggggcgcgtgttgcccatttcctttgggccgcgaacactctgtgtccccccaaggcggatggtcttgccccacaggggtgtcatcggacgcatgtttggaacgcagatttgccaggccggtttgttccacgacttccccatgtgttaagacgaacgccctcgttggaaagaagggccttaagagacgctcccttgaccaaaaaaagaacttccatcgtgtcgcgagagcgttccgatctgcccccaggtacccgttgcctgtgctggcagcattgccctgtggcgccaattccctgtgcaccccccggtgacccccttgcttgcgacgttggggtgccaacctcccccggttttcccaattttcccgtgtgtcctgggagcattttttgtgcgcccgcggggctttttcttccgctggaagccgttgcccggtgcgtggcgccccaaaacggtccggtccgcgggtaaccgcattcaccattgctggggggccacctgtgcgcgccgccgccccaccccagttttgggggttcttgtagcgcgtgctccgcacctcgtgacccccccttgtggcacacttct

SEQ ID NO: 572889 - DNA, 145 bp, Homo sapiens
gttagtctagagatccctgcttgatgtactgctgcttagtgtcacatgtgatcagcgtctcctccccaatctgaatggtggggctgatcccagcacctagcccgtgagctccgattgtcactgtgacagtgcacttgttggtgtc

SEQ ID NO: 572890 - DNA, 280 bp, Homo sapiens
  misc_feature (226)..(226): n is a, c, g, or t
gataacagggatatttaccttttgaagtaataaaatattgcatgtatttttctgctaattattttttgtcttttgatcttgtttaaaacatcttttatgtagtcatgtattttttcctttacagcatctgggtttcctgcattacttattaagaagctttcaccacctcgcagttgtagagatagtccccgaaatattattccaataaagtgttttcctcctttcntccctgcctcctcttccttccttccaggataacatttagttctttattctgact

SEQ ID NO: 572891 - DNA, 12288 bp, Homo sapiens
agcggggcggcggcgcggcttccatcctcccgccctcctgacgcggccggagcgcagccctgaggcccagggagaacgacacattggatacagaagggaggtgatcatgcaccatggcactggcccccagaacgtccagcatcagctgcagaggtccagggcctgccctggcagcgagggtgaggagcagccggcccaccccaacccacccccgtcccccgcagctcccttcgctccctcagcaagcccgtcggcaccccagtctcccagttatcaaatacagcagctgatgaataggagccctgcaaccgggcagaacgtgaacatcaccctgcagagcgtgggccctgtcgtcgggggaaaccagcagatcacactggccccactgccgctccccagccccacctctccaggcttccagttcagcgctcagcctcggcggtttgagcatgggtctccatcatacattcaggtcacgtcccccttgtcccagcaggtccagacccagagtcccacgcagcccagtccggggccggggcaggccttgcagaatgtgcgtgcaggtgcccctggccctgggctgggcctctgcagcagcagccctacaggggacttcgtggatgccagcgtgctggtgaggcagatcagcttgagcccctccagtggtggacactttgtgtttcaggatgggtcagggctcacccagatcgcccagggagcccaggttcagctccagcacccgggtacgcccatcacagtccgagagcggagaccctcccagccccacacacagtcagggggcaccatccaccacctgggaccccagagccctgcagccgcgggtggggccggcctgcagcccctggccagcccaagccacatcaccacggctaacttgccaccgcagatcagcagcatcatccagggccagctggttcagcagcagcaggtgctgcaggggccgccgctgccccggcccctgggcttcgagaggacgcccggcgtgctgctccccggggctgggggcgcagcggggtttgggatgacgtccccacccccgcccaccagcccttccaggactgccgtgcccccaggcctttccagcctcccactcacgtctgtggggaacacgggaatgaagaaggttcccaagaagttagaggagattcccccagcctctccggagatggcacagatgaggaagcagtgcctggactatcattaccaggagatgcaggctctgaaggaggtcttcaaggagtatttgattgaactgtttttcttgcaacactttcaagggaacatgatggatttcttagctttcaaggagagactgtatggaccattacaagcatatcttaggcagaatgatttggacattgaagaagaggaggaggaggaggaagaggaggaagaaaaatctgaggttatcaatgacgagcagcaagccctcgcagggagcctggtagcaggggccggaagcacagtagagacggacctgtttaagaggcagcaggcgatgccctccacaggtatggcagagcagtctaagaggcctcgccttgaagtgggtcaccaaggggtagttttccagcacccaggggcggacgcaggcgttcctctccagcaactaatgccgaccgcacaaggaggaatgccccccacgccgcaggccgcgcagctcgctggacagaggcagagtcagcagcagtatgacccctccacggggcctcccgtgcagaacgctgccagcttgcacaccccactgccgcagctgcccgggaggctgcccccagccggtgttcccactgcagccctctcctctgcgctgcagtttgcacagcagccgcaagtggtagaggcccagacacagctccaaatcccggtgaagactcagcagcccaatgttcccatccctgcaccgcccagcagccaactccccatccctccctcgcagcctgcacagctggccctccacgttcccacacctggaaaggtgcaggtgcaggcctctcagctttcctccctgccacagatggtagcatcgacaaggctccctgtggaccctgccccgccctgcccacggcctctgcccacctcttctacctcgtccctcgcgcctgtgagtggctccggcccaggaccctcccctgctcgatcctctccagtaaatagaccttcctcagccaccaataaggcactatctccagtcacttcccggaccccaggggtggtggcatctgcccccaccaaaccacagagtcctgctcagaatgccacctcgtcccaagacagttctcaggatacgctgacagaacaaataactctggagaaccaggtgcatcagcgcattgcggagctgaggaaagcaggtctgtggtcccagaggcgtctgccaaagctgcaggaggccccacgccccaagtcccactgggactatctgctggaggagatgcagtggatggccacagactttgcccaggagaggaggtggaaggtggctgctgcgaagaagctcgttagaactgtggtgcgccatcacgaggagaagcagctccgtgaagaaagggggaagaaggaagagcagagcagactgaggcggatagccgcctccacggcccgggagatagagtgcttttggtcgaatattgaacaggttgtggaaataaaactacgagtagaattagaagaaaaaaggaagaaggccttaaatttacagaaagtttccaggagagggaaagaattgagacctaaaggatttgacgcattacaggaaagttctctggattcaggaatgtctggaagaaaaagaaaagctagcatatctttgactgatgacgaagtggacgatgaagaggaaacaattgaagaggaggaagcaaatgaaggcgttgtggaccaccaaacagaactttctaatttagccaaggaagctgagctgcccctcctggacctgatgaagctgtacgaaggcgccttcctgccgagttctcagtggccccggccgaagcctgatggggaggacacaagcggagaggaagatgcagatgactgtccaggcgacagggagagtcgcaaggacttggttctcatcgactcgcttttcatcatggatcagttcaaagctgccgagaggatgaatatcgggaagccaaacgccaaggacattgcggacgtcactgcggtggctgaagccatcctgccgaagggcagtgctcgggtcacaacctcggtcaagtttaatgctccatctttgttgtatggggctctcagagattatcagaagattggcctggactggctggccaaactttacaggaagaatctcaatggcatattggcagatgaagctgggctgggtaaaacagtgcagatcattgctttttttgcccacctagcttgtaacgaaggtaattggggcccccatcttgttgttgtgagaagttgtaacatactcaagtgggagcttgaattgaaacgttggtgtcccggactcaaaatcctctcatatattggcagccacagagaactcaaagcaaagagacaggagtgggccgaacccaacagcttccacgtctgcatcacgtcctacactcagttcttccggggcctcaccgccttcacacgagtgcgctggaagtgcctggtcattgatgagatgcagcgcgtgaagggcatgaccgagaggcactgggaagcggttttcaccctgcagagccaacaacgtctgcttctgatcgactcgccgctgcacaataccttcctggagctctggaccatggtgcacttcctggtcccagggatctccaggccctacctgagctcccctctgagggcccccagtgaagagagccaggattactaccataaagtggtcataaggttacacagggtgacacagccatttattttgaggagaactaagagagatgtggaaaagcaactaacaaagaaatatgagcatgttttgaagtgtcgcctttctaaccgacaaaaagccttatacgaggacgttatcctgcaacctggcactcaggaggccttgaagagcgggcactttgtcaacgtcctgagcatccttgtgcggctgcagcgcatctgcaaccaccctgggctcgtcgagccccggcacccaggctcttcctacgtggcggggccactggagtatccgtccgcatctctaatcctgaaggcactggagagagatttctggaaggaagcagatctttctatgtttgatctcatcggcttagaaaataaaatcactcgtcacgaggcagagttgctgtctaagaaaaagataccgcggaaactcatggaggaaatctccacttcagcagccccagcagcccgaccagcagcagcaaagctgaaggccagcaggttgtttcagcctgtgcagtatggccagaagcccgagggtcgcaccgtggctttccccagcactcacccgccccggacggcagcccccaccacggcctctgctgctccacagggcccgcttcgaggacggccgcccatcgccacgttctctgccaatccggaggcaaaagcagcagcagccccgtttcagacctctcaggcttccgccagtgctccacgacaccagcccgcctcggcctccagcacagccgctagcccggcccatcctgcgaaactgcgggcccagaccacagcacaggccttcaccccaggccagcccccgccccagccccaggccccctcgcacgcggccgggcagagcgcgctgcctcagaggctggtgctcccctcgcaggcccaggcccgcttgcccagtggagaggtagtgaaaatagctcagctggcatccatcacaggaccacagagccgcgtggctcagccagagacgccggtgacactgcagttccagggcagcaagttcaccctgtcacacagccagctccggcagctcacagcgggccagccgctgcagctgcaaggcagcgtcctccagatcgtgtccgcccccgggcagccctaccttcgagcccctggccctgtggtgatgcagaccgtgtctcaggcgggcgctgtgcacggcgccctgggaagcaagcccccggccggcggtcccagccctgcacccttgaccccacaagttggcgttccgggccgcgtggcggtgaatgccttggctgtaggagaacccggaacggcctccaaaccagcttctcccattggagggccgacccaggaggaaaagaccagactcttgaaagagcgcctggatcagatttatttagtcaacgagcggcgctgttctcaagctccagtctatggcagagacttgctaaggatttgtgccctgcctagccatggaagggtacagtggcgtgggtccctggatggccgtcgtgggaaggaggccgggccagcgcacagttacacttcatcctcagaaagtccaagtgagctgatgttgacgctttgtcggtgtggagagtctctgcaggatgttattgacagggtggcctttgtgattcctccggtggtggcagcacccccgtccctacgggtgccgcggccgccacccctgtacagccacagaatgaggatcttgaggcagggcctgagagagcacgctgcgccgtacttccagcagctgcggcagaccacggctccacgcctgctgcagttccctgagctgaggctggtgcagttcgactcagggaagttggaagctttagctatcttgcttcagaaattgaaatctgaaggacgtcgggtgctgattttatcacagatgattcttatgttggacattttagagatgttcttgaacttccattacctcacctatgtaagaatcgatgaaaatgccagcagtgagcaacggcaggaactgatgaggagtttcaacagagacaggcggattttttgtgccattctctccactcacagccgtaccacaggtataaaccttgtagaggcggacaccgtcgtgttttatgacaatgacctgaatccagtgatggatgccaaagctcaggagtggtgcgataggatcgggagatgcaaagacatccacatatacaggcttgtgagtggcaattccattgaagagaaattgttgaaaaatggaactaaagatctgatccgagaagtggctgctcagggaaatgactactccatggctttcttaactcagcgaaccatccaggagctgtttgaagtttattctcccatggatgatgctggcttcccggtcaaagctgaggagtttgtggtgctttctcaggaaccttctgtcacggaaaccattgcacccaaaattgcaagacctttcatagaggccctcaagagtattgagtatctggaggaggatgcccagaagtccgcacaggagggggtgctgggaccacacactgatgctctgtcatcagactctgagaacatgccgtgtgatgaagaaccatcccaattagaggagctagctgacttcatggagcagcttacaccaattgaaaaatatgctttaaattacctggaattattccatacttctattgagcaagaaaaggagagaaacagtgaggacgcagtgatgactgcagtgagggcatgggagttctggaacctgaagaccctgcaggagagggaggcccggctgcggctggagcaggaggaggcggagctcctgacctacacgcgagaggatgcctacagcatggagtatgtctacgaagatgtcgatgggcagacagaagtcatgccgctctggaccccacccaccccgccgcaggacgacagcgacatctacctcgactcggtcatgtgtctcatgtatgaagccactcccatcccagaggctaagctgccccctgtgtacgtgaggaaggagcggaagcgacacaaaacagacccctcagctgcaggcaggaagaagaagcagcgtcacggggaggcggtcgtccctcctcggtccctgtttgaccgcgcaacaccaggacttctgaaaattcgcagagagggcaaggagcagaagaagaatattctgctgaagcagcaggtgccattcgccaagcccctgccaacttttgccaaacccacagctgagcctggtcaagacaaccccgagtggctcatcagtgaggactgggcgctgctgcaggctgtaaagcagttactggagctgcctttgaacctcacaatcgtgtcacctgctcacacacctaattgggatcttgtcagtgacgttgttaactcctgtagccgaatctaccgctcttccaaacagtgccggaatcgctacgagaatgtcatcattccacgagaggaggggaagagtaaaaacaaccgtcctctccgtacgagccagatctatgcccaggatgagaatgccacacacacccagctgtacacgagccactttgacttaatgaaaatgactgctggcaagaggagtcccccaatcaaacctctgcttggcatgaatccctttcagaagaaccccaagcacgcgtctgtgttggcagaaagtggaatcaactatgacaagccgctgcctcccatccaggtggcatctctccgtgcagagcgaatcgcaaaagagaaaaaggctctggctgatcagcagaaggcacagcagccggccgtggcccagccacccccgccccagccgcagcccccaccacccccgcagcagccaccgccaccgctgccacaaccacaggcagcgggcagccagccgccagcagggccaccagctgtccagccccaaccccagccacagccccagacccagccacagcctgtgcaggccccagcgaaggcgcagcccgcaatcacgacggggggcagtgcagccgtactggcaggaaccattaaaacatcagttactgggacgagcatgcccactggtgccgtgagtggaaatgtgatcgtgaacaccatcgcaggggtcccagctgccaccttccagtccatcaacaagcgcctggcgtcgccagtggctcctggggccttgactacgccgggaggctctgctcccgcccaggtggtgcacacccagcccccgccacgggcagtcggctccccagccacggcgacccctgacctggtgtccatggcaacgactcagggtgttcgagcggtcacttctgtgacagcctcggccgtggtcactaccaacctgaccccagtgcagaccccggcacggtctttggtgccccaagtgtcccaagccacaggagttcagctccctggaaaaaccatcacacctgcacatttccagcttctcaggcagcagcagcagcagcagcagcaacagcagcagcagcagcagcagcagcagcagcagcagcagcagcagcaacagcagcagcagcaacagacgacgacgacctctcaggtgcaagttccacagatccagggccaggcccagtccccagcacagatcaaagctgtgggcaagctgacgccggaacacctcatcaaaatgcagaagcagaaactgcagatgcccccgcagcccccaccgccacaggcccagtctgcgcccccgcagccagcagcccaagtgcaagtgcagacctcgcagccgccgcagcagcagagcccccagctcacgacggtcacggccccaaggcctggtgccctgctgacgggcaccaccgtggccaacctccaggtggcccggctcacccgggttcccacttctcaactgcagtcgcaagggcagatgcagacccaggcaccccagccagcccaggtgcccttggcgaagcctccggtggtgtccgtcccggcagctgtggtctcctcaccgggagtcaccaccctgcccatgaacgtcgcggggatcagcgtggcgatcggtcagccacagaaggcagcaggacagaccgtggtggcccagcccgtgcacatgcagcagctgctgaagctgaagcagcaggccgtccagcagcagaaggccatccagccccaggctgcacagggcccggcagccgtccagcagaagatcaccgcacagcagatcaccacccctggcgcgcagcagaaggttgcctacgccgcgcagccggcccttaagacccagtttcttaccacacccatctcccaggcccagaaactggccggggcccagcaagtgcagacccagatccaggttgcaaaacttcctcaagttgttcaacagcaaacacccgtggccagcatccagcaagttgcctctgcttcccagcaggcttctccacagactgtggcgctcacgcaggcgacggcggccgggcagcaggtgcagatgatccctgcagtgaccgcgactgcccaggtggttcagcagaaactcattcagcagcaggtggtgaccacggcgtcggccccgctccagactccaggcgctcccaacccagcccaggtgcccgccagctccgacagcccaagccagcagcccaagttacagatgagggtccctgctgtcaggctaaagacacctactaagcctccgtgccagtagtcagggcagcagggctgcctctcatctaaagcaaaactaccttcctcacagaaaacgctttattagtgaaccttgggaccatgtcacgcaagagattcagcactgggaaagatataattgaaacaaaatagtgtaatcattttattaaaatgcatcccacactgcaggacaaatggtccttatggagtgccgcgttctctgtactacgtggctcatggaaaaagtgacaacatggcttcctctaaatcatttcacctttcagtccccacccgcacccgtcccctagagccatagtactgtgttctgaaagccatttagaatttctttgtgagcatgtagtgctttgcacgccacagaagccgtctgccgtgtgtgaggagcatacaatggactttctaaagataaggcgtgggcttccacagtgtctgccagagtttagttctttataccttactgaaaaatgcctcgtggtcttcgcagaggggaaggcctgtctaaagtcaatcatccgagatgggttttccattccaaagaaaggcaatatggttccttccttccctcctaaaatatgacttaacttttaagagaaatgttctgacacccacctaaacacacaaggcacgttcctggcctgtgttcaagggaaatgatcagtcattgcattgttattccaaagagcagccaacagtggcctcccccaggccctaccctgcaatgggattcgctttcatttaatggaaacttctgggactgatgcccaactcagtgcactcaagacgcatctccagttttcgggggaagctggtatttgacatagtgtgttaaacagctcctgagaacctttgggacactctgccatggctggcgtgaggcccagaggaccacgcagaggcaatggtagtacagatgtcacagctgagggtacgatgaggcctgggctcagtgagccaggacgaatgtgacagacaccccttgctgccacagtcagccctttgacgaaggtgggctggtgattctggaagtattggctatagcggtgggcccagtcaactcttccttgtggacttacgacagcagattttctctaggataagcttgtgtggttctgccagtgaagcagagaaccacctgtgctgttgtggaaggcgtgccgttgagggggaaaacgaagcccagtatttgctactgtttttcctttttttactatgacaggaaaataaatgcaattttagtggaattgattgacagtgtctccttactttgaagttttcaccaaagcaaaaaggtccatatccaatagtatcctttgtgctgtggcttgattttggcctattttacattatttggtccaggaaattaggttatattaggttttttgtatactaaaaatcagttatggcacaataaagattttctgtttttaaattgtatttcatctgcttcctccccattctctcactttaagtgacattgaggaaggtattctgtcccacaggtttctgtggacagcgatacagcaggagtcagtgaaatcaactggggagctcacttgagctcttgataagaaatgtggagaaaagtaaaaaccaagctttgaagaaacagaagaaattaatcttttagttagttgaacataccaaagcagaggactggaatctgtttgttctaaccaacccgttctccctggcttggcacgtgccgtgagagcgcagcttgccggagggagggccgctgtgtgcgcctcacatctggctcccagtggaaacttttactcctcctcatccgcagatgtgatagaactgaagtatctaggaattctgcctttgtcatttgttttaatttgtgtgccctgttcattttttttgtctttcccaaatcttggtagtctccttatagttgaagataaaatgttgagtgcacttattttagaatatcctagacataactgtctaagtaaaagcgctctattaatctaaaacactacaagagaatttaacaccatctctcaaatgcttttttggagagcttaatgggattctgaatatttgcaatgtggagtttccgccccgatctcacgtcagtgagggtctcctgtctctcaagtgtgtttcctttggctgttccctaatacaaaacacggacatatttttactcgtagcactcaatttagtaacttctagatgctaccgttgacctgagttaaattcatttagtcgtgtacgtaaaaactctccttttagtgtgttattttcttggccttcccttttaaaggttaaagtttctaacctaagaattaagtacgcgttcaggaagctgttgtctaggccttccccttgtgaatctgggttcattccaatacggcaagtaagagttggaaactttgagaacacagactataaaggcagcagcccgaacactgtcagactctaattggcgaccctgggaaacagttgccctgctattctttaaagaaagacgtttattctgatgataaaaacagttagccagactgtttttaaagcacctggcgggaagcagaaggttggatccaagcccttgttcagatttggtgcctgataagacaggggtttctctttttgtgacctttattattattattttgttaactgttgtaaccagttagctgttgtgttttaagatagaaaggaacaagactaaaattgtaaatactttgtaaacatcagcatttgtacttgaatagtaggattttaaagggcattgatagcataccaaacaaaaggcaaaataaagtgacctttttataaaaaaaaaaagaaaaagtcgac

SEQ ID NO: 572892 - DNA, 12045 bp, Homo sapiens
agcggggcggcggcgcggcttccatcctcccgccctcctgacgcggccggagcgcagccctgaggcccagggagaacgacacattggatacagaagggaggtgatcatgcaccatggcactggcccccagaacgtccagcatcagctgcagaggtccagggcctgccctggcagcgagggtgaggagcagccggcccaccccaacccacccccgtcccccgcagctcccttcgctccctcagcaagcccgtcggcaccccagtctcccagttatcaaatacagcagctgatgaataggagccctgcaaccgggcagaacgtgaacatcaccctgcagagcgtgggccctgtcgtcgggggaaaccagcagatcacactggccccactgccgctccccagccccacctctccaggcttccagttcagcgctcagcctcggcggtttgagcatgggtctccatcatacattcaggtcacgtcccccttgtcccagcaggtccagacccagagtcccacgcagcccagtccggggccggggcaggccttgcagaatgtgcgtgcaggtgcccctggccctgggctgggcctctgcagcagcagccctacaggggacttcgtggatgccagcgtgctggtgaggcagatcagcttgagcccctccagtggtggacactttgtgtttcaggatgggtcagggctcacccagatcgcccagggagcccaggttcagctccagcacccgggtacgcccatcacagtccgagagcggagaccctcccagccccacacacagtcagggggcaccatccaccacctgggaccccagagccctgcagccgcgggtggggccggcctgcagcccctggccagcccaagccacatcaccacggctaacttgccaccgcagatcagcagcatcatccagggccagctggttcagcagcagcaggtgctgcaggggccgccgctgccccggcccctgggcttcgagaggacgcccggcgtgctgctccccggggctgggggcgcagcggggtttgggatgacgtccccacccccgcccaccagcccttccaggactgccgtgcccccaggcctttccagcctcccactcacgtctgtggggaacacgggaatgaagaaggttcccaagaagttagaggagattcccccagcctctccggagatggcacagatgaggaagcagtgcctggactatcattaccaggagatgcaggctctgaaggaggtcttcaaggagtatttgattgaactgtttttcttgcaacactttcaagggaacatgatggatttcttagctttcaaggagagactgtatggaccattacaagcatatcttaggcagaatgatttggacattgaagaagaggaggaggaggaggaagaggaggaagaaaaatctgaggttatcaatgacgagcagcaagccctcgcagggagcctggtagcaggggccggaagcacagtagagacggacctgtttaagaggcagcaggcgatgccctccacaggtatggcagagcagtctaagaggcctcgccttgaagtgggtcaccaaggggtagttttccagcacccaggggcggacgcaggcgttcctctccagcaactaatgccgaccgcacaaggaggaatgccccccacgccgcaggccgcgcagctcgctggacagaggcagagtcagcagcagtatgacccctccacggggcctcccgtgcagaacgctgccagcttgcacaccccactgccgcagctgcccgggaggctgcccccagccggtgttcccactgcagccctctcctctgcgctgcagtttgcacagcagccgcaagtggtagaggcccagacacagctccaaatcccggtgaagactcagcagcccaatgttcccatccctgcaccgcccagcagccaactccccatccctccctcgcagcctgcacagctggccctccacgttcccacacctggaaaggtgcaggtgcaggcctctcagctttcctccctgccacagatggtagcatcgacaaggctccctgtggaccctgccccgccctgcccacggcctctgcccacctcttctacctcgtccctcgcgcctgtgagtggctccggcccaggaccctcccctgctcgatcctctccagtaaatagaccttcctcagccaccaataaggcactatctccagtcacttcccggaccccaggggtggtggcatctgcccccaccaaaccacagagtcctgctcagaatgccacctcgtcccaagacagttctcaggatacgctgacagaacaaataactctggagaaccaggtgcatcagcgcattgcggagctgaggaaagcaggtctgtggtcccagaggcgtctgccaaagctgcaggaggccccacgccccaagtcccactgggactatctgctggaggagatgcagtggatggccacagactttgcccaggagaggaggtggaaggtggctgctgcgaagaagctcgttagaactgtggtgcgccatcacgaggagaagcagctccgtgaagaaagggggaagaaggaagagcagagcagactgaggcggatagccgcctccacggcccgggagatagagtgcttttggtcgaatattgaacaggttgtggaaataaaactacgagtagaattagaagaaaaaaggaagaaggccttaaatttacagaaagtttccaggagagggaaagaattgagacctaaaggatttgacgcattacaggaaagttctctggattcaggaatgtctggaagaaaaagaaaagctagcatatctttgactgatgacgaagtggacgatgaagaggaaacaattgaagaggaggaagcaaatgaaggcgttgtggaccaccaaacagaactttctaatttagccaaggaagctgagctgcccctcctggacctgatgaagctgtacgaaggcgccttcctgccgagttctcagtggccccggccgaagcctgatggggaggacacaagcggagaggaagatgcagatgactgtccaggcgacagggagagtcgcaaggacttggttctcatcgactcgcttttcatcatggatcagttcaaagctgccgagaggatgaatatcgggaagccaaacgccaaggacattgcggacgtcactgcggtggctgaagccatcctgccgaagggcagtgctcgggtcacaacctcggtcaagtttaatgctccatctttgttgtatggggctctcagagattatcagaagattggcctggactggctggccaaactttacaggaagaatctcaatggcatattggcagatgaagctgggctgggtaaaacagtgcagatcattgctttttttgcccacctagcttgtaacgaaggtaattggggcccccatcttgttgttgtgagaagttgtaacatactcaagtgggagcttgaattgaaacgttggtgtcccggactcaaaatcctctcatatattggcagccacagagaactcaaagcaaagagacaggagtgggccgaacccaacagcttccacgtctgcatcacgtcctacactcagttcttccggggcctcaccgccttcacacgagtgcgctggaagtgcctggtcattgatgagatgcagcgcgtgaagggcatgaccgagaggcactgggaagcggttttcaccctgcagagccaacaacgtctgcttctgatcgactcgccgctgcacaataccttcctggagctctggaccatggtgcacttcctggtcccagggatctccaggccctacctgagctcccctctgagggcccccagtgaagagagccaggattactaccataaagtggtcataaggttacacagggtgacacagccatttattttgaggagaactaagagagatgtggaaaagcaactaacaaagaaatatgagcatgttttgaagtgtcgcctttctaaccgacaaaaagccttatacgaggacgttatcctgcaacctggcactcaggaggccttgaagagcgggcactttgtcaacgtcctgagcatccttgtgcggctgcagcgcatctgcaaccaccctgggctcgtcgagccccggcacccaggctcttcctacgtggcggggccactggagtatccgtccgcatctctaatcctgaaggcactggagagagatttctggaaggaagcagatctttctatgtttgatctcatcggcttagaaaataaaatcactcgtcacgaggcagagttgctgtctaagaaaaagataccgcggaaactcatggaggaaatctccacttcagcagccccagcagcccgaccagcagcagcaaagctgaaggccagcaggttgtttcagcctgtgcagtatggccagaagcccgagggtcgcaccgtggctttccccagcactcacccgccccggacggcagcccccaccacggcctctgctgctccacagggcccgcttcgaggacggccgcccatcgccacgttctctgccaatccggaggcaaaaggtggagaggtagtgaaaatagctcagctggcatccatcacaggaccacagagccgcgtggctcagccagagacgccggtgacactgcagttccagggcagcaagttcaccctgtcacacagccagctccggcagctcacagcgggccagccgctgcagctgcaaggcagcgtcctccagatcgtgtccgcccccgggcagccctaccttcgagcccctggccctgtggtgatgcagaccgtgtctcaggcgggcgctgtgcacggcgccctgggaagcaagcccccggccggcggtcccagccctgcacccttgaccccacaagttggcgttccgggccgcgtggcggtgaatgccttggctgtaggagaacccggaacggcctccaaaccagcttctcccattggagggccgacccaggaggaaaagaccagactcttgaaagagcgcctggatcagatttatttagtcaacgagcggcgctgttctcaagctccagtctatggcagagacttgctaaggatttgtgccctgcctagccatggaagggtacagtggcgtgggtccctggatggccgtcgtgggaaggaggccgggccagcgcacagttacacttcatcctcagaaagtccaagtgagctgatgttgacgctttgtcggtgtggagagtctctgcaggatgttattgacagggtggcctttgtgattcctccggtggtggcagcacccccgtccctacgggtgccgcggccgccacccctgtacagccacagaatgaggatcttgaggcagggcctgagagagcacgctgcgccgtacttccagcagctgcggcagaccacggctccacgcctgctgcagttccctgagctgaggctggtgcagttcgactcagggaagttggaagctttagctatcttgcttcagaaattgaaatctgaaggacgtcgggtgctgattttatcacagatgattcttatgttggacattttagagatgttcttgaacttccattacctcacctatgtaagaatcgatgaaaatgccagcagtgagcaacggcaggaactgatgaggagtttcaacagagacaggcggattttttgtgccattctctccactcacagccgtaccacaggtataaaccttgtagaggcggacaccgtcgtgttttatgacaatgacctgaatccagtgatggatgccaaagctcaggagtggtgcgataggatcgggagatgcaaagacatccacatatacaggcttgtgagtggcaattccattgaagagaaattgttgaaaaatggaactaaagatctgatccgagaagtggctgctcagggaaatgactactccatggctttcttaactcagcgaaccatccaggagctgtttgaagtttattctcccatggatgatgctggcttcccggtcaaagctgaggagtttgtggtgctttctcaggaaccttctgtcacggaaaccattgcacccaaaattgcaagacctttcatagaggccctcaagagtattgagtatctggaggaggatgcccagaagtccgcacaggagggggtgctgggaccacacactgatgctctgtcatcagactctgagaacatgccgtgtgatgaagaaccatcccaattagaggagctagctgacttcatggagcagcttacaccaattgaaaaatatgctttaaattacctggaattattccatacttctattgagcaagaaaaggagagaaacagtgaggacgcagtgatgactgcagtgagggcatgggagttctggaacctgaagaccctgcaggagagggaggcccggctgcggctggagcaggaggaggcggagctcctgacctacacgcgagaggatgcctacagcatggagtatgtctacgaagatgtcgatgggcagacagaagtcatgccgctctggaccccacccaccccgccgcaggacgacagcgacatctacctcgactcggtcatgtgtctcatgtatgaagccactcccatcccagaggctaagctgccccctgtgtacgtgaggaaggagcggaagcgacacaaaacagacccctcagctgcaggcaggaagaagaagcagcgtcacggggaggcggtcgtccctcctcggtccctgtttgaccgcgcaacaccaggacttctgaaaattcgcagagagggcaaggagcagaagaagaatattctgctgaagcagcaggtgccattcgccaagcccctgccaacttttgccaaacccacagctgagcctggtcaagacaaccccgagtggctcatcagtgaggactgggcgctgctgcaggctgtaaagcagttactggagctgcctttgaacctcacaatcgtgtcacctgctcacacacctaattgggatcttgtcagtgacgttgttaactcctgtagccgaatctaccgctcttccaaacagtgccggaatcgctacgagaatgtcatcattccacgagaggaggggaagagtaaaaacaaccgtcctctccgtacgagccagatctatgcccaggatgagaatgccacacacacccagctgtacacgagccactttgacttaatgaaaatgactgctggcaagaggagtcccccaatcaaacctctgcttggcatgaatccctttcagaagaaccccaagcacgcgtctgtgttggcagaaagtggaatcaactatgacaagccgctgcctcccatccaggtggcatctctccgtgcagagcgaatcgcaaaagagaaaaaggctctggctgatcagcagaaggcacagcagccggccgtggcccagccacccccgccccagccgcagcccccaccacccccgcagcagccaccgccaccgctgccacaaccacaggcagcgggcagccagccgccagcagggccaccagctgtccagccccaaccccagccacagccccagacccagccacagcctgtgcaggccccagcgaaggcgcagcccgcaatcacgacggggggcagtgcagccgtactggcaggaaccattaaaacatcagttactgggacgagcatgcccactggtgccgtgagtggaaatgtgatcgtgaacaccatcgcaggggtcccagctgccaccttccagtccatcaacaagcgcctggcgtcgccagtggctcctggggccttgactacgccgggaggctctgctcccgcccaggtggtgcacacccagcccccgccacgggcagtcggctccccagccacggcgacccctgacctggtgtccatggcaacgactcagggtgttcgagcggtcacttctgtgacagcctcggccgtggtcactaccaacctgaccccagtgcagaccccggcacggtctttggtgccccaagtgtcccaagccacaggagttcagctccctggaaaaaccatcacacctgcacatttccagcttctcaggcagcagcagcagcagcagcagcaacagcagcagcagcagcagcagcagcagcagcagcagcagcagcagcaacagcagcagcagcaacagacgacgacgacctctcaggtgcaagttccacagatccagggccaggcccagtccccagcacagatcaaagctgtgggcaagctgacgccggaacacctcatcaaaatgcagaagcagaaactgcagatgcccccgcagcccccaccgccacaggcccagtctgcgcccccgcagccagcagcccaagtgcaagtgcagacctcgcagccgccgcagcagcagagcccccagctcacgacggtcacggccccaaggcctggtgccctgctgacgggcaccaccgtggccaacctccaggtggcccggctcacccgggttcccacttctcaactgcagtcgcaagggcagatgcagacccaggcaccccagccagcccaggtgcccttggcgaagcctccggtggtgtccgtcccggcagctgtggtctcctcaccgggagtcaccaccctgcccatgaacgtcgcggggatcagcgtggcgatcggtcagccacagaaggcagcaggacagaccgtggtggcccagcccgtgcacatgcagcagctgctgaagctgaagcagcaggccgtccagcagcagaaggccatccagccccaggctgcacagggcccggcagccgtccagcagaagatcaccgcacagcagatcaccacccctggcgcgcagcagaaggttgcctacgccgcgcagccggcccttaagacccagtttcttaccacacccatctcccaggcccagaaactggccggggcccagcaagtgcagacccagatccaggttgcaaaacttcctcaagttgttcaacagcaaacacccgtggccagcatccagcaagttgcctctgcttcccagcaggcttctccacagactgtggcgctcacgcaggcgacggcggccgggcagcaggtgcagatgatccctgcagtgaccgcgactgcccaggtggttcagcagaaactcattcagcagcaggtggtgaccacggcgtcggccccgctccagactccaggcgctcccaacccagcccaggtgcccgccagctccgacagcccaagccagcagcccaagttacagatgagggtccctgctgtcaggctaaagacacctactaagcctccgtgccagtagtcagggcagcagggctgcctctcatctaaagcaaaactaccttcctcacagaaaacgctttattagtgaaccttgggaccatgtcacgcaagagattcagcactgggaaagatataattgaaacaaaatagtgtaatcattttattaaaatgcatcccacactgcaggacaaatggtccttatggagtgccgcgttctctgtactacgtggctcatggaaaaagtgacaacatggcttcctctaaatcatttcacctttcagtccccacccgcacccgtcccctagagccatagtactgtgttctgaaagccatttagaatttctttgtgagcatgtagtgctttgcacgccacagaagccgtctgccgtgtgtgaggagcatacaatggactttctaaagataaggcgtgggcttccacagtgtctgccagagtttagttctttataccttactgaaaaatgcctcgtggtcttcgcagaggggaaggcctgtctaaagtcaatcatccgagatgggttttccattccaaagaaaggcaatatggttccttccttccctcctaaaatatgacttaacttttaagagaaatgttctgacacccacctaaacacacaaggcacgttcctggcctgtgttcaagggaaatgatcagtcattgcattgttattccaaagagcagccaacagtggcctcccccaggccctaccctgcaatgggattcgctttcatttaatggaaacttctgggactgatgcccaactcagtgcactcaagacgcatctccagttttcgggggaagctggtatttgacatagtgtgttaaacagctcctgagaacctttgggacactctgccatggctggcgtgaggcccagaggaccacgcagaggcaatggtagtacagatgtcacagctgagggtacgatgaggcctgggctcagtgagccaggacgaatgtgacagacaccccttgctgccacagtcagccctttgacgaaggtgggctggtgattctggaagtattggctatagcggtgggcccagtcaactcttccttgtggacttacgacagcagattttctctaggataagcttgtgtggttctgccagtgaagcagagaaccacctgtgctgttgtggaaggcgtgccgttgagggggaaaacgaagcccagtatttgctactgtttttcctttttttactatgacaggaaaataaatgcaattttagtggaattgattgacagtgtctccttactttgaagttttcaccaaagcaaaaaggtccatatccaatagtatcctttgtgctgtggcttgattttggcctattttacattatttggtccaggaaattaggttatattaggttttttgtatactaaaaatcagttatggcacaataaagattttctgtttttaaattgtatttcatctgcttcctccccattctctcactttaagtgacattgaggaaggtattctgtcccacaggtttctgtggacagcgatacagcaggagtcagtgaaatcaactggggagctcacttgagctcttgataagaaatgtggagaaaagtaaaaaccaagctttgaagaaacagaagaaattaatcttttagttagttgaacataccaaagcagaggactggaatctgtttgttctaaccaacccgttctccctggcttggcacgtgccgtgagagcgcagcttgccggagggagggccgctgtgtgcgcctcacatctggctcccagtggaaacttttactcctcctcatccgcagatgtgatagaactgaagtatctaggaattctgcctttgtcatttgttttaatttgtgtgccctgttcattttttttgtctttcccaaatcttggtagtctccttatagttgaagataaaatgttgagtgcacttattttagaatatcctagacataactgtctaagtaaaagcgctctattaatctaaaacactacaagagaatttaacaccatctctcaaatgcttttttggagagcttaatgggattctgaatatttgcaatgtggagtttccgccccgatctcacgtcagtgagggtctcctgtctctcaagtgtgtttcctttggctgttccctaatacaaaacacggacatatttttactcgtagcactcaatttagtaacttctagatgctaccgttgacctgagttaaattcatttagtcgtgtacgtaaaaactctccttttagtgtgttattttcttggccttcccttttaaaggttaaagtttctaacctaagaattaagtacgcgttcaggaagctgttgtctaggccttccccttgtgaatctgggttcattccaatacggcaagtaagagttggaaactttgagaacacagactataaaggcagcagcccgaacactgtcagactctaattggcgaccctgggaaacagttgccctgctattctttaaagaaagacgtttattctgatgataaaaacagttagccagactgtttttaaagcacctggcgggaagcagaaggttggatccaagcccttgttcagatttggtgcctgataagacaggggtttctctttttgtgacctttattattattattttgttaactgttgtaaccagttagctgttgtgttttaagatagaaaggaacaagactaaaattgtaaatactttgtaaacatcagcatttgtacttgaatagtaggattttaaagggcattgatagcataccaaacaaaaggcaaaataaagtgacctttttataaaaaaaaaaagaaaaagtcgac

SEQ ID NO: 572893 - DNA, 995 bp, Homo sapiens
cgggcgcggcccgagcgcgcaacttgcctagccggagcccgtgcggccagcgcacggcctcaacccgcatcggacccgcgccccgcggccgatgcatgggcgcgcgcgctcaggcggcccctggcccgggcgggctctgctgctgctgtgctgctgttgtgtgctcgggctgctgggcccctgggcgcgcagggggcgcggggccgggcggggcgggagaagaacaggttaacgccgcagggtcaaacacctttctcccagagcgtcaggggccatgtcggggaggagaacgtgcgcgccgatcgagaagttctggccgaggctgacttgggagatttgtgcggggagtggatatgtggtggagaacgcttgtggaaagtttggacgaggctccttggatgtcttggaggttgaggtctccgaatcctgtcccagtattctcaggcccgagcctcggttgtccaagtcagcccggggcgcggggcgctccgtgggggccgggcgtcgtccttcctggccatacgtggttcttgtcccggctgaccgcttggggcttcactttcgggcgtcctggacggttgggtgttcgggcgcttcgttctggatcgggggggccgccctgttcccatgttccggggtgtaccttctgccgagtccgagggcgagccgggaaacgcggggctggcggaagcgacgggggggccgacgaaatcatgagccgggccagggctctaaggggggaacagtccaaggggcccggataccccggcaccccacggtgtgggagaacggtgtgcccctgggaagagcggcggagcgccaaccgtctaagggggtgtcgggcggggcctcaggacatataagtgcccggggggcgccaaaaacagcgtttaaagaagagaaaacaccgcgtttaaaagggggggggggggacaaccgcggcggacaacgcaggaggcacacagggcagcacaacagggcgacgccaaacacgt

SEQ ID NO: 572894 - DNA, 12130 bp, Homo sapiens
agcggggcggcggcgcggcttccatcctcccgccctcctgacgcggccggagcgcagccctgaggcccagggagaacgacacattggatacagaagggaggtgatcatgcaccatggcactggcccccagaacgtccagcatcagctgcagaggtccagggcctgccctggcagcgagggtgaggagcagccggcccaccccaacccacccccgtcccccgcagctcccttcgctccctcagcaagcccgtcggcaccccagtctcccagttatcaaatacagcagctgatgaataggagccctgcaaccgggcagaacgtgaacatcaccctgcagagcgtgggccctgtcgtcgggggaaaccagcagatcacactggccccactgccgctccccagccccacctctccaggcttccagttcagcgctcagcctcggcggtttgagcatgggtctccatcatacattcaggtcacgtcccccttgtcccagcaggtccagacccagagtcccacgcagcccagtccggggccggggcaggccttgcagaatgtgcgtgcaggtgcccctggccctgggctgggcctctgcagcagcagccctacaggggacttcgtggatgccagcgtgctggtgaggcagatcagcttgagcccctccagtggtggacactttgtgtttcaggatgggtcagggctcacccagatcgcccagggagcccaggttcagctccagcacccgggtacgcccatcacagtccgagagcggagaccctcccagccccacacacagtcagggggcaccatccaccacctgggaccccagagccctgcagccgcgggtggggccggcctgcagcccctggccagcccaagccacatcaccacggctaacttgccaccgcagatcagcagcatcatccagggccagctggttcagcagcagcaggtgctgcaggggccgccgctgccccggcccctgggcttcgagaggacgcccggcgtgctgctccccggggctgggggcgcagcggggtttgggatgacgtccccacccccgcccaccagcccttccaggactgccgtgcccccaggcctttccagcctcccactcacgtctgtggggaacacgggaatgaagaaggttcccaagaagttagaggagattcccccagcctctccggagatggcacagatgaggaagcagtgcctggactatcattaccaggagatgcaggctctgaaggaggtcttcaaggagtatttgattgaactgtttttcttgcaacactttcaagggaacatgatggatttcttagctttcaaggagagactgtatggaccattacaagcatatcttaggcagaatgatttggacattgaagaagaggaggaggaggaggaagaggaggaagaaaaatctgaggttatcaatgacgagcagcaagccctcgcagggagcctggtagcaggggccggaagcacagtagagacggacctgtttaagaggcagcaggcgatgccctccacaggtatggcagagcagtctaagaggcctcgccttgaagtgggtcaccaaggggtagttttccagcacccaggggcggacgcaggcgttcctctccagcaactaatgccgaccgcacaaggaggaatgccccccacgccgcaggccgcgcagctcgctggacagaggcagagtcagcagcagtatgacccctccacggggcctcccgtgcagaacgctgccagcttgcacaccccactgccgcagctgcccgggaggctgcccccagccggtgttcccactgcagccctctcctctgcgctgcagtttgcacagcagccgcaagtggtagaggcccagacacagctccaaatcccggtgaagactcagcagcccaatgttcccatccctgcaccgcccagcagccaactccccatccctccctcgcagcctgcacagctggccctccacgttcccacacctggaaaggtgcaggtgcaggcctctcagctttcctccctgccacagatggtagcatcgacaaggctccctgtggaccctgccccgccctgcccacggcctctgcccacctcttctacctcgtccctcgcgcctgtgagtggctccggcccaggaccctcccctgctcgatcctctccagtaaatagaccttcctcagccaccaataaggcactatctccagtcacttcccggaccccaggggtggtggcatctgcccccaccaaaccacagagtcctgctcagaatgccacctcgtcccaagacagttctcaggatacgctgacagaacaaataactctggagaaccaggtgcatcagcgcattgcggagctgaggaaagcaggtctgtggtcccagaggcgtctgccaaagctgcaggaggccccacgccccaagtcccactgggactatctgctggaggagatgcagtggatggccacagactttgcccaggagaggaggtggaaggtggctgctgcgaagaagctcgttagaactgtggtgcgccatcacgaggagaagcagctccgtgaagaaagggggaagaaggaagagcagagcagactgaggcggatagccgcctccacggcccgggagatagagtgcttttggtcgaatattgaacaggttgtggaaataaaactacgagtagaattagaagaaaaaaggaagaaggccttaaatttacagaaagtttccaggagagggaaagaattgagacctaaaggatttgacgcattacaggaaagttctctggattcaggaatgtctggaagaaaaagaaaagctagcatatctttgactgatgacgaagtggacgatgaagaggaaacaattgaagaggaggaagcaaatgaaggcgttgtggaccaccaaacagaactttctaatttagccaaggaagctgagctgcccctcctggacctgatgaagctgtacgaaggcgccttcctgccgagttctcagtggccccggccgaagcctgatggggaggacacaagcggagaggaagatgcagatgactgtccaggcgacagggagagtcgcaaggacttggttctcatcgactcgcttttcatcatggatcagttcaaagctgccgagaggatgaatatcgggaagccaaacgccaaggacattgcggacgtcactgcggtggctgaagccatcctgccgaagggcagtgctcgggtcacaacctcggtcaagtttaatgctccatctttgttgtatggggctctcagagattatcagaagattggcctggactggctggccaaactttacaggaagaatctcaatggcatattggcagatgaagctgggctgggtaaaacagtgcagatcattgctttttttgcccacctagcttgtaacgaaggtaattggggcccccatcttgttgttgtgagaagttgtaacatactcaagtgggagcttgaattgaaacgttggtgtcccggactcaaaatcctctcatatattggcagccacagagaactcaaagcaaagagacaggagtgggccgaacccaacagcttccacgtctgcatcacgtcctacactcagttcttccggggcctcaccgccttcacacgagtgcgctggaagtgcctggtcattgatgagatgcagcgcgtgaagggcatgaccgagaggcactgggaagcggttttcaccctgcagagccaacaacgtctgcttctgatcgactcgccgctgcacaataccttcctggagctctggaccatggtgcacttcctggtcccagggatctccaggccctacctgagctcccctctgagggcccccagtgaagagagccaggattactaccataaagtggtcataaggttacacagggtgacacagccatttattttgaggagaactaagagagatgtggaaaagcaactaacaaagaaatatgagcatgttttgaagtgtcgcctttctaaccgacaaaaagccttatacgaggacgttatcctgcaacctggcactcaggaggccttgaagagcgggcactttgtcaacgtcctgagcatccttgtgcggctgcagcgcatctgcaaccaccctgggctcgtcgagccccggcacccaggctcttcctacgtggcggggccactggagtatccgtccgcatctctaatcctgaaggcactggagagagatttctggaaggaagcagatctttctatgtttgatctcatcggcttagaaaataaaatcactcgtcacgaggcagagttgctgtctaagaaaaagataccgcggaaactcatggaggaaatctccacttcagcagccccagcagcccgaccagcagcagcaaagctgaaggccagcaggttgtttcagcctgtgcagtatggccagaagcccgagggtcgcaccgtggctttccccagcactcacccgccccggacggcagcccccaccacggcctctgctgctccacagggcccgcttcgaggacggccgcccatcgccacgttctctgccaatccggaggcaaaaggtggagaggtagtgaaaatagctcagctggcatccatcacaggaccacagagccgcgtggctcagccagagacgccggtgacactgcagttccagggcagcaagttcaccctgtcacacagccagctccggcagctcacagcgggccagccgctgcagctgcaaggcagcgtcctccagatcgtgtccgcccccgggcagccctaccttcgagcccctggccctgtggtgatgcagaccgtgtctcaggcgggcgctgtgcacggcgccctgggaagcaagcccccggccggcggtcccagccctgcacccttgaccccacaagttggcgttccgggccgcgtggcggtgaatgccttggctgtaggagaacccggaacggcctccaaaccagcttctcccattggagggccgacccaggaggaaaagaccagactcttgaaagagcgcctggatcagatttatttagtcaacgagcggcgctgttctcaagctccagtctatggcagagacttgctaaggatttgtgccctgcctagccatggaagggtacagtggcgtgggtccctggatggccgtcgtgggaaggaggccgggccagcgcacagttacacttcatcctcagaaagtccaagtgagctgatgttgacgctttgtcggtgtggagagtctctgcaggatgttattgacagggtggcctttgtgattcctccggtggtggcagcacccccgtccctacgggtgccgcggccgccacccctgtacagccacagaatgaggatcttgaggcagggcctgagagagcacgctgcgccgtacttccagcagctgcggcagaccacggctccacgcctgctgcagttccctgagctgaggctggtgcagttcgactcaggtatgcggcagttgggggcgtggcccgtgcgggagctgcaccggccctggatgatgaggcgctcttgatgtgattcgcttcccagggaagttggaagctttagctatcttgcttcagaaattgaaatctgaaggacgtcgggtgctgattttatcacagatgattcttatgttggacattttagagatgttcttgaacttccattacctcacctatgtaagaatcgatgaaaatgccagcagtgagcaacggcaggaactgatgaggagtttcaacagagacaggcggattttttgtgccattctctccactcacagccgtaccacaggtataaaccttgtagaggcggacaccgtcgtgttttatgacaatgacctgaatccagtgatggatgccaaagctcaggagtggtgcgataggatcgggagatgcaaagacatccacatatacaggcttgtgagtggcaattccattgaagagaaattgttgaaaaatggaactaaagatctgatccgagaagtggctgctcagggaaatgactactccatggctttcttaactcagcgaaccatccaggagctgtttgaagtttattctcccatggatgatgctggcttcccggtcaaagctgaggagtttgtggtgctttctcaggaaccttctgtcacggaaaccattgcacccaaaattgcaagacctttcatagaggccctcaagagtattgagtatctggaggaggatgcccagaagtccgcacaggagggggtgctgggaccacacactgatgctctgtcatcagactctgagaacatgccgtgtgatgaagaaccatcccaattagaggagctagctgacttcatggagcagcttacaccaattgaaaaatatgctttaaattacctggaattattccatacttctattgagcaagaaaaggagagaaacagtgaggacgcagtgatgactgcagtgagggcatgggagttctggaacctgaagaccctgcaggagagggaggcccggctgcggctggagcaggaggaggcggagctcctgacctacacgcgagaggatgcctacagcatggagtatgtctacgaagatgtcgatgggcagacagaagtcatgccgctctggaccccacccaccccgccgcaggacgacagcgacatctacctcgactcggtcatgtgtctcatgtatgaagccactcccatcccagaggctaagctgccccctgtgtacgtgaggaaggagcggaagcgacacaaaacagacccctcagctgcaggcaggaagaagaagcagcgtcacggggaggcggtcgtccctcctcggtccctgtttgaccgcgcaacaccaggacttctgaaaattcgcagagagggcaaggagcagaagaagaatattctgctgaagcagcaggtgccattcgccaagcccctgccaacttttgccaaacccacagctgagcctggtcaagacaaccccgagtggctcatcagtgaggactgggcgctgctgcaggctgtaaagcagttactggagctgcctttgaacctcacaatcgtgtcacctgctcacacacctaattgggatcttgtcagtgacgttgttaactcctgtagccgaatctaccgctcttccaaacagtgccggaatcgctacgagaatgtcatcattccacgagaggaggggaagagtaaaaacaaccgtcctctccgtacgagccagatctatgcccaggatgagaatgccacacacacccagctgtacacgagccactttgacttaatgaaaatgactgctggcaagaggagtcccccaatcaaacctctgcttggcatgaatccctttcagaagaaccccaagcacgcgtctgtgttggcagaaagtggaatcaactatgacaagccgctgcctcccatccaggtggcatctctccgtgcagagcgaatcgcaaaagagaaaaaggctctggctgatcagcagaaggcacagcagccggccgtggcccagccacccccgccccagccgcagcccccaccacccccgcagcagccaccgccaccgctgccacaaccacaggcagcgggcagccagccgccagcagggccaccagctgtccagccccaaccccagccacagccccagacccagccacagcctgtgcaggccccagcgaaggcgcagcccgcaatcacgacggggggcagtgcagccgtactggcaggaaccattaaaacatcagttactgggacgagcatgcccactggtgccgtgagtggaaatgtgatcgtgaacaccatcgcaggggtcccagctgccaccttccagtccatcaacaagcgcctggcgtcgccagtggctcctggggccttgactacgccgggaggctctgctcccgcccaggtggtgcacacccagcccccgccacgggcagtcggctccccagccacggcgacccctgacctggtgtccatggcaacgactcagggtgttcgagcggtcacttctgtgacagcctcggccgtggtcactaccaacctgaccccagtgcagaccccggcacggtctttggtgccccaagtgtcccaagccacaggagttcagctccctggaaaaaccatcacacctgcacatttccagcttctcaggcagcagcagcagcagcagcagcaacagcagcagcagcagcagcagcagcagcagcagcagcagcagcagcaacagcagcagcagcaacagacgacgacgacctctcaggtgcaagttccacagatccagggccaggcccagtccccagcacagatcaaagctgtgggcaagctgacgccggaacacctcatcaaaatgcagaagcagaaactgcagatgcccccgcagcccccaccgccacaggcccagtctgcgcccccgcagccagcagcccaagtgcaagtgcagacctcgcagccgccgcagcagcagagcccccagctcacgacggtcacggccccaaggcctggtgccctgctgacgggcaccaccgtggccaacctccaggtggcccggctcacccgggttcccacttctcaactgcagtcgcaagggcagatgcagacccaggcaccccagccagcccaggtgcccttggcgaagcctccggtggtgtccgtcccggcagctgtggtctcctcaccgggagtcaccaccctgcccatgaacgtcgcggggatcagcgtggcgatcggtcagccacagaaggcagcaggacagaccgtggtggcccagcccgtgcacatgcagcagctgctgaagctgaagcagcaggccgtccagcagcagaaggccatccagccccaggctgcacagggcccggcagccgtccagcagaagatcaccgcacagcagatcaccacccctggcgcgcagcagaaggttgcctacgccgcgcagccggcccttaagacccagtttcttaccacacccatctcccaggcccagaaactggccggggcccagcaagtgcagacccagatccaggttgcaaaacttcctcaagttgttcaacagcaaacacccgtggccagcatccagcaagttgcctctgcttcccagcaggcttctccacagactgtggcgctcacgcaggcgacggcggccgggcagcaggtgcagatgatccctgcagtgaccgcgactgcccaggtggttcagcagaaactcattcagcagcaggtggtgaccacggcgtcggccccgctccagactccaggcgctcccaacccagcccaggtgcccgccagctccgacagcccaagccagcagcccaagttacagatgagggtccctgctgtcaggctaaagacacctactaagcctccgtgccagtagtcagggcagcagggctgcctctcatctaaagcaaaactaccttcctcacagaaaacgctttattagtgaaccttgggaccatgtcacgcaagagattcagcactgggaaagatataattgaaacaaaatagtgtaatcattttattaaaatgcatcccacactgcaggacaaatggtccttatggagtgccgcgttctctgtactacgtggctcatggaaaaagtgacaacatggcttcctctaaatcatttcacctttcagtccccacccgcacccgtcccctagagccatagtactgtgttctgaaagccatttagaatttctttgtgagcatgtagtgctttgcacgccacagaagccgtctgccgtgtgtgaggagcatacaatggactttctaaagataaggcgtgggcttccacagtgtctgccagagtttagttctttataccttactgaaaaatgcctcgtggtcttcgcagaggggaaggcctgtctaaagtcaatcatccgagatgggttttccattccaaagaaaggcaatatggttccttccttccctcctaaaatatgacttaacttttaagagaaatgttctgacacccacctaaacacacaaggcacgttcctggcctgtgttcaagggaaatgatcagtcattgcattgttattccaaagagcagccaacagtggcctcccccaggccctaccctgcaatgggattcgctttcatttaatggaaacttctgggactgatgcccaactcagtgcactcaagacgcatctccagttttcgggggaagctggtatttgacatagtgtgttaaacagctcctgagaacctttgggacactctgccatggctggcgtgaggcccagaggaccacgcagaggcaatggtagtacagatgtcacagctgagggtacgatgaggcctgggctcagtgagccaggacgaatgtgacagacaccccttgctgccacagtcagccctttgacgaaggtgggctggtgattctggaagtattggctatagcggtgggcccagtcaactcttccttgtggacttacgacagcagattttctctaggataagcttgtgtggttctgccagtgaagcagagaaccacctgtgctgttgtggaaggcgtgccgttgagggggaaaacgaagcccagtatttgctactgtttttcctttttttactatgacaggaaaataaatgcaattttagtggaattgattgacagtgtctccttactttgaagttttcaccaaagcaaaaaggtccatatccaatagtatcctttgtgctgtggcttgattttggcctattttacattatttggtccaggaaattaggttatattaggttttttgtatactaaaaatcagttatggcacaataaagattttctgtttttaaattgtatttcatctgcttcctccccattctctcactttaagtgacattgaggaaggtattctgtcccacaggtttctgtggacagcgatacagcaggagtcagtgaaatcaactggggagctcacttgagctcttgataagaaatgtggagaaaagtaaaaaccaagctttgaagaaacagaagaaattaatcttttagttagttgaacataccaaagcagaggactggaatctgtttgttctaaccaacccgttctccctggcttggcacgtgccgtgagagcgcagcttgccggagggagggccgctgtgtgcgcctcacatctggctcccagtggaaacttttactcctcctcatccgcagatgtgatagaactgaagtatctaggaattctgcctttgtcatttgttttaatttgtgtgccctgttcattttttttgtctttcccaaatcttggtagtctccttatagttgaagataaaatgttgagtgcacttattttagaatatcctagacataactgtctaagtaaaagcgctctattaatctaaaacactacaagagaatttaacaccatctctcaaatgcttttttggagagcttaatgggattctgaatatttgcaatgtggagtttccgccccgatctcacgtcagtgagggtctcctgtctctcaagtgtgtttcctttggctgttccctaatacaaaacacggacatatttttactcgtagcactcaatttagtaacttctagatgctaccgttgacctgagttaaattcatttagtcgtgtacgtaaaaactctccttttagtgtgttattttcttggccttcccttttaaaggttaaagtttctaacctaagaattaagtacgcgttcaggaagctgttgtctaggccttccccttgtgaatctgggttcattccaatacggcaagtaagagttggaaactttgagaacacagactataaaggcagcagcccgaacactgtcagactctaattggcgaccctgggaaacagttgccctgctattctttaaagaaagacgtttattctgatgataaaaacagttagccagactgtttttaaagcacctggcgggaagcagaaggttggatccaagcccttgttcagatttggtgcctgataagacaggggtttctctttttgtgacctttattattattattttgttaactgttgtaaccagttagctgttgtgttttaagatagaaaggaacaagactaaaattgtaaatactttgtaaacatcagcatttgtacttgaatagtaggattttaaagggcattgatagcataccaaacaaaaggcaaaataaagtgacctttttataaaaaaaaaaagaaaaagtcgac

SEQ ID NO: 572895 - DNA, 12080 bp, Homo sapiens
ctggctccgcgtcggccggtcggtttggtcggttgtagtggcctcgccgcccggtccgctgtcgcagcgctcatccgcgccgggagcccttggctgcgtcgcccggcagccgcgggagcatttcctgaagacgtagtcatgcagcacgtcagcagctcccagagcagccagcgccatgtccagtggcctggggcctgccccggcgcgggcgaggagcagccagcgtgctcccagccgtccctgcccctcacactgccatcccccagccaccaactacagcagctgatggtccagacccagagtcccacgcagcccagtccggggccggggcaggccttgcagaatgtgcgtgcaggtgcccctggccctgggctgggcctctgcagcagcagccctacaggggacttcgtggatgccagcgtgctggtgaggcagatcagcttgagcccctccagtggtggacactttgtgtttcaggatgggtcagggctcacccagatcgcccagggagcccaggttcagctccagcacccgggtacgcccatcacagtccgagagcggagaccctcccagccccacacacagtcagggggcaccatccaccacctgggaccccagagccctgcagccgcgggtggggccggcctgcagcccctggccagcccaagccacatcaccacggctaacttgccaccgcagatcagcagcatcatccagggccagctggttcagcagcagcaggtgctgcaggggccgccgctgccccggcccctgggcttcgagaggacgcccggcgtgctgctccccggggctgggggcgcagcggggtttgggatgacgtccccacccccgcccaccagcccttccaggactgccgtgcccccaggcctttccagcctcccactcacgtctgtggggaacacgggaatgaagaaggttcccaagaagttagaggagattcccccagcctctccggagatggcacagatgaggaagcagtgcctggactatcattaccaggagatgcaggctctgaaggaggtcttcaaggagtatttgattgaactgtttttcttgcaacactttcaagggaacatgatggatttcttagctttcaaggagagactgtatggaccattacaagcatatcttaggcagaatgatttggacattgaagaagaggaggaggaggaggaagaggaggaagaaaaatctgaggttatcaatgacgaggtaaaggttgtgacaggaaaggatgggcagactgggactcccgttgctatagcaacccagcttccgccaaaggtttctgctgctttttcatcccagcagcaaccatttcagcaagccctcgcagggagcctggtagcaggggccggaagcacagtagagacggacctgtttaagaggcagcaggcgatgccctccacaggtatggcaggaggaatgccccccacgccgcaggccgcgcagctcgctggacagaggcagagtcagcagcagtatgacccctccacggggcctcccgtgcagaacgctgccagcttgcacaccccactgccgcagctgcccgggaggctgcccccagccggtgttcccactgcagccctctcctctgcgctgcagtttgcacagcagccgcaagtggtagaggcccagacacagctccaaatcccggtgaagactcagcagcccaatgttcccatccctgcaccgcccagcagccaactccccatccctccctcgcagcctgcacagctggccctccacgttcccacacctggaaaggtgcaggtgcaggcctctcagctttcctccctgccacagatggtagcatcgacaaggctccctgtggaccctgccccgccctgcccacggcctctgcccacctcttctacctcgtccctcgcgcctgtgagtggctccggcccaggaccctcccctgctcgatcctctccagtaaatagaccttcctcagccaccaataaggcactatctccagtcacttcccggaccccaggggtggtggcatctgcccccaccaaaccacagagtcctgctcagaatgccacctcgtcccaagacagttctcaggatacgctgacagaacaaataactctggagaaccaggtgcatcagcgcattgcggagctgaggaaagcaggtctgtggtcccagaggcgtctgccaaagctgcaggaggccccacgccccaagtcccactgggactatctgctggaggagatgcagtggatggccacagactttgcccaggagaggaggtggaaggtggctgctgcgaagaagctcgttagaactgtggtgcgccatcacgaggagaagcagctccgtgaagaaagggggaagaaggaagagcagagcagactgaggcggatagccgcctccacggcccgggagatagagtgcttttggtcgaatattgaacaggttgtggaaataaaactacgagtagaattagaagaaaaaaggaagaaggccttaaatttacagaaagtttccaggagagggaaagaattgagacctaaaggatttgacgcattacaggaaagttctctggattcaggaatgtctggaagaaaaagaaaagctagcatatctttgactgatgacgaagtggacgatgaagaggaaacaattgaagaggaggaagcaaatgaaggcgttgtggaccaccaaacagaactttctaatttagccaaggaagctgagctgcccctcctggacctgatgaagctgtacgaaggcgccttcctgccgagttctcagtggccccggccgaagcctgatggggaggacacaagcggagaggaagatgcagatgactgtccaggcgacagggagagtcgcaaggacttggttctcatcgactcgcttttcatcatggatcagttcaaagctgccgagaggatgaatatcgggaagccaaacgccaaggacattgcggacgtcactgcggtggctgaagccatcctgccgaagggcagtgctcgggtcacaacctcggtcaagtttaatgctccatctttgttgtatggggctctcagagattatcagaagattggcctggactggctggccaaactttacaggaagaatctcaatggcatattggcagatgaagctgggctgggtaaaacagtgcagatcattgctttttttgcccacctagcttgtaacgaaggtaattggggcccccatcttgttgttgtgagaagttgtaacatactcaagtgggagcttgaattgaaacgttggtgtcccggactcaaaatcctctcatatattggcagccacagagaactcaaagcaaagagacaggagtgggccgaacccaacagcttccacgtctgcatcacgtcctacactcagttcttccggggcctcaccgccttcacacgagtgcgctggaagtgcctggtcattgatgagatgcagcgcgtgaagggcatgaccgagaggcactgggaagcggttttcaccctgcagagccaacaacgtctgcttctgatcgactcgccgctgcacaataccttcctggagctctggaccatggtgcacttcctggtcccagggatctccaggccctacctgagctcccctctgagggcccccagtgaagagagccaggattactaccataaagtggtcataaggttacacagggtgacacagccatttattttgaggagaactaagagagatgtggaaaagcaactaacaaagaaatatgagcatgttttgaagtgtcgcctttctaaccgacaaaaagccttatacgaggacgttatcctgcaacctggcactcaggaggccttgaagagcgggcactttgtcaacgtcctgagcatccttgtgcggctgcagcgcatctgcaaccaccctgggctcgtcgagccccggcacccaggctcttcctacgtggcggggccactggagtatccgtccgcatctctaatcctgaaggcactggagagagatttctggaaggaagcagatctttctatgtttgatctcatcggcttagaaaataaaatcactcgtcacgaggcagagttgctgtctaagaaaaagataccgcggaaactcatggaggaaatctccacttcagcagccccagcagcccgaccagcagcagcaaagctgaaggccagcaggttgtttcagcctgtgcagtatggccagaagcccgagggtcgcaccgtggctttccccagcactcacccgccccggacggcagcccccaccacggcctctgctgctccacagggcccgcttcgaggacggccgcccatcgccacgttctctgccaatccggaggcaaaagcagcagcagccccgtttcagacctctcaggcttccgccagtgctccacgacaccagcccgcctcggcctccagcacagccgctagcccggcccatcctgcgaaactgcgggcccagaccacagcacaggccttcaccccaggccagcccccgccccagccccaggccccctcgcacgcggccgggcagagcgcgctgcctcagaggctggtgctcccctcgcaggcccaggcccgcttgcccagtggagaggtagtgaaaatagctcagctggcatccatcacaggaccacagagccgcgtggctcagccagagacgccggtgacactgcagttccagggcagcaagttcaccctgtcacacagccagctccggcagctcacagcgggccagccgctgcagctgcaaggcagcgtcctccagatcgtgtccgcccccgggcagccctaccttcgagcccctggccctgtggtgatgcagaccgtgtctcaggcgggcgctgtgcacggcgccctgggaagcaagcccccggccggcggtcccagccctgcacccttgaccccacaagttggcgttccgggccgcgtggcggtgaatgccttggctgtaggagaacccggaacggcctccaaaccagcttctcccattggagggccgacccaggaggaaaagaccagactcttgaaagagcgcctggatcagatttatttagtcaacgagcggcgctgttctcaagctccagtctatggcagagacttgctaaggatttgtgccctgcctagccatggaagggtacagtggcgtgggtccctggatggccgtcgtgggaaggaggccgggccagcgcacagttacacttcatcctcagaaagtccaagtgagctgatgttgacgctttgtcggtgtggagagtctctgcaggatgttattgacagggtggcctttgtgattcctccggtggtggcagcacccccgtccctacgggtgccgcggccgccacccctgtacagccacagaatgaggatcttgaggcagggcctgagagagcacgctgcgccgtacttccagcagctgcggcagaccacggctccacgcctgctgcagttccctgagctgaggctggtgcagttcgactcagggaagttggaagctttagctatcttgcttcagaaattgaaatctgaaggacgtcgggtgctgattttatcacagatgattcttatgttggacattttagagatgttcttgaacttccattacctcacctatgtaagaatcgatgaaaatgccagcagtgagcaacggcaggaactgatgaggagtttcaacagagacaggcggattttttgtgccattctctccactcacagccgtaccacaggtataaaccttgtagaggcggacaccgtcgtgttttatgacaatgacctgaatccagtgatggatgccaaagctcaggagtggtgcgataggatcgggagatgcaaagacatccacatatacaggcttgtgagtggcaattccattgaagagaaattgttgaaaaatggaactaaagatctgatccgagaagtggctgctcagggaaatgactactccatggctttcttaactcagcgaaccatccaggagctgtttgaagtttattctcccatggatgatgctggcttcccggtcaaagctgaggagtttgtggtgctttctcaggaaccttctgtcacggaaaccattgcacccaaaattgcaagacctttcatagaggccctcaagagtattgagtatctggaggaggatgcccagaagtccgcacaggagggggtgctgggaccacacactgatgctctgtcatcagactctgagaacatgccgtgtgatgaagaaccatcccaattagaggagctagctgacttcatggagcagcttacaccaattgaaaaatatgctttaaattacctggaattattccatacttctattgagcaagaaaaggagagaaacagtgaggacgcagtgatgactgcagtgagggcatgggagttctggaacctgaagaccctgcaggagagggaggcccggctgcggctggagcaggaggaggcggagctcctgacctacacgcgagaggatgcctacagcatggagtatgtctacgaagatgtcgatgggcagacagaagtcatgccgctctggaccccacccaccccgccgcaggacgacagcgacatctacctcgactcggtcatgtgtctcatgtatgaagccactcccatcccagaggctaagctgccccctgtgtacgtgaggaaggagcggaagcgacacaaaacagacccctcagctgcaggcaggaagaagaagcagcgtcacggggaggcggtcgtccctcctcggtccctgtttgaccgcgcaacaccaggacttctgaaaattcgcagagagggcaaggagcagaagaagaatattctgctgaagcagcaggtgccattcgccaagcccctgccaacttttgccaaacccacagctgagcctggtcaagacaaccccgagtggctcatcagtgaggactgggcgctgctgcaggctgtaaagcagttactggagctgcctttgaacctcacaatcgtgtcacctgctcacacacctaattgggatcttgtcagtgacgttgttaactcctgtagccgaatctaccgctcttccaaacagtgccggaatcgctacgagaatgtcatcattccacgagaggaggggaagagtaaaaacaaccgtcctctccgtacgagccagatctatgcccaggatgagaatgccacacacacccagctgtacacgagccactttgacttaatgaaaatgactgctggcaagaggagtcccccaatcaaacctctgcttggcatgaatccctttcagaagaaccccaagcacgcgtctgtgttggcagaaagtggaatcaactatgacaagccgctgcctcccatccaggtggcatctctccgtgcagagcgaatcgcaaaagagaaaaaggctctggctgatcagcagaaggcacagcagccggccgtggcccagccacccccgccccagccgcagcccccaccacccccgcagcagccaccgccaccgctgccacaaccacaggcagcgggcagccagccgccagcagggccaccagctgtccagccccaaccccagccacagccccagacccagccacagcctgtgcaggccccagcgaaggcgcagcccgcaatcacgacggggggcagtgcagccgtactggcaggaaccattaaaacatcagttactgggacgagcatgcccactggtgccgtgagtggaaatgtgatcgtgaacaccatcgcaggggtcccagctgccaccttccagtccatcaacaagcgcctggcgtcgccagtggctcctggggccttgactacgccgggaggctctgctcccgcccaggtggtgcacacccagcccccgccacgggcagtcggctccccagccacggcgacccctgacctggtgtccatggcaacgactcagggtgttcgagcggtcacttctgtgacagcctcggccgtggtcactaccaacctgaccccagtgcagaccccggcacggtctttggtgccccaagtgtcccaagccacaggagttcagctccctggaaaaaccatcacacctgcacatttccagcttctcaggcagcagcagcagcagcagcagcaacagcagcagcagcagcagcagcagcagcagcagcagcagcagcagcaacagcagcagcagcaacagacgacgacgacctctcaggtgcaagttccacagatccagggccaggcccagtccccagcacagatcaaagctgtgggcaagctgacgccggaacacctcatcaaaatgcagaagcagaaactgcagatgcccccgcagcccccaccgccacaggcccagtctgcgcccccgcagccagcagcccaagtgcaagtgcagacctcgcagccgccgcagcagcagagcccccagctcacgacggtcacggccccaaggcctggtgccctgctgacgggcaccaccgtggccaacctccaggtggcccggctcacccgggttcccacttctcaactgcagtcgcaagggcagatgcagacccaggcaccccagccagcccaggtgcccttggcgaagcctccggtggtgtccgtcccggcagctgtggtctcctcaccgggagtcaccaccctgcccatgaacgtcgcggggatcagcgtggcgatcggtcagccacagaaggcagcaggacagaccgtggtggcccagcccgtgcacatgcagcagctgctgaagctgaagcagcaggccgtccagcagcagaaggccatccagccccaggctgcacagggcccggcagccgtccagcagaagatcaccgcacagcagatcaccacccctggcgcgcagcagaaggttgcctacgccgcgcagccggcccttaagacccagtttcttaccacacccatctcccaggcccagaaactggccggggcccagcaagtgcagacccagatccaggttgcaaaacttcctcaagttgttcaacagcaaacacccgtggccagcatccagcaagttgcctctgcttcccagcaggcttctccacagactgtggcgctcacgcaggcgacggcggccgggcagcaggtgcagatgatccctgcagtgaccgcgactgcccaggtggttcagcagaaactcattcagcagcaggtggtgaccacggcgtcggccccgctccagactccaggcgctcccaacccagcccaggtgcccgccagctccgacagcccaagccagcagcccaagttacagatgagggtccctgctgtcaggctaaagacacctactaagcctccgtgccagtagtcagggcagcagggctgcctctcatctaaagcaaaactaccttcctcacagaaaacgctttattagtgaaccttgggaccatgtcacgcaagagattcagcactgggaaagatataattgaaacaaaatagtgtaatcattttattaaaatgcatcccacactgcaggacaaatggtccttatggagtgccgcgttctctgtactacgtggctcatggaaaaagtgacaacatggcttcctctaaatcatttcacctttcagtccccacccgcacccgtcccctagagccatagtactgtgttctgaaagccatttagaatttctttgtgagcatgtagtgctttgcacgccacagaagccgtctgccgtgtgtgaggagcatacaatggactttctaaagataaggcgtgggcttccacagtgtctgccagagtttagttctttataccttactgaaaaatgcctcgtggtcttcgcagaggggaaggcctgtctaaagtcaatcatccgagatgggttttccattccaaagaaaggcaatatggttccttccttccctcctaaaatatgacttaacttttaagagaaatgttctgacacccacctaaacacacaaggcacgttcctggcctgtgttcaagggaaatgatcagtcattgcattgttattccaaagagcagccaacagtggcctcccccaggccctaccctgcaatgggattcgctttcatttaatggaaacttctgggactgatgcccaactcagtgcactcaagacgcatctccagttttcgggggaagctggtatttgacatagtgtgttaaacagctcctgagaacctttgggacactctgccatggctggcgtgaggcccagaggaccacgcagaggcaatggtagtacagatgtcacagctgagggtacgatgaggcctgggctcagtgagccaggacgaatgtgacagacaccccttgctgccacagtcagccctttgacgaaggtgggctggtgattctggaagtattggctatagcggtgggcccagtcaactcttccttgtggacttacgacagcagattttctctaggataagcttgtgtggttctgccagtgaagcagagaaccacctgtgctgttgtggaaggcgtgccgttgagggggaaaacgaagcccagtatttgctactgtttttcctttttttactatgacaggaaaataaatgcaattttagtggaattgattgacagtgtctccttactttgaagttttcaccaaagcaaaaaggtccatatccaatagtatcctttgtgctgtggcttgattttggcctattttacattatttggtccaggaaattaggttatattaggttttttgtatactaaaaatcagttatggcacaataaagattttctgtttttaaattgtatttcatctgcttcctccccattctctcactttaagtgacattgaggaaggtattctgtcccacaggtttctgtggacagcgatacagcaggagtcagtgaaatcaactggggagctcacttgagctcttgataagaaatgtggagaaaagtaaaaaccaagctttgaagaaacagaagaaattaatcttttagttagttgaacataccaaagcagaggactggaatctgtttgttctaaccaacccgttctccctggcttggcacgtgccgtgagagcgcagcttgccggagggagggccgctgtgtgcgcctcacatctggctcccagtggaaacttttactcctcctcatccgcagatgtgatagaactgaagtatctaggaattctgcctttgtcatttgttttaatttgtgtgccctgttcattttttttgtctttcccaaatcttggtagtctccttatagttgaagataaaatgttgagtgcacttattttagaatatcctagacataactgtctaagtaaaagcgctctattaatctaaaacactacaagagaatttaacaccatctctcaaatgcttttttggagagcttaatgggattctgaatatttgcaatgtggagtttccgccccgatctcacgtcagtgagggtctcctgtctctcaagtgtgtttcctttggctgttccctaatacaaaacacggacatatttttactcgtagcactcaatttagtaacttctagatgctaccgttgacctgagttaaattcatttagtcgtgtacgtaaaaactctccttttagtgtgttattttcttggccttcccttttaaaggttaaagtttctaacctaagaattaagtacgcgttcaggaagctgttgtctaggccttccccttgtgaatctgggttcattccaatacggcaagtaagagttggaaactttgagaacacagactataaaggcagcagcccgaacactgtcagactctaattggcgaccctgggaaacagttgccctgctattctttaaagaaagacgtttattctgatgataaaaacagttagccagactgtttttaaagcacctggcgggaagcagaaggttggatccaagcccttgttcagatttggtgcctgataagacaggggtttctctttttgtgacctttattattattattttgttaactgttgtaaccagttagctgttgtgttttaagatagaaaggaacaagactaaaattgtaaatactttgtaaacatcagcatttgtacttgaatagtaggattttaaagggcattgatagcataccaaacaaaaggcaaaataaagtgacctttttataaaaaaaaaaagaaaaagtcgac

SEQ ID NO: 572896 - DNA, 863 bp, Homo sapiens
ttggcccccgctgtgcttcgccctctttttttcagacctacagtcctcctccccctttggtaggctttcggccccaccacaggggtccccatttttctgtcaggaaggcgcttctgttcctgggtcaaccaccgaggcctgctcagggctttcaacctgccggcattttttcactttctcggggtgactcagtgcatattagttaagtccttctgtgtatctaggaaatgttaatgtcacttacgcttgattctcaaaatggacttctcaccgtgcccccatttttcactaggccctattaagagttgtgaggtacgccgaggagaaggcaatggtgcggagtcgagactatgtactaagggcgccctcaataccctcataagtcagagaggagagaaggcaaaagtgcccatacctggtcttcaaataaatagttgcttcacaaaagcagaggtcccaccagagaaggcctagaaaagaggcaatttgttcctgcttcatatgcggaaaccccagtggttatcaatacaatcctcaactataaaacaaactttggtatactgtttaggaggacaaaacacatgatcattgaaaactccaccttcaatggaaaaatacatgacatatattaatttccatgcagggcaatacatgaaaccaaacagctgcacaatatgtgatgtgacacacacatgtatgtgtaacagttcaagcgagggaagtcctgcatcacaataaaggataacaaacaagatcagatgaagacaatggtgtataccatgggatgggttcaaatgtagtaaacatcattagcagtaggggattggaggcagagaagaattcagcacgcagactactttgat

SEQ ID NO: 572897 - DNA, 727 bp, Homo sapiens
gactcctgctcagcatggctgctttagggactgttctcttcacaggtgtccggaggctgcactgcagcgcagccgttgtgggcggccgcccagtgccgactacagcagcgactgcctgccagcccccatcggttacgggccctttaccgagctcccagattgtcaatatgcggatggcgccctgttccccccaatgaaaggccagtttcgaaagaaaaggtctgacaggggaagactggttgtggcaaagaagggagtgggtatctggggttgttcaccggggaaatgttgggacggtcgtgctttttaccaaggcatggggaaggctccaagggccaggcaagaaaatgtttggacggggaaagaacccaagggggaaggccgggggaacaaattggctttttaaaaccccaaagaggggggtttcaccatctgggaaggggagcacccccaattttttcccccgaggcttccaatttaaaagaacggggcccaaccgttgcgcgtgtactttcccttttttttccctttcaaaagaagaactacatcagtataggactgcactcatcaacaacatcacacaacaatgctgtgttggtgtggggggccgcgctgatctggtgacgccccgtcggcggagagaagagcttctttgatgaagaacacaccatgcggtcgtggtgtggggggcccggaagccagggccccccatagtgtgtggcgtgtc

SEQ ID NO: 572898 - DNA, 346 bp, Homo sapiens
ggtcgacgggagacagacaaaagaatcaaagaagtaattcagccgggtgcggtggctcacgcctgtaatcccagcactttgggaggccaaggcgggtggatcacgaagtcaggggatcgagaccatcctggctaacatggtgaaaccccgtctctactaaaaatacaaaaaagttagccgggtgtggtggcgggcgcctgtagtcccagctactcgggaggctgaggcgggagaatggcgtgaacccgggaggcggacgttgcagggaacggagattgagccactgcactccagcctgggcaacagagcgagactccgtctcaaaaaaaaaaaagtcgacgcggcc

SEQ ID NO: 572899 - DNA, 369 bp, Homo sapiens
  misc_feature (147)..(147): n is a, c, g, or t
  misc_feature (366)..(366): n is a, c, g, or t
atactgggtacctaagttgaaaaagaaccccacaaatattcaaaactaaattgcaaaactgcaaaatgagagcattagagaccagtggttggtttttattcttgttttaattttcagcgctttgtctggtacctgccatgtggcgtnttttaagtgtttgttttgttgatgatcaaataaaataattgagaaaataacttttttccaagcttgggcagatattgagaattaagaaagggacagtttaaaattatatccatcaagtacactgatgaaacttaacctaatgggccttgggcccttttgggaaaacctgtttatgtttaaactaggggcaatgtttaccaatgtgtacatctttccaantaa

SEQ ID NO: 572900 - DNA, 329 bp, Homo sapiens
  misc_feature (120)..(120): n is a, c, g, or t
  misc_feature (188)..(188): n is a, c, g, or t
  misc_feature (267)..(267): n is a, c, g, or t
  misc_feature (323)..(323): n is a, c, g, or t
ggaaagggtccctcctgctgctgctggtgtcaaacctgctcctgtgccagagcgtggccccttgccatctgtcccggcggggctgccgatgccaggtgacccttcgagactgttgaccgnccgcgcctgtccactacatcataacctctctcagaaatgtcagcgaattcataacggatacccatggncgggggtcattaccaaggcataacagtgcacacttttccttgcaccccgagacaaggagaagccaacagataatgattntggctgtagcagatattgcatctggatgagcttgatattggcacggagactggatngcccgg

SEQ ID NO: 572901 - DNA, 490 bp, Homo sapiens
actaatttttgtatttttagtagagacggggtttcacctagtttagccaggatggtatatacaccacattttgtttatccattcatttgttgatggatatttgagttgcttccaccttttggctgttgtgaataatactgctgtgaacatggttgcacagctatctctttgagtccctgctttcaactcttttgggtatattcccagaaatggaattgttgtatcatatgataattctgtttttgaggaactgccatagtttcccatagtggctgccccattttacattcccatcaacagtgtacaagtattccagttactccagatcctcaccaatacttgttattttgtagggttggttggttttttgttttcttggcagtggtcacctcaatggatgtgaggcggtgtctttttgtgaattgcagtttcctaaaattagtgattttgagcatcttttcatgtggtcgttggccatttttgtatcttt

SEQ ID NO: 572902 - DNA, 206 bp, Homo sapiens
tgccaaagcgtagtaccaaaaaaataggccgggcgcgatggctcatgcctgtaatcccagcactttgggaggccgaggcgggcggataatgaggtcaggagattgagaccatcctggctaacacggtgaaaccctgtctctactaaaaacacacaaaaaaaattaggccgggcgcggtggctcacttgggtactacgctttggcag

SEQ ID NO: 572903 - DNA, 145 bp, Homo sapiens
ggcccccctgtggattgcaaccaaaatggggacttcctgggtatgggaggtcactccctctactcactgagtctaggattagggagggttattgccccaacctattgcaattgggagagtggagggacatggctcagacctcctc

SEQ ID NO: 572904 - DNA, 326 bp, Homo sapiens
gccctacatctccccgagaagaggtgaaagagactgctcctatctgcttctgcatcaaacttcaggctcaagacctgtccagaaaaaaaaatgtcttctttcagggatgaactgctgtcctcatcagacgccttattttgtttagaattcaagctcacttgacaggttattgtgaagattaaatgaattaatacatgtgaagcaactgtaacaactcttgacatgcgtgggctggactttcagaagaaacgttgtcagaactctgcccaactgaaaacaagcctactaaaaataaataaataaataaaattttaaaaaattgaaaa

SEQ ID NO: 572905 - DNA, 369 bp, Homo sapiens
gcgtcgaccaacaccataatgcctgttggtttacgtaaaaatctccagttagaaatagtaaccataggctaggcgcagtggctcacgcctgtaatcccaacactttgggaggctgaggtgggtggattacaaggtcaggagttcgagaccagcctgaccagcatggtgaaaccccatctctactaaaaatacaaaaatcagccaggtgtggtggcacctgcctgtaatcccagctactcaggaggctgaggcaggagaatcacttgaacccgtgaggcagaggttgcagtgagccgagattgcgccactgcattccagcctgggtgacagagtgagactttgtctgagaacaaacgtagaaaagtcgac

SEQ ID NO: 572906 - DNA, 201 bp, Homo sapiens
  misc_feature (4)..(4): n is a, c, g, or t
  misc_feature (7)..(7): n is a, c, g, or t
gggntancaggaatggctagggtagaaaagaaaaggggactcccagatctgaggggcatattgtcctaatgggaggggtgcaaaaggcacgtcagaagaggaggtttgagcggggcatgattagtcagtgcttactccaccagggcacagtgtcgggggggctcagtgtcaacacctgcccacctctggcacttggagagc

SEQ ID NO: 572907 - DNA, 249 bp, Homo sapiens
gagctccaagcacatgatctaatagattttataaccagtgcgcggggaccatcaatactgccggaaagaggttggaaggatctgaaatatgacatatcgtagatctggatgcattaaggagatgacaggaggaagaggctggagctgcccccatgcagtgcctgctgatgtctcaggtcggccaagcagcctcccgtagagcacagcttctaggccattatctccaaagggcaggggcacagtctgggc

SEQ ID NO: 572908 - DNA, 1852 bp, Homo sapiens
agcgggctgagcttgcatcacatccgccgcctgggcgcccaattccggaaggtgctgcacagctgtggcggcgggtactgcgttagtgattagagtttcttccctgccggaggtgggatacacggtagcatcatggtcgaggaggtacagaaacattctgtacacacccttgtgttcaggtcgttgaagaggacccatgacatgtttgtagctgataatggaaaacctgtgcctttagatgaagagagtcacaaacgaaaaatggcaatcaagcttcgtaatgagtatggtcctgtgttgcatatgcctacttcaaaagaaaatcttaaagagaagggtcctcagaatgcaacggattcatatgttcataaacagtaccctgccaatcaaggacaagaagttgaatactttgtggcaggtacacatccatacccaccaggacctggggttgctttgacagcagatactaagatccagagaatgccaagtgaatcagctgcacagtccttagcggtggcattacctttgcagaccaaggctgatgcaaatcgtactgcccctagtggaagtgaataccgacatcctggggcttctgaccgtccacagcctacagcgatgaattcaattgtcatggagactggcaataccaagaactctgcactgatggctaaaaaagcccctacaatgccaaaaccccagtggcacccaccgtggaaactctacagggttatcagtgggcatcttggctgggttcgatgtattgctgtggaacctggaaatcagtggtttgttactggatctgctgacagaactataaagatctgggacttggctagtggcaaattaaaactgtcattgactgggcatattagtactgtgcggggcgtgatagtaagcacaaggagcccatatctgttctcttgtggagaagacaaacaagtgaaatgctgggatctcgaatacaataaggttatacggcattatcatggacatttaagtgcagtgtatggtttggatttgcacccgacaatcgatgtgttggtaacctgtagtcgagattcaactgcacggatttgggatgtgagaactaaagccagtgtacacacattatctggacatacaaatgcagttgctacagtgagatgtcaggctgcagaaccacaaattattacaggaagccatgatactacaattcgattatgggatctggtggctggaaaaacaagagtgacattaacaaatcacaaaaaatcagttagggctgtggttttacatccaagacattacacatttgcatctggttctccagataacataaagcagtggaaattccctgatggaagtttcattcaaaatctttccggtcataatgctattattaacacattgacggtaaattctgatggagtgcttgtatctggagctgacaatggcaccatgcatctttgggactggagaactggctacaattttcagagagttcacgcagctgtgcaacctgggtctttggacagtgaatcaggaatatttgcttgtgcttttgatcagtctgaaagtcgattactaacagctgaagctgataaaaccattaaagtatacagagaggatgacacagccacagaagaaactcatccagtcagctggaaaccagaaattatcaagagaaagagattttaatgaatgtggaattttttctctctctttttttttctttttaattaaaaaaaaaaaagcttggcgttcatgaggatatccagtcattttgtgctctggctgggaatataaaggagaaattcacttgcttcaatcattgctgcttcatattttacaataaactgtcccctgtccccta

SEQ ID NO: 572909 - DNA, 1085 bp, Homo sapiens
gctttatctttacaagtgtgccactgtcaacttggctcaccctgtatagggattgcgcggcgcttgaacagctcaaatccatagagagcctttcgtattggtctccccttgttgtgtcagctggcgtcttttccaacagtaagccaactcaagttcccagtacccattcctggcggatgacttcagacattaggattggtcaggtgtattttcttataataggcgcattcagtttcggaaaaggacagctgtttcattaatgtcgcacggtaaaggaatagtggcgtactacaggtacgtacgcgtgctgcgtgctcatatttgttcctcgtgatcatattgtatctctcaaagtttggaagtatatctcgtgtgcttttgctgtttttctatgcttcctggaattctaggggactcatgagatgacttgaggttctaagagttctgcaagtgagaagacactacatggtcagcagcttgccacatgaagaacccaagctcctgtcaaagttgtgaatgcgactttggatgagattgaagaaggcccagtggacggttggtcttgaagacgtggcacgtgtagtgcgattatgaggaccgtctcgcagatccatcaagatcaaaggagggagagctgttcttggctgtttttgtctttgtttgcgtcttcttatagcattttgctttattcttcggaatgtaattttcctatcggcatgttaactcggtgcacatcgtgtaacctgtctggtgagcaacctactaattgggatgagttctacggtacatcgtgtattcgctgactcttggcggtacaactaactgttgtatataatacagtctctgccacagatgcaagtgacctcttcaggggccacagagtgcgcctgaggaaggataagcttcaagctggccatgggggtcgctcaaacagtcactccaggcttagatgatagactagcctaggtcatcagagcccagactctcacagagactaaaatcagagctctgtcttgttatcgataaatttcatcgcttggaaaaagaaatgctgaaagccagtgttagaatatcggggtgaccaa

SEQ ID NO: 572910 - DNA, 2865 bp, Homo sapiens
  misc_feature (2331)..(2331): n is a, c, g, or t
  misc_feature (2550)..(2550): n is a, c, g, or t
agcgggctgagcttgcatcacatccgccgcctgggcgcccaattccggaaggtgctgcacagctgtggcggcgggtactgcgttagtgattagagtttcttccctgccggaggtgggatacacggtagcatcatggtcgaggaggtacagaaacattctgtacacacccttgtgttcaggtcgttgaagaggacccatgacatgtttgtagctgataatggaaaacctgtgcctttagatgaagagagtcacaaacgaaaaatggcaatcaagcttcgtaatgagtatggtcctgtgttgcatatgcctacttcaaaagaaaatcttaaagagaagggtcctcagaatgcaacggattcatatgttcataaacagtaccctgccaatcaaggacaagaagttgaatactttgtggcaggtacacatccatacccaccaggacctggggttgctttgacagcagatactaagatccagagaatgccaagtgaatcagctgcacagtccttagcggtggcattacctttgcagaccaaggctgatgcaaatcgtactgcccctagtggaagtgaataccgacatcctggggcttctgaccgtccacagcctacagcgatgaattcaattgtcatggagactggcaataccaagaactctgcactgatggctaaaaaagcccctacaatgccaaaaccccagtggcacccaccgtggaaactctacagggttatcagtgggcatcttggctgggttcgatgtattgctgtggaacctggaaatcagtggtttgttactggatctgctgacagaactataaagatctgggacttggctagtggcaaattaaaactgtcattgactgggcatattagtactgtgcggggcgtgatagtaagcacaaggagcccatatctgttctcttgtggagaagacaaacaagtgaaatgctgggatctcgaatacaataaggttatacggcattatcatggacatttaagtgcagtgtatggtttggatttgcacccgacaatcgatgtgttggtaacctgtagtcgagattcaactgcacggatttgggatgtgagaactaaagccagtgtacacacattatctggacatacaaatgcagttgctacagtgagatgtcaggctgcagaaccacaaattattacaggaagccatgatactacaattcgattatgggatctggtggctggaaaaacaagagtgacattaacaaatcacaaaaaatcagttagggctgtggttttacatccaagacattacacatttgcatctggttctccagataacataaagcagtggaaattccctgatggaagtttcattcaaaatctttccggtcataatgctattattaacacattgacggtaaattctgatggagtgcttgtatctggagctgacaatggcaccatgcatctttgggactggagaactggctacaattttcagagagttcacgcagctgtgcaacctgggtctttggacagtgaatcaggaatatttgcttgtgcttttgatcagtctgaaagtcgattactaacagctgaagctgataaaaccattaaagtatacagagaggatgacacagccacagaagaaactcatccagtcagctggaaaccagaaattatcaagagaaagagattttaatgaatgtggaattttttctctctctttttttttctttttaattaaaaaaaaaaaagcttggcgttcatgaggatatccagtcattttgtgctctggctgggaatataaaggagaaattcacttgcttcaatcattgctgcttcatattttacaataaactgtcccctgtcccctacccctgtgtttttatttctaaaacaatttgtgatactaggaagatgcagatatcaagtaaatgcaggtttattgaacataactattctagatgtaatattttgacagtcttattagaaaacccccttttttaaaaaaaatgtatgaaaccgataattaggacatttgaaggagcagtagtttttttttagtcctttaaaaaataacatctgtgactaataatttgagattaaaagatttgaagtcttaatttatgtatgtttattccaaaaacagtttttgagtgtatgttctacaaagttctgcactagatactgttcaggaaatagacaagtaagatgtgtctatcctctaagacttccagtttggtagcttagtatagaaattctgtaacagaggtgcaggtgaaatgctgggggaacagaagggataagaccttttatttttctcaggaaggattgtggaagacttcatagagtnagtggcattggagattaccttgaagtgaaggaagacaaagaaggaaaagagatgaggcataaagtgatgaaaccaggcacaagaaagtgtgcggtgtgttctgggacaaggaatgttctgctactgtcgaataatggggactaaagctggcttgttctggggaaagctcatataacgtatggattttattcctcaatagtaggataccaaatactggtnttgaattggggacacatactgggatacaagggccagtaattaaagttggagaagggctggaaacttggggagatttgaaggagaaatttaagttctaatatggttggctttttgggaatacagtttttaaattgacggggattattccattatagatggtggattactttttattgaaaccggttaaaagagtgtaatttaataatgtgcgatgtaaatcatgatacattgcaaggagaaggagacaagtaggtgaaaatggatagggatgggaggggttaaagcacgggggttgtgttagatgtatatgtcctt

SEQ ID NO: 572911 - DNA, 2318 bp, Homo sapiens
agcgggctgagcttgcatcacatccgccgcctgggcgcccaattccggaaggtgctgcacagctgtggcggcgggtactgcgttagtgattagagtttcttccctgccggaggtgggatacacggtagcatcatggtcgaggaggtacagaaacattctgtacacacccttgtgttcaggtcgttgaagaggacccatgacatgtttgtagctgataatggaaaacctgtgcctttagatgaagagagtcacaaacgaaaaatggcaatcaagcttcgtaatgagtatggtcctgtgttgcatatgcctacttcaaaagaaaatcttaaagagaagggtcctcagaatgcaacggattcatatgttcataaacagtaccctgccaatcaaggacaagaagttgaatactttgtggcaggtacacatccatacccaccaggacctggggttgctttgacagcagatactaagatccagagaatgccaagtgaatcagctgcacagtccttagcggtggcattacctttgcagaccaaggctgatgcaaatcgtactgcccctagtggaagtgaataccgacatcctggggcttctgaccgtccacagcctacagcgatgaattcaattgtcatggagactggcaataccaagaactctgcactgatggctaaaaaagcccctacaatgccaaaaccccagtggcacccaccgtggaaactctacagggttatcagtgggcatcttggctgggttcgatgtattgctgtggaacctggaaatcagtggtttgttactggatctgctgacagaactataaagatctgggacttggctagtggcaaattaaaactgtcattgactgggcatattagtactgtgcggggcgtgatagtaagcacaaggagcccatatctgttctcttgtggagaagacaaacaagtgaaatgctgggatctcgaatacaataaggttatacggcattatcatggacatttaagtgcagtgtatggtttggatttgcacccgacaatcgatgtgttggtaacctgtagtcgagattcaactgcacggatttgggatgtgagaactaaagccagtgtacacacattatctggacatacaaatgcagttgctacagtgagatgtcaggctgcagaaccacaaattattacaggaagccatgatactacaattcgattatgggatctggtggctggaaaaacaagagtgacattaacaaatcacaaaaaatcagttagggctgtggttttacatccaagacattacacatttgcatctggttctccagataacataaagcagtggaaattccctgatggaagtttcattcaaaatctttccggtcataatgctattattaacacattgacggtaaattctgatggagtgcttgtatctggagctgacaatggcaccatgcatctttgggactggagaactggctacaattttcagagagttcacgcagctgtgcaacctgggtctttggacagtgaatcaggaatatttgcttgtgcttttgatcagtctgaaagtcgattactaacagctgaagctgataaaaccattaaagtatacagagaggatgacacagccacagaagaaactcatccagtcagctggaaaccagaaattatcaagagaaagagattttaatgaatgtggaattttttctctctctttttttttctttttaattaaaaaaaaaaaagcttggcgttcatgaggatatccagtcattttgtgctctggctgggaatataaaggagaaattcacttgcttcaatcattgctgcttcatattttacaataaactgtcccctgtcccctaaaaaaaaaaaaaaaaaaaaaaaaaaaaaaaaaaggggggggcgggtttaaaattttcccctgaggggggcccagttaagccggtccccagtttttttgtccaaagggggcccctatataagggggccgtttttatataaagcaggagcagggggccgcgttttaacaaacgtctcgtggagcttgggaaacaacctgtctgactgtggggacatttttggagaggaggaaaacccttaatcttgtgcgtggggtggaccttcatggcgcgcacactcttcccctgacaggagaatttaaaaagcgtctgagcggtaaacttataaacactttgccagcggttcttttaggtgttggttaacaccgagggcggcaatttgtgctggcgcgtcttgaaaaaaattttgggctgcacgtgatttgcatttcttggaagtatttttttttcgcgggactctgtgtgtaac

SEQ ID NO: 572912 - DNA, 1890 bp, Homo sapiens
gagagagagagagagagagagagagagagagagagagagagagagagagagagagagagagagagagagagagagagagagagagagagagagagagcagctgtggcggcgggtactgcgttagtgattagagtttcttccctgccggaggtgggatacacggtagcatcatggtcgaggaggtacagaaacattctgtacacacccttgtgttcaggtcgttgaagaggacccatgacatgtttgtagctgataatggaaaacctgtgcctttagatgaagagagtcacaaacgaaaaatggcaatcaagcttcgtaatgagtatggtcctgtgttgcatatgcctacttcaaaagaaaatcttaaagagaagggtcctcagaatgcaacggattcatatgttcataaacagtaccctgccaatcaaggacaagaagttgaatactttgtggcaggtacacatccatacccaccaggacctggggttgctttgacagcagatactaagatccagagaatgccaagtgaatcagctgcacagtccttagcggtggcattacctttgcagaccaaggctgatgcaaatcgtactgcccctagtggaagtgaataccgacatcctggggcttctgaccgtccacagcctacagcgatgaattcaattgtcatggagactggcaataccaagaactctgcactgatggctaaaaaagcccctacaatgccaaaaccccagtggcacccaccgtggaaactctacagggttatcagtgggcatcttggctgggttcgatgtattgctgtggaacctggaaatcagtggtttgttactggatctgctgacagaactataaagatctgggacttggctagtggcaaattaaaactgtcattgactgggcatattagtactgtgcggggcgtgatagtaagcacaaggagcccatatctgttctcttgtggagaagacaaacaagtgaaatgctgggatctcgaatacaataaggttatacggcattatcatggacatttaagtgcagtgtatggtttggatttgcacccgacaatcgatgtgttggtaacctgtagtcgagattcaactgcacggatttgggatgtgagaactaaagccagtgtacacacattatctggacatacaaatgcagttgctacagtgagatgtcaggctgcagaaccacaaattattacaggaagccatgatactacaattcgattatgggatctggtggctggaaaaacaagagtgacattaacaaatcacaaaaaatcagttagggctgtggttttacatccaagacattacacatttgcatctggttctccagataacataaagcagtggaaattccctgatggaagtttcattcaaaatctttccggtcataatgctattattaacacattgacggtaaattctgatggagtgcttgtatctggagctgacaatggcaccatgcatctttgggactggagaactggctacaattttcagagagttcacgcagctgtgcaacctgggtctttggacagtgaatcaggaatatttgcttgtgcttttgatcagtctgaaagtcgattactaacagctgaagctgataaaaccattaaagtatacagagaggatgacacagccacagaagaaactcatccagtcagctggaaaccagaaattatcaagagaaagagattttaatgaatgtggaattttttctctctctttttttttctttttaattaaaaaaaaaaaagcttggcgttcatgaggatatccagtcattttgtgctctggctgggaatataaaggagaaattcacttgcttcaatcattgctgcttcatattttacaataaactgtcccctgtccccta

SEQ ID NO: 572913 - DNA, 405 bp, Homo sapiens
cgctaacggaagataccttgcgattgcttggaaaaaatcgccccttccagcactaatatatctgagcacatcctagtcgtcgatagagtgccttggctcgccaggtcgcccgacgatacgaacaaaggcgcagtctacatgcgcgattccgtcgccgatggaggctcgctgcttgggctggtgaaaaatgcatagtgagatactgggccggtgactaagccgggaatggccttacacgaagacactatcgcctgacagatggtaagtaggaagtgtacattgaagcaactgtatatcggaaacagccattaatagagccttgactgaccgtgagcacggcgatctgggtagatgtgctgtgcactactcgtgagacctgctgctgccacggtccccggactgggg

SEQ ID NO: 572914 - DNA, 211 bp, Homo sapiens
agtcacacagggaggtgatacatgttcgtgtaaatgatgtaatgcaaaatttgtttaatcttcgccttaatacttttttatttggtttgattggggaactgatgagccttcgtgccccccttcccccttttttgtcccccaacttgagatgtatgaaggctttgggtctccctgggagtgggtggaggcagccagggcttacctgtacact

SEQ ID NO: 572915 - DNA, 2671 bp, Homo sapiens
  misc_feature (2137)..(2137): n is a, c, g, or t
  misc_feature (2356)..(2356): n is a, c, g, or t
agcgggctgagcttgcatcacatccgccgcctgggcgcccaattccggaaggtgctgcacagctgtggcggcgggtactgcgttagtgattagagtttcttccctgccggaggtgggatacacggtagcatcatggtcgaggaggtacagaaacattctgtacacacccttgtgttcaggtcgttgaagaggacccatgacatgtttgtagctgataatggaaaacctgtgcctttagatgaagagagtcacaaacgaaaaatggcaatcaagcttcgtaatgagtatggtcctgtgttgcatatgcctacttcaaaagaaaatcttaaagagaagggtcctcagaatgcaacggattcatatgttcataaacagtaccctgccaatcaaggacaagaagttgaatactttgtggcaggtacacatccatacccaccaggacctggggttgctttgacagcagatactaagatccagagaatgccaagtgaatcagctgcacagtccttagcggtggcattacctttgcagaccaaggctgatgcaaatcgtactgcccctagtggaagtgaataccgacatcctggggcttctgaccgtccacagcctacagcgatgaattcaattgtcatggagactggcaataccaagaactctgcactgatggctaaaaaagcccctacaatgccaaaaccccagtggcacccaccgtggaaactctacagggttatcagtgggcatcttggctgggttcgatgtattgctgtggaacctggaaatcagtggtttgttactggatctgctgacagaactataaagatctgggacttggctagtggcaaattaaaactgtcattgactgggcatattagtactgtgcggggcgtgatagtaagcacaaggagcccatatctgttctcttgtggagaagacaaacaagtgaaatgctgggatctcgaatacaataaggttatacggcattatcatggacatttaagtgcagtgtatggtttggatttgcacccgacaatcgatgtgttggtaacctgtagtcgagattcaactgcacggatttgggatgtgagaactaaagccagtgtacacacattatctggacatacaaatgcagttgctacagtgagatgtcaggctgcagaaccacaaattattacaggaagccatgatactacaattcgattatgggatctggtggctggaaaaacaagagtgacattaacaaatcacaaaaaatcagttagggctgtggttttacatccaagacattacacatttgcatctggttctccagataacataaagcagtggaaattccctgatggaagtttcattcaaaatctttccggtcataatgctattattaacacattgacggtaaattctgatggagtgcttgtatctggagacagaagaaactcatccagtcagctggaaaccagaaattatcaagagaaagagattttaatgaatgtggaattttttctctctctttttttttctttttaattaaaaaaaaaaaagcttggcgttcatgaggatatccagtcattttgtgctctggctgggaatataaaggagaaattcacttgcttcaatcattgctgcttcatattttacaataaactgtcccctgtcccctacccctgtgtttttatttctaaaacaatttgtgatactaggaagatgcagatatcaagtaaatgcaggtttattgaacataactattctagatgtaatattttgacagtcttattagaaaacccccttttttaaaaaaaatgtatgaaaccgataattaggacatttgaaggagcagtagtttttttttagtcctttaaaaaataacatctgtgactaataatttgagattaaaagatttgaagtcttaatttatgtatgtttattccaaaaacagtttttgagtgtatgttctacaaagttctgcactagatactgttcaggaaatagacaagtaagatgtgtctatcctctaagacttccagtttggtagcttagtatagaaattctgtaacagaggtgcaggtgaaatgctgggggaacagaagggataagaccttttatttttctcaggaaggattgtggaagacttcatagagtnagtggcattggagattaccttgaagtgaaggaagacaaagaaggaaaagagatgaggcataaagtgatgaaaccaggcacaagaaagtgtgcggtgtgttctgggacaaggaatgttctgctactgtcgaataatggggactaaagctggcttgttctggggaaagctcatataacgtatggattttattcctcaatagtaggataccaaatactggtnttgaattggggacacatactgggatacaagggccagtaattaaagttggagaagggctggaaacttggggagatttgaaggagaaatttaagttctaatatggttggctttttgggaatacagtttttaaattgacggggattattccattatagatggtggattactttttattgaaaccggttaaaagagtgtaatttaataatgtgcgatgtaaatcatgatacattgcaaggagaaggagacaagtaggtgaaaatggatagggatgggaggggttaaagcacgggggttgtgttagatgtatatgtcctt

SEQ ID NO: 572916 - DNA, 1799 bp, Homo sapiens
ctcagttgctaaacctgaggttctagccaaagaggagcttcctcctcttctctgaacggactcctgtagcttgcaacaagtagctatggaggtacagaaacattctgtacacacccttgtgttcaggtcgttgaagaggacccatgacatgtttgtagctgataatggaaaacctgtgcctttagatgaagagagtcacaaacgaaaaatggcaatcaagcttcgtaatgagtatggtcctgtgttgcatatgcctacttcaaaagaaaatcttaaagagaagggtcctcagaatgcaacggattcatatgttcataaacagtaccctgccaatcaaggacaagaagttgaatactttgtggcaggtacacatccatacccaccaggacctggggttgctttgacagcagatactaagatccagagaatgccaagtgaatcagctgcacagtccttagcggtggcattacctttgcagaccaaggctgatgcaaatcgtactgcccctagtggaagtgaataccgacatcctggggcttctgaccgtccacagcctacagcgatgaattcaattgtcatggagactggcaataccaagaactctgcactgatggctaaaaaagcccctacaatgccaaaaccccagtggcacccaccgtggaaactctacagggttatcagtgggcatcttggctgggttcgatgtattgctgtggaacctggaaatcagtggtttgttactggatctgctgacagaactataaagatctgggacttggctagtggcaaattaaaactgtcattgactgggcatattagtactgtgcggggcgtgatagtaagcacaaggagcccatatctgttctcttgtggagaagacaaacaagtgaaatgctgggatctcgaatacaataaggttatacggcattatcatggacatttaagtgcagtgtatggtttggatttgcacccgacaatcgatgtgttggtaacctgtagtcgagattcaactgcacggatttgggatgtgagaactaaagccagtgtacacacattatctggacatacaaatgcagttgctacagtgagatgtcaggctgcagaaccacaaattattacaggaagccatgatactacaattcgattatgggatctggtggctggaaaaacaagagtgacattaacaaatcacaaaaaatcagttagggctgtggttttacatccaagacattacacatttgcatctggttctccagataacataaagcagtggaaattccctgatggaagtttcattcaaaatctttccggtcataatgctattattaacacattgacggtaaattctgatggagtgcttgtatctggagctgacaatggcaccatgcatctttgggactggagaactggctacaattttcagagagttcacgcagctgtgcaacctgggtctttggacagtgaatcaggaatatttgcttgtgcttttgatcagtctgaaagtcgattactaacagctgaagctgataaaaccattaaagtatacagagaggatgacacagccacagaagaaactcatccagtcagctggaaaccagaaattatcaagagaaagagattttaatgaatgtggaattttttctctctctttttttttctttttaattaaaaaaaaaaaagcttggcgttcatgaggatatccagtcattttgtgctctggctgggaatataaaggagaaattcacttgcttcaatcattgctgcttcatattttacaataaactgtcccctgtccccta

SEQ ID NO: 572917 - DNA, 596 bp, Homo sapiens
ggccccccccaaacccaaaatttgggtgggttaaaaattttttgggaaaatttttaaggggcaaatgggaacttttttttaaatttttttgggaaaaaggggaaaattcccccaatttccgaggttttttttggagggtttggacccaaaaagggggaaaggggaaaaggggaagggggccatccctttgggggaacaggggggcctttttcccatgggggggattccactttcccttcccgacccattggttgaaaagaaaaaatgggggttttggcatttttccccaatttccccaaaaatccagggggccccccgggtttgggaaaaaattttcgggcccttttccctttaaaccttaggggattttaaaacagggttcctctcggttttaacccggggaggtcgcctctgggggggtccccccccctccccttaccacaggggacaaaaataaaccccgggagttcaaagggggccgggcatggggccccgcctttggaggggggccaaaacccttttatagaaaaggggggggtttcccctttggaaatgggggggagggcccaccctttttgaaaaaattgaaaaaaaaa

SEQ ID NO: 572918 - DNA, 2051 bp, Homo sapiens
  misc_feature (715)..(715): n is a, c, g, or t
  misc_feature (722)..(722): n is a, c, g, or t
  misc_feature (729)..(729): n is a, c, g, or t
agcgggctgagcttgcatcacatccgccgcctgggcgcccaattccggaaggtgctgcacagctgtggcggcgggtactgcgttagtgattagagtttcttccctgccggaggtgggatacacggtagcatcatggtcgaggaggtacagaaacattctgtacacacccttgtgttcaggtcgttgaagaggacccatgacatgtttgtagctgataatggaaaacctgtgcctttagatgaagagagtcacaaacgaaaaatggcaatcaagcttcgtaatgagtatggtcctgtgttgcatatgcctacttcaaaagaaaatcttaaagagaagggtcctcagaatgcaacggattcatatgttcataaacagtaccctgccaatcaaggacaagaagttgaatactttgtggcaggtacacatccatacccaccaggacctggggttgctttgacagcagatactaagatccagagaatgccaagtgaatcagctgcacagtccttagcggtggcattacctttgcagaccaagtatgaaatattataattacaaagatcttaaaagcatatttcactgttcacattttttctttttaaaatttctttataactattatatgacattttcctttatcaggactttataacaatttaaaataaagggttagttttgcagaatacatgactggaggcattaattactttgaaantattatntcttttngccccaggctgatgcaaatcgtactgcccctagtggaagtgaataccgacatcctggggcttctgaccgtccacagcctacagcgatgaattcaattgtcatggagactggcaataccaagaactctgcactgatggctaaaaaagcccctacaatgccaaaaccccagtggcacccaccgtggaaactctacagggttatcagtgggcatcttggctgggttcgatgtattgctgtggaacctggaaatcagtggtttgttactggatctgctgacagaactataaagatctgggacttggctagtggcaaattaaaactgtcattgactgggcatattagtactgtgcggggcgtgatagtaagcacaaggagcccatatctgttctcttgtggagaagacaaacaagtgaaatgctgggatctcgaatacaataaggttatacggcattatcatggacatttaagtgcagtgtatggtttggatttgcacccgacaatcgatgtgttggtaacctgtagtcgagattcaactgcacggatttgggatgtgagaactaaagccagtgtacacacattatctggacatacaaatgcagttgctacagtgagatgtcaggctgcagaaccacaaattattacaggaagccatgatactacaattcgattatgggatctggtggctggaaaaacaagagtgacattaacaaatcacaaaaaatcagttagggctgtggttttacatccaagacattacacatttgcatctggttctccagataacataaagcagtggaaattccctgatggaagtttcattcaaaatctttccggtcataatgctattattaacacattgacggtaaattctgatggagtgcttgtatctggagctgacaatggcaccatgcatctttgggactggagaactggctacaattttcagagagttcacgcagctgtgcaacctgggtctttggacagtgaatcaggaatatttgcttgtgcttttgatcagtctgaaagtcgattactaacagctgaagctgataaaaccattaaagtatacagagaggatgacacagccacagaagaaactcatccagtcagctggaaaccagaaattatcaagagaaagagattttaatgaatgtggaattttttctctctctttttttttctttttaattaaaaaaaaaaaagcttggcgttcatgaggatatccagtcattttgtgctctggctgggaatataaaggagaaattcacttgcttcaatcattgctgcttcatattttacaataaactgtcccctgtccccta

SEQ ID NO: 572919 - DNA, 1000 bp, Homo sapiens
ggatgcacggcctgggttttaactcggccgaggcggggatcaggtcgctgagaggtatacctcttctgggctcaatgatggacaacaatgaagcgcctggcctacgccatcatccagtatcctgcatgaccatgctccggcacggtggtgcctctcgatcctgattgctcaggagagcttggaatgtctgccatccatgtgcctggatgacttgctgtttgtgtggtgactggtagaatgacatgtgaccttgcgctccctcgagactactgcctggagatattttgaatgctggcttgcctactggtgcaatggagatgccctgcaatgtgaccatgatgtgagcccctgctggctgaaccctctgacctttacctgacggagtggacatcaagcagcatggcagagctgcctctaaaccagaacgtgaaacgagcagatgaaagttggacacacactttgaatcgctagcctgtgcattatgctacggcaaagccatccgagctcaacctcagaacaatcgccgatcttatttctagcaaacatgagcctgcgagcctaacatgcaaaactctggctatctacgcatgtgcgcggtgcagtgtgacgtgcatgagcgtggccaatccttgcattttgcgcccgtgcctacaagaaaaggccttactggcaggactgcggcctggctgcctctccaagaactgtcaacacaaaggacaccggttggaagggcccgatgtggcatatacctaacatcagtaacagggctctggacagcgttggtaatccactgactacgccgtacgacattacaagtatccacacccttcaatgacttagcgggagtcatgaacgtctgggtgaatgtcactccaggactcacggcaccggcgctatggccagacttcagaacatacaccgagctaagagacaacctggctacatgagcctgttttgtacccttttaccatctccagagtatagcacctctgatcggcag

SEQ ID NO: 572920 - DNA, 514 bp, Homo sapiens
aacttatatatcttaaagcccaatataaccctcttgtaacaagtggggaatatgatatgctaccttgttttaacctgaattgagtctcccttagctgagagagccagacaaactccattttggctccttcacttgcagctccttgcccacccaattcctcaaggacttaacttgtgcaagctgactcccagcacatcagagtgcaattaactgataaggtcctgtggcaagttatgcccacagttcccaggaattcgctcgggtgatagtatcctaagcccctgcatttgtatccagtagatagcacccaaagcccttgcacccatcaccttgtgatggatttaaagcccctgcacctggaaccatttgttttcctgtaaccatttgtctaacttttttttgcctgttttacttctataagattgctatagctaggctccccttcccctctctaaaccaaagtataaaagaaaatctagccccttcttcagggctgagagaattttgagcgcta

SEQ ID NO: 572921 - DNA, 1997 bp, Homo sapiens
agcgggctgagcttgcatcacatccgccgcctgggcgcccaattccggaaggtgctgcacagctgtggcggcgggtactgcgttagtgattagagtttcttccctgccggaggtgggatacacggtagcatcatggtcgaggaggtacagaaacattctgtacacacccttgtgttcaggtcgttgaagaggacccatgacatgtttgtagctgataatggaaaacctgtgcctttagatgaagagagtcacaaacgaaaaatggcaatcaagcttcgtaatgagtatggtcctgtgttgcatatgcctacttcaaaagaaaatcttaaagagaagggtcctcagaatgcaacggattcatatgttcataaacagtaccctgccaatcaaggacaagaagttgaatactttgtggcaggtacacatccatacccaccaggacctggggttgctttgacagcagatactaagatccagagaatgccaagtgaatcagctgcacagtccttagcggtggcattacctttgcagaccaagtatgaaatattataattacaaagatcttaaaagcatatttcactgttcacattttttctttttaaaatttctttataactattatatgacattttcctttatcaggactttataacaatttaaaataaagggttagttttgcagaatacatgactggaggcattaattactttgaagtgaataccgacatcctggggcttctgaccgtccacagcctacagcgatgaattcaattgtcatggagactggcaataccaagaactctgcactgatggctaaaaaagcccctacaatgccaaaaccccagtggcacccaccgtggaaactctacagggttatcagtgggcatcttggctgggttcgatgtattgctgtggaacctggaaatcagtggtttgttactggatctgctgacagaactataaagatctgggacttggctagtggcaaattaaaactgtcattgactgggcatattagtactgtgcggggcgtgatagtaagcacaaggagcccatatctgttctcttgtggagaagacaaacaagtgaaatgctgggatctcgaatacaataaggttatacggcattatcatggacatttaagtgcagtgtatggtttggatttgcacccgacaatcgatgtgttggtaacctgtagtcgagattcaactgcacggatttgggatgtgagaactaaagccagtgtacacacattatctggacatacaaatgcagttgctacagtgagatgtcaggctgcagaaccacaaattattacaggaagccatgatactacaattcgattatgggatctggtggctggaaaaacaagagtgacattaacaaatcacaaaaaatcagttagggctgtggttttacatccaagacattacacatttgcatctggttctccagataacataaagcagtggaaattccctgatggaagtttcattcaaaatctttccggtcataatgctattattaacacattgacggtaaattctgatggagtgcttgtatctggagctgacaatggcaccatgcatctttgggactggagaactggctacaattttcagagagttcacgcagctgtgcaacctgggtctttggacagtgaatcaggaatatttgcttgtgcttttgatcagtctgaaagtcgattactaacagctgaagctgataaaaccattaaagtatacagagaggatgacacagccacagaagaaactcatccagtcagctggaaaccagaaattatcaagagaaagagattttaatgaatgtggaattttttctctctctttttttttctttttaattaaaaaaaaaaaagcttggcgttcatgaggatatccagtcattttgtgctctggctgggaatataaaggagaaattcacttgcttcaatcattgctgcttcatattttacaataaactgtcccctgtccccta

SEQ ID NO: 572922 - DNA, 783 bp, Homo sapiens
  misc_feature (18)..(18): n is a, c, g, or t
  misc_feature (79)..(79): n is a, c, g, or t
  misc_feature (82)..(82): n is a, c, g, or t
  misc_feature (84)..(85): n is a, c, g, or t
  misc_feature (87)..(87): n is a, c, g, or t
  misc_feature (90)..(90): n is a, c, g, or t
  misc_feature (96)..(97): n is a, c, g, or t
  misc_feature (166)..(166): n is a, c, g, or t
  misc_feature (169)..(169): n is a, c, g, or t
  misc_feature (173)..(173): n is a, c, g, or t
  misc_feature (189)..(189): n is a, c, g, or t
  misc_feature (195)..(195): n is a, c, g, or t
  misc_feature (209)..(209): n is a, c, g, or t
  misc_feature (319)..(319): n is a, c, g, or t
  misc_feature (363)..(364): n is a, c, g, or t
  misc_feature (382)..(386): n is a, c, g, or t
  misc_feature (388)..(388): n is a, c, g, or t
  misc_feature (392)..(392): n is a, c, g, or t
  misc_feature (416)..(416): n is a, c, g, or t
  misc_feature (421)..(421): n is a, c, g, or t
  misc_feature (436)..(436): n is a, c, g, or t
  misc_feature (459)..(459): n is a, c, g, or t
  misc_feature (598)..(598): n is a, c, g, or t
  misc_feature (612)..(612): n is a, c, g, or t
  misc_feature (614)..(614): n is a, c, g, or t
  misc_feature (639)..(639): n is a, c, g, or t
  misc_feature (691)..(691): n is a, c, g, or t
  misc_feature (747)..(747): n is a, c, g, or t
gggtttggaggggaaggntggggtgaaaatgcagatgtgcttgcagaatgtaatacttgttttcccttccccctccccntcntnncnccnattgtnntcccggcgcgtctggggggctgagacaggtggttcgcctgaccccaggagtttgagaccagcctgggcnacnctgngggggcgcgcgggctntggcgnaacatgcaaaactnggctggccatggtggcatgaacctgtggtcccagctactccggaggctgaggcaggactgctcgagccggggaggcaaaggctgcagtaagccaagatcacgccactccnctccagcctgggcaacaaagcgagacccagtctcaaagaaaaanntaaaaaaaaaaaaaaaannnnngngggnttgcccctgggcataaaacaagtnttggngggtccgggtcatcntttacaagggttgaattcctccngggtgtgggttggggtgagatttccttttaggtactaaggttccccaaggggttgtcagacagggtttggctgggccagcagagacttgacaactccctctccctaacccgctgcccacctgtggaaactcccaccccnccgaccaacagggngngggaacaagcaccctcaagggggtnaagttctagaccccatgtaataaaaggtggtttcaaggccagatgtacattntttcattaaccctcacaatgcactctgtgaggtaggtgcaaatgccagcatttcanagatatgggccttgaagttagagaaaattcaacagt

SEQ ID NO: 572923 - DNA, 1825 bp, Homo sapiens
agcgggctgagcttgcatcacatccgccgcctgggcgcccaattccggaaggtgctgcacagctgtggcggcgggtactgcgttagtgattagagtttcttccctgccggaggtgggatacacggtagcatcatggtcgaggaggtacagaaacattctgtacacacccttgtgttcaggtcgttgaagaggacccatgacatgtttgtagctgataatggaaaacctgtgcctttagatgaagagagtcacaaacgaaaaatggcaatcaagcttcgtaatgagtatggtcctgtgttgcatatgcctacttcaaaagaaaatcttaaagagaagggtcctcagaatgcaacggattcatatgttcataaacagtaccctgccaatcaaggacaagaagttgaatactttgtggcaggggttgctttgacagcagatactaagatccagagaatgccaagtgaatcagctgcacagtccttagcggtggcattacctttgcagaccaaggctgatgcaaatcgtactgcccctagtggaagtgaataccgacatcctggggcttctgaccgtccacagcctacagcgatgaattcaattgtcatggagactggcaataccaagaactctgcactgatggctaaaaaagcccctacaatgccaaaaccccagtggcacccaccgtggaaactctacagggttatcagtgggcatcttggctgggttcgatgtattgctgtggaacctggaaatcagtggtttgttactggatctgctgacagaactataaagatctgggacttggctagtggcaaattaaaactgtcattgactgggcatattagtactgtgcggggcgtgatagtaagcacaaggagcccatatctgttctcttgtggagaagacaaacaagtgaaatgctgggatctcgaatacaataaggttatacggcattatcatggacatttaagtgcagtgtatggtttggatttgcacccgacaatcgatgtgttggtaacctgtagtcgagattcaactgcacggatttgggatgtgagaactaaagccagtgtacacacattatctggacatacaaatgcagttgctacagtgagatgtcaggctgcagaaccacaaattattacaggaagccatgatactacaattcgattatgggatctggtggctggaaaaacaagagtgacattaacaaatcacaaaaaatcagttagggctgtggttttacatccaagacattacacatttgcatctggttctccagataacataaagcagtggaaattccctgatggaagtttcattcaaaatctttccggtcataatgctattattaacacattgacggtaaattctgatggagtgcttgtatctggagctgacaatggcaccatgcatctttgggactggagaactggctacaattttcagagagttcacgcagctgtgcaacctgggtctttggacagtgaatcaggaatatttgcttgtgcttttgatcagtctgaaagtcgattactaacagctgaagctgataaaaccattaaagtatacagagaggatgacacagccacagaagaaactcatccagtcagctggaaaccagaaattatcaagagaaagagattttaatgaatgtggaattttttctctctctttttttttctttttaattaaaaaaaaaaaagcttggcgttcatgaggatatccagtcattttgtgctctggctgggaatataaaggagaaattcacttgcttcaatcattgctgcttcatattttacaataaactgtcccctgtccccta

SEQ ID NO: 572924 - DNA, 1760 bp, Homo sapiens
agcgggctgagcttgcatcacatccgccgcctgggcgcccaattccggaaggtgctgcacagctgtggcggcgggtactgcgttagtgattagagtttcttccctgccggaggtgggatacacggtagcatcatggtcgaggaggtacagaaacattctgtacacacccttgtgttcaggtcgttgaagaggacccatgacatgtttgtagctgataatggaaaacctgtgcctttagatgaagagagtcacaaacgaaaaatggcaatcaagcttcgtaatgagtatggtcctgtgttgcatatgcctacttcaaaagaaaatcttaaagagaagggtcctcagaatgcaacggattcatatgttcataaacagtaccctgccaatcaaggacaagaagttgaatactttgtggcaggtacacatccatacccaccaggacctggctgatgcaaatcgtactgcccctagtggaagtgaataccgacatcctggggcttctgaccgtccacagcctacagcgatgaattcaattgtcatggagactggcaataccaagaactctgcactgatggctaaaaaagcccctacaatgccaaaaccccagtggcacccaccgtggaaactctacagggttatcagtgggcatcttggctgggttcgatgtattgctgtggaacctggaaatcagtggtttgttactggatctgctgacagaactataaagatctgggacttggctagtggcaaattaaaactgtcattgactgggcatattagtactgtgcggggcgtgatagtaagcacaaggagcccatatctgttctcttgtggagaagacaaacaagtgaaatgctgggatctcgaatacaataaggttatacggcattatcatggacatttaagtgcagtgtatggtttggatttgcacccgacaatcgatgtgttggtaacctgtagtcgagattcaactgcacggatttgggatgtgagaactaaagccagtgtacacacattatctggacatacaaatgcagttgctacagtgagatgtcaggctgcagaaccacaaattattacaggaagccatgatactacaattcgattatgggatctggtggctggaaaaacaagagtgacattaacaaatcacaaaaaatcagttagggctgtggttttacatccaagacattacacatttgcatctggttctccagataacataaagcagtggaaattccctgatggaagtttcattcaaaatctttccggtcataatgctattattaacacattgacggtaaattctgatggagtgcttgtatctggagctgacaatggcaccatgcatctttgggactggagaactggctacaattttcagagagttcacgcagctgtgcaacctgggtctttggacagtgaatcaggaatatttgcttgtgcttttgatcagtctgaaagtcgattactaacagctgaagctgataaaaccattaaagtatacagagaggatgacacagccacagaagaaactcatccagtcagctggaaaccagaaattatcaagagaaagagattttaatgaatgtggaattttttctctctctttttttttctttttaattaaaaaaaaaaaagcttggcgttcatgaggatatccagtcattttgtgctctggctgggaatataaaggagaaattcacttgcttcaatcattgctgcttcatattttacaataaactgtcccctgtccccta

SEQ ID NO: 572925 - DNA, 589 bp, Homo sapiens
ctggtgttcggaggagaggcgctcgctgctcctgagctgcctggtaagctgggctggtgtgcggtgctaatgtgatcttacccatgatacacacccttataccaaccatacactgaggtgtatgtaagagggagcgtaagcatcagctgcaagccagctgcgtggtggagtgcatgtctcgctccgtgttcgtactcgatgaaggcatagccacggggcttacctgaccgcttactgtagaccatgtgtaatacttttgataaggtccgtacacctcaaactctctccggagcttggataactgttgtgtcataacttcactctcgccacgaaaggaagtcttgaagagatcccccttgagcattgggatcattgtgaggggtccaacattttaagctctgactccacttcttgctgtacggacgctcaaatctttacccgtctattcctctccatgcgctcctctcgggtacaagaacaagtagcagacgggcctctacgaagggctctcaaacctcgaatgtacgggcaatgccacaataaggttgatgtgtgtctacatgtggcgttctcaggggtggacgtatga

SEQ ID NO: 572926 - DNA, 276 bp, Homo sapiens
cattactacatgcaatcaaagtcatttgaaagtaagaccatctcccttgtggcaggtatctcggtataaagtaactttacaacatatgtgcgagaacagaagagctttacaccactgtcattatgttacctatagagacaaaactactaacacaagtaatatgggctacaattataacacaaacctgtgagagggcatgatacaattaaatttggagggccttcttggattattatcactactactgtctgctcacaatttctgtgcccatttcaa

SEQ ID NO: 572927 - DNA, 974 bp, Homo sapiens
  misc_feature (18)..(18): n is a, c, g, or t
  misc_feature (22)..(22): n is a, c, g, or t
  misc_feature (101)..(102): n is a, c, g, or t
  misc_feature (133)..(134): n is a, c, g, or t
  misc_feature (144)..(144): n is a, c, g, or t
  misc_feature (148)..(148): n is a, c, g, or t
  misc_feature (150)..(150): n is a, c, g, or t
  misc_feature (159)..(159): n is a, c, g, or t
  misc_feature (168)..(168): n is a, c, g, or t
  misc_feature (238)..(238): n is a, c, g, or t
  misc_feature (244)..(244): n is a, c, g, or t
  misc_feature (255)..(255): n is a, c, g, or t
gcacagccaggaggcggngtgnaagtggccgtggggcgggtatgggactagctggcgtgtgcgccctgagacgctcagcgggctatatactcgtcggtggnngccggcggtcagtctgcggcagcggcagcanngacggtgcangtgnanggagagtgnggcgtctgnctggggtccgcagtttcagcagagccgctgcagccatggccccaatcaaggtgggagatgccatcccagnagtcgnggtgtttgaanggggagccagcgaacaaggtgaacctggcagagcatgtacaagggcaagaagggtgtgctgtatggagttcctggggcacttcagccctggatgttccaagacacaactgccagaggtatagtggagcaaggctcgagcgctctgaaggccaagggagtacaaggtggtaggccatgtctgagtgtaactgatgccttctgatgactggtcgagtggggccgagcccacaaggacggatggcaacggttcggactcctggactgatcaccactgagggcctatcgccacaggagacagacttataactagatgatatcgctgagtgtccatctatcgcggaactcgacgtcatcaagaggttctccatggtggaacaaggaatggctctaagtgaaaagccctgaattgtggaacccaggattggcacaggccttaaactagtatgcctaggcccgcaaatatcatctccacagatctgaacgcccttggggcagactaatttcctacaacccatacacctatatctccaccatgccaagccccttgtgcatgggagccccatgccaatttcaactatcggcccacaatttctcaactaaaccacttgctcatagaccaccactcactactacataccacacaaaaaaccacgacaccacaactcacaccaacctatcacactccaaaaacattcaacactcacactaccacaacacca

SEQ ID NO: 572928 - DNA, 255 bp, Homo sapiens
gcacagggccagcaggatagaggctgagcctcggaggggacgtgagctggagagagcaggctagtggtttccctatggatagaatatcagaatctggccaggcgcggtggctcacgcttgtagtcccagcactttgagagactgaggtgcccagatcatgaggtcaagagatcgagaccatcctggccagtagggtgaaaccccatctctactaaaaatacaaaatttagcggtgcatgtggggaggggggtacc

SEQ ID NO: 572929 - DNA, 271 bp, Homo sapiens
ttcgattggcgggcacttagtgaaaccaatctctactaaaaatacaaaaattagccaggcttggtaggtgtgccctgtagtcccagctactcaggagcttgaggcaggaggatcacttgaacctgggaggcggaggttgcagtgagccaagatcgtgccactgcatccaagcctgggtgacagagtgggactctgtctcgaaaacaaaacaaaacaaaaatcaagtccctgtaagttggccgccaattcgaaggggtacccgagctcgaaa

SEQ ID NO: 572930 - DNA, 569 bp, Homo sapiens
  misc_feature (31)..(31): n is a, c, g, or t
  misc_feature (40)..(40): n is a, c, g, or t
  misc_feature (65)..(65): n is a, c, g, or t
  misc_feature (102)..(102): n is a, c, g, or t
  misc_feature (115)..(115): n is a, c, g, or t
  misc_feature (255)..(255): n is a, c, g, or t
aatttcccctaatccctggccactcctgaanctttgtggncttaatctcaaaaccccttaaacangttccccaaaggctccctactttgcaccaactccccngggtaatacccantcaatccctagggcatcaaatcacccacctgttatactgacaagtctgaaatccttacatcctaacctcgtctccctaagctgactgaccctcttcatttaaaatcttacaagcacatcaggtcgggcaccttggctcanacctgtaatcccagcactttgggaggccgaggagggcggatcatttgaggtcagtagtttgacaccagcctgggccaacatggtgatatcccgtttctaccataaaatagaaaaattagccgggcgtggtgccgtgcgcctgtaatcctagctactggggaggctgacatgggaaaatcgcttgaacctaggaggcggaggtttcagtgagccgagatcacaccactgcactccagcctgagcgacagagagaaactgtctcaaataaataaaatttcctataagcacatcaaatttgacatattgaaaaaaaa

SEQ ID NO: 572931 - DNA, 239 bp, Homo sapiens
catctagaagagttgcagtttataatatttcatcacctcatgttttcatctatctacttaagatatgggtaatttacaaaccacaattacagtgttataatattccatttatttctgtgtacttactataaccactgagtcctttgccttcagatgatttcttattcctcattaacatccttttctttctgattgaagaattccctttaacatttcttgtaggacaggtctggtcgacg

SEQ ID NO: 572932 - DNA, 118 bp, Homo sapiens
gccagcgccgaccgccccaaaaatactcccaccgggatcagggcgattaatgaagactcaacggggactaaaaaggggccccaaaaaaaaccaaaccacctttctacgtaccgtatag

SEQ ID NO: 572933 - DNA, 327 bp, Homo sapiens
accgccagacctatccagatgatactgcagacaaagggtgaggcaacaggagacatcactaccgactgttgatcaggcacaggaagaacgtgcaatcttacttccaggatttcacatctggaagaatgccttgggagctgtgggtagcccaaggactgttcccaggcaaaagaagcaggcacagggcccaggtactcaggctccattttgacccaacgctttattgtccattttacaacagtgctcatctttttggctttacaaacgtgcgtgatgaattagattttccaactattacactcaacaaagcactgtaaaactaaactc

SEQ ID NO: 572934 - DNA, 326 bp, Homo sapiens
aaactctcgcggccaagatatataacaagatgtaaaacatctatagatgaatggataaagaaaatgtggtatatacatacaatggaatattattccaccttaaggaagtcctgctgtatgtgacaacatggatgaccctgcaagacattacactatgtgaaagaatccagtcacagaaggacaaatactgaatgatttcacttatatgaaatatctaaaaatagtcaaattcagaaaacagagagtagaatggtgattgccaaggactgggaggaaggggaaattgggaattgatgttaggtaggtatcacagccgcgcagagttt

SEQ ID NO: 572935 - DNA, 398 bp, Homo sapiens
  misc_feature (14)..(14): n is a, c, g, or t
  misc_feature (20)..(20): n is a, c, g, or t
  misc_feature (25)..(25): n is a, c, g, or t
  misc_feature (40)..(40): n is a, c, g, or t
  misc_feature (42)..(42): n is a, c, g, or t
  misc_feature (61)..(61): n is a, c, g, or t
  misc_feature (117)..(117): n is a, c, g, or t
  misc_feature (143)..(143): n is a, c, g, or t
  misc_feature (147)..(147): n is a, c, g, or t
  misc_feature (160)..(160): n is a, c, g, or t
  misc_feature (168)..(168): n is a, c, g, or t
  misc_feature (202)..(202): n is a, c, g, or t
  misc_feature (233)..(233): n is a, c, g, or t
  misc_feature (244)..(244): n is a, c, g, or t
  misc_feature (248)..(249): n is a, c, g, or t
  misc_feature (259)..(259): n is a, c, g, or t
  misc_feature (271)..(271): n is a, c, g, or t
  misc_feature (308)..(308): n is a, c, g, or t
  misc_feature (381)..(381): n is a, c, g, or t
  misc_feature (393)..(393): n is a, c, g, or t
  misc_feature (396)..(396): n is a, c, g, or t
ctcagtacatcatngtgcanttacntctattttcctcagngncctgctcctagggaactgngacctaagcacaattagatcgctaagataaagctcaacaggacatatcaataagcncaacttgatagagcctgcttctctgnagcnccagcacctctgnccatcagntgctgctgggctgctgccaatgtacatgtagggngcagtcttctgctccccattcaagcttaccntgtagctcggnagtnnaaacataagngctgctgtacantgtaagttcccatcataatgctagctctagataccanattgacaagtggtaaatttgaggtcagaaaacaggagtgttttcctcagagatctccataattgaaagaaagnataaaatgcttnttntt

SEQ ID NO: 572936 - DNA, 374 bp, Homo sapiens
gaggcaaaaacttttatttcctgattttaaaaatcggccccatcataaaccccctggctttttttggatttggggtctaatgggtcccaacagggcctttacacagcccctttattcccctttttgggcctgcccatgagcctgagtgtgacaaatcaattagctttgtccctccaaactgggggagcaggactagacttttttggcaggcaaagagctcctcctcggccagtgttcgagcctggtccaccactcctcaagtcttcttgcttttggcttttggggccttggcatccaacgtgctttgggcatgagtgaggggctttacagcattaagcacaagggcttcaggcagcaccagccacagggctttc

SEQ ID NO: 572937 - DNA, 110 bp, Homo sapiens
atgagtacgggagagaagagaacaagattactatcagtaatgacaggggccgttggaggcaaggaagacatagaacgtatggtccaggaaccagacaatagatacaaagc

SEQ ID NO: 572938 - DNA, 2177 bp, Homo sapiens
cgtccacggcagagccaaggggtcctggaggccgtgggggagactcggaaaccagagggtgggcggtgccagggtgcacacagcaaaccggggctgagccaggcctgggacaccgagcccagcctctcccctgcggtgtgactgtgggtcccagggtggacgtgccggggcccccagccagtgcaggagaggcctttgagcagcttacctgagaagggcccatggggagctgggacctccggcctccgtcgcaagggcctgcgctgctctgagggcccgtcggcagctgggtcagggccacggggagctgggacccccggcctccgtcgcacgtgcctgcgctgctctgagggcccgtcggcagctgggtgcccagggtcccgaaggctcagggtggccctgaggaggctggagctccaccgcatttttcatatgaggaacccagcacgtcccgcctgcctccggcccctggaggctttctcagtgacaaaccgtttctgtttctgtcttgttttctcagacaaacgagggagcaggagacaccccctgactttttttatttctctgactacgagaggcacaatgcggagattgctgccttccacctggacaggatcctggacttccgccgggtccctcccgtggccggcaggatggtcaacatgaccaaggagatccgggacgtcacacgggacaagaagctctggaggaccttcttcatctctccagccaacaacatctgcttctacggcgagtgttcctactactgctccacggagcacgccctgtgcgggaagccagaccagatcgagggctcgctggcggccttcctgcccgacctgtccctggccaagaggaagacctggcggaacccttggcggcgttcctaccacaagcgcaagaaggccgagtgggaggtggaccctgactactgcgaggaggtgaagcagacaccgccctacgacagcagccaccgcatcctggacgtcatggacatgacgatcttcgacttcctcatgggaaacatggaccgtcaccactacgagacttttgagaagtttgggaatgaaacgttcatcatccacttagacaatggaagagggtttgggaagtattcgcacgacgagctctccatcctggtgccgctacagcagtgctgcaggatccggaagtccacctacctgcgtctgcagctcctggccaaggaggagtacaagctgagcctgctgatggccgagtctctgcggggggaccaggtggcacccgtgctgtaccagccgcacctggaggccctggaccggcggctccgcgtcgttctaaaggccgtccgggactgcgtggagaggaacgggctccacagcgtggtggatgacgacctggacactgagcacagagccgcctcggcgaggtagtgtccgccggccgctgcgcgtcccgaaactgagacagaggggccggacctcccagcaagcgcatgcgcccgtcgtgaattcagtgaattcagaggcaggacgggatcatccggagtcgggagctgctgccacaggaggcgaggctccccaggtctcataggacacattttgtcagtgtttgaccagaaaagcttgggaaggaagcgctgtctgtgctcacggacagaggcggccggcgccggaggcattccatcctttctgtagggaaaggagcctttatttactattttgtatttatatttgatgaataagtatataaacagagacgtgtacacagatgccaatcacctaccaaaccaaacacgaggaccgccctccctggttctgggggcccctcaaggccaagctcacccctcaagtgctctcacactcgggacctaattcaagtaaaaaccctttctccttcctggggcctcggctcctggagggctggagggtctcgtctgaggacgggaggaggctctcgctggacgtctggcctgtgcgctggtggacggatgcctacgcggttttggaggacccgatgaccaggcgtcctgcgagtccgcccgctggcctgcagcacccacctcggacttggctgtggacggttggtgcaagtgcatcctgcagggctggctgtgcgcagctgtgggctgacctttgcagagttttgtggaatagtttgcaatgtcataaaagtgcaataaaggtacagcagatgtg

SEQ ID NO: 572939 - DNA, 197 bp, Homo sapiens
cgctggtattgagtggcatgtgaggctcgagagctgaaggggagctacgtccaccagcctgtgggtctttcggtttttttttggtggtggtggtggttttttaaggatggagttcgctctgtcgcccaggctagagtacaggggcacaatcatagctcactgcagccttgaactccgggactgaagtgatcctccgg

SEQ ID NO: 572940 - DNA, 1018 bp, Homo sapiens
gcagagggcgtccttactccagtatttccatgtgcttccctgacccgggccggcctgcccaccaggtccctcgaatcggggcctctcagcgtttgagctctgctctcgccccgtccctctcctcactcctgcgggagaaacggcccctgttctttccgccccacgttgtcctcgtgagtgtgtagtccaggtcctgtttccccacagagactctgcaaaaaacacggggcccagaggtgaaggcagctccaggtggggtcaccccgaggcagggcagagcggctccgtcccctcccacacccgtgctcccgctaatgcagcctcagcgccgcagcccgggcgggtccatctgcagacgccaaggtccctgccgcagtgtttctcttctgctcctcatggcacgcgccgggctccccagaatctggcctgggccccccgtctcacgctggctccccgcaggtgggaggtggaccctgactactgcgaggaggtgaagcagacaccgccctacgacagcagccaccgcatcctggacgtcatggacatgacgatcttcgacttcctcatgggaaacatggaccgtcaccactacgagacttttgagaagtttgggaatgaaacgttcatcatccacttagacaatggaagagggtgagcctgtcctcgcccctgcacacccagggaagggccggccacctcccagctacctgcagcccacctgagaccctggggacggggggagcagaccctccagtggagggatgggaatgtcgcaaaggcccatctcagagccagatgcagagggcggccccaggccccaaccaggagggagggccgccccgggagtgggacctccgaggcacaggaatgctgcagaccaagtcccggcagagctggtgttacctgggaaacggaggccaggagaggctgctggtaggaagagcaggaccgtgcagaatagatgggcctctgcctgcacgcggtacctggagccagccagcgggggataggcggcctc

SEQ ID NO: 572941 - DNA, 412 bp, Homo sapiens
  misc_feature (6)..(6): n is a, c, g, or t
  misc_feature (77)..(77): n is a, c, g, or t
  misc_feature (138)..(138): n is a, c, g, or t
  misc_feature (159)..(159): n is a, c, g, or t
  misc_feature (171)..(171): n is a, c, g, or t
  misc_feature (178)..(178): n is a, c, g, or t
  misc_feature (187)..(187): n is a, c, g, or t
  misc_feature (196)..(196): n is a, c, g, or t
  misc_feature (203)..(203): n is a, c, g, or t
  misc_feature (205)..(206): n is a, c, g, or t
  misc_feature (208)..(208): n is a, c, g, or t
  misc_feature (210)..(210): n is a, c, g, or t
  misc_feature (212)..(212): n is a, c, g, or t
  misc_feature (223)..(224): n is a, c, g, or t
  misc_feature (226)..(226): n is a, c, g, or t
  misc_feature (235)..(235): n is a, c, g, or t
  misc_feature (242)..(242): n is a, c, g, or t
  misc_feature (248)..(249): n is a, c, g, or t
  misc_feature (254)..(254): n is a, c, g, or t
  misc_feature (259)..(259): n is a, c, g, or t
  misc_feature (269)..(269): n is a, c, g, or t
  misc_feature (271)..(271): n is a, c, g, or t
  misc_feature (274)..(274): n is a, c, g, or t
  misc_feature (277)..(277): n is a, c, g, or t
  misc_feature (279)..(280): n is a, c, g, or t
  misc_feature (295)..(296): n is a, c, g, or t
  misc_feature (310)..(310): n is a, c, g, or t
  misc_feature (313)..(313): n is a, c, g, or t
  misc_feature (341)..(342): n is a, c, g, or t
  misc_feature (351)..(351): n is a, c, g, or t
  misc_feature (372)..(372): n is a, c, g, or t
tataangctgaaaaattatccttatgaattttagatacaaaattaccaattaaatattattagataaattcctattnttcaaaacacaaagttgtatatttttttttattgggtgtttttttaaagttttcttttttnaaaaaaaaaaaaaaagaaaanaaagggcaacangctaacnccccatgcntgaagcagngcctggntnntntncnttgtgggcctnntnaaaaagttnactttcntaggcnnccaancaaancctccccctncnccncantnngaactgcacccaccnngtgcgggccccctnggnaacccctggggggtaggagggagggggnngcgagaggnttacacagggagtagagggancgatttatggtgagagaccggctccgggggctttaccttg

SEQ ID NO: 572942 - DNA, 2176 bp, Homo sapiens
  misc_feature (201)..(201): n is a, c, g, or t
gcggccgagcgcgccttgcgggggcgggatcccggcgccctaagaccccacgaccccgcgcaccggccgctgctgcgagaccccggcccgcgtcggtccgagtcgccccccggccccggcggagacgcctccctcctggccaggctgttcgagcacccgctttaccgggtggcggttccgccgctcacggaggaggacgtnctgttcaatgtgaacagcgacaccaggctcagccccaaagcggcggagaacccggactggccgcatgcgggtgctgaaggtgcagaattcctctcccccggggaggcggccgtggactcctatcccaactggctcaagttccacattggtatcaaccggtacgagctgtactccagacacaacccggccatcgaggccctgctgcacgacctcagctcccagaggatcaccagcgtggccatgaagtcggggggcacgcagctgaagctcatcatgaccttccagaattacgggcaagcgctgttcaaacccatgaaacaaacgagggagcaggagacaccccctgactttttttatttctctgactacgagaggcacaatgcggagattgctgccttccacctggacaggatcctggacttccgccgggtccctcccgtggccggcaggatggtcaacatgaccaaggagatccgggacgtcacacgggacaagaagctctggaggaccttcttcatctctccagccaacaacatctgcttctacggcgagtgttcctactactgctccacggagcacgccctgtgcgggaagccagaccagatcgagggctcgctggcggccttcctgcccgacctgtccctggccaagaggaagacctggcggaacccttggcggcgttcctaccacaagcgcaagaaggccgagtgggaggtggaccctgactactgcgaggaggtgaagcagacaccgccctacgacagcagccaccgcatcctggacgtcatggacatgacgatcttcgacttcctcatgggaaacatggaccgtcaccactacgagacttttgagaagtttgggaatgaaacgttcatcatccacttagacaatggaagagggtttgggaagtattcgcacgacgagctctccatcctggtgccgctacagcagtgctgcaggatccggaagtccacctacctgcgtctgcagctcctggccaaggaggagtacaagctgagcctgctgatggccgagtctctgcggggggaccaggtggcacccgtgctgtaccagccgcacctggaggccctggaccggcggctccgcgtcgttctaaaggccgtccgggactgcgtggagaggaacgggctccacagcgtggtggatgacgacctggacactgagcacagagccgcctcggcgaggtagtgtccgccggccgctgcgctgcccgggacggagacagagggggccggacctcccagcaagcgcatgcgcccgtcgtgaattcagtgaattcagaggcaggacgggatcatccggagtcgggagctgctgccacaggaggcgaggctccccaggtctcataggacacattttgtcagtgtttgaccagaaaagcttgggaaggaagcgctgtctgtgctcacggacagaggcggccggcgccggaggcattccatcctttctgtagggaaaggagcctttatttactattttgtatttatatttgatgaataagtatataaacagagacgtgtacacagatgccaatcacctaccaaaccaaacacgaggaccgccctccctggttctgggggcccctcaaggccaagctcacccctcaagtgctctcacactcgggacctaattcaagtaaaaaccctttctccttcctggggcctcggctcctggagggctggagggtctcgtctgaggacgggaggaggctctcgctggacgtctggcctgtgcgctggtggacggatgcctacgcggttttggaggacccgatgaccaggcgtcctgcgagtccgcccgctggcctgcagcacccacctcggacttggctgtggacggttggtgcaagtgcatcctgcagggctggctgtgcgcagctgtgggctgacctttgcagagttttgtggaatagtttgcaatgtcataaaagtgcaataaaggtacagcagatgtg

SEQ ID NO: 572943 - DNA, 292 bp, Homo sapiens
  misc_feature (107)..(107): n is a, c, g, or t
gcgaggggtacggtatcacagggtctagaacagggagagtcctgaaagactgactggccagccttctgggtttaaagatgagggaggaaggggcttgataaagattnggcaactggagaaccgccccaggggggggttcccagccctacactccgcacgccacttaccttcttactgcacgcgtgttctcactgcacgcattgcctcactccacacattacctcacttcacacattttctcactgcacgcattttactacacacatcatcttacttcacagattttctcact

SEQ ID NO: 572944 - DNA, 2212 bp, Homo sapiens
  misc_feature (201)..(201): n is a, c, g, or t
gcggccgagcgcgccttgcgggggcgggatcccggcgccctaagaccccacgaccccgcgcaccggccgctgctgcgagaccccggcccgcgtcggtccgagtcgccccccggccccggcggagacgcctccctcctggccaggctgttcgagcacccgctttaccgggtggcggttccgccgctcacggaggaggacgtnctgttcaatgtgaacagcgacaccaggctcagccccaaagcggcggagaacccggactggccgcatgcgggtgctgaaggtgcagaattcctctcccccggggaggcggccgtggactcctatcccaactggctcaagttccacattggtatcaaccggtacgagctgtactccagacacaacccggccatcgaggccctgctgcacgacctcagctcccagaggatcaccagcgtggccatgaagtcggggggcacgcagctgaagctcatcatgaccttccagaattacgggcaagcgctgttcaaacccatgaaacaaacgagggagcaggagacaccccctgactttttttatttctctgactacgagaggcacaatgcggagattgctgccttccacctggacaggatcctggacttccgccgggtccctcccgtggccggcaggatggtcaacatgaccaaggagatccgggacgtcacacgggacaagaagctctggaggaccttcttcatctctccagccaacaacatctgcttctacggcgagtgttcctactactgctccacggagcacgccctgtgcgggaagccagaccagatcgagggctcgctggcggccttcctgcccgacctgtccctggccaagaggaagacctggcggaacccttggcggcgttcctaccacaagcgcaagaaggccgagtgggaggtggaccctgactactgcgaggaggtgaagcagacaccgccctacgacagcagccaccgcatcctggacgtcatggacatgacgatcttcgacttcctcatgggaaacatggaccgtcaccactacgagacttttgagaagtttgggaatgaaacgttcatcatccacttagacaatggaagagggtttgggaagtattcgcacgacgagctctccatcctggtgccgctacagcagtgctgcaggatccggaagtccacctacctgcgtctgcagctcctggccaaggaggagtacaagctgagcctgctgatggccgagtctctgcggggggaccaggtggcacccgtgctgtaccagccgcacctggaggccctggaccggcggctccgcgtcgttctaaaggccgtccgggactgcgtggagaggaacgggctccacagcgtggtggatgacgacctggacactgagcacagagccgcctcggcgaggtagtgtccgccggccgctgcgctgcccgggacggagacagagggggccggacctcccagcaagcgcatgcgcccgtcgtgaattcagtgaattcagaggcaggacgggatcatccggagtcgggagctgctgccacaggaggcgaggctccccaggtctcataggacacattttgtcagtgtttgaccagaaaagcttgggaaggaagcgctgtctgtgctcacggacagaggcggccggcgccggaggcattccatcctttctgtagggaaaggagcctttatttactattttgtatttatatttgatgaataagtatataaacagagacgtgtacacagatgccaatcacctaccaaaccaaacacgaggaccgccctccctggttctgggggcccctcaaggccaagctcacccctcaagtgctctcacactcgggacctaattcaagtaaaaaccctttctccttcctggggcctcggctcctggagggctggagggtctcgtctgaggacgggaggaggctctcgctggacgtctggcctgtgcgctggtggacggatgcctacgcggttttggaggacccgatgaccaggcgtcctgcgagtccgcccgctggcctgcagcacccacctcggacttggctgtggacggttggtgcaagtgcatcctgcagggctggctgtgcgcagctgtgggctgacctttgcagagttttgtggaatagtttgcaatgtcataaaagtgcaataaaggtacagcagatgtgtgtcggcctcacggggcgggtccctcacaaaaaaaa

SEQ ID NO: 572945 - DNA, 895 bp, Homo sapiens
tcaaaaaaaaatgtgtgttttttttatataaaacataaaaaaaaaaaaaaacgggggggggggggggggggaaacccccaaaagggggggggagaaggaaaaaaaactttttgggaaaaaattccaacccaaaatgtgtgaggttttttctcctaatttttttttcaccacatcttcctcagctcaacaaaacaacactcttcttcattttgttggttgcaaaaaaaatccggctatttttcacacacatcaaggagaagaactgatcaccccaccacacgacaacaataatacaaaagacgcctccgaggtgtcatattcttctgcgtgcggaggggtgtcggcgcgcgcgctgggagggaggaactccccaggggggcgggcgcgtggtggccaccccaaaaaagccccagcgtcgctcacagggagaggaaagacccaggcgtcacacaaaagtgagcgccccgcgggcgccaaagtagggaggggcgcgcgcgccaaacactctccacaagaataactagccgtgcctaaaaaagaactcccccttaaggggatcatctaaataagagagaacaggcgcctagtattaccccccggggggaggcgcacataaagagggcccacacatccttccaccaacaaagggcggccccattaaacaccggcggtggtgcaacgtgcgccgtcggtgcacccaggggggcgccccataaggtgtaacaaactctccttgtccactgagtccccccgcacggccgcgtcaaacacgaccgggggggtccccaagatacacaccccacgtgtgcgcgcaaaaaattctctgacccccgggaaattcttccgtcccaaaattttccaaaaacttcacaccaccccatgcggcggagacaca

SEQ ID NO: 572946 - DNA, 2104 bp, Homo sapiens
  misc_feature (201)..(201): n is a, c, g, or t
gcggccgagcgcgccttgcgggggcgggatcccggcgccctaagaccccacgaccccgcgcaccggccgctgctgcgagaccccggcccgcgtcggtccgagtcgccccccggccccggcggagacgcctccctcctggccaggctgttcgagcacccgctttaccgggtggcggttccgccgctcacggaggaggacgtnctgttcaatgtgaacagcgacaccaggctcagccccaaagcggcggagaacccggactggccgcatgcgggtgctgaaggtgcagaattcctctcccccggggaggcggccgtggactcctatcccaactggctcaagttccacattggtatcaaccggtacgagctgtactccagacacaacccggccatcgaggccctgctgcacgacctcagctcccagaggatcaccagcgtggccatgaagtcggggggcacgcagctgaagctcatcatgaccttccagaattacgggcaagcgctgttcaaacccatgaaacaaacgagggagcaggagacaccccctgactttttttatttctctgactacgagaggcacaatgcggagattgctgccttccacctggacaggatcctggacttccgccgggtccctcccgtggccggcaggatggtcaacatgaccaaggagatccgggacgtcacacgggacaagaagctctggaggaccttcttcatctctccagccaacaacatctgcttctacggcgagtgttcctactactgctccacggagcacgccctgtgcgggaagccagaccagatcgagggctcgctggcggccttcctgcccgacctgtccctggccaagaggaagacctggcggaacccttggcggcgttcctaccacaagcgcaagaaggccgagtgggaggtggaccctgactactgcgaggaggtgaagcagacaccgccctacgacagcagccaccgcatcctggacgtcatggacatgacgatcttcgacttcctcatgggaaacatggaccgtcaccactacgagacttttgagaagtttgggaatgaaacgttcatcatccacttagacaatggaagagggtttgggaagtattcgcacgacgagctctccatcctggtgccgctacagcagtgctgcaggatccggaagtccacctacctgcgtctgcagctcctggccaaggaggagtacaagctgagcctgctgatggccgagtctctgcggggggaccaggtggcacccgtgctgtaccagccgcacctggaggccctggaccggcggctccgcgtcgttctaaaggccgtccgggactgcgtggagaggaacgggctccacagcgtggtggatgacgacctggacactgagcacagagccgcctcggcgaggtagtgtccgccggccgctgcgctgcccgggacggagacagagggggccggacctcccagcaagcgcatgcgcccgtcgtgaattcagtgaattcagaggcaggacgggatcatccggagtcgggagctgctgccacaggaggcgaggctccccaggtctcataggacacattttgtcagtgtttgaccagaaaagcttgggaaggaagcgctgtctgtgctcacggacagaggcggccggcgccggaggcattccatcctttctgtagggaaaggagcctttatttactattttgtatttatatttgatgaataagtatataaacagagacgtgtacacagatgccaatcacctaccaaaccaaacacgaggaccgccctccctggttctgggggcccctcaaggccaagctcacccctcaagtgctctcacactcgggacctaattcaagtaaaaaccctttctccttcctggggcctcggctcctggagggctggagggtctcgtctgaggacgggaggaggctctcgctggacgtctggcctgtgcgctggtggacggatgcctacgcggttttggaggacccgatgaccaggcgtcctgcgagtccgcccgctggcctgcagcacccacctcggacttggccttgccatatgcaaaggccaaggcatgctcctcttggccttgccatatgcaa

SEQ ID NO: 572947 - DNA, 419 bp, Homo sapiens
  misc_feature (41)..(41): n is a, c, g, or t
  misc_feature (52)..(52): n is a, c, g, or t
  misc_feature (202)..(202): n is a, c, g, or t
  misc_feature (246)..(246): n is a, c, g, or t
  misc_feature (307)..(307): n is a, c, g, or t
  misc_feature (315)..(315): n is a, c, g, or t
  misc_feature (317)..(317): n is a, c, g, or t
  misc_feature (350)..(350): n is a, c, g, or t
  misc_feature (361)..(361): n is a, c, g, or t
ggactttttgggtcgtaggaacctggtatgaggtcccccgnacgggattagnatccaataccccttcgaggatcaggaagtctactagatatcggaacgtagcgacctcctcaacgacggctaatcgtaaggagaaatcgcccatacttcctttatcatatagccgtcacgacacgcaataagctatatacgcacacactanataagctccattaacctcgtgctatcaggaagtcacagtacggntgcgaaagtctcttcaacatccatccaaacagttacggaagaaaaccacgtccgctttccncgatcggncnaagttactccctccaagaccttcgaagcagaancagtaaccaanaaaccaacctaagccccggtatggcaaattaccagctacgatttacccgcctgtcttg

SEQ ID NO: 572948 - DNA, 843 bp, Homo sapiens
tggtagtacagaggttaactaaactctgtaaatgggaagatcactgggttacccagtgctctcttataaacataattccaaaattgttccatgaaatccgttttaaaatgaacttctctgtgtgccacagtccctaggacgggtgcaaggaccacagtgtcaagtctggttggaggatgagtctctgaagagacagaattcctgccaaaaggcgcacagaacataagtcagccaattgtgtcgtgccaggatacttggacttgggttggctgctgctgctgctaagggatatggggagggttaccccttcccaggtggtaggacgagggttgtgggtaaaggtctgtcgtaaaggacccctggttgtagctccaatgattccgatgcgttgtcacgctctcgcagtgacgcgtaatatcagcattttcccagcctttttggaagctctctaggaaagcctacccgtggggtaatttgccccggtccatgtacacacctcggcggggggatcacaaagtaccagggcgtactgcgggaatcccgggagacaggatacttgcccagggcaaacaaatggggggagacgccagcacataaaccctgcccgagagagaaaacccgtctgcaaggactcaatgcgggtggcgacaaggcggtatggaatgggcctggtcaagttgtcctgacccagttcttgccaaggggaatcgcggcccctaaaggagcgaaatcgaagccgtacgatgaccaccgaccacacgccgacacgccaacaacaggaacactcacccacggcacactcgactaacacacgacccaaccgaacacaatcagcacacacca

SEQ ID NO: 572949 - DNA, 2684 bp, Homo sapiens
  misc_feature (201)..(201): n is a, c, g, or t
gcggccgagcgcgccttgcgggggcgggatcccggcgccctaagaccccacgaccccgcgcaccggccgctgctgcgagaccccggcccgcgtcggtccgagtcgccccccggccccggcggagacgcctccctcctggccaggctgttcgagcacccgctttaccgggtggcggttccgccgctcacggaggaggacgtnctgttcaatgtgaacagcgacaccaggctcagccccaaagcggcggagaacccggactggccgcatgcgggtgctgaaggtgcagaattcctctcccccggggaggcggccgtggactcctatcccaactggctcaagttccacattggtatcaaccggtacgagctgtactccagacacaacccggccatcgaggccctgctgcacgacctcagctcccagaggatcaccagcgtggccatgaagtcggggggcacgcagctgaagctcatcatgaccttccagaattacgggcaagcgctgttcaaacccatgaaacaaacgagggagcaggagacaccccctgactttttttatttctctgactacgagaggcacaatgcggagattgctgccttccacctggacaggatcctggacttccgccgggtccctcccgtggccggcaggatggtcaacatgaccaaggagatccgggacgtcacacgggacaagaagctctggaggaccttcttcatctctccagccaacaggtgacctcagaggccctgccggagccaagggcacatcagagggctgagcccactgtagacaccccctcggcctcccgaccaaggatgccaggtcatctcggaggccctgccagagccgagggcacatcagagggctgagcccactgtagacaccccctcggccttccgaccaaggatgccaggtcatctcggaggccctgctggagcccagagcacattggagggctgagcccactgcagacaccccctcggcctcccaaccacggatgccaggtggtctcggaagccctgctggagcccagagcacattggagggctgagcccactgcagacaccccctcggcctcccgtggcctgaatgaccctcccgtggggtcaatcagaaaagggaaaatcccatcagccaggaacaaggagccacactcttgcctgtctgcgctctccgggaggccaaccgtgatgccatttcctggtgactggaggaggcaggatctctcctggccaacaacatctgcttctacggcgagtgttcctactactgctccacggagcacgccctgtgcgggaagccagaccagatcgagggctcgctggcggccttcctgcccgacctgtccctggccaagaggaagacctggcggaacccttggcggcgttcctaccacaagcgcaagaaggccgagtgggaggtggaccctgactactgcgaggaggtgaagcagacaccgccctacgacagcagccaccgcatcctggacgtcatggacatgacgatcttcgacttcctcatgggaaacatggaccgtcaccactacgagacttttgagaagtttgggaatgaaacgttcatcatccacttagacaatggaagagggtttgggaagtattcgcacgacgagctctccatcctggtgccgctacagcagtgctgcaggatccggaagtccacctacctgcgtctgcagctcctggccaaggaggagtacaagctgagcctgctgatggccgagtctctgcggggggaccaggtggcacccgtgctgtaccagccgcacctggaggccctggaccggcggctccgcgtcgttctaaaggccgtccgggactgcgtggagaggaacgggctccacagcgtggtggatgacgacctggacactgagcacagagccgcctcggcgaggtagtgtccgccggccgctgcgctgcccgggacggagacagagggggccggacctcccagcaagcgcatgcgcccgtcgtgaattcagtgaattcagaggcaggacgggatcatccggagtcgggagctgctgccacaggaggcgaggctccccaggtctcataggacacattttgtcagtgtttgaccagaaaagcttgggaaggaagcgctgtctgtgctcacggacagaggcggccggcgccggaggcattccatcctttctgtagggaaaggagcctttatttactattttgtatttatatttgatgaataagtatataaacagagacgtgtacacagatgccaatcacctaccaaaccaaacacgaggaccgccctccctggttctgggggcccctcaaggccaagctcacccctcaagtgctctcacactcgggacctaattcaagtaaaaaccctttctccttcctggggcctcggctcctggagggctggagggtctcgtctgaggacgggaggaggctctcgctggacgtctggcctgtgcgctggtggacggatgcctacgcggttttggaggacccgatgaccaggcgtcctgcgagtccgcccgctggcctgcagcacccacctcggacttggctgtggacggttggtgcaagtgcatcctgcagggctggctgtgcgcagctgtgggctgacctttgcagagttttgtggaatagtttgcaatgtcataaaagtgcaataaaggtacagcagatgtg

SEQ ID NO: 572950 - DNA, 186 bp, Homo sapiens
gctaacttgtaagatctctatcattatggatcttcaatgatttgcaatggttgtcgcgttactgaagacttggtgacaatcattacattagtcacgtctccctacaccatggattgcctgatggtgaataagtgtcgactgtgcacgacaggctttccatggtgtagagaacacgtcgaattcgag

SEQ ID NO: 572951 - DNA, 922 bp, Homo sapiens
  misc_feature (201)..(201): n is a, c, g, or t
  misc_feature (737)..(737): n is a, c, g, or t
  misc_feature (758)..(758): n is a, c, g, or t
  misc_feature (880)..(880): n is a, c, g, or t
  misc_feature (882)..(882): n is a, c, g, or t
gcggccgagcgcgccttgcgggggcgggatcccggcgccctaagaccccacgaccccgcgcaccggccgctgctgcgagaccccggcccgcgtcggtccgagtcgccccccggccccggcggagacgcctccctcctggccaggctgttcgagcacccgctttaccgggtggcggttccgccgctcacggaggaggacgtnctgttcaatgtgaacagcgacaccaggctcagccccaaagcggcggagaacccggactggccgcatgcgggtgctgaaggtgcagaattcctctcccccggggaggcggccgtggactcctatcccaactggctcaagttccacattggtatcaaccggtacgagctgtactccagacacaacccggccatcgaggccctgctgcacgacctcagctcccagaggatcaccagcgtggccatgaagtcggggggcacgcagctgaagctcatcatgaccttccagaattacgggcaagcgctgttcaaacccatgaaacaaacgagggagcaggagacaccccctgactttttttatttctctgactacgagaggcacaatgcggagattgctgccttccacctggacaggatcctggacttccgccgggtccctcccgtggccggcaggatggtcaacatgaccaaggagatccgggacgtcacacgggacaagaagctctggaggaccttcttcatctctccagccaacatggnacgggggcccgcattcatctntccaggtagcctggcacgggggcccgcattcatctctccaggtagcctggcacggggagcccacattcatctcgccaggtagcctggcacgggggcccacattcaactcttcaggtagcctngnacggggggccgcattcatctttttcaggtaggcttggacg

SEQ ID NO: 572952 - DNA, 885 bp, Homo sapiens
gagggagtgagattgcatccctgggcttagaagtgacggagagaagacttgtgtagtattttgccatcagcacaaggaaaaccaggagagagtctgcctccaggcactctgtagccttctgccttcgtatgttcagaacggtggcataggtcttcccactccacgtcgatggcttgacactcttacggggtctgcatgtgcgtccactcgtccattggtggccccatgctcagctaacgtatactctggtacagtttcgctgtgatgcaagtcagtcaccttggaaggcaagaagcattctcgaagtaaccgttggaaaacagaacagctttggcttttgcagaagattgatgactagacctgtgttcctctagacgtgcctatggctaccacgtctacccctttgttcgcagacgccgagggcgctggaactgacatggcagtctatatcgctctgtcccttggaggcctggggtctatgctttggctcctctgaggtggaacgagactaagatgggcagctgaccgagagcagcttgtgtgtaccatggcttctctctcatggcttcctgagtcctcttccgctatgcactgcgccttatccctcaggcagccatgaggagcctccctggtcctgaccagagggattacgtttcgcgagtggttgcgtgtgggttcctggtcgatgagtggcagagcgttcgtgcgccccctgcttggcactgctgtactcgtcgcaggttcacttcgctcggccggattccgtagtgggaaagtggacggccatgcccagacagggccatgtacgcatcaaagtggtactcttccgggaggaaggggccacgttggcagactgagtccaaggggctaggtccattagcacag

SEQ ID NO: 572953 - DNA, 326 bp, Homo sapiens
ccacatttgcaggattcagtagaatttgaagaatcattgttagaatcatttccaaacaaatacactaagcaaaatggtgaattatggcttattttgaactgcatctttaacttacgaaagatgtactaattgtgggggtgcctgagtcaggcggagctgacccagggttgggaccgattgcagctgcccaggacccatttgcttggtccaggctatgtcctcgttagatgtactgtggtccacggactctttgttgtgtggcagacagtcactgtgggatgctcttcaatgtccgcagttacagaattggtttactttgatttttg

SEQ ID NO: 572954 - DNA, 145 bp, Homo sapiens
cacgagggaaccggagaacagtctgcaggaagtccaagtcatcagtctcgggcatcaggcggatgggagaccgattgtgtttggtgacagccagaacgttgtatcggtcaatgacacttttgacgaggtcatcaatctttctggg

SEQ ID NO: 572955 - DNA, 660 bp, Homo sapiens
cgcgcaatggaccccaattgggcgcaggatctccccgaggagcaccgtccttgtctggccccctggcgccaaacagcgtcctgtcgcccgcgcggtttttccgagaaggcttttattaatcgggcccctgtcccccctccctcgggagcccctgtttgcaccaccatgccgccacatctcgcccctggcatagagggcacctcctctgctgcgcgcgagcccccccctctttggcgaccccatgttccccccccagggttggcgtccccctggtgtgtgttccctcctgcacgaagtgttctcttgctggggcgacccaccaacgcccgggggtctcgaccccttccctctctccgcatggttgtgagctcgcgccgcaacaccacgctgcggtctttgtcgagcacccgctgtctcctaagacagccagcgtgccacccccgccccgccgatgtgggcgccgcacccctgcgaagcgcacttgcggagagacacacccggttgggtggggcgccctgaggagcaacccgccaggcgcacactagcgcaagaaagcagagtcgacactgcgacgactacgagcgctagttgcgcgctgcgaggtgcgcgggcgagttccacaaacagcatgattgttgtcccgcccacagtagacagaga

SEQ ID NO: 572956 - DNA, 168 bp, Homo sapiens
tgtatctctctccaaggcctggtcaagccctaagggcatttacaaatctctgagaatgttttttttatactaaaattgccccttatattctactgtgagaagggcagtttgccctatattgttttaaaaacgaagagaaagaagaaaaaggaaaacccagaaaaaaaa

SEQ ID NO: 572957 - DNA, 793 bp, Homo sapiens
ggcgtgggcctggtgcgcaagtgggaggtggcaggctgagtactccggctgtgtgcgggcccgttctcgggcgaacgtctccagccatgaaccggttgggtacccggttggtgggagccacgggactgttcttcgtccgcgcctgcgaaggtcccgcatgcaatggaaaagctcgacaaaactagcatatgtctgggggatgatatccatccatggtttgcaatcggaaaacgggagggggaagaagggcagaattgtgcccaaggattaaagatagaaggattcctccagccaaaggtggtgccccaagccaattccagggatgaagagtggcgaatgggggaaatccaaaccagaatggtgggtttgggaaagactaagtctgggattcatagaggaaggagtaatggcctggaaaagaaggacggtacctaagttggcagtaatacactgggccttgcagtagggaaacacggaggtgaatttcgaaaagaggaattaagtcttaatgaatcggtccaacgcttctaagtgacaggaattataggacccacgtatgtggccaggttgtaacaaaacgggagggcaaaacttttctggagaaccacaattgaaggggggcagaggaaaaccaagtaggcaggttctcaaaggagacgctagcccgagttagggcgagaaaaaaattaagatttccaagttaatttttacccacgggggggaattaactttagttcctcaagaaagagatacttcgtcagggaaacttccttttcagaaagagggctgaagt

SEQ ID NO: 572958 - DNA, 179 bp, Homo sapiens
  misc_feature (75)..(75): n is a, c, g, or t
  misc_feature (149)..(149): n is a, c, g, or t
  misc_feature (177)..(177): n is a, c, g, or t
attcttttctctttctctttcccacctcatgttataggtcattggtgcgtatctagagcagagggaggacttggngggttctgccacatgggcaaagctttctacttgaggcttggctctatgctaattggcttccatgccatgttacnatagcacctggtttcttggctgggtttngg

SEQ ID NO: 572959 - DNA, 125 bp, Homo sapiens
  misc_feature (4)..(4): n is a, c, g, or t
attnagcgacgcatcgtggccgttaagtcttccatctatgtctgaatcacacccatctctcactcacacctcacacaaggtgccagagcgctccccttctgctgacatttatatggacggactca

SEQ ID NO: 572960 - DNA, 1539 bp, Homo sapiens
ctagttctagcgcgagggccgccctattttttttctttttgtaagggtaaaatttactactggtaacttctagtgtctatagtctatattcggaaaaaggtagaaaatggagttacaattgggattctgttttgtccacaggaagtgtcgtggttaaaatcgtggtgggtgctttatatatgaagtactcgggtctattctatagctcttcaaaactgcgagtccttggggcaactccagcttgcaagcttcccaaagtacttctataagaagttatatcagcacatcttctaatttgggccagtgttccagtttatacagcgttaccaaacactatagcagagtgcaagaattagtgggggaacatcctatattcagaagtacgtctaatacaattcgggggtcatggagagtgctcgtgctgccgctggtgcatacacccagaagaaacccacctaacacaagacaccacacgggcttaacacaactccctaatgggtgctacgtcacaacgcggctcaaggcccgagcacgcacatcctaacagggacatgcggatcacctcttaccccgtgggagcctcttaagtaccgtcatagacctgaagattacaacgcaaacctaaaggcaaccatatatgcagcttgacaattgctgaaacaccagtctgtcccattcatcattgggccttccaggtggctaaccgtggttgacaacacttcttataatttgttcacccacatgggccctccacaaatactccgcggcgaacaggacggagcacacacgggggaccaacaagtccgccctcaaagacgacgataacacccacgttagaagaaatacaacaccaccgacataacatccgggccccactcaacaccaccatgcataacgcgaacccacatcggacacaccccaatcccccaccaaaacacagacaaggcgccatagggaaaccccatacaaacagcaatgggaaaccagggtgtgacagcgaaaccacgagggccagaataccggggggtcaaccgcccataatcgcaaaaccatcgcggcacacgcaccgcaccacccgtaccacccgcagcaacgacacccgcagccaccggggaaggagaagaaagagggcgggtcaaacgacacggcgacacccagcgcatccgaggtcccacgctgtgacacccgacgcagcaagaacacgctaagaggggaagccagtagggcccgagaggaggagagacaaggaacgcagagacagggcgtatgaccactagcggagctatagcgtagacgagcaggagaggaaaacagaaagacagaagcgggcgccaatcacaggtcaatacatatcgatgcgtgtgtggttgtagttaggccagcgcaagcaaggagatgacaagacacggcgaagaacggggagcggaggaaaggacgcacgtggtgagcacgggccccagcagaggcacacgacgaagacgcggacagacagagcagagcaaggagagagggtaagaacgaacaaagaccaaggcgacg

SEQ ID NO: 572961 - DNA, 178 bp, Homo sapiens
ttgtcacgtactcggtttgagcggggaatgctggacattgtaatgggttatggagacatgtcatattacgtatgctagggtgagtggtacgaagttttttcatagcgatgtgtatgaattggtcgtaacggaatcagccgtatgctgttcgaattcataagaacagggaggttagaag

SEQ ID NO: 572962 - DNA, 189 bp, Homo sapiens
tctggctcggcaccccgtagactttagcattggctgcattttgctctttggttagcttatctgcaccttgaactgctggtgcagcctgtacagtagatgctaccactggcacagttgcagcttgagcagctgcaggtttcgctggtgtctgagtaaccgcttgtgccactggtacaggggcttggccct

SEQ ID NO: 572963 - DNA, 1096 bp, Homo sapiens
gctgagattacaggcgtgatccaccagcaccctggactgccttggaactgacacttttatctttcttcccggctttgatctcgttattgttcagaagcttcactgtcatgaagatgagaattactaacaagaagcacaaggtacatgcaggagagtgagagatgtagcccgttgaaggtaggtggacacgcatgttgggaccatatgtagaagtggatgcatgcatacactaggactgatggacgcgtacatatgatgcttagtggtggcgaagctcttgcgagaagactcccatggcaaacgcagggatagagcatgtagttgttggacatgctacgggaggagagcctagaagtcggatttggtccagcgccgttgccaaaggggcctttgttctaggtcgtaaattcatgggcgactacaggatccggggtatcaaactaggcgagggaaagcttacttaggcaaatacttgtgcgatcatcgtagcagatctatagcagcatcctcttaggtaggcagggcccatatctggggcactatatttgagtgaggtccaacctgcagtcttcattcatgggacgtaaatttgcgggtcaggaacccaggagaataccccagtggatagccaatcctttagacatgaaagacgtttttgcaggattagggtgtggccaggaacatgcacgtaagtcccagtaacagtaaaacgtgggtggactaaaggatcggcgatatgtttggggcacgtagaacgtcacgggaggaacataacggaagagagggaacacaccttcacttcaaacgcgttaaaacaaatacaagaatttgtgggtaaaggagcagccgacaggtaagccgttaaccccataacgggggagaaaccggggagtggcactgagacgcggacatctggctgcgggagagcgcacgaccgcctggtgggccccacagcggcttggcgcattatacgacgttatcaccacagtttgggtgcgctcgtacttcgtgcggagtgttacccccccataggagggtaagacgccctgcggtggggaaagcaagtgggccgcgtcggatagtctgcgaaggaatt

SEQ ID NO: 572964 - DNA, 624 bp, Homo sapiens
  misc_feature (573)..(573): n is a, c, g, or t
cttttgagattcatccatgctgttttatcagcagttccttccattttattgctgagtagtattgccttgtctggatgtgccacagtttgtttatccattcttcagttctacaacatctggattgtttccaatttggagtgattataaatggtgctgctgtaaacattcacatgtaggtctttatgtggacatatactttcatttcttttggataaatagctaggaatagaattgctgggttttataaatatatgtttaacattattaggaaactgccaaactattttccaaagtgtctgtatcattttgcattcccacaagcaatgaataagacttctcgtatctccacatttacaccaaccattggtactttcagctttaaacattttagtctttgtactaggtatataatgccatctcactgtgttttgaatttgcatttccctagtgtctgatgatattgagcatcttttcatatacttatttggcatatgcatgatgaagcttctttgatgaagcttctgttcaaatctcttgcccatttttattgtgttggtggtcttattggattgnattattgagtatacagacttactagatcatgtttgcaatatttatccagtc

SEQ ID NO: 572965 - DNA, 110 bp, Homo sapiens
taaatgagtttatagcacacagatgagacatttttgaaacccgattattttaaaaaaaaaaagtcgacgggccgcggtcgacgggccgcggtcgacgcggccgcgaattt

SEQ ID NO: 572966 - DNA, 316 bp, Homo sapiens
tttttttttttaaaagggggggcccggggacccggggtttaagaaaatttgaacccggggccctggggggaaaaaaatggggccccttctggaaggccccttcgggttggggaccccctttttcccaatgggaacccggggcccccccaaatgggggggggggaaaaaaaccccctgggcgggtttccctggggggggcccaaaaattttgctttagggaaattcccggttttttttaaccccgggggggccccgggtaacccccaatggggggggggggatctcgggtaatttttccggttaaaattccctttta

SEQ ID NO: 572967 - DNA, 388 bp, Homo sapiens
  misc_feature (367)..(367): n is a, c, g, or t
gaaagggacaggccgggggagctttgtaaattagttatgaaactgcctttggaaaattatgactgagacagtgaaagagatctaacgtaaccgactccatcttggttctaaacttttaagttgtccttgctccttcctggacgtatgctgaactaactttgggaggaacttagtttatagtttaaaataaagacgataacagcctttacccaaaacaaaccaccttcttgcctgggggactaggacttgcctttgtagggacccaaaaaatgaggccacaaggttattaattatgggtttagggtgttatgtaggctgggagactaccaagagtcttgacccctccccttcaactggttcctaaggntccagttgctttgaggatatt

SEQ ID NO: 572968 - DNA, 127 bp, Homo sapiens
cataaatttacaatatgctgaacattatgacaagtgactaggcaagttggcaaccaggacacgattctaggttagaaccaggtaaggataaacactagattagataaataaggtcaacgaagtgaga

SEQ ID NO: 572969 - DNA, 387 bp, Homo sapiens
gctccgacccctaataatgagagcccaatgtccacttcacccgggttgaccgaggcgtcacggaatgcattgaagagacatttcacagccttcggagtggcatgggaagcctgcataccaacttggagaaatgcccctggagacattttataaaggcaagttatgttttttaatttcagaaatatttcattgcgggaatattgctagatatagtataagacagtaccagctcaatatctaaaccactgctgctagtgtttgcgtagatattgccattctgttttatataacccttttacggggcgggggctaactgtcctgtacagttagcgtaaaccacacgaaattgctatttttggcaagctccagtcaaatatcagcaatttc

SEQ ID NO: 572970 - DNA, 1975 bp, Homo sapiens
ggaagaccaaattacctactcttactcaccagacaaccttagccaaaccatctacccattatattaagtatagcgcgatagaaattcgaaaccgtggggcaaatagagtatagataccagcaagggaaaagatgacaaattaataacctagcagtagagtaatagcaaggcacgtaacactcgcgtactacctgtctgcataagtgacattgaacgggagcaacataacttgtgcgaggagtagcccaatcaagctaaggaccgcccggaaggccgagactgagtctaccgtaaggaacagacttacacatagtagcagcacccgttcgtagtctaggcaaaagtacatgggagagagtgttacctagggtagaggcgatcaataccgtagcctgagcctggctgattagtctggtgttgtccagaggatagaactctgtagattcaactgtgtagaactttgtcccaccaggaacccgtctagatccccgttgtaagatttaacctgttagtccaaagaggaacagctctttggacactagtgaaaaaacccttgtacgagagagtaaaaaatttagcagcccatagtaggcctaaaagcagccaccaattaagaaagcgttcaagctcaacacccactagctaaacaatcccggaacatataactgaactcctcacacccaattggagccaatctatcaaccctaatagaagaaggaaccccgaacaagcccacctctaaggaggggccccccgggcgctatgttccggggctcccccagctgaaagcgagccaaacacggtttctacccgttttgtacagagctgggggccccagagtgctcgagtatttgaccgacgtgggacaccagcacagcgcgaaacggatgggcacacacaaaaaagggaaacgtcaaccagacatcgcagctgcaactgcaatagagaatagggtcacgctacacgccacgcaaactaagcgacacaaggaagaagaacgagacaagaagaaaacaaacaaagagacaaggaaacagacagaacagtaagaagtaacgaacgaagaggacaaaagcaaacagacagacacgacagacgaagaagagagacagagaaagacagcaggaaggaagacgcagaagaggacagaagaacaacaagacgatgagcaaaacccaagctacagaggaagcggcgacaactacaacggcagagaaaagagagacggcagaggccccacaacgagaacacgagaagagaagggcagaacaagaagaaagaggaagagcaagagagagcggagaggagagagcagaagagaaggagaaaggagcgacacaggacaagaaaaagaagaccgaggacgaagaggaaacaggaacagaagaagacggcagacagaaggaaaaaaagggaggagaagagaggacgagcaggcggagagagaagagagagacagaagcgggaggagggagaggcagcggaagcggggagggaagcgggagaggcacaagcgagcgcgcagagagcagagacagaaagcaaagaggccagagagagagacgagagaggcaggaggggagaagcaggagaagaagcggggaaggagagagagagaagcagagaaggagaacgagcgaaaagagagggagacacagaaggcgaaaaggcggagagacgacgcggggagggcgcagcgggggcggagaggaagcgacgagaggggccaagaggagcgcggaggagggaaggcgagcaggcggacacaacataggacgaaaagcagaaagaaaagaagcaggcgcagaggaagcgggcggaagcgaaggaagagagggaacggaggggaagaggagaaggagagggcggacgagaggagggagaaaagagaagccagggaggaagcaagaaggagcgcagaaagaagagaggagggagagagcagagggggcggggacacggcaggggaggagaa

SEQ ID NO: 572971 - DNA, 796 bp, Homo sapiens
  misc_feature (682)..(682): n is a, c, g, or t
  misc_feature (698)..(698): n is a, c, g, or t
tgagatggagtctctgtcactcaggctggagtgcaatggcgcgatctcagctcaccacaatctccgcctcctgggttcaagcaattctccggcctcagcctcccgagtagctgggattacaggcgcatgccaccacacccagctaatttttgtttttcgagtagagatggggtttcaccatgttggccaggctggtcttgaactcctgatgtaatccacccacctcggcctcccaaagtgcagggattataggcgtgagccactgcgtccggctcaagtgaatgttcttaatgggatcatgggatctagaatggtgaatccttttcagaaggtggactttgcccagatccatcaaaggaatcactatttatggcagtgttgccttatgaaatgtgtttcttaggtaataacacttgaaagtctgaattactcctggatacatggactgcagaatggatgttgtggtagcaggcatgaaaacaacattaatcttgtacatctccatcagagcttttggatgactaggtgccttgtcaatgagcagtaatattttgagaagaatcttttttttgcaagcagtaggtctcaatggtgggcttaaaaatattcagtaaactatgctgtaaacagatgtgctgtcatccaagctttgtccatttatagagcacaggtagaatacagntagcatgattcctaangcctgtaggattttcagaatagtaaataagccttgggcttcaatttaaaaaggtactagctgcatttggctctaacaagggtcaacctgtcctgggga

SEQ ID NO: 572972 - DNA, 478 bp, Homo sapiens
  misc_feature (371)..(371): n is a, c, g, or t
atctaggctgggaatagtggctcaggcctgtaatcccagcactttggaaggcttaggcaaaaagatcagttgagcccaggagttcaaggccaccttggacatcatagtgagactacatctctactgaaaaatactacgtgctgggcatggtggctcacacctgtaatcccagcactttgggaggttggggtgggcagatcaagaggtgaggagttggagaccaggctggccaatatggtgaaaccgcatctctactaaaaatacaaaaattagcgaggcatggtggcacaagcctgtaatacagctacttgggaggctgaggaggaagaattgcctgaacccaggaggcggaggttgcagtgagttgagantcgtgccattgcactccagctctgggtgacagagcaagattccatctcgaaaaaaaatagtacaaaatattttaaaaaataataaaagttgtctattctgaaaaaaa

SEQ ID NO: 572973 - DNA, 290 bp, Homo sapiens
  misc_feature (171)..(171): n is a, c, g, or t
  misc_feature (185)..(185): n is a, c, g, or t
  misc_feature (209)..(209): n is a, c, g, or t
gtacccgacgagttgtccgagttatgtttatttatttagatacagggtttcactctgttgccctggctggagttcagtggtgattatggctccctaaagcctttatcttctgggctcaggcattcctcccacctagcctcccaagtaggtaggactgcagctgtgtacaancacatctgactgtntttaaatttttttctttcttcttnttcttcttttattattttttttttccgagagagaggagttttgctgtgctgcccaagctggtcttaaactcttggccttaa

SEQ ID NO: 572974 - DNA, 324 bp, Homo sapiens
  misc_feature (313)..(313): n is a, c, g, or t
tttcttggactaggaaagggaactccctgaccccgtgcgacttcgccgagtgaggcaatgcctcgccctgcttcagctcgcacatggtgcgcgcacccactgacctgcgcccactgtctgggcaacgtccggtcagtggcagatggcaaccgcgggtaaccttccaagcatggggcacacatggccagcacaatcgagcccaaatcgtatctgcgcgtcgactccaagctgggagctgtagaccggagctgttcctattcggccatcttggctcctccgctctattggcgagttcttaacaggacagctaccnaggtcagcagc

SEQ ID NO: 572975 - DNA, 125 bp, Homo sapiens
ggcatatgcgcctgcctgagaagttcactggggacagtagatgagaacggtacggattcttcccagtcacgcaaaatacgacacgcagacttttggatcgggttgttccgtcctggatattacct

SEQ ID NO: 572976 - DNA, 106 bp, Homo sapiens
caagctttgagtgcccgagattgaagagttcaaatctgagcaatgatgttgatgttggctaagagaattctcgtgctcaccacatctaagttgcccgccaatcgaa

SEQ ID NO: 572977 - DNA, 416 bp, Homo sapiens
  misc_feature (88)..(89): n is a, c, g, or t
  misc_feature (98)..(98): n is a, c, g, or t
atggtggctccgggttgcaatcccaacattttggaagactgtggcgggaggattgcttttgattccaagagtcaaagatcagcctggnnaacatggtnaaacccctatctctacaaaacaaacaaaccaccaaaaaaattagctgggtttagtggtacaccctgtggtcccagttacttgaggtgaaagtatcactcaagcctgggaggtagaggttgcagtaagctgagatcatactccagcctgggcaacacagtgagaccctgtcttgaaaaaaaaaaaagaaatatcttggttcttttatgaacatgtagtcagatctgctacagagagactttagtttctttccttacctcttttttcctttcttttattttaacttaaaaaaataaaacttaaaaattttgtaagttgta

SEQ ID NO: 572978 - DNA, 205 bp, Homo sapiens
gggcattatgggagtctaactcctttcttaggtgatcctcctacctcaaccttctgagtagctgtgactacaggcccccacggctatacccagctaattttggtatttggagtagagacgggttcaccaggtgggccaggctagtctcgaactccggacctcaggtgatcggcctacctcagcctcccagggatgcccaacaggg

SEQ ID NO: 572979 - DNA, 907 bp, Homo sapiens
gcttggcggactgtcccaagctgtggataacatctagaccaggtgtttgcaaacgtaggggacaatttttgatactcaggtaatgttgccaatgtctgagacatttcatatcataatgaagctcagtggggcaggagtgccactgtggccatcttgaatggaagtgactcgggactcttctgccatacattgtgcaatgcacaagagatgagccctgatgacaatggacttcgttgacgttacaagatgtcaacaaagtacgggggtctatggcaccacactgcgttgtgaggacacttctgcatacaggtctctaaagaaggagagggggatccggtgctggacttcatgtgtgcccgaccaaagatttgccatctggaattgggtatgtccctcgattgtgttcaatgggattgggcccatgtgaagccccaaggttgtcgaagggacgtcccgagtgcctcggcctccattggcggccacgtggtctctcatgagggtacctcaatgggtgttgcagtgcggttactcacaaagatgtattgatggcctaaacaccaggacaatccgtggtggcctccttttctcattccaccttgtagacgaaaagtgtggttcccccttaccatttccaccattggatggagttcttgggcccttcacagccggtgaactgtgagtcatttgacctctttcttaataatacccagccaaggtattcgtaatagcagggggaactggtacacagggcaggacagggttccatggacataagctggccctgtattatggtggtctcacctaaaacgggtattattaccgatgacagctcggtcaacatgtccaacacatacacctttgcctgaaaaaagactaaaaagaaacatacacaacatgtatgcaacta

SEQ ID NO: 572980 - DNA, 115 bp, Homo sapiens
  misc_feature (3)..(3): n is a, c, g, or t
  misc_feature (71)..(71): n is a, c, g, or t
agncctaagttgttggcatctgtcacaatcgtggatacccaaatgcgcgctctataatttcgcaaaggagnaaaggagcaatttttgtgcgtagtttgttgtagggtgttgcagg

SEQ ID NO: 572981 - DNA, 1562 bp, Homo sapiens
  misc_feature (1229)..(1229): n is a, c, g, or t
gtgacataccttccgtgcgtgacatggcttcccagagtgacgagagtgtgcaagtactgcgttggtcctagaaggtatacgggatgctgtggtgggcgtgtcacggctccggataagagcacccgatgccacatgagatgtgcgattgcacacacaatgtgctgggtcctcgacactatcacgtttagtcgacgtggaccattggatacgtggtccactcgagtcgcgactgtcttgggctcagatgcgtactgtaagacagagatgacttgacatcagctgcatcatatcttgcgtcgtccaacagcggcttgatgtgcatggacaaggtaacctcgatgcttactcgagcaaaagatgggggccacaaccagcgcatttgtgtgacgcggatgatgcgcgagtttctgtccattggggatagagccattgctgctcgcgagagctaggtggaagcgactattgggccagtgaacaatagctccatgatgggaaccccttttatagtggcgaggtagaggtagtgccaccattgaggtggggccttgcaattcttcgctggactctagctatgttactcagggctatccacgctagaccctagctacgtagcccttgaacattcggggacacttagacgtcttgcgacgcgcagaaagagagctcgcacttttgaactcccacaacaaagtaccggtgcgtccgaatggttttgaggcgccattcgcaagcggagaggatcttactacaccctgtaaccttgggaatgacaggctggcaattgggaaagaagcaatgtggacttattcactcctgtcgaggacaagcctcggtattgtagttcccctggttcccgaaatatcacgtactagaacttactttggttgagaagccatggggcgcgattggcatttgagagtcacaagagtcttggccacaaggtctagagaactaacattttcccaatcaacgggggtcgcagaagcatcacccttaccattgttacatcatcgaaggtgataagcgggggcgggagacgcgaactcagcgccgcagttgcacctgttctacagccaaggaggcccatgggaattgttctgtaaggttgcagggacacacggtcaattaggaaacgcgagggaaacattgtttccctatgaatttccgagcattccgttgaacgtcatataatcccgcaaaaggggacggacgaggccagaaagagcctngtataaatacaacggaagggcgtcgcgtacaacgcagccccaggtgccgaacgaatcgaaattccccctatggcgacatttgcatgggtggcttgccgggagcaaaacggggcgacacgggcgtgggtcgagcaggactgaaagagctcccgtgcaccaggtacactggcccttggaagcctgcgagagcacacgccaagggaagcgcacaacagttgacgcacacccagtgaagcgagagcgtacaagacgagagggccgtggcaacaggggaagcaggaaagcggttacagtcggagagcagcttggaacacacgagaggaagtaggacag

SEQ ID NO: 572982 - DNA, 178 bp, Homo sapiens
gtggccaggctgcgcacaccatagcgctgcatcgcgggtatcaatgataaactctgcaggctcacaggtgtggccttcgtgacggccctgaccagagacccgaagcacgactgggcatccccaactttccgaccgggactgactcaccaaccaggacacttcttccggtgtcccgacg

SEQ ID NO: 572983 - DNA, 856 bp, Homo sapiens
gtggggaacacttgctgggtatggtggctcacgcctataatcccagcacttgggagtgtgaggtgggaggctcacttgagcccaggagtttgagactagtctagtcaacatagaccttgtttctaccaaaaatacaaaaattagccgggcctggtggtgcatgcctgtggtcctggctatttgggaggctgaggtggatcacttgagcctgggatgtctaggctataactgagctgtgatcatgccatcgcactccagcctgggcgacagaccaagacttggcctgcctccaaaacgaaaccatttgactgtcacatgtgaaaaaagagctacaagtgaagtaggctgggccaccaagacatgcacatttaaccacatgtgctaacctatactagctacaaacctgtgcttaatatactgccagaaactggctctggctgctgttactgtggagcctgctacggacaaaactgcttctcaaccaatagacgtggtactacgcctactggagctggcacaactccatagcaaatgacatgtcccggagttgctgttctcctcatctcagcaaccctacatacgttctcaagcccgacaacgtcgaacgtctactctccgactacacgataacctgtgcacgctaatatactgaagcgtccccctctcaacacactcgtccgacacacaggccacaccggggccgccagagaaagcagagggcgacagactgaacaaccgaccacactagagacgacccacactggccagatccccccacgaccgcaacccaaaccagcgggccaccaggcagacccaggcccaccacagccaaaacttaacgacagtgagccccaac

SEQ ID NO: 572984 - DNA, 725 bp, Homo sapiens
acagatccatttgctgctctgtctgccggttcttgaggtgaatgtcggaatccattatctgttcgggaaagctctctggggcaggacaaatttacatgtataggagaccagaccagaagcccttctgaattaagatctcacatactgaaggaggcatgaagagcactaagatcggaagatgagtgagctgaccagaacggcaggaggccgagcaacttaagaaccagatcgagacgccaggaaagcatgtgcagatgcgactctctctcagatcacaaacaacatcgacccagatgggaagaatccaacatgcgcacgaggagagaccactgcgggggcacctggccaagatcatacagccaatgcactggggcacagactccaggctactcgtcagtgcctcgccggatggtaaacttatcatctgggaccagctacaccaaccaaacaacggtcaacgcacatcccatcatgcagctccatcctggacatcatgcccatgtgcaatatgcacacttctgggaaacctactgctgcgccctgacgcgaggcctgcaaataaccacatatgctcccctcaacacacatgacaaaccacaagaacggggacacgtggcgcgcagaagtagcgaccctggcacggaccacccggtcaccagaccatgcagacgaaacccggcacaacaccaccaaccgccccaccactgaccacccaggtgccacgg

SEQ ID NO: 572985 - DNA, 221 bp, Homo sapiens
tcatgccaggcctcatcaacctcgatttcgccgacgtgcgttcggtgatgcaggaaatgggcaaggcgatgatgggcacgggcgaagcctcgggcgacaatcgcgcgatcgaggcagcgtcgaaggcgatcgccaacccactgctcgacggggtgtcgatgaagggggccaagggcgtgaacgtctcgatcaccggtggcgacgatatgcgcctgctcgaa

SEQ ID NO: 572986 - DNA, 1874 bp, Homo sapiens
  misc_feature (136)..(136): n is a, c, g, or t
  misc_feature (144)..(144): n is a, c, g, or t
  misc_feature (194)..(194): n is a, c, g, or t
  misc_feature (196)..(196): n is a, c, g, or t
  misc_feature (219)..(219): n is a, c, g, or t
aagccctcgaggctgcagagacagagggaaccgtgtatgcaggcgttgcaggcgcacactgagatggcagatgcacgcaactggctcgaggctcttgtcgcgggctcagtgcatccgcctccatgcagccgtgagntcctgaangcaagcgcaactgtgcacgccacagacatcttcttggcgtgggcctgcantngaaacgtgccatgcactggcagnacggcagttcgtggacagcgagtacctgcaagtaagaccgtgcagcagggcgtagccgtagctagtgaaacgccccgtgcgagcaaacgacgccccgttcccccatcagtgacaggtggaatcccggtgagaaaggcggtcaacacgcgattcaccggcgttggcagcgcatacactggaggaggtgaagacccttagtacgtttcgcgaggcgcgcaaacggcagcacggtatccaaagaggggacttcaacgggcacttccatggtcgtttgttggcagacggggggtcctcggcggaactatgccgttaactttcatacaagccatattacaggctccggcctctggtcggagactttaacgcccattcggcgaacgaagggggctcctaaggtaaggcacgacgggcgtaccccgaacctccgaacccgtggggtggacacaccattttatatgcccccagttcggaaatgtgtggacccatagcgaaaggataatattcgctcaggaggggaagtaccttacccttatgacgtgtcaacgccggccgactgggggttaactcctctctatggggaacatttgctggaaggaacatggggggcaataaaaccccggaggggaacacggggccgcccattttgagcccttttaatgccgaccactagggtggcgccatttccaaccggagtccttggacgagctagcggtcagtgctttgtgcattcccaagttatctccccctttaacgaccagggggcaccagcggttctccattatgtgccgttccacttatttaagattcgcgtgtgaatagcacgaggcaaataggccttgtatcgggcccccaccactggtggtcctcctatgcaaagggcctctttattgggcaacccccgtggcatcattgttggggcggacgaagaaggtcccccttaagggtgtgaaatcctcaaaaaaggggcgccccacatcggaataccctccctgggagggacgctaaaacatacctccctctgtgaaacgccgcaaccggcaagcgcgactacaggcacttttcccctatacttccatcgtttcttcgcaagggccattttccctaccacggcgggtctccgtagagcgcctggagacgacagacgtagaggccccacgcggcgccccccacaaggaagcttggggggcgagccacacacgctctggcgcacctacgggcacgcgcgcgcgaagagcgggaagagcggtcccacaatccccacagaggctccatgcgcccattgggcgcgagaagaataccttaaaggcggctcatggcgctggacggaccaccctccagcggggcccccatcgcgcgacacctcaagagcccacggaccagcgctccgacaaagaacaactgccgcagcacccacggagaccccccggtatcagcacacctccctccaccgctccctagccgaaccaccatccgcggcgcccccgcgcccagcgccacccgcctcccctgtccgcgcgccaaaaccaccccagcccgagcacgccgccccggcccacccacacaccccgccggcagcacgcgccaacgccacaccaccccatgtcaaccaccgcgagccacaccccactcaccacacaacacagcaccaccccccc

SEQ ID NO: 572987 - DNA, 596 bp, Homo sapiens
agcggggtggtgcgtgggctaccccaacctgtgtggctgggccgcggtctcccctcaagggcctggggccgtgcctcgggtgtacgcgtaggggtctgtgtgctgggggtggtcaccgggcagcgtgggtgagcgggcagggggcagggagagcgagagaggggagcaggtaagtgaacgctcgccttccggggcctgggtcttggggtcggggcgcgcgaggcggagcggagagcgccccaccggggggaggagcgcggacgagcttccgccagctgcagccccggcgtgtgcgggctcgcccttgggtgtcgcagcgacccaggaagtcagggcggccgtgaccaaactcctgcgggaacggaagccagactcccggggggtgggagtggccactacgttcctgcgactcgcccggtgggtaccggatatacttggcacgtcccagaaatcgagtgacttcgaaagtactagcgcacccggaacaccgtgactccatttgtgtcaccgaaagcggcctacagaaagggagaacctttgaattactagcattaaggattaccacaagaaccagcgcctggactcactgtatcccc

SEQ ID NO: 572988 - DNA, 199 bp, Homo sapiens
ctagaggaaataatcttctcaagcatcccagctctatcacagatactatctatggcactagcatgcacattctcacccagaaagcccgagacagtatgctctcatctgaaattagtctgctaggatagctgtcactctcgggtgcgctaccctattgggctgtcactctcagaaatgagacatcctaaagtacaggtca

SEQ ID NO: 572989 - DNA, 283 bp, Homo sapiens
  misc_feature (100)..(100): n is a, c, g, or t
  misc_feature (111)..(111): n is a, c, g, or t
  misc_feature (115)..(116): n is a, c, g, or t
  misc_feature (128)..(128): n is a, c, g, or t
tctaccccccccaaaccacaaacaagaaccccccaatctagcaaaaataaaaatctcactatttttgaccaagcttcctcttaaactctatacacccaanctatccttttncctnnaatcccaagttntgagatttacacaaaaatatttcattctaattactttttatactttataggtcaacagctctcttttaaacacaaaatttattcaatatactttttcaaacaaactttcatgttctaatcattctctcatttcaccattaaattaaacacactga

SEQ ID NO: 572990 - DNA, 1077 bp, Homo sapiens
tggtgagagaaaagagagagagtctaccctctgtgtgcgcaccccacaaaaaagagagagagaagaactgtgtgtgctacaaaaaaaaaaaaaaaaaaaaaaaaaaaaaaaaaaaaaaaaaaaaaaaaaaacaaaaaaaaaacaacgaaaaaaaaaaaaaaaaaacaacacacaacacaaccacacaccacgacgacagcacccaacaaacaaacaccagacgagagaaactaaaaacaacagcagaaccaccacaccacacgacacaaaaagaaagaatacataaacatagtcagtatacaaaaacagaaaacacacacagagaccacacatacaaaaagaaacaagacaagcagagaaaaccgcgatcaaacacaaacaaaaaaaaaacaaaattgacaacatcaagataaaaagagagacgaaaaaaagaaacaaacaacacagaccaacaacacacaacagagacaaagaaccgaacaagcacaagaccacgaagccacagaacacaaccaaacgacaacaaacaagcgaaagtcaaccaacaaacagcaaacacacgaacgacagacgacgaagcacaccagacaaaacaccaacgacgacaaaccaccacagacaaaaaacacacaaacaacaaacaaacaaaaagagacaaaaaccagccgcacaagcacaacagagaaaaaagaaagaaacccgaaacaacaaaaaaacaagagaaacaaaacaacaacaaacagaaacgacagcacagacaggaaacaaacaagaccacgaaaaaagaaacacagaaaaaagaaaacgaaaagagaagacaacacaaagacaagaaacaccaaaaaaccaccacacaaaaacaaacacaaaaaacaccgacgacaacaacaaaacaacaaaaacaaccaacagccaacaacacaccaaagaaagaacacaaacacaaaacgacagaaaagcaaccacaaaacaaaaacacacacaacaaaacaaaccaaaacgaacaaacgaagacaaaacagaaacaaagcacgaaaaacaacaaacaaaaaaaaaccacaacacaaacaaacaaac

SEQ ID NO: 572991 - DNA, 638 bp, Homo sapiens
gcagtagttaataatggtaggtagatagaataataattaattaggtagttcggtggtaggcgaccacgccgagcaggttagctatctagtcggcagtcagtagtcagtagtagtagtggttgatgaatgataatttgttcatgttctttgcctgcgcgctgcggtcggcagtcgtagtactactggcagcaagctatagtggtagtactactcctgtattagtgactactcgcttcgcggcggcgctagagagtagatagtctcttcttctctactatactctcgacactactactactcctactgctagatgatatatattgtagtctatatattactctctactacacactactctactattacatagtctgctactactactagtactatatgagtagtagtagtagaagtaagtagtatcgtcgacacacataatatagtcgtgatactatcatctctatatgatttctctcgtagtatagagatgttgctctctctagcatctctctctctatgtggcgtctcttgttatctcacttctctgtgtagagacagttctctctctccgtcgtgtatatatatataataaagtcgctcttccctccacacctgcacccacaaaaagacaaacaaac

SEQ ID NO: 572992 - DNA, 718 bp, Homo sapiens
taatctatgttgtggacaatggacaatctgtgcacttccagacaatatttgctcgctgctcaaatgatacggttggtatgaccctaaagtaactcgagtacttccatgctggattaggtgtggtgctaggggaagacaagaaacagtcataacaacacgtatcgggatgaaacagtgcgcctcatagcatactatctagggaaaaggactaaaacgatccatggacaagttgaaggacaaagaaacgcagacaaggtcttacctgcagaggaatatgaatgctgctacagacaatccgttgcatatggctgcatccaatatgctgaccattcccataaccggttgaatgactacatcttctccttatgagcacaatgctacatgacagaggaaatacagctgcttacttgttgtatgccttcactagaatcaggtctattgcacgtactggcccaatataagatgaacgaaatgctccataaaagctgctcgagaaaccaagacttctttctggaatcatgagacggaatggaaactaggccggctgcattttacgagttcccttagaattctgcaaaagactatacgatgacttatatctccacactctactgtgattaatatatatgacctggacactgttttcaagcagttccaatgataacggctacggggtgagacgatggacgccttgcacattttgacgaacataggcact

SEQ ID NO: 572993 - DNA, 665 bp, Homo sapiens
aatagaaacatacagcggcggttgtaataactgcgcagcatggcgatcgccgcgggcgagaacgggttgccgctgaggtcgaagccctgggctctgtctgcatccatttcaaggaggtcgctgggcagctcgctaatctggttattgcgcaagctcacttgatcaagcgatggcaggttgaatattccgatcggcacttgcgtgaggccagcttcttcgatcatcaaacctgtcagccccgacattttgctgatgtcgggcgcgacgcccagcgggttatgactcaggtccaggtactcaaggttttgcaggtcgctcagggcgtcggcgctggtggtggtcaagcgaatatggctgtttgcaaggctcagtgacttgagtttgggtagattgaacacggcgccaggaatgtcgttcaaggtatagcggtagatcagcaggctttccaggttgggaaagtgctcgagaaatccctggggaatcgacgtagtttcctctgctctcaattccagcttcgaaatgtgctcgaaatcgatattcaatgacggtagatcgcctagcggcgccagcgtcacttccatttcacgggaggcggcgggcggctcttggtcggagtccagagcggtttcacgtcgccaagctgcttccagcactgttttgagttc

SEQ ID NO: 572994 - DNA, 656 bp, Homo sapiens
cctggcttcttagtgaagacaatgtacagtatcccattagatcagggctacacagtctatgagcaataatgtgatttgtggacattgcccatgtattgtcctcactgatgatttcaagctaaagcaaaccaccttatacagagatctagaatccctttatgttctccagaggtaggtggaagaaaccatgagcaggagcaggaattgagtgataaacaaatgggctaaagaagaaaacttttcttcttgttcagttcatccagattataactttaatgggacactttagaccattagacagttgacactggattaaacaaagtcacataatgccaattacacactgtatttatggcaatgtataatttgcaaagattgactttaaaagatgctgtgtaacagaattgaattaattcaattacttattatttagaatgctaaagcttatgctagtcttttctaattcttaacactcatacttgaaatcttgctgagtttccccagaagagaatatcggatgttttttgacatttttgacccatttaataatgttcttgtgtttacttagtatacatagactttatctcatgtgtcaaaagtcctaggaaagtggttgatgtttcttatagcaattaaaaattatttctgaactgtaa

SEQ ID NO: 572995 - DNA, 226 bp, Homo sapiens
ggtcgctctaacgtgatccccgatgtgcctcttgaggtcaggagttcatgaccagccgtggccaacttgtgtataactccgatctccacatatataattacaaaaattatgccaggcatggtagtcgggcaccgtagtaattccgatgccactcgagactgttggtgcatggagaatggctctgagcctgagagcgggtgtgaggattgcatttaacgctgctgat

SEQ ID NO: 572996 - DNA, 216 bp, Homo sapiens
aagccgccccgattatgaacgcttagcgaatatcagaaatagcaaggttaggttcctgtaagcctctgggtcacaacattttcatcaactgatcaatacataatcttgtttaatgtgtgtttctgtttaaagtaccttattttattttattttatttttgagacagagtctcactctggttgcgcaggctagagtgaagtggtgcgatctacggct

SEQ ID NO: 572997 - DNA, 1153 bp, Homo sapiens
  misc_feature (55)..(55): n is a, c, g, or t
  misc_feature (1153)..(1153): n is a, c, g, or t
atcaagtgtgcgctatacaaggacggttaattggaaattgcactaccatgcgatncaatcatggtagcattcccctgtagatcccaagggttcacattgataacgtatcagggtagagatgtaatactaagactattgcaaccacgtagtaattcagacgtcaggatccatgtgcgtaccttcaggccccgtaaggactctgcatgcgggatgctggcagaggccaaggcccggcatggtttctgcggtatcccaatcacagacacaggccggatggggagccgcttggtgggcatcatctcctccagggacattgattttctcaaagaggaggaacatgactgtttcttggaacgagataatgacaaagagggaagacttggtggtagcccctgcaggcatcacactgacaggaggcaaatgaaattctgcagcgcagcccagcaccggcgcacagttgcccatctgtaccatgaacgatgactgacgcttgtggccatcattgcccggcacagacctgacagaagaatcgggactacccactagcctccaaagatgccaagaaaccagctgctgtgatggggcagccattcggcactcatgagcgatgacaagtataggctggaattgctcgcccaggctggtgtggctgctactggaatcgcacctctccccacgcaaattgcactcttccagactcaatactgactccagtacacttcaacgcaccaaatcaccctaaatctccaaagctcactttggaggccactggggtcaactgctgcccaggcaagaactccattggagcagtgggatccctgcagattgacatcgacagcttccatcttgcattcaccgaaatgctgcgcttgcatcgcgggcccaaggaaacgacaggaacccatatcccacatcttcacacacatcaacaaccacaacaagtcatcaggaacaccccaccagtgaaactgtaaatcataaccaaataccaaaaataaaacaacaccaatcaccacataacccaccatatctttacactacacctacaacaatccatctcatacatcacacacacaaacataaacaaacaacgtatcatacaacacacatcttaatgcacattcactacttgacaaatatctaaatattaacn

SEQ ID NO: 572998 - DNA, 956 bp, Homo sapiens
atctctcctaaatcatatgtttggtatgctagcactagaagatctgcagaacttggacttacgctgatatcgaggcagatcttgtataatgtcctaatgatggccttgatgacctataaaaatcgctggggcgtaatacggatgacgtctctagtaaccccttcacagattggacgtccctgcatgtgatcactatatatgggttgctaatataagcagagaagctcagatgctgagcccgcgcatgtcaaattacgccgggccctatgaccttaataggtctcaaatctccaaacaaattatgggctagacttactgtacataaccttaaaacctacttcccaattgcttaaaacttaatcgtccccaaacaattcatatttactaccaacgtgacaattggacctttccaaaaaaaaccacattaattctggaatcaaacacaaaccaacccacagccttaattcattaaggcactcatccctcctactattttataaccaaaatctcctttaattactaacattttcacagccacaggaacctaaatccatattgtactatcttcttcgaaaaccaaatatttatccccaaccttgtggtaatcactcacgccgatggagcgcaacctaggcacgaaacgccttgaaactgcagggaactattacttcctattctacacccttagtaggcactctttcctcctactacatcgcatactttacactcacaagccccttaggctcactaaaccattcacgtaattcattctcactgccaagaaactattcaacttcctgacgccaaacacttattatgatagctacacaatacgtttactaggtaagaactcccctttacggactcatatgatcctaaagcctttgtagcccaccgtggtcaaatacttgcgcagacactacacggcgatgaaaatagcccaacttaccctaaag

SEQ ID NO: 572999 - DNA, 495 bp, Homo sapiens
gtcgagtgaatgtgaacctaggtttgtcttcactccaaaaccctgaaccacagtaatgagctgtctctgtaaaggggtgtaaccgtggtcttctgctagggaagtgataatcgatcttgattatctagagtgtgtgtacatttgatctagttaggatattctttttaccttagtatgatgactgatttaaattttgttaaattttaagacccctctggggccattattataatttaaactgattgctaatttgtattatgagtacagtatagacattccaaggtcgggttgatttagtatccattacaagacacagacctccactctgtctctctcaatctccaccttcctcttttcctccccattccttgtcctacccttcagtagagtaacttttaacttattcttttagtattaggcttgtttttcctttgaaaagtttgagatactttagaaatataaaaagatagtctcacaataaacattcactctgta

SEQ ID NO: 573000 - DNA, 228 bp, Homo sapiens
aaacaaacattatactgaataaatacatttacttgcctgcttcaagaaatagccctttggcccacaggatgatactgtgttgaaaatggaccagttattactaaacaagtctgctatatacttattttagatcttgcacgttacagtcccactattcacagtagttcagaaatcagcgatatgtgagatcttgattgcggccttaagagtgtcagatttctgaagggc

SEQ ID NO: 573001 - DNA, 146 bp, Homo sapiens
cggtatggtcctagcctttctattagctcttagtaagattacacatgcaagcatcccgttcgagtgaagatacaggacattctcatcagcacagggatcccaggatgcccacttccctccacccccacaccacagccatttaggta

SEQ ID NO: 573002 - DNA, 541 bp, Homo sapiens
gggatactcaaatatttgattcatttctcttagattgttatttcctttgattgcagtattttttttaaaaaataggttcactgagatataattcaaacataacattcatctttttaaagtgtacaattcagtcatttttagtatggtcacagagttatacaaccatcaccactgatttcagaatacttttgtcacaccaaaaagacaactcatacccaactccatcttctcctgatcccccagaaaccactaatctgttttctgtctctatggatttgcctattcttgacatttcatataaatggaatcatataatattgcagcctttgtgtctggcttctttcacttagcataatgttttcaagttcatccatgttgtagcatatataactacttcatatctttttgtaaacaaacaatattccattgtatagacacaccacattcttgtttatctgttcatcagttgatggacatttgggctgttttcatctttttttttttggctattatgaataatgctgctaagtacactggagtc

SEQ ID NO: 573003 - DNA, 304 bp, Homo sapiens
  misc_feature (132)..(132): n is a, c, g, or t
  misc_feature (137)..(137): n is a, c, g, or t
  misc_feature (149)..(149): n is a, c, g, or t
tcacaaagagacaagaaatgatctctgtctatgatcactgctaccttgggaccctttcacctttcagaggagagagattgaaactggctcacacgtggggaaatacgtatactggaggcttgtcacagctgngtgtncccgtcattggnggtttgggtccagggagcaagagaaaaacacactcctttgtgttcaaagatgaaaatctttcctgagtttaggggagcccagctttgggtttaggggaacccagctttttaggtatataagggcccagctttgggtttaggggagtcctcaactc

SEQ ID NO: 573004 - DNA, 598 bp, Homo sapiens
  misc_feature (139)..(139): n is a, c, g, or t
  misc_feature (384)..(384): n is a, c, g, or t
  misc_feature (441)..(441): n is a, c, g, or t
  misc_feature (556)..(556): n is a, c, g, or t
gctcgacagagtcagctgcaacggccgatgctgcggctttcgtcttcatcgctctgacgcgagtctgctggttcataaccacgaccacgagctacggtgagcttcatgttcaaggcgccgttagacgcagggttggcanttacgtgatcgggattaacgatctcgacatcatgatccagctgaatatcggcagcggtaaccacccccgaacccttcttcgacaaggtcagcgtaacttcgtcacggccgtgcagcttgatagccagacctttaaggttcaacaggatttcaatgacgtcttcctgtacaccttcgatggcgctgtactcgtggagcacaccgtcaatctcggcctcgactactgcacagcctggcattgagganaacaggatgcggcgaggcgttgcccaggggtgtggccaaaaccacgctcgagaggtncaggggtgattttagcccgggttgactggaaaacctgcacttaaatgtaaggggtgttacggaactcatgtaccgaattcgcatgggttgaactatttttctaggccttacttgngagtagagctcgacaatcagggcttcgttgtcgacgcggccg

SEQ ID NO: 573005 - DNA, 162 bp, Homo sapiens
gggggtatgctgttcgaatcattagaacaggcaggttagaagtagcggtcttggtgacaaaatatgttgtgtacgagttcagcgtgagagtgcgtcatatgttgttcctagtgtaagattgtagtggtgacaggtgtttattataataacactcctcactat

SEQ ID NO: 573006 - DNA, 785 bp, Homo sapiens
gactcatgcagtcgtgtgtgtgtgtgtgtgtgtgtgtgtgtgtgtgtatgtgtgtgtgacagtgtctcatcaggtccttccatctctgggagttttcttcaacccatatctctagaaattacagctgacagtattatagtagtgtgagcagaggatgatgtgcaaagtataaaaataaagttattatactctcctcttgcatagatacagttatagagatatgcgttgatcacctccgtatttcccaggcagtgctgcagagtgctgtaggacatagtggtgaacaagagagacgttggtccaagctcttacagagtcgacagtctagtctcagcattataggaaaaccaggagtgaataaaccagggtgagggcttgagctctgtgtttatatattagtgaggagaaaagtgtgaaaacaagaagtcttaagtaaatattgaggtcattgtgtgggcttaagtgtattcatagaaccatcaacactagtgtctacagcaatttcaagtgccctatcgatgaggctagcaccttaatcactgtagagcgcggattcatttataaagacgcaattatggacgccattttcaatagcctgggccattttagtgtacagccaacctgcaggggacaatcgggacgaagtaataatgaaatttttaagagaatattaaaaaagcatattattgtctggtaccaaggaagtggtgtcaataataagtgtgcccctaactggatagggccataaggagtgtgcaatatgatgagcttgtgagttgaaaatt

SEQ ID NO: 573007 - DNA, 145 bp, Homo sapiens
ctatgctagcagttcagatcggcagcgcacctgctcgacctgctcacacgaaaacgaactgttcgaatcgcgccgcgccctgaccaacgcggtctatgacctgaggctggcccagtatcgctggctggcgctttcgcataagctg

SEQ ID NO: 573008 - DNA, 252 bp, Homo sapiens
actacatactccatctcggaaaaaaaaaaaaaaaaactatggctggcagtcattcagatggaattgaggaaagaataatattaataactggatttcaaaagggactggaagatgtgaatcatctatttggctgaagaattcttacttcttggaaattactttttatggcggtggtcatactcttaggtgccaaacgggggaaaatttttaaccagggaagcggaagtatgtagtcgggtaccggagctcgaa

SEQ ID NO: 573009 - DNA, 896 bp, Homo sapiens
  misc_feature (379)..(379): n is a, c, g, or t
tggtatgtatatgtgaaatgctccagcctgaatcgacattaaagcatctgttcataaatactaaagctagatgatgtgggggacattgaatgacatgtgacatgagaggtgatttgaatacctgcataacagtaagttagtcttatattgtatcatatgatatgcggtaggaagtatgtagtttttcatagggttgtattgaacgttactcgtattggattgacattgatgtatcgctcaagatagatagtagccatgtatcatgtaattcaagactatctatataaatctggttgctacgatgggaatacttgaattagacagtagttagttgtgaactaatctatcgtcattcatgcaagtgtgaaccaagaatcangtggtctcttgattctattacgccctactaaagattggtgcatgagaagataataaagatatgaatatttatcgtgctgaatagcattttaagtgtgatcagtaatattgactcaaagaacgcgcttgcctaatatttacggcccaattcgtgtgcattctccatattcgattgtacttcagtcagtctgagacctgtcgcactcaaattcgggcagagtattatatctatactagactgtgtagtgtgttggggttaataagtcacatgtatcaggagaattgtatcctgaaggtctggaggagtgatgcgtcaaaagcaagtatttcctgtacgcaaactatgtagtaagtcctggaagaattgttggtggtacgcgacacttggccttaatgccagaatgcttgtctcctaaggatataaagatgaggtgtacggtgtgaccatcctaagttagtcagaaagattagaaatgaagcgcattggagtatggggtcctactagattaaagagtaag

SEQ ID NO: 573010 - DNA, 904 bp, Homo sapiens
ggaccggcggcctcggaggaaccatggggattcctcgccgcactgtccctgcggaaggcggccccggcgccgggcctcggcccctcgcgcgcgggtcggcccgggtccgatcgagaggcgagtgtcgtgagcgtgccgcgaacaaaagaacccgctcgtacgggcagcaccgccaaggggtgcgggccgccggtggcggccgcggggataatgtggagcgcgcccatggtggacagccaccgggtcccgccgcggggacaaaccccggctggaggggcattcgccccacaaaggtagcgggtggtccacggatggacccagcatttaaaggggggccaaataaaggggtccacccaactggctggcgtcatattcctgggaaggagacaaacttgtggacccctccccagcttatttatcagaagaacgccttgtggtggttcaagtggcccttaacctcccagtgggattctccagaaaaattgaaccgcggctgatcaaccagctttcttcttccaggacggaagcgacccaggtgggttggcccgggaaaaaacttcccctccttcccagagtcctcacagaaatcctgagggtcaggccgggtgcaagccttgacggaagcgggccagcagagagatttcctggaagcgactttggcttggcagagattcactgttctcaaccacggggcggccaagacggctaaagagaccgcagacgcgatgttgagaatgtcctgagggatttcccttcaacacaggagggagcggcgggggcgtaactctacccagattgtgatttgtcgggcccaaagcacccaccttggagattcaaaaaccttgggtccaaggggcccctgaaccacacggcgtccccgcgcggcgaggagccccgggctaaa

SEQ ID NO: 573011 - DNA, 429 bp, Homo sapiens
  misc_feature (415)..(415): n is a, c, g, or t
  misc_feature (419)..(419): n is a, c, g, or t
atccagtcctgtggctcgatagccgtttcctgggctatccgttgctcaaagcgttcttcttgggtcacgtcatcacctttacgattccagttttcgtgaattaattaaaaacacgaatcacattgttttatgaaagttacacaatagttaagtaaaatcacaaattttgtatgtttgaactgtgacggatttcgcaccctatttttataaatcattatttatcagtgcattaatgttttccgcagttgctatacagatcgcatagttaacatttcgttaaaagatcctttgctttttatgattcgcgatttaactattagcaacagaaatgtgaacatctggggagtagcgatgcagcagttagccagtttcttatccggtacctggcagtctggccggggccgtagccgtttgnttcnccacgttatt

SEQ ID NO: 573012 - DNA, 249 bp, Homo sapiens
atagccctgttctttttgcgagggatcgaacccagtagtcaccaatcgagtccacttgctccagtacaatttaagtgtggatccggtcatcagagaactgcctctctgcccttagaccttatcatctagcgcttaccttacattatgcttcttcatgcttgtcaatttccacttgtcacaatcatgtcacattgcgtctggctcacattttcctgggatcaccgaagctcgcacaattctgtcacatcc

SEQ ID NO: 573013 - DNA, 135 bp, Homo sapiens
gagctcgcgcgcctgcaggtgagaaaattgagacggagctaagagatatctgcaatcaatgtactgtctctcttcggaaagttctcgatcccaatgcttcacaagcagagagcaaagtcttctatttgaaaatga

SEQ ID NO: 573014 - DNA, 343 bp, Homo sapiens
  misc_feature (134)..(134): n is a, c, g, or t
  misc_feature (140)..(140): n is a, c, g, or t
  misc_feature (146)..(146): n is a, c, g, or t
tgatctacaggactatgtggtactgctgagtgtgttctgtgagactctccaagcaaggttagaagaagaagaactctagctgggtctgctacatcactgcagtttagatggatctggagagagacatgcttgtnctctgnattggnaagatgatttactctcgggaatcttctctgtcagcctgtacatctaaaggcatgaagcactcaattgggcgattaacattaggtgtttgttctctgatggtatctctgagaatactggttgtaggactggccagtagtgcttcgggactgggttcacgcccaggtctccagcaggtaggccacaggtacccgagctc

SEQ ID NO: 573015 - DNA, 545 bp, Homo sapiens
gggggaccacgcactaaaggttggactctgagacactgcttaccgtatcatcaaagagcatatctcctgttatgatcacgcgctgatccacaggtctcttaagggctgggtaggcctgcatgccgtattgctaacagtcacaacataactagcttatactcacatactagacactcagggagtccagaccgtaggaacaatcctgcgcggcatcatgctacatcgaatcagcctccaagcctttcggatccgttacataacaagcggggtgagcaggctctgcgtcacgataaagtcactgggtcagcaatgttgctgatcgtatgagtacacagcctacgtgtgacgaatatttaactcttacatactatccttggtattgctaggaccaggggcactgcgatttcttgacggaggcaagcgatgagtactctcgattgaagcgaggttccaatgaggattacatggcctgatgtcttgcaattatgcactgttctacattatgcttagagacagatgtaccctccggccgaatatttcaacca

SEQ ID NO: 573016 - DNA, 597 bp, Homo sapiens
gatctagaggatccggtctgagcaagcgggaaacaattcctttgacaggtcaggaccgtggtggggtgagtgcactccccagggcggggcaggcaagaaaaattaggaggggagggggcaccagttcttcctaaggggagcttgagactcctctagctcccagtgcctgacttggaaggaactacaaaccacgggagcatggtgccctatttcccttccctttctcactctcaataagaacctcataggcaggggggcggtggctccagaataactaatttaacataaaatacaaacacttaggtagaacggcatggagagcctggggctccttcagcaaggtcagggaagagggaccatgatggggggagaatgacttccttacctcccattcagggcaagggctcagtagctctgcatcttgcgagtggtttttaaaaacaaaaatttctaaaaggagcagggcaatgcagatcggtgggtacctgggaggggatgtcctggtataggacaagggaagaacagagcggtaccaactcccccaagatctccccaaagatcagcacgaacaaatggcgtaggttggggaggggggac

SEQ ID NO: 573017 - DNA, 321 bp, Homo sapiens
gttatctggagccggatctcctgctgaccttgagggcagcaacatgcaactaatactaaagcagctccagaccaggcgccgtgcctcaagcctggaatcccagcactttgggaggccaaggcaggcggatcacaaggtcaggagattgagaccatcctggccaacatggagaaacccgggctatactaaaaatacaaaaattagccgggcatggagctgcgtgcctgtagtcccagctactccggaggctgaggcaggagaatgacgtgaacccggcaggcggaccttgcagcgagctgagattgcaccactacactccag

SEQ ID NO: 573018 - DNA, 147 bp, Homo sapiens
ctctaagaggtccccattaaccattggatttttttaagaactaaaaattccaaatggtggccaccacaatcacacttcctcggtacttcacttctctcctcactctccattaattctggcagtttatccagaaaaaaaagtgtagag

SEQ ID NO: 573019 - DNA, 160 bp, Homo sapiens
tagtccggaggctgcagtattctccaaggacgcgggggtcttggagtcaaccccagccccgcaaagcagccctgcctcaatggagacaccacctgagctgcccatcctgcctcatcacacgtggtcagggagcagcgcgctagccatcttagggggggtg

SEQ ID NO: 573020 - DNA, 5047 bp, Homo sapiens
gctggatcctgcagtaaccacaacagcatcctctccctgcgccagggacctgccagccggagagatgactgattagatcagattagatccggagccccgctctgcagaagggggccccaggggcgggggaggaggaccccagctggcctgagctggggggaggggtgccttggggctcgcagagttagagctttccagcgcggggatcacacctcagaagccgccacaatgaaagacggaacacatttctacacccagtgactggccaggtcccagaggaaaacaaaaaatttgacttgaaaatatcgaccttggacatgtccaataaaacaggtgggaaacgcccggctaccaccaacagtgacatacccaaccacaacatggtgtccgaggtccctccagagcggcccagcgtccgggcaactcgcacagcccgcaaagccatcgcctttggcaagcgctcacactccatgaagcggaaccccaatgcacctgtcaccaaggcgggctggctcttcaaacaggccagctccggggttaagcagtggaacaagcgctggttcgtcctggtggatcgctgcctcttctactataaagatgagaaggaagagagtatcctgggcagcatccccctcctgagcttccgggtagccgcagtgcagccctcagacaacatcagccggaaacacacgtttaaggctgagcatgccggggtccgcacctacttcttcagtgccgagagccccgaggagcaagaggcctggatccaggccatgggggaggctgctcgagtacagatccctccagcccagaagtcagtgccccaagctgtgcggcacagccatgagaagccagactcggagaacgtcccacccagcaagcaccaccagcagccaccccacaacagcctccctaagcctgagccagaggccaagactcgaggggagggtgatggccgaggctgtgagaaggcagagagaaggcctgagaggccagaagtcaagaaagagcctccggtgaaagccaatggcctcccagctggaccggagccagcctcagagccgggcagcccttaccccgagggcccaagagtgccagggggtggggaacagcctgcccagcccaatggctggcagtaccactccccaagccggccagggagcacagctttcccgtctcaggatggagagactgggggacaccggcggagtttcccaccacgcaccaaccctgacaaaattgcccagcgcaagagctccatgaaccagcttcagcagtgggtgaatctgcgccggggggtacccccgcctgaagaccttcggagtccctctaggttctatcctgtgtctcgcagggtccctgagtactatggcccctactcctcccagtaccccgatgattatcagtactacccgccaggagtgcggccggagagcatctgttccatgccggcctatgatcggatcagcccgccctgggccctggaggacaagcgccatgccttccgcaatgggggtggccctgcctaccagctgcgagagtggaaggagcccgccagctacgggcggcaggatgccaccgtctggatcccaagcccctcccggcagccagtctattatgatgagctggatgccgcctctagctccctgcgccgcctgtccctgcagccccgctcccactctgtgccccgctcacccagccagggctcctacagccgtgcccgcatttactcccctgtccgctcacccagtgcccgttttgagcggctgccacctcgcagtgaggacatctatgctgaccctgctgcctatgtgatgaggcgatccatcagctcccccaaggtccctccatacccagaagtgttccgggacagcctccacacctacaagttaaacgagcaagacacagataagctgctgggaaaattgtgtgagcagaacaaggtggtgagggagcaggaccggctggtgcagcagctccgagctgagaaggagagcctggaaagtgccttgatggggacccaccaggagctggagatgtttggaagccagcccgcctacccagaaaagctgcgacacaaaaaggattcactgcagaaccagctcatcaacatccgcgtggagctgtctcaggcgaccacggccctgacaaacagcaccatagagtatgagcacctcgagtctgaggtctctgccctgcacgatgacctctgggagcagctcaatttggacacccagaatgaggtgctgaaccggcaaatccaaaaggagatctggaggatccaggacgtgatggaggggctgaggaagaacaacccctcccggggcacggacaccgccaagcacagaggaggacttggcccctcagccacctacagctccaacagcccggccagccccctcagctctgccagcctcaccagccccctgagccccttttcactggtgtcgggctctcaggggtcccccaccaagcctggctccaacgagcccaaggcaaactatgaacaaagcaagaaagacccccaccagacattgcccctggacacccccagagacatcagccttgtgcccaccaggcaagaggtagaggcagagaagcaggcagctctcaacaaagttggcgttgtgccccctcggacaaaatcgcccactgatgatgaggtgaccccatcagcagtggtaagaaggaatgccagtgggctcaccaatggactctcctcccaggaacgccccaagagtgctgtgtttcctggcgaggggaaggtcaagatgagcgtggaggagcagattgaccgaatgcggcggcaccagagtggctccatgaaggagaagcggaggagcctgcagctcccggccagcccggcccccgaccccagtccccggccagcctacaaagtggtgcgccgccaccgcagcatccacgaggtagacatctccaacctggaggcagccctgcgggcagaggagcctggcgggcatgcctacgagacaccccgggaggaaattgcccggcttcgcaaaatggagctagagccccagcattatgacgtggacatcaataaggagctctccactccagacaaagtcctcatccctgaacggtacattgacctggagcctgacactcccctgagccctgaggagttgaaggagaagcagaagaaggtggagaggatcaagacactcattgccaaatccagtatgcagaacgtggtgcccatcggcgagggggactctgtggacgtgccccaggactcagagagccagctgcaggagcaggagaagcggattgaaatctcctgcgccctggcgaccgaggcctcccgcaggggccgcatgctgtctgtgcaatgtgccaccccaagccctcccacctcccctgcttccccggctcctccagcaaaccccctgtcgtctgaatccccacggggcgccgacagcagctataccatgcgggtctgagctctgactgcaagccctggctgaggccaatgctgtgaagctccacagagccacattctgaagccgtcctctgcccacctgaggtcctggctccccaccctggccccctgcccctgcactcccatgggaatgccgcagggagccaggctggggccatgggctgctgccagaggaccgtggatacctcagtgtccacacacccaccatgcccagccctggagccatcactactcacaccgtggtcctgggccagggcctgagatgacagtggggagcaccatcctcattaatgtccaagtcacagggagcctcagccttgccctggctggggttgtggtgactccagtggaacattccctgatgggggacatgccgtggtggagaacacacctgtggctatcttatgtgaggactagaggtgaagaggagatggacactgcctctggagccagcctgacaccaaggacagcacttgtcatcatccctatcctcgtcagccccaccctgctgcctcagctggacccagggctttgacacaaacccagtgctttgcttatgggtgctcgctggggtccggtggagactgaccaccctgcttgagccaaagacaaggtgatgagagatggggagaggccattggctcccagagggaacagtgctggctgtggctagagaacagcaggtctgtgcagtgtctgagggcaggttgggaagggtagcagagagagagagacagaaagagagagagagagagagagagagagagagagagagagagagagatcctcagagtggaaggagggggaagcagcaggacacattggcaagtcaagcaggaaggagggagatggaaaggggatatcagattggtttcccccggtggagccttaggttagtgcccagtgcagtgccagactgtctcctctgctcctcccacctcatccctaggaggacccaccagtggagcacatgcagcctcagtggagatgcttggtgtggggatctgggtgaagggggttgagtagcgactgcctgggagatggctgttagtaggtctgcgcctggtgtctgcctcgccatcctggggtaaggggcagagagaaggacttgtcttatgtagggtgtggtcagccttggggccttacctacccagttccatgatatttcttgccctgttccccctggaatgtgcagtgggccagctgagagtacgccttgaggaggggggatgaggccttaatctgggaggcctatccccctatcccaggcatcccagacgaggactggctgaggctaggcgctctcatgatccacctgccccgggagggcagcggggaagacagagaaaagcaaacacattcctcctcagctccacccacctggagacgaatgtagccagagaggaggaaggagggaaactgaaaacaccgtggcccctcggccttctctctgctagagttgccgctcagaggcttcagcctgacttccagcggtcccaagaacacctactaattcctctccactccttcatggctgggacagttactggttcatatgcaagtaaagatgacaatttactcaac

SEQ ID NO: 573021 - DNA, 388 bp, Homo sapiens
atccctgaaatagggagccccttttagaatttattaaatccttgccctgggggattaaagcattccattagcaagagttggaccccccccccagttttcgccttcctttttttaaggtgttttaagaaaaagccctaaaagttttggattcatttttcccattctttccaaagggagaagagaaaagttgatggggtggttgtttttcaattatgccattaaaataaacatttttgttaaattcccctatccttggtttttaacggttttttttggaagggaagactacgagagggaaactttggtgaaaagtttttcccctatggtttatttattggcaggattttatgttgaaaaaggaaagaacattaaagtccttaaacctcca

SEQ ID NO: 573022 - DNA, 4753 bp, Homo sapiens
gctggatcctgcagtaaccacaacagcatcctctccctgcgccagggacctgccagccggagagatgactgattagatcagattagatccggagccccgctctgcagaagggggccccaggggcgggggaggaggaccccagctggcctgagctggggggaggggtgccttggggctcgcagagttagagctttccagcgcggggatcacacctcagaagccgccacaatgaaagacggaacacatttctacacccagtgactggccaggtcccagaggaaaacaaaaaatttgacttgaaaatatcgaccttggacatgtccaataaaacaggtgggaaacgcccggctaccaccaacagtgacatacccaaccacaacatggtgtccgaggtccctccagagcggcccagcgtccgggcaactcgcacagcccgcaaagccatcgcctttggcaagcgctcacactccatgaagcggaaccccaatgcacctgtcaccaaggcgggctggctcttcaaacaggccagctccggggttaagcagtggaacaagcgctggttcgtcctggtggatcgctgcctcttctactataaagatgagaaggaagagagtatcctgggcagcatccccctcctgagcttccgggtagccgcagtgcagccctcagacaacatcagccggaaacacacgtttaaggctgagcatgccggggtccgcacctacttcttcagtgccgagagccccgaggagcaagaggcctggatccaggccatgggggaggctgctcgagtacagatccctccagcccagaagtcagtgccccaagctgtgcggcacagccatgagaagccagactcggagaacgtcccacccagcaagcaccaccagcagccaccccacaacagcctccctaagcctgagccagaggccaagactcgaggggagggtgatggccgaggctgtgagaaggcagagagaaggcctgagaggccagaagtcaagaaagagcctccggtgaaagccaatggcctcccagctggaccggagccagcctcagagccgggcagcccttaccccgagggcccaagagtgccagggggtggggaacagcctgcccagcccaatggctggcagtaccactccccaagccggccagggagcacagctttcccgtctcaggatggagagactgggggacaccggcggagtttcccaccacgcaccaaccctgacaaaattgcccagcgcaagagctccatgaaccagcttcagcagtgggtgaatctgcgccggggggtacccccgcctgaagaccttcggagtccctctaggttctatcctgtgtctcgcagggtccctgagtactatggcccctactcctcccagtaccccgatgattatcagtactacccgccaggagtgcggccggagagcatctgttccatgccggcctatgatcggatcagcccgccctgggccctggaggacaagcgccatgccttccgcaatgggggtggccctgcctaccagctgcgagagtggaaggagcccgccagctacgggcggcaggatgccaccgtctggatcccaagcccctcccggcagccagtctattatgatgagctggatgccgcctctagctccctgcgccgcctgtccctgcagccccgctcccactctgtgccccgctcacccagccagggctcctacagccgtgcccgcatttactcccctgtccgctcacccagtgcccgttttgagcggctgccacctcgcagtgaggacatctatgctgaccctgctgcctatgtgatgaggcgatccatcagctcccccaaggtccctccatacccagaagtgttccgggacagcctccacacctacaagttaaacgagcaagacacagataagctgctgggaaaattgtgtgagcagaacaaggtggtgagggagcaggaccggctggtgcagcagctccgagctgagaaggagagcctggaaagtgccttgatggggacccaccaggagctggagatgtttggaagccagcccgcctacccagaaaagctgcgacacaaaaaggattcactgcagaaccagctcatcaacatccgcgtggagctgtctcaggcgaccacggccctgacaaacagcaccatagagtatgagcacctcgagtctgaggtctctgccctgcacgatgacctctgggagcagctcaatttggacacccagaatgaggtgctgaaccggcaaatccaaaaggagatctggaggatccaggacgtgatggaggggctgaggaagaacaacccctcccggggcacggacaccgccaagcacagaggaggacttggcccctcagccacctacagctccaacagcccggccagccccctcagctctgccagcctcaccagccccctgagccccttttcactggtgtcgggctctcaggggtcccccaccaagcctggctccaacgagcccaaggcaaactatgaacaaagcaagaaagacccccaccagacattgcccctggacacccccagagacatcagccttgtgcccaccaggcaagaggtagaggcagagaagcaggcagctctcaacaaagttggcgttgtgccccctcggacaaaatcgcccactgatgatgaggtgaccccatcagcagtggtaagaaggaatgccagtgggctcaccaatggactctcctcccaggaacgccccaagagtgctgtgtttcctggcgaggggaaggtcaagatgagcgtggaggagcagattgaccgaatgcggcggcaccagagtggctccatgaaggagaagcggaggagcctgcagctcccggccagcccggcccccgaccccagtccccggccagcctacaaagtggtgcgccgccaccgcagcatccacgaggtagacatctccaacctggaggcagccctgcgggcagaggagcctggcgggcatgcctacgagacaccccgggaggaaattgcccggcttcgcaaaatggagctagagccccagcattatgacgtggacatcaataaggagctctccactccagacaaagtcctcatccctgaacggtacattgacctggagcctgacactcccctgagccctgaggagttgaaggagaagcagaagaaggtggagaggatcaagacactcattgccaaatccagtatgcagaacgtggtgcccatcggcgagggggactctgtggacgtgccccaggactcagagagccagctgcaggagcaggagaagcggattgaaatctcctgcgccctggcgaccgaggcctcccgcaggggccgcatgctgtctgtgcaatgtgccaccccaagccctcccacctcccctgcttccccggctcctccagcaaaccccctgtcgtctgaatccccacggggcgccgacagcagctataccatgcgggtctgagctctgactgcaagccctggctgaggccaatgctgtgaagctccacagagccacattctgaagccgtcctctgcccacctgaggtcctggctccccaccctggccccctgcccctgcactcccatgggaatgccgcagggagccaggctggggccatgggctgctgccagaggaccgtggatacctcagtgtccacacacccaccatgcccagccctggagccatcactactcacaccgtggtcctgggccagggcctgagatgacagtggggagcaccatcctcattaatgtccaagtcacagggagcctcagccttgccctggctggggttgtggtgactccagtggaacattccctgatgggggacatgccgtggtggagaacacacctgtgactccagcctgggttatagagcaagaccctgtctttaaaaaaaaaaaaagagagaaaaatggctcccatagacttgcttgacacagggttgccacaaacttcaatctgtaacaaattttattatctggtaatctagcactttgggaggccgaggtgggtgcatcacgctgaggtcaggagttcgagaccagcctggcaacttggtgaaaccctgtctctactagaattccaaaaaacaaaaaaaattgggcttggcacttggggctgtgtgccttgatggtctccccaggccacttgtgcgcagggctgtggacgctcagcgagaaactctccctttggaaaccctgtgtgagagcgcacgagggttcgcagtgagacccgtgacacactcgtggcccatgtgaccaccccaaaccctgtgggcacacaaaaaggggagacacctcccagttgcctcacaagagaagaaacaaaagaggcgaccaatacactcaaggagcgcgcgcttattttcctgcggacagacgggggccccctaattcggagccgccaaacaacgccaaagaagcgcagacctggcaaacgatgacgacagcgaaccacaagccggcgtggtgcggcgcgcgcccccacacgcgctgggccctatcggaagaggagcagaacgcgagtctgatgtaagtaacgaaacactacgtagactggtgtgttggcgcgcgcggttgggtcccctcaacttgtggctaacgaagtgggcagaaagagtggtggcgcgaatgcgtcagcgggtgcttgaccagcgtgggaagaggacgacctaattggagttggcgtaaacgaaagaagatgaggaggaggagggtgggatactccgcacacccaatgtgcatgcgc

SEQ ID NO: 573023 - DNA, 596 bp, Homo sapiens
ctcattactggatactataatgcgttcaagagtttgctcattaactgtcacagccattattgatctacctaccaacagcgacaggatctatatctaagcttatgacgggctatgcaatatagcaagacacatgctgccccgcttgtgaagacgtactgataataagcacatacctagaaggaacccagaatagtggtgttatgaggaaaataaacaggataatggcatagagaatgatggggatttatgggggctatatataggttaggtgacactaagacaggcttagaaggtgagatttgagctgcagagagaaaacatttccaagcaacttcagggcaaaaccctgaggcaagaatgagctctttgtgtctgagaatctagtgtaagactagtgagaaaaactagtgggagagtgaagaggtggccttacccacccagatcattgggggtctctaacaggacatggtaaaaatgtatagttatctttaacaaccataaaaatatgcttattaaatcattatattgtgattttggaactaacataagtatggaagatacagggctactgagaggactgatgtgagacaaaggtg

SEQ ID NO: 573024 - DNA, 248 bp, Homo sapiens
ttccaaccccggggcttaatttaaaaagcatttttttatcatttatcccccttttaggtattttccaaggaaaaaattaccaaattatttcattggtcttctttttaatcgggttcaaaaagaaagcaatttttcccctttttttttaacaagaaaaaaattttttttttttgtttttgggctatgaaccatttttccaaaaaccggtaaaagggggtcaaaagggaaaattttaattaaaattggta

SEQ ID NO: 573025 - DNA, 124 bp, Homo sapiens
tatggcggcgaagatcggtggcattacccccaggctctgactttcagcatcatgcagggcttatctgtctggaggcagttacctcataataaactattaaatattgtcatcttgggaaaaagag

SEQ ID NO: 573026 - DNA, 791 bp, Homo sapiens
taaatttattcacaaaaagcagctggaaatcagaaaggcagctgccgctccagcattccccctcaaacctaaaaaaaaaaaaaacaaaaaaaaaaaaaaaaaaaaaaaaaaaaaataaaaaaaaaaaaaaaaagaaaaaaaatataaaaaaatcaaaaaaaaacgaggagggagccgcgccctcactaaaaagaatatcctccccggggaggcgagccccactatgtcggcgcgcccccgccattttttgatgaaaagagaggcgcccccttataggggggcgcgtcctttattaatacgccgcgccgacgcgccgccggctctgatatataacacacccactctaggttgtagggcgcggtggtagaaaaccaacggctgcgacgaagcgtacgagggaatctctgttggtggggaagaaggaaccacacccaacatatacctatgggggggggggggagaaaacaataatgaggagggcgggacacatacccaccctcccgaactagaacgaaagtattatattataaacgaccccccgatgcgcgagagctgaaaataataatcaaagacaaacatttcgatcgaagcgagttaatattagatcatagcggttagatcaaaaccccaccgaaacgaccgacacgaatataatgaagcgtcgggctcgacggatcgtaacgaaaagaagaacggtagggtcgcacaagcacgaagaaacaagaaatcagaatcgcttctggacacacaagaaaactatattattatacaccagccgagcaggacagaat

SEQ ID NO: 573027 - DNA, 388 bp, Homo sapiens
cgccttctgggttcagcaattctcctgcctcagcctcctgagtagctggggctacaggcatgtgccatcatgcctggctaatttttgtattttgagtagagacaaggtttcactatgttggccaggctggtctcaaactcctgaccttgtgatccgcctgccttggcctcccagggtgctgggattacaggtatgagctactgtgcccggctgagcttagtacttacaagacttgttttgctgggcattgctacaatggtctagttgtctccttttgtcattaccagaagtttgaatctctgctaaagtcttttttatcttgttcttcttcaagactatcttggcaattcttgaccatttgtatttcttaagcattttaagatcagct

SEQ ID NO: 573028 - DNA, 319 bp, Homo sapiens
  misc_feature (76)..(76): n is a, c, g, or t
  misc_feature (79)..(79): n is a, c, g, or t
actccttggaggatctgcacatgaaactgtcacagcccagaaatgccccagccccattgagatgtctgatctcaantgnagagagacattgagatgtcttcctttgcaagacacagtgtctcaactgttcattcctgtgattctcagtgtttttcctcatcagggtggattgttaattcattaagcatttattgggcctcagttttgtctgtaacatacatagactaaattattttaactagagaactacctttactgggataaaatgtaatatttttgcccttagattttataaaggagcaaaatgaaaaggatcctt

SEQ ID NO: 573029 - DNA, 146 bp, Homo sapiens
  misc_feature (58)..(58): n is a, c, g, or t
  misc_feature (70)..(70): n is a, c, g, or t
  misc_feature (90)..(90): n is a, c, g, or t
ggtcagcaggaagacgatgtcacgggccgctgcgtgacagtgcacggacagctctgtntggcagggaagnctgggcacacgatctgaggntccgggcagaggacgtcctccatgtcatcgatgaacttctcaggtacacgtcagct

SEQ ID NO: 573030 - DNA, 569 bp, Homo sapiens
  misc_feature (23)..(23): n is a, c, g, or t
  misc_feature (48)..(48): n is a, c, g, or t
  misc_feature (52)..(52): n is a, c, g, or t
  misc_feature (56)..(56): n is a, c, g, or t
  misc_feature (61)..(61): n is a, c, g, or t
  misc_feature (66)..(66): n is a, c, g, or t
  misc_feature (72)..(74): n is a, c, g, or t
  misc_feature (76)..(77): n is a, c, g, or t
  misc_feature (79)..(79): n is a, c, g, or t
  misc_feature (129)..(129): n is a, c, g, or t
  misc_feature (133)..(133): n is a, c, g, or t
  misc_feature (147)..(147): n is a, c, g, or t
  misc_feature (154)..(154): n is a, c, g, or t
  misc_feature (176)..(176): n is a, c, g, or t
  misc_feature (318)..(318): n is a, c, g, or t
  misc_feature (346)..(346): n is a, c, g, or t
gagatgggttctcgccatgttgnccaggatggtctcgatctcttgacntcangatnctccncctcngcctcnnnanntnctgggattacaggtgtgaaccaccgtgcctggtcttaacatatgtgtctntatnttttgcagagatgngatctcnctatattgcccaggctggtctngaactcctggcctcaagcgatccttccaccttaagatgtgtgtcttgttagaagtaaatcagatctggtggttttgatgctatttattcagtctcataactgtcatgactctgaatatataggctcttgaaatggtagaccnaaaaatacttcaagtatattatttgctnttcttttctgcttgtaggattctgcaactaatttttaagttatttatgtgtgtaaagccttcccaagtcccaggatacctaaagttgtaaacataggggtaaataactatttaaatgatgtctgatagataaatctatagagaagggattcagaatcccaaatgcttgcaactgatattgtattcttatgttcaggtttaatcgtcgtagtagtaggcgcagc

SEQ ID NO: 573031 - DNA, 1407 bp, Homo sapiens
  misc_feature (489)..(489): n is a, c, g, or t
gggagaagcacgacgctggtcgggatgatcagaacccagtcatggtatgaccagtgccagcttatctatcaacatatgagtcacctgaccctatgtctggagtccgtcgaccctggggccccggaagtagacgaagtgcaggccgacaggatgccctgatacaatcaagcggtcggatttttccagtccttgtatgagctcttgcgtctcgtcgcctttgagcacagagcacacctaccgtacttactttccatgatgccaagccgagtcgagtggccactggatctgagacacatagtctggcaggtctacgcgtcccaagagccttgcagcctgggatgaaccgtgcgctatgcagcgttccccaaatgtcctgtctgccatatgctctgctgtatggcatacgagtgctgtcatgtgtcgcgaccgccggtgtgcatgaatgtccagtgctgcgtgctccattggggatgccgctctggaccccangtggtgtgcctattgactaggaaaagtgccgaacactgagggtatgcggcgaaccggatggatcgaagtagtgcacccagtgcttgcagtgggcgatacctgtctccccagaaattgtcgtgttaagcccgcctgtagaggattgttatccgcgacccacctgtaacggtgggagtctttcccgcgggatgaagccttgtagatcgaccctttaagggaaactaccatggcacgtagccatagaaactgggcacggctctttggagaaggcttggattggcaccattgaggcatcccttgttttgaacactgagcaaggctactcctttggggagcataataggcccacttgacggctcccaccgaaatcgagtcatctgggaagacttgggaggacccggtctttctgggctggggtgttgaccaaggcagggatctggggcccagttcccccattgtgacgaagccaagccagaaggcgggtcctttcaaacattcctttgcccaggcccccaacgacgaagattacaacgctttttcttagctcccctttttagggcccccaaggcccttccaccacatcttcccaacgcttggtacctcattccccagtggaacaaccttgtgtgcgcttggttcttatccaggacacccccttgggaccaaactggaggacaaccgaagggtcggaaaccaggggagatataagccattggacggcataggggccctcggttgcccaatatttccaacttgtttcaccaaggggggggtgaagggctcccatagaagttgggccacaggtttatcacggttccccggttgtgtgaatacatggagcgccagggcgcagggtcccaaacctagcgcctgggcgacagtgcaaggcacggcacataggtgttccacggcccgggc

SEQ ID NO: 573032 - DNA, 579 bp, Homo sapiens
  misc_feature (579)..(579): n is a, c, g, or t
tctggagacagcagtttagctctggtggtcccaggctggagtgccctgggcgagaatctcgggctcactggaacctccagcctcccggggttcaacgcagattctccggcctcagcctcccaatgtacgctgggaggattacagggcacgctgcccccatgtccggctaatatttggtattagctagagccggggttttcaccaccgttgggtcaggctggtctcgaactccgtgacctcaggtgatccacccgtctcggcctcccaaagtgctggggcttacagcgtgtgagccaccggccttggcccttctcgatactctctgggcttgcaggtttgtcagccccaacaatagtattggcggcaagcggaagcgctaccggatatgacgtaatatccctggaggacagatctcgtccctctgggacaatcagggtttgcccccctcttggaggggcggcgctccccggcctaaagctggtcgtggagtgcgggacaaaggccgcctatttaggtgaacgggcgcctttggcaacacggggcagcccgctttgacgggccaaggaagccggaaaccgn

SEQ ID NO: 573033 - DNA, 570 bp, Homo sapiens
  misc_feature (506)..(506): n is a, c, g, or t
caccgcgtgacccgcgcgctggccatcaactgtggccaggccatcactggctttgatttccatggcggctactcccatcccgtgactgatggatccattgtccgcagaggaattctagagacgtgctcctgactgcctgcgaacatgagcaggcctccattgaacggaaggccatggagaaagaggagaagcaggctctaggcaactggaagcagctggccaaagggctgctcatcagggagagcgctgaagcgacggtacgggcccaagagcgaggcaggagatccgcacacagatgcaggaggcggactctgttctgatgaacaggcagtgaccagctctgaagcagaagcggacagagtactggctgccttctggcctcaataccgagaagatgaagaatagcataagctgatgggtgggccccaagacgaccaatcggggccagtaggagacccaccagatgatgctgcccactacaggcccggaccttgcctcggcattcncagcccctgccgttgcggcatctatgcctgtaggccttgtggagcctgcacgccggagggcacg

SEQ ID NO: 573034 - DNA, 898 bp, Homo sapiens
ggagagaactagtttcgagtttttagatatatttttggtgagtaaaatcttcataacctaaagctgggagggacccaaaaaagccaaattggtgagcccttgtatgcgtccaatttagaaagtgggctcagggttctctagaacagatataaccagtagcaacaggttgaaaaagattcgtgttcccgtctcgcactatagttttgagtgatttatataattgatttaaaatcgtattcttttccatccgtgcagtggtctcagagcgcgtggctcgtgggccttccgaggacataacattctgcgaagtagcgagatactgagcgcctactccggagtggtctgaaaagtttctgcccgacaacagaaaagctgaccccgcatgtggaccgaccaaggaagttactctctgtgagcgggggacctaccgtgaggcgccgtgatgtgaatacgacgtgaggcagttttgaagggccctttgtgtacgagcgtgactattcaaacgtgacgcggctctgtggaaacataggggaatgtgggcacctctactgtaggcgggaacccgagaagaggaggagagtgaggattcatcttatacaatacatatcacattctcccttacatttaatacgagagagggaattcatccaagcacaagagtgtgacacacaaggagttgaatagtggtgcccctttgaccagatgattgtgtataacgaaggatttacaagttcggggagacctttataataagtgactgagggatatattcgcctgtcgacaagtgtggaaaacgaagctgtgtggtaacacaatgctgcttccccgcgagaaaaccccgcggtgaccacaaggtgcatccacgttgtggtgacctagacgtggggtgggcgtatgg

SEQ ID NO: 573035 - DNA, 154 bp, Homo sapiens
tagtcggtaccgagctctctctgtggggtgggtgccagtcctgagctagacggtcccttaccttcctctctgggaagctgacctcagccggaggtctctcctggtggtgcccctgagcggcaacctgattcctgtccacatccgtactggcgcg

SEQ ID NO: 573036 - DNA, 156 bp, Homo sapiens
tcaacatttagggtttacgacctcgatgtggatcaggacatcccgagtggtgcagccgctattaaaggttcgtgtgttcaacgattaaagtcctacgtcttgactgacactctttgtcctaatcacagcagtcctacgtcgtgattgacactcttt

SEQ ID NO: 573037 - DNA, 109 bp, Homo sapiens
atctctacaggatcccctccacacagcactaggctttcctgaattgtcaagcctggtgcctttccaaaggactatcagggcctgtggtggagccagcataagccactgg

SEQ ID NO: 573038 - DNA, 451 bp, Homo sapiens
tggggcccctcctcctccatataatgccgccgccccagggaaaaagttatatttgtgggtttgtcaagcaccttttgagttttaccccgggtcacagggagaacctcttgcgggttttggtgaacccctttattaaaagggttccccggggggattccccacgctttggggggcccgggattttaaaaaaaaaggttgtggttttttcccccctggccggttttaaccaggccttttggtttttgggcccaggggtttgtgggggtccctttcggaactttaaacccttttttgggggggtgggaaatgggttttttaatgtggccaggggttttttgattttttttcccttttaaaaaaggggggggttgggggggggggccaattccccccgtttttttttccaggtgttgcccaataaccctttttgccttttgggggggccccccca

SEQ ID NO: 573039 - DNA, 252 bp, Homo sapiens
tcagactctagcaggatcccccggcggccacagctctcatggtgcctacgatcacctgctagagatgagttttctatcttctttgaccaccttgcgcccatcacgtctagcctgatgggtgactttgaagagatcaattggactaactggacgaggagcagaggcttaaggaggaggaagaagactagatacgcaaagaggagtgaggcaggcagaggtacaaggaggcatgatgaggactaagattaggat

SEQ ID NO: 573040 - DNA, 1060 bp, Homo sapiens
tgccgtcgtccctgtttaccatctgcgagacgcgtcttggcggacaggctgagccttcggcaaccacaaatactatcgaaccttggcggggaccatgcgctgtctgccaatgaaatgtcctgagcggaccaatgcccgatggcttgtgtatctatgatcgatagtccctgggaggtgcccggacacatgtccgtttggacctctatgaaagacctcataccatattaatcgcagagtttctcgctacataactatgaccacgacatatgtaggcctgtagatgacgatacaagtctagagaccacatagaggttcgaggccactcctgctacgaatgtgagcccagagtgacttcattgcgcgaagtgcggttacgctgtagacgcgcgcgccgtgcaagacgacaatacgatgtgtctccgtagtcgtcctcgcgaagggcactcccaatcgcatcttaccaaggtccacattgtgtcccaacgtgtggttagcacacgcttgttgtaacattggaacccgtcgcgactggagcacgtgtaattgtagagacggacatcaagtatctcctgaggaactaatacctataggaaagagtctagcccgatctaggtcgtagtatgcggcgtgatctctagcacattgcggccggcttgtctccgggcacacgtgatagaagcgctcgggccatgcactatgtgaaagctaggaaagcaagaatgcgactaggatccccttacgagaccgcctatcgcatgaaggaatgtgtggtccagccaggcgaaggggagtgatgattcagccaggtgagcatggaagaacatcagtactttcagctcactcttaaccagttattggctatgtgatccctgaacgaagaggtcgaatgtatgacccaagaacacgccaggcagaccgctggagcctacacctgggcccgtcagtatttcccacaggacgaaaggagacacccaagctcttgactcgtacaccactttcggaatagccaaaccgggctgtacacagcttcacctcgtggcccccacagcagccagcgctg

SEQ ID NO: 573041 - DNA, 103 bp, Homo sapiens
tctagacggactcccggacctggagactgtctgacgggacctgaccgacggacggcgccgcggggtaccgacgctcgacacttcgtaactcactggtcactac

SEQ ID NO: 573042 - DNA, 1317 bp, Homo sapiens
  misc_feature (736)..(736): n is a, c, g, or t
gtccactccatcttcgatagcattctggtctcaaagcacggaattatggctcttactcactgatgctcgcaggatgccctgctgtggcctatgatgcatacgaactgttagtgagagtcatataaaagcactacaaaacatactacatggcatcccggccgtggctcacaggatcaaggtcctgaagcatatgtactcaggcacggcattcgcaccgcgttgaccactgctaatcaattgggcacgtgtcttgcattcgtcggcgaataccatatccgttatatcagatccttagctgaatactggttgtgtattctgggaaaatagtagaactgcacagggtgagacacgagcaactcacaggtctactctcgcctcaggagtcgagaccacggagtttgagccgtgttgctcgcctatgttctaatcatgagttgcatagacataggtgtccgcataaaggggtgtagtgcggaacttgaattaagggaaacagcgacaaacgttggcaactgtgcgaatatttagaataggattcgcgaaatagggggccaaccgcgtttaacatagggggacacgaaacgcttcacgcgagaaacacccgtgttatcttttccgtgggggggtggggaagtaatcgaatgactctctgcgggacatacatttccttagcactatgaacaacgaaagaaatttttataaaggagcgcttacttacgggggaaggacccttttntgaggaagtaatggaattcggacgatgagcatcactttgtgaggcgttttcccccaactgagggatttagcgaattagtagccatgagtgcgagcaccgtgaagagcggagagcactttgggagctttaacccagttggcagactattagataatctttgggaattggaaacaggaatgtctctaagtttaccacacagggaattgttttggggtgaacactacacccacggaattagcgccattccaaaacatttgggggttttcttgggggacacaggttgcttggcaaaagctcccacaaaggttgtgcaacgaaaacgccaaaaaaggaaggggttatttattaaggcggcgacggccaaaccaaggcagacaaaccaaaaaaaagagggttggaacagacagggttgctttgccaaagctttgtggtgaggaccggaaggggttgggtaacggaagggagggtccgtttgggcccggaaaggtcaagggggcccaaaaaacttgggaaaacccaagggacttttacattaacctcattagttgatccacaggcattatggggacacactttaccag

SEQ ID NO: 573043 - DNA, 223 bp, Homo sapiens
gggagcaaggacagtcaggtcggtctgggcaggtggcattgtgcagtccccctgcgtctgaggtcgctgtctgtctggcttgggcagggttgggggaggacgatggacagagccatccttcctccaggcacttgctggtccaaccggagattctaggcctgccctgagtctgcgcaggtgctagtggcaccagagacacttcttgggacatggattctggcgg

SEQ ID NO: 573044 - DNA, 308 bp, Homo sapiens
cgatccccactagatgggccaagccaggtgaccttctagagtaacgaccacgtctacaacgttatcgtcacagtccatgcatttctaataatctctcttcatagtagtacccatcataatcggaggctttggcaactgactagttcccctaattaatcggtgtcccccatatatagcgatatcccccgcataacactacactgagcttcttgactcttatcctctcctctctcctacctcctgactcgtcatctcgctctctctctcttgtcagggtaccgagtctcgatcttcgctgatcgtcgttc

SEQ ID NO: 573045 - DNA, 126 bp, Homo sapiens
ccggtaaattagataactgtgcctggttggttagagtccagcaaagcaggacaatgtagaggttttgtcctgaatggtaataggtgaattaagggtaatcttctggtgcaaggtctggaccataga

SEQ ID NO: 573046 - DNA, 117 bp, Homo sapiens
  misc_feature (86)..(86): n is a, c, g, or t
tcatctgctgcttggtttgatgttcccataacccagtctgtcaggtattctaccatcttattcctaaatttcatttctggcaaaangagaggtcatctctcggtatcagctcgggtc

SEQ ID NO: 573047 - DNA, 1055 bp, Homo sapiens
gcttccccgcgagcggacgcggcaggcctcgtctcgctttttcttatttttcccccctttcccctttcttttttttttttcctttcttttctcccctcccccctttcaccatttcccttgcggaagggcttcccggggcaggggcagagccggttaacccccgcgcactcgtcacgggccccggacgcccaaggggcgagcaggacgccccgctcccacccggcgcactcggaccggcggacgggaacacaagcgccggagagccacccccgtggcagcaaaatccgcgtgcacacgaccgcacacggctcgaaacactgccaccacacgggacgaacacacagtcgactcgcgctagcagacgcacacacagcaatcatgctacccccatgattcgtccccaacaaaaaagcaagtgagccaccagtcaggcaccccacaggtgacacagagacggacccgggacgtcaccacagacccaataatccgatggcgaatgaagacaccgcggggagtgtgcaccactgcgcacctatgcgagagcccggagcgcacaaacacggcgatacgccacggcgagacgagcacccaaacaaacaccacacgccaccccacaaccgaccggcgaccgtctcaccccccatgcacggtcccgtacactggccgtccaacgcccacaaacacgcgcaacagcgatgtcagaaccaacccagtacagaccccagggccagcatcccgtcacctatagtggagtagtcagtcggaaaagccggagctagcgacacccagcactaaagcgagcaacaccagcctgacgcgcatacgtcgacagtggtgctgccaccaagcatgagcgtaagccgacgcacacccaggcttcgcccagatcgctcgcacaccaacaggacgcacacacaacccgagcacgaagcataccgtgggatgagcacgacagacacatatcgagcaagccacccgaggccgaaggtcgtccccactgctcgctagtccctacgcgtaccagccgccacgcagtatgatcaacaaatgaccac

SEQ ID NO: 573048 - DNA, 385 bp, Homo sapiens
agtcctgcaggtagaggcttactagaagtgtgaaaacataggcttgagattacaggcgacagcgatatctaagatagtcagtagaattagaattgtagaagataataagtgtagaggagagggttaatggtagatattgctagggtgacgctaccaattaggtgacatgagtagagtagacagcagtaatgatagacggattaggcgtacggaccggggctatagatagaatgagtaggctgatggtattcgataataactagtatggggataaggggagataggtgtgcctatgtggtacgacgtgaactagggcattaaaaatcttagggcgaaagcctaataatcactgcgccagctcataaggagatggccatggaaggaa

SEQ ID NO: 573049 - DNA, 424 bp, Homo sapiens
  misc_feature (21)..(21): n is a, c, g, or t
  misc_feature (23)..(23): n is a, c, g, or t
  misc_feature (410)..(410): n is a, c, g, or t
tggtcctgtgtccctaggggnangggatggctgcagtctctgtggaccagcagacttagcctttcctcctggtagttctgaggaatccaggcagcccagacaagtgggttccccgcaagtgaggcactgtgttaaacaggttctgttccccatgccacccaactgggtgaggaccctccaatagaggttgtcagacaccctatacaggagtgctcctactggcatcaggctggtgccctcaaggtcagaagtcccagaagaagaagcaggcactcatctttgctgttctccagcctctttgagtgacatctccaggcacagcagcgaatcagataaataggtcctgaagtgaacccccagcaaactgcagcagccctacagaagagggacctaaccattggaaagaaaanaaacaagcagaatg

SEQ ID NO: 573050 - DNA, 162 bp, Homo sapiens
  misc_feature (108)..(108): n is a, c, g, or t
tgaaactagaggatcccctcggtctaccttgttattcggctctaccttgtcttgaccgagaggaccaggaagcacttactcagatgccgaggtggatgggtgtggatnaagaggaggaggacgaagacaggagaagacaaggtagagccgacgagacaaggt

SEQ ID NO: 573051 - DNA, 1520 bp, Homo sapiens
  misc_feature (699)..(699): n is a, c, g, or t
  misc_feature (1255)..(1255): n is a, c, g, or t
gagtgcgcattgagcggagtcatcaacaagccaggcctgataccttccctgactatggggatgtgcttcgggctgtagaggaagcgtcagctgcccgacacagactctggcctcctccacggcactagcagcatcccagcatcatggcatcaggatgccattcacgacgactgtcgggcaatcgaggcttacatggagccgcaggtcaccatcagatgctcgatctacaaacgttcggctgggcaaggctcaacgaagatgcactgataggccgaaggggtattgacacctgcagctaatcaagatcgctgtagctggggctcgcgcggcgtcgcgtatacgagaggagaacatgccggaagctgtcttgggccagtggacgtgctgggctggtgactggagggtgcattcttaccacatagtaatcgccagagtcgctcttggcaaggaccagaacaagttgaagcgagggaggcggaacgaacgagatagatacaggacgagacgcacgtcctacggacgtacacaaaccggacaaacgcatgcatatacgccaaccgtgcatgaacaaggaaggcaacgcctccgggaaacggtcccttgctcatgtgagcatatatccgttgggttggaaggagggtctcaccagtaagcctagagataactgggtccactcactcaggggtgggatgacccccnttttcagtgatcccttgcccaagaaaaggccgttgaagcgaaccaaggcaaattgacagccgtaaaatgtaaacgggaaagctgcacgccgataagagaagattgcacacgtggacaaggaggcaaaaggccacagaggacaagaggcaaggggaaacgggaaaggcggggacaatggaaataatgcaagagcaagtggtagggagaacgcggagcttgacaaggacaaatgtacgtagaaatacggaaaggggtaagcggcaactgcgcactgcgttgggggcaccaccaacagaatttgcccacgagaggaaagccgtggcttcaagggaggaacgaagtaaataagaaccttgtaagggatggaccggggtcacgttgcaaaacagaccacacaggaaaagggggaaaacaggcacaacgggcctgagcgaggttaaggcgctcaggcgttaaacacaccattggagcttggtgggaaagaatacaaggaagggtagagaaaccaccttcccatgttggatgtcccattccatcacgtataacagaggaacgntactttccccaagaatgggaaggaggaaagcgatagtctccataggggaagaacgccacatggagaaccattaagtacacccgaggtaatattcacatggtgcaacgaaacgatgcagtattgccaacagaggggaggacaaaagacacacgggagaaagaaaaacacagacgaagtggggagagcggcgcgaatagagactgggtaatcaaagacagcagctaccgcgactacaagcatgggagtcgcgggcacaacggaaaac

SEQ ID NO: 573052 - DNA, 237 bp, Homo sapiens
cgtcgggcataaaacacgtaggttagactggtcttgaactcctgactcaagtgattgtcccgccttggctcccaaagtgctgggattacaggagtgagccaccatgcttggctgcacactattatattgtgtcttgcttcctatggctcagcattgtttgtgagattcatccatgttgtgggacccgtagttcatatataggaactatatactatgtgtgattacgccgatgacggg

SEQ ID NO: 573053 - DNA, 625 bp, Homo sapiens
ctaggtggaagcgacgtggggacgagggtatgcttgtgtttttacaggagatggacaaaccgtgtgggtgccctccaggtgtgtgtgaccatggaacgggagaccggagggatccatggtattcaaccgtgggcctgttacctccagtacgagccatgagccagcggaatctgaatgcaaagacagaacaagggccgaccggagtcacaatgacatccaaccccataacatggggacagatcaagaaaacgacacaagaagctgagaaactactggagcgccagggtcaggcaaaaaaccctgactccatgttcttggccatgctagctgtagttgtcctgtgcggtatgtttcccctgttgtagaggcaaaaacatattgggcatatgtttcctaaacccaactggtagtacgactggtactctggagcgagactcctcctgagatatattatgatcagggagcgtgggaccaggaaccctaactccgtctgacacagagcaatagcatcaattacacggggcccattggaaggactccctttattgttcaccatggatacgtcactcaactgcagctgtcttgcagccaatctcaggcatgttaaggtcccatggaccactct

SEQ ID NO: 573054 - DNA, 879 bp, Homo sapiens
tataaaaaaaaaaaaaaaaaaacccaaaaaaaatattgtggccctcttgagggaagctgtgtgtgtgtgacacaaaaaaccgggtggtcatataacccctctccctctctgcggggtgaggcggagggtgagcatgtgtggtggatatttttcagaatattgtgtgggggtttgtgggagagagtgggtgtgtggtagaagtttcatacctctcatgtgtggaggatatttgtggagggagaaagacggtgagacttctctcttataacagatgtgtgtgtggagagagttaacggtgtgtggggtgagtaatttattggggcgaaattaatataaaactgttggaagacaaaaaaaaaaaaaaaaacaaaacaaaaaaaaggagggtcgggcagcgccacagagagaagaaatctcgccgaggagcggcggccacaaccaacgcaaccgagcgacctccacgcacatattataggtgtaacaaagaggtggggcccccaaaataagggcgcgacctcaaccctattaaaaagcgccgagagggctagggggagcgagccccgcgacaacaacaacgggagagaggggagcgacgagagaaaaacactgcgaccaacagaggagggaaacacatggggcgcacacgcccaccccctacatacgaaggaggagcgagcagaacacaacacaaggggcgcacaccacaacaaccacaccacgaggaaacgaagcaaaccgacagccatcacagggcgaccgcacacacacaccaacacagccccacgacggaacataaacagcgcgagagaccaacccccagaaccggcggcaacatacggaccatgcgggccggaaagaacgcggcgcgggccgcacgcg

SEQ ID NO: 573055 - DNA, 541 bp, Homo sapiens
  misc_feature (87)..(87): n is a, c, g, or t
  misc_feature (91)..(91): n is a, c, g, or t
  misc_feature (94)..(94): n is a, c, g, or t
  misc_feature (99)..(99): n is a, c, g, or t
  misc_feature (115)..(116): n is a, c, g, or t
  misc_feature (132)..(132): n is a, c, g, or t
gtatatgtcgtagatgtatcccaaggaattgttaatgcagttaaggatcctgatgccaatgggaaatcctttgctttcgttggtccnagtnggnactcnttttccacctgggaannacatctttgctgtggntcacagattgttcctcccattccccctgccgctttttgcctatcgatggggagcaaaagttttttaaataagccccttttagccctggataacaagggataaagtggagcggatgcccatcccaaacatgaaattgcctcccctgcctggcttaaaaaaccttggtattcaggcaacccccctggaactcaaggccctttaggtggtgcggcgtcatcgcccttacccctggctgtttgcttaaatttaggatgtgaaaccggccaaaaccgtcaacatttagtgcctcctgaacagcttttggttttggggttttttggggcggcccatgtggttttagcccccaaccaggcggtttttttaaaggatcctggacccagttcccctatttaaacctttcccggtttga

SEQ ID NO: 573056 - DNA, 266 bp, Homo sapiens
taatgtcctcaagggtcatccattttttttcaggtggccgggtttccttcctgtattttaccgataatgggattttccgttacatttgggtaccacacttttttcctccctcagtgaacacttggcttgcttcctcttggctattgggggtagtgttaataccgacacgggggtgcaaatttttttttgggggtttgcctttaattccttttcccccccgggtttttttttttgcaaaataacccttaaagttgtttgccttttta

SEQ ID NO: 573057 - DNA, 435 bp, Homo sapiens
tctccagtatgcaaaacattgtacttctttgatacatggcagcattttgtaccagttaataaactggtagaaaatagttggtatgcttattaaagattataatttttgtttcagaacatctcagtattaaaaaccaatagttgtcaggcgtgggggctcgtgcctgtagtcccagcactttgggaggccaaggtgggtggataacctgagttcaggagtttgtgaccagcctggccaacatggcaaaaccctgtctttactaagaatacaaaaattagctgagcatagtggtgcatgcctgtagtcccacctactgcggaggggaggctgctgaggcaggagaattgcatgaacccaggaggcagaggttgttgtgagtcaggattctgccactcactctagcctgggtgacagaatgagactctgtcttaaaaa

SEQ ID NO: 573058 - DNA, 903 bp, Homo sapiens
atttagacctcggagtaatgacgaagacagtctccaggattgtactttacttttgttgcctatcctcgttcacctatgtggatactcctgcagccgaggcttccataggcgtctttcttaccactaccagccccacttgctgtcgcttcagaggacttcgtctcatggacccgtcgtgtgctcggtcaccattggggccacaatgcctgctgcccttgtcgcctcgggcttcaggggccctcatcggcatccagactcacgcaatgtctctcaccgcttgtattacagcagtccgtggacctggctacgtaatccttgaccaatgcccattgaacgcaaaccactgtgtcatcggggtcccgaattggagtggctccgatccgtccagcacactaatgcgtgaaatatgcccagacattcggtgcttgccctgcgcctgctggagccttcatccctctctccagcagctgttgagtgcaagtctgtcattgggcagatcatgcgtgcctatctactgctgctggagggaccagaaggtgatcccacggcgaacactggccactggctaccagtattccttcccagagctaggggatgcctctaaaggaaattgtagcctacgtaggtcaaggcaagggccagaggcctgttcctgcacaggcttccaggttaggcacacgtgattaggctcagctcatctagagagactgaagccatctggcttctctagattccatctctccagtcctcgtatccacattgttctgttgcatccaccttaatgtctccaaggccgtaatctcatcacggttgggacacttaatcatctcaactgccttgtaagatttccacggttgggtttctcatacatgtccggcagtaaccccaggggtcctggacagc

SEQ ID NO: 573059 - DNA, 1205 bp, Homo sapiens
ggtcacatatatgatacctctctggatcattttatattctcttcattttggttatctcatttgtgccttcccatactagccccttttcattctttttcaattttacattcattattcattcattttggctattcaagtttcttgtaatttcatggttggggctttaaacaatgtttcatttctacccaggcacaaatggcacaggcagcaggcaacaggtcatgcatcaggcacccagtgtgcatggttgttcacttattcaacagcaacctcttggaagcttatcagttatatcatgcaaccaaagcattccattttccagcgacaccaatccacaccggtccaagttgtgtgttaacacaaaattgaagcaaacacacaatactctttccagtcacgtgggttccgtcaatttgggactacaagtcatgggctcccaagtgtacaatcattccaggtgttagggtcacatgggggttctagacagggtaattcacccaggaaacaccaagacaggctgtttgtacaagccagaaacattcaagtggacccattttcttcattgtgattaggggagcctcataagcggggtggttggaaacatcacaaggtccgtttcaagagaacgcctaaattagcatttgttcattgtgttgcaccacttgggtgacccccaagaaagtccttaagccaattaactggggttgcacaaatggcttttacacagagcagagactggccaaggacaggttccgttttcacgttacatttcgtcattccaaggccatcggttggcaaagcaaacaacaatttggcccaagaacacaaaagaggaaccttacacatttccaatttctcattgggttaggtccctgtgggaatgcacgcgaagttaccttgttaccacaaaggtccaggttgtcgggggcctcacaaaatggtggggtaatacgagctcgcgtacacttggggggcaaacaccaacacttttgtgtggacatcacagattaacccaggttcggcaatgggagcttacgaaccccaaactatttgaccatttcccaatgggtgggacaatgtgttcaacaatacaaggttccatgtgaagagacaaaccacggaaaacatcttggcgacaggtttggacacccctgccgacacagagagggcaccaccagagtttggtacacacgcacacaactaga

SEQ ID NO: 573060 - DNA, 269 bp, Homo sapiens
tatagtaactacgtatctttaatatataaataaataaataaacgatgatcatctagacatggacttattatttaaaactaaaaaaatagagctatgaaatcatcgaaaagacatggagaaacctaaacttactaagtgaacgccaccaatctgcaagggctacatattgtgtgattccattatatataacattctggaaccaggaaaaactatggagacagccaaaagattaggggttgccaggagttagaggggagcgagggatgaat

SEQ ID NO: 573061 - DNA, 166 bp, Homo sapiens
gttgcagaagcaatgtgtgcagtgattgtctttggggatatttagcatttgcacattccctggaagaaaatataaaataaacacatgtccagaactgaacatgctgggagataaatgatgagcacttagaacacaaagaaggaaacagacactgggctatacatga

SEQ ID NO: 573062 - DNA, 1475 bp, Homo sapiens
ggggtaaattgtaggaggacgttagacgtcatgagtgaaacaaacaacgagttcttagcagctctcgaaagcgcagcagatcaaattaaggtgggagatgtcgttaccggtgagcttttagctattgataatgataaccaagcagttgttggtttgtctaccggtgaagaaggagttgtgccagcacgtgagtactcagacgatcgtaacatcaacctggcagacgaattaaaaattggtgataccattgaagcagttgtcatttctaacgtaacaagcgacaaggaaggcgtagttacttgttgtcaaagaagcgtttggatgcgcgcaaggcatgggaaaacttgagctttgctgaaggtgacacagttgatgccaaggttatcaacgctgttcgtggtggtttgattgttgatgttaacggcgtacgtggtttcgtaccagcatcaatggttgcagaacgtttcgtttctgatttgaaccaattcaagaataaggatattaaagcacaagttatcgaaattgaccctgctaatgcacgtttgattttgtcacgtaaggctgttgctgcacaagaacgcgctgcacagttggctgaagtatttagcaagttgtcagttggtgaagttgttgaaggaactgttgcccgtttgacagacttcggcgcattcgttgacttgggtggtgttgatggtttggttcacgtatcagaaatctcacacgatcgtgtgaagaacccggccgatgtattgacaaagggtgacaaggttgatgttaagatcttggcattggacactgaaaagggtcgtatctcattgtcaatcaaagcaacacaacgtggaccttgggacgaagctgcagatcaaatcgctgcaggttcagtgcttgaaggtactgttaagcgtgtgaaggactttggtgcctttgttgaaattttgcctggtatcgaaggtcttgtgcacgtgtcacaaatttcaaacaagcgtattgaaaacccatcagaagttttgaagtctggtgacaaggtacaagtgaaggtattggacattaagccagccgaagaacgtatttcattgtcaatgaaggctttggaagaaaagccagaacgtgaagatcgtcgtggtaacgatggttcagcttcacgtgctgatatcgctgcttacaagcaacaagatgactcagccgcaacattgggtgacatctttggtgataagttgtaagaggcatcaacataaaagagctggttcgccagttcttttatttttgaagaaaaattgagtgggcattagtgggcgctcacggtatgaaaaaggaggtgcgattatggcagcaccagtagtagccattgttggcgaccaaacgtcggaaaatcgactatctttaaccggatggccggagaacgtattgcaattgttgaagatcaaccaggggtaacacgcgatcgtttgtacgcgccagccgaatggttgaattat

SEQ ID NO: 573063 - DNA, 711 bp, Homo sapiens
ctatcgcttcgccgcagacggatgctggcgtcatgttacagtgacccactgtgtccatcaacaaggtcccctatgaggcatcatccctggagtcagtggactgcagatgcctaaagagaagatcgtcatgcacatgtagagaacaactgcacctgagatagaggtacctcttagagagcgcttctgacttgtagatgctcaagattggggatgtctctagatgccctgaagtccacctgcgtagttcttattcaatcttaggggaacgttagcgaaaccgctttgacagacccgcctgagcctaatttaagatgatctattatcaagcctagaatagtgagctactgtgtgttcacttctcaacaccaattgaggctggaaaaccccactgacccgtgcaccaccatcataattggctatcaacttaaccctttccacaagacacacacacagtagttgattatcacatagagtcaatcccttcctccaaagaggagcgtattctcctcatctgtgcgaagtacctaaggagaaacaatgtcctgtggtttagtgggtaactcatcttttgccccatgaggatgacaaccttactcaccctacgtacccaaatccctaataacaatcagtccccagccgacacgcagactcaccacacaatatcattaatctaacgccatcaaagaaaactccaaatctctaacaaacgag

SEQ ID NO: 573064 - DNA, 692 bp, Homo sapiens
gggccggtccggggcccccgcggagcggcgaggtcgaacctcgggtcaaggagagccgctccccggccaaggaggaggccgccaagatgcccgcgcgcgcatccccgccccacagcaaggcggcccctgtgagacgtgaaggtcaatggagtgagctgctggtggaggacgatggcctcctgatgccccctggctgggctggcgtgcaccccgttgcccctgcagctcaggcctgggccgcgagcgcctgggcgcgcctgggcttcgctgtgtggagcctttttccagcgagaccttggaagcttgcccaccggtcgacggccctttcgcccgatagtgcaagaacccaacacggacacagagagaaacgaacaagaacacatacataagtagaacacaacgacagagaagcgagccacaacataaacaagaaacacagaaaaagcacaaacgaagaaaaaataaaaaagaacgagaaagcagcagcaagaacagcagggagagacaggcacagaacaagcgacgccagccaggacagccacgaaaaagccaaacacgcaacaggagagaaaacagcacaagaagagaacgaggaagacgacaaaaaaaccaccaaccacaagaagaaaaaaaacagaaaaaagaccaacgacgacaccaacaagaaccaaacaacgacagcagacaagaaa

SEQ ID NO: 573065 - DNA, 257 bp, Homo sapiens
  misc_feature (15)..(15): n is a, c, g, or t
tgatgccgaggttanctagaggatcccaatcgacgatcaaggtagatcgagatcaagtacggcctattctgcttaccattttaacctagatgtcattctcactcagcaagttctaagtcaaattatgtcactctactgcttaaaatacctactcctcagaataaaatgctctggcgagaaattcttaaaagacccagctcccttctatctttccagactcatttatttctctctcctcttcctttatcacattctgg

SEQ ID NO: 573066 - DNA, 221 bp, Homo sapiens
  misc_feature (50)..(50): n is a, c, g, or t
ccccccctttttggggggggggggggggggtttcttcccttttggaaaantttcccggaaaaaaaaattttacttttttgaaattggggggggtttttttttccccaaattggggggggggggggccccggggccttttttgggggggggggggggggggggaaaaattttttttttttggggggggggcttcccgatttaaattttttttggttttttta

SEQ ID NO: 573067 - DNA, 548 bp, Homo sapiens
  misc_feature (470)..(470): n is a, c, g, or t
ccgtcccctttcgaggaaacctgagtgtggtagagaggggagtgctgcgatggtgctccatcatcgagtccggggccagagggcaggctttagaccattttcaaatgaatctgtgttcttttctttctttgttgtgttttctttattttttttagtatgctggggggtggggacgttggctcagtggatctccccagtgctgggagaatgctgtagcggcgtattgctcatgctctaagtggatgccttctcgcctctcctagtggtgtctcgacacaatccttcctcgtgtcttgtggccctcctggacgttgggcggggctacgggggcttcttgtgccctgcattgctcgcggagcacttattgtgggtggttcgtaggataggacagcggtggttgtaggctcagtgtatgtggtccaggacgtggtccttggcatctcgcgggattcctcggggtgtattcttcntcgcgtccctctcggtaccttctcacaattgtgtgcttgggggcagttgtttggggtgttgtgcagcccctcgtggtg

SEQ ID NO: 573068 - DNA, 990 bp, Homo sapiens
ggttacttccatcatgtggagataactcaggaatcactcccttggatactaaatcatggaagcattatactgacatcagaatcgtagtattgacagacaggataaataatcaccacgtgtcctgtacggatatcagaggtcccgtactactggctcgcggagtctccccttgatgggggattgagactactagcaatgacaacattctgcgtgcttgtcagtggagtagtttatttgactttagttggttgtatatccggaatcacgttgagagtatcatggtgtcttacatcatcttcgaacttagatatgctggattctagtgaagaccaacatgacttctgtccactctactagtgcacagaagcactccgcgatttgtaaggatatcgtatttgatcactcgtttaatgaacaagagactctaattgacaaaactttgataagtgccatgtattctgacatacgcctagatacgagtataaaactacgagaactcagaagatgtgtaccactatctccaatggaattgtgcctgttcatattaaatagggtgggtcctctagagtgcataacgttatagtccccttgatacgtaaacatcctcgtcccatagccacgtttaaatgtgaatctaattccatattggggagaaaaagtctcaaccagctgaatagcgaggattctagcccgcgcagacatagggaaagtcgtctcccacagtccgcagtattgtcgatgtattgaacaaaacttcaaggctcgcttcaatggaagctaacactctcatctaaacactggggggtgagtaagcaagtgattgaggagcaccactgtaggaccgctggcatcaggtgagcattgaaaaagaaaccagggaggttctgaccacaaaggaagcatttcggcacaggagaaccgagaatcctcacagtattggtccaggaatcgggcagaattcttcccggaaaaagtctgggaaaggaaacg

SEQ ID NO: 573069 - DNA, 143 bp, Homo sapiens
ccaaaaaggttggggcccgcttttggaaaagttggaaaaggcaaaaaaacgcattttttccctcagcctttggaaggaaccagccctgtgggactaatttacaaactgtagggtaataaatttgtgttgtttcgaccccctta

SEQ ID NO: 573070 - DNA, 99 bp, Homo sapiens
tcacaagtaccggatttaacttcatactggcgggaaaaggcacggaagaggcaggaaaaacagtcttgaatcactggatgctggcccctaccctcttcc

SEQ ID NO: 573071 - DNA, 1465 bp, Homo sapiens
  misc_feature (916)..(916): n is a, c, g, or t
  misc_feature (949)..(949): n is a, c, g, or t
  misc_feature (985)..(985): n is a, c, g, or t
  misc_feature (1000)..(1000): n is a, c, g, or t
  misc_feature (1008)..(1008): n is a, c, g, or t
cgcaagtagtgtttatataggccgtgtggcatatgtgccctcctatatctcccctggagaagtcccctgtgcttcccgagagcccctactaaaaggtggccctcgtgaagaaaaacggggccatctacgtgggaggatttattcccattttcccaagttttcacaggaggtaccccctcctgggacatacaacatttgggaaaaacctctttttttagaggcccgtcgctttctttcactaaaggggcgccacacacacttgtgcataggggcaggggtggtgaaaaaaaaaaagtttcgagaaagggtatatgtcgtcaatttttataaaaagagtgttgcgttgtgggtaatttattcctggggggtgttaaaaaaaagaaatagggttttggttacagcaccattttcacgagaaatggggggagaagattttgtgtcgcggcccccctgggtttttgccttcagagttttacttcttgggggcgcgttaatatttctcctcgggttaaaaattcgatgtagaccttcccccaaattaagggccccatccacatggaaaaaagagtttcacaaaaagagccgcgcagagatgggccccccaatagtttaaaagcattgggttgggttttaaaagggcccccagagggcgcctccttcccccaaaccccccagttggggcccccacatggacactttgccctgtgggtggagcacccctgggggggcacaagtgtcgacctctgtagaactctatataaagagtggccccctcctacgatgtgtttcccgctctgtctcgtgtttaaaaatatggggcggatataatatagatatatctcgggagcctctactctctcgacaaggaggggcgcgagatatttttggtaggggctataggaccttaaatggcctntctgtttagggagaaaagccacattcttgtggnagatctcttctcacgcaccacacaggagaatttctntctacacagagaccnctgagagntatattctgtttttatataaataataggagaatgggtctcaccccacatgagaacctgtgagataactggtccgcgtggtggtcccacagagatggcgtggtcacatatatggtcataatatatggttcttctcacacgagaaacttgagaatgagaatccacattggaggaaaagccggcgtggagatataactatgccacgagcacacaaatttgaggagaataacaatataacaacacgcacttgccaccgggaaacacatacacgaggagagccttttctgtgagattgggtgggagattttttccctcttttaatgtgggagataataagtagttaacttgtgaacacagagataaattttggagataaatttctattaatatcaactctgaagctaattgtactaatctcgagattgtgtttgttcataataaaagtgaagtgaattctga

SEQ ID NO: 573072 - DNA, 528 bp, Homo sapiens
ggctttcataggttctatcacacacgtgcggatgtaaattgttttgcatcatgcgactagcttattaattggctgaagccctatgaatgagataggctcctcttctctggtgacaatggggtaatttatcaacacaccccgattcaggggagtctggagtttaaggtttacggaaggtgcaactaggagagggtgctgatttatcctcccgacgacaagtgcgaaaagccgaacactgtttttacgtacaaattctcacaaaaataatagagaggtaatatagtcacctggctagtacgaaaactcattggaaaccaacttccatgccttcaccggtccaagcattaccaaaatacgtatccgcccctcttttggactaggttccctacataaagatttatactcttatttggaggcggaacaacgaagaggtgttcccccttgtccgcaaatggcggggaaaacagggccttttgatgcgggggcgaagggtatcttttttacaaaagaagggtaccctggtgcccc

SEQ ID NO: 573073 - DNA, 562 bp, Homo sapiens
  misc_feature (556)..(556): n is a, c, g, or t
ggagagggggtctcaaaatcgtgagaaattttgggtcaagtggtttccatgaagaagtactggatttgaaaaattaataacttagaactgccacgaggcaaaaaagataagccaaaggggtccacaaaacattctcgtttcgttctgaaggttgtacgatgcatggttatcattaaccagtctttgactactaaacttaaatggccaatggaaacaaacagttctgagaccgttcttccaccactgataaagagtgggggggcaggtataagggataatatgcatttagccttctgagctttctgggcagactgggtgacctggccagctccagcagccttctggtccacggtttggatgacacccacggaaatggccggtctcatatcacgaacggcaaggcgacccaaagggggatagtcggagaagctctcaagacacatgtgggcttggcaggaaccatatcaagaagggcagcatcaccagacttcgagaatttagggacatcttccagctttttaccagaagggcgatcaatctcttccttcagttcagnaaagtt

SEQ ID NO: 573074 - DNA, 166 bp, Homo sapiens
gatcccttgagtgtcactgtcgagcagctgggattataggtgtgtgccacacacccagctaatttttatgttttagtaaagaacaggttcatcatgtggcaggctgtcttgactcctgactcaagtgatccgccacctcggctcccaaagtgctgggatacaggcg

SEQ ID NO: 573075 - DNA, 131 bp, Homo sapiens
gataagcggtgaggggcctgaatgacaacttcattctcaaagaggagcaagtgtggacagttttccaagcagcggtcacccaatgtcactgttcttcaagatgaagcatcggagccatgatcacattgtta

SEQ ID NO: 573076 - DNA, 335 bp, Homo sapiens
  misc_feature (252)..(252): n is a, c, g, or t
  misc_feature (298)..(298): n is a, c, g, or t
  misc_feature (319)..(319): n is a, c, g, or t
  misc_feature (327)..(327): n is a, c, g, or t
gtatagtcacagaattgtgcaacaatcaccagtatctaattctagaacattttcatcaccctaaaaagaaatcctgtacccattagtagtcactccctgtttcccctactccctcccaaccactagtgtactttctgtctctatgaatttgcctagtctggacatttcataaaaatgggaatcataatatgggcacagcctttttttgtctgggctttttttcacttaggcataatgtttgccttctcaagnggttacccatattgtaggcattgtggtcaatatttcttttaatgtnatggtaattaccaatggtaantggtaatnagggggta

SEQ ID NO: 573077 - DNA, 269 bp, Homo sapiens
ggacgagaatgcagtgtgtgagggatgcttctttaccattgccctacaccctgattcccaaaacctatttgctttcacctggactgaccctgacaccctccagtcacaacaactcacatggactgtcctccctcagggcttcagggatagccctcatttctttggacaagctctagcccgaaacctcacttccttaaacctgtctcccagtcatcttcaatatgtggacgaccttcttctttgcagcccctctctaaaagactctcaaa

SEQ ID NO: 573078 - DNA, 412 bp, Homo sapiens
taggggcatgcggatgaggggcatgcaggcggattaggggcaggcagacgaggggcagtgcagtacagtgcatgcaggagacaggcatgcccatgagttggccagctgcctgcgaaatagcatgggcaggaagagaggtgagtaaggtgacaggaagtggaggcagctaggaagggaacacagggaggatgctggagggaagggagtgacatgttatccgtctcgcagtctggtgctgtcctaacctcacctggcatgagtccccccggtagctagcggggcacaggcacagctccacattgctggccagggccccctggcctgctgggctggccacctccagtgccatcctgcgcatggagacagccgaggagatctgtgagaagagggcacggatctgcagctgctccag

SEQ ID NO: 573079 - DNA, 604 bp, Homo sapiens
  misc_feature (221)..(221): n is a, c, g, or t
  misc_feature (226)..(226): n is a, c, g, or t
  misc_feature (251)..(251): n is a, c, g, or t
gacctgcctcctgcctgcccctctcccgcccagactgttagtaaatggacattgtgcccagcccggaccttgcaacccaggccggggtggagcatgggcctggccacctctctccttttgtgaggcctccaggtttaggcaggacaaggccttttccttcccacccgccctccccacggggcctcgggacctcaggtggccccagttcaattttccgctgntggtngtgggcccttaccttccccagggtnccagtttttggcagttttggaatggaagggttttggctgcccccaccttcttaagggcaaaggtggagggtggggggcgcttagtagggactcagggccatgcctgcccccctcatttcattcaaacccccccctagtttccctgaaggaacattccttagtttcaaggggtagcatccctgaggagccaggccgggccgaatcccctccctgtcaaaactgtcactttgggggccctcgctgcttttgtgtgtggtgagcaaaagtggagctggggggggtggaaagcccggggcccctgccccctccctgacccgtttaatatataaatataaagatgtgtttatgggtga

SEQ ID NO: 573080 - DNA, 374 bp, Homo sapiens
  misc_feature (2)..(2): n is a, c, g, or t
  misc_feature (9)..(9): n is a, c, g, or t
tngaggtancatctcttccatgccttcttctttctctttccggtgcgaactaactttaaatacttcggttctcccggggcacgtactttaggcagagggacttcccattttcccgccttctcttttcttttctgtttaatcatatgggaaagtactttagctcgagatggtccctctcggtccagcagataggcaggtacggctcccgggggtgtcttttcatcattctttggttgggggtgtctcttttcatgcatctggatagtcttttccattggtattttctcagcatgacgctgtttatggtaaagcttagccttcagaccaatcattttcttggccttcttggaacgttcatgactaaaggtgctgaa

SEQ ID NO: 573081 - DNA, 760 bp, Homo sapiens
caggcttggtacgcgcctgaatttattggatcgttgggcggggtgcggcggtcctgagcggctgcggcagcggaatttttgtcccgggtcgctgcagtgacggggtgctggcgcatcgggtgcgtgaggcggccgtgtgcctgcctggtgcagaatgtcacgatggacgatggcgtgacgcccctgatccccgacagcctggccataccagatcttcctgagcctgggcccggcctgacgtgctgtgccgccggagctggtgtgccgccaatggcaggccgtgtcagcgggacgagttcctgtggagtggagcagttcataccgatacataccaggtggacccgagaagtgcccacgaaaacccagcggaccatgtccatggatacggacggaggtaccagcggactgtaattgacaagggtgcaccatgcggatggaggtgcaagaagactgcgggaaacacacagaccagagtacatgaaccatcagacttcgtcccatatccgggtaccaagatatcgcagtcccatgcatcccaaagagaagatggagaagtgatgaaaggaaatcgatgagagggcgagaacagaagacttggaaacaaataaattaaggcgttgcattataaacaagaggggcagggaacaagttgagggagacccgtaaagagagaaatgggaagcataagagcaacaagaaaagacaccgtgaaattacaaagtaagggaagaaaaatataaaaacatgggattggacgata

SEQ ID NO: 573082 - DNA, 1076 bp, Homo sapiens
  misc_feature (643)..(643): n is a, c, g, or t
  misc_feature (661)..(661): n is a, c, g, or t
  misc_feature (664)..(664): n is a, c, g, or t
  misc_feature (667)..(667): n is a, c, g, or t
ccgtcgcagagctttcgccactggcccggggccccaagaagcacttaaacgcgctgttgcacgcgccgaagcattggactgcttgacaaactaacgggtgctactttgcacctcgctccactcgacaggtccccacaacgctgacgggaactgctcttccctcctgcactcgcctccttcctcagcgcaactacgacctcaacgctactgcgcttgcacctgcgacgcactgacggctacacacgcaagactactgctatgcaacgctttcactcaaaattgactggcaaggttcgagctggcatgtcacatacccctgctggacttcactggcactgctcatcagccactcgacgaacgacaggctgcaacatttccgcctggctctatgacaccaagggccgcttttgcctgttcaccgcatcacagctggacagaggcaaagctacaagttgtgcaaagtgaggacacgattactgctgggacgtgaagggaatccctcacctggtgactcatgatgctcgaaccatccgctacccagatcctgtcatcaaggtgaacgatactgtgcagatagattctagggactggcaagataatcaactttatcaaatttgatacaggccattggtgtatggtgatnggtggagccaacctcggncgngtnggtgtgatcaccaacagggaaagacatcctggttcttccgactgtgcgtgcatgtgacggatggccaatggccaacagcttgccacgaggcttccaacatcccggtccttggccactgtagacttaccctctccttacttcttctacaagactatccttaaaaagcctaaagaccgcatccactaacacaaccaacaactcgacgactatcggcggcgcgcaccggccctcaagggccggtccacccgtcccgaccgctccttccacggcccatcgcgcccatagggacctaaacgaagggaccacccccccaaccccccaccccccaccccccccaccaccaacacacacccaccccccgcccacacccccacccaaccccccacacacaccccaccccacccccccc

SEQ ID NO: 573083 - DNA, 731 bp, Homo sapiens
atcggggctcgtgggcgacgcgggctgttggtcgcctcggcttgcattctgtggggcactgattcacggccggcctcgtgctcgaagttgatctgcgtcagggaatcgtacgtgcgttgttgctcgatttgctggtctgtggttggtccctgtgcagtgaatggatggggttcaacctgagctccacccttcctcagggaataagcagtgtgagaccccgtatatccactggctgtcttgcgatctccgcgggtgtccctcgagactcctatggtctatcgcgcggtccccgtgcaggtgtgggcctccgtcggccccctggtcccaggctcttggtggtgctactccttgctcgggtacgacttcttggcggccacgccccgcttgcctgctgtaagactccagtgggggtgggacggtgcatggctgtccccaaccggtcggtcagaggccatggccagtgccttggggctgtgaacttacccatgcacaaggtgtttaggggacatgaagagacgccttccctccagggaggtctgcgattcctcatctggaggcactaccattgtcttgttcatggccccctttccctgcccgtctggaagtttatgctccacaacataaagcgagcccaccaataggcccctccaatagtgcccttcctccacaattctccgtcccccaggaccaagggggattttcactcacttcccacctgggggaatggctcc

SEQ ID NO: 573084 - DNA, 244 bp, Homo sapiens
  misc_feature (2)..(2): n is a, c, g, or t
  misc_feature (41)..(41): n is a, c, g, or t
  misc_feature (216)..(218): n is a, c, g, or t
anaatgaagattgccgaatgcatgggtgctgaggcgggcanaaccggtttgcatggttcctatagctatggcggtaatcccaacctgagggcaaagcgcatcgtggcgatacccaatgatgtcgatgtcgaggtgggcgattgggttgaggtcagcatcaccgactgccgtctggcgcttaaaaaataaactctggaagcaaaggcccttgagtcnnnacatccttccttcctctctgcgttag

SEQ ID NO: 573085 - DNA, 1117 bp, Homo sapiens
  misc_feature (3)..(4): n is a, c, g, or t
  misc_feature (142)..(142): n is a, c, g, or t
  misc_feature (155)..(155): n is a, c, g, or t
  misc_feature (168)..(169): n is a, c, g, or t
  misc_feature (176)..(176): n is a, c, g, or t
ctnnagatggcggctgtgccttagagagagcgcgctctgctccctgcctttgcctcactttacgcaactttccctaactttcgggcagcctcagggggcccccgtagccccctgcctttcctagggacttactggggtcgantcgaacctttttntgggagaaaagcnncttttangagctattcattattcgtgccattgtatggaaaagaagcaagcctgtactgagagcccagtgtcgtttgtattattccagcttaggaatgccatggcagcaacatccagttatatgtgcgctctcctaatgaggattatcaaatcatatacggacctgtaattagatattaacttattgctttattttatatgaccagattaacatatttgaggagtcataatatttatttatacgataaaaataacaggaggatttgtgccttcattattaattactcttgggatctgatacttttctctactagtagactaggactcttggatcttggacaatacatacatgggatcagtaaatacctgtgccacaggactacaaagacaaacacagatacaccacctccccgcttactatccaagacttacaagatgaggagacaatccggcacacacagccaagacggagcacagttaggctacacaagcaatgcatcgaagtcacccagcctctgaacaacagcttcagggggaccagaccaccagggacagaacaggccgacaacgtgcacgcacctggaccgtgcaccccagcgacagtgagcattggcagcgaagtccgacacgacagtctcgcagcccgcagcagcacgccgggaacacgagcaggaacaacgagggccagaagccagcaagccccccagaagaccaaggagagacaggcctaacaaagacagggtaaagtggagacagtgtccaatagctgcggctagggagtagtggggcacaggaggaaaaccgcggggtgatgacagcggacgatagggaaggggacaaagcgagaaagcgcacagagcgccatgaccaggccagggacaagaaagtgagcaagcacggcggagacacgcgccgtacgcactagcgcgtacgacgacgcgtcgcagag

SEQ ID NO: 573086 - DNA, 1786 bp, Homo sapiens
tggtggcgcatgtctgtaatcccagctactcgggaagctgaggcaggagaatcgcttgaacccaggaagcggaggttgcagtgagccgagatcgcgccactgcactccaacctgggcaacaatacaagactccatctgaaaaaaaaaagatcacacaggaaaacagaagttcgattttacgtcgtacactgctgtaatttcagcacatgtggactcgtgtaaccaacaccataaccttccatcacccctgaaactccctcccgccagccctttagggttgcccctccccccgaaccccaccagcccctggtgaccactgatctgtcctccaacccatagtgtttttccgggaatgtcacaaaaacagaagccgaccatgggtcacctttctggcgcctttctccccgcacaaagtctttgtccttgtgaagttgtcacgtgccaaacgcttgtccctttttcctgctgggtaatactcccggtgccgcccttgctgttcgtcgatgcacatctggctgcttttcgctggctgcgagcggagctgctagggacatggccacggggctgtgagagcggagtttcctctctccggtgaccctgagctgcgcctttctcagccgcctcccgaggccccaggcgctctgcgggggctctggcggggttggtgggggtgggcgttctcgttgtttcagcggcgctgccccaggccctgcgggagggaccgtgggacccgagacatccccgcctggcctccgctccccacccgggagtggggctcgcacccccccaagctcgggtaaagacgcttctggaaggaagggcgccccgcggaccccgcccaaccctgcccagcccagcccagcccagcccagcccttcccggggcggcggcgcgggaagcaggcggcggcgcacgggcgtcgtcatggcaaccccaccggctccgggggccgggaccgctgccccctccgcccctcgacccccgcccccccgcccttcctggctgcggctggacccggctgcgcggggcgcgaggctgcctttcccgggatcaccagggaccacccggcgcgctccccgggaatccgcacccctggccccagcgctccggagcgacccgggtcagcccctggctgcctgcaatgggcccccgggcgaaccccgggcggacccaggagtgagcacccggtgcgcggcaacgatgatcccgcaagggaagctcacgggaggcaggagctgtggcagccgccccaggatggggcgcggggagcgcgctgagctgtcctttcccgcagcggccccgcggttgaagcgtgggcttgggttttggtttttcttctgtggcaacagttctgttgagatattactcgcctgccatacaactcacccattttaaaagtacacctcaggggtcctgcgtgtattgacaaacccgccgccgtcaccacagccaatttcagaacattttcatctcttcaaaagaaaccctgtacccttcagctgtcaccctcctggtccccatccggtcctcgtcccgccctcagcagccacgcactgcctgtaaagtcccctgtcctgccctgtaggtggaatctataccttggggtctgttctgacgttcacctaacagcctttccaggctcagctgtgctattgtatggaccagggggttgttttgtttttgttgtttgttgattgtgtgtgtgtgtgtgtgtgtgtgtgtgagcctggcgtggttgcgggcgcctataatcccagctgctcaggaggctgaggcaggaggatca

SEQ ID NO: 573087 - DNA, 219 bp, Homo sapiens
gggccccccaattttttttcccccccgggaaaaagggggagggggtttttttaaaacctcctcccctttaggggaaaaaaaaagggaggggtttttttaaaaaggccggggggggccttaatttttttggggccccttttaattggaacttgccttttaagggggggggtttttaatttgcccccggggggagggaaaaaaaaaaccctttttttttta

SEQ ID NO: 573088 - DNA, 618 bp, Homo sapiens
  misc_feature (3)..(4): n is a, c, g, or t
  misc_feature (142)..(142): n is a, c, g, or t
  misc_feature (155)..(155): n is a, c, g, or t
  misc_feature (168)..(169): n is a, c, g, or t
  misc_feature (176)..(176): n is a, c, g, or t
ctnnagatggcggctgtgccttagagagagcgcgctctgctccctgcctttgcctcactttacgcaactttccctaactttcgggcagcctcagggggcccccgtagccccctgcctttcctagggacttactggggtcgantcgaacctttttntgggagaaaagcnncttttangagcgctcttttcgtgccctgttggaaagaaaaccacccgctctgagagcccgaggcggtgttttcccacttaagacccagggcccaccattttgtgcgctctcctaaagaggggtttttctttttgacccgtgtagaagtaataatcgccgtattattttgaccaccttacatatttgagggtgattatagatataaatcgcgctttaacgcaggattatggcgctatttttaataatttgggagctgagatttttctactagtagataggactcttgggttggacatactacatggatcacgtaaggtcacgaacattggtgataattttgaagagttatttgcttaagattgccctcgtttttgttgatccgccaaaaactttgagggacgcctcaggtacacagcatgtgtcttgtatctagtgtgctacttttatga

SEQ ID NO: 573089 - DNA, 731 bp, Homo sapiens
  misc_feature (331)..(331): n is a, c, g, or t
gagggtcggtcggctttgtctggtgtgagcttgtctgtgtccctgctgagggtggacgtggttggtggattggcggatggtatcctggttatcctgctaatagagtcaaaagatttgcagaatcttcgtctgatatagacccgcttacctggcatagatccattcagcaccttgaaggatggatgccctaggatgtacactctagtcgaaaaaatgctgaaggccagagaatccgagggactataagagaaatgctaacttccgcgcccagattccaagggatatgcgccatcagtccttttgcctggcacatcagcttggaaagatgttngccggcttcttcttttcatgacatactaatgtctcagtaaggaagtcacgaacccctggcacctgcgttcctggtcgttactgtaggaggatggtttatgacaagtagttcctttgctgtcgaaaggtagtctcatggatgctggtaaggaaacaaatacaacgcctcttggcactgtttgggagtccccgatgtgatcgacactaatctgaaaaaagtgttgaattggccaaatgatccccacgggatttaaaaaagaatggcctttcgctatccccggaaatcgaagctaaggaagggctcaatccttttggcgagagacaaatggcgacggcctagggatagaatagagcccgcaatcttcctttattcctggatttttagcaaacaatctcaagga

SEQ ID NO: 573090 - DNA, 171 bp, Homo sapiens
gatcactgccttgcacccagcacaatgaagatcaacgatcattgctcctcctgagcgcaagtacgtccgtcgtcgagtcggcggcgtccagtccgtcgccgtcgcgtggtccaccgtttccagcacgagtggtcgagtcagcaacgcacggacggtagttacggaggtccc

SEQ ID NO: 573091 - DNA, 958 bp, Homo sapiens
ggcggacgctgcgggaggcccgggagcggagtggaaccgatcccagaactccggacgtgtgcgggtgagtcgcagccatgtccctggttaactcgttcttgaaggggctggcgcgcgtgcgggcgtgccgtgagtggaagtgctgggcggccctggtgtgggggccctgtgggaaactgtgctggggaggcctgatcagcggggccgggggccgggggcggcagcagggcagtccggcgggcagccggttggttggaaggcggcggctggccggatgggaacgggacatgccgcatcctaaggcgggacgctcatcaggccgccatcaaggcgaagacgggttggcgcaggtaacaaaaagtcgggatgccccccggcctcccgcacgacaaaaactatttacgctttcccaatctgttgggaggggccaacggagacgtgacgggaggggccggacaagtttcgcggagaaacttcttgtggccccaggctggcttgggcagactggaccctggcagggtcaagcgcccagagaaatcttcatgacgccttttctcaattaaggtggtgacccaggaaaccgccttgcattctgaagcgactgcgttgttggggacattggaccacaattgtcggcaggtcatgggtgccgggattgattacgcgcaaccacagggccaagcggggctttggaggacatccaaagttactggtggacaacccttcacaagctgcaggccatatacaaagcagtttcgacacttggaccgatcgggacctttggcaggaggagaccccagggtgccttgagcacgcagggttcccctgtgaggagcttctcaaagagatcaccggcgcatcgataaggggacctgcttgaacccaccaacgtggcgcgcgaccaggcggccaaacttgacagccgggcacccggcacaccgcgggcgcagttataggc

SEQ ID NO: 573092 - DNA, 879 bp, Homo sapiens
  misc_feature (38)..(38): n is a, c, g, or t
  misc_feature (40)..(40): n is a, c, g, or t
  misc_feature (43)..(43): n is a, c, g, or t
  misc_feature (258)..(258): n is a, c, g, or t
  misc_feature (292)..(292): n is a, c, g, or t
ggcccccgcggccggccgagctccgtggactccgcagncnggnccccgcccctcacactacgccgggcggttccctccgagccccgccgggacagcgtcgacgctgcacacaccccagagaagccagaggacggcgcctgcaccggacacagcgcaacaccggcacagcacagcgtccacaccacaagtgagcctagggagctgtgtctacactgcagacgccggcctgagcgcacgcttcttcatgcaggctcagcngagggggaagaacacctccccgagggtggaaganctgtggccagcagacagatggacggacagacggacacaggcgaacaggcagcgcaggggtgagccgagccggtcaaatgggccaggacccggctccgtgtgcccttcacagtcaggatgacagaaccccgtggaatatgaaaaatgccgggagacagaccccggaggcacagcccctcaccgggcagggaggccgccagagggaagcgcactccagaccaccagagccccatctgattaaggcatcgagatcaaagctcagcagagggcggctcatgatgggcagctcaaaaaaataaacccaccaatcagagtccgtgttcctgtgaccggtggcgggttcggatgcagaggaggcttctcagtgcggttcctcctcatctcggaacctgccaccccactcaagcccgacataggccaggacagccaggacggccgcagcgagggcaacacgaggcccgtcgacatcctgaggccccgggcctgtcgccgagtcccggcttggggagtgtcccgggccacactggtcctgctccggctgtgtggtctcccaggcgcgtggctctccctccgggcccaggctctggt

SEQ ID NO: 573093 - DNA, 1184 bp, Homo sapiens
ccggacgctctcaggctctcgggcgcacggatccaggtcggatcgaggccctgtatgagaaatacaatatgtgggccatagaactactgaacatggagttgcaagacattgtaagggcctggatttgccgcaaatcctcgtgcaaagatgcttcaatgccaaagtagactatctatatcgtgtccgtgcgcgagtctcatttcctagcccagcttcgctagactcccgagattgcgagggatagccaagactagcagtatgcagtgctgattgacgacgccatgacaagtcctggctaagcaaggtcatgtatgggtagctaaaacaagatattagattccagaatcagtgccaccatgatgaggacaagcttaggaggtcaagtagcttcgtcgcttgtccgctcccttgtctccacgatttccgtattctgacgagtctagctgtgtgctctgacactatcccagaggcatatatccttggcgtggaatcgatgtgtgtgcccgtggctcgactcgattcagtattaactcaaagatcacataggagacctacaggagaacagatatatgcatgcattttacaaagagaggctgacgctgtgcaacaactgatctaccttgtatctacgacaaatcgcgtgtagcagagcatcagcttgcgagggctgatctattctgatacctcaccaaggatgcgatacgtgggatcgtgtcaaaagcctactactaacttagatgctggaagcgggatgcgtttgaacatggaaagagccatcaatgagcaaaggtgtggcatgaggtcaccagtgtccacatcttgaccaaacggaagccacatgcacagagaccggatattgccttcagctacagagaaggacccgcaggacttgcgttcagattgaacataagcgtattgggcacctggagaccgggaaacggggcgcatgacgaaacggtcagaagacgcctcgaacaaaaaggcctccagaaagggcgctcgaacccaagaggcacctcccactggcaacacactggcccaaaccacacgaggcgccgaaataacgaggcacggaacgtcaaacaggactaggaaagacactacagagcaacggcgaaccaacagagtaccgcaacagacaacacagagccaagataaaaacgacacaaccgcacaaccacaca

SEQ ID NO: 573094 - DNA, 128 bp, Homo sapiens
accagctgggtatatttaagcaacagcatttaacatagcaaaacattcacaccatgcagcagccaacaatcagtcccatttctctataagcaaaaccacataaacactcacacaactttccatttttc

SEQ ID NO: 573095 - DNA, 1017 bp, Homo sapiens
ttgtgtcgtgggttgggactcctcataggttacttgctcatgcggattcatttcactttgtgtgcaggtgtcgttgtgtcttaagacctctttccgttggcccctttgttctcgacggtgttgtactgtgcttgtttaacttggtagcgtaactcctctggcgtgtgccgactcttcggttaggcggttccaatggtaacatgccgtggtagatggggctctagggggattcctcggggtatatatcgggccagttgggatgcccctgtgtgttataatgtactggatccgttacaatttgcgttgaatcacataagtgtgagacgacaatggtggcgcgtcttagaaaggctgtgttggggcaaccaactgatggaatagccctcattgagtgctcctttgactcattctgcgtagcctgactaaactcttgccggatactttgaatgtctaaccgcggacgcttgcaagctctcgtttcgttctatctgttggtgtggtcttgctgagtcatgtgggacgctaatggcatgcaagttaggtcaggtgtggggaaggcgtctggctgtcgcttggatgctatgggaggggatagtagtcatagttagatcagtagattttagtatcataataatggatgtactatcttgtatagagtgagatcagcagtagaatagtagtggtagtgtgcgctcaatagcgagagaagaaccctaggtatggatgtataaatatgttagagcgtttaataataatcgttgatcagggtcgcgtgtggcttcacacactgttaatcgccagctacatttgggatgtctgtagacgtgctggagtcgcctgaggtcatagggtttgaataccaacactggactaacatgtgtgcaaccagctgtctcttctgagaaatactattatgagtccagatgtggtggtcgcatgcctgtaatcccagctagcttgggagtactgaggcaggagaatcaattgaacctgggatggaaaccgctccaataagca

SEQ ID NO: 573096 - DNA, 157 bp, Homo sapiens
ggaaatatttagtttttttaaaattcctatgttttttaaaaaaaaattcaaagcaagcctggttgtaaaaatggtgtaaaacattggggtgggggatcaattcccaaaatgctttttatgtttggtttggaagaaaacaataaatttcttttattga

SEQ ID NO: 573097 - DNA, 196 bp, Homo sapiens
  misc_feature (182)..(182): n is a, c, g, or t
gtagagagaaagccttccccctgctgtcttgcggccgtcttctgaggttctctgtctggggttggctctcttaaccctttctctgctcccagcgctggctcaccagggaaggtaggaggggcctccctcctggcttctgcatcatgcgccagcgaaacatcactggccgttggtctctcatngacttaacgtggct

SEQ ID NO: 573098 - DNA, 554 bp, Homo sapiens
gcctagccagagatatttatcttgttttgttccgtggcggggaaatatccagtccctatggggagagtgatacatctcttaatagtggcgggcgctatatctaagtaagcgagagataaacacctagggaacgaaccactatattgttaaggtcccccactcttgtagccgaaacaatccactcgcccgtcacaggcacaaacagagggatgtatttaaaaagaagtggttttcccctccccccccctttttcaagaggaggaagaccaaataatttgtcttagcagacagagaataaatagatagattctccaatgaagagcgaatgattgcctgcggtagagcggacgcacgcgcggctatgtgtgtgggaggcggactcaacgcaccatattgaacaacgactcacgagccttcggagggacgcccacttcgctggcgcaaggataggtggagaggcacacccgggagtctacgaacgcgccacgccgcgggcgccattaccgcgtggcgaccacctagattactctccgcccaacaaatagacagagaaa

SEQ ID NO: 573099 - DNA, 125 bp, Homo sapiens
  misc_feature (87)..(87): n is a, c, g, or t
  misc_feature (89)..(89): n is a, c, g, or t
cactcagcctgccaggagcgtgtaggaggggtcgggagaaatcaggctctcgaagctcataaaattcaacgtgaggcagcagtacangnacgcccgaagcacagtgggcggtcataaaggagcgg

SEQ ID NO: 573100 - DNA, 301 bp, Homo sapiens
gtggttagagtagcaggaaggaggacggaatattgatatggaatatagatattaggagattataagataactcgtctagaactcctgacctcaaatgatccactcaccttggcctcccaaagtgatgggattataggcgtaagccaccgtgccccaccttcttttctttctttctttctttttttttttaaagagagagcatctcactctgttgtccaggcgggagtgcagtagtgtgatcatagctcacggtagccttgaaccatggggttcaagccatcccaccttaatctccctagta

SEQ ID NO: 573101 - DNA, 580 bp, Homo sapiens
  misc_feature (37)..(37): n is a, c, g, or t
  misc_feature (92)..(92): n is a, c, g, or t
  misc_feature (123)..(123): n is a, c, g, or t
  misc_feature (137)..(137): n is a, c, g, or t
  misc_feature (140)..(140): n is a, c, g, or t
ccccggcttacttgccccaccagcagaaggttctgcngctgtattaaagccgctcgccacctcgagtcatggtgtatccacagggacaagtnccggtactttgcttgcttgatgagagcccgntttgaagaacatangantgagaaggatatgatgagggctacccagctgctgagggaggcagaagaagaattctggcagaatcagcatcctcagccgtatatcttcccagactctccggggggcaacttccttcggagagatatgagtgcttacaaggttccagaatggtgcttagattactggcatccctctgagaaagcaatgtatcctgattacttttccaagagagagcagtggaagaagctgaggatggagagctgggatcgggaggttaagcagctgcaggaggaaacatcacctgatggtattatgactgaagctttgcctcctgccagaagggaaggtgacttgcccccactgtggtggcatattgtgaccagacctcgggaacggcccacatagaggcaggcccctcactgttcatgcttgcaagtgagagtttcagagcacgctcaca

SEQ ID NO: 573102 - DNA, 585 bp, Homo sapiens
ccccagactagcatgtggttctatatttgtaaagttattgggataagaaacaattaaacagtttgtagtaaaaaaaaaaaaaaaaaaaaaaaacaaaaacatagtggcgcggacgcgccccgcggacccagcgaaacaagccttctcaagaaaccactgcgtggggcgcgcgcgcgcggcgccccagaggaggcaagggagaaaagagggccacatacaggctgttcgcccaaggaagaaccgcgggaccagcgaacagaggggcgtggagcattctccaacacaaaataaaaaacgcgccgcggggcggaacacccgacggagggttctgcgaacacaaaaatcccacacagagggaattctgagaagaggacctaataagggggaaactaaaaacaacacgggagggccaaaacggagcgaggcacccgagaaatatatcaaaatatagcgcccgccgccggaggggggtctaagaccaacaaacgacagaaaaaacacaacacaccacaaaaaaaaacacacagaaaagaaaaaacagaaaaagaaaaaaataacaaacaagaaaacagacgaacaaagaaa

SEQ ID NO: 573103 - DNA, 1337 bp, Homo sapiens
cgcaccccgcggttgggagtatgtgtgttgtgacgcgcgctcgcagtgggtgtgtgtcgtgctgccccggccgccctgcacgctcttgcgctccacgatgagtgtgtgtgtggggtgttttttagagtgggctgtagtccggccacagcggtggtctgtggggcgcgtgtttctcagagaggtggtggtaagcgaccgctcgtccgtgcccccgccatgatcaccgggggttggttgtttctagtctcagtagtgttggtcgaagccaccaccaggatgtcgccgcacccctcgccccgggcgtggtgctccccgtggtgcctcttacaagaaggggggtctgttgttgcacaaaaagggggggcgccccccgttcgaccccgccggtgatacgtgtgcgccccccataaggggggaaaaaggggagagccgcgcgaacacacccaagggtgttgtattttcctggagaaaggggggaagacaggaaaaagggaaatgtgggaacggggccacaccgccctttcccgcaattgtggacgctgttctcccccctcggaggggtgtcacccgccgcacaaagagggtggtcgcaagaagcccccctgtccttggaggggcttccccctgggggagattgtgcccagcgctgctctccagggcccaaattttaacctgttgtgcacacccggttaccgcaccaggaaagggcatgtgcgcaccccaagcgcctccccagacatctctgtttgtggttatagggatctctctcccctgtctcacgtgccccctctgtctgttctctcagagaaagaggcgccagcgcacacacaccccctgtggcaaagaagcggcggagagaagagagagagacacatgtgagcgccccacaataccgcacattgccctgtggaaaatattacatatatctcaccccaggagaaaacactgtggtctcttgtggcctctcttgaataccacctctccacaggcctccctctgatataaagctttcttgcctccccacacccctcgcccacacctctttctctgtttgaagaaatatacccccgcctccactaaaaagctattcttctcgcgcccacctcccacaagcccaccactgggggtatggggttctgctgtgtgctggaagagactcttggtgaattcgccggtggccaaacacagacccccggatttccagaaaccagatattctcatctcccatgcccactcccgccacgccaccccctggaaaaggggaaaatcggaagaaagtatttataagatcctttttctggccagaacccctgaaattaatcccgctggtgccccca

SEQ ID NO: 573104 - DNA, 860 bp, Homo sapiens
tagtggtgccgcccccctctgtttgagcccgcggtaatgttggttgtttccaaccacgacgtttgtcccctgctgatcgattgacacacaaagggggaatatgtgtcaaaagtacgtggttaacaggacgcacgccggttacgcgccaaaaagggggtcctggtgggacgcaccgaacgatgctcccccaagcaacgccccgttttggttaacatgacagacgggcggtaataacacccccttatgggcgcgcgccaaaatgtctctgtctattctatttatgagtgccgctctgtttaaccccgtcgctatattcccccggttgccccgcgctgtgtacacgaacacacactattgttatcaccatccgccgtcatgatcccccccgcccaccctctttgttgttacatcaactagttaaaccctctgcgccaacacttgtggaagtggttctccccaaaagtcctgctaaaaatagctgtgaacaccctgcttcaccctcacgtcccccctcttatgtggtgacaccacgagtcaccgcgtttttacaaccttcttcccacgattcttttattgggtggggttgttaatacaaacggctggacgaataaaccacgatctttgtgtcggagaaaccctgagagtagtttctcccaccccacgctggtaggaggagtcctcgggtcccccttctaaggcgtctcgtagattccgccagtctcctggttgaaccgggttaggagaacaaccacctcgttgtggaaaagaagaaaaacgttcactcggtgcgcaacaaattgtgtgcgccaccagcttgctggggattaaaaaaccccttttaagccccaaacccacataac

SEQ ID NO: 573105 - DNA, 112 bp, Homo sapiens
caacgcaaacccaagtaatatggtcattgagccagctggcggatccaatagtgagacatctgattgccgcatgtacactcgtccatgtaactcaaagaatcgagcacagagg

SEQ ID NO: 573106 - DNA, 100 bp, Homo sapiens
tggtctagaggatctatcccgagtcttcatgtatattccttgatattggacatatgatagtacgagaaatagtggagtagtgacaggtatagctgcagat

SEQ ID NO: 573107 - DNA, 797 bp, Homo sapiens
tccctcccgtctgtggtgccatcattaacacctccttgtcctccgctcctgtgctgagtccctttgtgcttggtgtaatagttgccacgcagagtttgctaaccctgtagtgcagcagcactaagaacgaatgcgtgtggtggaagcagaggcaaccgccgcaggcagctccattgctgcccgagtaacgacgtttcttatcccagaacgttcatggcgtgtatccttctttgtgggaagagcaaggtgaccatactaccagaagatcaactctaggctggtgtagttgcgagtaggtgacctactaagtggggcttaggagagtatggtggttcagagcccgtagttatccgcagcaagttaaggaaggttggacgcgtgggaatgggatgccttttgagtcccgaggaggtctttgaagatgcagactgtgtgggcgaattcgataggttggagaaccccttgtactgctaagcggagatatacataggaatacttgggccacattaagaaatacactcaggggggaacctttcagaaaaacaccctaatgcgtcgggcatacctcccagatcaggttagccatatgctgcttggcgaaaagggaacccttgactccaggagcgaattacaatgcaccactcttgcctcccgggtggggacccaggggattcagcccaactctttaaaagttactccctagtctacagcccgtggttgagaacccacctgattagggattaggggggcagacggcttattgcaggggataccaacatgaataaggtacctaagcg

SEQ ID NO: 573108 - DNA, 458 bp, Homo sapiens
atatggctgtcgggacatcacgatgcccatcaacagcgccaacaggaaaatatgcgccacgtagagtgtccacacccgacgcaggattttcaggcaggcgaagagatagccctcgcgctgcagaatcttgccgtaggccagcacggctgcgtagccggccaggaacacgaagatttccgcggcgtcactgaacccgaagttctgcacggtgatgttggcgagggggttgtgaggcacgtgatcccagaaaatgaagatcaacgccaggccccgaaaaaagtcgatgcgcgggtcgcgtccgttcagcatggcagcgggctcttgaacaagtagttgaatgacgaaatgtgagcgcgggcgtcgccgcacgtcgggcgggcgcaggttggcggtatttgtaagcaattgcaaaggctgggtattactgaatgtctctagagatcaatgatcaccagggt

SEQ ID NO: 573109 - DNA, 184 bp, Homo sapiens
  misc_feature (113)..(113): n is a, c, g, or t
  misc_feature (141)..(141): n is a, c, g, or t
  misc_feature (147)..(147): n is a, c, g, or t
tgaactcctgacctcatgtgatctgctggcctcggcctcccaaagtgctgggattacaggcatgagccttgtctggctagttcatgaagattttactctggctcttaaaatgngctacatgtctttaaaacaagcttatgnaatccntttctattctctggacaaacaggtttagcactggaat

SEQ ID NO: 573110 - DNA, 289 bp, Homo sapiens
tgcgtcaattagtgtgcatgagtaggtggctgcagtaatgttagctgtgttaggctgtactggcagtgttattggttgaatgagtaggctgatggtttctgataataactatgtatggggataacggggtagtaggtgtgccttgatggtaaagaagtgggctaggtgcatattttaatctatagatgcgaaagccctattaatcacttgcgccctgctcataagggtgattggcatggctagggtagatacgatacgttggggtggttggttgtaacatgagttgagg

SEQ ID NO: 573111 - DNA, 826 bp, Homo sapiens
gtccgagcacaaagagaagatgaccgagagactctttgtccagccaatgcaggacacactctgtttacccaagaactggtgtctgcagatactaaagaagagcgggatctcgggatgcaaaaactcaatcaagttcttgttgatattcgcctctggaaaagctgatgcttgtacaaacctatggaaagccttaaactggaaattcccagtgctatctagaggtttcgatgtcatcttaagaaacacacttaagagcatcagattgacctgatggcatttaatgcttaagtaccgaaagggtgtgtgccaatattcactaggtataatgcaggtcattcatatcttgggtatgtaaaacttaaactgattttctgtcattcatcactgagtagaagtaacatacattatagtggatttgctaaatcttaatttaaaaagcctcattttcctagaaaatctaatattcagttcattcattgacacatatttttttcaagaacgtacgaaattctgaggtgtcttctgggagctgtaggctcttgaagcaagcaacggtcttttcaggggttcggagacagaaaacccaattctccaaatctcagtacattccgaaacggctgtgatcagtccatggaaccggaattgcattgggacctagggtaccggacaaaaaggcaagggccttcagcaacttttccgtatgcggtctcgaccctctccatatcccacatcttgggtacgccggggcgggtccaaaagtgtgtccataccccgtgagcagcggccactcctcaaagcaaccgccgctcgccacaacaagggcgcc

SEQ ID NO: 573112 - DNA, 268 bp, Homo sapiens
  misc_feature (82)..(82): n is a, c, g, or t
ccaaagcccctcagcctgccttgcagaccaatggggtccatgttttgtagccccctcccctacgcctcacccctcctccctntcacaggttttgggcggccagtgaaaaaaacccagtgggggaggcagggagtttggtgcctgcaaaaattttttgcttctttcctggggggaggtggggaggttttagcaggagcgggccctgtacccccctgctgacctgctgtttggtaaaaaaataaaggttgtgtggctgggggaacggaga

SEQ ID NO: 573113 - DNA, 733 bp, Homo sapiens
gagctcgagtggccgatggcaacgatgtggtcaaagtcatgagctggtggtcgatggtcctggaggtggtcgaacaaatgtgatgactagagggatcacaaggaagacacagaacatatgtaacctcacttgtaccaaacagtaagcagctgttggtaagaatgaatgatgaaacacggtagagggacctagatgcctgagcagtctgaacttgcacacttgtgtgaataaccgtcaacgacttcaatgtgcgctgtgttaataatttacttgatatgtttagtacagtacttaaagacctactcttctcgactggaggacagcaatttcaatggtagaaaatcgagtgaacaatatgaataccatttacgcaagaaataggcaaggacggaggaaatgatcatagagctggagggaatctgagggggaccccgatgtcagtatggaaccttgggaagaatgattatcgatgacggaatctatgccgatctgtgtctacagtctcgtcggtgctacacgcaataaactagccgtcatgcattcttctcatgacgttaaatcaaaggattctgcatgcgatacctgggtctagtctgcgagtacttgctctattcagcaattggttgcactgacgtgataagaaggtggctcgactaggatgaacacggattcccctgggtgcaacatgcttgatgacagagtccgaataaggccccctcgtggatgagcctta

SEQ ID NO: 573114 - DNA, 439 bp, Homo sapiens
tagaagactcactggggttccacagctatggctcactaccaggagctgatgaatcgggcgaggggctcaagacagagctcaggcatcaccacacctcaggcctttggggcatctcccaggtccccatctccgggacaccgggccatggtggtgaagccagacagcgacctcaaaggtggcctgggagtcccctacagcccctcagcagagggcagcactggattgcttagctccatcccatagttctctacttcatataaatggctcaggccctcccaccccttctctaacactagctgcaaggcagaagccacagcagcctcggtccagccggcaggtggccactgggaaccatgtgtccacgggcgtaggggagtcggttcctgagaggtctgagggccagagctgccctctacattaacatgctgtctctaagggt

SEQ ID NO: 573115 - DNA, 851 bp, Homo sapiens
  misc_feature (506)..(506): n is a, c, g, or t
gctctactggcttctggccgatctccgttccgcgcctcctctggattgcactcgaacacaacgtgatactgttcgtgacacggtatcaatgatggacgtgatgatggtggagactgagatgggcctgagttccaccgtgatcctggatgacactgcggtgtgtgaacattcctgcatcgcctgtcgtaatatccagggatccgaatatgttgctatgagtctcgatagggagagattgttgctatccaagctgttggactgacgacacggtactggtagttagacctccttcggacagactagtaaactgcttgacaatagtcggagtaggacgttcgcttatacgcttggtgcgatcaatggtacctcgcttactatacggatagaaagctaacgagttcgtgtcacggaacgctctgaagttagtgccaatcgactcgcgaggctaggcgtcaaagtcagatcgcgattgaagcattctaggacacttctggtaaacaacccantctcatggatcgcaaggtcgttccagggtacacggggaggtcaccttgaaatggcatggattagtcggaatgcccactctaagtgccaaggactgcgtgaaactgtgttggggctattcctgtgtgacctcccgtgacacatagaagaatgcacaggcatgatccaatgttgatcatccacggagatgtacatgacaggtctgatggcagaattgccaggttggcaggccagtagccgcaacggtagaatggcgtgcacagactcctgagagtcctgcagtgggtgaccctgcatggaatcggcggctactcaagtggtgagccaagtagggggaacatgaaaca

SEQ ID NO: 573116 - DNA, 134 bp, Homo sapiens
  misc_feature (38)..(38): n is a, c, g, or t
aggatcccatgttatcgccaacacattacaacataaanacctcattcacacgagaaaacaccctcatgttcatacacctattccccattctcctcctatacctcaacccgacatcattaccgggttttcctctt

SEQ ID NO: 573117 - DNA, 1294 bp, Homo sapiens
tccgggatccggaggctttaattaatttttttcacataaattacacaagcactttataaaaggtgtcacacaaaaaaccaccttataagtgctctaaataaacacccccccacccctcaaagggtgttctgggaaacaatggggctgcgctttttattgtagaaacccctggtctggtcgctgtacctgaggattgggcgcagggagatcgtgtaggtgggggcgcctaggcaacacccaatgtgaagcgctggtttgtacctggtcgggctggtggtgtagtggtcgtagtggtgtgcccccatgtggtgggcgctcatgagaccttttgtgtgttttggtggctgggagggagatgtcgccaatggctgtgttccaggagatagatgttctgggtgtgttcacccctctgggacctgcgtggctctagattcggtagggggtcccacaagtgtgtgtacacccctctggtggaacctctcctggtctgagtgttgagaaccatctctctcgccctataatagtatgcgccccattgtgtgtgtggcgtctcctgggcggtgagacccccaccagggagggggcgcaccatgttgagacccacctcactctgtgtgtgctttgtggcgcgccctaatggggtgtgtcccccatgtgtgtgttgtgtcagactgcagacagacatgtggggtgtcccaccaacgagagaacgcgggtgtttccccccccgaagtggcgccaccagtattcccaagatattggcacacgagccctcgtgtgggggaaacccccccgaggaaaaaggactccctctcctctgcgctctataaaccctcccccctgtggaccacttctgttccttcgtgaaaaaatgccccccagcggtttcaaacacaccctctcaccactactcaaaccgcgcggggaactcttcacacaccgcccaaaaagacaacgacgagaattttccgtcttcaacacacgcagcttctccacgcacccccgcggtctggccggcggagcggccccttccgtgggggacggcggcgcggggcgcgcaatggttgtctcgcccctatggtgccgccccgttgggatgagcttcttcttcgcccccgcgacatagcagggacacaccacccggcccttgctcgcgtcgcccacaacactgttctggggcgggggcccgcctttacgcggcgcgccggtcgctcagaaggcggccttgctgttttccccccatcacatggggcgtgccgcactctttggcagtggcccccgacacgggtctcgt

SEQ ID NO: 573118 - DNA, 1961 bp, Homo sapiens
  misc_feature (1961)..(1961): n is a, c, g, or t
caagatcctgtctctccaaaaaaaaaaaaaaaaaaaaaaaaaattttacatttttggagttccagaggaccctcttattactctggatttcattttcagaggggttagtataaaaaattatatttgtataaagataatgtatattttttaataaattcaggctggatagggtacacaggaaaaagggggaccaaaaagagaaatttgtctaattattattccccggtggcccttacacacattgcattaggcctcaccaccagtatattacacgttattccacacacaacacaagacggtgggatacacaattgtggtgttaccaattacacatataaacgccctcacatgtggacacacacatatcattatattacacccacagaaggtctcccatctagtattaacacatgtgaaagtattttcaacctcgtgggggtgtgtcggtgaacaccatatgtgtgtgagtggggggatatataagaaacacaagtatgttttatgagatgaagatatatcttacacaatatatttatggggaatatactatatacacaaagacaataatacagtgtgttctacaatgtgcgccgtatatataaagagaattgtacttctataaatgagcattctacacacgctgtgcggtgtcagatatgccacacatattatagtctgtctccgcctaataaaaatgctccccacactggtgtggggcgaacacagcaccatcttatgatattacaacgagacagaccaaaaagacatatgcaggtgtacacaacgagcggggggggggaacacaatctggggtcgacaagagtgataaaaacacaactccgagtaacgacaaaacacggcgggcggggcggtgaacggaggaaacaacataccaccacgcagactcatcatcacatcataacaggggaacaacccacagcaggggggattagccataagaacgcccgcaaagaagatcgatcgacgtcacaaatcactgacgggcgtccaattataacaaacgagggcgaagtacacaggtgggcaacccacccattaacgacgacacgacagcaactcactcatcacgagagcacacctaatcaagaggcggataaggaggcagccaccaccgaactagatagtgtggtatatacagattcgccgcattgatatagtgggatggagcatcccacagacgtgtgagatagaatgaatagacacagcaatagccgcaccagactagtgggtgtgacgaaaaacaagcgtgcggaaacaacaacaggagagggagactacaccggtcaggtgcccccacttagtggatagaacactcatgacgacatagacacgaggaacacaaacaagcggggcgaccgcaccagcaagccaccaccacagagcaagggtgtctcaccagtggaaccaagcgagcacaaccagtgcgaaagcacaagactgttgagcggacaacaccaccagtatgttataaccaggggagacccagccaagaaagctgactagcccaatgtaaccagaacaaacggctcacatatgaggacacacactagtagatagatagtggacgcacaccatacgaaacacgggagcggacgcctccaacaaatacaaacttacgcagaagccaaacgcggcggcccaccacgggtgagtccgtacggcaggagaaaagcatcggaatccaaccaacccagcggcagaacgacaacaaccgcaggggtaacaaacgagcgaacggcccggcccatccacaagagagacagtagagggagcacaccaaggaggccaaaacaaaccaaagcacacgaagaggcaaatagcaggactaaccataagataacccagtcacgtggggaacaacaaggcacgcggccgccactcgctcaccaatcagagaacgacacacgaaataatgaaatatgataatacaaaatgaaggn

SEQ ID NO: 573119 - DNA, 279 bp, Homo sapiens
ttccttctttcagtagttttttctccctttctgatagtccaagattccttatttaatcatttcctttacattttaagaacttcctttagccattctttagagtagttatgtgggtgacagattctctaagtgttccttcatctgagaatgtctagatctcccctccatttctgaagtatacttttgctggatattgaattttggttagacagttcttttctttcagctctagcaacatgtgccacttctttctggcctatagtagcgattagggttagt

SEQ ID NO: 573120 - DNA, 116 bp, Homo sapiens
gctgccggaggcgtataatagaaatgacatgagggcagtccgcccctccccggcccagctagcccagtgagttcgtggggtagaggtgtaaaagctttcccccctgtcgtcgtctt

SEQ ID NO: 573121 - DNA, 383 bp, Homo sapiens
cccctggcttgctcaggtctgctgcctgcgcaggtctctgtggcctaaaaaggctgttcttttttatttttttggaacagagtctcgtactgttgcccagcctggagtgcaggggtgcaatctcggctcactgcaacctctgccccctgggttcaagcaattctgccccaacctcctgagtagctgggtttacaggcacaggccaccatgctcggctaatttttgtatttttagtagagacagggtttcaccttattggccaggctggtctcgaactcctgacctcaagtgatccacccgcctcggcctcccaaagtgctgggattacaggcgtgagccactgcacccggcctcaaaggctgggagggaatgcagtgactctg

SEQ ID NO: 573122 - DNA, 185 bp, Homo sapiens
acaacctagggtcagcttttgcatgtggtaagccatttaccaagatagttgtaggtaaagaagggcagatttattagagaaattagtgaaaatatgttagcagtagagcagctcagcagagaaggggctacctgcaaagaggcaagggctggcaggaaagttttatagagagtcctgcatgaagg

SEQ ID NO: 573123 - DNA, 441 bp, Homo sapiens
  misc_feature (33)..(33): n is a, c, g, or t
  misc_feature (41)..(41): n is a, c, g, or t
  misc_feature (57)..(57): n is a, c, g, or t
  misc_feature (78)..(78): n is a, c, g, or t
  misc_feature (90)..(90): n is a, c, g, or t
  misc_feature (128)..(128): n is a, c, g, or t
  misc_feature (160)..(160): n is a, c, g, or t
  misc_feature (193)..(193): n is a, c, g, or t
  misc_feature (392)..(392): n is a, c, g, or t
gttcttggatctcatacaggaaggaattcaagncgagtcgnaaagtacagtgcaaanagagtttattgaaagctactntgggccagcatnatggcttgggcctgtggtctaagcactttgggaggccnaggtgggaggatcacttgaggtcaggagtttnagaccagcctgggcaatatggcgaaaccccatntcttccaaaaataacaaaaattagccgggtgtggtggcctgcacctgtagtcccaggtactcgggaggctggatgggacagtcgcttgaacccgggaggcagaggttgcagcccagctgaggacacgccactgcactgcagcttgggtaacagagtgagaccccatctcaaaaaacaaaaacaaaacaaacaaacaagncagagttcaagaccaacgtggccaacacagtgagaccctgtctctattt

SEQ ID NO: 573124 - DNA, 174 bp, Homo sapiens
  misc_feature (3)..(3): n is a, c, g, or t
ggnagagagaactggcaagtggttacttcctccaattcactctaataggctctcagtaactcggacaccgtgattccattggaaataagtgtagccatgaccagctaatccttccccttaatcatctagggaaacccgaaagacatctcatgcaacaaaggactgctctatggg

SEQ ID NO: 573125 - DNA, 236 bp, Homo sapiens
aggttggaagaatagacaaaagtggagctagccgttatctagcacccatgatgatacctacctatgtgcaaagaaaagtagaagttcgtgggattgtgacaaacgtaagtattagtaggaggggatccttgagctccagcaggatccttgagctccagcaggatccttgagctccagcaggatccttgagctccagcaggatccttgagctccagcaggatccttgagctccagca

SEQ ID NO: 573126 - DNA, 715 bp, Homo sapiens
  misc_feature (4)..(4): n is a, c, g, or t
  misc_feature (98)..(98): n is a, c, g, or t
  misc_feature (162)..(162): n is a, c, g, or t
  misc_feature (243)..(243): n is a, c, g, or t
  misc_feature (249)..(249): n is a, c, g, or t
  misc_feature (251)..(251): n is a, c, g, or t
  misc_feature (261)..(261): n is a, c, g, or t
  misc_feature (278)..(278): n is a, c, g, or t
  misc_feature (283)..(283): n is a, c, g, or t
  misc_feature (299)..(300): n is a, c, g, or t
  misc_feature (303)..(304): n is a, c, g, or t
  misc_feature (316)..(316): n is a, c, g, or t
  misc_feature (319)..(319): n is a, c, g, or t
  misc_feature (324)..(324): n is a, c, g, or t
  misc_feature (331)..(331): n is a, c, g, or t
  misc_feature (343)..(346): n is a, c, g, or t
  misc_feature (354)..(354): n is a, c, g, or t
  misc_feature (358)..(358): n is a, c, g, or t
  misc_feature (361)..(361): n is a, c, g, or t
  misc_feature (367)..(368): n is a, c, g, or t
  misc_feature (375)..(375): n is a, c, g, or t
  misc_feature (391)..(391): n is a, c, g, or t
  misc_feature (448)..(448): n is a, c, g, or t
  misc_feature (484)..(484): n is a, c, g, or t
  misc_feature (500)..(500): n is a, c, g, or t
  misc_feature (695)..(695): n is a, c, g, or t
  misc_feature (707)..(709): n is a, c, g, or t
  misc_feature (711)..(711): n is a, c, g, or t
cgcnccttcaaaacagtcttaattaactttcatattggcagattaaactagcagagcaggttcaagggaaattaaatgatatggaccctaatttgtancattctgagttgattgtgtggtttattcattctggaaacatgttgaaactaacagtcagccacngcttttgataagtgatattgattaggttgaatcttcttgtaaatagtatttaccagttagcaaagtctgtgttttcagaanaacagngngcacagaggngttcaaaaaagtggaantgagncccacccggtaagagnngcnnaaacttgacacngtngacanttgggcnggaaaaaacccnnnngggggggnctgngcngggcanngcagganggggagcagcgccccncccatgtgacccccacagttatgccggatgttgccagatgcccctaggggacagagncaacccccaactgaggaccactgtcctacagagtcnggaaatattgtagggngaaaaaaataacaacaacaaaggcctgtgttaatgttaaatagatgagattatggaatgtgtatattaatgttaaaaattgtaccttgatcaatgtactttttataaacttgccatagatatctcagatttgaaacctcaagacagatttattattcttaaatgctgtatgataatgaagaaaaataaaaatttntttcttgcaaannnanaaaa

SEQ ID NO: 573127 - DNA, 465 bp, Homo sapiens
  misc_feature (5)..(5): n is a, c, g, or t
  misc_feature (14)..(14): n is a, c, g, or t
  misc_feature (32)..(32): n is a, c, g, or t
  misc_feature (47)..(47): n is a, c, g, or t
  misc_feature (94)..(94): n is a, c, g, or t
  misc_feature (126)..(126): n is a, c, g, or t
  misc_feature (198)..(198): n is a, c, g, or t
  misc_feature (234)..(234): n is a, c, g, or t
  misc_feature (250)..(250): n is a, c, g, or t
  misc_feature (445)..(445): n is a, c, g, or t
  misc_feature (457)..(459): n is a, c, g, or t
  misc_feature (461)..(461): n is a, c, g, or t
cactnggtaaaaanttccccttaaaaacttgnaccactgttgaacanttggggccctgggataaaaaaccccccctgtggtgggggtcctgtgncctgtgccattggccaggatgggtgaagccanccgtccccctccccatgtgaacaccccccacagttatgccggatgttgccagatgcccctaggggacagagncaacccccaactgaggaccactgtcctacagagtcnggaaatattgtagggngaaaaaaataacaacaacaaaggcctgtgttaatgttaaatagatgagattatggaatgtgtatattaatgttaaaaattgtaccttgatcaatgtactttttataaacttgccatagatatctcagatttgaaacctcaagacagatttattattcttaaatgctgtatgataatgaagaaaaataaaaatttntttcttgcaaannnanaaaa

SEQ ID NO: 573128 - DNA, 1161 bp, Homo sapiens
agcggagttgcattcctgcattgcaggcccgtgagaacactaaccgcctcctcgagaagcccaggtccagagccgaatccgtgcactgacccccccaggccatgcgcacagcctatctccccagcgctagcaactggcactggataccactgcaccgactatgcgcgaatggaccctcggcaggagcactgcaggcgaagggctgaccaggttggctgatgacgtcgctggaaagcgcccgatcggtatgcttgcaacatgagttgaagagcagtacatcgaactcctaggtatcaggcactttggttactgttggcatgaatcgacggagtaagcaagcgtggtaagcggcagttgacggcaagggatgtgcccccataattcagtttacggacctgtgaagagtatagcagtaacagaggatatgtttagaacggaacctaggtgaaaaaaattcttgccggcgactttggtggtggtgttccctgttaacccgacgcttaaactcaacgtagaatgacttcatctgactagaacgctcttggtggccactccaaatcgagcgaacgacactttggtcgtgtcctagcgcaaagcgcttgcttccgttgtatgtgaggtaccggaaactgggagcagccgaaatcgcgcaccatgcaaatttgggccgagcctttctattcaccgccagcgttgaactttattgatgtcccgtatgaatatcgaaacgtaagcattgcacataaaccttgagaagtcacggatagacgccgagcgtgttcattcaggtgaaaccatctcggtcctgcaatttgcgccttggactattggtggccattgccagcatccgattaccgcaagagaattcggcgccaggaatttccgaccatggatttccctggcactactcgcgggtgatgttcccaaaacaaattaaagccaataccattcgacttgaggggctaaagctcaacggttgcgaactaccagagtgcctggggacacgtgggtaatacgcctggtgcccaaccctgtgttcatccttccaaaatgtctggttggtcgcaacgaactaggcttgccttcattgccttggctccatggagtattatacgtacgtaagggcaggcaccatcattaacaccacttcaggtccccctc

SEQ ID NO: 573129 - DNA, 357 bp, Homo sapiens
  misc_feature (83)..(83): n is a, c, g, or t
  misc_feature (135)..(135): n is a, c, g, or t
  misc_feature (155)..(155): n is a, c, g, or t
  misc_feature (195)..(195): n is a, c, g, or t
  misc_feature (222)..(222): n is a, c, g, or t
  misc_feature (306)..(306): n is a, c, g, or t
gtctgtggggaagcacgggagaaatccacgtaacctttgctttctttttaagggaagcggttccgcgtgaacttggaaccctnagctccgggtgttctcggcagaagggcagctggaagggacacagtggggcangctttggggttgctccctgntctgcccgaggccggggacgcaaggcagccacgccttcgngggcttcattctgtagcattgcagcgntctcttcacgctctaacaatcttcgcttttcctcacttacgtggtgtgaactgtccgctctgcttcattttaattttaagccanggtccctctgaccggtgcccttaattaatgctgtaaggtggctggtggtct

SEQ ID NO: 573130 - DNA, 680 bp, Homo sapiens
taaggtgggacgggaagtaaaatttatggggggagtattaaaaggggggcagcacttgggaagccctcatgattgcgggcccgccattggtccagagggcccgagggggatgtcttgaccccacagccatcggggatgagccgcttttcagccaccaggtcttcaaattcatcagcatggaactgggtgaagccccacttcttggagatgtgggatcttctggggggccaggaaacttgaactgggccctgcgcaggcctcaatcacatgctcctggtctggcagctgggtcgcggatgggacattgataactgggccaatggtgaacccgggccacaggtgcccgtggggcttccaaaggcacctcgaatgcctgttgggagccttgtcagccccagcacaggacaacattctgggtgatgcggatgacgtggaaggggtggaagccgacccggatatggaagccatcttggccaacaacttttaccaggtacttattgggcacaaatctcgggcagccctccagggctccagaggacagcgtgcctcaatatcactctagaccccatgtgtggccacaaaggggaaacatcatccacgtttggcctttttccgccccaggtcaaaacggcgactctgggcctcggtaccctcggacaaagcgaaatggggtacggacg

SEQ ID NO: 573131 - DNA, 356 bp, Homo sapiens
  misc_feature (124)..(124): n is a, c, g, or t
  misc_feature (204)..(204): n is a, c, g, or t
  misc_feature (207)..(207): n is a, c, g, or t
  misc_feature (313)..(313): n is a, c, g, or t
  misc_feature (345)..(346): n is a, c, g, or t
  misc_feature (356)..(356): n is a, c, g, or t
ggggaagccccatattaaaccatcaaatctcatgagaactcactcactatcatgtgaacagcatgagggcaactgcctccatgattaaatgacctcttacctcctactgggttcctcccacaanacgtggggattatgggaactacaattcaagatgagatttgggtagggacacagccaaaccataccagatggggacactanggnctcttaataaactgatgggaaagctgaaaagtggctgggtacggtggctcatgcctgtaatctcagcactttgagaggcgctttgagctcaagagtttgagaccancctgggcaacatggcaaaaccccgtctctacnnaaaaaattan

SEQ ID NO: 573132 - DNA, 375 bp, Homo sapiens
cagatggtctacggagggaaagtcatgatgtgaataacaaaacaattaagcttgatggaagaaggcttttcctagtgcccatactttgggaatcccactctgtgtggtccgaatggacaacacctgtcgtgtcttgagccagcgagagatgcagtggaagtgaaaagcatggttacggactccccatgcgacagtacactctgctgaagtagcggacgccgggttagcttgacattcgtatgcaaagatcacataatgtggttcctgcgagatggcgcagttgtcaaccacaatatcccagggccagagggctactgcattccactttttcacttcaaagcgcttctggcccgcgccgccgttaggccgatctga

SEQ ID NO: 573133 - DNA, 838 bp, Homo sapiens
gtataacacctaatcctgacttccctaataccccgcatccttaccaccctcgttaaccctaagaaaaagaaatcatacgccccattatgtaaaatccatgtcgcatccacctgttatatcagtgctcttccccacagaatattcatgtgcctagaccaatgaagttattatctcgaatctgacactgagccacaacccaaaataccagtcctccctaagcgttcaaggctagacgacttctccataatattcatcccggtggcattgtgcgtgtacatggtccatcatagaatactcactggattataccaaacccagctacgcaaaatcttagcatactgcctcaattacccgacagttaggatgaataatgagcgagttctaccgtacaaccctaacatgaaccattcttaatttaagctatctatattatcctaactactaccgcattcctactactcaagtgtaaactccagcaccacgagcctactactatctcgcacctgaaacaagctaacatgactagcacaccttaattccatccaccgctcctctccctaggaggccctgcccccgctaaccggctttttgcccaaatgggtcattatcgaagaatgtcaggaaataaacaatagcctcatcatacccgcacatcatagcaacatcatcctccttagctctagttgtacctacgcctaatctatccacctcaatgatatactccccatatgtagcaacgttacattttacacatgacaggttgaaccatacaaaacccactcgttccttcccaaatcatgcctgaacacgtgggtctaacatatttcccttgtatata

SEQ ID NO: 573134 - DNA, 393 bp, Homo sapiens
cagtacaatgatgatcaagaccattgatcatacagagtgcaaggactcggtccagatcgaagcctccatccggacctagctgatcgaccttaaacatgagtgccatcatacgcatgagtatgacgagagccgtcctgtcatctgtcactctatatgctgctacgaggactacaacttagctgctgacaccatatgtagcgcaacctaacttgcgccaaaccctcgatgccattgccatggctatacttgacagtgatcgatagtttacactactggcccacacagcaactaatggaaagctttctggttgaacaaagcttttgctggacccccaaggagactttcgtctccggggcctccaactataaggccagaaccccgtcaacctccgcg

SEQ ID NO: 573135 - DNA, 114 bp, Homo sapiens
tcataggttcgcaggtaagagtgcttactagaagtgtgaaaacgtatgcttgtgattaagtgcgacagcaatatctaggatagtcagtagaattagaatagtgaagatagataa

SEQ ID NO: 573136 - DNA, 933 bp, Homo sapiens
ggccggagccaacatatctccgagtctgggttggcctggcggccgtggagtttgtgacatacgaggtgaaacacccatcgagatcacattaccgcttcaacgtccagactggtagcgccatgccttggcctgtagggattcgatatctgacagaccattacgacaccgaatccatagaccatgcagaggaccagtgaacctcacaagcctgcagcgacgccacacaagccacacacgtcagccaagcacatggcgccacgtcaagcacatccacaagccgggacacaagcacagcaccatgccccacgaatagcgagacaccccgggaccaagcaggactatccttagaccagaacacacgaagcccactgaacaccatcccgacaaatagtaactcagacaccccacgatgagaagagctgtgccgagttcctacccacgacactagacaaccacacacaataaaccaatccccaactaacattcaccttattcaattatccattcactatccatccatggaacaatctgctgcccagcaggccgccaatgcgatgacagacatatataccaccaggagttaaaacggaccacattgagtaacacacaaacccaacagggcacggcaccccttccccgcgcgcacagacgacacgaaacgacaaggataggcgaggatagcgagacaacaaaagttaaagagacaacagaaaaagtaataaaggagaaattccatggcaaaaattacaaagggaggaacacataattagagaggaacattatccgtatgggagcgtaagagacaaacggaacacaatttccgatatttcccttgggccaattagactatgactttagcgccgcttagggagtgggaacatagataaaggaaataggacggacagaggggggttaggaggaagcaggacaata

SEQ ID NO: 573137 - DNA, 171 bp, Homo sapiens
gctgtgagtactgtgtgaggtggtctcggatgctggcaatcacagaatctagacctgggagtactgtgtgagcgtggtcttggatggtggcgatcacaacaggtgaatcttgggcaggactggattgaggctggtcttaggaggctgtgcgattgacagaaccagaagcca

SEQ ID NO: 573138 - DNA, 339 bp, Homo sapiens
aggtgaggtgatctagaggatcccagtcgacggagactctcaacaattaaacgtggttggtttaattgtgagaggtcacgttttttccattcttgctctcgagggaaagttgcagcttcctagagacttgttgaatggttgtgaccaaagtgctgatagtgatatggacagtgaagtccaggctgagttggtctcagatgggagatgagaatcttattccgaactggagtgaaggtcactcttggctgtgctttagcaaagagagtggtggcattgtgcccctgctctagagatctgtgaactctgaactcgagagtctccgtcgaactgggtaccgag

SEQ ID NO: 573139 - DNA, 309 bp, Homo sapiens
agggagccaggcagttatctgtagtaacaaacaataacatccataataatcggctccaaatggcaagagcttggttagtaactgacactttccctaatttatgttcccccttgcaacttaggaccaaccagggaaagccaaatatgcacccctaaccaagcacactggatgtcccccttttagttagcccacaggcagcttccccacaccagcagtttccaatcagggcacacctgaagccttccctttcctcagctataaagctgtcgcccttgggtcagaataaataaccattgcttttttcattta

SEQ ID NO: 573140 - DNA, 643 bp, Homo sapiens
gagagtatcccgtggcactcaccgtgtgtagttggcatctccgcgcgtacggacatccgatcccagaatccctgtcctgctggactgtacgtgttcacactcgcgtcctgcagctgtgcgaggcgctcctagcgtggaaggcatgaggttcccggtgatctgtagctgagtggacggcggcacacggtcggactatgcgctggtagaagaaggcgcgcatacgaaggctcacatccgagcccgtgcgtcgggctccatgtaaagcgtggaatttcgatgtgtgctactcaattcaggagatgagaagacaaattgaacgttccggcacaaaacttctgaaatctgatatccaatacgctgatgctcaggaacctgactgacatcacaacacttgcatgacggggactccttccagatgagttctctcaggaggtgcactgtatcatcaaattggaagcacagactgcagtttgtaattgagaggaatgtgaaggtgcacttcatgggatgcccttggtaaacggcaacgatggaattacatcaaaggtgaatttctgtcgaagtttttcccagaattatcatcttttgcggatgcagagaacagttataaaaaccactcttgtaaatttacaaacgcgagaat

SEQ ID NO: 573141 - DNA, 677 bp, Homo sapiens
ttggatgccactcggccccctgactggaggccatgtgccagccttctaggaagagccccccactgcagacatgacccgagtaacttcctgctgatgaacaaatctgcaccccacttcagacctcggtgggcattcacaccaccccccatgccaccggctccactttccccttttattaatacattcacccagataatcattaaaattaacatgtgccaggtcttaggatgtgtcttggggtgggcacagtacccggtgactcttggggatatttatttattttccctgagcctatatcttcatctgtgaaatggggataaaaatacttgttgctgtcacaattattaccatctctccagctagcaaaattactacctgaagccgttactacatcacgaaggctattgaccgagggcttcccaggtgcctcacaccttgacgagttctgttaagacagtatatcatgtgctagcgaatctttacccattgtctcgggaccagtagcgtttacccaattattaatagggccactgatgctcagcgtattgaaatgttttgagtgttatttcagagagcaaatggcaaagactggatccaaacccatcttcctggacctgaagttcatgctcccagccaccccacccctgagctgaataaagatgatttaagcataaaaa

SEQ ID NO: 573142 - DNA, 611 bp, Homo sapiens
ggacaggaaggcttcgcggaaccctacgacccacccgacgcgtaacgccacagtaccgttttatatatattactatatttctacttttcggctttattatatagttagtatagtatctactatactatatatgtactatatataatatatatatctattagaagacggaggtactagctaatgttaggccaggctggtctcgaatccccgggctcaagacagatcctacccgcctcagcctccgcgaaaagtgggactacaggcgcagcatcgccgaacccggccaatccctgttttaatctcttattccttaaaaattgcaaaagtggtgtcattttatcctgcagatggaccctccctgatacaggcaggagaaaacagagacagacacagggaggagagcactgcacgcagctgaaggcagcagattggaatgacacctactgcaagccaaggaacacggagacatagcatgggaaccaccggaagaagccagaagacaggcctggagctggcattaccctcacagccgcagaaggaaaccaacctggtgccaccttgattatcggacttctggccttcagaactgggcagagactaaatttctgatg

SEQ ID NO: 573143 - DNA, 539 bp, Homo sapiens
tggaccggtgcgacagttgacagtgagctggggttgctcagtctataagtagcatctggatgcaaataatcaccgcttgaggttttcgagcgcgggtatgtggacagctctgtgctctactctcactctcgtggctctcctttgtggactcccttgctatggtgtcctcagcttcccagcctcaaaacctggagggatcggggctccagcctctaatatagcctcctctctccccacactcaggcctaaagggagctcactcgcgcccatggtgtgaaatgtgctcccctggggagacttcccctcctagtaaatgcacaactcggttcttcagttccgagggcgaaaactggggaatcctcctcgattcctgttgctcttgtaccaccatctaatccatgagcaaatcctccaggcttatcctgacagtggcttgccccttcctctacggcgattatcctcttgtcgggatattgcaataggctcctaattatccctgctcccaccctcttctccctataaggcctgttctccactca

SEQ ID NO: 573144 - DNA, 575 bp, Homo sapiens
gtacacagtggcctgaatgcatggtatctgatgtacgaccacatgcccatatgtgcgagagaggtatggtcgatactaggagagctcctggacgttgcgcatagagcgactcgattcacaccctgcgtccatccgtagtcacgccatggggcctaggcaaaacactctgacggcatatgcctgcaccgtacttttgcgcagaacgtcttggctagacgacatggaagccttactaggtgcctgaggctgaacagagtgctgtgctcaaaatattgggtcaacttcacaagcatactcagttaacatatgaggaaactgaggctgtgtggaacacgccaatagcttatggtcaatgaaacagaccctcggagtgcgaggatcaaaagagtatctataggacgcatgtagagcgcacatattgtatcctccagcgatcgtcgccagagcattttgctcatagccaaactggagctgttcgataacgtggcgtaccgtaatgggaaactagagctggccaaagagagctgttcattgggcgtccgctgatgtgcaactagttcttggccaagttcgcc

SEQ ID NO: 573145 - DNA, 462 bp, Homo sapiens
cttttcctcctcggtaggactagtttcaaacaggccctatatcaagtctgctgctgccctctcatcagacctccgcaccctcaccccaccatcacttacactactttaatccagttccttcaaagtgatacccccacaggtaagccctcagacatcctgaatacatcatccgcagcccttggaaccttttccttcgtgacgagccacaggaatactgacacactagtaggtcacacaggctaaacgtttctcgaatgaaagtgggagtcatatcagtccatgactcttccgttctcttgagctccctcgaatcttccgcttcctccccaccgagttcagcgtgtccacactcacagctccctccagaagcatgcaagagattttaacagttcctggtctgaaccctctcaccagtcaatacatcgtctaccctgagcagaatgactccctcctaaactttag

SEQ ID NO: 573146 - DNA, 583 bp, Homo sapiens
gcagttacacaccagatttcacttccacagcaggctttatatgttctgctcgtctggtgacctagcaggtgaccctggacaaggttacttctcattatgtccggcaaggactgtaaactctgccttgctgggtcagggtcatggaggggatgaaacgtgatacacgaggaatcagccggtgcttcagagtcagcagatcctggtcaggtcccagctcagtgtgtgggaaccttggtcaccgaacgtccctgagtgaatttgttaccatcaatttaaagttgggggttaattgatagcagtccaaaccccacaggagtaccctgaggacagagtgagacgaggtttagagaagtgcttactatggcatctggcacaaggaggatcctgatcaatctaatactcatttatcattgtggtaacctgtttaagggactccgcatgcagatgaggcttgggatgtgtatgagatctatctattagcaacctcttttattggtctgtgtcgagattcccctcccaaagctgggggcagggttgggctttataaaacttgagcccctctggggactgggttctcagcaag

SEQ ID NO: 573147 - DNA, 972 bp, Homo sapiens
ttccggtcgtaaaaatcggggtgtacacccatgcttcacatgtcttgccaattggggcattatccctatgcgccttgaatccatcagtcgtacaacgtgtgactaaacctgctactgttcaaccatattcctgtgatcggttacttttcttccgtaccaaccaacgaaagtcctcccagtggtacccccactccacgtccgctctaaatgcgctcaagggaatgggccccttctgtattcgccaatcgcctcaatgcaaggcgcctacatcgccggagtcagcagtcccatggtactcagactagagtggacaacgttccttggcggtcccaccgccagacagcacgcccgctccgtggccccacgacaaccgcacggcacagggggccgtccggcaacagggtcagacgtaggacccagctacacttgtgcagtgcgacagatcccatggccatgcgtcacgtccagcgatgtaacacgtacatcaacagttacatctctgaaatctgcctctgtctcgtaatcttgctctgtcgtacacggcacttccactagtcactactactgccggtagttgtcccttgctccggacgagtgagggagggtccttcaacccccaagtcccacactcccttgtcactcagcatacgtgcagttcactgagcttacgctctctgcgtgtctttcctccagggtctgcggtccactgtgaggagggaacggacttgtctcccgaaggggaagcctcccagaccacttgtcgggtcaatggtctagtgagaggataggtcaggaatggggaccctcaccccccaagcagcaatagtgccctctggccgcacatgtgagatggccgtggtgtctgggtgtggccttaggggctccatctgcaaggggcctctcgtcggcagccacagcaagggtggaggcttcaggtctccagcttaaatgccttcggagctgcaaatctcc

SEQ ID NO: 573148 - DNA, 382 bp, Homo sapiens
  misc_feature (125)..(125): n is a, c, g, or t
  misc_feature (222)..(222): n is a, c, g, or t
  misc_feature (236)..(237): n is a, c, g, or t
  misc_feature (314)..(314): n is a, c, g, or t
  misc_feature (333)..(333): n is a, c, g, or t
ggggatttatggccgcccccagtgttccgcgtccgggggtttgtgggagttgccttgacctgctgctccgcgcccgcggccccgccttctgccctcagcagcagacgctctgtcccgcccgggcngctctgcgaggctgcggctggtgagggaaccatggggtctgtgctcgcccggtgtttggagcctcttccatcaagtggtcctggttttggaggattnggagaagaagctgnntttgttgtagttgagcctggtgcttagcaggaaattcttgacaacaaagatgtggttgctcaacatgttcattttgntggacttggaaggtctgangatgctctcatcatttgtgaaattggagatgttttcaaggcccaaaacc

SEQ ID NO: 573149 - DNA, 1346 bp, Homo sapiens
  misc_feature (204)..(204): n is a, c, g, or t
  misc_feature (237)..(237): n is a, c, g, or t
  misc_feature (709)..(709): n is a, c, g, or t
  misc_feature (1346)..(1346): n is a, c, g, or t
ggagagaactagttctcgagttccctgacttgtagttcttttacatttggccatcctaaaccccctccatgatggttcttgcatcgctaactgcgggtccagaccgtgaacaaggggctctgatcggcggtaacttgcgtggatgctgctcagcagtctgctgggtgcactcgcacaagaggttctatggtgcgagtacgaacntacgctatagggcgatgggactgcgcagcgagngtgcctcggcgatataacggtgggacagcgatgttgtctttccgtaggccacaagtattgcgtaataacacatcctgtcgcagagtaatttcgctgggggacatatacggagcacgccgcaaggttgttgtgtgaagataacgcgggagctggggagggaactagggacgccatgaaagtgtctggggcgttcgcatggatggcacgctaacctcgcgcatattaagaccccaggagaaggcgagggaggtgcgcgtggcgtatagacgccacgcaaaggacagagagctcaggctcgcccgtgtgagcccaggagaaatggctgacaaaaaagcgaggaaactctacaacgaaaagcctggtgtgacggagagacctccaatggaagcccagtgactatgtgcgaccccgtggggtcccacaacgcgttagtggggcgtcggaaactaggctttatcgtgtggcgcatccncacgaggaaaaagcagccgcgtgcccccttagtgaaacagtgttggaacgccgtaggggaagcccctggttgttggtggggattcgtgggactcgtaggggtttgccaacggggaggcagtttgtggccgtaaacacacaaaagcggcgagggagaagtgctgcgaaaagaatgcgcggaatatcgcgctcgcgacttggaaaattcgctgagcaagctggaacggcgcacaacaccctagggggctgagggggggcgttcccgggtggctccatcaagatgaaaaactccttatgaaaataccccgctcagcacgttggggagagtagcacctaccggcggcagacactttttgccccccaaggggaaattaacccccgtgggggggctgccacccacggacgtttgcaggaaccacaaattatggaaaagcgccgccaaacaccaacggcgctagtggtgcgggcaacggaaaagtggtagttgggtacaccaagagccaataggcccccaaaaggtgtgggtgggcgcgtggccacagcaaacccccaagcgccaccattgggaaagtaaaggaccccccaggcgccgaccccccgtatgtaggaaaggttgggcaaaagcgggccaacaagan

SEQ ID NO: 573150 - DNA, 624 bp, Homo sapiens
ttctagaagcgtttgttggcagcgcacggttgtcgatgtcgacgctcccgcgcggttgcaatgtggaggaaatgttggtatcgcgtctgttcacagccattgtatgacacagacacggggttgcttctatgggcatgcacgagcctttcttcgcaccccctttgttatagtacttctatgtctccccacctatactagtcttactcgacgcggtatgctctattgatagtgggcaccccggatagatgattttaggggtgatatattcatcaaatccacctatcgagggacatagtaatcgaagaccccgcttctctcggaagtgtgtgtctctgatttatcgcgatggattcgttcttcctctacgagagagtcgtttctattggtatagctctcgatagatcacctctatcgatttgtgcgccactctctcccacgagattatttcttgtcgcgcaccgcgcacgagtaacttcctcttcattataagcactcttttgtatttcctccgtctcataatgaatcctctcaatcccacattcgtattactcgacttcccaccactgacgcctaaaataaaaaatttcccacaactgtctgtatctcatcaaaagaacaagaaaa

SEQ ID NO: 573151 - DNA, 186 bp, Homo sapiens
caagtcgttcactagtatcacagtcgtttgaacattcgtttcaccaatccactataccaacatgaagttcctttccgtcctcgctttgggtggtgccgtctccgccgttgcgctccctggcgacgattggaagacatggcagtcctgcgcaaaagagacacaatatgtcaccgtcaccgtcacccc

SEQ ID NO: 573152 - DNA, 1115 bp, Homo sapiens
  misc_feature (4)..(4): n is a, c, g, or t
  misc_feature (244)..(244): n is a, c, g, or t
  misc_feature (269)..(269): n is a, c, g, or t
  misc_feature (326)..(326): n is a, c, g, or t
  misc_feature (349)..(349): n is a, c, g, or t
  misc_feature (369)..(369): n is a, c, g, or t
  misc_feature (439)..(439): n is a, c, g, or t
  misc_feature (532)..(532): n is a, c, g, or t
  misc_feature (568)..(568): n is a, c, g, or t
  misc_feature (570)..(570): n is a, c, g, or t
  misc_feature (626)..(626): n is a, c, g, or t
  misc_feature (636)..(636): n is a, c, g, or t
  misc_feature (681)..(681): n is a, c, g, or t
  misc_feature (686)..(686): n is a, c, g, or t
  misc_feature (715)..(715): n is a, c, g, or t
  misc_feature (756)..(756): n is a, c, g, or t
  misc_feature (798)..(798): n is a, c, g, or t
  misc_feature (873)..(873): n is a, c, g, or t
  misc_feature (928)..(928): n is a, c, g, or t
  misc_feature (941)..(941): n is a, c, g, or t
  misc_feature (953)..(953): n is a, c, g, or t
  misc_feature (966)..(966): n is a, c, g, or t
  misc_feature (983)..(983): n is a, c, g, or t
  misc_feature (994)..(994): n is a, c, g, or t
  misc_feature (997)..(997): n is a, c, g, or t
  misc_feature (1005)..(1005): n is a, c, g, or t
  misc_feature (1032)..(1032): n is a, c, g, or t
  misc_feature (1038)..(1038): n is a, c, g, or t
  misc_feature (1041)..(1041): n is a, c, g, or t
  misc_feature (1045)..(1045): n is a, c, g, or t
  misc_feature (1050)..(1050): n is a, c, g, or t
  misc_feature (1053)..(1053): n is a, c, g, or t
  misc_feature (1098)..(1098): n is a, c, g, or t
tagngggtaaaaccatttttattaactgaccaaagcacatcattttgttttctgatttgaggtaaaatcataaaacacagttcacaagaaaatacaatgactatttaaccacaattacaagtttgaaatctcactaggtgttcatatacttttacaaattcatacaactgtatagtctacttaagcttagtgttaaccaaaagagcaatatcaaagacctagacacttgactactacttttgcngtgggtatagttttataacaacagnataactgttaccttatgaatatactttactttaaaaaccacttgactagcgactgtnctgtttcctcgtggttcaggggngtgcatgaaggctcttaggngagcaaacacctgttcctattctgtatgtccctccctcatttcaaatgagagtgaccaattgagtaaaanaaccaaataaccattgccccaccatgaacatggggcttgggaagacagtcctacaatcttcatcatatatttaggtttttaggccagccagcnctttttttccaaagctttcttttgaatgttcagatncnattttaatcctaactatagactactgtgtttgtgagggtgtctgagtgtctatgtnagggcaaggncaacagttcagttcagaaacacagaaaatatgcttttttgcagcngagcnctgttttgagatttcattttgttactggncagcgcttaatccataccaaagtctttggaacactgcaganttgctttagaggtagataaaacagaaatcatgcagttaagtnaattgagaaaaaaaaagggatttgttgtctttacagaacatcatgactaaaagttgatcctttgctcttggtgcncatttaagatttttacctgttttggggaatccccagtcttccttgtctctcaggnaaaacacatttanattcatcctgtnctaactacagatnggagaaaaacagttttnacatgtgtatntcngcactgcngttcactttctgggtttgtggcacacnaacacntcntgcnttctnagnagttattttttttagtgtcactagtggtgttatttaaacactttngccgtgcccacacttcc

SEQ ID NO: 573153 - DNA, 382 bp, Homo sapiens
actctcatggatgtgacacaggcaagtattatgcatatttttagaaataaagtactttattagaactacagatctccactctagtggtcctatcatagaattcattatctatctatctatctatctatctatctatctatctatctatcttgagatggagtctcactttgttgcccaggctgggagtgcagtggcgtgatcttggctcactgcaacctctgcctcccgagttcaagtgattctcctgcttcagcctcccgagtagctgggattacagatgcccaccaccatacctggctaatttttgtatttttaacagagacagggtttcaccatgttggccaggctggtctcgaactcctgacctcaggtgattctcaca

SEQ ID NO: 573154 - DNA, 356 bp, Homo sapiens
  misc_feature (30)..(32): n is a, c, g, or t
gacccagaggcaaggaaagccagtagcgtnnnacctctggcctcctatgtggttcattccactttagcaaactctttgctggggctgctagctagagtcccactggggaaacgagagcttgatccctagtcctcagactccaaagctcgtgctccttcaaatacaccagtgggtctaatcccctgtgattagaggacttagacaatttcatcctacctacctgggcatgagaatatagtggagaagtggatgcctacaagaatctctggagcaaatgttaggtaaacaaaaattggaccaaagacccacttcaattgaaccaacatggtctgcatgaattagatcagattttggct

SEQ ID NO: 573155 - DNA, 870 bp, Homo sapiens
gatggctgtgaggttcggtgctggtgccgggtaagtgggagaggcagaagtgcctgaataaatataagctcagaggtaaagggcaaggtcacagctaggagtccaagcattggtgatgtgtggctcgtaatatcccaaggtgagcccgtggtagcagtcagaacgcaggacattatgggataacgatagtgtagacgaaacagtttcattctatatccgtgcactggttggcacctaacattctctcggttgatgagatcatgcgagctggaatcttctctgaagaaggttgaattgaagcttcctctgtatctgagtcttgaagactctgcaaagtgatcctgaagaatacagctgtggaattttgtccaagcttcaaatgagtttcaagggaattttcccatgtgaaaaaaggagagaacactggcatctgttgaaattcggaagttctgaaattataattacagtatttgttaaaaattgcactgaagtgtacacagataaagcaggtctttcacccagtgaacaggatgtttgctttagcagcagtgacataaaattccatgttaaataagcatatattactaccttattaaatattccttgaaaaagcagattttaatggtttaattttatgtggacatatgtgaattattcagagtacctattgtaagcatctggtttaaaattttatggtaatataaataaggttagtattaaaattggagcatccggtagggaaattctgagaaatattgggcaggggggttaagcttgaaaagttgggaaaggccccacaagttgggaggggaagggacaaagagggtgaaacggggggtgggaaggcggaaggaaaaatgggggataaaa

SEQ ID NO: 573156 - DNA, 685 bp, Homo sapiens
ggccaacacggagaggacggggaccccggatcgactacccagacagagccggtgaatgggtttgtggtgaccatggatgatgatatcgccgcgctcgtcgtcgacaacggctccggcatagtgcaatggccagggctatctgcaggtgctgacagatagccaccaccagagagtcgtcatttaccacactcccagacagatagaagagcagccacacaatgtacccaagaggctgtagactagagttggggacattgtgagtccaagaaaaggacttaccatagtagtaggagcgaccggaagagcaccaagaagcaaaggaagaagtgcatcacatcaagccacttgtaaaagttaaccaccaatacaggaagccaccgggcagctcaggttaaaccgcaaacttgtgagaacaggagcatagggaatgaacacacatcttagagcgaccccagcaccattaacgttaacaaattgaagacccttgagcgatgtctggggcatcccccggaagcgtgtagtccatctacccggaaggcactgaagttgagacaccgcatagaacaccccccacgtggaaacacacccaagaggggaccaagaaccggagggagaaaaaggaattggaacaccctaaggaagtccatggattatgcagagaagcttacaaaaggtagcaccccag

SEQ ID NO: 573157 - DNA, 456 bp, Homo sapiens
  misc_feature (221)..(221): n is a, c, g, or t
ctgtttggagagaacaataacattaatagccaagatcaacatgtacctgacatcacgcgtcctgtacgccttgtgccgcctgggtgtggagaagggctatatccctgcgctcaagtgggacccgttccccttgcacactgcggtgatttgggggctcgtgctgtggctttttgagtaccaccggcccactctgcagccctccctacagtcctccatgaccntactctacgaggacagcaacgtgtggcacgacctctcagacttcctcatcttcaacaagagccacccctccaagtaacacagtccaaggtgcttcaggaactcctccgcccagacagcttccaggcagcagcccaccttccaggcagctgctcagggtatggttctgttggcataccctcgtggaggagcctgccttctcaaagtcataatcctcacactccaacttgtattaac

SEQ ID NO: 573158 - DNA, 179 bp, Homo sapiens
tgtcacgcaccagccaacttggggtgcaaaaagacatgagcgctcctcttactcgggagcaagtcagacacaggtgacagggtcaggaagatgacgctacagacaccaagtcctacgccagaccttccagccctggaaggctcatgatgtgcaggctcttgacacccaagtgcttgccc

SEQ ID NO: 573159 - DNA, 569 bp, Homo sapiens
  misc_feature (569)..(569): n is a, c, g, or t
tttttaaggttcatccgagcattttggttacaaatagggagatagttggtattaagattaggattgctgtgaagtttattacggatgctacttgtccaatgatggaaaaaggggagcttactggctgtcctccgattcaggttagaatgagggggtctgtggctaggagtcaataaagcgattggcttagtgggcgaaaaattatgctttgttggttggatatatgggggatggggattattgcgaggatgaggatggatagttctttggcaaggacgccttatatttttgtaagggcccctcggagaattgttcacgctgataggaagagtcaatctggactcgttgtgggaggggactttaaaggtttgctatgtctaagttattttttaaacaacacaaaattaaagattaccccaaattcttattagaaaaagagacccactacctggatgcccttaggatcctccgccgtttctaaaacttttttttcccttagaaaaaaaggagaaaatctggctttttttccggtctggggaacaatctaaggcgttctctcatttagaggn

SEQ ID NO: 573160 - DNA, 655 bp, Homo sapiens
gttcacagtgaggagggattccctgactttgacacacatggtcaccttgggacaaacagccttgtggtatgagagaaaaacccaattcgtttttatgtcctctgctcccttctccatctttcagcatagactataatcccttgaagcccagacatctgtctgggacctgacccctagtcattggttaccagtgtgtcaggcaatctggacttcccagtagatgccactgagatggagaccgtgtcagaaagtagcagtggttccatttctagattgtggatcttccgtataaattctgccattttcatttcacttcctgaaagtcagggtacgggatgagagaagttgataaacaacgatgctaaatgtgaaatgtccagcctcactctaaacttgccctgttcagagcatcagatgaacacttcattgggttctataggtggctttctgattgctggtagatccattgaagcacggagtcctgagagtcgttgtatactgtgtaacgagtggtctggccatgtcctgctgaaataccatgattgtttatggcaaaggtctcttttacaaaagctggatacaggatggttgggaagaaagccaaacccatgggtaaagtaaagggggggcgcaaaaagattcccccggaagggcc

SEQ ID NO: 573161 - DNA, 272 bp, Homo sapiens
tgagacagagtctcgctctgtcacccatgctagagtgcagtggtgtgatctcagcccactgcaacctccatctcatgggcccaggcgatcctcccgcctcagcctcccaagcagctgagattaccatgccaccatgcccagcctggccaacatggctaaaaccccctttactaaaaattcaaaaacttgttgggtgtggtggtggatgccctttacccccccttctcctgaggttgtggcccggactttctcccttgcccttgacgtgtctg

SEQ ID NO: 573162 - DNA, 266 bp, Homo sapiens
aagatcctgctctgggaggtcccggcagtgcctctgtatgaacagcgttagtaacagtgaccttgacgatggggcattcgctgttctacctcaggcatcaactctctaaagcactgagccatgacgaggccaggggaatggaggaccatcccgcacgcactctgtacccagaggtccaggtcatgccgtaagacacaccccctctgcacctcagttcctgatttataaaacaatggccattcctgttccacttgcttgttccgctg

SEQ ID NO: 573163 - DNA, 339 bp, Homo sapiens
tgcccatgtgccaaagacaaaacttccagacaaattctgatgccatccagtttagttcttacaaactgcatattaaaaaaaaaaaaaaaaatcttcaaggtcctaaaggtgatgtgctcagggcgaagcatataagagcgggacgtgacatttatgtccttgaaaagcctcgattatccaggtcctttacctggtaatatcctgaccagccaatggttctgggggtatatgcttcctccaggacatcaagctcaaagtctttattcccaatctcagcatttgggacagggtcaaagccgggaggacgctgggattctggtgtaaacctggtccaaaggc

SEQ ID NO: 573164 - DNA, 140 bp, Homo sapiens
agacacgatatttattttgaagttccaaatgacattagcagaattgggattataatgaaaacatgacctgagactggggtgtttctggggttctaaaacactttactagatcatcctccccctacagtagacgcttatgc

SEQ ID NO: 573165 - DNA, 252 bp, Homo sapiens
acaggtcgacagcttcctgatcttttacacaccacagctcagatgagaggattctttcccagggagagcaagagaatcaggaaatgaggctggagaaagagaggggctaggtcatggagggtctcacattagagtgtggaaacttcacacgagtggtcccaccttgggcatcccacgtaactactctctgtcccagcttccctactggtgaaataaagggctgatgtagggatggactgagatagtgtgtgc

SEQ ID NO: 573166 - DNA, 224 bp, Homo sapiens
aggaggaagaagaagaagaggaagatcaggactattacctaggaggcttgagacctgagcctgagaattgatgtctaccgagaacgaagaaatactggaagcatacgatgaggactaagataaagagctgtatcctgacattcacccgcctccttccttgcctccttccagggcagttcgacctgcccccctagtgccgaaagagctttacacgtcgcatcttt

SEQ ID NO: 573167 - DNA, 454 bp, Homo sapiens
tgagggaagaaagatgcatagggaatgttgcatgtggttatttctatttctctcaagtgcacattatccatcaagaagatttaaatcattttgaaatattaatataatgatcaaaaattaacttttatacatgttattaggcagaacccacagaaaacaataaagcacgagagaaaagaggatggcagtttacccaggaaacataggttgtgcaaagctttgcaatgatactttcaattcagagcaatgaagaacagaatgctgttttcccataatgagggctttcaattttcattagctttccaggactccaaaaattttttcaagacccggtagggttcagcaaaggccattgccaattttgaaaaggtttgccaggggaaaataaaggttcagttacccaaattacgttgttgacccagggccagaaataaaatctgatggcccaactcca

SEQ ID NO: 573168 - DNA, 578 bp, Homo sapiens
  misc_feature (386)..(386): n is a, c, g, or t
tgaataaggattacagaatgacagaggaacagtgcataacaatttaagacccaaagaattggtgtcaggctggtgcagcggtaaatattgttcagtgcactggattctgttccagagaaggacaatctgtgtggttcccaaggtaatcatttcccacccctcaattccattcctttccttttttctcctggtctctctctctgttcgctggcttctccacactctttcactcccatatcaaagccttcaaactctgagtaacagcccttatgatgtcattagactcccctttgctgacagcacattgggctgaagaagctatgcactcctgagttcatccctttggatggatcacaagacaactcttgtgtgacatcactttgaanactgggggggaacaagtttatttctctgaagtgcgcacaaaaaccacaactaacaaaactcacaaattcctttcagtcaaaaaatggaaactggcacgtgtaaaaattccattttagctaaggtcgcgaaagtaaaatataccaggagactgaagtaatatttaaacctattagtttacccataattgctca

SEQ ID NO: 573169 - DNA, 444 bp, Homo sapiens
  misc_feature (251)..(251): n is a, c, g, or t
  misc_feature (329)..(329): n is a, c, g, or t
aaattggggaacacattgggggcgggggttcccttggttgccccgcggtgggaggagtgggcctttaaaagtgtggtatcctctagggggcggggggggggttttgcccccagggatggtgtggttttgtgggtcggggggttccaggatttcccccccggaaggttccttatttggggtttcgggggggggcccagggaggggccccccccttttgttgggccaagataatgggggggggcacccagggnttggaaaaagggggccccttttttctgaggggtggggccaggggcccttcgggggggctttttaaaaaaaaacctttnccgggtggggggggaaacccccccaggttaaggggttgggggtttgggggggggggggggggcccggtttttgggggggggggggggcccccccccgggataaattccggggtcc

SEQ ID NO: 573170 - DNA, 561 bp, Homo sapiens
  misc_feature (168)..(168): n is a, c, g, or t
  misc_feature (203)..(203): n is a, c, g, or t
  misc_feature (212)..(212): n is a, c, g, or t
  misc_feature (216)..(216): n is a, c, g, or t
  misc_feature (224)..(224): n is a, c, g, or t
  misc_feature (231)..(231): n is a, c, g, or t
  misc_feature (236)..(237): n is a, c, g, or t
  misc_feature (244)..(244): n is a, c, g, or t
  misc_feature (247)..(247): n is a, c, g, or t
  misc_feature (264)..(264): n is a, c, g, or t
  misc_feature (276)..(276): n is a, c, g, or t
  misc_feature (282)..(282): n is a, c, g, or t
  misc_feature (296)..(296): n is a, c, g, or t
  misc_feature (305)..(305): n is a, c, g, or t
  misc_feature (307)..(307): n is a, c, g, or t
  misc_feature (318)..(318): n is a, c, g, or t
  misc_feature (329)..(329): n is a, c, g, or t
  misc_feature (332)..(332): n is a, c, g, or t
  misc_feature (334)..(334): n is a, c, g, or t
  misc_feature (340)..(340): n is a, c, g, or t
  misc_feature (343)..(343): n is a, c, g, or t
  misc_feature (346)..(346): n is a, c, g, or t
  misc_feature (350)..(351): n is a, c, g, or t
  misc_feature (425)..(425): n is a, c, g, or t
  misc_feature (452)..(452): n is a, c, g, or t
  misc_feature (460)..(460): n is a, c, g, or t
gaattccgatacctgagaatgaggcctggaacgaattctccctgacgacctgctgccaacgtcatgctctactggacaacaggcaccatcatctcctcccagcattctacaaggagaacctgggacagggctgatgacccagaagcatgagcggatgaaggtctatgntgccaatggcttctctgcctttccttttaatgtantgcaccgcntganaagtgggngaggttnaaganncaaagtnatntcctattcctacatggntcgtggggccantttgcngcctttgaggagcnggagtgctngnccaggacatcngcagttctgtnggngngggagnggnaangatnnacccttttccccccgcctgccacctccccccacaagtgccctccaggctttttttggggaagataccccttttntgaggaatgagtttgcctccgtccccngcccatgntgggagcccacgctcaccccctcacccctccaagctcactccccaacccccaactccgtgtggtaagcaacatggctttgatgataaacgactttactcta

SEQ ID NO: 573171 - DNA, 163 bp, Homo sapiens
gctatgatcatactagacaatctttttaaccatttatcatgccaacaatcacttcttaaaaatcaatgttgtggatatatatcattatatatttgtctaaacccttagaatgtacaacacgaatagtgaaccctaaggtaaaccggtaatatctatgctgctg

SEQ ID NO: 573172 - DNA, 861 bp, Homo sapiens
  misc_feature (109)..(109): n is a, c, g, or t
  misc_feature (128)..(128): n is a, c, g, or t
  misc_feature (130)..(130): n is a, c, g, or t
  misc_feature (146)..(146): n is a, c, g, or t
  misc_feature (187)..(187): n is a, c, g, or t
  misc_feature (190)..(190): n is a, c, g, or t
  misc_feature (196)..(196): n is a, c, g, or t
  misc_feature (198)..(198): n is a, c, g, or t
  misc_feature (205)..(205): n is a, c, g, or t
  misc_feature (212)..(212): n is a, c, g, or t
  misc_feature (232)..(232): n is a, c, g, or t
  misc_feature (263)..(263): n is a, c, g, or t
  misc_feature (269)..(269): n is a, c, g, or t
  misc_feature (277)..(277): n is a, c, g, or t
  misc_feature (286)..(286): n is a, c, g, or t
  misc_feature (292)..(292): n is a, c, g, or t
  misc_feature (307)..(308): n is a, c, g, or t
  misc_feature (327)..(327): n is a, c, g, or t
  misc_feature (329)..(329): n is a, c, g, or t
  misc_feature (335)..(335): n is a, c, g, or t
  misc_feature (340)..(340): n is a, c, g, or t
  misc_feature (352)..(352): n is a, c, g, or t
  misc_feature (356)..(356): n is a, c, g, or t
  misc_feature (360)..(360): n is a, c, g, or t
  misc_feature (387)..(387): n is a, c, g, or t
  misc_feature (391)..(391): n is a, c, g, or t
  misc_feature (400)..(400): n is a, c, g, or t
  misc_feature (412)..(412): n is a, c, g, or t
  misc_feature (430)..(430): n is a, c, g, or t
  misc_feature (432)..(432): n is a, c, g, or t
  misc_feature (440)..(440): n is a, c, g, or t
  misc_feature (445)..(446): n is a, c, g, or t
  misc_feature (457)..(457): n is a, c, g, or t
  misc_feature (496)..(496): n is a, c, g, or t
  misc_feature (498)..(498): n is a, c, g, or t
  misc_feature (522)..(522): n is a, c, g, or t
  misc_feature (529)..(529): n is a, c, g, or t
  misc_feature (606)..(607): n is a, c, g, or t
  misc_feature (618)..(618): n is a, c, g, or t
  misc_feature (620)..(620): n is a, c, g, or t
  misc_feature (835)..(835): n is a, c, g, or t
gggccaggggtctccggacagcatgagcgtgggcttcatcggcgctggccagctggcttttgccctggccaagggcttcacagcagcaggcgtcttggctgcccacaanataatggctagctccccananatggacctggccacantttctgctctcaggaagatgggggtgaagttgacaccccanaanaaggananggtgcancacagtnatgtgctcttcctggctgtnaagccacacatcatccccttcatcctggatnaaatangcgccganattgagganaaaaanattgtggtgtcctgnncggccggcgtcaccatcancnccattnaaaanaagctgtcaacntttnggcnagcccccagggtcatccgctgcatgancaanactccagtngtggtgcggganggggccaccgtgtatgcnanaggcacgnacgcnnaggtggaggangggaggctcatggagcagctgctgagcagcgtgggcttntncacggaggtggaaaaagacctgantaaagcngtcacggggctcagtggcagcagcaccgcctacacattcacagccctggatgccctggctgatgggggtgtgaagannggacttccaangngcctggcagtccgcctcggggcccaggccctcctgggagctgcagtccatggctgaccaggagcaggtgtcaccagccgccatcaagaagaccatcctggacaaggtgaagctggactcccctgcagggaccgctctgtcgccttctggccacaccaagctgctcccccgcagcctggccccagcggcaaggattgacacgtcctgcctgaccancatcctgccaccaccttctcttctct

SEQ ID NO: 573173 - DNA, 1498 bp, Homo sapiens
  misc_feature (330)..(330): n is a, c, g, or t
  misc_feature (380)..(380): n is a, c, g, or t
tatgggcattggtttcttttttggaaaatatttgtcttttgtggtttataaacacaagcatttggtggcatgtggcaaaaactttgactgtagttcacattctgtgtatattctgtgcgtggaatatactttattataaatgtggattagagataactctccttataggccagtgtgttcagcattgtgggtgtcattcccagagacctatacactttggtgtctccacaatttcaagagtgtatgaaagaagagtctccacgagttgagaacagaagtgtggtgtgtggtcacttcactctccgagaacaagcgacagctgtgtccaantgtgtgcggtgagagcaaaatatctctcgagagtctgtggggttacgcgncctgtgatatctcccgagatttgagccccgaggtgtaagaagtgtgtccgcggttcacagagacaccccgagacaagagaacacgagcgttagtgtgagagtatagaattagtggacgtctctcgagacctctctctcccagagagtcttgtggcgtgaaactcaagtgaaaagagagctgtgtggcgcgagagaaatagcccagcgtggatctctcccgcgaatatagaattagagagacaagagtctccgagagagagaactcttctccaggcgagagagtgtgcaacaccgtgtgtaggctattctcacggggaagagggaaagaggggccaatgtggaccggtggggaacccagagacagaaaaaatcctcccgaggaggcggaacaggtgggtgtctccattctctccacggtgtgtccacaacaagggttttacgcggggaaaattttctcccgcgatatattttcttccagtgtgttacaccgcgtggtgttcaccaaattaggggcccccagaagggggagaaaaaaaaacgccacgcttatcatataccacagatgatcggttgctggtacacacatttcgggacgacactatgaaacaggctcttggcgtcggacacaccaaggttgctccaccaggggttaacccccttgtagttaggggttcgccaaaagaacccggaaagaaggaccaacacacacacggggggattcatctggaggggatctttcttttccaccccatgaaaagtaatatggccactttagttgcaacggccatcttttgggggaccttccccaaggattatttttcccaccccaacggaaacggaacaagacatcacaatggcggcccaagagaaggtatgtgggcacaccaagtgttcgccccaagagggagattttcgggagacagcaaggtttcctctagtgtgacccacaaccaagagttaacatcatgtgagcaccccagcgaccgaccaaacgaaaaaatttttcttcgggagaacaatttctccggagggaggacgaagagggcgggagacgacacaacgaatcacgacaccgatgacatgcagcaacaagaagcaacaacaaacaacatgcacaa

SEQ ID NO: 573174 - DNA, 610 bp, Homo sapiens
ggccgggcgcggtggctcacgcctgtaatcccagctctcagggaggctaagaggcgggaggatagcttgagcccaggagttcgagacctgcctgggcaatatagcgagaccccgttctccagaaaaaggacacaaaaaaacaaaaaaaaaaaaaaccaaggacacaaacaaacaaaaaaaaacaacataataagggcggtaactttccccctcaaagggccaaaaaaaaaaaacaaaaaaaaacaaatcgtggtgggcggcgcgcggcccccggcggcccacggagaaaaaacttcttcacaacacctattcgtgggtgggcggcggggggcgcccccgttgtggtgtggtgagaaaacgtgggcgcccaaaagggggtccccagagaaggaaaaatccgcggggccgagaccacaacgggcggcgggggttctccctccccaattaataaaaaaaagcgccgcggggggacacacccagggcggttgctggtagaaacaaacccgcggagagggggatgcgcgaggcgagcacgaatcgcggggcgactcatcacaccagggggggacctcccaggaggcgaacacgcaaatataaaaaatagtgctcc

SEQ ID NO: 573175 - DNA, 690 bp, Homo sapiens
cgagcagagggaaggggaagaggtcggggagcgagggcgggagcggtcgcggtcgcgatcgagcaagcaagcgggcgagaggacgccctcccctgtgcctccagtgcgccgcttccctcgccgccgccccgccagcatgcccggcgtggcccgcctgccgctgctgctcgggctgctgctgctcccgcgtcccggccggccgctggacttggccgactacacctattacctggcggaggaggacgaattcggaggcccccttcaacttaccaaggaacccctgtgccaaggcgggtgggcctttccttgtgcgcggaccttttgccccttgggaccggaaaggaaggggacccttgagtggggcccttccccagggttccaggccaagggccttggttgggaattcttcaaggaaccggggcaaccaacaaggctccgttaaggggttccttcccaattcaaaaaggccttgccaaggttccccggggaaaaaacaactttcttaacccccccaaggctttgccaaggaaggccacccagccggggcaaggccttcaaggaggggggaggccttgttggggacgaattggaggaagggtaggatcccctgtagcccgggcgggggccgggcgaacgttccctgaaccaggaggcgttgttgttggccccggattggggtcatccccctta

SEQ ID NO: 573176 - DNA, 382 bp, Homo sapiens
ccattttactctttttattctgctcattaatgatctgaaaaaaaaaaatggggaaaaggggattcccccacaaggctccaaaaaaccaaaagtgcaaatcagcccatttcactttcactgtctgaaatagggtctttaaaacccaggatccaagggtggaatgtacctatttggactcgatttgcttccggaccttttccaaagcctttttgtccaattgtccctgaccaatgatgaccagacaagccaaaatcagggccacacacacgaaagcccctttgaacttccaaaataagcgttgttccatcaaagctgagcggcagtttttgaactcatttcttttaaatgacctgcatgggattttctctacatatcctggggg

SEQ ID NO: 573177 - DNA, 268 bp, Homo sapiens
  misc_feature (3)..(3): n is a, c, g, or t
  misc_feature (11)..(12): n is a, c, g, or t
  misc_feature (30)..(31): n is a, c, g, or t
  misc_feature (36)..(36): n is a, c, g, or t
  misc_feature (53)..(53): n is a, c, g, or t
  misc_feature (81)..(81): n is a, c, g, or t
  misc_feature (106)..(106): n is a, c, g, or t
  misc_feature (162)..(162): n is a, c, g, or t
  misc_feature (182)..(182): n is a, c, g, or t
  misc_feature (246)..(246): n is a, c, g, or t
  misc_feature (257)..(257): n is a, c, g, or t
ttncaaagacnntacacgggcagagtcacnngggtntatcatcaaactagagnaagaacggggaggtagtgaacaagccgntgatgggaggaagtctttctaatgngcggggagatgttatcgattattcatcatccggggtttccaccaacgatgcttccnccccggatcctatcactgangaagatgaaaaatcagatcagtcaggcagtaagcttctcccggcaaggaatcttccgaacggtnaagctcttccngacagatttga

SEQ ID NO: 573178 - DNA, 384 bp, Homo sapiens
cgtccggctgtgctctactattcgggtagttaattcctcgagagagggacaccgaactgatctatgggagcttgttgtgcctcgctctctgcaggccattccagaggcgtatgcttcgatgcacccatggcttccacaggaacaatcaggcccatccagagacacaacaaggtggcccagttctgcagcacagaaggagcttccgtggatcaattcatgctgatggataattccaccaccgattcctacagcgagggatagaaatcactgagggtgctttacctgaaacagaaaactatgatatcacaacgcctcatctatttagcagagcttaggcatgtgagggtctatagatacttctttagacagctgaagcccactagg

SEQ ID NO: 573179 - DNA, 90 bp, Homo sapiens
tgtgcgagagtcccgcccccgtccacttactatcgttcagggagttatattgactactggggccagggaaccctggtcaccgtctcctct

SEQ ID NO: 573180 - DNA, 219 bp, Homo sapiens
agacggtccgcatcagtgtaaccagtgataacctgatctgtgtgtttaacagattattaccaagtgaaaaattcagactgattagcaattttaactaacatgctatataaaagtgtaaagtctgatgcggtgaaggcaatctagtgctatatatatacctcctcatgggtcttacttatgggcacggtgggattatgatgagtacctggaggggttaga

SEQ ID NO: 573181 - DNA, 309 bp, Homo sapiens
tcgagctcggtaccgacgctctctctgtggggcagcacagagagggggccactccatgtccgtggctgcccacacaccccaaattagctgaattctgcgtgtggcataggtgaggaaaaggaggctagatacgtgggactgtggcaatggcctcacataggaaacagggtcttcctggagatttggtgatggagatgtcaagcaggtggcctctggacgtcaccgttgccctgcatggtggccccagagcagcctctatgaatcaacctcgtttccaaaccatcagcccgcagtagctgagtgtccatg

SEQ ID NO: 573182 - DNA, 1347 bp, Homo sapiens
  misc_feature (17)..(17): n is a, c, g, or t
  misc_feature (122)..(122): n is a, c, g, or t
  misc_feature (130)..(130): n is a, c, g, or t
  misc_feature (145)..(145): n is a, c, g, or t
  misc_feature (255)..(255): n is a, c, g, or t
  misc_feature (257)..(257): n is a, c, g, or t
  misc_feature (263)..(263): n is a, c, g, or t
  misc_feature (288)..(288): n is a, c, g, or t
  misc_feature (292)..(292): n is a, c, g, or t
  misc_feature (328)..(328): n is a, c, g, or t
  misc_feature (330)..(330): n is a, c, g, or t
  misc_feature (332)..(332): n is a, c, g, or t
  misc_feature (334)..(334): n is a, c, g, or t
  misc_feature (366)..(366): n is a, c, g, or t
  misc_feature (397)..(397): n is a, c, g, or t
  misc_feature (404)..(404): n is a, c, g, or t
  misc_feature (408)..(408): n is a, c, g, or t
  misc_feature (420)..(422): n is a, c, g, or t
  misc_feature (428)..(428): n is a, c, g, or t
  misc_feature (434)..(434): n is a, c, g, or t
  misc_feature (438)..(438): n is a, c, g, or t
  misc_feature (442)..(442): n is a, c, g, or t
  misc_feature (457)..(457): n is a, c, g, or t
  misc_feature (459)..(459): n is a, c, g, or t
  misc_feature (466)..(467): n is a, c, g, or t
  misc_feature (491)..(491): n is a, c, g, or t
  misc_feature (496)..(496): n is a, c, g, or t
  misc_feature (498)..(498): n is a, c, g, or t
  misc_feature (529)..(529): n is a, c, g, or t
  misc_feature (544)..(544): n is a, c, g, or t
  misc_feature (576)..(576): n is a, c, g, or t
  misc_feature (583)..(583): n is a, c, g, or t
  misc_feature (655)..(655): n is a, c, g, or t
  misc_feature (657)..(657): n is a, c, g, or t
  misc_feature (667)..(667): n is a, c, g, or t
  misc_feature (674)..(677): n is a, c, g, or t
  misc_feature (782)..(782): n is a, c, g, or t
  misc_feature (893)..(893): n is a, c, g, or t
  misc_feature (1233)..(1233): n is a, c, g, or t
ctcgcccggccccgttngcgtctttccgctccccctggcttggcccctcgctgccggcgctctctcccgggcgctccttgctgctctcttcccgcgctctggccctgcctcccctccctgtnccgcgccntgtcgcgcgccgctntcctctctctcccgccgctctgctcccgtctccgccccgtcctgccggtcccgccccttcttctgcttcctctgggtccccccccctcccccggctcgcccttcccctgngnctgtcncccctccctccttgctctttcaagncacngatttgggttcattccatgatctgctccgtagagancnantntgcgcatgcaggagggagaggggcattctcanctctgcctgaacaggctgcagctggaggctnttcatcnggtncgtttcagcccnnncctgcnctcctntggntggntggtatctggggaanantcagggnnggttcgaatccattttgtccgtgnactcncntccccactgggccaccgtatgcagcttgaangccgagcccacttcnatgctatgttccaaccatcctcccccactacncgccctngcttctctccaaccagccatcgccttctgccaactccctagccttggcccacaccagatccttggagtgaantnggtaaagaanaaatggnnnntatgcaaagagccataggaactgggggccttccctggacagtgatcatgccaggcctggacctttaggcctgcctccccaggactccttagatcccactctttcnacagacttctgtgatcacagccctgcgggcaggggggctctccctccaccaactctcaaggctcctcagcctaagactatggctcatgagaaacactcaggcctgacctangcttgggagtcaaactgctcatattagtagcatatgtgttcacacgtggggtaaagcctaagtagaaggtactgggtgtatgtgtgaccacttgtgtaatgggtgtcatggagaactgaaaagggtatctgcatgaagggctccgtgtcatgactatgtccgaggatccaactattactgccgttctgaaacttcctcatttagggtaaccatcatgtatgcccacgtagggtgatagtaattcgtgagactgaagttgcttagagtacttctttgaccagaggaataccgactagagctacctcgtaccgactagaagcagtggctcagatcttacttngctcctgcttacgaagtattcccaatcactggtcatctgaccctagttgaagcactcctgaacagtcatgtgtttcaacaatcttcctttatatcaagtcgagagagtatactt

SEQ ID NO: 573183 - DNA, 2011 bp, Homo sapiens
cggcacgcgtgggtcgaccacgcgtccgcactatgcctatcatatagtaaaacccagcccatgacccctaacaggggccctctcagccctcctaatgacctccggacctagccatgtgatctcacttccactccataagctcctcatactaggcctactaaccaacacactaaccatataccaatgatggcgcgatgtaacacgagaaaagcacataccaaggccaccaacacccactgtccaaaaaggccttcgatacgggatcatcctatatattacctcagaagttattgtatcttcgcaggatttatctgagccttttaccactccagacatagcccataaccaccaactaggagtggcacatgggcccacaagaggcatacacccgcataaatcccctagaagtccaactcctaaacacatcagtattactcgcatcaggagtatcaatcacctgagctcaccatagtctaatagaaaacaaacgaaacacattaatacaagcactgcttataacaactttcactgggtactctattcgaccctcctacaagcctcagaggtaatatagagtctccctacaccatataccgacggcactataccgcatcaccatttatagtagacgcaggcttccaagagaattccggtagtaatgggcacaacatatactaagaaaatggataaacgacactataatttcgacttacctaccaactcaatgggaatcaaacggagcctgaacgggaatcggacaccgtcatgacgaaagcgaaggacacacagcaaacgcactaaaaagacaccacacaccaccatacagatggggcaacccatcgcgccacccacactataccgaacacaaacgagaaataaaaagacagcagtggacaatagcaggaatcacgccagacgcagacaatagctactagcaccatacacaaacgacagactacagcaacgcaccacaactagcgaaagcacagagaagcacgaaatcacgacgcagaagacagcaaaaaggaaacagacaacagaacagcaacaagaccacgacgacacggagacaagccagacacacacaagacaacaacactgagaacaaagaaacccacacaagaaagagacgcagcaaagagaacaagagacaaaaaagaacagcaagcagaaccaaaagaaggagcagaagaaagagaaacaaacgaaggacaaccaacacacaggacaaaggaaagagaacgaccaactagagaaaagcagagacacaaagcaaacacaagaaagcagacaaacacgaaacccacaccaccggacaggacaaaaataagaaagacgcgcgacaacgagaacaaggagacgcgacgagaaaggagacggacagaagagacgaaagaacggacagcaagagagacaggaagaagcgagacgagacgaatgacccaagaagagaagagcaagcgaaccaagcaaagcaaggagagagaagaagcagaaacaaacgagcagacaggggagcagacgacaaagcatcacagagagagccgcgacgcggagcaagcaacaagacgacagcgtgacggaagagcagggaagcagcgagcgaagagagacgaaagaagcagagagaacgagacacacgaccgagacaggcagaagagacagaacagaaccgacagcacgaacagaccgagagagagacagcgagccagaagcagacgagcacggcgactcaaacgagcacgggcgcaagcagaacacgaccacggcacacagagcaacaacacagcgagaagagaaccgaacagacgagacgcagcgacagggcacacgaagaggagccgacaacgagagaccgaaccgacacggagaatacgagacgacaagaaagagcaacgacaaacgaagcaacaaggaaagagaagacgaacaaaccaaaaacgcaagacagacgagagagagagaacaaacagacagacgcagagacaacagcagcgcagcagcagaacgc

SEQ ID NO: 573184 - DNA, 879 bp, Homo sapiens
gagtctaaggaaatcatggctctgaagtatcacgtctttccagtaccctgagttctctatagagtggcctaacacaggcagaatgggccagctacttgtctgcaatggtatcttcaagaataccctggcatcccttgtgactgaccgtcaagtctcttgggaaagcctggcatctcctcacataagacctctgaccaatgggagggtgcagcctgtgagaccatccaatcccaaataaaatgcaccccaataaaaatggacccaagaaatttatcgtcaagtaaaggtcccaaacaagtgaaagagattatgctcagaagatggttctcatcaccaagtagcctgtgttggatgctgtggagccttagtggagatttcagcatttcctaccttgtgcttagtttcagatatggatgatcacattgtgatgacttatatgagggcagatccaagagccagcaggtccaaaaaggcaacaaaccataagcagccagaccaaaaggccaggtcctgtgctatcacaggtcaccctctttaacagtcagaaaaccagcggagggcaaagaatcccatccctttcctgagtcatgctcaaaaatcaggcaccagtgctcaatcaaatcatagattcgagcaaagggctctccctgggcagaaactatggacgccagtgtggcactgtgcgaccttgaaagctgcaattccaggcagggtcaccagcccggaggcctggaagggtgctcccagcacggaggccgaaaaggaccccaaggcaaggctcaacgaacagagctcgggccagtagcaccaggaacacggcgggggagaccccggacaaacacagagagagcctatacgggaggagcacgggaacacgca

SEQ ID NO: 573185 - DNA, 264 bp, Homo sapiens
gggccccccccccccgggggtgggcccggccttggggtccccggaaaaaaaaaattttccccccgggcttagggggggggggggcgggcccccccccctttggcccaccccggggcgggggtcccttcccccctggggttggggggggcgggggccccccccccccccccgggggggattggggggggggccccttccctttttttttttttccgggggccaaaattggttttttttttaaaaaaactttttttttccccccga

SEQ ID NO: 573186 - DNA, 630 bp, Homo sapiens
acctgtgcttcccaggttcaaatgattctcctgcctcggcttcctgagtagctgggattacaggcacctgccaccacgcccagctaatttttatgtttttactagagacggggtttcatcactgttggccagctggtctcaaactcctgacctcaggtgatccacctgcctcggcctcccaaagtgctgggattacaggtgtgagccactgcgcctggcctccatgtgcatttgatgcatactgcatgcatttccagtgggactagctatgttaaatgtgcccagtagctatgtatggctggaggctatcatattggatagtctattagtagaaaaatatattaagacagccttggagatagctccttatgccgggacccagagtttggaacgatatatataaaaataattattatggtttcagttaacaacaggggactgtacaatgtagtgggttccaggttgagagtgctagaaagaaccatagctattgtatctaagattcagcgccctatccccatttttatcggtggagggatgtatgcttcaacaacatgtgtgtggtcacccagaggagtcactggcatcgtcaagactcaaaccgagtgatcttctggtacgtcgtttgtg

SEQ ID NO: 573187 - DNA, 140 bp, Homo sapiens
tgagtaacagccttcttcatccaccctcgtctcctaggaggttgccctcggctagacctggttcttgccaagtgggcattatcgaggagttcacaaaaaacaatagcctcatcatccccaccatcatagccaccatcact

SEQ ID NO: 573188 - DNA, 194 bp, Homo sapiens
ccctttactccccaacggatagcatttgtaaatactctaggtatctgtaacccctctgatgaagtctgtatagtgtgactaacccccaggcaggttggtttccattaatttttttttttttgaatgggatgtcctatggaaacctatttccccagagttttaaaaataaaaagggtattgttttgtcttctgta

SEQ ID NO: 573189 - DNA, 232 bp, Homo sapiens
tagtgactccccaaggaattaatttttacctagaaatccatgcctgagcaacatagtgaaagtccatctctacaaaaattacaaaaattagccaggtatggtgcctgtagtctcagctatttgggaggcagaagtgggaggattgctggagcctgggaggttgaggcagcagtgagctatgattgtacccctgcactccaacttgggcgacagcgcgaaacccagtcttaaa

SEQ ID NO: 573190 - DNA, 198 bp, Homo sapiens
cacaaggggaaactccacctctcggattcaaggcatcctcctggcttatactcctgagtaactgggacgacaggtgtgtgggaccacacacaggtaattttttttggaattttagtgtagacgaggtttcacctgttaatcatcaaggtcttgatctcctgacctcgtgtattacccgcctcattctcccaaatggca

SEQ ID NO: 573191 - DNA, 725 bp, Homo sapiens
tgggctctagcagggggtaaagggggtgctactagggtaaatacgggccctatttcaaagattttaaggggaattaattctaggacgatgggctaatgaaatccgggggttggctccacagatttcagagcattgaccggtagtatacccccggtcgtgtagcggtgaaaggtggttgggtttagacgtccgggaatggcatctgtttttaagcctaatgtggggacagctcatgagtgcaagacgtctggtgatgtaattattatacgaatgggggctcaatcgggagtactactcgatggtcaacgtcaaggagtcgcaggtcgccgggttctaggaataaggggggaagtatgtacggagttgaagcattagatccgccggagtcggggtactcgtaggtctcagtaccatggggggccaagtggattcggacgggtaagggagggatcgtgacctcgtcggtatgtaaaggatgcgtagcggcatggcgcagggcagatgagcgactaggatgatggcgggcacggatagcttcagacggttttctattctcctgagcgtctgacatggttcgtataaagtaagatatggcgcgacgagtgttacgcgaacgggcctacagggacatggaagccgtataggaacattgcattatgagggcgttgaccatgcaacggtgactaagctcctctatgatggcggaagttacgttttgtagacca

SEQ ID NO: 573192 - DNA, 183 bp, Homo sapiens
gcccgttagaatgacagtaccaaaagacagtaacatatgctgacgagattgcagaggcaagggaccgtttaacactgttagtgggatgtagacttgtacagccgttattgagaagagtattgaggttctgacaactaaaatagactacatatgattcagcagtccactactgggtatatatcc

SEQ ID NO: 573193 - DNA, 465 bp, Homo sapiens
caaataactttattcttaaatttaacaagctattattccatgtgcttcgcgatcagtggaatcaaaagggcgtggttacgcgcactggactcgtgcgagtcactagggaggtcacacatcgggtgtacgcaactttctgtgaattgttcacgaattatgactactacttactcacatgggtcaatgtgggacactgagacgataatttctggaacttccctaaaaatgggcaatttatccataggagttctatgcccatgctcgctagatagttattcaacggatgtttatctaggtgcgacatctattagatcaccatgtttccgagcttacacgttctcacccttcaagctgttaaggatcggatcctcagccccatctccagttgtttgagcattatacggggagtggtgtacagcgcgaactaatcttccatcctgcactttctaagaaataggagttctg

SEQ ID NO: 573194 - DNA, 403 bp, Homo sapiens
ttcttagaaagaggtcgcgtatcttttaatggattgagagaagcccattggtatccccgaatcatggagaaaagcaccagatacaatggacagtcacacttttaaaaatcaaacagtcactaccttcagcccacacctccacacccgcatctggcctccccaagggcggtcagtccgggtaaagtcaccctctccttctactcgggtattaccacgagattggaaattttaaacgcagaaaaaaaaagacgtcacgtaacaaataattgagtgggcgaacccagggaagcccttggactatgattcccaattttctgtccactccacactggcagagatacagggataacccaccatttgggtccccacgtataatccaagaactcatacaaaattttccaga

SEQ ID NO: 573195 - DNA, 163 bp, Homo sapiens
aggtatccccacaagccgggctatagtcttcaaagtcctgatcactttgtgtgagaaatgatccgggtcctccctggagcactggccatgcttcgaaaacgggcgatgacatgctcctggtataaagtgcaaagaagtatatatggggtgtgaatgctgtgtg

SEQ ID NO: 573196 - DNA, 193 bp, Homo sapiens
ttgtacgatgtgcggtagctgggggtatcatatagtcactcccggtttatggagtgttcttctactattaggacttttcgcttcgaagcgaaggcttctcacaatccatgaaaattattaatattacctgctgttcagagacaatgaatgaagcctacagggggtaccgcagctcgcaattccgtaaatcatg

SEQ ID NO: 573197 - DNA, 373 bp, Homo sapiens
agaggtaattacttcaaatatttaagggaaaatattaaagccacatggaaagagaatttggataggaaattctaatttcctgagattcagtaatcctgttgtatcctgcccctgtggttagctgaaaaaagttatcattcaaaggtctaatatccagaacctataaggaacttaaattaacaagcaaaaaaacaaataacctctttaaaaagtgggcaaagaacatgaatagacacttttcaaaagaagacatatacatggctaacagacatatgaaaaaatactcaactttactaataattagagaaatacatatcaaaactacagtgaaatgccctcttacatcagtcagaatgactattattaaaaagta

SEQ ID NO: 573198 - DNA, 788 bp, Homo sapiens
ataccttgggtaaatttgtgttaccaaaaaaaaaaaaaaaaagggaggtgtattgtcgacacacaaaaaaagcaaatcagggtggtaggcttaaggtacaattccaagggtcatttaccaacagcggggttttttttaatacttaaaaaaactttatgctacattattcatggccatttccatattggggggtgggcaactctaatacgagggaactcagggaaattgtcttccagccattgattggccattatttattttctaaaaggtttctaagatgacggttatcactatttggttaatctccatgctgactttggaaacgagggtactagtatccctttagcaagatggctaagttttccgtgggcgtaattcacaccaacggtgggtcctaacgggaaaggtaaaggctagggaccctaaattcagaatcatagtggccggcatatttggtaccagggtccgtgtgctttcggttccacagtggctgagtgacgaggtgagaagacattttttgggacatcttcctgtgggtggattagaagacacctttcttgtggtcttagggttagggagggatactacggatcctgggtgtatcctatctaaggtggcggccgtatacgcgagcaggacgacgggggctgtggtcttccggttttttccctaagggtgtttggcgcggtctttcctttcccttttgtgttgttgacctttttcttggtccaggaccttgcttctcgcttgccctctgtttttagccccccgttgcttcccgggtggtc

SEQ ID NO: 573199 - DNA, 230 bp, Homo sapiens
ggcttttagtccagaaggacctcatttttgcacctcttacttgaggagcaagaggagggaagggagaaagggatgttggaataagaggatgtggggcactgccatgggcaaggtcaaaaattagggctgtatttgacttgggccgggacccggggggccttcagcaggtgaaaattgttggttttttgttggaaagggggcgaagacattagcccaggaacttttacttc

SEQ ID NO: 573200 - DNA, 322 bp, Homo sapiens
actaagtattaattgtgttgtacatttgttcttcgcatatattaaagttgtgacccaaatgtgttaaagctcactctctcccatgtaaatttcccagaagttcttgagctcaaatgtatcctacatccagctgtagaaatttgtcagaaattgtctaaattgtgtatgtaattgtactgtctatctctagccactgcgctgaacagtacttgagtccccatatcatatggatttacccaaggaaatgtgtggcctttgttttgtattctttcagtgtagaagttcctgtgtcatatttaattaaacttgttcgtaaacttga

SEQ ID NO: 573201 - DNA, 498 bp, Homo sapiens
aatgcatatagacaatacagtatttagtaagctgtatacatacactaaattataagagattcaatattagagtttatatattgtatctttaaccactacagagtgcaactcaggttcttcacaacagattgaatattgagcagttctttaaagaaagagggggcagaaaaaaagcccaagtgaataacacattgaaactattccccttcgaaaatgaattctaaaatgatgtggaatgtgaaataaggttttaacatacggtgatccaagtttatagttagaaacaaaaagaagtccttcatgaaataaaggttacaagaacacgttgcctgttttcccccattataaactgagaaggtgggtaaagacgatgtttacagtacgaaaataggtgactacaggatcagcgcttcatctcacatgctgtacccaaagccaggctgtggctgtccatacggtggtgcggtataaccataaccaaaaggaccatgtagagaa

SEQ ID NO: 573202 - DNA, 1172 bp, Homo sapiens
  misc_feature (755)..(755): n is a, c, g, or t
ttgtcaaggagctgccccccaggggttctatcggaggtccccctttgcccgcggcagtcttggggggagctgttgcacggaatgttcccaaccccagtgccagcggattcccccggtgattcgggggatgtattctcccccatggggcctctctgcctcaggagggttttttcccccaaaggctcgtggtgtaccgtaggtgcgctctcttggcggagatttgccctctccttgcgttcaaaaggtccgacaccccggaatttgggcctccccgttggacccggggtgtctttcttttcacgggcgggtgccacaagagtggggcccccaggggccccaatttggttttgggggccgctccactcgggtgttttctccatccgcgttccgggcgggggagacctcgtcgaggaagttaccccctggcatgtcgcgctggcacccccgcgtttttcggggcgccttttggcccccttggggcaccgatttcacaagagctcgggtggcgccccctcttgggccccagtttttcgacgccgcccttttgggcccccacggtagtcaccccctcccggctttccctttccccgagatttgtggaagagagggagcctctgggggcccacccaagggcttctcaaattttttgcccggcacggaaactttccacgggaaaccccccccttgggccccaagtataagcttctgttgggcacagggcacaaagccccttttcgggtgtcacaccccttgtnggcgtacacaccacagagacgccctctcgcccctctcctgttttacacagctctcacaggcacagctctgaaggcgcccccgagcccaccaaatttgcacggggggtctccctgcgtatagttatgcggccccaccccgcccggtggagagttctgtatcccgcgttctccttatgaacacttttcaccagagaagcccaagcgtcccctggaggcgccctgttggcaagcttctagctttgccgtcgctgtaattgggccccagtcacttgttttttctcgccctccaccttttccccccagtgttctagagttcactgtgagcccttcgtgtcactttcccgcgggtggccacccgggttagattccccgcgtggttttgttggtccaaattaaaagcctcagtgacccctgaga

SEQ ID NO: 573203 - DNA, 182 bp, Homo sapiens
gtcaagatagcagcagcagtgtgtcagggctcaagacaccaccccctccagcttactggggcccagtgagcctctcccttgctacaggtggtgtgggtggtccatgctcagccagggtagtgtggttggtatcacggtctatgtcacgcctacactacaggtgtgaacttgcctactgtggc

SEQ ID NO: 573204 - DNA, 331 bp, Homo sapiens
  misc_feature (331)..(331): n is a, c, g, or t
tgtggagacggggtctgattttacatagcttcatagattggttcaatcaggtatgacatttacatagtatgtggggaaggctggtcgccccaccctaatcttcttatgcaaatgagctttccagttgatcagtgtcttgtctgcccctttacagtacatgtgactggaagagaatggaagatggagctgccatcttgaaaatgtctagtcctgagccagcatggtggttcatgcctgtaaccccagcactttgggaggccgaggcaggcagatcacgaggtcaagagattgagatcatcctggccaacatggtgagaccccgtctccacan

SEQ ID NO: 573205 - DNA, 148 bp, Homo sapiens
gcgtacatcctacagtaggattacatcgataacatgtgacactagatgatagacacccatacatattaatactactaatgcaacaaacacagacatcatgaaacacgcacatatactaaacacaagcaaccacacaagtctatctcaa

SEQ ID NO: 573206 - DNA, 622 bp, Homo sapiens
ctgtaaacaggctgatgccagtgctttaggggtggcctggctgagaggatgtgcaggactcgcatgcacacaccatggctgtactaccacaggagcaactgggaaccccagcagctctctcaaggagtgtgttggcatttctttttcctattggttttggctagtaacttggagccatttagaaatttatatttcttcggtacagaaaggaattatacatgaatacagaatactgcttgtttcttattagttcatttcatggttctctttttcctttctaataagaaaactcatgaaatgttccacataatttattagattccggcaggaattttaaagtcaaactcagttgtttacagcctaatgcacaatgccctttcagctttactgtactttttttttggagatggagtcttgctctgtggcccaggctggagtgcattggcgtgacctcggtttgcagcaacctcctcctcctggatacaagcaattctcctgcctcagcctcctaagtagctgggatttgcaggtgcccaccactgtgcccggataatttattttgtattataagaagagacaggttccatcatgtgggcgaggctggtctcaaacgcctgaacta

SEQ ID NO: 573207 - DNA, 349 bp, Homo sapiens
ccacagtctgtactggggggatgggccagagggcatggggcggaggcaaacgcggacaccgctggtaaagccatcagatcttgggagacttacttttgggaaagacctgctgcttgattcaattacctccccctgggtccctcccacaacacttgggaattctgggagatacaattcaagttgagatttcagtgcggacacagtcaaaccatatcagcaccagtggatggacagacccaggatgcatttcttttcttttcttttctttttttggaaacggagtcccacactgtcgcccaggcttggagtgcagtggctccatctctgcccactgcagcctccccctccc

SEQ ID NO: 573208 - DNA, 159 bp, Homo sapiens
  misc_feature (1)..(1): n is a, c, g, or t
ncgtgttgatgttcttagggtttaaattatttcaaacactggaataatgtcatggattatcgctggtattttactaaaacagataagtttaggtcagcttaagcaacttaagatgtaagtctgggccaggcacagtggctcacgcctgtaatcctagca

SEQ ID NO: 573209 - DNA, 596 bp, Homo sapiens
  misc_feature (584)..(584): n is a, c, g, or t
tcatcgagctcggtaccttacgctcctagacggagaacacttcagagaaacagaacttggactgagatggagaaaatcagagtttgtgttcgaaaacgccccctgggcatgagggaggtacgtcgtggagaaattaatattattactgtagaagacaaagaaactctacttgtgcatgagaagaaagaagcagttgacctcactcaatatattctgcagcatgttttttattttgatgaagtctttggtgaggcgtgcaccaatcaggatgtatacatgaagactactcacccacttattcagcatattttcaatggaggcaatgccacttgctttgcttatggacagacaggtgctggaaagacctacaccatgataggaactcatgagaacccaggattgtatgctctagctgccaaagatatcttcaggcaactagaagtgtcccagccaagaaagcacctctttgtgtggatcagcttctatgaaatttactgtggacagctttatgacctcctaaatagaagaaaaaggctctttgcaagagaagatagcaagcacatggtgcagattgtgggactgcnagagcttcaggt

SEQ ID NO: 573210 - DNA, 180 bp, Homo sapiens
attcagtagctgaaagataaaatatcccttttaagaaagaacccaattaaatttttggaactgaaaaatttacttccagatctccccaatagaatttgaagcctcagcagcagaaaaattaagatgaagaaagaatttttgagctggaagaccagcttatacaatcaactcagtcagcca

SEQ ID NO: 573211 - DNA, 1007 bp, Homo sapiens
agcgggctcgcggcgcccaacggaccaggctggggccgtgaggtaactgttgcagaccagtcggaggtgggaggcgacactgagtctccatgttccctgagatggtgccctgagggaaaaggaggcggcagcataaactggtcctggagagaagccccttctcgcaccctctcctctagccgagcatgtcccaggactccgctctgctcctcagtccgcgctggtgtgggaccccggtgcccgtgggcgtgacacggacggcaagcaccttggaccgagtgttagctgatagccaagggtggtcgacaccctggaaagcggcagaggggggttggaggtactgagggaagacgacgaagtcgggcacgactgacggttaacccgatggcgggagtgttgatgactagaagtacccagtgggccaacccccctgggcgcccaggccaatgacgcgagggaacgaagcgaagacggccaaaggccatgcgagtccctgcaagcgcgcctggaatggcgtgccaggcttcgcaccccgcgaagaatgtcatgagagaacagcgcgtacgtgaaagaagctgcgtgaggcgccccctttgcgggctagggaaccactgcctggcggcagggcgtgtcctttcctttcgcaacctacttggccgagctttcgtgcgaaatcgctgaggaagacctagagagatcggtctgctcgggggccatcatccgcccaggcaaggccgcggggcggcttggcgtcccgcccctttcctgacccggggggcggccggcccttccctccgtgcctgtggggcgccccccttggggcattggacccttttggtttcccttcggtcccccttggctggcctgggggcggcctgtgagaccccctggaagaagaccgtggggctttggcacctgggggggcccgccctttgggacttgtcgtggactgcctggctggaagccggttgtttgttaccaggcaccagggttttgaagcgcacccc

SEQ ID NO: 573212 - DNA, 329 bp, Homo sapiens
tagattggcgtcgttaaaactatgtccttcctgactccctactctgtatgggggatctgagatcccccatacagagtagaaggatggttaccacaggctgggaagggtagtgggtggttggggtggaagtactgatggttagcaggtacaaatatatagttggaatgaataaaaactagtaattgctagcacaacagggtgactacgcgtcaacaaataattaaaaattgtatatttttaaataactaagagtataaatggatttatagtatcacaaaggataaatgtttgaggtgatagatatccatttatactgggtaccgagctcg

SEQ ID NO: 573213 - DNA, 387 bp, Homo sapiens
  misc_feature (103)..(103): n is a, c, g, or t
  misc_feature (137)..(137): n is a, c, g, or t
  misc_feature (139)..(139): n is a, c, g, or t
ccgtttcttagaaggggggggtgtgtcttcttcttggggagggggggtgggcgccccggcccctctccctctagagaggggggggcgccgtcccttcctaganagggggttgtggttctccccccccctttccttananagggggggggggggcccacccccttttctctttagaattagggggggggccccccccccccccttttccccaacccagggggggggggggccgccccccccccccttaaacccgggggggaaatcccccttatttttccctgggcccgggggcccccttggggggggttgcccccccccccccggggggttttttttttttttccccttccccccggccccccaatttggtttttggggggggggcca

SEQ ID NO: 573214 - DNA, 637 bp, Homo sapiens
  misc_feature (4)..(4): n is a, c, g, or t
  misc_feature (313)..(313): n is a, c, g, or t
  misc_feature (322)..(322): n is a, c, g, or t
  misc_feature (334)..(334): n is a, c, g, or t
  misc_feature (339)..(339): n is a, c, g, or t
  misc_feature (350)..(350): n is a, c, g, or t
  misc_feature (389)..(389): n is a, c, g, or t
  misc_feature (394)..(395): n is a, c, g, or t
  misc_feature (504)..(504): n is a, c, g, or t
  misc_feature (539)..(539): n is a, c, g, or t
tttnatctttttaccccatcaaaccgctgtctcttcaccagcttcattgtgtcacagtagctccctttgggaggatgatgtgaaagaacacccagagagagggagggagaagagagatagtgggtatgcctccctagccccccaccccccaggcccaccccttgaccccctgttcccccaaacccgagcacatcacgccaggccccttggccgccaggacagcatcagcccaccccccagcaataacctagggtatgggggaaggccagggctgtggtaaggaaaagaatcaaagaggggagtgatacggggngggggcacntggccgcccgcnaaacntggacattaantttatatcatgacccccttttaagccagtgagctgggcntcagnntttcccaggccatgcacatttaatttatttcagagaaactctaattgtattttcactgcagtatcttgtattttttatttgtgatttaagaaatgtgaagagaaaatanacagacacaataatggctaacattgtttctttcantccttgttctagagctaaccactctaaaattgtttggtaatgtcacttagtgtaattaattgtaacatattcttttaaataaattgatttattgatca

SEQ ID NO: 573215 - DNA, 320 bp, Homo sapiens
ggataagggcagtggggggcagggccgaggggggagaaagcccaaatgtagtcttagctccactgatttgtgtcgggacccaaaaggctgtctccgtgtacaggaccagtaaccaagcttacgggagcagagcccccaccgtgcacaagatgcctaaagtattttatccaaattcgaataattttttccaacagctagcagcgggtggaatgcatccgcgacaatactctcaatgtttacctggagagaagcatctagactggccacgagtactgcatcacctgctgtgaccggatcaactttcaccccagttacaacat

SEQ ID NO: 573216 - DNA, 160 bp, Homo sapiens
gttggcaagacaagcgccttacgaaaggcggcaaaaagggagccaagaagaaagtggttgttccattttactaagaaagattggtatgatgtgaaagaagctactatgttcaatataagacatattggaaagacgctcgtcaacaggatccacggaccaa

SEQ ID NO: 573217 - DNA, 348 bp, Homo sapiens
ccctaccctcagtttaatgatccactccaccttcaatcctctaactttcataatggctatcttactcttctaggagtataaaatgtagcccatttcttgccatctcatgcgctacatcttgacctaacgtttttacgtcgtcttcttgcgcttcctttgtagcgttcatcagggttcgctgatacatgcgtgtatatatgctgtccaagaggttggtcaagttgttcggggtttatcgattactgaacaggctcctctagagggatatcaccactgccaggtcctttcagtttgtggcttgttggctcgtactgttctggcaaggatttttgttgcttactccttcac

SEQ ID NO: 573218 - DNA, 844 bp, Homo sapiens
ttcccgccgcgccgccgtcatcatgagggaaatcgtgcacttgcaggccgtgggcagtgcggcatccaaatctggcgaccaagtatggggatggtgatcacgtgatgagcacggcatctatccccacgggcacctaccacggggacagcgaactgtcagctggaacgcatcaacgtgtactacaatgaggccaccggcggcaagtacgtgccccgcgccgtgctcgttggatctggtagacccggcaccatgtgactccgatgacgctcggggcccttcgggcagatcttccggccggacaatcttcgttttcggtcatattggtgctgggaacgagattgggcttctaaggggctactacacagaaggcgcggagctggtggactcggatgctgtgatgtcagtgagcaagatggaagtgctgagaggctgtgactgtcactgacagtggtgttccaagactagagcccacgttccctgaggatggcgggcgactggagtctggtgatgggtaccctcctcattcaggcaagatccggggacggatgtaccccatgaccaaggaaatcgtgacccacgtttaagtgtagggttggccccttgttcgggccccgaaattagattggtactagaaatcggaccaggatcgggttgggactcgccccgtaagcggagaattggactccaactcgcgttacgttacaagggttcgcaatccccaagggcttccggttaaggaaagaaaccgaccatggaaccggaaagagacccttaacctggggcaatttttggcatttaaacctcgagaggcctacctccttaaatcggggaaacccaattattt

SEQ ID NO: 573219 - DNA, 136 bp, Homo sapiens
ggagtgagccgccagaacacaagtgtcgtgaatactacccctacgagccaaaatgggaaaggaaagatgactacatatcaccattgctcgtcatatggacgactgtagattcgggcaagtgccagccactagctgg

SEQ ID NO: 573220 - DNA, 243 bp, Homo sapiens
tatcccctggcggaaccccgtatcttaaaataaaataaatttaaaagaaaaacaatgaaatatccatagcatgcttacaccaataatcagtttcattttttctcatgtgatagaagtctggaagtccaggactgctgcaggcactcccagaggccacagtgagtaggccagcgttcgctcgtgacgctttctgcatgtcacttctcttacaactgtgagttttcactatagcacgagtctgtt

SEQ ID NO: 573221 - DNA, 143 bp, Homo sapiens
gccttggggcccccccttcccccttttttgtcccccaacttgaaaggtatgaaggcttttggtttccctgggagtgggggggggcacccaggggtttcctgtcccctgactttagacccgttgaataaaagggccccccttta

SEQ ID NO: 573222 - DNA, 1221 bp, Homo sapiens
  misc_feature (326)..(326): n is a, c, g, or t
  misc_feature (384)..(384): n is a, c, g, or t
  misc_feature (432)..(432): n is a, c, g, or t
  misc_feature (456)..(456): n is a, c, g, or t
ggtactggcaatgcacatatggatactacggagctgggaatgtccctaattcgtatcggatagctcgtgtagcctagcaacaagaagaatctttaacacactaggaaaggtcagcagtgtgggaccacggtgatcactgtattcatagcgctacagtgtcatgcgatcacttacatacgcataatggccttcacccaggttcggtctcaatctagttacaacattaagaaacgtacgacgcaatgcgtccgagaaggtggagagaacaactaatgtatcctgtggttaatcccgcgcctcggatggttggcgaaaataaccggagnctgacttggagcgcttgcgctggacaggaagaccagtgaggacacttcatttctgcancggcattcgttcacagagcgtaaggggaagtgcagccagtcgcgaacnagagcacttccgtgtccagtccgnacacgtagcgtgactcccgcaccaggatggtgtgcgaactgttcaggactgccgtgtctcgagttgccgaacgggcctgggccgttggtgatgagttggagtcggtgccaccgctgggcatggaggtggattgccccacttccggcaacctggcatgggtgcgggccccgtgtctttagggactgctcctatactcccacatgcggctcgggggtcggcagacatcagagtggatcagttggtagccctctaacgtccctaccttcgttcctatcaatggtcggattgccccttgggaatcgtacacgaggtccttggcctaaagttgttgacattggttccatggaagccatcaagcgcgaattagaaaagctcctatctaaattttattggcttatccggtaattcgaatcgcaacaccgcattaatcctctaacggaagcttacagtgttacctaaggtagcaatgttgtgtagcgtatcactgagttgttggagcgcaagcacgattatgacagaagaattctggattgttagaattgacacgaggcgtatagttgctatctggtgggctttagagatcgtaggttgacttggttgagtgcgatgtctgtgtggcttgagtagaaagatggttggacctttgagtcaaggaaggctgattcaaattatgaaaatttagtgcgacattacttggtctaatatctgggagactgagaggatgggagaagtctagtaaaccaaaaggttggccagaaattggaa

SEQ ID NO: 573223 - DNA, 391 bp, Homo sapiens
tactgaggaacagaaagtctctacacaaacagactactgaaattacacctcagaggaaagctgtagtccaagaggaaatacccacaaagccctaaggtctgaagaaattaagatgtcagaggcaaaatctcaagaacagttagccctcaaagaggaagcttccaaaggttctgatttctgaagaagtcaagaactccagcaagcaacctccctggcacacaatccattgtccactgaggaaatcactaaaacatcacaggccatcagcaagcacagtcagaactcatgctgagattcaaagcataatctactcagatgagcataaacgcaggtcaacgactggttttaaaagccaacattgctggtgccaatgatgtgaaatgggtactgc

SEQ ID NO: 573224 - DNA, 772 bp, Homo sapiens
gtttccaggaagaaaacagttccagcgttgtcttgacaacttgaataatcaatgataacagaatgttcacaattaaagtctccttcttcttatattgtatcctctagttcatttcctccagatattggatcatgacaattcatccatttgattctctatctccagagcccaaagatcaagcattagctatggttacgcacgagtgtatcaaattttacgccaatggcctccttcagtggggacactgggtcttcaatagactttgtcctataagaggcaatgggccataattaatgcacatatttcaaagaactcgaacatgatttgatcagtcttcttggatgactctatcggctgcgaggaccgagctgcaaatcaagagaagaagacaaggaactgagagagaactaccatataaacttatgaagtcaaacagtgaaagtagtgtatacatggcaatatgatcatgttgaagactcaatgtcatgatacttgagagcctcctagaagaaggaattctgacgttctacactaaaccagtggaagatatttggaatgacgctaggtaactaacttaattcggaggatcaaccttgaaagctccagaacacctcaagaacgtaactttcacgttgaagggacttttggtagatctaatcaaggataatatgcgttccatagacctttcttccagacccgtggaaagaccgaatatacatccaattaataccaacagcatagttcgaataaactgaaatagaggactcaggtc

SEQ ID NO: 573225 - DNA, 858 bp, Homo sapiens
gttttaaacctttgatatttgacaaactttccaaaatcaaatgtaaaattctaacttaaatgttttcgacctcaagctaacttttgggcattaaagcccttggaagtccaaatagggcccctggaagtccaaaagaaacatattaggctaatttggtatattaaaatcatacaggaagctgatcaaataaaaaatgttgtttaattttctttgagttgtatttgtataaatctgttattaatatgcatcccaaaattgtatcatattgctaaaatgttgatagatcttgttatatgttattggtaataattgttatcctgttaaattattgtataccacagaaataatgaaatttctttgtcaattgcatcagtaatcatggctcttctaagtcttttgtcattcacagatgattattgttttacttggattcttttcaaaagtggtttgtaattggctacagcctaaaatctgcttgttcaaaaaaaaaaaaaaaaattccatggaaagggccctgaaagcacacacacttaaaccccagttttctgataaccttgggaattcaccccgtgggactagtttaaaactcttctaaacataattttttaaaatctagttaaacttattgaagatggctaatccaacatcaagcgaataagtgaatttactgggggctgaactgatttaaatgccaaataattttttcaatcaccctttttggggttgagacattgctgatactttcatgtttgtcttgcccaagcaaaaaactggtcttttcctttgaagctgtcaatgctacagtatcacataaataccctttgtgaaacatgaaacattactttcttaactgatttc

SEQ ID NO: 573226 - DNA, 249 bp, Homo sapiens
ggagaaaggttctacctgatacccccagctagaggtgagtgccggcttgcctgttaatttaatattaaatagctgatgggcatctagaggaacaagctattcaggggatgatttctcagcctctcagcctgtacatgagaggctgagggcccggtgccatcaccagtcatagcggcggtactgtcggaaaggggagtcctcaagtccctggatgtccatgcgtggagagcactccgaccttcgtgcccc

SEQ ID NO: 573227 - DNA, 786 bp, Homo sapiens
ctattcagaacataaagaggccataccctggagagcccaacatatggaaaccagcaatatggaccaaacagccagttccccacccagccaggccagtacccagacaaaaaaaaagagaaaacaaaacacacaaaaaaccacaggaaagaggaagagacaaacacgcagagagacaaagagagaacacgaaacaaacacagacaccaatgaaaaggaaaacaagacaacaaaaaaaaaaatgaacaacaataaacaaacacaaaaaaaacagaaagagaaaacaaaaagacaagaacagaaaaaaagtaaaacacaagtaatgtgcaaagatgagaaagaaaaatgaaaaaaagctaaaaaaaagaaaaacaaaaaaaaaaaagaacagaaaaagagaatacgaaaaacaaaaaaatataaaaaacaaaaatgaaagacgaataaaaaataaaataaaatatgacagagaaagcagacgggaagagatacaaatagataagaagatgatgacatcatgaagaaacagatataacaagatacatcactaagcgaaacagtaagaaaatagtgaaagaaaatgagtgaataaaataaaaaaaaaaacagaaaaaacaaaagcacaataaaggcagagcggataggaccgaccggcacacgagcacgaaacaccacacagaaagaagaacaagaagaaaaacaacaggaaaagcagagaaaagcaacaaaaaaaacagaaaccacaagcgagaagaaaagaacgcaaaaaaggacacagccgacacaaga

SEQ ID NO: 573228 - DNA, 770 bp, Homo sapiens
  misc_feature (770)..(770): n is a, c, g, or t
agcggaatgggggacacttggaagcgttcacagccttggaggggctagtggcccctgcggcatctactagagtgccccgtgctccacgcttgtccctgctgccagccacagtcacgaatccccgcagcgcctatgcgtttctgcgtgtgctgaaaccgcgcgccgcggcccggcctcctccccggcgtctccgtgtgctgaaaccgcgaaccgcggcccggcctcgtcccgggcaggcgagcgtctgggacactgactggaccagcctcccgcactttctgggtggctttgggcaggtcagccagagctttgcgtgtgtcctgtggtgaccggaggccccagtcctgccgggagccccagggagcgcgctgtggcctctccgctgagcagtgaggctggagggctcctacgtcctcccatgactgagccgtcgctctcgcggtgctgactgctgagcccccgtgccagccctcccaggacacttggaggcttctcctgccgagctgccggcgactccacagagcatctgcacgtttctgtggccccgctccgcccctctggcttctgctccacagcctgcttcaccaggtcatcctctcagctccacgcaggtcctctccccgcctcactcccctccccagaccagctcctgagaccaggccacagggacccttggccttgcctccagacccagatgcccagacccctgttgacattccgcagaggtgtcctcggggctgacaaggactgaggagcccttacaaggacan

SEQ ID NO: 573229 - DNA, 337 bp, Homo sapiens
atatggatttggtatgatatgcaagcaatttccggaggttgtgccaagctactatgattgtgggaattacaacaatcagtcttcaaattttgtgacccattaagggaggagattttggaggcagaagctctggcccctatagtggtggagtgccaatactttgcaaaaccacgaaaccgaggtggctatagtggttccagcagcagcagtagctatagctagtggccgaagattttacttaggatacaaagcttagcaggagaggagagccagagaatgtgacagggaagctacaggttacaacagatttgtgaactcagcctcgccccagctgcgg

SEQ ID NO: 573230 - DNA, 382 bp, Homo sapiens
atccttccctctctacgatccttccctcttatctatacaacatttcttcaaaatctctacttctaaaaaataataatttgcaacaagacaaagcaattatcttctgtgggcatctgcatattgtcacaatagctagttaattaatactggtcaattaaaaacacacaccaggctgggcacagtggctcacgcctgtaatcccagcacttagagaggccgaggcgggtggatcacgaggtcaggagatcaagaccatcctggctcacacggtgaaaccccgtctctactaaaaatacaaaaaaattagccatgcatggtggtgggctcctgtagtcccagctactcgggaggctgaggcaggagaatggcatgaacccgggag

SEQ ID NO: 573231 - DNA, 793 bp, Homo sapiens
  misc_feature (37)..(37): n is a, c, g, or t
  misc_feature (39)..(39): n is a, c, g, or t
  misc_feature (227)..(227): n is a, c, g, or t
  misc_feature (231)..(231): n is a, c, g, or t
  misc_feature (338)..(338): n is a, c, g, or t
  misc_feature (389)..(389): n is a, c, g, or t
  misc_feature (418)..(418): n is a, c, g, or t
cgcgcgctgccggtctgcgctgcccagcgggaggggntngaccccgcgttcctcctccctgccggtcccatccttaaagcgagagtctggacgccccgcctgtgggagagagcgccgggatcggacggggagcaaccggtggcaggccgtgccggctgaggaggtcctgaggctcagagctgccgcggctggcacacgagcgcctcggcactaaccgagtgttcgcngggngctgtgaggggagggccccgggcgccattgctggcggtgggagcgccgccggtctcagcccgccctcggctgctctcctcctccggctgggagtgggccgtagctcngtgggccgtcgccagccccggcccgggctcgagaatcaatggtgcctcggncgctgtccctgcaggctcagtccatctgncctttgcctgggcagcccgggcagagaccatgtttgacaatggacgcggattgccagtacgtggacctcgatgtgctctgcagatgtagctaggatggatttgccttaagcaaatacttaattcaaaggcatacccccttccaaaagaggagtattcttgtaatgatgagtaccatcaagtacacacttacaaagaagacacataacactaatgcgataaataaagagaggaataatacattccaatacagaaataatcagaaatacatacgtgcgagaaaacacgtgacagataagacagtaaacataatagagtaaaaataacaaaaatcaggaagtaacaagaaagacataatcaaaaaagacatggcaacg

SEQ ID NO: 573232 - DNA, 363 bp, Homo sapiens
  misc_feature (180)..(180): n is a, c, g, or t
  misc_feature (261)..(262): n is a, c, g, or t
  misc_feature (324)..(325): n is a, c, g, or t
aggcaattggccttggtgagatggacttcctcctcctcctcctcatgaccggggtgaattagaacgtttttaaagacacccccttccaaattctgtaacacattgtaattggagaagaaggaaactctgcaaggctaaactgtcattcacaacttggctacacatagactcatagtcagnttttgtctccaagaaccttaggctttgtgtattttttaattttttaattctcacgtgttaactcctatatatgtttttttnntatttaaagatgtgtgaaaaacagcagagaggtgaggttgtggccctcaaattattgcaaannaatagtaacacataaaggttctctccaaaatatagaga

SEQ ID NO: 573233 - DNA, 1108 bp, Homo sapiens
  misc_feature (761)..(761): n is a, c, g, or t
caaacccactccaccttactaccagacaatcttagcctaaccatttacccaaataaatgtataggcgatagaaattgaaacctggcgcaagtagagtactagtacctgcagagggggaagacgatgaatgaaagttaataagccaacgcagtaacgattagcaagggacttaaccgccgtactacctttcgtgcataagtgaatttaatctaggaaataactttgcaacggagaggccagaagctatagacacccgcgataaccatgacgtatgctaccttaagaacagcataaaagagcacacccgtctatgtagcaaaatagtgggaggatttataggtagaggcgacaaatctaccgagcctggtgatagctgggttgtccaggatagaatcttagttcaatctttagacatttgcccatcagaaccctctgataatcccctggtaagtttaactgttagtccaaacgaggaatcgagctcttgggcacgactaggagaaaaaccttgtagaggagagtaaagcaatttaacacccatagtaggcctaaaagcagcctagccaattgaagaaagcgtacaagctcaacacccattacctaagtaaatcccagaacatatagctgaactcctcacacccaatgggagcaatctatcagcctatagaagaactaatgttcgtataagtaacgtgaaaccattctcctccgcataagactgggtctggattaagaacagtgaactgacaaattaagaggcncaatgatctaccggtcaatcaacaaagtcattattaccctcaatggttaaccaacataggctgctcataaggcaaggtaaacaaaatttcacgggacatccggaattttacaccggctgtttccagaaaatttacctctaggtcgccagttttaaggaccgccgcaccgtggaacagtgttacagggccggaacccaaacacgtcaaagaggggaaagcacgtggcctcaaagagacggaagaagaacaaagagataacaaggtaataacagagaatgcgacgcagagggctacagagacaaacatagggataatacagaacaagcagaaaacataaatataagagg

SEQ ID NO: 573234 - DNA, 220 bp, Homo sapiens
gagcagcagagaagtatatctggagaaaggctattatactcgttaaacgaagtttattctctctggatacatttcttcatcttcttcatgatttagattcacgttatcactagaatattacttttctagctatgctatcaaatgagctacttagaaacttccctcctttacaaactttctattccttaccgtctccctctctgtcgtgtcccgctgggat

SEQ ID NO: 573235 - DNA, 366 bp, Homo sapiens
  misc_feature (131)..(131): n is a, c, g, or t
  misc_feature (136)..(136): n is a, c, g, or t
  misc_feature (227)..(227): n is a, c, g, or t
gagccgccgtaggatgtacgagatctgtgagacatctcgcgatcaatcgacaggtatcagagcacagatttgttggttaatcactgggttagagactgatgcagtgagactgctgtgatgcacagatccancccancagcccttttcaaagcactttatccgtgagtctcaagggaggagtctgagtgtgggggtaacaggtcctgtgtgcagccacagtatttcangtccatttcatgaagcttgggcttttgttcatattcactttctgcacaatgggaataataatatctatcttgtgggctcattgtgagatgtgaagcaccctttgggtgctggagagtagtgaattccttttcttcctct

SEQ ID NO: 573236 - DNA, 395 bp, Homo sapiens
cgtagctagaacaagtatatttactgtcggggggctgggagacgtacagcctacgctagagtataaaaaaagtttttttaaattaattttttgtacggcaagtacgggtatctgtcatttctggtggtcaacgataagacaaacttgaaatatgtgagtttgccttatgtttggtctgtagatatctatgtggggtagagcaattaaatcagatcttttaaacttcaatcttctcacttacagaatggtgatttaacttaagcgaaatgtctatcccacaaaaagaactaagtacgggcttcttttctcttccattcttccattctttatatacttaggtatataacacgagcggaaagtcactttttttatactattacgcgggaagggaatgg

SEQ ID NO: 573237 - DNA, 376 bp, Homo sapiens
  misc_feature (346)..(346): n is a, c, g, or t
  misc_feature (371)..(371): n is a, c, g, or t
agtgcagtagcaagacaagcctttttcttgccaatagtgtttcctcccctcacccttccataatctgctgccacctctccccaggagctccaagcctctgttcatttctgcatagtataaaaacttctgtcctctggtccttcaagtctcatattttgtgtggctcccatgcatttgcacataaataaatttatatgctttttcttctgttaaaagaagaagaaaagagaaaaagaaagatcaatatatataaaaaaagctgaccccagagaaaacaaagataaatcagataactaacagaagctaacttggaaaggtaaatctctttaaggaaaggttccaaggnttaagcctgggggtaatttaaattntccag

SEQ ID NO: 573238 - DNA, 103 bp, Homo sapiens
cacccggccactctagtcagctcagattcccaagattacaaaaggaaattcagctaattatagcttgatagaaattatagttctgccgattcctgattgacag

SEQ ID NO: 573239 - DNA, 283 bp, Homo sapiens
  misc_feature (28)..(28): n is a, c, g, or t
  misc_feature (60)..(60): n is a, c, g, or t
  misc_feature (72)..(72): n is a, c, g, or t
  misc_feature (96)..(96): n is a, c, g, or t
  misc_feature (103)..(103): n is a, c, g, or t
  misc_feature (166)..(166): n is a, c, g, or t
  misc_feature (185)..(185): n is a, c, g, or t
  misc_feature (274)..(274): n is a, c, g, or t
tggggggggggaaaaaggagtttaatanggaatataagaatttttctaatttaaaaacangagagagatacnacaatctaaaataacataatattngcgaagnctaaaagggggacaattaatttccaaaagagacttaagagagacttaaccaaggagaaggggnccaaatcaaaaaaagaganacacacacacccacacacacaaatatatactcttataagagagacagagggagggcaaaaaattaaaacccctccctaatagagagagnacaaactta

SEQ ID NO: 573240 - DNA, 391 bp, Homo sapiens
ggggctgctgatcaccattgagaccacctgaagatgggccatcaaaggctcaaatgaggccaagggactggagcccagaacttaggtgggcagctgtcaatcagcatgtgctaattggatctgagttcccgcccaccggttcaggggagccccaaggctttggtattgaaggaagcaggtgactcatctttctcctttttaaaaaaatttttagaaacagggtctggagtgagtgacgagatcatcgttcactacagcctcaaactcctgggctcaagcaatcctcctacctcagcctgcccagcatggcaaaaccgtgtctctactaaaaataccaaaattagccgggcgtggtggtgggcacctgtagtccccgcttcttgggaggctg

SEQ ID NO: 573241 - DNA, 331 bp, Homo sapiens
  misc_feature (12)..(12): n is a, c, g, or t
ctcacagtctgntaatccagcactttgggcgcccaggcaggtggatcatgaggtcaggagtttgagaccagtctggccaacatggtgaaaccccgtctctactacaaatataaaattagctgggtgtggtgtcaggcgcctgtaatcccagctactcaagaggttgaggcaggagaatcagttgaacctgggaggtggagattgcagtgagccgagatcatgccattgcactccagcctgggtgacaagagcaaaactccatcccccctgcccaaaaaaaaaatttaattttcacagaaaattaatagcataggttttattatcctcattt

SEQ ID NO: 573242 - DNA, 377 bp, Homo sapiens
tcgacgtcacttctgtacactgaagatgttcaaagaggtgccatggctttgaagaacctctgggatagtgaaaggggcttgtaaatgtccttggacattctacttagacccagcacccatctcatttccttttccatctcctcaactcttgtatttctttttctttcttactcagtgaagactgggggctttcagatcagatctggttgcagaagcttttataagtcacataggagtttagatcccagcttttctgagcttagtgaccttggtcaagttatataacctgaggatttcttaccttttcaggtaatctaatgaaagaaatgatccctcaccccagaagaatgctcatgaatgcacatgcacaaaaaaaa

SEQ ID NO: 573243 - DNA, 212 bp, Homo sapiens
  misc_feature (48)..(48): n is a, c, g, or t
gggggggaaaaaacccccaaaaagggggggggggggggtttccccccnttttatccccccccttttggggggtggggggggggggtccctttttccccccgggtttttcccccccctgggcccccatgggggcccctttttttttttaaagggggaaaatcccttggggcccggggggggggccgggggtccccccccctttttttttttca

SEQ ID NO: 573244 - DNA, 1140 bp, Homo sapiens
  misc_feature (247)..(247): n is a, c, g, or t
  misc_feature (268)..(268): n is a, c, g, or t
  misc_feature (298)..(298): n is a, c, g, or t
gggagcgcgcgggcacggggtgcggctggaccgaggcgtgcaaagattccagaatcggaggacatgatgaagactcgtgctgctgttttagtgcgggtctgctggctgacctggggagaagtgggcgaggtcgtgggggcatcagacggtgctcagacgatatgcatgctccgaggcaaatgtgccagtcagggtgaaggtaggtacgtcaataacgcggaagttcacatagatgcctggggcaagncgcgcggctgacatatcacgnagtgagaggaaccctcgtcagtaggtacanatacatacctatacatcgcaaagaggacgcaagacgagcgaacgttgctcgaggcgagagccgtagaaaagcacaggccggagagagaagaaagaggatgcccgtaaggtgagaggagggcaactgagagacgaagcttgataggagactccgaggagtgtgcggttgagagctattgattgggccgtcttggggaaaagtgtaagcacctgccgtgaaaccagatccttgcattgtaagggttctagcagcacgcggtctgcagcaacgtggactctagcgcggggcttggctcgtccagccttgagggagatgcctgaaccaggagcctcgctccgtttctacctctctgggatagagatgggtggagcggtagtctgaggtcgcctgcgtgggagaacggaccggacagaagagcgcacatgctgggatgttcatgcgaggaccatgttcatgccgtgcgtcactagcatcatagagcgagctcttccaggacaggttctttcacccggggaggccccaggatacctatcaataacgtggccttcaagctggcccaaccggaggctcaattcttcctttgcccagtccggatcgccggagatggagtccttcgtaacggtaagagacccgtgagttccaggcaaggttcaagcctgccttgagagtgatacgggaaggcaaaagggggcgtgacatcacgtccaaaagcggcttcaagaccggccaagagtactaacgaaggcgcgaactacggacgatgtacgcggaaacacacaacaccaggagttgacaaaagagacaagtaagcacaggacagtgtaagtagaggacaaacacag

SEQ ID NO: 573245 - DNA, 818 bp, Homo sapiens
acgtcgggtctccgcggcccgggttattgtacgaaccatccggacccgcgtaatcgtaggaactatcggccccgcgtaatcgtatggtctgcgcgggtcccggcctcccatcagagctgggactccccgcccccaattggcgggcgatagagtctcctcgccccagagtcatcttcgggagcgcccagggcccgggtgattttgggctcgccgtggccccgggtgattgtttcatctccgtggcccgcggtggtctgtagcgtctccgacgagccgcggactcccgtagggtccccgtggccccgagttgtagtctggggacaccccggccgcgggtgatcgtcgggtctccacgcgcccggtgtcgctgacgcggatcctggcctcggtcgccttctcaggggctgccctgcataagtgcccgcatggagcaggattgaacattctggcacccgtgcggaagggtgatcgtgtcctggtgcgtgagtcttgacccaggtgcctgaaggaaaggaggccgctttgcgacgggcagcaaatgatttccacccccgcgtcaccgtgcgcctggcaggagcaccggataggcacccgtgggatttaccgatctccaaggtcattgtggtggggggacctgtcggtggggaagacttgcctcattaataggttctgcaaagacacctttgataagaattacaaggccaccattggagtggacttcgagatggaacgatttgaggtgctgggcatccccttcagtttgcagctttgggatacgctgggcaggaagaggttcaatgccttgctcactactataa

SEQ ID NO: 573246 - DNA, 868 bp, Homo sapiens
gcctcatctgtacccattctaatcgcaatggcattcctaatgcttaccgaacgaaaaattctacgctatatacaactacgcaaaggccccaacgttgtaggcccctacgggcctactacaacccttcgctgacgccagttagaactcttcaccaaggagcccctaaaacccgcacatctatcatcaccctctacatcactcgtcccgacttagctctcatcatcgctcttctagtatgaacccccctccccatagccaaacactctggtcaatgtcaaactaggcctcctattaattctagccagctctagcctaggcgttgtactcaatcctcgtgatcagggtgacgccatcaaatctcaaatctaacgccctgatcggcgaccacgtgcgagcagtagccataagcaatctcatatgaagtcagcctagacagtcattcctacgttaatcacacattagtaataagtggctcctttaacctctccacccttagcacaacacaagaacagctctgattactccaggcatcatgacccttggccataatatgattgatctccacacctagcagagatcaagcgaaaccccttcgaccttgccgaaggggagtgcgaactagtctcaagcgtcacatcgaatacgcgaggtcccttcgacctatgctgcatagcgaatatacgaacatgattattaatatgcacctcagcataaatcttctaggacaaatgtgaggctcttcgccggaatgactcacatattggcccgagacctactttaacgcctgtggttatcgacagtagccaatcgcaggaattttacctcataaagtcacttgcctattatagatgtcctcgatcgggccccg

SEQ ID NO: 573247 - DNA, 447 bp, Homo sapiens
agcaatatccagaagctattttttgaacgtattaatgtgttcagccctgtggagttcaacaaggtgtgggtgttgcccggctttatcaaaatcagcctaaaaacgctgttggagtgtgtggggctgggcccctttgggggttttgggttccaacaggggaaaatggactccccctttttgcagttttacctgtggggttttttggcccacaaaaaatttgtgccctttttgttggaaaaaatggtggctttttttgccctgcgttgcccaaaccctttgcccatgaaaccccagttggtttagtgttttttgggaggggggttaggggcaccccttcccatgccccggtttttccctgccccccatggcccccaggttttggttttggtggtctttccccccaggcaggtgttagggccggcctaataaaaatgtgtggcctcctca

SEQ ID NO: 573248 - DNA, 711 bp, Homo sapiens
ataccaggagctggaacgacgatgcagcgcctgatcccgcccttccgcgaggattcggccaagctcaccacgctggtggatgccgacgccgaggacttcatcggctacctggaggcattgaagctcctcaagacacacctgaggagacaggcgctcagtgggcctacacgagggtctgatgcgcgcagtctctgtgccactgacgctgtcgtagacacacggcctcactgtgagcgaccctgcatgaactgtaccggtgtgtgaacatggcctgccggtcagacctacatgtggcggcaaagccctggagatacgcgtgtttgacgcatatttcaacgggctcatcaacctgagggacatgacagacgaggcatttaatgaccagatccaccatcgagtttacagcctcttgcacgaagccaagacacagactgcactggtgctggactgtttgtagaccccgcatgagtgacggtgcgggaggcctctccgagctctgtggcctctccctcgcccatacccagagggcagagctgtgacctcagtgaggacacaaatagttcatatgatgcccggaagatatgttgtcactctagagagcatctcctgagaatggaggcgctatcagggacaattttagcataatgggatgagtttttgggacatctcgaggggtggcccgtgcccagactccctttgtgagactgtgac

SEQ ID NO: 573249 - DNA, 152 bp, Homo sapiens
cctcgtgagtctacccaccttggttgcccaaaatgtgggattacaggtgtgagccactgcgccaggcaaacggggatcttttagtggtgcctcttctctctttggacttacggatgttgtcccttaaggaaacctggaggctactactgtga

SEQ ID NO: 573250 - DNA, 440 bp, Homo sapiens
  misc_feature (325)..(325): n is a, c, g, or t
acacatgcacacgtatgtttattgcggcactattcacaatagcaaagacttggaaccaacccaaatgtccaacaatgatagactggattaagaaaatgtggcacacgtacaccatggaatactatgcagccataaaaaatgatgagttcatgtcctttgtagggacatggatgaaattggaaatcatcattctcagtaaactatcacaggaacaaaaaaccaaacaccacatattctcactcatagggagaattgaacaatgagaacacatggacacaggaagggaaacatcacactctggggactgttgtggggtggggcatcntctctacttattaaggctctgatttttactcacatgtatcgatgatctttgtctgtctgctcatcaatatcgcttgtatatgccttccttgtttctgtcgtttgtcatttttgct

SEQ ID NO: 573251 - DNA, 152 bp, Homo sapiens
tgtagcttcgggaggctgtagacgcacgggaacgaaagggatcataccagttaccccggaaaagacactaaaataacccagcttccagagctaaggaaatttatgtgccgaaaagcgaaacaagaagataggaagagcgagaggcgaatgcg

SEQ ID NO: 573252 - DNA, 1391 bp, Homo sapiens
tttgtatgtttgtttttcttgttttgtgtttttgttttttctttctttctttttttgtaggctgttcgctttttgtttctgtttttttctttgttggttttgcttttgttttgtctttgtgtgtgcgttcttttgtggttcttgttctcttttgttgttttgctccttttctctttttcttttcgctttctattccggttgggtgttgctgttttttttgttctttgtttctctcctgttctttttgtgtttttcttgtcgtttttttcgttcttccttgtttcttctctgtaacgtgtggcatatcttagtttttttttttatacaccggtgtctgggattatcaattacattttttgtctgttggtgactccatgtgttgctccccttttgcgaatgttttcaatgttcacatatattctcatatatacatattgtgttgttcacaatatatcttccctggtactcgtgtaatcacgctgttttttgtaaggtttcttactcggtaatccctgttggtgcgcctattggtggtatcccccgtcgagttgtgtgcgttttgcggagaatttctgcccgttcccgagtgtttctttctttgtctcctcctcttgtttggtgtgctgcttccctgtgcgtactctgtttcgcgcagtccccttctctcgtgttttttttgttgccgtcacttctgtacgcctgggggtatctgtagctcattccaactttttcagcaacgttggatgaaccccgagctgtagccacccccttttgagcccattagtttccaaaggtcacacagacattatccgcagcacacaatggttatggtccactattcattcccttggagccccggccaagaacgggtttgcatgatattttccctcgcgggataaactcatctttgggcaacaacttggggtttccaaccgcttatgtcctgtggtaccggacaatttctcgaggttatacgaagtctctactccttgcaatcgcatggggtcgctttcggtctctctaagagtgtagcgagaatgcaagaatctttctgtggaaagatccctgatcttggtatagatccactcaccccttcgaaggtggaggcccacgtgacacccactcgaggaaatgtcaacggcaaaagagtcccaagaattaaggaaggcacatccctctcctgagtcacgccacagagggttgatctttgctgggaaacacgctggaagagtggacgcacccctgtctgactacacacactccacgaaagagtccacctctgcaccttggtcctgcgcttgagggggggtgtcctaaagtttccccttttaaaggtttcaaaccaatttcattgcactttcctttcaaataaaggtgttgcattccccaca

SEQ ID NO: 573253 - DNA, 137 bp, Homo sapiens
ttatgcattagggtgatggattgtggccattttataggattagtgtagtcaaggaaaatggggggttgttctctggcaggcaggagatgggggtcacaacgtgctcagtaggggagcttttgagccacggatgagca

SEQ ID NO: 573254 - DNA, 185 bp, Homo sapiens
gttttagggcctcggtccataaaaaaccccccccccctggcccggtggaagggtttttttgtccctccccccaactgtcctccctggggcaggtggcctggccccccccctggttttggggcgggcccgggtgggcccggttgggggctccgtttggggggttataaaaaccgccccccccccca

SEQ ID NO: 573255 - DNA, 807 bp, Homo sapiens
ggagtgacccttacaagtccttcttgatcctgaactgggttaggtgccgctgttgctgctcgtgtgaatctagaaccgtagccagacatgggactggaggacgagcaaaagatgcttaccgaatccggagatcctgaggaggaggaagaggaagaggaggaattagtggatcccctaacaacagtgagagagcaatgcgagcagttggcagaaatgtgtaaaggcccgggagcggtagagctcttgtgaatgagcgtgtatcctctcgatcacatacagaagaggattgcaccggagaagctctttgacttcttgcatgcgagggaccattgcgtgtccccaaaaattctttaacaatttgaaataaatgtgtggaacttaattacaccccagtcttcatcatctgggcatcagaaatatttccttatggtttgatgtcccattgtgtctatattgtgtaactggtaagttcactatgaacctcatgggttggctaaggctggtacgcttctatgtaatttccggcaattgattcccattcttaaattaacaagttcctatgattctgcagaaaaaaacgaagaagcgacgtaaaataaaacgttgtgacgccactcggcctggagaagttctaaaccacatggtgggcgcagggcccataggacggacgtggcctacggtccaagaacctgcccggaaggcgggtccacaaacagcggggaccgagtgaaaaccaggggttgggtacggctaagggcaggacatacccgcggataacaataagacaccaactcggcagagagcaac

SEQ ID NO: 573256 - DNA, 113 bp, Homo sapiens
atatcattgaaataggcagttgctagctcgccacctccagcacatccttgtgaactgtgtcattgtagactcgactggaaagatgacctgtattcaatcttttcaactgttta

SEQ ID NO: 573257 - DNA, 1083 bp, Homo sapiens
gcctgagccgtgcgggtgactgcttcagtggcttctccgctgactgggacctgggctgcccgtcggaaagcactgccctccattctgcacttgctttgtttgggctcatcattgaacgcgctatggggcctcctgtgcaaggcgggaaacatgcctgtgttgtgtaattgttgacaggagtgtgacacaccgacgggagccatttccttccaaaacaggggatgcattcatgccaatttacaacgtttttgggcaaacttggaagacttgtacaggtcaccacaggcactttacgattgcatgcatatattaccaatgtgcaaaattccaaacatgcaacacacatggtgcgattgcgaaccattgcttgtctacttgtttagctaaccctaattaacacgactcatgccagtaccatatgtgggcgctctgacctaagacttacgacaaacaacccaaacaaaaaccaatgcttgtcacccacacagtatttttaaccacaaattttcataccatttgcacaccactgaaaaaaccccgaacagacgaactctctcctcgggcaacaccggttctgacagggcaggaacctttcaaaagcccaggactcccgagaatgttgcttgcgaattaccccaggccaaacatgtgatgaccatgacaacgaaagttaacaacttgggaaaccccatgttggcccttgattgacacacattggggacaccatttactcttggctttggggtaaccaagggtaggagcgaaacaaacaaatcaaacacaggttaatttggtgcctgggcaatttcccttccgtgtacgcttcacaactcttagttgcaactctttgcacaacttggccccgtgtgttaccttaaagaagcaacttcagttcccttggattgatcttccctggggcacctttcttgtggccaactttatggtggcaacgtaatgccccccttttccaagagatcctcctgtacgaaagcacaaccactgtggaaactccatatagggaaccaaactattcacttggtgaaaccccaataatgtggcatatagaggaggcgccgaaaaacc

SEQ ID NO: 573258 - DNA, 563 bp, Homo sapiens
  misc_feature (517)..(517): n is a, c, g, or t
  misc_feature (536)..(536): n is a, c, g, or t
  misc_feature (546)..(546): n is a, c, g, or t
gaaaatattaagaaagaaaagaagatttcagccaaaatttatatgaataaatttcagttctgccacttactaaatgatcttgggaaagttacgtaaccctctgagtctcatttttcttatttttaaaattgagatgcagtaataataatgtttatctcacatgaacactattttaaataaaatgatttatgttaaaacacctagcaatggatggcaatgaatgagtaatccataaataagaatctacttaaaattgcaactattagcttccactagcaatgcaaagggcatttatatatcaataataaagaacgaatgttgcctgccaaagataatcgacaaactccaggaatcatctctgtgcagcagggtttatttttggcaggatttggggaccatttgggaataaaagacccaaaaggtacctcaacaccagacctggcacagggtttggtcaacatcttattggaaatcccatgggaggaaatcccattaggattggaggaccatttagggngtggttttatgggtattcnatacgggaanttatggcccggggcttg

SEQ ID NO: 573259 - DNA, 645 bp, Homo sapiens
agcggaacggggatcgagcctggtgctgctgcatggctgagggctgcggctagaagggctggtcgagtgctgcgctgctgcgtgaggacgtgacaagtcaccgtactttagctccagttcccctgatggatcttcatagagacacattgtttgcagcagtgctcctggcaggctcacagcagttcatctatcttggtgtactggtttccatatttgtgatttctatcatggaaaactcgatctaatggcgtaacagtcaacctttgaatgaaccgacacattgtcaggtaccacgtgaattcgtcttccattcacatgccatgttcccttcactattgaaccgaactcattactacccacggactacctatgaaatcacgatcgaaacgcattttgccaagagtcaacgaccgaactacgtccaggaaaataagttggaatgagaaatgaggtttcaaagagagttttctagaagacgtggggagagtttgcgagtgaaacaaattttgtagctcaatgaaagacttttgcgttcggaagagggaatgcgcacagatgtgactcacttagggaaacactttggcgtatctttggtttgtatattgactctggaactaacgtcgattgaattgttgggacaatgac

SEQ ID NO: 573260 - DNA, 151 bp, Homo sapiens
acaaaacattaaaagacccactagcacacacaaacacaaaagtgtctaatagctgtccagatgtacattccacgtgtagtgataatgcacatctagacatatcgtactgtcaattgcatctctatgcatgtctatctaatgacactataga

SEQ ID NO: 573261 - DNA, 161 bp, Homo sapiens
ttagccgggcttggtggcccatgcctgtggtctcagctccttgggggggtggggcgggagattcttttgggcccggggggtcagggctgcagtgagctttgttcgcaccttggccttccggcttgggcatcggggcaggtccccttcctccttccccccca

SEQ ID NO: 573262 - DNA, 354 bp, Homo sapiens
gtcgactcctagtcagtctccagagagaagatagaaatgcaaactgtccagtaactgtgagccatgctaagctgaatagacaggcaaaaaggaggctcactactgtgccttgggaggaaatttgtattatcagggagaatggtatgtattggttaaggtggaggtgtgatagaaacattttgagtatataggagaatttagttcacaataggagtttaaaaagataaaaaaggccgagtactgtggctcatacctgtaatcccagcactttggaaggccaaagcggagggttgacttgaggccaggagtttgaaaccaacctggacaacacagagagaccacatgtctacagaa

SEQ ID NO: 573263 - DNA, 157 bp, Homo sapiens
tggcggaaacgatctctgctattctcgaacttgtaattggagtcgaagcccggctcgctggcgtggagccgggcgctgcgattgcgagtgcctagatgggccacattattggttaacgcagcagacagtccgtgctaccgatcctcgaagttctgta

SEQ ID NO: 573264 - DNA, 175 bp, Homo sapiens
aagcgtcattgtgtgacacgtcgttggagtgctgttttataaccaacaagaggtcaatgtatagaaatacctgatgggagaagactgctcttcgtcccatcagtaagggcaattcatgatgttaaagccacagatctgggattaggtcaagtaagatttaaggcagaagtagatt

SEQ ID NO: 573265 - DNA, 705 bp, Homo sapiens
actacggctcacgcctgtattcacagcaatttgagaggctgtagcagtcgcctgactagagagcttgatcgctagccatctcgcattaaccgggatactcccatactttctcaacagtacagacatttagccccttgtggcgcaggacgcctgcagtaccagttacagactggctgtcgcaggagtaggattacaaccaggcaggtctggcatgcaacgcgtcacatatcgagctacgcacttgagcctgctcgtcggagtcagactccttgtcgtactgatatgaggcgaatgactgacaggcgatagcgtactagtctaaccacatgtactcatgaccaacgcgtactatttgatcagacttatagacaccgtcggatgactgcttcacatacctaccattagtacagtcactgtagtcaggagtgatctcttagcaagagattgacttactcatgactatacacgctagcagattcatgctgacagcgcactcacagtgagatatcaggatcatctaagtcatcagacgcaacttaccatataagatgtgacgagactagtagtagcactaacgtcgtagtacgactgatattaacctaatgacctcttaagctaggacccaggtcctagggctaagtatgactgtctactaagggtacccagctactactacaggcttatatgcctttttcccccctggcg

SEQ ID NO: 573266 - DNA, 208 bp, Homo sapiens
  misc_feature (159)..(159): n is a, c, g, or t
  misc_feature (179)..(179): n is a, c, g, or t
gaaggttcaagtcagggcctgagtccaggtctctgctttctgctggacgggccaagccctgcattttggaccctgttcatctctccagccttgtttctcacaacttcctggcagaaaccttggctgcagtcactggcccttcccagcacatgcaccttnctgcctctggactttgggtnttgccagtcctgcgcccttcggtttttcc

SEQ ID NO: 573267 - DNA, 821 bp, Homo sapiens
taaaacccagcccatgacccctaacagggccctctcagcctcctaatgacctccggctagccatgtgattgcacttccactccataacgctcctcatactaggcctactaaccaatcagccactaaccatataccaatgatggcgcgatgtaacacgagaaagcacataccaaggccaccacacaccacctgtccaagaaaggcctgtcgagtacgggataatcctatttattacctcagaagttttcttgcttcgcgaggatttttcatgagccttttaccactccagcctagcccctacccccgcaatataggagggcacatggaccccaacaggcatcaccccgtaaatccccgtagaagtcccactcctaaacacatccgtatgactcgcatcaggagtatcaagtcacctgagctgcacccgataagtctaatagaaaacaaccgaaaccaaataattgcaagacatcatgctatattacaattagactgggtctctatttgaccctcctacaagcctcagagtactgtcgagtctccgccttcagcatttccgacggcatctacggctcaacattttttgtagccacaggcttccacgggcttcacgtcattatcggtcaactttcctcacgtatctgttcatccgccaactaatatttcactttacatccaaaacatcactttggcttcgaagccgcgcctgatactggcatttcgctgaatggtggtcgctaattccggatgtctcccacctatgatggggctcttacacacaacccccgaacgggttatcaccacctaagagccaaaacaca

SEQ ID NO: 573268 - DNA, 487 bp, Homo sapiens
  misc_feature (59)..(59): n is a, c, g, or t
  misc_feature (180)..(180): n is a, c, g, or t
  misc_feature (182)..(182): n is a, c, g, or t
  misc_feature (221)..(221): n is a, c, g, or t
tggagtggtccttccaaaactcagggggggcccggggcagaggaaaaaatttccccccnatgttttccctttgtgtgctgggaataagcaaaagaaacgttttttttcaacctgtggcagagctgaagaagcaaacggattttgagcacaggattcccaaagaacagtggtgggtcaagntncggcccctcatgaaaatcctggccaagtacaaggccagntattacgtgtcggactcaggccagctggaacatgtgcagccctggagtgtttgacccagtcccgcctgcatgtgcctgcagcccccgtggactgtctgtttttgtaacacttaagttattttatcagccctttatgcccgtattattaacattaatacctaatcggggagtgcccatttgcccccccagccccagtgggtgctgtttgtggagtgtgtttcatgctttcaaatgggcatatgagcagaattaaacatttgcctcca

SEQ ID NO: 573269 - DNA, 166 bp, Homo sapiens
tactttggtgtgccaacgactggtgaccccttatgtagctttagcccttggtcaccccgatgacgtcgatcatactacatcctgcccaaacactaggttcacaggtacctgctgctcaagcctctcgcgggcccagtccagcttctcggccacagtgcctccgttc

SEQ ID NO: 573270 - DNA, 571 bp, Homo sapiens
cctcccccgcccctacgggcccattaccggcatcctccccaatttccccccaacttgttacccccaccaaaaggccccacatccctggccccatccccaagcattggtaacctcgtttccttgggaaaatttggtgacccttcacattccggaccacatctttatattttctccccctttttttctcccccaattctcccccccatattcccccctgaacttccacccggtaaaccccctcctccgggctcttctccgcaaaaaatccccaccaccaatttcttccctttaatccccgccctctcttcccagccaaattcttgtggcctaccctcggtctctttttctgcgtctccccatacagtccccccactttactgcccataactgccgttcctccgtggaaatcttttctcccccccacccccccaccactcttacctcctgccaacctacacggctaaccctctgtgcgtcctactgggcggctctcctccccaatcatcttttctccgcccacccgccctatctcccgcccgtaatcctgccctgccctctcttttatataccc

SEQ ID NO: 573271 - DNA, 227 bp, Homo sapiens
tccgtgacagctcaattcccatgacttaattcagcagacccacagtgacgaagactcacatagacgtggcacccgacttcctacattctatgggttatttgtttatctatttaacagtaatactatgatccattaagtaccactacccccaccttcatgagccgcgaacgcctacagatcggcgcggctactaccaggcaaactcagacgaccatcgcaccctcgca

SEQ ID NO: 573272 - DNA, 238 bp, Homo sapiens
gtcctacagagccatcacctaaatatcagcggctgtgactccccatgtacccccacaccaattatgaaggccaggcatgggacacactagtaattcccctctgctttatggtccagcttaaaacgctgccataagcaggaattctaactcaggtatagcacttattggaaattcccaatcctcaggagccacacaagcccagggccagcaacaacacttcggggagcggagggatgag

SEQ ID NO: 573273 - DNA, 155 bp, Homo sapiens
gctgtactttcttcatgaattcccactgatcactaaccacacaacaccatctcactgacaccatgttcaaccactgtcttttactataacaaattccaggaactggaccttaggaaatccaagtatcaacaccaaggattgtggagatattccac

SEQ ID NO: 573274 - DNA, 266 bp, Homo sapiens
gatctagagtttaccgcccgaataacctcactaaaggtttacgaatgaaatttgggagaagctcagctctgtaaaatagctcccgttttttttcttgggaccctacttaataccgtgggctcccattgtgagctgattaatttcttgcaatcagaaaccatccctatcacatcagataatttgtggtttgacctagggaagaagaggttgagcgaagaacccccaccaggtatggtttgagagtctttattgagggttaattgcgg

SEQ ID NO: 573275 - DNA, 103 bp, Homo sapiens
gtggctgtaagcatgactttattagagtttaggaggtcagaaatactgaagtcaaggtgtgggcagaggccagtcccttctgtcgtcttctcgcccccgtata

SEQ ID NO: 573276 - DNA, 179 bp, Homo sapiens
gacatctagagatcccctccgaccactggcaggcatgtattaaatattgagacaattgcgggtatgtgatacgttgagactactgctgcactcaaacgctccctaacagatccaaaatgtgtccagttcttcattcattttctttcgggcacaggcgtgagagagagagatagtggcta

SEQ ID NO: 573277 - DNA, 457 bp, Homo sapiens
tccagtccacaacactacaatccttcaatctctacagaaccttaaatccattaattcgggggggtttcaccatcactaacccccatgtgctgtttaccagattaaattttagtcaatcatgataattaatctcacataaacctatagttcccttgtctctcttattctattgtatctacttggaaaaaccataaccctgattaagtgcactctatttactcctgccctgcatatgttcagctgaaacacggctaaaataaaagataaataaaagtgggtggtctcagctgggtgtggaggctcacacctgtaatcccagcactttcggaggccaaggcgggctgatcacaaggtcaggagatcgagaccatcctggctaacacggtgaaagccagtctctactaaaaatcaaaaaaattagccaggcatggtggcgggtgcctgtagtcccagctac

SEQ ID NO: 573278 - DNA, 450 bp, Homo sapiens
  misc_feature (2)..(2): n is a, c, g, or t
antcttgagtatactagtaaatctggaaatcgcgagttagtgatgtgagttgacaggtgccagaggatttagcaagggcacgcattaaatgctatagtgtgaggcaaaatatgagttgagttatagttaataactaaatggtcaggaatagagcgaggaaagaagaaagagtaatagatagatgaaagagttaaatttttcttagctttagagtaggtagggtaatctcctgggactagggcccacaactctggagggggtggcgctttcttgactcgggtatgatgagtccatcccttttttgctgtacgaacaggggtggttagcagcacaaggtagggtccttcccaggctggctcgagtttaccttctttatcaccctttggtgagaccgtgatcttcaggctggcgctggtttaccggacattctaaggtgtggtacatgtgcta

SEQ ID NO: 573279 - DNA, 109 bp, Homo sapiens
tcggtacctgggaagcagctctttcgtggtctacaacgggcagatcacgcccatggcaccgccggcctcaactgcaccggcctcgggttatcgctgctgtcgcagaaca

SEQ ID NO: 573280 - DNA, 288 bp, Homo sapiens
  misc_feature (231)..(231): n is a, c, g, or t
gatttgcagacgacatgagctgctgattctatcactgatcggggaggataaaggctttggaattagtgttgacatcagggctcaaagtgtggggtctggggtacaggctgcagaggctgacaggagccacgtgtgtgtgcatgtgtgtgtgtgtgtgtgtgtgtattctctcgtggtggacacatatgtcttcagcaaccctggcctgcgagagctccctcctgagctggngcaggtgggcaacctctggcagctggacactgaagacctgaccatcagcaatgtgcc

SEQ ID NO: 573281 - DNA, 165 bp, Homo sapiens
gtacgaaggcaggagtatgtatgatggtccatcctggcatgagcagtggctcacccaccggccttgaacgaggtgagcttggctctctggtccccatggacttagaggggaccaggcaagaactctgcacagatgctttgtggggcctgtgcatgtgatttgcag

SEQ ID NO: 573282 - DNA, 503 bp, Homo sapiens
tgtggatgatgtgggtatgtgtgtacatatatatacataatttttaaaatattagcgagagtcatgtctttcacttttaagttcagggagcagtttgttctaaccacacaaacattctcagtgtggtatttcatggagctttagagacaaactaatgtctcattacataatgaaatatgaacataccatcgtgttatttcaatgtcttcaaatacatgatctgagggtgtatgtcacatacttgtgtaccaactcttagttgtgccttggacatttgcattgcctacctgcaaacaattactaggttaactagaattgctatgcagttctaccttgcgagtgctacacggtaattgcattttaaagtatatttgcacattttacatgctatgctatatgattgcctttgggttttgtgtacagactatttttgttgatattcaatgaaaattataggcttgaaataatactgttcctatgtgaagtaaattgctataacctaa

SEQ ID NO: 573283 - DNA, 526 bp, Homo sapiens
gaagaaaacacactgaaaaacacgaatggtttgcagtaaatcctatcgttcaggaatgtagtatgaaggagggaataccatgatcattgtattgtttcctataggaaactgacattaaaacttcagagaatctacagccgagttcgaagggagactgggagctctgtcgcactgaatgacctcgcagaggaagactacactgagaaaccatttcactcaaggaaactcacctcagtaccacgcagccagacgttgccgagaaatgttccagggaagaaagtaatgggaataaccagcaatgtaccctgtcaaggaatgaaggtagatcattgtgaaagatttgaagaaggtggacacaaagccttcttcagaaaagaagattcacaaaacatctagagaagacatgttttctgagaaacaggacatacctttcgtagagcaagaagatccttataggaagaaaaagcttcaggagaaaagagaaggaaatttacaaaatttaaattggagtaaaagtcgaacatgt

SEQ ID NO: 573284 - DNA, 254 bp, Homo sapiens
tagcctcgcagtgcttgcttgcacgctctactggtcagcacctgcgcatccacctggtagcctaccactgctcctactgtgataagtccttcctggcagctctcccacctccagcagcacaccagaatccacacatggcgacagaccctacaagtgcccacatcctggctgcgagaagtgtttcactcagctctccaacctccagtctcaccagtgccagcacaagaatggacaatgccctacaagttgtcccc

SEQ ID NO: 573285 - DNA, 768 bp, Homo sapiens
  misc_feature (9)..(9): n is a, c, g, or t
  misc_feature (35)..(35): n is a, c, g, or t
aggtaaacnataatctctgtaatgcagtggtatcnaataattaacaggatacaatttattacaaataacatatacaagattctatcaacatttaagcaatatgatacaattttgggatgcatattaataacagatttatcaaatacaactcaaagaaaattaaacaacatttttatttgatcagcttcctgtatgattttaatataccaaattagcctaatatgtttcttttggacttccaggggccctatttggacttccaagggctttaatgcccaaaagttagcttgaggtcgaaaacatttaagttagaattttacatttgattttggaaagtttgtcaaatatcaaaggtttaaaacacttgatcaaaataagattacaggtcactgtaagataatagttattcatttagccaaactgataattcaaaaatttcaaaaagcaaaaattttactctttgacagaggggagattcagttttccaaacaatcaaaagacataataaaaacagcattagggaaattctctcctcttattactaatattttttgcagtttactcaaaaggtaaacaaaaatcttttactatttcttattaatgtatacaaaaatcttgttcaaaagagaaatccaaattctaactttgtgccagtgtattataaatgctaaagctaattttaatacagccttataaacagatcaatccaattgcaattgttttcttttcctttttttgtttttttttgagacagggtctcactttgtc

SEQ ID NO: 573286 - DNA, 181 bp, Homo sapiens
  misc_feature (8)..(8): n is a, c, g, or t
  misc_feature (170)..(170): n is a, c, g, or t
gctgggtnatctaagatccgcagtggtgtggtaaaaactctagagagcatagatgtacatgagcatatctgaatgctccatccccgtctcttttctatcttatagctgtccttgcctctgccctggattggttggcaaactaaaggacttgatgtacataactcctgtcnttttcccttac

SEQ ID NO: 573287 - DNA, 226 bp, Homo sapiens
tagtatccaaactgtggtgatgatcgctggacgatgaggtctggggtgaggttgctggccctgtcgctctgccggaatgatgccccgttctcttgggcgtccgtggctatgggtcgggagccgtcctctgtcagagtatcagtttctgtcttgtccggtgacgcagcgatggttcaacttggagagtgaccttatggagctgcatgctgtgtaccagcgatactgg

SEQ ID NO: 573288 - DNA, 823 bp, Homo sapiens
  misc_feature (136)..(136): n is a, c, g, or t
  misc_feature (510)..(510): n is a, c, g, or t
  misc_feature (558)..(560): n is a, c, g, or t
  misc_feature (583)..(583): n is a, c, g, or t
  misc_feature (727)..(727): n is a, c, g, or t
  misc_feature (729)..(729): n is a, c, g, or t
  misc_feature (731)..(731): n is a, c, g, or t
  misc_feature (734)..(734): n is a, c, g, or t
  misc_feature (741)..(741): n is a, c, g, or t
  misc_feature (760)..(761): n is a, c, g, or t
  misc_feature (777)..(777): n is a, c, g, or t
  misc_feature (779)..(779): n is a, c, g, or t
  misc_feature (787)..(787): n is a, c, g, or t
  misc_feature (820)..(820): n is a, c, g, or t
acccccactccttcccttaatatcactatccattcgccctccaccttttcttctcacctatcatattctttccttctacatatctctccactctacatccctcccctctcctcctacaattctcactcccatcacnacatctttccctctctattaacacctctcgcctcttctagccacaaaaccctctcataaccctaagccttctttcttctctcaccttccttccacatcaatccccattaccaacccttcctccctttcttcccattttagtttctttaatattaccctcttcacaacctttcccccctacctcctttatcttctattctcattaatccctcttcccccacacccacctctctccaatctctcttttcctcactgtttctaccattcctcctttctccccaattatcccccttactctccctcacgttacttccccatcttcacaccctaaaatttttctcccttattcctcctctccacccaactctctccgcntccaattatcccctctttcttctatcctctatctaaacatttatctcnnnccccccttccactcaccctcctnctccattatccacttatttctctactctctccccctcccccctctctttttaacgccatctccactacctttcaaatcaaaaatcttttcttctcatatccacctttaataccactcctcccgacactacttatctcaacccancngnccngttccangtccattcaacctcaaacnnccccccccccgctcgngnattatctntcattatctctcaatattcacactttttcccanccc

SEQ ID NO: 573289 - DNA, 612 bp, Homo sapiens
tacttcctgtgtgtgttgtggatgaggaaatctgctcagttggatacccacactttgggcactgggaaaatttttccaaagttctcaaactatttgaaagaatatgagcatagttcctttaagaaatctggtgatattaaagtataggaaccttgcattgtctttaaaatatagttcagacagtaggctcagaggcagaaaaacaaaaggcactgagatatttacagtttcgaatgaatattaaagacatcagggagaaattaaatttagttttctaactgcaataagtatatgcaatcaaaggtggggtcggaagttgtaaaaaggaccaggacagctcacaggtaagaggagtgcagggaagacacaaaaaaatcagaagccaatactgagtaagtcagaacttgctgaatcctagtaccaaatgtgagatggaataggtatgaccaaagtctgcccaacaagcccagggcagatggacacacaggattccaggggacagcatgggccctgcagccatgtgggctggaagggcacttcatctaagggggccccagattcccagccacagccccaggacaagccagctcaggctttcttaccagggcttgg

SEQ ID NO: 573290 - DNA, 144 bp, Homo sapiens
gggtaaaaggctttccccccaggggtgggatattttgaaggggtttttccaggggggggaaggctttttttaataattaccccaaatactttcccgaaaattggccgcttttttgcccaaaataacccttttggggggctttta

SEQ ID NO: 573291 - DNA, 113 bp, Homo sapiens
cgtggacctgaatcgatattgggctatcagggtagcagcacagcaagttgaagttacaccccagctatatcagggcaatcatggaggagagcagagttgtatgagaagacgga

SEQ ID NO: 573292 - DNA, 210 bp, Homo sapiens
cacatgagagttacggaaaatgggaagctgtgcagatatacaactcaagtggtcgctggaacaacattactacattcaggtccgagcaggtgataataaatatatgcacttgaacgtactcaaaagtcttcccggacaaaatgaggacctgtggtaccttacgggactaccaggattgacaaaagagaaggactgacgacgcgtgaccgg

SEQ ID NO: 573293 - DNA, 888 bp, Homo sapiens
tacggggcgtatataattcgtgggcgagaagaaattagacacggggttaaacaaagcgtttcttcacctatatgtttagcccgcggatgtttctcgaaaaggagaatgtggtcggaaaggtcgggcataaaatatggtgacggctgcaagcggtgatgatatctagggccgcccacaacccctagcgggtcaaatataagggaaaaacaacttgaggcgttaaacataccgccgttgccagcagattgctgttatttgctaagccattggcggcacttaccggccatttggcccaccagtagtggaattattgcgcaagctatcttctcgcaaaacaaggggtctccaaaacaaggatgtgtcttaagcaggaggtaattttataagtgggaccagttctcggcaccaattgttagagcgatgtttggccgccccgccccaacgtatataaataggtggcaagcgtagtattacgcaagtactggggaagatgttacaacccccagatataggctaattcatcctacagtgggctccgccccccttctattgacgagttcatcagtaacaagagtccacacaccacactcttgtcgggagttttggaatgtagaatggggcggtccccgagacccagggttttgctatagtgaaggaccttaaatatctagggacagtgtttgttcaagatgaggccaaagggcaagtgctatagagagacatgcgctctcaggcgattggaaatgtgttccctgcatggcacgcaaggggaatacccctcgaaacagaagaattccaaggtgatcatgaagtcacccacacgagacgcttcaagaagattgacttttgtccactatcaatactgacacagactttgcgcaacatatc

SEQ ID NO: 573294 - DNA, 576 bp, Homo sapiens
acatatggtaccttgtatagttaaaatatatagaagtactagataaactgctattctagtagcaggtgcacaatatatcataatccatcaacattttagaagagtacaaacttctccacctctccactgatatttgttctttataagtaattcccattctattgggtgtaatttggtactatcaggtggttaagatttacgtttctgaaaagactaataatggaagcatctttcatagaactgttggctatttgtgtatcttctttgtagaattgtatatataagagctttgcctctttttaaaatttgcctattattgtacatatttatgtagtacatatattttcatgcatccacaaaatgtgtgataaccataaaaggataactgggatactcatcacctaatgcatttattatttgtttgtgttggaaacatttcaaatgttcttttaggtatttggaaataagcattaaattattgctaactatggtcgccctaagtatgctattgaacactagaacttactccttctgtccaactgtatttttgtagccattaaccaacctctcttcatt

SEQ ID NO: 573295 - DNA, 160 bp, Homo sapiens
ctagcggatccttatcaacatcagtgtgcccttctacaaactctttttgttttaacccaggtccctccccacctacccccttcctttgcttgcagtgaaaaaagtctcaccttattttccctgctagcaaaggcagggtacctgcagctcgaattctgta

SEQ ID NO: 573296 - DNA, 202 bp, Homo sapiens
cttgtttctctttatggcttggcttcattcagacctggggtggagccacatcaaacccactgcccactggctgtccgtctggcctaccccgcggttaccaaccacagtgatgaagcagcgcttgcagatgtacaactcgcagacaacggtcagcaatcagctgcatacagacggtgtggaggaccgaggggttgggggcctt

SEQ ID NO: 573297 - DNA, 270 bp, Homo sapiens
  misc_feature (6)..(6): n is a, c, g, or t
ccagangtccagtcaagtgccaaccattttaactttcttgatcatagctgatggccttcctgggacaacctggaaggtcaaagcaagaactcttgagattattctagctgcaactaccagtggtggctgtgtatattactgctgtgtagaaacattagtagtgttttcattttaggtccaagtaagatgtttttagtgatatacctgcagaatggctctgtcttaaaactgtgtagaaaaaccctaatctttaggagctttccctaagga

SEQ ID NO: 573298 - DNA, 115 bp, Homo sapiens
tggtcatctagaggatcccttttttttttttaattttgaagaaagggtcttactctggtcacccagggcgggagtgcagtggtgcaatcatggttcattgcagcctcaacctccc

SEQ ID NO: 573299 - DNA, 103 bp, Homo sapiens
cccataagcgaactcaccggtgaagtaatgcttgggaaatgctcaacaacttaggagccctgagcccaccataggaaaagacatgtacattttgtcacaatct

SEQ ID NO: 573300 - DNA, 159 bp, Homo sapiens
gctatcacattcactcactgcatgcatgtgttgttgccctgtgtaatccctgctccagtacgcagcaggaactgcaggtccagcacatttggtgtcatgtagcttgtgttgaggcagccaatgtgggctgcaagctcaccatcttgtgtggcattcacc

SEQ ID NO: 573301 - DNA, 876 bp, Homo sapiens
gggaaaacgtgattcttcagtctgaaataaatacttagaacacgacttggctcctacaagcaatctggactcataggtcatcagatactggagctgtctcacccgatgggccaccacggagggtacgcacacaggttcccatcccaccccgctgcatcaagacacaggaatcgcgctgcctgatggttggactcggcaactgcgcccctttttctagaagccttccccggccaatctacaggcagcgatgcggcctggcgaaaaagacaactgagaatttcatcgacaggttgcatggtccgcacggattgacggattctacgctgcgtctctctatggttccacctggctgctgtgctgtgctgtgtgcgaggacggccgccaggcacctctacactcaccattcatagaagactcgctagataacacggcaccagacacagcaagcgcgcaccccacagtgcaccacgacagagcacgcttgagacacaacagcaccacttgaaagaaagagcccttgacccaccccatcaatcatctgcacacgcactctaagcctacccaacagctcacacaggatgaccccggtgaataacatgactgctcacgcactacacatattgcagccccggcaactgcgaatcactcactgcggcccgaccgacacacgacagtcgcaacgagcgcatagcggacccaccccaaccgcccgccgcgccccaacagcgaccccgcatcgacagagagaccaccgacgccacgcaactcccatataccacagacctgcaacgcgaacaagcaaaggcatgcagcgttagataacactcagcgcaggacccggagcggaacaaacaactagagccactgaggcagagc

SEQ ID NO: 573302 - DNA, 402 bp, Homo sapiens
atttcccacctcaggagtcttgggagacacagctcattcctccctacagaagctaaatatactagaatcttgatttcctggcatccgttgaagtcaggttacaggcctagtggtagtgatttatggaaaaaaaaaaaaaaaaagcccagagcctcctttccggtgacagtgttggttgcaggcaggtggggtttccatggcagcagtagcagcagcagcggtacaaggtgaagcacgtggggctcgatgtcattgccagtttcttcagcagaccagttttgcacatgatttcaggaattgttcctggctgcacagctctgagtataattctctagccttcctgacaattctgtgaaccacgtaaaaaaccttataataaattcatttttttcgcttaaaaaa

SEQ ID NO: 573303 - DNA, 258 bp, Homo sapiens
  misc_feature (65)..(65): n is a, c, g, or t
  misc_feature (74)..(74): n is a, c, g, or t
  misc_feature (92)..(92): n is a, c, g, or t
  misc_feature (117)..(117): n is a, c, g, or t
  misc_feature (123)..(123): n is a, c, g, or t
  misc_feature (183)..(183): n is a, c, g, or t
  misc_feature (188)..(188): n is a, c, g, or t
  misc_feature (199)..(199): n is a, c, g, or t
  misc_feature (216)..(216): n is a, c, g, or t
  misc_feature (224)..(224): n is a, c, g, or t
  misc_feature (226)..(226): n is a, c, g, or t
  misc_feature (234)..(234): n is a, c, g, or t
  misc_feature (239)..(239): n is a, c, g, or t
gctaagtgttcgctacgcgggggctaccggatcggtcggaaatggcagaggtggaggagacactnaagcgactncagagccagaagggagtncagggaatcatcgtcgtgaacacanaagggnattcccatcaagaggcaccatgggacaaccccaccaccacccagtatgccaccctcatgnacagnttcatcctganggcacggagcaccgtgngtgacatngncccccagnaacgntctcaccttccttcgaatt

SEQ ID NO: 573304 - DNA, 876 bp, Homo sapiens
  misc_feature (434)..(434): n is a, c, g, or t
gctgctctaggagtacccaagtcaagaagcgggaacgtagcagagtagttggtgatcgttgcgcagcaggatgtgattgcgctaactaacagattcaggatgtctgtgtcccattaaaagcatgaattgtggtctcggcgggtctactccgagatcgctgtccgcgggtgctcgcctggaggattgaggaatgggcgtagccgcagatgatatcgaccaatgcatatcgcccggtctcagagcaagtcctgtggcagtactagtgccaattcgccagctctatctaaccaggagcgtatagaacggcagggccatgagtagttgcagtgcacgtcggttagattgtgccacgaacccatagcgtaaagcgaggggatggatggctagtactacctcacgttgccatgcctaccttgtcgtccctaggtgtcatngtagacttgttccgatgctcatcttcctggatgtacagtagtgacgttacagtgggattgcatcactaatgcccacgtagtctgatgtgcttggagtaaaaatgcggttgctagccattgggtagtgccatctgtgctcgcatactccttgatggctcagcgtgtctgtcccgctctggttcgttcctaatatgtgcgggaatacagggcctatatatctgcaatgcgtggaatcgcagacgtactatgctgtctactatgatcctgatcagacctggcgattggcgcagatccttgtggctcctcacagtccgccagggcaatgaggctcttgtcatgatccactgataaggatgttcttctcctctttgtaccaagtacctagaacaggtttcctactccattctgtacttcctatagctgcggcatgtacatgggagga

SEQ ID NO: 573305 - DNA, 173 bp, Homo sapiens
  misc_feature (6)..(6): n is a, c, g, or t
  misc_feature (78)..(78): n is a, c, g, or t
  misc_feature (151)..(151): n is a, c, g, or t
ccccangacaaatatgtttatttacaaaatccacacatcctgcctcccagcatgcactgcctggagagagtgcagtgntcaggccctcacacacctggggaccccaggggcaagcagggtgcacggtaccaaaccatggggctgggggagngctggaggccaccctggcccca

SEQ ID NO: 573306 - DNA, 222 bp, Homo sapiens
aggttagtgggatccatgcggcaattacaggagctcagcactaacagaggagccttatccaccttcatcacacagacttagatggacacacacacactctcgctcacactctcacacatgtgcacacatacacacactctctctctctctgtgctgtccacctcctctgtgctgtccacctcctctgtgctgtccagctgtccacctcctctgtgctgtcca

SEQ ID NO: 573307 - DNA, 129 bp, Homo sapiens
agaacagcaaatggggttacctggtggcttgggtaaggatatgctttgtcgttgctgtggtctgggttgctgctgtggtgatggttagattccctggccccggaacctatgcatactgtgggtgcagcc

SEQ ID NO: 573308 - DNA, 164 bp, Homo sapiens
tatgttaataagcagttagctgttctcacagataagatgattgtggtggcagccatgagtcatcagtaaaccagtgtgagcagtgcaggactgaatgtctgctgtccacttgcagtgtgggagtccatgtggagggtgctcctatcttgtttcacatttttgcg

SEQ ID NO: 573309 - DNA, 543 bp, Homo sapiens
  misc_feature (39)..(39): n is a, c, g, or t
  misc_feature (135)..(136): n is a, c, g, or t
  misc_feature (267)..(267): n is a, c, g, or t
  misc_feature (475)..(475): n is a, c, g, or t
  misc_feature (503)..(503): n is a, c, g, or t
aggcggccaaccctttgttttgaattttccaatgtattnaagccattggaatcaatattgaagcaagccctggagaaatttacccggggtttaagtgccctccacaaggcaaaagaaaaacttgcccataatganncaatggtttcaccatcccaccttttcctagcatcagacccatcacttccaagttgcctcccgatctggcatgcatcaccatcttcagcagagccaatgctgagattttgcagtacttaaagtaatggtganccttagtcccagggttcgccgccaggatttcttgctgctgtttcttgtcgtatttgtagatttcatcgatactctgagcttcctgcatgttgttggccagttcccaggttttctgggccataccgctcccggacgccgccatcgccgaggaagcggagaagttgtcgtctctacaaccaagacgcaactttacctcgctaggtttccngggtgtggccttgaccctccgcaccacngggaacaaactcttaccctagacgtcttgctcgtgcccga

SEQ ID NO: 573310 - DNA, 347 bp, Homo sapiens
ccagatagcctcggatacggaacatacggcgttgggaaagtaggtcaggagcacctaagatcagggatgcgtaccatttgcgacacttcacagtcatgaagactgagaagactgtctgcagcgtgaactaaagtcacaggcagatcactgatccagaacacttcaagaactcgtcaaacagctcgataagcctttttgactgtgtacatcggtaccgggaataacattcctaggctgaaatttccacaaagaatagaacctgtacccagttcttcaggctgatttccctgacctcttgggcatttgtatttgtagtaaagtatagcagagattcctaagtattttat

SEQ ID NO: 573311 - DNA, 171 bp, Homo sapiens
  misc_feature (122)..(122): n is a, c, g, or t
  misc_feature (166)..(166): n is a, c, g, or t
atatatatatatatttgaacagacgggggtctcactatgttgcccagttcattctccaactcctaagctcaagcaatcctctgccttggcctcccaaagtattgggattacaggtgtggagnccaggccccatttaccttgtttgttgtcttacatattagaacgnctcca

SEQ ID NO: 573312 - DNA, 479 bp, Homo sapiens
  misc_feature (300)..(302): n is a, c, g, or t
  misc_feature (307)..(307): n is a, c, g, or t
  misc_feature (324)..(324): n is a, c, g, or t
  misc_feature (330)..(331): n is a, c, g, or t
  misc_feature (336)..(336): n is a, c, g, or t
agtaaaatcacaattgtggaattacaggaattctggtgatattaaggtgaaataacaaaacacaaaaggccctattttaacagttgatgtgacagtaagttttaatagaacctgtaacttcattttggaaatgcttctccaccaaataagggctttttcccctatttaaggagccagatggattgaaagatgtggaaataggcagctgtagatcttgatcttccaggtaccccatgtacctttattgagcttaattataaaaaattttttttgggaaaaaaacccccccctttttggggnnnttttnccccaaaaaaataattngtgggnngcccnccacgatctcactaaaggatttctatttgctgtcagttaaaaataaagccctaaatacatttttattctttctactgagggcattgtctgttttctttgtaaatgccgtacaataaacaaattatttaataacctaaaaaaaa

SEQ ID NO: 573313 - DNA, 848 bp, Homo sapiens
ggctgttggagcccatgacgcctgtcgggatgcaaaagagaagcgctctacaaagccaagatgcagattcacctggaagttctggggcccctgaaaacttgacattcaaggaacgccagcgtcttttttcacaaggtcaagatgtatccaataaagtgaaagcttctcgtaaattaacagaactgtggagaatgaactgaacacaaagtgaaagaaaatgaggagaacactttgtatttaccccaaaatcttttcagttgtgggttagtaggtgcgagatttgaagaggaaaaagaggaagggggttatatttctaagtgatttacaaatttctgtgttcataaaattgtagggatttagaaatgttcaaattccaagaaatgtgtattgttaaatttaccatgagattgcacatatagatgtaattataaaacaatgttcatagttacttaattatctaaaaatcacacgagggtaagtaaaaggtaggattacttttaattggagtcaatgagattcaaaggggacagaacataagggcaggagaagagaatggatgtgtctatctaataccaatattaaccaatcataataggaacgaggagcacaacagaagatactgatggactgaacaatgacagaaacattttatatagctagtgaagcagagacataactagaaatatcagactatgaggaaacgtaaaggagaaacaagagcctctaccacgggaaggacctatgagaaagtctcaagtaccctgatggagcgtacaaagatctgaacctaatagaaggctagccagacagggatgaccagcgaagtaacacatccaaatggatcggta

SEQ ID NO: 573314 - DNA, 202 bp, Homo sapiens
ttgaaaagataaaggggcacctgcattcgccgaaaggctctgtatttcatgttcaaaatatggtcccgggccccaaaccttccaaaaaaagggttttatagcccaaagtgctttcccaaggacttgggctcccccttggtccctccatcctgttacgtaagaggttgttttcagtgttcttcaataatactctccacttcta

SEQ ID NO: 573315 - DNA, 188 bp, Homo sapiens
tttttttttggggaaaaaaatactccaaacccccttttcttgctttatttttcaggggtttattgctttatgaacgggttaaccccgaaatccccttggggtttttatacgggataaaaaagcaattccccttaaaacggggctcgggccccctttttttttttgccattaaaaatttttttccccta

SEQ ID NO: 573316 - DNA, 361 bp, Homo sapiens
gcatgataaatcgagtggtaccccccgatagccctgacagcatgtgtgtggcaggcagtgtacaagtgtgttgcaccctagggagctggtattgggctggaatagggagtatcaacagcgccttccagcgtcccagtagcctcccctgacgtccttctgggtcctcctcgtgagtgcatagctcgggcaggtcttctgggcacataggagatctggggggcctcccaatgatcggtctcttggcattggatcagtggtagattgcgctgtgccatgtccttcctggcatgggtagcgaagcacagtgtccacctcatagcgcagccgtgggcggcctgaacacctgtcgggctagtcgggg

SEQ ID NO: 573317 - DNA, 260 bp, Homo sapiens
  misc_feature (47)..(47): n is a, c, g, or t
gggcccccccccaaggaaaaatggttttttggggggtgagctgaggnctgacccatttaaaaaaaccccctgattccccccctggaatcccccccttttataaatgatgggggtttaaaagtaccaaaaagccccccccttccaaagtccccaaactggaaagtttattccttttttttggttttaactgaaacctgagggattttttatgggtatggttgggtattgggagggaaaaatttttttaatttcatttttta

SEQ ID NO: 573318 - DNA, 401 bp, Homo sapiens
cgccctctaaatatatacttagacctgtgaaatgcactcagactcgcgtgtttaggaatatttaactttctttcactacattggcactaaattttttctttataaagctttttgaagggcataaacacaagaccattattgatgatatgacctaatacatttcctctgtgtgtgtgtgtaacatttcaaatactttttttttcttttccactggttgtaaggtgcaacaatttaatatttttaagggactttttaagagatccttaagaaccaatttttacttcagtgcaatcctacacacggtcaacattagttttgagattagacttataggatcttccattctatttttatctgctttttgctggtaggttcctgtgcaggtttttccttttggtttt

SEQ ID NO: 573319 - DNA, 781 bp, Homo sapiens
ttggcccccggcaccccgttataacgctctttgcgagctggggcctcgctttgccccgtcttgggagcattctttggagggttttttaccccgcgtctccaatatggccttcccgatgggcccccacccagggtggtaccgccccccggtggcgcctggcccccccctatgggggtgggccccccgcggggtgccacccccacgtcgggatggcggcaccccctggtgcctagcacacccctttcgccttgggcgcgcccccatctgggcccccactccgtaagtggggtcgcaactacgccgggccccacatcttgtcttccttggtgcacacgaggatgcccccattgactcctcctcgggcgttgcttgcccccgcgctcgtcgaagacacaaatgccaccctatagcctgtgcttctctgggcgcacacacacaataaccgtccggggctgttgtcttgtgctccccgcgcggtacacatcacccgcaggctcgcaacctggtgcactccctcttgtgcctcggttgtttttgcggcgacgtgtgcattcccccgcgcggcgcgttatcatgaccagcggtcttcccgcgctctctcccaggggaggtcttctcctcttccctggcgcgcctcttgtggctccgcctctccgccccccccgttgtggcgggcggtctcacccgtcgtttctcggggagacccccggcaccccgacgctcgtacgttatcaccccgatcctcctgattatacccccgttctcagcggacaacaaaaca

SEQ ID NO: 573320 - DNA, 201 bp, Homo sapiens
gtagtctttaggctgattcacaaaagtagcgctggagagaaatctggatggtattagtatatagatggtatttacaaccaagggaaatggatgagatctcctagagaacaagtatagagtaggaggagaagaccacactccaaggaattcaagagaaaatgtaagagcttgttattagagaaaccaacataggaacatatt

SEQ ID NO: 573321 - DNA, 728 bp, Homo sapiens
  misc_feature (226)..(226): n is a, c, g, or t
  misc_feature (373)..(373): n is a, c, g, or t
gtgcccggcgtcctcccttccccctcgccgccgaccgagttcttccttttcagaccgggtcgccttgctgtcgtcgcggtgattttcctgctactgctactgctgctgctgccaccgccactaccactgggctcatttgccccgaccccttcccgccgcccgcccccagccccacacaagatgtcagaggatttagcaaagcagctggcaagctacaaagctcagntccagcaagttgcagctgcatatctggaaatggagaaaatgaagatttgctacagattgaagaaagatttacaacgaagttatagaactaaccacagaccttctgtcaactcaaccttctgagacgcttgcaagttcagacagtttngcttctactcaacctactcattcatggaaagtaggagacaagtgtatggcagtctggagtgaagatggacagtgttatgaagcggagattgaggagatagatgaacgaacatggcaccgctgcaatcaccttggctggtcatggcactgctgaagtgactccactgtcgaacctcaagcctgtagaagaaggaaggaaggcacaggaggacagtggcaacacgccccaatgctcaaacacaacgaaatgatgcccacgcagcgtgaatataaggacagaagaaagctttgacacacagctcagagcataaagacacttgagcaggaaagcgacgaccaagacaagtgaacatgga

SEQ ID NO: 573322 - DNA, 159 bp, Homo sapiens
gacggtgagaccaaaagtcaggcccggagaccgtgcctgtgtgctcttcagacatgtacttcatcccggtggccgaggattccgacttaccccatatcagaagctgccctacggcgtcttctcgaccagaggcgaccaaggagcgaggataggtgtggc

SEQ ID NO: 573323 - DNA, 362 bp, Homo sapiens
aacaaatatgatgaacagtaagggagcaaagtggttacggacttacaggaactataactattctggaactaaggaatagaaaccgctgaccttgggccagcaggttttataactaacttgttacttgcctttctcacccagttaatcagactctgtactatatatacccttttatgaaacaagtgtctcggttcactaattctagttttatggttgtgctaaattcatagcaggtgccttattctttgcatttaatcaaaccattccatatcaacattttccttggttaactatagatataaggctttaagttgtcgtatgtgttatttactgtacaatgttctgataaattagactgttaa

SEQ ID NO: 573324 - DNA, 114 bp, Homo sapiens
ccacaggctatacaccaaagcgtaaccctaacttaaacttggtgggactctggggtgactaatgatgttgtccggtgtagggctccatcaatttgtagcggtattgtacccact

SEQ ID NO: 573325 - DNA, 649 bp, Homo sapiens
tcttaaactataatgtctaataaacaatattctgggcacaactctctttaaggccttaccctccttccttcattgggaactccaactcccctggatacccctcttttcataccaagtttctcacggcgcaacccctctttcttccccagtaccccctccctataccccacgagcttcctctttttctctcttctaactccctataggtttctcacaaataatcccccgtaagttttcttcacaactcataagccttctttacttctcccccctattctcccctaaatcgcatattacccagcaccctcgcctacaacatgttgcaatataatgtacccatcattacccacctttctaataatcctgccgccatattattgagcacgtttctttgcgaaccgcacactttactgcaaacttctcgtatccatcagctccccgtcttttaaagatttcctcactatttccccccacctctttcacccctttctataatgaggctgtataattctcctcccacacagtacacattaataaactatattgcctgcttatgacttcctgggacacctctaagcaagccctaaccactcttaaaagggtacaccaccccactttgtatgaacctttaaagatcaagcatctcaga

SEQ ID NO: 573326 - DNA, 120 bp, Homo sapiens
gtatgctcgtcggggtgttctgaggggtctatggcttgggctctccttgcagagttatttctagttaattcattatgcagaaggtatatggggttagtccttgctatattatgcttggtt

SEQ ID NO: 573327 - DNA, 1591 bp, Homo sapiens
atgcgcggtatgcaccgcatcaagagaacaacccgttcagaactgagctcagccagagacagatggtctgacttgatcatggaggttgtaaccagctgtgtctgcaaaggcttccaaagagctgcgtacttgaaacaatgaacggcctcactagagtgtgcccatcaggagcatgcacgactctgacatgcgcgcacaatcattcacacacaatcattgcacctgggtacttgcttcttgcaatgtgccagacttccgcctctgtgagaaagcgctgtgtagcactagtggtgaccccatgctcgttatcacgaatgatgctattcgatatcagagtatcgatgtggctcatcgacttggaggctctcgacgagcattcatcatgcacgaggacaacgctaagattccacctgagacaaggctgacatcaaaatcaactgctaggagaatgccatagaaggacacgaccggacctagcacaaagcgaaaaacgagaggacatagtgaggtcgaacatttacctcgtaccatgaaatttaccaccttaggttcgtttctcccggacccaattgcgacaacggcgcaaggcaagaagcggcgtcaaccttacggacagtttccctagtagcaacgtataaatagaagggggtgacgcacgtggaaaccaaatttagaaagcaaatcgcccaggaaatatggataaacacaagatggaacgaggccgttgagctagtgcccaccatacccaattggcgcttgctagcagacagccggtcttttacgcacccagaaccccctgaactactttcacagcggcaagtgacaacgaagggcctggatgcatccttggcacccggcggtggaaacacatggtgtatctcctgggagaacgagagattcaaacttggacgcaacgcgaaaaggttgtagctccaccaacataggggccgttgtgctaccctcgaccaccgtacaaaacatactagttggccccgattgctaccccatacgtacagaaccacgaaaagtataaaatccgccagccgtgagacatatacatgacgcccgctaaatttagacgtcacaacgtcccaactggatagccagacgatttggaacatgactaaaacggccgttgccaacgcattctggacggaaaacgccgccttggcccgtaacatacattacaatacttgaaccacccataatggcttcgcattttgtgaagcactctggcgtacagtttagaccaaccgttggccacgcccgttgtgggccaacacggcaaaaattagggcggatctacactacctatggagcacaaaacaatgagcatccggaagcaccaatgaaaccaaagcaccaggagacacaaccacagggacaagaaatacccccatacggctacaataccccgctcaagatcccacattagaaaaacgcctagggagcatgccgagcacgacccgcaacaaacaatagtaaacagaacagacatcaccaaggagagagatcatcaaggaggcaccccaggacgccaacaaacgacacgcacagcggccacagcaacaacagcacagagcagaacgac

SEQ ID NO: 573328 - DNA, 393 bp, Homo sapiens
gatgcataatacctacataaaaatatggcaataatacaaagagctttcatattcccacacccacttttccctattattaacatcttatgttagcatggtacatttgtcacaattaatgaaccaatacattattattattaactaaagttcacactttattcagactcccttagtttttgcctaatgtccttttctgttctaggatcccctccaggaagccgtgctacatccgtcatcatgtctccttaggctcctcttggctgtgacagtttcccagacatcccttgcttttgatggccctgagagttttaaggagtgccagtcgtgtattttgtagggtgtccctctattgggatttgtctgctgtttttctcatgagtctaaatgcaatca

SEQ ID NO: 573329 - DNA, 336 bp, Homo sapiens
tgagcaccccccaggagacaactttaaaccggcgaggaatttgaagttttacgcacccgacctgcattactccggcctgagctcagatcacgtaggactttaatcgttgaacaaacgaacctttaatagcggctgcaccatagggttgtcctgatccaacatcgaggccgtaaaccctattgttgatatggactctagaataggattgcgctgttatccccaggttaacttgttccgttgtccaagttattggatcaattgagtatagaagttcgcttggactggtgaagtcttagcatgtactgctgggaggttgggttctgttccgagggcgcc

SEQ ID NO: 573330 - DNA, 707 bp, Homo sapiens
  misc_feature (8)..(8): n is a, c, g, or t
  misc_feature (15)..(17): n is a, c, g, or t
  misc_feature (28)..(28): n is a, c, g, or t
  misc_feature (30)..(30): n is a, c, g, or t
  misc_feature (40)..(40): n is a, c, g, or t
  misc_feature (44)..(44): n is a, c, g, or t
  misc_feature (52)..(52): n is a, c, g, or t
  misc_feature (57)..(57): n is a, c, g, or t
  misc_feature (59)..(59): n is a, c, g, or t
  misc_feature (65)..(65): n is a, c, g, or t
  misc_feature (76)..(76): n is a, c, g, or t
  misc_feature (84)..(84): n is a, c, g, or t
  misc_feature (87)..(87): n is a, c, g, or t
  misc_feature (90)..(90): n is a, c, g, or t
  misc_feature (93)..(93): n is a, c, g, or t
  misc_feature (98)..(98): n is a, c, g, or t
  misc_feature (104)..(104): n is a, c, g, or t
  misc_feature (107)..(107): n is a, c, g, or t
  misc_feature (111)..(111): n is a, c, g, or t
  misc_feature (128)..(128): n is a, c, g, or t
  misc_feature (131)..(131): n is a, c, g, or t
  misc_feature (142)..(142): n is a, c, g, or t
  misc_feature (147)..(147): n is a, c, g, or t
  misc_feature (175)..(175): n is a, c, g, or t
  misc_feature (177)..(177): n is a, c, g, or t
  misc_feature (179)..(179): n is a, c, g, or t
  misc_feature (195)..(195): n is a, c, g, or t
  misc_feature (197)..(197): n is a, c, g, or t
  misc_feature (226)..(226): n is a, c, g, or t
  misc_feature (235)..(237): n is a, c, g, or t
  misc_feature (241)..(241): n is a, c, g, or t
  misc_feature (247)..(247): n is a, c, g, or t
  misc_feature (249)..(249): n is a, c, g, or t
  misc_feature (259)..(259): n is a, c, g, or t
  misc_feature (274)..(275): n is a, c, g, or t
  misc_feature (289)..(289): n is a, c, g, or t
  misc_feature (316)..(316): n is a, c, g, or t
  misc_feature (331)..(331): n is a, c, g, or t
  misc_feature (333)..(333): n is a, c, g, or t
  misc_feature (338)..(338): n is a, c, g, or t
  misc_feature (344)..(345): n is a, c, g, or t
  misc_feature (361)..(362): n is a, c, g, or t
  misc_feature (365)..(365): n is a, c, g, or t
  misc_feature (380)..(381): n is a, c, g, or t
  misc_feature (383)..(384): n is a, c, g, or t
  misc_feature (389)..(389): n is a, c, g, or t
  misc_feature (396)..(396): n is a, c, g, or t
  misc_feature (399)..(399): n is a, c, g, or t
  misc_feature (404)..(404): n is a, c, g, or t
  misc_feature (419)..(422): n is a, c, g, or t
  misc_feature (439)..(439): n is a, c, g, or t
  misc_feature (441)..(441): n is a, c, g, or t
  misc_feature (444)..(444): n is a, c, g, or t
  misc_feature (446)..(448): n is a, c, g, or t
  misc_feature (450)..(450): n is a, c, g, or t
  misc_feature (475)..(475): n is a, c, g, or t
  misc_feature (483)..(483): n is a, c, g, or t
  misc_feature (506)..(506): n is a, c, g, or t
  misc_feature (552)..(552): n is a, c, g, or t
  misc_feature (577)..(577): n is a, c, g, or t
  misc_feature (608)..(608): n is a, c, g, or t
  misc_feature (633)..(633): n is a, c, g, or t
  misc_feature (701)..(701): n is a, c, g, or t
tgttagtnaaaaaannnaattgtaaggntnaagcaggggntatnggggaaanaaaananactganagctttgaagngttcagangcnaanttnaaaanaaatgnganaaanaccaatcagatgttcanaanacttttcaggntccanatcaacttgattatggacatagttcaanananaaggggaagagaaagngngtgtaatcaccaaaaattaaaccagaggnataattttnnnaaanaatttngngttacagaanaaattctaacttttnnaaggctaaagctanataaaactcaaagcaatctatttgggnacctgggggcaaaangnctttncttttnnctaactaaacataatnntgngcattgggggaaatnngnnttcangggggangcnttggnaaacttttccaaaannnntggggcccggctttagngnganannngnaggggacacatatatgggggggtgngggggggncaaagactaatgacaatgtatgnggttaataggcctgtaatggaaccatgatactactaataatatganataaaaagccactcatttatataangtgttcctgaatggtgcaataagaaatgggntcacagatttatgtacatatatgantcactaagagttcagaaattaagctcactttaagaaaactcagccaggcacagtggctcacgcctgtnatccca

SEQ ID NO: 573331 - DNA, 216 bp, Homo sapiens
ggctgcaaacaaaactactgtgtctaagtcatcaaaagtatgtacaggctgggcagtggctcacacttgtatcccagctactcaggaggctgaggcaggagaatcgcttgaacccaggaggcagaggttgcggtgggccgagatcgtgccattgcactccagcctgggggcaagagtgagatttcgtctcaaacaacaaaaaacaaacaacaaaaa

SEQ ID NO: 573332 - DNA, 843 bp, Homo sapiens
gagtcccagaggttaccccaaggcacccctctgagatctcggtctgcttctgctcgacatgacaaaaaactagcccccatctcaatcatataccaaatctctccctcactagacgtaagccttctcctcactctctcaatcttgtcatcatagcaggcagtcgaggtgtgatgaaacgaaacccagctacgcaaaatcttagcatactccttcagttacccacattaggatgcattatctatgcatgttcttatcgctgtatcaacccggtaatcatacccagtgcttaatccaaagctagtttatatcatacacaacctatcgtactcgcattccaacatactcatagattaaacgtcccatgcacccatgatccgtactactatctctgcacgctgaaataaatgctaccatcactaacacccttttaatttccatccaccccgtccctctccctaggagggcctgccccacgtctaaccgggtttatgcccggaatgcgcacattgtccgaagaattctgtataaaatgaatatgcctccatcattcacaacctatcatagctcagcgatcaccctccttaatctctacttcttccttacgcctgatctacatcccacctctactcacattagttccacatatcttaaccaacgtactaaaatgtgctgatcagttggaacatataaaaacgccactcctatttgctcccacaacactcatcgcccctttaccgtgctaatccttaactatctcgcctattttatactgaatgatctatatagacatcaaaatcaatggacaaacactgtgccatcaccctcccttcggtagctttcatc

SEQ ID NO: 573333 - DNA, 161 bp, Homo sapiens
tcgtgctcacgatcaccttatcgtgcagaagatcacctctagccttggaagttctgaggattgctctgaaccagccacctgccttcatggtgagagataaaggaactgctatctgggagccctgagaggtatacactgtgtaggagggaggtgatcttctg

SEQ ID NO: 573334 - DNA, 256 bp, Homo sapiens
cctcctctttgctgattctgtgtttggtctcgatgcagtgctgactgcgcatgcttgcgtgatatgctgaaacctgtcctacccagcaccacatagaagtccaggccggttaatacaatgcttgggatcatatttgatacccagatcgatgtgtcctggatcccaaaaccaaagttccagcaatctgaaagttgtttccttacctgcatactcaagaccgaacctcccaagagccccgaagactggacaagaatac

SEQ ID NO: 573335 - DNA, 115 bp, Homo sapiens
cagcaccctggctattttacgtaacaattattctatggttctatgattattcagctagtgagaggccctcagcttgtctgcacgtggcagtgactgatggcacagttaaggtggg

SEQ ID NO: 573336 - DNA, 688 bp, Homo sapiens
  misc_feature (502)..(502): n is a, c, g, or t
gttagcaagaagaggctggctgtggaagcttcccttggcaacacgtagagaattttggtctcgatccaggaaggagaaggagccagttgtggcagagacagtggaagaagtgaaaaaagaacctgttttggtgtgtccacccttacgaagccgagcatacacaccgcccagtgatctccagagtcgcttggaatctcatattaaagaagttcttggttcatctcttcctaataactggcaagatatctccctggatgatggacatatgaagttcagactcttagcaggcttagctgatggcttaggccatgcggtccctaactccaggcttcaccaaatgtgcagggtcagagatgttcttgatttctataatgttcctgttcaagacaaatctaaatttgatgaactcgttgctagtaatttacctcccaatttgaaaatcagttggagttactgagcagtctggtcagagaccacgttgggggtcattcattcttattcntcctagcgtgactgaaaagtaccagaacttttctcaaaacttcaattttgtataatttttttttttgctccttgtagaagagcacatctcccctcccccaaaggagaatcaacaaagaaaacgttttcacattttgctaaagctatttttcccccaataaaatcaagtcttgataacttaaaaaaa

SEQ ID NO: 573337 - DNA, 700 bp, Homo sapiens
tacattataccaaatggtaataaacttttagaactggccattctaactcaacatgattatatatttaccaatgttgatatgtctagaacttgtcattctttcattttagttgtgcatagtatgctgttggacagtatactattatttatctttgtataaatttgatgaagtttatatattctaggttctgtttttcagttgattatgttgaaaatattttccttcagtctgtgttgtagttttggctaaaaaattttaatagaaaaatataactcatttttcttacacattattttaactacaggaagagaaaaaaaaccccagaacattaagtaagactactgaaacaagctaaataggtgatattgcatgtaaacatacatacatctttctattcatagacaagacacaataaaaaatcttggatgaaatacttcgatttgcatatattacacattttcttttttgctggttgattaatgactgcaaagaaacttgaactcattttatgtggagaacactggtaaagaaaaagacacaagaaattctgaaaaagtacctgaaagtgaagatctaagagtgaattggatcttattaataaaagctgtgtttctattctggggattaagagtgggagtggtatatgctgtttttttcctcatacgctttaaagttatttctattatttgtaatttccctc

SEQ ID NO: 573338 - DNA, 706 bp, Homo sapiens
actctcgaatgacttggctactacatacctcttggcactgcgcgccaagccatgtaagatgaacatggacagatctgttgccgtaggtacagtcctgcgtctaatagtgcttgacctcgacagtagaaacggcgtgttggcaaaccggacggtgttctttgcaactaatccttcgatagctagtatctagaagggctattactggtgatcgtatcacctacggagtaccagatgcgatcacagaataatcgaatgttgatcattcgccctgtgcattgagaaggtacaattcacttagaattggctccataaatcatcaggacctcacaccctttagaactaaaacataaatcgcaaaaattcccatatccacataatcgatatacaatcggccgtaatggttcaatgttttcccacaacagcttctcggcactaatccgagaagggccaccgagaagtgactcggactaagccccgattgaaatagcatcacgactgaaaaccaagaagagtcaatctgtcggctcatccatggcttctaaacagccgcccacacttagtccattcgcatcattccgacgaagccatagctccacgcagaaaagtacccacaagaagaacgaaaccctccaatatacctggagctgcaatctggctgaccccaaccaacaaaataaagagacagcacaacaaataacacaacaaa

SEQ ID NO: 573339 - DNA, 917 bp, Homo sapiens
caaaagtagaagagcatgcctcccaagaccccatcgaacagggggatgaaacccccaaaacacccaaagaccagacccacactcaagataaccaaggggaagcatagggggccccaaggagacccccacccaatggaaatctttccccatgacccacaaaggacatatcagagagtggactcattcgataatgaacaagagtgggatcctacctctatgcccggggatcgtgggcactgcaggacagaagataattaaagccaagcagtggaggtgtgatataacgagaggagaccataatggagaggacagatgggcggttggagccacgaaatgacagggaaaatatccagcaagaataacggcaaaagataatcagaggcagcatagcatagggcagctggcagagtagaggaaccagaggaggaaccaagaccaaaccatcacatgcatcaccacagcaggcccagcaacttgcacagccgcagaaccaccggcagcagcagggtacagcagatatagaggcaaatcacacaagcgggaagaccgagacaagacgggggacatcagaaataccacggaacaagaagaagaaaccccaatgacgacagtgactccttgaggccttcccatatcatgaacccaactatgcacgcgaatcccgccaaaaaaccacccaaaagggaactagtgaaaaccaaactccaacacaccaagaggatcccacatctacggaagtaacccacaaaaacctacaaccaagggaggaccccacacaaacaagcataccaacgcacagccaacaccaagaacaccagaacaatcaaacaaggacaacgagaacaaaatagacagaacgaaaccattcaacaaaccaccaacacacacgtacgattaccaaacacaacgacaccaac

SEQ ID NO: 573340 - DNA, 113 bp, Homo sapiens
aaactgccccatagtgccggagtcgtggtggctcacgcctgctactccccgcactttgcgcgaggccaaggcggttcgatcactaggctcaggagactccagaccactccgtg

SEQ ID NO: 573341 - DNA, 662 bp, Homo sapiens
tgttctagaggatcctcagataagcaggagaatcgcttgaacccaggaggcagaggttgcagtgagccgagatcaccccactgcactccagcctgggggacagagtgagactctgtctcaataaaaaaaaaaaaaaaaggataaaaatgccgggtgtggtggctcatgcctgtaatcccaaaacttgggaaggctgaggtgtgtggatcgttggaggtcaggagtttccagccgtgccagcatgtgtgaaaccccgcctccactaagaaagtggaaaaatttaagtgtcggggctcagtgcctttaatcccagctactggggaggcatgaggcaagaaaatcgcttgaactctggaggcagaggttgcagtgagccgaaattgcaccacgtgcactccagtctagtgacagaaagagactctgtctcaaaaaaataaaaacaaaaacaataattgagcagagcctcagagaccgtgtgagaccaccacaagaagtgtaccacaagccgggcttgggggctcaccacctgtaatcccagcatgtggggaggctgagccagggggaacacctgaggttaggaattcaagacaagccggaccaatatggggaaacccggtctccactaaacattatataatcagccggcacagtggcgggcgcct

SEQ ID NO: 573342 - DNA, 937 bp, Homo sapiens
tggtggaggtggcgaacggccgctccctgtgtgtgtggagccgatggcggtgcaggccctccgggagcgcctgggtgtggggggccgacggtaggcgccctgccccgtggtcccggcgagaactcgctgctgggcctcccggtgctgcttgattgcccggatagagggcggcggctcttggggctgacgatcggctgcctgtgactctggtcagcgccccgctgtccagactctcggcaccacagcctggccctgagatccttcatgctgccagcaagaggaggagcttccaggatgcatgaagcgccttggagattgatggcccgggagaccgcgtcgtcaggagctcctggaggaagattacgggagggcgccaaggctgctaagaaagcaggagaactaagaagcaggcttcaggtggccagtctcaaagccatgaggccggctcgagccaggggtgccaaggaggcatgagaccatgttgattgccaggcttcgggaggaagcaggagcaagctggccccttctgttttcccaaagcaggacccttcatttgtggtttagcccccccttgcccagatcttgctctcctttgttcgagcttggccacttgccaggtgcctcgaccggtcaaggggccaggccccttggaactggcggttttccagtcctaaaagactgggccccggccggctgcctgtccaacgagctgcggccgaacaggtatctacaggaggacctcgtgcgagcggagggcttttttcctcaaggcgcggctggcgacgtcggggggactccctggttcatcctgggttagcccctctgttttaccgccattatttttcgcacgggttggcgcgtatggagccccccctccgagagcggtgtgggtgtggcgctgtaaagcgctaaaaaccgctccttttctcccccgtat

SEQ ID NO: 573343 - DNA, 272 bp, Homo sapiens
aggggggctgaggcaggaggatcgcttgaacccgggaggtggaggttgcagtgagctgagattgtaccattgcactccagcctgggcaacagagcgagagtctgtctcaaacaaacaaacaaaaaaacaaatgccacgtcaacatcaggacgttaacctttagaccctatatggtctaaaaaggggaggcatgaataatccaccccttgtttagcatatcatcaagaaataaccataaaaatgggcaaccagcagccctgccctgtctatgg

SEQ ID NO: 573344 - DNA, 101 bp, Homo sapiens
gcacgagctagacgccacgggggcccaagcaccgaatgccacatactgggaatgctattacaattcactggactgcatgctacagcgtagagactgggaaa

SEQ ID NO: 573345 - DNA, 156 bp, Homo sapiens
tctcgtgtgctgatatataaagaatactagcaatggtcccacgtgtcatcgttgcatgtaattaactaaagactaacatcgatgggaagggtgcctttctgaatgtaatatactcccaaagcacttcagagactggtattgacattcttccagtgt

SEQ ID NO: 573346 - DNA, 144 bp, Homo sapiens
acgcatggtgatgaaatggctgaggacctatcccagtctccccacagatccgtgcctttcccatgtgtgaatttgtatctagcctaaagtttccctaggcattacttatctcagcaactttcccatctcgtctcttctcttgta

SEQ ID NO: 573347 - DNA, 117 bp, Homo sapiens
attaataaggaatttagcacacacacttctaataaaaggaagctagatgcagcccttgctataaaaagctatacctgaaccaaaatgggcatgtggagtcttaggccccttgcagtc

SEQ ID NO: 573348 - DNA, 120 bp, Homo sapiens
  misc_feature (89)..(89): n is a, c, g, or t
tactgaggtcgatctatagcatcccctgaaacttaagggtcgaaggtggatttagcagtaaactgagagtagagtgcttagattgaacnaggtccctggaagactgcgtatcacaccgga

SEQ ID NO: 573349 - DNA, 139 bp, Homo sapiens
tcccaatttccttttagggcttaaaataaattagggttttatgatttttttaaaccagtttcctattgttagccatttgtttccagttttttaatattataaataaagtgaaccaatatttctttctatccccttttta

SEQ ID NO: 573350 - DNA, 140 bp, Homo sapiens
caagccagtgtgtcggaaagggggaggcccgcgtcggctatgcgacctaccaggcactcttcagcggaaatcaaataacggtcctcactccagtatgggcgccacgcctgaagttcatcccatgggcaggggtaccgagc

SEQ ID NO: 573351 - DNA, 410 bp, Homo sapiens
  misc_feature (357)..(357): n is a, c, g, or t
ggttccttgatctagaaacctgagcgtcacctttacctcctccctttcgcacagttgctgtcttccgccaattacatgcccttcttccttctcagttcctctcaaactcttatgtcacccacgccagcccttgtcctggccaccacctgctcacctgaattgttgccactgcctcccaacaggtctccctccctccagccagacggcctacaatctgccctcacctcactgccagaatgatcttctggaagcagaggtggagctgaacctgtattcaagccgtcagttggaatccaaacagttataggactgacttcaggttccatggccaggacccatgagtctttgtagccaggntccagcagcacttcctgcatcatttctgaccagttcccaaattgcgttcctga

SEQ ID NO: 573352 - DNA, 903 bp, Homo sapiens
gcgatgaccgttgaacaaagcggtcctggggtcactcatagataagtactacacgctcctgggctcgcgacttccacacgcaacgaagtcgcgtgtgcgatgagatcgcccattatccgccagacacacagatagctccgcgataagatacgcaggttatgtcgcgcttctgagtgaggcgaattccaagaggtccagtaagaggtatctccagtcaatgctgcggtgaggaggagagagatgggcggagacatagttatcttccgtgagagtctcacaccttgtgatcacgtgggattacttgagatgtagatcctgacactaacggaaatgctgaacgctatctggcacattcgtgccgttctgtccaaccttcaggtcactcatgcctacaggctgcggatgatatttcatatgccgcttcgtcgtgacctgtaatggccttttccctgtagtgctgtattattgtctcgataaaatctgtcgacgacaccacgctgtgatgaaggatcttcagcgtaaccatgcacatgacggtcttgccaagacggccgggaacaaaggccaaacccacaatgcacctagggtcccatcttgcggcgcaccagagaacggcctcaatccgttgtgttgtcaagactcccggtgtagacaccggccgggccccccgccgtaggacgaggaaaggcttggtaaataggttgcccagtgaaggagcgggtgttgacgcctgccagtgtactgtatgactccccacaaaaaattctcgggcgcagcggcgatgcaacatctcatccagacggtccctctcgcgggtagaccaaggggccacagggctacacaagggggttccccaaaaatcaggtttggcccccccaaaaaacctgtccccgaaaaaaccaa

SEQ ID NO: 573353 - DNA, 195 bp, Homo sapiens
cacgaggtggagatcaagcgcgccggcgaggacgagccggtgaagggggtcaggaactggctcgagaacaaccgggacgtggtgcagccctggatagaggcggcgaaggaggcccggcagtcctcctgacgggcgcggggtgaccgcttgaggaggatcgaccgccggaggtttcttctggggatgggatccgcc

SEQ ID NO: 573354 - DNA, 258 bp, Homo sapiens
tacaaacaatcccaaagccttccctgtttaccccacctccctcagtccgacggggcacgcccgccgaggatcccgggccaggtgcctcctagaggaatgcgtctccgcctcccccggcgggagtcccttgtttgcgacgtctcccgccccttgagtcccctcctgggcttccgagagtctgactcagccaagccggcatcgtttcgcctcctacaacacaccccgagcgcgagaagaaattacaggattgcaggggca

SEQ ID NO: 573355 - DNA, 731 bp, Homo sapiens
gggctgactctcttttcggactcagcccgctgcacccaggtgaaataaacagccttgttgctcacacaaagcctgtttggtggtctcttcacacaaacgcgcatgaaatttggtgccatgactcggatcggggtacctcccttgggagaatcaatccccagtcctcctgctctttgctccgtgagaaagatctacctagtgacctcaggtcctcagattgaccagcccaaggaacatctcacccaatttcaaatctggacccccatggaaaatcggacgtgttcaactcatctgggcagccaactcccagagcccctggaaactctggcccaagcctctcttgactgactccttcccagatcttctcgggttaagcagctgaagactggacatttgcccaatcgccttggaagccccctaagacatcacggattgccgagctttcgaagtaactctcacagtggagggaacgcgcatgaaaaaacaaaaaaagaaaaaaatttctttgtggtagcagaatacaaaaaaaaaaaaaaggcatttttcttcgtggactgaactattatttaaatctcaaaggatggacatctcacaacttctacagacgtactgtgaggtaataatgatatctcattattaaattattgaagtgaactcagattccatttatattacttttatatctataatggtctagttaaataaagagaggaaatggtcatgggcagggg

SEQ ID NO: 573356 - DNA, 398 bp, Homo sapiens
gagggggaggcgggatgggacacccaacactttttccatttcttcagagggaaactcagatgtccaaactaaaaaaaaaaaaaaaaaaaaaaaaaaaaaaattttggggccgccttggcgcccttggaaaaagtttttgtagacccatctcggtttgggccgcgggggcccaagatagtgttaacggttaccacagtggtcaatcgcggtgttcccttagagaaactcgtggcactgcactatgggtgctgggggtttcctctccacccaatataaaaaaggcccgggggggcaacaccgggaggtttctgtgacaacaactcacggagggaggttccgtgaggccacatcacggcggctctattcacgcgggggagttctcaagcgagcccggatta

SEQ ID NO: 573357 - DNA, 273 bp, Homo sapiens
cgccctaggtgccgacctcacgggctacttaaagtcccctccagggcaggtgactgaggccgtgaaggtgtccaagctcgtcgggtaccgccacatcgactgtgcccatgtgtaccagaatgagaataggtgggggtggcattcagaaaccagggacaggtgtaacgtagagcctcatcgtcagcaactgtggtcactaccatgaaaggcctggtgaaaggacctgccaaaacactcagcgacctgaagctggactacctggacctctacctt

SEQ ID NO: 573358 - DNA, 428 bp, Homo sapiens
  misc_feature (420)..(420): n is a, c, g, or t
tagtgtggtaaataggctctcatcacttcatcttccggtgggtgggcaggttgggcataaatggcgtgaagtggaaaaccaggctctccaggaagggaaaaataagtgatccccagcgtatacatttctttctcacctgggctttgggaatggcactttggcagtttcttcagacattcagaagggtagagagttatatatatcagggtcctatcagcttcattcttaatttcatagtttgggaaaaagacatgggccttgaagtaatagagggtttcatccacaatatctgtatctttggtctctcggggggcaggtccttggaatggacttcggataggcaacagtgccatgtatccgatgagtggggtatcaggatccatgagagaagaggggtaagccggaggtagagagccgggnaagggtac

SEQ ID NO: 573359 - DNA, 864 bp, Homo sapiens
  misc_feature (4)..(4): n is a, c, g, or t
  misc_feature (65)..(65): n is a, c, g, or t
  misc_feature (67)..(67): n is a, c, g, or t
  misc_feature (143)..(143): n is a, c, g, or t
  misc_feature (172)..(172): n is a, c, g, or t
  misc_feature (201)..(201): n is a, c, g, or t
  misc_feature (226)..(226): n is a, c, g, or t
  misc_feature (230)..(230): n is a, c, g, or t
  misc_feature (243)..(243): n is a, c, g, or t
  misc_feature (247)..(247): n is a, c, g, or t
  misc_feature (296)..(296): n is a, c, g, or t
  misc_feature (311)..(311): n is a, c, g, or t
  misc_feature (357)..(357): n is a, c, g, or t
  misc_feature (370)..(371): n is a, c, g, or t
  misc_feature (379)..(379): n is a, c, g, or t
  misc_feature (388)..(388): n is a, c, g, or t
  misc_feature (402)..(402): n is a, c, g, or t
  misc_feature (415)..(415): n is a, c, g, or t
  misc_feature (423)..(423): n is a, c, g, or t
  misc_feature (429)..(429): n is a, c, g, or t
  misc_feature (478)..(478): n is a, c, g, or t
  misc_feature (482)..(483): n is a, c, g, or t
  misc_feature (490)..(490): n is a, c, g, or t
  misc_feature (495)..(495): n is a, c, g, or t
  misc_feature (497)..(497): n is a, c, g, or t
  misc_feature (529)..(530): n is a, c, g, or t
  misc_feature (565)..(565): n is a, c, g, or t
  misc_feature (631)..(631): n is a, c, g, or t
  misc_feature (673)..(673): n is a, c, g, or t
  misc_feature (718)..(718): n is a, c, g, or t
  misc_feature (732)..(732): n is a, c, g, or t
  misc_feature (734)..(735): n is a, c, g, or t
  misc_feature (737)..(739): n is a, c, g, or t
  misc_feature (745)..(745): n is a, c, g, or t
  misc_feature (747)..(748): n is a, c, g, or t
  misc_feature (751)..(751): n is a, c, g, or t
aggnaaatagcactaatgaagagtaaatatgcaggcagcaaccttcaggagttgggagttggggngntacgacttcaaaactgcgataggtacttatggtgggtatctggtgattcttagttggcacaaatgccctgcctagnccccttaactgcgtcagttcacagatggngtgttttgttgttggtgttgttagtaggnaggattgccttacactggggaaganagancagcttgagtganagtncgcagtgtttttgattttgtttgtatgtcgctgttttaatgcaacaacnagctcacagtttgcnaagtggaaaaatattcagtagcatcatgtacttgtactataggtangagcttaaaatgnncatcatcnatcatggcntccacaaataagcnacctggggcattnattaattnatgtcnatcgagaagaacttaaactagagaattaagcccactttatgaagagcgntttnncggctgnttgancnattcgaatttggatttgtgttcagcactttgnnaggttcaactttttgcttctacccagattggtctnaggtctgtcttctcatccatccctttctaaagccaaagcacatttgtagcacataatccaggagangcagaagtaaatgctatgactggcggtatttcttagcctggntttgtagtttttaggcagtaagtagattatgagcgaacaaatgtnaaggttcatgtggngnnannntacctntnnatnaggtatggtcttagtcaagctcagagacaacaaagccttctaggtcattaggcaatggtgggtttctagcaccatagactgtctactgacctcatttttcttttggaatggag

SEQ ID NO: 573360 - DNA, 341 bp, Homo sapiens
tgaggatatcgagaggcagctcaaagcccttggagtggattagtgctcatgcactcacacacacacatacacaaacaaacactggtcatttgccgggcaacagaaggccacccaaacacacactaaaacacattcataccaaataacaaatacacaaacaaacagtccaaaagctcacattcacacttgcctactctgggataccgcaccacagatgacaaatgcaattttttgttcctatttatttatgacaatgagagatagctgtcaagggtgtttaagactctttcaggtgaaccactattgcttttagaaggataaaaataaagattcagtttgga

SEQ ID NO: 573361 - DNA, 968 bp, Homo sapiens
cgtaggcgcctgttcatctcaacacgcacaacaacgggttcttttggtcacccaccactggtcccatggacgtgccgatgcagcaatggactccatgtagcatacgcccaatgcgcctcttctttgaagcgggccactgatgcgtcatccttgaacatgcccaagggaacagagtatgggattgactataactcctgggaggtcgggcccaagttccggggcgtgaagatgatccctccaggcatccacttcctccactacagctctgtggacaacggctacctccgcaaggaagtaggccctcgctatgggcttcctctccttagccctgcaccagcggcgcgctgacagctgctgcgctgcgagcacactcacggccaacgcacggtagacctgtccccagccccagcagtctgacgctgcagcgccatgcagggccaacctccagcgagctggaccagttcctgccggcctcacccatactgccacccatgacagacagtggatctcactcaccaacttcactcagcgaagccacagctggacgaagctacagcccgacgcaatcgacagatctgtgccctcccccgcatgtgctacctgtgcctctccactgacgcacaccaaggcaccgcgtggggcaaaatctaccccgctgtggcctcgagctgcaaaagctaccaacaagggcctgacccggctaccagagatcgagcccacagccggcaccagacgacccgctcatcagcagctgcccacgcagactgtcccagcaagctgcctccccaacctctacattaacccaaccaccacatttaacccccacacctaatacacctgacaaacctgcccccccaccaaatccaactctccccaccacccaccaacaaatacatcaaaaaacacccccatcattccaacaccatacaatcaacattaccaaccaccacaacacctcaacccataca

SEQ ID NO: 573362 - DNA, 303 bp, Homo sapiens
ttagtgtaccgatagtccctagttgagcaacaactaagtgagcacttgttgtatgaacactaattcgatactcgcttgatcataacacaccctgtgtgtaaatattttttcccctgaaaaacgtagcacccttcagcaggaccctataaaactttcctccagcccttgcctctttgcaggtagccccttctctgctgagctgccctctgcaacatattttcacaatttctctaataaatctgcccttctttacctacaactatcttggtaaatggctttaccacctgcaaaactgaccctagg

SEQ ID NO: 573363 - DNA, 501 bp, Homo sapiens
ttgctggttctgaaagtggcaagataataatgtgaatatcaaatccaaattcatgaactttgtcccagaagatggcaccccagaggaaggcccaggtatattgcaaccatttgaaagctatggtaccccaagtcaagggagtaaaaatatgtgactatagccaagattcaaaaagcccaggaaaaaggaatggggcatctcctgcatatagtgactattcctacagagtacacaaggaatctgatgcagaaaaccaagttccatgcaacactaataatattggcaacttgggtgaagaagaacccaagtttcatgctcatgaagaaaatagaggacactcagaagtgaattttgactcttcaacagttgtcaaagaaccaggtttgaaagataacatgaatgcagagagaaagagcaaagtaggaaatacctatatcctgaaagcctccttagagccagagaatattaagtcaacacctggggttgccaacaatggctctc

SEQ ID NO: 573364 - DNA, 159 bp, Homo sapiens
atttgaaaaaaaaaaatcatttaaatgatcctttgttcccggctctccttaaagactgagggaacagttcctatttggaaatttgactaaaccttttcctaaggtatttttcaggggtcctaggtttttttatcaaaattaaaagcaaacccctttgga

SEQ ID NO: 573365 - DNA, 168 bp, Homo sapiens
aagtcagaagttatcacaagtgcagtcctcaaactcccttcttgaattcctccctcaaactccctattgcttctttgaagtcagccatgatcaaaggctgtcgagaaactccctaccccagcatactgacagatgccaccatggagaagctggcactggccaaatttg

SEQ ID NO: 573366 - DNA, 741 bp, Homo sapiens
gataacactacggctctcaggtctcattcgataacacgaacactgggtatgttcaaggccacttgtagcacacacagacggaacttggttctgttatgataaggacattgaatgggcttgtctaatattgacgcatttcaaaacgttaatatgaaattggatatctaaccaaggacatgtttgataaaattaggtctatggcttgttacaacaaaattagtttgtatcttggttattaaacagtatctgggactggtttgggcagaatattaaacttattttgttgccaattattgtttaccgagtataatgttgctatttagcaatgtgcttggttttaaacgaaattctccttgggaaaaaagtatcctcttttaattttacttcccataagcgtaaatgcctggacatagctcttgtgcaacctttaaataacatggttctgagtgtatattggagccccagacaaataatgtttaaaagttatccccttgctactttactgatacctttatcattcctgagacagttttgctaatttaaaaaatgtagcattccatttgtatatatttctctcccttgccaaaaagattttctaatactgacttgtaccagccagagacaagatccaaaaggtactcaggctctcttgcactagaggacacttttccacctacattgaactcctggactaccatcagccaaacttaacccttgggaggaagggatttgaatagccaa

SEQ ID NO: 573367 - DNA, 844 bp, Homo sapiens
tagttgccggtccggtgggtacgagatgactgaaccggtgcgcctctcccgaggacccttgaggtcaaggtggagtatgcctacagtgacaacagcctggaacccgggcttttagtagaaagcaccctgcaaggggagtgtagctgtaccatgagctaatagcatcggttccaccagtgcctcttctgtccccaaaacagatgatgagcgacagtgattaccaacaggaggcctaccaaggagtcctacaaaggaccgtgctggcggccgcgcaacaacactcaggcttgagcaagaagaaggagggacgccaatcaagagaggctatgatgacctttcagaacgcgatcgtaccccaacttggccagcaagaaaggagttctccgattgggatcccaaaagctcagcaaagcccatcgtaccatacagaaagaccattgagtaggagtcaaagtttttgcacaaggagacaggaaaaaacgcaaggcgaggaggaaggtgtcaccagctgacagcatagggaatgtcaccgacacctaaatgatcatgcaaagatgaaactaatgagcaagattggcgcaaggcacaccgggaaaaacgccccaggaaggggaaggaagcaaggtaactcgctgaaccaaggatcgtaagattacacgagatagataagagggggaattcattgggaataccgcgtggatgcaaggatacattaaaagtggcctccaatcttaaagtggtgccaagcaatcgagtgaaaaatgcacaaggatgatgtaatcagggcaggactcgaaggagcaacttgtaaagcacagtatagagcatgagcaaacatagtgat

SEQ ID NO: 573368 - DNA, 355 bp, Homo sapiens
tgagacagagtctggcactggctggatcacagttcattgcagccttgacctcctgggctcaaacgatcttccttcctcagcctcttgagtagtggggattacaggtgtgtaccaccacactcggctaattgtttattcttatttggtagagatggggtcttgcttaggttgcccaggctggtctcaaactgctggcctcaaggaatcctcccacctgggtttccaaagcatttgggattacaggcgtaagccaccacaaacggtgagcattatatttctacgggactgctttaaattcatccgtcgacgcggccgcaaatttagtagtagtagtcgacccgggaattctcggacc

SEQ ID NO: 573369 - DNA, 443 bp, Homo sapiens
tgaaggggttaacgcctgtaatcccagcatttcgggaggccaaggtggacagatcacttgaggtcaggagtttgataccagcctggccaacatgctgaaacccaatttatactaaaaatacataaaattaactggctgtggtggcaggcacctaaaataccagttactctggaggctgaggcaggagaatctcttgaacctgggaggcaaaggttgtggtgagccaagatcacgccattgcactccaacctggtcaacaggagctaaactccgtcatagaaaatagatacctaaaattaaaaaaattacaataaataagtaatacagaatggccaatgtgggcttcacaggtaggacacggatttttttggtaaggggctttttggaacccctctcctgtagggcccttcctgggcatcatgctacacacgtgttcctctcgt

SEQ ID NO: 573370 - DNA, 147 bp, Homo sapiens
tattgggattacaggcgtgagccaccgcacatggccctgagttgtcggtttgtttgttttgtagttaaattgaattaaaatgcataggagaaatatgtgaccaaacctgtgttaccagagagacttcccagaggagatgatgcctga

SEQ ID NO: 573371 - DNA, 1226 bp, Homo sapiens
  misc_feature (717)..(717): n is a, c, g, or t
  misc_feature (998)..(998): n is a, c, g, or t
cattctgtcttgttttcctgttgctcccctctccgtgtgtttcttgctcttcttcttgtggtgtgttttgtattcgtccttctggtcgtggtctcacagtctgggtttcgcgtgtttgtctggttgccgcgttttctcccactgtagggtggcggcttcttcaaggggcccaagggtatatattcttgcccccccttcgtggtgccccccgttgttcgaacggtgtggtaccccttggtcgttgtttgcccctcctctcctgttttctccccatttcctctctgcgcacctccttttttgcaccccttggccaggtcgtcccgtgacactttggttttcctgtgaaggtcttcttggcccccccatgccaatgcgcatccacctgcgcccctcccggtgagctcgtgggatgggccccctcccggggtacctgttgtgccttgattgcccccgggggctttccccgaaaccgtccattcccgtgcctctatctggcggctgtcccaggcctttgggcccaggtccatcccctgtgggctgtaaccggagagcttcactggcctggccccttccgtggtcccccccgtgcaccaacctggtcccactggttggaacctcgagacctcgccgttttatagaaaaaccctctccccaatatttgagtgaacactcccaggaaagggttgtgtgataacccacgggcgtttcgggagaggngcccccccctctccaagggggcactcccctgggctatccacctgaggccccccgcggtggtttctcccttctgaactttccaccacgcgatcaccccactctctctcccccctttgtacacctctgtgggcctggccacttgtcaccttccaacgcgcccacctttgtcacaagctcactttcctggtaatgaccaccgaaatttggctatcagccacacacagggtggtggaacctcacatggcccaccacatggcctccacaaggagagtataagaacncccctggagccacaccacgccccacgtccaagagcacccagaggaaagagagagaccctcacctgctcggggagtccctgccaccacctcacgtcccccacccaccacctgattctcccctcctcaccacgttgccacatgtatgagccccttgaagaaggggaaggggcctagggaacccccccttgtcatgtacccatccataaagtaccctgtgctccaacccca

SEQ ID NO: 573372 - DNA, 133 bp, Homo sapiens
ttaggataagtaacatgaaaacattcgcctccgcataagcctgcgcaagactaaaacactgaactgacaacaaacagcccaatacctacaagcaaccaacaagacattattaccctcactgtcaaccacgaca

SEQ ID NO: 573373 - DNA, 516 bp, Homo sapiens
  misc_feature (78)..(78): n is a, c, g, or t
  misc_feature (84)..(85): n is a, c, g, or t
  misc_feature (90)..(91): n is a, c, g, or t
  misc_feature (115)..(115): n is a, c, g, or t
  misc_feature (119)..(119): n is a, c, g, or t
  misc_feature (145)..(146): n is a, c, g, or t
  misc_feature (150)..(150): n is a, c, g, or t
  misc_feature (228)..(228): n is a, c, g, or t
  misc_feature (230)..(230): n is a, c, g, or t
  misc_feature (237)..(237): n is a, c, g, or t
  misc_feature (247)..(247): n is a, c, g, or t
  misc_feature (269)..(269): n is a, c, g, or t
  misc_feature (275)..(275): n is a, c, g, or t
  misc_feature (396)..(396): n is a, c, g, or t
  misc_feature (398)..(398): n is a, c, g, or t
  misc_feature (417)..(417): n is a, c, g, or t
  misc_feature (420)..(420): n is a, c, g, or t
  misc_feature (423)..(423): n is a, c, g, or t
  misc_feature (427)..(427): n is a, c, g, or t
  misc_feature (438)..(438): n is a, c, g, or t
  misc_feature (491)..(491): n is a, c, g, or t
  misc_feature (497)..(497): n is a, c, g, or t
tcccccacacagaatgatgacaggggccagagcattactgtgagctccgccccttgccagagcattactgtgagctcngccccnngtcannattactgtgtgagctccgcccccntcancattactgtgtgagctccgcccccgnnagancattactgagctccgccccctgccagagcattactgtgtgagctccgccccctgccagagtattactgtgtgagctcngncccctgncagagcattnctgtgtgagctccgccccctgncagagnattactgtgtgagctccgccccctgtcgagcattactgtgtgagctccgccccgtctatcattactgtgtgagctccgccccctgtcatatcattactgtgtgagctccgccccctgtcanancattactgtgtgagctccnccnccngccngagcattactntgtgagctccgccccctgccagagcattactgtgagctccgccccctgccagngcattnctgtgtgagctccacccat

SEQ ID NO: 573374 - DNA, 179 bp, Homo sapiens
gtagctgatcttgaggattccagactcggcacctgttcgatggtgctgaattgcagcagagaacaagaaaaaaagaagcctggctgaggtgctgtgtgttggtgggccctgtgtgccacagagcgcagctctagtgcctgtgtgcccagtacctaatctcctaactgctgtgcagtgca

SEQ ID NO: 573375 - DNA, 143 bp, Homo sapiens
ctacacccacagcgggctgtggtagagaactctcttccttctttccaccgtacagggcgagggctgcttcctcgcggcagccggggcgaagaaatctcgagagaactggcatgaggagttagggtcatcacaaatacacacac

SEQ ID NO: 573376 - DNA, 136 bp, Homo sapiens
agccagtgtcaacatggcgagaccagtctctacagaaaataaagtatgtgggcgtggtggcacgcgcctgtatgtcccagactgcttagagagagctgagtgtgggcagggttcactatggagctccagtgaggct

SEQ ID NO: 573377 - DNA, 139 bp, Homo sapiens
atacagaatctcatagttttggattaattagcaccaatcagtttaaacactgactgttagaatagctgcatgggtttttttttttaaactaattaagcgttggctacttagtataagtaagtataagccgaattaaggt

SEQ ID NO: 573378 - DNA, 435 bp, Homo sapiens
tccaaggacatgaaggtctgaaaaagaaacaggaaaatacagacatccccgcttaagcagggtttgtttttctttttgtttttttgagacagagtcttgctctgttgtccaggctggagtgcaatagtgcaatctcggcctcccgggttcaagtgattttcctgcctcagcctcccgagtagctgggatcacaggcatgcaccaccacgcccggctaattttttttttacttttagtaaagacagggtttctccacgttggccaggcgggtttcaaactcctgacctcaggtgatttgcctgcctcagcctcccacagtgttgggatgacaggcgtgagccggtgtgccgggcccagggtttccctttttttgcagtttcagttatccatggtcaacagagctccaaaaatattaaatggaaaattttaaaacta

SEQ ID NO: 573379 - DNA, 357 bp, Homo sapiens
agcggacctgcgcgttaagagtgggccgcgtcgctgaggggtagcgatgcgggctccggggatgaggtcgcggccggcgggtcccgcgctgttgctgtctgctgctcttcctcggagcggccgagtcggtgcgtcgggcccagcctccgcgccgctacatttttttactggtcgagcctggattctcggccgctgccggcctggttcgacgaagccaagattcggggtgttcatccactggggcgtgtacatcggtgaccgactggggcagacgagatggttctggatgggacatggacagggcgaagaggcggacgccagtaacaaagactcaagacgccgaaaaaaaacacagcc

SEQ ID NO: 573380 - DNA, 1555 bp, Homo sapiens
  misc_feature (1312)..(1312): n is a, c, g, or t
  misc_feature (1348)..(1348): n is a, c, g, or t
  misc_feature (1391)..(1391): n is a, c, g, or t
atcatcgtctaccctggtcattcctaaggaatacctcacatcacagtgagctgcatgaaatgagagcttgcaagacccgtgaccaccttctgaatcaccgtttcacacctatcatctgccttcacatccagcactgactggcttgcgtgccattggcctaccgtttacccatttagagagtcgtccttgctccacgaaccgggtctatggcaaaggtacacatggaccgggactagagtgtcccatacgtcctgccactccttcaatgtcaccccgattacacaaaggtctgaccaattgcttatgcaggcctgcatgtacatgacgatccgctgtgagcatcccatcgtactccactccgtggtcatccctcgtggtcgtcgactcatcgctgggcacaccgcgttctcacatagtctgtcaatgtatcaccataatacaactgtttgtgagccatcaatagcgtcgcaccaacgttggctcagttcccttgtcgcccttgcaaaagaccaagaatttctattacagggctcagtatttgccccaatacacaagaccattggttatggaccggattgtatgtctcttcttgtggctacatgtacgctcttccacgtttcagcttcgttaccagacgtctcaaaccgccaccggttcgctgacctacttggaactatcatgggacgcccttgatcgggttggcgtcacattcctcggtcgctacgtagacgacatgatcggagtgctgaaatgatcttgttacgactcactatacaataaagaccatgcgcttcctttgggacaccggggttgacccccccttggactagttccttgcccgacgcatgactgcaccctggatacctgacgttaccgagaaacaaaccaatctgcgtgaactatagagacatcttgctcacctgtgagtgaacttggcgaaacacccttagtgtgccaaactaggctagaacccaggcataggcatcatatacacgatggacagcacgccactcaatggcaattggttgccccttttagtacatgtggtccggtggtcctacgacgcccctcatacatcaatgtacatacaccgatggcacgcgagttgcacaccagacacttcttccatactgccctcccattctctcatcagacccatctccgcctacaagcaccaacatattcaccacacaaacataccacactcatcaaccatgcccacacccacaactcctacaatcatacacgtcgccaatcccaacacctaccattccacaactccgataacgtactaactaatctttcatttctntctttctttcttctaatccctctcatccttttaccngtacgctccatgcatacctactcacacctgacacgcacacctnccaagccgtcaatcgacgtccatcacacagacgaacccgctacatcactaacacacgactcacaccacacctagcaacatccaccactacccgccaatctcagccgaccatcgcacgtcaagccacttgactacccaccccaacacgcactctctactcactac

SEQ ID NO: 573381 - DNA, 112 bp, Homo sapiens
tcgcgctcggtacccgttcttcccagtgatatcatacatttaatacataatgtcattatagcattaataatactgcaaccttttcttacaaagattgtgaatatcttttttg

SEQ ID NO: 573382 - DNA, 258 bp, Homo sapiens
  misc_feature (13)..(13): n is a, c, g, or t
  misc_feature (105)..(105): n is a, c, g, or t
  misc_feature (107)..(107): n is a, c, g, or t
  misc_feature (128)..(128): n is a, c, g, or t
ctagaggatcccnctgccaaaagcgataccaagcgtaaacacatgtacagtatttgacaatgacaggtgtacctgaaaatgtgtgttgcctatggcagtatatcntnatataccagaattgctaatanggatggtaaattctgtgactcttcaaagaagggagtggcaaatgttcacaggagctgataggagaggtcttgtggaagaggctgaaggtgaactctgcccagagtaatcattgggtactacgctttggca

SEQ ID NO: 573383 - DNA, 574 bp, Homo sapiens
gagcgaaatttgctcagttgcagggattccccaggactccctgggagtcaggccacacccagttgcttctgctgggctggcggtctgtctgctctggagtggggtggggtggtgaggtgcacaccacacacacacacacacacacacgcacgcacgcacgcacgcacacacggagggaggggggaaagggagatggggtaggtgaggaaactcaccgtcccagagctctcttgccccctcttcaggcaataagctctcactgctgttcctgtccaggtgaccaatttttgccataggaggccctatttttagacctcaaaacccaccaccaatgtctgggctgcaagctcagtggaccaggctgctgcacgggctgttttgtttttgttttcgtggtggcacatgcctgtaatcccagctacttgggaggctgaggcaggagactcacttgaacctgggaggctgaggttgcggtgagctgagatcgtgccattgcactccagcctaggcaacaagagcaaaactccatctcaaaaacaaaaaacaaacaaacaaaaaaaccttatgaaggaaa

SEQ ID NO: 573384 - DNA, 141 bp, Homo sapiens
taaccgatataaacattctaggtctaaatgcaatcagtctaaatgcatcagctctaaatgcaatcagtctaaatgcaatcagtctaaatgcaatcagtctaaatgcaatcagtctaaatgcaatcagtctaaatgcaatca

SEQ ID NO: 573385 - DNA, 461 bp, Homo sapiens
ggcattcatgcctctggcagctttcagttccagttttcccgtttcagggccttaaatgggctagggctactttatctttttgacctggaggctatgcagaagactacatatcttcaggttaactcacgtactccggctcataaagaaaagataaatcctttgacttgctacgggggtgctaactagccatccgacagtgcagttgtcttactgaacaagggcgagagaactcagacacgggggcattaagtgcttgactattactaggagctggtctctcgatcgcatgacgtagactgaaaaaccctgcctgaagacgatgaagagtgctgacgccagaagcatgtgcctttaacacattacacttaaggtgagtggaaacgagacatgtaagctgcatcatggaggtttagaagcgcccgttttgggactgtttgaaccccaggcaacaagacgtaagg

SEQ ID NO: 573386 - DNA, 898 bp, Homo sapiens
atcctcaccaacacttaactattttctccctctctttttcttcttaaataatagccatcctaatgggtgtgactcttattatttattggtaaaactaaactcttattttgtaataatttctaaagtgttacacaacgctgtaatacattttaatctaacattattgaaaaattctaagaacacgtgtgtattgcagaaaacaaaggtaacagagttatgtgaaagagtagacggagaatattgggcaaactaatggggcttatattggtgatatgttaggcagacttactgaccaacagtgggtcacatcgatgtccaaagaagaattcactgaaagcagcaactatgtatagtgctcaggtacaagcatgggctaaatgaaagtagtcaaatggaacagctcagcagatgatattaacctgacgagataggaaaacttggcagaagaatatgttatgactacagcttttgacacgaactatgtgatattgttgtatattccatgtgagatatcttcccttcatatgtagcgtataacagtagttaaattacgtgtacatgaacacatctggagaacatgcacctattttcacgtggaccacacatccttgcggtcagggacctgagacgtcaggcagcatgaccacggataagattgaattctacaccatacaaccttctaccggctagtcttgcaaatattggtagatcacggaacattttcttcacgcgactcacaaattttgctaggcccgcacgcacgtcgggtcatcggcctgtaatttccaaggtcacctttgggaaggcttgaagccaggcacgatccaccaggtacgggagaatccgacaaccatcctggccacctggtgaaactctgtcttacctaaacatgcaaaat

SEQ ID NO: 573387 - DNA, 109 bp, Homo sapiens
ctggattgtcatccccataaatataacaaaattacaaaaaaaagcatagttgggcaataaatacgtttagataagttaaataagcttttttatattgatgtcatagaaa

SEQ ID NO: 573388 - DNA, 157 bp, Homo sapiens
tgtacgggcctgtcctgttcatgtacataagatagtgcttaaattggaaaaagctttttggcaataggaaagactgcagcttttacaaatttggtacttttcagtcctatccaggtcagtaagaagtcatatcattggacactagtaaaggactctg

SEQ ID NO: 573389 - DNA, 971 bp, Homo sapiens
cggagggcgtgaagattccgggacgacgtactgcctgctgcaggaaggccctgaagcggcaaggagaagcgcagggcgcagcgggcagcgccggtgggagaagcgtacggccggccgtggtggagaagatgcagcagcgccaggaccggcggcggcagaacctgcgcaggaagaaggcggcccgcgccgagcgccgcctgctcagagcccgcaagaagggcctgcatcctgccgcaggacctggagcgcgcaggcctggtcctgagtctttccacacctggggccgccgtcttccgtcctaggagactccaggacaccgctctgagtccttgacgctggctctgtcccaggatctccacagaccttcggcctctccatcgtgagggggacacagctggtgactctgctagagttgtgaggcgcccagatcacagatcccatgtgatgaaagacgagagtttcagcgtcatcctctgaacgacaggatccgggaccttcagacgccagcggaaagtggtgagggagaactgggcgcctgagtactgcatttccctgggccgtgaaagcttccgccgagggttctgcagaggtcagaggaggaggaacggtgagggtgggcagtcaactgcctgttccccactgccagtcgttcgcaggagccatcgggacagaagacggtggccgtctgaatgccgggccacgttagtacagcgagcgtgcagcccgaaatcacgagcgaacaagccatcgaggctcgctcggctagtagtgggacaccgtggacactgaggagtacgggggaagcacagtccaggacgatggtgcatcactggggcagaacgccatggctcatccccgctctcttggcttacagcctgttggggtctcattcgtttctgttccccagtgcctccggggcggcagttttactgtctaagaatttatatcggagggagcagtacttccctctc

SEQ ID NO: 573390 - DNA, 108 bp, Homo sapiens
  misc_feature (2)..(2): n is a, c, g, or t
tnatatctagaggatcccgtctagctcgccagtgtacgaaacagttgtctctgcaggagtgtgtgtctggcatttttttttttgaaagggaaaacctctttccatgag

SEQ ID NO: 573391 - DNA, 1165 bp, Homo sapiens
  misc_feature (231)..(231): n is a, c, g, or t
  misc_feature (233)..(233): n is a, c, g, or t
  misc_feature (235)..(235): n is a, c, g, or t
  misc_feature (239)..(239): n is a, c, g, or t
  misc_feature (369)..(369): n is a, c, g, or t
  misc_feature (615)..(615): n is a, c, g, or t
tggttcagagcgagtgctcgtgggtcagcgttctgagtagctgggattataggcatgcggcatccgtcgaccagctaagtttgtttatatttgtggtagagacactatgttcatgcatgttggcccggctggtctcaagctccgttacgctcaagtgatctgcccgcctcagcctcgccgaagtgctgggattacaggcgtgagccactgtgcctggcagtcttttatttnanantaantacttagtcctaacctagtgaattatcaatagcatttaaaattccttctatcctgataccatgaacagtaattttcccttttaagttatgatttgactctaatttgggtcttgtatctggtctttaaacncctttcgttaccctttggaatagaacaatcatgctactgttagcaaaattattgtaggcataaggaagagctgtgagttcaaagaagattgtgagttcttggaatagtattttacagcgttgtttattcttgaccttcttgttttttaagcttagagtttataagaaaaaagtgaatatatagctaattatagcattttagaaaaaattagctctgcagatagtcaggccccatacttcttggctnattactgattttaataccttcatgagagtattaaggttgaaaggaatggtgaaatttgcattatcagaggtctgatatgtaatttattgtaaagaaattaaatatatagaggtcaattaaaaaataacatattctcaaactccattaccactaatatcttggggttgtcaatgatagactatatatatatatgtatgtatatgtgtatatatatatatatatcattcttctcttgacgagacggagtctatggtccggtcacccacgcttggagttacagttcacaggcaactatgctttcccaggttcaagcattctcggcttccaggcatcccgaagtcacgtggaattcagacgctgccaccagacccagctaacttttcgctcttcaacagaacggcgtctcccatgtcggcagcggatccaacctagaccaattccaaccgcagtccaagtcggctacgagataaccacccggacaacctgtacttcaagaagaccacagaccagccggcgccacaacgcaagcaagcattacaatcgatctacg

SEQ ID NO: 573392 - DNA, 386 bp, Homo sapiens
ggtatggcatacagagtataccctggtacacatatattcatttgtgagtatggatactagagcacattatctactaaccattcatgtcagttccaaaaacccatctaaatatcttgagttcctgaattttgaacaggattacctggagcctggagccactttaagttgtacttctgactaaactggaattatgagtgaggaagagtgtttactaaataaatgactggggcaagctaaaattgaggaggaaattagaaactgtttgacaaactttaagagctacttgaaataacagaagtcttgattaatatgcaaataatggctagaaagtatggtttaactggaccctattatgccttttaaaaataatttcagtaacccataaa

SEQ ID NO: 573393 - DNA, 690 bp, Homo sapiens
cgcaggaccgccaacgttctggtaaagggggaatggaaaataaccgaccccaagtccggctggacccggaatgaccatgtgtcagggtcccatgtctaaccgccctaaaaagtacgtaacgagatgacccgcccggtggtgtcccagtcaaactaagagataccccacgcgtctgcaatggcgcagagcattatctgccttatgctagtcagagtcggggcaagattcgctatgtaacatgacaagatgtacgcggcccattcagtgaaattcgtagttcacacagagatctatctacacatgatgaatctcattcatgatggaaaacagcactcgcgctgtataaactcaggacaacaaggtaaggaatctctgttccttaagtgctgagctaagtccgggtctagcaaacagtataggagtccctagataaggcattgggctagccccagctgtacccagcaggtctagtgaaatattcactctgaggaatctttgagattccctgggaaaaagaattttcagcaagggccaattatttccagcattccgttctttaactgtgtatttctttacagggaaatagcgcacagtgtcggttttgtgttaagtagcggaatggattcgtgagcacggaaacgtaattgaagcataatattcttgcttaaggaataattcctctggcagtaa

SEQ ID NO: 573394 - DNA, 2850 bp, Homo sapiens
  misc_feature (184)..(184): n is a, c, g, or t
  misc_feature (430)..(430): n is a, c, g, or t
  misc_feature (2832)..(2832): n is a, c, g, or t
cagcaagcatgctttgaaatctggttcagactatcatcaggaagaaaaaaaatcccacagtacctgaaatgtgattgttgcagtgttcagtttccttgggggcctgctcccttcacaccttgagcccaagtccttttccgttggctgattcagctcccagaagagacgaggaagtgtgtggcangggactggaaaacttcacttgcttggattaggcaaggctccactcattgttgatatttgcccagcaggaaaatcatgtaagttataccaccagaaagcaaaaggagcatggtttggtggttaaggtttagtgggatgaaggacctgtcttggtgggccgggccctcttgtgccccgtaggctaggtcttagggcaactccttgccctcctgctcagcacctccatttccccatccttggtgagatnacaagctatcgcgaaaagcacttgggagatttggatgatttgagaagagtgacttaaaaaaaatgcttctgtgctctaagatatatatgtgtgtgtgtgtgctacatatatatttttaagaaaggaccatctctttaggatatatttttaaattctttgaaacacataaccaaaatggtttgattcactgactgactttgaagctgcatctgccagttacaccccaaatggctttaatcccctctcgggtctggttgccttttgcagtttgggttgtggactcagctcctgtgaggggtctggttaggagagagccatttttaaggacagggagttttatagcccttttctactttcctcccctcctcccagtccttatcaatcttttttcctttttcctgaccccctccttctggaggcagttgggagctatccttgtttatgcctcactattggcagaaaagaccccatttaaaacccagagaacactggagggggatgctctagttggttctgtgtccattttcctctgtgccaaagacagacagacagaggctgagagaggctgttcctgaatcaaagcaatagccagctttcgacacatacctggctgtctgaggaggaaggcctcctggaaactgggagctaagggcgaggcccttcccttcagaggctcctgggggattagggtgtggtgtttgccaagccaaggggtagggagccgagaaattggtctgtcggctcctggttgcactttggggaaggagaggaagtttggggctccaggtagctccctgttgtgggactgctctgtcccctgcccctactgcagagatagcactgccgagttcccttcaggcctggcagacgggcagtgaggaggggcctcagttagctctcaagggtgccttcccctcctcccaacccagacataccctctgccaaactgggaaccagcagtgctagtaactacctcacagagccccagagggcctgcttgagccttcttgctccacaggagaagctggtgcctctaggcaaccccttcctcccacctctcatcaggggtgggggttctcctttctttcccctgaagtgtttatggggagatcctagtggctttgccattcaaaccactcgactgtttgcctgtttcttgaaaaccagtagaagggaaacagcacagcctgtcacagtaattgcaggaagattgaagaaaaatcctcatcaatgccaggggacataaaagccatttcccttccaaatactcgacaatttagatgcagaacatttctctgtattcagacttagagtaacaccagctgaaaactgcagtttctttcctttggatacataaggcttctctatcggggtacgggacagggaggaggcctcatgtctgaagggggatttaggggcgagagccccagccctgaccctcggtcctgtgcaccgctttggggcacagtctgatggcgcctttgctggcgccttagtatggttgactccggatggacaaaagaaaaaaaattttttttcttgaatgaaatagcaggaagctcctcgggagcatgtgttttgattaaccgcaggtgatggatgctacgagtataaatggattaactacctcaatccttacagtaagattggaactaagggcagggactcatgcataagggtatgaatcccagccaggacaagtgagttgaggcttgtgccacaaaaggtttgtccttggggaacaggcaggcctgccaggatcccccccatatcgattgggctgggagggctggccgtgaggtccccactttctgctttccttgcccatgtgtcacccctttggcctccagcttgtccctctctcactttctatagctttgttggaccagatggtgaggaaaggaatggcctcttcccttctagagggggctggctggagtgagacctggggcttggcctggaacccaccacacagccccaaagtcaggaagcctggggaaaccagagctgagacctcttcaacagggtttctttgagatcctacacctccattgggccctttttcagtcttcaatgggggcccagttggctctagaaggagaagaggtgaagcaggatcctttgccctgggggagtctgagggcgcggtccttggactcattcaggccgtctttgtagttgggggagttccactgggcgatcccagcccctccccacccaccctctaatggacctcctcatagaagccccatttcacttttgttttatctacctcttagcaaaacaatagataaattaggtagtggcagctccacttgcttaggttagggggggaaaaagatttctttttccaaaggaaaaaaatattaccttgagaatactttccaaaaaataaaatttanaaaaaaaaaccaaaaaaa

SEQ ID NO: 573395 - DNA, 1377 bp, Homo sapiens
  misc_feature (445)..(445): n is a, c, g, or t
  misc_feature (481)..(481): n is a, c, g, or t
  misc_feature (509)..(509): n is a, c, g, or t
  misc_feature (529)..(529): n is a, c, g, or t
gcacggagacgagtgcggctgctgcgagccgagcccagcgatcccgatcctctgagctcgtgaataagggaggctagcgagggggtaggtggttggggccttgagtgcaaagtcccccgagtgcatcctgcgtcatatgcgcacgtatggtgagcgaaggagaccaattggcttcaacgaagaagtggagacttcgtgggatagccgtggccatcactcaagagactaccagggcgtagagtgccttgccgggtaggagaagactaggcagcccgttgacgtctgagttgcgacagagccgtgtagtagtggagaccggcgcaagtcacgaagaagtgcttgccacgagagagcgtcgcatcgcataagcggtaaaccacatgcgcgcagcgcatgcaagcattgcgtattcgtccccgagaagcttcaacaggggccgccgaancatgtgcccaagtcgaagtagtgaggcctggaacanttgtcgacggatttctcccaggcgaggnctggtccctgtcgtacggcnctgaaaggtacacgtcgcgttttcataacggtcgccaggaattcgcgcgagcacgatcaagatagggacgcgcacatatggggtggatctaatgaattgtacgtgctcaaaggctcgatgcagatgaccagaagggaatgtgacccgaagcagcagcaggaccgatagagcatggccttttaatgtacccagagaattgcatacgccgcaagatggtgatccagaatcgcttgccttatggatgtatttccgcatggtcatggcaatcatctggatcgagtatagcctggctaaacaacgttcttgagcatgggcctttcacagggtccaagaaatgaccatgtagtagaagtgtgggcccagaagtgacaccctacagatattctactcaggacgtcatcaactgccgaatgaatctgtgcgcaacagcagagcgtaagagcccgttcaagggctttggagatgataccagtaaggacccaaaagagtgattaccaagaccagaatggtaaatcagggccaaattgggcatttccaagggtgaactagagagcgagccaggtatttctgaactggagggtgacatgcgcgacatcagcgaaggtcccaggtcaaaacggggtcccgggcaaaaaattcgggggaaagaggacccggagaataaaaccggacggttggacaccatggggaaaaaagggggcacaatgaggaacaacgatagaactaacacacaaaacaaagggacgcaaggtgtaaccacactgaactcgatgagacagaaagcaagagcgtacacacgcgagcaaagaggtaaagaaaaaagcgatatcgtcccgctgctcgcaagt

SEQ ID NO: 573396 - DNA, 200 bp, Homo sapiens
gagatagtacaagatacaacatcgaggtcgtacaccctattgttgatatggactctagaatagagattagcgctgtatatccctagggtcacttgttccgttggtcaagttattggatcaattagagtatagtagtatcgctatatgactaggtgaagtctctagcatgtactagctcggaggttgggcttactgctacc

SEQ ID NO: 573397 - DNA, 225 bp, Homo sapiens
gctgcgttgtctcacgatcccttggtcacgctcatttcctggtatacagcgactttggctacagcaacaggttggtgaacctcatggcccaggattgcctccaaggagtaagacccctggagcacgctagcccccgcaatgagcacaatgaggacgagagagaccctcactgctggggagttccctgccacctcaatcacactactccccatatctaacaacggg

SEQ ID NO: 573398 - DNA, 1670 bp, Homo sapiens
  misc_feature (1312)..(1312): n is a, c, g, or t
gacccacgctgtcgaacagagcaagactctgtctcaaaaaaaaaaaaaaaagcatgcttttaagcagtaactccccattccccccaatgcacccactcctgggttaacctcttctttctctctggtctctggaacttggccttccttggtgaagaaccttggtggtaaggtgggaatattggcaatatttggtccttcgccttagcctcatggtcctcaagggttcattcatcttggtgttggcaagccttcttttccaataaattgggtcccaatttctatggattattggaacattgggcccaaattggtcccaatagaaagtgcatgttcaatgggttccgtgtaaattaaacaccttaagaaaacttggcgcccttcttgaacatctcttgtagaacacttgggagaacagagtttcacaattgtgctccataatcgtgaggttccccttccttcgaggaaaaccaaacccaatgtggtgccttccaaggaatgcgcacgcaagagaaaagcgtgaaaattcacaccagaaactcacaaggcattctgtggacaccaagtggaaaacgtgcaaagaagcaccaacgctatcaacgccttttccagtaatgtgtgcccccagggtgtgggaccacacgctgggcatccccaaatttgggaccacagagcgatcgatagtccagtataacccccattcaccctataaaagttccgcccacaagtttattccattacgacataaagacacaagggaatgtcgcatttttttctatttcgcacgagtgggtataagagaaagcacgccccgtagtaaatatataaaaaggacgagggagcgtacagaacagcgcacacattgggggcgggattagcaacacctacagttagaaaaggatagacaaccgaagtgatcaccaacgcgaaaggggaacaacaccaccgttcgatctaaaacaaagtggagggggggacataataacccccaacggacaggagagaagtagggaacatggaggacgccaccaatagtaaaaccgagtttttccccccccaagattgggagacgccacgaagccacaaccaaaaggaggggaggcgcgagcgcacgcaggagagaagtagtccccccaccacgaagaaggcggcgactattatgggcgctagcgtagccacgacgtatgaaagccctagcccccgcgattatttgttcggcagagacgaggaaaacatcacgacacctgtctggggaagagaaacaaccgtaagtagcgacatgttgtgcacacaccccggatggtccaacaaaaanacgaccagacaggaggcaagacaataagaacgtctcggagaacgacagttgcgaggcggcagaacacccggagcgcggcgagacacgatcgcacaagagttaggaaccccgggaaagatacgcgggacactcagtcgtggagacgatcccagacggagacgagcagagtgaaaggcagcagtgaggaaccaagcgtcgggtggaaaccaccaaggcaaagcaggggagactatacgagcaagagagagaagtcagcagagagagatcctaccccactgtggtgagcgaccccacgacacggtcgagacgcaaaacgagaggcgaagacagctccgcggctgagcaagacagacaacca

SEQ ID NO: 573399 - DNA, 241 bp, Homo sapiens
  misc_feature (38)..(38): n is a, c, g, or t
  misc_feature (99)..(99): n is a, c, g, or t
  misc_feature (178)..(178): n is a, c, g, or t
  misc_feature (184)..(184): n is a, c, g, or t
gtgaaacctcattctccaagccagagacaatttaaagnctgaaagtcaaactacaagttaaattctctacccagattgagaactcgccttgctattttncttgcttttatctgattgatccccaccgttcacctattttacatatacctaccatttccggattgatttttctatactntcatgnccacctttgagtggtatgtttgctttaaccttttttgcatactcacaaaccagtcag

SEQ ID NO: 573400 - DNA, 205 bp, Homo sapiens
tctcccagagatgaaccatgacagcatgtgaaccaacagtgcatggcactccacacatggggatgcatcatgtagccgtttttatacactaaagcatgcctactaatttccttcgggactaactctttgatccatggactgtatagatctgtgtagtttgagtatgcagtagtatgggagatgctcctattacctttctattatt

SEQ ID NO: 573401 - DNA, 283 bp, Homo sapiens
tttttttttttctagaactccttataaatggaatcacatagtatgttctcctggctcatcttcttttgctcaccataatgtttctgacactcatccacgttgttttatcagcagttcatttctttttgttgttctgtaatatcccattacacaaatacatcacaatgagtttatccattcgcccgttgagggatatatgggttgcttccagtttttctctattatgaataaagttttttttggggacatgtgttttcatttttcttggataaacacctaagag

SEQ ID NO: 573402 - DNA, 103 bp, Homo sapiens
cgctttagctttccccagtgatgtgccgtgcgggatcatcagcgacttgaagtcaagatctgtacttcccattgctgatagaactcagtgatgcttcttgact

SEQ ID NO: 573403 - DNA, 250 bp, Homo sapiens
tcccttgtctatttcgaagtgatattcagaacttatctgttaatgtgtaatttttatccattattctgtgtgtacagatctttgtgatttttgactctcttatctagttttttttttttttttggggtttccggtggtgttatccaagggcaaaaggggtatatggacaatggcaaatggaagtggtggctacaaagtgtgaccgggaaaaaacccagatagcgtcgccaccgtgggcacctcatcctca

SEQ ID NO: 573404 - DNA, 470 bp, Homo sapiens
taggagtatcccccatcacaggcagtagcaggctggaaaactcagtcggtgatggacttgagcgacaggccatccagctcgtccttcttcttacatggcataggagatacgaggagcccttgcagtattgatgagctcatctgccaggcaactcagcaagtggtcttaaatgtgccggaagacagcctcaggagcgcctgtgcacggcagccagatggcctgttacacactggcgcagggaggacaaatccacagcctgtcgtctcacagtccgctggggcgcccaaatggggtatggagtccttcccggggaccactggttgatgtatgccgttcaccaaggaaccctgcagaaggttccatcgcctgttagcaggtgtatgatctcgaagggatgcctaatgattcgcacagtcattaagcttctaggcggttgttgcggccgtgaatcatcatggagttagtgaggc

SEQ ID NO: 573405 - DNA, 655 bp, Homo sapiens
gctcaaactcatgacctcgtgatcctcctgcctcagcctcccaaagcgctgggattacaggcatgagccatcatgccgtggcaattttggtatcgttagtagagacgacggtttcaccatgttggccaggctggtctcgaactcctaagcctcaggtgtcccagccacctcagcctcccaaagtgctaggattacttgatgtgagccaccgaacctggcctccacctttaaaatctatccagaattgattggattctgacaggtatagtggtgcagtgcgtcaatctgagctgtcatcagtgtcctctctgtgactgttggaacacagtcgacgggctcttataaggccttgatattctattgatacacttgcccttcaatggagtgcagtagtctatgtcccttcatcttgcaaactggagtccctcgaaggaataaactgcatgcggaagcgatgcagtcttaacttctagaagtgcacgttagacgcagatgatttctcagctgggcatggtggctcacgcctgtgatcccagcactttgggaagctcaagtgggcagattacttgaggtcgggggtacgagacgcagcttggccaacacggtgcaacacgttcactataaaccataacaacgatgcagacatgatgtcatg

SEQ ID NO: 573406 - DNA, 317 bp, Homo sapiens
tctcgcaacgatacaccctaggaagcaattgatatcatagctcagaccatacctatgtatccaaatggttctttttttccggagtagtaagttacaagtatgggagattattccgcaagcctggtaggataacgaatatagaacttcagaggtgaccgaagaaatcagaactaggtgttgtgtatacgaatggggtctcctacctccggacggggtcgacagaaggtggtgttgacggttgcggtctagttagatagtatacgtgatgccagcagactaggactgggagacgataggacgaagtaggactcgctgtg

SEQ ID NO: 573407 - DNA, 111 bp, Homo sapiens
aatagctcggtacctctctccacactgggtgttacggtaatattggattagctgtggggtagtcttggcattttgtgaatttttgcactgtgtaggtaaaattgttcaggt

SEQ ID NO: 573408 - DNA, 419 bp, Homo sapiens
ttctgatccgctgggtctctgcctgctcttatgccaatgctgcgtctggtgactacgcacacacgaatgatgctgctgatcagagcagagattgaggccaacatcacacctgatcctcggcgcccattgcctcagctcaggatctctaccaccgttgatgtgcagatgatctaaacagatactaggacgtaggacaatggcctactgcatgtgtaggtgaacagtcaagtccaatatgtgacccataccgacctgcacaagtatgacactgaggatgcacgaaagcatacattgggcaagcccctgaccctggtcactggctcgctccacgaggacctgacatacatgagtgcgactgtgcgtcacacagatgacggcccgcatacagctccgatgctagactaacttcaggatgaggt

SEQ ID NO: 573409 - DNA, 351 bp, Homo sapiens
atggaacgtcatcaataacggatatgtacggactgaacatacgcacatctagctcagtgccccaaaatatacaggtcctctgtgaccttggcatggtgagcatttatctgggcatccaactgtacctccactggcatgtcttgcacacccttggaccaaagtccgagaagagtttttgactggcaaggggcgggggacagtcctcactctcgccctgaggggtggctgctcccaggctggcgacagtctcataggtcttgttgctgatgtccagcctcccactggcccagtgagcctgggccgggagcttcagcaagcagcgctgccagagcaaaagattgaggatgagga

SEQ ID NO: 573410 - DNA, 646 bp, Homo sapiens
  misc_feature (34)..(34): n is a, c, g, or t
  misc_feature (54)..(54): n is a, c, g, or t
  misc_feature (83)..(83): n is a, c, g, or t
  misc_feature (88)..(88): n is a, c, g, or t
  misc_feature (92)..(92): n is a, c, g, or t
  misc_feature (98)..(98): n is a, c, g, or t
  misc_feature (149)..(150): n is a, c, g, or t
  misc_feature (162)..(162): n is a, c, g, or t
  misc_feature (164)..(165): n is a, c, g, or t
  misc_feature (173)..(173): n is a, c, g, or t
  misc_feature (179)..(179): n is a, c, g, or t
  misc_feature (192)..(192): n is a, c, g, or t
  misc_feature (199)..(199): n is a, c, g, or t
  misc_feature (213)..(213): n is a, c, g, or t
  misc_feature (220)..(220): n is a, c, g, or t
  misc_feature (222)..(222): n is a, c, g, or t
  misc_feature (252)..(252): n is a, c, g, or t
  misc_feature (271)..(271): n is a, c, g, or t
  misc_feature (293)..(293): n is a, c, g, or t
  misc_feature (311)..(311): n is a, c, g, or t
  misc_feature (318)..(318): n is a, c, g, or t
  misc_feature (348)..(348): n is a, c, g, or t
  misc_feature (359)..(359): n is a, c, g, or t
  misc_feature (405)..(405): n is a, c, g, or t
  misc_feature (423)..(424): n is a, c, g, or t
  misc_feature (427)..(428): n is a, c, g, or t
  misc_feature (440)..(440): n is a, c, g, or t
  misc_feature (445)..(445): n is a, c, g, or t
  misc_feature (478)..(478): n is a, c, g, or t
  misc_feature (502)..(502): n is a, c, g, or t
  misc_feature (504)..(504): n is a, c, g, or t
  misc_feature (544)..(544): n is a, c, g, or t
  misc_feature (565)..(565): n is a, c, g, or t
  misc_feature (589)..(589): n is a, c, g, or t
  misc_feature (591)..(591): n is a, c, g, or t
  misc_feature (601)..(601): n is a, c, g, or t
  misc_feature (605)..(605): n is a, c, g, or t
  misc_feature (609)..(609): n is a, c, g, or t
tctaacgccaacacactttatttcccttcggacncatctgcaagcttctgccanacctgaacccacggcctggcaccaacgcnaccancacnccccanaggtcaatcctgggggctgaggagctgcaatttccctttcttcctgaaaannaaaaaaactganannaattgaanaaaccncactgccattccncactcancagtttcagcaggnctgaaangnggctgtgggaagttgccattttgggaaggngtttattctctgcggctanagggattgcctgctttaaaaanccccttacgctgattaantcaaaantcccttcaaagtaaaaaaccaacctttcanggtccaaaaangtggtatttctggtttcctgatcaggaggcttgcaaacctaaaaangttcttccttccaaaaannaannaacctgaagtanaaaanctcaaacggcagaattttctatttctggaaaanctggctgcgatttgtttttgggananagtgaggcaagtccctgtggcagagaacgaattggccccncggcctctgtttgtgagagcngcccagccacacccaggaagaaanancccccatgcnctgnagcncatcctccttagagagagaacgcctgcgggtttcggc

SEQ ID NO: 573411 - DNA, 378 bp, Homo sapiens
cacgaggccgaagaagtatctggacgacgcgccgcggctggtgcacaacccggacggctcggacatgtggaagttccgcgacaccgtcatccccaacgtggcgctcaacgcggtcgccggccggccgaaggaggaatacggcatcgagccgaccgggctcgacgagatccggccgggttgctacaacgtcgacgagcgcgtcaaggacatgaacgccggcggcatcctggcctcgatctgcttcccgtcgttccccggcttcgccgggcggctgttcgccaccgaggacaacgatttctcgatcgcgctggtgcaggcctacaacgactggcacatccacgagtggtgtggggcctacccggcacgcttcatcccgat

SEQ ID NO: 573412 - DNA, 366 bp, Homo sapiens
ttagagatgattctgaagagccttcgttgactgtccctaggtataggctcctggtcaaaggatttcttcatgaacgccatggttcatggccgtgctgagagacaagtgcattctctcggatctacggacgtgtgctaaacggtcttggtcaccaagatgctctccagtcggttgtccatggtctgtccggatttattcggacacagaaagtccttccacattgcacctaattctccggtcaatgctttatgacacctaagtctcgtggtgggtgagtgcgtgacaatctgtggtccatggtgcacacgcagtttgtgagagcagaggcgtcccacataccgcacactgtgtgtgagcccgcgtgcc

SEQ ID NO: 573413 - DNA, 604 bp, Homo sapiens
  misc_feature (440)..(440): n is a, c, g, or t
ctgggcgcggtggctcacgcctgtaatcccagcactttgggaggctgaggcagggggatcacctgaggccgggagttcgagaccagcctggccaacatggtgaaacccagtctctactaaaaatacaaagaaaattaactgggcctggtggcacaagcctgtaatcccagctacttgggaggctgaggcaggagaatcgcttgaacctaggaggctgaggttgcagtgaactgagatggtgccactgcactccagcctgggcaacaagagcaagactccatctaaaaaaaaaaaaaaaaaaaaaaaaaaaaaaaaaaaaaaaaaaaaaaaaaaaaaaaaaaaaaaaggaaaaaaaaaaaaaaaaaaaaacttgcggccgaatttggggctaattgggccaattcgccctatagggagcggttttacaattaatgggccgnggttttaaaccgtcggaacttggaaaaacctgggggttacccaactaaatcgcctgtgagaaaatccccttttcgccagttggcgtattaccgaaaagccccgcaccgatggccttttccgttgcccaacctgaatggcaaatggaattgggcttttttttgtt

SEQ ID NO: 573414 - DNA, 1087 bp, Homo sapiens
catcacccggtcatgccgttgtgtgtcctccgtgtgtgtccctctttatcgatcttcttaccgccctaatcccccgttctcccttctttatggtctttccttgcctctggagccccgttctctggagggagtgtccaatttgttaacctggtgccccttaccgtgctataattgcccgccatgtgcgcataattgtaggcacagctccgccgagcttttctctagcccctagccttattgtgactccagactatgtactgggtgctctcaagacttctctggttttacatgcaaggccccatgtgtctgccccagtgaaacccgtctgcctaatatcggatcacaggcacttgtgttcagccatcaaggctcacctggtggaacatctgtagcagggcccctttatcaagccatcctggattgcctttggacacaagaaaggtttctagccacagtagatctttagctctcatagcatgcccaggggtgccggaatgaacactttctggaagctttcatcttttgcctacattatgtgcagcgaccctctcactgtggcagttagtagactcgcccaagctccctcgactttggatagcatttcgagggaccaagggcgggcggagtctctcaacagtgtgataatatgaggctccggtggctggtgactggacacttcactcaatacccggacgattgtctggcatcactacaagcatgggacgagacttgcttggttcaccacggagtttcaagaacgccaccttcgtggtacatgtagcatagaccccgtcttccgtaagaatttcgagagaagtgtgaataaaacgataagattaataacacaaggaaacaagggcgccgccgcgatctagaactagtcctcatagaacctgttgcatgcaagcttagtctcaatcagctttgcctcttctttttgagtgtatattattccagacctttctgccacttagcacttgtataatcaggactggatatggggatgatgggtgtaaattgtattgacaaagtcgcgaataaaaatctaccaatgtgaagcccataaaccatctattcgtatttttcg

SEQ ID NO: 573415 - DNA, 1501 bp, Homo sapiens
agcggaggagcctgggcctgggcctgggggtggggtgggggggacaggcgtccccaccgacacgaaaacccaatataatccctggaaggagaaagcggaataaaaacaaagatgtgccgatgactaccaaaagaggacagaaaagagaagacatagcacacggcgtaacacgagcgtcagggaaacacagagacaagcggaagggagagagataacaagaacaaaagaggaaggacagaagcaagagcgcgacaagaaaaaacagagaaacaatgaaataagcgaaaaagggaaaaagaagcgataaagggagagcaaaaagacgacgagaataacaaagcagaacgcatacagagacaacaaatacaaaagacaaaaaaaaggaaagaaccagagatacaaaagcgaaacagtaggaaaaatcgcagacacacgagaaaccaagagaacacagaacaaaaaggcaagggggacacagagaaaaagaaaaacaaaagatggaataacagaaaagtaacaaggaaatcaaaagagagagcccatgaaaataactaagagagaaacagtgataaaaagaaaataacaagcaaaaaaaagaacaaaataaaacacagaaataataaaaaaaaaaacaaaaaaacgaaaagaacagaaaacgaagcaaaaaaaaaggcaaaaaaaaagcaaaagaagaaaagaaagaaacaggagacagaaagaacaaacagagacaaagaagaaaataaataaaaaaatagaaaatagatacaaaaaagaaaaacgtaggtaaaccaacgttaaaaaaaaaaaaagatgaggaaacaaataagaatagaaattgatacacaataaagagcaataaattaacaaataaaagaaaacgaaaaaatatatagaaaaatagacaacaaaaatagatgaaaacaaaaaaacaaatagtaaacataaaagaaaaacaaaataagaaaaaatactgacaaaatatgaataaaaaaacaccaaatgagaaaaacaagaacaaaatcgaaacaagaaagaaacaaagaagacaaaagaaagaacacacaaaacaaaaaaacgagagaaacaagaaaagaagaagaacaaaacacaacacacacaacagaaagataacataaaagtcaagagaaacaacaaaaaaaacgaaacaacaaacagagaccacacacgagaaaaataacaaacgaaagcatacagacaacaaaagacaaaaacaaaaaaataagaagaagaaaaacaacaaaaagaaacaagagaaaacgaaaagacaaaaaacaaaaaaagaaacacacaaggaacaccaaaaagaacacaacaaaaagaacaaagaaacaagaaaaacaataacgaaaaaaacaaacaaagaaaagaagatagaaaggaaagagaacagaaaagaacaaaatcaaaaaaacaaaaaacaacaagataggagaaaaaaaagataagaaaaaaagcaaaaaaagaaaagcagaaaaaa

SEQ ID NO: 573416 - DNA, 300 bp, Homo sapiens
ggttctgagcgatctctgtgcattcatctctccattggtaatcccaaatgtggactgagcacacacctgtgcgtcaggcctgagctaggttctagggctgctactgtcaccaagacagatgatgtgtcctgccctcatggaggggagggagacaataagcaaagaaataactgcatgatgtaatgtcagccagggagcgatgctgcaaagcagggtgggcgtggggagtgacgcaggccggggttgggtgagagccatgctgaagaaagtcttaccagtctttccaggaaccccatgatg

SEQ ID NO: 573417 - DNA, 1237 bp, Homo sapiens
  misc_feature (244)..(244): n is a, c, g, or t
gcatatttgttgctgcttgctcttcaatgatgcagtgtgccatgtgtgctagctcttcctctgtatcaaggctcctgctaggcccaccgactgggtgctgggtgttgctgcttattgagaccagcaaatctctgtgaatgactgaagtgtgcttgcatcgttcgaccccatggggattagcacgttggtcgttctctctcacagcaggattggctttactgtgtagtgctcgtaccctctaagnctgggaagtctgagcatggtccttacacagatagggtagctgggtgctgggcctaaggctgacataggaggaatcgctcgaagaggcaataccttgtgcccgtgtccgttttgaatctatggaccgtcagtgttctagcttccacatggcaccagtgaacataggtgcattgcggtcaccaagaaggcggactcattactcatgacatcggagtccaatccaagccttggacgccttgtttagaacttagaccagtctacaacaccttgtcataccctaaggctgttgtgcacctacttgatacgggtagaggacacgatgggaccacggatgacaacgtaattcgtttgtcgcagcattgtcgtagcacgggattccacgtacacacatacacgtgcaagcgtatcccaccggccaagacaccttatatcggggcccaaaaccaagaatccggtaattactaacccccgtacgttgtcaagcgtcactatagctctcagtgtgggcgattcctggccttatgcaaggccctggaattcacgcttgccaggtaaaccagattctaaccggtgcgtatgggtaattttgcccacaaccaactggcaccgcataaggcattccccttggttagtggggcggcaaatgccccttgcaaaccgctttgggtgtgccaacaacaagactaggcaaccagagagtaaggttagggtgacttggagggggcctcaatactgaaagcttcctccattggaaaccaatcattaccccatttcccaagaattcccttgcatgacatccttgctaggcccattgagaaactaatttgccatgtggcacgagtcaataccttggttgcaagacctctttgggcaggggcccatgtaagccctttatcccccaaaagaatgcatccaaacgaacactccaaagggaaaggccaacgtggaacggccaaccccgttttcctatcaaggagacttaaggtttaacccg

SEQ ID NO: 573418 - DNA, 1067 bp, Homo sapiens
  misc_feature (1038)..(1038): n is a, c, g, or t
  misc_feature (1057)..(1057): n is a, c, g, or t
tccccaatcccgccagcgcggggtgattcgccccccccaaaaaggggggggggggggggcgccaaaacaccgcggggggggggggcctccggggggggaccccgaaaacaggggggggcggccccgcggcggcgctgagacggaagaggggggggtttgccccccccacaaatggggcgcggacaaatggagaaaacacggggtgagtgaaacccccgcggggaggatgaaacgaccgaggcacacacgcccacaaagccaccacaacgccactgttgggagagaagagccggactatgccgccacccgacagcatcgtagcagcgacgcgtgataggagtgagaagaaaagacacgcaacagggtttggaggagcccacgaacacaaggcaacgaaaactggcggcgcgcggaagaacacacattgcgccccacgagaaatcaacagggcgggggctactcacagggtagcccaacaccccacaggtagggggagagactcccagaagaacaaaccccgtctggaacgaggagaggcgaggcgcaccatgaggttgtacacaaaccaacgaaccaccctggcaggatacgggcagaacaagagcaaacggataagcccacgaccaagagcagatacaaccacagcacacgccgggctggcgcaaaggatataataggaccgcacagtgagccccgagtgggggaccgcagccgaccccgacaggagcgggaccagcatcagaatctagtcatctactgagagccacgatacgagacgcacaagcggagtagtgcgggcgacaacaacaacaaactcacacgcccggagcaagacatactacactctacgccgaaagctggacgacccgggcctaccagaactggtggaggtcacacaatacacggaagggcgggatctcacagacaaaggaatagctgagtcgctgcacagacttcggactccacagatatgaaagtcgtagatatgaggagaagaagtgaatccacaagctgcactgcgacgtgcaactggacgancacatctgagcacaattcngagcagcgag

SEQ ID NO: 573419 - DNA, 859 bp, Homo sapiens
  misc_feature (1)..(1): n is a, c, g, or t
  misc_feature (656)..(656): n is a, c, g, or t
ngggggggcgccccccccctctccctcgcctccccgctctgttaggtttctcacgtgcggggacgctgcgccccgcttgctcctccccactctcgttcgtggtggccgctcttctctgcggttcactcgctgggtcccaccactctctctgtcagccctcgcgctgtgtcgcatcccattgcttggggcacgcctcgcgcggcggcgtcctctcgcggtagctcacacacacctctctctcgcgctggggtgctcgctcgcttcacacacactctctgtgtccgctgcagtaactctctctctggcggggctctccctctcctccaccgtagcggcgcgcgcgggcgtgtaactctcacgcgcgcgcgcgctacgcgcgtgttcgccactcgctctgatatgctcgcgccacacacacacactcgcgcgcggtcgcacaacacacacacacacactcgctcgtgcacgaacgatacacacacacttgtttgttacacgccatccacacgcacacagacagtagagatgtctgtctatatgtatgctcacgcactcaaatgataacaacaacactatcaacatgctggtttgttgtctgtaggttctgtggtggacaacaccactagtcgggtgcgggctgctcataccagtattgntgtcggggcggaccctctactacctgcggcttcttttgagggtgtgtgggggacctcttcttctggctgtcgatgattaacaaacacgatagggtgtgctcctccctgtcttgtgagatagatttttttttatttttttttttcccccacaccacccgggcgaaagaggggaataggggaaaaaattttttggggttgtggta

SEQ ID NO: 573420 - DNA, 127 bp, Homo sapiens
gaccccctatctataaaagagaatatcattaatgacgtgacttcaatgcttgagcgaaatctctacttgacagtggtcctgatgtccacactgagggctgtcccttggcatttcatgtgagcaatgt

SEQ ID NO: 573421 - DNA, 368 bp, Homo sapiens
ctgtaggaattcggcacgcgagtacggttgttgttaatgttttggacataatcagatatgagcatagatagtcgagtgacaatatacctgtcaagccactgagattctgagacacacttaaatgttatgacaagagatgtattcctcaggatcatgattcttagtttactcatacatgaagacacgatccggagatatacatgaacttagtttttgattgagtgtaaatgcgcttatatgtcttcaatcaagaacataatcatattttaaacttagtatacctataatcaataggccgatgacactaagctctggggtagctttgcaatgtatattttaacagctctctggtttctttcctgggttct

SEQ ID NO: 573422 - DNA, 351 bp, Homo sapiens
ggtgatcctcgtgagtaggagacagacgtctcactttacatcacttgggcagtcattagctcgcatatctcagagttgggacttcccttcttgggaacttggatagatccgtcatgagagattgctgtgttgccctggctacagcttatatcgatgtaatatatgctaagtctacgccgctatagctggtggagctatttgactggtaggaatcctaccgtactaccttatgcaggcttggatctctaggaggcccctatgcactactacacgctttggaggctggcatggagccagatgccgaacggctatcagaatatactgatgcctggtgtatcaggtcacttttct

SEQ ID NO: 573423 - DNA, 629 bp, Homo sapiens
  misc_feature (83)..(83): n is a, c, g, or t
  misc_feature (106)..(106): n is a, c, g, or t
  misc_feature (129)..(129): n is a, c, g, or t
  misc_feature (240)..(240): n is a, c, g, or t
aaccactaagtttctgatccagtttgtgagactgttaggcattaatcacaagaggctgggtgctcgcgcctattgtggtgcantgtagtggtggtgtgggtaggantggactttttattgcattggacngaatcttctagcagttagactccacagattctgtggacatttatgcagcagtgcacgacctaagacttcacagggttcacatggtccagagtgagtgtcagtatgtctacntacatcagtgtgtaagagatgtcttcagagcaagaaagttacggagtgaacaagaaaaccccttgtttccaatctatgaaaatgtgaatccagagtatcacagagatccagtctattcaaggcattgagaatgtacctgaagagctgctggataaaaatcattccccgtgccatttgtgtttacatacttggttcatgcccgccataggaggccggctatttctgttgatcgtatgtataatttattaatatggagaatgtttaaaattttatataatttaaaggtaacagatattattgtacagacttgcattccgtagtttcttctgtaaatatgtatttctcacaatgttggatcttcagctttaaataatacgatttttccgcga

SEQ ID NO: 573424 - DNA, 198 bp, Homo sapiens
tgaagaacagtctctcagattctacctaacccaaatcactatcgcttccaatacacaagttattcgtactcaacacagttctcctgtcattagttttatttctatttctttcttttttttttttttttagaaatggatatcccgctctgtagcccaggctgaagtgcagtgcaaaaatcatcagctcattgaaccctc

SEQ ID NO: 573425 - DNA, 239 bp, Homo sapiens
ggggcccttttgggggccctacctcggggtccccgcccgggcccggccggggatccccggggccccccccgctcccggtttttccccgtcccttcttctggcgttttttttggtttctttttggttttttgaggggttggtttttttggggtttccttgggccgggccccttttgttgtccttgttttttgtttctgtttgggttttgtttgggtaaattttgaccaatgtaaaaccga

SEQ ID NO: 573426 - DNA, 494 bp, Homo sapiens
cgggccagtacggatgtgtggagtacggatgtggtttgttcttgctatttcaagttccttgtatgtgcatcattatactgtttatatagaaagtcttccatatgtatctgcatgtaggtattgactgctacagatgtccatcttagcactgcttttgctatatcccatagttttgggtatgctgtgtttcaattttcttttgtttcaatacatttttaaaattttctctcttaatttcttcattgacccagtggttattcaggagcacgttgtttaacttccatgtatttgtatcatttccaaagttactcttattgattgctagttttagtccacttttattccagttttattaatagtggaaaacttcccgagtctagcaggatgtttacacatctggatacaagaagctcagagattctcaaatatttataatgcagaaagacattctccacagcacattatagtcaagccttttctcacgttggggagct

SEQ ID NO: 573427 - DNA, 342 bp, Homo sapiens
tataggcgctatataggcgcaggttgctgagcagtgtctgcgctcttcgttggtttttttctatgagagtctttatctgtttcaccccgtgacagcatttggaatttccttatggacgtacttacttccctgatgggacatttcctggagctcatggtctgagaccgtctggtctcatggcacactccggggagctccttcagcttggtctctgattcccgggtctcatttagggcatcctctttcttcttcgtggcttctgctaggtggctgagcagtgtcgtgcgctgtgcgtctgttttttctatgagagtcttgatctgtttcacctaggggcctatg

SEQ ID NO: 573428 - DNA, 272 bp, Homo sapiens
catagctgaattcctatgaggtaaccccataaaccacgcctatgacttaatgcttgtttcgaccgtctaatcatgctgtgacaaagtacttcggctgacaagtgacacctaaaaatataatgtactttgacttaccttatgaccgctagcagatataaagactgtaatcagagttctcttgaataaattttgcgtctaaggaataaatactatttattcctaattagatggggcggaaagtctttgaagaggaacctttactttacttttta

SEQ ID NO: 573429 - DNA, 356 bp, Homo sapiens
  misc_feature (6)..(6): n is a, c, g, or t
  misc_feature (22)..(22): n is a, c, g, or t
  misc_feature (50)..(50): n is a, c, g, or t
  misc_feature (66)..(66): n is a, c, g, or t
  misc_feature (209)..(209): n is a, c, g, or t
  misc_feature (249)..(249): n is a, c, g, or t
  misc_feature (256)..(256): n is a, c, g, or t
  misc_feature (301)..(301): n is a, c, g, or t
  misc_feature (304)..(304): n is a, c, g, or t
  misc_feature (311)..(311): n is a, c, g, or t
tagggnactgtgggacactganaaaacagttggggaaaatctttcgaagntgtggaaatcccaaanaaagactgataattccctggtaggggtgtgtgcgtgacgtactgcagcctcaacctccctgggctcaagtgatcctcccacctcagcctcctgagtagctgagaccgaccaggtgtgccaccacgcctagctaattttttatncccagggtctaccctttgtttcccaggctggtcttgaatncctgggntcaagcaatccttccaccttgccctcccaaagtgttgggattatngcntgagccnccacgactggccagaggacaaaattttaataaaggtcttagctta

SEQ ID NO: 573430 - DNA, 115 bp, Homo sapiens
gaccacgtcacattggttttaaagaccttcacgaaagagatcggcgggcgatgcgccgggctcaagcgcaagactgcggcggacgtggcggcatttgtccggcctgcgaccatgt

SEQ ID NO: 573431 - DNA, 201 bp, Homo sapiens
  misc_feature (21)..(21): n is a, c, g, or t
  misc_feature (45)..(45): n is a, c, g, or t
  misc_feature (51)..(51): n is a, c, g, or t
  misc_feature (63)..(64): n is a, c, g, or t
  misc_feature (67)..(67): n is a, c, g, or t
  misc_feature (91)..(93): n is a, c, g, or t
  misc_feature (95)..(95): n is a, c, g, or t
  misc_feature (144)..(144): n is a, c, g, or t
  misc_feature (149)..(149): n is a, c, g, or t
  misc_feature (198)..(198): n is a, c, g, or t
gacctcatggtatagcaaaanacaacaacaaaaaaagaataaaanataaancagacaaaaaannganaacaacaaaaaaataaaaataaannnanatccctaagtctcccttctacccacagaaccaacaacacccttcccggnctttnctttccctcggcctcttctcgtcccctaagcacacaacatccgcttgcntct

SEQ ID NO: 573432 - DNA, 104 bp, Homo sapiens
ggatttgctggtgcagtacaactaggcttaatagggacatgaactgagtgaaaatttaaaatatcgtcattttgaagtgtagtcttatcttattctatgcaaaa

SEQ ID NO: 573433 - DNA, 328 bp, Homo sapiens
taatgctcctgcatacctccaggacacaggttcaccagctgggtgtctgtcacagacactgagcctccgcgttggtccaaacttgtactctccttgacaggtcttctctggccctcctcaaactccacaggactgacactgtgttcgctgatggccacatcactcgtgtcgcggcgtataggatgggctgcggagtgaacgttgtctgccgtcgagatggagccttcctgtggttcgcgcgcttccttcctgaagcctcatatttcccattccgtagataaatgggcaactcaaactggaaagtgcagttaccagtgtcctcttcata

SEQ ID NO: 573434 - DNA, 897 bp, Homo sapiens
taaaagcttatgggctcaatatctatcattcgtcttctttcccaaactacacatcactgtatgactcaaccagtagcagtttattttggcccctgggtttttatccagtttaacgtaatgttcccaagataagatggagctaaataagctttaaaaaaaaaaaaaaaaagggtgtgatatctcttttttcctttcactccacggggcgtattctcttcggcttatctcctccagaaatatattaatggcgcctaatctcacgcctcaactttacaacgagtggagactctcaaggcgcgcaacaatctctttgtgaacaccgcccctgttcttagtgtgtgtgatcttttagaaaggtgagagcccctttgtgggacaagagattttcgtatgcaaagccgcggatataataagcattgttctttgttataaaatgggctcgtggctgggggtgccacgagagatgtgtgtcctcttaaagaaggtgaatcccttttgtggtgttctgcgtggattcacccccccaaattttttcggggggcggcatggcggcgagaagtttgtggagggtggcgtagctccttttgtgagaacggggggcccaattgagccgtcaaacgtggcgggggaggcatgttcgccggatataggcttttttgtggcgctaatctccttgttgtgtgcgcgggagccacacctccttgggttgcttttgggggcagaccccaagatttcgttatctgaaagccgtggcggcgctcagaagtgaaatttgtaagaccgggggaagactttaaaagaagccttttgtggccccctgggggggtatttctggtcggtggtaccccgtctttcggggttcacaatccgggggcctttaacccgggggccaaagaa

SEQ ID NO: 573435 - DNA, 214 bp, Homo sapiens
cttgccccggcatgctgagagtataaggtgggattggtggcaccggttgctgccatactaaaattggtaggcctttaaggtgtaatggtggtagaatctgtaggaccttgtgatgaactcggggcctgaccttacttcacagcctgtggagacccagtggccctcgatggtaggtggcatctgcactgtgatccttgcacaacttgtcgagatt

SEQ ID NO: 573436 - DNA, 383 bp, Homo sapiens
  misc_feature (272)..(272): n is a, c, g, or t
cctgtcttttgaccaagacatacctctatcatcactcagttattaaagtcaccgcctgccctagtgacgcatgtttaacagtgccgcggtaccctacgcgttcaagggtaccataatcacttcttccttatttctggaccttttttaaatgtttctcccgtaacagctgtctcttacttttaaccagtgaaattgacctgcccgtgaagaggcgggcatgacacagcaagacgagaagaccctatggagctttaatttattaatgcaaacantacctacaacccacaggtcctaaactaccaacctgcattaaaatttcggttagggcgactcggagcagagccaacctcgagcagtacatgctaagactcacagtcaagcga

SEQ ID NO: 573437 - DNA, 461 bp, Homo sapiens
atttatttacaggatcatgtgtgaatgtgttcacccagagttcaggtcacggcattttattctcttaatacaaggttttcgcaacggttaccttgctttccaaaggtggatatattttggatgagaaagctgagttgttttaatttctaatacctcttataggagaagaattaataagtttttagaagcagtatgcgggtaagatacagtacatgatttggttttctgacaaaagcgagttcttagtgcgtgaagaagaagactgagtctggcttctatgtcaatttgtcgccatagaagtgaaagcgtcgctcttgcttctttcattattagcttgggacgcaatgagtgtgatggattagaatttggacagagtaggtggggcctcagttccaattcaaatataatgtctatgttcaaattgagtgtgctgtgaagttgttctgtctttgaaaaaaaaa

SEQ ID NO: 573438 - DNA, 113 bp, Homo sapiens
gatggttatagtatgtcgggactcccactccaggatgcgggctccccttggttgcactgtagagtggacagacagtggacagtaccatgtagaatggggtgtgaaggctggcc

SEQ ID NO: 573439 - DNA, 385 bp, Homo sapiens
aaggtacagaggccagggagtgaaaatggttgacaaaagagggaagagttaggtgtctcatagccactcatagtggggtggccaggggtaatgcgcatctccccactttaggcttctctaacaaacttctgacacctctcaagttcacatctttaatgtggaaacacagaaggtgtggggaaggaggggcattttgtctgtttgcaaacgtgtgcgcttcaggccttgggacttgccaagaggcaaggaagaaaggaaagcgaaatcgtcgtaagatgtttgttgaaccttagggatcccaccgtaaatctccacagtcacccctgttacatgaggaggggaggggtgaagtggggaataattcttgtattcgtccaaaaaaaaa

SEQ ID NO: 573440 - DNA, 125 bp, Homo sapiens
gcttgtccccagaccagagtggaataatgccactcacagagggcatgaggagaatggcacctgtgctgcaggctacatgcagccaccacacgtgactgtgtgcatctgataacacctgtggtgat

SEQ ID NO: 573441 - DNA, 86 bp, Homo sapiens
tttttttttttcaagccaatataaggaatttattgtgtaaaaaagaaacatctagagaatgccacagacaggcctagtatggctac

SEQ ID NO: 573442 - DNA, 366 bp, Homo sapiens
  misc_feature (19)..(19): n is a, c, g, or t
  misc_feature (24)..(25): n is a, c, g, or t
gggtccgggagcgcggcgnagacnntgcctgagatcagagtcacgcccttgggggccggccaggacgtgggccgaagctgcatcctggtctccattgcgggaaatgtatgctggaggtggatgaatgggctgcaaatgacgaccgacgcttccctgacttctcctacagtcacccagaaccggccgccataacagaccttcctggactgtgtgatcattagtccacttccacctggaccactgcgggggacatacccctacttcatgcgagatggtgggcttacaacgaagacccaatgctaaactgatctcaccaccattgacatggacatacttgtggacaactcagtctgcacgaactatcgc

SEQ ID NO: 573443 - DNA, 644 bp, Homo sapiens
  misc_feature (28)..(28): n is a, c, g, or t
tatcagtgcttggtcccccggcagttantgcatatgtcgaccgagacggcctcgcgccgcagcgatgggcatctctcgtgtgacaactggcacaagcgccgcaaaaacgggggcaagagaaagtcctatcacaagaagcggaagtatgagttgggtgcgcccagctgtcaacaccaagattggtgccccgtcgcattcacacagtccgtgtgcggggagtgtaacaagaaatacctgtgaccctgagtgttggactgttgggtgaatttctcctggtggctcagaagtgtttgtactcgtaaacacaaggatcatcgatgtttgtctacaactgtcatcttaactacacgaagcttggtttctgtaacgcaacgaacccctggttgaacggacatttggacatctcgtggctccaatttcgacgcaggcgaccccgcgtaccagcacgggtgtgttacagatgtcccccaacatagctgtccgctattgccccctgttgggccccggccgagcaagtggggaccccagcagtgttgcacctccgatgtagagacacgacagaagaatttcttatcacccaaagaaacgcattcttaaaacacaattccctaacagaaactattgatgaacaggtacacacgcca

SEQ ID NO: 573444 - DNA, 130 bp, Homo sapiens
ggaccccccatctcaagtcatataccaaatctctccctcactaaacgtgatgccttctccgtcacgtctctgcaatcattgtccattcatagcacggcatgttgagtgtggattagaccaagacccagac

SEQ ID NO: 573445 - DNA, 109 bp, Homo sapiens
cttccttcttatgcgttgcttgtatacttcctcgctccttaagcctcagctcctcgatcctgttagtccttcatttgttatctctgacgtgcctttgattacgcccgca

SEQ ID NO: 573446 - DNA, 199 bp, Homo sapiens
catgtgcgtgtgcaagacagggggccttgaagcagagttcccccgtgagatcaggtgtctcaatgaagggtggaagaggtagttggttaaaggttgcaattagagtgctggatgctgcagaggtgtatcctcttcatggctccttggaatgagacccgtctctcatggaaattcataaataaaactgtggttactgaga

SEQ ID NO: 573447 - DNA, 308 bp, Homo sapiens
  misc_feature (23)..(23): n is a, c, g, or t
  misc_feature (205)..(205): n is a, c, g, or t
  misc_feature (240)..(240): n is a, c, g, or t
  misc_feature (268)..(268): n is a, c, g, or t
gagggtcccaaataattgcattntaattcctctgcaatcttcctgccgccaacaatttctcttgttggctgttttaggctccatctgggaggaacccagcctccctcatatgaaaaatgagttccctgggatctattttattttatttttttgaagacagtcttagactctgataaacccaggaatgggagtgcagatggtgacnctctaagagctaccacatagcacacctacatgccnacacaggagttcaaagcaaattcatcantgatactcagcactcaccagaagtaagacaggagactaca

SEQ ID NO: 573448 - DNA, 1330 bp, Homo sapiens
  misc_feature (537)..(537): n is a, c, g, or t
  misc_feature (1330)..(1330): n is a, c, g, or t
tggcttcagcggtggtttattggacatacaggtaggctctatagacaacaggccgggaggtgctgtgcaagtagtgtgggggaaaaagtggagagggtgggaggggtggagtgtgttgtgcggtgcgaggaacaagctgtgagtgtgggagggtgtggggcacagaggtgtgccaacactgtggaagagagcgctcttagaagaacgcttaaagaacagacacagagttagagagcgccagagggggccacagagagtcgtcgggcttctcacagagtgtgacaacacacacagacgcccagagtgtcgcgccttaagagcgcgcccctaaacactctctgtgtgcggtggcgtttattctctgtgtgacacccccacacagacaccagaggggtgtgtagggagagtctctctctctgtggagacacctctctcccactattcttcctctctaacaagaggacacactgctggacacagagagagcttcacacacacacagagagtaaaagagagacagagcctgtgtcgtcaccnctctctctgtgttgcacactctcgtgtggctctcacagtgggggggccctctcacagagtctcacagagacatatctctctctctctctctctctctccccctgctgtgacgtggggcgggtggggggcacacacaccacgatggcaccgtgggggcacacgcacccgagggcgctccccgtgaggcgcgcgtggctccccccacacatacgacgacgacacgagggcggcgctggagcaaaaacacaccacacggccccacacggtggtgtcctccccacgcgtggaagcgagccgcgtagtgaagaatactcctatgctctatgcttcgccgctgttggtggtgtggtctctccacaacgaagcaccactaccgcacacgagtgtgcggcaccaacgcgcttgtactacacaagagccgtcacaaaaagaaacgtatgtggagcagcagtctctactcaacaccaaacaccaggccaagtagtagatggaaccaggtgggcgggcccccctaactaccaggtgggcgcaactggtggctgggcggccctagtctggaggggcggagcacgacacaaaaccagccgcgcgggcggccggtaccttaggcggcagcaacaccccacggggccggcggcgaccacccccactggggcccacacgccaccaaaaccggggggggagacaacgaccacccacagagtggagggacgggagccgcaccccccaaaaatccaaccagcgcgggggacccgcacaccacggcgggcaaccccaaacaccaccaacgcgn

SEQ ID NO: 573449 - DNA, 405 bp, Homo sapiens
  misc_feature (65)..(65): n is a, c, g, or t
  misc_feature (234)..(234): n is a, c, g, or t
  misc_feature (276)..(276): n is a, c, g, or t
tcacgcccatgtcacaacatcaatgaacgatgctgttacttgttccaaacacatatcatttaagnggtttggataaacaacaacctaaaataaataagcactaagcaaactcagggctacataaaccctgtggtgaggtaactgacaatgggtacaactgggacactttactgttaaatcacctctatctacatgtgcccaagctgtgaggtacttggttttaatcctaaaaantcatggtgcacatttattcctgccttccaactgggctctaangtcacctcctcagagaagcccacttttctgtgcttccactctgctttttttcagcatttagtagagcatcagtcaccatccatatctgggaacaatgattgtaagaaacagaaacccatttgcatgagc

SEQ ID NO: 573450 - DNA, 194 bp, Homo sapiens
tcagcactgatggaaaataccagtgttgggtttttttttagttgccaacagttgtatgtttgctgattatttatgacctgaactgattatttatgacctgaaataatatatttcttcttctaagaagacattttgttacataaggatgacttttttatacaatggaataaattatggcatttctattgaaaaaa

SEQ ID NO: 573451 - DNA, 133 bp, Homo sapiens
gataggatcctaacagagcggactgaacatgcgccggacatgtctcgaccttgttccaatgtcttcctgaagcagtagagcagcccgtagttcttgagccagtgctgtcatggttgtgtgcagtttgtgtcag

SEQ ID NO: 573452 - DNA, 241 bp, Homo sapiens
gaggatccgtgatcggtacttggttgcctgaaacaccaaaacaaacccgggctctgtcactgctcaccctctgatttaactttaactttttatcctgctggtaggtggtggatgcgtaagaatttaaaaagaagatactcacatttcggacaacgtgtttcatggtagaaggaaaagaaacgttgacatgtttaaacacaaaaccacaatattttattctttacaaaggtgacgatgctta

SEQ ID NO: 573453 - DNA, 271 bp, Homo sapiens
  misc_feature (183)..(183): n is a, c, g, or t
  misc_feature (210)..(210): n is a, c, g, or t
  misc_feature (240)..(240): n is a, c, g, or t
gcaaaaagctggaaagaaacagaagtaagataaatagctagacgaccttggcgccaccacctggccctggtggttaaaatgataataatattaacccctgaccaaaacgactggtgttatctgtaaatcccagacattgtgtgagaaagcaccgtaaaactttttgtcctattagctgatgtntgtagcccccagtcacgttcctcacgnttactttgatctattatgacccttttacgnggaccccttaggagtttgtaagctctttaaa

SEQ ID NO: 573454 - DNA, 613 bp, Homo sapiens
cttcattggtagtagccgggcccttaggtggtgcctaaaccagttatgtgtgttgcatgagcccccgccagtagtttacagagtcccctaatgcggcacagaaccgttggtgacaagaaggcgaccatgcttttcagctctggaagtcgatgaaacatacgttcccaaagagtttaatgctgaaacattcaccttccatgcagatatatgcacactttctgagaaggagagacaaatcaagaaacaaactgcacttgttgagcttgtgaaacacaagcccaaggcaacaaaagagcaactgaaagctgttatggatgatttcgcagcttttgtagagaagtgctgcaaggctgacgataaggagacctgctttgccgaggagggtaaaaaacttgttgctgcaagtcaagctgccttaggcttataacatcacatttaaaagcatctcagcctaccatgagaataagagaaagaaaatgaagatcaaaagcttattcatctgtttttctttttcgttggtgtaaagccaacaccctgtctaaaaaacataaatttctttaatcattttgcctcttttctctgtgcttcaattaataaaaaatggaaagaatct

SEQ ID NO: 573455 - DNA, 654 bp, Homo sapiens
  misc_feature (353)..(353): n is a, c, g, or t
  misc_feature (358)..(358): n is a, c, g, or t
  misc_feature (361)..(361): n is a, c, g, or t
  misc_feature (370)..(371): n is a, c, g, or t
  misc_feature (377)..(377): n is a, c, g, or t
  misc_feature (380)..(380): n is a, c, g, or t
  misc_feature (386)..(386): n is a, c, g, or t
  misc_feature (388)..(388): n is a, c, g, or t
  misc_feature (390)..(390): n is a, c, g, or t
  misc_feature (392)..(393): n is a, c, g, or t
  misc_feature (395)..(395): n is a, c, g, or t
  misc_feature (397)..(398): n is a, c, g, or t
  misc_feature (408)..(408): n is a, c, g, or t
  misc_feature (412)..(413): n is a, c, g, or t
  misc_feature (418)..(418): n is a, c, g, or t
  misc_feature (422)..(423): n is a, c, g, or t
  misc_feature (425)..(425): n is a, c, g, or t
  misc_feature (427)..(429): n is a, c, g, or t
  misc_feature (432)..(432): n is a, c, g, or t
  misc_feature (435)..(435): n is a, c, g, or t
  misc_feature (620)..(620): n is a, c, g, or t
  misc_feature (622)..(622): n is a, c, g, or t
  misc_feature (626)..(626): n is a, c, g, or t
gcagtcctcaccaccctagcccaagtgggcacccactgtcgccaacacctcgaggccaaagcatcgcctgctgcacaagctatccactccgtgctcctaaaccagtactgtgtggcatacaaaacgccagtaagtgacagagtcaccaaatgctgcacagaatccttggtgaacaggcgaccatgcttttcagctctggaagtcgatgaaacatacgttcccaaagagtttaatgctgaaacattcaccttccatgcagatatatgcacactttctgagaaggagagacaaatcaagaaacaaactgcacttgttgagcttgtgaaacacaagcccaaggcatcacaagagcncctgnaanccccacgcnncctctnccngctctngnananncncnntgcaagcctncccnnaagcngacnngntnnnccnagnagggtaaaaaacttgttgctgcaagtcaagctgccttaggcttataacatcacatttaaaagcatctcagcctaccatgagaataagagaaagaaaatgaagatcatcagctcactcatcagcctttcttattagcctcctatgtgcttcaattaataaaaaatggaaagaatctaaaaacaatnanaaanaaatcacaaacgcgagactagttctctc

SEQ ID NO: 573456 - DNA, 373 bp, Homo sapiens
  misc_feature (90)..(90): n is a, c, g, or t
tcttatgctagtaggtcagaggactataaactatcagcggctgaccccggagacacctactccgttactgttgctgctataccaccaagnggatggtgccgcagaatgccaaattgtcactacaacaggtgcagtcccaggccgggccaccatgatgatcagcaccacgggcataaacactgcgctgctccagtggcacccaccccaggaactgccttgcgaagctgctgggctaccggcttggcagtacccgccggggccgaccgaggcgcggcccaacaacactatatatttcggcgagggagtgaccagcacttcacagtcaccgggctgcacaaggggaccccctacatcttccgggttgctgcccaga

SEQ ID NO: 573457 - DNA, 663 bp, Homo sapiens
  misc_feature (47)..(47): n is a, c, g, or t
  misc_feature (304)..(304): n is a, c, g, or t
  misc_feature (309)..(309): n is a, c, g, or t
  misc_feature (312)..(312): n is a, c, g, or t
  misc_feature (321)..(322): n is a, c, g, or t
  misc_feature (328)..(328): n is a, c, g, or t
  misc_feature (331)..(331): n is a, c, g, or t
  misc_feature (337)..(337): n is a, c, g, or t
  misc_feature (339)..(339): n is a, c, g, or t
  misc_feature (341)..(341): n is a, c, g, or t
  misc_feature (343)..(344): n is a, c, g, or t
  misc_feature (346)..(346): n is a, c, g, or t
  misc_feature (348)..(349): n is a, c, g, or t
  misc_feature (359)..(359): n is a, c, g, or t
  misc_feature (363)..(364): n is a, c, g, or t
  misc_feature (369)..(369): n is a, c, g, or t
  misc_feature (373)..(374): n is a, c, g, or t
  misc_feature (376)..(376): n is a, c, g, or t
  misc_feature (378)..(380): n is a, c, g, or t
  misc_feature (383)..(383): n is a, c, g, or t
  misc_feature (386)..(386): n is a, c, g, or t
  misc_feature (629)..(629): n is a, c, g, or t
  misc_feature (631)..(631): n is a, c, g, or t
  misc_feature (635)..(635): n is a, c, g, or t
ccgaccgcccacacaccagcccacagtgcccacccatctccgcacanacccctaagccctcacgaacgccccgtgcaaacactactctccgctgtactcgcacccagttatgtgtgttgcatcaccacaccgccagtaagcgccatagtcaccccatgctgcacacaatccctggtcaccgccgcccctgctttccagctctcacagccgatacaacataggttcctgagaaggaccgacccctccaggaccaatctgcacttgctgagcttgtcacacccaagcccaaggcatcacaagagcncctgnaanccccacgcnncctctnccngctctngnananncncnntgcaagcctncccnnaagcngacnngntnnnccnagnagggtaaaaaacttgttgctgcaagtcaagctgccttaggcttataacatcacatttaaaagcatctcagcctaccatgagaataagagaaagaaaatgaagatcaaaagcttattcatctgtttttctttttcgttggtgtaaagccaacaccctgtctaaaaaacataaatttctttaatcattttgcctcttttctctgtgcttcaattaataaaaaatggaaagaatctaaaaacaatnanaaanaaatcacaaacgcgagactagttctctc

SEQ ID NO: 573458 - DNA, 101 bp, Homo sapiens
gtcaattgctacacgctttatttgagttaaagataacaaacaatatacttttatgtaaatagctatggcaatgtagtttacagtaattccttttatatata

SEQ ID NO: 573459 - DNA, 187 bp, Homo sapiens
tgagcagacgtgttgaatggaacggctacgacctggttaaggccatgtgacccttgtaccccaggaggctctggtgctgtgtcgggatgagacggagggaatggtcatgcctcatgaggccatgataattatgagggaggccctatgagaagtatagggaacggacttcaaatgataatttcgccag

SEQ ID NO: 573460 - DNA, 334 bp, Homo sapiens
ccggcgctcgtaggaataacggcagcgcaggagtatctgcagactctttgtaggagaaaagtgctgcaaggctgacgataaggagacctgctttgccgaggagggtaaaaaacttgttgctgcaagtcaagctgccttaggcttataacatcacatttaaaagcatctcagcctaccatgagaataagagaaagaaaatgaagatcaaaagcttattcatctgtttttctttttcgttggtgtaaagccaacaccctgtctaaaaaacataaatttctttaatcattttgcctcttttctctgtgcttcaattaataaaaaatggaaagaatct

SEQ ID NO: 573461 - DNA, 849 bp, Homo sapiens
tgggctggctccggccagttaatggaggtttccacgtgggggtaggggaaggggcccacccttgccctggcggtgtccccccggtgaaggacctctcccgaaggaagcaatgcccacaggttggagcacatctggttccatgggttcttctgtggtccccaacagggcagttctggggcctcgtgggggctcgggcaatgttccagagtctgcggctacgccccaggtgttctccggggtggctgggcagactctgtgcaagggcatctagggcagtcccccattttgggacccccagttcttggagggccaaacccagggtttcccatttggctcgaggcaagaggagacgccctttggttagacgcggcccaatttctccttccatggatgagtgtccgagaggaaaagagatggtgttctgggaggccctcatatagggttgggtcacaagacgcttgggaggctgggggtttggcccaagaggagaccacccatttctggggcgcaagagaccgctggttgagtaaacctccaaagagagagtcctggcggtcacggagggcgccattgcgggggaagagacccacagtgtgctgagacggctggtcgtgggaggccacaggaagtgggcctcggagtggcccccaggggggagagtgtggggtggccaaaaaacaaataccctctcaggagcgcctacggggttgtcgacccaacgaatgggcaactctcaaaagggagacagcggccaaaggaagggaacctccatctacagcaatgaggaagcacaagaggggtcttcgttggcttatggcaacacgcacgattcaggaaataggactctag

SEQ ID NO: 573462 - DNA, 313 bp, Homo sapiens
tctagaggatcccgcccgagaagctgagctgcccagatggtcgctacccgaatgtcagcgtcacaggatatctgagatgctgggtgacccccaaggacgcatgaccggaccaatgaaagaaatcaatccttactccttgacagctcattccgtggttgtatcagagacttatgcgtggccaccaacatatgaaagtgagtgtctatgctctctaaggacactttgacaagactgaccagctcagggctgttgtcacctagtcttggagaatgtcagcccaccaaggaagggctcggtgtgaacagatgctaac

SEQ ID NO: 573463 - DNA, 1154 bp, Homo sapiens
  misc_feature (52)..(52): n is a, c, g, or t
  misc_feature (71)..(71): n is a, c, g, or t
  misc_feature (85)..(85): n is a, c, g, or t
  misc_feature (113)..(113): n is a, c, g, or t
atctctaatgctatacagccacctccaatatctataaatcagatcaccccanaactaagatgctgaaaccntgtgaaaacccacncatgccgagtgaaagatgagtccgctanctgccttcattagctgctgattttgttgaaagtaaggatgtttgcaaaaactatgctgaggcaaaggatgtcttcctgggcatgtttttgtatgaatatgcaagaaggcatcctgattactctgtcgtgctgctgctgagacttgccaagacatatgaaaccactctagagaagtgctgtgccgctgcagatcctcatgaatgctatgccaaagtgttcgatgaatttaaacctcttgtggaagagcctcagaatttaatcaaacaaaattgtgagctttttgagcagcttggagagtacaaattccagaatgcgctattagttcgttacaccaagaaagtaccccaagtgtcaactccaactcttgtagaggtctcaagaaacctaggaaaagtgggcagcaaatgttgtaaacatcctgaagcaaaaagaatgccctgtgcagaagactatctatccgtggtcctgaaccagttatgtgtgttgcatgagaaaacgccagtaagtgacagagtcaccaaatgctgcacagaatccttggtgaacaggcgaccatgcttttcagctctggaagtcgatgaaacatacgttcccaaagagtttaatgctgaaacattcaccttccatgcagatatatgcacactttctgagaaggagagacaaatcaagaaacaaactgcacttgttgagcttgtgaaacacaagcccaaggcaacaaaagagcaactgaaagctgttatggatgatttcgcagcttttgtagagaagtgctgcaaggctgacgataaggagacctgctttgccgaggagggtaaaaaacttgttgctgcaagtcaagctgccttaggcttataacatcacatttaaaagcatctcagcctaccatgagaataagagaaagaaaatgaagatcaaaagcttattcatctgtttttctttttcgttggtgtaaagccaacaccctgtctaaaaaacataaatttctttaatcattttgcctcttttctctgtgcttcaattaataaaaaatggaaagaatct

SEQ ID NO: 573464 - DNA, 909 bp, Homo sapiens
  misc_feature (133)..(133): n is a, c, g, or t
  misc_feature (135)..(135): n is a, c, g, or t
agcgggacgactcagggacctcccgagcgccaggagtcaggggccgacctgcaggggctggaggggccagggcaccgcgagagcgggcatgggcgcagagacgtccggttcgcacggcgcgcgtcggccgagngntcatttcgaacccgtgcagattcacatgtgttgagcagtgcagccacggtcatggaggagtgtcgttacaggagtctctcagtggtgacgtgaatagtggcgacatgagtccgccattgaggtccctggatgggagagaagtcggagaaattcgcattggtagctgctggacgtggtcgtgaacacgacgggaaggcggtcaggaccaacagcagataatgacctgctactgaaaccgttgggctgatcggaggaaagcatctcgttagcccgtaaactagccaggtacacattgtctaactgtaggaatcagagaatcaaagcagcaagtgatcttttcaggggactgtcaggtggcttagttcttccacatctttcggtagcccactgttcaactcgatctcgtgagtcgacaaaatgcagtcattctcgtcataatgcaggaaggcccatgaccgaggtcaggtgagcgctacctggagaggactccaaagggccaggccctgggttccccttgggtggaagactcaccggttccttgaaccgtgtcattcgtgagacaggggccggtgtgtccgttgggggcattccgcgggtccatcgaaaggttgtgccttgatttcttgaccacgggtgccccgcaggttttggtccccaattctggacaacttggtgggagagggttgtcccgggggttggccccacgatgtgttgccaacaggcgtgtccgtttccaaactggttggcgtgttcttggtgccctgggggaggaca

SEQ ID NO: 573465 - DNA, 1183 bp, Homo sapiens
gccaagatatatctgtgaaaatcactgattcgatctccagtaacactgaaggaatgctgtgaataaacctctgtctggaacatacactcccactgtcattgccggaaggtgcgaataatgtagtgagagtgcctgctggacttggccttcattagctgctgattttgttgaaagtaaggatgtttgcaaaaactatgctgaggcaaaggatgtcttcctgggcatgtttttgtatgaatatgcaagaaggcatcctgattactctgtcgtgctgctgctgagacttgccaagacatatgaaaccactctagagaagtgctgtgccgctgcagatcctcatgaatgctatgccaaagtgttcgatgaatttaaacctcttgtggaagagcctcagaatttaatcaaacaaaattgtgagctttttgagcagcttggagagtacaaattccagaatgcgctattagttcgttacaccaagaaagtaccccaagtgtcaactccaactcttgtagaggtctcaagaaacctaggaaaagtgggcagcaaatgttgtaaacatcctgaagcaaaaagaatgccctgtgcagaagactatctatccgtggtcctgaaccagttatgtgtgttgcatgagaaaacgccagtaagtgacagagtcaccaaatgctgcacagaatccttggtgaacaggcgaccatgcttttcagctctggaagtcgatgaaacatacgttcccaaagagtttaatgctgaaacattcaccttccatgcagatatatgcacactttctgagaaggagagacaaatcaagaaacaaactgcacttgttgagcttgtgaaacacaagcccaaggcaacaaaagagcaactgaaagctgttatggatgatttcgcagcttttgtagagaagtgctgcaaggctgacgataaggagacctgctttgccgaggagggtaaaaaacttgttgctgcaagtcaagctgccttaggcttataacatcacatttaaaagcatctcagcctaccatgagaataagagaaagaaaatgaagatcaaaagcttattcatctgtttttctttttcgttggtgtaaagccaacaccctgtctaaaaaacataaatttctttaatcattttgcctcttttctctgtgcttcaattaataaaaaatggaaagaatct

SEQ ID NO: 573466 - DNA, 664 bp, Homo sapiens
ggttgcttcccggggcgaaaaaatacaccctttttttttaaaaattttcttttaaaacccctctcccaaaaaatattaatcccccccaaacaaattttgaaaagaaaaaaccttccccttttttaacaattacaccaaggcttcgggttcccccttgggggcgcccctatgcccggggggaaattcattttttataaggaaaacccctttgtccacagggcctttaaaaaaggcgttcttttcaattgaacaccttcacctccgccccaacacaggaggcaaaagatttttgtaaaaaaaaaaaaaccaccttgggggagcggcccaattaggcccccaaatatctccccggtggtttttaaaagccccttgaaaaaaaacggggggggggaaaccccctttttttttaatttttcccccggcatttagctcgatataccgcgggggagggggcgctatccccaatttttgggaaaaaaaaaatagggagggggggggactttcgggctccagcggcggagaattgtttgtggaaaaataaaatcttacaacacccgtgcctataaccaaaaagttccccgggctgggaactccgaagaacaccggcgcccctttgtgtgccaattttgggccaaaaccacctgtttttttctttctgggcccg

SEQ ID NO: 573467 - DNA, 1864 bp, Homo sapiens
  misc_feature (52)..(52): n is a, c, g, or t
  misc_feature (71)..(71): n is a, c, g, or t
  misc_feature (85)..(85): n is a, c, g, or t
  misc_feature (113)..(113): n is a, c, g, or t
  misc_feature (1220)..(1220): n is a, c, g, or t
  misc_feature (1353)..(1356): n is a, c, g, or t
  misc_feature (1434)..(1434): n is a, c, g, or t
  misc_feature (1467)..(1468): n is a, c, g, or t
  misc_feature (1596)..(1596): n is a, c, g, or t
  misc_feature (1641)..(1641): n is a, c, g, or t
  misc_feature (1667)..(1667): n is a, c, g, or t
  misc_feature (1722)..(1722): n is a, c, g, or t
  misc_feature (1807)..(1807): n is a, c, g, or t
atctctaatgctatacagccacctccaatatctataaatcagatcaccccanaactaagatgctgaaaccntgtgaaaacccacncatgccgagtgaaagatgagtccgctanctgccttcattagctgctgattttgttgaaagtaaggatgtttgcaaaaactatgctgaggcaaaggatgtcttcctgggcatgtttttgtatgaatatgcaagaaggcatcctgattactctgtcgtgctgctgctgagacttgccaagacatatgaaaccactctagagaagtgctgtgccgctgcagatcctcatgaatgctatgccaaagtgttcgatgaatttaaacctcttgtggaagagcctcagaatttaatcaaacaaaattgtgagctttttgagcagcttggagagtacaaattccagaatgcgctattagttcgttacaccaagaaagtaccccaagtgtcaactccaactcttgtagaggtctcaagaaacctaggaaaagtgggcagcaaatgttgtaaacatcctgaagcaaaaagaatgccctgtgcagaagactatctatccgtggtcctgaaccagttatgtgtgttgcatgagaaaacgccagtaagtgacagagtcaccaaatgctgcacagaatccttggtgaacaggcgaccatgcttttcagctctggaagtcgatgaaacatacgttcccaaagagtttaatgctgaaacattcaccttccatgcagatatatgcacactttctgagaaggagagacaaatcaagaaacaaactgcacttgttgagcttgtgaaacacaagcccaaggcaacaaaagagcaactgaaagctgttatggatgatttcgcagcttttgtagagaagtgctgcaaggctgacgataaggagacctgctttgccgaggagggtaaaaaacttgttgctgcaagtcaagctgccttaggcttataacatcacatttaaaagcatctcagcctaccatgagaataagagaaagaaaatgaagatcaaaagcttattcatctgtttttctttttcgttggtgtaaagccaacaccctgtctaaaaaacataaatttctttaatcattttgcctcttttctctgtgcttcaattaataaaaaatggaaagaatctatcagagtgtctgatgcgctgctactctggtccacacccggctgttgtcctctgcatccccgcccnccctgtcctaagctcccccccccggcccacccccctccccgcccaggtatcatctcacgcccacagtgactcacgggctatgccgaggccctccccctgctcttgtcaatggtacggtgcgtcccgtgagtannnncaccactactcccctcaccgccatctccccactatccacccgctacgcgcggccatgccgccagcacacacatccccncccgccggccacttcctccccccccccctcctnncaccccgtcaccgctcgggcctcccgcgcctctcagactcctctaccccttccacaacaacgtttatctggtcgcatacatattatttaatgccccccactaatctgtctaactaccccctctccagntcccagacagcacactcggtgtgcagcgctcgcagcgctttcatntccaaccacacacgctccccagcccnccacacgaatcccgtgtgcttcgctctgatccgttaagaggagccatcgagttcnccctatggtaacatgttagtcccagactgtgcaccgactccccacctctatggctcccactcgcctcgtattcccctcattgccntccacacccacccatcagtctatcatccctccattcgccactctcttccaccctcag

SEQ ID NO: 573468 - DNA, 228 bp, Homo sapiens
tctggtatgcgagaagtgaacaaacaacgattgacaaaccagttcacattataagataaaacggttaaattaaaactcaataaacgatataattcactcaataaaaacagcttatagaaaggcagtgcttgacacatagcactgtaaaatataacaatgttattatttaaccgcaatatcattgttttttgtaccattaatgagatacctgagcataataatcagtta

SEQ ID NO: 573469 - DNA, 1026 bp, Homo sapiens
gctcctcgccagcagccgtccggagccagccaacgagcgtttcgctcttgttgcccaggctggagtgcaacggcactatctcggctcaccgcaacctctgcctacctggttcaagcgattctcctgcctcagcctcccgagtagctgggattacaggcatgcgccaccatgcccggctaattttgtatttttcgtggtggtggtggggggggggggtccctccagtgtgggctcaggcgggtctcgaacccccgaacctcgggttgacccgccgtgcctcggcctcctaaaggtgcggggattatattaggcgtgtgggccactgtgggcctgtggccttaccttcaagttttattaaccattttcattacataggaaatgggtggtgtttcccattaaagggaaaatgtggcagacacattttccgcctccagtgagtgcgtttactcgtgggctctggaaacccaaacccttcagggatgtggcctgggcgcatgtgggggaaccagccgtgcgtggggcaggggggcatacccaggggctttcctatcctgggggcctaccccggggcaggggacccccaggggcttatcctgggacagggcacctccagggggccttaccatggaggcacctggagcttatcccgggagcacttgacctggaggtctacccagggccacccagcggcctggggctaaccatcttctggaccgcaagtgccccggagctacctgccatgggccctatggcgccctgtgtgccttgattgtgcttataactggcttgcctgggaattggtcccccattgctgtaacaattcgggccggtgaaccccatgacccagatggtttaaattcccaaagggactatggtgccctccactattacccggttctgggacacccgcgggcctggtgtggaacacagcgtacgcggggggaaaaacaaggggtcaccacagaggagcccccacaaaggtgtacgaccacgtgagagcctgggcacacgctcaaaacacagcga

SEQ ID NO: 573470 - DNA, 1366 bp, Homo sapiens
  misc_feature (52)..(52): n is a, c, g, or t
  misc_feature (71)..(71): n is a, c, g, or t
  misc_feature (85)..(85): n is a, c, g, or t
  misc_feature (113)..(113): n is a, c, g, or t
atctctaatgctatacagccacctccaatatctataaatcagatcaccccanaactaagatgctgaaaccntgtgaaaacccacncatgccgagtgaaagatgagtccgctanctgccttcattagctgctgattttgttgaaagtaaggatgtttgcaaaaactatgctgaggcaaaggatgtcttcctgggcatgtttttgtatgaatatgcaagaaggcatcctgattactctgtcgtgctgctgctgagacttgccaagacatatgaaaccactctagagaagtgctgtgccgctgcagatcctcatgaatgctatgccaaagtgttcgatgaatttaaacctcttgtggaagagcctcagaatttaatcaaacaaaattgtgagctttttgagcagcttggagagtacaaattccagaatgcgctattagttcgttacaccaagaaagtaccccaagtgtcaactccaactcttgtagaggtctcaagaaacctaggaaaagtgggcagcaaatgttgtaaacatcctgaagcaaaaagaatgccctgtgcagaagactatctatccgtggtcctgaaccagttatgtgtgttgcatgagaaaacgccagtaagtgacagagtcaccaaatgctgcacagaatccttggtgaacaggcgaccatgcttttcagctctggaagtcgatgaaacatacgttcccaaagagtttaatgctgaaacattcaccttccatgcagatatatgcacactttctgagaaggagagacaaatcaagaaacaaactgcacttgttgagcttgtgaaacacaagcccaaggcaacaaaagagcaactgaaagctgttatggatgatttcgcagcttttgtagagaagtgctgcaaggctgacgataaggagacctgctttgccgaggagggtaaaaaacttgttgctgcaagtcaagctgccttaggcttataacatcacatttaaaagcatctcagcctaccatgagaataagagaaagaaaatgaagatcaaaagcttattcatctgtttttctttttcgttggtgtaaagccaacaccctgtctaaaaaacataaatttctttaatcattttgcctcttttctctgtgcttcaattaataaaaaatggaaagaatctcctgcaaagctgccaaaaattgaagcgcactattggatatttttacaaactcaagggggggcccggtgcccataacccccatagagaggcgtatatcatttactggcccgtcgtttacaacccttgactgggaaaccctggggtcccaaagtaattcgcctgccaatatcccttttggagattgtttatcgagggccgttcgtacgccttcc

SEQ ID NO: 573471 - DNA, 238 bp, Homo sapiens
aaaaaaaaaaaccttttaaaaaccccccccttaaacccaccccttttttgtttttggcccaggggtttttccattttttttggggttttttttttgaggtttaaaaattttttccccccttaagcccccccctttttgccccccccttttttaaggtttggggttggggggggggccgggttttttttttttttttttaggggggggggccccaagggaattaaccccgggcctttga

SEQ ID NO: 573472 - DNA, 1584 bp, Homo sapiens
  misc_feature (52)..(52): n is a, c, g, or t
  misc_feature (71)..(71): n is a, c, g, or t
  misc_feature (85)..(85): n is a, c, g, or t
  misc_feature (113)..(113): n is a, c, g, or t
atctctaatgctatacagccacctccaatatctataaatcagatcaccccanaactaagatgctgaaaccntgtgaaaacccacncatgccgagtgaaagatgagtccgctanctgccttcattagctgctgattttgttgaaagtaaggatgtttgcaaaaactatgctgaggcaaaggatgtcttcctgggcatgtttttgtatgaatatgcaagaaggcatcctgattactctgtcgtgctgctgctgagacttgccaagacatatgaaaccactctagagaagtgctgtgccgctgcagatcctcatgaatgctatgccaaagtgttcgatgaatttaaacctcttgtggaagagcctcagaatttaatcaaacaaaattgtgagctttttgagcagcttggagagtacaaattccagaatgcgctattagttcgttacaccaagaaagtaccccaagtgtcaactccaactcttgtagaggtctcaagaaacctaggaaaagtgggcagcaaatgttgtaaacatcctgaagcaaaaagaatgccctgtgcagaagactatctatccgtggtcctgaaccagttatgtgtgttgcatgagaaaacgccagtaagtgacagagtcaccaaatgctgcacagaatccttggtgaacaggcgaccatgcttttcagctctggaagtcgatgaaacatacgttcccaaagagtttaatgctgaaacattcaccttccatgcagatatatgcacactttctgagaaggagagacaaatcaagaaacaaactgcacttgttgagcttgtgaaacacaagcccaaggcaacaaaagagcaactgaaagctgttatggatgatttcgcagcttttgtagagaagtgctgcaaggctgacgataaggagacctgctttgccgaggagggtaaaaaacttgttgctgcaagtcaagctgccttaggcttataacatcacatttaaaagcatctcagcctaccatgagaataagagaaagaaaatgaagatcaaaagcttattcatctgtttttctttttcgttggtgtaaagccaacaccctgtctaaaaaacataaatttctttaatcattttgcctcttttctctgtgcttcaattaataaaaaatggaaagaatctaaaaaaaaaaaaaaaaaaaaaaaaaaaaaaaaaaaaaaaaaaaaaaaaaaaaaaaaaaaaaaaaaaaaaaaaaaaaaaaaaaaaacccaaaaaaaaaaaaaaaaaaaaaaaaaaaaccttgtggcccccttggcccaagcgaatttaaaattaaacaaacttaatcaaggcgcccaaattcgagcctaattggccaaatccccctaaaaggaacgcaattaaaaataaatggcccgtgtttaaaaaacgttgaaacggaaaaaccctggggttacccaacttaaaccccttgagaaaaaacccccttttcccaagtgggcaaaaaccaaaaaagccccaaccaaatcgcctttcaaaaaattggccaaacctaatgggaaaaggaaaattgaaccttaaaaatttggaaaaaaccgcggaaaaatttgga

SEQ ID NO: 573473 - DNA, 1301 bp, Homo sapiens
  misc_feature (52)..(52): n is a, c, g, or t
  misc_feature (71)..(71): n is a, c, g, or t
  misc_feature (85)..(85): n is a, c, g, or t
  misc_feature (113)..(113): n is a, c, g, or t
atctctaatgctatacagccacctccaatatctataaatcagatcaccccanaactaagatgctgaaaccntgtgaaaacccacncatgccgagtgaaagatgagtccgctanctgccttcattagctgctgattttgttgaaagtaaggatgtttgcaaaaactatgctgaggcaaaggatgtcttcctgggcatgtttttgtatgaatatgcaagaaggcatcctgattactctgtcgtgctgctgctgagacttgccaagacatatgaaaccactctagagaagtgctgtgccgctgcagatcctcatgaatgctatgccaaagtgttcgatgaatttaaacctcttgtggaagagcctcagaatttaatcaaacaaaattgtgagctttttgagcagcttggagagtacaaattccagaatgcgctattagttcgttacaccaagaaagtaccccaagtgtcaactccaactcttgtagaggtctcaagaaacctaggaaaagtgggcagcaaatgttgtaaacatcctgaagcaaaaagaatgccctgtgcagaagactatctatccgtggtcctgaaccagttatgtgtgttgcatgagaaaacgccagtaagtgacagagtcaccaaatgctgcacagaatccttggtgaacaggcgaccatgcttttcagctctggaagtcgatgaaacatacgttcccaaagagtttaatgctgaaacattcaccttccatgcagatatatgcacactttctgagaaggagagacaaatcaagaaacaaactgcacttgttgagcttgtgaaacacaagcccaaggcaacaaaagagcaactgaaagctgttatggatgatttcgcagcttttgtagagaagtgctgcaaggctgacgataaggagacctgctttgccgaggagggtaaaaaacttgttgctgcaagtcaagctgccttaggcttataacatcacatttaaaagcatctcagcctaccatgagaataagagaaagaaaatgaagatcaaaagcttattcatctgtttttctttttcgttggtgtaaagccaacaccctgtctgtgagattggagagaatctactagagtggtacagcactgtgatattacagagatgtgttgctatcctgaacattctgtatgatctgtggaagtgctactgcgatctattattccacttccgttgacgagacataggtagacgtgagctaacttaattaaccattgctgctctgctctacagtacgtgaccctgagactggataatttgccacagcctcct

SEQ ID NO: 573474 - DNA, 254 bp, Homo sapiens
cctggtgctgccgcccaggcatctcctctcctcactctgggaaggaggtggtcttctggcaaagaagatatctgagttcttccatcagaggagatccttattcatgcaagacattcactctgtagaagccacggtccctgtcatttgtgctgagagtctttttctcactgagtcttttcaaacggcccatggaaacgggaaatccagatggcccatttgacaaacgaaggaaacgggccgactttagacattgt

SEQ ID NO: 573475 - DNA, 1202 bp, Homo sapiens
  misc_feature (1036)..(1036): n is a, c, g, or t
ggtttctttgcaggacatcagcgatggcgtgcttgggtaccactgaacagagtgatccttggtagacactgggaggtgtcttctacaggtctctcatcgtcttggtcagctgatgatctgggcgttcagcgtccagtgtgctcgtccgatagcaccaccagatatcacaattgttaggaccgaaactaaccgttctcgccatgaaattatcctctctgccaagatatcacttgacgccaggccaaaggatgccccagcacatcaccgacggggtggcatgtatcgtgccaatgtctgtggatggatcccagcatgaagccaagcgggcccactactgtcctaaccgtattggttcgagcgcacactcgaagagaagaccttgccggggggcaccgctcccatcactatgtacgcggacaagacccagccacccgaggggctgggcgtgaacacgctgggcggacagaagggcctctgcgggctttgagattctgcgccgaattattccgttccgtgcccctcaagtggcaagaccatgcattgcgcatgggttgaccacgcgatgccgtcatgagaatcaagtccaattgactacccctactcagactctaacaactaggagcacccaaccgtaggtacgcacagtggacacacacggggagagggcacacctcgcgggccgccacaccccctcggggggcccgacccgagaatagcgctcatccctactggtacagccacggcaggggcccatccaatccgacgcgctcgagcgcgccaacggccaggctcgaacgcacaacgaagcgcaggcaccaatcccaccaccaagcggctcgtgtgcccaactccgcgtgggctatggctcgccgccacattgacattaccgaccagcgggggatccgctaaccgtacgccacccgtcagtcgtatccacgagaacaccacgggcgctgtcgaaccacgcgacaactaacgcccaaagcggcgcgtcctaggagagattcccctcctcaccccgggtccacctcaccgnacccaaggtcgactccaggactcggcagcggaccccagcgcacacgcatgggctagcccgcacacacgatcgcacccaccacggcacgttcggcagcacaccgcactcgcgccccctccgcgcacagcaacctgccccttacaagacacggccatgcccacgaagc

SEQ ID NO: 573476 - DNA, 676 bp, Homo sapiens
  misc_feature (106)..(106): n is a, c, g, or t
  misc_feature (124)..(124): n is a, c, g, or t
  misc_feature (175)..(175): n is a, c, g, or t
aggtgactctagagatccccagtgggtcctgcttacatggaaaccctgggcctgattgtgcaggcggtggccttaggcggggtgtaggcgccgtagatatgcaatngggcgcctggcagttgtnggcggatcagtggccacaggcggtgcttcatccacagcaccgcatcccaantgggcgcgtggcggaagttaccgatgctgaggaaatgcgcacggtcgtcaaagggcgcaaatgcgtcggtgggcggttgcagcatcaaggggcaccagtggagcagggcggcaggcaccttgaactgttcggtgagcagacggatttccacgtcggagatcatcaagctgatgtcacagcggtaaatggcggcgatttcgcgtttggccaggtcggtgtcggccatgcgttggaactcgtcttccagcgccggcgcgaacagggcgctgaagtcgtcgctgtcgggttgggctttcacctgctctttgagccgctggtgacgggcgtcgcgcaggctttgcaggtcggaggtttccagcacgcgcagggcgtcggggcagcattgttctacgcgccagccgaattgctcctccatcatgaaacggtcgaacagcacgatatccggggccagttcgcgaataaagtcgtcgaaactgctgttttcagttcgatggtgcgtcg

SEQ ID NO: 573477 - DNA, 615 bp, Homo sapiens
  misc_feature (431)..(431): n is a, c, g, or t
gcacacctggaagggactgcctatggtccctagcaggtgcaggccaaggaccggggctccccatccttcagtcacctacatgcgcttacgtcaagacttgacatcactagatgcttgagaccctactcccgtgagcccgcatgagctgctcttcctagatacatgaccataggacaagcccccatgaatggccagtggagtgttgctgtgcctggcaccattggccacctgtcgtaggccgatcacttgtccgtcagtctccgaccgccacacttctgtgcgcaacaacgaaggtctaagcaatggtccttgccagatgcggcgaggtgctccgacaaggcggcccatgccctgcggccccagtaccatccagcatttgagtggctcaatgtccaagaagcaccaagagccgcgtaccaatgttcatgctncacagacgaaacctctccaatgcagaactggtaacagacaagcagcccaagaaagctctctagctcccgaagagctccgagctctcacctccagcaatccaagcgtggcagcccaagcactggctgcatgcccaagtggaccgtgcctactggtctctgtgctctctcacttccgcagagcgcc

SEQ ID NO: 573478 - DNA, 830 bp, Homo sapiens
  misc_feature (489)..(489): n is a, c, g, or t
  misc_feature (492)..(492): n is a, c, g, or t
  misc_feature (499)..(499): n is a, c, g, or t
  misc_feature (679)..(679): n is a, c, g, or t
  misc_feature (742)..(742): n is a, c, g, or t
  misc_feature (745)..(745): n is a, c, g, or t
ccgagcggcgctgtgaactgcttcctgcagagccgtggccatggcgcttcacgttcccaaggctccgggctttgcccagatgctcaacggcagggagcgaaacacttatcagcgattagaacaggctgtgtatagaaacatacaagcttgctaactgagcttgaccataccactctgtacagcgatatggaccacattggcacagtgaacatagaactggttatctacaccatcttgcagaagtagctttgtgatcaacaacgatgcctcatacctagttctaatcagatctagaagtacagcattcctgctgctcaaagtgagtcgtaaaggccttctcagtactgcagagagcaagaagtcggagatggcactaaacttatgttctgggtatttgctcggcagctctcctggacttagctgcaagaacttctgaggattggcctgtcagtttcagaggtcatagaaggttatgaaatagcctgcagnaangctcatnagattcttcctaatttggtatgttgttctgcaaaaaaccttcgagatattgatgaagtctcatctctacttcgtacctccataatgagtaaacaatatggtaatgaagtatttctggccaagcttattgctcaggcatgcgtatctatttttcctgattccggccatttcaatgttgatnacatcagagtttgtaaaattctgggctctggtatcagttcctcttcagtattgcatggcatgnttnttaagaacggtacacagacggtgtacgtaatatcatgtctgatgagccggtgataacggtgtcctcgtgacatcttatcgccgca

SEQ ID NO: 573479 - DNA, 424 bp, Homo sapiens
caacttcccaaaccaggacctgtcttccagtttgggcagggtatgcctggggttggaatcatgcctacggtgggtcagcttagagcacagttccaaggagtactggccaaaaacccacagctgcggcatttaagtcctcagcagcagcagcagttacaggcactcttcatgcagcggcagttgcagcagagtcaggcagtaggccagaccccaccttaccaggagcttgggacccagacctttcccttccagggcttcttgggttgccaacctcaacttgggggcttccctggaccacagacaggccccctccaggagttaggggcagggcttcgacttcagggcccaccccggctccttgccccaccaggagccttatttacaggaccagtccttggccctgtggcccccacctccaccctca

SEQ ID NO: 573480 - DNA, 339 bp, Homo sapiens
gagaaccgcacacgcgtttggcacactgaagagtgctacctctatgtgccttctgtatctctttagctcgggttatacccgcggagtgtattgacgcgatgcacacagcagtgtgggcgctcatcggagtacagatttcggagaggactatttcatagcctcgcgcgggatggcctttgctcagcatcttcaactctggccattggaagatgatgcctaagtagagagtgaagtaactgaatttgcatacacgtgcgatgctgatgagctgggtggcactctttgagagacctatcgtgagctggcctgctgccgtgcagcaggagaccttgcgattgg

SEQ ID NO: 573481 - DNA, 178 bp, Homo sapiens
agaagggttagaacccgggaggtggaggtgcagtgagccgagatagcaccactgcactccagcctggcaacagagcgacactccgggtcaaaaaaaaaaaaggtacctggtaataaacttacctctaaaaatggtaaccttccctcctaaggggtaaaaaaaaaggccaattaacaaa

SEQ ID NO: 573482 - DNA, 205 bp, Homo sapiens
tgtgctgtcacatgacccactgttatcgttactttgacgttttcagcgcacacccttcctctggtttggtatatttattgatggatcaataataatgaggaaagcatgatatgtatatgctgagttgaaagcacttatggaaaatattaaaaggctaacagttaaaagactaacacgaaagaaaaaaaaaacaaaaagagaacga

SEQ ID NO: 573483 - DNA, 630 bp, Homo sapiens
ggaactttgtgactaatgagcaacttgtgaagatggtgtactttgggctggagatgatatcttcaagtagaatggcactggcttgacatatgcctgatatgacgagcaatgcaatgcctgactacgaactccgacctaagtgcacgtgacactatacagttatgccacattcgaataggaggactggtgcgacatgctcactattgaactgcgctagaagccatgagaaggactgggagttactatagcaggttaactacactatactggagtatccgtgtcatacgttgtcatacgaagaattgcccatgccgatggaagactgatgcagggagaccctatatgaatggtgaatgctgaagacgcacgtgatgccactgctggctgaatcaactctggttcattgcatacagataggatgctatctgactgcaagcaggtattgaatgccatatggcgctttgacttgtgcagacggtggatccagggcatctgagtcactggacagtagctacaatgacaatgcattggcatctgacctgcggaatgaccaacatgcgagatggaatgggacctactgactgactgggaatagcatcgctggacgagtgacagcccacttggtgtgtg

SEQ ID NO: 573484 - DNA, 670 bp, Homo sapiens
gacctcagttcctgtttggaaaatgagataataaccctgacataggaaggtcattgagatgatttgagagagattacccagtataagatatttgttataaaggcctgtaaatgctttataagtagctgctgttattatccttatgaggtattttctttttgaagaaaaaaagataatgtttgtaaaactggattccaatcataggaaaggatttggcccaggcgctgcagctcatgcttgtaatccccaccactttgggaggcccaggtgggaggatcacttgagccccaggagttcaagacccagcctgggtaaccaaagtgaggcccccacctctcaccacaaaaaatttttaaattatccagcgccccggctgggcaccaatggcgttaccaccctgtaattcccacccactttgggatgaggccaggtatccactagaggtccagagttcaagacccagcctggcccgcccatgttggtgaaacatcccatctcttatttaaaatacccaaaattagcccggccatggtggtggatgcctgtaattccagctacttgggaggctgacaccggagaattgcttgaaccccggaggcggaggtttcagtgaggccagatcacacccctgcactcccccctgagccatagagtgagactccaatttcca

SEQ ID NO: 573485 - DNA, 894 bp, Homo sapiens
  misc_feature (880)..(880): n is a, c, g, or t
gtagaagcagagtggttaccaacatcaagaagacactcaaagccaccgatcctcctcggtcaggagatggacgcagcagttggtgaacgggatgtccccctcacgctgaagcagaggcagcccaccaagaatgatgtccaaagtgaaaggtctggtcctccagccgccactagggccggctggggcagttggcactcaccaggcctgggtcaggtgggggaggggacaccaagggcccatttcctcccctctctacctgcagttgagttccagacctgcccgtaccctcacccagagcctcccaaacctgttgtactgtcccagaaaaactgttactccccctcaaccaaattcccttccttcccaagtttgtcccttcagatcaggggctcaaccaatgccaatcccaaaaacaaggttcagaacactgcccagcttccctccaggaaggttcttgtctctggtgtaaagggctgtctccctcccagtatctttgccccacgtcatttgtccaggctggtaataaaccgaacggcaggtttaaacaagcccccaggaatgatcggtaagggaggcccctcaccttgtgaggagggggaactcttctcaagccctgttaccaagcctagatgtgcaggattctagccaggtcagatggcggtcctcactgctaatcctgtgaagcaagtaagcaggagactgaagcgctggtataaccaggttcacctaagcggccggccaaaaggaagggcgaaaaccgttcaaccaaggtgggtcagaggaagagctcgcggtacgccatggcgaaaactatgtgaccccaacaggggcgaatccgggggggccgctctcgccctccacctttcacatatacactcgnaaaaacgagaagaa

SEQ ID NO: 573486 - DNA, 765 bp, Homo sapiens
gcggttggccgggaggattgtctacgggggggtgcccctaactggtcggggcgccccgctgtggtgcccccccctttgccggcgggagtcctggttggccccccccctgtggccaatgaagtggcacccgagggcttccacgtcgtgaaaggccgcggccctcaatggctgtatggttgcagaccctttgtccaagggccttcgcgttttcgcggcctcccctcattctgtgggataggcgcgcctgccggggggcaagaacccgccgggcagtggcgcgcgtcggcaagcgagaaggggcaagaaaaagcaagacgcaacaactacaagaaggcggctggcagcaaacacccggcaagatcggcgcaaaacgaggggcgcctccaataagcggcgcgcgcgcgaggtgcccgaagcgccgattccaggaagacacaccagaagcatacagactcaccagaagagccacacatcgatcacataccctgtgtactacggagggtaaccttgattcaccgtggcgcacactgcattcttgggcaccgttcccgcccccggttatctccgtcgccctccaccggcggtgactacgtccgtggctgttggccacacacgctccctcccggcagtgcccggcggggaccccgctgtcactacgctacatcacctggtcctaatagtaaagcaccctttgacgattcgcgcccctgggtgccctttccttttgcccccggggccccccccgacccctcgcccaacataaca

SEQ ID NO: 573487 - DNA, 186 bp, Homo sapiens
  misc_feature (23)..(23): n is a, c, g, or t
  misc_feature (94)..(94): n is a, c, g, or t
  misc_feature (176)..(176): n is a, c, g, or t
gcctttaacatcctctgccaatnactggcctcaaatcaccagtggaaccttttcaaaaaatacaccattggctctatgtagttctactgatctnaaatatccacgtgtgggccaggagcactggctcatgcctgtaatcccagcatcttgggagagcgaggaaggaggatcatttnagcccaggag

SEQ ID NO: 573488 - DNA, 205 bp, Homo sapiens
cagtaacagaaagataactggaaatcccccaaatagttagtgattaaacaacatacttgtaaataacacatgggttaaagaagaaatctcaagagaaaactgaaaatattttgaagtaaaagaaaatgaaaaccttaccaaatttgtagaatgcagcaaaagcagtgcttagagggaaatttatagcattgaatgtatgtattag

SEQ ID NO: 573489 - DNA, 181 bp, Homo sapiens
agaggatccccgacggtcgttttgtcggtcgccagcgtatcgacagcgacggctgcgtgcgcgtccgctggtggtgggtaacatgctttatgtgtatggcaacggcggcaagctggaacccctgaccatcaagtaaaggtttgactatgcttggggtaacccccaggttaacagaccgtcg

SEQ ID NO: 573490 - DNA, 262 bp, Homo sapiens
tcacaggtgtgagcgacgcagcaagacggcgatgattgctgcatatccatcgtgaggaacgcatttcctcaccagcaacggaacaaatctggatggagaatgattatgacgagctgagagaagaaggcttcagacgatcaaattactctgagctacgggaggacattcacactcaaaggcaaagaagttgaaaactttgaaagaaatttagaagaatgtataaatagaataaccaatacagagaagtccttaatggacaaga

SEQ ID NO: 573491 - DNA, 821 bp, Homo sapiens
gcatcagttgctctcaagctcggggtctgttgggtggggtgacatcgcgggtccaacatgcgtatcgaaaagggttatgtctgtgcgggggccatctatcctggacacggcatgatgttcgtgcgcaagtgatgggacgggggtcatgatttaggaaactctatgatgtaatagaaatattttaataagagaagcgactagtccttcgagcataaagtgtaaggtggacgggaaacgtcaattaccgggaaagcgggtggtacaggagcttgcagtggataatgcatttgaattggaaaaatcgtataaatgaacctgatcaaatacacagcgatggaaggtatggaaattaagagggtattgatgcgatgatagaggagattgtaagagagaatcaacacaggaaagcgagggagcgtatagtatgtataatagagtaggattgacggatctatgaaggagctgacaggaaatgttcaggtatatcaaagaagtcgagcgaagagatgattgatcttatccggagtcccatctagctagggaaagggtgaaaagagtgtagggaatgagatagatggtacagtggttacagaggaggatgtggaccatggatagatgctccctgtaaataatcgtctgggaatgcattggcgttgagaggtacgatttgaaaaatggcactatgtggatacttggaaactggctaaattatttgagggtaaagggtaaaggtgcaggttacatgaaaagcgagtttatcagacatgtttgcctggattgccgaggctacggtaattatcagatatgacggatgtttagag

SEQ ID NO: 573492 - DNA, 354 bp, Homo sapiens
  misc_feature (18)..(18): n is a, c, g, or t
  misc_feature (21)..(21): n is a, c, g, or t
  misc_feature (60)..(60): n is a, c, g, or t
  misc_feature (110)..(110): n is a, c, g, or t
  misc_feature (112)..(113): n is a, c, g, or t
  misc_feature (137)..(137): n is a, c, g, or t
  misc_feature (192)..(193): n is a, c, g, or t
  misc_feature (224)..(224): n is a, c, g, or t
  misc_feature (226)..(226): n is a, c, g, or t
cgcgggggtaccgccccnatnacaattcattcatccatccatccatccatccattcatcnatccatccatctattcatccatccatcatccattcattccagaagcattngnngagtgagcacatccatctatccangcatccatccacccacccattacccatccaattatccatccattccagaagcatnngccgatcgagcgcatccatccatccatccancnatccatccatccatcatccattcattccagaagcatgggctgagtgagcacatccatctatccatgcatccatccacccatccattacccatccaattatccatccattccagaagcatgtgccgatc

SEQ ID NO: 573493 - DNA, 266 bp, Homo sapiens
aacgcgaggaaaggaatggccagccacaccttcgcgataactgtgttggcccaacatgttctatgaggacaggacagacagacagtccaaggctgaactgtttttcctccatcacagctatcctgtccctcattgacctctgtggtttccactatacacagtcaccgtcccaatgacatgatgaatgaaggaacaacctctaaatgactcgcactgcaagtgaacagcgatgttcagtcctgcattgatcacctggtcttcctcat

SEQ ID NO: 573494 - DNA, 157 bp, Homo sapiens
cgacggtctgtaccaatttattatatataccaaacagtaacatatgtagaatatgggaatcgtcttccgcggtgccgacgtcgagcgctagttgtgaacattccaagccaatgtactacaacttgggcaggggaaggctaaacaagtatcatcaacc

SEQ ID NO: 573495 - DNA, 284 bp, Homo sapiens
  misc_feature (264)..(264): n is a, c, g, or t
tttaggccatttcattaaaaaaatgaaattatgctttaggtaagctttacccttcatcctcttcccctgattgtaattcactgattcatgatggatgagcgttatggtgtggccgcctgactgtaagatggcctggtgagccagagaaatcagctaggtgactctcagatttcagacgcacagaaactgtgagataataaatgcttattgctttaaatgctaaatttttggggttattgattatgcagcaatagataaggtagntgaagtgtgcaatgggaatg

SEQ ID NO: 573496 - DNA, 295 bp, Homo sapiens
  misc_feature (18)..(18): n is a, c, g, or t
  misc_feature (21)..(21): n is a, c, g, or t
  misc_feature (60)..(60): n is a, c, g, or t
  misc_feature (110)..(110): n is a, c, g, or t
  misc_feature (112)..(113): n is a, c, g, or t
  misc_feature (137)..(137): n is a, c, g, or t
  misc_feature (192)..(193): n is a, c, g, or t
  misc_feature (224)..(224): n is a, c, g, or t
  misc_feature (226)..(226): n is a, c, g, or t
cgcgggggtaccgccccnatnacaattcattcatccatccatccatccatccattcatcnatccatccatctattcatccatccatcatccattcattccagaagcattngnngagtgagcacatccatctatccangcatccatccacccacccattacccatccaattatccatccattccagaagcatnngccgatcgagcgcatccatccatccatccancnatccattccagaatcatttaccaagcaaacacatccatctatccatccatccaccgtgcttatctcaat

SEQ ID NO: 573497 - DNA, 186 bp, Homo sapiens
tcgaggatcccttcttgtgctggtgtctgattgttagtctaaatatttccttaaactgtgtggactgtgatgccaccacagaagttggtctttactggagaggtaataggtcactcctggggcctcttgggtcccccatcgtaacagtccctgggaatgtattattctgcagcaaagaaccacacg

SEQ ID NO: 573498 - DNA, 191 bp, Homo sapiens
aaattcactgggaagaaaccggtaaaatgaagcactgaggaaatgacaagtggttccgtgggggtacccaacacccagcccatcataggagtatgcagagaaccacacctgattgaacttgccacagttaacaattctgcaagaagagaaattaggcgctgtttatttctctaaaggtgtctggatgaaac

SEQ ID NO: 573499 - DNA, 255 bp, Homo sapiens
  misc_feature (79)..(79): n is a, c, g, or t
  misc_feature (92)..(92): n is a, c, g, or t
  misc_feature (127)..(127): n is a, c, g, or t
  misc_feature (216)..(216): n is a, c, g, or t
cattccaccagttggcaacagcagggtgttttttcattttcagcaaatgctcaacattttctctcaaccaagcaccaanaacatcccagggnctctcaacatcatgccattcacccatgcacaaacngttcaacagcaaaggccagtccttcaaccactctcaactcactcattcacaccagccttgtgcccaaccactatgccgtggcctcactncccctttccagacaccaaggtcagcaagccgcagggggc

SEQ ID NO: 573500 - DNA, 416 bp, Homo sapiens
tggcggtgtgtctattcctatcaagaactgctattccatttgtagtcccgcagggctgccagcatcagtctcacttgccagctatgttcagggccttcccaccaggaaatctttcccatagccagtttctgtctctcttactgagaaacagaacagttcttcctagcattttgtgccttggaattgccatccataaaccaagaagctcttgtttggtcagttgaaagttgtttatttggcactgtagaatccagcagtttctcacacagttccagagtcagtcctaggggaaaagaaattctctgcatgccttgagtagcatgatcctctataaaccatttccattgtgtcatggaactcttctgggcactgccatccccattagaatgttcctctgacatcatctgagacagcat

SEQ ID NO: 573501 - DNA, 277 bp, Homo sapiens
ttttcctttccctttcccccaagggggtcctaaaggttccttccccaggggggttttttttgatttttggggggggcaagcctttttgataaaccggttagcccccggccttttccagggttttttttccaatgggaaaattagggggggaaaggggggggggggctgttaaattgtaagctcccgggggcagagtttttgttccctttttgccccctgttattttttcattgtggggcccccgggggcggcccaataatttttgaatggcccccca

SEQ ID NO: 573502 - DNA, 1013 bp, Homo sapiens
ggcggggtctgggcagcggcggccgtggtggagggctatgctggcgggggatgacggggcaggcccctcctcctttgtccgccctgccctcccattggtcctagctggggtgtgccgtgggtgcgtgacaccgggctgcggtggccgtgagcatctgctggctcagtgctgcgtggaaagcggtgcgctgtgccagctggtggtgggtgcccttggtcctggcgggcggagctctgaattgcatgcccaacgccctgtggctgctgtacggggtgcccaatgtgacctgggcccttgaagtggcatgcagctgttgtgatggccacttatcccttggcacggcacacacgtggaacccgtggtggttcaacccctgggaaaggattaggcctttgtggtgtgcggctaggccttgtggccatggggccgcgaaaatgggaaacccctgtgcgggtcgtttggctggcacgcaacatgcgcccgggtggttcaattacattatggggccatatgggcaaagggtggaaaggccactgggtaccgaaccattacacttttgagctgttaaacactggcgcacctgagggtgacatttactttaaggacttgataggatgtacccggggcgcgctttaaaacgctggcgcgaaagacgcccgagttacactatacacgttggggccgtttggtgtaagcacgaaagaaattatcctttaccgatgttacccggggggaacatttctcgtggggcgttagcgtattaaagcccccctccagtccgggtgaccaaaactttttaatgttttggggcccgccgttttacggaaatagttttatcccaagagaatacgggggcgcatttaaagttttaccgtgtggacatgtgagcagtgtgccgcgccgcaccaagagaaggcgccccgacacagactggtgctgacacagcgtgtgaaaacctcgtggacacccacagccctgtatggggatctgtattgggtcgacatttccagaag

SEQ ID NO: 573503 - DNA, 330 bp, Homo sapiens
agtctgaggatccccttccccacatgaggtactttggaatatttagatgaagggaactcttggaataatccagcctttattttaaaaagtttatttccagttgctgcttaatgtatgtccagtggatgtgaaagtgtggaatggttggatacatgtcgcaggtagagtcctatgttttcatggtttggtaaagggatttcccagtgtattgctggttcattggcacatttatttccttgatgtcacttcactgttttggtttttggggttggttttggagacagagtctcactctgttgtccaggctggagtacagtggcaggatctcgg

SEQ ID NO: 573504 - DNA, 419 bp, Homo sapiens
actcatagtgcagtgccccataacagagttatcaaatcttccctccaatcctctgtgacgttgatatttatttcacttatccatatgctataatcaaccaatacattgttgctattgttactttaaacagttatctttgggctgggcatggtgctcatgcctgtaatcccagcactttgggatgccgaggcgggcggaccatctgaggtcaggagtttgagaccagcctgaccaacatggagaaaccccgtctctactaaaaatacaaaattagctgggcgtggtggtggcaacctgtaatctcagctatttgggaggctgaggcaggagaattgcttgaacctggtagatggaagttgcagtgagcagatattgcgtatcgcattccaggctgggcaacaagagcaaaactctgtctc

SEQ ID NO: 573505 - DNA, 128 bp, Homo sapiens
gcttgtggggaacttggtctgttcagcccaagaggaatcgaacagatcaaaagcagtttgggaaggccagtaaccgatcagggatggagggagaagtgacaatccaggggtcgggggctgtttggcat

SEQ ID NO: 573506 - DNA, 384 bp, Homo sapiens
tggacgatcgtgagctcctctgatggacacaagtattgatttcaatacccaacatgcacgattggctccgcaatccttgttcaacaacagggtttccaaccaggtctctcagccaacttcagttcagcagattccaatccctatttatgcaccactgcaagggcagcatcaagcccaactgagttggggggctggcccctgctgtttcccaggctcaggaatggttcagctcctcacttcaaccatatagatctcagccagcttttatgcaaagcagtttatcccagccatctgtggtcctttctggtactgctattcacaactttccaactgtccaacaccaagaacttgccaaggcacaatccggtcttgcctttcagcaaa

SEQ ID NO: 573507 - DNA, 687 bp, Homo sapiens
ggtcaagaccgtgggaaccttcagagatgaatttggatcccttccaggagttgtatttgggaaccagtagtgtggacgaattgcgagagaagcttagtgaatccgtgggattcccttggatgatattgaatttgctaagggtagaggaaccgttccccgtgatatttctgtccctgatattcatccagatttagactggaatcctaaagtttctaccctgaatgtctggcctctttatatctgtgatgatggtccggtcatattttatagggattaacccgaagaattaatggaattgaccgatgagccaagaaatgaactgatgaaaaaagaaacccgtcgactcccgaagacctggacactcgtgtaacatactcccctcgtaaagagaaagcccttaaaatatatctggatggaccccccaataaagatctgactcacagactgactctgatagtgtacccttttcccctcgggggaattttggttttaattagatggttcacctacccctgggtagtgcccttttggcccggacctggttggggtaaccccagtgacccccgccctgattggactgccctacccccatccagaagctccagtgccccatgggcccctgttttgactcggaatcatgttgtgccctatagtccaatgtactgtaaagtgaaaagggatgtgcca

SEQ ID NO: 573508 - DNA, 181 bp, Homo sapiens
tggttcgaggttaacgtacaaatccttaatccatcttgaatggattcagtaggagggggtaaggaagggatccagtttcagctttctgcatatggctagccagttttcccagcaccatttattaaatagggaatcctttccccatggctagtattactcaggtttgtcaaagatcagatag

SEQ ID NO: 573509 - DNA, 285 bp, Homo sapiens
  misc_feature (214)..(214): n is a, c, g, or t
  misc_feature (231)..(231): n is a, c, g, or t
tgttctggtcacacttaaaaatatcaagcctctgaaagaacaaacagtttttggagtaacttaactttgccccagaataaggcttaaaaatatttaaagaaatacaaataaacaaacaaaaagaaccagcacccaaaaatgtaaagttcatgtctagtaacaatcaaaaatcatctagcagacaaagaagcaggaaaacatacccccacccccngcagaaaagtcactttntcagaaacagactcagacatgagagatgacagacttagtacacagcgatcttta

SEQ ID NO: 573510 - DNA, 457 bp, Homo sapiens
  misc_feature (1)..(1): n is a, c, g, or t
ntgtgaccacacacacattacatgtgtatacacaccaccacttatacataccacatccacacatacacgcacatgtgcatgcatgcatatacactcttcgtgtgcgcgcacacacacacagattcagtatagaaaagaggaaggcaaaggctaaatatacagtgtgagaaaagagggcaggtgatggacacgagttatgaaagggatcataatcatttttagttctaactgtgtcatggatttttaatttttggtgatagataagtacataaaattatattcatcaattacagtgtaaaatccagtgtgaagctctacagcttcagaataggtaagtctaaatgcataggagtgtgttgaggtgtctagacttcgggtcggcttcatttttggtgtgatttttttttttaaataaatattaaagctataaaaatactccagctgtaaagaaaaaaaa

SEQ ID NO: 573511 - DNA, 134 bp, Homo sapiens
atggaatcggttccaaagagcggtttactgctgtgaagggatcgcagctttgaatttcaacgctctggttctcagtcctcgggcacctgtgcgtgaatcgctgccgcaaggctgggccaagttaaggccccacg

SEQ ID NO: 573512 - DNA, 374 bp, Homo sapiens
ctggtcgatcttgaggatcccccttatgttctgacccaccacaactctttctgttcccgtatgcttcagtcttgctggttgtcatcccagttttctggagcccctcaactctaatcataccttggtctttgcacagtgcttctatctggaacactcttcagcccagatattggcatgggctcctcctccacctccttcaggtctttgctcaaaagtcagaagagcctgggtgcggtggctcacagattctttcccctgggagtctggaagttgctgatttaatgcggatgcctgcttcaatccttgccctctggagtctgttctccaccaggcagccagaggcagcttctgaaccaaagtcacatcatgttgtt

SEQ ID NO: 573513 - DNA, 826 bp, Homo sapiens
ggctcagtctagcgtccgtgtgtctctgtgagcatcttagacagagtgctcatgatagttagggatatagtgcatcggactggcagcctgaattggtggagaccgcagtcagtaacttgagtgatatatggaatattaagaggacagtaacccatggccctacgccccgtacctgatcacatcgtgccctgctgggctttaccccaaacagcccacctatccatctaggcctggccatggccctgtgccatgccacatagaggattaagtcaggatatcttgagccctctcaaatcccatgttatattcaggcctctgcccaatatagagccagacttctgtccccaacacttccactaccatggagcccagattagtaaaacgctctctgggcccagcgttcgccagaaaagacaccaggggagcaaggctcaaaccaggggcagctaaatctgatcttgtggaccagtctctagtacgggctttcagcgtggctgtctgttcattgctttccacacataggatgcagcaatgatggtacatgggtatcacgatcggcgtaggggctagtccaagtctagcactagccacaactggaagagcctcttgaagtactgagagatcccagagggatagtcagcatccaggcagaacatcctgattatcaactttctgagtccaaacactagacccagagggtgccagaacgcacagcgtagagggaaaaccccaaagtgtggacgaacacaacacacagaaaggggacggagcacgaaggatggcgaagcggccccggaggcacaactggcccgtctcgagcaacaga

SEQ ID NO: 573514 - DNA, 123 bp, Homo sapiens
tacctgtcggtcatctgcaggcgtctgtacaaagtgccctaggcatgcatcacgccggtcacgcaggagcggtctaccattaagtctggataggttgtgatcgtttggcccagactcaatcat

SEQ ID NO: 573515 - DNA, 169 bp, Homo sapiens
ggggataaagaaaactcaatgaattgagaaagtataatttgctcaggagaagtgcattacatgatttctctgagaaagaccaaaaacattccttatgaatagagcccaaagactttgattaaaattgactagaatgagtccactatacttctatttaaaaatgagaagg

SEQ ID NO: 573516 - DNA, 862 bp, Homo sapiens
  misc_feature (27)..(27): n is a, c, g, or t
  misc_feature (90)..(90): n is a, c, g, or t
  misc_feature (259)..(259): n is a, c, g, or t
  misc_feature (272)..(273): n is a, c, g, or t
  misc_feature (285)..(285): n is a, c, g, or t
  misc_feature (289)..(289): n is a, c, g, or t
  misc_feature (317)..(317): n is a, c, g, or t
  misc_feature (375)..(375): n is a, c, g, or t
  misc_feature (389)..(389): n is a, c, g, or t
  misc_feature (409)..(409): n is a, c, g, or t
  misc_feature (413)..(413): n is a, c, g, or t
  misc_feature (430)..(430): n is a, c, g, or t
  misc_feature (448)..(448): n is a, c, g, or t
  misc_feature (470)..(470): n is a, c, g, or t
  misc_feature (476)..(476): n is a, c, g, or t
  misc_feature (503)..(503): n is a, c, g, or t
  misc_feature (507)..(507): n is a, c, g, or t
  misc_feature (584)..(584): n is a, c, g, or t
  misc_feature (591)..(591): n is a, c, g, or t
  misc_feature (606)..(606): n is a, c, g, or t
  misc_feature (642)..(642): n is a, c, g, or t
  misc_feature (660)..(660): n is a, c, g, or t
  misc_feature (667)..(667): n is a, c, g, or t
  misc_feature (742)..(742): n is a, c, g, or t
tatttgtattcgaatcagcaattatantccctgtgattatttgaagagtgtgtagaaagacgtttttccagttcaaaatgccttatacantcgagaggaaaaaaattacacaatttcaggcaggctacgttttcctttgtttcatctgcttcctctctcaccaccccatctccctctcttccccagcaagatgtcaattaagcagtgtgaattctgactgcaataggcaccagtgcccaacacatacagccccaccatnatccccttctcannttataaacctcnaagnggattcactttctgatagttaacccccntaaatgtgcacgtacctgtgtcttatctatattttaacctgggagactgttgtcctgncatggagatgaccntgatgctggggttacctcancatnccccaccctttcaaagntgacatatggccatcccnttgcccagaatccccagacacncctaancctgtggcactgggacagaatagattntccntttgagaggcacttcctgtgtcaatcttgtttgaaggaggtggtgatggtggatagaggtgaaggaggtagggagtnccctccnagtgccaaaattacnaatatgattattgaccatcggggaattctcacacantgatttgttttttaagcnattgccngaaacccccttttttagcttttgcttggggtgggggtaggagttaaggtttattcaatcctgtcctgggtagggngaaagttaatctagcccatgtgatttttcagaaaagtaagtggaacatgctgccccttttcaatttctgtcagtgcttccacatggaaacaaaatgcaataaaatttttccaaaccctta

SEQ ID NO: 573517 - DNA, 363 bp, Homo sapiens
ctctagtagcgggacggagccttgcggccctcgagcatgtacgatacccctcaggaggtgaccgaagctagactgtcttacctgacagagaccatatagtgaggcgatgctgacgatgggcacgggctagaggaacaacagaagcggatcgtactggaccctacaggctccatgaacatttacctgatgctagatggatcagacagcatggcgtccagcaacattacacgagccagaatgggactaggcaactgaattgagaaggtggaatactgctatgcctgaactcgtcagaatggaatctcgctgatgctacaggactagctccctgatcattctagtcactatgaaccagggccatcg

SEQ ID NO: 573518 - DNA, 260 bp, Homo sapiens
  misc_feature (16)..(16): n is a, c, g, or t
  misc_feature (140)..(140): n is a, c, g, or t
tcaagttgtgactctncatgccctgatgtagagttttgttgaaacgtcccagcgaaaaaaagacgcggcgccccttttttagcttttgcttggggtgggggtaggagttaaggtttattcaatcctgtcctgggtagggngaaagttaatctagcccatgtgatttttcagaaaagtaagtggaacatgctgccccttttcaatttctgtcagtgcttccacatggaaacaaaatgcaataaaatttttccaaaccctta

SEQ ID NO: 573519 - DNA, 254 bp, Homo sapiens
ctccagacgatactactattatacccagtagtatctctggaggcgtaacacgttgtacgtcttggtactatatctgtaacatggcaccaaggtatatgcaagctgacagcgccgaagaggcttcattgtgcatattcctacaccgtatataagggtcactttatcagagtttgtacagaaaacatcttgtactgcgtttataataactattcatccatatcccaatgtacagtacacgtatatcacagcacaaa

SEQ ID NO: 573520 - DNA, 175 bp, Homo sapiens
agctcggtacccataaaaagatatcctgaagattactccatatcagtatatagagagcatttattaaaccacatagagtgtccttgttggtagacattcaggatgttttttaactcttaccatcacaaacaaagctgcagtgaatgactctggtctgtgtgtccttttgtacatg

SEQ ID NO: 573521 - DNA, 132 bp, Homo sapiens
agtgcactaggctcatgagtagccggcaccacaggcatgtgctaccagcccagctaattttcttttaatatttttttggtagaaatggggactcaccatgttgcccaggctggtctcagagctccgtgggcc

SEQ ID NO: 573522 - DNA, 621 bp, Homo sapiens
ggtggaagagggtgtattggacatgaaccgctatgagaacctataacgaagtgcattgatccggtcatttctccatgtggggctgaagcagtcggatatttacctacagattggaaaggggtaggccgatgctgatttcagtgcagttgttgcgcgcgttggctgcatgggtggtggtgggtcaccatgtcatgcagctgtttttcaacttcgaggcccacaacgccttcgaggacctgttggtcgaaaagggcggcgccggggtggacgtattcttcgtcatcagtggcttggtgattttcctcgcgagcgccgataaagcgctcacgccctggcgcttcatgctgatgcgcgtggccaggattgctccggcgtactggttctataccgtgcttttggctgtgctggtcacggtcatgccctggatgtttccagacgttcagctagaactgggtcatgcgctcctgtcgatgctctttattcccgcgcaaaacccggcgggctacggcgtgtatccactgctggatgtgggctggacactgaatttcgagatgctgttctactgcctgtttgctgttgcgctgctggtactctctggatcagtcacggatcctctaggtc

SEQ ID NO: 573523 - DNA, 100 bp, Homo sapiens
taactgtaatcacacacatgcatgatacttgtgcataaatgacaaatagatctacggaatagagtagtggatgtccagaaataaacacttgaccaaatat

SEQ ID NO: 573524 - DNA, 717 bp, Homo sapiens
tggactagaaggagaccgtccggcgatctggaggagtgtgggccaagccgttccctttgagggtcatcggcgggctggtcatagctattgcatatattgaacaactaatcttgtaatacgctttgatcctaggcgttccaagaccatccacatcatggctcgaccgaatcgtaatccccgcatgagtgtgaaccgttggtatccgcaatggagccttgttgtgagctttgggtcagtgccaaaacagccatcgatcatgccacaattgacctacacgtgtctctcccaccgggtgctcaacgtcacgtggctgtgcaagggggagcctggtcactgagggtgtcggctgagagcctcttccggcccagaacagattacgagcgttccacgaatgttccagtgtaccatgaccttttgtggcccgtctcgcaagaggacttcatatgactgcgagggtggagcactggggcttgagaccagcgcgctcgctcaatgcactggtgaggcccaagagccaactccagatgcctgagacaacggagactgtgctcggtgccctggggtcgtggtgctgggccatagtcggccaatcatcgagggcaccgtacctcagtcatagaagtctctgggttcgacaggacccccgggccagggggacccgtgaaatactgtaaagggtgaccaactctctgaccagaagaggctgaggagagaccg

SEQ ID NO: 573525 - DNA, 937 bp, Homo sapiens
  misc_feature (755)..(755): n is a, c, g, or t
gttaccaccctgtgccctgtgggactcttgagacaggccaccagacagttggtttctgtctggacacacgtgggggatatgatgtcccgtgtccatggcccacgatggccggacagctcttgatagtcaaggagcactgtgatgccatctatcaaagcgcgtgggaccgttgcggcgattccatcgtgccgacaggaccttcgatcggccatgaatccgactatcaatgcagtgggctttcttccccaacggctacgctttgaccaccggctctgacgacgccacgtgcacgcctcttcgatcctgcgggccgatcaggagctcctcatgtactcccatgacaacatcatctgtggcatcacctctgttgccttctcgcgcagcggagcggctgactgctcgctggcttacgacgactttcaactgcaacatctgggatgccatgaagggcgaccgtgctaggagtcctcgctggccacgacaaccgctgtgtagctgccttcggggtcaccgaacgatggcaatggactgttggcccacgggattcctgggactccttcgctacaagatctggaactagatggccccacccccactgggctccaggtccaggacggggccctagcccatgcccacactacaagtgccatggagcttgctggggactaggcagcaatcccagccccctgtccccgggcacatcggggacccttgggtcacctgccctacccacgcctaggtcttaggattcctcnccggggctcccacagctgtggagataacgaaggggactggaatgggggaagaggaggaagcaggaggccactcatccttctgctgcccatggggttggggcctcacccctctggagggccggaggcaggaaggtagaaaccccaggggctaggctatttataaaactggttttatttaatct

SEQ ID NO: 573526 - DNA, 125 bp, Homo sapiens
gtcaattcggcagctggaggctgacattttggatggtcaatcagatatttaaagattttgccatgatgatccatgaccagggtgatctcattgatagcatagtagccaattctggaaagtcaaag

SEQ ID NO: 573527 - DNA, 150 bp, Homo sapiens
actccacacggaatgacacagaggaatacctctacgtctcaaggactcacctcccagaggacgtcaggattcactcaatgattacttagatgctatcgaacacaatggccactccaggccaggacagcgacctgctctgagaggtccatg

SEQ ID NO: 573528 - DNA, 204 bp, Homo sapiens
  misc_feature (52)..(53): n is a, c, g, or t
cgtggatcggtcaggggatgatctttaccaggcccagggcgcagcacgccgnnctgactgcctgtggatttcatttctgcctttcagtttttacttcttcttcctttggaggcagaaattaggcataagacaatatgaggggtggtctcctcccttaattgtacgaaaaggttctcagggagatgatgaaaccatgtgtacatc

SEQ ID NO: 573529 - DNA, 909 bp, Homo sapiens
ggtccacccgcctcggctcccagggtgctgggattacaggcatgagccactgcgcctggccacactccataaactttacgtgtttgaaatacacgtttactcttagcccaaagcacccaatgacatttcttaccctacctgtttcaccagatttttctgcccctgactctgttctactgtcactctggccaattggaactcttttttttttttggagacagagtctcgctcggtggcccaggcgggagtgcaagggtggtgatttccggcttaggttcaggtgattctcctgcctcggcctcccgagtagctgggaattcacaggcacctgccaccgaccgggctaactttggtagtttgggtagagacagcatctcaccatctgggccaggctgggtctggaactcctgacgtcgatccacccgcctcggccccccaggggctggggattacaggtgtgagccatcgcgtccgggccaattgggaactctttaatgggtattttcacataatagctggtctaaatcttagacaactgaatgactggttagacatcactaaatttaatggggcataaaattctgcggaaacccaggtgctccggtctagtggtacctgggtggtgctgctgctgcgctgctcgcggtgcagcggcggctgagacgggccacaccttctaaataccccaagggctggcctggcagggcacagaccaactggcctcagggacgcccaacttcctggtacaggatattcctctccccacagacaccgtaattcttcactgtcgttttccccacagcccgcaaattaggaatttacaacacaggccctgttctccgcgtcttgaccgggcacacaaccgccaccagagggggaaatgacctgtccgccaccgaaaatgggccg

SEQ ID NO: 573530 - DNA, 788 bp, Homo sapiens
atacaaaaattaaccaagcacggtggtgcacacctgtaatcccagctactcgggtggctgaggcaggagaatcgcttgaactttggaggcagaggttgcagtaagctgagattgtgccactgcactccagcctggctgactgtgtgagactccatctcgaaatacataaaaaaaaaaaaaaaaggataaaaatttccaaaagaccaaaattaaaccaacaaaatttccgggtagaacgatgtaaatataccacaatatctattttttactacgatattctacgatagagatttaactacaattctgggcaagaaaaccaagctttaaataattggacaaaggattattttaaaattaattgggagggaacaaatatgcgaagatggctaatcttttttaaagtggaatcgagagggagactttcttcaccagattttaaaacggaccataaagctataataatcaaaatgggcatgggattgggcacagagttaaatcagcggaaaacttttcgaaactctagaaaattttaccaggtttttgtgggaaaggttagcactgtgttaaaaagtgcgcatttcaatgggggtaacaagaggggtcctaataaggcagagtgggctatcggggtgggagacattaattattctaatactgcttgccaaaataatttccagatgcgtaacagaggtagtaataaatggagtctaatcataaaaagcttggaaacttggtgtgtacctcgggggcgggcagattggaaggggaggctcttaaatttgaaacct

SEQ ID NO: 573531 - DNA, 309 bp, Homo sapiens
  misc_feature (204)..(204): n is a, c, g, or t
  misc_feature (288)..(288): n is a, c, g, or t
ctaaaggtcggatgcggtggctcacacctgtaatcccagcactttgggaggcccaggcaggcggatcacttgaggttaggagttcaagaccagcctggccaacatggtgaaactccgtctctactaaaaatacaaaagttagccgggtgtggtggtgcatgcctgtaatcccagcttcttgggaggccaaggcacaagaatcgnttgaaccaggagacggaggtttcagtgaatgaagatcgtgccattgtattccatcctcggcaacacagcaggactgtgattttntttggagactcctagattttc

SEQ ID NO: 573532 - DNA, 818 bp, Homo sapiens
gcccagtgaccaatgcactcccaccgcctaccttagcacatgtgtctctgcagtgactgcgggagccagtgctcctgccgcccctcttgcccctcagaccttgcatccacatgaagcacaacccatgccaaacaccacatgccttctccatgagcctggcactgtccctggcaaccatgggtgtgccccaagtgcatagctcattctacgctctgtgtggcactcactgtgactcccccttgtgccaactccttgtggcacttttgtgtcccactgtcgctgatgccacttgacgcacgtgccatgtctactctttcttaatattagtgccagacaaatgtcgtatttatacaacacaaacttatctccattgtgttttgtaacgtgtacttatatactatctactaagcaccacacgttgccttgacgtgcacgcaaaccggcaggcggcacgattgtgcattacccactgtgtctgccaatgcccccctagattgtgcttgcaatcccgtaaaatcccatccgacttggcgtcacatgcatatgcattgctcatctttgaccagcactggcacacatcatgtgcgacaggacagtcagctacatcatcctatccatatcttcgcattcattacgagaccattcttgtcaacacaaccccagatcacttccaggcagtgactaacgagtgtagtcgcacacaggcgacattgtcaccctataccatcccgactacaatgtgtcccactagtgccactgcgacttgttaacctcctcgtattccatctacacggtcgttgcacagctacaggtgctgc

SEQ ID NO: 573533 - DNA, 609 bp, Homo sapiens
tgagagagggaatgaggccacttgagagttgtgtgtgtttacaattttctggccaggcacggtggctcatgcctgtaatcccagcactttgggaggccaaggcgggcggatcacttgagctcaggagttcgagaccaaattgggcaacatggtgaaaccctatctctacgaaaaatacaaaaattagctgagtgccgtggctcgcgcctgtcctcccagctacttggggggctgaggcagtaggatcgctcaagcccaggaggtggaggttgcagtgagccaagagcctgtctctccaaaacctacaaaatttagccaagcttggtggtgtgagcctgtagtcccagctacttgggagacacacgctggagggatctctcgagcacaggaggcagaagatgactaaataaatggaagcacctgaatgggatgaggtctctcttgaaggagagagcaaaagagatttacatagtaacaattataataaggctggggctgtggatcacgcttgtaaatcccagcccttgggaggccaggcaggaggatagctaagctcaatacacttccctacctgtccctctcatttacagcaccagcacatatgggtct

SEQ ID NO: 573534 - DNA, 277 bp, Homo sapiens
aaaaaggggggtttttttaaaaaagggttttgggaagggtttccaaggacccccgggttttttcttaaggttatgggggaaacaagcttggcccctgggggccggggcaaataggtttccccccaaaagaccccggcccccatgttttttaactttttgggcccctttgaaaccttggctttttttttttaaaggggtttggaaaccccctttttttttccaaaaggtcccctgctttgtaaaaaaaaaaaaggcctttttaaaatttggttgttta

SEQ ID NO: 573535 - DNA, 244 bp, Homo sapiens
gtacccggatgacacttacgaatcagggagagatgaaagagtctagcaaattatttctagcataatcactcagtttaatcttcatgactcagtccttgtagtataagttccaaataaaaaagaaaaagtgctggtcaaccgattactgtttacccatttttcaaggttttaacttatgggaagccaggtgaaaaaaagagcctagcttttttgactacccattgccggctgggatacctagtgg

SEQ ID NO: 573536 - DNA, 162 bp, Homo sapiens
  misc_feature (52)..(52): n is a, c, g, or t
  misc_feature (61)..(61): n is a, c, g, or t
gattcaacccctagcttatgctgtccacatgccacacaagcagccataaaangagaaaaanaaaaagagaaggacatgaatgagggcagggagtcaaggtgtataaagagagtaaggaaggtaggtaggtagcaaagagggaagacagaaaaacagagaggt

SEQ ID NO: 573537 - DNA, 606 bp, Homo sapiens
  misc_feature (313)..(313): n is a, c, g, or t
  misc_feature (318)..(319): n is a, c, g, or t
  misc_feature (324)..(324): n is a, c, g, or t
  misc_feature (330)..(330): n is a, c, g, or t
  misc_feature (398)..(398): n is a, c, g, or t
  misc_feature (401)..(402): n is a, c, g, or t
  misc_feature (430)..(430): n is a, c, g, or t
  misc_feature (435)..(435): n is a, c, g, or t
  misc_feature (459)..(459): n is a, c, g, or t
  misc_feature (476)..(476): n is a, c, g, or t
  misc_feature (525)..(525): n is a, c, g, or t
gtcagcgttcacattcctcaggaactctccttctctggtccacggaacttaacccgatgcaggcatggaggcctctgctctcacctcatcagcagtgaccagttgtgtccaaagtggtcaggtgtggcctctggtctctgccgtagtttttgcccctggtccaggattgcctacagttgtgattggaaggagttgtgttccatggcggctgtgcccatggtgctcagtgccatgggcttcactgcggcgggaatcgcctcgtcctccatagcagccaagatgatgtccgcggcggccattgccaatggggctngagtnnccggncagctntggctactcgcagtcacgggagcacggactctccggatgaccaagttcatccgggctccatgggtcgncanngcggcgtcatgcgaggttctactagctncctgnccctcgccctgagagaagagaacnatgccaggggagaaggnacccagccatcgtgacccagcgaggagccaactatcccaaatatacctngggtgaaatataccaaattctggatctccagaggaaactaagaaataaagatgaattgttgcaactcgaaagccccaagcg

SEQ ID NO: 573538 - DNA, 858 bp, Homo sapiens
  misc_feature (627)..(627): n is a, c, g, or t
  misc_feature (830)..(830): n is a, c, g, or t
ggccaggcgtggtgatgggtgcctgtggtcccagctgctcgggaggctgaggcaggagaatggtgtgaacccgggaggcggagcttgtagtgggccgagatcgcaccactgcaccactccggcctgggcgacagagggagactccatctcaaaaaaaaaaaaaaagaagtttgaattttagccgggaaattagaccctcttctttctcagtgcgatttaggacgtgtggttttaagaaaactgtgcaacttacagaagtttacacagttaagaagggcagagtctcggtgcctcctaccagtgacttacctgtggtgttggtagcattaattggccttcttttccccaattcagaattacggcgtagtagaagtcgctaaggggatattaatctattggcaggcacaggaattttccccttgccatttaagagaagggcagggaacaatttattccttttttcctctcttctttttaggaggggcaagaggtttcccttctgtgttcaccccagggcaggagagttgcagggcgcattgactctcggcgatttaccttggggaaccttcttgcccttccccggggggtttcaaagcggaatctcctcaatggttctcggcgccatcncttgaagttgcgctttgtcgacttgcgcagcgcgttgttgtgcgcccaacaggtggccgtgggcttacaattgggcggtacattcgcacacgggggcgcgcgaaccggcgcgtcgtccggccatttgttttcgccccagggctgggggtcttggagacctctacagggcctccagggggtgactcccggtttggcctctcagngcctccccgggggttgcctggggactcc

SEQ ID NO: 573539 - DNA, 906 bp, Homo sapiens
catcttacagatgctaattcattgatgtaaaagatactcaatggtaggcctgtggacccattcaatatgttttggtacctttctgtaactttcgtatatccatatataatatagatttacccaaatctatctttcttaaaattgcatattatcggtcttcatgaacatgtcctttccacaattccggtttcaacacatttggtccgctctctttctacagaagtaggcctggacatcatttacacattattctgccagttcttacttatccactgtgtcccagagtctttactcctaaatatcttcctgttctgccagcgctttagatttccatgtgttctattaaaagagtaggaacatactcctccatgccagacatctgcttatgtataagcattgactcatctttcccccttatgtaatcacatgctatctccttccggtcacgtccgctgtacggcttcaagaacaaaaagcatatttactgtttctccctaaaaacttgtgggaaaactcaattctatattactctatggagtattgtcaccacaatggattgtatcctttaacttctgaatccctggtataacagtacgttacacccccttaaattcctttccattacctctgcctgccctgctcggtcaaggcgctgcggcaactaatccctggatcaattttgacaaaggcttctcttcttccacttccaccactgtccgtcgcatttgccggcccaatctttcgaacccacggccaaacacgaattctccttcattacccaatcacacaacactcctctctgtgggatccctctcagctccacaatcaccaatacaacgcgcgcggaccccataactctcgcccccctctccaacaccgtgcgggcctcgcccacacaacactcta

SEQ ID NO: 573540 - DNA, 802 bp, Homo sapiens
  misc_feature (374)..(374): n is a, c, g, or t
agcggtgtgatgatcacgcttggcacctttagtatagggccatggtgacgcaattcacagtaagtatgatccgaggtgcctgtgtcacgtgtatcattactcaaatgaggtcgggcggtggtcgtttcagactgtgccggtacgcatgcggcagacctctggcatggactggcacgtgccacgtgacgcgtagtcacttggaagtggctctaccacgagttacacgagtcgcagggctcgtaggcatgctgttcattctactcactctcgctctggtactgggaagggcactatggttagaccacctctatcaaggaaagcacctagcctagatgcagtagcatgagagttggatgtgacacgtagaagctgantgggcaatagagtcgagctgcaggtatcctcgatggagaggctacaattcgcgttgtacccatggttgtgaacgatgaggcatgaaattgtgaacttgactaggtgctagcaggcgcatgaacaccgttatagcgagatgggtgagtgaggccgggatacttagtcccgtgtcgctgagaaaggcagtcgacattgctgataggatcgcgcagacggatgttggcagaagcgtgtgatggaccagagcaagaatcacctctagtggtgctgtgttgggcatgaacgcgcctaccagcctgtcccagttcccactttggcgagtttggataacaggtgtggcagtggaactgactagcaactacctttcgtacctccttccatggccagcaatacttttgcccaccaacgatgtagccactgtactggg

SEQ ID NO: 573541 - DNA, 316 bp, Homo sapiens
  misc_feature (29)..(29): n is a, c, g, or t
  misc_feature (47)..(47): n is a, c, g, or t
attataaagtaacacattttccattggcnaaaaatttagaacacagnaaaatacaaacaagaaaactgaaactaatataaacatgtattttattcttctttaaaattgtactgcagttttgggggatgtattattttcagaaagatatatcatcaactgaatttgttgggtgaaaggcaacataagtatttcatatttggcttttatgatgctatgtagattgaagaatttttttgtatataatgaatgctaagccttcatgtttatattcagatattcattttgcaatgaataaaacagacaaatccctgccttc

SEQ ID NO: 573542 - DNA, 1103 bp, Homo sapiens
gcactcctggaagatggctaggagttccccagttatgacgaaggcagtggccatggttgagcaacaatgagtgttgtgaaacatcagtcagattgataaaatctagatgagtccggatgcggtggccagattgcctgtatttcccagacatttaaggagtaaggcttgagagccaggttgaatcacctgaggtcgggagttacaacgaccaggcttgggtcaatcaataggttgagagactcccggtcctgctatctagaaacatcagcagaaaacttatgccatgggctatgtgtggtctgagcgccgtgtagattccatgcctatactcatgaaaggcttgagagcatagggaggaacttcgctgtgagaactccatgggatgctgggaggtagcgagattggagcttgcaagcaatccaagtgctcaacatgcaagctcccgagccgtgtgagccggaagaagcgagccggtaggcaattccagatcgttcagaatagagacatgtaacatattcagaggacatatataccttcgtttgtcatatcgttccaattcagcgtcgattcagacaactttataaatttagtgatacagagcattattattgttccctggtctttgacttagtaagatcctagtattaggaatgtgtagaattattggatttagacaaagtattttacaagttaagccggttgcagtgaaagaagggtttgggtatgaataaggcacgacattggaagttgcttaacatggaaaagatacaaaaatcagtgtctctttcggcattgagtaaaccttaaagaaggcaatttgcaggctctggagttcccagtggcaggtgcatagccagctgtaattgctcccttggcaccttaaacgggaagttggtcttggttttgtgaggacaaatttagaattgtttaaagaaggcggttgagaaacatacgaagcaaggcccataataggcacgcattaagtattaaattttcaataggaaaaaaggagttaaaagcggagaaattatgtattggagacaagaggaaccccaaggaaaatgaaaagtggcctaaatgaggccaattcggtgtacgtgccg

SEQ ID NO: 573543 - DNA, 506 bp, Homo sapiens
cgacgacgtgagtgagaaggctataacgtttagtgacgggagagactttggtatatgattgagatgggggctagttatatgtcatgtgagacagaacgcaggccggatgtcagaggggtgccttgggtaacctctgggactcagaagtgaaagggggctattcctacgttttattgctatagccattactgacttattaatgactgacgtacttgacttggtacgtacttggttatggttccttgtccggacgacgtactacttgttgaacgacggactagctacttacgaacggactatggatgcggttgcttgcgtgaccggacactacttgactggccgcttctgtaggaaccgcgggtttcttttttattggttacaccctggaataaaacgctagcctgtttactttctacggcctacctcaggtaaaaacatcacgtgcgacgcttacgcgcctgtgaccgagaccctgccttgcgggggactcctctacgacgtcgacc

SEQ ID NO: 573544 - DNA, 409 bp, Homo sapiens
  misc_feature (31)..(31): n is a, c, g, or t
  misc_feature (401)..(401): n is a, c, g, or t
gatgagggatatacccacagtgaccctgaanacttgctggcttccccatcttctgtgaagagctatgacccagctattcctcaatgagctctggaaaatgaatgccctggttttcttttattattattattatttttttatttttttgacacagggtttcgctcttgcctaggctggagtgcaggggcataatcttggctcaccgcagcctcgacctcccgggctcaagccatcctcccacctcagcctcatcagtagctgtggactacaggtgcacaccaccacacaggccaatttttgtatttctttgtagaggcagtttcactcaggctggtcaggaactcctgagctcaagtgatcctcccacatcagcctcccaaagtgctggtgttacactggtncctggtat

SEQ ID NO: 573545 - DNA, 288 bp, Homo sapiens
cttagggataagtgaggtggactcactcctgattttacctgatgtctgtatttggcttccatataaaatgtcacttgaagaaaggattccgagcctcaaataaaaagcggaaaatccctgaactgggtttcttggtctgcatagcgagaggctaaccgtactcgcccccgtcaggcattgtgaggatcatggcgtagcaagccgaggaagctgcagcctgtggttgactggagcagtcaactggcttcacagatattagccattattatgaggctgtcgatgctggag

SEQ ID NO: 573546 - DNA, 740 bp, Homo sapiens
gaaataattcacttatctccaaaatagaatcctatatgccaataagtgagttattgatctgactagtagtatgtcttgctgttcaaaatagacacttatccttgtctgtgactaaatgccttgaaaagaatgaacaatatagaaaattcctcagacctacaagaattttccaccatgcagagaatatcactttattttagatttaacaactagtcacaggaattatagcatagggcagttgggttgttaagatctaatttatggcgtacatgtcggttgtatccagtgggaccaaacctgaacggaaatgaaatctcatcctattctttactatcaagagaatgaaatgatgctagaatgaagtgagtttgggttgtaatctgaatctatggatgtcacacaatacattatgtatagtgtgattttacagatatgctaaaaacgtcagagtgagtacacaacatgtgtatatttgaaaaactatacacactattgtatgatacacaatgctgtcagaaactattggtgcgtgtagggatgatctggtgcagctgaatagtaagtactttttaaaagttaggattatcattttcctatttaatgatatcgtgtatttatatacagaccactgatagataagcgcagggattctaaaagatcctggtatacaaaattaagaactctgctctaattggaaaccaaatgagattaaattgccagaaaagtcaggcaaattaatt

SEQ ID NO: 573547 - DNA, 456 bp, Homo sapiens
  misc_feature (42)..(42): n is a, c, g, or t
  misc_feature (49)..(49): n is a, c, g, or t
  misc_feature (51)..(52): n is a, c, g, or t
  misc_feature (120)..(120): n is a, c, g, or t
  misc_feature (313)..(313): n is a, c, g, or t
  misc_feature (336)..(336): n is a, c, g, or t
  misc_feature (352)..(352): n is a, c, g, or t
  misc_feature (417)..(417): n is a, c, g, or t
  misc_feature (435)..(435): n is a, c, g, or t
  misc_feature (453)..(453): n is a, c, g, or t
gcaatggcggcgctgacgagagctgcatttggaagtgttgtngagacantnncgtagcccaatgcgaccagactcagggaaaacatcaggcccctccagctgagccttgtgtgagcccgnccctccctaaatgccagacttgggagctgacagacagcactgcctgtgctgggtttaaaagtcctggtcagctgagtggaaatagaaggatttctgctgccatcatcttccatgggctttccaggtcacacgacctacaagtaggggaccagggaaaagaagagttaagcctgcatgccaattctaaagctcntcaggatcaaaatgtcgttcggncctgtccagaaatggnaagcctgttgaaggcaccttgcaaagaacaaaagtgacttgtgttccaagccccgtgttgggaanttcctgaggcaaagaganccccagccccgggttggnccg

SEQ ID NO: 573548 - DNA, 747 bp, Homo sapiens
tcatcgaagcgggatcggcccaaaatggaagtggaactacccttgagtgacttccgcaccgaagcaagactcgcgaaaggcatatcaatgcaccgtttccacatgcgaaggaagataatgtcttgcacctactatctaaaccacgctgagaccgaagtacaaggtgcgatccatgcccatccgacacaggatgcatgacagtacaggttgtgcgtggcacagtagaacggtcagcaatatggcgacgtagtcccaggtttacatgggaagaaatatgttgtctacatttgaacggtttgcccgtgggaacgggggtctaagtggcacaacgggtccatgggtaggcattgtctaccccgatgcagaggttgggtctctcactaaggctgtaatactctggacaaggcgaccgcctgaaacggatcctcggaacggaagagtcctcaatctcgccaaggtaggatcatggaccaagggcgaatacgaggagaggaaacctattgagaaagatgccggaagtaaaggactagtctgatatacagatgctttgatttacacttggaagctatagaactatgaaagcacaaccacaacacccaacaaaccatgtcggccgactcggcccggtcgactctaaactacatgaatgcgtgtcacggcgtcttgtaacagattgaaggcaaccggggtaccactttatcacctaaggatacccattactggttatgataggcgaagaaccccaca

SEQ ID NO: 573549 - DNA, 146 bp, Homo sapiens
aacaaggaggctcccaggcctctatcacaggccccacatcagagatatcagacgctcaaatgaggcagggcaaggtgcgcacccaggactccccgtcccctgcacactggggcttctcctctgcaagcagctgagagtcacacgca

SEQ ID NO: 573550 - DNA, 113 bp, Homo sapiens
tcaacgatacacagaagcaaaggtgtagtcctaatgtgccaaaggcatggtccttgggctctgggtctctcatccttgtgtgctgctctgctcaagagatgtccaaggcggag

SEQ ID NO: 573551 - DNA, 454 bp, Homo sapiens
aatgcgagcttcaactggaagccagtggagagagcggaggagcggggtgacgtgagagaacttgggaaggttgaacaccagacgggctgcggcgttctggatgagttgtaggggtttaatggcacaggcagggagcccagccatcagcgagttgcggtaatcaagacgggagatgacaagtgcctggattaggacctgcgccgcttcctgtgtgaggcagggtcgtactctgcggatgttgtagagcatgaacctacaggaacgggacgccgccttgatgttagttgagaacgtcagggtgttgtccaggatcacgccaaggttcttagcgctctgggaggaggacacaatggagttgtcaaccgtgatggcgagatcatggaacgggcagtccttccccgggaggaagaggagctccgtcttgctgaggttcagcttgaggtggtgtcgacgc

SEQ ID NO: 573552 - DNA, 969 bp, Homo sapiens
  misc_feature (1)..(1): n is a, c, g, or t
  misc_feature (21)..(22): n is a, c, g, or t
  misc_feature (60)..(60): n is a, c, g, or t
  misc_feature (88)..(88): n is a, c, g, or t
  misc_feature (100)..(100): n is a, c, g, or t
ncccttccccccccctctttnnggggcactcaggcgcgggcgcccccactctcccgcgcncccacccccactgcaaccttccgcccanaaagagacaccngagtctttcgctttctttctcttctataggagggatcagacattatcatttcctatattcattaccttgttatcgggaggcgcgatcgcaagcgctgtgtttaatgagtgggctgtgtggttactgtctatcttgatatcctctgcagacgtgctttatgcgcgcactgaagagaacatgaggaagtagaagaaaaaatagtatttgagggcaatatcttgtattatactatcgagtcttttccgatagtgagaagagtgcagagtatgaaccaggcaagacctactcccacaacattcgtctttatgtattgagatagagtcagcacctccggcgatcccacaacggaaacaccaaaaacaactacgaggacgcaaggcccacctcaacgaatattaatatccaattatgtgtaacaatactccgccaccacacaaccaacgcctcactctcaacatatataaagtaaagtattagcacctcgacaccgatcccccccatcttttataatctcgctcccacccctcctatcggttgagcttgtgaacatcgaactatttattgttgagctgcgctaagacaacagaacgtacactccacagtgatgctcagctcgagtggctaaatgtaaagatgagtaccattattacacaaagtaattaaatgtattcactgcgtgaactatatagtgtttattgcaatattacagacggaggtgaaggatgctacggaattcatgatatagtaaagatatatattatcaaatatcaattattatagaactacaatgcgagaatgataatagaacggacaatagaatgtagtagcgtgtgtttagttggatatacaagttgtaaagctcgaaagac

SEQ ID NO: 573553 - DNA, 351 bp, Homo sapiens
  misc_feature (16)..(16): n is a, c, g, or t
  misc_feature (21)..(21): n is a, c, g, or t
  misc_feature (81)..(81): n is a, c, g, or t
  misc_feature (112)..(112): n is a, c, g, or t
  misc_feature (187)..(187): n is a, c, g, or t
  misc_feature (189)..(189): n is a, c, g, or t
  misc_feature (225)..(225): n is a, c, g, or t
  misc_feature (228)..(228): n is a, c, g, or t
  misc_feature (267)..(267): n is a, c, g, or t
  misc_feature (276)..(276): n is a, c, g, or t
  misc_feature (278)..(278): n is a, c, g, or t
  misc_feature (299)..(299): n is a, c, g, or t
acccacacccacccangaacngggtttgttaaagatgcagagcccggtaatcgcataaaacttaaaactttacgagtcagnggttcaattcctcttcttaacaacatacccntggccaacctcctactcctcattgtacccattctaatcgcaatggcattcctaatgcttaccgaacgaaaaattntnggctatatacaactacgcaaaggccccaacgttgtnggnctacgggctactacaaccctttcggacgccataaaactnttcaccaangngcccctaaaacccgccacatntaccatcaccctctacatcaccgccccgaccttagctctcaccatcgctcta

SEQ ID NO: 573554 - DNA, 468 bp, Homo sapiens
gcctactactactaaattctcccccgatcgacggaagatctgcgacacacacagggtgtcgtgggcatgacaggtctcggccagccgccgatagccgtcgatgcaggcatcgtcggtggccatcagcacatgggaggtataacgcgcactgtcgtgaacgcccgccacctgcaacacgatcaggccgacaccgccctcggcgggcccggtgataggcgatcaactgttcgttgaccaggttgtcggtgggcatggaggtgtcgtgtccgctggacatgatgcggttcttcaggcgcttgcacgcagctgcaagggttcgaacaaatgatgagaggcgtgcggcgacgtcgacatggcaaggcttccaggcggcccgggatcgaacgcgggctgttgttattattgttccatgaaaatttacctatagtaaaaaatcaacttgtttttttactttgccttgagttagct

SEQ ID NO: 573555 - DNA, 1651 bp, Homo sapiens
  misc_feature (1)..(1): n is a, c, g, or t
  misc_feature (114)..(114): n is a, c, g, or t
  misc_feature (782)..(782): n is a, c, g, or t
nacaataatattgctggctcgtttttgtagtgtggtggctcaccctcctcctgtactatgtagccattttgtgtggtgtctctgtgctcgtactcactcgtgccactcccgcgnggtgttattataaagggtcctactcgtgtggagagggacgttgtcccgtgacctctcccttgtggtgatattgtaaagaaaaaatgtttgtaaggctctcatcactagagagacctctcacaggtgagcaccgcatgtctttgttgtccgctccgtccttgtaagagacaacatccttttacatgctccctcggggtggtgatatgatactcttcgcaagaaaagtggttttttattcccctcttcctccttccgcgatattgatggaatcccctggggcccaaaaggcgcgccaataagtttgagggaacactccgtcttttccgccgcgtgtattccccaggcctcttaagggggctccccgtgggcatttccagtctttattttattggagggaaattaatgaggctattatccatttcaaagggacccctttctacggaggaaaaccattcgctccccttgggggaagttttatctttccgtggtctttgaaaaattgtttatacccccagccttgggaaacacactgttttttgtaaaagcttttgtcttaccactgtggttggcgacactattttggggcaaaagtgtgttttttcgcccaatatttgggacatttgtgaaaaagagtggcgttttcttctcgggaagattttagagattgnaaatttgtgttccggcccacactctgggcgcgttttaaaccccgcggtttctccctctcacagagaggtgtaaagatcacacaaatctcgtgtctccacatagccacccaagagatggatttagaaatcccaggagatctctgttagccaggagaaatctcttgtgaaaatagaccctcacgagagatatctctctcaagagagcgcccctgtctgcgacgccaccccactcccatcagagagagagatctccattctcgccacgagagttctccgtttaagagaagagaacactctcaccgtgtgaataaaacactgtgtgagagaaatctcagagtgtgtgtgaagacgttttaacacctcaataatgcccacaagagactcccactgccgcccggggaacacaccccagtgttgtttctcgcaccagagcccccagggaatctcacacaaagacctcccggggttggatataagagccaacgtgctgtgccagcacagccggcgcacatcacacaaaaccgcacaataccagaatagagaaagagccgcgccggtgtctccagagccacagaaagaccctgtggttaaagttaagagaaagaggaaagaaagagctcgctcgttggtggtttaagaaagaccagaagaagacctctctggtggggaaaaaaggccagccagcttaccccagaaacccagcccctggaaaagaaagacctcgccagaagaaagaaaacacttactacagaagagagaaagaaagacctcgctgccataaaacattttaaaattgattattccctaaaggtccaatcaatttggacaagacttcttttgaataaagagccctgattaaaaccggccca

SEQ ID NO: 573556 - DNA, 712 bp, Homo sapiens
ttgctaggtacgatggctgggttttgaaagaaatccagaaggacttcctgctgctgcggtacgaggtggtgatcatcgacgaggcccacgagaggagcgtgtacactggacatcctcatcggcctcctgtcccgcattgtgactctccgtggctaagagtgaacctgccactcaagctgctcatcatgtctggccacgctgcgggtggatggacttcacccatgaacccacggctcttctgccaagcctgccgcctggtcatcaatggtgtgaatccatgtgcatgttcccatgtgactagtgcatttcaacaagctggacaccgctggaagactacatgtggctgatgtgcttccggaaggtctgcaagatccacctggatgcttgcccgcaggtgtgcatacctgtgtgttcctgactggtggcagtgctgagtgtgcatagcgcttgtgcctgccagtgctcatgtgaatgtgctttcccaccctaccagagcccggccacaagaaaaggacgactgatcagaaagactcggtgtgcaggaaatgcggaagtttaagaagtcacaggtgccagggccaaccaaggcgcggtgctgagtgtgctgccccagatcaacttggatcactctactcggtgtaaccggcaggcgaaggcgatgagtgacagtgaaggcaagaagtggcatgacggaacgaggggggccctggga

SEQ ID NO: 573557 - DNA, 417 bp, Homo sapiens
caaccaagtgaagattaaaagaagctttgacagaaacattcagaataacacccgaatgcgaatccagaaaaaagcgctactgggggacaatagtcttagcacaatgttctaaaaaatgctcataaggaagggttggggcattaaccctttagacacaagctctaagaactctggatccaacgggcacttgaatagctacaagatcatgggcctgctgggccagatgtaccgagggcgagaccggaaagcagcctgtcttgcaccattgcaactaactggctataatctacggcaagagtccatcagctccgtcacaagagtactctcccaatgtgttatagttatccttaacgctcttcaattcaaggaagtgcttgccacgtatactcttctgactggagggcaggtatgtcacct

SEQ ID NO: 573558 - DNA, 330 bp, Homo sapiens
ccgcaaccctccccttcagctttacggcggccagtgctgaatggccctgtggccctccctgggccttttggtcttggccagagaagacagaaggacccggcttgggcttctgcatgtcctacccctgaccccagcctcaaggggcccctcgtaggccctttatggggggtttggggctcagcccagctttcatcatggatgtaagctgctgtctttgccacgtgactttgagtggatgttctgggggatggcccttgttgggaggaggtcagatgccgcccgcctgctcccggcagaagggtggtattaatatgtcataggatggctaaa

SEQ ID NO: 573559 - DNA, 235 bp, Homo sapiens
ggaaacaacatgacaaaatttacaacgcaaaaagtaaatgaattactttgggtcaatgagtcgtttaaagttccagataaattaatgtcaatcatgatgaatcgtgaacaacgtgagcaaacgtttaaagcatttcaggaagttgagcgttatacatcattcgattggttccatgaatattttgaagacgaacaagctaacgaagacaaccaaacaagatttcacaccagaagtc

SEQ ID NO: 573560 - DNA, 129 bp, Homo sapiens
tcgtttactaaatcaattagccaggcatgtggcgggtgccgtaatcccagctgcttgagaggctgaagcaggagaatctgcttgaacccaggaggcagaggttgtggtgaggcgagattgtgccattgc

SEQ ID NO: 573561 - DNA, 826 bp, Homo sapiens
actgcttaatgtccctgtgtggggaatccacgaatttactcgccatcaggcctactcccgatccttacatatggcctcctctagcttcttgcctgccacccagctcgatcatctttgctccacttggccttatacctgtcatatccatgatgcggaggatagtgggagagtctgtgtaactatctttctcagaccaaattattccaactcttctgcatgcaatcaggatttaataatgagcagttagtatgtaggctgcactgtgaggcgggaatgacttccgacttcaggccagaattcactgtgtgccattgttgcacagagaggcgtttcagtatttctactacagcctgtgtgtgttgtgaagcattcgctggtttctggcagatgccattggctcatcttggtgcacgtgcagctgtagaattggttatttcgctgagtgtatccacgtcaacgtctctgaaatactggtgacttaactttttcccaaccccaatgagaaaatgctgtttcactttctatgaccagttaaaagaaacatggatgcacagatgttcaagccacaggtcaatcgcgaggcaacgaggtagaaataagatgcggccccggcaccaatggggcaacagaagaagatgggttccttacaagagagcccgcgctgtgcagtggtacgttgcagacttacctgggtacggaggagggtagaaaccgtttgacttggttatttcaggcggtcacctgtcttccggacttcatgcaacgaacgatatccagacgttttcccactgccactgaaaagtcgcgcctatactgatttgatcca

SEQ ID NO: 573562 - DNA, 466 bp, Homo sapiens
gtcgttacggacgctgtcgaggtgagatagtgcgatgacctcgggaggaattgtgttgagggtcaacgtcgctcagatgcaacgtacgtaaggttggggaagtgggtgaggaaacctggcgctccccgggtagtggggtaaccctttagcgtcaaactggacgtgtgatcgaagtttgcattgagtacaggccgttcgccgtgaatggggtagccaaggttcagtgtgcgtccgattgcgtggtcagtatcgatcggcgtttcatgacgccagccgcggagcagttcttgtgtccatatccagcggtgcagttccgcttcggcgaccgtggaagggggcagcggggcatcggtgttgagagaggcctgcaagagggtcgagcgccaggccatcagatcggttttgagtcgtaaaagctcgtttttcaggtagcggagcgtctgtaagggagtggcgtccgtagcgg

SEQ ID NO: 573563 - DNA, 165 bp, Homo sapiens
tgacattaaagagacatttataatgtactgaaaaaagacacaggaaccaacattgtgtgtccactctgtacctctctcaccgccccattagtgtcccattagctgtttccctgctaagggctggtgcatctggccaggcctagctttggatttggccaacaatgt

SEQ ID NO: 573564 - DNA, 104 bp, Homo sapiens
  misc_feature (12)..(12): n is a, c, g, or t
  misc_feature (63)..(63): n is a, c, g, or t
agcttacagagnaaggaggtgggagagacctggccaggtgagcttgggtgttgcccccaggtnaatcttcctcctctcctctctctgtccctttacctttgatc

SEQ ID NO: 573565 - DNA, 1341 bp, Homo sapiens
  misc_feature (537)..(537): n is a, c, g, or t
  misc_feature (545)..(545): n is a, c, g, or t
  misc_feature (548)..(548): n is a, c, g, or t
  misc_feature (553)..(553): n is a, c, g, or t
  misc_feature (555)..(555): n is a, c, g, or t
  misc_feature (566)..(566): n is a, c, g, or t
  misc_feature (596)..(596): n is a, c, g, or t
  misc_feature (624)..(624): n is a, c, g, or t
  misc_feature (893)..(893): n is a, c, g, or t
  misc_feature (899)..(899): n is a, c, g, or t
  misc_feature (923)..(923): n is a, c, g, or t
  misc_feature (1188)..(1188): n is a, c, g, or t
  misc_feature (1190)..(1190): n is a, c, g, or t
  misc_feature (1194)..(1194): n is a, c, g, or t
  misc_feature (1196)..(1197): n is a, c, g, or t
gaggtcagtctcgctatattgcccaggctggtcttgaatgcctgggctcaagcaatcctcccaccttggccacctgaatagctgggactacaggcatgtgccactatgcccagctaattttttgtatttttagtagagatgaggcaatatttttaatatagctaatgcatgatgttaaaaactttgcatatggaaaagatgcattcaaaatagaagacagatcaatgaattttagtgtagtcattttaagtttagtgacatagtttcagtttccacattgcaactatacactgtggagttttagcatagtatctaagaatgaatatccacagttctgaacaggttattttagcactcttttccagcaatatatctctgagaggccatactttcttcacgtatgtcaaacaaataacatattgcaacataattgttcttcagacttgttttttagcagcagacacatttccaaatgtaatcttactctgaatctgagcttcattatacaatacagacaaaagtgagcttttccagttnaagtaggngtntgatntnaaacacacccntggccccaacaaaacaaataaaactcccantcttattttaagagcttgttgaagaganttattaagtaacgccgcccttcctttcggccggaaccgccatcttccagtaattcgccaaaatgacgaacacaaagggaaagaggagaggcacccgatatatgttctctaggccttttagaaaacatggagttgttcctttggccacatatatgcgaatctataagaaaggtgatattgtagacatcaagggaatgggtactgttcaaaaaggaatgccccacaagtgttaccatggcaaaactggaagagtctacaatgttaccaagncatgcntgttggccattggtgtgtcaaacnaacacacagttaagggcaagattcttgccaagagaattaatgtgcgtattgagcacattaagcactctaagagccgagatagcttcctgaaacgtgtgaaggaaaatgatcagaaaaagaaagaagccaaagagaaaggtacctgggttcaactaaagcgccagcctgctccacccagagaagcacactttgtgagaaccaatgggaaggagcctgagctgctggaacctattccctatgaattcatggcataataggtgttaananaagnannttgaggacctcgtggctcacatggatatgcagttgctgatgattcctcggatcattgtcggggggtgggaggactaggggccagctgagcggacaggtgattgtgtctcccggcccggactcgtgtcacgggcggtattgccgg

SEQ ID NO: 573566 - DNA, 1254 bp, Homo sapiens
  misc_feature (537)..(537): n is a, c, g, or t
  misc_feature (545)..(545): n is a, c, g, or t
  misc_feature (548)..(548): n is a, c, g, or t
  misc_feature (553)..(553): n is a, c, g, or t
  misc_feature (555)..(555): n is a, c, g, or t
  misc_feature (566)..(566): n is a, c, g, or t
  misc_feature (596)..(596): n is a, c, g, or t
  misc_feature (624)..(624): n is a, c, g, or t
  misc_feature (936)..(936): n is a, c, g, or t
  misc_feature (940)..(941): n is a, c, g, or t
  misc_feature (950)..(951): n is a, c, g, or t
  misc_feature (956)..(956): n is a, c, g, or t
  misc_feature (1092)..(1092): n is a, c, g, or t
  misc_feature (1095)..(1095): n is a, c, g, or t
  misc_feature (1104)..(1104): n is a, c, g, or t
  misc_feature (1120)..(1120): n is a, c, g, or t
  misc_feature (1132)..(1132): n is a, c, g, or t
  misc_feature (1144)..(1145): n is a, c, g, or t
  misc_feature (1149)..(1149): n is a, c, g, or t
  misc_feature (1156)..(1157): n is a, c, g, or t
  misc_feature (1161)..(1162): n is a, c, g, or t
  misc_feature (1176)..(1176): n is a, c, g, or t
  misc_feature (1188)..(1188): n is a, c, g, or t
  misc_feature (1209)..(1210): n is a, c, g, or t
  misc_feature (1215)..(1215): n is a, c, g, or t
  misc_feature (1221)..(1222): n is a, c, g, or t
  misc_feature (1228)..(1228): n is a, c, g, or t
  misc_feature (1232)..(1232): n is a, c, g, or t
  misc_feature (1234)..(1234): n is a, c, g, or t
  misc_feature (1237)..(1237): n is a, c, g, or t
  misc_feature (1244)..(1244): n is a, c, g, or t
gaggtcagtctcgctatattgcccaggctggtcttgaatgcctgggctcaagcaatcctcccaccttggccacctgaatagctgggactacaggcatgtgccactatgcccagctaattttttgtatttttagtagagatgaggcaatatttttaatatagctaatgcatgatgttaaaaactttgcatatggaaaagatgcattcaaaatagaagacagatcaatgaattttagtgtagtcattttaagtttagtgacatagtttcagtttccacattgcaactatacactgtggagttttagcatagtatctaagaatgaatatccacagttctgaacaggttattttagcactcttttccagcaatatatctctgagaggccatactttcttcacgtatgtcaaacaaataacatattgcaacataattgttcttcagacttgttttttagcagcagacacatttccaaatgtaatcttactctgaatctgagcttcattatacaatacagacaaaagtgagcttttccagttnaagtaggngtntgatntnaaacacacccntggccccaacaaaacaaataaaactcccantcttattttaagagcttgttgaagaganttattaagtaacgccgcccttcctttcggccggaaccgccatcttccagtaattcgccaaaatgacgaacacaaagggaaagaggagaggcacccgatatatgttctctaggccttttagaaaacatggagttgttcctttggccacatatatgcgaatctataagaaaggtgatattgtagacatcaagggaatgggtactgttcaaaaaggaatgccccacaagtgttaccatggcaaaactggaagagtctacaatgttacccagcatgctgttggcattgttgtaaacaaacaagttaagggcaagantctnnccaagaganntaatngtgcgtattgagcacattaagcactctaagagccgagatagcttcctgaaacgtgtgaaggaaaatgatcaaaaaaaaaaaaaaaaaaaaaaaaaaaaaaaaaaaaaaaaaattgtgggcgcgcggccttgggccncgngaaaaaggnttttcaaaaccactcncggtggggcggngggggccccagnnaggntataggnngacnnggggccaaaagcgnggtcccaaaganaacacccggggcaaggcaacnnagggngctggnnttctcncacnantanaaaaaanggcgcggggg

SEQ ID NO: 573567 - DNA, 1412 bp, Homo sapiens
  misc_feature (537)..(537): n is a, c, g, or t
  misc_feature (545)..(545): n is a, c, g, or t
  misc_feature (548)..(548): n is a, c, g, or t
  misc_feature (553)..(553): n is a, c, g, or t
  misc_feature (555)..(555): n is a, c, g, or t
  misc_feature (566)..(566): n is a, c, g, or t
  misc_feature (596)..(596): n is a, c, g, or t
  misc_feature (624)..(624): n is a, c, g, or t
gaggtcagtctcgctatattgcccaggctggtcttgaatgcctgggctcaagcaatcctcccaccttggccacctgaatagctgggactacaggcatgtgccactatgcccagctaattttttgtatttttagtagagatgaggcaatatttttaatatagctaatgcatgatgttaaaaactttgcatatggaaaagatgcattcaaaatagaagacagatcaatgaattttagtgtagtcattttaagtttagtgacatagtttcagtttccacattgcaactatacactgtggagttttagcatagtatctaagaatgaatatccacagttctgaacaggttattttagcactcttttccagcaatatatctctgagaggccatactttcttcacgtatgtcaaacaaataacatattgcaacataattgttcttcagacttgttttttagcagcagacacatttccaaatgtaatcttactctgaatctgagcttcattatacaatacagacaaaagtgagcttttccagttnaagtaggngtntgatntnaaacacacccntggccccaacaaaacaaataaaactcccantcttattttaagagcttgttgaagaganttattaagtaacgccgcccttcctttcggccggaaccgccatcttccagtaattcgccaaaatgacgaacacaaagggaaagaggagaggcacccgatatatgttctctaggccttttagaaaacatgggaatgggtactgttcaaaaaggaatgccccacaagtgttaccatggcaaaactggaagagtctacaatgttacccagcatgctgttggcattgttgtaaacaaacaagttaagggcaagattcttgccaagagaattaatgtgcgtattgagcacattaagcactctaagagccgagatagcttcctgaaaaaaaaaaaaaaaaaaggacatgcgcgcaattttagatctcactggcacaatgccctctatagagaggcgtatcacaatccagtggccggtgttacacaacgttgagagtgaaaaaaccgtggcgtcccaaatctaaatcgtcttgcaacatatccctttttcgacatgtggtattatagaaaagaggcccgcacatatcgcttttcacaacatgtgcacactctgtgtggagaatgaaaattgtacgctaaaatattgttgaaaaatccggggaaaattttgtgaaaaagagctcattttatccccaatgggccgaactcggaatctcctttatattcaaaaaaataccccgatatggggtagagtggttccccattttggcacaagaccccctttaaaagaagcgggtctcccacgagggagccgtctatggggagaggccctcctcgagcccatcccctatgtttt

SEQ ID NO: 573568 - DNA, 1854 bp, Homo sapiens
  misc_feature (1854)..(1854): n is a, c, g, or t
cgtcacgggagcgccggcggctgagaatccgcgttgttccgtgttgggggcggcatggagcgggagccgggcgccgcgggagttcgccgggctctgggccgccggctggaggcggtgctggcgagccgcagtgaggccaacgccgtgttcgacatcctggccgtgctgcagtctgaggaccaggaggagatccaggaagcagtccgcacgtgcagccgtcttttcggggccttgctggagcggggagagctgtttgtgggccagctgccctctgaggagatggtcatgacagggtcccagggagccacacggaagtacaaggtgtggatgagacaccgctatcacagctgctgcaatcgcttgggagagctcctgggccacccctcctttcaggtcaaggagctggccctcagcgcactcctgaagttcgtgcagctggaaggagcgcaccccctggagaagtccaagtgggaaggcaactacctgttcccccgagagctcttcaagttggtggtgggaggcctgctgtctcctgaggaggaccagagcctgctcctgtcccagttccgggagtacctggactacgacgacacccgctaccacaccatgcaggcagccgtggatgccgtggcccgggtcactggccagcaccccgaggtgccccccgccttttggaacaatgccttcacgctgctgtctgccgtgagcctgccccgccgggagcccaccgtctccagcttctatgtgaagcgggcggagctgtgggacacctggaaggttgctcacctgaaggagcacaggagggttttccaggccatgtggctcagcttcctcaagcacaagctgcccctcagcctctacaagaaggtgctgctgattgtgcatgacgccatcctgccgcagctggcgcagcccacgctcatgatcgacttcctcacccgcgcctgcgacctcgggggggccctcagcctcttggccttgaacgggctgttcatcttgattcacaaacacaacctggagtaccctgacttctaccggaagctctacggcctcttggacccctctgtctttcacgtcaagtaccgcgcccgcttcttccacctggctgacctcttcctgtcctcctcccacctccccgcctacctggtggccgccttcgccaagcggctggcccgcctggccctgacggctccccctgaggccctgctcatggtcctgcctttcatctgtaacctgctgcgccggcaccctgcctgccgggtcctcgtgcaccgtccacacggccctgagttggacgccgacccctacgaccctggagaggaggacccagcccagagccgggccttggagagctccctgtgggagcttcaggccctccagcgccactaccaccctgaggtgtccaaagccgccagcgtcatcaaccaggccctgtccatgcctgaggtcagcatcgcgccactgctggagctcacggcctacgagatctttgagcgggacctgaagaagaaggggcccgagccggtgccactggagtttatcccagcccagggcctgctgggacggccgggtgaactctgtgcccagcacttcacgctcagctgaccctggcccacctgtgaataaatctcagctgaccccaaaaaaaaaacaaaaaaaaaaaaaaaaaaaaaacaaaaacacccccgggggcgctctaatgcgggggcgcggaaaacaagaggagaagcacgagaaggcgcactggtgtcaacaggggtccctgacccacgttctgtgtacaacgtggaaaacacggggaccccaaaggagaggcgaataaccgaaaacccggtaccccgtatgcgcctgagn

SEQ ID NO: 573569 - DNA, 759 bp, Homo sapiens
  misc_feature (4)..(4): n is a, c, g, or t
  misc_feature (8)..(8): n is a, c, g, or t
  misc_feature (26)..(26): n is a, c, g, or t
  misc_feature (32)..(32): n is a, c, g, or t
  misc_feature (644)..(644): n is a, c, g, or t
  misc_feature (659)..(659): n is a, c, g, or t
  misc_feature (661)..(662): n is a, c, g, or t
  misc_feature (664)..(664): n is a, c, g, or t
  misc_feature (674)..(674): n is a, c, g, or t
  misc_feature (678)..(678): n is a, c, g, or t
  misc_feature (685)..(685): n is a, c, g, or t
  misc_feature (688)..(688): n is a, c, g, or t
  misc_feature (691)..(691): n is a, c, g, or t
  misc_feature (699)..(699): n is a, c, g, or t
  misc_feature (703)..(704): n is a, c, g, or t
  misc_feature (706)..(706): n is a, c, g, or t
  misc_feature (710)..(710): n is a, c, g, or t
  misc_feature (712)..(712): n is a, c, g, or t
  misc_feature (715)..(715): n is a, c, g, or t
  misc_feature (726)..(728): n is a, c, g, or t
aggnaacntaggctaggtacgaggcnggggtntaatcggccgaggccagtaattcgccaaaatgacgaacacaaagggaaagaggagaggcacccgatatatgttctctaggccttttagaaaacatggagttgttcctttggccacatatatgcgaatctataagaaaggtgatattgtagacatcaagggaatgggtactgttcaaaaaggaatgccccacaagtgttaccatggcaaaactggaagagtctacaatgttacccagcatgctgttggcattgttgtaaacaaacaagttaagggcaagattcttgccaagagaattaatgtgcgtattgagcacattaagcactctaagagccgagatagcttcctgaaacgtgtgaaggaaaatgatcagaaaaagaaagaagccaaagagaaaggtacctgggttcaactaaagcgccagcctgctccacccagagaagcacactttgtgagaaccaatgggaaggagcctgagctgctggaacctattccctatgaattcatggcataataggtgttaaaaaaaaaaataaaggacctctgggctacaaaaataaaaaaaaaaaaaaaaaaaaccccggggatttttttgggggggggaaaaaggggtntggaaagggccgggntnnanggtttccggncccnatttttnggnacnaggggganaatnngngggncnccntaagggggggnnnaattgaaaaagccggggttaacctgtttatg

SEQ ID NO: 573570 - DNA, 903 bp, Homo sapiens
  misc_feature (129)..(129): n is a, c, g, or t
  misc_feature (141)..(141): n is a, c, g, or t
  misc_feature (171)..(171): n is a, c, g, or t
ggcaaatgttttataataaggtgttagggggaatgttaaaaatgttaattagtcctggtggaatatgccattggcgagttccttaaaaaacgggggaaccttccttcctttctctttccccccctctcnctctttctctcnttccgcgggcggaattcgggcacgagcggnacggccatcttccagtaattcgccaaaatgacgaacacaaagggaaagaggagaggcacccgatatatgttctctaggccttttagaaaacatggagttgttcctttggccacatatatgcgaatctataagaaaggtgatattgtagacatcaagggaatgggtactgttcaaaaaggaatgccccacaagtgttaccatggcaaaactggaagagtctacaatgttacccagcatgctgttggcattgttgtaaacaaacaagttaagggcaagattcttgccaagagaattaatgtgcgtattgagcacattaagcactctaagagccgagatagcttcctgaaacgtgtgaaggaaaatgatcagaaaaagaaagaagccaaagagaaaggtacctgggttcaactaaagcgccagcctgctccacccagagaagcacactttgtgagaaccaatgggaaggagcctgagctgctggaacctattccctatgaattcatggcataataggtgttaaaaaaaaaaaaaaaaaaaacaaaaaaaaaaaaaaaacaaaaaaacaaaccaaaagaagcaaaacaagaatcaaaacaaagaagaagaaacacaaagaggaaaaacaaaacgggaaaggaaccatgaacacagcacggaaaccaagaccgctatgaattcactgcgcactaagcagactgtgagaaaaccacacacaatgaagaaaacgactcg

SEQ ID NO: 573571 - DNA, 153 bp, Homo sapiens
cgaatcaacttccttaccaaccttcctgtctcaacctcccaaagagctatagattacaggcttgagccaccacccccagccctcgacttgtaaagacagattcaacttatattccactatatgttgactttaatttgcttgtatatagttggc

SEQ ID NO: 573572 - DNA, 2009 bp, Homo sapiens
  misc_feature (1681)..(1682): n is a, c, g, or t
  misc_feature (1684)..(1684): n is a, c, g, or t
cgtcacgggagcgccggcggctgagaatccgcgttgttccgtgttgggggcggcatggagcgggagccgggcgccgcgggagttcgccgggctctgggccgccggctggaggcggtgctggcgagccgcagtgaggccaacgccgtgttcgacatcctggccgtgctgcagtctgaggaccaggaggagatccaggaagcagtccgcacgtgcagccgtcttttcggggccttgctggagcggggagagctgtttgtgggccagctgccctctgaggagatggtcatgacagggtcccagggagccacacggaagtacaaggtgtggatgagacaccgctatcacagctgctgcaatcgcttgggagagctcctgggccacccctcctttcaggtcaaggagctggccctcagcgcactcctgaagttcgtgcagctggaaggagcgcaccccctggagaagtccaagtgggaaggcaactacctgttcccccgagagctcttcaagttggtggtgggaggcctgctgtctcctgaggaggaccagagcctgctcctgtcccagttccgggagtacctggactacgacgacacccgctaccacaccatgcaggcagccgtggatgccgtggcccgggtcactggccagcaccccgaggtgccccccgccttttggaacaatgccttcacgctgctgtctgccgtgagcctgccccgccgggagcccaccgtctccagcttctatgtgaagcgggcggagctgtgggacacctggaaggttgctcacctgaaggagcacaggagggttttccaggccatgtggctcagcttcctcaagcacaagctgcccctcagcctctacaagaaggtgctgctgattgtgcatgacgccatcctgccgcagctggcgcagcccacgctcatgatcgacttcctcacccgcgcctgcgacctcgggggggccctcagcctcttggccttgaacgggctgttcatcttgattcacaaacacaacctggagtaccctgacttctaccggaagctctacggcctcttggacccctctgtctttcacgtcaagtaccgcgcccgcttcttccacctggctgacctcttcctgtcctcctcccacctccccgcctacctggtggccgccttcgccaagcggctggcccgcctggccctgacggctccccctgaggccctgctcatggtcctgcctttcatctgtaacctgctgcgccggcaccctgcctgccgggtcctcgtgcaccgtccacacggccctgagttggacgccgacccctacgaccctggagaggaggacccagcccagagccgggccttggagagctccctgtgggagcttcaggccctccagcgccactaccaccctgaggtgtccaaagccgccagcgtcatcaaccaggccctgtccatgcctgaggtcagcatcgcgccactgctggagctcacggcctacgagatctttgagcgggacctgaagaagaaggggcccgagccggtgccactggagtttatcccagcccagggcctgctgggacggccgggtgaactctgtgcccagcacttcacgctcagctgaccctggcccacctgtgaataaatttcagctgaccccagcccacctgtgaataaatgtttttgcaggaaaaaaaaannanaaaaaaaaaaaaaaaaaaaaaaaaaaaaaaaacaccaacaagaaaaaacaaaaaaagggggggggggcccctaatatattcccccgcgggggggccagacagattgacggccccccccgacttttttagtgagcaacgagggggcccccaatgagagggggaccttattataaaaacatcgacagcaggggcgcgcgcgtttaaaaccagcactgctgtggtgagggacaacagaccggacgtggtgggggactctgtggcggacagccacacccccctgcacggggggggggggcaaaaactaggtgggaccacacactcaccg

SEQ ID NO: 573573 - DNA, 631 bp, Homo sapiens
ggacgcgtgggtcgacggacgcgtgggtcgacccacgcgtccgcgccatcttccagtaattcgccaaaatgacgaacacaaagggaaagaggagaggcacccgatatatgttctctaggccttttagaaaacatggagttgttcctttggccacatatatgcgaatctataagaaaggtgatattgtagacatcaagggaatgggtactgttcaaaaaggaatgccccacaagtgttaccatggcaaaactggaagagtctacaatgttacccagcatgctgttggcattgttgtaaacaaacaagttaagggcaagattcttgccaagagaattaatgtgcgtattgagcacattaagcactctaagagccgagatagcttcctgaaacgtgtgaaggaaaatgatcagaaaaagaaagaagccaaagagaaaggtacctgggttcaactaaagcgccagcctgctccacccagagaagcacactttgtgagaaccaatgggaaggagcctgagctgctggaacctattccctatgaattcatggcataataggtgttaaaaagaaaggtacctgggttcaactaaagcgccagcctgctccagccagagaagcacactttgtgagaaac

SEQ ID NO: 573574 - DNA, 576 bp, Homo sapiens
  misc_feature (21)..(21): n is a, c, g, or t
  misc_feature (27)..(27): n is a, c, g, or t
  misc_feature (37)..(37): n is a, c, g, or t
  misc_feature (44)..(44): n is a, c, g, or t
  misc_feature (52)..(52): n is a, c, g, or t
  misc_feature (90)..(90): n is a, c, g, or t
  misc_feature (115)..(116): n is a, c, g, or t
  misc_feature (119)..(119): n is a, c, g, or t
  misc_feature (134)..(134): n is a, c, g, or t
  misc_feature (146)..(146): n is a, c, g, or t
  misc_feature (217)..(217): n is a, c, g, or t
  misc_feature (264)..(264): n is a, c, g, or t
  misc_feature (357)..(357): n is a, c, g, or t
  misc_feature (369)..(369): n is a, c, g, or t
  misc_feature (397)..(397): n is a, c, g, or t
  misc_feature (405)..(405): n is a, c, g, or t
  misc_feature (408)..(408): n is a, c, g, or t
  misc_feature (410)..(410): n is a, c, g, or t
  misc_feature (413)..(413): n is a, c, g, or t
  misc_feature (430)..(430): n is a, c, g, or t
  misc_feature (433)..(433): n is a, c, g, or t
  misc_feature (437)..(437): n is a, c, g, or t
  misc_feature (447)..(447): n is a, c, g, or t
  misc_feature (450)..(450): n is a, c, g, or t
  misc_feature (453)..(454): n is a, c, g, or t
  misc_feature (457)..(457): n is a, c, g, or t
  misc_feature (461)..(461): n is a, c, g, or t
  misc_feature (464)..(464): n is a, c, g, or t
  misc_feature (473)..(473): n is a, c, g, or t
  misc_feature (475)..(475): n is a, c, g, or t
  misc_feature (482)..(482): n is a, c, g, or t
  misc_feature (485)..(486): n is a, c, g, or t
  misc_feature (488)..(488): n is a, c, g, or t
  misc_feature (499)..(500): n is a, c, g, or t
  misc_feature (506)..(506): n is a, c, g, or t
  misc_feature (508)..(508): n is a, c, g, or t
  misc_feature (522)..(522): n is a, c, g, or t
  misc_feature (529)..(529): n is a, c, g, or t
  misc_feature (531)..(531): n is a, c, g, or t
cttaccttccagcaacgccanactgtntaacaatttnactgtgnaaataaangcaacagaaataaaattcattaatgtccttaacctgtnctcttactgtgagcattatataganntcngatacaagatatatnaatcatagtatnggccttcatacatgtcaatgttacttacttcatatatggtttttaataagccttaacctaatttctatttnattcaagatcttcaattaagacctaagtgaggcttgaagctttcaanattatttctgttattaaaattctatccccatcccttcctacccgcatttctccaaactaaaaaggtatcactcaattctgagtttttgttttntttttttggagncgtattctcgctctgtggcccaggatgnagtgcagnggnanaanctcagctcacggcaagntcngccnccgggttcanggnatnntcntgcntcnacctgcccngnagttggnacnnanagacacagtcnngcacgntngactaatttggtantttaagnanagacggggtccacggtgttagccaggatggtcttatctcctgacc

SEQ ID NO: 573575 - DNA, 1672 bp, Homo sapiens
cgtcacgggagcgccggcggctgagaatccgcgttgttccgtgttgggggcggcatggagcgggagccgggcgccgcgggagttcgccgggctctgggccgccggctggaggcggtgctggcgagccgcagtgaggccaacgccgtgttcgacatcctggccgtgctgcagtctgaggaccaggaggagatccaggaagcagtccgcacgtgcagccgtcttttcggggccttgctggagcggggagagctgtttgtgggccagctgccctctgaggagatggtcatgacagggtcccagggagccacacggaagtacaaggtgtggatgagacaccgctatcacagctgctgcaatcgcttgggagagctcctgggccacccctcctttcaggtcaaggagctggccctcagcgcactcctgaagttcgtgcagctggaaggagcgcaccccctggagaagtccaagtgggaaggcaactacctgttcccccgagagctcttcaagttggtggtgggaggcctgctgtctcctgaggaggaccagagcctgctcctgtcccagttccgggagtacctggactacgacgacacccgctaccacaccatgcaggcagccgtggatgccgtggcccgggtcactggccagcaccccgaggtgccccccgccttttggaacaatgccttcacgctgctgtctgccgtgagcctgccccgccgggagcccaccgtctccagcttctatgtgaagcgggcggagctgtgggacacctggaaggttgctcacctgaaggagcacaggagggttttccaggccatgtggctcagcttcctcaagcacaagctgcccctcagcctctacaagaaggtgctgctgattgtgcatgacgccatcctgccgcagctggcgcagcccacgctcatgatcgacttcctcacccgcgcctgcgacctcgggggggccctcagcctcttggccttgaacgggctgttcatcttgattcacaaacacaacctggagtaccctgacttctaccggaagctctacggcctcttggacccctctgtctttcacgtcaagtaccgcgcccgcttcttccacctggctgacctcttcctgtcctcctcccacctccccgcctacctggtggccgccttcgccaagcggctggcccgcctggccctgacggctccccctgaggccctgctcatggtcctgcctttcatctgtaacctgctgcgccggcaccctgcctgccgggtcctcgtgcaccgtccacacggccctgagttggacgccgacccctacgaccctggagaggaggacccagcccagagccgggccttggagagctccctgtgggagcttcaggccctccagcgccactaccaccctgaggtgtccaaagccgccagcgtcatcaaccaggccctgtccatgcctgaggtcagcatcgcgccactgctggagctcacggcctacgagatctttgagcgggacctgaagaagaaggggcccgagccggtgccactggagtttatcccagcccagggcctgctgggacggccgggtgaactctgtgcccagcacttcacgctcagctgaccctggcccacctgtgaataaatttcagctgaccccagcccacctgtgaataaatgtttttgcagga

SEQ ID NO: 573576 - DNA, 463 bp, Homo sapiens
  misc_feature (3)..(3): n is a, c, g, or t
  misc_feature (6)..(6): n is a, c, g, or t
  misc_feature (433)..(433): n is a, c, g, or t
gcngcngcctactactactaattcgcggccggtcgggaatgggtactgttcaaaaaggaatgccccacaagtgttaccatggcaaaactggaagagtctacaatgttacccagcatgctgttggcattgttgtaaacaaacaagttaagggcaagattcttgccaagagaattaatgtgcgtattgagcacattaagcactctaagagccgagatagcttcctgaaacgtgtgaaggaaaatgatcagaaaaagaaagaagccaaagagaaaggtacctgggttcaactaaagcgccagcctgctccacccagagaagcacactttgtgagaaccaatgggaaggagcctgagctgctggaacctattccctatgaattcatggcataataggtgttaaaaaaaaaaataaaggacctctgggcacacattanggaggggatccttctagagtcgccccgcct

SEQ ID NO: 573577 - DNA, 983 bp, Homo sapiens
atgcaactaacacttgcctccccactgcagcctgcggtcctgcccacctcccgtgatgtgtgtgtgtgtgtgtgtgtgtgtgactgtgtgtgtttgctaactgtggtctttgtggctacttgtgtgtggatggtattgtgtttgttagtgaactgtggactcgctttcccaggcagggcgctgagccacatggccatctgctcctccctgcccctgtggccctccatcaccttctgctcctaggaggctgcttgttgcccgagaccagccccctcccctgatttagggatgcgtagcggtaagagcacgggcagtggtcttcagtcgctcttggagaccctgggcaaggttctgccagcactttgctcaatcattcttcatggactccttatacactcccttctaacaaaacacctttgccttccttatcccacctgatcccagtctgaccggctctcttacgcaaactggacgactacacagcacggcacgctggtgagcccagcgttgacgtcacgcaggctactgccccttccgccgctcaactctcttcccaggggcttccaccgagcgcgtccccatctgccccgccccttcacagagcgcccggaggataccacggcccagggcttctactctgcccctggacgcaattgtgtcccctgcatatcttctcagccataactccatgggctctgggaccctaccccttccaacattccctgcatcctgagcacttcaaatcatacacaccacaagctacatccaagatgccagaactaacagccccccagccaacatcgacaccatcagggccacgacaaacaatcagaaagcgacacccagcaacacccatgagggaccaacacaaccggcgaaatgaaaacaccagcacccaagggaccttgacaacatcggacctacgcccccaataaaaagcgccaaaaacaaaccccgacacctgccccacgccaaaggccaaa

SEQ ID NO: 573578 - DNA, 1652 bp, Homo sapiens
gtgaggttgtgatctgccctacgtactgctttgttgatgcatacaggctacggcttcgtgcttagtcatcacctgacgaagttattacacaactagtgtgtggggttgttgtttgcttcttttccccgtcttgcggtcccaaggtgatgcgtgtcgtctgttctatccaccacaccgtctgtgtgtgtgtggtgtgcctctctctgttgctttcccacactttagttgatcgtctcaccacccgcgggatgttatataacgattcattggtgctagtagatctgcctcccacagaaagtttcttttgagggagtcactctcctctttttccctggggggacaccaacatttgggggggcctctcacaatagctgcccaaaagagaatggtgttctccttctcaacgaagagatattgttgttttctcttcgctgggggagaacaagtaagtttgtacgctgtgggtgtaccgcagcgaccaacactagtggggcgccccccctcccccttctgtggtgtaacagccacaccctcggggcgtatttatcaacctgcgtcttatccaacggtgggtggattttattttcctcgttgggagaccgctttctctcctcgggtgcccccataattttatatgggccgtcccccggcggttttatttggctcgccccccgttcgtgttatatttgtgggggaggtttgccaccacacccaaccgggggtcgtctcaccccctatgttgcccactgtggcaacaagttttttgtgctgggagagctctctagaaaggggagaaacacagaatcttcgagtctcccccccgctgttctctgggggtaataaaaacaaagtcctcgggagagagaattggggcccccctccaaaaaattttctcttggaaaagatttctcggcgtgagagatgtctcgcccccacctctggtttagaatataaatggggtttctctctgggacacaagcccccacactggggggtgttttgagagaggccctttctctcacagagacctatatcccacacccctttttggggctctcccattttttgtcttgttttctggtgaataaatggagagacacacagaccacaggttgtcggggtgggggtgtgtgcaacacgcacaaagcgcacagtggggagacacacagagaaggggctcggctcgggagagcctcgggagcaaaagggtgcacaccacacgtgtctcgcccccacgggaaaggcttcacagagagggggctaaatggagaatattaattccccctagaatatacctcggccacaccccacacttctttaatacacacgtgtggtgggagaagaacccggtgtcttcaagaaactctgtgtttgtgttgcacaattgcggccactcttaaagtgtataagtgaggtgataaataggagactcggtgtaaatgagtaaccacaagcactcgtgtaaaacctctcacagaaggagaaaggagagaatgttttgtggagaccacctcttggtgttttcttttttgcgtgtgggcacagttttaaagttaattagtttttaaaaatcacgtactttttaatgggaacaacttgacccaaaatttgtcaccagaattttgagaccccatttaaaaagttaaatgaga

SEQ ID NO: 573579 - DNA, 997 bp, Homo sapiens
  misc_feature (993)..(993): n is a, c, g, or t
cgtcacgggagcgccggcggctgagaatccgcgttgttccgtgttgggggcggcatggagcgggagccgggcgccgcgggagttcgccgggctctgggccgccggctggaggcggtgctggcgagccgcagtgaggccaacgccgtgttcgacatcctggccgtgctgcagtctgaggaccaggaggagatccaggaagcagtccgcacgtgcagccgtcttttcggggccttgctggagcggggagagctgtttgtgggccagctgccctctgaggagatggtcatgacagggtcccagggagccacacggaagtacaaggtgtggatgagacaccgctatcacagctgctgcaatcgcttgggagagctcctgggccacccctcctttcaggtcaaggagctggccctcagcgcactcctgaagttcgtgcagctggaaggagcgcaccccctggagaagtccaagtgggaaggcaactacctgttcccccgagagctcttcaagttggtggtgggaggcctgctgtctcctgaggaggaccagagcctgctcctgtcccagttccgggagtacctggactacgacgacacccgctaccacaccatgcaggcagccgtggatgccgtggcccgggtcactggccagcaccccgaggtgccccccgccttttggaacaatgccttcacgctgctgtctgccgtgagcctgccccgccgggagcccaccgtctccagcttctatgtgaagcgggcggagctgtgggacacctggaaggttgctcacctgaaggagcacaggagggttttccaggccatgtggctcagcttcctcaagcacaagctgcccctcagcctctacaagaaggtgctgctgattgtgcatgacgccatctgcgcagtggggccacgctcatgacgattctaaccggctggactcggggggctcactgtggcttgacggtgtcactgatgaaaaaactggataccgatntacg

SEQ ID NO: 573580 - DNA, 373 bp, Homo sapiens
  misc_feature (19)..(19): n is a, c, g, or t
  misc_feature (21)..(21): n is a, c, g, or t
  misc_feature (348)..(348): n is a, c, g, or t
cggttgactctagaggatncncctccataatgtgtgcccagcatgctgttggcattgttgtaaacaaacaagttaagggcaagattcttgccaagagaattaatgtgcgtattgagcacattaagcactctaagagccgagatagcttcctgaaacgtgtgaaggaaaatgatcagaaaaagaaagaagccaaagagaaaggtacctgggttcaactaaagcgccagcctgctccacccagagaagcacactttgtgagaaccaatgggaaggagcctgagctgctggaacctattccctatgaattcatggcataataggtgttaaaaaaaaaaataaaggacctcngggcacacattatgggaggggtacc

SEQ ID NO: 573581 - DNA, 1963 bp, Homo sapiens
  misc_feature (1963)..(1963): n is a, c, g, or t
cgtcacgggagcgccggcggctgagaatccgcgttgttccgtgttgggggcggcatggagcgggagccgggcgccgcgggagttcgccgggctctgggccgccggctggaggcggtgctggcgagccgcagtgaggccaacgccgtgttcgacatcctggccgtgctgcagtctgaggaccaggaggagatccaggaagcagtccgcacgtgcagccgtcttttcggggccttgctggagcggggagagctgtttgtgggccagctgccctctgaggagatggtcatgacagggtcccagggagccacacggaagtacaaggtgtggatgagacaccgctatcacagctgctgcaatcgcttgggagagctcctgggccacccctcctttcaggtcaaggagctggccctcagcgcactcctgaagttcgtgcagctggaaggagcgcaccccctggagaagtccaagtgggaaggcaactacctgttcccccgagagctcttcaagttggtggtgggaggcctgctgtctcctgaggaggaccagagcctgctcctgtcccagttccgggagtacctggactacgacgacacccgctaccacaccatgcaggcagccgtggatgccgtggcccgggtcactggccagcaccccgaggtgggtgatggggtcctgtcgccagcatcatgctgttgcctcccagggaggcaggcactggggggcggcgtcaggcactcaggccaggctcccgcagtgtgccccccggcctttttggaacaattggcttccaccgcttgcttgtctttgccgtgaagcccttgcccgccgggagcccaccgtctccagcttctatgtgaagcgggcggagctgtgggacacctggaaggttgctcacctgaaggagcacaggagggttttccaggccatgtggctcagcttcctcaagcacaagctgcccctcagcctctacaagaaggtgctgctgattgtgcatgacgccatcctgccgcagctggcgcagcccacgctcatgatcgacttcctcacccgcgcctgcgacctcgggggggccctcagcctcttggccttgaacgggctgttcatcttgattcacaaacacaacctggagtaccctgacttctaccggaagctctacggcctcttggacccctctgtctttcacgtcaagtaccgcgcccgcttcttccacctggctgacctcttcctgtcctcctcccacctccccgcctacctggtggccgccttcgccaagcggctggcccgcctggccctgacggctccccctgaggccctgctcatggtcctgcctttcatctgtaacctgctgcgccggcaccctgcctgccgggtcctcgtgcaccgtccacacggccctgagttggacgccgacccctacgaccctggagaggaggacccagcccagagccgggccttggagagctccctgtgggagcttcaggccctccagcgccactaccaccctgaggtgtccaaagccgccagcgtcatcaaccaggccctgtccatgcctgaggtcagcatcgcgccactgctggagctcacggcctacgagatctttgagcgggacctgaagaagaaggggcccgagccggtgccactggagtttatcccagcccagggcctgctgggacggccgggtgaactctgtgcccagcacttcacgctcagctgaccctggcccacctgtgaataaatctcagctgaccccaaaaaaaaaacaaaaaaaaaaaaaaaaaaaaaacaaaaacacccccgggggcgctctaatgcgggggcgcggaaaacaagaggagaagcacgagaaggcgcactggtgtcaacaggggtccctgacccacgttctgtgtacaacgtggaaaacacggggaccccaaaggagaggcgaataaccgaaaacccggtaccccgtatgcgcctgagn

SEQ ID NO: 573582 - DNA, 705 bp, Homo sapiens
gcgtatgtaacgtccgtaacgagcgcgtaaccgccatcttccagtaattcgccaaaatgacgaacacaaagggaaagaggagaggcacccgatatatgttctctaggccttttagaaaacatggagttgttcctttggccacatatatgcgaatctataagaaaggtgatattgtagacatcaagggaatgggtactgttcaaaaaggaatgccccacaagtgttaccatggcaaaactggaagagtctacaatgttacccagcatgctgttggcattgttgtaaacaaacaagttaagggcaagattcttgccaagagaattaatgtgcgtattgagcacattaagcactctaagagccgagatagcttcctgaaacgtgtgaaggacaatatgatcttatacacaccaattattcctagaaccaaggacgaactgtttgtgccttgacgtggccaagaagagtattactcccgatttgatggcggcccatgcggcactcacataatgtacatgcaacaacgagggtcttggcagtgcttgcagcggacaaacccggtgaggcaaaaaggggcgatgctctcccccggaagataataaagccgggggacaaccaagcggctttcacgaccgtccgtatagtgaggtcagggctctgagggctgttgacgcaaaggcgactgcgcatgcccatcgtactaatccg

SEQ ID NO: 573583 - DNA, 352 bp, Homo sapiens
ttgagtgtcactgtaaaatacatggcatttttttgtttgttggagacagagtcattggcttgcggccaaacagctagtaggtgtcagagtaagggtccaaacctaggcagcctgactccatagcctggggcacctaactatgttttaatccttttcctcaccacagattttaaaataagggactaataaggccttctcattaatttcggggaaacttttggaatttcctggtggggcctatagcttatagctgaaaggagtggtagaggccagggtggtggtgggcctcaggtctggtaattcccaaccaccttgtgggaggccaaagacagggaggtactggcttaagggc

SEQ ID NO: 573584 - DNA, 707 bp, Homo sapiens
  misc_feature (141)..(141): n is a, c, g, or t
  misc_feature (327)..(327): n is a, c, g, or t
  misc_feature (597)..(597): n is a, c, g, or t
ctggaaatctggtgggagcaaacgcacagtgttcatgcccatcgtccgtagaattaagttgcccctaaaaatcgtttgaaagtagggcccgtatttaccctaatagcaccccgctcgtaccacccgtcgtagagccgtaanaaaataaaaaatagagaagaaaaagaagagaacaaaaagggtgggagccggactctgagggacgcgagtgcaaaggcgttgtttcgaacactatcggagtggaggggcgcgcggcggccgccagaggagaggtgaagaggtgaacacagtggggccaaagaagtgtgtgttccctaagaggagagnactccggggggccaagagacaccaagagaggggggcgggaaatctctctcacaccaaaatataaaaaaagccccgcggggggggaaaaccggggagcggtctccggtgagacaaaatactccagagagagggggagctccgagagagaggcgccaaatccgaggggggggactctcttactacaaggggggggagccttccaaagaaggcgagagcgtcgcgaaatattcccagatatctatagcgcccccggaaacgcgggggggggtnataacagcagaagcaacaagacgcagcaaccaaaacacacgacacacaaaagaaaaaaacagacgcgagaagaaaacacaagacacaaatacaacaacagaccacagccc

SEQ ID NO: 573585 - DNA, 1038 bp, Homo sapiens
  misc_feature (10)..(10): n is a, c, g, or t
  misc_feature (12)..(13): n is a, c, g, or t
  misc_feature (19)..(20): n is a, c, g, or t
  misc_feature (60)..(60): n is a, c, g, or t
  misc_feature (119)..(119): n is a, c, g, or t
  misc_feature (1038)..(1038): n is a, c, g, or t
gtccagcatnanntccgtnngggctgtgggaggggacagcaggggcagaggcacactccncagacttacactcagtgtgggcagggggtagggtgggagcgaggtcactgcagctccancctgtgtctgtctgtccgcaggggggccctcagcctcttggccttgaacgggctgttcatcttgattcacaaacacaacctggagtaccctgacttctaccggaagctctacggcctcttggacccctctgtctttcacgtcaagtaccgcgcccgcttcttccacctggctgacctcttcctgtcctcctcccacctccccgcctacctggtggccgccttcgccaagcggctggcccgcctggccctgacggctccccctgaggccctgctcatggtcctgcctttcatctgtaacctgctgcgccggcaccctgcctgccgggtcctcgtgcaccgtccacacggccctgagttggacgccgacccctacgaccctggagaggaggacccagcccagagccgggccttggagagctccctgtgggagcttcaggccctccagcgccactaccaccctgaggtgtccaaagccgccagcgtcatcaaccaggccctgtccatgcctgaggtcagcatcgcgccactgctggagctcacggcctacgagatctttgagcgggacctgaagaagaaggggcccgagccggtgccactggagtttatcccagcccagggcctgctgggacggccgggtgaactctgtgcccagcacttcacgctcagctgaccctggcccacctgtgaataaatctcagctgaccccaaaaaaaaaacaaaaaaaaaaaaaaaaaaaaaacaaaaacacccccgggggcgctctaatgcgggggcgcggaaaacaagaggagaagcacgagaaggcgcactggtgtcaacaggggtccctgacccacgttctgtgtacaacgtggaaaacacggggaccccaaaggagaggcgaataaccgaaaacccggtaccccgtatgcgcctgagn

SEQ ID NO: 573586 - DNA, 1491 bp, Homo sapiens
  misc_feature (537)..(537): n is a, c, g, or t
  misc_feature (545)..(545): n is a, c, g, or t
  misc_feature (548)..(548): n is a, c, g, or t
  misc_feature (553)..(553): n is a, c, g, or t
  misc_feature (555)..(555): n is a, c, g, or t
  misc_feature (566)..(566): n is a, c, g, or t
  misc_feature (596)..(596): n is a, c, g, or t
  misc_feature (624)..(624): n is a, c, g, or t
  misc_feature (1329)..(1329): n is a, c, g, or t
  misc_feature (1332)..(1332): n is a, c, g, or t
  misc_feature (1341)..(1341): n is a, c, g, or t
  misc_feature (1357)..(1357): n is a, c, g, or t
  misc_feature (1369)..(1369): n is a, c, g, or t
  misc_feature (1381)..(1382): n is a, c, g, or t
  misc_feature (1386)..(1386): n is a, c, g, or t
  misc_feature (1393)..(1394): n is a, c, g, or t
  misc_feature (1398)..(1399): n is a, c, g, or t
  misc_feature (1413)..(1413): n is a, c, g, or t
  misc_feature (1425)..(1425): n is a, c, g, or t
  misc_feature (1446)..(1447): n is a, c, g, or t
  misc_feature (1452)..(1452): n is a, c, g, or t
  misc_feature (1458)..(1459): n is a, c, g, or t
  misc_feature (1465)..(1465): n is a, c, g, or t
  misc_feature (1469)..(1469): n is a, c, g, or t
  misc_feature (1471)..(1471): n is a, c, g, or t
  misc_feature (1474)..(1474): n is a, c, g, or t
  misc_feature (1481)..(1481): n is a, c, g, or t
gaggtcagtctcgctatattgcccaggctggtcttgaatgcctgggctcaagcaatcctcccaccttggccacctgaatagctgggactacaggcatgtgccactatgcccagctaattttttgtatttttagtagagatgaggcaatatttttaatatagctaatgcatgatgttaaaaactttgcatatggaaaagatgcattcaaaatagaagacagatcaatgaattttagtgtagtcattttaagtttagtgacatagtttcagtttccacattgcaactatacactgtggagttttagcatagtatctaagaatgaatatccacagttctgaacaggttattttagcactcttttccagcaatatatctctgagaggccatactttcttcacgtatgtcaaacaaataacatattgcaacataattgttcttcagacttgttttttagcagcagacacatttccaaatgtaatcttactctgaatctgagcttcattatacaatacagacaaaagtgagcttttccagttnaagtaggngtntgatntnaaacacacccntggccccaacaaaacaaataaaactcccantcttattttaagagcttgttgaagaganttattaagtaacgccgcccttcctttcggccggaaccgccatcttccagtaattcgccaaaatgacgaacacaaagggaaagaggagaggcacccgatatatgttctctaggccttttagaaaacatggagttgttcctttggccacatatatgcgaatctataagaaaggtgatattgtagacatcaagggaatgggtactgttcaaaaaggaatgccccacaagtgttaccatggcaaaactggaagagtctacaatgttacccagcatgctgttggcattgttgtaaacaaacaagttaagggcaagattcttgccaagagaattaatgtgcgtattgagcacattaagcactctaagagccgagatagcttcctgaaacgtgtgaaggaaaatgatcagaaaaagaaagaagccaaagagaaaggtacctgggttcaactaaagcgccagcctgctccacccagagaagcacactttgtgagaaccaatgggaaggagcctgagctgctggaacctattccctatgaattcatggcataataggtgttaaaaaaaaaaataaaggacctctgggctacaaaaaaaaaaaaaaaaaaaaaaaaaaaaaaaaaaaaaacaaaaaaaaaaaaaaaaaaaaaaaaaaaagaaaaaaaaaaaaaaaaaaaaacaacacaaacttgtgggcgcgcggccttgggccncgngaaaaaggnttttcaaaaccactcncggtggggcggngggggccccagnnaggntataggnngacnnggggccaaaagcgnggtcccaaaganaacacccggggcaaggcaacnnagggngctggnnttctcncacnantanaaaaaanggcgcggggg

SEQ ID NO: 573587 - DNA, 1143 bp, Homo sapiens
  misc_feature (22)..(22): n is a, c, g, or t
  misc_feature (111)..(111): n is a, c, g, or t
  misc_feature (147)..(147): n is a, c, g, or t
  misc_feature (152)..(152): n is a, c, g, or t
  misc_feature (164)..(164): n is a, c, g, or t
  misc_feature (190)..(190): n is a, c, g, or t
  misc_feature (815)..(816): n is a, c, g, or t
  misc_feature (818)..(818): n is a, c, g, or t
gtttactactacgcgagcactnccgtttttagcgcggttgacctgagtgtactagagacgagttccgccttgtcgtctagacgctcctagctacagaggtgtgtgtctacnacctcgcgtgcgcacgtatatactctacgcctggcngggcntactgtgctgangtttatctataaaaaactgatactantacgatacgctctgaccttttcctcatcgcgcccgcttcttccacctggctgacctcttcctgtcctcctcccacctccccgcctacctggtggccgccttcgccaagcggctggcccgcctggccctgacggctccccctgaggccctgctcatggtcctgcctttcatctgtaacctgctgcgccggcaccctgcctgccgggtcctcgtgcaccgtccacacggccctgagttggacgccgacccctacgaccctggagaggaggacccagcccagagccgggccttggagagctccctgtgggagcttcaggccctccagcgccactaccaccctgaggtgtccaaagccgccagcgtcatcaaccaggccctgtccatgcctgaggtcagcatcgcgccactgctggagctcacggcctacgagatctttgagcgggacctgaagaagaaggggcccgagccggtgccactggagtttatcccagcccagggcctgctgggacggccgggtgaactctgtgcccagcacttcacgctcagctgaccctggcccacctgtgaataaatttcagctgaccccagcccacctgtgaataaatgtttttgcaggaaaaaaaaannanaaaaaaaaaaaaaaaaaaaaaaaaaaaaaaaacaccaacaagaaaaaacaaaaaaagggggggggggcccctaatatattcccccgcgggggggccagacagattgacggccccccccgacttttttagtgagcaacgagggggcccccaatgagagggggaccttattataaaaacatcgacagcaggggcgcgcgcgtttaaaaccagcactgctgtggtgagggacaacagaccggacgtggtgggggactctgtggcggacagccacacccccctgcacggggggggggggcaaaaactaggtgggaccacacactcaccg

SEQ ID NO: 573588 - DNA, 832 bp, Homo sapiens
atcaatcggcgggattccattgttccagcgataaaagaatcatatgggaaagagaaagaaaatagtaggcatatagaaacactggagagtgtctaaaggggaggaaactacagagcacttggttgccacagagagcagattgacctctgctggagcccaggatcagaacgttattaattcactgtgggggggtttggcatcttaatattcttgaagagaaaagcttagaatacagtaaatcctgtaaacgccagaacttgagccttgtgtatagattttaaaagaatatatatatcggccgggcgcggtggctcatgcctgtaaatcccagcacctttgggaggctgaggcgggtggattgcttgagcccaggagtttgagaccagcctggccaacgtggcaaaacctcgtctctgttaaaaattagccgggcgtggtggcacactcctgtaatcccagctactggggaggctgaggcacgagaatcacttgaaccccaggaagcggggttgcagtgagccaaaggtacaccacttacactccagcctggcaacagagcaagactcggtctcaaaaaaacaaaaattttaaaacaagactataaggcagtactgtaaattcagttggaattactggaatatttacccaattttcgtgtaatcccctataggtcacatttggtattaaattggggttccattgggaatttgaatgtaaatacgtaatctagtttcatataaggaagtctttaataccaaatgaaaggttttctggaataataacgtcatgattttagactggactttctcaggtgagctacataggatattca

SEQ ID NO: 573589 - DNA, 102 bp, Homo sapiens
gcctcggacaccgccatctattactgtgcgagacagacctcagttgttgtagttaccttcttagtcccaccctcttacttctttgacccctggggccaagga

SEQ ID NO: 573590 - DNA, 983 bp, Homo sapiens
  misc_feature (8)..(8): n is a, c, g, or t
  misc_feature (63)..(63): n is a, c, g, or t
  misc_feature (89)..(89): n is a, c, g, or t
  misc_feature (101)..(101): n is a, c, g, or t
  misc_feature (150)..(150): n is a, c, g, or t
  misc_feature (204)..(204): n is a, c, g, or t
  misc_feature (241)..(241): n is a, c, g, or t
  misc_feature (281)..(281): n is a, c, g, or t
  misc_feature (289)..(289): n is a, c, g, or t
  misc_feature (303)..(303): n is a, c, g, or t
  misc_feature (327)..(327): n is a, c, g, or t
  misc_feature (355)..(355): n is a, c, g, or t
  misc_feature (357)..(357): n is a, c, g, or t
  misc_feature (365)..(365): n is a, c, g, or t
  misc_feature (373)..(373): n is a, c, g, or t
  misc_feature (385)..(385): n is a, c, g, or t
  misc_feature (397)..(397): n is a, c, g, or t
  misc_feature (448)..(448): n is a, c, g, or t
  misc_feature (485)..(485): n is a, c, g, or t
  misc_feature (508)..(508): n is a, c, g, or t
  misc_feature (525)..(525): n is a, c, g, or t
  misc_feature (527)..(527): n is a, c, g, or t
  misc_feature (533)..(533): n is a, c, g, or t
  misc_feature (578)..(578): n is a, c, g, or t
  misc_feature (646)..(646): n is a, c, g, or t
  misc_feature (648)..(648): n is a, c, g, or t
  misc_feature (670)..(670): n is a, c, g, or t
  misc_feature (674)..(674): n is a, c, g, or t
  misc_feature (694)..(694): n is a, c, g, or t
  misc_feature (696)..(696): n is a, c, g, or t
  misc_feature (698)..(698): n is a, c, g, or t
  misc_feature (700)..(700): n is a, c, g, or t
  misc_feature (721)..(721): n is a, c, g, or t
  misc_feature (775)..(775): n is a, c, g, or t
  misc_feature (791)..(792): n is a, c, g, or t
  misc_feature (795)..(796): n is a, c, g, or t
  misc_feature (816)..(816): n is a, c, g, or t
  misc_feature (826)..(826): n is a, c, g, or t
  misc_feature (834)..(834): n is a, c, g, or t
  misc_feature (843)..(843): n is a, c, g, or t
  misc_feature (850)..(850): n is a, c, g, or t
  misc_feature (861)..(861): n is a, c, g, or t
  misc_feature (877)..(877): n is a, c, g, or t
  misc_feature (893)..(893): n is a, c, g, or t
  misc_feature (901)..(901): n is a, c, g, or t
  misc_feature (959)..(959): n is a, c, g, or t
gacgcgangctcggcgatggggagcggcggcgtggtccactgtaggtgtgccaagtgtttctnttatcctacaaagcgaagaataaggnggaggccccganacctgaccatcttgagtctccccgaagatgtgctctttcacatcctganatggctttctgtagaggacatcctggccgtccgatctgtacactcccagctganggacctggtggacaaccacgccagttgtgggcatgtnccagcttccaggagctgtggccgtctccagggaacctgangctctttnatagggctgctganaaggggaatttcgaagctgctgtnaagctgggcatagcctacctctacaatnanggcctgtntgtttctnatgaggcccgcncagaagttaatngcctgatggcctctcgcttcttcagtctcgctgagcggctgaatgttggtnccgcaccttttatctggctcttcatccgccctccgtngtcggtgagcggaagctgctgcnaggccgtggttcacganancctcanggcagagtgccagctgcagaggactcacaaagcatccatattgcnctgcttgggcagagtgctgagtctgttcgaggatgaggagaagcagcagcaggcccatgatctgtttnangaggctgctcatcagggatgtntgancagctcctacctcctctggnanancnacaggaggacagatgtttcanatcctgggcgatgcctccacagcttccgataactcagggactacgctgccaaangctgctgggaagcgcnngtnncttttgccaaagcctgttcnaattctaacnagcttggnctggtggtnatatctncagttatatcntttgctagctattttntgcttcccaggctgtnagttaacnacaagtcttctccgtgcagaagggactcaatgacaccaagaggtacattctgatcgantggctggtggaagttgcaccatga

SEQ ID NO: 573591 - DNA, 944 bp, Homo sapiens
  misc_feature (22)..(22): n is a, c, g, or t
  misc_feature (63)..(63): n is a, c, g, or t
  misc_feature (72)..(72): n is a, c, g, or t
  misc_feature (78)..(78): n is a, c, g, or t
  misc_feature (105)..(105): n is a, c, g, or t
  misc_feature (111)..(111): n is a, c, g, or t
  misc_feature (115)..(115): n is a, c, g, or t
  misc_feature (121)..(121): n is a, c, g, or t
  misc_feature (147)..(147): n is a, c, g, or t
  misc_feature (153)..(153): n is a, c, g, or t
  misc_feature (186)..(186): n is a, c, g, or t
  misc_feature (215)..(215): n is a, c, g, or t
  misc_feature (233)..(233): n is a, c, g, or t
  misc_feature (235)..(235): n is a, c, g, or t
  misc_feature (248)..(248): n is a, c, g, or t
  misc_feature (263)..(263): n is a, c, g, or t
  misc_feature (302)..(302): n is a, c, g, or t
  misc_feature (313)..(313): n is a, c, g, or t
  misc_feature (330)..(330): n is a, c, g, or t
  misc_feature (357)..(357): n is a, c, g, or t
  misc_feature (361)..(361): n is a, c, g, or t
  misc_feature (375)..(375): n is a, c, g, or t
  misc_feature (388)..(388): n is a, c, g, or t
  misc_feature (390)..(390): n is a, c, g, or t
  misc_feature (403)..(403): n is a, c, g, or t
  misc_feature (411)..(411): n is a, c, g, or t
  misc_feature (415)..(415): n is a, c, g, or t
  misc_feature (435)..(435): n is a, c, g, or t
  misc_feature (440)..(440): n is a, c, g, or t
  misc_feature (449)..(449): n is a, c, g, or t
  misc_feature (463)..(463): n is a, c, g, or t
  misc_feature (467)..(467): n is a, c, g, or t
  misc_feature (483)..(483): n is a, c, g, or t
  misc_feature (485)..(489): n is a, c, g, or t
  misc_feature (507)..(507): n is a, c, g, or t
  misc_feature (511)..(511): n is a, c, g, or t
  misc_feature (518)..(519): n is a, c, g, or t
  misc_feature (521)..(521): n is a, c, g, or t
  misc_feature (523)..(525): n is a, c, g, or t
  misc_feature (944)..(944): n is a, c, g, or t
ctgtagcagaaatgtttgaaanaacataagcacaatgactcccccaaagaacaagaggccaangcaaacccngcggangtggaaggaaaaaaaaataaagccacnaaaagnaaangagaanccaacagataaccaagagtctataangtgcgngggtattgttacgaaactaaacaggaggaaaangtctgcaatgagaaagcgtataagaaaanagaaaactagaatgctgncnacaaggacaaaanacctgccaaatttgncaatgcatccagtaaaagcaccaatgctgttagcctaanctagtgttgancgtaaaatcgcacaacnaaaaagcatgcatcccaaagacgcaantcanaaaaaccaaagctnggccaacaataanangaacaaaagccanaccactanaaanaaatctcaacccaagtgccncgcanaaagcgccngcaggaaccaaagnaacncataataaaaaaagtnannnnnaaaaacaatcaatacacnattnaaaaaannantnnnccatgcctgaggtcagcatcgcgccactgctggagctcacggcctacgagatctttgagcgggacctgaagaagaaggggcccgagccggtgccactggagtttatcccagcccagggcctgctgggacggccgggtgaactctgtgcccagcacttcacgctcagctgaccctggcccacctgtgaataaatctcagctgaccccaaaaaaaaaacaaaaaaaaaaaaaaaaaaaaaacaaaaacacccccgggggcgctctaatgcgggggcgcggaaaacaagaggagaagcacgagaaggcgcactggtgtcaacaggggtccctgacccacgttctgtgtacaacgtggaaaacacggggaccccaaaggagaggcgaataaccgaaaacccggtaccccgtatgcgcctgagn

SEQ ID NO: 573592 - DNA, 419 bp, Homo sapiens
  misc_feature (125)..(125): n is a, c, g, or t
  misc_feature (140)..(140): n is a, c, g, or t
  misc_feature (143)..(143): n is a, c, g, or t
gagtatgtgctaagtattcatataaattagagatggtataggaggggaattaggtggtttgaagattaagatgtatctattcccagcactttgggtggtggggatggggggatcacttgagcccnggagtttgagactanccngggcaacaaagtgagacttcctctctataaaaaaatacaacaacaaaataattagctggacatggtggcgtgaacctgtggtcccaactacttgggaggccgaggtggaaggctaaggtagaaagatcgtttgagctcaggaagttgaggctgcagtgagctgtgtttgtgtcactgcactccagcctaggggacagagtgaaccctgtcttcaaaaaaatacataaataaaattacaaaggggtggagacaagggtaaggaccaaagaatgtttt

SEQ ID NO: 573593 - DNA, 103 bp, Homo sapiens
aaagggatggataggctggcacttctttttgttttccctttactggacacagtctcactattgttgtctgggctgtcatgagctccggtactcaagaactcct

SEQ ID NO: 573594 - DNA, 741 bp, Homo sapiens
gaaaggaaagagaaaattgacttctgtttctcagtctagtgtcaatgttcaatgtacaggttgttactgaatgagagtatttcggaatacacattgcacaggactttgatttggggtgatgtatttgagagtatttgttggggatcgttgaccgtatgtagaaaccatctttaacactgaattgtttttgttcgcagtgtttcctctcttgaggctttctcctaccccggcagatgactgcggctttgatttggatgatagcgaaggagtttgtgatctgtttgatgtccagatactgaattattggattccatggaaacttgggactgtgtctacctctaactgtgtagcatttggacttcttgataacctaaatatttagaatggtgaatgtgacacctttttggttcactgattctggggtgttcttccctggtgctttctttgcttcacaggacttcaaccatgggggcgaagggctctgattgcttgggggatgggtgatttaatgtccacaggcgtccccactcccaagggtggctatgttctggatttcaacttttcttctggttgtggatccttctgttttttcttcttggggaggaaagtgaaggacactgcaggtcatcgggggcaggtggccagggactcattgttgtcttgtatttttaactgcactggactgctgtgttcctgtgtgtccttcctgtccgggcgacgttcgtgccactgtggactggg

SEQ ID NO: 573595 - DNA, 1427 bp, Homo sapiens
  misc_feature (239)..(239): n is a, c, g, or t
gttcacagtggggctctctacgactatccgtcttcaccgctcttcgggcgatgccgaatctactgagcgtcttgcgaatagtacagaggagatgggccggcggcgtgcgtcgatatgcaccacatagagattgaggccgatgatgctgatcgctgggctctatgctagtgcgaggcaagctcgctctctgaaccagtcggtgtccatatgccatcagctcagtggctgcatccaagatnatcgcagcggtcgtcataggacgcgagccatggggggcacagtagaggtaccttcgtgactgtgtgcgaaccactgaaggtccgtggagccacatggatcgtgcgttgcacgtggcaacgctggagagtaacgcgcgcacttcgctgcggttgcgtagtcccctgcgcgaaactggagcgtagcggaaccgttgtggagagaacaagaataattgggcgacccccaaccaggcttcttgttagcgaaccagcaagccatgccgcccgttgggccctcacgagcagtgcaggccatgcgctggctcgccgtcgactagaattcgcagcaagaagcgctccactcttgcacaacgctgcgaaatgccgcaggcaacaagcaacaaggacctgaagggtcgagtgagtgtagtgatttccgaggaacgcgtgtggacatgcactcgggtggccatgcgtgacgtttggaagccactgctaggtcccagcgcctgggagcgcgtcctaacgcccatcgtgggtggctgcggcccttcttggggcgctctggtgccaatgggaccttcgtggcgcacgacagagcgggtgtcatgccctacaaactggctggggtctggtcgtaccccgcacgggtggcattcccgtggccttctcgcgccaaccggtctgcgggtccctttggcgggtgctggggaaccccttggggtcttgggacccgggggaccctaggaagcggaagattaaccctacgaatggaaaggaatttctcctcaactttgtaggcacaaagggcttaaacccgacgttataaggcaggccatcgggttctgagatacgcgtgaaaaatttccttttcgccggaagcattcctacatggaagcaaacgactctgtgagctcccccctttcggcccgtgtgcacgtctgaagccctgtgagaatgggcgccccgggccggcaagtaccgcgcgaccttcgtccacgggagaaagaatgccaacggagcttggcccagagtggggcaaaggagttctgccccactggggattacaaccggaactcaagaggaacccgagaggagggaggacacgagcgacaccaaaccccggcggcagatggagcacctgcggggcaccccccaaaaaaacacttcaacaccccgcagagacgagacgccgattcaccccaaaac

SEQ ID NO: 573596 - DNA, 1420 bp, Homo sapiens
taggtcccgtgctgctatttggtttcttcgtttttgttgttgatggtgcgtggatttgtgtcgggtctcgtgtgctgttgctgtgctctgtgtcgtggggtgtgacctctatcttgacggctgttgttgccttgagtcggggcccagcggttgcacaaggcgcttttatgttctctcttttgtgcgtcctggtagcggccgggggggatttcgcccggggatgtccgctatgttatgggtccaccgggtaaaagtggttcccagcaccacttgttcgggaaatcccggaggttttaaataaggggggaagacaccgggttggagaaaagagcccctaaaagagttgttggcacagtggtcacccggatcttcgtccgctcctcttgatgagggcagtttctcccgcgctttttgtggataatgggtcacccctcggatatattacagggtgttgctgccggtcctgtgggtgccctgctgttttattgtatgctggggcttgtagatggggtctcctctggcggggtgtttccaccagtgttacccccacgggccctttggggccggccctactagctggcgtatattctacagctggtggtgttaggatgtgggcgccccccaaggtgatcacgagcctgcgaggcccctatacgtctatgatgagaaatactcacggaggactcttttttggcccctcggggctcgcgataatattataaggcgttgttggtgcacaaaagggggacacgtttctcccacggtaatgagagacccacccccttgtctccatttttagacacactaagagaggttatacaacaccgtgcagacacacccctcttggtggagaaagaaccacaagagaagaggtgtcacacactcgtgttggtggagttttgcacacaacacgacacgtggggagacccactgccgagagtctgtggttgtgtgtctttcttgggccctcgaccccctctgtgtgttgtcggtgaaaaattgggggggttccactctgagtctggcacttatttacaaaggggataaaagtgcacagaactgggggaaagttttatagtgcccccacaggagagaacctcgcacccaccttgtgcgcgcctcttcaacaccacaggtggagaacttcggagaatacacacaaagagcctcttttgggcttaagacttggtggaagactattcaggacccatttaccatgacagatatacgatgagattcccccgttcattggggtggcaatagtccacgggtccttaaattctttgggttcggtattcccccaggcttcgaaaaggcccaagggcttaaggacttgcccctaaactgggttctactgtgaccctgttgagttttttggacattaaaataattgaaataaaaccaattttcccttccaata

SEQ ID NO: 573597 - DNA, 1234 bp, Homo sapiens
ggtcatcatccgtaaagggagagaccactatgcctactcctactacccgaagccggtgaacatgaccgaaggcctacctgtcgacatcatactcgccagtgagaagacgagcacatgatgtatgctgccgtgtgatccgcgagctatctacagaccatgagcatccctgcaggaggactgatgcggctgggcctgctccttcatggagcacccattgtgctactagacaccctccgtgaggatgaccaggcgccaggactgcgtgtggtgtctacattgaagtgcgcatgcctatgctcatctcattggtagtgtgcgcctcctcccgacgggtcagtccccatagctgcgctcggggtacaaggggcttccccccattagcgcacaccgtgaggacaagtcttgtcaagcccttgcctggtatgcgcgttgatcagcagtgaacactttccttgtcacgtcactcagttcacagccaatgagttgacactgacctgggccctggagagggtttaccggggcttgcatacggcacgggaggtagtcgaagacgccttacttctcgaaagggcttggggactgctcgacgaatacgacacgaaaggaccaacggtccaaagcgtgcacgcccgagctaagcgaagctcaattgccgttgccctattgatcctggtacccgacgtgaaacttgcaaccccgattgctgcgtggagaccccaagtggccggactaattgcacaccttagcatagaataggttgaccacagatggtcaaaacctacgttcaataagccactccaaaggggcccgaacgcctgagactggtctagtgagcttcttggccgatattggcagttggcacgggaggctacgtgattaccacgcatcggtccactgattcgacccaaaattcggtcagaaggtgggacaggggtggaacatgctctactgggtaatggcccgtgacagccatcacgaaacctaactgggggacaacacagaattaattgaggttaacaacaggaaagacccaaggggccgaaaaaattgggtgccggcagaactgacttggaaacagagcaagggacaacttgacgtcggaacaggggtccccccgaatacccgtacagacacgatagtacaacaatcgtggtcgacaaaaagtacagcgagccgtcacgataatacaagagaggatagcacaacccacaagaacaaggagcaccacgacact

SEQ ID NO: 573598 - DNA, 268 bp, Homo sapiens
atctggccgacttccctaacaacagctgctcccacatcccctcggactggagcttaagccctaactaaggtgggcagacctaagacctaagaccaaaagattagttaagtgtcttacaagcatctagccactgtccagggccaagagcatacaagtcttgcagtccctttagcaagagcaagcagttgccctgtactgtaccaccaaattgtcaaaaaccccttgcagttagcaagaggtaggcttacctctttactagggattatcg

SEQ ID NO: 573599 - DNA, 556 bp, Homo sapiens
ttgttcttaattgctttccaggggtataacaatatccatctactacacagtgattgagtattagctttgacctttttaagcccttacaatcccacaaaaagcctattcgtagagccatagtcaacacatttggttatattgcataggccattggccctcatgatgtattggctacacttctgaacaacctcaaagttcaagaaaggcagaacagagtttgtaccactgtagcaatagctattgttgcagaaacatgtacaccctttacagtactccctgccttaatgaatgaatacagagttcctgaactgaacgttcaaaatggagtgtaaaaatcgcttaccttcttgtcggaatatattggtgaaatgggaaaagactacatttatgcctgttaacaccgttacttgcacgatcccttacatgcatacgagaccttgtacaccgacagacggctagtgcagtggtacggcacatgtcacttggggttcatggatttggttgtgacgcttcgctcgatcacttgtcgccctatgtttggcccaatgtgtttgag

SEQ ID NO: 573600 - DNA, 329 bp, Homo sapiens
ctgaatgatattccagtatgtgtatatactacattttgtttttccattaatctgatgagggatatctgggttctttccgccctttggtgactgtggataatgttactatgagcattactatataaataactgtttagtccctgccttcgattcttttgcatatatacgcagaagtagaattgctggatcacatagtaattcactgcttaattattggaaactgccatactgttttccacagcagctgtaccactttacattcccagcaaaaatgcacaatggttccaacttctctcacatccttgccagcacttgtttcctgctttaaa

SEQ ID NO: 573601 - DNA, 785 bp, Homo sapiens
  misc_feature (36)..(36): n is a, c, g, or t
  misc_feature (91)..(91): n is a, c, g, or t
  misc_feature (100)..(100): n is a, c, g, or t
  misc_feature (105)..(105): n is a, c, g, or t
  misc_feature (107)..(107): n is a, c, g, or t
  misc_feature (109)..(109): n is a, c, g, or t
  misc_feature (114)..(114): n is a, c, g, or t
  misc_feature (187)..(187): n is a, c, g, or t
  misc_feature (221)..(221): n is a, c, g, or t
  misc_feature (272)..(272): n is a, c, g, or t
  misc_feature (291)..(291): n is a, c, g, or t
  misc_feature (297)..(297): n is a, c, g, or t
  misc_feature (303)..(304): n is a, c, g, or t
  misc_feature (333)..(333): n is a, c, g, or t
  misc_feature (431)..(431): n is a, c, g, or t
  misc_feature (479)..(479): n is a, c, g, or t
  misc_feature (481)..(481): n is a, c, g, or t
  misc_feature (519)..(519): n is a, c, g, or t
  misc_feature (553)..(553): n is a, c, g, or t
  misc_feature (555)..(555): n is a, c, g, or t
  misc_feature (588)..(588): n is a, c, g, or t
  misc_feature (625)..(625): n is a, c, g, or t
  misc_feature (639)..(639): n is a, c, g, or t
  misc_feature (656)..(656): n is a, c, g, or t
  misc_feature (661)..(661): n is a, c, g, or t
  misc_feature (663)..(664): n is a, c, g, or t
  misc_feature (667)..(667): n is a, c, g, or t
  misc_feature (682)..(682): n is a, c, g, or t
  misc_feature (706)..(706): n is a, c, g, or t
  misc_feature (708)..(708): n is a, c, g, or t
  misc_feature (724)..(724): n is a, c, g, or t
  misc_feature (758)..(758): n is a, c, g, or t
cgggctgcagccgccctccgcgctcgcctgccagcnccctcgccgcgcgtccgtcctccgtcctcccgggccagccagccagccagccagncgggccggnggcgngnancaggncgtcccgatgcccgagccaggccccaggatgaacggcttctcgctgggcgagctgtgctggctcttctgctgnccgccctgcccgagccgcatcgccgcaagctggncttcctgccgcccgagcccacctacacggtgctggcgccggagcagcgcgncgccggcgcgtccgccccngccccngcccannctaccgccgccgccgccgcggcccagccngcaccgcagcagcccgaggagggcgcgggcgcggggcccggtgcgtgcagcctgcacctcagcgagcgcgccgactggcagtactcgcagccgcagcntggacgccgtcgaggtcttcttctcgcgcacggccccgggaacaaccngnctcggctgcatgttcgtgcgctgcgcgccctccagccngctacacgctgctcttctcgcacgggcaaacgcncngccaaccctggcgcccagaatgctgcagccttnctacaattgcgccctcgcgcctcccgccaatcaaacntgcaaacaatcttnctccctaacgcactacntcggngnntanggcgctcagctcggngcaaagcccctccgagcaaagaancntctacgccgcacaatngacgcccgcgctggcaggcgcctgcgcacccggnctatggcgctgagctcccgagaacatt

SEQ ID NO: 573602 - DNA, 429 bp, Homo sapiens
cccagactccttttccttggccagaaggccgaagaccaactggcctactggaatgggccacttttggaatcggaatcaagcctttccgtttctggaattcctctctgtaagggagatttttatggaaagggaataattccagggaaaatggacccttctaagggatcccaccagggaaaacttggttatggaggaatccaaaacccttaattcggaggatatccctaaggcttggaaagagaaaggacccacaggggtggcccacctgaaccagtttaagccagaaccggacccaatggggaaaaggttggaggatccagaacctccagggcaaaggcagccacccagggatggaagaaggctcttggcctacctgccgaccaagcatggtttaagccaggattattaagatccactttacggatatcc

SEQ ID NO: 573603 - DNA, 743 bp, Homo sapiens
  misc_feature (36)..(36): n is a, c, g, or t
  misc_feature (91)..(91): n is a, c, g, or t
  misc_feature (100)..(100): n is a, c, g, or t
  misc_feature (105)..(105): n is a, c, g, or t
  misc_feature (107)..(107): n is a, c, g, or t
  misc_feature (109)..(109): n is a, c, g, or t
  misc_feature (114)..(114): n is a, c, g, or t
  misc_feature (187)..(187): n is a, c, g, or t
  misc_feature (221)..(221): n is a, c, g, or t
  misc_feature (272)..(272): n is a, c, g, or t
  misc_feature (375)..(375): n is a, c, g, or t
  misc_feature (423)..(423): n is a, c, g, or t
  misc_feature (425)..(425): n is a, c, g, or t
  misc_feature (463)..(463): n is a, c, g, or t
cgggctgcagccgccctccgcgctcgcctgccagcnccctcgccgcgcgtccgtcctccgtcctcccgggccagccagccagccagccagncgggccggnggcgngnancaggncgtcccgatgcccgagccaggccccaggatgaacggcttctcgctgggcgagctgtgctggctcttctgctgnccgccctgcccgagccgcatcgccgcaagctggncttcctgccgcccgagcccacctacacggtgctggcgccggagcagcgcgncgccggcaccgcagcagcccgaggagggcgcgggcgcggggcccggtgcgtgcagcctgcacctcagcgagcgcgccgactggcagtactcgcagccgcagcntggacgccgtcgaggtcttcttctcgcgcacggccccgggaacaaccngnctcggctgcatgttcgtgcgctgcgcgccctccagccngctacacgctgctcttctcgcacggaacagccgtggacctgggccagatgtgcagttctacattggcctcggtcccgatcaactgcaacatcttctcctacgactactcgggatacggcgtcagctcgggcaagcctccgagaagaactctacgccgacatcgacgccgcgttggcaaggcgctgcgacacccggtatggcgtgagtccgagaacattatcctctatggtcagagcattgggactgtccccaggtaagatttggcttcgaggtaatgatg

SEQ ID NO: 573604 - DNA, 144 bp, Homo sapiens
ctgtggtttgcgcggaatcgggggtatgtctgttcgaattcatatgaacagggaggttaggaagcaggtcttggtgaagagctgcaaaccagtatccgctgtcaaaccagttatcgtgcaacgcaataccgctgctaaccagta

SEQ ID NO: 573605 - DNA, 272 bp, Homo sapiens
tgtctggcgtctgtccggcactgcccgcctctcctccaggtaggtccttctggctgttccagtactccgctgcaggccgccccagctccgtcaccgcccggaactctcccacgtcgctgtcgaagcgcgcgtactcctgtccggttgtagatgtatctctccaggatagcgctgtgtcccattaaacgcgtagcattcctgccgtaactagtacacgtaattctctggagtggccctgccctggaccacagatgtgagcagcaccaccagga

SEQ ID NO: 573606 - DNA, 367 bp, Homo sapiens
taaatttggcccatctttttttagtcttttgattcaaattcaaaacttaacagcccaaaccaggtcagagttcctttcggttagaatttattgccctttattcctttttataaatttctatagattaaacggttatttttatgttattggcctaaagccacacgtatatgggtttgtcctgagtccgttttcaaatgcccttgtgatagggaaatggttttgtccatgtttttggaaaaacttgggtatgtccaaaaggaagggagggattttttttttccaaagtaatttatgatttttaattttttaatgggccttggatatgggccaaatgatggaaaaaaaccagtaaactttttgtttttta

SEQ ID NO: 573607 - DNA, 280 bp, Homo sapiens
  misc_feature (40)..(41): n is a, c, g, or t
  misc_feature (48)..(49): n is a, c, g, or t
  misc_feature (54)..(54): n is a, c, g, or t
  misc_feature (59)..(59): n is a, c, g, or t
  misc_feature (63)..(63): n is a, c, g, or t
  misc_feature (71)..(72): n is a, c, g, or t
  misc_feature (84)..(84): n is a, c, g, or t
  misc_feature (93)..(94): n is a, c, g, or t
  misc_feature (96)..(96): n is a, c, g, or t
  misc_feature (98)..(98): n is a, c, g, or t
  misc_feature (111)..(111): n is a, c, g, or t
  misc_feature (117)..(118): n is a, c, g, or t
  misc_feature (178)..(178): n is a, c, g, or t
tactagtgaccaggagtggacagcatgcctcactctcccnntacaagnncgggnggctnattncgggtgtnncttgtgattttntcccagccnncntnccagctggactgncttttnntggggaacacgtggacgtttgtgttagaagctccagtcacatccttcaatcccaagcttnttttccatggtgaattacacaggcagtgttttccaaaattgtcattgatcagtacaggcccagagagacactctgacaacccgtcgctattttcaggatccg

SEQ ID NO: 573608 - DNA, 946 bp, Homo sapiens
  misc_feature (2)..(2): n is a, c, g, or t
  misc_feature (4)..(4): n is a, c, g, or t
  misc_feature (28)..(28): n is a, c, g, or t
  misc_feature (31)..(31): n is a, c, g, or t
  misc_feature (44)..(44): n is a, c, g, or t
  misc_feature (54)..(54): n is a, c, g, or t
  misc_feature (104)..(104): n is a, c, g, or t
  misc_feature (136)..(136): n is a, c, g, or t
  misc_feature (143)..(143): n is a, c, g, or t
  misc_feature (155)..(155): n is a, c, g, or t
  misc_feature (180)..(180): n is a, c, g, or t
  misc_feature (214)..(214): n is a, c, g, or t
  misc_feature (249)..(249): n is a, c, g, or t
  misc_feature (264)..(264): n is a, c, g, or t
  misc_feature (268)..(268): n is a, c, g, or t
  misc_feature (317)..(317): n is a, c, g, or t
  misc_feature (319)..(319): n is a, c, g, or t
  misc_feature (321)..(321): n is a, c, g, or t
  misc_feature (472)..(472): n is a, c, g, or t
  misc_feature (503)..(503): n is a, c, g, or t
  misc_feature (581)..(581): n is a, c, g, or t
  misc_feature (587)..(587): n is a, c, g, or t
  misc_feature (594)..(594): n is a, c, g, or t
  misc_feature (605)..(605): n is a, c, g, or t
  misc_feature (689)..(689): n is a, c, g, or t
  misc_feature (691)..(691): n is a, c, g, or t
  misc_feature (702)..(702): n is a, c, g, or t
cnanagtgggacagggttttaaccacanatnggggcggcatgcnattcctagtnacttgctggacagtattttttcataattacaggaagtttttatttttaanactgggtctggggtatatttatttgccccatnacctctntctaaaggcccnagtcctagggctgccatggtgacanggagactgatgctcctttagattgtttctctggngccgacatagtgtgggacaaagagtcacctagaangcatccttggtcatnattntctccttcccgcctggccgagagaggcttgaatcccagttgtttctccngntntcacctcccccaggaggtcaggattccactgacgtcctgggcagccagtgaatttaattttccatgagaaacgacagagttaacctgtggcattaggagacctacttcatgtggaccctttttttccttcagtttaacttttctggagcantgtgctgcgtagttcggcctgagtttgtgcngcttgtttaaaccactcttgtgtacgctatgttgaagctcaacaaaagagtcatgggaccacttctagaaatctttcngctttnaggcctnttaatctcatnacagtttgttggttgtgccaaacactttatttgggaaaggaaagcccagatttgaatgggtctttcccctgggccttatcctananaggcatttgtnatatggagaaaataatttttcatttttgctcatttaattctataaattctctttataaaggaaatttgtggtcttaagttctccttaaaagacctttggattaataaaattaaaatccttacctggccgaatggtggctgcagatgatggtggtggaaaaccgggatcattgacccctgtgcttccattccctagagaggtttaatagttacatgagcaaaagctgttgccccaaagtgatggc

SEQ ID NO: 573609 - DNA, 1476 bp, Homo sapiens
  misc_feature (537)..(537): n is a, c, g, or t
  misc_feature (545)..(545): n is a, c, g, or t
  misc_feature (548)..(548): n is a, c, g, or t
  misc_feature (553)..(553): n is a, c, g, or t
  misc_feature (555)..(555): n is a, c, g, or t
  misc_feature (566)..(566): n is a, c, g, or t
  misc_feature (596)..(596): n is a, c, g, or t
  misc_feature (624)..(624): n is a, c, g, or t
gaggtcagtctcgctatattgcccaggctggtcttgaatgcctgggctcaagcaatcctcccaccttggccacctgaatagctgggactacaggcatgtgccactatgcccagctaattttttgtatttttagtagagatgaggcaatatttttaatatagctaatgcatgatgttaaaaactttgcatatggaaaagatgcattcaaaatagaagacagatcaatgaattttagtgtagtcattttaagtttagtgacatagtttcagtttccacattgcaactatacactgtggagttttagcatagtatctaagaatgaatatccacagttctgaacaggttattttagcactcttttccagcaatatatctctgagaggccatactttcttcacgtatgtcaaacaaataacatattgcaacataattgttcttcagacttgttttttagcagcagacacatttccaaatgtaatcttactctgaatctgagcttcattatacaatacagacaaaagtgagcttttccagttnaagtaggngtntgatntnaaacacacccntggccccaacaaaacaaataaaactcccantcttattttaagagcttgttgaagaganttattaagtaacgccgcccttcctttcggccggaaccgccatcttccagtaattcgccaaaatgacgaacacaaagggaaagaggagaggcacccgatatatgttctctaggccttttagaaaacatggagttgttcctttggccacatatatgcgaatctataagaaaggtgatattgtagacatcaagggaatgggtactgttcaaaaaggaatgccccacaagtgttaccatggcaaaactggaagagtctacaatgttacccagcatgctgttggcattgttgtaaacaaacaagttaagggcaagattcttgccaagagaattaatgtgcgtattgagcacattaagcactctaagagccgagatagcttcctgaaacgtgtgaaggaaaatgatcagaaaaagaaagaagccaaagagaaaggtacctgggttcaactaaagcgccagcctgctccacccagagaagcacactttgtgagaaccaatgggaaggagcctgagctgctggaacctattccctatgaattcatggcataataggtgttaaaaaaaaaaataaaggacctctgggctacaaaaaaaaaaaaaaaaaaaaccgcaggtagttcaggccgggtctggctgtggtcttcccccgtaggaaatggcggggagctccaggggacccaggcgccgtcgattcggcggagcctgggttgaccagccaggacaggggggtaaacccgaacaattctgcgcgaggtagggaggccaggcgtcggaagaaatggtctccggggtgaagtcggctggtgatggcctaggagctggactgacgaagcgaagactcgactcccaggtcagaa

SEQ ID NO: 573610 - DNA, 932 bp, Homo sapiens
  misc_feature (630)..(630): n is a, c, g, or t
  misc_feature (779)..(779): n is a, c, g, or t
gagggcctacgcgtggctcccgggcgctacgtgttcgacagacttgaaccgcgaccttgtggcctcagccagtaattcgccaaaatgacgaacacaaagggaaagaggagaggcacccgatatatgttctctaggccttttagaaaacatggagttgttcctttggccacatatatgcgaatctataagaaaggtgatattgtagacatcaagggaatgggtactgttcaaaaaggaatgccccacaagtgttaccatggcaaaactggaagagtctacaatgttacccagcatgctgttggcattgttgtaaacaaacaagttaagggcaagattcttgccaagagaattaatgtgcgtattgagcacattaagcactctaagagccgagatagcttcctgaaacgtgtgaaggaaaatgatcagaaaaagaaagaagccaaagagaaaggtacctgggttcaactaaagcgccagcctgctccacccagagaagcacactttgtgagaaccaatgggaaggagcctgagctgctggaacctattccctatgaattcatggcataataggtgttaaaaaaaaaaataaaggacctctgggctacaaaaaaaaaaaaaaaaaaaacccgngggcatcaaatggcggggggcgggaaaaaaggggtactggaatgggccatgggccaaagcggttccctggacccagttttcctggtccaagggggaaatcggcggggccccaaaagggaggcggaaaaattccgaaaagccaggtaccnggtagagaatcggcgaccaaggccgccgggaaccaagacacccgcgctagtgacgcggtctataggggggacgcaagcgagtctggagagaccacgaattcgcgggcgcagaacagcggccagagaacaaaagaaaaaccagccagcgccgac

SEQ ID NO: 573611 - DNA, 867 bp, Homo sapiens
  misc_feature (841)..(841): n is a, c, g, or t
gctgggtatgtccaaaccccgtaaactgaaatattgctttgtaccttatatggtgggtacctggggttgttccattatagaccgtctttcttcccattgtgtagaggatccatccagtgtggagcgtgccttgtgtcgcagattttcgaaagaggtcatagccttacatacccgtgttaactatgcctcccccatagtactctgagacgaattgtgcactctggtgttcccctttacattaaggcccgtcttcgtagaacaattcttcattatgactgtggaaaagccctgtcttgtaggcccgcccgagagctttctgttgttgaacttgaggagcctagtatatacttagcctattatttgagcactaagggatattttcttgctcttagtcttaataacgtggtatggcagctgatacacctgaaggcccccaaatagcataccttgtgctttaactatcgctctgaatagcctgttttcaaattgtgccattttgtgtggaatctttgagaaaattataagagccaaatagtcatacatgacctcggttgggtgagacgacacaacacattttatcgacgactctttggaatttacttgtagaccactcgcccaagatagcttattccttgggaccataagttatgaaaactcatgatcaagatatatgtgtatacatacagtgtatctggtttgtcaggtctaacaaggctaggctgcaaaattaatatctagacattcttttaatgccaccacacgtgtctccgcttctctgcttttaaagtatttataaaatataattgtacattttgtaaaatattatgtgtgatttctatcncttgtcatatcactgtataccagtcg

SEQ ID NO: 573612 - DNA, 957 bp, Homo sapiens
  misc_feature (655)..(655): n is a, c, g, or t
  misc_feature (804)..(804): n is a, c, g, or t
ggacgcgtgggtcgacggacgcgtgggtcgacccacgcgtccgcgccatcttgacccacgcggtcggacccacgcgtcgcggacgcgtgggtcccagtaattcgccaaaatgacgaacacaaagggaaagaggagaggcacccgatatatgttctctaggccttttagaaaacatggagttgttcctttggccacatatatgcgaatctataagaaaggtgatattgtagacatcaagggaatgggtactgttcaaaaaggaatgccccacaagtgttaccatggcaaaactggaagagtctacaatgttacccagcatgctgttggcattgttgtaaacaaacaagttaagggcaagattcttgccaagagaattaatgtgcgtattgagcacattaagcactctaagagccgagatagcttcctgaaacgtgtgaaggaaaatgatcagaaaaagaaagaagccaaagagaaaggtacctgggttcaactaaagcgccagcctgctccacccagagaagcacactttgtgagaaccaatgggaaggagcctgagctgctggaacctattccctatgaattcatggcataataggtgttaaaaaaaaaaataaaggacctctgggctacaaaaaaaaaaaaaaaaaaaacccgngggcatcaaatggcggggggcgggaaaaaaggggtactggaatgggccatgggccaaagcggttccctggacccagttttcctggtccaagggggaaatcggcggggccccaaaagggaggcggaaaaattccgaaaagccaggtaccnggtagagaatcggcgaccaaggccgccgggaaccaagacacccgcgctagtgacgcggtctataggggggacgcaagcgagtctggagagaccacgaattcgcgggcgcagaacagcggccagagaacaaaagaaaaaccagccagcgccgac

SEQ ID NO: 573613 - DNA, 155 bp, Homo sapiens
tcctcctcctgtaaatgacgtgattcatctcagaaggtaacacatttccagcaccagctcaagatatattacacagtataaccccttctgggaccttcacatttggtctgactaatttgactattatccctcctcctcctgtaatgcactagaat

SEQ ID NO: 573614 - DNA, 915 bp, Homo sapiens
  misc_feature (753)..(753): n is a, c, g, or t
  misc_feature (756)..(756): n is a, c, g, or t
  misc_feature (765)..(765): n is a, c, g, or t
  misc_feature (781)..(781): n is a, c, g, or t
  misc_feature (793)..(793): n is a, c, g, or t
  misc_feature (805)..(806): n is a, c, g, or t
  misc_feature (810)..(810): n is a, c, g, or t
  misc_feature (817)..(818): n is a, c, g, or t
  misc_feature (822)..(823): n is a, c, g, or t
  misc_feature (837)..(837): n is a, c, g, or t
  misc_feature (849)..(849): n is a, c, g, or t
  misc_feature (870)..(871): n is a, c, g, or t
  misc_feature (876)..(876): n is a, c, g, or t
  misc_feature (882)..(883): n is a, c, g, or t
  misc_feature (889)..(889): n is a, c, g, or t
  misc_feature (893)..(893): n is a, c, g, or t
  misc_feature (895)..(895): n is a, c, g, or t
  misc_feature (898)..(898): n is a, c, g, or t
  misc_feature (905)..(905): n is a, c, g, or t
ggacgcgtgggtcgacggacgcgtgggtcgacccacgcgtccgcgccatcttgacccacgcggtcggacccacgcgtcgcggacgcgtgggtcccagtaattcgccaaaatgacgaacacaaagggaaagaggagaggcacccgatatatgttctctaggccttttagaaaacatggagttgttcctttggccacatatatgcgaatctataagaaaggtgatattgtagacatcaagggaatgggtactgttcaaaaaggaatgccccacaagtgttaccatggcaaaactggaagagtctacaatgttacccagcatgctgttggcattgttgtaaacaaacaagttaagggcaagattcttgccaagagaattaatgtgcgtattgagcacattaagcactctaagagccgagatagcttcctgaaacgtgtgaaggaaaatgatcagaaaaagaaagaagccaaagagaaaggtacctgggttcaactaaagcgccagcctgctccacccagagaagcacactttgtgagaaccaatgggaaggagcctgagctgctggaacctattccctatgaattcatggcataataggtgttaaaaaaaaaaataaaggacctctgggctacaaaaaaaaaaaaaaaaaaaaaaaaaaaaaaaaaaaaaacaaaaaaaaaaaaaaaaaaaaaaaaaaaagaaaaaaaaaaaaaaaaaaaaacaacacaaacttgtgggcgcgcggccttgggccncgngaaaaaggnttttcaaaaccactcncggtggggcggngggggccccagnnaggntataggnngacnnggggccaaaagcgnggtcccaaaganaacacccggggcaaggcaacnnagggngctggnnttctcncacnantanaaaaaanggcgcggggg

SEQ ID NO: 573615 - DNA, 299 bp, Homo sapiens
aggggccaagactcccgctctgcctcgccagttttttttccttccaccggtgcctcaatcacccctttcaagacaccctgcctattcgggcggctcctgaggggtccagccactccgggggcaagagccctccaccacagggtccctggaacccaaagcatgcaaggcaggggcggcgtagggaggcccggggaccaagacccctcctctaccgcggcaggtttttttctaccacctgtgccttgacctcccctttcaggcctccctgacgctttgggcggccgcagacggggcgcgca

SEQ ID NO: 573616 - DNA, 1242 bp, Homo sapiens
  misc_feature (537)..(537): n is a, c, g, or t
  misc_feature (545)..(545): n is a, c, g, or t
  misc_feature (548)..(548): n is a, c, g, or t
  misc_feature (553)..(553): n is a, c, g, or t
  misc_feature (555)..(555): n is a, c, g, or t
  misc_feature (566)..(566): n is a, c, g, or t
  misc_feature (596)..(596): n is a, c, g, or t
  misc_feature (624)..(624): n is a, c, g, or t
  misc_feature (1212)..(1212): n is a, c, g, or t
gaggtcagtctcgctatattgcccaggctggtcttgaatgcctgggctcaagcaatcctcccaccttggccacctgaatagctgggactacaggcatgtgccactatgcccagctaattttttgtatttttagtagagatgaggcaatatttttaatatagctaatgcatgatgttaaaaactttgcatatggaaaagatgcattcaaaatagaagacagatcaatgaattttagtgtagtcattttaagtttagtgacatagtttcagtttccacattgcaactatacactgtggagttttagcatagtatctaagaatgaatatccacagttctgaacaggttattttagcactcttttccagcaatatatctctgagaggccatactttcttcacgtatgtcaaacaaataacatattgcaacataattgttcttcagacttgttttttagcagcagacacatttccaaatgtaatcttactctgaatctgagcttcattatacaatacagacaaaagtgagcttttccagttnaagtaggngtntgatntnaaacacacccntggccccaacaaaacaaataaaactcccantcttattttaagagcttgttgaagaganttattaagtaacgccgcccttcctttcggccggaaccgccatcttccagtaattcgccaaaatgacgaacacaaagggaaagaggagaggcacccgatatatgttctctaggccttttagaaaacatggagttgttcctttggccacatatatgcgaatctataagaaaggtgatattgtagacatcaagggaatgggtactgttcaaaaaggaatgccccacaagtgttaccatggcaaaactggaagagtctacaatgttacccagcatgctgttggcattgttgtaaacaaacaagttaagggcaagattcttgccaagagaattaatgtgcgtattgagcacattaagcactctaagagccgagatagcttcctgaaacgtgtgaaggaaaatgatcagaaaaagaaagaagccaaagagaaaggtacctgggttcaactaaagcgccagcctgctccacccagagaagcacactttgtgagaaccaatgggaaggagcctgagctgctggaacctattccctatgaattcatggcataataggtgttaaaaaaaaaaataaaggacctctgggcacacattanggaggggatccttctagagtcgccccgcct

SEQ ID NO: 573617 - DNA, 1282 bp, Homo sapiens
  misc_feature (537)..(537): n is a, c, g, or t
  misc_feature (545)..(545): n is a, c, g, or t
  misc_feature (548)..(548): n is a, c, g, or t
  misc_feature (553)..(553): n is a, c, g, or t
  misc_feature (555)..(555): n is a, c, g, or t
  misc_feature (566)..(566): n is a, c, g, or t
  misc_feature (596)..(596): n is a, c, g, or t
  misc_feature (624)..(624): n is a, c, g, or t
gaggtcagtctcgctatattgcccaggctggtcttgaatgcctgggctcaagcaatcctcccaccttggccacctgaatagctgggactacaggcatgtgccactatgcccagctaattttttgtatttttagtagagatgaggcaatatttttaatatagctaatgcatgatgttaaaaactttgcatatggaaaagatgcattcaaaatagaagacagatcaatgaattttagtgtagtcattttaagtttagtgacatagtttcagtttccacattgcaactatacactgtggagttttagcatagtatctaagaatgaatatccacagttctgaacaggttattttagcactcttttccagcaatatatctctgagaggccatactttcttcacgtatgtcaaacaaataacatattgcaacataattgttcttcagacttgttttttagcagcagacacatttccaaatgtaatcttactctgaatctgagcttcattatacaatacagacaaaagtgagcttttccagttnaagtaggngtntgatntnaaacacacccntggccccaacaaaacaaataaaactcccantcttattttaagagcttgttgaagaganttattaagtaacgccgcccttcctttcggccggaaccgccatcttccagtaattcgccaaaatgacgaacacaaagggaaagaggagaggcacccgatatatgttctctaggccttttagaaaacatggagttgttcctttggccacatatatgcgaatctataagaaaggtgatattgtagacatcaagggaatgggtactgttcaaaaaggaatgccccacaagtgttaccatggcaaaactggaagagtctacaatgttacccagcatgctgttggcattgttgtaaacaaacaagttaagggcaagattcttgccaagagaattaatgtgcgtattgagcacattaagcactctaagagccgagatagcttcctgaaacgtgtgaaggaaaatgatcagaaaaagaaagaagccaaagagaaaggtacctgggttcaactaaagcgccagcctgctccacccagagaagcacactttgtgagaaccaatgggaaggagcctgagctgctggaacctattccctatgaattcatggcataataggtgttaaaaaaaaaaataaaggacctctgagacccaccttgctcataaacaaaatgcccatgtgtcctctgcctggacctgtacactcggccacaaataacaaggaccgag

SEQ ID NO: 573618 - DNA, 884 bp, Homo sapiens
accactgaagaatctggctgtcgccatggtccgccgccccgaccgtagttaccggtattgtaatcaatcaaggccgatacccaaagtctcgcttgctgccgaggtgtccctgatgccaacattcgcattttggacctgaggcggaaaaaggcgaaaagtggatgactttccgctttgtgccacatggtgtcagatgaatatgagcagctgttctctgaagccctggaggctgtccgaatttgtgccaataattggtacatggtacaaagttgtggcgaaagatggtttccatatccgggtgcggctccaccccttccacgtacatccgtgatcaacaagatgttgtcctgtgctgtgcgctgatcaggctccaaacaggctctgcgatggtgcctttggacataagccaccaggctcactgtgcggccaggcttcacattggtctaaggttatcatgttccatccgcaccaggctgcagacaattcgaagggatcatgtgattgaggccctgcgcagggtctaagtctcaagtttcctggtcgccatgaatatccacatctcaaagaaagtggggcttcaccaagtgcaactgctagatgaatctgatgacctggtgagctgataagcggttcatccgcagatggcttgtaggggtcaacgtacatcccccaactcgtgcgcccttctggacaacgttggtgggccttgcactcatgagggcttcgatgtgctgccccctcttaatactcacataaatctactttctgtcccctaaaaaaagacaagatacccaaaaggggcgcggtcaatacccccgggggccacgtttctcccccttttttcacaggcccataaacgaaaaaaaaagggacccttaacagga

SEQ ID NO: 573619 - DNA, 1383 bp, Homo sapiens
  misc_feature (537)..(537): n is a, c, g, or t
  misc_feature (545)..(545): n is a, c, g, or t
  misc_feature (548)..(548): n is a, c, g, or t
  misc_feature (553)..(553): n is a, c, g, or t
  misc_feature (555)..(555): n is a, c, g, or t
  misc_feature (566)..(566): n is a, c, g, or t
  misc_feature (596)..(596): n is a, c, g, or t
  misc_feature (624)..(624): n is a, c, g, or t
  misc_feature (1268)..(1268): n is a, c, g, or t
  misc_feature (1283)..(1283): n is a, c, g, or t
  misc_feature (1285)..(1286): n is a, c, g, or t
  misc_feature (1288)..(1288): n is a, c, g, or t
  misc_feature (1298)..(1298): n is a, c, g, or t
  misc_feature (1302)..(1302): n is a, c, g, or t
  misc_feature (1309)..(1309): n is a, c, g, or t
  misc_feature (1312)..(1312): n is a, c, g, or t
  misc_feature (1315)..(1315): n is a, c, g, or t
  misc_feature (1323)..(1323): n is a, c, g, or t
  misc_feature (1327)..(1328): n is a, c, g, or t
  misc_feature (1330)..(1330): n is a, c, g, or t
  misc_feature (1334)..(1334): n is a, c, g, or t
  misc_feature (1336)..(1336): n is a, c, g, or t
  misc_feature (1339)..(1339): n is a, c, g, or t
  misc_feature (1350)..(1352): n is a, c, g, or t
gaggtcagtctcgctatattgcccaggctggtcttgaatgcctgggctcaagcaatcctcccaccttggccacctgaatagctgggactacaggcatgtgccactatgcccagctaattttttgtatttttagtagagatgaggcaatatttttaatatagctaatgcatgatgttaaaaactttgcatatggaaaagatgcattcaaaatagaagacagatcaatgaattttagtgtagtcattttaagtttagtgacatagtttcagtttccacattgcaactatacactgtggagttttagcatagtatctaagaatgaatatccacagttctgaacaggttattttagcactcttttccagcaatatatctctgagaggccatactttcttcacgtatgtcaaacaaataacatattgcaacataattgttcttcagacttgttttttagcagcagacacatttccaaatgtaatcttactctgaatctgagcttcattatacaatacagacaaaagtgagcttttccagttnaagtaggngtntgatntnaaacacacccntggccccaacaaaacaaataaaactcccantcttattttaagagcttgttgaagaganttattaagtaacgccgcccttcctttcggccggaaccgccatcttccagtaattcgccaaaatgacgaacacaaagggaaagaggagaggcacccgatatatgttctctaggccttttagaaaacatggagttgttcctttggccacatatatgcgaatctataagaaaggtgatattgtagacatcaagggaatgggtactgttcaaaaaggaatgccccacaagtgttaccatggcaaaactggaagagtctacaatgttacccagcatgctgttggcattgttgtaaacaaacaagttaagggcaagattcttgccaagagaattaatgtgcgtattgagcacattaagcactctaagagccgagatagcttcctgaaacgtgtgaaggaaaatgatcagaaaaagaaagaagccaaagagaaaggtacctgggttcaactaaagcgccagcctgctccacccagagaagcacactttgtgagaaccaatgggaaggagcctgagctgctggaacctattccctatgaattcatggcataataggtgttaaaaaaaaaaataaaggacctctgggctacaaaaataaaaaaaaaaaaaaaaaaaaccccggggatttttttgggggggggaaaaaggggtntggaaagggccgggntnnanggtttccggncccnatttttnggnacnaggggganaatnngngggncnccntaagggggggnnnaattgaaaaagccggggttaacctgtttatg

SEQ ID NO: 573620 - DNA, 161 bp, Homo sapiens
gatctaatcgagctctgtacctctcatggaactgagtacacagtacatttgttatagtagattttattagtgattaggaaaaatgataagagattgacatctttcaattgacatagatgccaatcattttaagtattattttttaaacatctttgattctt

SEQ ID NO: 573621 - DNA, 1543 bp, Homo sapiens
  misc_feature (537)..(537): n is a, c, g, or t
  misc_feature (545)..(545): n is a, c, g, or t
  misc_feature (548)..(548): n is a, c, g, or t
  misc_feature (553)..(553): n is a, c, g, or t
  misc_feature (555)..(555): n is a, c, g, or t
  misc_feature (566)..(566): n is a, c, g, or t
  misc_feature (596)..(596): n is a, c, g, or t
  misc_feature (624)..(624): n is a, c, g, or t
gaggtcagtctcgctatattgcccaggctggtcttgaatgcctgggctcaagcaatcctcccaccttggccacctgaatagctgggactacaggcatgtgccactatgcccagctaattttttgtatttttagtagagatgaggcaatatttttaatatagctaatgcatgatgttaaaaactttgcatatggaaaagatgcattcaaaatagaagacagatcaatgaattttagtgtagtcattttaagtttagtgacatagtttcagtttccacattgcaactatacactgtggagttttagcatagtatctaagaatgaatatccacagttctgaacaggttattttagcactcttttccagcaatatatctctgagaggccatactttcttcacgtatgtcaaacaaataacatattgcaacataattgttcttcagacttgttttttagcagcagacacatttccaaatgtaatcttactctgaatctgagcttcattatacaatacagacaaaagtgagcttttccagttnaagtaggngtntgatntnaaacacacccntggccccaacaaaacaaataaaactcccantcttattttaagagcttgttgaagaganttattaagtaacgccgcccttcctttcggccggaaccgccatcttccagtaattcgccaaaatgacgaacacaaagggaaagaggagaggcacccgatatatgttctctaggccttttagaaaacatggagttgttcctttggccacatatatgcgaatctataagaaaggtgatattgtagacatcaagggaatgggtactgttcaaaaaggaatgccccacaagtgttaccatggcaaaactggaagagtctacaatgttacccagcatgctgttggcattgttgtaaacaaacaagttaagggcaagattcttgccaagagaattaatgtgcgtattgagcacattaagcactctaagagccgagatagcttcctgaaacgtgtgaaggaaaatgatcagaaaaagaaagaagccaaagagaaaggtacctgggttcaactaaagcgccagcctgctccacccagagaagcacactttgtgagaaccaatgggaaggagcctgagctgctggaacctattccctatgaattcatggcataataggtgttaaaaaaaaaaataaaggacctctgggcggctacaaaaaaaaaaaaaaaaaaaatacaaaaataaaaaaaaaaaaaaaaaaaaaagaggggggggcaaagaaaatttacctcaggggggggcgcagatatttaggaggggtaagcggttttttgtggaaaagggcggccccaataatggaggagatattataatagagagggacggagcgatttatataaagcgctagtgagtggaaaaacgtgatcgtgggcatgtggaagaacgcccttttggggggggaattggagaacatgtaagagttaagcgtggagaaataacgtaggtgatgtgtaaggtaatgtgtgagagtgtaggatttaaataggg

SEQ ID NO: 573622 - DNA, 539 bp, Homo sapiens
ggcacgagctcttacatcagtgcaggggaagtttatccaagtagcagtttcccggggattataaaaatccccgaggcattggtctgggtgtggcgccttttttgggtggtgttttttcacgtccctcccctcccctttctccataaacaagagaggcattaactgggaaggtccgtggaaagtctaagaagcggatgggggtaattggccggccttccctttagttggaacagcgtttactcgggaagaggtcaggggcctttttctgggtggtgatttatgcaagtgttatctgaaggcgagtggagtgagtttacgtgggattggctgttggccaccggtggtggtgcgggctccttccttccggggatgagttccattctctcccggtcggccaggagtgaggctccccagccagagcagtcccccgtgtgcttatccccttccttcgtaaacggcagccattggtgattttccataaccacttttatagacacataataatttcctttgaatcagtttgcatcttaaattaagtt

SEQ ID NO: 573623 - DNA, 959 bp, Homo sapiens
ggagcccactcaaggggatgaggaggtttaagccacaagtggtggctaaataaaagcttagtcagagctgggcacggtggctcgcacctgtgatcccagctacttgggaggctgaggcaggagaatggcttgaacctgggaggcagcaggttgcagttgggctgagatcgcaccattgcaactccagcctgggtgactgagcgagactccatcccaaaaaaaggaccacaaataaaaggggtttaagccagagatttggggagtttgcaggcaaaaaacccttttctggtggcgggggttgggcacattaccgggcctaagggaggcaggggaagacccattagagctcttcctgggaggcaggtgggccaccaggcgaacaagcgaatataaccttgtgggccctttaagggggcacaacctcatagtcggacaactggatctacagcggagaggttaactcactacagaggacggttccccacaggttacacatattaaactcatatacgcgaattattctaatattactcgtagcctaatatagggataacgaaatatcttgtcaggatcggttcaacccaacctaagggctaatcaccctttaacatactcgttggacaattcaaaaggagagttgcgggccaagaaaacagggttggaagataacggcgcttgactctaaattaggccaaaagctgttgggcatttctacaatctgaagccgttaatagaaagagagcctccataaattaacgaacggtttggtaccctgtggtggctcttggcggcaccgacagcggcgaaacagacctcacgtggagcagggcatcacgcgggaccccattttggagcactgtgaagcactgagacaggttcagacgtgtgtatgggacccttctaacaagaaaacaaaaaggggcgggcagggaactggggcggagctagtattgatcgcg

SEQ ID NO: 573624 - DNA, 1357 bp, Homo sapiens
  misc_feature (537)..(537): n is a, c, g, or t
  misc_feature (545)..(545): n is a, c, g, or t
  misc_feature (548)..(548): n is a, c, g, or t
  misc_feature (553)..(553): n is a, c, g, or t
  misc_feature (555)..(555): n is a, c, g, or t
  misc_feature (566)..(566): n is a, c, g, or t
  misc_feature (596)..(596): n is a, c, g, or t
  misc_feature (624)..(624): n is a, c, g, or t
gaggtcagtctcgctatattgcccaggctggtcttgaatgcctgggctcaagcaatcctcccaccttggccacctgaatagctgggactacaggcatgtgccactatgcccagctaattttttgtatttttagtagagatgaggcaatatttttaatatagctaatgcatgatgttaaaaactttgcatatggaaaagatgcattcaaaatagaagacagatcaatgaattttagtgtagtcattttaagtttagtgacatagtttcagtttccacattgcaactatacactgtggagttttagcatagtatctaagaatgaatatccacagttctgaacaggttattttagcactcttttccagcaatatatctctgagaggccatactttcttcacgtatgtcaaacaaataacatattgcaacataattgttcttcagacttgttttttagcagcagacacatttccaaatgtaatcttactctgaatctgagcttcattatacaatacagacaaaagtgagcttttccagttnaagtaggngtntgatntnaaacacacccntggccccaacaaaacaaataaaactcccantcttattttaagagcttgttgaagaganttattaagtaacgccgcccttcctttcggccggaaccgccatcttccagtaattcgccaaaatgacgaacacaaagggaaagaggagaggcacccgatatatgttctctaggccttttagaaaacatggagttgttcctttggccacatatatgcgaatctataagaaaggtgatattgtagacatcaagggaatgggtactgttcaaaaaggaatgccccacaagtgttaccatggcaaaactggaagagtctacaatgttacccagcatgctgttggcattgttgtaaacaaacaagttaagggcaagattcttgccaagagaattaatgtgcgtattgagcacattaagcactctaagagccgagatagcttcctgaaacgtgtgaaggaaaatgatcagaaaaagaaagaagccaaagagaaaggtacctgggttcaactaaagcgccagcctgctccacccagagaagcacactttgtgagaaccaatgggaaggagcctgagctgctggaacctattccctatgaattcatggcataataggtgttaaaaaaaaaaataaaggacctctgggctacaaaaaagaaaaataaaacaatacactctcactatacaaacctaaacaaacggcccaattcaattctaaattcggagcagccttatttttggcggcccaattttggactcacttgggccatttcgccttaaagggggtcgtttaacaattac

SEQ ID NO: 573625 - DNA, 604 bp, Homo sapiens
  misc_feature (269)..(269): n is a, c, g, or t
  misc_feature (347)..(347): n is a, c, g, or t
  misc_feature (375)..(375): n is a, c, g, or t
  misc_feature (396)..(396): n is a, c, g, or t
  misc_feature (412)..(412): n is a, c, g, or t
  misc_feature (449)..(449): n is a, c, g, or t
  misc_feature (457)..(457): n is a, c, g, or t
  misc_feature (513)..(513): n is a, c, g, or t
  misc_feature (526)..(526): n is a, c, g, or t
  misc_feature (586)..(586): n is a, c, g, or t
ctggtatcccttcctcttttaataagggcactaatcccaccaagggctccatcctcataatctcgctaaacctaattacttccccaaagcctcacctcctaataccatcacatgggggattagggcttctttaactttttaacttttaagttcagaagtacatgtgcaagtttcttatgtaggtcttgtgttgtggggtttgttgtacagattatttcattacacactcttaagcccagtacccattcgttattcttcctgatcctctntctctaccctccaataggccccagtgtctcttgttcccctctatgtgtccatgcgttctcatcatttagctcacactngtaagtgagaacatgtggtatctaggtntctgttccttcattagtttgntaaggataatagcctncagctccatccatgtttcctgcaaggacatgatctcnattctttntatggctgcatagtactccatggtgtatgtaccatattttatttttcaataccaantgatggcatttangttgatttcaagtatttgctattgcgagtagtgctgcagtgaacatacatgggatatatncttatgatagcgatttgt

SEQ ID NO: 573626 - DNA, 1494 bp, Homo sapiens
  misc_feature (537)..(537): n is a, c, g, or t
  misc_feature (545)..(545): n is a, c, g, or t
  misc_feature (548)..(548): n is a, c, g, or t
  misc_feature (553)..(553): n is a, c, g, or t
  misc_feature (555)..(555): n is a, c, g, or t
  misc_feature (566)..(566): n is a, c, g, or t
  misc_feature (596)..(596): n is a, c, g, or t
  misc_feature (624)..(624): n is a, c, g, or t
  misc_feature (1332)..(1332): n is a, c, g, or t
  misc_feature (1335)..(1335): n is a, c, g, or t
  misc_feature (1344)..(1344): n is a, c, g, or t
  misc_feature (1360)..(1360): n is a, c, g, or t
  misc_feature (1372)..(1372): n is a, c, g, or t
  misc_feature (1384)..(1385): n is a, c, g, or t
  misc_feature (1389)..(1389): n is a, c, g, or t
  misc_feature (1396)..(1397): n is a, c, g, or t
  misc_feature (1401)..(1402): n is a, c, g, or t
  misc_feature (1416)..(1416): n is a, c, g, or t
  misc_feature (1428)..(1428): n is a, c, g, or t
  misc_feature (1449)..(1450): n is a, c, g, or t
  misc_feature (1455)..(1455): n is a, c, g, or t
  misc_feature (1461)..(1462): n is a, c, g, or t
  misc_feature (1468)..(1468): n is a, c, g, or t
  misc_feature (1472)..(1472): n is a, c, g, or t
  misc_feature (1474)..(1474): n is a, c, g, or t
  misc_feature (1477)..(1477): n is a, c, g, or t
  misc_feature (1484)..(1484): n is a, c, g, or t
gaggtcagtctcgctatattgcccaggctggtcttgaatgcctgggctcaagcaatcctcccaccttggccacctgaatagctgggactacaggcatgtgccactatgcccagctaattttttgtatttttagtagagatgaggcaatatttttaatatagctaatgcatgatgttaaaaactttgcatatggaaaagatgcattcaaaatagaagacagatcaatgaattttagtgtagtcattttaagtttagtgacatagtttcagtttccacattgcaactatacactgtggagttttagcatagtatctaagaatgaatatccacagttctgaacaggttattttagcactcttttccagcaatatatctctgagaggccatactttcttcacgtatgtcaaacaaataacatattgcaacataattgttcttcagacttgttttttagcagcagacacatttccaaatgtaatcttactctgaatctgagcttcattatacaatacagacaaaagtgagcttttccagttnaagtaggngtntgatntnaaacacacccntggccccaacaaaacaaataaaactcccantcttattttaagagcttgttgaagaganttattaagtaacgccgcccttcctttcggccggaaccgccatcttccagtaattcgccaaaatgacgaacacaaagggaaagaggagaggcacccgatatatgttctctaggccttttagaaaacatggagttgttcctttggccacatatatgcgaatctataagaaaggtgatattgtagacatcaagggaatgggtactgttcaaaaaggaatgccccacaagtgttaccatggcaaaactggaagagtctacaatgttacccagcatgctgttggcattgttgtaaacaaacaagttaagggcaagattcttgccaagagaattaatgtgcgtattgagcacattaagcactctaagagccgagatagcttcctgaaacgtgtgaaggaaaatgatcagaaaaagaaagaagccaaagagaaaggtacctgggttcaactaaagcgccagcctgctccacccagagaagcacactttgtgagaaccaatgggaaggagcctgagctgctggaacctattccctatgaattcatggcataataggtgttaaaaaaaaaaataaaggacctctgggcggctacaaaaaaaaaaaaaaaaaaaaaaaaaaaaaaaaaaaaaacaaaaaaaaaaaaaaaaaaaaaaaaaaaagaaaaaaaaaaaaaaaaaaaaacaacacaaacttgtgggcgcgcggccttgggccncgngaaaaaggnttttcaaaaccactcncggtggggcggngggggccccagnnaggntataggnngacnnggggccaaaagcgnggtcccaaaganaacacccggggcaaggcaacnnagggngctggnnttctcncacnantanaaaaaanggcgcggggg

SEQ ID NO: 573627 - DNA, 327 bp, Homo sapiens
gagaaaacatatatatatagtttcttttaattgatcaggtctaataaatgtgtactaaaaaaaatcagagtatatttaataaagcagaatagtttatttaaagagaaggtctcttccttattgatatcatggtatgcattaattccatttgttactattgtgcacaaaagccctgttcacaggggaatggtgtaaacatttatcctgttttgtacactgtatttagtagacataactgttgaatagttactgaatcatgatgtaaagaatatgtgaccatcttcaggtatgggatttctgaccgtttcaaatttcaatcaatgagca

SEQ ID NO: 573628 - DNA, 843 bp, Homo sapiens
  misc_feature (365)..(365): n is a, c, g, or t
  misc_feature (490)..(490): n is a, c, g, or t
  misc_feature (556)..(556): n is a, c, g, or t
  misc_feature (571)..(571): n is a, c, g, or t
ggagagcgggaagaggaaacgtgagaatgaaagtggatgcccgcgaatcccggaagtcagactgtttttttcagttccctggaggctttttgatactgattcgcgtacacctgttgtttgaaagctctcagcgggacaatgctgacccagctgaaagcaaaatcagaggggaagcttgcaaaacagatttgcaaagttgtgttggatcattttgaaaaacagtattccaaagaactcggagatgcctggaatacagtaagataatttcttctcatccttcaagatttaacatattggataatatacaaaagctaatgttgttcctgaattaataattctcttaaacaataagcttaaaaggaaancatgcaggatttaacctttctaagagataggaaagaaaatgtgaataaatggagaaacatattgtgatcaggattggaaaaattgactgcaataacagatgtgaaatatctccaagtttaaagcntttaatataatcctaggcaaggttactatatctctacctgtctacatacacaaatatgtataaatnatgtttaactgaacntttattccaaagttcatctgaaagaataaacattcaagatagggtttgaaaagttctgaagaaaaaaagaagaacgaatagagatttgtccgtgtctgatgttaactaaattgaaagtgttctactccgtttaagctgatgggtaggcacatgatgccagccaagccgtccttctgtattacctgtgtttgccgatcattttttattacacatgaatcaacactggatagaatttttcaactgtttggagggaaaaataacttctccatcag

SEQ ID NO: 573629 - DNA, 121 bp, Homo sapiens
  misc_feature (118)..(118): n is a, c, g, or t
ttatgagcatgggcagatcatacaaaactcctccctgtgcctaagcatcgaggcgtacgtggaagacgggagtgagtgggtgtgtgccggcggtgctggggctactgggcgagcagantca

SEQ ID NO: 573630 - DNA, 840 bp, Homo sapiens
  misc_feature (362)..(362): n is a, c, g, or t
  misc_feature (487)..(487): n is a, c, g, or t
  misc_feature (553)..(553): n is a, c, g, or t
  misc_feature (568)..(568): n is a, c, g, or t
aaggcagttcacttcagcagtgtgagcgtcaactgagtggcttggtttggaagtattgtttgaacaagtatcccaaatcataagtttctgatgatcagcaactgacccaaacagagacttatggaacagatgccaggaaacatcttctactactactgtatgccctgtaaagatggtctttgcatccaccacatttccctcctttggaacagcactgatgtcccacgggtagatggtgtgatcatctgaagcactaaataatttcttctcatccttcaagatttaacatattggataatatacaaaagctaatgttgttcctgaattaataattctcttaaacaataagcttaaaaggaaancatgcaggatttaacctttctaagagataggaaagaaaatgtgaataaatggagaaacatattgtgatcaggattggaaaaattgactgcaataacagatgtgaaatatctccaagtttaaagcntttaatataatcctaggcaaggttactatatctctacctgtctacatacacaaatatgtataaatnatgtttaactgaacntttattccaaagttcatctgaaagaataaacattcaagatagggtttgaaaagttctgaagaaaaaaagaagaacgaatagagatttgtccgtgtctgatgttaactaaattgaaagtgttctactccgtttaagctgatgggtaggcacatgatgccagccaagccgtccttctgtattacctgtgtttgccgatcattttttattacacatgaatcaacactggatagaatttttcaactgtttggagggaaaaataacttctccatcag

SEQ ID NO: 573631 - DNA, 417 bp, Homo sapiens
tgctgattgccatggacaagaccgggtgaggtcacaggggagacaagtctgtgtcaaaccggctatcgtcggagatgcgtggcgtggcacgggtcttatctacatcccatagactcaggccgagaccccatgtcagaatctttccagagataaacctgctgaaaattggtaaaggtgtcttgagttccttctaagggtgtcagactcttgatgaactcctggtctccaagacgcaatatcacctggtggctctcctggtcatatgtcacaccaggacatgtagcattagcccaggcttcagagggatccatccagtctttgacattacaaagcaggacactgggtgagctcagcaacccacagatgatggcaccctttttcaaatacacagctggagaatcttgaccatggctcctc

SEQ ID NO: 573632 - DNA, 917 bp, Homo sapiens
  misc_feature (844)..(844): n is a, c, g, or t
ggagagcgggaagaggaaacgtgagaatgaaagtggatgcccgcgaatcccggaagtcagactgtttttttcagttccctggaggctttttgatactgattcgcgtacacctgttgtttgaaagctctcagcgggacaatgctgacccagctgaaagcaaaatcagaggggaagcttgcaaaacagatttgcaaagttgtgttggatcattttgaaaaacagtattccaaagaactcggagatgcctggaatacagtaagggagatactaacatctccatcatgctggcaatatgctgtcctgcttaaccgattcaattatccttttgaactggaaaaggatttacatttgaagggctatcacacactctctcagggatctttacccaactatcctaaatcagtgaagtgttaccttagcagaactccgggccgaatcccttcagaaagacaccaaattggaaacctgaaaaaatattatctcctaaatgctgcttctcttctcccagtgttggctctggaattaagggatggggagaaggttctggatctctgtgctgctcctggagggaaatcaatagctctgctgcagtgtgcttgtccaggttatcttcattgtaatgaatatgatagtctgagattgaggtggctaaggcagacgttggaatctttcatcccacaagctttgataaatgtaattaaagtgtctgaattggatggcagaaaaatgggagatgcccagcctgaaatgtttgacaaggtgttagtgggatgctccgtgttcaaatgatcgaagctggttgttttcttctggactcttcaggaagggcatcctgttagggatnaagttcaaagggagggaattttgcctctttcttacaggttaggaggctgtttaagggtcttgccatttaaggg

SEQ ID NO: 573633 - DNA, 1091 bp, Homo sapiens
  misc_feature (974)..(974): n is a, c, g, or t
ggagagcgggaagaggaaacgtgagaatgaaagtggatgcccgcgaatcccggaagtcagactgtttttttcagttccctggaggctttttgatactgattcgcgtacacctgttgtttgaaagctctcagcgggacaatgctgacccagctgaaagcaaaatcagaggggaagcttgcaaaacagatttgcaaagttgtgttggatcattttgaaaaacagtattccaaagaactcggagatgcctggaatacagtaagggagatactaacatctccatcatgctggcaatatgctgtcctgcttaaccgattcaattatccttttgaactggaaaaggatttacatttgaagggctatcacacactctctcagggatctttacccaactatcctaaatcagtgaagtgttaccttagcagaactccgggccgaatcccttcagaaagacaccaaattggaaacctgaaaaaatattatctcctaaatgctgcttctcttctcccagtgttggctctggaattaagggatggggagaaggttctggatctctgtgctgctcctggagggaaatcaatagctctgctgcagtgtgcttgtccaggttatcttcattgtaatgaatatgatagtctgagattgaggtggctaaggcagacgttggaatctttcatcccacaagctttgataaatgtaattaaagtgtctgaattggatggcagaaaaatgggagatgcccagcctgaaatgtttgacaaggtacttttattacattgtgacaaactgatggacgcccagtaataccactattatgttgctttgtggttgttattttccatctgttctcagacatagcctgatacagtttctcagtaccctggaaaattttgataaagtgaacatggaagcagttttcatttgatggtcagcatggttcaaaggaagcagtaacattgggattgaggattatagantgttttatattggcaggtaactcaaagatactcaggaaaagatcggatattatttgggtcagtactgtattgctttaattcagtaacatttcatatcagagtatggacagttgaaga

SEQ ID NO: 573634 - DNA, 115 bp, Homo sapiens
  misc_feature (21)..(21): n is a, c, g, or t
tgcagcagacaacagcacacnttatgttcatgtggatgttaaagccaacaagcaccagttaaacaggctggttctggagctgctgaggaaagagcgggttcacaggtaaataccc

SEQ ID NO: 573635 - DNA, 1538 bp, Homo sapiens
  misc_feature (733)..(733): n is a, c, g, or t
  misc_feature (1465)..(1465): n is a, c, g, or t
ggagagcgggaagaggaaacgtgagaatgaaagtggatgcccgcgaatcccggaagtcagactgtttttttcagttccctggaggctttttgatactgattcgcgtacacctgttgtttgaaagctctcagcgggacaatgctgacccagagacacgtccttgatatgttttccagtctggtcttgaactgggaaatgatcctctcgcctcgtccctgcaaagcatgagccagctggagtacagtggcgcgatctcggctcactgcaacctccacctcctgagttcaagcgattctcccacctcagccccctgagtaggtggggttacaggcgcccaccactactctcggctaattttgtatttttagtagagacgggtttcccgtgttggccaacctggtcttgaactccagacctcatgtgatcctcccgcctctgcctcccacagtgctgggattacaggtgtgagccacctgcctagcccctacagtgactttttaaaattaatttgttccttttgacagtttcttcagccccagtagattctgttttaacctttgcttcacatttggaaaataattatttggaaaaaccttgctttttcataattagataatgtacagttttggtacatgtaaggtattgttccatttcaagaactagtaattatccaaaaaaagtgttcttgtcttaaaaaaagaccttgctaatgttgacgttcagtaaattgtantatcactgtgtgtcagcaactttttcttatcgtcatagctgaaagcaaaatcagaggggaagcttgcaaaacagatttgcaaagttgtgttggatcattttgaaaaacagtattccaaagaactcggagatgcctggaatacagtaagggagatactaacatctccatcatgctggcaatatgctgtcctgcttaaccgattcaattatccttttgaactggaaaaggatttacatttgaagggctatcacacactctctcagggatctttacccaactatcctaaatcagtgaagtgttaccttagcagaactccgggccgaatcccttcagaaagacaccaaattggaaacctgaaaaaatattatctcctaaatgctgcttctcttctcccagtgttggctctggaattaagggatggggagaaggttctggatctctgtgctgctcctggagggaaatcaatagctctgctgcagtgtgcttgtccaggttatcttcattgtaatgaatatgatagtctgagattgaggtggctaaggcagacgttggaatctttcatcccacaagctttgataaatgtaattaaagtgtctgaattggatggcagaaaaatgggagatgcccagcctgaaatgtttgacaaggtgttagtgggatgctccgtgttcaaatgatcgaagctggttgttttcttctggactcttcaggaagggcatcctgttagggatnaagttcaaagggagggaattttgcctctttcttacaggttaggaggctgtttaagggtcttgccatttaaggg

SEQ ID NO: 573636 - DNA, 283 bp, Homo sapiens
gccccggggggcccccccccccccggccccaaaaaagtaccaccccccgggggggggggggggcaaaaccattgtttttccccccccgcccgggccccccaaaagggggcctgggggcccccgggcccccgggccccaaaaggttagttgcctttccccgggggggggggcaaagccccccccccaaaaaaaaggcggggggggttttttcccccctgggggggggggcggcccaaggccccccattaactgaaaaaaaaaaaattttttttttttcccggga

SEQ ID NO: 573637 - DNA, 115 bp, Homo sapiens
  misc_feature (11)..(11): n is a, c, g, or t
gttggaagtgntgaatcctgctgaaaacttccgtgtgctagtgaaacagaagaagggccagcttttagggatgcggctatccagctcataaatcacatcggaacagggttttgga

SEQ ID NO: 573638 - DNA, 402 bp, Homo sapiens
gctactctagaggaccccgacggctgttacctccaacagctgctgcttgtgctgcatgtcgcaccggcaccatcctgctcggcgtctggtatcttgatcatcaatgctgtggtactgttgatttttatttgagtgccctggcctgatcctggatcacgtataactatttcaacgttcttgaacttcgggaggttgactttggaagttcatggattgatgccaacattgtgcatatgccaattggcgatattcctcctttccttcattggaaaacttttttccccccccccgttttttgggggaaaacgttttaaaactttggggttttggcttatgggctacgttaacgggaggcggtaccaaggcaaacgcggcaggccttggatccatcccgattcttcg

SEQ ID NO: 573639 - DNA, 460 bp, Homo sapiens
  misc_feature (2)..(2): n is a, c, g, or t
  misc_feature (18)..(18): n is a, c, g, or t
  misc_feature (28)..(28): n is a, c, g, or t
  misc_feature (55)..(55): n is a, c, g, or t
  misc_feature (90)..(90): n is a, c, g, or t
  misc_feature (149)..(149): n is a, c, g, or t
  misc_feature (358)..(358): n is a, c, g, or t
  misc_feature (360)..(360): n is a, c, g, or t
  misc_feature (362)..(362): n is a, c, g, or t
anccgggggccggaccantgtcccctanttgtgggaagcaaatcgtgggcgcatnacgggcggcagggcctgaagtgaagctatgtttcnagtgtcctctgggtgtttccaagagcaacaggaaacgaataaatctctgatggagtctnactctgtcacccaggctgggattgcagtggcacgatctccgctcactgcaagctccacctcccaggttcacaccatcctcctgcctcagcctcccgagttgcagggactacagcacccgccacaatgcccggctatttttttgtgtttttagtagagatggggtttcactatgttagccaggatggtcttgatctcctgacctcattancncncgactccggctcccaaagtgctggaattacaggcgtgagacaccgcgcctggtctccatcaaatgactttttaaataaaaatacggttctcacctaac

SEQ ID NO: 573640 - DNA, 1410 bp, Homo sapiens
cggacgcgtgggtcgcccacgcgtccgtgggggagcccgcgggagcctgtgaatgttgatacgagctggccagttcctgggcccagctcacgttgtccagactacctgccaggatggctattcactagtgcttctaaagatactattgcatatcctagaggctgggtccccatctgctgtatcgacgtctactggagaagatcctgtcctagctgtgtttatgggatgtgtctctagcgattgtacgaagaaacatgacaaagcgttcctcttgacataggcagcccggaaatgttgcgtgtaggcatcagctcgaacatagtccgcagggtcccatcgttcgccggagggccgctgcgtgtgcccgaagcgcccagagacccacgtctagcagcgtcagcccttgggcgtgatttgccgacgaaacccgggtaaaacgcaagcgccttggtggcagcatgcaggacagcacgaagcaggcgcaggggagaacctgccctctgggatcaccactgcttaggccacagccgtatctcaatcgcgcacgacacgcactgcgacactctgctcccggcacccgcccgcacgccccgcgctgtcccgccgctcccgcctgcgcgcctctgctcgccctccctttcaccgcgcctcgccaccccacgcacccctcgctcgcctccccccgctccctgcctgtctcgctgcgcccctctcacccgcaccctcaccgcgcctgctcgtaccgcgacacttcccctgcccccccacccccgctccccacccccgccaacccgacacgctccctgaccgcgccgccccccaccgcccgcaccccagcgccccccctcgccccccccgccaccaccccacaccccgcacccccccggccccaacccgccaccacgcacccgcgccgccgccccgccccaccagcaaaacgccgcgaccccaccccccgtccaccccaacctcccacgcccacccgcacaccgccccccggacacacgccacccgcgcgacaactcccatccaccgcgcccccgacgccaccacccccgccgctcaacctcacccccgcgccgccctccgcaccacccctccacccccgccgcccacacacgcccgcccacaccaacccccaccaccctccaccccccccacccccacccccccccccacccaaccccccacccccacccacccacgcatccccctcccctcccacccatacaagtccccccactcccccccccccccactccccacctatcctccccctctccttccctctcctccatcctctcttactctcttccctctccacacacatcccatctcttcactccccacccccctccctccatccacacttaccacccccaccaacacaaaaccccacacacaaccctg

SEQ ID NO: 573641 - DNA, 523 bp, Homo sapiens
  misc_feature (6)..(6): n is a, c, g, or t
  misc_feature (21)..(21): n is a, c, g, or t
  misc_feature (54)..(54): n is a, c, g, or t
  misc_feature (65)..(65): n is a, c, g, or t
  misc_feature (93)..(93): n is a, c, g, or t
tgtcantgttgcaggcccccntggaaaatggtggatctagctctggtgatggcnggatcgtgctngcggcccaccaatgtggtctccgtccanctatgggatatgagctgaacccgtggcttgtgggacttgcacggctgcatgcctggagagccggttgttctgcgagtgtctgctaccatcgaaaagatctctggaaggtgagcctcagggactgtcacaacgtgtctgtgttcctggctcccagtgtgctccaactgctggaggacaaactgcaagcagagctccctgtgggggcccgtgtggtatctggacgattcccccttcccacctggcagcctgtagctgtggtgggcgagggcactgacagagtttgggcctatgatgtccatggttctgggccaactgtgtcttcttgtggggtgcccatcaaggccatcccagagtccagttctaccttagtccctagagcccctgtttgacaaactggctgactggataaaataaagactctgtgggttca

SEQ ID NO: 573642 - DNA, 905 bp, Homo sapiens
gctcgtgtgcttatttgctccccgctctcctcttagcgcgggctccgtgtccattgctagcgtcgctgagaatcttcgtcacagggcccgaggactcgcttcgtctcattggccgccgggagcaactccccgcgtgcaagtgccaggttgccctgcttggcaccctcgctcgcgtgtgcgcgtgtgaagctctcccctttctggtcaagaagctggggtttctcgactccagggtcctgtccctagagcatctgcccgctcttgagactgttttatcggagaccccgggattttcgtgccacttcggcgtccccgttctagcgtcttaacctcttgcggggctctctatctattttctcccgttgggcccgcccaacccgtggctccccttccgcggagtctcaattccccaggtccctgccccgtgtgcggtagagtctccccggttcaccaccggggagcccccttttccgcgcccgttgctgacgccctaaccatgcgtgcgtgcccccattgttcgctgcccttctatggtgtgtaaatctttaatcaggggcacccgggtctcgctggttctcactcctcacccccgggcccaagctcgtaccatcttgtgccagcagaaggactcaatctgtccccccaggaggcggtcacccctcacacgctctcatgtcacctctcccgacccccctcccttgctgcgaggcacttccggggcacacttttgacagggtttgccctgggaccctggccacccttccccggcactcccagacgctgcctgaatacccttccctcggatctacccccgtggggccgccggcgtcttctaatagcgcccggggtcccccgggaaaccccccccccccccccccccccataaagtccccccccccatccca

SEQ ID NO: 573643 - DNA, 143 bp, Homo sapiens
acccccgggcccggggggtaaaaacaaccctttggaaaaaggtttcttgccccccgggggcccgggggggaaaccctgcctcttgggccagggagattttttatcaatggtgcccgggggggtgcccccccccctggtaaagg

SEQ ID NO: 573644 - DNA, 308 bp, Homo sapiens
tgctgctgctgctgctgctgctggatctgctgctgctgctgcacttatctgtcttggaactgctgctgcacggtactctgctgagcctggaacatgcgtgctgttgctgctgccatgctgctgctgctgtagcgccgcctgctgctgcgtgctgtaactgctgttgttgctgctgttgcttgcatgctgcctcctgctggagcttgagcttcggtctgtggcgttgccgttgacactacagccatgctgtgaggagccatccccgaggtcccaggaggcggatggccttagagagacattggctgtca

SEQ ID NO: 573645 - DNA, 114 bp, Homo sapiens
gggtacagctggttctcatgcctacagcctcccaagcggctgggcttgcaggctgtgcatcaccatacctggctaattttgtgtatttttatgtagagacatagtttcacctgt

SEQ ID NO: 573646 - DNA, 819 bp, Homo sapiens
ggcaccatgttagccatgtgctggtctctgaagtcctgaactcagtgtgatcacctgcctcggactcccaaagtgcatggggattacagtgcatgagccatcgcatcgggacccgagaatgttagatctctataactttgtgtgtcgtggaagcagcatgggctttagatgtcaggcaagactctgggttcaaatcctgtctggcagtctagtggtgtagacttctttctggtacagaaacctaccttatcctgatgctcagtattccatcatctgtaacacatgggaacacaaaataacctgctttagtggatgattgttcattgttgaccaggtgagtaacatcgatagatgttggataagcatgagagagcaagacaccaagaaacagcaagtgtgcggcactcgagactcacacatgaggaaaactatgtaccaagaaaatagcaaattactcaggggcatatcacacgcatagaacctcacatagaaatcaaggacaagtatcttgggagaaacgttgaccgtaacagagacaaacaacttatcagtatgctaccactcggaacgggccgacatggacaagggacaggacgtgtcgttggcacaggcgtgccggggattcaaaaccgatatatgaccggcaggttaaaacgtggaacccgataacgtgggaacgttaacagggtgttgaaaggtaggaaggatgaccaacccttggttgaaacaagaaaacaaaaagttgacgatacgagctggactcactattggtaaagccatagaatcatacaacgacggggaaagctgcaggaaggcagc

SEQ ID NO: 573647 - DNA, 198 bp, Homo sapiens
acactcgcaccgtgttcgccacccatctgacaggagctaggcaccatccgccttcctgcccacgatgggaaacggatggatggcgccatccacttctgacttccgcaaatccctcgtctgagctgagctgccctcttcctgtatcttgggttcagcctgctcacaccttccccgggtgggaacggtgcgttggcccaa

SEQ ID NO: 573648 - DNA, 163 bp, Homo sapiens
tgccatctttgactcctggactatattgtgaacgagccacctcctaagctgcccaacggtgtgttcaccccgacttccaggagtttgtcaataatatgcctcatcaatgaacccatgcggacgcgtcggaccttgaagatgctcacaagaccacactcttcat

SEQ ID NO: 573649 - DNA, 170 bp, Homo sapiens
acctcagtttgggaccaactgcttggaatctttgaaaaccggttttgaatgccaaggaggagttaaaggcccttcccgacccaccttgtgttcccccttattctgcgccagattgatacacacgtaggagttcgcctccattacaccaaccaccatcaaggtcgccccca

SEQ ID NO: 573650 - DNA, 760 bp, Homo sapiens
  misc_feature (368)..(368): n is a, c, g, or t
  misc_feature (629)..(629): n is a, c, g, or t
  misc_feature (760)..(760): n is a, c, g, or t
taacccctccttagttttatgcgctcaaaaaccaatttaaacccccccccattgtaaagggggggcggtgacaaaagcaaaaacgccgaaacccggctgggaaaccaccagttgtgtgccccccgccatttttttcgcccgtgatgtgggatttgtgtgttttacattcggtgctcccgtgtggcttggggttgagagtttgaggggtggacgccctcctgggggggcactgtggccatgtgaagcccccttttgtgagaacgctcagaggggagtgtggaagacagcgccactgtggtccgcgcctggggcttctgtggggacagctggctttgttcccacagaattcccttgaggcggcggagagngggaggggatggggccgaggggtcctccctcgaggtgtgatacagagagagggttgctctcgaagagggccccaagaggagagggggcccccgtggtgtggaccatgaaaggtcggcgcccagagaggggcgagaaagggggtcgtctgaccgccgcgtgtgcgtgcgtcaaccaccaggagggtttccacatccagcggtcggggcggcagggtggggcgccacgactttccggaccacttgtagaagagaacccctccnccatcttcctctcggggagaatttttggccccggcccttaaaaacctctgcttttgtcctcagggatggtctgaagtctccgggggacccttctggggggcaagtgggttttgatcgccgcgatataaggn

SEQ ID NO: 573651 - DNA, 128 bp, Homo sapiens
ctggctctgagaaggaaacaggaagttggccgatggaagggtggtttttcttcccagggtctccccaagagctgcttcctttgagtcctgctgtgtgtagatctgttgacaatgacctggacggctct

SEQ ID NO: 573652 - DNA, 162 bp, Homo sapiens
tctgcggctgttcttgatggatcccagtttggttggacgtcctttaggcaccgtccagcccagcgaacgacagattgagggcgtcagggcgctggaccacatgcatctcggagcgctagggtttacggtggcgcgcaggagtgtggctgaggtctaggctgt

SEQ ID NO: 573653 - DNA, 138 bp, Homo sapiens
gcctcccaaagtatgttctcctcctcttcttacagatggtgagccttgctactacagcgtcatccttaatgatccaggagggcagctcatcctcctccattaaagcggggcttccgttacgggttccggtgcatctct

SEQ ID NO: 573654 - DNA, 264 bp, Homo sapiens
tgaagagaattcagaaagaatctcacagatgtcatcaaacaagtccatggtggcccatacgagcgctttctccacagaggaactgcgcacgctcctgtccacttctcaaagccaggggaacacatggatgtactatgtgacctgtggcactgtcacccagcgctacttcgtctatccagcacttggacaggacagatacatacagttgagaagttctgcatggcacagagatgcattctatcattacagcagtgtctgcaagag

SEQ ID NO: 573655 - DNA, 161 bp, Homo sapiens
aacaaggtacagtgacatagacagttgtatgaaaaaggaaagaaacttgtcaaaaaaatatattaatctagtaaaagagacaaagataaggaaggaaaaaggtaaaaatacagctatacttcacgaaagataatcaatcgaaaaaggtgctgaaaaagtca

SEQ ID NO: 573656 - DNA, 107 bp, Homo sapiens
taatcgagctcggtaccgccaatcactcttttcttcaatatgtctttcatgatttgagaggttctgaaactttgtttttttctcttcctgcctctttttctcttctt

SEQ ID NO: 573657 - DNA, 933 bp, Homo sapiens
  misc_feature (480)..(480): n is a, c, g, or t
atgtaatggcagttatattttgcagattcccacattaatagaagacctgagaatgtatccccataaagcgtgatgcttaaatatacaacgactgccagtattacatattttttttgttgacacttcagtctcagctgaagactatgaaatatgctggcctatagatgtcttttcccattgtactctacatattatggacttgctctatggaaactgagacatttcctattacaaggtatcttataatttagattggcgctcagcgttcttcagatacgaaagatgccaatcattcgagagatatagggtatattgtctccctagtattactggtttgccccgttgtattaatatccatagtagcatacgtgcaacgaatacgaagatcaaactttctgtcgaatctcagcttactgaaagttcattccacactttcactttggtaactgaattctcttactttatgagcaataaactaanattctcatttgcattctcagttcagtcgcttatagtcctgacttagagatgtttaagtggaatcaaattgtgggtcaacttttcgtggttttccgatgattactccgttatgctataaaggtgcccagtattcttaaaacactacgtcgtatctttgtaaatgtgttaacacgctttttgtgtatggaagtgcctgtattgttatattaatttagaacttggattctttccatttggcatttcgtatcatcgtaatttacaggaggaattattgaacattctgagtcctggcgatgattacctaatacactaatttaacttgccagagggtttttactagcaaggcctcgctaaaccttcgccattaccttttgtggtactcacctctatgccttaaaaaaactttgtgacaaacaaccgatgtgcgtcctggttccctatcgcttctcgcta

SEQ ID NO: 573658 - DNA, 1124 bp, Homo sapiens
gtctccctctcttagcatattagacccatggtgcttcgagtacgaaaacagtactaacaaagtcgaattaagcatcaacaagtgttattatacatagtgcatagacgtgcttcgtacaagtacagataagattttgacatggtagatcgaacaacattcttttcgggggttagattagaaaacccttaggacttcgtgatatgaagcaaataagtaagaaattattctttagagtaatgtctttgaaaggcaaagggaagggtaaagtcggagccagtgtcaaggaaagttgtgtaatcgaggtggaaaaatagccccaagtcagagaaaaggagggtaggtctgcattataattgtctgtgtgaagcaatcatttagttagctttgattaatttttcttttctccttatctgtgcagaacaggttgcttgttgtaaagtgaagatcatgctatattttatatatgaagcccctaatgcgaagctcttgacctctgtgctatgtcgttatatatattacagagtgaaactctcactgctaagtgctcagagatcttttttcactgtaaggaggtaacctttaacaatgatgggtatgacctttgtctcttcataccggttttatgacaaaggtctatggaatctatttgtcgtaagtttctactcccatcaaagcagctttctaagttattgccttggttattatggatgatagtgatagcccttataatgccttaactaaggaagaaaagcatgttatatctgaggtatgttctcaatacatatttgaccatataggttaaattccagttaaaccaaagaagacggtcaggagggagattactaaccctttggacaatgcttagctgggcacgcttgtcggtaaaaatacgaaggtctttaatatcgtttctccaatcaagaaagtcacgtgttacccagggcaggggcaaggggggccacatgaaggggcccacagcggaatacacaccaactctatttcaccttgtaatttagagcccttaccttatattttaaacaaaggtcggcacagttaatgtccttgccgttgtactataacacacacaaacacaagtacaacaagagcccaacaacaggagcaag

SEQ ID NO: 573659 - DNA, 331 bp, Homo sapiens
  misc_feature (114)..(118): n is a, c, g, or t
ttttttaaaaaaaccccccccccccccccccccaaaggaaaaaccgggtttttttttgggagtgttcccccccccagacaaaaaatttataccaaaaagaagtgtttgtttccnnnnnacactttttttttttctctttctgcccaaaagaaggtggtgttttcccccccccccccctaaaggggtccggtgggacccccaaaagggttgtttcaccccccccatccctgcctacccccatgaaagtctgatccttgtttttattggtattgcttttattaataatgcttttattatcattaaaactctagttcttgttttgtctctccga

SEQ ID NO: 573660 - DNA, 2133 bp, Homo sapiens
  misc_feature (537)..(537): n is a, c, g, or t
  misc_feature (545)..(545): n is a, c, g, or t
  misc_feature (548)..(548): n is a, c, g, or t
  misc_feature (553)..(553): n is a, c, g, or t
  misc_feature (555)..(555): n is a, c, g, or t
  misc_feature (566)..(566): n is a, c, g, or t
  misc_feature (596)..(596): n is a, c, g, or t
  misc_feature (624)..(624): n is a, c, g, or t
  misc_feature (1439)..(1439): n is a, c, g, or t
gaggtcagtctcgctatattgcccaggctggtcttgaatgcctgggctcaagcaatcctcccaccttggccacctgaatagctgggactacaggcatgtgccactatgcccagctaattttttgtatttttagtagagatgaggcaatatttttaatatagctaatgcatgatgttaaaaactttgcatatggaaaagatgcattcaaaatagaagacagatcaatgaattttagtgtagtcattttaagtttagtgacatagtttcagtttccacattgcaactatacactgtggagttttagcatagtatctaagaatgaatatccacagttctgaacaggttattttagcactcttttccagcaatatatctctgagaggccatactttcttcacgtatgtcaaacaaataacatattgcaacataattgttcttcagacttgttttttagcagcagacacatttccaaatgtaatcttactctgaatctgagcttcattatacaatacagacaaaagtgagcttttccagttnaagtaggngtntgatntnaaacacacccntggccccaacaaaacaaataaaactcccantcttattttaagagcttgttgaagaganttattaagtaacgccgcccttcctttcggccggaaccgccatcttccagtaattcgccaaaatgacgaacacaaagggaaagaggagaggcacccgatatatgttctctaggccttttagaaaacatggagttgttcctttggccacatatatgcgaatctataagaaaggtgatattgtagacatcaagggaatgggtactgttcaaaaaggaatgccccacaagtgttaccatggcaaaactggaagagtctacaatgttacccagcatgctgttggcattgttgtaaacaaacaagttaagggcaagattcttgccaagagaattaatgtgcgtattgagcacattaagcactctaagagccgagatagcttcctgaaacgtgtgaaggaaaatgatcagaaaaagaaagaagccaaagagaaaggtacctgggttcaactaaagcgccagcctgctccacccagagaagcacactttgtgagaaccaatgggaaggagcctgagctgctggaacctattccctatgaattcatggcataataggtgttaagttaaaaaaaaaaataaaggacctctgggctacaaaaaaaaaaaaaaaaaaaaaaaaaaaactttgtgtgggcgcgcgccttgggcccccgaggaaaaagctttttaaacccttcggtgtgtgggcgcgcgcgcggggccccgttgggttaggtgtgaaccgtgggtccaaagaggggttcccgagaggagaacaccggggcccaggacacagagggcgcggggaattctcctcacccatttaaaaagagcgcccgggggnggaaacacccgagagcgttctttgtgaaaacaattcccgagagagggaaattccggaggggggccacaactaacggggggagctcatcatcacacaggaggggagcgtcccaaagcgcgaagcgcctcgagattcatctaatattttatacgcccgcggccctgcgggggagccaaaacaagcaacacaaacgagcaaaagcaacaacaagaaagcgaaaagacacacaaagaaataaataaagaagagcaagaacagagaacaacgaacagcagaagaggggagagaaagaaagagaaaaaaaggaagagagcaacaaaaaaaagaagagagaaaagaaaacaagagaaggaagaccggaagagaagaaaaggaagaggagaaaaaaaaacaacagagaagaaagcagataaaagagagagagaaaaagagaaaagagacagaggacaagcagaagacgaaagcgaaaaaagcaaagaaacaacgcaaacgaaaacggaaacggagcgcgacacggagacagagcaagaggaaagagaaaagaagcagaagaagaaagggaaaaacaaagagagagacaaaacaaaaagaaagacaaacgaaaaaagaacaagaacaaaaagggaacgagacaaacagacaagcaggaggaagaaaagccgcaacgagcggagacaaaacgaggaaaaaaaaa

SEQ ID NO: 573661 - DNA, 266 bp, Homo sapiens
  misc_feature (5)..(6): n is a, c, g, or t
  misc_feature (8)..(8): n is a, c, g, or t
  misc_feature (25)..(25): n is a, c, g, or t
  misc_feature (27)..(27): n is a, c, g, or t
  misc_feature (55)..(55): n is a, c, g, or t
  misc_feature (65)..(65): n is a, c, g, or t
  misc_feature (73)..(73): n is a, c, g, or t
  misc_feature (133)..(133): n is a, c, g, or t
  misc_feature (178)..(178): n is a, c, g, or t
  misc_feature (181)..(181): n is a, c, g, or t
  misc_feature (193)..(193): n is a, c, g, or t
  misc_feature (207)..(207): n is a, c, g, or t
  misc_feature (262)..(262): n is a, c, g, or t
gcatnntnctgagcactgtttatanantgtgtaaatacccatatgtcctgaattnaccatcactntcacattnaaagggaggaaaacactctctaagccatagagagagacatattcagggatattctgaganggggctactagaagtttaatatttggaaaaacagttagtgcattnttnactccatctctntaggtgctttaaanttttatttcaaaaacagcgtatttacatttatgttgacagcttagcgtataagtntaat

SEQ ID NO: 573662 - DNA, 232 bp, Homo sapiens
gtgtaccgtcctctagcgtaacacttgaatgtttgccctttttgattattttgaaaaatactgtcatgaacatgggtgtacacgtttctgttagcatccctgtctttaattcttttgcaagtatatccagaaggggaattgctgggtctcttagttatccccccttttttgacatttttagggctgtacccatgacatacggaggtgcccaggataggggttgaatcagagc

SEQ ID NO: 573663 - DNA, 1443 bp, Homo sapiens
  misc_feature (537)..(537): n is a, c, g, or t
  misc_feature (545)..(545): n is a, c, g, or t
  misc_feature (548)..(548): n is a, c, g, or t
  misc_feature (553)..(553): n is a, c, g, or t
  misc_feature (555)..(555): n is a, c, g, or t
  misc_feature (566)..(566): n is a, c, g, or t
  misc_feature (596)..(596): n is a, c, g, or t
  misc_feature (624)..(624): n is a, c, g, or t
gaggtcagtctcgctatattgcccaggctggtcttgaatgcctgggctcaagcaatcctcccaccttggccacctgaatagctgggactacaggcatgtgccactatgcccagctaattttttgtatttttagtagagatgaggcaatatttttaatatagctaatgcatgatgttaaaaactttgcatatggaaaagatgcattcaaaatagaagacagatcaatgaattttagtgtagtcattttaagtttagtgacatagtttcagtttccacattgcaactatacactgtggagttttagcatagtatctaagaatgaatatccacagttctgaacaggttattttagcactcttttccagcaatatatctctgagaggccatactttcttcacgtatgtcaaacaaataacatattgcaacataattgttcttcagacttgttttttagcagcagacacatttccaaatgtaatcttactctgaatctgagcttcattatacaatacagacaaaagtgagcttttccagttnaagtaggngtntgatntnaaacacacccntggccccaacaaaacaaataaaactcccantcttattttaagagcttgttgaagaganttattaagtaacgccgcccttcctttcggccggaaccgccatcttccagtaattcgccaaaatgacgaacacaaagggaaagaggagaggcacccgatatatgttctctaggccttttagaaaacatggagttgttcctttggccacatatatgcgaatctataagaaaggtgatattgtagacatcaagggaatgggtactgttcaaaaaggaatgccccacaagtgttaccatggcaaaactggaagagtctacaatgttacccagcatgctgttggcattgttgtaaacaaacaagttaagggcaagattcttgccaagagaattaatgtgcgtattgagcacattaagcactctaagagccgagatagcttcctgaaacgtgtgaaggaaaatgatcagaaaaagaaagaagccaaagagaaaggtacctgggttcaactaaagcgccagcctgctccacccagagaagcacactttgtgagaaccaatgggaaggagcctgagctgctggaacctattccctatgaattcatggcataataggtgttaagttaaaaaaaaaaataaaggacctctgggctacaaaaaaaaaaaaaaaaaaaaaaaaaaacaaaaacactctcgagaggacttattgttgtcggcggtggcgaaaagaagggtgttacgtaacagtggggcacgtttgcttatgtttttttctttgaaccctttttttgtggtctacaaggtgggaaatattcagccgggatccccattataggaaccggaattattgcaaaaagcccggtttgccgttatttttgcgtgaagag

SEQ ID NO: 573664 - DNA, 1577 bp, Homo sapiens
  misc_feature (381)..(381): n is a, c, g, or t
  misc_feature (735)..(735): n is a, c, g, or t
  misc_feature (1063)..(1063): n is a, c, g, or t
ttagatggggtggacgctaggctagagcccactgtagtggaggtatgtaggccttgtgcaaggtaggccgcagtggcgggaccctggacgtgcacctggttgacctcctgtgcattccggcgatattcggctcacttccagctgcccaggtgtccagactgactacacttgctggcatgaggctagtgtgagaactactatggctgaaggtgattaatgcaaagaacctgcgtgtctcctgaggtaaagtcgttggaaacccttcatttctctccattgtggatgggcgtggggtatgtaaaggaggccctggacgctggacctccataggcatcacacatgcgtaacagcgcgtccattgagtgatgtgcgaagagcgcnttggcgagggggtagtttcgtgcaactatacaacaggggcatggcatatacaatatgattccttggcctttgctccctttgcgcgcacccggaactcgcttggtgaacacactttcctttgtacttcgcgaaaggcgctttgggcgtgcagcctaactttgaggtgcacggaaggcttccacctccacacagggggatgacgcctatccacaatccttcccaaataggaggtgagctccatgtatggacatcataataatctcgcgcgcggtggcgtgcgtgggctaggatgcatatgcggagcagagaatatgcccgtgacgcataatgtcgtggcgtggattccgcagtgtntaagtcccctaatgcaaggtgtttccgattggagcaccttttcatacttcgcattgcccacaattaacacaccaacgcagtcctacctaggcggaactccaccaattggttaagaaggctaaaagctctacaacggatacggtgtctggtgggttgggcaaggcaacacttgttaggggggccaaaagcccctttttccatagtgtattacacccctagtggcataaacacttagcggtggcgtaacccttcttggcttttggacggttgccccttccatgcgcgaagacccctacctgtgggaaccaaaacgacaagcgcataactngggactaatatttggtgggcccttgtgcaaggtttgccccctccccatcgcgaagcgagtaacccgcggcttggtgtggcttgtaagcggcgcggaccccatatatctggtctttaattataatatataaccgtctgtggcaacccttttgggggggacacatctcctgggctgggagttggttacacacttcccatttacttcccattcttacaacttgggcaattccccaagggggtttgtttggggggaaaaacacaaatgtgtgtaagggtgttccccttttgaaacggtagggcgttgaaaactctgttccacgttgggctaagcttttacacaggaaacaaacttggggtgcacaggattggcgcccaagaaattggtttagggctataaattatagtgtggtggacaaacatggttctataagggagagaaacagaaaaaaaaggggtagcccacagattcacaataatctcctggggaatattatcccgggcatagtgatgtgagt

SEQ ID NO: 573665 - DNA, 943 bp, Homo sapiens
gaaataggaatcgaggtatcagactggggtgataattctgaattatgaccgtgctgtagaagcttttgcaaaagggggaaatctgaccctcggaggaaacttgactgtggcggttgggcccttgggaaggaactgtggaaggaaacgtgccctgagaagctccgtggccgtcttcacgtactgcagggtcaaggggactctttgcaggcgtgtcttcaggaagggagctgttgatcgaacaggcaacacagatccctagtagaaaattctgtggtcaggatatccgagcttatgagattccatgggagatacaccgtcggcctgttcaagccgaagatcttatgaaattcttgattccttttactgaacatagtcatgacacattgcaggacaccgaaatcattgcatgaaaagcagccaagggagcacgaggaagtctctctgctaaagaatacctcccaaagccatggtcgaagaccacagcagtcatcttgcgaccagtccaagctggaactctggctctccaaaagcaatttgaatcaacccatagaagtgacgagcgctgtattcctttgagcggacagcactctgggatttgactttaaagctgggacaagactcaccgttcatgtcaaaaaacagatcccttgtggatgggtggcagggacaacttcggaggtcaactggatttgtccagccaactacggtaccataattagagcgtatacatgtctctggcagcattcaaaaattttcctactggcgcgttctatacgccgtgcacatagctaaaatctgttgacaaatttctggtgaagatggctctgtagagccggggactgtaacagttactcactgggcaaacaagcgcagtgtgaacaccggtcggcttggtgaggtgaacattgcggatcttgctcctccctctttcgtatatctttca

SEQ ID NO: 573666 - DNA, 143 bp, Homo sapiens
  misc_feature (19)..(19): n is a, c, g, or t
cggtcaactagagacgtancacacacacacacacacacacacacacacacacgcgcacaccacatgcgtattctctgtctggtactgagtttctcccagagcctggtgcctgggtgttggctataattgtccattccttttct

SEQ ID NO: 573667 - DNA, 1792 bp, Homo sapiens
  misc_feature (537)..(537): n is a, c, g, or t
  misc_feature (545)..(545): n is a, c, g, or t
  misc_feature (548)..(548): n is a, c, g, or t
  misc_feature (553)..(553): n is a, c, g, or t
  misc_feature (555)..(555): n is a, c, g, or t
  misc_feature (566)..(566): n is a, c, g, or t
  misc_feature (596)..(596): n is a, c, g, or t
  misc_feature (624)..(624): n is a, c, g, or t
gaggtcagtctcgctatattgcccaggctggtcttgaatgcctgggctcaagcaatcctcccaccttggccacctgaatagctgggactacaggcatgtgccactatgcccagctaattttttgtatttttagtagagatgaggcaatatttttaatatagctaatgcatgatgttaaaaactttgcatatggaaaagatgcattcaaaatagaagacagatcaatgaattttagtgtagtcattttaagtttagtgacatagtttcagtttccacattgcaactatacactgtggagttttagcatagtatctaagaatgaatatccacagttctgaacaggttattttagcactcttttccagcaatatatctctgagaggccatactttcttcacgtatgtcaaacaaataacatattgcaacataattgttcttcagacttgttttttagcagcagacacatttccaaatgtaatcttactctgaatctgagcttcattatacaatacagacaaaagtgagcttttccagttnaagtaggngtntgatntnaaacacacccntggccccaacaaaacaaataaaactcccantcttattttaagagcttgttgaagaganttattaagtaacgccgcccttcctttcggccggaaccgccatcttccagtaattcgccaaaatgacgaacacaaagggaaagaggagaggcacccgatatatgttctctaggccttttagaaaacatggagttgttcctttggccacatatatgcgaatctataagaaaggtgatattgtagacatcaagggaatgggtactgttcaaaaaggaatgccccacaagtgttaccatggcaaaactggaagagtctacaatgttacccagcatgctgttggcattgttgtaaacaaacaagttaagggcaagattcttgccaagagaattaatgtgcgtattgagcacattaagcactctaagagccgagatagcttcctgaaacgtgtgaaggaaaatgatcagaaaaagaaagaagccaaagagaaaggtacctgggttcaactaaagcgccagcctgctccacccagagaagcacactttgtgagaaccaatgggaaggagcctgagctgctggaacctattccctatgaattcatggcataataggtgttaagttaaaaaaaaaaataaaggacctctgggctacaaaaaaaaaaaaaaaaaaaaaaaaaaatctctcggagggctatctcttttttgggggggcgggaaaaagagagggatatatagagaagggggcgcccggtgtgtgtgctctatgcgggtgtgttcctgtggagccccaggtttcttctgtgtgtgtcacaagggggggagaagatctcggggcgggttctctccctatattgtggtgaggcgtggtattattcttctccgagatatacagccgcccgggggttaccccggggggacttatatatggagatctctccggggggaaagtaggccacaccccccgcgggtgactatatatcctacccccccgcgcgccaacatatttgaacgaggggggcctgtttaattaaagatcgtggggcatgcaggccccaccaaggagggggagaacaactcatctctcgtgaggagaagacacactcctcctgtcattacatcttactgatggcgaccaagacatcataactcgggtgcggagacctacgtagccgaaaacacacaaacaacaaaaagaacccacaaccgcgtcaccaacacacagtggcgagagaa

SEQ ID NO: 573668 - DNA, 1268 bp, Homo sapiens
  misc_feature (537)..(537): n is a, c, g, or t
  misc_feature (545)..(545): n is a, c, g, or t
  misc_feature (548)..(548): n is a, c, g, or t
  misc_feature (553)..(553): n is a, c, g, or t
  misc_feature (555)..(555): n is a, c, g, or t
  misc_feature (566)..(566): n is a, c, g, or t
  misc_feature (596)..(596): n is a, c, g, or t
  misc_feature (624)..(624): n is a, c, g, or t
gaggtcagtctcgctatattgcccaggctggtcttgaatgcctgggctcaagcaatcctcccaccttggccacctgaatagctgggactacaggcatgtgccactatgcccagctaattttttgtatttttagtagagatgaggcaatatttttaatatagctaatgcatgatgttaaaaactttgcatatggaaaagatgcattcaaaatagaagacagatcaatgaattttagtgtagtcattttaagtttagtgacatagtttcagtttccacattgcaactatacactgtggagttttagcatagtatctaagaatgaatatccacagttctgaacaggttattttagcactcttttccagcaatatatctctgagaggccatactttcttcacgtatgtcaaacaaataacatattgcaacataattgttcttcagacttgttttttagcagcagacacatttccaaatgtaatcttactctgaatctgagcttcattatacaatacagacaaaagtgagcttttccagttnaagtaggngtntgatntnaaacacacccntggccccaacaaaacaaataaaactcccantcttattttaagagcttgttgaagaganttattaagtaacgccgcccttcctttcggccggaaccgccatcttccagtaattcgccaaaatgacgaacacaaagggaaagaggagaggcacccgatatatgttctctaggccttttagaaaacatggagttgttcctttggccacatatatgcgaatctataagaaaggtgatattgtagacatcaagggaatgggtactgttcaaaaaggaatgccccacaagtgttaccatggcaaaactggaagagtctacaatgttacccagcatgctgttggcattgttgtaaacaaacaagttaagggcaagattcttgccaagagaattaatgtgcgtattgagcacattaagcactctaagagccgagatagcttcctgaaacgtgtgaaggaaaatgatcagaaaaagaaagaagccaaagagaaaggtacctgggttcaactaaagcgccagcctgctccacccagagaagcacactttgtgagaaccaatgggaaggagcctgagctgctggaacctattccctatgaattcatggcataataggtgttaagttaaaaaaaaaaataaaggacctctgggctacaaaaaaaaaaaaaaaagtcgagcggccgcgaatttagtagtagtagtagtagtaggc

SEQ ID NO: 573669 - DNA, 1303 bp, Homo sapiens
  misc_feature (537)..(537): n is a, c, g, or t
  misc_feature (545)..(545): n is a, c, g, or t
  misc_feature (548)..(548): n is a, c, g, or t
  misc_feature (553)..(553): n is a, c, g, or t
  misc_feature (555)..(555): n is a, c, g, or t
  misc_feature (566)..(566): n is a, c, g, or t
  misc_feature (596)..(596): n is a, c, g, or t
  misc_feature (624)..(624): n is a, c, g, or t
  misc_feature (1298)..(1298): n is a, c, g, or t
gaggtcagtctcgctatattgcccaggctggtcttgaatgcctgggctcaagcaatcctcccaccttggccacctgaatagctgggactacaggcatgtgccactatgcccagctaattttttgtatttttagtagagatgaggcaatatttttaatatagctaatgcatgatgttaaaaactttgcatatggaaaagatgcattcaaaatagaagacagatcaatgaattttagtgtagtcattttaagtttagtgacatagtttcagtttccacattgcaactatacactgtggagttttagcatagtatctaagaatgaatatccacagttctgaacaggttattttagcactcttttccagcaatatatctctgagaggccatactttcttcacgtatgtcaaacaaataacatattgcaacataattgttcttcagacttgttttttagcagcagacacatttccaaatgtaatcttactctgaatctgagcttcattatacaatacagacaaaagtgagcttttccagttnaagtaggngtntgatntnaaacacacccntggccccaacaaaacaaataaaactcccantcttattttaagagcttgttgaagaganttattaagtaacgccgcccttcctttcggccggaaccgccatcttccagtaattcgccaaaatgacgaacacaaagggaaagaggagaggcacccgatatatgttctctaggccttttagaaaacatggagttgttcctttggccacatatatgcgaatctataagaaaggtgatattgtagacatcaagggaatgggtactgttcaaaaaggaatgccccacaagtgttaccatggcaaaactggaagagtctacaatgttacccagcatgctgttggcattgttgtaaacaaacaagttaagggcaagattcttgccaagagaattaatgtgcgtattgagcacattaagcactctaagagccgagatagcttcctgaaacgtgtgaaggaaaatgatcagaaaaagaaagaagccaaagagaaaggtacctgggttcaactaaagcgccagcctgctccacccagagaagcacactttgtgagaaccaatgggaaggagcctgagctgctggaacctattccctatgaattcatggcataataggtgttaaaaaaaaaaataaaggacctctgggcaaaaaaaaaaaaaaaaaacaaaaaaaaaaaaactttttggggcgccctgggccccgagaaaaagtttttaaacaccatttgttggggggccgcgngggcc

SEQ ID NO: 573670 - DNA, 1741 bp, Homo sapiens
  misc_feature (473)..(473): n is a, c, g, or t
gcagccgacatccctgaagtggacttaaagtgagctgctgtcatacttcctctaggcatgtagtgctcccgctaacaagacttgactactactcgagcgctaccgtgctgggagtccgtggatctgcgtcgactttggatcccagctctcgtctacaattggagatctcaggcccgtggttgctcttgtagagacggcatcatcgtaggcgtagttgcctgttaaaaattgaccatggatgtataacaagtctcgcgatagcctgcgctccacctcacgtctagcgcgacttccactctcgacacgacgccttggacgagagcggcaagattcctaggcgatcattgagatgatagcgggagaatgcgatcagcggctgaggtcaaattgttgcctagggaatcttccttgtcctccacctgacattaacgcgcgcatcttgtactcggtgcccaatctcatatcaccatgtntcgtattgtctggcgcacagagaagattcccatggacttggggccataagccccttgaaaaacgagtagagggggaaggcagggggagacgcatagagagccctctctaggcgcaattgcgggcttacaatacacggagcataggagcccatcggtgcgtaaagaaaagcacacctaggtacggtgccgcttttcgccgggtagagttcttaagcccatacgagaggtgtagagccgccgctaacgttgtatacacgggcaaattccctcttggcggggctgcaactctaggggttccccagcgcctaaagggacactttgttcgcaagaggtgctccgtgctccggttggcgtttcgcacaccgtaacgagcctttcaatggcgctatcccttttgaatacaggtgtccttaagagagggggatccccgggggaagatctacggctcccctttttgtacaacgttgccggcgtttttcatcttttcggccctccacggaaggacatatggccaattggaaacctaaggcgttttcttccaaaattcaaaatactcgccccccataggcaagggggagaacaatttcccaaatatgcacttcgcgccgggtggggcatcgctatgcgcctttgaacaagtgagcgccctgttacagaagcatgtgccgtccgtggggggccgacaaagggttaccgagtttttatccagaatttcgcggagcactttttcaaacaggggtgggggacacccgcgcccggttcatttttcaaacccagcaaatgctttttgcctcgacaacaggggtaataccgagcgatcacccatcatggaggagagaagagcccccccagacggggtgtgtatccacgggggagacacaccaccatatgcggactagcagaaggggcccccagatagagcaggattcgggggtgaaactacccggagggacaaccgccacgggggggccgccacaaaggtgtagtaaatctcgcgcgaatacaactcagaggaacaaaaacacacaacctatgttcctatcaaacccctccggtcgttgtcagcccctagtttgtggggaccacccacaaaatgatagaagcaacaccacctccagagtagttttctactaacacggcgggctctccactaggagcaacacctaagtctgagcactgtatgtagtgacgatagacaaggagcgatttatcatcggccataaccagcagctaagcttcgtattcggatagcgacatcgaactgaaga

SEQ ID NO: 573671 - DNA, 377 bp, Homo sapiens
cggcataggctcacttagcctgtctggactctgggtgtagcaccctccatgtcagaaaatacccccgggttcagctcatcacacagccaaggaaggagctccacactgacactaagggtgcatcctgggctcattcatcagggcatgcctccaaaatatttctccacgtctcctccctttgcccacctgcattgtctctgtgcctcagccccggctgggggcctgcaaggattccctatctcctctgcccctgcacggctgggtccaaggccatctgtccacccaccacacctctctcaccttgcacaccacgctccagccccaccgtcctctttctgcttctttcccagcctctgggcttttgcacacgcttgttc

SEQ ID NO: 573672 - DNA, 1436 bp, Homo sapiens
  misc_feature (537)..(537): n is a, c, g, or t
  misc_feature (545)..(545): n is a, c, g, or t
  misc_feature (548)..(548): n is a, c, g, or t
  misc_feature (553)..(553): n is a, c, g, or t
  misc_feature (555)..(555): n is a, c, g, or t
  misc_feature (566)..(566): n is a, c, g, or t
  misc_feature (596)..(596): n is a, c, g, or t
  misc_feature (624)..(624): n is a, c, g, or t
  misc_feature (1274)..(1274): n is a, c, g, or t
  misc_feature (1277)..(1277): n is a, c, g, or t
  misc_feature (1286)..(1286): n is a, c, g, or t
  misc_feature (1302)..(1302): n is a, c, g, or t
  misc_feature (1314)..(1314): n is a, c, g, or t
  misc_feature (1326)..(1327): n is a, c, g, or t
  misc_feature (1331)..(1331): n is a, c, g, or t
  misc_feature (1338)..(1339): n is a, c, g, or t
  misc_feature (1343)..(1344): n is a, c, g, or t
  misc_feature (1358)..(1358): n is a, c, g, or t
  misc_feature (1370)..(1370): n is a, c, g, or t
  misc_feature (1391)..(1392): n is a, c, g, or t
  misc_feature (1397)..(1397): n is a, c, g, or t
  misc_feature (1403)..(1404): n is a, c, g, or t
  misc_feature (1410)..(1410): n is a, c, g, or t
  misc_feature (1414)..(1414): n is a, c, g, or t
  misc_feature (1416)..(1416): n is a, c, g, or t
  misc_feature (1419)..(1419): n is a, c, g, or t
  misc_feature (1426)..(1426): n is a, c, g, or t
gaggtcagtctcgctatattgcccaggctggtcttgaatgcctgggctcaagcaatcctcccaccttggccacctgaatagctgggactacaggcatgtgccactatgcccagctaattttttgtatttttagtagagatgaggcaatatttttaatatagctaatgcatgatgttaaaaactttgcatatggaaaagatgcattcaaaatagaagacagatcaatgaattttagtgtagtcattttaagtttagtgacatagtttcagtttccacattgcaactatacactgtggagttttagcatagtatctaagaatgaatatccacagttctgaacaggttattttagcactcttttccagcaatatatctctgagaggccatactttcttcacgtatgtcaaacaaataacatattgcaacataattgttcttcagacttgttttttagcagcagacacatttccaaatgtaatcttactctgaatctgagcttcattatacaatacagacaaaagtgagcttttccagttnaagtaggngtntgatntnaaacacacccntggccccaacaaaacaaataaaactcccantcttattttaagagcttgttgaagaganttattaagtaacgccgcccttcctttcggccggaaccgccatcttccagtaattcgccaaaatgacgaacacaaagggaaagaggagaggcacccgatatatgttctctaggccttttagaaaacatggagttgttcctttggccacatatatgcgaatctataagaaaggtgatattgtagacatcaagggaatgggtactgttcaaaaaggaatgccccacaagtgttaccatggcaaaactggaagagtctacaatgttacccagcatgctgttggcattgttgtaaacaaacaagttaagggcaagattcttgccaagagaattaatgtgcgtattgagcacattaagcactctaagagccgagatagcttcctgaaacgtgtgaaggaaaatgatcagaaaaagaaagaagccaaagagaaaggtacctgggttcaactaaagcgccagcctgctccacccagagaagcacactttgtgagaaccaatgggaaggagcctgagctgctggaacctattccctatgaattcatggcataataggtgttaaaaaaaaaaataaaggacctctgggcaaaaaaaaaaaaaaagaaaaaaaaaaaaaaaaaaaaacaacacaaacttgtgggcgcgcggccttgggccncgngaaaaaggnttttcaaaaccactcncggtggggcggngggggccccagnnaggntataggnngacnnggggccaaaagcgnggtcccaaaganaacacccggggcaaggcaacnnagggngctggnnttctcncacnantanaaaaaanggcgcggggg

SEQ ID NO: 573673 - DNA, 412 bp, Homo sapiens
ctgggaaagcccgtgtgggtttttgcctaggaccacatgtctgtcattctgcggctggcgacatgctttaggtaccgttttgaggccctaacaatcacaaactatgctcaagtcactctctacattgctcataacttccaaaatctattttcttcctcatacctgacacatatacttgctgctccccggctccttcagctgtactcactctttaagtcccacaattaccattgttcctggcccggacttcaatctggcctcccacattattcctgataccacacctgacccccatgactgtatctctctgatccacctgatattcaccccatttccccatatttccttctttgctgttcctcaccctgatcacgcttgcctcgtgctatccccaaactgccattcttaactc

SEQ ID NO: 573674 - DNA, 1584 bp, Homo sapiens
  misc_feature (537)..(537): n is a, c, g, or t
  misc_feature (545)..(545): n is a, c, g, or t
  misc_feature (548)..(548): n is a, c, g, or t
  misc_feature (553)..(553): n is a, c, g, or t
  misc_feature (555)..(555): n is a, c, g, or t
  misc_feature (566)..(566): n is a, c, g, or t
  misc_feature (596)..(596): n is a, c, g, or t
  misc_feature (624)..(624): n is a, c, g, or t
gaggtcagtctcgctatattgcccaggctggtcttgaatgcctgggctcaagcaatcctcccaccttggccacctgaatagctgggactacaggcatgtgccactatgcccagctaattttttgtatttttagtagagatgaggcaatatttttaatatagctaatgcatgatgttaaaaactttgcatatggaaaagatgcattcaaaatagaagacagatcaatgaattttagtgtagtcattttaagtttagtgacatagtttcagtttccacattgcaactatacactgtggagttttagcatagtatctaagaatgaatatccacagttctgaacaggttattttagcactcttttccagcaatatatctctgagaggccatactttcttcacgtatgtcaaacaaataacatattgcaacataattgttcttcagacttgttttttagcagcagacacatttccaaatgtaatcttactctgaatctgagcttcattatacaatacagacaaaagtgagcttttccagttnaagtaggngtntgatntnaaacacacccntggccccaacaaaacaaataaaactcccantcttattttaagagcttgttgaagaganttattaagtaacgccgcccttcctttcggccggaaccgccatcttccagtaattcgccaaaatgacgaacacaaagggaaagaggagaggcacccgatatatgttctctaggccttttagaaaacatggagttgttcctttggccacatatatgcgaatctataagaaaggtgatattgtagacatcaagggaatgggtactgttcaaaaaggaatgccccacaagtgttaccatggcaaaactggaagagtctacaatgttacccagcatgctgttggcattgttgtaaacaaacaagttaagggcaagattcttgccaagagaattaatgtgcgtattgagcacattaagcactctaagagccgagatagcttcctgaaacgtgtgaaggaaaatgatcagaaaaagaaagaagccaaagagaaaggtacctgggttcaactaaagcgccagcctgctccacccagagaagcacactttgtgagaaccaatgggaaggagcctgagctgctggaacctattccctatgaattcatggcataataggtgttaacaaaaacaaataaaggacctctgggctacaaaaaaaaaaaaaaaaaaaaaaaaaaaaactttttggcgccgcccctgggccctctaaaaaattttttaaaccccttctcttttgggcccgggggcccacttgatggttgatagttgtaacctctgtggtcgcaataagctgtgtgttccccaaggagaaatcccccgggtgtcctatgagaacctatctgtcggtctggggtgttttttctccaccacaatataaaaaaaacgcgcccgcgggggggacaaccgcggcggcttttctttgagaaccatctcccagagaggggggtgtcccaagagggtacattccgggggttccctttaacccgggggattccacaggaaagcgctcgatatttaaattttaccgc

SEQ ID NO: 573675 - DNA, 472 bp, Homo sapiens
  misc_feature (104)..(104): n is a, c, g, or t
  misc_feature (118)..(118): n is a, c, g, or t
  misc_feature (121)..(121): n is a, c, g, or t
  misc_feature (124)..(124): n is a, c, g, or t
  misc_feature (129)..(129): n is a, c, g, or t
ccgggtcacacaaaggcatgctggagtacccagcctatcaggtgcccctcttccaaaggcagcgtccgagccagcaagaggaaggggtgctgtaggcttccccncccacccaacgganganaangggcnccccaaaaaagtgagggccggagaggagttcaggaacccttctccatacccacaatctgagcacgctaccaaatctcaaaatatcctaagactaacaaaggcagctgtgtctgagcccaacccttctaaacggtgacctttagtgccaacttcccctctaactggacagcctcttctgtcccaagtctccagagagaaatcaggcctgatgagggggaattcctggaacctggaccccagccttggtgggggagcctctggaatgcatggggcgggtcctagctgttagggacatttccaagctgttagttgctgtttaaaatagaaataaaattgaagccta

SEQ ID NO: 573676 - DNA, 1225 bp, Homo sapiens
  misc_feature (537)..(537): n is a, c, g, or t
  misc_feature (545)..(545): n is a, c, g, or t
  misc_feature (548)..(548): n is a, c, g, or t
  misc_feature (553)..(553): n is a, c, g, or t
  misc_feature (555)..(555): n is a, c, g, or t
  misc_feature (566)..(566): n is a, c, g, or t
  misc_feature (596)..(596): n is a, c, g, or t
  misc_feature (624)..(624): n is a, c, g, or t
gaggtcagtctcgctatattgcccaggctggtcttgaatgcctgggctcaagcaatcctcccaccttggccacctgaatagctgggactacaggcatgtgccactatgcccagctaattttttgtatttttagtagagatgaggcaatatttttaatatagctaatgcatgatgttaaaaactttgcatatggaaaagatgcattcaaaatagaagacagatcaatgaattttagtgtagtcattttaagtttagtgacatagtttcagtttccacattgcaactatacactgtggagttttagcatagtatctaagaatgaatatccacagttctgaacaggttattttagcactcttttccagcaatatatctctgagaggccatactttcttcacgtatgtcaaacaaataacatattgcaacataattgttcttcagacttgttttttagcagcagacacatttccaaatgtaatcttactctgaatctgagcttcattatacaatacagacaaaagtgagcttttccagttnaagtaggngtntgatntnaaacacacccntggccccaacaaaacaaataaaactcccantcttattttaagagcttgttgaagaganttattaagtaacgccgcccttcctttcggccggaaccgccatcttccagtaattcgccaaaatgacgaacacaaagggaaagaggagaggcacccgatatatgttctctaggccttttagaaaacatggagttgttcctttggccacatatatgcgaatctataagaaaggtgatattgtagacatcaagggaatgggtactgttcaaaaaggaatgccccacaagtgttaccatggcaaaactggaagagtctacaatgttacccagcatgctgttggcattgttgtaaacaaacaagttaagggcaagattcttgccaagagaattaatgtgcgtattgagcacattaagcactctaagagccgagatagcttcctgaaacgtgtgaaggaaaatgatcagaaaaagaaagaagccaaagagaaaggtacctgggttcaactaaagcgccagcctgctccacccagagaagcacactttgtgagaaccaatgggaaggagcctgagctgctggaacctattccctatgaattcatggcataataggtgttaaaaaaaagtcgagcggccgcgaatttagtagtagtagtagtagtaggc

SEQ ID NO: 573677 - DNA, 1613 bp, Homo sapiens
  misc_feature (537)..(537): n is a, c, g, or t
  misc_feature (545)..(545): n is a, c, g, or t
  misc_feature (548)..(548): n is a, c, g, or t
  misc_feature (553)..(553): n is a, c, g, or t
  misc_feature (555)..(555): n is a, c, g, or t
  misc_feature (566)..(566): n is a, c, g, or t
  misc_feature (596)..(596): n is a, c, g, or t
  misc_feature (624)..(624): n is a, c, g, or t
  misc_feature (739)..(739): n is a, c, g, or t
  misc_feature (745)..(745): n is a, c, g, or t
  misc_feature (1311)..(1311): n is a, c, g, or t
  misc_feature (1460)..(1460): n is a, c, g, or t
gaggtcagtctcgctatattgcccaggctggtcttgaatgcctgggctcaagcaatcctcccaccttggccacctgaatagctgggactacaggcatgtgccactatgcccagctaattttttgtatttttagtagagatgaggcaatatttttaatatagctaatgcatgatgttaaaaactttgcatatggaaaagatgcattcaaaatagaagacagatcaatgaattttagtgtagtcattttaagtttagtgacatagtttcagtttccacattgcaactatacactgtggagttttagcatagtatctaagaatgaatatccacagttctgaacaggttattttagcactcttttccagcaatatatctctgagaggccatactttcttcacgtatgtcaaacaaataacatattgcaacataattgttcttcagacttgttttttagcagcagacacatttccaaatgtaatcttactctgaatctgagcttcattatacaatacagacaaaagtgagcttttccagttnaagtaggngtntgatntnaaacacacccntggccccaacaaaacaaataaaactcccantcttattttaagagcttgttgaagaganttattaagtaacgccgcccttcctttcggccggaaccgccatcttccagtaattcgccaaaatgacgaacacaaagggaaagaggagaggcacccgatatatgaatttactttantttggntttttcccctttccccctttaacggggggcccccttttttctaagggaaaaaaaaacaatttgggcgttcggttccccttttttggggagttgttcctttggccacatatatgcgaatctataagaaaggtgatattgtagacatcaagggaatgggtactgttcaaaaaggaatgccccacaagtgttaccatggcaaaactggaagagtctacaatgttacccagcatgctgttggcattgttgtaaacaaacaagttaagggcaagattcttgccaagagaattaatgtgcgtattgagcacattaagcactctaagagccgagatagcttcctgaaacgtgtgaaggaaaatgatcagaaaaagaaagaagccaaagagaaaggtacctgggttcaactaaagcgccagcctgctccacccagagaagcacactttgtgagaaccaatgggaaggagcctgagctgctggaacctattccctatgaattcatggcataataggtgttaaaaaaaaaaataaaggacctctgggctacaaaaaaaaaaaaaaaaaaaacccgngggcatcaaatggcggggggcgggaaaaaaggggtactggaatgggccatgggccaaagcggttccctggacccagttttcctggtccaagggggaaatcggcggggccccaaaagggaggcggaaaaattccgaaaagccaggtaccnggtagagaatcggcgaccaaggccgccgggaaccaagacacccgcgctagtgacgcggtctataggggggacgcaagcgagtctggagagaccacgaattcgcgggcgcagaacagcggccagagaacaaaagaaaaaccagccagcgccgac

SEQ ID NO: 573678 - DNA, 2020 bp, Homo sapiens
gcggccgctttaaggcgccgggcccgcctcaatcgcagggggcgtggcctagcggtcccgcccccggggcgcgcgcgcgcattggctgtgcggggtgcgggcgcgcgggcggcgctttgaaccgggcgcggggcgcggggcgcggggcgctgcggccggtacacgccggggtagggccggggtcgggttgtggtcgggccgggattgggctctcctgggccatggcagccgaggcgcgcgtgtcgcgctggtacttcggggggctggcctcctgcggggccgcctgctgcacgcacccgctggacctgctcaaggtgcatctgcagacgcagcaggaggtgaagctgcgcatgacgggcatggcgctgcgggtggtgcgtaccgacggcatcctggcactctacagcggcctgagcgcctcgctgtgcagacagatgacctactccctgactcggttcgccatctacgagactgtgcgggaccgcgtggccaagggcagccaggggcctctccccttccacgagaaggtgttgctgggctccgtcagcggtttagctggaggcttcgtggggacgcccgcagacttggtcaacgtcaggatgcagaacgacgtgaagctgccccagggtcagcggcgcaactacgcccatgcgctggatggcctgtaccgcgtagctcgtgaagagggtctcaggagactgttctcgggtgcaaccatggcatccagccgaggggccttagtcactgtgggccagctgtcctgctacgaccaggccaagcagctggtccttagcaccgggtacctctctgacaacatcttcactcactttgtcgccagctttattgcaggtggatgtgccacgttcctgtgccagcccctggatgtgctgaagactcgcctgatgaactccaagggggagtatcagggcgttttccactgcgccgtggagacagcgaagctcgggcctctggccttttacaagggcctcgtcccagctggcatccgcctcatcccccacaccgtgctcacttttgtgtttctggaacagctacgcaaaaactttggcatcaaagtgccatcctgaccagccgtgggaatggctgggctgccaggccagacacgctaggttcttccaaagagtcccaagcccagcacctgctcctggggccacgacctccctggccgtggccacccgtcctccgcagcaggcccctgctgtccccccacctgctggctgagctcctcctggcctcgtcccctctcagctgtagctgcaccacccccgctctggctaccaggctctcccggctgggcactgcgtggccttgcccctctcccgctggcagctcctcaggggaacaggggctaccagaggctgatttctcccctctcctgggccaggggaggggtattatccctgcctcctgcccccgatgcccaaagcagcatcttccagcactttccatcgaggacttgggtggcagagtgtgggtgcagcctggctgttgctcacccaagtgctagctctgcacttcgtgtctgctgagagcaaccagaccttccatgtcctcgggcagctgcaactccccgcgagaccccgcagctgggtgggatgaacaagcaacgcagaccacaagcgagtgcctgggagggagtggcccagggtggttctggagccattgtgggtgagggtcgagggccaccgaggtcccgcgcaccgctgcctgccctgcagtggctttaacagttagttttgccaaagcctctccactcaccagcaggcggtctctgtcttcagggattgtgcctgcgtccctcgggcacctgggcccccccgcttggctccctgggggaatggcccaggcgggccgcggttcctccttagggccttctccccgacaaggagtccgacggggcggatgctgcatcctctgcctccctggtcgctgggcttcaccccacctgggaagggcagtgtgctctgtgggggctgcaatcaataaatgccgggagctgcca

SEQ ID NO: 573679 - DNA, 1022 bp, Homo sapiens
ctttggcccacgtgttctatttccatgggcttcattgggggcttaaggtgcctcccccatcatggcctggtccccttgagatctgggcctcacaaaccgggtaaaatttttagcttgggaccctggtgtatctttcctgttttcccggctggcctttgccactggggaaccagggcgcgctttccctgggaatttaagagtcccatcccgagacctgggggaaagctttttaaggggtacccacgttgacttgctttcacgctccggatttgcttggatgtctaccatggggcccccctgtggactatcctgtggttacctccctagggcccggaacccggttaggttaatctgatccaggattggatcaacagcctccttctcttggggacttctcaaggagcctgtggttcatcctagaacgatagatagatttgatttctgggttccctcccgtacagaggtgtcccccgtctctggtgcacggctccgtcacttaacactaggggacttggttttagaactctgtatgacggaacgaaaatggccccgggggaaggaaaacgtgactgggaaggacccgaaacctgggaaaggggaatgggtagaaccagactgagaaatcccacatgcttccagaattcagagggttcaaaggaatggtttcggatattaggctctccctgcgtcccgtgtcttcttaccaggaatttcttgtggaaacatatccagaagcaccaaagtgtgtggaccaccctgagtaccccactctctgtgaataccatacccccttcttggccccggtggccaaacactggttcttcccggtgactgtagagaccagttttagaccctttgtgatagaactataatgctctctgtacatctagtctcctgcctcctcagctttgcaagatagttttagtaggaatgaagatggaagatcccggcttgggttgcctaactaccctgtttaaaatattgtgtaatccctttataaatttaactttggatttgtttta

SEQ ID NO: 573680 - DNA, 1195 bp, Homo sapiens
  misc_feature (537)..(537): n is a, c, g, or t
  misc_feature (545)..(545): n is a, c, g, or t
  misc_feature (548)..(548): n is a, c, g, or t
  misc_feature (553)..(553): n is a, c, g, or t
  misc_feature (555)..(555): n is a, c, g, or t
  misc_feature (566)..(566): n is a, c, g, or t
  misc_feature (596)..(596): n is a, c, g, or t
  misc_feature (624)..(624): n is a, c, g, or t
gaggtcagtctcgctatattgcccaggctggtcttgaatgcctgggctcaagcaatcctcccaccttggccacctgaatagctgggactacaggcatgtgccactatgcccagctaattttttgtatttttagtagagatgaggcaatatttttaatatagctaatgcatgatgttaaaaactttgcatatggaaaagatgcattcaaaatagaagacagatcaatgaattttagtgtagtcattttaagtttagtgacatagtttcagtttccacattgcaactatacactgtggagttttagcatagtatctaagaatgaatatccacagttctgaacaggttattttagcactcttttccagcaatatatctctgagaggccatactttcttcacgtatgtcaaacaaataacatattgcaacataattgttcttcagacttgttttttagcagcagacacatttccaaatgtaatcttactctgaatctgagcttcattatacaatacagacaaaagtgagcttttccagttnaagtaggngtntgatntnaaacacacccntggccccaacaaaacaaataaaactcccantcttattttaagagcttgttgaagaganttattaagtaacgccgcccttcctttcggccggaaccgccatcttccagtaattcgccaaaatgacgaacacaaagggaaagaggagaggcacccgatatatgttctctaggccttttagaaaacatggagttgttcctttggccacatatatgcgaatctataagaaaggtgatattgtagacatcaagggaatgggtactgttcaaaaaggaatgccccacaagtgttaccatggcaaaactggaagagtctacaatgttacccagcatgctgttggcattgttgtaaacaaacaagttaagggcaagattcttgccaagagaattaatgtgcgtattgagcacattaagcactctaagagccgagatagcttcctgaaacgtgtgaaggaaaatgatcagaaaaagaaagaagccaaagagaaaggtacctgggttcaactaaagcgccagcctgctccacccagagaagcacactttgtgagaaccaatgggaaggagcctgagctgtatagacctagttccctatgattcatggcatacaaacgggggggaaaaaaataaagcttg

SEQ ID NO: 573681 - DNA, 2047 bp, Homo sapiens
gcggccgctttaaggcgccgggcccgcctcaatcgcagggggcgtggcctagcggtcccgcccccggggcgcgcgcgcgcattggctgtgcggggtgcgggcgcgcgggcggcgctttgaaccgggcgcggggcgcggggcgcggggcgctgcggccggtacacgccggggtagggccggggtcgggttgtggtcgggccgggattgggctctcctgggccatggcagccgaggcgcgcgtgtcgcgctggtacttcggggggctggcctcctgcggggccgcctgctgcacgcacccgctggacctgctcaaggtgcatctgcagacgcagcaggaggtgaagctgcgcatgacgggcatggcgctgcgggtggtgcgtaccgacggcatcctggcactctacagcggcctgagcgcctcgctgtgcagacagatgacctactccctgactcggttcgccatctacgagactgtgcgggaccgcgtggccaagggcagccaggggcctctccccttccacgagaaggtgttgctgggctccgtcagcggtttagctggaggcttcgtggggacgcccgcagacttggtcaacgtcaggatgcagaacgacgtgaagctgccccagggtcagcggcgcaactacgcccatgcgctggatggcctgtaccgcgtagctcgtgaagagggtctcaggagactgttctcgggtgcaaccatggcatccagccgaggggccttagtcactgtgggccagctgtcctgctacgaccaggccaagcagctggtccttagcaccgggtacctctctgacaacatcttcactcactttgtcgccagctttattgcagccgctggtgacgagccccctcctcagggtggatgtgccacgttcctgtgccagcccctggatgtgctgaagactcgcctgatgaactccaagggggagtatcagggcgttttccactgcgccgtggagacagcgaagctcgggcctctggccttttacaagggcctcgtcccagctggcatccgcctcatcccccacaccgtgctcacttttgtgtttctggaacagctacgcaaaaactttggcatcaaagtgccatcctgaccagccgtgggaatggctgggctgccaggccagacacgctaggttcttccaaagagtcccaagcccagcacctgctcctggggccacgacctccctggccgtggccacccgtcctccgcagcaggcccctgctgtccccccacctgctggctgagctcctcctggcctcgtcccctctcagctgtagctgcaccacccccgctctggctaccaggctctcccggctgggcactgcgtggccttgcccctctcccgctggcagctcctcaggggaacaggggctaccagaggctgatttctcccctctcctgggccaggggaggggtattatccctgcctcctgcccccgatgcccaaagcagcatcttccagcactttccatcgaggacttgggtggcagagtgtgggtgcagcctggctgttgctcacccaagtgctagctctgcacttcgtgtctgctgagagcaaccagaccttccatgtcctcgggcagctgcaactccccgcgagaccccgcagctgggtgggatgaacaagcaacgcagaccacaagcgagtgcctgggagggagtggcccagggtggttctggagccattgtgggtgagggtcgagggccaccgaggtcccgcgcaccgctgcctgccctgcagtggctttaacagttagttttgccaaagcctctccactcaccagcaggcggtctctgtcttcagggattgtgcctgcgtccctcgggcacctgggcccccccgcttggctccctgggggaatggcccaggcgggccgcggttcctccttagggccttctccccgacaaggagtccgacggggcggatgctgcatcctctgcctccctggtcgctgggcttcaccccacctgggaagggcagtgtgctctgtgggggctgcaatcaataaatgccgggagctgcca

SEQ ID NO: 573682 - DNA, 326 bp, Homo sapiens
cattcaacggtgggcaggacatgaatagacttggcataaaacgatgacatacacatggcctacacgtatagtaagaaaagctcagcatcaccagtcatcagagaaatgcaaaccaaaaccagaatgagatgtcatcttaccccagtcagaatggctattattaaaaagacaaaacaacaacaacaacaaaaagaacaacaagtatttgcacggatgcagagaaaaggaaactcttaaagattttcggtgggaactataaattacgtactacgcttctatggacacacacaaacagtgatatcttaaagaaaagataccgataattt

SEQ ID NO: 573683 - DNA, 444 bp, Homo sapiens
ccatctgtgacaattttaatcctcatttgatcatattttatggtaaatgagcttaactcgatttttttttaatttagatgcctcctaatgtactataacaggtgctatgataagaaagatgaatgagtttgtaaaacccagggtaaataaggagtttactacaagaatacaacttcccatatgcaagatggggctgggcaaggctgtgagagcttctcttgaattgagcctaagaggatgaggagaattccatgattgaggactcagaggtggacctcccaaacaaagggacaaagttgtgaaagtgcaggtcagattcagagaagagctaatcgtggaatttaatttaaaataataaaagaaaaggactttgatgaacaaccataccgtttttagctcttacatcgtgtagttttccaagtaaaaatgctttgaatgctgaaa

SEQ ID NO: 573684 - DNA, 482 bp, Homo sapiens
  misc_feature (447)..(447): n is a, c, g, or t
gcggccgctttaaggcgccgggcccgcctcaatcgcagggggcgtggcctagcggtcccgcccccggggcgcgcgcgcgcattggctgtgcggggtgcgggcgcgcgggcggcgctttgaaccgggcgcggggcgcggggcgcggggcgctgcggccggtacacgccggggtagggccggggtcgggttgtggtcgggccgggattgggctctcctgggccatggcagccgaggcgcgcgtgtcgcgctggtacttcggggggctggcctcctgcggggccgcctgctgcacgcacccgctggacctgctcaaggtgaggccggggcccgggacgcggggcggatgggaccctggcgccgccgagacgcctgcaaaggcagcagcccggccccacgcacccggggatcgccgcgcccggggctccctcctggagagcgcgaggaggnccccgacgcccggatggccgatcccgggtggccct

SEQ ID NO: 573685 - DNA, 152 bp, Homo sapiens
  misc_feature (58)..(58): n is a, c, g, or t
gaggaaagtaagaaagaaagaaagaaagagacagagagagagaggcaggagcaggcgntgggaagaaagaggacagaaaataacaggtttcagagatgaaaggtgagcacacaggcagcatggggacagccttgggcggcaggggccaccct

SEQ ID NO: 573686 - DNA, 2500 bp, Homo sapiens
gcggccgctttaaggcgccgggcccgcctcaatcgcagggggcgtggcctagcggtcccgcccccggggcgcgcgcgcgcattggctgtgcggggtgcgggcgcgcgggcggcgctttgaaccgggcgcggggcgcggggcgcggggcgctgcggccggtacacgccggggtagggccggggtcgggttgtggtcgggccgggattgggctctcctgggccatggcagccgaggcgcgcgtgtcgcgctggtacttcggggggctggcctcctgcggggccgcctgctgcacgcacccgctggacctgctcaaggtgcatctgcagacgcagcaggaggtgaagctgcgcatgacgggcatggcgctgcgggtggtgcgtaccgacggcatcctggcactctacagcggcctgagcgcctcgctgtgcagacagatgacctactccctgactcggttcgccatctacgagactgtgcgggaccgcgtggccaagggcagccaggggcctctccccttccacgagaaggtgttgctgggctccgtcagcggtttagctggaggcttcgtggggacgcccgcagacttggtcaacgtcaggatgcagaacgacgtgaagctgccccagggtcagcggcgcaactacgcccatgcgctggatggcctgtaccgcgtagctcgtgaagagggtctcaggagactgttctcgggtgcaaccatggcatccagccgaggggccttagtcactgtgggccagctgtcctgctacgaccaggccaagcagctggtccttagcaccgggtacctctctgacaacatcttcactcactttgtcgccagctttattgcaggtggatgtgccacgttcctgtgccagcccctggatgtgctgaagactcgcctgatgaactccaagggggagtatcagggcgttttccactgcgccgtggagacagcgaagctcgggcctctggccttttacaagggcctcgtcccagctggcatccgcctcatcccccacaccgtgctcacttttgtgtttctggaacagctacgcaaaaactttggcatcaaagtgccatcctgaccagccgtgggaatggctgggctgccaggccagacacgctaggttcttccaaagagtcccaagcccagcacctgctcctggggccacgacctccctggccgtggccacccgtcctccgcagcaggcccctgctgtccccccacctgctggctgagctcctcctggcctcgtcccctctcagctgtagctgcaccacccccgctctggctaccaggctctcccggctgggcactgcgtggccttgcccctctcccgctggcagctcctcaggggaacaggggctaccagaggctgatttctcccctctcctgggccaggggaggggtattatccctgcctcctgcccccgatgcccaaagcagcatcttccagcactttccatcgaggacttgggtggcagagtgtgggtgcagcctggctgttgctcacccaagtgctagctctgcacttcgtgtctgctgagagcaaccagaccttccatgtcctcgggcagctgcaactccccgcgagaccccgcagctgggtgggatgaacaagcaacgcagaccacaagcgagtgcctgggagggagtggcccagggtggttctggagccattgtgggtgagggtcgagggccaccgaggtcccgcgcaccgctgcctgccctgcagtggctttaacagttagttttgccaaagcctctccactcaccagcaggcggtctctgtcttcagggattgtgcctgcgtccctcgggcacctgggcccccccgcttggctccctgggggaatggcccaggcgggccgcggttcctccttagggccttctccccgacaaggagtccgacggggcggatgctgcatcctctgcctccctggtcgctgggcttcaccccacctgggaagggcagtgtgctctgtgggggctgcaatcaataaatgccgggagctgccaaaaaaaaaaaaaaaaaaaaaaaaaaaaaaaaaaaaaaaaaaagggggggggcccaaaaaaaaaaccccggggggggcccaaaagcgcctaccccaggcttctgtcggtagcagcagaggggggccccaatagaggaggggacgcggaaatcaagagaacacaggagcaggagggcccgcgtgattaaaaacaccgcgggcgaggaggcgggaaaaaacagcggccactgcggggacacccgggagaagaaggcaacccactcaccgctggggcgggggggacaccactaagggcggccgcacacccacccacacagaagatattaaaaggtctacagggggacaaacaataaccgcaacgcagtgtaccaaaccggcgcgtgcacacccacagccgctatacggcggggccgtgagaaaagactggcccaccgcgtgatcgagccgcgaaaacatttcaccgcaggtataatcaaaaagt

SEQ ID NO: 573687 - DNA, 2441 bp, Homo sapiens
gcggccgctttaaggcgccgggcccgcctcaatcgcagggggcgtggcctagcggtcccgcccccggggcgcgcgcgcgcattggctgtgcggggtgcgggcgcgcgggcggcgctttgaaccgggcgcggggcgcggggcgcggggcgctgcggccggtacacgccggggtagggccggggtcgggttgtggtcgggccgggattgggctctcctgggccatggcagccgaggcgcgcgtgtcgcgctggtacttcggggggctggcctcctgcggggccgcctgctgcacgcacccgctggacctgctcaaggtgcatctgcagacgcagcaggaggtgaagctgcgcatgacgggcatggcgctgcgggtggtgcgtaccgacggcatcctggcactctacagcggcctgagcgcctcgctgtgcagacagatgacctactccctgactcggttcgccatctacgagactgtgcgggaccgcgtggccaagggcagccaggggcctctccccttccacgagaaggtgttgctgggctccgtcagcggtttagctggaggcttcgtggggacgcccgcagacttggtcaacgtcaggatgcagaacgacgtgaagctgccccagggtcagcggcgcaactacgcccatgcgctggatggcctgtaccgcgtagctcgtgaagagggtctcaggagactgttctcgggtgcaaccatggcatccagccgaggggccttagtcactgtgggccagctgtcctgctacgaccaggccaagcagctggtccttagcaccgggtacctctctgacaacatcttcactcactttgtcgccagctttattgcaggtggatgtgccacgttcctgtgccagcccctggatgtgctgaagactcgcctgatgaactccaagggggagtatcagggcgttttccactgcgccgtggagacagcgaagctcgggcctctggccttttacaagggcctcgtcccagctggcatccgcctcatcccccacaccgtgctcacttttgtgtttctggaacagctacgcaaaaactttggcatcaaagtgccatcctgaccagccgtgggaatggctgggctgccaggccagacacgctaggttcttccaaagagtcccaagcccagcacctgctcctggggccacgacctccctggccgtggccacccgtcctccgcagcaggcccctgctgtccccccacctgctggctgagctcctcctggcctcgtcccctctcagctgtagctgcaccacccccgctctggctaccaggctctcccggctgggcactgcgtggccttgcccctctcccgctggcagctcctcaggggaacaggggctaccagaggctgatttctcccctctcctgggccaggggaggggtattatccctgcctcctgcccccgatgcccaaagcagcatcttccagcactttccatcgaggacttgggtggcagagtgtgggtgcagcctggctgttgctcacccaagtgctagctctgcacttcgtgtctgctgagagcaaccagaccttccatgtcctcgggcagctgcaactccccgcgagaccccgcagctgggtgggatgaacaagcaacgcagaccacaagcgagtgcctgggagggagtggcccagggtggttctggagccattgtgggtgagggtcgagggccaccgaggtcccgcgcaccgctgcctgccctgcagtggctttaacagttagttttgccaaagcctctccactcaccagcaggcggtctctgtcttcagggattgtgcctgcgtccctcgggcacctgggcccccccgcttggctccctgggggaatggcccaggcgggccgcggttcctccttagggccttctccccgacaaggagtccgacggggcggatgctgcatcctctgcctccctggtcgctgggcttcaccccacctgggaagggcagtgtgctctgtgggggctgcaatcaataaatgccgggagctgccacatctgttcctgcctgcgctgcctgcccgctggctgccttgctgtccagaccagcaggaccccctgcaccccctaaggaggaccgggccaaggccttttggggaggagccaggtcctcgctgtgcatttggatgaaggaattggggaagtaggaggaaccaaaaccggtgtggggggaagggaacaagacggtgaggctggggttgagggtctcagacacaggatctggctctgtcattcagactggagtgcagtggccgatcttggcttactaacctgggcctcctgggctcaaaccagtcttctacctcagcttccagtagctggtgctaggggcgtgtccatctaccggctattggtggttgggagcgggccccctgttcccgggggccatttggccgggctccccctggccccgagc

SEQ ID NO: 573688 - DNA, 2265 bp, Homo sapiens
gcggccgctttaaggcgccgggcccgcctcaatcgcagggggcgtggcctagcggtcccgcccccggggcgcgcgcgcgcattggctgtgcggggtgcgggcgcgcgggcggcgctttgaaccgggcgcggggcgcggggcgcggggcgctgcggccggtacacgccggggtagggccggggtcgggttgtggtcgggccgggattgggctctcctgggccatggcagccgaggcgcgcgtgtcgcgctggtacttcggggggctggcctcctgcggggccgcctgctgcacgcacccgctggacctgctcaagggacagccaaggggcgttgttttctgaccgtgtcttgccacagagaacaaagaagaaagggcctgaggctttgcacagtctgcccagcaggccctgccctgtgaacctggctgtggtcactgggcagccgcctgtctaggggacctttattttagcagcctgtccaggggacttgtattccagcagcctttgaggggactggctttactaatgagcaacaatgctggtcgctgcgtgaaggccaggtgcatctgcagacgcagcaggaggtgaagctgcgcatgacgggcatggcgctgcgggtggtgcgtaccgacggcatcctggcactctacagcggcctgagcgcctcgctgtgcagacagatgacctactccctgactcggttcgccatctacgagactgtgcgggaccgcgtggccaagggcagccaggggcctctccccttccacgagaaggtgttgctgggctccgtcagcggtttagctggaggcttcgtggggacgcccgcagacttggtcaacgtcaggatgcagaacgacgtgaagctgccccagggtcagcggcgcaactacgcccatgcgctggatggcctgtaccgcgtagctcgtgaagagggtctcaggagactgttctcgggtgcaaccatggcatccagccgaggggccttagtcactgtgggccagctgtcctgctacgaccaggccaagcagctggtccttagcaccgggtacctctctgacaacatcttcactcactttgtcgccagctttattgcaggtggatgtgccacgttcctgtgccagcccctggatgtgctgaagactcgcctgatgaactccaagggggagtatcagggcgttttccactgcgccgtggagacagcgaagctcgggcctctggccttttacaagggcctcgtcccagctggcatccgcctcatcccccacaccgtgctcacttttgtgtttctggaacagctacgcaaaaactttggcatcaaagtgccatcctgaccagccgtgggaatggctgggctgccaggccagacacgctaggttcttccaaagagtcccaagcccagcacctgctcctggggccacgacctccctggccgtggccacccgtcctccgcagcaggcccctgctgtccccccacctgctggctgagctcctcctggcctcgtcccctctcagctgtagctgcaccacccccgctctggctaccaggctctcccggctgggcactgcgtggccttgcccctctcccgctggcagctcctcaggggaacaggggctaccagaggctgatttctcccctctcctgggccaggggaggggtattatccctgcctcctgcccccgatgcccaaagcagcatcttccagcactttccatcgaggacttgggtggcagagtgtgggtgcagcctggctgttgctcacccaagtgctagctctgcacttcgtgtctgctgagagcaaccagaccttccatgtcctcgggcagctgcaactccccgcgagaccccgcagctgggtgggatgaacaagcaacgcagaccacaagcgagtgcctgggagggagtggcccagggtggttctggagccattgtgggtgagggtcgagggccaccgaggtcccgcgcaccgctgcctgccctgcagtggctttaacagttagttttgccaaagcctctccactcaccagcaggcggtctctgtcttcagggattgtgcctgcgtccctcgggcacctgggcccccccgcttggctccctgggggaatggcccaggcgggccgcggttcctccttagggccttctccccgacaaggagtccgacggggcggatgctgcatcctctgcctccctggtcgctgggcttcaccccacctgggaagggcagtgtgctctgtgggggctgcaatcaataaatgccgggagctgcca

SEQ ID NO: 573689 - DNA, 256 bp, Homo sapiens
  misc_feature (68)..(68): n is a, c, g, or t
  misc_feature (76)..(76): n is a, c, g, or t
  misc_feature (226)..(226): n is a, c, g, or t
ggccagcctggacaacgtgatggaaccccatctctactaaaagtagaaaaaattggccgggcatggtngtggatgnctgtagtcgcagccactcgggagagggcgctggagaatcacttgaactcatggtgcgcaggttgcagggagccgagatggcaccattgtgctccagcctgggcaacaagagcaaaactccatctcaaaaaaaataaagaacctgcgagtnagttcccacacgttttcctaatgggctgct

SEQ ID NO: 573690 - DNA, 1928 bp, Homo sapiens
gcggccgctttaaggcgccgggcccgcctcaatcgcagggggcgtggcctagcggtcccgcccccggggcgcgcgcgcgcattggctgtgcggggtgcgggcgcgcgggcggcgctttgaaccgggcgcggggcgcggggcgcggggcgctgcggccggtacacgccggggtagggccggggtcgggttgtggtcgggccgggattgggctctcctgggccatggcagccgaggcgcgcgtgtcgcgctggtacttcggggggctggcctcctgcggggccgcctgctgcacgcacccgctggacctgctcaaggtgcatctgcagacgcagcaggaggtgaagctgcgcatgacgggcatggcgctgcgggtggtgcgtaccgacggcatcctggcactctacagcggcctgagcgcctcgctgtgcagacagatgacctactccctgactcggttcgccatctacgagactgtgcgggaccgcgtggccaagggcagccaggggcctctccccttccacgagaaggtgttgctgggctccgtcagcggtttagctggaggcttcgtggggacgcccgcagacttggtcaacgtcaggatgcagaacgacgtgaagctgccccagggtcagcggcgcaactacgcccatgcgctggatggcctgtaccgcgtagctcgtgaagagggtctcaggagactgttctcgggtgcaaccatggcatccagccgaggggccttagtcactgtgggccagctgtggatgtgccacgttcctgtgccagcccctggatgtgctgaagactcgcctgatgaactccaagggggagtatcagggcgttttccactgcgccgtggagacagcgaagctcgggcctctggccttttacaagggcctcgtcccagctggcatccgcctcatcccccacaccgtgctcacttttgtgtttctggaacagctacgcaaaaactttggcatcaaagtgccatcctgaccagccgtgggaatggctgggctgccaggccagacacgctaggttcttccaaagagtcccaagcccagcacctgctcctggggccacgacctccctggccgtggccacccgtcctccgcagcaggcccctgctgtccccccacctgctggctgagctcctcctggcctcgtcccctctcagctgtagctgcaccacccccgctctggctaccaggctctcccggctgggcactgcgtggccttgcccctctcccgctggcagctcctcaggggaacaggggctaccagaggctgatttctcccctctcctgggccaggggaggggtattatccctgcctcctgcccccgatgcccaaagcagcatcttccagcactttccatcgaggacttgggtggcagagtgtgggtgcagcctggctgttgctcacccaagtgctagctctgcacttcgtgtctgctgagagcaaccagaccttccatgtcctcgggcagctgcaactccccgcgagaccccgcagctgggtgggatgaacaagcaacgcagaccacaagcgagtgcctgggagggagtggcccagggtggttctggagccattgtgggtgagggtcgagggccaccgaggtcccgcgcaccgctgcctgccctgcagtggctttaacagttagttttgccaaagcctctccactcaccagcaggcggtctctgtcttcagggattgtgcctgcgtccctcgggcacctgggcccccccgcttggctccctgggggaatggcccaggcgggccgcggttcctccttagggccttctccccgacaaggagtccgacggggcggatgctgcatcctctgcctccctggtcgctgggcttcaccccacctgggaagggcagtgtgctctgtgggggctgcaatcaataaatgccgggagctgcca

SEQ ID NO: 573691 - DNA, 506 bp, Homo sapiens
agcggggggtcggacccctggccgctgccgccatcactgtcgccctgcccaatcgcccctcagcacatccccctttcgcacggaaaaaggggaatacagagattaggattcatacaaagacctcatagagaagtagtaggcatagtatgagcagtataggtagttggtggtaagcgatcgttaatatactagataatatgaggacaatgagtaagaaaaggtaaatatgagactgaagtaggagacacagtaggaggaaagatatatgtgaaaccacaataaaaggaaaaaaaaaggcaaaaagaggaagagaaaagaaagagaagagaaaaaaagaaacaaaaaaaaagaagaacaaaaaaaagacaaagacagagacagaaccgacaagcaaagaaaggcggaggaaccaaccaagagaacgaacaaaaaaaaaggagcacaaacacaggtaacaaaaaacagaaggggcacaaacaggcggcacgagggaagtgagacgaaaa

SEQ ID NO: 573692 - DNA, 493 bp, Homo sapiens
  misc_feature (279)..(279): n is a, c, g, or t
aagaaccacccaaggaagtgggaacggccctcctcggatgaggaaaatgagaacggagacttcacggtggaaaagtgcccgggccgggccccgcccggggaaatggaggtgccaaccctctgttggaccaagccgcactgtccgggcccctgccggcccccagttcaccgcttgaattgccatgacctggaggcagacaaacgcccacctgctccccaaccttaaggcccccggggaggggcagggcctggagcttcccactaaaaaaaagttttaaanctgggggcttttggttgggcctcgggctccaggccctgggacccctttcaagggaaacccccaaacctttgggccaggacacctcctggtcccctgcacctttcctgttgggtttaaacccccaaaatggagggggaaaggaaaaccgtaaagagcagaaaaggggggggaatttaaaaaaaaaaaaccaattaaagtccatttcagaccggca

SEQ ID NO: 573693 - DNA, 522 bp, Homo sapiens
  misc_feature (7)..(7): n is a, c, g, or t
  misc_feature (61)..(61): n is a, c, g, or t
  misc_feature (63)..(63): n is a, c, g, or t
ccatagntgcttagtcttcttgccccgtgggcggcgtggaggggcgagagcgcgaggcctntnccgtggcgctcgggcagctgcaactccccgcgagaccccgcagctgggtgggatgaacaagcaacgcagaccacaagcgagtgcctgggagggagtggcccagggtggttctggagccattgtgggtgagggtcgagggccaccgaggtcccgcgcaccgctgcctgccctgcagtggctttaacagttagttttgccaaagcctctccactcaccagcaggcggtctctgtcttcagggattgtgcctgcgtccctcgggcacctgggcccccccgcttggctccctgggggaatggcccaggcgggccgcggttcctccttagggccttctccccgacaaggagtccgacggggcggatgctgcatcctctgcctccctggtcgctgggcttcaccccacctgggaagggcagtgtgctctgtgggggctgcaatcaataaatgccgggagctgcca

SEQ ID NO: 573694 - DNA, 82 bp, Homo sapiens
gacagcagcttctacatctgcagtgcccttcggagggtctccaacgagcagtacttcgggccgggcaccaggctcacggtca

SEQ ID NO: 573695 - DNA, 310 bp, Homo sapiens
gatgctgtcagagagtcccacctaggctgataccactgtctcgcgctgtagtgaaatagtgatgggagtgtacatgtctctttgatgttctggtttcctttcctgggaataaatacccagtagtgggattgctgcatcatatggtagttctgtttttaatttttcgagatacctccatattgttgtccatagtggctgtactagtttacattgtcaccaacagtgtgcaagagttcccttttctccacattcttgtcaacatttgctgtcgttcatctttttgatagtagccattctatctggggtgagg

SEQ ID NO: 573696 - DNA, 162 bp, Homo sapiens
tttatatttcaatagtttttcagaaaaggtaaatgtttaagcctttcgatggggttggacctttgcttatattactacaggtatccctctttgacatttaaatgtcaatattttgtacatattttcaaaccacttaataaactatttcaataaattttcaca

SEQ ID NO: 573697 - DNA, 436 bp, Homo sapiens
gtgtgcgcctgcgtggtgttgtccggcgcagcccacgccggctgcagctccgcggagcctgagccggatctcgagcggggtacacgggctgaggctggcggctggcggcccctgccccgtgggctccagttgttaacggcggcgtgcggcgtctgtctggcttgttcacggctgcgcctccatgtcgtgcccatggctgccgcggacagaggacgcgatgctgcttgccgagtgtggcctgtgccttggagccaactgggaacgacgttacattaggttcgacactttccggttcctacttttccttttgaaagcgtccgttgtgaaccccacgttgacacgtagtctcaagctcgttccaaacccttggttccagggggcacgacacagacacggccatggttgacttaagccctaaagcgaatttccttgcgta

SEQ ID NO: 573698 - DNA, 260 bp, Homo sapiens
gcacgaggtgatttgacccaagaaaacagatctaatgatacaaccacctctccacatcaaagcgatggcagggttgtttagtttccagccataagtagcagcagcttctctgttcaacatgaaaccttgagcgtaagaagtaatcttggaagcatacaaagcttgttccaaatcatcgacaaattgttctctgtccttgacggcgtcttttggaacttctgggcctggtaagaccttggaggctctaattctctcgttct

SEQ ID NO: 573699 - DNA, 400 bp, Homo sapiens
tttggggtcttgctccagtcctatggcagaaaacgtgaacattccgcaaagtattattgtaacaaaacacgtaactctggtaaatgttctgtcgtgattgttaacattccacagattctaccttttgtgtttagtttttttttttttacaatggttttaaagccatttcaggttccagtggtacgatagggaaaggtgataatagcggtttcatcatggtcttcaggagagctttccagagtggatcatttctcccaaagactcccaagcctaaaaaatgattcagcaaagtgtcaggataccaaatcaaggtacacaaatgacgggcatttctatacacctggaataacattcaacactggaataacatttaagcaaagaccccaaagggggtacggag

SEQ ID NO: 573700 - DNA, 453 bp, Homo sapiens
ggtcccgtacagaaagctgtggctcaagaggctggtggcagccatgtctgggcaagactagcaaaggcctccaccagggagccccatctcaaggccatgggcattttgcctggttccctttcccctgggaacaatgggtgggaaggcctaggtgggtcccaggccctgagagactcccttggccatagtgcaccctagtgaaagatcactcccagcactgtaattctttggctattggtgcctgagatggccagtgctgggatggtccaccatcttaaagaagaagatgtgctgtctggggccctgtggggcctaaacccagactttactagatgagattgaggcaacaccaggcctggccaccatgagatactatgcacccctgaggacctcatttgttgtgtctatgtctcaaaggatcagatggttgtcttgaacctgtgatcgtggtaa

SEQ ID NO: 573701 - DNA, 454 bp, Homo sapiens
ggtcccgtacagaaagctgtggctcaagaggctggtggcagccatgtctgggcaagactagcaaaggcctccaccagggagccccatctcaaggccatgggcattttgcctggttccctttcccctgggaacaatgggtgggaaggcctaggtgggtcccaggccctgagagactcccttggccatagtgcaccctagtgaaagatcactcccagcactgtaattctttggctattggtgcctgagatggccagtgctgggatggtccaccatcttaaagaagaagatgtgctgtctggggccctgtggggcctaaacccagactttactagatgagattgaggcaacaccaggcctggccacctttcggttctcatacacctcatggtctggaaatctctgctgaacatacctgatctagaggaccatgattctgtccctttctggggtgttt

SEQ ID NO: 573702 - DNA, 101 bp, Homo sapiens
tctgtcactctaaggatccccagatagtgtggtacttcaaaatgtcatccacgctgtcggaggtcatgtcctttaaatcactgccgtgtactacgcaggga

SEQ ID NO: 573703 - DNA, 220 bp, Homo sapiens
ggaaggttaggagatactataatccagcctgactgaggaacacaccaatatcatcactgtagccatagaacatctttacagacaccatgaagtgcttgcgcatgtctgagtcagatatatacgatgttaaggctgtgcaatagttctttccttccaagttatagctgctgcatttcttggatcactatttcctatcccaataaatgcacacagtagcgaa

SEQ ID NO: 573704 - DNA, 715 bp, Homo sapiens
  misc_feature (5)..(5): n is a, c, g, or t
  misc_feature (231)..(231): n is a, c, g, or t
ggttntgagaacagagtgctgttttagagctggcagcagcgtctcagcccaagagaaggttatattcccagaggatgtcagtcccaaggaccagtagctgccatcagtttggattctgaaaactaactggcatcaacactgggtgtagaaacatgcttgccttatgtatcagaggacatgctcagcagatccaagagatatatttggcaactttttctagaaaaggcacantgggtatcattcattacattttggagttttttggggttttttttttttttttggaagacagtctggctggtattggcccaggctgggagtgtgggtgggcacaatcacagctcatggcatcctcaatcacccagggcctaagcaatcctcccacctggtagctggggactacagctcacagcacaccgggctaaaatttttttttgggtgggaagacgggattctctatgtggcccaggctgggtctcagggctccggggctcaagagggtcctccggcgctcagtttccaaagggcacagggccaagtggtacgctttggtccctggccatcaggcccaacaagaggttctataccttttaaggaatggacttccataaatgggtaatgtgggtgggcaagtcttaaagcgggaattggtaaattcctcctgaaagtgttttccatgcagtcaccattgaactaatcgtaccaatacaggatg

SEQ ID NO: 573705 - DNA, 120 bp, Homo sapiens
ggatccgtcacactgggttcgagttctagaatcgggggtcagacagggatgcagctctgggacatcagcaagaaggacattatcacaccggacaagaaaggaatccaagcaagtcctctg

SEQ ID NO: 573706 - DNA, 479 bp, Homo sapiens
acttgtgaccctgtatgacgtgcaggggcttatgcgggagttgtgatctgtccagattgttgctttagccggagatgggagacactgagcaggtggtccttcagccataagcagccccgcgtgctggtccagaaccgtggagctcatgggaaatgtggtgaccacgtgagttcacgctgacgtctcaaagtttggaagttttgtccccagaagctgaaaggcaaaatgggtgctgtcgggactccgactaattgcgtaaatcccagcgtcgtgggccttgattctgcccaggcgcgcacaccttactccccagtcttcccgtcttagatgtttatctggccagacagtactggctgtgggaaatctgttcccatcgggagacaatcggacacagttgacaaagcgggtgtggtcgccaatcgtaacttgaacttgaatgggggtcctcagagaatgccgggcagtttcatcgctccccg

SEQ ID NO: 573707 - DNA, 177 bp, Homo sapiens
gccagcttccccaggtttatgtctgttactccatccacatctttttctggtttcaaggcatttaggactttgttgctaaacaagttcctcagagatctgaagggcaaggccatgtactcttggtatcttccattgacctttaagattcacctataatctcggctccactcctatctg

SEQ ID NO: 573708 - DNA, 1133 bp, Homo sapiens
  misc_feature (537)..(537): n is a, c, g, or t
  misc_feature (545)..(545): n is a, c, g, or t
  misc_feature (548)..(548): n is a, c, g, or t
  misc_feature (553)..(553): n is a, c, g, or t
  misc_feature (555)..(555): n is a, c, g, or t
  misc_feature (566)..(566): n is a, c, g, or t
  misc_feature (596)..(596): n is a, c, g, or t
  misc_feature (624)..(624): n is a, c, g, or t
gaggtcagtctcgctatattgcccaggctggtcttgaatgcctgggctcaagcaatcctcccaccttggccacctgaatagctgggactacaggcatgtgccactatgcccagctaattttttgtatttttagtagagatgaggcaatatttttaatatagctaatgcatgatgttaaaaactttgcatatggaaaagatgcattcaaaatagaagacagatcaatgaattttagtgtagtcattttaagtttagtgacatagtttcagtttccacattgcaactatacactgtggagttttagcatagtatctaagaatgaatatccacagttctgaacaggttattttagcactcttttccagcaatatatctctgagaggccatactttcttcacgtatgtcaaacaaataacatattgcaacataattgttcttcagacttgttttttagcagcagacacatttccaaatgtaatcttactctgaatctgagcttcattatacaatacagacaaaagtgagcttttccagttnaagtaggngtntgatntnaaacacacccntggccccaacaaaacaaataaaactcccantcttattttaagagcttgttgaagaganttattaagtaacgccgcccttcctttcggccggaaccgccatcttccagtaattcgccaaaatgacgaacacaaagggaaagaggagaggcacccgatatatgttctctaggccttttagaaaacatggagttgttcctttggccacatatatgcgaatctataagaaaggtgatattgtagacatcaagggaatgggtactgttcaaaaaggaatgccccacaagtgttaccatggcaaaactggaagagtctacaatgttacccagcatgctgttggcattgttgtaaacaaacaagttaagggcaagattcttgccaagagaattaatgtgcgtattgagcacattaagcactctaagagccgagatagcttcctgaaacgtgtgaaggaaaatgatcagaaaaagaaagaagccaaagagaaaggtacctgggttcaactaaagcgccagcctgccttgagctgctggaacctattccctatgaattcatggcataataggtgtt

SEQ ID NO: 573709 - DNA, 1471 bp, Homo sapiens
  misc_feature (537)..(537): n is a, c, g, or t
  misc_feature (545)..(545): n is a, c, g, or t
  misc_feature (548)..(548): n is a, c, g, or t
  misc_feature (553)..(553): n is a, c, g, or t
  misc_feature (555)..(555): n is a, c, g, or t
  misc_feature (566)..(566): n is a, c, g, or t
  misc_feature (596)..(596): n is a, c, g, or t
  misc_feature (624)..(624): n is a, c, g, or t
  misc_feature (1169)..(1169): n is a, c, g, or t
  misc_feature (1318)..(1318): n is a, c, g, or t
gaggtcagtctcgctatattgcccaggctggtcttgaatgcctgggctcaagcaatcctcccaccttggccacctgaatagctgggactacaggcatgtgccactatgcccagctaattttttgtatttttagtagagatgaggcaatatttttaatatagctaatgcatgatgttaaaaactttgcatatggaaaagatgcattcaaaatagaagacagatcaatgaattttagtgtagtcattttaagtttagtgacatagtttcagtttccacattgcaactatacactgtggagttttagcatagtatctaagaatgaatatccacagttctgaacaggttattttagcactcttttccagcaatatatctctgagaggccatactttcttcacgtatgtcaaacaaataacatattgcaacataattgttcttcagacttgttttttagcagcagacacatttccaaatgtaatcttactctgaatctgagcttcattatacaatacagacaaaagtgagcttttccagttnaagtaggngtntgatntnaaacacacccntggccccaacaaaacaaataaaactcccantcttattttaagagcttgttgaagaganttattaagtaacgccgcccttcctttcggccggaaccgccatcttccagtaattcgccaaaatgacgaacacaaagggaaagaggagaggcacccgatatatgttctctaggccttttagaaaacatgggaatgggtactgttcaaaaaggaatgccccacaagtgttaccatggcaaaactggaagagtctacaatgttacccagcatgctgttggcattgttgtaaacaaacaagttaagggcaagattcttgccaagagaattaatgtgcgtattgagcacattaagcactctaagagccgagatagcttcctgaaacgtgtgaaggaaaatgatcagaaaaagaaagaagccaaagagaaaggtacctgggttcaactaaagcgccagcctgctccacccagagaagcacactttgtgagaaccaatgggaaggagcctgagctgctggaacctattccctatgaattcatggcataataggtgttaaaaaaaaaaataaaggacctctgggctacaaaaaaaaaaaaaaaaaaaacccgngggcatcaaatggcggggggcgggaaaaaaggggtactggaatgggccatgggccaaagcggttccctggacccagttttcctggtccaagggggaaatcggcggggccccaaaagggaggcggaaaaattccgaaaagccaggtaccnggtagagaatcggcgaccaaggccgccgggaaccaagacacccgcgctagtgacgcggtctataggggggacgcaagcgagtctggagagaccacgaattcgcgggcgcagaacagcggccagagaacaaaagaaaaaccagccagcgccgac

SEQ ID NO: 573710 - DNA, 1477 bp, Homo sapiens
  misc_feature (537)..(537): n is a, c, g, or t
  misc_feature (545)..(545): n is a, c, g, or t
  misc_feature (548)..(548): n is a, c, g, or t
  misc_feature (553)..(553): n is a, c, g, or t
  misc_feature (555)..(555): n is a, c, g, or t
  misc_feature (566)..(566): n is a, c, g, or t
  misc_feature (596)..(596): n is a, c, g, or t
  misc_feature (624)..(624): n is a, c, g, or t
  misc_feature (1175)..(1175): n is a, c, g, or t
  misc_feature (1324)..(1324): n is a, c, g, or t
gaggtcagtctcgctatattgcccaggctggtcttgaatgcctgggctcaagcaatcctcccaccttggccacctgaatagctgggactacaggcatgtgccactatgcccagctaattttttgtatttttagtagagatgaggcaatatttttaatatagctaatgcatgatgttaaaaactttgcatatggaaaagatgcattcaaaatagaagacagatcaatgaattttagtgtagtcattttaagtttagtgacatagtttcagtttccacattgcaactatacactgtggagttttagcatagtatctaagaatgaatatccacagttctgaacaggttattttagcactcttttccagcaatatatctctgagaggccatactttcttcacgtatgtcaaacaaataacatattgcaacataattgttcttcagacttgttttttagcagcagacacatttccaaatgtaatcttactctgaatctgagcttcattatacaatacagacaaaagtgagcttttccagttnaagtaggngtntgatntnaaacacacccntggccccaacaaaacaaataaaactcccantcttattttaagagcttgttgaagaganttattaagtaacgccgcccttcctttcggccggaaccgccatcttccagtaattcgccaaaatgacgaacacaaagggaaagaggagaggcacccgatatatgttctctaggccttttagaaaacatggagttgttcctttggccacatatatgcgaatctataagaaaggtgatattgtagacatcaagggaatgggtactgttcaaaaaggaatgccccacaagtgttaccatggcaaaactggaagagtctacaatgttacccagcatgctgttggcattgttgtaaacaaacaagttaagggcaagattcttgccaagagaattaatgtgcgtattgagcacattaagcactctaagagccgagatagcttcctgaaacgtgtgaaggaaaatgatcactccacccagagaagcacactttgtgagaaccaatgggaaggagcctgagctgctggaacctattccctatgaattcatggcataataggtgttaaaaaaaaaaataaaggacctctgggctacaaaaaaaaaaaaaaaaaaaacccgngggcatcaaatggcggggggcgggaaaaaaggggtactggaatgggccatgggccaaagcggttccctggacccagttttcctggtccaagggggaaatcggcggggccccaaaagggaggcggaaaaattccgaaaagccaggtaccnggtagagaatcggcgaccaaggccgccgggaaccaagacacccgcgctagtgacgcggtctataggggggacgcaagcgagtctggagagaccacgaattcgcgggcgcagaacagcggccagagaacaaaagaaaaaccagccagcgccgac

SEQ ID NO: 573711 - DNA, 277 bp, Homo sapiens
  misc_feature (25)..(25): n is a, c, g, or t
  misc_feature (100)..(100): n is a, c, g, or t
  misc_feature (240)..(240): n is a, c, g, or t
  misc_feature (253)..(253): n is a, c, g, or t
  misc_feature (275)..(275): n is a, c, g, or t
aaacttgccctggtgttaggcaacnaaatgttttaaggcaattttttgtagcacagcccctttttttttttttttttttttggaaacagggactcactanttttgtatttttgaagggaaggggtttcatcatgttggtcaggctggacttgaactcctgacctcaagtgatctgcccacttcggcctcccaaggtgctgggattacagacattagccaccacgcccagaaagcacagancttttttcaaaanaaatttgtgatgttttaataanaa

SEQ ID NO: 573712 - DNA, 1253 bp, Homo sapiens
  misc_feature (537)..(537): n is a, c, g, or t
  misc_feature (545)..(545): n is a, c, g, or t
  misc_feature (548)..(548): n is a, c, g, or t
  misc_feature (553)..(553): n is a, c, g, or t
  misc_feature (555)..(555): n is a, c, g, or t
  misc_feature (566)..(566): n is a, c, g, or t
  misc_feature (596)..(596): n is a, c, g, or t
  misc_feature (624)..(624): n is a, c, g, or t
  misc_feature (1091)..(1091): n is a, c, g, or t
  misc_feature (1094)..(1094): n is a, c, g, or t
  misc_feature (1103)..(1103): n is a, c, g, or t
  misc_feature (1119)..(1119): n is a, c, g, or t
  misc_feature (1131)..(1131): n is a, c, g, or t
  misc_feature (1143)..(1144): n is a, c, g, or t
  misc_feature (1148)..(1148): n is a, c, g, or t
  misc_feature (1155)..(1156): n is a, c, g, or t
  misc_feature (1160)..(1161): n is a, c, g, or t
  misc_feature (1175)..(1175): n is a, c, g, or t
  misc_feature (1187)..(1187): n is a, c, g, or t
  misc_feature (1208)..(1209): n is a, c, g, or t
  misc_feature (1214)..(1214): n is a, c, g, or t
  misc_feature (1220)..(1221): n is a, c, g, or t
  misc_feature (1227)..(1227): n is a, c, g, or t
  misc_feature (1231)..(1231): n is a, c, g, or t
  misc_feature (1233)..(1233): n is a, c, g, or t
  misc_feature (1236)..(1236): n is a, c, g, or t
  misc_feature (1243)..(1243): n is a, c, g, or t
gaggtcagtctcgctatattgcccaggctggtcttgaatgcctgggctcaagcaatcctcccaccttggccacctgaatagctgggactacaggcatgtgccactatgcccagctaattttttgtatttttagtagagatgaggcaatatttttaatatagctaatgcatgatgttaaaaactttgcatatggaaaagatgcattcaaaatagaagacagatcaatgaattttagtgtagtcattttaagtttagtgacatagtttcagtttccacattgcaactatacactgtggagttttagcatagtatctaagaatgaatatccacagttctgaacaggttattttagcactcttttccagcaatatatctctgagaggccatactttcttcacgtatgtcaaacaaataacatattgcaacataattgttcttcagacttgttttttagcagcagacacatttccaaatgtaatcttactctgaatctgagcttcattatacaatacagacaaaagtgagcttttccagttnaagtaggngtntgatntnaaacacacccntggccccaacaaaacaaataaaactcccantcttattttaagagcttgttgaagaganttattaagtaacgccgcccttcctttcggccggaaccgccatcttccagtaattcgccaaaatgacgaacacaaagggaaagaggagaggcacccgatatatgttctctaggccttttagaaaacatggagttgttcctttggccacatatatgcgaatctataagaaaggtgatattgtagacatcaagggaatgggtactgttcaaaaaggaatgccccacaagtgttaccatggcaaaactggaagagtctacaatgttacccagcatgctgttggcattgttgtaaacaaacaagttaagggcaagattcttgccaagagaattaatgtgcgtattgagcacattaagcactctaagagccgagatagcttcctgaaacgtgtgaaggaaaatgatcaaaaaaaaaaaaaaaaaaaaaaaaaaaaaaaaaaaaaaaaaattgtgggcgcgcggccttgggccncgngaaaaaggnttttcaaaaccactcncggtggggcggngggggccccagnnaggntataggnngacnnggggccaaaagcgnggtcccaaaganaacacccggggcaaggcaacnnagggngctggnnttctcncacnantanaaaaaanggcgcggggg

SEQ ID NO: 573713 - DNA, 866 bp, Homo sapiens
agcgaaatagttcattagaattttctgcttgaaaattaagtagtttccttgctagcttggacagctgaaaaatcgggtggaatctatggaaaaaagattaggcaagttgatttattactgattttgcaggactggatagacagttaaatcagtgcttctccaagtgatccatgggccacctgctgataaatcacctggcccactatttttaaaaagtgattcagggcccctatatcagacttctgaaccagaatctctggatgatcccaggaatggcagcattgtggatttggaaatgattcttaggcacactgaagtttcaaaacagtcatttaaagtgtgcctattacctatagctgtcaaactccaggttaaacattttcttcctcttgaacctggaaactttttaaagctgtcatgataattggcttcattctgaggtgtaagctcttaagatctaaattccatctaaattagttattttagatctgatcactgtgttactgcactcttgtcttcatctagatttaggattagactggttaagctgaactgttaatgttcttttacaacttgtggcctatatgttgtattcataataacttgttttaagaaaaacagaaatttaggcttttaaggtggcgacttagtgggaagtactctagtagtaattcctaattagagtaaatctgactaatttacatcagttctcatatccggataggggaccggtttcaatatccgaaaaataggataaacaaaggttgggagaggattaggaaggcactggggtagggtggaaaaaaaatggtattgagaaccttcccagggtgggggggtaggagagagttaaaagtaaagatagc

SEQ ID NO: 573714 - DNA, 172 bp, Homo sapiens
ctgtgccagatgagcatagtggcatgatcatactgtggctcacctcctggatcaagtggatctcccacctcaactcttgagcagctggggcacaggcatataccatgccagctaatctcttcaatttctggtagagacagggtctatgttgctcaggctggtctcgcactcc

SEQ ID NO: 573715 - DNA, 183 bp, Homo sapiens
  misc_feature (163)..(163): n is a, c, g, or t
ggtgatgattcgggaggtgaggaggagaatcccttgaacctgggaggtggagtgtggtgagctgagatcacgccattgcactccagcctggcagcaagaaagaaattccgtctcaaacaaaaaaaaacaacaacaaaaagaacttgtgcctcctgatgaaatnaggcccacccctgtttcaaa

SEQ ID NO: 573716 - DNA, 1712 bp, Homo sapiens
  misc_feature (537)..(537): n is a, c, g, or t
  misc_feature (545)..(545): n is a, c, g, or t
  misc_feature (548)..(548): n is a, c, g, or t
  misc_feature (553)..(553): n is a, c, g, or t
  misc_feature (555)..(555): n is a, c, g, or t
  misc_feature (566)..(566): n is a, c, g, or t
  misc_feature (596)..(596): n is a, c, g, or t
  misc_feature (624)..(624): n is a, c, g, or t
  misc_feature (1364)..(1364): n is a, c, g, or t
gaggtcagtctcgctatattgcccaggctggtcttgaatgcctgggctcaagcaatcctcccaccttggccacctgaatagctgggactacaggcatgtgccactatgcccagctaattttttgtatttttagtagagatgaggcaatatttttaatatagctaatgcatgatgttaaaaactttgcatatggaaaagatgcattcaaaatagaagacagatcaatgaattttagtgtagtcattttaagtttagtgacatagtttcagtttccacattgcaactatacactgtggagttttagcatagtatctaagaatgaatatccacagttctgaacaggttattttagcactcttttccagcaatatatctctgagaggccatactttcttcacgtatgtcaaacaaataacatattgcaacataattgttcttcagacttgttttttagcagcagacacatttccaaatgtaatcttactctgaatctgagcttcattatacaatacagacaaaagtgagcttttccagttnaagtaggngtntgatntnaaacacacccntggccccaacaaaacaaataaaactcccantcttattttaagagcttgttgaagaganttattaagtaacgccgcccttcctttcggccggaaccgccatcttccagtaattcgccaaaatgacgaacacaaagggaaagaggagaggcacccgatatatgttctctaggccttttagaaaacatggagttgttcctttggccacatatatgcgaatctataagaaaggtgatattgtagacatcaagggaatgggtactgttcaaaaaggaatgccccacaagtgttaccatggcaaaactggaagagtctacaatgttacccagcatgctgttggcattgttgtaaacaaacaagttaagggcaagattcttgccaagagaattaatgtgcgtattgagcacattaagcactctaagagccgagatagcttcctgaaacgtgtgaaggaaaggtgatcaggaaaaagaaagaagccaaagagaaaggtacctgggttcaactaaagcgccagcctgctccacccagagaagcacactttgtgagaaccaatgggaaggagcctgagctgctggaacctattccctatgaattcatggcataataggtgttaaaaggagaaaaagagaaaaactcgggactagtgctctccaacgggaacgggtcccagctgaggggtaggcaggtcggcgggaaggccaaggcgagggcttaaaaacgccaacagggttgcacagccaaggagtgcaagaccaaatataatagccgagtggcccagatgtccggggagaagacccngcagctggggagtgcgggcctggataggcatgggaaggacttgggatagaaacatgagaagggcgccctatcatcccaagaagcagagggagctggatcctcccagagaacaataaagccctggcgggtatgcgccaggccaaggggggcctcaggggaaccagagagaacagcccgggtaacgcaagacgagggcgcgggaaacgcagagaaatgtggccacaaaaaaaccgggggggacccacagcgaaaggccatgggcagagaaagcccaacgggagacagaacgcggcgacaaaaagtcgcggcggcaaaaagagacgggcgaatggagcacccacaaaagga

SEQ ID NO: 573717 - DNA, 422 bp, Homo sapiens
  misc_feature (99)..(99): n is a, c, g, or t
  misc_feature (161)..(161): n is a, c, g, or t
  misc_feature (191)..(191): n is a, c, g, or t
  misc_feature (300)..(300): n is a, c, g, or t
  misc_feature (312)..(312): n is a, c, g, or t
tccgtcccaggcagtggattaggaggccagaaggagatcccttccacggtgctaggctgagatggatcctctcagggcccaacagctggctgcggactnggaggtggagatgatggccgatatgtacaacagaatgaccagtgcctgccaccggaagtgtntcctcctcactacaaggaagcagagctctnagggcgagtctgtgtgcctggaccgatgtgtctctaagtacctggacatccatgagcggattggcaaaaagttacagaattggctatgccggatgaagagcctattagnaaggtgcccccnaactcttgggcctgatgagggccctttcaatataccccctggggggttgtccccacccccttcccactttaattaaactgcctccgtgtgggggggtacttttgtgaaaa

SEQ ID NO: 573718 - DNA, 1364 bp, Homo sapiens
  misc_feature (537)..(537): n is a, c, g, or t
  misc_feature (545)..(545): n is a, c, g, or t
  misc_feature (548)..(548): n is a, c, g, or t
  misc_feature (553)..(553): n is a, c, g, or t
  misc_feature (555)..(555): n is a, c, g, or t
  misc_feature (566)..(566): n is a, c, g, or t
  misc_feature (596)..(596): n is a, c, g, or t
  misc_feature (624)..(624): n is a, c, g, or t
gaggtcagtctcgctatattgcccaggctggtcttgaatgcctgggctcaagcaatcctcccaccttggccacctgaatagctgggactacaggcatgtgccactatgcccagctaattttttgtatttttagtagagatgaggcaatatttttaatatagctaatgcatgatgttaaaaactttgcatatggaaaagatgcattcaaaatagaagacagatcaatgaattttagtgtagtcattttaagtttagtgacatagtttcagtttccacattgcaactatacactgtggagttttagcatagtatctaagaatgaatatccacagttctgaacaggttattttagcactcttttccagcaatatatctctgagaggccatactttcttcacgtatgtcaaacaaataacatattgcaacataattgttcttcagacttgttttttagcagcagacacatttccaaatgtaatcttactctgaatctgagcttcattatacaatacagacaaaagtgagcttttccagttnaagtaggngtntgatntnaaacacacccntggccccaacaaaacaaataaaactcccantcttattttaagagcttgttgaagaganttattaagtaacgccgcccttcctttcggccggaaccgccatcttccagtaattcgccaaaatgacgaacacaaagggaaagaggagaggcacccgatatatgttctctaggccttttagaaaacatggagttgttcctttggccacatatatgcgaatctataagaaaggtgatattgtagacatcaagggaatgggtactgttcaaaaaggaatgccccacaagtgttaccatggcaaaactggaagagtctacaatgttacccagcatgctgttggcattgttgtaaacaaacaagttaagggcaagattcttgccaagagaattaatgtgcgtattgagcacattaagcactctaagagccgagatagcttcctgaaacgtggggttggaggttatttccataacaaattgccactattaagttgcttaaaacgacacaattttattatcttacagttctggaggtcagaagtccaaaatcagtctcattgatttaaaatcaaggtgcccttgggactatgttccttctgctacaccttttaggagagaatccagttcctcaccttttccagcttccagaagccacctgcattccttggctcataaccctgttcctccgtcttcaaagtcagcagcctcatgtaacctgccacgtaacacctacatttgatgactacagatataggtaatactcagagatcaactcaaggcctggggtaggagtccccatagccgt

SEQ ID NO: 573719 - DNA, 227 bp, Homo sapiens
atggccagttgcttctagtacctgatgcatttttacatattggcagagctaatagacccctcagaggtactcgtagtacttggatgctaatatgctggcagcttttctcgtcgacaaatctgggtccacaaatcctttctctaaaagtctaaattctggtaaactctgaactctcctctcttgtctccccagctccaggggttgtaagtaatcttgtataaattaat

SEQ ID NO: 573720 - DNA, 1432 bp, Homo sapiens
  misc_feature (537)..(537): n is a, c, g, or t
  misc_feature (545)..(545): n is a, c, g, or t
  misc_feature (548)..(548): n is a, c, g, or t
  misc_feature (553)..(553): n is a, c, g, or t
  misc_feature (555)..(555): n is a, c, g, or t
  misc_feature (566)..(566): n is a, c, g, or t
  misc_feature (596)..(596): n is a, c, g, or t
  misc_feature (624)..(624): n is a, c, g, or t
  misc_feature (1270)..(1270): n is a, c, g, or t
  misc_feature (1273)..(1273): n is a, c, g, or t
  misc_feature (1282)..(1282): n is a, c, g, or t
  misc_feature (1298)..(1298): n is a, c, g, or t
  misc_feature (1310)..(1310): n is a, c, g, or t
  misc_feature (1322)..(1323): n is a, c, g, or t
  misc_feature (1327)..(1327): n is a, c, g, or t
  misc_feature (1334)..(1335): n is a, c, g, or t
  misc_feature (1339)..(1340): n is a, c, g, or t
  misc_feature (1354)..(1354): n is a, c, g, or t
  misc_feature (1366)..(1366): n is a, c, g, or t
  misc_feature (1387)..(1388): n is a, c, g, or t
  misc_feature (1393)..(1393): n is a, c, g, or t
  misc_feature (1399)..(1400): n is a, c, g, or t
  misc_feature (1406)..(1406): n is a, c, g, or t
  misc_feature (1410)..(1410): n is a, c, g, or t
  misc_feature (1412)..(1412): n is a, c, g, or t
  misc_feature (1415)..(1415): n is a, c, g, or t
  misc_feature (1422)..(1422): n is a, c, g, or t
gaggtcagtctcgctatattgcccaggctggtcttgaatgcctgggctcaagcaatcctcccaccttggccacctgaatagctgggactacaggcatgtgccactatgcccagctaattttttgtatttttagtagagatgaggcaatatttttaatatagctaatgcatgatgttaaaaactttgcatatggaaaagatgcattcaaaatagaagacagatcaatgaattttagtgtagtcattttaagtttagtgacatagtttcagtttccacattgcaactatacactgtggagttttagcatagtatctaagaatgaatatccacagttctgaacaggttattttagcactcttttccagcaatatatctctgagaggccatactttcttcacgtatgtcaaacaaataacatattgcaacataattgttcttcagacttgttttttagcagcagacacatttccaaatgtaatcttactctgaatctgagcttcattatacaatacagacaaaagtgagcttttccagttnaagtaggngtntgatntnaaacacacccntggccccaacaaaacaaataaaactcccantcttattttaagagcttgttgaagaganttattaagtaacgccgcccttcctttcggccggaaccgccatcttccagtaattcgccaaaatgacgaacacaaagggaaagaggagaggcacccgatatatgttctctaggccttttagaaaacatgggaatgggtactgttcaaaaaggaatgccccacaagtgttaccatggcaaaactggaagagtctacaatgttacccagcatgctgttggcattgttgtaaacaaacaagttaagggcaagattcttgccaagagaattaatgtgcgtattgagcacattaagcactctaagagccgagatagcttcctgaaacgtgtgaaggaaaatgatcagaaaaagaaagaagccaaagagaaaggtacctgggttcaactaaagcgccagcctgctccacccagagaagcacactttgtgagaaccaatgggaaggagcctgagctgctggaacctattccctatgaattcatggcataataggtgttaaaaaaaaaaataaaggacctctgggcggctacaaaaaaaaaaaaaaaaaaaaaaaaaaaaaaaaaaaaaacaaaaaaaaaaaaaaaaaaaaaaaaaaaagaaaaaaaaaaaaaaaaaaaaacaacacaaacttgtgggcgcgcggccttgggccncgngaaaaaggnttttcaaaaccactcncggtggggcggngggggccccagnnaggntataggnngacnnggggccaaaagcgnggtcccaaaganaacacccggggcaaggcaacnnagggngctggnnttctcncacnantanaaaaaanggcgcggggg

SEQ ID NO: 573721 - DNA, 1241 bp, Homo sapiens
  misc_feature (537)..(537): n is a, c, g, or t
  misc_feature (545)..(545): n is a, c, g, or t
  misc_feature (548)..(548): n is a, c, g, or t
  misc_feature (553)..(553): n is a, c, g, or t
  misc_feature (555)..(555): n is a, c, g, or t
  misc_feature (566)..(566): n is a, c, g, or t
  misc_feature (596)..(596): n is a, c, g, or t
  misc_feature (624)..(624): n is a, c, g, or t
  misc_feature (1236)..(1236): n is a, c, g, or t
gaggtcagtctcgctatattgcccaggctggtcttgaatgcctgggctcaagcaatcctcccaccttggccacctgaatagctgggactacaggcatgtgccactatgcccagctaattttttgtatttttagtagagatgaggcaatatttttaatatagctaatgcatgatgttaaaaactttgcatatggaaaagatgcattcaaaatagaagacagatcaatgaattttagtgtagtcattttaagtttagtgacatagtttcagtttccacattgcaactatacactgtggagttttagcatagtatctaagaatgaatatccacagttctgaacaggttattttagcactcttttccagcaatatatctctgagaggccatactttcttcacgtatgtcaaacaaataacatattgcaacataattgttcttcagacttgttttttagcagcagacacatttccaaatgtaatcttactctgaatctgagcttcattatacaatacagacaaaagtgagcttttccagttnaagtaggngtntgatntnaaacacacccntggccccaacaaaacaaataaaactcccantcttattttaagagcttgttgaagaganttattaagtaacgccgcccttcctttcggccggaaccgccatcttccagtaattcgccaaaatgacgaacacaaagggaaagaggagaggcacccgatatatgttctctaggccttttagaaaacatgggaatgggtactgttcaaaaaggaatgccccacaagtgttaccatggcaaaactggaagagtctacaatgttacccagcatgctgttggcattgttgtaaacaaacaagttaagggcaagattcttgccaagagaattaatgtgcgtattgagcacattaagcactctaagagccgagatagcttcctgaaacgtgtgaaggaaaatgatcagaaaaagaaagaagccaaagagaaaggtacctgggttcaactaaagcgccagcctgctccacccagagaagcacactttgtgagaaccaatgggaaggagcctgagctgctggaacctattccctatgaattcatggcataataggtgttaaaaaaaaaaataaaggacctctgggcaaaaaaaaaaaaaaaaaacaaaaaaaaaaaaactttttggggcgccctgggccccgagaaaaagtttttaaacaccatttgttggggggccgcgngggcc

SEQ ID NO: 573722 - DNA, 723 bp, Homo sapiens
tggctctgctgctccctgaggtgacttaacctgcgccccgcatcatgtcaaagctcgccgggcccccggggcctcaggaagcccgagagaggcgtttccctcaaccgttttgcccaggagttccatgagaggcccaggacctcaaggaaggcattcctctgcctacccagattttagtgaagcctgaccggacctttgaaattaagattggaccagccccctgtttcctacttcctgaaggccagccaactgggattgaaaagggggccccggccaaccagggaaagaggtgccagcctggtgacccttgaagcatgtgtatgagattgcccgccatccaagctccggatgaggccatttgccctgccaggatgtacccctcgtcgtctgttgtccgctccatcatcgggtctgcccgttctctgggcattcgcgtggtgaaggacctccgttcagaagagcttgcagctttcccgaaggacgagccatcttcctggctgctcagaaggaggcagatttggctgccccagaagaagctgcccagaagtgacccttgccccccccagctcccagatttcaaaggaggtagttgccaaagctgtgcccaccaggggaggaaggaggtcacccccatatgatgatggttttcatgactttgaatgatatatttttgtacatctagctgtattcgaggcatcaggcctgaataaacatcctttttta

SEQ ID NO: 573723 - DNA, 1534 bp, Homo sapiens
  misc_feature (537)..(537): n is a, c, g, or t
  misc_feature (545)..(545): n is a, c, g, or t
  misc_feature (548)..(548): n is a, c, g, or t
  misc_feature (553)..(553): n is a, c, g, or t
  misc_feature (555)..(555): n is a, c, g, or t
  misc_feature (566)..(566): n is a, c, g, or t
  misc_feature (596)..(596): n is a, c, g, or t
  misc_feature (624)..(624): n is a, c, g, or t
  misc_feature (936)..(936): n is a, c, g, or t
  misc_feature (940)..(941): n is a, c, g, or t
  misc_feature (950)..(951): n is a, c, g, or t
  misc_feature (956)..(956): n is a, c, g, or t
  misc_feature (1232)..(1232): n is a, c, g, or t
  misc_feature (1381)..(1381): n is a, c, g, or t
gaggtcagtctcgctatattgcccaggctggtcttgaatgcctgggctcaagcaatcctcccaccttggccacctgaatagctgggactacaggcatgtgccactatgcccagctaattttttgtatttttagtagagatgaggcaatatttttaatatagctaatgcatgatgttaaaaactttgcatatggaaaagatgcattcaaaatagaagacagatcaatgaattttagtgtagtcattttaagtttagtgacatagtttcagtttccacattgcaactatacactgtggagttttagcatagtatctaagaatgaatatccacagttctgaacaggttattttagcactcttttccagcaatatatctctgagaggccatactttcttcacgtatgtcaaacaaataacatattgcaacataattgttcttcagacttgttttttagcagcagacacatttccaaatgtaatcttactctgaatctgagcttcattatacaatacagacaaaagtgagcttttccagttnaagtaggngtntgatntnaaacacacccntggccccaacaaaacaaataaaactcccantcttattttaagagcttgttgaagaganttattaagtaacgccgcccttcctttcggccggaaccgccatcttccagtaattcgccaaaatgacgaacacaaagggaaagaggagaggcacccgatatatgttctctaggccttttagaaaacatggagttgttcctttggccacatatatgcgaatctataagaaaggtgatattgtagacatcaagggaatgggtactgttcaaaaaggaatgccccacaagtgttaccatggcaaaactggaagagtctacaatgttacccagcatgctgttggcattgttgtaaacaaacaagttaagggcaagantctnnccaagaganntaatngtgcgtattgagcacattaagcactctaagagccgagatagcttcctgaaacgtgtgaaggaaaatgatcagaaaaagaaagaagccaaagagaaaggtacctgggttcaactaaagcgccagcctgctccacccagagaagcacactttgtgagaaccaatgggaaggagcctgagctgctggaacctattccctatgaattcatggcataataggtgttaaaaaaaaaaataaaggacctctgggctacaaaaaaaaaaaaaaaaaaaacccgngggcatcaaatggcggggggcgggaaaaaaggggtactggaatgggccatgggccaaagcggttccctggacccagttttcctggtccaagggggaaatcggcggggccccaaaagggaggcggaaaaattccgaaaagccaggtaccnggtagagaatcggcgaccaaggccgccgggaaccaagacacccgcgctagtgacgcggtctataggggggacgcaagcgagtctggagagaccacgaattcgcgggcgcagaacagcggccagagaacaaaagaaaaaccagccagcgccgac

SEQ ID NO: 573724 - DNA, 175 bp, Homo sapiens
aactctgatgcttagactcctgacagtctcctgcctactcctccctgaccagtcctccagccctaactcctccctgaccagtcctcctgccctaactcctccctgaccagtcctcctgccctagcctccctaaccttgccaagaggcagtctggagagtctgaaggcagtctgga

SEQ ID NO: 573725 - DNA, 100 bp, Homo sapiens
attccattctataggtttggtcctagcctttcattagctcttagtaagattacacatgcaagcaatgctgtccctgtcctgcccaggttctatgttcttg

SEQ ID NO: 573726 - DNA, 1542 bp, Homo sapiens
  misc_feature (537)..(537): n is a, c, g, or t
  misc_feature (545)..(545): n is a, c, g, or t
  misc_feature (548)..(548): n is a, c, g, or t
  misc_feature (553)..(553): n is a, c, g, or t
  misc_feature (555)..(555): n is a, c, g, or t
  misc_feature (566)..(566): n is a, c, g, or t
  misc_feature (596)..(596): n is a, c, g, or t
  misc_feature (624)..(624): n is a, c, g, or t
  misc_feature (893)..(893): n is a, c, g, or t
  misc_feature (899)..(899): n is a, c, g, or t
  misc_feature (923)..(923): n is a, c, g, or t
  misc_feature (1240)..(1240): n is a, c, g, or t
  misc_feature (1389)..(1389): n is a, c, g, or t
gaggtcagtctcgctatattgcccaggctggtcttgaatgcctgggctcaagcaatcctcccaccttggccacctgaatagctgggactacaggcatgtgccactatgcccagctaattttttgtatttttagtagagatgaggcaatatttttaatatagctaatgcatgatgttaaaaactttgcatatggaaaagatgcattcaaaatagaagacagatcaatgaattttagtgtagtcattttaagtttagtgacatagtttcagtttccacattgcaactatacactgtggagttttagcatagtatctaagaatgaatatccacagttctgaacaggttattttagcactcttttccagcaatatatctctgagaggccatactttcttcacgtatgtcaaacaaataacatattgcaacataattgttcttcagacttgttttttagcagcagacacatttccaaatgtaatcttactctgaatctgagcttcattatacaatacagacaaaagtgagcttttccagttnaagtaggngtntgatntnaaacacacccntggccccaacaaaacaaataaaactcccantcttattttaagagcttgttgaagaganttattaagtaacgccgcccttcctttcggccggaaccgccatcttccagtaattcgccaaaatgacgaacacaaagggaaagaggagaggcacccgatatatgttctctaggccttttagaaaacatggagttgttcctttggccacatatatgcgaatctataagaaaggtgatattgtagacatcaagggaatgggtactgttcaaaaaggaatgccccacaagtgttaccatggcaaaactggaagagtctacaatgttaccaagncatgcntgttggccattggtgtgtcaaacnaacacacagttaagggcaagattcttgccaagagaattaatgtgcgtattgagcacattaagcactctaagagccgagatagcttcctgaaacgtgtgaaggaaaatgatcagaaaaagaaagaagccaaagagaaaggtacctgggttcaactaaagcgccagcctgctccacccagagaagcacactttgtgagaaccaatgggaaggagcctgagctgctggaacctattccctatgaattcatggcataataggtgttaaaaaaaaaaataaaggacctctgggctacaaaaaaaaaaaaaaaaaaaacccgngggcatcaaatggcggggggcgggaaaaaaggggtactggaatgggccatgggccaaagcggttccctggacccagttttcctggtccaagggggaaatcggcggggccccaaaagggaggcggaaaaattccgaaaagccaggtaccnggtagagaatcggcgaccaaggccgccgggaaccaagacacccgcgctagtgacgcggtctataggggggacgcaagcgagtctggagagaccacgaattcgcgggcgcagaacagcggccagagaacaaaagaaaaaccagccagcgccgac

SEQ ID NO: 573727 - DNA, 387 bp, Homo sapiens
ggcgaggttgtcgtacagccctggacctataagtcaaagcttatctcaaaatatatttattacccaagctgctcccgacattaaattaaaactccaaaaattaaattccggccctcaaaccccacaacaggatttaattaacctcgccttcaaggtgtacaataatagaaaaaagttgcagttccttgcctccactgtgagacaaaccacagccacatctccagcacacaagaacttccaaatgcctgaaccgcagcggccaggcgttcctccagaacctcctcccacaggagcttgctacacatgccggaaatctggccactgggccaaggaatgcccgctgcccgggattcctcctaagccacgtcccatctgtgtgggacccca

SEQ ID NO: 573728 - DNA, 131 bp, Homo sapiens
gacttagcgatgcttatgtctcgatcgttatggggcgagtagtctaagatctctagctaggaagggtgaccagagagggcagacagcagtcctctgtcccaggtcttctatagcaaggaacacggagatct

SEQ ID NO: 573729 - DNA, 109 bp, Homo sapiens
aggatccccgagctgttcttcaagaatagtattgtcagatgacgaaatatacctgcgtcttccttttggtgtttctccaattatgacggtggtctggtttgtatggggt

SEQ ID NO: 573730 - DNA, 693 bp, Homo sapiens
  misc_feature (63)..(63): n is a, c, g, or t
  misc_feature (66)..(66): n is a, c, g, or t
  misc_feature (122)..(122): n is a, c, g, or t
  misc_feature (196)..(196): n is a, c, g, or t
  misc_feature (202)..(202): n is a, c, g, or t
  misc_feature (209)..(209): n is a, c, g, or t
  misc_feature (215)..(215): n is a, c, g, or t
  misc_feature (303)..(303): n is a, c, g, or t
  misc_feature (376)..(376): n is a, c, g, or t
  misc_feature (382)..(382): n is a, c, g, or t
  misc_feature (411)..(411): n is a, c, g, or t
  misc_feature (431)..(431): n is a, c, g, or t
  misc_feature (484)..(484): n is a, c, g, or t
  misc_feature (527)..(527): n is a, c, g, or t
  misc_feature (542)..(542): n is a, c, g, or t
  misc_feature (558)..(558): n is a, c, g, or t
ggcggcgacggcggcgaccccaccgcgcatcctgccaggcctccggcgcccagcgccccacgngcncccgcgcccccgcgcccccgcgcccctttcttcgcgcccccgcccctcggcccgcnaggcccccttgccggccacccgccaggccccgcgccggcccgcccgccgcccaggaccggcccgcgccccgcangccgcncgccgcncgcgcngccatgggagtggagggctgcaccaagtgcatcaagtacctgctcttcgtcttcaatttcgtcttctggctggctggaggcgtgatcntgggtgtggccctgtggctccgccatgacccgcagaccaccaacctcctgtatctggagctgggagaaaagcncgcgcncaaaaacttctatgtaggcatctacatcntcatcgctgtgggcgctgtnatgatgttcgttggcttcctgggctgctacggggccatccaggaatcccagtncctgctggggacgttcttcacctgcctggtcatcctgtttgcntgttaggtggccgcnggcatctggggctttnttaacaaggaccagatcgccaaggatgtgaagcagttctatgaccaggccctacagcaggccgtggtggatgatgacgccaacaacgccaaggctgtggtgaagaccttccacgagacgcttgactgctgtggct

SEQ ID NO: 573731 - DNA, 193 bp, Homo sapiens
atcgagctcgtacctgtaatccccatacagagtaacgcgacgattaatggacagactgatgttggagtctatgctcatctggatgtacattccagatcaaactcaatgccccgggctccgacccataggggaatgcagcgggacataataagctcagcagtggcccagcccagggcagcaaaccatgatctcg

SEQ ID NO: 573732 - DNA, 988 bp, Homo sapiens
ggcatcacttcctctcaagaacttgacgtatgtgaggtgggcgttacacgcggattcaacatgcgtatcgaaaagtgtaattgctgtctcagggtccagtctatcctgcgtacaagatcatgcatgttcagtaccgtctgacgattagcaagggtgttcaggattttgcaagatctaacatgtcatagaaaagcgttccattgaatgaagtcgctagatcctcgtcaacagttaggatgtgacccaaatgcattccggcaaagcagctggtaatagagctgtacagtggataagttcatttgaatttgcatgaaacgtatcaatatgaacctatcaaataccagcgagagctatggaataacactattgatgcgatgaacgagagtgtgaagaacaatcactccagcaagcggccgagcttaaatttcagtaatgaaaccaagattggacggataaaatgaggaggacgctagccggacaagtccaggatactcaagtgcaaggtcaagcaaatagggatccatcttatcgcgagccccctcttggcgggcaaagggaaacgaaggttgcaagagacattggtacagcctgttaactcagaggacatgtgagagcttggaagatgctccttatgaatctctgtcaagcatttctgtgatagtacctgggaccaatgcccttgtggatacttggagagctggtaaacttatgattagttggtgaacacttacgggtccgtttagaattgaagacccgcggatttacaaaggaccttcttttcgctgcattgtggccatccttacaaaagtactcagatatccagggatgtagatttgcttgtccagttgttaaatccttgtagcggggataagatgtacataaggtaaagtcagttgaaaaatcctacttcggacacttgaagaaggtgaattgtggccgtcacaagggtgagctacggacaaggggctcagcagggttgatagtatag

SEQ ID NO: 573733 - DNA, 83 bp, Homo sapiens
agcggaggtctctcgtcgctgcaggcgcctcagcccagccgcgtgccttggcccatggccgcctactcttaccgccccggcct

SEQ ID NO: 573734 - DNA, 409 bp, Homo sapiens
cagtgattaggcttcaatgacagcatccaggattaccatatcctacacacctctcttcttgtgggtcgacaaagctgctcccgtccacgtagagctcccagtctactgttgtccaaggatggtctcggaggtcgggcctgctagaataaactgactgcaacacctctacacagttatgttcaacgtggctctctgataccaggagcaaggtggcggggttcagggtgtagcaaacttcaatggttatgcggggattctcacagagcaagctttggtacctagttagtctagcattcgttagccagttacgtccttgggtgttcattagtgttaccacagcatggggaggcctttatgttttttctttttttttgagatggagtctcactctatggccccgggccgaatg

SEQ ID NO: 573735 - DNA, 249 bp, Homo sapiens
gctcgacgcttttctagcatggctaataagttctgtgtttgagcagcttagacctcaggctactagtatgttgaaatcaattatgcaaagcccattcattttgatacaatgtactaaactgctgctgtcaccacagtagaatggctactcagattggtttcttggatttttccctccctcctctgctttttttttttttttttttttaaaccatcacaatgttttcatccattgccaaagttgtcgacg

SEQ ID NO: 573736 - DNA, 383 bp, Homo sapiens
gggtacagtggtgtgatctgctcaccgaaacctccacctctcgggttcaagcaattctccctgcctcagcctcagctgggattacaggtgcccgccaccacacttggctaatttttgtatttttagtagagacggggttttgccatgttggccaggctgctctcaaactcctgatctcaggtgatccgcctgccttggcctcccaaagtgctgggattacaggcgtgagccaccgcgcctggccgagggaggtgaaactttacaggctccaagactagtgtccctggaaggcagaggagccttgggctgctctgttgggttctgggcccctggccgcaagtttctgtatttcctgatctctagtactctgatcccgggtgttc

SEQ ID NO: 573737 - DNA, 554 bp, Homo sapiens
tccacgttttcagcgggataccccccctctatgagagatccccggcacactccctcccgaaacgtttcaagagtcttggggtgtaacaattgccgccacttgtgtcactggtgccgagatagatatgtagtagagtacaccttcttgctgatgccccacgcacccgctagtgatgcccgtaacccctctgttgttccgccgcttagctgtaccacgcggtcaacaaataccacaccccgggcatgtgctcatgctatcgctggccacacacagtgggtggcaacaatcggagaatctaccccgcgggagtagaaatcattccttgtctcgaccaactctatcgggagcataaatcctaatccagtccccccgaagcttgacctccgcctgcccgtgcagagggatggtgacacgcctcccccaaggcggagtcatcatttgggaaactatactgatgaaataacaagactgatagtcagaagcccttggtctttcaccccctctcctcccaatacataaagggaaaacccaataaaccccacccaaacaaaaca

SEQ ID NO: 573738 - DNA, 852 bp, Homo sapiens
tctcctgtgtcctatccctttatgtccccccctcacagaggtccagtctcacaccccaataaaaacacttcgggaaccaccaaacggcctataaaatctctagaactcaccttccttgtaaaattataccgcttccctaatagcgttccttaacgccccttatacaaatgtgtctaaaccccccgtcccttatatttatacgaagtagttgttgttactattccaaacccctatttttctcttttctccgacacccgacccctctctgtgaaatttggcccccctctaattggccgcagccctgttgccccccccccaattatggggcctccccccctaataataaaaatgggcccctcttccttaagcccccacccaacagggagtcttccttaacacgggtgtttatctaccaccagttggatattgctgaacacgaacaccatgttgaaacattgcaagaaaacttattttgccgaaaaaactttcagcgtataactcttggcaggagccacactacaatctgttataaacaagagtccttttatcccccacgcgccagtgtaaccactgtcttctcctctccaacttccattctgcacatctcccgaaggcaaaaaatcggccacggtcaactcattcaatacttctttcctgtgaaaaatattcaccacgaccattttaacccccggtcgatagctgatgggcccccgaagacctaagagggaagcccattcccaaagtgtctacccatagacacaccaaaagccaataccatattccccccgtttctcccacatttttctaggaccccgagccatgccaaatcccctttcacggttcaaaaaacca

SEQ ID NO: 573739 - DNA, 200 bp, Homo sapiens
agtcaatagccctatgctacatcaaaaagtctgaaaaagcaccaacacacaatctaaggtcacacctcaaggaactagagaaacaagaacaaaccaaacccaaacccagcagaagaaaggaaataaccaagattatagcagaactaaattaaattgaaacaaaaaaatacaaaaagataaatgaaaccaaaagctagttt

SEQ ID NO: 573740 - DNA, 379 bp, Homo sapiens
  misc_feature (13)..(13): n is a, c, g, or t
  misc_feature (23)..(23): n is a, c, g, or t
  misc_feature (29)..(29): n is a, c, g, or t
  misc_feature (32)..(32): n is a, c, g, or t
  misc_feature (87)..(87): n is a, c, g, or t
  misc_feature (379)..(379): n is a, c, g, or t
ggaccctctaganctaagatggncaccanganggcaccccaaccagagccctatgttagctgagcggatgaccacacgagaagagtncacttcaggccagactaacttagagacagctgtggtggcccttacttaggaccaggccttagaggcaggcacagggggagccactttggcccagaccatttctgaggcagccattgggggagccatgctgggccagaccaccttagagggctgtcgggggagccacttcggaccagaccaccttagaggagactgtgggaggagccattctggaccagaccaccttagaggatgctgttgggggagcccgctgggccagactatctcagaggaggctgtatgaggagctacn

SEQ ID NO: 573741 - DNA, 1015 bp, Homo sapiens
  misc_feature (250)..(250): n is a, c, g, or t
agcggcgtgatgcgcacggctcccatgcaggcaggcgcgctcggcgcgaggtatgagcagatgtggcctggtgaacgcctggtcgcgccgtattcttctgaggtgccacgcgtgccgccgccgcacagctcagcgcatggccctagcctgcgttgtgcatttctaggaggtgggacgctggaagagcactctgcgtgagcttgtgcacgttgtgaaggagttgatgctgaggtcactctgctgtcctcgntcacgtgtgcgctgcacatcctgcgatgtgtacgagacgtactctcgcgaaggaagaatccttgacatcattcgtagtgtcacagacaacgttactctagggtcactggagtcaagtccatcacctgtagtgtggaatccagtgcagagtctgctatggtctcttggagtggagtttggtagacttggtcctcagtcgtactgctccagctttaatcttgtgtgataccccagaatgcattccagcaagcatatctagaaacgcagagaaagatagcctctgcttaccatcctaggcggtgcagcgatagtccatcgctctagtcccagtctgattagtgatcgcctaaacgtccgcgccatcgtttgacggcctctgtcatgacgcaccagatggaacgctaagtcctagtcggcactgacgcgtgtaaccatgtcctaccagtcactcgaacggctagtccggacttgttgcaatggctccagcaaagtaaccaggttatcagcacaccttggaacattgcgccgaacctaggacatgcgcaagctagcagagagcgtcgcaagaaggcgatctgagcttgcgccctgagtgagccacttgtatttgggcgcctatttcccattggcattggccgaccatacggaacccccttgcgagggaggatctatgcttgccctcgacctactagagtattggcggcaccagatcagccttgctgtggtgtgaatgggcccatgtcaacgatcgattcagttccagcct

SEQ ID NO: 573742 - DNA, 101 bp, Homo sapiens
ctccacattctcttttgaaatgccccccacgcactgccaggcaatctttcatccccactacactactaaaaatactctaactaagatcaccaacctccctg

SEQ ID NO: 573743 - DNA, 170 bp, Homo sapiens
ccaacacgctcggcgtacaggtacacagcacgcgcaagatgaagacagagacagcagatgcgccgaaggctgtggagtacttgttgaccccactcaggagtccctcaaagatactccagttcatggtggacccacgcgtcagctgctaccgactgcttggattacaagga

SEQ ID NO: 573744 - DNA, 194 bp, Homo sapiens
  misc_feature (175)..(175): n is a, c, g, or t
accatactactcagagaacctcagtgtaccacgagagcagagcactggagcacatttctgtcccagcgcagggggcaggattaaggatgtgccagagcctcaagatccaatggctggccccagcatgatgggctgggcccaggggattgtaaggagagaccaggcctccagctgngtatgggacagatgtcggg

SEQ ID NO: 573745 - DNA, 1487 bp, Homo sapiens
  misc_feature (537)..(537): n is a, c, g, or t
  misc_feature (545)..(545): n is a, c, g, or t
  misc_feature (548)..(548): n is a, c, g, or t
  misc_feature (553)..(553): n is a, c, g, or t
  misc_feature (555)..(555): n is a, c, g, or t
  misc_feature (566)..(566): n is a, c, g, or t
  misc_feature (596)..(596): n is a, c, g, or t
  misc_feature (624)..(624): n is a, c, g, or t
  misc_feature (1185)..(1185): n is a, c, g, or t
  misc_feature (1334)..(1334): n is a, c, g, or t
gaggtcagtctcgctatattgcccaggctggtcttgaatgcctgggctcaagcaatcctcccaccttggccacctgaatagctgggactacaggcatgtgccactatgcccagctaattttttgtatttttagtagagatgaggcaatatttttaatatagctaatgcatgatgttaaaaactttgcatatggaaaagatgcattcaaaatagaagacagatcaatgaattttagtgtagtcattttaagtttagtgacatagtttcagtttccacattgcaactatacactgtggagttttagcatagtatctaagaatgaatatccacagttctgaacaggttattttagcactcttttccagcaatatatctctgagaggccatactttcttcacgtatgtcaaacaaataacatattgcaacataattgttcttcagacttgttttttagcagcagacacatttccaaatgtaatcttactctgaatctgagcttcattatacaatacagacaaaagtgagcttttccagttnaagtaggngtntgatntnaaacacacccntggccccaacaaaacaaataaaactcccantcttattttaagagcttgttgaagaganttattaagtaacgccgcccttcctttcggccggaaccgccatcttccagtaattcgccaaaatgacgaacacaaagggaaagaggagaggcacccgatatatgttctctaggccttttagaaaacatggagttgttcctttggccacatatatgcgaatctataagaaaggtgatattgtagacatcaagggaatgggtactgttcaaaaaggaatgccccacaagtgttaccatggcaaaactggaagagtctacaatgttagattcttgccaagagaattaatgtgcgtattgagcacattaagcactctaagagccgagatagcttcctgaaacgtgtgaaggaaaatgatcagaaaaagaaagaagccaaagagaaaggtacctgggttcaactaaagcgccagcctgctccacccagagaagcacactttgtgagaaccaatgggaaggagcctgagctgctggaacctattccctatgaattcatggcataataggtgttaaaaaaaaaaataaaggacctctgggctacaaaaaaaaaaaaaaaaaaaacccgngggcatcaaatggcggggggcgggaaaaaaggggtactggaatgggccatgggccaaagcggttccctggacccagttttcctggtccaagggggaaatcggcggggccccaaaagggaggcggaaaaattccgaaaagccaggtaccnggtagagaatcggcgaccaaggccgccgggaaccaagacacccgcgctagtgacgcggtctataggggggacgcaagcgagtctggagagaccacgaattcgcgggcgcagaacagcggccagagaacaaaagaaaaaccagccagcgccgac

SEQ ID NO: 573746 - DNA, 243 bp, Homo sapiens
agccttggtggcagagtgagatcttgtctccaaaaaaaaaaaaatttatgttaggcttggggacagttggcaatgtaataaattaagtcgggggtggcctctttagtaaaatttgagcaaaaacttgaaggagggaaaggattgggccagggtgctgaggaaagagctttgtaggttgaacaaccagaattagggtgtctgaggtgtgtctgaggctctgaaaggagcggtgaagcactcatt

SEQ ID NO: 573747 - DNA, 469 bp, Homo sapiens
ctctgagatactcaattaagtcaataaacacatctacaccatcacactcacatagttaccatttagtgtgatgagaacactatatgatctactctcttagcaaatatcacgtgtacaatacagtattattaactacagtcaccatgctatacactgggtccacagaacttactcatcttacataactgaaagtttgttccctgtgaccaacatctcctttcccccaccccctggcaaccactgtacggctctgattctatgattttgacttttttggatttcacatctaagtgagatcatgcagtatttccctttttgtctctgtctcatttacttagcataatgttctccaggtttatccatgttgtcgcaaatgataggatctccttatttatggctaaatgatattccattgtggatatgcaccacgttttctttctccatgtatctgtcagcgagtacttaggtt

SEQ ID NO: 573748 - DNA, 1547 bp, Homo sapiens
  misc_feature (537)..(537): n is a, c, g, or t
  misc_feature (545)..(545): n is a, c, g, or t
  misc_feature (548)..(548): n is a, c, g, or t
  misc_feature (553)..(553): n is a, c, g, or t
  misc_feature (555)..(555): n is a, c, g, or t
  misc_feature (566)..(566): n is a, c, g, or t
  misc_feature (596)..(596): n is a, c, g, or t
  misc_feature (624)..(624): n is a, c, g, or t
  misc_feature (967)..(967): n is a, c, g, or t
  misc_feature (969)..(969): n is a, c, g, or t
  misc_feature (971)..(972): n is a, c, g, or t
  misc_feature (986)..(987): n is a, c, g, or t
  misc_feature (991)..(991): n is a, c, g, or t
  misc_feature (996)..(996): n is a, c, g, or t
  misc_feature (998)..(999): n is a, c, g, or t
  misc_feature (1002)..(1002): n is a, c, g, or t
  misc_feature (1006)..(1006): n is a, c, g, or t
  misc_feature (1008)..(1008): n is a, c, g, or t
  misc_feature (1019)..(1021): n is a, c, g, or t
  misc_feature (1245)..(1245): n is a, c, g, or t
  misc_feature (1394)..(1394): n is a, c, g, or t
gaggtcagtctcgctatattgcccaggctggtcttgaatgcctgggctcaagcaatcctcccaccttggccacctgaatagctgggactacaggcatgtgccactatgcccagctaattttttgtatttttagtagagatgaggcaatatttttaatatagctaatgcatgatgttaaaaactttgcatatggaaaagatgcattcaaaatagaagacagatcaatgaattttagtgtagtcattttaagtttagtgacatagtttcagtttccacattgcaactatacactgtggagttttagcatagtatctaagaatgaatatccacagttctgaacaggttattttagcactcttttccagcaatatatctctgagaggccatactttcttcacgtatgtcaaacaaataacatattgcaacataattgttcttcagacttgttttttagcagcagacacatttccaaatgtaatcttactctgaatctgagcttcattatacaatacagacaaaagtgagcttttccagttnaagtaggngtntgatntnaaacacacccntggccccaacaaaacaaataaaactcccantcttattttaagagcttgttgaagaganttattaagtaacgccgcccttcctttcggccggaaccgccatcttccagtaattcgccaaaatgacgaacacaaagggaaagaggagaggcacccgatatatgttctctaggccttttagaaaacatggagttgttcctttggccacatatatgcgaatctataagaaaggtgatattgtagacatcaagggaatgggtactgttcaaaaaggaatgccccacaagtgttaccatggcaaaactggaagagtctacaatgttacccagcatgctgttggcattgttgtaaacaaacaagttaagggcaagattcttgccaagagaattaatgtgcgtattgtnantnngcacattaattctnntggnaggantnntgncttnangatgagtgtgnnngaagatgatctgaaaaagaatgaaaccaagagagaacggtaccgtgggttcgatagtagagagcgctcgagtctgctccacccagagaagcacactttgtgagaaccaatgggaaggagcctgagctgctggaacctattccctatgaattcatggcataataggtgttaaaaaaaaaaataaaggacctctgggctacaaaaaaaaaaaaaaaaaaaacccgngggcatcaaatggcggggggcgggaaaaaaggggtactggaatgggccatgggccaaagcggttccctggacccagttttcctggtccaagggggaaatcggcggggccccaaaagggaggcggaaaaattccgaaaagccaggtaccnggtagagaatcggcgaccaaggccgccgggaaccaagacacccgcgctagtgacgcggtctataggggggacgcaagcgagtctggagagaccacgaattcgcgggcgcagaacagcggccagagaacaaaagaaaaaccagccagcgccgac

SEQ ID NO: 573749 - DNA, 1023 bp, Homo sapiens
  misc_feature (537)..(537): n is a, c, g, or t
  misc_feature (545)..(545): n is a, c, g, or t
  misc_feature (548)..(548): n is a, c, g, or t
  misc_feature (553)..(553): n is a, c, g, or t
  misc_feature (555)..(555): n is a, c, g, or t
  misc_feature (566)..(566): n is a, c, g, or t
  misc_feature (596)..(596): n is a, c, g, or t
  misc_feature (624)..(624): n is a, c, g, or t
gaggtcagtctcgctatattgcccaggctggtcttgaatgcctgggctcaagcaatcctcccaccttggccacctgaatagctgggactacaggcatgtgccactatgcccagctaattttttgtatttttagtagagatgaggcaatatttttaatatagctaatgcatgatgttaaaaactttgcatatggaaaagatgcattcaaaatagaagacagatcaatgaattttagtgtagtcattttaagtttagtgacatagtttcagtttccacattgcaactatacactgtggagttttagcatagtatctaagaatgaatatccacagttctgaacaggttattttagcactcttttccagcaatatatctctgagaggccatactttcttcacgtatgtcaaacaaataacatattgcaacataattgttcttcagacttgttttttagcagcagacacatttccaaatgtaatcttactctgaatctgagcttcattatacaatacagacaaaagtgagcttttccagttnaagtaggngtntgatntnaaacacacccntggccccaacaaaacaaataaaactcccantcttattttaagagcttgttgaagaganttattaagtaacgccgcccttcctttcggccggaaccgccatcttccagtaattcgccaaaatgacgaacacaaagggaaagaggagaggcacccgatatatgttctctaggccttttagaaaacatggagttgttcctttggccacatatatgcgaatctataagaaaggtgatattgtagacatcaagggaatgggtactgttcaaaaaggaatgccccacaagtgttaccatggcaaaactggaagagtctacaatgttacccagcatgctgttggcattgttgtaaacaaacaagttaagggcaagattcttgccaagagaattaatgtgcgtattgccatagcactctaggccgatagctctgacgttaggaatgtcagaagagagcaagaggt

SEQ ID NO: 573750 - DNA, 1016 bp, Homo sapiens
  misc_feature (537)..(537): n is a, c, g, or t
  misc_feature (545)..(545): n is a, c, g, or t
  misc_feature (548)..(548): n is a, c, g, or t
  misc_feature (553)..(553): n is a, c, g, or t
  misc_feature (555)..(555): n is a, c, g, or t
  misc_feature (566)..(566): n is a, c, g, or t
  misc_feature (596)..(596): n is a, c, g, or t
  misc_feature (624)..(624): n is a, c, g, or t
  misc_feature (1011)..(1011): n is a, c, g, or t
gaggtcagtctcgctatattgcccaggctggtcttgaatgcctgggctcaagcaatcctcccaccttggccacctgaatagctgggactacaggcatgtgccactatgcccagctaattttttgtatttttagtagagatgaggcaatatttttaatatagctaatgcatgatgttaaaaactttgcatatggaaaagatgcattcaaaatagaagacagatcaatgaattttagtgtagtcattttaagtttagtgacatagtttcagtttccacattgcaactatacactgtggagttttagcatagtatctaagaatgaatatccacagttctgaacaggttattttagcactcttttccagcaatatatctctgagaggccatactttcttcacgtatgtcaaacaaataacatattgcaacataattgttcttcagacttgttttttagcagcagacacatttccaaatgtaatcttactctgaatctgagcttcattatacaatacagacaaaagtgagcttttccagttnaagtaggngtntgatntnaaacacacccntggccccaacaaaacaaataaaactcccantcttattttaagagcttgttgaagaganttattaagtaacgccgcccttcctttcggccggaaccgccatcttccagtaattcgccaaaatgacgaacacaaagggaaagaggagaggcacccgatatatgttctctaggccttttagaaaacatggagttgttcctttggccacatatatgcgaatctataagaaaggtgatattgtagacatcaagggaatgggtactgttcaaaaaggaatgccccacaagtgttaccatggcaaaactggaagagtctacaatgttatacaaaaataaaaaaaaaaaaaaaaaaaaaaaaaaaaaaaaaaaaaacaaaaaaaaaaaaactttttggggcgccctgggccccgagaaaaagtttttaaacaccatttgttggggggccgcgngggcc

SEQ ID NO: 573751 - DNA, 1008 bp, Homo sapiens
  misc_feature (537)..(537): n is a, c, g, or t
  misc_feature (545)..(545): n is a, c, g, or t
  misc_feature (548)..(548): n is a, c, g, or t
  misc_feature (553)..(553): n is a, c, g, or t
  misc_feature (555)..(555): n is a, c, g, or t
  misc_feature (566)..(566): n is a, c, g, or t
  misc_feature (596)..(596): n is a, c, g, or t
  misc_feature (624)..(624): n is a, c, g, or t
gaggtcagtctcgctatattgcccaggctggtcttgaatgcctgggctcaagcaatcctcccaccttggccacctgaatagctgggactacaggcatgtgccactatgcccagctaattttttgtatttttagtagagatgaggcaatatttttaatatagctaatgcatgatgttaaaaactttgcatatggaaaagatgcattcaaaatagaagacagatcaatgaattttagtgtagtcattttaagtttagtgacatagtttcagtttccacattgcaactatacactgtggagttttagcatagtatctaagaatgaatatccacagttctgaacaggttattttagcactcttttccagcaatatatctctgagaggccatactttcttcacgtatgtcaaacaaataacatattgcaacataattgttcttcagacttgttttttagcagcagacacatttccaaatgtaatcttactctgaatctgagcttcattatacaatacagacaaaagtgagcttttccagttnaagtaggngtntgatntnaaacacacccntggccccaacaaaacaaataaaactcccantcttattttaagagcttgttgaagaganttattaagtaacgccgcccttcctttcggccggaaccgccatcttccagtaattcgccaaaatgacgaacacaaagggaaagaggagaggcacccgatatatgttctctaggccttttagaaaacatggagttgttcctttggccacatatatgcgaatctataagaaaggtgatattgtagacatcaagggaatgggtactgttcaaaaaggaatgccccacaagtgttaccatggcaaaactggaagagtctacaatgttaaactccgtctctactaaaaatacaaaaattagccgggcatgatggtgcgtgcctgtagtcccagctactcgggaggctgagacaggagaattgcttgaaccctggaggcagaagcaggaag

SEQ ID NO: 573752 - DNA, 190 bp, Homo sapiens
  misc_feature (1)..(1): n is a, c, g, or t
nctcaccgcatcacacctgaaggaaggcaagggcagaaacggagacaggttgctactgcagtacaacacgtgaaggctggaggtcgcttggactgagtcagaacagggaaactgatgggaagctgtcggagagaggatgagaaaaccagccaagaaaaacgagaaggatcatccagtaaagcataaaaag

SEQ ID NO: 573753 - DNA, 1286 bp, Homo sapiens
  misc_feature (537)..(537): n is a, c, g, or t
  misc_feature (545)..(545): n is a, c, g, or t
  misc_feature (548)..(548): n is a, c, g, or t
  misc_feature (553)..(553): n is a, c, g, or t
  misc_feature (555)..(555): n is a, c, g, or t
  misc_feature (566)..(566): n is a, c, g, or t
  misc_feature (596)..(596): n is a, c, g, or t
  misc_feature (624)..(624): n is a, c, g, or t
  misc_feature (1286)..(1286): n is a, c, g, or t
gaggtcagtctcgctatattgcccaggctggtcttgaatgcctgggctcaagcaatcctcccaccttggccacctgaatagctgggactacaggcatgtgccactatgcccagctaattttttgtatttttagtagagatgaggcaatatttttaatatagctaatgcatgatgttaaaaactttgcatatggaaaagatgcattcaaaatagaagacagatcaatgaattttagtgtagtcattttaagtttagtgacatagtttcagtttccacattgcaactatacactgtggagttttagcatagtatctaagaatgaatatccacagttctgaacaggttattttagcactcttttccagcaatatatctctgagaggccatactttcttcacgtatgtcaaacaaataacatattgcaacataattgttcttcagacttgttttttagcagcagacacatttccaaatgtaatcttactctgaatctgagcttcattatacaatacagacaaaagtgagcttttccagttnaagtaggngtntgatntnaaacacacccntggccccaacaaaacaaataaaactcccantcttattttaagagcttgttgaagaganttattaagtaacgccgcccttcctttcggccggaaccgccatcttccagtaattcgccaaaatgacgaacacaaagggaaagaggagaggcacccgatatatgttctctaggccttttagaaaacatggagttgttcctttggccacatatatgcgaatctataagaaaggtgatattgtagacatcaagggaatgggtactgttcaaaaaggaatgcaaaaaaaaaaaacaaaaaaaaaaaactgttcggttggcgccgcgccttcggccctctgagaaacacgctttttcttacacaccacttccggtttgggcacgcccgcgggccccaatgctagggttacgatgtgaaccacagggtgggctaaaatagcgatgttccctaaggggagagattccgggggctcaagtgcaatattggtgtgctggagaaatctcattcacaacagaccatttttggaaaaaagcgccccgcggggggagcaacaacccgcgaacgtgggtttctctatgaaaagccaatttcccgcgagagatgggagagtcacacgaagaaggctcaaatcagagggggaattcatgtcaacgacggggagattgtttcaaaagagaaaacatcgcagaataattcaaaatataacgccccccgcccggtgtgatn

SEQ ID NO: 573754 - DNA, 564 bp, Homo sapiens
  misc_feature (148)..(148): n is a, c, g, or t
agactccttagcatactaggtcacatggaacttgcggtcattcccaggctcccctggaaactctctgtgggtggcagcgtgaggaggacttacccgaggccgatgagccacagaagcgggactgaggttgcgtcacaccccgtactgncacctgggaattactctggagattctttttttattttttattttttagagatggggtctcactctgttgcccaggctggagtgcagtggcgcgatcttgctcactgcaagctctgcctcccgggttcacgccattgtcctgcctcagccttccaagtagctgggactacaggcgtccggcaaaacgcctggctaattttttggtatttttagtagagacgtagtttcaccgtgttaggatggtctcgatctcctgagctcgtgatccgcccgcctcgggctcccaaagtgctaggattacaggcgtgagccagcgcgcccgggcagaattgttcgtaggtatgtgtgaaacgaaggagtccgcgctccgtgggcccgggtgaagtgcagtgggcgatctctggtcactgtaactcc

SEQ ID NO: 573755 - DNA, 758 bp, Homo sapiens
  misc_feature (228)..(228): n is a, c, g, or t
  misc_feature (273)..(273): n is a, c, g, or t
  misc_feature (279)..(280): n is a, c, g, or t
  misc_feature (287)..(287): n is a, c, g, or t
  misc_feature (289)..(289): n is a, c, g, or t
  misc_feature (293)..(293): n is a, c, g, or t
  misc_feature (309)..(309): n is a, c, g, or t
  misc_feature (335)..(335): n is a, c, g, or t
  misc_feature (416)..(416): n is a, c, g, or t
  misc_feature (419)..(419): n is a, c, g, or t
  misc_feature (452)..(452): n is a, c, g, or t
  misc_feature (462)..(462): n is a, c, g, or t
  misc_feature (467)..(467): n is a, c, g, or t
  misc_feature (469)..(469): n is a, c, g, or t
  misc_feature (472)..(472): n is a, c, g, or t
  misc_feature (474)..(474): n is a, c, g, or t
  misc_feature (476)..(476): n is a, c, g, or t
  misc_feature (478)..(478): n is a, c, g, or t
  misc_feature (480)..(480): n is a, c, g, or t
  misc_feature (497)..(497): n is a, c, g, or t
  misc_feature (508)..(508): n is a, c, g, or t
  misc_feature (518)..(518): n is a, c, g, or t
  misc_feature (525)..(525): n is a, c, g, or t
  misc_feature (530)..(531): n is a, c, g, or t
  misc_feature (544)..(544): n is a, c, g, or t
  misc_feature (546)..(546): n is a, c, g, or t
  misc_feature (548)..(548): n is a, c, g, or t
  misc_feature (721)..(721): n is a, c, g, or t
  misc_feature (725)..(726): n is a, c, g, or t
  misc_feature (731)..(731): n is a, c, g, or t
  misc_feature (736)..(736): n is a, c, g, or t
  misc_feature (740)..(740): n is a, c, g, or t
  misc_feature (742)..(742): n is a, c, g, or t
  misc_feature (751)..(751): n is a, c, g, or t
  misc_feature (755)..(755): n is a, c, g, or t
ggaggagcagttcggcggggacggggcggcggcagcggcaacggcggcggtaggcggctcggcgggcgagcaggagggagccatggtggcggcgacacagggggcagcggcggcggcgggaagcggagccgggaccgggggcggaaccgcgtctggaggcaccgaagggggcagcgcccgatcggagggggcgaaattgacgccagtaagaacgaggaggatgaaggncattcaaactcctccccagacactctgaagcagcgacggcacagngggaannatggganantgtntataggaggccttagntgggacactacaaagaaagatctganggactacttttccaaattgtggtgaagttgtagatgcactctgaagttagatcctatcacagggcgatcaaggggttgggnttntgtgctatttaaagaatcgggagagtgtagatnaggtcatggntcacnangancntnantntgaatgggaaggtgatngatcctaaaangggcaaagcnatgaaancaaanngagccggttaaananantttttgtggtggcctttctccagatacacctgaagagaaactaagggagtactttgggtggtttggctgaggtggaatccactagagctccccattgggacaacaagaccaataagaggcgtgggttctgctttattaccttttaagggaaagaagaaccagtgcagaagatntggnnacagnaattnccanangtggtcttngtanatg

SEQ ID NO: 573756 - DNA, 339 bp, Homo sapiens
  misc_feature (284)..(284): n is a, c, g, or t
  misc_feature (319)..(319): n is a, c, g, or t
aaaggaagtcgccagatcttaccccgcctgtttacccaagacgtcacctctagcatcaccagtattagggccccgccttcccagtgaaacatgtttaacggccgcggtaccctaaccgttcgaaggtagcataatcacttgttccttaaatagggacctgtatggatggctccacgaggggtcaactgtctcttacttttaaccagtgaaattgaccttcccgtggagaggcgggcatgacacaacaagacgaggagaccctatggagccttaatttattaatnccaacagtacctaacaaacccacaggtcctaaacnacccaaccttcaataaaaaa

SEQ ID NO: 573757 - DNA, 690 bp, Homo sapiens
  misc_feature (160)..(160): n is a, c, g, or t
  misc_feature (205)..(205): n is a, c, g, or t
  misc_feature (211)..(212): n is a, c, g, or t
  misc_feature (219)..(219): n is a, c, g, or t
  misc_feature (221)..(221): n is a, c, g, or t
  misc_feature (225)..(225): n is a, c, g, or t
  misc_feature (241)..(241): n is a, c, g, or t
  misc_feature (267)..(267): n is a, c, g, or t
  misc_feature (348)..(348): n is a, c, g, or t
  misc_feature (351)..(351): n is a, c, g, or t
  misc_feature (384)..(384): n is a, c, g, or t
  misc_feature (394)..(394): n is a, c, g, or t
  misc_feature (399)..(399): n is a, c, g, or t
  misc_feature (401)..(401): n is a, c, g, or t
  misc_feature (404)..(404): n is a, c, g, or t
  misc_feature (406)..(406): n is a, c, g, or t
  misc_feature (408)..(408): n is a, c, g, or t
  misc_feature (410)..(410): n is a, c, g, or t
  misc_feature (412)..(412): n is a, c, g, or t
  misc_feature (429)..(429): n is a, c, g, or t
  misc_feature (440)..(440): n is a, c, g, or t
  misc_feature (450)..(450): n is a, c, g, or t
  misc_feature (457)..(457): n is a, c, g, or t
  misc_feature (462)..(463): n is a, c, g, or t
  misc_feature (476)..(476): n is a, c, g, or t
  misc_feature (478)..(478): n is a, c, g, or t
  misc_feature (480)..(480): n is a, c, g, or t
  misc_feature (653)..(653): n is a, c, g, or t
  misc_feature (657)..(658): n is a, c, g, or t
  misc_feature (663)..(663): n is a, c, g, or t
  misc_feature (668)..(668): n is a, c, g, or t
  misc_feature (672)..(672): n is a, c, g, or t
  misc_feature (674)..(674): n is a, c, g, or t
  misc_feature (683)..(683): n is a, c, g, or t
  misc_feature (687)..(687): n is a, c, g, or t
ggaggagcagttcggcggggacggggcggcggcagcggcaacggcggcggtaggcggctcggcgggcgagcaggagggagccatggtggcggcgacacagggggcagcgccgatcggagggggcgaaattgacgccagtaagaacgaggaggatgaaggncattcaaactcctccccagacactctgaagcagcgacggcacagngggaannatggganantgtntataggaggccttagntgggacactacaaagaaagatctganggactacttttccaaattgtggtgaagttgtagatgcactctgaagttagatcctatcacagggcgatcaaggggttgggnttntgtgctatttaaagaatcgggagagtgtagatnaggtcatggntcacnangancntnantntgaatgggaaggtgatngatcctaaaangggcaaagcnatgaaancaaanngagccggttaaananantttttgtggtggcctttctccagatacacctgaagagaaactaagggagtactttgggtggtttggctgaggtggaatccactagagctccccattgggacaacaagaccaataagaggcgtgggttctgctttattaccttttaagggaaagaagaaccagtgcagaagatntggnnacagnaattnccanangtggtcttngtanatg

SEQ ID NO: 573758 - DNA, 498 bp, Homo sapiens
  misc_feature (497)..(497): n is a, c, g, or t
atgcccagcctaccacatctgtgtattacagttcaccatgagattcgggtggggtctgtagggcgtgtgactggattagtgagggtgcatttctcgtgactggtaaaacactatctccttggtactcctcgatgatagcatggtgagctctcacaagtatctggtatgaaaaaatagtgtgtggtatctccccccatcactctcttgttccgtgctttcacgtgtgtaacaatgccatgctcccgcattcacaattctgccagataaattgtggcaggtaatgagtgtgtgtaataaatgagtgctgataggatgaaagatagaaaatgatataagatagaaagaaaatcattctggaagctttgagtcttcctttagtaatcatatgtaggttcttttttaccatcccctgttacagcacttactgacctggagtctgtctcacaaatgactaaatgtcatatacgattctaggatgtacactagaactgaaaggng

SEQ ID NO: 573759 - DNA, 1265 bp, Homo sapiens
gaatatacgaccatgagagtctcctccccgtgggtgtcaccaggtcgtacatcgctagtagaatccaaaaatcacagtagcagagggatgtgatcgaggtagtgcatggtgtaagacgaggacatgcggtagctgattaaatgagtatatggtacgtgccaagagcaaaccgggtagtgtcgagtcaaatcagctgagtatctcaccttctctgggaaggcgactagagctagctagagtgctgagggtcaagagttcatagtgcatgagttgcttggaatcggagacaacgaatgtcagggaagaaaggcaggcttgtccgcgtctcgatccccggatcttttgcagagttagccataggattgcgacagacgcagtggtcgtcggagtcgttgcagacatgcaggtataaggagctaaacgctgtggaaacctggtggttggctcctcgttgtggtggtcatcacgagacattgggtgcattgggtggcaccctgatagtgggtgcaagatggtgtgctacttgaaggggatatggaaacaaggcgaatggctcgacgtgtcacagtcactgggagcttcttagccgttgaccaacattgcacgtatcccgcttgaatcccgatgaaagcttgaagctatcaaagagatgcacatctctagaccttgcatccgcttataacatccctggtaccacttgagcgtgtgtacagcatgcgtgaatgtatacgacaggtaaagtaccaaaacagcgagtctagtgaagacatcatttatcgcaaagtacaacaagggtttggttcgtggcaaccaagggcaacagattacaaccgaatgagatggaaatgaggaaggccttaagtcacaagtacggccaaagacggtaagacgggcatggacccatggacaacaagggcgcatccccagaccggggagaaaaaaacgaagacaagcaacggagagtcggaataacagcccttaaaggatgagagacacatccacatggtcggggcaaagagcggggcgagaagccctgcgacgagacggaatgtgtgagcagcacatgcatgacaggtaagcccaaagcagggcgtcacagggcacaacacaggacgaaagatatagactacagcggtcagaaacgagacagccgacacagtgacatgagcatacaacagtacgcgacaagaacgacagatgagccagaacagggacccacaacacgcacaatgaatcaacgacatgcaaaagctacggcacgcaca

SEQ ID NO: 573760 - DNA, 923 bp, Homo sapiens
ggtgccgggtaggggccgtcgggtagagggtgaatagcagttgccgagcggaaaggaatcgatggtgattgatagtgtgtatgtggtgaacaaagctaggcagggattgagtttaccagttgtggacacggtacgacgaacgaggggggctgagggctgaggaagaggtttcagtttatacggctggatctggtggtcaaggctagatcgaggagcgtgtgtggttgcattatggggcagaggagaaggaaatcgcgattggggttcagtgccagtgactggcctagtctgggtggtaatggacgtgatatggacaggtataacggccggggggaaagaggtgctggggctatctgtggtaaacccatggtaagatataagcgcggagtcccaattacggatttatggccggaccccggtctcactgctaatgaagaaggtctatggtggcctccatgttccactcgccttctgtcgccattgcggtttcccagtgtgtctccttgacatcaagagtaagctctacggcacttgagatgttggagaacatgactggattcggacattgctacttgtgacgagaccactgtggagtggatcaaagttagggtctagggagatcctaggtaagttgggatagagactcttctccgaaagatcatgagattaatgcagactttgcctcaagaatcatgctatgctttagaaagtgctataagtgtgaagtcttgacagtaactgagctactcctggaggggcggagaaggcggcaacttggaccggtccatggtcgagcgggttttggcccccggtctgagggtccgggccagaaacagggggtgcccccgggggagccagtggctggctgtccgcagggggacctgaccgcaatgttgtgcgcacaggggcccgccgcaagggca

SEQ ID NO: 573761 - DNA, 852 bp, Homo sapiens
agagccggtggtgtccgcgctaccgggagagctggtggacaaatgtataggatcatgaattcacatcgtgatgaagagtgataaggaaatggtggtactcttcttgaggatcgatgatcttgtgaaataatggtatctggaaggatgtcacttgaggtttgaaaatcatgatccgagagggaacatgggacttactaacatttagatgagattttgctagactggagaataatataactaaactgctggttccgtgaaggtacgaagggacctgaaagtgtggaatgagttttccgttgagtgacacatagattatgtttggcgtataagtgactaggaaattggaatttttgtttcccgagtttctaaatgtttacattccgataaatgataagtttccgcgttgagagggaagtgttggaaggatgtgttagccagtgtttggtaaggtgaatcagtgattatcctggtgaaactgaataacagagcttcttcttgtgcagatgaaagataagggtgttggggttagatgtcatgtgtgattgtaatggagtagccacgtggaacaaagtttgtagtttgttctgcagtcgatttccggtgatgatatgtttatttggaggtcatttacgtggcattgattctgagaatatgtgtgtgggcaaacaaatggtgaactttgattgaacggggcctgtgaacaaccggaatgatcatttgaaaactcaatgaagggggggttgggaaaaagaaagatacaaaatattgtggggggcgggccgaaaggtttacacatggggggggggagagaggaagggaaatgggtagagacgcgggaatggggtccaagcg

SEQ ID NO: 573762 - DNA, 184 bp, Homo sapiens
acgttgtggttcgttcacagcttcctatgtatgattgtttgcacgagagggcgctcctgtttttaaaagcatttggatgacccctggctgagcggtgctctgcctctaactccctcctcacactccagaattacccttcctcatctgtgcccgtggtcccacctctccccgttgtcccacctct

SEQ ID NO: 573763 - DNA, 648 bp, Homo sapiens
atgtgagtgcatgtacttggaaaactctgaggctacactgtatgaatgttgagatgtactattaatccacatggacctgtccacagagaaaggattatgatgcttttcttgtaaaaacctttatttaatctctattcttctctgtcttaaaaatggggagatttatgtctgcttcttagattcctaagtccatctgctcattcagccacactgctaaactgtcttctaaaaaattttcagtagatttggaaagatatatcatgaagataattttgtcttcttcaaataatgacagtttggtttccttctttccagatgtagacttttactttcttttttcttatcttattgcattggattggacctgcaggacagtttaaaataaaatcagtgatacttagaacccttgtctcgttcttaatcttagaacaaggtttgctttacgtttttagtagatatttatggccaagataagaaagtacagtctatacctggcttgtttggtttttaatcacaaatggatcctgaagaccttgactggctcttgcttgactagcagtagtcttggaatacaattccctgtttcctttcgttctctgcattcccaatcttaaggcgctctggataagcagcttctttctctcggag

SEQ ID NO: 573764 - DNA, 108 bp, Homo sapiens
  misc_feature (20)..(20): n is a, c, g, or t
ggatcgtacgacggagcggntagtggactgtcctcctcctgtcattaacttacaagcagcacactccagttgtcactgtagtcaaaactgggagtctgtgagtggacc

SEQ ID NO: 573765 - DNA, 352 bp, Homo sapiens
gtctgctggacgtgttctgtatgcgggtgacgccgtgcccggactagtgaggctgtccgtcctcccgacagtagccgaggtcaccgcacgctcggggtccacgtcctccggcagtctggcacttgtgtagtcgtaaggtgtttcatgtacagtgtccgttcagccgccagctttctcagccccgcacctcgatgttggtttgtttggaggtggtgacaatgatgtcttcaggtgagaagtctctcacgtccaccgcaaactcataggcgtctcctagggtcttgatgttgcctgcccaccggggcttggttgggatgggctctttgacgaggcatggacaggccttcattca

SEQ ID NO: 573766 - DNA, 283 bp, Homo sapiens
  misc_feature (2)..(2): n is a, c, g, or t
  misc_feature (7)..(7): n is a, c, g, or t
  misc_feature (19)..(19): n is a, c, g, or t
  misc_feature (28)..(28): n is a, c, g, or t
  misc_feature (31)..(32): n is a, c, g, or t
  misc_feature (47)..(47): n is a, c, g, or t
  misc_feature (60)..(60): n is a, c, g, or t
  misc_feature (62)..(62): n is a, c, g, or t
  misc_feature (67)..(68): n is a, c, g, or t
  misc_feature (76)..(76): n is a, c, g, or t
  misc_feature (90)..(90): n is a, c, g, or t
  misc_feature (109)..(109): n is a, c, g, or t
  misc_feature (128)..(128): n is a, c, g, or t
  misc_feature (131)..(131): n is a, c, g, or t
  misc_feature (165)..(165): n is a, c, g, or t
  misc_feature (174)..(174): n is a, c, g, or t
  misc_feature (179)..(179): n is a, c, g, or t
  misc_feature (189)..(189): n is a, c, g, or t
  misc_feature (200)..(200): n is a, c, g, or t
  misc_feature (210)..(210): n is a, c, g, or t
  misc_feature (212)..(212): n is a, c, g, or t
  misc_feature (227)..(227): n is a, c, g, or t
  misc_feature (247)..(247): n is a, c, g, or t
  misc_feature (264)..(264): n is a, c, g, or t
  misc_feature (266)..(266): n is a, c, g, or t
  misc_feature (276)..(276): n is a, c, g, or t
gntttantgcaggaatccnccagacacntcnngcccccgcacccccntcagccgcccgcntntcccnnccagcccntccaggcaggcccngtaggccgtagaccataancaaaaccctaaagaggggnacngttcagcctgtgggaggggagaagaggtgctgtnaacgaaaanctatnttaagaacanattagaagttnacaaccaagngncagccttcagcgctncggggaaagtcaaccgaccnctatgtcacctctagcngnggaaacctcngaggccc

SEQ ID NO: 573767 - DNA, 367 bp, Homo sapiens
  misc_feature (365)..(365): n is a, c, g, or t
cgatgagtctcaagctgccgcccgtttggtacaacaatgccaaatttggcatcttcatccactggggcgtcttctccgttcccgcctttggcagtgaatggtactcacgcaacatgtatcaacagggatcgaaagaatatcaacaccacctagccacctatggcccacaaaacacattcggctacaaagacttcatcccccagttcaccgcatccacattcgacccaaacgcctgggccacactcttcaaacaagcaggtgcccgctatgtcgtcccagtggccgaacaccatgatggatttgccttgtacgactcccatctctcggactggaccgcagtcaagaccggccccaaacggcgtttntt

SEQ ID NO: 573768 - DNA, 625 bp, Homo sapiens
  misc_feature (88)..(88): n is a, c, g, or t
  misc_feature (116)..(116): n is a, c, g, or t
  misc_feature (118)..(118): n is a, c, g, or t
tgattcatcacaggtagatccagcgtttacattgcaatctcgttacatgcccaatagcagatgatagcgtgtcatgctagcagacgtnctcactctacatctgcagggtcatctantntggcaatgattgatatctgactccacagtgtacttcagaatgtactggtccgaatagatggtaaagtggctatccgttgcagcgatttctgatcttcagactcagatctgtgagtgcactcagacaatacttgcatcttctacatagaggtgcatctagtgctgtaactttgtcgcctggtttgaagtaggacactgctgggcccatactttacacaatatgtgtaacgtgatggccatcgatcactgggaaagctaggacctgaactttagaatcgatacagtcggcatcagtatgcgtcagcaacgtagcaatgatctgaatgcgtatcacatgaaccttggagtaagcgaccacagcctattccattcagatggtctcacctgcttcctaggaaatggatgctcagcagtagatagcattgcccatggcggccatttttcattgggacgctgtgttggaagctactctcgcagttcaaacagcgtcaaactcttgcccaggtag

SEQ ID NO: 573769 - DNA, 425 bp, Homo sapiens
  misc_feature (154)..(154): n is a, c, g, or t
ccgatgaaagtgccaggcccaagatttgaacccaagccctggtcctgtaggggctgcctcgtgttctcattctaataagtgaccatgactgagaattcaccatgggccagacactctgagatagaagttaccagccccttggccaggcgctggntgtcacgcctgtaagtcccaacacgttgggaggccgaggcagatggatcacctgagatcgggagttcgagaccagcctagccgacatggcaaaaccctgtctctgctaaaaacacaaaaattagccaagcatggtgcacctgcctgtaatcccagctactcaggaggctggagcaggagaatcacttgaacccaggaggcggaggttgcagtgagctgagatcatgccattgcactccagcctgggcgacagaatgagactcccatctcca

SEQ ID NO: 573770 - DNA, 521 bp, Homo sapiens
ggctcggtacacgatacgctcctagacgggtgaggaaggcatgctgaaagctaaaataggcctcttaaggcaaacagtaggccaagttgtgaatgcaaaggaaaagttcttgaagaaaaatcaaagtgctactccactaagcatatgaataagaaagtgaaacagctttattgctgctagggagaaagtttgaatggtctgaatagaagatcaaagcaaccacaacatttccttaggctaaagcctaatccagagcaaggccctcgtttcaattctgtgaagcctaagagaggtgatgaagctgcagaagaaaaattggaagctagcagaggttggttcctgtggtttagggaaagaagccatctccatgagtgcagaatgaagcagcaagtgctgatgtagaagctgctgcaagttacccagaagatctagctaagatcattgatgcaggtgactaaacagattgtcagtgtagaggaaacagccttccattggaagaaggtgccgtctaggagcgtaat

SEQ ID NO: 573771 - DNA, 123 bp, Homo sapiens
ttctctaggcacagccaccatcatagactataagagccgagtcaggtcttaaagaacgagcaggacatctatacccatctggtccaatctctgctggaatcagacagtatcaaccagctgcag

SEQ ID NO: 573772 - DNA, 192 bp, Homo sapiens
ggtatctgtgaacatgttaagagtaatttagatgtgggggtgggggtggagaaaggggaagtggtccagacacaaacaacccattggacatgctaagccgaggaggcattcttctaaagcagactatatatgtcaacagcaaaggtaacatatgagtattcaaaaagaaaaacataactactatacttttaa

SEQ ID NO: 573773 - DNA, 223 bp, Homo sapiens
aagcagatggatgctggccagtaggcattgtccccttttatatctataacttcactgaccttcattttacctctagtagagacttgtcccattaattcggggtaccgcatccatcagagattccggaatcatgggtcctggcctagtaggccttgtgtccattatatatctataacttcactgaccttcattttacctctagtagagattgtaccattaattg

SEQ ID NO: 573774 - DNA, 361 bp, Homo sapiens
agcggagatacccccggagctccagccgcgcggatcgcgcgctcccgccgctctgccccgtaaacgttcctgcactggtagccgtccccagttttcagagggccaaggccgaaagtttgaagttttccgttgtaaacaaagcccagagagaaagcgttggaaaaccccgttccggaggcccaaaacccggtgggaggccaaacacaaaccagccggtcacatgccagtttccaccccggaccggcgacgcggaacggccggccaacggaacacacaacagcaacacacacagaacgcccgaacaccacgaaagaggaacgagacagacgcagaacacggcgcccggaaccaagagggagca

SEQ ID NO: 573775 - DNA, 160 bp, Homo sapiens
cgatgtagaccaggctgagtgcagtggtgatcttgtgtcacgagctcagcccctaggccaagtgatcttcatctcaactccaagtgctgggaccacaggtgcacaccaccgtgtccagctaatatttttattttcgttaagaaagggttttaccatcttg

SEQ ID NO: 573776 - DNA, 896 bp, Homo sapiens
tgtagtttgcttaggtccttttctttctttctttcttttttttttggaaacggccctctctctgtggcccaggcggagtgcagtgatccccgagatcgcaccattgcaccccagtctggtgcaacagagtgagatcccgtctcaaaaaaaaaaaggaagctggaaaaaaaaatagaattaaaacctctccccttgtctcacccgccaatgaaattttctggacacatccccaaatcacatgttggaatatttcccaaccacaaatttaataaggtataccaaatattttacctctcctaaaataggaaaaacatatattaaccttaaaaaagcgccctcagggggtatataataatcttcctaaaacccaggataacatactccatgtgcgcggttaacattaaacccccacatatatttgtcccctcatagtttttgaacaacacaaattaaggcccattatcaccactggatggagaaccctcaagggcgcattacatgttgggtttcgcaccatttacaatattcctgaagatttcaccccttggaatttggagaaacccatttccgttttttgtgttacacccatttgggccaagaatttctacacaaagggcctcgtggaattaatagggtaaatccttgtgacataactttatacaatagggatgccaccagattatggacgggcatgcgggtgcacctatcggtacagtaggtaccccgattttaataaaaccctccaattaattggctgtgattttaccacaaatccttcccgtttcacacgttaacttttttcacaacacatggggaactcccaaaaaggctatatgtatggtcccaacacctgtttcaactatttgtcgcttacaacaatcttgttaaatttccca

SEQ ID NO: 573777 - DNA, 552 bp, Homo sapiens
gcgatgcggaacaggaagaagagggctcctggcttactctaaagacacctgtctggagactcgagcgggacctctctgtggtatccaaaggtcatctcgaccacaagaacttggacgcgagcattttacatggaggtgaagcagaggggtcgggccaggtctgggacccagagctgccatgcactcccgcgctctcacagacttctgatttccaacctgcacgtcagagccccctcctgccagccggatgggggcctggatccagtgggaaatcacatgggaatatggctggcaaactgcaaagggccagatgagtgtcaggttacagaataaatctttactaactcaaagaagaaaagggctgcggataaaacaggaaaggttagatggaggaaggcgggcagacgggcctaagaacaagggccaaaatgagaatacagcatcggccaaagaggaccgtggctgtctctcccctggcaaggaggggcccttttggcccaggacagaggcagaggccagtgggtacaaccaggtcagatgtgcaaggagagc

SEQ ID NO: 573778 - DNA, 116 bp, Homo sapiens
  misc_feature (14)..(14): n is a, c, g, or t
  misc_feature (88)..(88): n is a, c, g, or t
  misc_feature (115)..(115): n is a, c, g, or t
gtttcctgcaacgntcacgaacatgaacatcaaaggttcgccatggaaagggtccctcctgctgctgctggtgtcaaacctgctcctntgccagagcgtggcccccttgcccatnt

SEQ ID NO: 573779 - DNA, 145 bp, Homo sapiens
tccagctttatacttcctccaagctttatacttctcacgctttatacttcctcaacgctttatacttctctagaggtccacgcatacttaatattatacttgaattcaatacggaagtataaagcgttgaggggtaccgagctcg

SEQ ID NO: 573780 - DNA, 497 bp, Homo sapiens
aaacgcgaaaaacacgtggcccccccggtggcctatttctaaattagtttctcccggtggccaaaaggcacgggtttcccccccacccccgaggtccccgtaaaccgcccgggaagaaacgggtgtttttacatggaggaccccctccccggtaaaacgggggaggaaatttttggccccattggcatggggccccacgccaagaacaaccgggacttgggtttccccctcgacctggacttcaagggccagttgggggagttgtcctgctcccccgactaccggatgggttaaggcccggttttcccccccggcacgagcccagggggtgggggttcctagggggtttgggggcccccccttcctttcccccccccccccaaaagggggttttaggggcctgggctggggggatggggggggcccctcgtgactgtgttttttaaaacttatgtttttaaaggggggcatttaccccaataaatcccccgctggga

SEQ ID NO: 573781 - DNA, 747 bp, Homo sapiens
gcaaccgttccaggtgtggtggtgcaggcctgtaatcccagctactcagaaggctgaggcaggagaatcgcttgaacctgggaggcagaagttgcagtgagccaatgatcgcgcctactgcattccagccgtgggcgacaaagcgagactctgtctccaatagaaaaaatagagacaggcacaagcaaagtcccggagaatccgtgatgttaacaaggattgacgcgaactcggatgcccagctcccacatccggggactggggctggacaatgcctgtggagacctcggcaaggcttcgcaaggcattggtgggtcagctggtcggcaccggcgggacggtctggacgatgggtgctggagatgactccgggaacgggaacgattgccggatcgggcagttcctgtatggcttggcgcagccgggcacggcgtgaagacggccgatcggccatgggctatggcgcaggcccgtggagtcacctgtaacgccagttcacagccatcagccgagcagagaaatcgttgatccctggaggagtgagcaagaccagaggcggctgaccgcagggccttcccggcagggccatccgcgcgaacggcatcacgcggagcgagactggagaatcactcggaagggacagagtcggtggagattccaagactagactccgagcatgcaccacgggcatgggagaccacaagaggttggagcagctcggggcccgctcaaggaccaagagacgaa

SEQ ID NO: 573782 - DNA, 221 bp, Homo sapiens
tagcgtatctcataacggaagtaacatctgtcgaacatgcaccatgagctttgagtgatgctcttcctggggacaaatgtgggcttcaatgtcaatgaatgtgtctagtcagggatgtacgtcgtggcaagtgttgcatagtgacagcaaaaatgacccaccaatggaagcagactggcttcactgctcaggtgattatcctgaaccatccaggccaaata

SEQ ID NO: 573783 - DNA, 109 bp, Homo sapiens
gaaaagatgtctgactcaagacctcagttgattctgtttgccttaagtttgggtcagtgataggctgcttctaacccctatactccttcaagaatacagtatgaaatca

SEQ ID NO: 573784 - DNA, 457 bp, Homo sapiens
cgtgatttcgggtgtatctcgaggatctccgggtgtgacttcgacgatgttcggcggcgcgacttcggcggtcacttcgagaaccgacccgaccacatccccggctgactcgtccgcgccgactggattaccaccctccggcagcacgaccggctcggtcacgaacggcgcaaacttgagaacacgccctgctccggatgtccgttacgtagacattgccggtcatgtcagtggcgatgccgccgaacggtatcgaactgggtcaggtcggtcggtgtgtcggaaggctgaccgaacgagccgacgcagttaccgagcgtatcgtaaaccagcacgcgacccgcgtcaggaatcgccgacgtacaagcagaatgggcgattcgtcgattgcgatatacgggcggttgccgagatcttcataccagccgcgtaccgggaaagtgaacaacgctgtgcc

SEQ ID NO: 573785 - DNA, 117 bp, Homo sapiens
gacacgggagggatgacaagatggagagccatgactaggcacggaggtcagacaggcagccgggcaggatggttagtggcccagtgagagagctgcaaacctggggacgcaaggggg

SEQ ID NO: 573786 - DNA, 293 bp, Homo sapiens
ctcccattgaacggagtcatttggtttggcacaagtggatgcgcactgtgacataaaagcagaataggaagcactcccttctgggggctgtcggagaggatgtgtctggaggaggaaaagactgggattatcggctggctgcgtggatgataccttcgctgagcctctctggccactgttattgcttgtttgtatatcacgctgtactttaccattctcaatattgtgtttatgcagcgagtgtggcaccgctaggggcattaactttctcacgctgtgatacatggacgaaa

SEQ ID NO: 573787 - DNA, 200 bp, Homo sapiens
cctggcaggctctttctgctgtggttggtggttgggagatcgacgactctacgcctgtacctgggatactcgtgtgatagatggcgatgcaacgtcctgccacgccgccgtgggctggactgcaggcggtgaatatccccatgggccgtgtctcttcaaccatgacgggctcctgcacatttgatgaatattttcgtcac

SEQ ID NO: 573788 - DNA, 922 bp, Homo sapiens
ggcggatcacggtgaaaaggagaaccccatgcgtggaacttctgcatccgcaaactctgtcttcaacatctgtgttgcgggagagtgtgagcacagactgacgcgagcagccaaggtgttggacgcagctcacagggcagacccctgtgttttccaatagctagatacactcgtcagaatcctcttggacatcccggcagcaatatgcaaaagattgctgtccactgcacagttcgaggggccaaggctagaagaaatcttggagaagggtctaaaggtgcgggagctatgagttaagacacataaactaacttctcagatactggaaactttggttctgggatccatggaacacactcgactctggtgtactcaagatagttgacccaatgcattggctatctacggcctggacttctatgtggtgctgggtaggccaggttacagcatcgcagtacaagaagcgcatcgacatggctgcattggggccaaacatcagaatcatgcaatacgtaggaggccatgcgctggattccagcagaagtatgagtgggactcatccttcctggcaaataaacttcccgtttctatccaaagagacgcaatacacaagttttcagtgatcaataccccctacaacatccactgaatcgggggtgcgccgtccatacatgtattcctcctcggggggcaccaacgttctggcgctgtacccacagcttttctgccggtctcccatggtggggctcccttcatgtggcagcaccgctacaattgtcccctgccccacgaccaggcacctgaccgccctttgccctgcctgcttctcccgggcgcaccttcggctacccctggtcgccatgcgttacagcgtaccctggccatccgcgtgtctaccactggactctgacgcacttccccg

SEQ ID NO: 573789 - DNA, 139 bp, Homo sapiens
tgaggaccccgaggcgtctgtaggagacagatgctatcaaatgaggactctggggtgttatttcagaaccccatttctagaaaataccacgccagagtcctcatttgatagcatctgtctcctgcagacctcatcattc

SEQ ID NO: 573790 - DNA, 112 bp, Homo sapiens
cgacgaatatataacgcctgcacaaaagaagtcaaattactaacggaacgtggcagaagattgtagagatactaattttagtagaagttcatggtattggcaacagtgactg

SEQ ID NO: 573791 - DNA, 521 bp, Homo sapiens
ttatggccgggggaaaaaaaaaaaaattttttttttaaaaaaaaaaaaaaaaaaaaaagaggaagtttttttttaaaaaaaaaagagccccccaacaaaattttaaaaaatattattttttttaaattgagaaaattcgattagttaaaaatttaaaaacaaaggtaattttattttataattccattgtatttaataaaaattttttaacattaaaagcaagcaatctaattgtaatgaattttgtcccgccaattttaatttacatttcacaaacattgctttttattttacttttttagctgttaacttttttatatttaaaaaagtttataaattttaattaattttttttcttttttaaataaaaaaattattttaaaaaaagggcctgcctttccttttccatttggctatttttttggctttgcagggacggaagtatttttttttttttttattaaaaaattgggttttaaaaaatgggttgaaaaaacattaaaataattttaaaataaaaa

SEQ ID NO: 573792 - DNA, 585 bp, Homo sapiens
acgctctctgtgtaggttgggtgtgtcagcaggagatagtatggtgggtcttgtggggtgtgagaactggggaaggggaaccccagtctcagatgacagacacacagaaactggcttggagacctcgcttcaggcacatacgtgctgcacaaagatcaccagacagtaggagtggagacaggaaatagagatttgcatctcaggataggagacagaagatggtggtggtgagttgatatgtcctgctctagctctcctgttcttgaaccaaatgggaagaacgtcaaggactatggatgttggattcacccagggatccatggaatcagaggtgtaagtggggttgtcgtgatgggcatccatggacaaggtaggtgggtgtcctcaagaatttgggaatggcactcagtgggccttggaagtttggctagggaatctcttctatctcctctaagaagtgttcgctcgggatgatgcaggcttgggtttgacaagacgctcatcatttctaactgaccatcaagactgattcggttccttaccaggtctcttcatagcattgagtcacccattctggatgagatg

SEQ ID NO: 573793 - DNA, 433 bp, Homo sapiens
cagatgaagaagttcacattcattcgattcagtgagcctgctgctgtccctgctgcgtgggagtcgctatgggccgccaggacctgggttctgcccgtagtaagcggcctgctgtcaataattatttccccaggcggcactgtagtctggctgggagcctgggggagctcctggacccctccggtggccacttgcgcttgcttcttgtagtactcctcccaagccttcgtgtagtcctgctgtgggggcgctccggtctgctggggctgctggccgatctttttgtaatactcttcccaggccgtagtagggtccgtctgtcctgtgggtgggggctgaggggctcaccctgagccggtgggcgcaggggccggtgcggggccggggacggggcccgggggctgctggtagtagtgtgagtagtaggcggccc

SEQ ID NO: 573794 - DNA, 280 bp, Homo sapiens
gaaaaagaagaaaaagaaatatcaaattgtatgtacgccgagttccatcatggatcactgtgaggagctaatccctgaatatctgaacttcattagaggggtggtagaatcggaggcatctccctctaccacatatcccgtgcagatgtagcaacaaagccaacaattttgaaagttcatccaggcaagccatttggtccaaaaatgcttcagacactctttcactgcaactggctggcacgataaagcgaactacaagaaattctatgagcagttctct

SEQ ID NO: 573795 - DNA, 1359 bp, Homo sapiens
tggctagtacgaggctgcgtggtttaattcggccgaggctcgctctgcccgtgtaccagacatggctgacatcctcgtgccgcgctgccccgaatactcgtgtcgcggtgtgccctgggccccgggcgctgctggttgggctttctcgtgtgaatgtgcgaccccctggcctgctctgtgcctgagcctgcaggactgcttgtgaatgctgcgactgtgccctatcatgatcctgctgagtctggagtgacatgcacctgattatcaactgcacaagatttttgaatagagccctctcaatgcactcttgacttcattcacatgtcaatggaacttgtatttacctgtgcagaagcctcttctgatgcccgatgtaccatactggtgacacaaatgctggctgtctgtgcacatgtgtttatgtgacgcctgtacatctatatgaggatgcctgcctgtgcaccaccgacatcatctgacactgcgaacatgaccagccacagcaccatcacagctgtgactatgaactatcacctgcccacaatggcctaccagcacatggggccactcacttcttgctctctcattacccccctgcaacccctggcacgccttcctctgtaaccttcgcctttgccgacccactgtgcccggtgaccttgctgtgccgccgtacctgccccaccacctccgcctaactcttcacggtctctgctcgtggcattcccttgcccaacacccgcagcatgccctcactcctttcttgggccccccaccctgtgtccctcgcccttgcctggaccccatcaactccacttcttccctttggcaacccactgtgcttccagaccaaccgacttcatatcttgcatgcccaccacctggctagtgccgcgtgttgcactgtcactggaccagccatcgcccatctgtggcacttggcgcacctgtcccctccaacccgcttgggcggccctccgactggcaccatcccaccctttggcatcccccccttggcgctccactacacccttaacgcgctggcttaccccgggccaccttcgccgcagcttcctcccgaacttgtccccttctgccgccccctccctccccctggtctgtgccttcctatccctacgccacgggtgcgctactcaacacttgtgtgccactcatggctcctccactgccgtgtccccgctcatgcactttcatacggcgatccccctcactccgccccctgccccagttctccactccagcgcacccccgcgagtcatcctccaccggctccccgcccatcgcttgtgtcgtgtcgcctcccttgatatctgccacgtgcccgtctcgtcacatcta

SEQ ID NO: 573796 - DNA, 849 bp, Homo sapiens
  misc_feature (116)..(117): n is a, c, g, or t
  misc_feature (125)..(125): n is a, c, g, or t
  misc_feature (147)..(147): n is a, c, g, or t
  misc_feature (188)..(189): n is a, c, g, or t
  misc_feature (196)..(196): n is a, c, g, or t
  misc_feature (258)..(259): n is a, c, g, or t
  misc_feature (287)..(287): n is a, c, g, or t
  misc_feature (383)..(383): n is a, c, g, or t
  misc_feature (510)..(510): n is a, c, g, or t
tcggcacgaggagcgtgctgcgcgctggcgctctaggacgtacgacatggctgcgctgagctgctgggcgctgcatgctgtggggccgccgcctgcggcctttgctgcgggcgccnngcgctggnggccgtgccgggaggaaaaccnattctgtgtcctcggaggaccacagcccagttgggccccanngctgaancccagcctggagcttgcaggcaggacgactgttcagcactgcagaccgccgaggacaagganngaaccccgtgcactcgattatcagcatncacagagagcgtgcagggttccacttccaaacatgagttccaggccgagacaaagaagcttttggacattgttgcccggtccctgtactcagaaanaagaggtgtttatacgggagctgatctccaatgccagcgatgccttggaaaaactgcgtcacaaactggtgtctgacggccaagcactgccagaaatggagattcacttgcagaccaatgccgaganaggcaccatcaccatccaggatactggtatcgggatgacacaggacgagctggtgtccaacctgcggacgattgccagatcggggtccaaggccttcctggattctctgcagaagcaggctgaggccagcagcaagatcatcgggcagataggcagtgggtaactactcagctttcatgggtggctgacagagtggaggtctattcccggtcggcaagcccagtggaagcctggggtaccgtgggcatttcagatggtaccggaactgtctcgccactcgcgaagcctcggaagtccgcaacgggaccgcgcttattaatcacctgcacacccgactgc

SEQ ID NO: 573797 - DNA, 392 bp, Homo sapiens
atggttccaaagaagcacccaataatgtaagaacatctcataaagtatccctcaggagtattgcatcaatgacagatgaagagagatttaatatgagaattaagaagtttggtattacaagtaaagaattcagaaaatcaccagtggcttcttgctttggactgcctctgtcaactggaaaaaaaaagaaggcgcctggaacgttttggactctcatgattcacttctgcatcttctctccaggtttgctatgtaaaaaaaagatcccagttccacatatcaaatcattatcatcagttctttaatttttcccactgacattggtttatactgataatgtcactgctgtaatttataaataaaaacagacattcatatctcctataaaaaaa

SEQ ID NO: 573798 - DNA, 888 bp, Homo sapiens
  misc_feature (661)..(661): n is a, c, g, or t
gacagtataatggcaaacagaggaactggggcagcaggcagctcgcagactggagacgctctagggaaagccctagcttcgatctattctcctgaccacacgaacaacagcttttcctccaatccttcaactcctgtgggctcccctccttcactctcagcaggcacagctgtttggtctagaaatggaggacaggcctcgtcatctcccaattatgaaggacccttgcactcactgcaaagccgaatcgaagaccgtttggaaagactggacgatgcgattcatgttctccggaaccacgcagtgggcccgtccacagctgtgcctggtggccatggggacatgcatgggatcatgggaccctcccacaacggagcgatgggtagcctgggctcagggtacggaactagtcttctctcagccaacagacactcgctcatggttggggcccaccgtgaagatggcgtggctctgagaggcagccattctctcctgccaaaccaggttccggtcccacaacttccggtccagtctgcaacttcccctgacttgaacccaccccaagacccttacagagggatgccaccaggcctccagggccagagcgtgtcttctggtagctctgagatcaaatccgacgacgaggggcgatgagaacctngcaagacaccaaaatcttctgagggaccagaaattagatgacgaccaagaaggattccaaatccaatttactaggcataacgatgatgagggaccggaccccgagcagaaaggtgagcgcgagaaagaacggggatgggccaaatggccgggagcccgagggtccaaaatcacgaggcgtagaagtggcgctgggggcccctaaaggagagcccaacaagcggatcc

SEQ ID NO: 573799 - DNA, 487 bp, Homo sapiens
gtttccgcccgatccccgcctccagcccgtgccccagagctccaggtcgccgacccgggccctggggagtgactcagcgcaaggatggtggcgacttgcgggggctggagattcgaactgttcaaggccttgaatgcagggatgagtggggtgaacgcgagccctcggagctggtcccggggctgtgccagagcgtggggccgggctggggtggacgggagaggaccagattcggagaccagggcagggcgggagaagccacggctgcggaggggcgcgctggggcttcgacctggctgcactaacccaggctcctcctcgccccggcctccgggtctgggaaattgaggggacggcaggcccggctgccctggaactgggagacagggagaatcccctgccggggtccctggaaacagtgcccaccccacatcactacattccctcggcccgtgttagtgaataaagtattatatactcaccccaa

SEQ ID NO: 573800 - DNA, 170 bp, Homo sapiens
  misc_feature (31)..(31): n is a, c, g, or t
  misc_feature (58)..(58): n is a, c, g, or t
  misc_feature (60)..(60): n is a, c, g, or t
  misc_feature (100)..(100): n is a, c, g, or t
gcacagtggtttgaatatgaacaccagtagnattctcgttcgttgttagggtaagagngntttgtagaatgatctccaaaagaagcagtcctcaaaaggnatttaccagtgatatcttttaatattcatgtttatttaatgatgtaagatagaattaataaactactaag

SEQ ID NO: 573801 - DNA, 311 bp, Homo sapiens
cttgacggtggtgatgctacaattgtggatatggtatccaggacgcgcccatgtttgattgagagcttctcatactatccacctatctgggtctgcatttgctgtccgtgatatgagacagacagtgtgcggagggtgtcatcaaagcagtggacaagaaggctgctggagctggcaaggtcaccaagtctgcccagaaagctcagaaggctaaatgaatattatccctaatacctgccaccccactcttaatcagtggtggaagaacggtctcagaactgtttgtttcaattggccattcaacgcctccg

SEQ ID NO: 573802 - DNA, 229 bp, Homo sapiens
gttaaaaactttcctgtattctcgatcctcctttcttggctggaagctttcaactgcaaccgtgaacttttttgctctgtgcttcctttataaaagtgctgctgtgtgatatgcagaaagttacggcgtgtagggtagtgagactcacgtttattgtctggcgccttcagctcacaggtgtaggactttgggcaggtatttgtcactagaatttctgtgcccgtgtccc

SEQ ID NO: 573803 - DNA, 628 bp, Homo sapiens
gtacacgtatactgaaaactggagggcctatcaaggctctcatcgctgctcagtacagcgggggctcaggtcctgcgtgctctccgcaccaccccactatccataatatggccaaaccaacctgcacccctagaatttctccgccaaatttcctgcacggcaatggtcgccagcactaatgaggtgtgatgactggattctagatgtgtattgacgcagcaacatgccattgccctactattgtgagcacattgagtgagcttgcgggggaagtaactaccagagagcatgacagcccagagtagtggttgcacgtatgggtagagctatttgcttgatatcctgatatatgattgccccaggctcagtaccttgtggttgttaccccacactatgggcatcatgcgaccacaaaacaaacatggccaactgagaatgcacaaggaggaaccgtagcgggcgacactatcttgtggggccttggcctgcgaccttggcccttaccctttaggataccgagcctgaatgtgcacctatatatcctttgtgtttgtgggggctgaaaaccagaacgtagaccacttattgggcgttgaaacacttcaccacagttatgggacttgccacc

SEQ ID NO: 573804 - DNA, 216 bp, Homo sapiens
cgtcgtcgcgtcgtctgcttgtctcttactttaaccagtgaatagacctgccgtaatgaggcgggcctaacacaggaagacgagacagaccctaatgagctttaatttattaatgcaaactgtacctaacaaacccacagttcctaaactaccatacctgcttaaaaaatttcggttggggcgacctcggagaaggaacccaaactccgagcagca

SEQ ID NO: 573805 - DNA, 899 bp, Homo sapiens
tggtgtacctgctgcgcagccgcgtttgtacagtctcactgattgatgaggttaggcatccagaagtctcgtcgaagagggacccaaatagcgtggacagatacgtagcccagggacgtcgtgtgatagaccaactacaccagagaccgccttgtagtgtacaatcccgataggtctagatccacgttcgtatgcagaggtacatggacatgagctgtaatgaagttattactagaccgtatacgtatggaaatacatcatgcatactaacctcacagtctgtcctgatgggacacacgtatcctgggacacaccaggtccagatccggttgcatgtcactgtcctatttcatgactacatgcgtgcaagggagtggagtgatacttgattatgactgttctccaaggtggacccgtggtattgctttgtgcacaaatgatctccggataattgcgattaaggcactgaaggagtgccataggggtatattgtgtatccactcattgaatgattagcagatgtggcagaatgatcgtcatattggccatgttggacttaatagatataaggcgtattggagggataaaaaactggtgttgggtatctacgcaagcgggtgtgcaggccagaattgcccgaactacatgggtaacgcgccacgggcccggcccacttgaggttcagcttcctttaaagcccgacggtggtccagaacggggcgaaaatggactagacaaccggcctgagaatgcatatcacccgaagggtggtcgcgatacagacagagagcagcaatacatacaacgaaagtgcacagacagacacacaccccacatacagaaacacacgcggggggcgaagcgaacaaaacaaataagaaaagagcactctcgactcc

SEQ ID NO: 573806 - DNA, 345 bp, Homo sapiens
  misc_feature (243)..(243): n is a, c, g, or t
accagaggcagaaaagcctgaaaattcctacaaatccagagcgccctgtccccccctctaaaggaatgcagctccctcgcccagcaacggaacaaagctggacagagaatgacgactttgacgagttgagagatgaaggcttcagatgatcaaacttctctgagctaaaggaagaagtttgaacccattgcaaagcagctaaaaaccttgaaaaaagattagacgaatggctaactagaatanccagtgtagagaagtccttaaatgacctgattgagctgaaaaccacggcacaagaactatgtgacaaatgcacaagcttcagaagcctatttgatcaactga

SEQ ID NO: 573807 - DNA, 298 bp, Homo sapiens
ggcgcctccctgaccctcgtccgagtcgtccctgcgcttccgcacgcgcgcgctcgaggcgttcacgagaagatcgtcgtgtcgttcagaactcatcttcgaccctttgctgtgcagtaaggtgatgacctgcttcctgctgcatgaggattatccatatagattcaaagagaacggcaggaagacccttaactactgtccaagggattcggcttgattggattaacgaaataaaagaactagtggaaggcgttagaaaaaagttctggccttgcatgggttacctggtaatttggac

SEQ ID NO: 573808 - DNA, 145 bp, Homo sapiens
gtaggtcctgcgtccctgctctcatgtgtgtctttcctgacatcacccaaacctcctgtccccatgggctcactagaactgttgcctgtgagggcctcggcaatcctcagccactttcatatccgcggctccccagatcctgtca

SEQ ID NO: 573809 - DNA, 121 bp, Homo sapiens
gaatcacttgcaggtctcactcatgaagatagtttgcaaaatcctaaacaaaatatcagctaacccaatctagcagatataaaaaacttaccatgttgagattatcccagctctgcagtgg

SEQ ID NO: 573810 - DNA, 235 bp, Homo sapiens
  misc_feature (93)..(94): n is a, c, g, or t
  misc_feature (100)..(100): n is a, c, g, or t
  misc_feature (118)..(118): n is a, c, g, or t
  misc_feature (130)..(130): n is a, c, g, or t
  misc_feature (177)..(177): n is a, c, g, or t
  misc_feature (223)..(223): n is a, c, g, or t
gggacatgtttctaaaattctgcttctctgcaaaagcaatgtctttcttggttgatatttgagttttaaaagggtcaaatctttctaattttnngtatcnttaggagggcagcaactnagaggaatccangcagtcttattccaaccattaggaaacttaccacttccttggatttncacagatttaaaaaatctctttccgtgtcccttctcttttaatgtnaaatcaagattt

SEQ ID NO: 573811 - DNA, 430 bp, Homo sapiens
tgatgcgcgtccaatgtccgcgccaggcgtgctggtgtcatcgtcgcatcgcggcactggtttcctcctgtgacgttgcttcatcgtgttcaatctccggcgcgatgttgatgggcctccgtttacaaggtctcaggacatgtaaacatggtaggatagaaacacgcccaggatgccacatgtgacagacaaagggcaggtcacccaaacttgggatgtccagacgatggattcgttgagaagcttaagcttctcaacgggagcgctgccacctttatccccaggcctttcccacaacggcgagcatctactaggcacccacttaaagcccctcaacagacatgtgtccattcggtcctcgaacctaacaaactagtgttcaccccacactgtacagataagcgaacagggaatggacgttgagaagctt

SEQ ID NO: 573812 - DNA, 309 bp, Homo sapiens
  misc_feature (15)..(15): n is a, c, g, or t
  misc_feature (68)..(68): n is a, c, g, or t
  misc_feature (127)..(127): n is a, c, g, or t
  misc_feature (208)..(208): n is a, c, g, or t
  misc_feature (298)..(298): n is a, c, g, or t
cggttctacgagganaagcgcaagctggccagtatggccggctgagccgctatcccggcagccggatnacctgggcggcgtaggccaggcccgcgccgtagcccaggagtagcgccaggctgccggntttggcctcgccgctgctcagcagggtgtacatcgccagcggaatcgaggcggccgacgtgttgccggcatcctgaatatnttgggcaacaacagtttccggcttgagctccaggcccttggtgagtagctcgttgatatcgccgttggcctgatgggggatgaacacctngatgtcgtcga

SEQ ID NO: 573813 - DNA, 104 bp, Homo sapiens
tctccgtggttttttgagaacctctctttcagcctgcatcatcacaatgccaacacatttgatccagaataaagccattattaccctccctgtcccccccccca

SEQ ID NO: 573814 - DNA, 414 bp, Homo sapiens
ataccgggtggtgggttcacgaagcatgcctcagtgttctggggaaaactgttccatgacatgggaagatggcacctttcagtaagcagcactctctggtgctggaacttgagcactagaatgggagaagcaagccaggaactcggaaatgtgtcctttgccttgtttgttgggaagcagaagtcctgttgtccgcctggcattttatgaagggatccaattcagcaaccatgagaaggcagtgcagtttagtgcgcattgggccatccgggtcaatgagacctggctgtggagccttgtcagttcccaccagatcctgtttgcccatttattcattgttcatttcacaagcatttctgacacactttctttgtgccaggtttatgccctcaaggtgatcactgcctagaatgt

SEQ ID NO: 573815 - DNA, 249 bp, Homo sapiens
agcggcagttgcagaagactgctggtggattttatccggtactgggtttgccctcagttctaaagctgcccctagcgggcacttatatgcagccaatatgaatcgctgttaacaaatagagaaaccaaggccaggctaacatggtgtcctcgtaatagaatgggtgcgaggatgtttcccgtactggatcaagagaatattgattctcttgactcaggatccgtgttctcaaacctcacgatagactgc

SEQ ID NO: 573816 - DNA, 379 bp, Homo sapiens
  misc_feature (29)..(29): n is a, c, g, or t
gtcggcttggtctacacccccaggatganccaaggacagcttggaggttagaagcaagatgaagtctactgtcggatttctcttactgtcttaattttgcaagagcagtttcatatttaagggtttcaacatgtgctttttaaataagtaaattactaaaacatctttgtataaatagttattgcctttatcataattcaagctgcaacttaatgtcaccagaagattaaacagtaaatatacagaggctcatgaactacaaattgtaaaacagctctcactgtaaattaaaatacaaataaataatttctacagatattcgtttataaattgaagaaactgctcccataattatagagttactttaaggacatacggc

SEQ ID NO: 573817 - DNA, 673 bp, Homo sapiens
  misc_feature (6)..(6): n is a, c, g, or t
  misc_feature (66)..(67): n is a, c, g, or t
  misc_feature (71)..(71): n is a, c, g, or t
  misc_feature (74)..(74): n is a, c, g, or t
  misc_feature (85)..(85): n is a, c, g, or t
  misc_feature (95)..(95): n is a, c, g, or t
  misc_feature (108)..(108): n is a, c, g, or t
  misc_feature (111)..(111): n is a, c, g, or t
  misc_feature (136)..(136): n is a, c, g, or t
  misc_feature (147)..(147): n is a, c, g, or t
  misc_feature (149)..(149): n is a, c, g, or t
  misc_feature (180)..(180): n is a, c, g, or t
  misc_feature (186)..(186): n is a, c, g, or t
  misc_feature (194)..(194): n is a, c, g, or t
  misc_feature (226)..(226): n is a, c, g, or t
  misc_feature (267)..(267): n is a, c, g, or t
  misc_feature (278)..(278): n is a, c, g, or t
  misc_feature (281)..(281): n is a, c, g, or t
  misc_feature (300)..(300): n is a, c, g, or t
  misc_feature (313)..(314): n is a, c, g, or t
  misc_feature (323)..(323): n is a, c, g, or t
  misc_feature (330)..(330): n is a, c, g, or t
  misc_feature (350)..(350): n is a, c, g, or t
  misc_feature (373)..(373): n is a, c, g, or t
  misc_feature (379)..(379): n is a, c, g, or t
  misc_feature (409)..(410): n is a, c, g, or t
  misc_feature (458)..(458): n is a, c, g, or t
  misc_feature (495)..(495): n is a, c, g, or t
  misc_feature (498)..(498): n is a, c, g, or t
  misc_feature (518)..(518): n is a, c, g, or t
  misc_feature (520)..(520): n is a, c, g, or t
  misc_feature (532)..(533): n is a, c, g, or t
  misc_feature (536)..(536): n is a, c, g, or t
  misc_feature (550)..(550): n is a, c, g, or t
  misc_feature (562)..(563): n is a, c, g, or t
  misc_feature (572)..(572): n is a, c, g, or t
  misc_feature (590)..(590): n is a, c, g, or t
  misc_feature (598)..(598): n is a, c, g, or t
  misc_feature (612)..(612): n is a, c, g, or t
  misc_feature (638)..(638): n is a, c, g, or t
ggtggnggaggtatgggggcgggtggcaccgctcactcgagtttcacagaacatggcagccgcgcnngggnggngtggcgggggntcgtcctgtncagcttcatttcnagntaacagttacagtagagttctagtncgtgagctggnanggtatgggtctccgaggacaaaagtgctagntggccnggcctcgnggcccagacccctgtctttcagggcggccttnggtcaccctggcggctaggtcacaggccggggccccggttngcccgacaagnganagtgggaggggcgggccanaaggtcctttggnntatgcaccncggccgnggccgtgcaacaggggccantgccccctgctgggccctgggcnttcagnacatcatggcacgtgaagatgaggtcccannggggtggggtgtagagcaggtgcatacgggttggagttgcagccccgnccctcaatcccatgggtgtcgggctttcgccaaaccnttnacgttgcccaccctgaggcncnttcaccagccanncangggcagaggatatnggctaagggtannctgggtcantgcggccggacgtcttgncacctgtnacagggcaatgaanttggacaagccttcagagaaacaganccggggcttgccagccctagcagtgtgagtccggc

SEQ ID NO: 573818 - DNA, 1857 bp, Homo sapiens
taaaaaccctcatcaaaaaagggagatcatacaaaaatagtcaaacccctatctacaaaaggccagtatcaggggggcggcttcgaagcccaaaggtgagtgtttgggatgtgtataaaggtgaaacctatttacggtggggcggatgtgaagcacgaataggtgaggaaagttgtgagcccaattaatgtgagcggtgaagtctccggtggaagcccgtggtggtctaccaaaaagagtggtgtgccgaccccgtgtcagaagtcgccgtgtgcggaacagtagtgtgtgtgacagcaggggagacactctctgacagagaatcactctctgtgagaggtcttgtgtgtaagagagaggtgttcaaaacactaagagagacacccccgagtataaacacagtgtgggtcaattaaagccgagagttgcttgtgcaaaatatatatgtgtgggggggtcatcctgcgagagtgtgggatttctccataatatatagacaccccatatgtgtgggtagaagggcccctccaccgtgggtgcacggtgtggagtatacacctcgctgtgaatagtgagcagaggagatataaaatacgcggggaaagtgtgtgtatataaaaggaggacaggggtgggagacccctctacagtaggggagcggagaaaaatactacaaacgcggggggagaggagtagatagttgcccctgtagtgtaggtgggggcgcccaaagtggtgcgccatcccccatacaaagtgggcggggagggcgaccaaagggggggccaatacagggcgagtgagagcgcgggggacaaacaaagggggcgctcaaagaacaaaaaaaaatccccgggtgggcggcaagaaagcaacacaaacaaaaatctactccggagagagggggagaaaacactcaaacacgctgacgcggggaatataaactaccccggcggaataaactacgaaaggagggggcgccccttcaactcgtgggggggcacccacgcggtgcgcgggcgttgtctcgctctgcgtgggggagccccctggaggagggaacacagtgacgagcgcaataaaacacacacgggggacgttaacaaaacaaacgactccggcgcggccaccaacaaacacaatagtgggggggcacacaataaagtgggcgggcacgaccagcggggagtgtgcacgcagagcgacacaaaacaaacatagaagagcgaccccccaaagagaaattaatgagtaaacgaggagcaacgcccggataaaagagtgggacgaacgcgtgggggagcaacagcgtggtgataatatactaccacaccacgcggtgcgcactaaacgtgcgcaccagggaagcagaagagacacaaatacaagcaagacagagagcggggtccaggaacaacgaggcggggctccccccctggtataaaaaaaggagagaggacacacaaagggaaggacacgggaggaggaaataatacaccccaccccaaaatgtggccacaagcgccgctgagaaaattgaagaagccgcaacgacagagcgaaaacaaacacaacagacgagggccatgagtggaaaaaaaagacagcgggacccacaagggggggccacaccaccccccgcgttgtgaagaaacgaaatggtctggcgcccctatcggcacacccggtcgataaatgcgcccgagtgacggaccaaaaagagacgaggaagaccacactaaccaagtaggtcaagacaaaatggaaggaacagcacacccgcgagaggctgatgagggccccaccaactgacgagcaacgcgacacatgaagatagacagcaccacgcggaaggtc

SEQ ID NO: 573819 - DNA, 827 bp, Homo sapiens
ggactgctaaaggtctcccctccgcagctggcattgctctacacagtctgtgagtctcagtccttgcacaactctgcctcttcccccgctgactgtgcctctgcagagatgtgggcagctggtcaggatgagccacttcggtgctcatgcatcagacaacgcatgtcccacgactcagacctgggcgaacgcaaacacgggtgcttggacagtgcccagcgagatgccttgtcggacacctgatcctgagatcgttggtgatgttcgcttgcagagtggcagacagggacatgtgcacgtgtctgttgcgcctggaaggctcattgcctacagagaaacttctgcagcccgacgctgcgactggaggccctggggatcctgtctgaacaacaagtactcgcgagggttatcctggcaagagatacctatgggggagcagaggtggatgcgagtgacaacaattagagcactaagagcgatggccagataggcccagtcgaaccttttatagcaagcccatattgaaccctgagatcgcatccacaagatgagagaactgtcacgctgtccccagcctcttaactcccatggagtccacccacgccaaacctagacacacgtctatcacaactagatcccattatcctttatacaacacatcaacataaacctcgatcaatccaaatacaaaacaagaaacccctacacccagaataggtcaaacaacaattcataaaacaacaagaataccatcgtacccaacagtacacaaactaaatatccaaacacacaattccatactataaatacgaagtcaaatagcccaa

SEQ ID NO: 573820 - DNA, 166 bp, Homo sapiens
gacctatgtcttccaaagtgctgggattacaagcatgagctcaccttgcacagccaaatcaagtcacttttaaaatacaaatttattatatgtctaaggacattatcgataaagtgaaaacacaacccacagaatgggagaatatatttgcataccatgtatctga

SEQ ID NO: 573821 - DNA, 201 bp, Homo sapiens
  misc_feature (132)..(132): n is a, c, g, or t
tgaacgcttcatcacgagttacaaggctttggaatctttgccctgataatattgaagcctgtaaatcagagacaagggaacacatgtccactttggaggaattctcttgaagaagcccattgtaacaggcangacctgtgaaaatattggtggaaacatgaatatataggctcgtgtaacacattccaaattatggttggc

SEQ ID NO: 573822 - DNA, 804 bp, Homo sapiens
gggcggatccgcagcccccacgcccgcagctcccgctccagcccaggcccggctccagccccggaggcatgtcccggccccagccgcagcccccgtcccggctgccgggtgcccgctcggactcgtggcctccgggccgtcctcgtgactcctgtgcccagaagccggctcgcagcgcctgctgtattctcactgacctggtgtcgggccgttacccgtggctccgtgcacttcgggctggtgcgcctcatccactggcggaggactcggacctcgtgagtggcgacggatgtcgatgtggccgcgggggatactctggggttgctccgaagtgccggtggggcgcaggtgcccaacagaggggatgggcctgggccagccccccttgtcaggccgaggattacagattgcgagcttccaagatgagtaccccgtgagaggcgtcaacgcaagcattgttgacagcgagaaccaagctgaaacctagaaggacctgtacttgtgagtgcccctgaagaatgtggaccggaacaatgctgatccacctgacagtcacgtgtggcacggtgatcgaccgtcaaccatcgactgtgccgtcaaaactcatcggaaaccaattgcaataatctatcccgtcacagcaaggacctgcagcacatctggcccttcatgtatggggactacattgcctatgactgctgactgcggaaggtcatacacttgaaagaacaaatcatctgaagtaatcaaacggagcaagtgctcatgaacacggagatgcgccagctctaaaagttgccgaat

SEQ ID NO: 573823 - DNA, 1160 bp, Homo sapiens
ccccctctggggtgtatttcccaccggggcgatttcaacgggagccaccctttgtccccagcggggagggtgttggggtgttctttcccccgtggtgttgtcctgtaagatggtgtggggccagccccgcgggagtgttagtacacaacagggagtgttaccgccgccggcggacatttctcgacagatgtcctgccgaagtagtctgtggggcccacataactcctctcttcgtaaaaaggagttgggagttgtgcgacacacaaagggctgcggggaaagagtattttggtgccgcccaaaagagaggcctgtcccaacaataggcgctcacccccgaaatatggtgggcgcgcccccccacatgtaactgcccgggtgtacccccattatagtggcgcacccccaatacctcttcgggggaggaaaacctttacccctcaagaagacgcagagaggtaaaggggggcacattcgcacgtgggtggtcccttgagagagaaaatgtgaaacggagagtttttcaaccgtcccaggccatcggatacttgccacaggagaactgagattcccccctattgttgagaatggccttgtgcggacccacattcggtgccactgtgagtgccactctctcaagagaaagtcacgagaagaaaggcccaacactgagcgggggcaagcccacaatagtgacaccgcacggctcgctcacatgaagaggcgtgtcacccccctgagaagaaaacacacgcgcctcgccaagagacacactgtgagggtgtcacccgcatatgtcttcgagaacattgcctgccatccgctattgtgaccacggctatctacacttattctagttctcgctgaagattgtccaagaagcctggcgcccaccacgcacgggaaaccacaggcaccccattgtgattccccctgacccccactttgactgcggtatgctcgacgaagggggaacacgtgccacatgtaccacacaccacagatgttctctgttctcctcgcactgggcaataagggagcccactcacgggagtgactagaatgaaccactgtaataaagcatttttggggagtggcttaggactcttcctcagttttctttccccgggcttgaaccccccctctgaggtttttcctga

SEQ ID NO: 573824 - DNA, 1060 bp, Homo sapiens
  misc_feature (70)..(70): n is a, c, g, or t
  misc_feature (72)..(73): n is a, c, g, or t
  misc_feature (84)..(84): n is a, c, g, or t
  misc_feature (95)..(95): n is a, c, g, or t
  misc_feature (552)..(552): n is a, c, g, or t
gattatacaatgacctattaaatattatatgattaagtagattatgtaaaaagtgctgtgggacactgtnannaatcatttagnactatgtgagnaaatcagtcaaggtttaagagaggagttaccagttacagataacaatgtatttttttccactgacctaagcctttcaagcaaaatcagaaaactgtaattttcactaaaataaatcatcaatggaatgacctagtttaagaccctttgggaagacagatagagtcctagaaatctctactacatcaaaacaaatcagagggataggcaaacatgccaatataactgaataaagagcccagaaagaaaccccttcaaacatggcatctttatatatgacaatcaatggcaaagagtgcatatttcagtaattgatactagaacaattactacctatatggagaaaaattagattcctacctcagatgtaggaaagaagtccaagttttatgaagccaaaaacttataatttggggattcctaaggaaattccaaaataaattaactttggaaaatttngtaaaaacacaaccatgtgaacattacttggggcttctcccagagccttgaaaaagagcttatacaagtgatggtagagtaaatctacctctgttcacaacgaacacaaaaataaatcaaaaatggttacacaattcaatatttcttaattcttagagaaatcatggacacaaatgtgatgcctcagagaggaagggaatcttacataggtaaggccccaagacataaagggccaactttcatggaaaggccttggaggtttttcattaaattaacacgcttgttctccagaaactgtcaattacggcctgtttaatacaagccacctggtgcgcgtttccacaagttcctccaagaaagacccttttatactacataggacagcgcgaaccccttctaaggaccacgcgtttcacacgtcgctctcgaacataaagcactctccacgaattttgtcgagcaaatcgcacacaacggcacaaataacggcgcagggcgcagaaacagg

SEQ ID NO: 573825 - DNA, 105 bp, Homo sapiens
gctgctgatctattgttggcatgacaggtacatcgacatgatcccgttgtgtgatgttctgtaagtaaagtccaaacaaaaaaaaaaaattgaagaaaagcagca

SEQ ID NO: 573826 - DNA, 713 bp, Homo sapiens
  misc_feature (89)..(89): n is a, c, g, or t
  misc_feature (134)..(134): n is a, c, g, or t
  misc_feature (150)..(150): n is a, c, g, or t
  misc_feature (179)..(179): n is a, c, g, or t
  misc_feature (211)..(211): n is a, c, g, or t
  misc_feature (218)..(218): n is a, c, g, or t
  misc_feature (225)..(225): n is a, c, g, or t
  misc_feature (307)..(307): n is a, c, g, or t
  misc_feature (341)..(341): n is a, c, g, or t
  misc_feature (521)..(521): n is a, c, g, or t
  misc_feature (567)..(567): n is a, c, g, or t
  misc_feature (583)..(583): n is a, c, g, or t
  misc_feature (622)..(622): n is a, c, g, or t
  misc_feature (625)..(625): n is a, c, g, or t
  misc_feature (679)..(679): n is a, c, g, or t
ggaggtattaacagacaagggaacagttagggatcccttctttcccctatacatacacagacatacaaacacacgcacccgagttaatnacagggaccatcaggcgacaaattgaagggcagagggaggcagcnccctccgagatttggnccggacccaagggtgggctgaaacctggnccaggggcagccgtcccgaggggttattcctnaccagtntggagangaggtcctgggctcccgtgggcacagaagcggggaactttaggtccaccttgacgatgcggcgataggcctcgttgtgtgangcactttcaaagggtgggttccccaccagcagcncatagcaaagcacttcaatgcaccacagacccaccttctcattgtgcatgcgccccttaatcatctctgggggcaggtagtccagggtgccacaaattgtcttcctcctcagggagggcgcatgcccagaccagccgaagtcagccatcttcagctctcccttgagccctaagagcagantttctggctttatgttttttttaattaccttcttcccatggcagtncattagagcatcttcnaactcctccatgatcgtggcttttcgctgctcgtcaaangtncagctcttctgcagccccttgtagagctccccgcggggggcatactctagaatnaagttgatcctcctccggtcataaaaatagttgt

SEQ ID NO: 573827 - DNA, 299 bp, Homo sapiens
  misc_feature (37)..(37): n is a, c, g, or t
tatttttttgggggggcgcccctgttcaccccagagngcctttttttcttttttcccccaaaaaataggggggccctttttttgtttttgggttttttttttgggtttttcagccccctaaccccaaattttttttttttttttttgggggggtttttttttcctttttttttttttcctttttttaaacctttttttttttttaaaaaattttttttttttttttggccctttttttttttccccctttttttttttttacccccccgcttaaaaattaaacctttaattttttttta

SEQ ID NO: 573828 - DNA, 354 bp, Homo sapiens
agtcaccgcgtactttagccaactgatggacaagctatcgagcgcgaagatagaaatgccgctcgaaggatacacatcgtccagtcgggtttcgacgaaccccaaaaaaaacccaccgtaaggtgttttttaactccaggcgtcaattcagttacgcaacggaagaccgtggtttgcccgggctgttgtcgtagaaaagtggtcacttccacggcgacggttcatggcgcggccgtagagaacgctggcccgttatcggccacccggggggaatttcccctgtggccattaaacccccttgggttcaacggatacgggcgagaataatccagggcctttgttagagccccagtt

SEQ ID NO: 573829 - DNA, 916 bp, Homo sapiens
  misc_feature (50)..(50): n is a, c, g, or t
ttttttgtgttattttttcgttgtggttgatctgagagcgaacccctagnatactgaagactaggcctgtgcttgtatcaacattcgtgctgttaatatagcatattaatcggaggcattatgaacgtcagaacagatgctggctataaaggatgaaccataggccaagattaaacgctgacgagcacatgttgctgcataggaaaggcaatatctctaggtggaaaaaactcgtctacatcgacctccgtttgtacattccatcacacccagcaatagctgtacattgtagtcatccaccattatagtttgagtgttttttcacgactgaacaccagctgctatcaagcaagcttatatcagtggaattatatgaattacgaaatgtggtgataatgatttcatatatagtttggggattagagaaaaggtcatacgatgtaccacaagagactcttagaccttataaggaaccttgggtcccattgttacaaagttaaaacttttaccccaacctgaatccattttccagtctcttttcaagctgtaaaaaagataaaaaccacgtgtgattcttaggacatcagatgcttcctactgaaaagggttgctgtagcaataacgaaccctcctttaagaaacaaagtgacccttaatacttatttttgatattacaactgagatggtgtccttactaagtgatacttgaaggaacaaagtgctttctatctctagaaacataaagtttagcaactgggcacagccccgacttaaatggctgaacctttggcttcatacacaagttctagaccttcaactcaaaatgatatgtatacttattattacagagtatacctattatatcaaatgtcttataaagcttgttaactagtctactattcgcatttatagggat

SEQ ID NO: 573830 - DNA, 921 bp, Homo sapiens
  misc_feature (333)..(333): n is a, c, g, or t
  misc_feature (405)..(405): n is a, c, g, or t
atagcattgacaagtgtggatcgcggggaggcgcgccagaggagtccctatagcgagctacgtggagccccataatggtccttcttcagcgcgtgcccaggtcactctctcagtacatctggtaggtgtgggtctccactgcgtaatacctgattcaatttgtaaccgacctgcctacctcctcgattctcatggagagcatgaggagtgaagcgtcccaaagaagcgtcgcatttggtagtgtagctgctctgggctcgcgtgaactcacgcttcttggatcgtctgcgttcgtaccaaatgtcaacacctctacttgatccatgcctcttnctcagacgctgcttggaactcttctcacatccaagaaatcttcttctagaagtcgacatgaatagctaatcntagctaggtccgaaatgtccctccaacacaaaataccaaagttaggcgtggagcctttctggccttcttccttgtcgagatctctgtatagtggtcataaaatatgaataattggagctatgtcaacgatctaggattattgctcaatgcttcatgctcagagggagacttgaaggggatgaagaaggctaagagattggttgactcagagagggttgaagttgaaaatggagaaagtaggtcactacggactatgtgacaagtaatggaagaattgacacactatgaggacggtttcgctatagaaaaaggcaggccgtgtagaattaccagtaatgccggaataatgaggtcagaactgatttggagtgaagagaagttgacactgagatggctgtacctataacggaactgaagggaggcgggggcgtgagaaatatcaggtgagacagtttgactaggaatagtgcgtccaaaggaaaggggtggagggagattgaggtaatcaagaatacg

SEQ ID NO: 573831 - DNA, 423 bp, Homo sapiens
  misc_feature (60)..(61): n is a, c, g, or t
  misc_feature (313)..(313): n is a, c, g, or t
  misc_feature (331)..(332): n is a, c, g, or t
  misc_feature (334)..(334): n is a, c, g, or t
  misc_feature (336)..(336): n is a, c, g, or t
  misc_feature (345)..(345): n is a, c, g, or t
  misc_feature (352)..(352): n is a, c, g, or t
  misc_feature (355)..(355): n is a, c, g, or t
  misc_feature (357)..(357): n is a, c, g, or t
  misc_feature (368)..(368): n is a, c, g, or t
  misc_feature (382)..(382): n is a, c, g, or t
  misc_feature (389)..(389): n is a, c, g, or t
  misc_feature (407)..(407): n is a, c, g, or t
tgggctcctccccccccgtgttttgggggcccccggaggagggcccttctcccccccccnntttttttgggggaatgggggtcccccccaggatggggggctttttgtttccccccttttgaccccgggtttttgttccccgccccttggggccagggtttttctccaaaaaaaaagttttttgtttcccctaaaaaccccttcccccggggtttttttttgctgttccccctggggcccccccccccccttttttttttgttcccggggggccccccttggggggccccccccccccggtttccccttgggntttttttcgggctttttnnangnaaaaccccnttggggnaantnggaaagggccnaaaaaatttttttnttttccntggcccccggggggggtngggggtttttccaaga

SEQ ID NO: 573832 - DNA, 513 bp, Homo sapiens
  misc_feature (29)..(29): n is a, c, g, or t
  misc_feature (217)..(217): n is a, c, g, or t
  misc_feature (284)..(284): n is a, c, g, or t
  misc_feature (292)..(292): n is a, c, g, or t
  misc_feature (305)..(305): n is a, c, g, or t
  misc_feature (326)..(327): n is a, c, g, or t
  misc_feature (337)..(337): n is a, c, g, or t
  misc_feature (348)..(348): n is a, c, g, or t
  misc_feature (373)..(375): n is a, c, g, or t
  misc_feature (388)..(388): n is a, c, g, or t
  misc_feature (391)..(391): n is a, c, g, or t
  misc_feature (437)..(437): n is a, c, g, or t
tatcgccaccacggaaaaatcgcccgccnctataaatttcgcttaattagagtaactcccaagagagtaagaatggctgaaatttaccataaagtaataatttccataatctttagaattctctcccaaccactgtgaaataggaagaaggaagttcttgccccgaatcttaggaaatcccccctcgttcggttataatccctgcctcctcgaatcnttgaggagtcttttaaattagatttttgttttgttgtctccccagttaatattatatttagatatcngagagtcnggccaaaaggaanacttttatctctagggaaaannacatttaganaaatgtattcngtgtatctaatactgaaatgcgggnnnaaatttaatgttnaanaaaaactatagacattgacatggaaaagagatttaatgttttgaanaaaaactttatattaactgagtaacatcctcctgatgagaagtactatattaaatataaacccattatgttataaa

SEQ ID NO: 573833 - DNA, 386 bp, Homo sapiens
aaatagttgggtgcagtggctatgcggtggcactataggaggctgaggcgggcagatcacctgaggtcaggagttggagaccagcctgggcaacatagacccctatctctacaaaaaatttgaaatatgaaaaattagccaggtgtagtggtgtgcgcctgtggtaccagctactcaagaggcgaaggcagggaagattgcttgagcccaggagtttgaggctatagtgagctgtgatcatgccactgcactccagcctgggcaatagtgtgagactctgtctcaaaagaaagaacatggccaggcgtggtggctcacacctgtaatcccagcactttgggaggcccagggcagtcaggtgggatcacctgaagtcagggatttaa

SEQ ID NO: 573834 - DNA, 191 bp, Homo sapiens
  misc_feature (89)..(89): n is a, c, g, or t
  misc_feature (152)..(152): n is a, c, g, or t
attgttgtttaatttgccgttccctaatgacatatgatgttcaggatctacttatatttatcacctatctgtatatcttgttttgtgangtgtctgttcagattttttgtccttttcttttttcttcttttttccccctgcccttttgtctncatttttaaaactttggttgttttcttattgttgagttt

SEQ ID NO: 573835 - DNA, 683 bp, Homo sapiens
  misc_feature (26)..(26): n is a, c, g, or t
tgcaggaattcggcacgagcgagttntttttttttactttagccttctttctatgaaaaccagccccgagcggacagagttccccacagacttacaagagtatgtggtgtgcaaacagaccttatggtaacaggtaccaagtgagacacccaaggactgtgcaagtattctagctcgctaaggagagttttttatggtgtggccacaaagtgtgttgaatctgaagtcagtggcaaccatattatacctgtccgtcaatttcgtgctgtgccagcgtttgtggggcaagacttgatccaaatattattcaccaaatttggttgtgtgttttaaaaaataacttccaattatgtttttttttccctgtgtttttagtatgccagacccgcgaaatgtgcttcactttccttaaggagcagatcggtggaaattgttttccgactgtaaaagtaaagattatgtttctttctcgtgagggcttttacgaggaaaaaggtctatcagggataagaaacccgggagattttcactgtccttgggtgcaatgtgggacagggtgtttttactaataggcccggcgatcttaatcctgttcgttgggaccaaatttgaacgttttaagggggttggcctttacccacattgcttgaaaaccccttctttgaggtgcctggatggggtgg

SEQ ID NO: 573836 - DNA, 442 bp, Homo sapiens
aaactcctttcttaccgtaggtttctcccctcccgtccgcccgggctgaagcgacacggctgcgggcgggctagtaaaccatggggccgattgagcgtgaactcctagtagaacacgtatgtgccaaaaagcaggttgtaacagaccgcaagcctagataatctccgactcactaagtagggaccatctctcgatacagagaaagacttgggaacgcagtaagctaggccccacgagggaaacatctagagcggccgcctctgtatgagaaacaaaaaaaggtaattgtaaaaagacgacacatagtaacacaaatagtaataaaaaataagataacaacagaaaaaaacacacacaccaaaacacccacagaagagaacaaaaacaggacaaaaacaaaaagagaagaaaaaagaggccaaacaaagtgaaacaggagact

SEQ ID NO: 573837 - DNA, 255 bp, Homo sapiens
gtttccctttagcaggagagacagtagagtatgggggcagcggaggagggcaaggagtgatgttcgggtagaagtggctgagctgggcacaggaggagtgccaggtcagtaccattgctcagtgacagacctcaaacttggcagtgctgaaggtacacacgggtgtgtgtgaggcaggctaagcgggatggctgccgcaatggagctgtgggagggccgggctcagggctagccctctccgctctaactgatgat

SEQ ID NO: 573838 - DNA, 145 bp, Homo sapiens
acccatatccaccttaataaccagacaaccttagtaaaaccatttacccaattaaatgttaggctaagaattgaaactggcgattagttatgcaccgcaaggaaagtggaaatttataccagtatataagcaggaccacccttaa

SEQ ID NO: 573839 - DNA, 2113 bp, Homo sapiens
  misc_feature (327)..(327): n is a, c, g, or t
  misc_feature (2113)..(2113): n is a, c, g, or t
gccgattcctaccatccttggatcgccgacgatcccttggactggcgctcagaaaaatggctacaaaacttcctagcacatgacgaagatctggattcgaccaagcttcaacactaatgaccgcaccgccacacacaacggacgactctcctaccgcacgacaagactgacaccagcgagaccactgcatgccgccacgcgcatgcccactccacagacccaacgcgcaccgccacaccggcgaccggcacaagcacgctgcactacacatacccgggctgcaccaactctagccacgaccgcacgccccaccaccacgcagccaanagccaacatacagctacgcacacacttcccaccttgcgcccactgcgccaatacgccactccacgccgcccacacccgagagcgacccctcacaacgacgcagccacacacaaggccgcgcacaagaccccacgcgacggcctcgcaaccccacccatccaggagcccagcactcaccccggcgcgcaatcatcggccccaaagacacacacccggaggacaacggactgagcaacgcaaaacaaccccaacagaaaagacatcccttagcgcagacatagcggacgagaactggggaccatacgccacgcccgcaacgcgccccctaggccacactaggccaaaggcgacccccccaagtccgagacccccccgaacagacgccccataggggccaacaccagacacacccacaggcggccccaataggcaaaaaaccaggactacgccacacttagggcgcaaagccaacaaccaaacagccccatacccaggacccccacctgacagccacaccaaaaccaacagggcgcatcacaccacaacaacgggagcgaaaccaaccaaacaccaaagcaaaccccccccacaagagacccaaaccaggcctaacacttcccatccacccccaaaaatacgacccagcaccacccacaaacgggccatggagaaaaaagaaccccacccccaccacaagcaaccagccaccgaccaccccacacaaccagcccccacacacgcgcaccccgacaccagaccacacaagagatcgaacaacacaacacgaggcacaccacatgcacaaacccgcacacccacacgccacgctttgcgcaaccctccacagccccaacgatcccggcaaaacccacccgctggacacccacaagacgcaacacaacagaaacggaacaccccaaccactcgacacgcggggcacagccccgcacaacgcggcgaaaacaacacacatcgccaacaggcccccggcggccccaaataccacgcccacttggcacccccgaggccacccacagcggacacacccgcaggccaattaacccgcagcccaagcgaccaccacccccgacccgcgtggcaaccacacacacacagacacaaaccggccgccacaacaccggcaaaaaacgcccgcagcaggaccaacccaccatggggacatagcagccgacaacaaaacacccaatcaccgattaccgccacagacttcaccacgatggacccgaagtggcaaaccacaccgcatataacaaaagacaccaccaataggcacgagacaaaaacatggcacactcgggaaaagaaaagaccaggagaacaaacaaaaaactagacatcaaccacgcaacaacacacaataacaagagcaaaagaaaaacacaaccatgaccgcaaggcgtcccacgccagaccaaccaagcatacccagcacccaacagcaaacagagatgaaaaccaccaagcgaacaacacaggtgcagaacaccaaaagaacacaaaacaacagaaacacaacaaccagcagagacagcaccaccgagcacaataaccacccgcggaccaggaaggccacaccatatcaaccacgagacaataaactaccaagacacgaaaaaagacgagacgacaaacgcaagcagcaaagatctaccaacagcgaagagaacagaaacatggagccagaggccaaaagaagaggagaacacgaccacacgaccaaaaagaaaaaagaaagagcaagcaaaacacagaatacaacacaatn

SEQ ID NO: 573840 - DNA, 142 bp, Homo sapiens
tcaatcggctcggcccatgttttacatgagtgtggtcatatgaaagatgaatgactgatgtagtacatgtatgagacaggagcgggcgggcggagcagagagagagagagagaagactagattacctaataaaactgataat

SEQ ID NO: 573841 - DNA, 316 bp, Homo sapiens
ttttcaggatctatcaaggtctagccagcaagtagtctacatttagaaactgagggtagaagtgtctgtattttgtaagtagagaaacaatgcatctacagaatactaagtcacatgtctttaacaaggcaatttacattattaggtgtcagtttttaattaatctttatgttccttaggatcctagcaatacactcagttgactgtatctcaagttcaaactgcactcacctggctataaaggtaaacatcacaatggaattgggcctgtctgactagggaaaaagatcacttcaatattgcacatttcctttct

SEQ ID NO: 573842 - DNA, 367 bp, Homo sapiens
  misc_feature (6)..(6): n is a, c, g, or t
  misc_feature (64)..(64): n is a, c, g, or t
  misc_feature (75)..(75): n is a, c, g, or t
  misc_feature (115)..(115): n is a, c, g, or t
  misc_feature (139)..(139): n is a, c, g, or t
  misc_feature (199)..(199): n is a, c, g, or t
  misc_feature (268)..(269): n is a, c, g, or t
  misc_feature (275)..(275): n is a, c, g, or t
ttttgnaggtggagtcctcaacgctgttgccccagggctggagtgcagtgttgagatcttggcncaatgcaatcnccacctcacaggtagctgggactacaggcacctgccaacnacgcctggctaatttttgtattcntagtagagatggggtttcaccatattggtcaggctggtcttgaactcctgaccttgtganccgcccgcctcggcctcccaaagtgttgggattatagtcgtgagccaccgtgcccgtcctagagtcagnntttaantcttcaaatattcaagaccggtttattagctatttgaggttgtgaacgcttctccttccttacaagtgcaaagcctaactcattgaatgtgt

SEQ ID NO: 573843 - DNA, 178 bp, Homo sapiens
agtagtccacgtcgcctggcttctccggcttctcccttaggtccccggtggtccatcacggcccttgcatagccatccaggcgtcggcttcccttctgtcctggtgatcctttttcaccactcaagccacggtcaagccacatagccacggtcaagccacaagccacggtcaacccag

SEQ ID NO: 573844 - DNA, 169 bp, Homo sapiens
tcatcaaggaatagctattagcggctggtggctcacacctgtagtcccagctacttgggaggctgaggcaagaggattcttgggcccgggaggtaggaggatgtagatagtactagataaacgttcacacagtctaaaattaccctttatactagctgaataatctcaa

SEQ ID NO: 573845 - DNA, 256 bp, Homo sapiens
gtccccaggggtcactttccatccacgggaaaaacaaatgccccttttccatttatcattgggatttcctcccaggaggcctttcaggttgggtaaagcaggggcctccagtggtcaggccaaaagcaaggaaaacctggctgcccccctgtgggtgaaaactcaaaacatttggaactacccttttccaattaggttcccttttggttaaaaacaaagctaattaaatcatcctgccccccgagggtccaaacca

SEQ ID NO: 573846 - DNA, 528 bp, Homo sapiens
tacttttccacggggacgaggcgggagttggccaggcctgcttgagcggcccaactccaaggggaatctgtctcccttctggctcacccatcagcggagagctactttcattcaataaaaccttgcactcattctccaagcccacatgtgatcccattcttccggtacaccaagacaagaacctgggatacattaatccctctgtccttgtgataaggaagggggtctaagtgagctaaaacaagctgtctacagacggctaagttactagagcacactgtaacacatgcccgcgggagcctgtaggagctgtaaaacattcacccctagatgctgacatggggtcggagctccacagcctgcccgtctgtatgctctcctagaggtctgagcagcagcggggcactgaagaagcgagtcacacccccatcacatgccctgcgagggggaccagggaacctttccggtttgaagcccatgtgacttccatttataagactctctgccatgtggagaatggtctggaat

SEQ ID NO: 573847 - DNA, 363 bp, Homo sapiens
tataactgcctcacccgatctcacgcacagtgcgagagttgaaggtaagccccggatgttgccagattacggtggacaaataaaaaaaaaaaaaaaaagcattgggccgctccaacagcaactcacaaatgcatgaaatgttttaacctctagacagactgccagaatttctctcttctaattcctacttgtagtgataacatttttctttttgtgatttttttttttaaataatagtgtagtaccttgaaacaactgcagttctaactcattgtcaccatttctgtttgacaagttccacttcctttgcaattattgtatttagttgtgcactagtgtcaataaaattgacatttgtgatgc

SEQ ID NO: 573848 - DNA, 107 bp, Homo sapiens
agttcgatggagactctcaggatccttcatccgcaaggcatctgatgtcagtgaagttaggatggtcctgggagagaagggatagatcgtcaagattatcagctaaa

SEQ ID NO: 573849 - DNA, 117 bp, Homo sapiens
gcggccgcctactactactactgctcgaattcaagcttctaacgatgtacggggacatgattatttttctaagctggttggttaataaacagtacctgctctcaaattgaaaaaaaa

SEQ ID NO: 573850 - DNA, 935 bp, Homo sapiens
ggggggcttcacgtggaatatctcatcttccccacacaatgactttgcaagatggaaaacactcgtccaccccagctgaccgatggggacaggtttggagaaagcagagccaaggcaggcactgatggaaacacgcggagaaggagggcgagaattttgtcccctgaattgagcaccattgggaacaaatcaatccaagtaagaatgaaacccaggctggtgaagaaagccaaacaaaacattccctttcaagaaacaggcaaacatcttccccaacgcctggactgactttcctgggttggcctgggaaactcccttctggaggtgggagccaaactcttattgtgactgagatttatcttccataaaagtccaggtgacggtgaccaataacaatctcaccattttactgatgtgtcaatttcctgtccacatacagaaaagaataagacttcagggaggcaggcaggcaacaggcacgtctgagtccatttctcagctgaaatctacaagaaactgaggacctcaatcccccaaacctggagcaatgcagtcctgcggtatgcttgataggggtgcctcagaaagcagaacccttttccccaaacctgaaggctttcagaattgaggtcctacatttccgtgggcaaggtatcctggagtgtggccttggtgagtgacccaggccaggcatggccacacaaggatttctggccccaaaactgtggctttttcctgtgcgttggtccacgcggtaagttggggccacctgttcccgccgggttctattaaccccaccagcgtcttgtttgggccggacagttccactatcttcaaattcgtgtgtctcaaaaggccccggttttcttctccccatgtgtcctccactggcgcttttccccaggggtttccccaccttttctcgcccactttag

SEQ ID NO: 573851 - DNA, 247 bp, Homo sapiens
tatgggcacagaaattattctgtctgacaccatatagtgaatacatgtcattatacatttgtccaaacccacagcatgtacaacaccaagagagaaccctagtgtaaactatggactttaggtgatgatgtgtcaatgtcggctcatcaactgtaacaaacataccactctggtgggggatgctgatgatgagggaggctgtgcctgtgtgggggaaatacatgggaaatttctgtgcccatttcaa

SEQ ID NO: 573852 - DNA, 127 bp, Homo sapiens
gatcacaggctccacgatgggcacacatgccattctgctggccaatacaggcactaacgggccaaaacattaggcatctaccatgatggcagagagctgagggggtgtgtaccccaatcttcaggca

SEQ ID NO: 573853 - DNA, 207 bp, Homo sapiens
agtatctaaatcaggtgtcatagcggaaggagtaattctctgtgagtcttggctctacgcctctagactcttggtacttgtcttctgattcgtccttatgcatcatagctaggagctcgtgtttagaaccttgggttcttttgctcatgctgcttctgttccagtcagaattttacggggaactacgtggtctactatttttgtaac

SEQ ID NO: 573854 - DNA, 744 bp, Homo sapiens
  misc_feature (354)..(354): n is a, c, g, or t
gaaagccttcggaggacagtgggagtggtacctcaggatgctgtcctcattccatgaatactagtttattacaacctcttatatggaaacatcagtgcttcatcctgaggaagtgtatgcagtggcaaaattagctggacttcatgatgcaattcttcgaagtgccatcataggatatgacacccaagtagggggacgaggactcaagctctcaggaggagaaaaggcaaaagaagtagccaatttgctaagatgcacatgttctgaagcgacccacgccacgtcatactctatgatgaagctacttcatcgttagattcgacttactgaaggacgacgtagattaccttgtgntgacaacaaatagacatggtagtgatggtcaaagaacagaacttctattttcactatgcacacagattgtcaacagtggttgatgcagatgaaactcacttgtcattggatcagggtaaggtagaccgaacgtggtacgccaccaatggtttgcttgctgaaccgctcatagtatctattcgagaaatgtggcatacacagagcagccgtgtgcagaaccatgataaccccagaatgggaagcaaagacaagtataatatatccaaagaggaggaaagaaagatactacaagaagaaattgtcaatagtgtgaaaggctgtggaaactgttcgtgctatagtcacatagacatttcttttttgtgttaacggctacatattgctgagcga

SEQ ID NO: 573855 - DNA, 598 bp, Homo sapiens
  misc_feature (456)..(456): n is a, c, g, or t
  misc_feature (528)..(528): n is a, c, g, or t
  misc_feature (585)..(585): n is a, c, g, or t
gttctggtggtattaggcatttatggactagtaaaaaacacattcttatctgtccgctttcggacaacaaccgggcttgattctgcagtaaatactgtgcagatgatggcacctttgaacatgttaaaggggcggaggaagctaaacatgaattacaggaagttgttgaattattgagaaatgcacaataatgtactattcttggaggtaaacttccgctgtggcgggagaagctgatggtgccttttattatgcttctggatcccaatgtgatgagactgttgtaggtgagggagccaaacggatcagacatccttataaggaagcacatgcgaatgctcattgagcaatatttaatgatgaattagatactgatgcagggaagagaattgaatctacaatgcatgcatattctaggcacaccattcatcaactgcttgctgaaatggatggacnttaacccaatgtatggctatcataataggagccacaaactctccagaggcattagataatgagctatacgtnctgatcgcttgacatgcaagttacagatccaaggacagatatgtaaggtcgacaganatattgtgggatt

SEQ ID NO: 573856 - DNA, 282 bp, Homo sapiens
agctggattcagagcttagtaggcatatgcagcttcatagtaagacttcatgatttgagagtttgttcctttagaaaaaaaaatgccttctggccgtaagtctcaatgcagcatatacaaaacagttaggaataccagtaaatacggcaacccgtgtagaccagtgaggagctagctactctcctctaaccaaaaggcagtgaagacagcactcggcatgtcatcatttattacaagaaagggggaagaaaagaaaaaccttatgtcgcttttcaaaattac

SEQ ID NO: 573857 - DNA, 870 bp, Homo sapiens
gaacgtaggctgcaatctggctcccgctcgtcaccgtcatagccctaccttgacgctccaatagagacatgcgccgtcggcaagtgagagccgcgtacggtgctactgagcagactcttggtgcctcggtgacggaaagatctaactaaccattgggcaatccgcacgatcctacgaacgccaagaggcaaaatggtcatcatctgccttttggtggtgcaaactagtctgcgcgagtgatgcacttcaactaatgcaagccgaggccagactcgacttcagtccacacgttcttcagagattttctaatgatagtgctgcatgagagagtgtggaacgacctacttgtctgctagatttaggaaacggagaaccacttgtgcatgatctgcgcaacagccggacagaggacccgtgatagcaccgagaagattgcaaaagcgcatgataatgacctgcccagaaccgggaagatgaccaaaaagacgaatgtcttcattagggattccctacattgccggcacccaaggaagggctgtcgtttcagggcgtttcgttgcgctgcgttgtctgttacttgatgattatcgccgcgagaaaaactcgaaaagggcagaaatactacctggctcatggtctcactttggtggatcgtctagcggataggagagaacttggagcgcagaatcgtcgaaaaatacactgtaaggtgggcccctccatcgcttgaggtcttgcttgagagaagaattgctcgaagacagccccaaattcgctagcctaggaagccggatgatctgggtgtatgattccggaagcgtagcaggccaagggctgattagacatgcccggtgaaccttgagatgctgg

SEQ ID NO: 573858 - DNA, 434 bp, Homo sapiens
  misc_feature (24)..(24): n is a, c, g, or t
  misc_feature (46)..(46): n is a, c, g, or t
  misc_feature (81)..(81): n is a, c, g, or t
  misc_feature (178)..(178): n is a, c, g, or t
  misc_feature (250)..(250): n is a, c, g, or t
  misc_feature (274)..(274): n is a, c, g, or t
  misc_feature (432)..(432): n is a, c, g, or t
cccccttaattattttttagaaanctccctttccaaaatgccacanaccccttgggaggcctcaaccccttaaacccccancccagatatcatccttaaattcagttacccaccttcaaagaaacaggaccttggggagaggaaggagagaggttggaaagaagcccacagagagaantgggaaagtttaggctgggcacagtagctcaggcctgtaatctcagcatttgaggaggccaaggcaggaggnttgcttggggccaggagtttgagnccatcttgggcaacacagtgagatcctgtctctacaaaaacaaaatttaagaattagccgggcgtggttgtgcacacctgtagttctagctactagggaggctgaggtggaaggatcccttgagcccaagaggtaacagtgagctatgattgtaccantg

SEQ ID NO: 573859 - DNA, 99 bp, Homo sapiens
atttattattttacagttctcaaggtcaagagtctgcagcatttttcaccggccaaaatcaaggtgtcagcagggctgcatcccttctgtcgtcttctc

SEQ ID NO: 573860 - DNA, 636 bp, Homo sapiens
gccgccttttttggttttttttttcacgcttaattcactttatttttctggtataaaaaccctatgtggtagccacagtgggagccggagtccgggcagggagactcgggggggggtctgggacgagggggtcagggaactccggcatagggagactgggggaatacagtctccttccagaggtcgggggtcaggtagctgtaggtcttagaaagggcatcaagagggggcctgggcgaagttgcccaggggggcgaggtgcagcccgcgggcgtgaggtggatagcacgttcattgcgagataccagcccattacagtgagacaggctctcatataaggcaacaggggtggcggagaacgagtgccaggtgccccggggtgtgcagggattgaggggataccagcaacagagccgacaggggcccggttcacctgggcaggggaccagggtgggggctaggccagatctgtgtccccacagtagcctcgtgggcagggggacagagggagacgctggcgccagggatgaggggccccgggagtggggggggcacctcctgggagcatttaaaaccaagaccggagggggcatggtagtccccgaatagcaacaaaggcgttgaacctgggttgcg

SEQ ID NO: 573861 - DNA, 137 bp, Homo sapiens
  misc_feature (37)..(37): n is a, c, g, or t
  misc_feature (42)..(42): n is a, c, g, or t
ccggttcagtagatgtgaagtggcaggatccagagcncacangaggcagtatactgtgccactgatttacatggtctggggggtaaagaggctggagagctggaacactgggagcaagttcaggctgactcagtaac

SEQ ID NO: 573862 - DNA, 528 bp, Homo sapiens
  misc_feature (420)..(420): n is a, c, g, or t
taaaaggtttccccaacaaaaaaaaagaggcttggggggggaaagggaaaaacccccaaaggggggcgaggggggggggggctttcaaggggccctaaaaaaaggggggggaaaaacccctccccaaaaggggggggggggggtgtgaacccctttttttaagatcaggcgttgttttggaccctcagtggttttttttttacccgccgcccggggggccttttttaggggtggggttatatcaacgctcggcgcccctttgggggggtatttccggccggggtttgttcgcccccgggattttggtgagagtttgaaaataaacgcggccaattgtgggggaaacgtagtgtgacagagaggggtgggggagcgctttgggagaaaaccgggggtgccccgggtattccccgggggggngaggaaatggggggtgtgggtcttcggttgcataaacgcaacaaggaagtgtatgagtagtcgtgcggcgggtgatgtggaggggaagggtggggaagggtgcgggtg

SEQ ID NO: 573863 - DNA, 126 bp, Homo sapiens
tccactcgtctttcttctcatatgagacattcccttccagatctcgccatgcttctaggaaagatccgtgatgctgatgcaggatgatctgacttgatcttctctcggctggcattgagccaaagc

SEQ ID NO: 573864 - DNA, 180 bp, Homo sapiens
tccccccccccccccccccaggtttagaaaaaaggtttcccccaaatttgggttcccaaaaaattttgggggggaaaacttttttaaaggggttttggaaacaatttaaacgggttttttttttccccccaggacccccccccctggggtttggttccaaaaatttttgggaaaacccca

SEQ ID NO: 573865 - DNA, 1557 bp, Homo sapiens
  misc_feature (550)..(550): n is a, c, g, or t
  misc_feature (1364)..(1364): n is a, c, g, or t
agtaccccgctgtgggctgcacttcgaaggactgctcgagatcgcctctgtcctacacatcttgaaacgaggcgggatagtgtgagccgcggcgacttgccacagtggacccgtgcgctcgaaggagatctcgacacgtggatccctacgcgcagggacccctgtacacgccgaactccggcggctcgtgcggcgccgtatcccgtgcctctctctgcgtggctgcatcgatgttgtgtgtcggggggggctcgcaggatttgacgttgcgcgctgccttgcgcctcaactctcaccttgcagaaggcattggtctcagtgtcaccctcgccgagagaggagtccggcgcacgcctggacgcgtgtaccaacgcggttgcgacctcgtgcactaaccattgcgcagccaagaatgcgtagtcgagcaagatagtcccgaggccgagcttttgccacaggggaacgcgtagtagtccagttgtttttaccagctggagaatagtagttgcataaatgaactgtgggatgtcatctctactactcaccgcgnatgttcgggtgctgtgctgcccacaaaaatgggcgtcgtggagaaccagagtctcgagtaagtgaccgaaccacatcacgaaagggcaaaaagttaacgaagcacgcaccagctatgaggcactacacatttgcattggacatcattgtccttcacattagccctattcacagaatcaagccttgcgctcgagtccctaacgacgcatcaatggagtcccaaatgtatattatataaacagttatataaatcatagaggtcaaatttctggcttagaataaaactagcctatatccctggggaggttgaaagagagggcaaggtacgggcttgtttgccacatgaatgtctccatttggatagcggtgtcaccgaaaggcccaaggttccaagtttccattacttcaaggacggttacaagtggagatcatagacagggcggttccgctaaagataactttaccccctttttcccagtggttaaaccctataacttttaggcaacccctttgtcaccagtggccgaaaaaaaaaaagttggtttccaagagacattaggggattaacaaggaagggccttttaaaactgttgggggcacaccgaaaaaagttggggaaaaggaaaagccctgggtagccaatttccgtggaaagaacacagaattggattgtcccgcaacagattttggtatatcccggaggaatatcccaggggacacgggccaggaggtgtcttcacccaataatataaccaccttcttttatgggatgtgcaacaagcctggtggcttaaaaggcacagtcccacccattntggcgagtctcgtgcctggcacacacttgtgtgttcctcaccacgggggacgaccacttccgcgaagacattaggatcgggcggcggcatgagtctaacataaacagcgggggctggaaatttcaaaccaatcatagcatatagccacaccgaatattacacccgtggagaaaacacaccagtgtcgtacaac

SEQ ID NO: 573866 - DNA, 406 bp, Homo sapiens
  misc_feature (111)..(111): n is a, c, g, or t
  misc_feature (139)..(139): n is a, c, g, or t
gcatgccgcccaccacgccgcagccacccaccacgccgcagttgcccaccacaggctcacggcccacgcaagtttggcccatgacgggaacctccaccaccatcgggcttntcagctccaccggaccctcacccagctntaatcacacccctgccagccccacccagacacccctccttccagccacgctcacatcctccaagcccacagcctcctcgggaggtaaggagcctccagctgagcccatggagagggcagctgcaggaggtcctaggtacacctctggggtgggcttagggatggccctgcttcctggctcacatctgccactaagcagattcccagcgtagaacttcctatgcttgggagccaaactggggatttttcggaaaaacttttaaagaca

SEQ ID NO: 573867 - DNA, 105 bp, Homo sapiens
ggatttgctggtgcagtacaactaggcttaatagggaaaaaaattcaattaaagactaataaggaaagcagcttattaagttggtattttaagagagaggaaaaa

SEQ ID NO: 573868 - DNA, 112 bp, Homo sapiens
actcgaaaacaagtacagcgctaaagtcagcgctcagctcgttaaagaagcggctgccatcggctacaagagaaagagaaccaaggaatttaaataaattcctggttcctaa

SEQ ID NO: 573869 - DNA, 247 bp, Homo sapiens
cgctgaacaatgacacggcatacgcagaggtcacgacactgcacacgccgaggggccaaactgcagcacgccgagcatccatagcaaaatcgccgatcttcacgtgcacacgccgaaaaaccacactgcacacgccgaaggtccacactgcacacgccgagggtccatactgcacacgccgagaccccacacggacaggtcacaggccgaaatcgccgatcttcacggatcttcacgagagcaatgt

SEQ ID NO: 573870 - DNA, 389 bp, Homo sapiens
ggggccaataaaactttatttacaaatcaggctgtggccagatgtggcccacaggctgtagttgttggacctctaccgtagaccatcatgaggcctggggttcttcgagaacaagaactccttggttgattccccagggtacggcagggccttgggaacctgggtgggttggggagggtctaaaaaggctcctttctttggtaacctgactttttggaagctcaggtctagctgacgccccatcactgggccaggggggctgaggcaggtgatttggggaagggtttaagattcctgaatacatttttccatattatgccacaccttttttctatggcccttcagagccttgcggcttggggactaatggttgggaccggaattccgtg

SEQ ID NO: 573871 - DNA, 192 bp, Homo sapiens
attgttttctacaccaaatcttggtttttttcttctttctttaaacatagaggtaccaccacaaggcatgccctactctctcgcagctcttgatagcatctgtttgaggcaaagctctctcggcaagcaagtggctatttggattgctgtgcttccccttttttccaacctcgcacattgacatcataaaat

SEQ ID NO: 573872 - DNA, 1456 bp, Homo sapiens
tgtgcctgttctcgcgaggtgggtggttttgttaccccttcgtcttcgtcttgtaactcgtgctgatactctcaggtatggtcggttcgtccccaccacactatcctgtgtcctttctactcgaggatggttgttccctacgtcgagtgtgttgtcccccgccctcttttcgtggggggggagaagatatcacctccctctactgttgatttatgtgcgtggttgtccatcgccgggttggggtgctgttggtccatagtatctaataatacactctggtgggttcactcactccctctttttgtttgtgtgttgccgttggtcgtgcgcgcgcttcctatcattgtgttgtcgacccacgcccaatttatttgtttttcttgcgtggccgccccccactaaattgtattgtattctgtcccccgacgcacttcttgttcgttgggggcggcgacacgtcgtctgcgatttaaaccagacagccgggatctagttagggaaggggcaagtaataatattgtgtgtcctcccctcaacattattgatgtcagcgggcgtgcccctattttattaagaaggatgacagtcgcgttggatcataactacgcacaaacagcgagtattgttggtgggggcgcactaaacacacggggggggggtattatcttacacctcacacagactgtttatctaacactttggtgctgtggggagtaagaatacccctccttgatttgcttccccccgctgtgttgttatacgcaccagtcttgtgtgtagtttgttttttttgtaacagccgggggagggagtgcgggagaggcccccccctctctttttgatagagtcgctcttctcgcggtgcgaccattgtttattgtatcccccccgcgtcgtgcgtgcggtgaggaggagacaattatctattgtgtgtctttcaagcgctgcgccctcttcacacaagagacattttgtgtgagaaaaatattgtagcgccccacttatttatatcatccctcgtttcacccatacgtagtaatagaggtattttttgctcccacacaatgtacttgttataataggtagtttattttctcgacacatcccgcatacaccacacatctggtggtgggatattgccacgacccgagtgttaccgccaccacattttgatgtgccattgtgtgatgggaatcaccctgcagcagcccacaccgctggttgtttgttactcactcacaacgagtggttgtaattagagacgcctcctccctcaactcatgatggtgaatccctcttttcttctgtagtggagagaatgtttaacaagtgggggcaaataactcttctttttatgataaacaccatcgctccctttttttttttttatcccccccctctctttttgggaaaaagggggagaaaagggaaaaaaaccccctttttttttttttta

SEQ ID NO: 573873 - DNA, 285 bp, Homo sapiens
ttactgatcctgaggatccgagatcacgccataatagcagcctcggtgctccagcatacttcttcatctcagcctcccaagtagctgggactacgggtgcacgcaaccatatcctgctgattttttaactttttgtggagacttggtctccctatgttgcccaggctggtcttgaacccctgggctcaaccagtcctcctgcctctgcctcccagagtgttgggattacaggcttgagccattgtgcccagtctatggtatagttttaaaaaacaaaaccaaaag

SEQ ID NO: 573874 - DNA, 255 bp, Homo sapiens
  misc_feature (23)..(23): n is a, c, g, or t
ggggcccccccggggttttttcncgggggttttccccccgttttttcccccccccaatttccgccaaggggttaaaattttcgtgggtttttcccccgagggcctttttttaaaaaaaaaccaaaaggggggggggttccttttttttacccccccgattggcccgtttggggggttctgttaaaatgggggggtttttttggttttttttttttttgccccccacccttttataaaatattttttgggggggga

SEQ ID NO: 573875 - DNA, 246 bp, Homo sapiens
atccagctccgcatatagcgccgttcatccgttcactgatttctcagtcatccttctgaccgtaatgtttgcttcatgatctgggtatgttctggagtggaccgttgcaaacactgaagcagcagtcagctgcatttgttgtcctggatgtcagagccgaattgagccgggtcaactgtgggtgcccaaagaggtcaaggtaatctatcctgaatcttgaaagaactccccccttaagcggatcag

SEQ ID NO: 573876 - DNA, 341 bp, Homo sapiens
ccagcgtttggaaagcaggttttgtgggaccccccgccccgccccccgcactccttaaaagcagcagtagtgggttttccaccctgttttctgccacattttaaacaaaactgtgctgtgcccctccgggaggcctggatttggcaaaaagaaacacaataaacccccttctttttcttttccgtccaacaaatttggagagctcttggcccccctacccctttcccccttttggatttaattttaaagtcagtgtactgcaaggaagctggatgcaaaaaaaaaactaaattaaactggcctgttatttaaaatgtaataaaccagtttgccatgaggga

SEQ ID NO: 573877 - DNA, 480 bp, Homo sapiens
gctcaggtcaacgaggaccttgtgtcccttccacaccagttgccagaggccagtgagcccccccggagcccctctgagaagaggaaaaagacctttgtgggagagccgcagaggctgggctcagagacgtgcctcccacagcacatcagggaggccactgcggctccccacgggaagaggaagaggaagaagaagaagcgcccggaggacacagctgccagcgccctgcaggaggggcagacacagagactagcctgggagccccatgtacaggagggagggcctatggcacagctgccctgtctgtcagacggcaggatagatggcacactagcctaccacggtgaattggccacgcaggtgagtactgtgttacggacggccaccacgcgagcatctacccaaacggagagcaggtaaggagcagaagatcttggagcagaaggcggcctgctccatgccccacttcgggtcagctga

SEQ ID NO: 573878 - DNA, 124 bp, Homo sapiens
gttgggattacaggtgcacactaccattacctggttcattttcttattttaactagagacaggttttatcatggctgaaaccaccaggctagtctcaaactcctgacctcaggcgatccgccca

SEQ ID NO: 573879 - DNA, 679 bp, Homo sapiens
  misc_feature (22)..(22): n is a, c, g, or t
  misc_feature (105)..(105): n is a, c, g, or t
  misc_feature (120)..(120): n is a, c, g, or t
  misc_feature (255)..(255): n is a, c, g, or t
  misc_feature (297)..(297): n is a, c, g, or t
  misc_feature (319)..(319): n is a, c, g, or t
  misc_feature (344)..(344): n is a, c, g, or t
  misc_feature (353)..(353): n is a, c, g, or t
  misc_feature (367)..(367): n is a, c, g, or t
  misc_feature (412)..(412): n is a, c, g, or t
  misc_feature (471)..(471): n is a, c, g, or t
  misc_feature (515)..(515): n is a, c, g, or t
  misc_feature (540)..(540): n is a, c, g, or t
  misc_feature (544)..(544): n is a, c, g, or t
  misc_feature (551)..(551): n is a, c, g, or t
  misc_feature (556)..(556): n is a, c, g, or t
  misc_feature (584)..(584): n is a, c, g, or t
  misc_feature (593)..(593): n is a, c, g, or t
  misc_feature (653)..(653): n is a, c, g, or t
aaaataacacgctaaaaaaaanaaagccagttcctgcagactccgaacaacgctggggagaagctccctgagacccccggcgggaaagcctggtgggaagcccanctgtgtggtacctgntgctccacctgccttggtgccatcacagcccggacaatggccactggcctgacaaacgcacccgggccctggaggctgggctcaatggccccaggcagaggagggggaggcggcctgaactggcccgggccactnggccgcaaggttctggtttcttattgctcaacctggggccangggcgttttaaggacatccaantgagctgccctcctttgctaaacanaggaggaangaaggtaagaaatnaaaggggattacaaaacgggctaagttttcccctagtccccgctntctggacatgagagcctagccagaaccacgggcttcctcttaccaacaccaaactgtcnttaagccccgccaccgccacccaccatcacctcccactgtgganggtgcgtcccaaagctccaattaantaanaaggtanggcangagctgggatgaccacccttcctcagcnaggaaatgnaacactggggtccaggaacggggtgctcccgggtaccacacctaatgcccctgggagggntgctcttggctggaggtgggaagggg

SEQ ID NO: 573880 - DNA, 1310 bp, Homo sapiens
tggcaaacacttttttttttggaagctcttgaaataattacacccgtgacgtgctctaacaaaaccaggtgctgaaagcgtgattaaatctatttgacgggtggcaccgtgggtgaatttccttctcacagcttcagcacacgagcaagtgactcgtggagtgccatcagcacgtgcccccacagcgcattatgtgcttctctccttctgtgggttattggtgggaagttgtggtgcaacgtgggtgacacaaatgtgtgcgtgacagaggtgcctcttcaacattccacgtggagaaaaacgcttgcacatgccaaagggaaaaaaaaatgtgaaaaacgcggaagcaatgtgtccttctgcatatgtgcttctctcccagcagaatatatttcatctcaccatatttctcatgtgcgcgtgacacacacaccgcatagacacacaaaacacaaaaagaaagcttccttttgtgttcccacaagaaataaccctgtgtctaccaatttctcggagaaattttcgcagatacataccccatgtgtctctcacttttaacgcagaggagtttagaagacataatatttcaccatatatatatatctccacatatatctcaccatctctatctcctttatatcgtgagacagcgccctatgtgaatgctgaaagaatttatgtaaagcgctttataaacaagggggcagaaatctcaggcgaatctcccagagaagtgcttgaacaaagtggggcgtgctcttctcacagacaaaaaccctcttgcagcaagctgtgaaaaggagatgaaaaataaacagagagagaatatacgaaccacacctatacagctttcgtggaagctttatcctcatcagacggagttagttcagaaccacaagatatcgtgctcacccagatgacaccagtgtatcaggggacaaccaccacaacaataacgcaatgtgttaccactgggatcaccatcttgacagcaatgccccccgcaatacgtagtggcgcagtggaagaatcactgtgtagtcacccgaatgatatattagcgagcctatgtcgattgtgcccacaataaaagtcatcttgtcgttatccgctaagataaacaagcaacaacatagatgctgtgcacaagcccacatacaacgtgattagtcagaaatcttggccccaccagaacaactagctggatgacgaagaagcggggcgtttttagtgagacgagacaaacattgtgcgtatactatccaccataagtgaggacacagtgcctatctcaacaaagagccacaaca

SEQ ID NO: 573881 - DNA, 172 bp, Homo sapiens
  misc_feature (52)..(52): n is a, c, g, or t
gcgctgtatcccaatactttgggaggcaaaacagaggagcccttgaaccagnggttcaagatcagcctggggaacatagcaaggcctcctctctactaaatatttttttaaaaattttttaaaaagtagctgggtgggccgggcacggtggctcatgcctgtaatcccagca

SEQ ID NO: 573882 - DNA, 284 bp, Homo sapiens
ggggtgttagggaggaggttggagaatgaaggcagagagggcagcactaaaaaaagaaaaaaaaacaagtctgggtgcagtggctcatacctttaatcccagcactttgggaggccaaggtgggcggatctacctgaggtcaggagtttgagaccagcctggccaacatggttaaaacctcgtctctactaaaaatacaaaagttagccgggtctggtggcgtgcacctgtaatcccagctactcaggaggctgaggcaggagaatcgcttaaactccgagact

SEQ ID NO: 573883 - DNA, 414 bp, Homo sapiens
acaccacagccagtcctgccacagccctgccacaaaaaacctgtgaacttatgaatcaaggcatcttggccctggtcagctccattggctgcacgtcagcaggatccctccagtctttggcagacgccatgcatatcccccacctcttcattcagcgctcaacagctgggaccccaaggagtggctgtggactcacccggagcaacaggaatgatgactacactctctcagttcgcccacctgtctacttgcatgatgttatcctaagagtggtcacagagtatgcctggcagaaattcattatattctatgatagtgaatacggtaagtgtttataatttgtttaggttttgtaagctgatatttgcatgagaagcaaattcattaaatcttaaaagtttcaagggtcttaaa

SEQ ID NO: 573884 - DNA, 413 bp, Homo sapiens
  misc_feature (15)..(15): n is a, c, g, or t
  misc_feature (85)..(85): n is a, c, g, or t
  misc_feature (96)..(96): n is a, c, g, or t
  misc_feature (152)..(152): n is a, c, g, or t
  misc_feature (184)..(184): n is a, c, g, or t
  misc_feature (273)..(273): n is a, c, g, or t
cctccctgaaaattnctttgaaaacctcaatttttatttcaaaaaactcagggggaagtttgcatttaaatgataggaagcacanagtgcaaagancccaggcccagttcccttatgtgatcccagttccccagatctacaaataagtaatnctgtaatatgtaaataggcccaggccgcaagntgtcacgcctataatcctagcactttgggaggccaaggcgggtggatcacttggggcccaggggttcgagaccagactgggcaacatgncgaaaccctgtctctactaaaaatacaaaaattagccgggcatggtggcatgtacctgtaatctcagctactcaggaggctgaggcacgagaatcggttgagcccaggaggtagaggttgcagtgagctgagatcgcgcc

SEQ ID NO: 573885 - DNA, 891 bp, Homo sapiens
  misc_feature (809)..(809): n is a, c, g, or t
agcggggctgcatgcgcgccttcgaccgtcaaagcatccaggcagccccctgctccggtccatgcatggaacgaccccgacccagacccctcacaaaggctcctgagcgaacctgagcctcacttttactatgagctatcaacacggtgcacgtacatgtgaggctatgactctggctaaccatcttgtgcctgctgggtatcctcactcgtctatcgaaagactgacgcaaggtgaagtgcaggaaggcggactccaggtctgagagcccaacctgcaaattccgtgtaagtctgagcttccctcttcagcccctggtggcggtcggcgtgtaacagccttgcccgaggaagagctccgttgccgagccctgcctgagcgcggtgagcctgaaggaccgggtgtgaggcggtggtggacccagtctgggcgccgggagcggctccgcgagcatatgaggcgcatcagcgcaaggctcctaggctggagcacaggggactcccctgtcttgttcccttcatcccaaagcgctgttggtcaaggaaagaatctcaccgcaaatagtagtgcactgtcttgaatgcgctgatgagaacattggtcgcacgtgggccttcactgcctcacatgcgggaatctctgagcggagccttcgaattcacacggaccgcgagggcagtacactgaaagagattactcggagttcacttcttggcaccgaacatgtacccttaaagctaaatgtcaaagcacatgagggaaaagattcaggaatttgggcagatgacaatgggagcagccctactcantgttcttcttagtgatattacgtggagttccctttatggaaaatgcgtacgacagaagccgacgcacagagaagggcgaaac

SEQ ID NO: 573886 - DNA, 413 bp, Homo sapiens
acaatcctggcttcagtttcttcctgtgtaaaataagaggtttggatgaaccccaaattctttccattctaaaaagctgtgtttttatcattctttcctttatcttttcaagtattctttgggtgaaacgctattttataaggtgttaatgaggccaacagtgtattcaaaagtaaaaggtcctgattaagacttggtagtgagaatattctagctttgtagctgtgacattttcttaacatttcttatttggcttcctcagggcatcacatattatatatcacgtaccacatattgtttcccatgtataatctatacttgtccctttatttatttttgtgtgtgtgtgtgtgattcttctttgagcaatatacttagttattttagttacagaaataatacctgtttattgc

SEQ ID NO: 573887 - DNA, 403 bp, Homo sapiens
  misc_feature (119)..(119): n is a, c, g, or t
  misc_feature (126)..(126): n is a, c, g, or t
  misc_feature (187)..(187): n is a, c, g, or t
tcaccgtgatggacgttggcatccaccggtacagcgcgccaggggtgggctggagcggggttagacttgtggcccagcatgcacaacaagtttcccgtgccgacttttcccgctacganctgatcntcgccatggaccagagcaacctgcgcaacctcaaggccatgcaaccagcacagggcaaggnggacctggacctgttcctgcgccgttacgactcggtggtggatgaagtgccagacccgtactacgaaggcgaccagggctttgaaaccgtactcgacctgatcgaacgcgcctgtgacctgttggtgattgaattgaagggccggttatgactttgcaggtgcaggcacaggtttcgctcaaaccgttcaacagctttggcatcgacgtgcgagcc

SEQ ID NO: 573888 - DNA, 376 bp, Homo sapiens
tcaaaagacagttgacggaccaggaagcttgatgcatggtgaaagaattggtctttctgcccgggcttggtggctcatgcctgtaatcccagcactttgggaggccgaggcaggcatgatcacttgaggtcaggagtttgagaccagcctggccaacatggtgaaatcctgtctgtactgggattacaaaaaaattagcccggcgtggtggtgcatggttgcattctcagctacttgtgaggctgaggcaggagaattgcttgaaccccggaggcaggggttgccgtgagcagagatcatgccactgtactccagcctgggcaatagagggagactccatttcaaaaaaaaaaaaggggggtttttccttgggaaa

SEQ ID NO: 573889 - DNA, 108 bp, Homo sapiens
acagagtctctgagtccccatcaacctgcaaatctaccccagcatcagagggtgaggaccgaggagctgcgagcagatcaagaccctcaacaataagtgtgcctcctt

SEQ ID NO: 573890 - DNA, 665 bp, Homo sapiens
gggatatcacagatagaatcgttcgaggagtagatgagaggtagtctgctaggtggggtgtatgttgactaggtttacatcgttcggactttctaagctgttcaggtattttaatgaaccaagggagagcactgtgaataaaggattatgcataataagaaggtggtgagggggtagattcacagagtttgggatcttttggatttgcttaaacagtttggggattaccttgctttacattgaataggcctgatgttactgatgctcaagggaaagtcaagtaattaggaaagaagaaagcaggcatcaaactcagacaaacaaatgaatatactatggagaaggaatagttgtggttggtggttgaaatggggaagggagcagggagaagcgcatggaatttctggaggaaattggtacttaattcctacttcaggcttttcgaaacttacaggacattgactcttggatgatactattaaacctaagcatcttttatttttttagaatagaaactttcagcttacattttcttcagtgtaggaaaggagtccacgggcacaggggatagtataaatcacatgctttgtgataggagcagtctttgacattacggagctctcagctcctggtgttcgtcggttcctagattacattatagtgtt

SEQ ID NO: 573891 - DNA, 935 bp, Homo sapiens
gggatgcagatgggtgctatcagagcctctcccacaccactatggtgtaataatgtgattattactctacactgaagcggatcagagttcgatattatttgagcttcagatgtgctttagaggcttttcaaatgtaccgatgatactgtttcttgctacatgaatatagtaaccacgtccacagtgttcatatggggaaggatatggggaaggaaatatatttgtaagacagatgagaggctgtatctatttgcagattttacaagggttcggtccactaacaattcgttggagagatggggtgatattccatggcgtggatcagggcttggacctttctgctcgggtggtacccgtgggcgtcgacgtgtgacctaagggacttagctagtagtttcatcacttgtgtatcggcttactaataagaggtggtgactcagcaggagcggaaagtatgtggcaggttccacctgggagccaaggtgggggcctgatggctttgccagaaatctggctctatgaacctccgtgaggcaggatctgtgaatgactccacattgtgtctagcatgaagtataaactcatccagcggttaacatctggacagactcggtcatcgcagtaccgaggagtattataggtaaaggtggtggaaccctaaatacggcttgtggtgggggtctccatgcaggtaattggagggccggcactcgctgtgaattggctggcgcttaatgatggacaggagactgtttacgccttaagaagaccctgttttgtggttgactcgggtacctggtccctgtgggcaaaggccttccacaatgttcccttttgcccaagactcactactgtctgccaaggagagccgtttgtcacaaaaaaaattggcgccagttaatgggaggaataatagatggtacaaggcattggac

SEQ ID NO: 573892 - DNA, 925 bp, Homo sapiens
gccagcacgtaacttacgcggtatacgtagcgtcagataccgccaatcagtgccagtagcagcaacaccacggtggtggcaatcatcgcattcaggcgatattgcgggtcaaccgcccaaataattagcaccatcaggctcataagaccaaatgcagcgaaaagcatcgtcaggcccagcatcagtaaaagttgaaagagattcgctttttcctcttccagctccaccaccgccagccgcagacgtgtctctaccatttcaaccatgatagaaacaattcgctgcccgatgcccagaacgcttttaccgggcccttgtgcgtgatgagtgtccgccataattaacgacgcgacagcagaacgccgagcactacaccgattgcagcgccaatgcccacgcccgtccacggattttcgcgcacatactcatcggcacgcgccgccgcgacacgggtttgtttggcaatggcatcaccggtttcacccaggcgataacggctctgtttcagtgcctgctccgctttgctacgaatcttactcaactcttctttcgacttctcgccagatgagctaagcacctcttccagcgtatcggaaagggatttcaactcagcacgcagatgttccgtagtgtgttctttcgacatagttttctccagggtgagtaaagtacgtgactatttgttgaggtttagtacagtcgcggcgccttccagcctgttttcaggcgtctttcctgcggcttcttgccaaggtttcccggttccgcgttttgggcactctttatccggcattcgcccttttttgcttccgcctcgggctaaatcttggctggggttcccgccacctcatctttcggctttgcgatttcttctggatgatccggccgcagtggcttctgaccggtggccgaatccctcagggtt

SEQ ID NO: 573893 - DNA, 398 bp, Homo sapiens
atagaatcgagctcgcgtaccacaccagctcgggggttgcggagacgggggttctcgaactcctgacctcaggttgttttgcctgcctcggcctcccaacagtgctgtaattacaagtactgagtcaccacgccaggcccctttgctctttaaatgtgtagtagtttgatttttttgtcctctattgatgctgcagctcagagacaaaggcagaatctttatcctgacgggcaacaccgtgtcatctggcttctgtgacctcattggtttcttggttctggaacagagtagggctgtcgtcgaacgggtctccttcccctgtgttctctcattctgctatagagtccttctgacgctccattctctgtccctatagataagatctgaggcctccatac

SEQ ID NO: 573894 - DNA, 126 bp, Homo sapiens
gcccctgattatgggcataattgtgaagtgacaaaggcccttcaaacaagagatgcagtctgctggatcacagagaggtcgtggagtgtggatctggcaatttcatggtgccatctgggactgggg

SEQ ID NO: 573895 - DNA, 353 bp, Homo sapiens
  misc_feature (353)..(353): n is a, c, g, or t
tcagcctcggccccattcatgatcttggaagcaagtagtgatttctcaaactgtgatgccacccatttttacaccaaatatcagtgtttctgggactatcatgcccctggtgggtgtgtgatttagaatgctaatgagcgttggcagaccaccgtagctcctgctgtaatcctcacactttgggaagctgaggcaggaggattgcctcaggccaggagttcaagaacaacctggccaacatagggaaaccccgtctctcaaatcctaggagcctaggtcgaatcgcaccatgttgggtccagttggtcttaggtcgcttgacctacaccctggattttcagggtcttatcgtn

SEQ ID NO: 573896 - DNA, 275 bp, Homo sapiens
ccaaatgaaaaaaaaatttgcctctcctaaaataagaacatgaagacccttcattgctcgacaggagggcaccagtgtgtcaaccctaccctacaatctaggtagttaccttaaataccaatagcaaatctgagcatatatgagaggcgtgattctgacagccaagtagaaatactgtggggaaccatacatgtacacccactggatgccctgaaaaaatgccaataatttgagcgcacccacttctgctagctgtctcttccacatcctcacat

SEQ ID NO: 573897 - DNA, 947 bp, Homo sapiens
  misc_feature (22)..(22): n is a, c, g, or t
  misc_feature (33)..(33): n is a, c, g, or t
  misc_feature (65)..(65): n is a, c, g, or t
  misc_feature (317)..(317): n is a, c, g, or t
taaaaaaaaaactttgggcccnaatcaatcgtncaacaaaaaagcaagggaatgaagctttgaantttcctctgtggggttttcctttttctggtctctgtgcaaaccctgcccctccctcgggtgctgctggcctcaaaggaaggaactccgtggggggagggtgtgaatttgcaaaacctgggtctctgctctgctctgggggtgggaaattgcagtttgaacgaactccttccctctcacccctcctctcccggcctcgcccaggagtcttggctgttggcagctcagaggtgggggaggcctgtggtgttganggccctgcacctgctcctgctcctgtcaccccttcctgctgcctcctccatgcccaaggaacacccatggtgcagtcctcaggcaaggccaggacggggctgaggccctgcgtggagatgctgcaccagcggaaggctgagacccgcttaccttagttcatctgttcactcgtaataaaaagaattctctcaaaaaaaaaaaaaaaaacaaaacacaaaaaaaatttttgtggggcgcgccttgggcccctggaaaaaatttttttaaacccctttgggtttgggggcggccgcggcccccagtgggttatgggtgaacccgttggcccccaagctgtttcccccagagagaaaaccccgcggcccgtgcacgagcgcttgggttttcctcccccatttaaaaaagggccggggcgcgacagccaaggggttttggacacaatcccggtgcgaggttcgggaggccataagggcgttctacccccgcgggagtccaaacaggaacctggaatatcaaaattaagcccccgcccgctggattattagcgaatggaccaccagtagctcctcgtcgacatacaccacacgatcacccacaccagcactctgtatggcgcaccaccgctctac

SEQ ID NO: 573898 - DNA, 235 bp, Homo sapiens
  misc_feature (12)..(12): n is a, c, g, or t
atcacccacatnagaaatacccatgaaataatagcatattttacccagacatctgagtctgctttcaagagatttttatactttggggtctatctattatttgattgactgagtaatattcaagttgttttaactccaaatcattcattcattcatttattcacttgcttagaaaaacatccactggttgcttaatttgtgtccagtactagttggtagctagaaaaaaaaaaaa

SEQ ID NO: 573899 - DNA, 743 bp, Homo sapiens
  misc_feature (58)..(58): n is a, c, g, or t
  misc_feature (84)..(84): n is a, c, g, or t
  misc_feature (94)..(94): n is a, c, g, or t
  misc_feature (96)..(96): n is a, c, g, or t
  misc_feature (99)..(99): n is a, c, g, or t
  misc_feature (130)..(130): n is a, c, g, or t
  misc_feature (146)..(147): n is a, c, g, or t
  misc_feature (174)..(174): n is a, c, g, or t
  misc_feature (180)..(182): n is a, c, g, or t
  misc_feature (193)..(193): n is a, c, g, or t
  misc_feature (199)..(199): n is a, c, g, or t
  misc_feature (207)..(207): n is a, c, g, or t
  misc_feature (215)..(215): n is a, c, g, or t
  misc_feature (225)..(225): n is a, c, g, or t
  misc_feature (231)..(231): n is a, c, g, or t
  misc_feature (234)..(234): n is a, c, g, or t
  misc_feature (236)..(236): n is a, c, g, or t
  misc_feature (239)..(239): n is a, c, g, or t
  misc_feature (250)..(250): n is a, c, g, or t
  misc_feature (289)..(289): n is a, c, g, or t
  misc_feature (307)..(307): n is a, c, g, or t
  misc_feature (314)..(314): n is a, c, g, or t
  misc_feature (317)..(317): n is a, c, g, or t
  misc_feature (328)..(328): n is a, c, g, or t
  misc_feature (334)..(334): n is a, c, g, or t
  misc_feature (407)..(407): n is a, c, g, or t
  misc_feature (410)..(410): n is a, c, g, or t
  misc_feature (418)..(418): n is a, c, g, or t
  misc_feature (426)..(426): n is a, c, g, or t
  misc_feature (434)..(434): n is a, c, g, or t
  misc_feature (437)..(437): n is a, c, g, or t
  misc_feature (445)..(445): n is a, c, g, or t
  misc_feature (448)..(448): n is a, c, g, or t
  misc_feature (459)..(460): n is a, c, g, or t
  misc_feature (483)..(483): n is a, c, g, or t
  misc_feature (488)..(488): n is a, c, g, or t
  misc_feature (524)..(524): n is a, c, g, or t
  misc_feature (530)..(530): n is a, c, g, or t
  misc_feature (595)..(595): n is a, c, g, or t
  misc_feature (603)..(603): n is a, c, g, or t
  misc_feature (616)..(616): n is a, c, g, or t
  misc_feature (694)..(694): n is a, c, g, or t
aggtaaaagtccttactgaatatcatataaacatcaggtgttaccaggcttgatttcnggaaatgtcactggtttgtgataganattacctatnanacnatgtggtataaatgaatatctgaattttacnattatgtggctacagnntgcccattactcttcataggtattacntctttnnngttcatttccnttcacncatttttnctgctgangcctcgttcnccttanagncnccngctgccttgcncccagccatcgttctcttgacagcgttgtctgaccagcnctgagagacagacaccgngccaccncgngccgctggtgnagatcntcagcagtgatgctctgagggtcgttcttcccgcatttccacaaagtcatcttcaactgccttggttatttcntcngatatgcnatattccnagaactcncanaagcagtnagntaaatgcgcgnntttgttcagcacggaaggcagcnccgcngagagaaggctgttcatgtactcctccatgtttggnggaatnagccggggctgtaagtgaatctggcagtctgccgggaggagtgacctcccctccgcaagtcatgncaacgttnatattgcaggggnattccatctgatggtagctgaagtcataatccaccttctgccacgttatgaggttgctcagggctgtcacattatganacctggggtatcagctgcccctgttccaggagagtctcatcgattacaa

SEQ ID NO: 573900 - DNA, 370 bp, Homo sapiens
aaaaaaaggggcccagggggggggggggggggttgcaagggggaaaaaatttttttttcccccggggggggcgggaaaaaaattgggttttttccccggggcccggggggggggggaccccaaaaatttggggggggaccccaaaaaaatcctttttttttgggggccccaacccccttgggggggggggggccgggggggggtttcccccgggggaaaaatgaacccccggggttttggggtttttgggggggggggggggggggtgggttcccctttcccgggggcccgggtttccccggggtttttcccttggggcccccccggggtattttgggggggtttttttcccttctaaaaaattttttta

SEQ ID NO: 573901 - DNA, 758 bp, Homo sapiens
ctgtcgcccaggctggagtgcagtggcgcgatctcggctcactgcaagctccgcctccccggtactcagtatttcttaaatgaatcctttcttcatcatactgctgctaccactggtaccctaagtctaataatcacgtctggttcattgcagtaacttattttctctatttccacccttgtcactgtgcaaataaactatcttctacattgttaccaaatgatctttaaaaatcatctaatgatcataatcttttcttgcttaaaatcttactgatttttcaccattcttaaggccaaagtctaaaattcttactgttgtctacaaggcccttcatcatctggccccacctacttctttaatatcatatcttactcccccccactcgtcaacagagaacttttttttgatatctaagatttttagcattaaaattataggatgtagtagaaatgaaagtttaaaaatattgcttgtaaaattattcttcattttaatgtatattcataattagctcactttatgcatatgtgtcaaatgagatagtttttgttagtgtttatgaactgtaaaacattaatgtaaaatattgtttctctttactttttgtttctatcttgccttttgctttcatctacttgataaaagatactgctgctaccactggtaccctaagtctaataatcacgtctggttcattgcagtaacttattttctctatttccacccttgtcactgtgcaaataaactatcttcta

SEQ ID NO: 573902 - DNA, 117 bp, Homo sapiens
gagggcagaccacaaggtcaggagacccagaccatccttgctaacacagttaaacctcctctctacttaaaatacaaaaaaaaaattaacctggcatggtggtgggcactgtagttc

SEQ ID NO: 573903 - DNA, 743 bp, Homo sapiens
ggccaaacattcagactgtgagtatgctcttggaataccttaagaagttacaattagccgggcatggtggccgtgcctgtagtcccagctacttgagaggctgaggcaggagaatcacttcaacccaggaggtggaggttacaggtgagcagagatcgtggcaactgatctcaagcctggggtgacaaggagagattgtgtctccaaaaaaaagtgttacacctaggggtgtgaaattgggcaacaaggggatgtgaaaacatatatagtagaaagaggctggaattaacttcccagggtgtggcgtaataacaacaacgggggggtataaaagagggggatatgcggttgggtagatttggattcgaaaaacgaatttccttaaggtctaacacgcttacaaaaaagatacattgtactctttttccccacaaagttttatgtgttgctatgggcacagggttgtggtctattacgattttagagttatttgccttttgggggatattctattaaaacaggggttaaatattgttccaaacgaggtggaaaaatttacaggatgtgtacgtggtatggaagggattaccaatgtgcgggagattctggttaaattgagcctctggtaaattggctggtatttgggttccaaaggggtttaacttataggaagtggtaatttaattaaaattatttatagtttgattacaatttgtaactaataggagtgaactagggtaaaa

SEQ ID NO: 573904 - DNA, 718 bp, Homo sapiens
  misc_feature (5)..(5): n is a, c, g, or t
  misc_feature (61)..(61): n is a, c, g, or t
  misc_feature (69)..(70): n is a, c, g, or t
  misc_feature (87)..(87): n is a, c, g, or t
  misc_feature (96)..(96): n is a, c, g, or t
  misc_feature (122)..(122): n is a, c, g, or t
  misc_feature (129)..(129): n is a, c, g, or t
  misc_feature (150)..(150): n is a, c, g, or t
  misc_feature (170)..(170): n is a, c, g, or t
  misc_feature (195)..(195): n is a, c, g, or t
  misc_feature (233)..(233): n is a, c, g, or t
  misc_feature (248)..(248): n is a, c, g, or t
  misc_feature (253)..(254): n is a, c, g, or t
  misc_feature (258)..(258): n is a, c, g, or t
  misc_feature (267)..(267): n is a, c, g, or t
  misc_feature (279)..(280): n is a, c, g, or t
  misc_feature (307)..(307): n is a, c, g, or t
  misc_feature (348)..(348): n is a, c, g, or t
  misc_feature (350)..(350): n is a, c, g, or t
  misc_feature (358)..(358): n is a, c, g, or t
  misc_feature (363)..(365): n is a, c, g, or t
  misc_feature (377)..(377): n is a, c, g, or t
  misc_feature (391)..(391): n is a, c, g, or t
  misc_feature (395)..(395): n is a, c, g, or t
  misc_feature (405)..(405): n is a, c, g, or t
  misc_feature (417)..(417): n is a, c, g, or t
  misc_feature (465)..(465): n is a, c, g, or t
  misc_feature (507)..(507): n is a, c, g, or t
  misc_feature (534)..(534): n is a, c, g, or t
  misc_feature (568)..(568): n is a, c, g, or t
  misc_feature (599)..(599): n is a, c, g, or t
  misc_feature (606)..(606): n is a, c, g, or t
  misc_feature (617)..(617): n is a, c, g, or t
  misc_feature (649)..(649): n is a, c, g, or t
  misc_feature (664)..(664): n is a, c, g, or t
tcaanccttccttccgcctcggcctcccaaacgtgctgagattacaggcctgagctgctgnatggctannattttgttaaaggccgncacagaggngaagtcaactgctagaaatcacaggnttttaanaggtggagtcacatttgaacncgtggcctctgatgccaganctgcaggtcacatgttcaccatggnccaggtgaccctgactgcgggccccacctcttctgtgnggcacagggcaggantccanntgangcgcgaggngcctgggacganncctttggtctcttctggggttgcggcnaaaacctgggggtcccgggtgtgaagaagggggtctgcgcncncagcgggnaggcnnnaggcgctgcganaggacgccgaggangcgntggaacttcncaaagcgttcancgcagcggagtcccgcgccgcgcggctacccacaagacgcagcctccngcacgagagccgcgtgggtcaggggcctcccctcagctccgnggttagggccgggaatcctcggcaggngctggcgctgccaccttggcggaaatttggggtncgtcccgggaccatggtgacgcgccccgtgnagggtgngcaacagccgntcacagctctcgtccagcggccccgcgacttnctcgccctccaatangcgaaccatgggtgccacgtgcggcacgccacctcgccggggtcgcagggtcca

SEQ ID NO: 573905 - DNA, 204 bp, Homo sapiens
tgaataataaccttctaaaatagaaagcactaggcccatatgggttcactggtgaattctactgaatatttaatggaaaaaataataccaattctctaaaattgctcccagaaaatagaaagcagcagacggaattttttttttttttttttttttaaagacagagttttgttttgtggcccaggcgggagtgcagcgggtgat

SEQ ID NO: 573906 - DNA, 1122 bp, Homo sapiens
  misc_feature (74)..(74): n is a, c, g, or t
  misc_feature (247)..(247): n is a, c, g, or t
tggaaaaagtcatggaggccagggggttggtttgaaaccagcttggggggggtttcgatttctccttctccttnttttgtgtctagaattttattgttatatccgggttcttctctcgaaatgtgtgtggtggctaggggtggggggggcatctccattattagtctccacctccgaggttttagtggagggtttctctctactatttaggaattttctcgccttctcggaaagcgcgaaagggctnttctctcaaatctcatttgaaacattctattataatatattatacgtgcgcgtgttatagaagaaaatgtgtacatgtgagccctatacgagaattgtatatgaggagtggtttctcagtgtgtgcggtgttatgtgccatctcgcgggatatagtctcgcgagagtataacgcgtctcggaggcacatatctcgcggaaatataggccgcgagagaaagagtggtgttgtgtgtggcgaaaagaacagagttttttagaattcttttagcgccgccgcatgataaacatatatctgatatcatagtgctgcacacatgtgggcatttgtgtggggcggtatagcgtcttgtggtctctatagggcgtgtgttaacgcctgtgtagacacatcatagggggagacaaatctcacgtgtagcacatggggtaagacgccctctcctttatgtgcaatgtgggccaaaattataacacggctctcccatatgtgtagatttgagagccacacattttatggtggtgggacaaaagtgtgggcggacattacacaacaagcgttgtaaggattagcggtgtggtctcgagttggtgtacgcataagccgaggagtgttctctataagggtgggacattgaaagtttttggggcctaaatttacccaaatgtcgtcccccagggtcttcagggggccgcccaacgccattaagcggggtgtaggaacacaaaatagcacaagacggtatttgaaaatttcccctataagggggggcgccttccaaaagaaagccccacctgttggcacaagccgacacatctcaaattttctacaacataatgttgaggcccttctccccggtgttgagaactgtgttg

SEQ ID NO: 573907 - DNA, 819 bp, Homo sapiens
  misc_feature (549)..(549): n is a, c, g, or t
ggaagctggaggcacaggagatgccctcccagtctcttcactctgggggcctcggagcacagaccactcaagaccccctactttgatgctggcgcctcatgcactgagcaggaaatgcctcgtatacctatgagctgcccaccgttggaagaacggtcaggacccttgtcaccctggagccacatagcctggggtccccctatcccggtgcctccagggcccacgctgctgtgtgaagacgtttccctgtgatctagaggatgaggagggggaggaggaggaagagtatctggtactgagaatcaatcgcctagtctatgtatgctcctgtcacttagtagcgagtcccgctcttgattcctacacagaggctaaaggcattattgggtcagggtcctcgtggccagtgtatgtgtgagctgcattgctgcctggtggtcgtcacatctgacctgtggatcccttaggtttcttgccaaggatctagtgccccctgagctctggaccaggtcactgtccgagttaaacgaagattatgcattcccattntgtgcatgtgcgtaccttgtgtaggactccctagcatatgaacgccccctaatcgcatgagccctaggagaacattcacgcgtgactaatggaatcctggtgatcttatctcatgaggcaggaggtgggggaccggtggttcggcacaaacctctggatgtcaaagactcctctccccatactgtgatcttataccatatctctcaacggcacaatgtgctctactcccccacatgtcggggtgtacgacctttatctatgatttggtcg

SEQ ID NO: 573908 - DNA, 146 bp, Homo sapiens
cctgatcttacgtgcccttttttactgtacggaaaagccccaactggcctcctgggggatgagggctgaaatgatcccgaaggccttttaatctagtgtgaaatccggcgtgtactcacgaaatccgttccccgcaatttacagca

SEQ ID NO: 573909 - DNA, 846 bp, Homo sapiens
cagcgggcggttgaggccttcggtggtgaacgcagtctccagcacatgtctggttgtctggccacagccggcgcggccttttccgttagcgttgctgctttgttcctgcctcgcgccccagcattggtccttgcccatctccttccgtcctgccccattcaactctcgcccagtgcctccgtcgcaggcagcattcaccacaggcacctgctcagtgcacttggcgcgtacgcagcatctccgacccagtctgggggcgctggacggcctgcgcagccacctccaagcatccaccagcattctcgctggcccatcattctctcactccaaacagcaggcatgccaaccaaggggcaccatttgccctttaccgactgcacagcattcatgcaccatgtttgcaagtgtgttttgcagcagcccacgggcacccagggcggcataccgtgaccaactctgtgcatcccttcagcaccatgcacagccatggcagtggcaggccgcaacacacattaccgcaagcagcattgcccaccagttcgcagcaagctcgaacaccattcagcaggtcagcagcttgcgcacgcctcagcaaggcacctttccagcacatctcatcgttcaatcgcattcttgcctcacattgcccgcacgccgcagccagacggccgcatgcgtgactaccccacacgacgttcaaccacaacacctcggggtcctcatactttcagcatccttttcacctgttcctggtctccatttggcacttatgctacctggcaggtctttctaccctgtgacagcttctttccaaggcccacgcacattgattgcagttatgcctcg

SEQ ID NO: 573910 - DNA, 871 bp, Homo sapiens
cctcccatttttgggcgcccccctccccccatggcgaaaaaattgtttccgcccccgggttttcctttcctggccgaaaggtggggagaagtatcaactggtttccctttcattgagggggccccttttatggatgtcctcacaggggggtctagctttcttcgttcaactgttgacccgccgtgaagtttgccctcccccttgtgaagagagcgtggctcttgactccctccctctcctggtgtcatgcacgcccttgggggcctttcaatgtttgttgactgccagcaccagttccttctcagaaccgccaccggtctcgcttaacttgccctccatacccgctcccttgttgaaatttcttgggttgtgggcggaacctcctgtggagcacgaggatacacccccatcttctcgtgcgcgcaggtaccattggttttagaacgttcttacccgcgtcctaaagcccggcacttcttagttccctccatttggactccccaatgactgttgtcccacggggaccagtttcccttaggggtgaccgcgcccatcctatttttggagggcatctacatcgaacccttgagggtttcgcacctccggatgagtggatcagggacatccccgatggtgccacccggctatttatgagtttgtttgtgtgcaacgcggataaagatcctaccgggatctggggttccaggaccgcgggttatcgagcgtcgggtttttttttcttccaattctctccccttccaaagagccaaaagaaaataagggccttttttcccaaggcccttccccccttaatgaaattttttccactttgttttaaacccccaccccccccaaaacaggggttttttta

SEQ ID NO: 573911 - DNA, 128 bp, Homo sapiens
ggatatatcacactggtacatagtcctcatcagacgtaggttttatctgaggggacaggtctcattctgccacccaggcgggggggcaatgatatcatcacggctcacggcagccttgacctcttgga

SEQ ID NO: 573912 - DNA, 816 bp, Homo sapiens
tcgcaacaatttttcgagattttccacgttcacctcgttgtcccctaaatattactctgcattttcccgcaaaccaatgtcctagaaacaaccctaatactgtgaaacattttcttttaacaccccaaacctaggtgggcgccttctcttatcacaagagcccacttcgttttcgctcctcccaccacccggtcttaaagacagcactttgttacacaaatttctccactcatattcttcctatcattgtcactttcctccccgactaatagacccgcgatcttcatcaacaacttgttgaccagttctctcacccccttgagaccacttgtggcacaaatcttcccacaggatgcctccgcgatttttccatccacccgccaggtgtctttcgaccatccatcagtcctataagaattgtttagcaaaacaggcgcacgtaacaagttagtatcttcggttaatacgtgaaacaggctggaggtctcccccagacgactgcaatgccctgcgtgaacaatacatatactccgactcaatccactcgccggtgagtatggttgtcttttatcgttgcatagaatggcttgcggtgcacgggtgacatatccaccaccaccatgagcccactctttaaccttttcttaaacagtaggttgagtctttttcttcttttaaaacaccaccgcgaccctcacaaacacacttcttgagaagagaaactgtctttcaagaaaaacatatttctccgcataaagtatctttataaaaaatcataaattagagcaaaattctttcgcaccaatatacagaaca

SEQ ID NO: 573913 - DNA, 203 bp, Homo sapiens
atccccaagagcacatgccaaactgctgcccgaagcacatctaacggtggaatcacacatatgcccctccatggaactcatacacataacatgaaagacacctgctggctgcaaggtcacaagacagctgcaggctacaagtccaatactgctcagaacctacactgggggagagaggggtagacaggtgtaggtagagctct

SEQ ID NO: 573914 - DNA, 1034 bp, Homo sapiens
  misc_feature (1034)..(1034): n is a, c, g, or t
aaagaaatccccgtgactgtctataacgccaattattaaaaaatacaccaaaatcacttgactggacgtgcctgtggaaataacctgaacaaacgagaccacgagaagaaccgaatcacttaccaggtcctgacaacttaaaactaccacctacggactttctacctggacggctggacgaaaacacgaacgacacactctgacagacaactggttaccaacgacccgacggtacaccaacgggtacaccacaactttcagttgacacgcgatggctgaactgggtcactatctacttcatgacacgacttgaccggaccaacttttaacaacggaccttggctttcagcgggctccgtacacaaccaatcccccgagtgtaagcggaacaagtatgtggccgaaggacacaaaaaaacaaatacacaaggttctccaaagggggcatcatataagcaaccggacaccggacctgtccaccgggggaaacaggagatccggttttccgttccgaggggtggccactaaaacagttcccccaaatgacgacaagcgccgagggcacactaccagcacgacacttgggttttagtacatttaactaaaaaaagccacgattaaaacggctttcaacaatttaacgcggccttggaaaccccccgttttgtagggcaaaacacagacatgtgggattgggaacgggacagggcctcccataaaaggcggatgatggggaacaccgtttttccaacagggggggcacaacacccgctttagggtctacaaatgcacgcgcaacgtttttctcccatggagccgcaagcgccctagaatgtagggccgataaaacggcaccacacatacatgttccgccaagttttccaaccgaagaacgatattaccaatcttcattcccgcttgagggcacgacactgcctaagtgcgtaaatagatgctatctgattaaaagacaccgttactgttcactcgtaccaacacatcactgacgatgaccaccgatttaggaccaaaan

SEQ ID NO: 573915 - DNA, 718 bp, Homo sapiens
  misc_feature (115)..(115): n is a, c, g, or t
  misc_feature (119)..(119): n is a, c, g, or t
  misc_feature (121)..(121): n is a, c, g, or t
  misc_feature (132)..(132): n is a, c, g, or t
  misc_feature (182)..(182): n is a, c, g, or t
  misc_feature (184)..(184): n is a, c, g, or t
  misc_feature (199)..(200): n is a, c, g, or t
  misc_feature (211)..(211): n is a, c, g, or t
  misc_feature (239)..(239): n is a, c, g, or t
  misc_feature (372)..(373): n is a, c, g, or t
  misc_feature (697)..(697): n is a, c, g, or t
ccttagaaaggaaaaagcatctacccatcaatcttccttccccagggaaaaaaattacccacgtacttaatgagcctttaaccaaaggctttccaattattggacagattcactnttcntnccaaggccttnctggaccattgtcaaggcttggccttagccaccagaattagagggtcaangngggtcaagagtacgnnaaggtcagcangggaccctcaatactgattcttctctgnctgaagtagggcagaaagcagacatagctcaaatactgagcagccaaaaaaagaagaagatggcgagaaccagaaagagggaatcctgccagctgaaggctgggtgaccctgtcccagatccacacctgtacnncggcggaaaggctcatgggcattgaagacggtggtgaaaaagccaaagggaaaagcaccaacaccaaatgagaagtggaagcccccggtatcaccaaatggctggaataatctgggatcctggggcttctggctccctcgcccataaagcgggacaaccttctctctgctgatcccagctttacatactggacactcttgccgttctggccgtgtctccagccactgatgaagacatggccaacagtacaggtggccacacacactgaccacagcttcccgagcagtctccaaacatatattacattcgaaggtcgcgcccgcnccgcaccgctcgcgatttggc

SEQ ID NO: 573916 - DNA, 832 bp, Homo sapiens
  misc_feature (22)..(22): n is a, c, g, or t
  misc_feature (63)..(63): n is a, c, g, or t
  misc_feature (138)..(138): n is a, c, g, or t
  misc_feature (194)..(194): n is a, c, g, or t
  misc_feature (198)..(198): n is a, c, g, or t
  misc_feature (244)..(244): n is a, c, g, or t
  misc_feature (264)..(264): n is a, c, g, or t
  misc_feature (266)..(266): n is a, c, g, or t
  misc_feature (268)..(269): n is a, c, g, or t
  misc_feature (271)..(271): n is a, c, g, or t
  misc_feature (274)..(275): n is a, c, g, or t
  misc_feature (279)..(280): n is a, c, g, or t
  misc_feature (282)..(282): n is a, c, g, or t
  misc_feature (285)..(285): n is a, c, g, or t
  misc_feature (287)..(287): n is a, c, g, or t
  misc_feature (291)..(291): n is a, c, g, or t
  misc_feature (294)..(294): n is a, c, g, or t
  misc_feature (298)..(298): n is a, c, g, or t
  misc_feature (327)..(327): n is a, c, g, or t
  misc_feature (339)..(339): n is a, c, g, or t
  misc_feature (353)..(353): n is a, c, g, or t
  misc_feature (358)..(358): n is a, c, g, or t
  misc_feature (361)..(361): n is a, c, g, or t
  misc_feature (367)..(367): n is a, c, g, or t
  misc_feature (387)..(387): n is a, c, g, or t
  misc_feature (400)..(400): n is a, c, g, or t
  misc_feature (411)..(411): n is a, c, g, or t
  misc_feature (420)..(420): n is a, c, g, or t
  misc_feature (430)..(430): n is a, c, g, or t
  misc_feature (479)..(479): n is a, c, g, or t
  misc_feature (483)..(483): n is a, c, g, or t
  misc_feature (490)..(490): n is a, c, g, or t
  misc_feature (532)..(532): n is a, c, g, or t
  misc_feature (543)..(543): n is a, c, g, or t
  misc_feature (573)..(573): n is a, c, g, or t
  misc_feature (596)..(596): n is a, c, g, or t
  misc_feature (628)..(628): n is a, c, g, or t
  misc_feature (645)..(646): n is a, c, g, or t
  misc_feature (660)..(660): n is a, c, g, or t
  misc_feature (663)..(663): n is a, c, g, or t
  misc_feature (687)..(687): n is a, c, g, or t
  misc_feature (689)..(689): n is a, c, g, or t
  misc_feature (714)..(714): n is a, c, g, or t
  misc_feature (717)..(717): n is a, c, g, or t
  misc_feature (723)..(723): n is a, c, g, or t
  misc_feature (760)..(760): n is a, c, g, or t
  misc_feature (806)..(806): n is a, c, g, or t
tggtagtgtagtggcattgatntgcgagccatcactggcaacgctctgcctcccgcgcgattnaaactgtattctacctgtcctcagcactctgcagagattagccatgtgagtactacgaggacatgttggccatanacacccaggctaattgttgtggcactttcagtaggagatggggtttcacgtatgtngtgncactatggtcttgatctcttgatctcgtgatctacccaccttgggntcccaaaatgttgggattanangnntnaannactnnancangnaaantgngatnttttagtggtgcctcttctctcttttganttaaggatgttnttccttaaggaaanctggnggntactantgtgatacactacttgaganatggattgttgcnctttcttctanagtctttanaaggagtagnttataaagacagaagatgtgaaccattgcattaatgtttggaagctganagtnttctagntttctgctagcaaactgatatgaggtagagtcctgaaagatntttcagcaatntcattttcttgggataagtgagtgactttnagaacatgtgtgtgttgtatganttttttgtgtgtgtggctgctctactcagatntgcatagaggttttttnngtgttccgtgttcngtntgtttgtgttggtcagattttttnanacatcttcatagtgtatcatcctgnaanctgaanagtcactttgaggttattgctttttctttccaggtcngttagccaactaaaaaggccccgaaaaaactggcttcatggtccangtctatcaagtgctcatttgttacag

SEQ ID NO: 573917 - DNA, 389 bp, Homo sapiens
atgctgcgagcaatccgtcagacgagaaagggcgccgagattctggagggctgggaattctctggcgaagaggcggcagatgggcaggatggaggatatgtcacatggctcggacgccggcacgcgcgacgagtgctacgggaggtggcaagcaacggcttcgctcttctcgtcgggttcatctcacagcagcaccgggagatggcaggggcagacaacacgagtgagacagaagggcaggcggcagacactggggatgaagtgacaatcacgccggcgccggcaccggaggcattatggaagggctcgtcgagcgggcaagggcaaggaggcaaccgcgatatgcgctctctccagacggatgaaataatgccgcggttgggaacgcc

SEQ ID NO: 573918 - DNA, 216 bp, Homo sapiens
  misc_feature (18)..(18): n is a, c, g, or t
atcacaccactgcacacnctgcctgggcacaaagcgcaaccctgtcaaaaaaaaaaaaaaaaatctccaaagaggaaaattgtttattggattacctactaaaatttctctttagaaattttataagaaaagctgtagcgagaattgatctattggtagtccttgggatattttactccagaatgtggctctcacccgcaatttgaaattggggat

SEQ ID NO: 573919 - DNA, 155 bp, Homo sapiens
  misc_feature (103)..(103): n is a, c, g, or t
  misc_feature (151)..(151): n is a, c, g, or t
ggtgcctgctcatcagacacctgatcttgcaagaccatcattaaaagtctcactttcgctgttctacagaaaaataatccctaatctgggggtttggacaggngactttgtttctcacaagactagttctcactctgttgcccctgctggngtgc

SEQ ID NO: 573920 - DNA, 113 bp, Homo sapiens
cactcaaagcacacagcatgtccctgtgcccatcactccttggagcatggtaacagggcttctccaacctcgcatcttgcagccgtctgcgatgatcacatccttcaggggtt

SEQ ID NO: 573921 - DNA, 101 bp, Homo sapiens
tgtagcgatctagaggatcccttccggtttgtgcatctgcgtgtgctttgaaaatcaacgacaacttgcgcacagtgagcatgtttttgaacacattaaca

SEQ ID NO: 573922 - DNA, 162 bp, Homo sapiens
ctttctattagctctgagtgagattacacatgcgatgcatccccattccagtgagtcgaccctttgaatcaccacgatcaagagggacaagcatcaagtcacgacagcaattcagcttcagaacggttaagcctagccacacccccacggggtacagcagtt

SEQ ID NO: 573923 - DNA, 409 bp, Homo sapiens
  misc_feature (18)..(18): n is a, c, g, or t
  misc_feature (74)..(74): n is a, c, g, or t
  misc_feature (148)..(148): n is a, c, g, or t
  misc_feature (168)..(168): n is a, c, g, or t
  misc_feature (217)..(217): n is a, c, g, or t
  misc_feature (224)..(225): n is a, c, g, or t
  misc_feature (315)..(315): n is a, c, g, or t
  misc_feature (351)..(351): n is a, c, g, or t
gaatctcgctgcggatcnacggatcgtccctggaaaagccggaagaaacacacgtcgagccgcttctccttcancgcgtcgatctgtgcggccggcgtcatctcgtgcagcgaccagtgcacgtgcggatggcgttcggcgaaacagncaacgcgtgcgggatcggcncgaccatcgccgaactgatgatgccgaacgccaggcgccccacttcgcncggcccnncaacgcgtgagatcgatcgcgcgatcgaactgcgcgacgatcagtggcacctgctccttcagtgttttccctgcctcggtcagttcgacncgatgctgcgagcgcacgaacagcgcggtgccgaantgctcctcgagcagccggaatttcctggctcagcggcggctgcgagatatggagccgc

SEQ ID NO: 573924 - DNA, 772 bp, Homo sapiens
  misc_feature (16)..(16): n is a, c, g, or t
ttctgggacactgagnaggggagtctccgtcttcacattgtgcacagatctgaggatgggattagcgaatttgtggagactgcacacccggacctgcccatgtctcaaaacaaacacatgtacagtggctctttttccttctcaaacactttaccccagaagcaggtggactgcacccaggcatgaagaaggaatattggccatctttgccacctataaattctgtaaaattatagacttgctcaaaagattccttttgatcatccccaccctgtgtaactggaaagggcattgcgatccacgtgtgtccaacaaacaaatgtatctgacgcctagcgagtcattctcacactccccctgggtgaggagcgcccgcccccgaccccgacgcccccggcctgccatcgccgaccgaacctgggagcagttactggtccctccgaccgcccccggcattaccactaccatcaccccccgacctaccctgctcccacttgacttgtcaatgtggatggtattctccgattcaaacgcatgatttccatcgcccggcgcaaaggcgagtaataaataagcaataaaccgtctgatcccgagacccccgccagagccctcatgctaccaagctaggaggacgacccccaagggcaacgactctcccgtcacccccaccacccgattaggaactacctggccctgttcctacttatacctagggagtcattaattagagaggcgctcgctacgctttataaataacgtaaggcataat

SEQ ID NO: 573925 - DNA, 739 bp, Homo sapiens
tatgcagtcgccagaccgagccacatcgcatcagacaccatggggaaggtgaaggtcggagtcaacggattatggtacgtattggagcgcctggtcaccagggactgcatttataactactggtaaagatggatattagttgccatcaatagaccccttacattgaccatcaacatacagtggatatatacatgtaccacatatagattccacaccataggcaaattaccagtggacacacgtacaagagctgcagaacgaggaagcattgatacatacaataggcaaataccacatacacctatcttaccagagcagcgagaatcccataccacaaatacaagctggcggcagactagcatggcgactagagatacagtacgtagagagatacacactaggacgatcttacacacacacataggagaacggcatggggcatcatatagacagggagagagagaccaaacaaggagtacatacatcatctgacccccatctagcaagatagacaccacacatagtaacgtacataggagtagtagaaacacatgaagacagtcatagacaaacagacctacaagatacatcaagaaaatgccatcctgacaccaacacaaactagcttaagcaacccactgtgcacaaggtacatcacatgaacaaactatatgagaatcagaaggaaagagactcaatgaccaccggtcacatgccaatcactgaccaaccagaaaga

SEQ ID NO: 573926 - DNA, 243 bp, Homo sapiens
ttggcatagcactgaatgagctggtctcttccagatccacaccatgctcacatgtagacccgtggaagtatgtttctggctgactcagtgcctctcgtggtaccagccatccctgccctgttccttccccgggtgtcgccagagctggagcccctgctccttcactttgcagcctcctcttctgtcaccaactgggaacccacctcttcctgaaagttctcccccactgactcaccggcttgc

SEQ ID NO: 573927 - DNA, 550 bp, Homo sapiens
  misc_feature (526)..(526): n is a, c, g, or t
ccctcacgggttacctccaaaaaaaaaagaaaaagaaaccttactaaaaacttcccaaggacccaaggacccattttcctctctatctgcctaaaataatttcttaataactcctacaacattcccccctgtggagatgccacactaactgctgttagggagttttgggcgacgactccttctggctacttcttgttgcaaaagggcgtcgaatggggaagagcagctagggctcctcctggggtcaatctaagggtcctcagaagaatgatgtgtctatgtgtggttctgtttacagcaccatttggagtttgattgcttctagatgagaagaaacaatttgagttatagtattgtgtatacagggtccaaatatcaatacaagacacataagcaagagagggcttaataaaggggttaaccaattccataaagaagactggaatttattaaagaggcattgtagccactcggggatcaataattttgatttgatttttaagtacttgtagattttctttaactngaggcattaatccgaaagcagcat

SEQ ID NO: 573928 - DNA, 102 bp, Homo sapiens
ccctgtacctggggaggctgaggagggaggctgatggttgcagtgagccgcgactcgcgccactgcattccagcccgggaggcaagagcacaactccatctc

SEQ ID NO: 573929 - DNA, 487 bp, Homo sapiens
cgaattcgatctcttcatgttatccttgtaggagtaactgtaatgaggttacgagattagtgccatcgccaggcgcatatgtagatttgcattcaagacttgaggaatcaaatcgagcgtgtctattcccatcgatgatatcagaagatatcttctcttatgcaagacagattaaatcccaagactttccacagagtcatgaggacttcattgtggacgcaaatataacatcactctccgccatgagagagtggtctggaagtgaaccaatgtcttcaatggaggattacagtgcgacagcatgagagcatgattcgtctctctgaagctatggctcggatgcactgctgtgatgaggtccaagctaaacatgtgaaggaagctttccggttactgaataaatcaatcatccgtgtggaaacacctgatgtcaatctagatcaagaggaagagatccagatggaggtagatgagggtgctggtggca

SEQ ID NO: 573930 - DNA, 275 bp, Homo sapiens
acatgcgtctgatagtaccatcgtggacatgcagccttaatatattctaacgcttccttacctgctggtaaactgccaccggtctcaacacccccatgagggccccctgctgccccagctccctccctggacccctgggaccttcctcatgagcctcgacttgaaaggttaacgtctcaggtcctgcaccagtaacagccagcggcctcaatagccccactgagggtcctctacgtgccaccgaggtccctcccgtgtagccctgctgaacctca

SEQ ID NO: 573931 - DNA, 270 bp, Homo sapiens
gctgttcgtgtgtgcttcacgtgctgtcacggacttgccgtctggcctgtgtggcggcaggtcagctggctgctcgtggtgtacaggtccccggcggctcctggctaggtgggacgtatctggcggtcacgttctgtccgctttcgctccaggtcacgctgagtgactcctgggggaagaaaccctggagcaggcatgcgacgaccacgttcccatcttggggggtgctgtcgaggctcagcgggaagaccttggggctggtcgggtatg

SEQ ID NO: 573932 - DNA, 159 bp, Homo sapiens
cctaaggcctagaggagcaacacaaactctgcctgggctgccagcctgctccctgtggaatctgtcctcaacactgccacatcggctcttgcctgaactcccagcctgccaacctgcactacaaactttgggcttgccagaccacacgctcatgccaga

SEQ ID NO: 573933 - DNA, 198 bp, Homo sapiens
gccaaggggccccagggccccggggctccccccacagcggggtgggccccggggcccgcggctcagtggcccgcttgccacgtcggccaggcccctttgggccccttttttaattttacccgtgctcttccctcttgtgcctaagcctggggtttgggagggtttaacccccgatttgccggggggccaaaaaaaaaa

SEQ ID NO: 573934 - DNA, 655 bp, Homo sapiens
tgagacagagtctcactgttgcccaggctggagtgcagtggtacaatctcggctcactgcaagctctgcttcccaggttcacgccattctcctggctcagcctcccaagtagctgggactacaggcacccgccacaagtgcctggctaatttttggtatttttagtagagacagggtttcaccatgtgcagccaggatggtctcaatctcctgaccttgtgaaccacccgtctcggcctcccaaagtgctgggattacaggtgtgagccaccacgcctggcccatgaaccaagtgtttttaaggaaacaaaactattttttcaatcatcagatttatactagctatatggcctatcagcactatctggctaattagtgaatctagaaattttttaccatatttgataatactgatcagctcagtaatgggatgacgtgaacagataatcatgtcggtttcacatagtgtcaaatatggtaacactccaaattcaacttcaaactcttcacttcatacatggtccataggccacagcttacatatcacattactaaacgggcaaggacaagccttcattcctcctggatcactggcatcgaaagctcattaacgcaatatattcgaaatccatgacaactgcctatgcctcacacg

SEQ ID NO: 573935 - DNA, 390 bp, Homo sapiens
  misc_feature (230)..(233): n is a, c, g, or t
  misc_feature (270)..(270): n is a, c, g, or t
  misc_feature (275)..(275): n is a, c, g, or t
cctgggacagttggtggcactctgtgagactactctcagaccagtcctttccatcatgggctcctgtggaaaatgaccccagctcagctcagtagttgatgggacatctgattcaggttggacccagcccagacatctgattcaaacaatattcttctccaggaattttgtaaccagcactggtagagggagggaagtgctcccccccccccaaaaaaaaaaaggggggnnnnttttttttggggggggggggggggggggaaaaggganaaggnctttgcccaagaaatgtgagacttggaaaccaaaggccgccatgttttctgtctcatgatggaatccaatcttctttggcggggaaaataaatgaagccaacaccagtaggaaaa

SEQ ID NO: 573936 - DNA, 256 bp, Homo sapiens
ataaagccatctgtcctccccgctggtccatatcacgtactcgcttacctcactagaggcaccgctccaacgactgttccctcttccttctgcagcatcagctttaccctctctgatcattcctactctatatagacacacataatgctgcccatcttagaagaaatacattatgtgaattcatcatctctgatctctgtcattccattttcttaaaaaccttattcctagcaggcttttgcccccaccatctccc

SEQ ID NO: 573937 - DNA, 1770 bp, Homo sapiens
  misc_feature (827)..(827): n is a, c, g, or t
  misc_feature (1717)..(1717): n is a, c, g, or t
  misc_feature (1770)..(1770): n is a, c, g, or t
tggaaaaaaagtgtctcactttgtgcccaaaacccgggggggagtgcaggggcccaatctgtgggctctcacgtggaacctctccacctctcccgaggtttccagggaattcttcagtgccctcagccctccgtgagataggcgtgggaactatattgggcatgtgcaccaccagtgccccatataaatttgtggattttttaagataaaacacgaggagtttctccaccgtgtgtgtgtggccgagggcgtggtctctctcgaactcctcgctgtgagacctctcgtgtgaatctcgtgccgcgcccttgtggcctctcccaaagaggtggtgaggaatttcacggggcggtggacgcccactgtgtgtcgcccgagcgagtggtgtgatgttctcttatattatctcgagagggtgtgttatagcgagagaagactctcgcccgtgggctatatattctccgatatcttctgttatacatctcccttaatagcgagggtgtgttgggcccaccgcagcgttattgatgacaagagtgccttataatatacgccgcggtattatctataggagtgagatctctcctactatttatcaacccgacacaaagaccgcgagagaaacaccatttatatctcttctcacccaagagggggtgtctcaccaataacatactgcgtgggataagtgtgggtgtatccaatatatatcttctccacaaaaatctttctacaaatataaaccgagtgtgttcccgaggcgcgtgagtaacaaaagtgtgggtccccgtggggataaactcaccacgcggtgggttattataagncgcaccatttcttcccccgtgtaagttgagtacccctaggagggggacgggggtgtagcaactcaccacacgggaaaacttttcccgagagaaagcattcaccggggcgggggggaaaaaattatacccctttacaaaggggggggggcctcaaattacaacaaattgtcttcgcaaacaacctctgtggcgggttggaagaaaaaacaccccccttttaaagaggtgtgcaacacccagtggactaacaggggtggttataccaaggggcgcaaagaggaggcattcttctaagcgccataaaaagaacggagtgtattaagaccaacaaacaccaacagcgtcgcgtcttttgctagaacaagcactcccaagcgagggggtgtatcatacgcattaatattatggtggttgtcccccccacaatataattgagaaaaagacagcgcaaatcatatgatcgtgtgaaaacccaactttatttttgacgatcagtcacatgcactgacgttcataatataaatcgttgcaggcagaaaacaaagatacgtctcatcgtgtgtgtaccccccggcgggatagaaacaacagacgcggagacaaatctatacacgcagacaaaaaacataccgccccccaacgcagtagtaggaagaaattagttacccacgaccccccccacaatagtgtgtagatatatgagagacccacacaaccactccagaccagtatttgtattgttataaaagagggtacccgtggtgagataggcaggggacctaacataacaatgcgtgagccgccccacgtatgagagaaacatcagcgcggaatccgtacgaaaatgaaaaccaccatcagactgcaatatgatgtcgtgtatatatctngagatcgagtccgcgcgataatagtaaatcataatactaatctaaaatgcgtn

SEQ ID NO: 573938 - DNA, 409 bp, Homo sapiens
ggttctgtgatgagcgtgaaacgagcatgcccatgcacgactctggtccccgccataggtggtctcctaagattgtcatctcctgtccctggcaactgctgtgcgcccattaagatgcacgaggtcccagcacagtctgatgtttactgtgacgtgtgtgatttcctggttaaggcggtcaccagtctgcttgacaaccaggagactgacaaagaaatactccacgcttttgacgcactttgctccaagctgctgaagtccctgtcggacgagttgccaggaggtggtgcacactgtacggcagctctctatcctgtccatcctgctggtggaggtcagccctgagctggtgtgcagcatgctgcacctctgttctggcacgcggttgcctgtactgaccgttctcgtg

SEQ ID NO: 573939 - DNA, 250 bp, Homo sapiens
tgttcaagttattggatcaattgagtatagtagctcgctttgactggtgaagacttagcatgtactgctcggaggttgacctctgctccgaggccgccccatccgaaatttttaatgcaggtttgagagtccaggacctgtgggactgataggtactgttcgcattactctattagagctccatagggtcttctcgtcttgctgttttatgcccgcctattcacgggcaggacaatttcactggttttaa

SEQ ID NO: 573940 - DNA, 155 bp, Homo sapiens
tgcctgctgctctctgctccctaagaggcagaggcagccctggatctaggctggtgatgggggtcggcccctatggtgggagaagctggggcagtttgccaggggttggtctagccacatctagagttctagagaatatgggacatagcgagaag

SEQ ID NO: 573941 - DNA, 1436 bp, Homo sapiens
  misc_feature (430)..(430): n is a, c, g, or t
  misc_feature (1209)..(1209): n is a, c, g, or t
  misc_feature (1218)..(1218): n is a, c, g, or t
tgtgggtgttgtgtgttgtggtagttgtgtctggcttcgttgtctctcgtggtctgtggatgtttcgtgtatgtgtgttcgtggttgtttgtttactctggtttcgtgtttcgtcttgttgggtttcttgttgtgtagtcgtgaggtgagagcacagctaaacctgtggcacaccagggtggggccattgaactccggaggacccgtggttgcccagaagcgggggtgttgactgcccgtcccgtttctttttcccgtctctttcgtggtcgccgagccccttggctgccgtaattctgcgcccggggcgcccagagaaactattcgcggtgatcaaatgtggggggggacacatacggaacgtcggctgagacgtttgggccctgggcgcaggaaattggtcacggctgaccgccgaaaggggcgacangttacaacgcccgttgggtggttgaacaccatcgatgggggtaccgcgggcggttcctccggaaggttcgttttgtgtcgaaggtcgcgcacacagtcattggcgcacacaccgcacctgttggtcaccaaagtttggtgagagtgtgtgtgggccctggtgagtactttgtggccagggaggaagtgtgtatgtctgttctcgtaagcccttcgtttctttgtcgctggggggaacctgtctgtgatgcccggacccgcgttgggggccgcaaaattttttttggacacgccggagtgttgtgggcctcgccctctccccgcagggatttagtctgtgtccctctcgcagcgaatgttttattttcccctcgtgcccccctcgtgtgagagccctcttgcccccccctaccgagtggggtcctccgccccaccgcgtgccacgcttccggtggggatacctcgagggacttggagaggagattctcgtgagggcaccacagcttgggcttgtcttgggaagatattgctcggaactttgttgatagaccgcaccacacacacagcggagatgtctgtctgggcctcttttcgagagctgtcttgcacgcacacttcttattgttatacacttaagggagttgaaagggtgtatgtccgcgaggtggaggcccacttgagagtgggctcgccactggagaaggagaagaaataggctggcgacggttgcccctcttctgggaacaactgaagaagggcaatcctttcgcccttagtctngctgagggnctattggagagggtcctccctccactctgtttctaccacgagagttatactttgctggccctaaatgacacttcccctccccaccctctccttttgaggcttttccttttccctcccctttttgctaccctaagggggatattccctccgtggcccctgtccccaccctttataatttggggtcccttttttataacccgggaaaaccccaaccaaga

SEQ ID NO: 573942 - DNA, 416 bp, Homo sapiens
ccagaccctcaccgaccacctgtcctgggaccaggctgggaggggagtgtggcagggaggaggaagaggaaggtgagaatgagtagaacagttttgtattctactccctacaagccattttgaacttctgccctcaccggactctgggctgtgactggggcaccaaactcagcacatgagtctcccctagctctcgtggggagagggatgctatttattcaattcggggcaggagggagaggagggaaagtatttctgaccctgaagccaacagccggggggttgtgcaaacatgattgcacgtaacacaaggaagcactgccctcccgctgactggctgacgtttaccctttgctgttgccaacggttggatgctgtcatgggaattatcaacgtttgtcttggatatatataaa

SEQ ID NO: 573943 - DNA, 1154 bp, Homo sapiens
  misc_feature (25)..(25): n is a, c, g, or t
agcggggggggagctcatgcactgntgatagcagtacttggggagggccgagatacgtgggagtcgaccctggaggtcaggagttcgaagactagcatgggcaacgtggtgaaagcctgtctcttaatagaaatacataaagttagctggtgtgatggcggatgtctgtattcccagctacttgggaggctgaagagcaggagaatgcgttagagacccaggaagtagaggttgcgagtgagcgtgagatggcagccactgcgactccagccgtgggacaatcgagacgtgaggacgtccactcctcatgaaagaagagaagggagaagcgtcgtccacgacgctgggatgtcggcgccaataagggggcccggataccttggacggggggaagccggagtagcaacgttgaggcttgccatgtcagcgaaggggtacgggttccagagactggggcgggtaaacctcacggggggcgcataggccagtggtacgccggggtggtggcaacaggtgtcgtcaatgccacgggtcccgaagagattgccacaccgggcaaacctataacgcgaaggcacagcggccccaggaagggaacagacgcagtgatcgcgctgccttatcggcggacaaggaacggagaggttaccacacgaaaccgaaagcaaaggatggggcacagccaggagtgacaaaacaataagcgagccaatgaaacaagcacccatacaagaggaccaacacaatgcatcaaacagaagagaatcgaaacacacgaggtaaacgacgaactaaacgacaggcaccaacaagtgaagaaggacacgcacggggacccggagacaccggaaccagaaggaaatccaagagcaccgagaagacaaaccgagggaacgacgggacactgatgagagaagaccgatacgaaacaacaaggcacgcacaaacaaaaaacacagacgcaacaagtacccaccaagaaccacaccaagacgcagaaccacagagagaaggaaaacaacgaacagcaagaaaaccaaagcgaaccgacaggaggagacacagaagaacgagaggacaacggacaaaagagaaagatgagagacaacacgcaagagaaaaggacacgagagcaaaaacgagaagaagacaaa

SEQ ID NO: 573944 - DNA, 102 bp, Homo sapiens
ggtggatatgcagttgtttccctgtacagtattgaagccaggatctcctcccaaaaagcagaactcatagctctcaccaggcccaaaaatgtgtaaaatata

SEQ ID NO: 573945 - DNA, 146 bp, Homo sapiens
  misc_feature (143)..(143): n is a, c, g, or t
gtcaagcaaccactctgcggccttcccggcgtatttgcagcggggccttggggagggaatgggggttggacgggattgaggaaggtccgcacagcctgtttttgctcagttgcaataaacgtgacatattgggagcgttaccntta

SEQ ID NO: 573946 - DNA, 160 bp, Homo sapiens
ggctcggtaccctggcgtgtcccagcagcgaatttgacatcgtttttgttggcatttggatttactgttaggaatgtcactggtattctatacagattgtaatgaatctgtagattgctttgggtagtatggacattttaataatatcgattattccaat

SEQ ID NO: 573947 - DNA, 140 bp, Homo sapiens
gaactctggacactgcctggaggaatcaggcctgccgtagccagggaagggcgggaaacaaagacgacgctcagagagggcaacctttccctaaaggttacacaagcaccaaatttaggaaaatttgggttccccaattc

SEQ ID NO: 573948 - DNA, 164 bp, Homo sapiens
  misc_feature (36)..(36): n is a, c, g, or t
tctacagcgtctgacgtgaccactagatggctatangtttagacatatggctgggcgtggtggctcacgctgtaatccaagcactctgggaggccaaagcaggcaggtcacctaaggtcaggaatttgagacagcctggccaataatggtgaaacccctgtctc

SEQ ID NO: 573949 - DNA, 145 bp, Homo sapiens
ctgagctggtaccggctctggtgtaccgataagctgcaggttatccttgctctgtgcgccttttatttgtccttaaactacctcaccacgagccacaccaagagccacacgaagagccaccccaagggccacgcgaagagccaca

SEQ ID NO: 573950 - DNA, 374 bp, Homo sapiens
  misc_feature (374)..(374): n is a, c, g, or t
tcgacccacgcgtcgcccaccgcgtcccggaagggttttatgttgttaactcgtcggtcgcgctacgctcactccaccactccgcgcctcagtccccctaccaaccgtaccatcccagctcaatccaccgtccgcttaacccagctatctcacactctaccctaccaccacttacctcctcacccacaacaacatcacatctccgacaccccctcctctctcctcctccacctcacacccatccctcctcccccctacccgctcaccacccatcgctactccaccctccagacgcatcctcacctactaccacctcgaaccaccgccactccaacccacttccttactcacactcactctctatcacttcttan

SEQ ID NO: 573951 - DNA, 399 bp, Homo sapiens
ctcgtcaaaggacctgggcacgtgagtccaagtgctgctaacaactacactctagagtaaagaaaatagcttaaaatctcgccatcttgttcctcatttgtagagggggaatattaaaacagttcctgtatgacccacttcacaatggctgaaagagagcgtcaaatgagttcatggacaggagacagccctctcattgtaacgagatctcacccttgattcctctgctccacttatataacacatctctttgtctatgcccccaaaagtacaactcctatccaaaaatccccaagcgtgggcctttggcatcttgttcactccctccaggattttgctcacactgtaccctctgctggaatatgttttgtccgcactagatgttcaaggcacatctca

SEQ ID NO: 573952 - DNA, 1015 bp, Homo sapiens
agctgttcgtaagttcccgtgcctatgattcttgcttgcatagtgttcgtctatggctgatccaggcactctcttgcagtctcgaaacgctctccgaattcctgttgcgtttgcaatccttccggggtcctgtcatccatcggcctatcatcacatgactgtcatgtgtaccatgccaagctaccggctttcagggaatgagttacccttcgtaagctcatgctcagatcattgcatcctcctcccaaaattctagctaaaaggttcatccatcctggccagttgtgatgaccaatctcgtataattagggttattggtccgaattttgctatcctggtagtccgcttccatatatcataccgtacttcatctggcctctcccttggataggtgaactgggaaaagatagtagggtatattaggttacagattgttcgacctcattaagtcactttgtcgtaataatggggagaaggtaggaaacgcagctgatagaagaatattaggagttttactgattgaatgccaagcaagacgtattgacaaggcagcagttctttgactaagagagtcttattggatagtaaagctgaactataggttgtgggaggaaaggccagccaattgagagagaacttctgagattgggttgggagcagatgtaggcttgaaatacagtggtcctggtttgtgaactttacacgtgactgggtggaatcttggacgttataggaatcccaaatgtctagcgatgtgtcgcgtagatgtcagtatccatatactggggatgatggtccgtagctaacacattggtgtccctgtggctaactgtatcctggtgtgctcatgagaggggctcccgttgcattcactaagcggggcgccacggggaccattggggactatgctgtccctatggttgaagggtacctcccgaataacaggtcggcaccatgccacagcaaagcgattttattcccaaagcttggctggaaaaggttgttcacaacacag

SEQ ID NO: 573953 - DNA, 154 bp, Homo sapiens
tcactcatgcctctgacttgcagatgcctcatgccagagaacttatagtcttagaataggaaaaagtaaagaaatatcaacttccaagtatggcaagtaactacccaatgatttagtaattttcccgcccagttatgacttagggaagctgggg

SEQ ID NO: 573954 - DNA, 359 bp, Homo sapiens
ctactactactaaattcgcggcggctcgacctcagcatggagtgcaactgacaacttggcaattggccaggtgcagtggctcacgcctgtaatcccagcactttgggaggccgaggtgggtggattatctgaggtcaggagttcaagaccagcccagccaacatggtgaaacccggtctctactaaaaatacaaaaattagctgggcatggtggcgggctcctgtaatcccagctactcgggaggctgaggcaggagaatcacttgaattcgggagttggaggttggagagagtggagatccgcccctgcactccaaaccaggtgacagagtgagactctgtctcaagtcgacgcggcc

SEQ ID NO: 573955 - DNA, 381 bp, Homo sapiens
cggcatagcgcatacgcccagaactcctgggctcagcgatcctcccacctcagcctcctgagtagctaggactgcaggcatgcaccaccacacccagctaacttttgtatttttttttctgtagagacaggctatattacccaggctggtctcaaactcctgggctcaagcaatccacccgcctttgcctcccaaagtgatgggattacaggagtgagccaccatgcctggccactagttcaccaattaaaatgttaatctcatccaaaaacacagtccaagttgacacataaaatgaaccatcacagatagtatctaccttattctttgcccaggctggaatgcagtggtgcaatctcggctcactgcaacctccgcctc

SEQ ID NO: 573956 - DNA, 835 bp, Homo sapiens
gcagcatttttagttatgtggctgtttggcagaatgacaactaaggttttcccccatttggatttcaggaggacatgaatagtgtgtttaattgtaactcctcatacacttttaaaaccaacatcttttttcatacaatgttggtagtgtttgtccaggtaccttaactgtagcttgtgtaatgttgatgaatatctgtatcttacggtcttccataatggctaggttgatattcaaaaaaacctatttctgtgtttcgaggggtggggaagtaaaaacactaagtgtataatttgaacccgaggcatattgcttccagattctgatgtgtgagggaaaatactgtcacaatcgaacaatcttgacaatttacttaatcaagtaaccagtagttcatgcaaaaccaacttgtacagactaataaatcttttcgcacagtgattcagtttgctcagctcttgctatgtctatgtagatttcgtcatccatgtgttattaatttacactgatctctgctatgttaaccccccaaataaagttatttgtcctttaaggtggttactataatacccctcagctaagattccaggtacttacttactggggcagcttgtctctgtcatacaattgccacatgattcagccttctttgtgacttgaccacctctgcatatgtttgttgagatttactccaggtgggtcctttcggaagtacctctttgcttttaactcctctctgattcacgtcctatcttctcccgctctcgagttaccctcccttggctccatccgcattcctgcattggcccacccttttttgccgtttcggcacgct

SEQ ID NO: 573957 - DNA, 1211 bp, Homo sapiens
gacaggagcgatgcctgtatggggcaggcgagcagcgcgggatctgtccacctcgtccgtaactagtgtttggcctgccccagtgacagtgtgacgggctggcctgtgagtgtgtccatctggaagggagtccccggcattggggattgtggattcccgtctacccgcaaagtggagcctagccaaggggggcggagctgactgatcgcataaggcggatatggcactttcacggagctgcccatctaatcggtgaaggcgcgtgggagtagggtacgtgatgatttcctagggttgcgctaagcaaatacattctgggtgagcgacataattggacggcttgtggatcgatccatctagcatgttcgccttgagctcaattacaaagcggcggtggcattctcaggagcgtacacgcagtctctctgcacgtcatcattgtgccctgttcgttgagatgacatgtcttttattgggggtaaagaaacacacgcatcgaatcttagaggatagacgtggtcatcagtcagtcgtgccagtattctgtataagggtgtactaaccagcaattcggttgaaatcgtccctggtgcccttttaccacctcgagctgtttctaacgttggcggtgacatctggacttacgtccccagaacttaccctttttgtgggcaaggatcggtaaatgataagcgaaggggtttccattgcgttggccatagattggcggccccgtccgtagaactggcgtccattggtccgtggggaacttgagggaaatgggttgtttaaccgagggacggtttaggggccccaacggtttgtgcgggtttcggaccacgtttgggtcaggaacgttcttggggggcatatgcaaatctaccgaaaggcctggaacgagtagtttgcggacacaccgggaacagtagagctccaattggggtttccttggtaccatattccttttggggaaagcctacctttcccgtgtggtcttggagggcctcccttgggattttacgcaccttgggtgtgaaagccacccagaagtggcctagatttgccacaattaagttacccttggttgtgtgccattcaaacttagagcaaggctcgggttcccctaccaaggggaaagacactgggcccaacggggcgcgcgcaatatttgagcttaaaccacgaaagttggtccctgaggacatacgtag

SEQ ID NO: 573958 - DNA, 222 bp, Homo sapiens
aattctgggggaatggatggcattggtggcagagatggcatcgctggaattggaggaatggagtgagcggcgggactgtagtcattggagatggctgtgcttggatacagttgagtctaagacgttgggctcccaaagtgtatagcccccaatattttggaggagctagttcctacgactggctgtggcaaaatgtctagtatgtaagtagtatgctttcat

SEQ ID NO: 573959 - DNA, 198 bp, Homo sapiens
  misc_feature (22)..(22): n is a, c, g, or t
  misc_feature (41)..(42): n is a, c, g, or t
  misc_feature (95)..(95): n is a, c, g, or t
  misc_feature (161)..(161): n is a, c, g, or t
  misc_feature (188)..(188): n is a, c, g, or t
  misc_feature (191)..(191): n is a, c, g, or t
aagggataaaaggaagctttgncaccactctaccatcaaannggaattgaacattcccattaaggcagtaaaacaaaagccaatagcaaacatgnatttcattcaaccattgatagatctctgccgttattcttcagtttctcttctcgtctctctatttntttctctggttgtcgaccagctgactntgncatcgtt

SEQ ID NO: 573960 - DNA, 497 bp, Homo sapiens
  misc_feature (497)..(497): n is a, c, g, or t
aaggatgagcgagaaagtggtaggaccaggattcaaacataggtctctctgactccagagtccgtgtgcttcaactctaggctctgagaatggatgtgtgtccagctgttcttcaagccaatttcttccagagtccctgaaaatggttggaaatggctcattgtcatggtggaagagcctgctgatggaggaaataaaccactaccacagccaccatcatcagaaacaacaactctatcaccatagcaattggtggtaggatcctttgaacctgggaggtcaaggctccagtgagtctcagcagaggagtagggggtgggtggcagctagggttagggttacggttagggttaggccagtccagttgctgaggtgaaacggctgggaagcatccttctccccaacagccaaatcataaatcaactctgttgtctgtgccttcaaacatgtcctgaacctgccccatctcaccagctgcactaactccctctctagcn

SEQ ID NO: 573961 - DNA, 266 bp, Homo sapiens
  misc_feature (113)..(113): n is a, c, g, or t
ctgtgctcacactcctggagtcaagcgatcctcccacctactgtggcagcctgaagggttttaaacaggcctgtgtggtgaatgccttggtgggccttggtgggaggatgggncctgactccccttgtctctgtacccctcctctctcctcctctttagaatggaggcaacctgctgtgtgccgtggatgaatccaaggatcacatgctctcggtgtgggacctggggccgagagacccacggtggtggctgtccgggtggagggt

SEQ ID NO: 573962 - DNA, 967 bp, Homo sapiens
ataccaggtcctcacacgctcggaacgagaagcccctcatctgggacatccccaagaagattatgaaggcaacaaacaggagaagatgctggattaaaagatgtcacctgtggaacataggaaggacatcaccaaacaggatcaggtaactattcgatttatacgtaccgcacgctttgtattcaaaaattatctatacctcagtacacaatcacgcgaaaccaaaaagaaaagaacattattgtagctcacgctaattaactgaatactatactctccctggggggctcataacaaaatcgactgcgcctcaataccactaacacatttaaagatcaccaaaacaactcacctatcccgacgcgtaagtcgcataaccgcttaccgcaccactccaatcgttccgcgacagcaccagccgacgctcccccctatatcacaaatattgtatttcgccactcccccgtcccgtcaccgccgcaccaacaacaaacctaaaaaacacgctctacacacaacaagaatccatcaaaaaagatatggaggaatggaaaacgtacttgtaaccaacactagccgcacatccctccaccaatccgacacctacacccgcccatatgcatcacccaatactcagcattgtcctcactcctcacataaatcgaaacaccacccctacagtccccgcgccgccatcacgcgatcatcactcatcacccctaacctgttacccatactacacaaaagcataatcgagtaatagtaccagtccgaggtacacaatgcacaacaccattgttatacacctactaattatgatagccattcgagagcgacccaactatcccccaactccctatacataccaccgccctccaccccccccccgctacatatcataaccaccacatcctacccccataatgacactcagccctagatagatacataccataaacccatatat

SEQ ID NO: 573963 - DNA, 200 bp, Homo sapiens
tcagtataagacaccatagactactcagatggcatccctggaccaaccagtgaccggagagacattgccaccctagaagggaagaacacaagactagctggactttaccaactagctgatagtagagccctacgggccttgcagcaacacattaggtagttgagccaacgtatatggtatacagtaggacacactgggtg

SEQ ID NO: 573964 - DNA, 494 bp, Homo sapiens
  misc_feature (428)..(428): n is a, c, g, or t
attccctgagacaaaacagtattgaaattaggccaatgaataaccttccagtgacttctgcagtgttcaagtggagcaaagatccacacgtctctcactggaaatcaaaaactagaaatgattaagcttaatgaggaaggcatgtcaaaagctgagatcagccaaaagctaggccttttgcaccacttaagcttaattgccaatggcaagcaacgtttttttgagggtattagaagtgctactccagtgaacacaggaataagaagaaagcagaaaagccttattgctgttttgcagaaaggtttaaggggtcgtgaagaagatcaaactattcccaacatttcccttaagccaaagcctaatccaaagcaaagcccctactttttttaactataaacctttaatcttttttaatttttaaataaaanccggaaacagggaaaaaacctgccaaaaaaaaatatggaagctttgcaaaggcttctttttggttt

SEQ ID NO: 573965 - DNA, 332 bp, Homo sapiens
aagacggagctagggtgtgagggggcgagagaggtcggaggggcggagagagagaggtagaggaggactgggtgacgagaatcagtgtttcagggaggcatgctggctcgggatggtcgaaaagcagtcgagaatcaagccaaaagattgtcacagttttgtttcggaattatgcactctctgggaagaaaactttacgcacttcttttccacaagtggactaccggaatatgacaagtcacaggtggcgtgagtgacatgaccggctgtgtcccttcctacacatatatagacgcacgccgtgctcaacgtctcacggaaccatgcacacg

SEQ ID NO: 573966 - DNA, 934 bp, Homo sapiens
ccacccagagctgtggtccccgaagggtgttcgtatctgtcttggccatgttgtgcatctccaggtctcctctgctcagaagatccccagtgagccctcgatgactccattaccttgatgctagtgcgcaggcagactagaagacgaggtgagggacaagttcatacgatccctgctgcatcagtgtctgcctatagattagattagccgtcggtgccctatgcggctggacccatgacgtgtgagaaacctggcctttcagaggtcggtattgaagctggagctgccccttgagaacttcatggtcgaagggctgataaagccagacactgcaagtcagcccgggaccttgcgggttgacaaggcctttggcggcagtgccggcaaattggctcgtcacggggagactgtttgacctcctgggttctgccttcgcggggtggtcctggggccatgacgtgctgggtgtctcctgatgatcgggggtatgctgcttgggcctgtctgcggggctggactcggtcaccgtgctttctggttgtcacacgttagtccgggtagggccgtgaggtgggccgtgcccttgtacctcgtgttccgttgtcatggccacctcgagccttgttctccgctgtggcagctgggatgtgtaggcgggaagctgacataggaactgcttcctgtcgacttgccactctggtgttgcgcgcctctgcatttctattaccgtgtgattgctggcgcccattccgaccaagatttcggccttcccaggaattacaccgggggaccggccactgtaaaagagcccatctcgaacgcggtcaggtggggtcggaaaacccgcgcggggccaacatccggtttgtcagcagacccgccgcgcgggtttgcccagcttatctaccacgagaaaatgtaaataagatgactg

SEQ ID NO: 573967 - DNA, 377 bp, Homo sapiens
gagctcattcactcctcacaaacagccctgccaggcaggtcctcaggaactgttaacgcagagttaagagggtcagtttcaatctcagttcccattacttaacagataaggtaccttggacaagttactcaacctctttgtacccagtaaaagaaaagaaggataatagtagtagcaactttgttgggttattgcgaggattgagaaagggtttagatagagtgcctaaataggtactcaaaaaaatgttagctattggctgggtgcagtggctcacatttataatcccagcacggtgggaggcggaggcaaatgggtggcttgagctcaggagttcaagaccatcctgggcaacatggagaaaccccatttttaca

SEQ ID NO: 573968 - DNA, 459 bp, Homo sapiens
  misc_feature (61)..(61): n is a, c, g, or t
  misc_feature (454)..(454): n is a, c, g, or t
tttgagacaagatcttgctctgtcacccaggctggagtgcagtggtgtgagcatggctcantgcagcctctgcctcctgggctcaagcgatcctcctgcctcaacctcccaaagtagctgggaccacaagcatgcaccacaacgcctggctgacttttatattttttgtagagatggagtcttgcaatgttgcctaggctggtctcaaacttctgggctcaagcgatcctcccacctgggcctcccaaagtaatgggattacaggcgggacacttggtgcccgatcttaccctgtgaatccttcaacctgcctcaacttggagccaacagagctgctggcacctcctggaaagccgactgcgtgactgctgcatggcctggacctagaggctggaggggcttctctttgggcatgcactgcaatgtgggtcttgaagcgcccccacgtacgtgnaagct

SEQ ID NO: 573969 - DNA, 548 bp, Homo sapiens
  misc_feature (34)..(34): n is a, c, g, or t
  misc_feature (40)..(40): n is a, c, g, or t
  misc_feature (289)..(289): n is a, c, g, or t
  misc_feature (312)..(312): n is a, c, g, or t
  misc_feature (370)..(370): n is a, c, g, or t
  misc_feature (429)..(429): n is a, c, g, or t
  misc_feature (446)..(446): n is a, c, g, or t
  misc_feature (449)..(450): n is a, c, g, or t
  misc_feature (510)..(510): n is a, c, g, or t
aatcaacatggagcttttaaaggtggctaacggntaactntctgtgccaaggctgtgctgccatcctggatacaggcacacctgtcatcgtaggaccccactgaggaaatccgggcccgcatgcagccattggggaatccccttgctggctggggagtacatcatccggtgctcagaaatcccaaaactccccgcagtctcactcctcattgggggggtctggtttaatctcacggcccaggattacgtcatccagtttgctcagggtgacgtccgcctctgcttgtcnggcttccgggccttggacaatcntcgcctccagtacctgtgtggatcctcggcgacgttttcttgggggcgtatgtgaccncttcgaccgcggggacatgaagagcggcgcacgagtgggactggcgcgcgctcgccctncggagcggacctggganatnngagtaccgcaggcgcagtacccgggtgccgcccaggttgatgcatgcgcaccgggtagcnagatagcgctactcagtaaaaatccaatatttccattg

SEQ ID NO: 573970 - DNA, 160 bp, Homo sapiens
gtggttcttgtgctggggaacaccagttagtgtggagcagcccagccaagcactgtcaggaatcctggacgcagctggatagacacttctcctggtgtcacctgggtattaatttcattttcatgtgggtattataaccgagcacaagaaccacacgggt

SEQ ID NO: 573971 - DNA, 896 bp, Homo sapiens
gagcgggcggggacacttccctgggcgggactgtctcggtggcacccggtggaaccgaggagaacgtggagctgccggtgagcggcgaatatggacgactacagcctggatgagttccgtacggcgctggcaggaggagctggcgcagtgaccaggcgccgaagaagcggcgacgtgccctgtagtgctgccgagaggctgggctcggcggccggcaggtgggctccgggcgcagcagaacaggcctcgggggacccggcgctggcccagggtctccctggagggcgctggggaggccccccggcaggcgcggtgctgaactcgggccgacggggcacaggaccgtacgcggaggccgatcacgtatctcctctgggcccgcgagggcgaccgcaggggcgcgtggagccaagctgggtaggaaccagactcatcgcgctgaacctgaacatgataatgaacatgcatgtagcatcatacatcttggactatccaaacgttgcctttacggaacttgcgccaatcaaataatattttgcagatatactgggaaccaggtaaaagcaacctaagagaagaatgtgcgacagcggtgacgcaatgtacgttggcaaagcggtgcacttcggcaggaagggaaattgcacgcgcagccacgatggggataccaagcggcatggtagccccacgaccacgcgcacacagcgggcataccccaactacccggggaacataccagcccacccactcactcatgcgaccctaactctcatatagcactgaggcaaagcccaggccacatccctaccccaacagaaagtgtgcgcccaacgccacaaacggcaaccaaacactggattgacacaacagccccaaacctgcgcaacaacaccact

SEQ ID NO: 573972 - DNA, 229 bp, Homo sapiens
  misc_feature (150)..(150): n is a, c, g, or t
ttcgtcgaagaacaacggcacttatccagtgaaccactatcacgaaaaaaactctacgctctctatactaaatctcccctacaaatctccgttaattataactattcacagccacgagaacgtaatccgtgattttactatcgttccttngataaccactacttatcccctaccttggctatcatcacgccgatgaggcaaccagtccagaacgcctgaacgcaggcac

SEQ ID NO: 573973 - DNA, 672 bp, Homo sapiens
gccaaggacagctttgtgcctgaagaagtggctgcggctattgttttacactttttaaaatgacaggtggtagctgccaagtgtaaaatcaactgtgggccagataaatagacccacatattgtggacagtattcctgcaattgtcttggtgatctgatcagccaccaggctcaaagaaccctgttcatttaacaaattattgacctggactcctgttatatgccagggcctgtcctaggccctgggaacatgacattgagcaacagcatggcccctgtccttagagaacgaacattccagtgtgtgtgtagtaaggggcaagctgtcctgtaccttaccgatatattagcgtagtgtcatcgtgggtaaagtcgactagatctagttttgaaccaaacattattattgctgtattatacaagaggatatacgcatccagcagtcctcgatcttgtctgcagtaggattcacgatgagatcgactaggtgagtccacgacttagctatgatagggtatgggtgcccaggtagaatagaatacttggacacgtggaagacactgaatgggtccctcacggatgacatcggaagataatgtggcctaatcttcctccaacatgtgcacgggcatggtaagaacgtacatctgcgcagcaccagcggcagacgaa

SEQ ID NO: 573974 - DNA, 309 bp, Homo sapiens
  misc_feature (84)..(84): n is a, c, g, or t
  misc_feature (136)..(136): n is a, c, g, or t
  misc_feature (154)..(154): n is a, c, g, or t
  misc_feature (174)..(174): n is a, c, g, or t
  misc_feature (185)..(185): n is a, c, g, or t
  misc_feature (223)..(223): n is a, c, g, or t
  misc_feature (275)..(275): n is a, c, g, or t
ctgacctggcagcgggatggggaggaccagacccaggacacggagcttttggagaccaggcctgcagggaatggaaccttccanaagtgggcagctgtggtggtaccttctggagaggagcagagatacacctgcnatgtgcagcatgagggtntgcccaagcccctcaccctnaaatgggagcnatcttcccagcccaccgtccacatcgtgggcatcattnctggcctggttctccttggagctgtaatcactggagctgtggtcgctgcttntaatgttggaggaggaaccagctcaaattagaaa

SEQ ID NO: 573975 - DNA, 523 bp, Homo sapiens
cggagtgcgctgccagagaaggagggcgaggagctgggcgagggcgatgcggcccgatggatggacgcagcgtgcgctggagctttcgtcggacgatggcggtggagtgttgaggatggttatttgagtgatgtccctgtgcagagctgtatcaatgctgcagctggcctgctggctgcgtggacgacttcaagaatggccttctccaaggagaagatggagaagaccaaggtgcgtacccgcgagaacctggatgaagactgcgcctcaagaccaatggaaaacctggagaagacgctggcacaccctggagaagcgcatgaacaagctggtgcactgctgcctgtgtgcccgccgagctggctgcgagaaacatgaatgactgtctgctgggacaatgttgcgcaaatccttcacgcccgaccacgtggtgtactgcgcgctccaatgaccagcggtctacaaggtgccacccttcaccttccacgtcaagaagatccgcgagggccagtgtggaagtgct

SEQ ID NO: 573976 - DNA, 395 bp, Homo sapiens
  misc_feature (212)..(212): n is a, c, g, or t
  misc_feature (229)..(229): n is a, c, g, or t
tcaggaggcaggataacgttgactggagcagagtcagtgagcgagattgcacactccactcagcctggcacagtgtgagactccactcaaaaaaaaagagagagagaaactgagtccagaaagatagtactttcacagagtccacagagagtacgtcgtgcaggccggaccagtctagtttgggtacttttaaccctcggtgataaccttanttgtctctacaattctncatctacccttcagctattggctagtctgcagaagtgtgtctatcctagattaacccacccagctactttaaactataactttgtccccagatgggaactgcagaatctgcttctgattcacctagctgcctacctagagtagctaggggggtacccgagctcgaa

SEQ ID NO: 573977 - DNA, 322 bp, Homo sapiens
tatcatccttcctgcaccctgtgggctcctgaaactcacatgggtacaaaagatacagtaaagacataaataccacattttgacacatggaaacacaaggagtgtccagcaaaagagtagcagcagtgaggaagagctgccgagacgggtatacaggaagctaccctgtgtttctgagaccctttgtgacatctcacattttatccaagaaaggatgatgagacagaggcagagccattgttgttccgtgctgttcctgagtgtcaactatctgggggggacattcccagtgtatcacgaacgagcaggaatcttcagaggg

SEQ ID NO: 573978 - DNA, 256 bp, Homo sapiens
ggcgaccgagtacaattggctgacatcacagttgtctgcaccctgttgtggctctataagcaggttctagagcctctttccgccagcctttccaataccaaccgctggttcctaacctcaattaacaagcccagttccggctgtcttggcgagtgaaactgtgtaagagatggccagtttgatgctaaaagttgcagagaccaacctaaaggacacacacgcaagagagggctcacgggagagagcagagcccagc

SEQ ID NO: 573979 - DNA, 482 bp, Homo sapiens
  misc_feature (111)..(111): n is a, c, g, or t
  misc_feature (342)..(342): n is a, c, g, or t
  misc_feature (392)..(392): n is a, c, g, or t
  misc_feature (429)..(429): n is a, c, g, or t
aaaaaaaaacttcctacttcctaatgccccacagtatttgtcaaaataaacctggggaacagaagaaaaaagacattcctgaaaaataaggggtccagaagctgtagcagnaaaaatgtaacatcccttaatttttccaggaaatttaatagagaaaggcctactgttatgtgtgaatgaatacaaacccccagtaaagaagaggcccaggctcttgccctataatccccagcactttgggaagctgaggcgggagaattatttgagccccaggagctcaagaccagcccgggcaacatggggagaccctgtctctacaaaaagttagccaggtgtggtagncatgctgcggtcccagccactcgggaggctgaggcgggaggattgcttgnagccacctcaaggtgggtgcagtgagccatgtaatcngccactgcactcccgcctgagcaatgaaggaagaccctgtctcaaaaaaaaaa

SEQ ID NO: 573980 - DNA, 1152 bp, Homo sapiens
  misc_feature (463)..(463): n is a, c, g, or t
ggcaccctcggctgggtagcgccagcagagcgaccaaagcgtcccgacgcctatccaggtcctgcactccagaagccatagatagatgctccatgtgcggcggcggccaagtcccaacaagcctttccctggatggatgcatcggtaccgggggacttgcgcctggagaactatcctatccctgatccaggcccaaatgaggtcttgctgagagatgcattctagttggtaatctagtgtgctcagcatgtccacgtactgggaagtatggtcgaattgggaattattattgtgaaaatagcccatggtgctgggacatgaagtcttcgggaacagtgcgaaaagagtgggatcatcggtaaagcacctaaaatcctaggtgatcgtgttgccatcgagcctggtgctccccgataaaagtgatgcagattctgcaagatgggccgataccatctgtcacctntccatcttcttgctgttgccacgaccccccgtatgacgggaacctctggccgagttctagtaaggcacaagtgcaagcctgtttggttagcaatgcttccgtgagcaatgtcaccttatgacggaaggcagccctgcatcgaggccactttctgtggggatccatgcctgcaggagaggcggagttaccctgggacacaaggtccttgtgtgtggagctgggtcaatcgggatggtcactttgctctgtggcaaagcaatgggtagcagcgtcaaggtattggttgactgatctgtctgataccgattggtccacaggcaaagcagatggggctgatttatcctgccgatttccaagagagccccagggaatctcgctcggaagataaaagctcggtgggggttcaaccccgaaaatacccatgaatgcaccggggcacaggctcactcacaggggggagatttttagcaacaccgccctagtgttgggaccccctcgtttttcggccagctgacttgtgtaagaacaccgaccccattgggtaatcacacgcgttgtgtgatacaaaggacgatctatctacaacatagcgagcagagcaaaactatgtcaccaccagcagagataagcccacccaacagacttcgatacaacggtcgtgataaacatatgtgtcaagctacgaacca

SEQ ID NO: 573981 - DNA, 81 bp, Homo sapiens
gccgaggacacggctgtgtattactgtgtgactggttctgcttcgggcagttctcgctattttgacttctggggccaggga

SEQ ID NO: 573982 - DNA, 324 bp, Homo sapiens
cggcatgcgcactgaattcattgacaactgcatccctaccaagaaggcccgatagaagtacgagaaaccagcaacttccagcagggaaggaacaccacgtatggcatatatctgctgctcagaggacaaggaattctgatctttccttccgccaaagctgtcaacagcacaaccaatcagcttcaaagtcagaacacaatgtggcatcgtccacttgatatcgtacttgccgatggcagagtaatagtattcagccagaatgtaggccatctgtaagcaaaagggagcgcggacggcagcgatggcgcggcccattagtcgaag

SEQ ID NO: 573983 - DNA, 124 bp, Homo sapiens
gccaatctcaggctcagcagcactgcagcagatcatttcatcattgttagtggcagtgtggcgagttcagctaaatattttgagaccggtggggatagcgatcattcatggtcagcggaggtga

SEQ ID NO: 573984 - DNA, 263 bp, Homo sapiens
ccccagtcattccatacaaagacaaagaactctacaccaggcggccaccatgtctcgccgaaagttatgaagtggcagtttagctaatgcctgaaacgggtcctttatcttgatgttttacatttcaacaagaaattctgaaaacgtatcaaaatctctgagtaatggaagaaggcatcacctatctactagctaaggacaaagtggataagagctagcgtctaaaatgtttgagtaggtgtccgaagcaagaaagggagctg

SEQ ID NO: 573985 - DNA, 417 bp, Homo sapiens
gaggatcttacgctgctcctcttagaaacttaagagtactttatggagcccctccctaccccgagtagaacctaacagggacctcggtttgttcctgtgagtactgccaggacttgtttaatgggtgcttggggttatgggtttacctaccttatttttatctcctcctcctcctcttcatcatcatcttcgtcatggcagtgtgtaatattcctgggggggccagtgggaagagggttgggaggtttaatctcactaatttgaccggtgccagctggtgccgcttgtaagtcagtgtctttttgaaatccactgattgtgcgggttccgggtggcaagagggagactccatctcattgatatctacgtgtgtgtgctccaccgttgattcatgaggcatcaagacatgggccagcc

SEQ ID NO: 573986 - DNA, 409 bp, Homo sapiens
ctgccgatccttccacctctgtggaagggcggctccccctgccactttccccacttccgcgggggagtggcacactgccggccggctctctcgggggctgctcagatgttatccggatgttccctttagatgttcctcgtgcatgttatctctctcctcctttatagtcctcttccaccaatcccaactctgctacccacacgctgagtacgctgctctcctccaatcaggagcaggatcagctcctgcaggtcatcactcaagttggcgagagacagctgcgtagaagttgtttactcccttctcagcgccatattgtgggagagcagatgcatagaataagtcttaattccagtaacttagtctagtccgagttgctccccacagtccttttgcaatgcactttttt

SEQ ID NO: 573987 - DNA, 408 bp, Homo sapiens
atcccctcgtgtcatcccctctggagaatgtagcagcaaggtgccattttggaagcagggagcagccgtcattagacacagaatttgctagtgccttgatcttggacttcccagcctccagaactatgagaataaattgctgttatttataaactatccagtctcatgtatgttgtcctagcagcacaaatggactaagaaagaactcataatcaaaagtgtcaatcaaaacagctgccgtaaagacagatatacagagaccaatagaagagaatagagagcccggaaataaatcctcacgtataaggtcaaacggtttcaacagagagccaagaccattcaatgggaaagaacaataaatggtttcaacaaatggctgaagactggataggataacacgttcgcgag

SEQ ID NO: 573988 - DNA, 216 bp, Homo sapiens
  misc_feature (165)..(165): n is a, c, g, or t
taatcgtcacacgcacggagaaggatgggtttgatctctggtcctgtcagtgggttaggatctggccttgctgtgagctgaggtgtaggccacaaatgtggctcagaactgttactgctgtagctgtggcataggccagcagctgcagctatgattcaacccctngtctgggaacttccatatgccatgggtgtagcccttctccggtggcgtggt

SEQ ID NO: 573989 - DNA, 224 bp, Homo sapiens
cagcacaacagccctgccatgggtttgtttgtcttctctactgctcactcccaacctttcgtaatgccattctctacaaccttatttctgagctacgtctcagcttacacttgtgtaatctacacatcacgaccacccctaacacaaccaccaaaactcctattgtggtctgcactcgactaacttacaaaatgctagcaggaaactttcaaaaaaaaaccaaa

SEQ ID NO: 573990 - DNA, 181 bp, Homo sapiens
ggggctggagaagtgcaggcagcagctgcaggagtgagctccggcaggtcagctggccagctgttggaggagaggaagaagcgcgagacccacgatgcgctggccctggagtgctccagaaactgggtcctgctgctcaccaaggagcgggacggtatgctgtggctgcagtctgtgaggt

SEQ ID NO: 573991 - DNA, 1626 bp, Homo sapiens
tttgttgcgcctttgttatgatctgggtgggtcgtcgcctccacactggtgttgttgtgtgtcctcttcactgtatactgcttctcagcggcggcttgctgttttgttattagcctcgctgcacgctggccgcctcgtctgttagttctcgttgtttgtctccgcggggtgtctcttcattagtggtgggttatgcttctcgtaggtggcagcccgcctctggtggtggggtgtgttggctcttacagtgttttccttcgggcagtcccttctggtggggggcgtccccccccccgggtggatgcggggggggggcgcccatcatctatgggtgtgtatgtgggtgctggtgtgtgtgggtgacttcgtctgctttgtttttcggctgcgcggttctttttgttgttggtgccccttcgctgttgatctccactgtggtgtgtttctttgttatgtggggggggggatctctttctgtgtgttgtttattgtctctctctattctctggtcgggggtgggtgtctctcgtgtggggggaggtactttgtgtatgcccccccactaactatttttttgtttactcctttgtggtggtggggactattagttgtgggggcgtcgtattattattgattattggcggagatatgatataaatatctttttcgttcttggtgagggtccaccctggatggatgtttgtctctcctccccaccacccggtgtcactattataggccgtggagaagatgaatatagttggagatgaaagaggtgctttgtggaaagtttctgtgtggagtgctccctcattcttgtgtgtgtcatacagagggcgctccactgcacattacttctgttcctctgaagaaaagagcgcgttctgcggagaaaaataaacccgtgtgttgtggtgtgctcctccgcccaactgggcctccgctgctccgcgttgtgctctgcttctccgcgggcggtgttgttctcttcactccccgcggcgtctgttgttcttctgtcgtgcgccgcaactactgttgtgggggtggtgctgctggtcctgctgcaggtgctcctactgcgggtggttggtgggctgcacctgctattagtatatggtggtgtggttattttggcgagtatattagttgtgttttgtacacaccccactgcttgttcttctttatctccttgtggcggtggtgtattataaggacgccgcactccttactcctacgcgggtatgatgctgcagacactctgtgtgtgtgagacacactctgcgaagtgtgtgtgtgtgtgtgtgtgtgtgtgtgtgtgtagatatgtggtgtgttgtggtgtgtgtgttgggtgtatatatatggtgtgtgacacacacttgtggagagaaggtgactcacttgtcttgtgtgtgcacaaagctgcttgttgttttgttgtctggaccacgtgagttggtttaactgtggtcacaaaacactcttgtgagactcgtggttgttggtgggattttccaatgttgtttttttaaaagtgcattccctgtgctattttccaaaccttgagtttggccccccatttttggccgttccaaagtgttaaagactatttatcgttggttt

SEQ ID NO: 573992 - DNA, 1397 bp, Homo sapiens
catggtggggtgggtttcaggtcacattgtttcagtttcatgcattgccagcataaactcatgccagagcacacttaacagtcttcagcacatggcacacacacagtcaaagcacaatcatcaacttcccaagttggcaaggtaactccccaatgcatttcagtttattttccccccaagttggcaatggggcaagctgcggggcacagttacaatcatgcagccacttggcgtgtcaccagtgccattcacatttgggccacaggcacacagtgtccataaatattgcatcactgtcatcatgtattcacttccacacagtcatcagcagctattggcgggcacaggcaacagtcaattggcaacctggggggtccgggtctagcgcctcacgtgggctggcaccaattcaactcacacattcatgcgggcacacattgccaacaaagtaagtcacagcgcatcatcgggtcagtagtagtaggtatctcctttctggggcacatattatactaccagggtagcatctgccacactccacattcaaattttcaacaacaacctcacctcaatcagcaacaacttggcctagccagccccacaggggcacacgatggcgcttataactgggcatcccctttgcacaggggggcaatcttaccctcctatgcattggggtccagccccttccgggtccattccaatcccacaagggttccaaaggaaaatgtccccatcaaacatgcgcagccacaggcccacggcaacggcagggctccaacaggaccacaaccgacttcacaagctcgcaacacaaacaggagtgggttacgcgggcacacgaacacaatcaaaaatctcaaacaccccacgtcgggggctagcacacgcatgtggccgagagaccaccaacaggcaccaggcctacacgggggctacaagggaccccacaacccaacaacactatcgggcgacaccaccctgggaacacacactgcaaacacaccccgccaacaacagggcaccgggacacccctcgcgtcaacccgggaaccgcaagcgaactagggtggccacaccgataccagcaatgcaaacagcacaccactaacaacagagcgtacagccacgcggacgaacagcaggaaaacgcgcaccaacccttgccagcaccacaccaaagacacacagagagaaaaacaacctacgggcagcccaacaacacacccacgagacaccacgcgacaggacccacaagacacgcaaaaccgacagaccagggcagccgcagcaaagaaagggagacacagcaaaagagtcaaccgcccggggcagacacgcccaccgcacagagacgagaaacactaggaataaccagagacaccagacaaccacaa

SEQ ID NO: 573993 - DNA, 384 bp, Homo sapiens
ggcaggtgaggagaggagccctcttgctgggctggtgggatcgtccgccaggccatcgggggtgtgtcaggggcagggctggagggcggggggtttgctgtgggttgacggcaccacctagctgctccccgctctctgcacctctgccctggcagcagcaggagctgactgctcaccctgaaggagtgcctgagacaccttgccacctggtagcagcataccctcagcatacaggcttgacagggtccagagaacccaggggagacagacaccaagaaagacgatggcaagaaagttcctggccagcaacacccccctccacgccaggcaaactcttgcacataccgtcaagagccatgagggccggtcagcctctctggcagc

SEQ ID NO: 573994 - DNA, 1369 bp, Homo sapiens
  misc_feature (548)..(548): n is a, c, g, or t
  misc_feature (757)..(757): n is a, c, g, or t
ggacgcgtgggcgaggcggggggatcacgaggtcaagagatcgagaccatcctggccaacatggtgaaaccccgtctctaataaaaatacaaaaattagccgggcatggtgacgtgcacctgtagtcccagctactagataggctgaggcaggagaattgcttgaatccgggaggcggaggttgcagtgagccgagatcgtgccactgaactccaacctgccaatagagcgagactccgtctcaaaaaaaaaaaaaaaaaagaaagaattagctttgaaggaaaattaccggacattcagaggaaagctatattttctcggcagtgggtgctctttttcaaagattagaatttttgtgaagcatgtgtttttcttagcgaatgtggtgtggatgaagggttgaacctgtggcttgaaggcattcgctctcaagcgtggaggggagtgggtgcgtgttaagaaagccacgttgggagcccacaagaaggccaccttccttattagttcgagcttaaggggctttccctttttctggcgccccgagcttnttggcgcgctgacacgggggtgactcttcctattttagaaccacattcttggtgcctttacaagctcaatagaatgtgtcttacctaagaagcgaaaagccacaggttttccagtgacgtggccaagaatttccctgaaattagacagttttggcctgaaaaggaaagttctaactttctggggacctcccagcggcgcaaagctttgnaacgcggccccacttctggtggtttcaaagagcgtcttgagagggccaaccgggtggtacagagacacccctgacacacgcgctaaggtttaacaattatgcggcttcctgtgacacatatgtgtaacctccctcccattagaaatgggggttccccccgcgttggcgaccgcagttgtttgctctgtgttatgcgagaattttctttagaacccttctgtggggagaattttccccccctgggtctggggcggaccaacttctttatttgggcgcgggcggtagaactcagttgtcaaggggcggataaccccgggagttgtcccccaaaggcatacatagtgggggggcagtcatgaaggacaccaatcaacgaccctttttgcgccgtgtgtgggaggaacaccattgtatggggcgcccccccacacatattgtggctgtttctgtgaagcgccaaccttctttgtaaaacacccgcttttgaaaggagtgcatatatgcagagacaccctgttgatcaacaacatacttggccgtagaatatcaggccatcattaagacgtattactaactgacacaagacggcaactcacatcgtggtagtccaca

SEQ ID NO: 573995 - DNA, 104 bp, Homo sapiens
gtatgtgagagggctcctacgtccgcgaaggccagccgctggtgcagattaacgacgtgttgctgcttgcgcccagtgtgcagcagcagcaggcgggcgtgcag

SEQ ID NO: 573996 - DNA, 202 bp, Homo sapiens
ctcggcgtgtgtgataacgaacgtatgcgcctgcgctacgcggaaggcccgtctcgtctctgcttcctgtctgcgccccgttcgtgtccatggcgggtgcgtgcgcggatggcctgtgaagtactggcagacgtgcgttgctccccgacatcacgcggcccaacatcgtggaggcgctgctacatggtgtccctgcccatgg

SEQ ID NO: 573997 - DNA, 250 bp, Homo sapiens
acttgatagaaacacgtctttagacatggaatgtctctcccggactgcaactaatacagtagcgtcgccttatgtagcagtttcacaggcactacctaagagataccaaactgttcatagtacatagtggtgtaactagaattgcatgtacagctcctaaggtaacaccattgaaagggacaacattcattagagatgcattaataccggaatatttccttacaatccaactgcactgctttgtacaccc

SEQ ID NO: 573998 - DNA, 166 bp, Homo sapiens
tacctcgggccatggacaacatgtggcatggttctgtgccacattcctgaagcaatcttcctgctagggccattggacacagaatccgagtgatgctgtacccctcaaggatttaaactaacgaaaaatcaataaataactgtggatttgccgcaggagggtaccg

SEQ ID NO: 573999 - DNA, 130 bp, Homo sapiens
ctggagtgtaaccctgaattacgattattatgattttcaagatcacatttctctgttattcggaagtacagggtcaatttagactaaatgatcggtgaataaagtgactttgtcttgatgtatctgagaa

SEQ ID NO: 574000 - DNA, 235 bp, Homo sapiens
atcgttgaggcaggacactgtcgatgctcttgatggggccaaggggcaagactggggatggtggtctcccccaggtcatagtaaataaggccacgtagaccgcacatgatgggcagcggccggctgcgctgagccgccatctcaggttggtgaagctgctgctgctgggtgcgcgatggtcttggttcagcagcacactcttgatgctctgctccatggcggtacttcctgggcc

SEQ ID NO: 574001 - DNA, 387 bp, Homo sapiens
aagaaagaccagatgccagttacagacacccaagagggtgccttctaatacaggaatgtggctaacagataagtataaatctagggagtcggacagagtctcactctgtcgcccagactggagtgcagtgaagcaatctcagctcactgcagtctcagcctcccaggctcacacaattctccagtcagactcccaggtagctacgattacaggcacccgccaccacgcacggataatattaagtatatatagtaaagacaggcttacaccatgttgtccaggctggcctcaaactcctgacctcaggtgatccacctgactcagactcccaaagtgcagagattacagatgtgagccaccgaaccaggtcaaaaaaaatttttgaga

SEQ ID NO: 574002 - DNA, 276 bp, Homo sapiens
agacgtatatgccatagctgttcctgatgtaccacttgtatccgccatcgcatgtcacgatgtggtaaaacgtcgggctattgagattcgtctctcctgtctctctctgtttcttgcgctctctcgctatcctgtgactccttgcactctgtccgtcctctctctttactagattctttctctctttctctttttattagattccctctctctgtctctgtctctgcctctctttctttattagattctctctctccctctctttccccctttctc

SEQ ID NO: 574003 - DNA, 441 bp, Homo sapiens
aaatgctcatgagatcagatttagcattaaggtagtattagtctatgctgagctcagtacacaagaaacaaaaacaaacataaaatcaacaaaaaaggaaacagtacatattattaaagtaaagactaaagtcgagaagttttattttaaaagaacagaacatttacaagacatcagttatttggtgccccatatgtcattaaaaaagtttacttataccttgtattattatttccctaggctagtcaagcagcaaaccattaatcggtcggagaaacctgcatgacatatgcccgactggctcttcgtcacccacttgaaggacactacccaatcgatggaagcctttaatcgcacagccctccctattagcggactactggcggatgcagacatgtactactcgagcagttacccatagatcgttacatggggatcctc

SEQ ID NO: 574004 - DNA, 166 bp, Homo sapiens
atgacgatagaagcggcggatgatgtcctaggagcgtgcgagcacacgaagtactcctgcttcagccgcagctccgtatccctcaaagaagtatacatttggatacaggacgcctggagatgactcaggcaagtgcctcagatgtgccctgtcgggctagtcgggg

SEQ ID NO: 574005 - DNA, 323 bp, Homo sapiens
tggcgctgcgcactatctatcaatccatggcgcatgccccggagatactgttccagaacgcggtgtcggcccagcagacagcaaaacaccctggcccaggcggccaccaaccagtgacgtgatgcagatctacagcgtcgataccaccgcaggtgcggcggccaccgagaaagtcgcccagggcggcgtgtcggataacctcaccagcctgttgaccgtgctcaagtcgttccagccgtaagcactgagcactaacggatgtggtacttactcaacccaggagtctccaccatgagtacagtcagcccgcaaatcactgatgc

SEQ ID NO: 574006 - DNA, 567 bp, Homo sapiens
  misc_feature (45)..(45): n is a, c, g, or t
  misc_feature (83)..(83): n is a, c, g, or t
  misc_feature (96)..(96): n is a, c, g, or t
  misc_feature (102)..(103): n is a, c, g, or t
  misc_feature (163)..(163): n is a, c, g, or t
  misc_feature (169)..(169): n is a, c, g, or t
  misc_feature (224)..(224): n is a, c, g, or t
  misc_feature (245)..(245): n is a, c, g, or t
  misc_feature (317)..(317): n is a, c, g, or t
ttgtgttgggtaccccgccgaaattcggccccattatggcccggnggacgtgatgatcttgtgcggatcttctggcaaagcanaccatggggactnaggagnngcggtgagggaagtctggatgctgtcggctcctacgacgatccgactgccgccttagagngaaganacctctccgagacctctcatcacagcccgtggaagcgttgtagctcccaagtagngctcatgagaagtgtactccnttgtgacagatatgcgaagatataacaccaagccctcctatggataccaatacgctctttccagacctacgngagatagagaaacttgacaggtttccttccgcgcataggagcccgccaacgatacaatgctttgcttcttctggtgggccaatcttttatcactacctagacggctccgtcctattgcctacctgggaccactgtgaagcctgggcacttttcccaacaaccagcacagggtttccactttggtccctttgatcaggatcaagctgggcactttaatgcctcaataggaccggtgcttggtgggttccct

SEQ ID NO: 574007 - DNA, 920 bp, Homo sapiens
  misc_feature (8)..(8): n is a, c, g, or t
  misc_feature (439)..(439): n is a, c, g, or t
ggagcccngactacgctaacaaaacaggccaccacatgcaccccaatgtggtcaacaaacggagggttagccctcctcggaacatataaccccccgtgtttaaagggcgaccactctaaaccaggggccacacccacaaggggtcaccaacgccctggggcccccctgggcggggagaatgcccacctgtctcagcggcgaacgttcacggcccacaaatcggtgctcaaagagcctccagcgacaccgggtctttacacacacgggtaattcttgcgctgccacacaacattatcttcatggcctaatcacggcgccatctttggccttggataaaaagaactgtggccccgcccacctgggtcaaccaccaatgaaagcccagcccccttgggggggcagtaagcacaaaagcatgcacctcagggaggaaggagantatacagccaccacttcgcggagaaacaagccggaacaccccacgtcttgtataagaagacaagtggccaaatgtatcccggcgtcacataaattggcgcggctcgccccttggaaaacccaagcaccacactgggagcccgcgtgaccacaagaagggagcgcgaaatgggaacccaccggggcaccaaagcctcaagctggcccccaggcgtgagaaccacgctaacctccactacccccggcgccacaagtagcagagatgtcaagggtctcacataaaacgacgccaccaacacaatgcaacgtcacgtccacgacgccgacgcgacgctcaagaagcccgcgcaaggaggtattaggcaccccccacccccgggagtgggttcccccccaggggtcagaccccaagagatggaaaaatataagccatccacaggccctctctaaaacaaccggcgcacccaccggcccacaagaca

SEQ ID NO: 574008 - DNA, 286 bp, Homo sapiens
ctctcaagatcccgatttccactgtttatagtaaaatatactttattttttaatacaatagcttccagcaatatactggtgctgatgttccatagaatagataaaatacattcatctataataagctttcatttgccttttctagaaattattaagaatatactccaattctgttcaacattacggcttgaggagttgaattttttccatgttatctatatactcttgtgtggcccataccttgatctgatttataaaggatggagttattaaaagctctacacta

SEQ ID NO: 574009 - DNA, 193 bp, Homo sapiens
tccttgtaatccaagcagtcgtccttgtaatccttcttgcatcatcagtgcgtgcttagcatatgcttgtctcaagagattaagtcatgcatgtctaagtacgcacggacgctacagtgaaactgtgaatggctcattaaatcagttatggctgctttggtcgctcgcttgtatactgcttgggttacacgga

SEQ ID NO: 574010 - DNA, 276 bp, Homo sapiens
  misc_feature (10)..(10): n is a, c, g, or t
  misc_feature (23)..(23): n is a, c, g, or t
  misc_feature (30)..(30): n is a, c, g, or t
gttgtagatngcgagagatggtntggattntcttgctgagttcttgaagactctagggtgcgttgatccacacaccaagcctcggcgatctgcgccaacgcccgattgatgtagctgcgcaacgtatataggtgaactgcagctgagcgtagagcacatttcgtacagattcgcttcaagcacagggtggtcgtattgcccgtacttctcttggttctacgcgtggagttcacaccggagctattggccaaacgttccagttccaacaaaccgttg

SEQ ID NO: 574011 - DNA, 904 bp, Homo sapiens
  misc_feature (4)..(4): n is a, c, g, or t
  misc_feature (278)..(278): n is a, c, g, or t
  misc_feature (338)..(338): n is a, c, g, or t
  misc_feature (413)..(413): n is a, c, g, or t
  misc_feature (475)..(475): n is a, c, g, or t
  misc_feature (507)..(507): n is a, c, g, or t
  misc_feature (510)..(510): n is a, c, g, or t
  misc_feature (514)..(515): n is a, c, g, or t
  misc_feature (518)..(518): n is a, c, g, or t
  misc_feature (535)..(535): n is a, c, g, or t
  misc_feature (546)..(547): n is a, c, g, or t
  misc_feature (553)..(553): n is a, c, g, or t
  misc_feature (556)..(557): n is a, c, g, or t
  misc_feature (560)..(560): n is a, c, g, or t
  misc_feature (572)..(572): n is a, c, g, or t
  misc_feature (574)..(578): n is a, c, g, or t
  misc_feature (583)..(585): n is a, c, g, or t
  misc_feature (590)..(590): n is a, c, g, or t
  misc_feature (595)..(595): n is a, c, g, or t
  misc_feature (597)..(597): n is a, c, g, or t
  misc_feature (601)..(601): n is a, c, g, or t
  misc_feature (603)..(603): n is a, c, g, or t
  misc_feature (605)..(605): n is a, c, g, or t
  misc_feature (607)..(607): n is a, c, g, or t
  misc_feature (613)..(613): n is a, c, g, or t
  misc_feature (615)..(616): n is a, c, g, or t
  misc_feature (619)..(619): n is a, c, g, or t
  misc_feature (624)..(624): n is a, c, g, or t
  misc_feature (628)..(629): n is a, c, g, or t
  misc_feature (633)..(634): n is a, c, g, or t
  misc_feature (636)..(637): n is a, c, g, or t
  misc_feature (639)..(639): n is a, c, g, or t
  misc_feature (642)..(643): n is a, c, g, or t
  misc_feature (649)..(649): n is a, c, g, or t
  misc_feature (654)..(655): n is a, c, g, or t
  misc_feature (673)..(673): n is a, c, g, or t
  misc_feature (678)..(678): n is a, c, g, or t
  misc_feature (680)..(680): n is a, c, g, or t
  misc_feature (683)..(683): n is a, c, g, or t
  misc_feature (685)..(685): n is a, c, g, or t
  misc_feature (690)..(690): n is a, c, g, or t
  misc_feature (692)..(692): n is a, c, g, or t
  misc_feature (694)..(695): n is a, c, g, or t
  misc_feature (697)..(697): n is a, c, g, or t
  misc_feature (712)..(714): n is a, c, g, or t
  misc_feature (716)..(716): n is a, c, g, or t
  misc_feature (721)..(721): n is a, c, g, or t
  misc_feature (736)..(736): n is a, c, g, or t
  misc_feature (738)..(738): n is a, c, g, or t
  misc_feature (742)..(742): n is a, c, g, or t
  misc_feature (757)..(757): n is a, c, g, or t
  misc_feature (760)..(760): n is a, c, g, or t
  misc_feature (764)..(764): n is a, c, g, or t
  misc_feature (770)..(770): n is a, c, g, or t
  misc_feature (772)..(772): n is a, c, g, or t
  misc_feature (777)..(777): n is a, c, g, or t
  misc_feature (780)..(780): n is a, c, g, or t
  misc_feature (783)..(783): n is a, c, g, or t
  misc_feature (786)..(786): n is a, c, g, or t
  misc_feature (801)..(801): n is a, c, g, or t
  misc_feature (803)..(804): n is a, c, g, or t
  misc_feature (807)..(807): n is a, c, g, or t
  misc_feature (862)..(862): n is a, c, g, or t
  misc_feature (892)..(892): n is a, c, g, or t
cgtngtgtcattttcagcctggtgtggggtgagtggtacccaacggccggggcgccgcgtccgcagaagaggcgcggggtgcaggcttgtaaacatataacataaaaatggcttccaaaagagctctggtcatcctggctaaaggagcagaggaaatggagacggtcatccctgtagatgtcatgaggcgagctgggattaaggtcaccgttgcaggccttggctggaaaagacccagtacagtgtagccgtgatgtggtcatttgtcctgatgccanccttgaagatgcaaaaaaagagggaccatatgatgtggtggttctaccaggaggtaatcntggcgcacagaatttatctgagtctgctgctgtgaaggatatactgaaggagcaggaaaaccggaagggcctganatcccccatctgtgcaggtcctactgctctgttggctcatgaaatagtttttggaagtaaanttacaacacaccctctttctaaagacaaaatnatnaatnnagntcattacacctactctnagaatcctgtnnaaaaanacnnccntattcttacaancnnnnntcctnnnaccancttcnanttancncntncaatantnnaancccgnaatnncaannanntntcnnctcaanttaannctccactttttcttaaanactanancancnaactncnannancacttatataaacannncnttatnaatccattctcactntnttcnctctaaacaaaacanttntatnttaatntnttcanaantcnctntccttactacttttncnnaantatttaattcacaactacacatatatttctcatcctacaaattttttctatacanttctaatcctttttttcataaaaacatttnatttatcaaact

SEQ ID NO: 574012 - DNA, 194 bp, Homo sapiens
  misc_feature (131)..(131): n is a, c, g, or t
tcattaagcaggcaattctatcaactagtaggtctttcctatcatgcataattaactcacaaacctaggtcactaacatctatatcacgtcactgccaagactataatctgagcaacattatatgatagcnacacatagctttatagtacagatactctttacggactccacttatgactccctaaagcccatg

SEQ ID NO: 574013 - DNA, 193 bp, Homo sapiens
gcgatcataatattctggctggaattagtattaaagggtaatgtatgcatatgctttattatttgaaattaacagttgatgaaatgtcaaagcatgcactaatgggcacatttctgtttttcccgattaaccagtcattggcaatatgcaccaggacaagcatgcacatcccactcatgcaatttgctgccac

SEQ ID NO: 574014 - DNA, 598 bp, Homo sapiens
  misc_feature (4)..(4): n is a, c, g, or t
  misc_feature (278)..(278): n is a, c, g, or t
  misc_feature (338)..(338): n is a, c, g, or t
  misc_feature (413)..(413): n is a, c, g, or t
  misc_feature (475)..(475): n is a, c, g, or t
  misc_feature (507)..(507): n is a, c, g, or t
  misc_feature (510)..(510): n is a, c, g, or t
  misc_feature (514)..(515): n is a, c, g, or t
  misc_feature (518)..(518): n is a, c, g, or t
  misc_feature (535)..(535): n is a, c, g, or t
cgtngtgtcattttcagcctggtgtggggtgagtggtacccaacggccggggcgccgcgtccgcagaagaggcgcggggtgcaggcttgtaaacatataacataaaaatggcttccaaaagagctctggtcatcctggctaaaggagcagaggaaatggagacggtcatccctgtagatgtcatgaggcgagctgggattaaggtcaccgttgcaggccttggctggaaaagacccagtacagtgtagccgtgatgtggtcatttgtcctgatgccanccttgaagatgcaaaaaaagagggaccatatgatgtggtggttctaccaggaggtaatcntggcgcacagaatttatctgagtctgctgctgtgaaggatatactgaaggagcaggaaaaccggaagggcctganatcccccatctgtgcaggtcctactgctctgttggctcatgaaatagtttttggaagtaaanttacaacacaccctctttctaaagacaaaatnatnaatnnagntcattacacctactctnagaatcctgtggcttccattttttaacccctgattggcgaagaggtggccgctaattgtaact

SEQ ID NO: 574015 - DNA, 726 bp, Homo sapiens
ccggacaatgtttgtatattttttatttttatttatttatttgggggaagaaaattgagagatgaggggaacagagaggggggagggggagaggggggggagaattgggggggacacaggacttcccccggagacacgggggcgtgcggagcggcggtcaccacgcggaacaacgaactcacacaagaacaggacggggagaacaaaaagcgggcgccaggaaacacaacaacagacgagagaaaaaaacgagcgaatcacagggggggcgacacacgggggagctaacgacacgcgagagagaagaacacggaggagaggagcaaacacaccaaggcgcggagccacccagagagcgggcaacaggacggacagcgagagaccgacaacaaaaagagggaggcaagaagaaacaggagcggggagggacgacacgcaccaaggcaacgggcgacgacggagaaaacacacagcagagccgcacacacgaggcaacaaacaacagcgaagagaggagcaagagagagagaagagccgggaaaaacgcaagccggagtagagaaacacaacaagggggaaacgtggggagaagaaaagaaggcagagggcgccaaaaacacaaggcagagcagacagaaaacacgagcgaacgcgaacagaggggagaaacacaaggagggaaaacacaccaaggacccacaaaagaaaaaaaaaaacaagaacaaa

SEQ ID NO: 574016 - DNA, 409 bp, Homo sapiens
atttggtcccgacaagatgacatagatttgcaaaaagatgatgaggataccaagagaggcacttggctcaaaaaatttggtgctcagaatgtagctcggagcgattgacatttccgaacaggaaacttacattggcaaggataactgagaaaagaaaaaagtcatggtaggtcgaggtggttcaacaaacacaattggtcgaaccgaaatggaaacgttttagcaggagttactgtgcatctggacacgtggcacttcattttatctcggagcgcagtgccgggacctggggcttggcatctcgccctccctgcgcttcgcaacgttcccctaaagcaatcttctcgaggtacgcccacagccacgacgttggtcacgcacgcggcggcatacaaaacgcaaaagacaa

SEQ ID NO: 574017 - DNA, 112 bp, Homo sapiens
agaaggccagcttgaggagcgagtaaccagctccataaattcacatcgaccagttttttgggatactaatggaacccacccgtatttttattgaaggagcattggcttgcat

SEQ ID NO: 574018 - DNA, 847 bp, Homo sapiens
gcggtagcggcggtggtacgcgggctccccagcggcatgcctgtgccccccgggcgcgatggctactcgtcagcgtcgggaatcccactggcgaggcggcttctccggctcctgctagcgccatcgggcggggtctgctcgctagccgcgcgaagtaggctggctgtccgtctggcgaccgactgtcgaagggcaagatgcatgtgtggtgcgctgacctgcttggctgctgtctgagtcgtagttgcgcggccgtgctcttcgagggccccgcctcctctggtgccgtgcgccgattccttcgtatcagtgccgggacaccatcaatcgcgcgtcaccatggggctctccatcctcacccacgacgtgcctagccagtcctcaatactgggccgcttctggtggaggcggggggacatgcctgtgtgtgagctgggcgatgcttgtgtgtgtgtcggctgtaccgatgtgtttcggcccacgcggactatctggccgctgtgtgccactgccgggcgtcccacgtccctgccgcagcccgggcctggtgtgaccgactcccgcgtgtaggcgcatgtccgccagcggaggtgtgaggcatggtgttggcacccgtgctcgcgcgccactccggtgggccgaacatgacgtcgcacctgctgcttgggaggtgtcgccaggggcctgtcgcggcacagctcagttttcgtgacggtagcggcttgcgccctgtccagtgtacaagtcacgggaccgccttatcgccgggaccggtccaagcgtgggccgtcaagtgcattagccccaggcgttgggcttgtggcctgcgttccgagttaaggtcgcc

SEQ ID NO: 574019 - DNA, 603 bp, Homo sapiens
gctgtaccatgtcactgtgcatgcgttgcccgatcattattgcagccccgtagcaggcagctccacctccgtattccgtgacacgaaaaccgggactcagaacgaagccccctaggaactcacctccgcattccgataaagatcaccgtgtccagccctttactaagcacaatcaaagacgccctcggcttacttctcgttcgctgtctcgtcctgtaatgatattaacactatgtctcaccagacctcctaggcgacccagacaattatagccgctagccaacccgcttaaacacccctccccacatcaagcccgaatgatatttcctagttcgcgctacacaattctctcgatcgcgtccctaacaaagtaggaggcgtccttgccctattactatccatcctcatcctagcaataatccccatcctccatatatccaaacaacaaagcataatatttcgcccactaagccaatcactctattgactccatagccgcagacctcctcattctaacctgaatcggaggacaaccagtaagctacccttttaccatcattggacaagtagcatccgtactatactacaccacggatcctaatc

SEQ ID NO: 574020 - DNA, 141 bp, Homo sapiens
tgaggtcaggggagctgcacttgtatctgggactccgatctctcttcctccacccggtctcccgttcctcccttcccaaatgtgcatttttcaccccatcctcagagattttttttggtgccgccattcacattcctgata

SEQ ID NO: 574021 - DNA, 773 bp, Homo sapiens
gggccgctgccgggcatggcttccagtccgcggagggcgaggcggcggtggacagcggccccggcacccagctgcccgccgcccgcaagccgagcgcccgtccgccgcgccccgagcccgcgcttcctatctcagcagccctgccgccgccgccgaggacaagcgagcggcccatgatgcagggccatcaagtgtgataggtgcgtgggagacggagcatgtaggtaaaacttgcctactgatcagttacacaagcaatgcattatcctggagactatatacccttactggtctgtgaccaatttatgtctgccaatgataatgggtagaatggaaaacgcggttgaatctgggctttatgggaatacaaggctggacaaagaaaggattaatgacaagattacaggcgcacgacttatttcgcctaaatcccgggaacaaaacagagacgtgataggaaccattatacactcttagtgccgtgagcagaccccacttatgaatggaaggctccgatgaccagttcaattttggacacaaattggatacagaatgacacaagcggcatgggaaaatacccagtggaacgcggatgcacgggggacaaccacaacacattgggtcacaccaagcaaaagcattccacccaattccaagtccccattacgaattgcagagataacacctaacaaccacctgcaggacttgactaaaacggggggcacttgacccttcgagcacggaccccaccaggaaccttccgacacgaaaaa

SEQ ID NO: 574022 - DNA, 169 bp, Homo sapiens
cgcggtgcaggtgtgggactaccggtgcagtgtgtgggactcccggtgcaggtgtgggcctacccggtgcaggtgtggaactacccggtgcaggtgtgggacctaccggtgccggtgtgagaactaccggtgcaggtgtgggcctacccggttgcaggtgtggaacctc

SEQ ID NO: 574023 - DNA, 131 bp, Homo sapiens
tgtcggtacctgacaccgcgagtaccagacctgtattcgcagaaaagtcgagtggacgaagttgttgcgcaacaacttcgtccatactgacctgacctcaagaagtgtatggggtctcggctgtgtgcagt

SEQ ID NO: 574024 - DNA, 236 bp, Homo sapiens
ttaggtttgtttaggaaacccagcctcccgtttattttggccgctggggtggccccaactgctggacttttggcctgggaaaacatgttaagcccccctcattcccccccggggccctcctcccggatggcccctgggctaccccttttttcagccctggtttaaataccccccccgggggcttttttaaaaaaggtgggttttaaaaaggccccccattaaagcccggtggttga

SEQ ID NO: 574025 - DNA, 293 bp, Homo sapiens
  misc_feature (257)..(257): n is a, c, g, or t
cagaagtggccagttaatggggcttcattcccctgcactttggaaatgaccagcagtcccaaatgcatttgagagtattttcactcatgagagaaaacgtgcttctcagattctgaaggctttctgagtgaaaaccagacaaaacagacagtaagagtgctaataagtatgagacatctttctttttgttttccccccaccccaatctctcacctctggcttaaattcttaattttatggaaatggatacttggctnggtgcggtggcttcatgcctgtaatgccagcacctt

SEQ ID NO: 574026 - DNA, 243 bp, Homo sapiens
tcccagtagcggacgatgtgagagaagtactggagtaagtctgactctaagagatgaaaatctagtattatggagtataattctcccaagggaaaaacgccagtagaacatcagacagcttgtgctttagttctcaatgcacgccaggatctgaaaagtgtcctcagaagactactagaagagacgaaacggaacctgtgccttttacttctgaggtgaaaagatccaaaatggctacttcag

SEQ ID NO: 574027 - DNA, 99 bp, Homo sapiens
agcctgggacctgaagacacggctgtgtattactgtgtgagagatcggtctgtatattgtagttcgagtggatgccatggcctcgaccactggggccag

SEQ ID NO: 574028 - DNA, 1218 bp, Homo sapiens
  misc_feature (122)..(122): n is a, c, g, or t
  misc_feature (288)..(288): n is a, c, g, or t
  misc_feature (291)..(291): n is a, c, g, or t
  misc_feature (313)..(313): n is a, c, g, or t
  misc_feature (343)..(343): n is a, c, g, or t
  misc_feature (621)..(621): n is a, c, g, or t
aggtacacgcccttccacagatctcgcatactcttgtggaacaccaccctcttacgagtttccaccagagtttgagatatgattagtaatatgtgtattgatgtgatactgcctctgtcagncacagaggaggtcactcacaacttctactgtagatgtctgaagtcaccatataacgagaagcattgtaaaatagaggaatactattaacctctagcgcacaatggactaattcatatagcatgtcaactttaatccttatataaaggagacgcaatatatacgcancantctggcgatttgatattgatgntacccacaaatatatgttccttacatatgntcaccattgttttggtgatgtcgtataagccacccaagtcaggtccttgttagtgtagggtcacaagtgcgcgatgggcactgcagaggatccagcatggtgctcttagccatatgataacaggatgatataggggcatggctattcgatctcatgtcctcctcttagcccagttccctggctatctggaagaacgtcaaagtaacctttaatcaccgcatgtcgacggatctgttcgttggataacgactcttttcccctgttactagtggcttccnttatgggcttagaacttgggtggaggtctttgcgctcacgaacggtttggggcccagttgtgtaaagcgatagagggctaaagacagctgtgaaaaggctatatctatgtaataactcctagaaattgggctgatccgattggggatatgaggcttaatggggcgaacgctatagacgcgaataatagattgggtagtgggaaggtggaaatacctctcagttaagaagaactttattcaaatccaataatacaggttgggtcaatgcaccatagcatggcatagtataccgttgacgaaggaaattggattaactggcgggcttgttgtgcacattgggtactattggttggcactcattgcctccgatccagttaaactgcgcctagggttacaattccaactccaattggttgcccgtcccccttatttaaaccctattttcaaaggttggcggagccccacaattttatgcaacatatttcaagggcgatgagacgaggtatccacaaacgtgtgtgtggggaagcccctgggagacttggtcaccgttcccatcgtgggggcgccaaacttgggtccaaaggggcaatcccc

SEQ ID NO: 574029 - DNA, 379 bp, Homo sapiens
aaagaaactgtgtgaaatgtgagaatgctgccctgaagtgcctgcaatcctcagcccacagcccagaggccccagctcaatgtcctggtgtgttgccaacccagtgattgatgaggagggtgaggtcaatggctttgtgggtgctatgcgtgagaaggatggagaagctgagtgtcctccctgcatcccgccaccaagtgccttcctgaaggcctgggtgtattggccaggagaggacacagaggaagaggaagatgaggaagaagatgagtgacagtgactctggatcagatgaggaagagggagaagctgaggcttcctcttccactcctgctacatggtgtcttcttgaagtcctgggtctatcagccaggagagg

SEQ ID NO: 574030 - DNA, 245 bp, Homo sapiens
ctcaacgctttactacttcaatagattcaggtttagccgagcatgagatactattatacagaagcagaaaacgaacaaaaacccgggtaggacaggtactggtagtgatgtcaggatattgtacaagagaataaaaatattcaggagaatgatatttcatacatgctatttatcaaagagaaaagatatatacgtatgagatttattactgtaatgataaaaattacgagtcatcgccgatatac

SEQ ID NO: 574031 - DNA, 1608 bp, Homo sapiens
cttgtcttcgatggcggcgtggtggggtgctggggggtgtgttgtggccggctcgggttagggtatgtctggtgtgtgtgtggtggcggccggtgcgctgtggggggacgggtgttgtgtggtggggcgctgcgtgctgggcttggtgtggctcggtgacgtctggagattcttgtgtccgccgtggtgggggtttcgccctgtaggcgtgtgtaggtgcgggttgttgtcgtcgctggtggcgttgttgcgtggtcgttgtggcttatgggtgtgcgcggtggccggtgcgtgtgctgtccggtgtggcgtggtgggggtcggttcgcgccgtgcgcggtgggtgcggtgggcggggaggggtgggagcgaggtgcgggggtcttgtgtgttggtgggtgatggtgtgaagggcaagtcgtgcgtcgccgtgaggagtgggtgtcgcgcgtagatgtgggttgggcggcggggtggttggaggttgggaaagggtaggggttgtagggtttgctgcgagatgtgagaaagtcgagatgtgtggatggggaggtgatgtgatatgtggagatgtgagaagtggggagggagagttgtgtaggtagtctagtcggagatgttggtttcgtgtggtgtggtgcggcccggctggtgggtgtggtggcgcgggtggtgtgccgggggccggggggaggtggggagggtgtgggctgggaggcggtgggttgttgcgcggttggggtggtcgaggggggcaggggggtgcagaggcgcatggtggagtcaggggggatgtagtgcgctggggtttcaggtggtgggtggagagttgggtgcgagggtttgtgttggaggatgtgggatgggggaggatgcactggtgagagggggagagggtgtgggtggcgagagaggggtcagtatgcgcggagatggtgcgcaagggtgctcgcggtggtggcgcgcaggcgcgttttgagaggtggtggaaggaggtggaggcgtgggtgcagaggggggtgggcggagagggtgtgggtgggaggggtgtgtgtgtgtgtgtgtgtgtgagagtgagcgggggagaggctgtgtcgacagtgtgcgtgtggaggtgtgcaggtcggtgagctgtagagtaggcagagtttagtgtgtagtagtgtgtgtagagatttaggtgtggatgggtaatgcgtggagagaggggagaatagtgtgtgttgcttgcagtttcttggggagtctgagtcgtaggcaaaaggccgaggagtcgtgaagagttcagagtagtgatgtagctgttgtgttagctgtgtatagaaattagtgcgttgtggtgtttaaaatgagtcttttaagaaagagttaaggacatcgctagagcgcttaagtaggttagagagagaggttaaattatcaaggcctagtttgtgcagtttgcgtttttttgataaaaggtaagttgctgattaagtctaagttggaattgataattccagtagtcttagattaaaatgaggatattttctcctagattttctcatgttatgcctatgcatttatatatctaaccattaatttcataatccagaggttcaccataaa

SEQ ID NO: 574032 - DNA, 715 bp, Homo sapiens
ctgtccccttggtcctcaggcggtcgtggctggcgtgtggctggcggttgggccgaggcggggtggcctcagtggccgaggtggctggatcgcgtagcaggtggaaggagggatgggagccgcaggcgcagacccaccctgccatgaagcccccctgcagcctgtgcaggagacatggcggacgcagcatctcctgtgctctgtggtaaactggacctgctgtgtgtgtgaccctgacgtgcccatgcatgatatgaggatgcgcaccaggggagctcatcgagcagaccaagcgcgtgtatgaccaggttggcacccagtgagtttgaggacgtgtcctacgagagcacgctcaaggcgctggccgatgtggaggtcacctacacagttcagaggaatatccttgacttcccccatgcatgtttccgccctccaaggacatccggaacagccagcacaggaggccgacaagagagctctcttgagcttcgacgtggagctgacgcatgagcggaggacgtgtaccatgaggactcgtgtggctccagggagaccacgttcagaaaggactcaactgacggcccgacggcctgcggcgggtaccttggacggcgcgctacctcgaacgctgcggccgcgagacaactggggccttcagccatcccccatgagacgacctcagggaccaagcactccacatcggcaatcatagcac

SEQ ID NO: 574033 - DNA, 291 bp, Homo sapiens
aaatttcactttcctatgcaaataatcttaactttggaagattatttattcttagtgaaaatacccatatatgcagtctttggcttcattctaaagttgtaaaaatccatatcaccttttctaaggtccctctcagtcacagcacaagaacggggccagctcctcctgtaacaagacaggcacagaacatcttccacatggtggtgacttcaggggtcagcaacagtgcccagatagtgcatttccttgacgtgacttctgtgtcccatctatctctccaggaacacatca

SEQ ID NO: 574034 - DNA, 778 bp, Homo sapiens
ccccctaaggcgtatcccccgcgccctcgccttcgttttctttgttgtgtctcgcccccgcgttgcgagcatctccctcccctccctgtatgtccttgccgctccgcttgcactcgcagtctccctctgtttgctgggcgtcgcgcccactcccccgccttcgctcgtctcaatgttcgcccctctctctcctccggacgggctgctctctcgccgcttagttggtcgcgccccctcccccgacgcgacgtgactgttttgtggagaggctcgttactttctgccgcggccgacactcttctcgtgatgtcagtctgcctcgcgctcgtcaccgccccccccgctctggttcactctacgccttgttgagggggaaccttctactcctctgttgggtggttccccacccccctatgtttgtctcgtcgttctcgtcacatttatttacaactatgcctctctctcgctcgtccagcggcagctcccctcactttatgttttgtctcgcgccccccggtatctctctcctctctctctccattgttgctcgccgcccacacacgcacactgggtggtgcctcgctctctcccccaacccctcatcctcacctcatgaaaccccctccttctccccgctggttacacacacccctcctgtgctttatcctaccacctcgctcacgccctcacttctctctctcctcctgtctctctcccctccccgccgcctcctctctctctctccgcggcgcgtcctttcctctctttgtattaaata

SEQ ID NO: 574035 - DNA, 731 bp, Homo sapiens
  misc_feature (322)..(322): n is a, c, g, or t
  misc_feature (341)..(342): n is a, c, g, or t
  misc_feature (348)..(348): n is a, c, g, or t
  misc_feature (350)..(350): n is a, c, g, or t
  misc_feature (352)..(352): n is a, c, g, or t
  misc_feature (365)..(365): n is a, c, g, or t
  misc_feature (381)..(381): n is a, c, g, or t
  misc_feature (384)..(384): n is a, c, g, or t
  misc_feature (386)..(386): n is a, c, g, or t
  misc_feature (395)..(397): n is a, c, g, or t
  misc_feature (411)..(411): n is a, c, g, or t
  misc_feature (414)..(415): n is a, c, g, or t
  misc_feature (522)..(522): n is a, c, g, or t
  misc_feature (582)..(582): n is a, c, g, or t
  misc_feature (585)..(585): n is a, c, g, or t
  misc_feature (589)..(589): n is a, c, g, or t
  misc_feature (596)..(596): n is a, c, g, or t
  misc_feature (604)..(604): n is a, c, g, or t
  misc_feature (607)..(607): n is a, c, g, or t
  misc_feature (609)..(609): n is a, c, g, or t
  misc_feature (612)..(612): n is a, c, g, or t
  misc_feature (614)..(614): n is a, c, g, or t
  misc_feature (622)..(622): n is a, c, g, or t
  misc_feature (624)..(625): n is a, c, g, or t
  misc_feature (629)..(629): n is a, c, g, or t
  misc_feature (631)..(631): n is a, c, g, or t
  misc_feature (635)..(635): n is a, c, g, or t
  misc_feature (639)..(640): n is a, c, g, or t
  misc_feature (659)..(659): n is a, c, g, or t
  misc_feature (669)..(671): n is a, c, g, or t
  misc_feature (674)..(674): n is a, c, g, or t
  misc_feature (676)..(676): n is a, c, g, or t
  misc_feature (678)..(678): n is a, c, g, or t
  misc_feature (680)..(680): n is a, c, g, or t
  misc_feature (687)..(687): n is a, c, g, or t
  misc_feature (697)..(697): n is a, c, g, or t
  misc_feature (705)..(705): n is a, c, g, or t
  misc_feature (709)..(709): n is a, c, g, or t
  misc_feature (714)..(714): n is a, c, g, or t
  misc_feature (718)..(718): n is a, c, g, or t
  misc_feature (720)..(720): n is a, c, g, or t
gccctcccgattccccgacagcagatatactaaatcctgcatgtaatatatctgctgtcatcttacttggaccaacttcccatttacttatctttaaactatacagttacatcttaattccatccaaagaagatacagttttaagacagaagtgtactctctactatgccatttactgtacagttagcaagcaaagtgttaaatggagaagatacttgtttttattcaaccttttgagattcagattgactacatgttaactgaatgtctaaagtgatgatcgttgtgccctccaagttagtcttcaatcttttgggtttgnatgaaggttttacataagnnttattnangncaaggggggtggntaataaatgtatatancantnaataatgtnnngtaggtgtagattnccnnatgcatttggatgtacagatcgactacagagtacttttttcttatgatgattggtgtagaaatgtgtgatttgggtgggcttttacatcttgcctaccattgcatgnaacattggggtttcttcaaaatgtgtgtgtcatacttcttttgggaggggggttgttttnttntgtntattttntgagactnctncnggngncaaatttntnntttngngacncttnnttttgttaatcctgtctgngacacttaannntcntntnangcattantgctttagantgttcaantaanatttnctgncnaaaaaaaaaaa

SEQ ID NO: 574036 - DNA, 1762 bp, Homo sapiens
  misc_feature (206)..(206): n is a, c, g, or t
  misc_feature (209)..(209): n is a, c, g, or t
  misc_feature (875)..(875): n is a, c, g, or t
gggagtctgacacatgaggcggtgacctctgacaaacgcaaatgtgagggagcagtggagatatgagtgatatgatgaagctgtgagactgtgaatgaatggggagtaaaggacttctcgttgacctgtggaggaacgaaggacaggattcacggatgctctccagctgcacactgagacggtcatggacgcgttcgcgtcagagnctntgcgaagagagtcgtgactcgtcgccgtcactggcatgtaggaccgatgcgacgacatggaacaagggggtgactgagacatgtgggagaggccgggagggcgtgtccagacatggctgacatcaaggaagcaacgcctggatggtacgtggaaacgcccggggaaggagctgtgtcgtctgggcggccgtggcgcccgaggcgctagcaaggtggaacacttgttgattgatgcctacatcgtgtatgagcacggtagaagaccgacgaaaccgaaatgtctatcaatgacgcacataaagtagttgtggacaacacgagggagacgcgatgaggaggctggcgtacgtagggcaccaaactggggagggagttgcaaagacgggtaggcgtgaccctgtgtgctaagctcttagtgggggtaatgtgcatgtgttgcagtaaagggaaggtgatcgaaagcgatgtgcgtctgagggcattcagaaagaaagggaactctacaggagggttgtgcgaatacgcaaggaggggtttggggatatctacgcttgtcctggagggggctacttgttcgcgcagtggacaaggggaacgaaattccgttcgtccttcgccatgacggccagggaaagaaattgcgcacgaggggcggcttctaggctntttacctgtgctggtgaggacaccgtggttgggattggcatactgcatgtggtcgatacttgctaagcccttgagggcattgggcttgactagggagccggcagacttgcatgggcttacaacgtacctcggacttttggacatttaggtacccattcttccaaaagagttggcgccgaccattggtttgggcgaaccgtattgggcgccccttccccaaagattggcttttccacattaggacagcgtgcctggtgaggagacctgtatcatgcgcccatggagagttattgcccgacaaaggcggacttggagccccgaggtgaacttatcactgttcctcccatgggtttgcgtttcacaggattgtataccttatgctgcgagaacacaatgacgtcttgcagccgctaagggattcggccgggcgaagatagacactctgtggggccgccgtatgtaaaacaacaatggcgcacgagtatgttccacatccaagaaagccagacaggcggtttgtgagagactcaccctccgggaacaatgggccccgggccgaatcacgcggcgacgagagaacattctagcggagcagggaccacgtcgcgacgatctagacgagggcccacagagaacagatgaagcgccacatcaaccaagacgtgagaccgcggacgaaggcgatgattatcactacgaacgatgagtgacatgcagagacgagcacgacggaactgcacgagcagacggctcatccaacctccgcacaatcgagaaggagattgacgacacaaagaagaggctgactgggacgactccgcagcgtgcagcgaccaattagcaacaacccgacaagaagcgacgaacagcctcgcgactgacatata

SEQ ID NO: 574037 - DNA, 443 bp, Homo sapiens
gcacgaggagagagagagagaaggaggagggaagggggataacctcgaggaacagcacacagcaggtgcgaccgccatcttaatgtccttgattgcgtgcagatggtgtggaagtggctggcaccagaacagcccaatgagaaggaatgagcagacaatggagatttatgtagaagagagtgagcatggacacaggtacaattgtcaggaggagttgcttagaaagttatatcgtgacccacttccactcctgcccgttcatcacctaacactgacagatcatctaatgtccattacggagtgatacgatggacacgtccccatgatcctgggaccaaacataatggctgggagggacaccgagatcgaccaccgaccgctgccatccgacgccactatcacctacatcactgagggacccacacccagccttcacaagcctc

SEQ ID NO: 574038 - DNA, 239 bp, Homo sapiens
ggacgacaataagaagctgcatgacaataaaggtaaataagtacagtgtccctggtatccatggggtataggttcctggaccgtccccccaacccacagacaccaaaaatccaagtatactcaagtcccttacataaaatgacatatttgtatataaccaacgcacatccgcctgtatactttatccctagactaatacctaatgcaatgtaaatgctattgaaacttctaaaactagg

SEQ ID NO: 574039 - DNA, 240 bp, Homo sapiens
gggcagctgaactactccatgtgatactatatgatggacacattcactaaatttgtctaaatcccgtagaatgtacaacaactcagaataaacgctaaggtaaactatgggctttggaggataacaatgtgtccatgttggttcatcagttgcaacatatgtaccactcttgtgcaggatgttgataattggggaggcatactacaccaagagtaaaccctaatgtaaactattggcttt

SEQ ID NO: 574040 - DNA, 313 bp, Homo sapiens
cagacagactctggcagagggggctggggcgtccagcgtggtcagcatctgggggagtgagaaggcaggaaggataaaggattttccagagagtgtgactgaagaacagtaggctaaggaagctacagccatgggccactggttctcgggaatttagagaaggaagcagagacaactgaagacagactggccgggaacacggaggatctgggatggaagaggggagagctgggaagccgcgcctctgagtagcgtgggggcagagtcggcatcctaggtgggtgcaggtgtatgcggaagcagcattcattca

SEQ ID NO: 574041 - DNA, 125 bp, Homo sapiens
  misc_feature (25)..(25): n is a, c, g, or t
agctgcggctgccctgattatcccntgcaaaaacgtgcagaggcattgttcgcaggtgccttccgccccagttgcatgcattcatcacagagctctacgcatatctggtggacgcattcggttca

SEQ ID NO: 574042 - DNA, 242 bp, Homo sapiens
catgcccatccaggtggttccatcagtgcttgtgcccggtgcataagaacagcactggtccctgctgtagaggaggttggtgcaatcagtcaagttacatagctgagggttggggtcaactgatgccagcacagagaggtgggttcgttcatcccagagaaacctgggcctgttggtggggtaagacgtctttccgaggaggcaaagttagccaagatccgagggtgcgtggagagcggggt

SEQ ID NO: 574043 - DNA, 1376 bp, Homo sapiens
ggattggacggcctcgagtgcttaccgctcttcgtctgcttgttcgcaggactcggcgccaccgtcgggccccggggtcctcgggtagattctgcgacgctcgcgaagttaatccgcaaggcaaccagtgatcgagctatacacatggcagataaccaaagaccaaccaacgaatccagcccttcaagggctgtctaactgtccatatgatggtttgcgcatgatttcgaccatctcgcaggggtatacgatgcgagttgcgacacaggaggagtcctatcggatcgatagcaaatggaatgcgaccgagatcaggtagggatgggccttgtcgaatccgaatctgatgggaaggaacttttcgacacttgaattgagtgcgttttggcttgtgcctccattacgggtgagaggcacaatccgctcgagcatagaactcgccaattcagcacgtgtggcattcgccgcgaatgccatttgcacacttgaacgtggccccctctatggggttcgcaccactaacaacattctatgcagcactaagtagatttgcccatggaacgccgactggttttatcgggatgaacaggaaaagtttgagacaattgtgaacatccatgaaacttcaccctgacacagggacctgtttcaaatccaagaaaatagcgtgccgttatgtgaacattgggctcatagggaactgaaagacggaaatggcaaaaaacaaggaggcaacacacacttgtgcaaggggaaagcggcactttaatcacctacacggcacggcatggacctggacatgggaatacccaaacgcccaacattggggacgcgcagcaacctaccgggggagtattctaaccaccggaacttcgaaccgggcaaccacgaatgggcagctactccggacccacggttgggattatcacaccggtacagcgaagaacaggcccaccccccgttaacattgtcaagaacgcgagacccaccaacacccgcgtgcggaacataccttgtatgcaaacatcatccacaacacgatttgcagaaacacgtggaccgaagccaccacgattcgagtttccccgtccgaaaacagaccaactttggtgtgagggaccccataggagacggaaccccaaagaccggacattcagcaacggttcggacagaacagggcaacaaccggttatatgagggtcaacctcaatagcatattcacttctgcccaaacgggtttgagatccaattgtgggcacacttatgaaccttgccagtcatttggaatacccgatatcaggttcacaagtaccgagcgagtgttgtaggcacccccacaaagccgcttccaatatcgaggaactcaccctagcgtg

SEQ ID NO: 574044 - DNA, 414 bp, Homo sapiens
cctgaagatcttagtatcccccaatcgttacaaaggctacataactctaaacggaatgggaggccaaactctaggtcagctgagatcctggagaacatatcctagatcctgtctcattccctatagcggataacactccagccgtgtacatctcaggagcctgctagaagacagtgagtacgggagaggaggggagctagcttccaacctactccacacttgactcccataggacaacagtaagtgtcagggcatgtgccaaatcaagtggccagtacctctaggctggagacgtaggatatcctagccatacagatgcaatggaacagagaagagaaaggcggttccattgtcaccatagtgagccatacatttgcccagggaaccgggtcccggctaaggggctaggtatgc

SEQ ID NO: 574045 - DNA, 657 bp, Homo sapiens
ggagagctggacagccagatccaggagacaagcatctaatgatgacattctggtctcgtacttcgcgtctcccccgtgattagcccggcttgtgtcccctgtggccctctcccttaccctcctgcccatgtcactgcaggattgagagcctgaacaggtctgacggttgcggggaagatgcgcagggtcccggcaccggagcacggtggggcggagctattggtctcctcggtcacctctgtagaagtttcgccgtgggcgggtcgcgcgagaaatcggcgcgtcccggcgtccgtgtggccgcgccgtttggcccgggtcgtggatcgcagcgtacgagccgagggatgtctgcgttgaggctgccgtgtctgggccttgactcgctagggactcggcttcccgtgccgtgcgtgtggctgctggcctgggggacatggcagtgtgcgctcgtgcacccagagaccttcctcgtcgacatcctcgctaggccatgggagcatccatgctcgccatagctttgtggtcatgtgcccccatcgacatagcgccaactagcgtccgtggaaggcaggtccgggcaggagggtctgtgggtaggtctggaaggctgaaggaagggaatcctcaggaggagagagacacagatactatcgt

SEQ ID NO: 574046 - DNA, 477 bp, Homo sapiens
  misc_feature (162)..(162): n is a, c, g, or t
  misc_feature (164)..(164): n is a, c, g, or t
  misc_feature (172)..(173): n is a, c, g, or t
  misc_feature (177)..(177): n is a, c, g, or t
  misc_feature (182)..(182): n is a, c, g, or t
  misc_feature (184)..(184): n is a, c, g, or t
  misc_feature (189)..(190): n is a, c, g, or t
  misc_feature (192)..(193): n is a, c, g, or t
  misc_feature (223)..(223): n is a, c, g, or t
  misc_feature (227)..(227): n is a, c, g, or t
  misc_feature (477)..(477): n is a, c, g, or t
gtcctcagtgcagggcaacaggactttaggttcaagatggtgactgcagccatgctgctacagtgctgcccagtgcttgcccggggccccacaagcctcctaggcaaggtggttaagactcaccagttcctgtttggtattggacgctgtcccatcctggcnanccaaggannaaantgttntnaaatnnannttaaggaaaaaaaggatggaggagattatnaatnttgggagaagggaaaatgtaaattaatgatgtaggaaataaaggatgggaagagcaagattgtgcagaaggcagaccccagaagtccaggaagatgtgaagcgcctttcaagaaagatatgaatagataaatggtataagtaagaataaggaagaaattttaaggtaaaaaggagaaggagaagatatatgggaaggtaaaaaaaatgattaagaaaaatatgaatggaaaatatgtattaagttatgan

SEQ ID NO: 574047 - DNA, 723 bp, Homo sapiens
  misc_feature (177)..(177): n is a, c, g, or t
  misc_feature (188)..(188): n is a, c, g, or t
  misc_feature (206)..(206): n is a, c, g, or t
  misc_feature (225)..(225): n is a, c, g, or t
  misc_feature (235)..(235): n is a, c, g, or t
  misc_feature (239)..(239): n is a, c, g, or t
actgactgcgccgtggaggctgctgcagtgttgtgagttggaagctggggagctcggcatggcggtccccgctgcagccatggggccctcggcgttgggccagagcggccccggctcgatggccccgtggtgctcagtgagcagcggcccgtcgcgctacgtgcttgggatgcagangctgttccggngccacagcaagacgcgcngagttcctggcgcacagcnccaaggtgcnctcngtgtgtgcctgtgatgtttgcgactgtggctgtctgcctagcctcgtgggtccttctgacaagacgtgccagctgtcttcttgctggatgaagtgaccggtttgtgtcaaatgaaaacaattatcgtgggacatgtggtgatagttgtggaccatgctttgtttggcatccaatgtaatcctgacctattttgttactgtgctgtccggagataaaaccattctgcatctgggatgtgatggactacaaaatgcattgccactgtgaacactaaaggggagaacattaatatctgctggagtcctgcatgggcagaccattgctgtagtgcaacaaggatgatgtggtgacctttattgatgccaagacacaccgttccaaagcagaagagcagttcaagttcgaggtcaacgaaatctcctggaacaatgacaataatatgttcttcctgacaatggcatggttgttcacatctcagtaacca

SEQ ID NO: 574048 - DNA, 368 bp, Homo sapiens
gtcctcgatcgtcagagttagtcatcagtctggacacagataccatgccgtacgtacgatgacgtgatttagcatattcaataattcaagctgtgatcatataacctagagatttgccgagaatctctaaagtctgcgagggtcgaaaaccctctgtgctgggacagacggtgaatatataaggcttgctaggccatattttctctgtcataaccattcagtactattatagacaatacataatataaatggacctggctgcatttcaataacattctatttacaaaacaggtagggagctggatttggccagaaaactgtggggtttgaacacagtttgccaacccttgctctaaagaatgccctag

SEQ ID NO: 574049 - DNA, 220 bp, Homo sapiens
tcagaagtaaacatgtattcctaccctatctcatacccacaagtgtgaactttaccaggacaggatgtaagttataatcatcctcatggtcccaacatagagcatgcaacatgtactcaataaaggtttactgaattagtctgaaattcacctcgctcagggagagttagaaaaagctcgtatacatgagactttcagatgaccttttcatttatgttcc

SEQ ID NO: 574050 - DNA, 350 bp, Homo sapiens
  misc_feature (177)..(177): n is a, c, g, or t
  misc_feature (188)..(188): n is a, c, g, or t
  misc_feature (206)..(206): n is a, c, g, or t
  misc_feature (225)..(225): n is a, c, g, or t
  misc_feature (235)..(235): n is a, c, g, or t
  misc_feature (239)..(239): n is a, c, g, or t
  misc_feature (246)..(246): n is a, c, g, or t
  misc_feature (273)..(275): n is a, c, g, or t
  misc_feature (332)..(332): n is a, c, g, or t
actgactgcgccgtggaggctgctgcagtgttgtgagttggaagctggggagctcggcatggcggtccccgctgcagccatggggccctcggcgttgggccagagcggccccggctcgatggccccgtggtgctcagtgagcagcggcccgtcgcgctacgtgcttgggatgcagangctgttccggngccacagcaagacgcgcngagttcctggcgcacagcnccaaggtgcnctcngtggctnggaagttgccacggggcgtcgctaccnnnggggggggtccttcgacaagacgcccagcgtcttctgctggggaaaagaacccggcnttggtcaaagaaaacaat

SEQ ID NO: 574051 - DNA, 669 bp, Homo sapiens
agcggagcgtgagcccctcaaacctcgcggaactcctccctgcaaatggagccaggacgccctccctcatggtctgccctttaaccagggcagggtgacgtacggacctccacagtagtacgcggtcactgccttagcagtgaggcctcagggcccggtgctggcactggcctagcgtggactcgtaagcatggctggcgcctgactggctcgtgtgcgctcacagctgctggcggactgtaggtgcgcgcgcggtcgccatggcagcgcagccgccgcggccagtgggtgagaggagcatggggagctcccggtgaggcgccgtgcgccggcagtcccgtgttgggcctccagtcagccagtactccgggcgcgacctggcggtcacgcggatctccagaatctggtctccaaagattatctaatctggttggaacatccgcaaaatagtcctttatattgcatatctccagaatggatacgaattagacttggctagcagcaggaatccataacatgcggagcaccgttatgcagtagaagacgtacggtagattgattctccaaatttaaaatgtctgcttaaggtagatgtggtatacctcgtggagcgggttatatctgcgaacgctcaaacgataccctcttacttccctgtcatgattggcc

SEQ ID NO: 574052 - DNA, 154 bp, Homo sapiens
taactcacacatctgacagagatgttatggagctgctcaaggctgccgttgtttttgtatgttcagaagccctacaggtccttggagggtgggtttctcagtaccaacagtggataactgttggagactactgcaggacatttctttttctttt

SEQ ID NO: 574053 - DNA, 232 bp, Homo sapiens
tccagtacccgagcatgcatgcctgcctgcgggtcgacgtgtattcaccactgcggtgcatgcatccctgaacaagatccggcgacacgtgagaaccagtgatgacctccaaatatcgttaagctggagcctggacgacgtgtaatcaccactgcggtgcatgcctccctgtacaagttccgtcgacacgtgagcaccgtgctgacctccaaatatcgttaagctggagcct

SEQ ID NO: 574054 - DNA, 94 bp, Homo sapiens
taacctgttttatttcataggtacatgaggtatggtgtataaaaaaagagataagatttacccaacatcaacaaaataaaaacccaaaatagtg

SEQ ID NO: 574055 - DNA, 393 bp, Homo sapiens
gcacgagcacagatgatgtgttttcaaaatcaaatgattggagctcctcatcatcttccccggtaaactgctcggtttcagatccattatccagatacctcaacgggctagtgtacgcaattgaagggtacctataaaacaaagtacgttcctctttcaactgaaaaaacccccgataatcctttgacaagaaataatacataatataatctcgctttctgacaagacttttcagttcttggtactctaattcccgttcgaaaatcggatatgtgccagcaatttcgtcagttattatagcgtttataatagcctcgtagtcatcgggctcaattctattttcgtagttgaacagacggtaaaaagggctacagtcataattatgctcgcatt

SEQ ID NO: 574056 - DNA, 420 bp, Homo sapiens
  misc_feature (167)..(167): n is a, c, g, or t
  misc_feature (390)..(390): n is a, c, g, or t
  misc_feature (392)..(392): n is a, c, g, or t
  misc_feature (410)..(410): n is a, c, g, or t
tggtttaaaaagatgttttaattaagtaaaaaccagggaaaaccacaaaataaataagtatggataaatggataaaaagtacaagtcttcaccccatcacatcaacttttggcaaggatgtaagggaaatggatacattactgcattgttaaagtagaagtatattnttgcacagccactttggaagacaatttggctatatccatttttttttttttaaagacagagtctcactgtgtcaccccaggctgaaatgcagtggtgcaatctcagctcactgcaacctccgcctcccaggttcaagtaattcttgtgcctcagcctcctgagtaactgggattacaggcacccaccaccacacccagctaatttttgtatttttagtagagntntgggttttaccatgttgnccaagctggt

SEQ ID NO: 574057 - DNA, 423 bp, Homo sapiens
  misc_feature (49)..(49): n is a, c, g, or t
  misc_feature (306)..(306): n is a, c, g, or t
  misc_feature (317)..(317): n is a, c, g, or t
  misc_feature (320)..(322): n is a, c, g, or t
  misc_feature (423)..(423): n is a, c, g, or t
ccctcctcggcgtcctggtcccggccgtgcccgcggtgtcccgggaggnaggggcgggccgggggtcgggaggagtcacgtgccccctcccgccccaggtcgtcctctcagcatgggggtcccgcggccctcagccctgggcgctggggctcctgctcttttcctcccttccttgggagccctgggcgcagaaacgccaccctcctcccctccctgaaccaccctaccgcggtgtccctcgccctgccccggggacccctgccttcctgggtgccggctggctgggcccgcagcagtacctgagcnacaatagcctncgnnncgaggcggagcctgtggagcttgggtctgggaaaaccaggtgtcctggtattgggagaaagagaccacatgaactgatgtgacaatgtgatgaatgccccn

SEQ ID NO: 574058 - DNA, 373 bp, Homo sapiens
ccggggccagggcaccagcacatgttccacggccggcagcaacttttccaggggctccagcagctttaggggctcccggggccctggccggagccggagtcaaagccggagccagagccaaaggccaggacagaaaccccgagaggaaccaaaatgacccttgttggggcattgaaaatatcatgagtgccccggggaaggggagtagggatgtcttttcccccccaccagtgatgagtggggctagctgaagcccattggtttccccgatttcaattgggtgagaaggcaaagagctagctcctccctttttttttttttccccctgagacttgtttataaaaaacaaaacaataaaaagagtttggtcaga

SEQ ID NO: 574059 - DNA, 117 bp, Homo sapiens
aggaggacacggcgggccacactcatagcgagcctcggctgaagcggctgggcatgacgccgcctctctgacgtcccccatagatcttggtcatggagccaacccctagcgccaccc

SEQ ID NO: 574060 - DNA, 866 bp, Homo sapiens
  misc_feature (332)..(332): n is a, c, g, or t
  misc_feature (338)..(339): n is a, c, g, or t
  misc_feature (344)..(344): n is a, c, g, or t
  misc_feature (350)..(350): n is a, c, g, or t
  misc_feature (353)..(353): n is a, c, g, or t
  misc_feature (358)..(358): n is a, c, g, or t
  misc_feature (361)..(362): n is a, c, g, or t
  misc_feature (367)..(367): n is a, c, g, or t
  misc_feature (372)..(372): n is a, c, g, or t
  misc_feature (377)..(378): n is a, c, g, or t
  misc_feature (384)..(384): n is a, c, g, or t
  misc_feature (386)..(386): n is a, c, g, or t
  misc_feature (388)..(388): n is a, c, g, or t
  misc_feature (404)..(404): n is a, c, g, or t
  misc_feature (407)..(407): n is a, c, g, or t
  misc_feature (413)..(413): n is a, c, g, or t
  misc_feature (416)..(416): n is a, c, g, or t
  misc_feature (440)..(440): n is a, c, g, or t
  misc_feature (458)..(458): n is a, c, g, or t
ggaaataagaaattaattataattataatttcataaattataaacataattccataagtgtagtctaaaggaaaataagaaattaagctataatttttggaaaggcatttcattacgtaagtgcgtgggcatggctgtatcacagcaaatcacgatgaagcagcctaaggcttcatgtttgtttgtttttttttggagactgagtctcgctctgttgcccgggccggagtgcagtggcgcgatctcggctcactgtaacctccgcctcccgggttcgggtggttctcctgcttcagcctcccgagtggctgggattgcaggcgcctgccacnatgccnngctantttttnaanttttngtnnagacngggtntcacnntgttgncnangctggtctcgaactcntgncctcangtnatccacccacctaggcctcccaangtgatgggattacaggcntgagccactgcacccgtccgaggcttaatcttatgtgtagattcaccaacaatcttatatgtacatcaacagctgtaaatatcaactgatacaggtgtgctagattggcaacgcaaatacatgattttctgaaatagcaaataacttgataaagtttcaaaatcaaaatataaacttgcattcctggaaaattgtatttcttaaaacagtgcaaaaatacattgcattggtaagtaaaatggaatttgatcagataattataaggatatttttttcatctacctgaccgtggcacattggagaggtaggtgggctgtgctgtgtggctgcgtctcacactggacgtctaatgtccttgaccccctccgagctgagtgccagacacactcgccaaccactcccgtggga

SEQ ID NO: 574061 - DNA, 646 bp, Homo sapiens
gaccagtgttgatctgtaatgtaatagaaaatctgatagaccagcacttctggcttttttttttttgggtacaacaatgcaagatgctctgatagcattggctaacgggaccaggaggatctaaaaaggaccagcctaatgtagaagggggttattgggaccagaggctttagatacattatttatagatcctacatatacttttatcagtagaaggatttcattatagatgtataaggaaaagggatatggcaaaaattatgtaatagataccaaattagggaagttgggcaatttacaagggcatatctcagtcaaggtacacagatggcagtgccataagcaagtctataaatatcggtggaaagacatccccctacatttaaaatggtcggccctaataatcaaaggcagttaacaaagtatatgggctgtgtgtcatgaaatagttcaggttcagatggaacggtagggtaacggtagggtttatggagattatgacattgattgcccaaaaataagtcttagaaaatcctcaattttagggtaaatagtaatacaactaggtcattcatttggacatctaggagtcaaattgcaagatcccctagtaatacactatttaactaataggtttactgtacag

SEQ ID NO: 574062 - DNA, 601 bp, Homo sapiens
  misc_feature (1)..(1): n is a, c, g, or t
  misc_feature (67)..(67): n is a, c, g, or t
  misc_feature (73)..(74): n is a, c, g, or t
  misc_feature (79)..(79): n is a, c, g, or t
  misc_feature (85)..(85): n is a, c, g, or t
  misc_feature (88)..(88): n is a, c, g, or t
  misc_feature (93)..(93): n is a, c, g, or t
  misc_feature (96)..(97): n is a, c, g, or t
  misc_feature (102)..(102): n is a, c, g, or t
  misc_feature (107)..(107): n is a, c, g, or t
  misc_feature (112)..(113): n is a, c, g, or t
  misc_feature (119)..(119): n is a, c, g, or t
  misc_feature (121)..(121): n is a, c, g, or t
  misc_feature (123)..(123): n is a, c, g, or t
  misc_feature (139)..(139): n is a, c, g, or t
  misc_feature (142)..(142): n is a, c, g, or t
  misc_feature (148)..(148): n is a, c, g, or t
  misc_feature (151)..(151): n is a, c, g, or t
  misc_feature (175)..(175): n is a, c, g, or t
  misc_feature (193)..(193): n is a, c, g, or t
ngaagctgtgcccccattctggctctcaagagccttctatggacggggcgtggtggctcacgccacnatgccnngctantttttnaanttttngtnnagacngggtntcacnntgttgncnangctggtctcgaactcntgncctcangtnatccacccacctaggcctcccaangtgatgggattacaggcntgagccactgcacccgtccgaggcttaatcttatgtgtagattcaccaacaatcttatatgtacatcaacagctgtaaatatcaactgatacaggtgtgctagattggcaacgcaaatacatgattttctgaaatagcaaataacttgataaagtttcaaaatcaaaatataaacttgcattcctggaaaattgtatttcttaaaacagtgcaaaaatacattgcattggtaagtaaaatggaatttgatcagataattataaggatatttttttcatctacctgaccgtggcacattggagaggtaggtgggctgtgctgtgtggctgcgtctcacactggacgtctaatgtccttgaccccctccgagctgagtgccagacacactcgccaaccactcccgtggga

SEQ ID NO: 574063 - DNA, 738 bp, Homo sapiens
tagttcccacgataagaagacccgcccgtgcatccttgcttcttatatggctggagaaaaaataaacccccacagaccggggtgttattcccacatgtcggccccccctcaaggacatccttgtggagtgcttcacgtacgctaatctcttggcaccacacccttggtgggcaccctctgtataagtgccgttgggcacactcgtctccgtagacatattcttcgcgatatgtctctagcgtatgatccgccagagtttacgagtgccacaccacacttctgtcttcctccccctcaagggcggcggaacatataaatatatatctactgttctctctcgcgaccactttctgtgcgcgcccctctctaatcataggaaggtaaccatgagtgtgctctgtttctgtgttatcccatcctgttggctacctcactctcccaccttggtctggtgagatacttatgctccccgagacagccaccaaaaacgctcgcgagaatctatagcctttctcactgaggagagatgatcgggccgcacctcttctacgccgtactcgctccccgagtgacccccaagatttcctgctttctatttctccccgaaccctcacacagtgtgtcacaacacatctaaagaggtactccctctttttcccacctgcgtcattaacctttgccccctgatcatttaaaaacaaaaaaatattaagaaagcttctaccccacattaaacaa

SEQ ID NO: 574064 - DNA, 149 bp, Homo sapiens
taaaagtaacaataatgaaagattacttactgtttatatgtctgccactgattatttaaccagaatatatgttagaacgggctggactgatatttgatccttcttcttttaggaaaaattattataataaatattcagttctctgtaat

SEQ ID NO: 574065 - DNA, 280 bp, Homo sapiens
aagggcgggtatcgaaggatacggtgtggtttacatgcaggtaaaaggtctgctatcgcgacctaaatttgatggaaaagaattggagaccaacgcgtcggccaggaaagtatagagccgagcttcagattatcgattcgatctttcctttttgcgaatagcaaaatccttgatcgagaaacttgtgttgagagcttcattggccgcatttaaaaaatcctggtcgggagtcttaacctcgacccaattgatttgtccgaatgtttggtccaccccgcca

SEQ ID NO: 574066 - DNA, 197 bp, Homo sapiens
tacctggggccccgacattggggctggccccatctctacaagagagaatacaacacaatgggcaggcatggtggtgtgtgcctgtaatcccagctactcaggaggctgaggtaggagaattgcttgaacctggcagggcagaggttgcagcaagccgagatcacgccactgctctccagcctggttgagactgtctc

SEQ ID NO: 574067 - DNA, 675 bp, Homo sapiens
  misc_feature (132)..(132): n is a, c, g, or t
agtgtgacctgtaacaattcaagcaaaaatgaattttccctgattctagagaagaatcccctggtggagtatgtggaagagctgcccacccccccctttggtgggacctttgggggggagcgccgggagtanctttcttcttgtgctactgcaacttgctctgtgggattatcagaggtgccttggaaatggttcatttggcggctgatgttacattcttgcaagacagactaaaaggtgacagtgtgacagaaataggaataacatttctaaaaaagcgagacgagaaaaaatatagagggaaaaaatgaagactagcacggaaaatgccacggggcggctagctgagttaatgttagctaaacatgtatagacatagaaattttgaattgcttcatagcatgagctttgaaaggtttataaatcagccagaaatttgaaatgcagggcatgaaggcttaaaggtttttttttccttttgcttataaatcacgcattttcaatctcatgtccacaaaatttcatatgcaaatagctccttacaagatagcaggcaggaattccacatcttacactatccatcctcagagaagctgttcattccattcacgtatggtaatgggaaaaaaaagcagcacaaatacaaacagttgtgtatttgtaactttgctgaaa

SEQ ID NO: 574068 - DNA, 385 bp, Homo sapiens
aggcaaaattaccagacagagggaaagttagagagcgaaggagagttagggagcgaaataagggtcgtaggaaagtgtttagtcgaggacgacgcatttaggaaagttaaaagaaaaatcaacaaggggtcggtctaccattctaaggagctcaaagaggttacatacgacacgaaccctagtaacgaggatacgacaagagaacccgataacacggtcaaggcgtaggacgagaagagagtacatagaaaccgggggtgcccccgcggacgtaaagcccataggattttcctcatttcagaggcttaagggaacctatgggaggtcgtacggttttatgaagggataccgaagataccttccacgaggcgttttcggtaggtcc

SEQ ID NO: 574069 - DNA, 314 bp, Homo sapiens
ccgatatgtgagcacaattctagatgatgcaaaacatttattccaagccatgctacagaaagctactgttgatgccgatgatgtgcgataggaatccagtgccgcgctgatccgtcttttaactctcctcccccaagcgattttttattcgctattgcaaggcaaagaaatcaaaccacctttgccattgatcaagccatattcaggtcctaggttgccaactgatagatactgcttaacagctccaaaatataggctgcaatctttacagaaaaaggcatcaacttctgcgggaagaataacagacccgcggt

SEQ ID NO: 574070 - DNA, 136 bp, Homo sapiens
agatctagacgatccccctacattgcaggagttggagtagggtcactagtttcccactttcagtatatttcgatgtcagaaataacgcatcttaggaatgactaaatcagataatggcagtttactgctgcacaac

SEQ ID NO: 574071 - DNA, 175 bp, Homo sapiens
  misc_feature (24)..(24): n is a, c, g, or t
ttgcttggttacatgaggctgaangcctgctgggtgtgtgcccagattgttaaggcattctaagtcacgggatgagataggagttcagcacaagatgccggtcataaagagcttgctgataaaacaggttgcggtaaagaagctggccaaatcccacccaaaccaagcaacccct

SEQ ID NO: 574072 - DNA, 887 bp, Homo sapiens
agccaacatggcggcggaacgcggcgcgggggcagcaacagtcgcaggagatgatggcaggttgacaggcgggtcgagtctgaagaatccggcgatgaagaagggaagaaacacagcagtggctatctgtgccgacctcagtgaacagagcctgaaggatgggcgaggagcggggggaggaggcccccagaagaagaacatgagctgcctggtggacatggaaccccatccaacctggacagagatgcaagaggcatgtggatgtgaatcactatcgccatagggcaacgattgcccggaattggagactctctgcctccgcaaaaatttaattaaatgcatgagaatcggtgaggagctacagagtcttcgaagagctggatctttagcgaaaccagatcaagaagatggagaatctggaggcgctaacagagtctggagatcctagatatttctttaaatctgtgagaaacatcgacggggttgacaaagtgaccccgattgaaaaaatcttcttggtcaacaattaaatcagtaacattgagaacttaagcaacttacatcaactacagactgcaagagctgcggacctaaccggcatcggggcaacggaaaatatttggacccttaccagctgggaaggttgttcggggcaaccacactctacagctcgaacctggtgggccaccacccgtaagcccagagtagaaccgtgcacaactatgggttgaccggagcccggggccctaccacggtggactaggggggacaaacccagtgggtgcacagacacagatccacaccagagtgacactcgtcccaaccggagtggccaccacagcctagggtttggtcgcgaaagcctaacaaaatggtgttatgaggta

SEQ ID NO: 574073 - DNA, 332 bp, Homo sapiens
agccttcagatgggtgctcatcttgttcagcatcagaggatcactcaggagagaagccctatgatgtaatgagtgtgggaaggcctttagtcaaagctcattatcttaagtcagcatcggagaattcacagtggagagaaacctatattatataatgttaaagaatgtgggaaagcttaatggatggtgctcagagctcattagacatcggagagtatcatgccagaaaagagccttcccattaatatgaaggggagaacgtctaccaaacaaattctacatcggtctaatctactttaggactggatcccataataagttataagttcctt

SEQ ID NO: 574074 - DNA, 677 bp, Homo sapiens
acggcaaatgctgtagatccagaaactaggctatacgggatgtaacaaggatccagagttaagaatatctagaatattttataaactataaagctgcaacacatgatatttacgctctagttactagaaaactaaggaaagcacttatgagctctgaataaagtaacatggaaagcacttatactaatcgacaaaaaaaccttctaatgcattatcagaaagattttctaatacaaggaggcatattgctcagtcagaaggggttctataagaaaagcacttactaagttagcgactaacagaacaaccagtttaaagatgaattaaatgcccaattaggggaggcatggcaggtgtaagagaaaggaaaagcttaagaatacatttcctgataataccaacctttctttcatcatctactgcatttgacagaaattaaccttttagagtttatacccgtgaccactttcattccttgtacaatgtagtgtaaatctccacttcgtattttgtcaaaatactgtctttgtcctttgatcacacacaccccacccggcacaccacaggtaaacagaatcttcattagaggaaatagcagtctgttcacatcccgcaaagctggtcaaaactcgtataatcccaagatgtccaagactgagtgtacgccatccatacga

SEQ ID NO: 574075 - DNA, 172 bp, Homo sapiens
ttgggggggggggtttggggtcccttttggattcggcggttccggggggggggggggtttgtgccgattccttttttttgggggtttgttttgctgcttttccattttgtttccccgcccgggaaggggggggaaaagccttttttccccccccaaaaaattgtaacattca

SEQ ID NO: 574076 - DNA, 508 bp, Homo sapiens
cagaacacatctcataacagtagaattaccactattgttctacatggtgattcaattaacttatactcttactaacaataattcaacatccaactactctttctatcttccaacatgcaatataatttccttcattactagtaaatattttatttgtataggatttacatttcttctagtgtgctgtaagtaatatgtgttttgtgtattataattattctaaatgttagcattttttttcactttaaacattaatcctatgttacccaaagagtatctgaaacaggtctcaattaatttaagactttcttttgtcatgcttaaagacatgccagtgacacagcctcaggacgtcctgactacatgtgctccaggtggttggcctacaacttgcttgtatacattttagagagacataagatatcaatcagtatgtgtaagatgtacatttatttggtttggaaaggtgggacaatgggtaggggggcagtggagagtggggacttca

SEQ ID NO: 574077 - DNA, 335 bp, Homo sapiens
aacgggtgatgcggttgacaaccactgccctgagtgatccagctctgctattgaattaacgccaccatttatcacgcaggagacaggaccgagagaacatgtcgcagtcgctcttcttatgacgcccgtgaagagaggccacggtcagaacggctcaagcagtgctatctgacactcaatttaactcgcgagtctcctgaattaccacaagagagggcgtactgaatatgaaaagcagacaccaagccctggacttgacgttccttagcagaaatacactgtcaaaggagagatcgcttaagccgtggagtacgagcttacagagtgctacgatc

SEQ ID NO: 574078 - DNA, 426 bp, Homo sapiens
tccgactaggtacttcgtgactacagtcttccgcgctacaatacgtgctgactacgtacttcgcgactacgtacttctgagtacactacttccgactacatacttcagactacatacttccgactacatacttctgactacatacttccggactcctactaaaaaggactaccttaagagcatggaaaagtggcttactgacaaggaaacccccgaagagtaagggagggcatgtggacaattaagaagtgatggcatactctttaaacttataattaactacgtttacttatatatcacacgtaatacaaaacacagtctcttgcagaactggttcagattacttaaataccagatacatgattaggcctctacataagtgtatgggagttacttatgtttatatcggaagtatgtagtccggaa

SEQ ID NO: 574079 - DNA, 240 bp, Homo sapiens
aggatgtaggctgctgcaagacatctacattcatttacacgcattacagagacacaggctggggagggtaagcaactgctcgcagacataaagttggcaagtagtccagtcaggattcgaaccagctccagtgccctagttaggtccaaatccactcagatggggaaatggtgagtcaggcagaagcaacaaccaggggcccattcaggaaacatcaggcctgcctgaatctctagcaag

SEQ ID NO: 574080 - DNA, 291 bp, Homo sapiens
gtttttttatttctactgtcaatgatgtgcaaaccttttactggttgcatggaaatcagccaagtttataatccttaatcttatgttctcaagcttggattaatacatatggatgttactctcttgcacaaatatcttgatacatcaatttgtctggttaaaaataggtggtagatattgaggccaggatattgcaaatacatgaggcttcatgcacttaaggagtatttctggataggatttgcatcttcctgggaacttttctggattatttccactctaggcaggatg

SEQ ID NO: 574081 - DNA, 106 bp, Homo sapiens
gtcatagcatatactcacattacatacatttatatacaacatttatacaacaaactaaaatgtcataaaaaacaatcctcttaagagaatggcgtgaacccgggag

SEQ ID NO: 574082 - DNA, 154 bp, Homo sapiens
  misc_feature (21)..(22): n is a, c, g, or t
ttttttttttttaaatccccnngtaaaaccagaatcccccccccccccctttttttctaaaaaaacccttttaaataaggccaatggggcaaattttagggggggccccgtccccctgttaaacaaaatgccaaaaaaagtttttttttgttta

SEQ ID NO: 574083 - DNA, 123 bp, Homo sapiens
agatcccctttcatcccaggaagccagcccaagagggtgtcctctggcccatttctgcaaaaattctcaggccctcttcaggtgcaccgtgaccccattggctccatgtgagtgcagggcaga

SEQ ID NO: 574084 - DNA, 130 bp, Homo sapiens
ttactggtcgcagcggggttagcagcggaatcgcggggtatgctgttcgaattcataagaacaggaaggttagaacatagggtcttgagtgacaaaatattttgtgtagagttcaggctcttggtgaagg

SEQ ID NO: 574085 - DNA, 233 bp, Homo sapiens
  misc_feature (2)..(2): n is a, c, g, or t
gntcggactgtggtgtagagtgtagacatgatgtagtgacttatttatttattcggggtggagtctcgctctggtcgccgagctaaagtgcagtggcgaatctcggctcattgcaagctccggctcccgcgttcaagcattctcctgtctcagcctcctgagcagctgggattacaggcgtgcaccacatcacccatctaatttttgtatttttagtagaggcagggttttgc

SEQ ID NO: 574086 - DNA, 175 bp, Homo sapiens
tctgcagaaatacacagaaatcatgctacttgatggagtaacgcagtaagaatcctttacctgaccagttttactgcttcacttctatttgaattcccaatttcttcccagtaataaatcaagaggcagaggtcgggtgtggtggctcatgcctacaatcccagcactttgggag

SEQ ID NO: 574087 - DNA, 396 bp, Homo sapiens
caccagagacatgtactcaacaacacaaatacccgaccaaagtctttaagaaagcaaaagaggccgggcacagtggctcacacctgtaatcccagcactctaggaggccaaggtgggtggaccacttgaggtcaggagttcgagaccagcctggccaacatggcaaaacctcgtctctactgaaaatataaaaattagccaggcatggtggcacacgcctgtaatcccagcagtttgggaggctgaggcaggaggctcatttaaggtcaggagttcgagaccagcccgggcaacatggcaaaaccccgtctctactaaaaatacaaaaagttagccaggtgtggtggtgcacgcctgtagtccaagctactcgggaggctgtcgggctagtcgggg

SEQ ID NO: 574088 - DNA, 857 bp, Homo sapiens
  misc_feature (94)..(94): n is a, c, g, or t
gagtaccagctccccactgccctgagggcgggcggccctgcggcggagggaaaaaggaagaggagaaggaaatggtcccgaatccctgcagtgngtccaggcctctcccgggtgccagtctttctgtaggtgcggcacaacgccaggcaaaagaagaggaagggaatttaatcctaatcggtgaaggtcgattgagggtctgctgtagcaggtggctcgcttgaagcgagggaggaagttcctccgatcagtagagatttgaaaagattgttgggagtggcacaccactagggaacaaagaagaaggggcgaactgcttgtctctggaggaggtcaaaccccagaatcagctcttgtggccttgaaagtggctgaagacgatcaccctccagaggtttgagccagtcccacagcttcctcccccagctgagtgactactctattcctggggtccctgctatgtgtcggggacgaatgggcatgggtacgccgaggaaaagtaggctggtgaccgcagcctgatgatgggggctgggcctgctatggcatttatagactgcctaggggaagaaacgacccaggaaaaattggctgagggtgcatctggggatgtgatgatgctgggactggtccggggccggattaatgactggtctgatgatgatgctgacgcatgagagcaggagtattttggaccacctgggtcgattggctgattgacgacgtagccagagggcaggtaccggcatgggggcgaagggtccatgagaacgctgcccaagaaagttgggggaagcgaacattgacgattgggcggggcacaattggggcggagaccaacaaaaagtgaagcaaac

SEQ ID NO: 574089 - DNA, 1153 bp, Homo sapiens
tgcagaccttcgatgcgcaccgtggccctggggacctgtggcagccctccaaggtggccaccaccagcgtcatcaccatcgtcaatgtccaccgagctctcctccacctcctgtgcccattcatcgtgcgttgcagtccatacgttgcctgtgcctgtgtgtggctggtgggtgtggctgtggctggctgtggctggcgtggcaggctgggtgggggcacattccctcgtacctgtcactgggatgcagacatctcagacatccgagtccaagcgcaggccccatcgaggcgcaggcagtcacaccaggaagagactgtattgcagggtgaagagtgggctcccgtgggcccagagctgcacgccggtccacagacacactcacgccctgccacctgctccccgacaggatgtgtctgtgtagtgggaattggtatcttgcacccgtgggagtcgggacatataatggaaaggccctcgggaagttccgcgtactctgattgggggctgccggaagacacggccccaggagtcagagccctgtggtcaggtctagcatggggctggataccactcctgctgtaagcaaacttcgacacctgtacctgcaacggactcccagacggtgcggtgagaccatcaatgccctgaccggattctgcagacccccggcgcaggagcatggatggatagtggccaggaaggcttccgatcctttccagattggtcacgatagcagtgcaccgtgaacccgggcatgacaacaagcacggggcatgagtgaatctggcaccaagtgatgacacgagccgcaagcagtaaaagatgagaacgcgtgatgtgaagagacacatgggcagtccaaaggcaagaaggagtgaaaggagtagcaagctcgaagagcgggaccagaggggcagagcgcatgaggaccaccgaatggaggaaagaagcgggcacaagagaagagaagtaccccaggagacacagggaacaccaagaaaggcgtcgacgcaaaccgcagacaacccgcggacaaaggaggaccagccccaagaaatgagaccaagaaggcaccgaggaacaggaagaagagaaggccaacattacaggaggaaacaaacaagcgacaggacacacacacaagcagaagg

SEQ ID NO: 574090 - DNA, 111 bp, Homo sapiens
aagcagatcgagaccgggcccttcctcgaggcggtgtcccacctgccgcccttcttcgattgccttgggtccccagtgctgttagaataaaaagcctcgtgtcggaaaaaa

SEQ ID NO: 574091 - DNA, 325 bp, Homo sapiens
aattcgcggcgcgtcgacacggctgcgagaagacgaagaagggcactcaggaggctgaggcaggagaatggcgtgaacccggaaggcggacttgcagttagccgagatcatgccactgcactccagcctacatgacaatgtgacactccatctcaaaaaataataataataacaatataagaactagctgggcatggtggcgcatgcatgtagtcccagctactcctgaggctcagtcaggagaatcgcttgaacttgggaggcggagttgcatgagctgagctcataccactgcactccagcctgaacagagtgagatcctgtc

SEQ ID NO: 574092 - DNA, 647 bp, Homo sapiens
catgatggcccacacctgtaatcccagcactttgggaggccgaggtgggactcttgaggtcaggagtccaagatcaccctggccaatgtggtgaaacaccatctctactaaaaatacaaaaattatctggccgtggtggtgcacacctgtaatcccagctattcggaaggctgaggcaggagaatcacttgaacccaggaggtggaggctgcagtgagcagagattgtaccactgcactacagcctgggcaacagagctaaactccgtctcaaaaaaaaaaaaaatcggcgttagtccaagaattgaaacctttcggcttctatccagctgagtaattaaaaggtctaattaatagcaaatttagaaaataaattatccccggtggcatacgggtccccggcatcatataaaagggtccatatgcttcacatagtatccctgggtgaatttaatactgaactgggggaatcgggaatgaataacgtggaggtgtgcagaatctttcatcttcagccataatattttaacttttgaagacaccaaaagaacgtccatggtagagcaaactggcccttacttttaaaaagatcgacttttcaaagttcacaacttcctcccaagacaaatctccaggtggtccccacta

SEQ ID NO: 574093 - DNA, 224 bp, Homo sapiens
cgcttggtaccagctgggcaacaaggtgagactccatccccagaaacaattaaaaacaaacaaacaaacaaacaaacaaacaaaagcaagctgggcatggtggctcacacctgcagttccagccactcaggaggctgaggcaggattgtttgagcccaggaggtcaaggctggagtgagctgcgattctaccactgcactccagcctgggcaacagagcgagac

SEQ ID NO: 574094 - DNA, 630 bp, Homo sapiens
aagtgtcttggggtaccctgccccccccggagtaatggatatgtcgaaccacgcgctcgagactgtgcctgtcgcatcctggtgtacaggtacctgtcggtggttactgcccacgaaggcagtgtgcccccaccactctcctccagacccaggtggggaccagcccctcaccacctcccagtgacaccagccataccctattgcttcctatggcctccaccacaacatagcctcctaaagcgacacatcgtcgtcatcagactgtctgtgaatgcagaccccgacatcccagcgagatctggaggtcatgaaactctgcatccaggttattaagttgaaatgtggcttcatcactattccttggacatgtatcacaaaaatgcagatcccctctatgccaatgctggaaggttctgcactacacgactcagtgtctccagcgccctctacagcacaccgtgccataccacaatgagcatccaagagcccctaccacgccgtaccaatgagtcggttcaacgcctacgtgatggagcattggtgtatggatgtattgcagccatggtggtggagaacaccatgggacgccatattagcgaacgaggagtgaaggcaggagcagggccgtca

SEQ ID NO: 574095 - DNA, 309 bp, Homo sapiens
gccggaccggcatactggacttctggtctcctacctcatttccccatcagagattatatactcctccttaatcttaaggggcttgcagaagggcggaggttcatcttctgtaactgcttcctgctgatgttatgtggcatatgaccctgcctagcactggatgaggtaaaatccctggtatacctgtgctaaaagaggccaaagttagatgtctttatcttctgggtcagaagaggggatgggttgaaagacttgtgccagcatcatctttacatgggattattgtaatctggagaaggtcccggtatg

SEQ ID NO: 574096 - DNA, 264 bp, Homo sapiens
tcgactcatagagtgatcccttttagctgtccaccagtttcccggtcaggtatacacggatggggctgaggcgggggagaagactggggaggtggagagggctggagccagatagcgtcctgggagtgttgaggagagaggctgcaggccccatgagcacagcgtgggactagtgcccattcggtgggccatgtgggccactctttacccacggctggtggaccgcagtctgctgccacagtccaacggaggtgctgacaggtt

SEQ ID NO: 574097 - DNA, 210 bp, Homo sapiens
tgtatcttagaaatcagtgtgatatattgctatgctgtgagttcgcccaacggtcttggagtgcagtggcacaatcttggctcaccgcacccccgcctcccggggttcaagcaattctctgctcagctcagagagcggggtgcagcgctcacgcacacagactaaatttatttagtagagcaggtacatgtgcagctgctcacctgacta

SEQ ID NO: 574098 - DNA, 971 bp, Homo sapiens
gtcagctccatttggggaccagagccatccagaacctgagtcctggaatgcagcccagcactgccaacaggaccggtcccaaggtgggctggggccaccggctggatggcttcccccctgggcggccttctccagacaatctgaaccaaatctgccttcctaaccgtcagcatgtggtatatggtcccgtgggaaccgtagccatcagtccagcgtactcgccaaccgtcatctcgccagggtgagaccgctcaattgcctggagattggatagttcccgcgtgcgtgccactgcgcgcagcctagcacaaagccgcctagatgtgtgccaaactgtgtggtgggaggaagcaatgagcgcgattctgtgaggccgagattctcggtcaagacccgtaccccactggttgtctgcatcgcggcctagggtggaggctcggattctcctagcgttcgcaggaggaagctccccgagccgacacctaccaggctccgggtcctgctcccagccatcagcctgatattgtccatcgggtcttgagctggccttaccctcctggggtggccacattggacagatatcaagaacatctgccgatcctgaggcgcttccgtctctgtgccacgcaaccctgccagctatctgaccccctagaaagggagctgctggcactgatccaactggcagagggagttccagcgctgctgccgccaggggaacaatcacacctgtacatggaaggcctgggaggatacccttgacaaatactgtgaccgggagtatagctgtgaagacccagcacacttgtgtgggcccaaaccttcccagccctaactcgggatgagtggcttggccgtcgggccccttacccccactatgaccgggaatttcttgaccattggagatcagcgaagtcaccccaacctcatggggccactctgtggaacccaaagagttctcacaagcgtac

SEQ ID NO: 574099 - DNA, 332 bp, Homo sapiens
tatatatgacgaactactagtcccagtatatgactcactatcggggaaacactatgtcttaggacagagggaaatacaaggtgacacacagaatttaatttcgattcttatgggtatgagtaagcacctaacacctactaaccaaacaaaattcttcttcccttcagagattcttggtccttacccaaaacaccccttgcaacaaccacactaccctgttaccagaccctgcctgcagtcacattttccatctcatacttttattcactacaaattccaaaactcttgaagtatgaatgactgattctttttttttttttttttgggaaatg

SEQ ID NO: 574100 - DNA, 131 bp, Homo sapiens
gtcagtgctgtaggaagtcagaccactattactggcaacaatccaggaagccaaacaataacccccataataattagcccgaaatggccaggacttgattcataactgatagcttcccatatgtctgtccc

SEQ ID NO: 574101 - DNA, 253 bp, Homo sapiens
agtcgtgtacgggtctctggtcaggtccttcacgaagtgccacacctttgcgcctgcagagtttatcatatgatacccgcgcatgcaggctatggtggtgctccgcctgtccattgagggccccagcaaggtggacatcaacacagcagagcaggaggactgggacgtgcagggtcacctactgccccacatgagccaggcaactacatcatcaccagcaggacttcagccgagtaccgagcacgactatcgt

SEQ ID NO: 574102 - DNA, 684 bp, Homo sapiens
  misc_feature (47)..(47): n is a, c, g, or t
  misc_feature (102)..(102): n is a, c, g, or t
  misc_feature (104)..(104): n is a, c, g, or t
  misc_feature (212)..(212): n is a, c, g, or t
  misc_feature (443)..(443): n is a, c, g, or t
  misc_feature (598)..(598): n is a, c, g, or t
  misc_feature (602)..(602): n is a, c, g, or t
  misc_feature (638)..(638): n is a, c, g, or t
  misc_feature (641)..(641): n is a, c, g, or t
aaggatcagttggtagagcaatgactgttatcattgggtccctggtncgagtcaggtcgtggagccagatagagaaaagcctgtagaaatacaggctttttntncttgggatttgacccagcaatccagacgcttagcatgacgccatctctaatccttcgattcagaggtaaggccaatgaaagtcgctgcagtcgtttcaaccaaaggcnggccggggaaaaccgcggttggcgccaatctaggcgcgttctgcgccgacgcgtgtcattgaccttactgatcgatctcgatcccagccgtcactgtccttgttctatacgctaatgcgtgaggcgccgggcgggacctaccaactgatcgttaataatgaaatgcctccgcggagcgctttcttctgtcggtaatgaggtgaagcgctgagcaaggcatttgataaaatngctagcgaatgtggccgcggaagtatcaacggcctttaataattcactattatgaaaaactatgatcagtgcataggtgtagacgctaattcaaaaccaccattgataacgaactgaacgcccatacaaaccagtagaaaaccaacgactcgggnaatngcatcgattcctgactcaccaagcactttcatgatncgncccgaacatcttaagctatccagaaaataagcgcagtaatgat

SEQ ID NO: 574103 - DNA, 171 bp, Homo sapiens
aggccttaggtgctgttccatgggaaagatggtgttggtgtcctgcctgtctgccccagcccagatttccctgtgttattccatcatttttcatattctggtggcccccacccctggaggagcccagttcgtttgagttagttaagttgggtaataccagcttaaaggcag

SEQ ID NO: 574104 - DNA, 386 bp, Homo sapiens
tacctgcatctgtgctccaatctagcgctggccctctggacacttatgaactcttaacttgtcttttctcatccctttgaccccgccagactgtgtagccctcaggcctggtgttgggcccgatcacctcaacatcccattgtgattttaatttgcattacccaaaaggctaataatgttgaacatcttttcatatgcttacttgctacctttataggtttttcttttagcccattttcttttctttcttcttcttttttgtcttaagtgcctggcttatttcactcagcacaatgtcctcaagattgattcatgtagtggcacatgtcagaatttccttgcctttgaaggccgaataatattctgtgggaggcacagattgcagt

SEQ ID NO: 574105 - DNA, 702 bp, Homo sapiens
gccgaattcggcacgagctcacctcctctcactgctagaatattcaccaagggtttgcatttgggaagtcccttaccagctcctgcttagagctggtagggccatacatgtccacactcccaactggtggctctcccgctgaatggggcctcagcaggtgcccaggctgctacaaccttggccactctgtttctccaccccagcactgggcatggtaattagcctttccccatgttaatttattcagttttttcacgggtcaactgaattccccacttcctgggtaagaagcatgatctcctttaatttcacgtctaagatcctggcagcttcccctagctggttcctctgtagtcctgctgggactgtcagctcatttaaatgtggggctgcagaatgctttatgtctcccccacccccttaccttttacagaggaacctttcatcaggaataatgaatattgctgccctgggggctttgctaatactggtcataccttgagaggagaggtatttgaaccttttctttatgggtgaccttctcaaattttaaaaattggttatggcttaggccccttactggttaacatggatgaagtctaccaatactccggttgggaaaccttggatgggtcttgtcaacatttaagcctttaattcccttaccttgttacaattaggggtaggcctacctttggggtg

SEQ ID NO: 574106 - DNA, 930 bp, Homo sapiens
ggaaagcggagcgtccgggacgcggcgggactcgagtgtttcggaaaaggagcgtctccccaggcggtggttgtcttcactagcgatggggtaaaaggaggacgcaatacctggttcaacttgagcagacggagtctcgctatgttgcccaggctggggtgcagtggcgtgatctctgctcactgcaagctccgcctcccgggttcacgccattctcctgcctcagcctcccgagtagctgggaccacaggcgcccgccaccacgcccggctgattttttttatttttagtagagacggggtttcaccgtgttagccaggatgatctcaatctcctgacctcgtgatccgcccgcctgggcctcccaaagtgctgggattacaggtgtgagccaccggcctggcgagcatgttaatttaagcaaatgaatgtccctgggaatgatcttcaaggagaattaaagtgggatagagaagtcatctatctgcacctgtgtctgaaccagaatgacgaggcacttccatgtcagctagttactggagcaggcggagtaaggagtacccctgggcttctgccccgaaacaccacggtacttcaaaacaatattacattaatttcctgcttgttcttgagaacgcactggtttgaaaaatcggatggggtgatacctgtctcatccgtcatttaccaagctcctttaatcacttcctccagaccattccttgagcactactatgtgccggcagggtaattcattgagcccctgctgtgtggccgggccgttggaggactctagcaattattcctaggtccgcgcctggtaactcaacaggtaccaatggcggttctggcctggttcgcgaacaagaggcgcggcccactagccaaagatcccgcgcatgaaaccgggcggcatagacaaaccgcgca

SEQ ID NO: 574107 - DNA, 727 bp, Homo sapiens
gcacgactctgggagtggggaaacagacgagcggtcctctgctgcagaagtcctcggggtggcttctcacaagtctgcgaaggggaaagggttgtgagaccaagcagacccaactccagctcccagcaggaggtggctgcgccacactcaggaggcctcttggtttcagggtctctctgtctctctctcagcctcttcctcgcttctctgtctctctgtctctctctctctctctccctcgtcgactcccccaaacatgtccaccggctccctcagcgatgtggaggaacttcaagaggtggagatgtgggaatgtgacgggttgaaaatggattcgaacaaggaatttgtgacttgcaacgagagcaccgaggagagctccaactgcgagaatgggtctccccaaaaggggcgcagggggctgggcaagaggaggaaggcgcccacctaagaagagcccccctgagtcggggtctagcgcaggaggggaagtcaggtccaatcgcaagcaggcgcagcaacgcgcgagagcggtgcccgcatgcgagtgctgagcaatggcttctccagactcaagagcagcctgacctggtgtgacccccagacagcaagctctccaaggctggtagcacgctcaggctggagtccagctacatcgcccacttgaggcagatcctggtctaactgacaaataccgagaagcgggtacattcacccggtcaagctg

SEQ ID NO: 574108 - DNA, 107 bp, Homo sapiens
gactctagatgatcccacctggcctcccaaagtgctgtgaatacaggcgtgagccactgtgcctggcctgtcaagtattttttaaaggtttattctgagccaatatt

SEQ ID NO: 574109 - DNA, 308 bp, Homo sapiens
ggaccgattcacggcaggcttgtgatattagattttttaaagaagcaatatagaagttagattttaatcaaatttgtatgggtttctaggtaatttttacaaatatgcttgttggcttcagctggtctcctaccgtctgctcttggatggagatggggacggggcgtggagttcaaaacactgtgtaattttgtatctctgattgtcttgagttaagagctgctgaagaagttattttattatcttttatatataaggaataaatccccgcctttagttccttcatttcagtctactgttccgggggt

SEQ ID NO: 574110 - DNA, 283 bp, Homo sapiens
gaaggcacctgcatgttaaaacaagccagtacagcagcaggagcacccacctgggctgcctgggactattaattggagggaaatccaaagatttgtctgtttcaggcccttagatgtaggctgtctttgtgacagcatccttctacccaatcgtgcctccaccctcctcttgcctctctgcattcccagacagcgctccacagtgccctggtggacctcagaacaggcctgagagcagtgatgtgcaccagaggctgtgttctctaggtcatgggaatgggtt

SEQ ID NO: 574111 - DNA, 294 bp, Homo sapiens
tagcagtgaggatgaacagagatcactcttgtggccatcttggttttggtgggttttagctggcttctttattgcaacctgttttgtcatcaagatctttaagacctgtatcttgtgttgacctcctagctcatcctgtgatttggaatgccctaaccatctggaatgcagcccagcaggttttagcctccttgtacccagcctctattcaagatggagttgctctggctcacacgcctttgaaaatttcccaaaaccaaggcggctattgcaaaactaccaaatatgtaaaaa

SEQ ID NO: 574112 - DNA, 246 bp, Homo sapiens
cgatataagttcgagagtagcagtaaagtttggcgtagttcaagtttatgtatcagggagtatgagtagatgcatagattgtgcatacaagcagcagcatcaattgtcgaacattttcatctccctaaaaataaatcccatacccattagcaatcatttcccatttctccccaacctccccccaactgcagtcctaggccacctctactccatgttccattttcatgcatctgccactgcttggtg

SEQ ID NO: 574113 - DNA, 939 bp, Homo sapiens
ggctttccaggtcttctcccggtgaaccggatgctctgtcagtctcctcctctgcgtcctcggcgggccgggtcctcgcaaagccgtgcatcccggagtgcccagccagcgggctcccggaggctgcctgggcagtgcgtgtgcgcggtaggagctggggcgcgcacgggtaccgcgcgttgggaggagaccattgcccttgccgcgatgggggcccggggcctctccttcaccgcggtaaggcaaccgggcgccggcgttggggtaccctgcccaaccggggagcttcctttcctttctcctggtggctgctgggcacctgaaatcccagctgccggggagcacctggcaagcaacaacggggacgaacttcttttaagcgttgcaccaacgttcgcaagcgcagtcgtgtagggaacgtggggactcccccagacgggctccaaatcttcccggaagcgtatgtgtggatctaacgtccggaaaacaatttattagacggtgcaccccaccccttcgcgaaagagatattcccgttgaattgggtctaatggttcaccgtgcatccttacaggccctcacagggggcaaggtgtccctgttgctgccaggcacaacgctaagtgtaacaattttccacattacttgcgggaacctccctgggcgcaaatacactctggctatgggcacaaagcccttcttccgggtatggggtggccctactgactcgaggggaaccgaccgtttaccagcaggcttcagcgttgacactctgtcccctacaattcgcagtgctttttcgctccccagagggcgagcccttaagaaacagttgatcttttggccccccccaaagcatttgggttggcgacctgggcacattgacatggtgctgctggccagaagcgggtccatatccggtagccaccccccaattag

SEQ ID NO: 574114 - DNA, 920 bp, Homo sapiens
gttggttgtaaaactatgcaatatgattaaacctgacataaaactgcacacagaagcaataaatacgcggtatctctcgtaatccgggttttttcccttgtaccggggaaacctccaccaagggctgcccccaaaggtgttcccccccaatataccgtttcggaaaccctctgttattgccctcaatatattccgggcggacccttgtggtgcccactccccaatgcccaaagcattgggacttctttaggtttccctcaaggttttgtaaaaagatcgtcttcctcacaccccgagccctccgtctccggtaagcccaaggaacacgccgtgcctgcccaccgggccccccgcaggttgggcagagaggagagccctttgctcctacctcctgggtaaaaaggtccccgtggcaacccgcggagtcctaggcaagtcaaggttaccaaaaagggggggctgctccccacagaccttcgtgggaggcccaggccgattcttcttcgagcaagtatgcgggtagaaatacaaacagtctcggcaagatcctggcttggtgtcacaattgtggcacaacttggggaagccaatcttcagtgcaatcttgcgctttctatctccaccaaaaaacacccgtcatgtcggtgttctctattactccccacgataggactttatcggtcttttcgtaaaagaccatcgcatgcccttgcagtcttataatacaaaagcaatgcttccatattctagaagatcttccgattcaggtcttcacatccctcccccatgtttaattgggcgtcttgatcatatcttggaagatgcgccccaatttcgcaccccgtttacgcttgccgtttaaaaacccgaacgtgaattttcccccagaaaatccctgttcaagtaacccaaacataaca

SEQ ID NO: 574115 - DNA, 119 bp, Homo sapiens
cgtgacagctaccgtttcatcaacgaacctgcacgtgtcaccagaagcgctgcattgattgttcaggccggcgccaacatagccaatcgttacgcctgcagcggtaatatggccattat

SEQ ID NO: 574116 - DNA, 118 bp, Homo sapiens
agccggcccgattagcccgcagcagagctgcaggtgtctgccgcgacaccgaggttcagctcatctcgtctctttccggaacctccacctcagcgctcccaaatctccgctgaatgat

SEQ ID NO: 574117 - DNA, 195 bp, Homo sapiens
  misc_feature (65)..(65): n is a, c, g, or t
  misc_feature (86)..(86): n is a, c, g, or t
  misc_feature (111)..(111): n is a, c, g, or t
aggaagggtaggggagtagtgagggtttaggaagattggggttggggaaggatagtaatagggtntgagtctttgggtaggggggnttagggggttgtaaacattgaccanttttagaaggggatgggggtgggagagggctccccttatacttcctcacagggttaaggcctctccaggctcatgggtcgacgc

SEQ ID NO: 574118 - DNA, 406 bp, Homo sapiens
  misc_feature (218)..(218): n is a, c, g, or t
  misc_feature (311)..(311): n is a, c, g, or t
  misc_feature (374)..(374): n is a, c, g, or t
  misc_feature (393)..(393): n is a, c, g, or t
ttccccggtttttaaacccgccagaatcatagggttactcattgtcgcaacttgcaaggtcgtctctttttgttgctgatgaaactgacctataaccgaagtaatatccccagtgccgcagtaggtagtgcaccaaccctgacgacatcattattaagaccttctttacgatgaagcgaccgtccggcagtgttgatggcgtcaagaactctgactgnatgcgttaaaaattgttcgccgggtaaggtaagttgcgccccctgacgaccacgctcaaacaagcgagcgccagtcagctgctccagttattnaatgtttagagagcgcaggttgactcaaattaagggtttcagccgcgcgccccaaagtccttnttgtgcgacactacgaatntatgaaggtggcg

SEQ ID NO: 574119 - DNA, 187 bp, Homo sapiens
agtctgacgcttgtgattaacaggccaaatagaacgctggggactggtggagtcctctagaggaaaaaatgatgaacagatacatatgagatacctgctacagttatatgtctacctagttgttagaatgtaggaagggttttccacatatattatcttgtgtaatcctcacagtaaccctgttcaa

SEQ ID NO: 574120 - DNA, 100 bp, Homo sapiens
acggccgtgtattactgtgcgagaaccctttattttgatagtagtggcccaggaaatgatgcttttgatatctggggccaagggacaatggtcaccgtct

SEQ ID NO: 574121 - DNA, 883 bp, Homo sapiens
gcactctccggccggccgcctgcccgtcggctcctccgtgcgccgccagcctcgcgccgcgccgtcaccatgagcccggcctactcgtccagcgcagctggcgtgtcctcctagcgcgcaccttcggctggggccccgggcttcccggctcggctccccgagtgagctcgcccgtgttccgcgctgggcggcgctttcggctctcatggtgctcctgccaagcctcggtgacagtacccatagtgtacccaggtgtcgtggcacgtcgaggcagaggccgggggcctggggtcgctgtgggccatcacggcaggggaccacccagaacagaccctcctccttacgagcgcagtagatgaaaatgaccggatcatcccttatatgctgaggctcggtagtctacatttctgattaatgccatgggttaacccttgcaactataaagtgacattcagagccaagacatgacaagtagaccacaaacaaggcaacacaacatacaaacaaacaaaggcacgaactcggcagaaaagaaaaacagcaagacccaaaagagcaagacaggaacgaacaacacacacagcacataggcaaaaaagaaagaaaccgaattgagagaaacgaaaaaaaaaagaaaacaacagacacaaaaaaagacaacgacacgaacacaaatcaaacaagaaaccgaaagagaaagcaaaggcaaacaacaaataacagaaaaacaaaacacagaagacaaacacaaaaaaaacaaacaaaaaaaaaaaacaacaggcaaacgaaaacaaaaacagaagaaaaagaaacagtgcacacaaaaacaacaaagaaaagcaggaacaaaacacaacaagaaacacaaaagaaagaaaacaga

SEQ ID NO: 574122 - DNA, 553 bp, Homo sapiens
  misc_feature (485)..(485): n is a, c, g, or t
tgagcaagcggggaaggggctataagaaactacttcttcatcgtccggagagggtgacgggggtcactacaataagtggaagccagggtccgccttagtacgcgccgggccagggctggttgttcagtcaggcaccaccgccttgcttgtggtcacacatcgggacatgaatgagaaggaactggaagctcaggaggcacggaagtgcccagctagaaaaccacgaacgggaggaggaagaggaagatggagatggagacagaagagaaaggagggtgggggctcagatgaggagcaggagatgtggcagcagcagtgagagggagggcagtgaagatgagcacttcgggcagcgagagtgaccgggaggaaggtgactgggacgaggccagtgacaagagtggctgtggtgaggacgagagcagcgaggatgaggcccgggctgccctgtgacaaagaggagatcttgggcagtgatgctgatnctgaggaggatgccgactctgatgatgaggacagaggaccggcccaaggtggcagtgacaatgatcag

SEQ ID NO: 574123 - DNA, 779 bp, Homo sapiens
  misc_feature (18)..(18): n is a, c, g, or t
  misc_feature (62)..(62): n is a, c, g, or t
  misc_feature (64)..(64): n is a, c, g, or t
  misc_feature (104)..(104): n is a, c, g, or t
  misc_feature (141)..(141): n is a, c, g, or t
  misc_feature (146)..(146): n is a, c, g, or t
  misc_feature (170)..(170): n is a, c, g, or t
  misc_feature (188)..(188): n is a, c, g, or t
  misc_feature (206)..(207): n is a, c, g, or t
  misc_feature (213)..(213): n is a, c, g, or t
  misc_feature (218)..(218): n is a, c, g, or t
  misc_feature (221)..(222): n is a, c, g, or t
  misc_feature (298)..(298): n is a, c, g, or t
  misc_feature (313)..(313): n is a, c, g, or t
  misc_feature (315)..(315): n is a, c, g, or t
  misc_feature (322)..(322): n is a, c, g, or t
  misc_feature (327)..(327): n is a, c, g, or t
  misc_feature (334)..(334): n is a, c, g, or t
  misc_feature (338)..(338): n is a, c, g, or t
  misc_feature (343)..(343): n is a, c, g, or t
  misc_feature (362)..(362): n is a, c, g, or t
  misc_feature (372)..(372): n is a, c, g, or t
  misc_feature (376)..(376): n is a, c, g, or t
  misc_feature (394)..(394): n is a, c, g, or t
  misc_feature (398)..(398): n is a, c, g, or t
  misc_feature (466)..(466): n is a, c, g, or t
  misc_feature (558)..(558): n is a, c, g, or t
  misc_feature (588)..(588): n is a, c, g, or t
  misc_feature (591)..(591): n is a, c, g, or t
  misc_feature (668)..(668): n is a, c, g, or t
  misc_feature (715)..(715): n is a, c, g, or t
  misc_feature (761)..(761): n is a, c, g, or t
ctcgaacacgagcacgcncagctcccgcgcgtgggccagcagcagctcaaagtccacttgcnanaggaactggttatacaggacaccctcagtgaaccggagtntgtccctttccagctcccagagccggatctggtcggngatgnaagggggcagcacaggtgtctgtntgaacatcactgggtggnctcttgtacttaggaaannaattanatacnggnntgtgatgccactggcgattgcatgctgcacactctcccgggtcacctgcgccaccaccatgtaggggaaccgatanaacatctaaaaaaananggaaatnagggnaatctgnagcnccgantccgtgtaggaataaagtnggtaattagnttcnacgaaaataaaacctggntgangcaaagtgcccccagctccagaaaaacctgaagagagaatgatggccaggagtgtggggtagtaacgncgagatttcctcttcctctggaaaacaagcccaaactcacgcagatgttgcaggaagttcaacagagaatcactcataccttccacagagtnatccttgcccagagtagagaagctgagctngtngaggaaggagagatctctaccaggtccatgccccggctctgggctgtctgcaaatactgcaacataaagtaccaganctgagccggggtggtcagccaacaggaactggaagccagcggaagtnatgcagggcggctctccaggttcagtactcttcatgagcccagctngctgaggagctgagccaa

SEQ ID NO: 574124 - DNA, 117 bp, Homo sapiens
ggcggggcgaatgaggtcactcatgggaccttgagcaagtcacacggctatggacacttctaaaagtaagggctatggaaatttctaagaattagggggtccggagctcgatatcgt

SEQ ID NO: 574125 - DNA, 371 bp, Homo sapiens
gctttttttatgaaatgtaaagaaagaaccccctttgtattttttgtaatcccccctttgtggccaggcctgccccgcccactttgtatatatgtaagttaaacccgggcaggggctgtgcccgtttttgtactttggtgatttttaaaaattgaatctttggccttgccttgattgtataataattttgagcccaggtctcgctgtgttgctcaggctggtttcaaactcttaagatcaagcaatccgcccccctcaccctcccaaagtgttgagttcccaggggtgacccccccccaggcctgattgtaatttttttttttttttttttcctggttatgggaagggagaaataaaatcctccaccccca

SEQ ID NO: 574126 - DNA, 212 bp, Homo sapiens
ctgtcaagtagctgacgactacatggtgtgttgccacacacccagctcattacgcgtatcggggagcagagagggggacacaacatgtcgaacagacagaggtggaactcctgatctcaagtgatccacccgcctaggcctcccaacatgctgggatcgaaggcgtgagccaccacacccagcctggatcctctgatcttattacaatatgc

SEQ ID NO: 574127 - DNA, 200 bp, Homo sapiens
tatatcatttctcacctaatgttcttcacatccatagctatcaccacagcaaatccatagattttggtaaacattaaagcagcgctaggttttcaaattactatcattcattatgatctttgttttgtatgaaatgttgaaatgtttgagacagagtctcggtctgtcacccaggctggagtgcagtggcgcgatctctg

SEQ ID NO: 574128 - DNA, 127 bp, Homo sapiens
  misc_feature (89)..(89): n is a, c, g, or t
gatcccaggagacaccagggccagagtgaccacagcagggcaggcatcatcgtgtgtgtgtgtgtgtggatgtgtgtgtgtgggttttntaaagaattcttgaccaataaaagcaaaaactgtcaaa

SEQ ID NO: 574129 - DNA, 403 bp, Homo sapiens
actgagtgtgagcttgggggaaggcagaggcacctgttcaccgctgaccctgggtgcagatgggcatgccgggtatactgactgtgctttcctggggcctgtctccctaccaggtcagcctggggtcctctggcgcagggggccatgcactgcctcctgtgggcagtgggatcagcacttccactttgctcagggctagagcaggctgctgcgggtgtgaagacttaggaaacgaattcggaaggaaggaaaggattttgcacttcccaagctagaggaacatgaatagagccgggctgccaggccaagggtctgtaagacggcggctcttcagagactctgcaaatgctgagaaaggaaggctccccaagggcagttcctgtgggcgttactctgagttttc

SEQ ID NO: 574130 - DNA, 712 bp, Homo sapiens
agcggtacgtgagagcgcggcgggaaggtagcgcagtcgggcggcccgcggccccggcgcggcctccgctagggccaagacccgcacacctgccgggccggggagaagccgggggccgcgcgcaggcgaggacccgccggccggcccggggaagatctcaggacgcggaccgggcagctcgggtccgacggtgagcccgggcggaggacgcgcccaccggaggtgcggcctcggagctccagacccagcccactcggggctggggtccccaggaggaggccgacggccgaggctggtgtgcgcctgggagccagcgcagatccctgcgggagcaggaggagccagagccggagggagccgcggtgcccggcctatgcaccgggcgcagataggctgggaggcgcgggccctgatggcgcgtggccggtggcgctggggactgctcggcaggcctgccgtctctcccggaccgtctgggctcgcgctcgcagcttcggactctgcgtagctgctggcgcggccgccgtcgggccgtgcgggagcccccgaggcgcagggtcccgcggtgcccggaacggacagacccggaggggggtcgaccgctgtcgcgagctactacgagcgtgatgggccagtgggacccggccttcaactggcagcatccggagcctacagcttctgcttgcggcacgtgcggataccgcttctgctg

SEQ ID NO: 574131 - DNA, 156 bp, Homo sapiens
gatctagaggtccctgatatgcggtctcaatatgggattcaggtcttagcaaccaaaatctgaaaacgctcctaaaggggatgaaaaggtaacataattaaacatacacacagtcacacacagagagacatacatacaatacacagagatacacac

SEQ ID NO: 574132 - DNA, 109 bp, Homo sapiens
atagctttgtagggtccctgaaaagcatatttggatttaatcttttctcacaccgctaataaaagacatacctgagactgggtgaatttataaaggaaagaggttatgg

SEQ ID NO: 574133 - DNA, 970 bp, Homo sapiens
gcatatcaactagttgcgcgtatgtatcttttcatctgaaaggacaatgggtgggggaagagctccactgaggatgcgaggctacgggagggcctgggtctcgacgccgtgcccgcctgccgatccaaccactcgcacgggggagacacaagatacgcgtaactcttttacatttgtccgtgtgtgagtcgaatctaggcgagcgtgtgcatcgcgcgcgaggcgtccatataccgcgttcctagttccacctccaagacactataacatccatcaatacaacatatctagtgtaagcgccaagaacttacatacataacagtgtctgctcggcttactaccccgaaagcaagaatatacaggagtctcagtcgtcacatgccccggcgatggggtggggctcgtataagcggggacatatgagattgtgcgagccttaactatttgtctcgattagtaacatatagattctgtgcgcggtgccttgtaaggatactgtggtcctagtaattatacttgtagtgccaagcccgcgttttacatactggtaaatttcgagtgagaggggtaattatctcttgatccaatagatctggagccacttctcttggtaaaatcaaccaagtctctttgcgcctggactatcaagcggccttacctgatgccgtgagaggaattcgtactctggcactgcaacacagcggcgaaccattgattggggcgaacgctgtttacagacccgcgatacccgagagttctagtaaaatgaatcactcgtgcgaaatttagatagctctctaaaaggacaatataggcttagaacagagactcatgcagaaaacttgggaaaaacaataaacaagtgaaccaaaacacatttagatagtgagagttggccgtgcggaagaggtccttgactggagtgtcttggaaggcgggcatcccacgacggtgggggattgtacggggc

SEQ ID NO: 574134 - DNA, 1362 bp, Homo sapiens
ccgcatgggccggaggagagccccggccggtgggtcgctgggacgggccccttatgcgccactcagactcagccggcagccgcaacgcccatcgcctcacacctgacctccctggcttgcacacaacgctgaacctcaactgactggcctactgcactctgcgcgcgctcgctctctacactccttcagctcacgctgcactgcacacagcagccctcccccttgcactgacctctccccttgcccttacctgccaacgcacaccctctgtcccacgcggcacacccaacgcaacgcctacttcgcctacgccctgcacgcacacacctctacacctacttctaaccgctctctgctgtcccctgccctgcacgcgccctaagcacaccctgcgcacctaccctgcctcctctctccgcacgcgccacgcacgccgccacgccacgcaccactcttcacgcgccacacgcccttcccctatctgccaacatcggcctacaccacatcgcatcaccatcccaacagtcctctcgcctcctggcttggcactcacttagccccctggcatgcgacgatggcatccctaagataaccccttgggccaaatcccctaatcacaccaccttaatcccttcatctccgcccctcacgcctacaccgtcacaacccctccccacacaatctcaccatcgcccacaccgcacgccaacacaccgcccaccttcacccaccctcttccttcctcccttaaccccaccaacttggaccgccaccgccaacccacacacttccccacccaccccctctccctggcccttccccccggggcgcgccccccatcaaaccgcaatcatacccgccaaacgccgggcccacacccccccaccgcggccccaccgacgcggcgccgccatgcggccgccccccctcacacgtctcccccggggccccccccccactatccccccccccgaacgccgccaccctccctccgggccaccccacccgccccgccaagctcgcgcaccgcctcccacaggcgcgcgcaacccggtcatctccacccccggcgctcccgacggcccccccaccggcccgccttccccatgcgccgcacacagccaaaagatcctctcccacacctctcctcgcccccgcccacgccacccacgcgccctggccaccccacatccttcaccggccgtcggcggagcattccacccaacgcgcgaacgcttcaccgcccttccagcgcaacatcggcgtcccctcccgggcgaccaccaagcccccccctacgccactatcccacccctgtggcgattccccaacggcggcatctcgcgcccttgccgacacgca

SEQ ID NO: 574135 - DNA, 365 bp, Homo sapiens
ttacatgattacaatacgagtctctgtacctgtgggtatcatcagttcagcgaagggtccccagcggttggggagagccccaagcttgagaacagtaagtgaacaattgttgtactgaaccacttagttacgaaacagctgatcatcaaacaacctgtgtgtaatatgtattcctcctacacacgtagcacccttcagcaggaccctataagactttcctccagcccttgcctctttgcaggtagccccttctctgctgagctgcccactgcaacatattttcacaatttctctaataaatctgcccttctttacctacaactatcttggtaaatggctttaccacctgcaaaactgaccctagg

SEQ ID NO: 574136 - DNA, 117 bp, Homo sapiens
gtgtgagttactattactgtctcaatttctgtctctgtcaagaagagattcaaggtctccttctgctgggctctgctttcttccagcaaaatttttatttcatcagtttctgcttcc

SEQ ID NO: 574137 - DNA, 100 bp, Homo sapiens
tcgtgggttcctgcagatgttgcgcaaaggcatagtgccatggtgagaagcggtgcacgaagcagcgtctccagcaggcgcttgactgtagttggaatga

SEQ ID NO: 574138 - DNA, 479 bp, Homo sapiens
tcagcctggtaagaatgggtacagaaccataaagaatgaatgatcagaggatggctccagatccaaagtagggttgtccctatagagaaaagattttaccaatcttttaagacagggattggtaaatactttcttaaagggcctgacagctaatattttagggtttatggcccatacagtctctgtctcaactgtttctgctgttttagcacaaaaatagctacagacaaaacttaaatgaatggacgtgactgtgtttcaataaagctttatttataaaagcaggaagtgggccagatttggcctatgtggtttgtctaacatggttataagaagaaggaattggtggataaatatcatgactttgttaatgcctatttaatcatgttccttaaatatattgtttagtaaacttctttatagaattacccatatagtaatttttgttttcaaataataaacttaaaatgatactaaaa

SEQ ID NO: 574139 - DNA, 207 bp, Homo sapiens
cgactcccggactggacgactgtctgacgggcctgaccggacggtcggaccggtgctgctggtggtggctggcttctgtcccggtacggacgctaccacagacgactacggtctgacctggtgcccctccctttggcctggcctctcacctacgtgtgggttcggctgctcttgaccctcttcgcctcgggtgctccttcctcctcc

SEQ ID NO: 574140 - DNA, 779 bp, Homo sapiens
cgccattctcctgcctcagcctcccgagtagctgggactacaggcgccagccaccacgccccgctaatttttttttttgtatttttagtagagacggggtttcaccgtgttagccaggaaggtctcgatctcctgacctcgttgatccgcccgcctcggcctcccaaagtgctgggattacaggcgtgagccaccgcgcccggccggtgatagtggttttttagaattttttccccttatcacaagactgaactgaaaattgatgcaatcacatgatggaatattggttcaatctgacagattaagggtctaggaagaaaacattaatttggatttcaccaaagaaaaacagttggttgaaaatcaatcagctctcatacatagctaagaacaatattcactgcttttcaagccatcaaatgctttcaatcaaatatctaaaacacggtggttaaaatgtcaactagcacttttcttaacgctatttcctggatttaaaaacgagacctgtcatagcatatcctatcttctagattgggatcctctgggtcaagagcaagccttgagcaagcctctgaagagctgcatctctaactgcaagcattcccaagtacttatatatatatgagcaggcactggcacctctactcttactgacaattcgctgacgtggtcacatattaacaacgctgttctttgaacctaggaccacttgggtggaactcatattgccaatgttttattacaggcataggccgaaattacaatttcaaaattaa

SEQ ID NO: 574141 - DNA, 403 bp, Homo sapiens
cacagaagagaccgttgctgtatgttgtttatgcggggaaacgtcatatcgggggcaccgattattaggggaactagtcagttgccactgcctccgattgtgatgggtattactatgaatgacagattattacaaatgcatgggctgtgacgattacctttgttagaatctgttcgcttacacctaaaaggtcgcctgtgctggtcccatctcgctctcttctcttgtcgagatggacaagagaacagagattgagatgtcttctgtatagtaggactgatatgacttgcttatggactggatagaagggctgtggggacgacagaattgcataaatactctagattttgccttggaccgatggtagcccttgattgatgattgtgaagggtgagatcagaca

SEQ ID NO: 574142 - DNA, 101 bp, Homo sapiens
  misc_feature (25)..(25): n is a, c, g, or t
ctggatccccccggtaaatgtagantactgtggcaaatgcctttatttcacctatcaagaccttagatagactagtgcacataattcagtactggtggagt

SEQ ID NO: 574143 - DNA, 295 bp, Homo sapiens
gctgggtgaacagcgccgccgatcttcctgaccacctgctcaggaatccgaggatcatccgtgcatcacgtaacgatttggttacaggttttggcgattgcgatgaaggttaaatgaaaggtctacggacaccgatgtgccgaggcatggggatcttcgaggaaagaaggtgcaagtaatgacagcgctacgctattgcagcgtagaatcatgtacctagcgcaatacgatcatccgaccgagcagcgtgtgctgtttcaaccccaagacggcctgcagcgcattgagcacgtcg

SEQ ID NO: 574144 - DNA, 815 bp, Homo sapiens
cagtggattaatctctttacccaattccggctccctaaattggtcgcgctgtgctattgcgccccctggttatttgggagtggccacaacgggagtcaacaagtgcgattgcgaaagtttgttcgtggaagcttatacaggcggaaaggcgattgtattttcgcccgttcttgtggttaagaaagacctgggaagtactggttcgccctgctaatttttgttgtgaaacttcctgggtggaagctctgctccctttggctgttataatgtggttcccgtgctactccccattgtttgtgtgtagagggcttttccgaactattccccctttgggttctgctttgcttgttcgttgaatatgtgtccgtgcctgtttctggtgggtgtcattcctgatgccgtgtggccagaagtcttctggggctggcctggtgcagcccagtttgtccccgtaagcttcaactggagggttaattggatgtcttgatcccgtagttcctgcccacaccccactctgtttaatccagtggtgggaagacccggtttctcagaactgtttgtttccaagttggcccacagttaagtttaggtagtaaaagactggtttatgtatgaaccaatgcgttcctggttaaacacttctcagaaagagaaagagaggaagatgttttgtggacaccccgttgggtttctttttttgcgtttggcacttttaagattattagttttttaaatccgtacttttttatgggaacaacttggcccaaaatttgtcacccgaattttgagacccctttaaaaaggtttagtgagga

SEQ ID NO: 574145 - DNA, 948 bp, Homo sapiens
  misc_feature (45)..(45): n is a, c, g, or t
  misc_feature (61)..(61): n is a, c, g, or t
  misc_feature (107)..(107): n is a, c, g, or t
  misc_feature (124)..(124): n is a, c, g, or t
  misc_feature (133)..(133): n is a, c, g, or t
  misc_feature (138)..(138): n is a, c, g, or t
  misc_feature (143)..(143): n is a, c, g, or t
  misc_feature (159)..(159): n is a, c, g, or t
  misc_feature (163)..(163): n is a, c, g, or t
  misc_feature (184)..(184): n is a, c, g, or t
  misc_feature (191)..(191): n is a, c, g, or t
  misc_feature (223)..(223): n is a, c, g, or t
  misc_feature (232)..(232): n is a, c, g, or t
  misc_feature (347)..(347): n is a, c, g, or t
  misc_feature (577)..(577): n is a, c, g, or t
  misc_feature (585)..(586): n is a, c, g, or t
  misc_feature (614)..(614): n is a, c, g, or t
  misc_feature (716)..(716): n is a, c, g, or t
  misc_feature (723)..(723): n is a, c, g, or t
  misc_feature (742)..(742): n is a, c, g, or t
  misc_feature (749)..(749): n is a, c, g, or t
  misc_feature (758)..(758): n is a, c, g, or t
  misc_feature (768)..(768): n is a, c, g, or t
  misc_feature (776)..(776): n is a, c, g, or t
  misc_feature (848)..(848): n is a, c, g, or t
acacatatgatggccgaggtgatagtgtggtttatggactgaggncaaaatctaagaagantcgcagacctgacatccagtaccctgatgctacagacgaggacacncctcacacatggaaagngaggagttnaatgntgcanacaaggccatccccgntgcncaggacctgaacgcgctttcngattggnacagccgtgggaaggacagttatgaaacgagncagctggangaccagagtgctcgaaacccacacgcgcacaagcagtccagataatataagcggaaagctaatgatgagagcaatgagcatcccgaagtgattgatagtcaggaacttcccaaanacagccgtgaattccacagccatgaatatcacagccaggaagatatgctggttgaagaccccaaaagtaaggaagaagataaacacctgaaatttcgtaatttcacaggaattagaaagtgcatcttctgaggtcaattaataaggagaaaacaatacaattcctcactagcatttagtcaaaagaaaaaatgctttatagcaaaatgaaagagaacatgaaatgcttcnagcacagnnaagagggtgaatgagtatctattgtgantcgtggaaataacgtgatgtcgtttgataaggtagtatagttagtggctatcatagcgaaacaccctgaaaactaaaagcatacagggttatgtctatgtcnatactanagaagaaatgcaaactatnacagtantataatatntgttaatctntcatgaanagaaatttatgtagacgcaaagcgaagagatacttttacccactaaaaaagagaatataacattttatgtcnctataatcttttgttttttaagttagtgtatattttgttgtgattatctttttttacattcaagataaaagatttattcacaccacaaaaagatgtcgac

SEQ ID NO: 574146 - DNA, 924 bp, Homo sapiens
  misc_feature (226)..(226): n is a, c, g, or t
agtgtctgttgtcctcctcgcgtatccgacgtggacctcccttgtgtccccgtgtgttccccatatgcgttctcccccgtacggccaccaccttgtgtgactgccccatcttgtacgaagccttagatgttccttgccgcccgacatgccgggattctcccatctccggggccccacttcggggcttggtcccctctccccggggggttcttaagctccggaagcnccccagctgcggttcccccacggggcttcctacaagccccgtcgttggtttggagtccattcggcgcatacctcgccctgggccccactaatttccggtgggggccgttgtctcccccacctccaccctatgggacacaacatcacccacaactaattccgcggctcactccttgatactcacaccgctgcactcacagaaaatttttctccccaaacagtcggctcaccaccaggttcctcctaggtgcccgcggcactactgcgctttgaaggatcaatactccagacgaagatcctgaccatattgtgaatccaaacgtctgatgagtccccctcactcacacaagaaagccttgctccctaattaaattttctcccctccgatgactctccccggaaactcccccctgagtgcccccggccgcacccgccatccacaaagcggccgcgaaatgcgtcacaacagacgcggggccccaggttctctcccaaggccccacaaccctcccagccgagcaagggcgcaaatgtcccgaggaggagtctcgggcaccaccaaagtaacacactagatgggcccgcatcgccgaggagaggcaccccgggggggcttacagccagacaacaaggaggccaccgcgaatgacgacaccacttgacccccctccccccgccccgaaaaacacccacataaca

SEQ ID NO: 574147 - DNA, 104 bp, Homo sapiens
atttccactctggcatgtaatgcaatgtactggtctgcttctaggtagagtgtggcaaaatctcctgtgagagtgcaggcatgccggccaggtagtgggtctgc

SEQ ID NO: 574148 - DNA, 258 bp, Homo sapiens
cgatctagaggatcagatttggaagagagatatgccaccagcattttattaagggttgagaattgcttgcgccaagctgtgtccaggcagctcagatgcttcagtcagacccttactcagtgccggctcgagattatctatttgatgggctcaaggggcattctctcgggaacattcagaccggcctccttacttttcgatgaggctgaggtccgtaaaattattagagttggcaaaggattttgggaattatcttac

SEQ ID NO: 574149 - DNA, 889 bp, Homo sapiens
gaaaacgctctaggggcgtacattgctagttggagccggctgtgtcttgctgtcccgcggagtggaagcgcgtgctctttgtctatgtgtccctggcctatggcgctgctaggctctccacgcgtgaagcacggaaatcaccacatgcctgcgggagcgtccggaatgtcgttggtgcgtagattcttctcatttccgagcaaatcaacatgcatttatatatctagctgtggaattatatcctagtctgacacctttacatcgagtgctgaagtacggactcagcttgctagttactactgatcttgagctctatctaatacctaaataatgtggtgggaacacacctgaaacgtatctgtgcttataccaagctgtttcagttctctgcacaaactggattagtagttatctcataatattgtcgcatgtgtgctgcaatggtcctggtcacagatgtgcagttccgatatttgattgtgacaacgactggaaggagtatgacagtgctcccactataaaaggtctcatgacaagctatcccaggatgaatcactccgtgcaggtgatttcagcacaagattcaacatgcttccggtcgacaattttcctagccactgtagggacagtattcttggtttcatatcgattctggctgttttttataccacgagcgaacgggattcggattgtacctggaaaccatgtgtcacagaagtcggtaacccacaggttttaattgaccaattacctgagggaaacgttcaggcctttcagttcattttaactaagttacaatcccaacaacaagttgatttgccattgcgttgggcctacagaaattccttgtcaaattgaactgatgatgaccttgagggaacaattcatg

SEQ ID NO: 574150 - DNA, 219 bp, Homo sapiens
  misc_feature (193)..(193): n is a, c, g, or t
catttatgtggtagcatttgtcagtactctgtgcctttttatggctgaataatattttatcatatggatttaccacattttatcattttatttatccatcatcagttgattgacatttgagttgcttctactttttgagtattatcaataattctgttatgaacattcttgtataattttttggtagacattnatcttcatatttcttggatatatacc

SEQ ID NO: 574151 - DNA, 424 bp, Homo sapiens
  misc_feature (67)..(67): n is a, c, g, or t
  misc_feature (78)..(78): n is a, c, g, or t
  misc_feature (190)..(190): n is a, c, g, or t
  misc_feature (205)..(205): n is a, c, g, or t
  misc_feature (304)..(304): n is a, c, g, or t
ccaatgattccaccatccagatacaaatactgttaacaactggagcatatcatactcctatctaggntatatatattnttacacacaatagacacatataataagtgctatgtggtatgactttttctccattaccaatatattaatgaggctggtgttttatgtgacttaaataaatcctggtccatcnggcaatatataattnttaaatgggttgcatgaatacccacttatacaagatgtgtcataatttctttaaagccaggtcacctttgtgttggagttaaattgtgtttttattttnttgctattataaggagttgctaaaaaagaatatgctgtgtagcaaaatattgtgtacctcacctctgacttctccttctttatgaataaatatattaaaaatagaaatggtgtggaccta

SEQ ID NO: 574152 - DNA, 307 bp, Homo sapiens
attatccaggagaacttccccaatatagcaagcaggccaacgttcagattcaggaaatacagagaacgccacaaagatactcctcgagaagagcaactccaagacacataattgtcagattcaccaaagttgaaatgaaggaaaaaatgttaagggcagccagagagaaaggtcgggttaccctcaaaggaaagcccatcagactaacagcggatctctcggcagaaaccctacaagccagaaagagctgagggagttaagagggccaaccttagggcacgtgggcattattaaaggtcttaaaagc

SEQ ID NO: 574153 - DNA, 265 bp, Homo sapiens
ctagagcaggtcatcaggccaggatgagagaggttatcaaaggtgctctggtgtgctttgctccacgtgcttaggcctggaaggaaaggtggtggcacagaggttggcagaacctggtgttagtcaaacacacatctggggagagccctctaccttccttctactccacttaaggtggaagcattccaggagacagagaatgtgaccaggatgcacagtttaatctgaacccctggcttcgttcagtgctacttcacttgccagc

SEQ ID NO: 574154 - DNA, 486 bp, Homo sapiens
  misc_feature (56)..(56): n is a, c, g, or t
  misc_feature (59)..(59): n is a, c, g, or t
  misc_feature (92)..(92): n is a, c, g, or t
  misc_feature (109)..(109): n is a, c, g, or t
  misc_feature (112)..(112): n is a, c, g, or t
  misc_feature (376)..(376): n is a, c, g, or t
  misc_feature (401)..(401): n is a, c, g, or t
  misc_feature (424)..(424): n is a, c, g, or t
  misc_feature (468)..(468): n is a, c, g, or t
ctgggcagaccccagaagatgtgggcatcacggctgctcagtgcccccctgcgtgnccnttcctgcccctgcctttctggtgccctttgagnccagggaggcgtcccgnaangtggaggcgtgacgctgctggggccttccttcgtgaggaggagagcacgagagccttcccgggctcggccgccaggactttcacccggttctgccgagtccccctcctcgtgccctcagtgggacgctgacctcagagctgcgtcctgggcctctttcctcagctgggcttttacaaagggcgacaagcaaggtccgggaagtttgtgaagtcagcctttaaaaagtctttccttgctggccaacgacttgaaggctgggcgtngccgggtgcagcttgatctcgcctnacaaggaagtggttgggggggtncaaggccccgaacaattccctgtaatcggggggttggctggccnaaggaagggccggccttt

SEQ ID NO: 574155 - DNA, 830 bp, Homo sapiens
  misc_feature (19)..(19): n is a, c, g, or t
  misc_feature (84)..(84): n is a, c, g, or t
  misc_feature (110)..(110): n is a, c, g, or t
  misc_feature (115)..(115): n is a, c, g, or t
  misc_feature (125)..(126): n is a, c, g, or t
  misc_feature (128)..(130): n is a, c, g, or t
  misc_feature (238)..(238): n is a, c, g, or t
  misc_feature (373)..(373): n is a, c, g, or t
  misc_feature (381)..(382): n is a, c, g, or t
  misc_feature (384)..(384): n is a, c, g, or t
  misc_feature (398)..(400): n is a, c, g, or t
  misc_feature (408)..(408): n is a, c, g, or t
  misc_feature (415)..(415): n is a, c, g, or t
  misc_feature (426)..(426): n is a, c, g, or t
  misc_feature (455)..(455): n is a, c, g, or t
  misc_feature (466)..(466): n is a, c, g, or t
  misc_feature (508)..(508): n is a, c, g, or t
  misc_feature (511)..(511): n is a, c, g, or t
  misc_feature (516)..(516): n is a, c, g, or t
  misc_feature (525)..(525): n is a, c, g, or t
  misc_feature (534)..(534): n is a, c, g, or t
  misc_feature (543)..(543): n is a, c, g, or t
  misc_feature (588)..(588): n is a, c, g, or t
  misc_feature (595)..(596): n is a, c, g, or t
  misc_feature (827)..(827): n is a, c, g, or t
cccggcaccctcccctgancttcctggctactcatttccagcgaagtttaatctatttttaataatcgttcagttttcaagganatggaggagctgttttttcccacggngcggnggccctgggnngnnngggcccagaggttccggccgcgatgccgtcagcgccttcggcagagtgactgaagcgagatttcgttctcagaagtgagatgcaacgatttcgagggaccagggaggnggcggcgccgcggggccacagcccagccccgcgccccgaccgcgtcacagccaaagccccgccggggtgcgcgctgcagaggggacacgccgctcatcaactggggcagccgcggtcggtcggccggtggcgggnggcagggnngnggtggggtccgggnnngccacggngcccggngtcacccgcgnggccgccccggtggtgcgtggggggcggngcggggcgggncgggcgctcaaaactcctcgtgcacgctgcggcgtagtccancancttgntgcccgtgnagaactcgntgtacttgngcacctcctcgggctccaggtggtggttctggttctcgtcggcgnggcgatnntctgcttggcctcgttcagcgcgttgtactcgttcatggggtccatgtagctctccagctcctcggcggtcacgatgccgtcgtggttggagtcaatgagctcctcaaactccttttttctgtctttcaccagttgtcgtcaatgtcctggccctgctggttctccacggtgcccacgggcagggagatgaactcgggcacagagagctgcttgtcaccatcctggtccangtg

SEQ ID NO: 574156 - DNA, 563 bp, Homo sapiens
  misc_feature (19)..(19): n is a, c, g, or t
  misc_feature (84)..(84): n is a, c, g, or t
  misc_feature (110)..(110): n is a, c, g, or t
  misc_feature (115)..(115): n is a, c, g, or t
  misc_feature (125)..(126): n is a, c, g, or t
  misc_feature (128)..(130): n is a, c, g, or t
  misc_feature (238)..(238): n is a, c, g, or t
  misc_feature (373)..(373): n is a, c, g, or t
  misc_feature (379)..(379): n is a, c, g, or t
  misc_feature (387)..(387): n is a, c, g, or t
  misc_feature (392)..(392): n is a, c, g, or t
  misc_feature (403)..(403): n is a, c, g, or t
  misc_feature (405)..(405): n is a, c, g, or t
  misc_feature (410)..(412): n is a, c, g, or t
  misc_feature (426)..(426): n is a, c, g, or t
  misc_feature (438)..(438): n is a, c, g, or t
  misc_feature (441)..(441): n is a, c, g, or t
  misc_feature (443)..(443): n is a, c, g, or t
  misc_feature (445)..(445): n is a, c, g, or t
  misc_feature (455)..(455): n is a, c, g, or t
  misc_feature (481)..(481): n is a, c, g, or t
  misc_feature (494)..(494): n is a, c, g, or t
  misc_feature (512)..(512): n is a, c, g, or t
cccggcaccctcccctgancttcctggctactcatttccagcgaagtttaatctatttttaataatcgttcagttttcaagganatggaggagctgttttttcccacggngcggnggccctgggnngnnngggcccagaggttccggccgcgatgccgtcagcgccttcggcagagtgactgaagcgagatttcgttctcagaagtgagatgcaacgatttcgagggaccagggaggnggcggcgccgcggggccacagcccagccccgcgccccgaccgcgtcacagccaaagccccgccggggtgcgcgctgcagaggggacacgccgctcatcaactggggcagccgcggtcggtcggccggtggcgggnggcacncaacaccnccccncccccacaccnanccccnnnccacgcaaaacacnccaacaaaaccnccncncnccccccaccncaccccacccaacccacagaaaaaanaagacgcaaacancaccacgacgaaaaaacnggcagcaaacgcaacaaagacagcgaaggcactaaagaagacccagaaacc

SEQ ID NO: 574157 - DNA, 265 bp, Homo sapiens
tggaggttgcagtgagccgagatcgcgacactgtactccagcctgggcgacagagtgaaactcccatctcaaaaaacaagcaaacaagacttcgcagtgcatagccctgtaacatgcacatattggatgaatgtacttgcggtggcatatgtcatgttgttaccaaagacacacaattcaaatgatgttatttttggcacaagttatgtttcaaggaaggacaaagccacccacttacattccatctcacactgcacacaatatg

SEQ ID NO: 574158 - DNA, 326 bp, Homo sapiens
  misc_feature (25)..(25): n is a, c, g, or t
cgggaccaccgcgaaaccctgtgtntactaaaaatacattttttaatgctgggtacagtggctcatgcctgtaatgccagcgctttgtgagaccgaggtggggggatcacctgaggtcaggagttcaagaccagcctgaccaatatgatgaaaccccatctctactaaaaatacaaaaattagctggtcgtggtggcaggcacctgtaatcccaggtacttgggaggctgacacaggagattcacttgaaccctgtaggcggaggttgcaaggagccgagattgcaccattgcactccggcctgagcaagaatgaaacgctgtctc

SEQ ID NO: 574159 - DNA, 196 bp, Homo sapiens
ccacaatcgaggcggaagtgagtatttcctattcggcgacagaattctccgatccgtgcctagcagacgaggaggcgtccttgcccgattagtatgcatcctcatcctgagcaataatgccccatcctccatatatccaaacaagagagcaatcggacgccccaagggggggggacctcgaaaagtcagacgaggc

SEQ ID NO: 574160 - DNA, 356 bp, Homo sapiens
  misc_feature (222)..(222): n is a, c, g, or t
ctggcatccacgcatggcatctacttcaagaatcagaaagggcactctggacttcacccaacatggactcgttgagctgaagctgcagataaccacattcaagggcggaaccttctgccccagctttgccatatgataagctttcctgcttggctcttattcttccacaagagaggactttctcaggccctgcttgctaccggttcagcaactctgcagaanatgtccatccttgttggcttcctcagctcctgcccttcgcctgaattcccagctttggtggcagtgcctcatcttcaactttattgctcccctttacctcaccctactgcctcccatgcgtggattgcctgggt

SEQ ID NO: 574161 - DNA, 549 bp, Homo sapiens
  misc_feature (57)..(57): n is a, c, g, or t
  misc_feature (116)..(116): n is a, c, g, or t
  misc_feature (377)..(378): n is a, c, g, or t
  misc_feature (382)..(384): n is a, c, g, or t
  misc_feature (406)..(406): n is a, c, g, or t
  misc_feature (410)..(410): n is a, c, g, or t
cttggcggtactgcttatttctttattcttttattctgcgttgcatccaaacattgnttcactttgatcattcatctccataaaatttgaattgctaaataaggcctactccctanataccaaactcccttccttaggaaaaagaggggtgccaaaaaccccccaattttttttgggggaagggggggtccccccccttagccccccatttttttttgcgccaaattttttttttcttcccccccggggcgccagaaatccccccaatcggtaatgggagaagggaactttttgaagaggaacgcccctcgggggaaaacccgcggagcctacaccctgttgaaaaaaaaatgttccggcggagaaaattttgtggnngggnnnaatctccctctccattttcaangcanattcctaggtttttaatgtttgtaatggaaacctttatgagaggactctgattttgagaaatgccgtgtgggactctgctggggtggtaaaatgaggggtatccgcatcttcacctctggcatgatagggggtgggggg

SEQ ID NO: 574162 - DNA, 455 bp, Homo sapiens
  misc_feature (57)..(57): n is a, c, g, or t
  misc_feature (116)..(116): n is a, c, g, or t
cttggcggtactgcttatttctttattcttttattctgcgttgcatccaaacattgnttcactttgatcattcatctccataaaatttgaattgctaaataaggcctactccctanataccaaactccatacctaacaaaatggcagtttacaaaggtcttagatactatatcccaagaagtatatgcagcatagaggtggccaatattcagaagctacattttcttatactgcccaagtgatcatgaataaccaaaacatttgaaatgaattaaaatttacttatggtcagaaatgcacttgaggattaatccccagaattgcaactcatggagaaaaaaggtagtggagaattcaatcctgtttaacccaattattttttggctttagggaagtccatttttaaagggcaatttcccaaggtttttaaaaggttgggaatgaaaaaccttttt

SEQ ID NO: 574163 - DNA, 1096 bp, Homo sapiens
gctcaaaattgaaggcacggaaacttgtgcagtacggaacgtcctggcagactcttcgaccggctggctggcatgatgtgttggtgagtcagacgaccacacgaatttcatgatgcatttctcacattgaacgagttcgtgtactgcggagacctgtagataatgacaacgcatctgactggttataggaagatctgaacaccagtgcttgtgacgtcctggcatagatcaatgaatgggtataaggcgacctgcacaagcgacaaaggactgggggacgtctagagcgcatttgcaaagatatgtctgatggaaactaggactcaaaatggtgagaagtaccataatggatgactgatatactacctggtgataccgagtacaggagtcgcagttttgcatggtatgtgaatatacccatgggttgccattgggatgagcaaggctggatatgcttaactgtataaatgaagacaatcttctagttgacatgactcactccgaaggcctggttcgagcagtagaccatgtgggtacaactgtgggcatttatgtaggacagctgtgcaactcaatgttgattctggctacaatggtctcgtgacgccctcgctatccgatgcactatctccatctacttgaaggagatatgagttctggactctgtccatgggtgaaatcttcaggaagatgccatgaaaggtgacctcatggtatttctgagagtgtctggttgccgaaagcgccctgttctatgacttgtttattaggagtggatggagcgtctcggttctatccctgaggggcgagtgcctgtctcgccggcacgatctctgtgaggggcctgcttgagcatatccagctggaggttgtctgaagtgtttggttaaaccaggttttccaccttccagtgtccctggttgcgcctgcctggggttcgcatggtgttgaagtagggtggaagaagaggcttgacccgggttttccccattccggcccggcctggaagcgctcgaagctttcctgtctgtggcagtgctttgttgctcaggccggggctctttttttggggtaccctgccgagctggcctttggt

SEQ ID NO: 574164 - DNA, 345 bp, Homo sapiens
  misc_feature (200)..(200): n is a, c, g, or t
  misc_feature (255)..(255): n is a, c, g, or t
  misc_feature (286)..(286): n is a, c, g, or t
aaaatctcctcctgcccataacctccccctacacctccaacatgcatcccacacacatacaagtttaatgcacagcagaacttgaaagaaatccccaagcgtcacaaaagagtgtaagtggtgagcccacatgggaatattagaagcgaatataagccttacaggtgagaggttagagtttttaatgctgagtgagatangctccaggccttgcctctgtagttacaaagcactatccaggttctgaaatagggncaagaaaaattctggctagactgggcttggnaagctacctacttctctgctgctcatttgggactacaaatgggaataatggtacacatg

SEQ ID NO: 574165 - DNA, 201 bp, Homo sapiens
  misc_feature (157)..(157): n is a, c, g, or t
ccgtggtactgcagtgcagcctttatctgtggtcaaggtccagagtcctaaagctaaaggacttggagtcccatgtttaagggaaggaaccatccagcatgggagaaagttgtaggccagaagataaatgctgtctagttctttccggcattattcntgcctgccttttaattctgggctgcactggggcagcctcccagg

SEQ ID NO: 574166 - DNA, 643 bp, Homo sapiens
  misc_feature (26)..(26): n is a, c, g, or t
caggctggtactgcccccgggtttantggatcgcgcagtgcgggggcggcgcagcgggcggaggctgcgccgtggttttctgggcagaatgtcacgatggacgagtggcgtgacgcccctgctccccgacaagcctggtctaccagatcttcctgagcctgggcccggcgacgtgctggcctgcggtgctggtgtgccgccaatggcaggccgtgtcgacgggacgagttcctgtggagggagcagttctacacgctactaccaggtggacccgcgacagtgccccgacacccagcggccatgtcctggtacgaggagtaacagcggctgtatgacacggtgccctgacgtggaggtgcagacagctgcagggaacacacagaccaggtcctgcaccatcagaaatctcccattccggataacagaatcgcgtcctgctccaaggacagcaatgatgacgatctggagcaacgaacctgacacattctacgcaatgatgcacaagacagaggacaatgcaggacactaacaacgtgggaggatacaaaccaagttctcacacagatacaaacaaaggaacaaatacgactaatggatggcctagagagagagaaccatggggcccaaaaaaaatcctcatcca

SEQ ID NO: 574167 - DNA, 129 bp, Homo sapiens
cgctcacgaggatcccaataggagcgatctgtggtataaaaaataacctgtagttctccagatactaagctgtatatgattatggtgggtgatttcagatatataagcagatgggcacacattatggag

SEQ ID NO: 574168 - DNA, 218 bp, Homo sapiens
gtttctgcaggttcgcctctagacggactccccggtctggcgtgcacttcgcggggcgcatggtgggactcgtaccactgtcggtacggtgtgctgtcgagtgggcacgatgcaattcttcaccagtgtcttggtacgaacccgctcgttattcgatgcattgtagacaacatcgatgatccttgtattacgcagtcaacactctgagccccaacgag

SEQ ID NO: 574169 - DNA, 455 bp, Homo sapiens
gagatggcttaaccattcacccactaaaggacataagagtggtttcagttttgtagccctaataaagctgctgtgaacattcatgtacaggtttttatgtgaacatacattttcattttctgggataaatgctcaaaagggcaacggtggggttgtatggtaaacacatatattttggtaagaaactaccctactctttttccagagtggctctactttttacatacagccactcatacaattcagacagcaatgtatgattgatccagtttcttcacatcctcaccagcattgggtattactactattttttatcttaaccattcacatagatgtgtgtaatgataccacatgtggttttaatttgcatttccaatggctaatgatgttgagtatcttttggtgtgctaatttgccatctatgtatcctcttcggtgaaatgtcttcatgtctt

SEQ ID NO: 574170 - DNA, 238 bp, Homo sapiens
gcagccgcctactactactaaattcgcggccggtcgacgtttaaagaatgctgtcatacaggcctatactaagtcaagcagctgactgacaatcagccccttctccctatctcctttactcaatatatataaagggctctagaactcagggcccttgttcactagaagcaaggagccccctgaccccttcttccaaatagacttttttgtctttgtctttaaaaaaaaaaagtcgacg

SEQ ID NO: 574171 - DNA, 123 bp, Homo sapiens
  misc_feature (6)..(6): n is a, c, g, or t
  misc_feature (69)..(69): n is a, c, g, or t
cagaangtatatcatcccatctgaaaaacactaattattgacatgtgcatctgtgcaataaacttaaantgattattaaatactcaaatatatctacattgtttatattattgaataaagtat

SEQ ID NO: 574172 - DNA, 522 bp, Homo sapiens
gtcagtcattacagtcagcccagacactgtgttgggggacaagaccaatccttcaccacaacagtgcaaagcagtattggacatgagttggaatgtgtgctgggcccacagtacttattcccccacggctgaggggagaccaccttctgatgataaacaaaccctagctaacactctgtattcctccagggagggggataaaacccacatgcacgaagaaaccttgaccccagtgtccaatgggatagggatgctagagttatagtaaaggggaaaccctatgtcagctgttaacagagttcacaggggtagggatcaaccctgtactccagctcccaaatgtggtcactttcccagcttcttcatccgttcatcaatgctggcaaagttcccctcaactgtgagcaggtttgcacgcatggttgtctgcacctgggtcaagaaggtggtatagtccttcaagggattaacaaacatctgctgggtgggatccaagtgtgtcaggagctgaacaaagattga

SEQ ID NO: 574173 - DNA, 565 bp, Homo sapiens
gcgttcgggtgtggcgagatggagacagcccccaagccgggcgaaggatgtcccgcccaagaaagataaacttcagtaccagcgagaaagaaagcgcggcgatcactgggaggacagagcaccgttccgaccgatcagccggaggcctctccagggcctccttcgctaacgagaagaaatcgggagctccgtcctcagagaccaaaaaatgcgttacatcttaaagaagtctcggatctctaagaagcctcaggtcccgagagaagaccccgagaatggaagaacccggagtccctagcgcggcttgtccggggcccaagatccattcccaggcccccgctccaccgtccctgtggaagtggtccagaagattctgtcgctattgacaaatctcgaaacgctaccacattctaaagccacaatactcgaagccgacgttgacggttggctgaagctgacggaagagggaacacgaagtatcaaagctgctcgttctgagctgcctgcttgctgaagaacctgggtttctggcagggggaagcgatggggacagacacagccacag

SEQ ID NO: 574174 - DNA, 191 bp, Homo sapiens
  misc_feature (176)..(176): n is a, c, g, or t
ctgccgccccccagagagagctctgcaccacaccaagagaccagagcccagagtacaggcactcaactccgcccagtctctccccgctgtgggggctgcactataacactcgactgtgctgcacatgggaagaacagaattgctcctgcacgcaactaatacaataaaactgtctngaagtgagcttggtt

SEQ ID NO: 574175 - DNA, 1655 bp, Homo sapiens
tataaataaataaatagataaataaaaggtaatcattagcattttttcagttctgttggtatttgatttctatctcaaagatgatatgaggaatcttattaaagggttattataaatgtatggttttatgtattttgaattattctgtaaccaggtatttgtagatgcatagtgtatgtctttttccattggtaaaaattgatctatactgtggaaagatgaaactttattacttttctacaagctttttttcccttcttctcattgccttcccacattttaaagtcatagatctttagcatagaaaagatatagcagtagatgagtttgttttttaaaaaaagttatagtctgcttggtttaaccaaaagtaatttaaaaattaataccacattaaaaagctatttcaaaagcaatatgaaaaggaggattattttttattttaacatattatttgggctgggtgtggtggctcatgcctgtaatcccagctgaggcgggcagatcacttgaggccagtagttcgagaccagcctggccaacatggcaaaaacctttctctactaaaaatacaaaaattagccaggcatggtggtgtacgccagtattcccagctacttgggaggctgaggcatgagaattggttgagcctgggaggcggaggttgcagtgagcccagatcgtgccactgcactccagcctgggtgacagagtgagattctgtctcaacaacaacaacaaaaaagtattgtttgttaaaatggtaccttaattcactaactactgaaccattagtatgttctctccaaagctccctgagtttttctgagtatcagatttacttgagtatcaagtggcctggctttagtttataaatttacattaatcagctttgttactttaattaaagtattttgttacattttccctcataaacatggtaaaataaaatagcctgacatactaacttagttagtaacatatttactaacatagttttgtaaaaaactatgttagttttggaggccacacactgatctttatatgagattctatggccatattgttttcctggtagttatggaacctatttcctaaagtaaaatgtatttttgatcagtgattgtgcttttgaattgagcaggttacaattacagatgtgtgcttacttcatacaggtctagaattaaacataatactgtttatttctacctgatatatcaggatcaatcagatgaaatatgtaaggctttcttctgctaagggatagctttagaaataaggttgtgataaaccgcaagaggagcaatacattttgaggatgtcatagaactcatgctcttttgtttatgtattttagaaataattaaaattggccgggcacagtggctcatgcctgtaatcccagcactttgggaggccgaggcaggcggatcactaggtcaggagatcgagaccatcctggctaacacggtgaaaccctgtctctactaaaaatataaaaaattagctgggcgtggtggcaggcacctatagtcccacctactcgggaggctgaggcaggagaatggcaagaacccgagaggcagagtttgcagtgagccgagattgagccactgcactccagcttgggcgacagagcaagactccatctc

SEQ ID NO: 574176 - DNA, 357 bp, Homo sapiens
ctgaggttgggcagtgtcacgctatatcccagaggtgaggcaggcggatcactgaggtcgggagttcgggatcagctgtacacatgagaaacctactgaaatacaagtagcggcatgtggtgctgctgtagtccagctgtcagagctggcacagagcaaatccagtcaaaaaaaaaagaagaaagaaagctgggctggtggttaggcatccccttccttgttggaactactggacgaccctcttagatgtgccttggtgctgtggagattgtgtagtgtctagctcttgtgagctgtgtgtttgtgtagtcttagctgtatctgagatgcgggttgagggctctagctcttggtgag

SEQ ID NO: 574177 - DNA, 668 bp, Homo sapiens
  misc_feature (156)..(156): n is a, c, g, or t
gctcaagaatgccttggaaaagcccagttctcagaagaaaaggagcaagagaacagtgagctccatgcaaacttaaacacttgcaggatgacaataatctgttaaaacagcaacttaaagatttccagaatcaccttaaccatgtggttgatggtntggttcgtccagaagaagtggcagctcgtgtggatgagctaagaagaaaactgaaattaggaactggggaaatgaacatccatagtccttcagatgtcttagggaaaagtcttgctgatttacagaaacaattcagtgaaattcttgcagctccaagtgggaaagagatgaagcacaagttagagagagaaaactccaagaagaaatgtggttctggcaagggaaggaggaaaacttggggggaaaactgtgggggaccaacgaaggagttcaggcaggcctgtgagagagccctggaagccaagaatgaattcgataagaggcaacatgaaggcaagaaatcaggcaaattggagacatgaaattcactatttgccaggaaaatctaaaaagtatggcgggaaatccaaggggcttacagatctccaagttcaggaagctgatgacagagaagggagagaattctgggccaactccgagagttagagaaaaagaagaaacttgaagatgca

SEQ ID NO: 574178 - DNA, 273 bp, Homo sapiens
tggaatgaaagttactggagacaagatgagtaggacaggcagaaaagagagagatactgatgggtagaagcacagatgggtgagactagtgggcaacacctcaatttcttgacaccgaaagtttagaaatttactttgcctctttgtgagcaaatactgtgtgctcattgactccaaagacaatttttttttagcgtaaaatcaacacccagcacccacagggaagaaataattccacagagctaagtattccacaaagttgcagcgtggccg

SEQ ID NO: 574179 - DNA, 1425 bp, Homo sapiens
  misc_feature (1)..(1): n is a, c, g, or t
  misc_feature (116)..(116): n is a, c, g, or t
  misc_feature (752)..(752): n is a, c, g, or t
  misc_feature (1028)..(1028): n is a, c, g, or t
ntgagtggatgtgcggagggggttgtgtgggcgacgcgcccgcgctcgcagcaggatgacgagagtgcgtcactcgtgcgtagctcagctcgacacgccgtgaggcgaggtgtcgntccgcccatccaagactacgcgtgtgtgcgtgtccgtgtcagcgcgacacatggattccgcggtcgctgttacgtcgccgccggccggttgtgtcgcgggagcgaaacaggtctccgccgccccgcccgggttggtgggctggtgtagtatcgtcgtcggtgtctagacagcacgctcgcccgcgttggtgtctgtcacccggccgtggttagatggcagcatgtcttctggagaggggcgccctcctctctccgacgctggatggggggcgcgctccccccgtatgtgtgtgcgcgctgccgctagattttttgcggggggagaccaacagatggtgttcagcggaggttgtaggcgggacctatttgagctggtggccgttgccggccgaaagaatgtgcaccccacattggaggggggtttttttaaggaggtcgtcgtcgcacggcagttgggcaccaacccgacaccaaattgtgtcccccccgttataagttcctccttttgtggggcccaacattgggtccttgggggaaacacaatggaagcttatccgcgcccacgggtgtgaaccctgccagaacccttagggccccccggtgtcgttacccacggggcacaaggccccaggcgcntttggggacacacccccgcagaaccagggccttgcttttggcgcttttgggcttacacacgtagtgttgcaacatcgggttatagcccctggccgcttgtgaggaaagtgatattaaggctgaaaattgccacctgttgcactcggtttccacgcgtgaaaaggttctcgtgaatcactgtccccctccgtggggctccgtcccttcaaccactccacctcttgtgccccctctctccagggaggttgtcccgcgcgttccccgcgctccacgtgnccgccctgaggcccctccacgagcctcccccctcgtggctctttttctggaatggggaactcggccgcgggtcaccctaggcctccacccgctggaagcccacccgctgcacaatggcccacttcttctgaagaggcccaaccgccggtattttcctcgctggccctcgtgttaagtgctctttctgtataaagggaccagacacgaactgggtttttttcctctgtccggtgtttagagtaaatatgaactaacattttattttccccttatgaaagatagaaattatttttatgtgagtttcccagactttatcaccaaaatttttgtaaaatgtttctctggaaagttaactaccagaatgtaaatatgcttctcatcaaataacacaggttta

SEQ ID NO: 574180 - DNA, 192 bp, Homo sapiens
gtcgccttgctgcttcagacttgaggctggtctgcttccgactccatctgactgaacactgaagtcgcgttgtccttgaacaactggaccgcgcgcgccatcgcgcccacttcatcgccacggttgagcgacggcaccgagacatcgaggtcgccaccggcgagacccttcatcacgtcagtcatggctgcg

SEQ ID NO: 574181 - DNA, 206 bp, Homo sapiens
gttttttttgggggggggggggggggttcttttttccccggggcccctttttcccctttgggcctttttgggggccccctttaccccttttttttccaaaacggggggggggggggggggggttttccgggggttttttccccccccgggccggggcaaaattaaaaaaaaaattgagcggggcgggcgggcggaaacgggcagga

SEQ ID NO: 574182 - DNA, 1190 bp, Homo sapiens
  misc_feature (1190)..(1190): n is a, c, g, or t
attcaaccaattaggccctggaccgatacgcctgtaaccgctagacattactgcaggccactctacatcagtgcaccgtaagttggacagcgccgatcctatgcaatatcagagccattaacgcttccactcatagcacttagtcatcgttcgacaaattgctaatgtctagcatgaactatcctatgacaatcgctggtcggccttgaatccaagtcctacgtttttcacacgttctaggtaaaggcccttctagctctgtcaccgatgcaatctacattcttaacacatatatgtatgacactaggacacaacatgagataaagagacaagatgagtgtgtgcggcgcgagagccgcgagagacccaccggggatgagaaagagtattgttaccgatgacactttcgcgggagcgggtgcgcgcgcgaagcgcgagccactgcggatgagtgtcgaccagggaagggaaacagctcgcgagacgctcaaaaagatgcgtgagccgtaaactcccagggaagggagaagaccacaacgcgagggcagacacagaagagacaaccagacgacgggacgagagagaggaaatcaatcacacgactccacgaggaataaaaaaaaagcgcacgccgcggggggggagacaaaaaaccctcgtagagggcgatgtcaccatcagcgagaacacacgatatgtgccgagaaagcagggagggggaggagcacccaccaggaggagggcgggaccaacaaacacacggagggcgagcagtctgctcttatcaaccaccaacgacgagggaagagtcccccaaaaagaggaagagagcccgccgggaggtgcaccccaagaagatagaaagccggcccccccgggggggatgctggcgggtggtactcacacaaaacataagacaaaaaagacagagccgcccacgggagagtcgaaaaaaacacgcccggacggacgacgatggttcagtctggatggacaaagcacgaacaactatccacacgaaagagagcggacatccacaggaagaagagggacgacacacaaccaagcagggggggcagactctactcaacaaaccaacaaggcgaacagaagcacgccacagacagagcgcaaggacagcacacgataactcacaagatgaccggcgccgcccgcgaggagaggacgan

SEQ ID NO: 574183 - DNA, 203 bp, Homo sapiens
gcatagccaggttccagcagttggcactttttgcgcagctcggacagctcggtttcgctcaagtcgggagcgtggcacacccacacgtccatatcgctttgatcggcctgggccaggtgccaaggctgcccatcaggaacaagccgtggatcggcgtaggcgggttgccgtggcgcggtttataggagaacgaacgggtcagg

SEQ ID NO: 574184 - DNA, 492 bp, Homo sapiens
gcactagatcatggctgttcatacctcattcatactactgatcctatagaacgacatctagatagctaccaggtgtagggagctatatttagagaccgctcggcatatctatgtcgtaggttgaagtgtggacatgagtatccaatccattgagtcaacacccttgatggtaagagtgtgtagttttgtaagaagctgccaagctgttctccaaagtagctgtactatcttgtattctgaccagcagtgaatgagagtacttgtagctttacctccttgccagcattcggtgtggtattttcaattttgaccgtcgtgtagtggtaatctcatagttttaacttgcaactccctaatgatgtacaacgtgcagcatcttttcttttttcttttcctgaaatagagatggtgtctcactatgttacccgggctggtcttgaactcaagtgatccttctagcttacatgcccaaagtgctcgtattataggcgt

SEQ ID NO: 574185 - DNA, 110 bp, Homo sapiens
  misc_feature (79)..(79): n is a, c, g, or t
ctccacttctatgtcagtctatgtgtaacaatagattctgctgcagtatggccattagtacaggtaggggaaaagcggntctttggccctttcatttcacctctgcaagc

SEQ ID NO: 574186 - DNA, 124 bp, Homo sapiens
tggcgtctagatgaaccacgatggtccctggcacctacacaaccctcccagtggtgtcgtatctatcctggagggcaggttttctgcagcaagccccaaagacagagcttgtgagcaggtgtgg

SEQ ID NO: 574187 - DNA, 689 bp, Homo sapiens
gggcagtgggtactttgtggaaccgtgtagaagatggttaaggtcagttcgaagtagatattgatgaaggaacgtatgcggcccggcagtggtggctcacaccggtaatcccagcactttgggaggccaaggtgggtgggtcatcggaggtcaggagttcaagaccagccctggccaacatggtgaagccccatgctctagctgaagatacgaaaatttgctgagcgtggtggtgtgcacctgtggtcccagctactcgagaggccggggcatgagaatcgcgttgaacctgggaggtggaggttgcagtgagctgagatggcaccactgcactccggcctaggcaagcgagagcgaaaagctcgcaagtagcagaagcaagacaagacaaagcacctgtgctaggtcagtctggcagcgtaagatgaacagtcccgtaccaagcagcagagctcaccatctcgttatagcgttaagtgaaagaacatggggaaggggaaaggggaatggctgcttgttgatatgttccctgacacatatcttgaatggagacctccctaccaagtgatgaaagtgttgaaaaacttaataacaaatgcttgttgggcaagaatgggattgaggattatcttctctcagaaaggcattgtgaaggaattgaggccagatctctctccctatatgctaaa

SEQ ID NO: 574188 - DNA, 433 bp, Homo sapiens
ttcctgaatgcagcctgctgaggtgtgttggtagcttgagcctgggaggtggaggctgtaatgagccgagatcgccccactgcacttcaacttggatgacagagtgagactcccgtcacacacacacacacacacacacacacacacacacacacaaaagaaaaagaaacatctttatgtctcagggagattttagaattcaaaatataccaaatataaataaattaaaaaaagaaatctgtgtgtgtggggccaggcgcggtgtctcacgcctgcaatcacagcactttgagaggccgagagacacgcgtatcacgaggtcaggagtttgagaccagtctgaccaacatggagaaaccgcgtctatactaaaaatacaaaaattagctgtgcctggtggctcgcgcttgtaatcccagctacccgggagcaa

SEQ ID NO: 574189 - DNA, 650 bp, Homo sapiens
gggaatttgccaagggagccaagttggaaaacaaaggagggtaggcgatttagagtttctgcaacctgtgttaccggggctcatgcgatggggaggcctgtctctcaagatttgggaactacgttgacttgctgccgctgcagggtaacgccctgccatacttgaagagacagcaagcaccatgttggcaaaaccggtctgaaaccaatcagctgaagcgatgcgcctccctgaggctgccaaagtgctgggattacaggcctgagctaccacacctggacaacatgattttctaataggccaaaggtgagaagagtaaaagtcaaggatggctagccacaaattttggcccaagagacacaaaaattgttttattaactgaaaaaggcaacagtacacaagagactggtttgaggcatgaacatgaggagcacagttttgcacttttaagttgacatattggatattcaacagagttgtcatgcaggtaaactggattggaatgacattcgaaagacaagttttcgctggatgatcttaagcgctgcaatcagcttataggcggtataatacattatgaattgaatccaaatgaaattgtaccctcgcgggtggtccagaaagttgaagcggtgggacttacccacgcg

SEQ ID NO: 574190 - DNA, 326 bp, Homo sapiens
  misc_feature (13)..(13): n is a, c, g, or t
cccctccctaagngacgatgacaatgatgtaatcctgggagcgaaatctcgtttgagagcactctgaggagcacatgcgcggcggattctcagactctggaatggaaccacaaactaatgcaaaccagtgctacccagaagcaccaacacgtgtgttctccattccaccaatcacagaccagtatctactccaaacatccagtaacgaaaactatggcatctccccaggaacagcaaggcaggcttcttactcacgatgaaccagcacgaataaacccagcaaaaagagaactgcatacttaaatttaggatagtcattcatgagg

SEQ ID NO: 574191 - DNA, 261 bp, Homo sapiens
gagtgtgcaccctcagcagagaaggagaccagagtgggttactcctctccacaagcaggtcatactgtcatctgcccgagtctggatgaatccagagttttagtgggctccagaggggaggaagtacaagctgactggtccatgggtggccatgggtgggccacgccaggtgtggtggctcacacctgtaatcccagtactttgggaggccgaggcaggtgggtcccgatgtcaggagttcgagaccatcctggctaacac

SEQ ID NO: 574192 - DNA, 131 bp, Homo sapiens
tatgtgcactggatctgtgggtgagggcatggaggagggtgcagtctccgaggcccgtgaggctatggctgccctggagaaggactatgcggaggtggtcatcgactcctatgaggctgtcggagagggag

SEQ ID NO: 574193 - DNA, 595 bp, Homo sapiens
  misc_feature (479)..(479): n is a, c, g, or t
  misc_feature (483)..(483): n is a, c, g, or t
  misc_feature (496)..(496): n is a, c, g, or t
  misc_feature (499)..(499): n is a, c, g, or t
  misc_feature (520)..(520): n is a, c, g, or t
  misc_feature (532)..(532): n is a, c, g, or t
gtccttgaatggacgccgtgccgggtcaaatgttagcctccaggccctgggttgtggaagtgctgacagaagtcatggctgatgtttgagcagatgagagcctaacgtgggcaagttgctcaaggtgctatcgacaggtacgaatccctgagaaccggggccaccctggagcgcgtatgtagagacgcaggccaaggaaaatgccgtatgatctggaagctcaaccgtggctgtcctgaagcatgtacctagttcgaaccctagcacttcttgcagacctccggtcaccggccagatccatgcgtgaaggccctcaccaaggttgccgcacacagacttcagcctggtgcgaagtgcatgatcgaccaggcacatcaagaagaacggccaatccgacagatttggtacctcggggacctgctggagacctgccatttccaggccttctggcaagccctggatgaaaacatggacctctngganggtataactggcnttngaagactctgtccgaaagttnatctgccatgtngtgggtatcacttaccagcacattgaccgactggctgctgggccgagatgctcggggatctgc

SEQ ID NO: 574194 - DNA, 371 bp, Homo sapiens
tttaaaccagaaaacagcatgagatcctttgtgcgagcatccacgtagaggctaatctaatgtgcagacctgaaccgtgttaggatgtaaatcagacaacagttaaaatgggccccttttactgtctctaattatccctcaaaaaagttgattaaaaattaatacctatgtgcatactgccctaccatttaaaaaataagaaaagtcggtggtgtatgcctgtaatcccagcactttgggaggccgaggcgggcagatcacgaggtcaggagatcgagactatcctggccaacacggtgaagcccctctctactaaaaatataaaaaattagccgtgcatggttgcgggcgcctgtggtcccagctactca

SEQ ID NO: 574195 - DNA, 646 bp, Homo sapiens
  misc_feature (301)..(301): n is a, c, g, or t
  misc_feature (416)..(416): n is a, c, g, or t
agcgggttccaccattagcgaggctcacacccggcgctccaagttcggggctggaggcgtccggcttcctccctcccggaggcgggacggccccgccccgggcccgggtcgtcccggggccctcccactcctatcctggctccctaggcggcatcccacggcgactgaagccggcggcccccagtctcccgcggctgctcccccaggcatggcacagggcctcgcctcactatggcagcagcacggacagcacgctcgacttcatgctcggcgccaaagctgatggtgagaccattctaanaggctccagtccattttccaggagcaggggatggcggagtcggtgcacacctggcaggaccatggctatttagcaacctacacaaacaagaacggcagctttgccaatttgagantttacccacatggattggtgttgctggacctcagagttatgatggtgatgcgcaaggcaaaagagagatcgacagtattttgaacaaagtagaggaaagaatgaaagaattgagtcaggacagtactgggcgggtgaaacgattacctcacatagtgcgaggaggagcatcggaagatactggccacgcgagggcgctggttgaatatgacatagatgaagtggcctatg

SEQ ID NO: 574196 - DNA, 980 bp, Homo sapiens
aacggtctaaggtaacgagggctgggtggcgtggctttccagagggcagtgtagtagctttatgctgaaaaggtgggcactagaggtctgtgtgccattgcccaggcagagtctctgcgcttacagaactcctaggaggtgcttgctgtggcggagtggcctgcctatggtgtgctgcgtgttcatccactggtatgcagtggggccaaaggctgcgaggttgtgcgtgtcctgagcgcaaacctccggaggacagaggggccataaactccagtgaaagttatgtagcgagtggcgcgtgataggaatccacagccggagacccctgcttagctatacctacggttgacactgcatgtgcagccacgctgattgcctcagacaagggtggtgcctgcggcgagtcaacggctgaagactcgatgctcgctcctggggaccccaacataggctcaaagaatttgggccctaatgaatgctcgctctgccacttagaagctcgaacgttgatgcacttggtggagacaccgccgaacagatggacgattgagcatggggccagcacaaccacgcactctgcaggaagcgacggagagagggtggggagagccacgacgcccgctcctgcacatgccgccagcacacgtcgctcacacagcataacagggtctccattgcgtcgagcgtgtagtactaggagtcatggccatgttgcatctctaaggagctttgttacagctttcgtgccagcggacgatggaagaaggaccagtgggcccctaccacgaacttgttcactaggttctcaaacctcaaccccgccggcgggcggggagactgggaggggggaggaaacccgggggaaaggggccgctccctggcaccccgattggctctaagcccctcttcctgcacgcggtggacatcggggggctccccaaggggggcggaaaaacaaaaccgggatgggtgtgggggag

SEQ ID NO: 574197 - DNA, 1053 bp, Homo sapiens
cagaggtgctgtcatccagccttcatggttccatttctagagcacaggtggagtagatgtagcatcattcttaagggccttaggatttttggaatggtaaatgagcactggcttcaacttcaagtcaccagctacattagcccctaacaagaaaatcagcctgtcctttgaaactttgaagccagacattgacttctcctctctagctatgaatgtcctaaatggcatcttcctccagtaggggctgtttcatctgcattggaaatctgttgctcagtgtagcctccttcatcagtgatcttagctgcatcttctggagaacttgctgcagcttctccatcagcacctgctgcttcaccttgcactttggtgttatgaagacagtgcctttccttaaacctcaagagccaacctcttaccttccaacttttcatcttttcctctgcagcttcctcacctctctcaggcttcatagacttaagtagaggtagggccctgctctgaattaggcttaggcgtagaagcatgttgtagctggtttgaccctcacgtccagatgactaaaagtttcaccatatcaaaaatccaggtggtatcacctagaagatcactcatgtgttcactggaaggtagcaactttacactgtgcaccacaaggagacttatcctttgcaatcgttgacttgggtggtaggactccaacagggcccaagtttcaggcctgaccttgggttttcgacatgccgttacttcagaaagggtgagtcacttggccaggtcgttgattacaggtgagaaaatgcagcgacacctcgcgtgtaaccaatgaaagcagacctaattcggacaaaagtaggggggaacaaacatgggaccaaatagcgacggaggggctacacggaaataacacaagctcagaacaggacgaaagaaagggacctgccggcgacgggaagaagcaggaaacaacaaagagcggtaagcaaagtccgagactacaagggcacacagcatacagggcacgaccacaaacacggcagaggtggaccaaca

SEQ ID NO: 574198 - DNA, 137 bp, Homo sapiens
tggcacattctcttgaggtccagtcaggcttctgaggagcgaggttggccagtgtcacctcctctgatgacgggctcgtggctggcggccaagaagcaggagctggaggagatactgcatgagatgggggccgcgcg

SEQ ID NO: 574199 - DNA, 120 bp, Homo sapiens
aactgaggcgacggtaccaggtctcgtgcagcccaacttccagcaggacaagtcctggggcgctggttcagcggggcctcgcttcaactcgagctggctccgggagaagaaggcggcgtc

SEQ ID NO: 574200 - DNA, 543 bp, Homo sapiens
  misc_feature (34)..(34): n is a, c, g, or t
  misc_feature (298)..(299): n is a, c, g, or t
  misc_feature (389)..(389): n is a, c, g, or t
  misc_feature (391)..(391): n is a, c, g, or t
  misc_feature (408)..(408): n is a, c, g, or t
  misc_feature (490)..(490): n is a, c, g, or t
  misc_feature (493)..(493): n is a, c, g, or t
  misc_feature (495)..(495): n is a, c, g, or t
  misc_feature (528)..(528): n is a, c, g, or t
gacgatgcctgccgtgcccgcctggggctcgggncggtgaggcccggggcgcggggtagctatggcgacggcaagcgcggcccgcggcgccgcctgacaggtgtgggccccggcggcggcggcgtggagcagcatgtacgccaaggggggcaagggttcggccgtgccctccgacagccaggcccgcgagaagttggcgctgtacgtttatgagtacctgctgcacatcggtgcccagaagtcagcccagaccttcctgtctgagatccgatgggagaagaacatcatgcctagcccnnagattccacaactccagcgaaacatgtacactatcatgaaccccatcggcagggcgccggcaggtaatttcccgctcggccctggcaggncncatggccgccatgagcncgatggagcctcaccacgtgaacggatccctgggctcgggcgacatggacgggttgccgaagagttcccccggcgccgtggncgncntgagcaacgccccgggcaccccgcggacgacgncgagatggcggccgc

SEQ ID NO: 574201 - DNA, 83 bp, Homo sapiens
ttttgtacttgccctgtggggcctccactgcttttttatgggagacacttttaatttaacagatgagaatattttgaaactca

SEQ ID NO: 574202 - DNA, 1067 bp, Homo sapiens
ggcctgctaattttttatttttagtagagatggggtttcatcatgttggccaggctggtctcgaactcctgacctcaagtgatccacctgccttggcctttcaaagtgctgggattacaggcatgagccaccgcacctggcccttctaacgttttcttcatcatagtcccaaaaaccaatactttacaagtggcttctttgaaaggcaccacatttacgtggacatgtcactggcttggcgagacgggcagtcacagattacctacatcccccacaccagcctcatgcctctcctgcctcatgcagcacaggctgcgcttcatccctcataccacacaccatggcaccactacatccacatccccaagaggcctgcactgagcatgcctggcaaatctctaacactatactgacgcgcgcccactctccacttcaaactctgctaccccacgacctgcccagccgcacatgagcagacaaagctcctggcaacgcctgcccctgctgcctcacagcaaccacccccagcccctcgcaccccaccgcagcgactactaccactccacctacagcgcccctcacctccagcctctcccaaccgctccaccgcgcgcgaaccctgacctcccccacactcgacgcaccacgccacgcctggaacacaccagaacccgcctcacccgcacccagcggtacccgcgccccgcacgccctgcaacgcctccatcgcaccctacccacacaccgcccaccccccgcacccacaaccacccccgcccccccaccaagctcaacccccagccccccccgcccccccccccgcacccccccggcaacccaataccaacgaaacaaacacggcaccccacacccgcaaccccccccgccaccccgcccccctcgcccccccccccccccccgaccccccaacccaccccacccaccctcaaacacacggccacacagcacccagccgccgacactcccaccccccccactctggcccccacaccgccactacccccacaccacgcccagcaccccccccggcccgcgcccaccacacc

SEQ ID NO: 574203 - DNA, 233 bp, Homo sapiens
gcagagagaactgatttatcaaaggcagagaagctggggagtcagtgtgttctgaagtggggacaggctggtgtgtgtggggaaaggcacacatggaggatgaagctgctgaggtaggccaagggtgagcttacgtgggccacgcttcattttctttttttttcgagacaaagtctcgctctgtccctttaggctgaagtgcagctgctcaatctcagttctctctccctgca

SEQ ID NO: 574204 - DNA, 118 bp, Homo sapiens
ggagttattgtaaggcagcggacatgtgcaggatatctagtgtggtggtgaagatgaaccacgtgacgaaatagaaaaagctacctatggtgcccctacttggccttgccatatgcaa

SEQ ID NO: 574205 - DNA, 104 bp, Homo sapiens
  misc_feature (20)..(20): n is a, c, g, or t
actctctgtgggccacacgntgcacttgcaccaccacacacacacacacacacacacacacacacagacagatccagcagcatccttggaacatcctgaagtca

SEQ ID NO: 574206 - DNA, 384 bp, Homo sapiens
tactgttctttattttactttgcaggacacccttggggcatttcttataggacaagtctagtggtaatgaattccctcagcttttgtttatttgggaatgtcattttctccatcacttttgaaggacagtttttccagatacaggattcttgtttgattttttttttttcttttaacattttaaatatgttggcccactgcctctggtctccaaaatttctgatgagaaatttgctgataatctcattaaggatcccttgtagctggatgcattggctcacacctgaaatccgagcactttggaaggccaaggcaggaggattgcttgagacctggagttcaagatcagcttgggcaacaaaggaagaccttatgtctttaatt

SEQ ID NO: 574207 - DNA, 757 bp, Homo sapiens
atatgtagtccaaaacaacaaaaaaagaaaaggtctaaatgtgactaagaacgaacagtttccacagcctttcacagctatggacaagtttgcttctggtagtttctttcttacctcctcttgggatatattttctttcttggcttcccattgggggttatcagggttctgcaccacggctgctcggtgtatgccacatttctgaatagatccctatgagggttagcaagcaaaccagggtgggtgtaccaagtgcggtaaccttaacccggatccaagacaaatggatttcatctggctatgcaaccatctggtgggcacaacatctggtggttgcctatggaaaactagaagttctggtggtttggaccacatcctttcagggcaccaagaatagtctcttacagtaaatcgaatctaagcgatgacagtagtcttccatcatagagtatgactgggggggtccttcaaaagggtctctggcaaatggtctacttcttggcttttctcctccttgaaagctgtgagtacctacgtacccccttacttggggggggtccataataccatggttgggactccgaaggaaatcggatccatgaacgtcccagctacatttgggcacgtgcattagcattcctccacgggtgaagccgtggatgtttcccatatacggaggtggtgactacaaccgtttatggaacgaggaagctcctgaggtaccataccaatgggcaacgaggatacagggacaatt

SEQ ID NO: 574208 - DNA, 394 bp, Homo sapiens
tcagccgttatgtgcgatcttaggactttatgctattacaagtcctaggcattaacggttcctcactaggggctattgccgagccatggatcgcaagcctgactacttacctagatttttgaggataattctatgagtcagttataactatctcaatcctaagagtgaaaaatggaagttctcaaaccattgcctaagtagcttggaaatgagcctatggctccgccgaaatggcctgacttgctctagcactcatgtggactatcgactgtactgcgaaacaccttgaatcacccaagtttacctgttagcaaagaatctacttcaaaagccaatgacgaattcatgatgttgctttccatccaggctttgtagggccgcagagagcttgaca

SEQ ID NO: 574209 - DNA, 449 bp, Homo sapiens
  misc_feature (443)..(443): n is a, c, g, or t
  misc_feature (445)..(445): n is a, c, g, or t
ataagtctgaaaactcactttttttcacactaactgcagaggaaacataggaaaaaaattgtatatattgcaagatgaaaggtatatttagctatacagaagagccttataaaagcaaagaaattgttataaaagtcatgagaaagttgctcttgacagaggaaagagcctgtggaagtacacacacaggagagacggggcctcttaggtgtcaccacattccatttcttatcctggatgggtttgggtgtttgtcttagaactgttggtaaatgatacaagtgcttttatgtacttttctgtatgtatatttcctaatatttttagagccttgtaacagagattaaatgtctgttagatgtttggaatttctgtcggaaatcttgaagaatttgattggagtatgttattagtaatacagataaaataatatttcctgcaanancaaa

SEQ ID NO: 574210 - DNA, 188 bp, Homo sapiens
ggataggcacatgagcggcagtgttaagagtgggctggaacttggacatctccagtttctccatgatggcctataaaacagaagggcgtgagagcctgttaccatgtcttcaaaacgatgtttcagtgtactaggaggtaccagagatcaccacaactacagattgtagggagagctagcagctgccc

SEQ ID NO: 574211 - DNA, 228 bp, Homo sapiens
aggatccgaaaaaacctcccttagatctcccctcctgaacctgaaactagtcatagatgagatgccattgttgtagtccaacgtctgtgtagaattgtgcaggcttgattatgggtgactgaataaagcaattagcatcgacagaatttctaactaagatattagatgcatttacttgcactgcatactagtctgtggttggtccaaactccatcaatgttatcttat

SEQ ID NO: 574212 - DNA, 1471 bp, Homo sapiens
  misc_feature (413)..(413): n is a, c, g, or t
ccctttattttttttttggtactgggtaacacctttttaataggtcaaagtaactggtacagttcattatatttctttccgtggagaaataattttatattcccccaacaaactaacaggggagggatattattttgttctcaaaaattaacagaaagtggatgtgggtgataacgtggcacgattcaaagagaaaaaccaaagatttccgtgtgtcttgtggcttctattcttctctccgtgggacaagaacgagaaatacagaggacaaggtgtttgagtatacacctccgagtgtggacgtgtgtaacaatagttccacacagtggctttgtaactctttgtcttttattaaattatattatctcacacacatgtggacacacacaggggagataatgggtctctgtggnaaacactttctctctctatacaaaggtgacaagtatatgtgagaagggggtgtccctctgtggtgctaaccacacacgactaatctctcgttgcttctcacaaaagaaaaagaaaatatatttcagtgtgcgcctatccaaacaaacacgtggggccacaaatttcactctcgtgtgtggtaaacaaaagagaagcagtgaagttcttcataaagagtgtgtgtgttctcgtcacgagacgtaagatttcgcgcgagacacacgagagtgggcttctcaccattaatttcccaccacgaaacagacgtctacacaccaggggccacgcgcttacaaacaccacacagacaacggggctctgctagggctatttctcccccctgcaaattaacacttcaacaggctcctctccacaaacacttactacggcttttaaaaatattccctttgggctaaaccgcgtggcgcacatcacgccattcattgtggccaaactcttggcaccagcggggtggatttacatcatgaccgaccacaatcgaacaaaaattttacccaggtcctgggcaactcatgttaccacttctccctaattgcggtgaagcaacccacagaaggaaacattttcttcaaggagccactcccgtgggggggacttctcccccgtggggacacacttctcctgtggcggccatatacacgtggacctactccccttcattttccccactgttaatggcagagactaacaggggtcacagccatgttatggcgcacacttctaaaacgacattgtatcaccccccccgttggggccatccatcccccccctttttagcaaacgcggtaatagcctgtgtaccgtgtgtccaacccactatgaacagtggtccctgtccacagtggacggtgctgataaaaacggcctacacgactttagtacatgttgcaacgctgtctttagcaaaaacaggcgcctatattaggggactcgcggccacgaaatttacgtgcacatctatcacgtagtgtgcacaaacaagcaccatcacacacgt

SEQ ID NO: 574213 - DNA, 283 bp, Homo sapiens
agtagcttcctgtattactcctactccttatgtgttgtgtattcactaggaggaatgccaaagagtctggcatcaacatattctctcacaaagtcactttactcaaattggggaccaatgtatagggagaggccagcaggggctctcactaaggtggacataataatccacctcccattactttgatatctgatcaaatgtatagacttggctttgttttttggtcctatgaggaaatctgatggacatcatcatccaatatgcggaaggcggtctttgcata

SEQ ID NO: 574214 - DNA, 95 bp, Homo sapiens
  misc_feature (4)..(4): n is a, c, g, or t
aaantgtctgtagtaggggacccagagtcccaggcccctggagttgttgtatggcaggggccttgtctctcactgcatttggtcagggggacatg

SEQ ID NO: 574215 - DNA, 336 bp, Homo sapiens
cctgtaatcccagcacctcgggaggccgaggcgggtggatcatgaggtcaggagatcgagaccatcctggctaacaaggtgaaaccccgtctctactaaaaatacaaaaaaaaattatccgggcgcggtggcgggcgcctgtagtcccagctactcgggaggctgaggcgagaggattgtttgagcaggagtttgaggctgcagtaagctgtgatcacgttactgcattctaacctgggagacagagtgagagcctgtctcttaaaaaattaaatttaatttaaaaataagagcatgggccaccacgcccacctagttcctcttttgataaggctg

SEQ ID NO: 574216 - DNA, 1032 bp, Homo sapiens
  misc_feature (944)..(944): n is a, c, g, or t
  misc_feature (954)..(954): n is a, c, g, or t
  misc_feature (995)..(995): n is a, c, g, or t
  misc_feature (1024)..(1024): n is a, c, g, or t
cattaggccagcacagtggctgacatctctaatcccagcattttgggaggtcgaggtgggtggatcacctgaggtcaggagttcgagaccagcctggccaacatggtgaaactccatctcttctaaaaatgcaaaaatttagccaggcatggtgctgggattacaggcacataacaccacacccagctaactcttgtatttttgtagaaatggggtttcgctatgttgctcagactggtctcaaacacctggcctcaagtgatcctcctgcctcagtctcccaaatgctgtgattacaggcacaagctactgcaccaggcctctgactacatttctattaatatggttaggttggaggttttagtatttttgtatctcatatttgtatcaatatgactggcttctttgtctgtagtgtgtggtaatattagttctgtaaactgtcagttgcaaaaaaaaaaataccttgaactatagtatatgttgataattagccataataatttcttagttaatttcttataattaaatttgtcaaagaggaaacttacagtttatatctgatgaaatctctaaaaagatgggtaaaacattgggaaatgtatgcatgtacttcactctggtttcatagggttagcaagtgtcttaaaaacatatataaagaagcacagagattgttaggagatatttatgctcccagttttaataattgggatactttgtataccacagaaagaaaaattactaaactcctctttttttagtcaaaattggaaaaaaagtcttaattgacagttactatgcctgtgctacccatagcaagtatttcagtggaaaatactttactaagtaagtaatttgaacacagcttaaaatccatagtatgttacaattgctagccttttcacaaagtttgcattgtcttaatgtagaagggatactgngatctaaganttcacaatttttaaaagtgggaacctaaatagggttttccnaattggccctggaagtttatttggtatcntaggtgtt

SEQ ID NO: 574217 - DNA, 847 bp, Homo sapiens
agcggcggggcatggtggcaggtacctgtaatccagctactcaggtggctgaggcaggagaatcgcttgaaccaggaagatggaggttgcagtgggccaagatcgcaccactgcattcaagcctgagtgacagcaagactctgcctcaaaaaaaaaaaaaaaaaaaagggttggatgatacgaagatgtagagcacctgaaactatggctgctgtgggagtgtaagtgggttatacctgcttggaaaaagtgtttgggatatcattcttattaaaatgggaaccatttcaccattgaccattaagagtctcagacgagtcccacgtccataggtccagcactcttgagacaactgtgcagataagtgctcctagagattcaagcaccaattaattgtctcacaacagcatttttcccttaaaacaaaaccgtggataacaaccttcaagtgccgtggtccataggggaccaaattaaatttattaggtgtagtccacacagaaagaattatttattacaggcaggtgaaacattaggtggacatagcttttatagaattaacgaattttaggacaaatagtttggaccaacagggttggccttggcgttgggggcctcacaccttattaatccgtagcgctttggagggcccagttgggaggcatgcttgaggaccagggagtttggagaccgagccttggggccaacgttgggacgaggacccgtgttgtctacaaagacaatttttacagagtcgcccggggcatggtgggcgaacatcgggggatccatttgaagcccaggaattaagagggctcactgagctatgaacgttgccattgaggcc

SEQ ID NO: 574218 - DNA, 625 bp, Homo sapiens
atcttacaaatgtgatttgcagttgctgcttgttttggttttaggagtctgaaatattttccaacttaatccatgtttagtatctattcaaagtttcctttgtccagaaaaaacctaccaacactaaaaaataataaaatattaaaatagaaggaaaaattattcccactgagttcccctgcaatgatagcaatatattatatttactggtaaaaatgaagttgaatttatgccacttcaaacatactaagagtaactgaaaggtttgcatttgtattctgagggggtgagaatgatccatcttctgcagatgagtcagcttccagggttggtagaggggctaagacaaatgattgttttcttgtgtagctcaaggaatctttgtacgtttttctgttgcagcaaattgcattgctaacattgatcttcatttgcttaaatggatgcattagttcttagaaggaaaggagaggtgctagttaatttttagagtaagagatgtagatgtactcttccaagcattgatttaatcagcttctcttcccaatggaactggaaatcaaccgaagtgaagacctgaatctccccatcccattaccttcttcgtacgaggcattcccttccc

SEQ ID NO: 574219 - DNA, 454 bp, Homo sapiens
aaatatatgagtatcactaatctctatgtcggtagacgctgctgaattatctctcgtattgagatgccctccatctactgtagaactagatagagacatacaagtcatacatggtgtcatcctctgacttaccacgccagaacaaatgagccaggatgatcatgccctgtcaaatatgaacaactccgttcctcgcagtggtgcagaagagccacatgttgacgggacggcaggagtcatgatggtcagtggttgagtgtgcagcggacttttctctgggggtaatgaggctctccaagattggggtatggaacaaagaacagtgagcaagcctatcttaatgtgatcctggcatcttgtgcttgacttactgggtgatattgggctacgactgaggactcatatcgacgtcctgagttcaagtgtggcgacagtatctaccacgggagggtta

SEQ ID NO: 574220 - DNA, 695 bp, Homo sapiens
agggcgcatcgaaaactatgcgtggatgagacctcggctatcgtggctacatctaccacccgctgtgttgccacgaggtgtaggacgtaatcatcaagtgccagctgcccaagctgcttcacggcgcagggcctccccgagctcaaccactcccaggtttatgccgtgaagacgttgtgctgcaaagaccagtgagcctgatccagggcccgccaggctacggggaaggacggtgacgtctgccagcgcagtcggtctaccaccgtgtgacccggcagaggcagaccggctccgtgttgcgtggttggtggtgcctccgatgacttagcatcgccggtggtgactcagtctacacggagaagagtccacctcagtactggggcctataagggtcggtgcgcctctgcgcctgagaagccgtgaggcccatcggaatccccgggtgttcattatctggccctgtcactaaccagagtcaggaaccatggtctgcttgcctgagactgctaacaagcatgcgagcgcgctgacgagacgagcactggggcagcatgtcgtcgtgccgaccgagaagcggttaccgtggtccttgtaatgcgcaaccgtgtgaggagcatgagcctgtttgattgcaagcgccgcaatgtcatcgtgggtgcacatggtgttgggcgtccgcgtgaagccgagggttg

SEQ ID NO: 574221 - DNA, 527 bp, Homo sapiens
  misc_feature (287)..(287): n is a, c, g, or t
acttcggagactgtccctacacaattagggacgcatccatccaacgattgcgctcacagtgcgtacgaccctagacacctagggaatccctcggcaaccgtgggtgtgcgctcgcgctaatagtcatatcactgtggcagcatcgtgacatcgctccagagttgtcctatggatacgtcgatgtacttgctcgtctctgaacacctacatctctatactgtgtagtcctcacatgtagacgcaaggcactgagcattgtaggcgctgacactgcgagcccactcctncgcagcgataggccgctcaggtagtccctacgtcctcacccactaagggtcacagagtatactattatatatacaagtctttgtaaatttggtgtgatcttggggtgtgggagtgggcaccaacgcccgtccctggggtccttttttttattttctgaaaatcactctcgggagctgccgtcctcgtctactgggggcatatgccccagccctgtaccacacctgcctgtgcctagagca

SEQ ID NO: 574222 - DNA, 113 bp, Homo sapiens
gcattgcgatccaaccatcaggcagccgattccgtgtctggatcacacggggtggaaggaaccgtggcgtcctgcgtgggccaatgggtgagacacataagtcctggacataa

SEQ ID NO: 574223 - DNA, 711 bp, Homo sapiens
tgaggtttctgctgttattctgaatgaagattcccttatatatgacttgatgctctgtctactggtacttagggatttttctcgtttgtctttgtgactattgtcagttcaaatataatgtgccttggaggtgacctttttggggatcttggagcgttcctggatctgaatgtccatatctctcgcaagacttgggaggttttgagctatatatttcattgtcttttgcgttttcttttatttttaatcttgctgtgatctccttagcagctataatttcattaaatatgttttatttttgaattttgtttttggagacagagtctcgcactgtcgcccgggctggagtgcaatgacgcagctctggggttattgacccctccgcctccggggtgcatgcgatactcgggcctcagcctcccaaatagcggggattacgggtgctcagcaccacacccaagctaatttcttcgtacttttagtaagagacggggttacgccatgtgggccacgactggtctggaagtcctaacctcatgtatcccacctgcctgtgggctcccaaagggctgggataacaggcgtgacgccacacatgcctggcccgtgttggttcacaacagttggctccgatgattcattgctatcactgctgcactttgagttgcgaagtcttgtgccctttgccctgtggactcgcactgcaacttc

SEQ ID NO: 574224 - DNA, 301 bp, Homo sapiens
  misc_feature (86)..(86): n is a, c, g, or t
  misc_feature (159)..(159): n is a, c, g, or t
gctggtttttgttttgtttgaaaaatgtttcataacgccacctttataaactttcagatttgccaagaataaccaattgctatttnccaatattcccagaactaaataacagtccttttttacccaagaaataactatattgtggcatttttccccttnttaagttaataaaaactcccccattcaacatactacttatcccttcagtaggccccccccccttgaattaagggtaaattgacaaatgtctgtttctttttatatggaaggggtaaagatataattaaaggtccttttgcta

SEQ ID NO: 574225 - DNA, 1395 bp, Homo sapiens
  misc_feature (1072)..(1072): n is a, c, g, or t
tctaattggtctgttaattcccacaaggtacccaggggtgtgggggcgccgagccaaggcccagacaggccatgtgggacctttcctctccgggggggtgtgcacgcgtggattttccgggttctgtgccccaccagcaggtttggcaggcaggccgtcagtgagtgtgccggtgtggaaaggctctccgaaggcgcgttgggcgagggggcctcggggcggggcccacaaccatgtgtgtgtggagcctagaaacaataggtgggcgcgaggctccattcctcttattaacccaggggggcctcctctcacaggggggcttccagaaagcgggttttacaccacgagacaggccggtgtcttatggtcagatagaggaggaacttgggggagaagtgtcccccacttgtgagtggggccaatttctcccccgagggatattgcccttgtgccccctttgtggggtcggcgaaatcttttaaatcccaagtttttccacacagagcggaggttagggcgaccggtcaggatcccccccggattccaaacgccgaagaaattcttagggccgtgaaaacacaatattatgtcgggcacaatgtttgtggaagcgtcttgttgtatacgaccccacggcgcgggggcgagaaaaccattcttgtgtgggaactctcttctaatgtccggggatataacacttccccgctgtggggggcaataccaccgtggcgtcttttccccgcgagaacacagctggtggggtctaccaacccacggggggagacaaaaagaggggcaccccgcaggtggaaaatcccgcccgggaaaaagaagacacccaaaggacatcactccaagaagggaggatataaactagccgaggggagaccgtcatgtgccacaagatggtctccccgagacacgcaacaagtcgtctgagagcagttgtggtctacagatctatcaaaaccatcgggcgagggggcatcaccttaggtgcagcctccttaccacgacagttggggcggaccagcgaggtcccccccgtcgtgttcttgtggtgatgtagctncaaccgagaagttgccacacaccaaccggaagaaaagggcccccgccccgagggatgtaaacgtctgttggcgacccaccacagggtgtgtataaaacaccaccagattgtgttttgcgccgcccccggctgaagagaaaaacgaggatcccacatcgatgagaggagggcggcaggcaacaacgacaaaccactcgctcggctgagtccacagtaggcggcagcgcgcccgccgaccacacaacaggcgcaggcccaccaagaaagtcaggacattccaccccgagagggaaacggacgcggccaccccatcgttgatggtc

SEQ ID NO: 574226 - DNA, 304 bp, Homo sapiens
ccacctacagaacattaagatgccagcaaccggcccggcgcggtggctcacacctataatcccagcactttgggaggccgaggtgggtggatcacgaggtcaggagatcgagaccatcctggctaacacggtcaaaccccatctctactaaaaatacaaagaattagccaggcgtggtagtgggtgcctgtagtcccagctactagggaggctgaggctggcctggaggttgcagtgagccaaggtcacgccacttcactccagcctgggcaacaagagtgaaactccgtctaaaacaaacaaa

SEQ ID NO: 574227 - DNA, 836 bp, Homo sapiens
ctgtgtcatcagccgccttggctgcttcggcttgtatttccaaggtcctagatgaggtggagcgccgggtgggatctccgctgcattggtctatcctttacatgagaagtctcatggagtcgcccttcccagccccaggaagaccatcaaagtgaagacattcctgccaggtgctggcaaatgaggtgttagagctgcaggcgagcccatggactcaaggctggagcacgtggacgtttgagtgcctttataccctgcctcagtgtgcgccagctcatccgaatctttgcactcactgacgtgctggagcgccgggtcatttttgtggcagataagctcagtaccctctccaggctgactcgacaacgcagggggggtggccattgatttctaccccccattcatcctggcagcacacaccattcaatttcctggtacatccccgggcacatcccattgattgacaatcagtcgtgactgagtggcaacaccgcatatcctgggcttgtgacatgctccgtaccaagggttaccacgtccacacaaagaactgggccgggacggctgccatactggaaagagaagggccgcgagaaagggtggaaatctggcgcaatcctgcaccacggaataccatgcccgcagccagagggggcacgaacggaacaggacacacgctagttggcaccctaagggaacaggttaacaaggggcacggctccagggaagcaaggggctctgggcagcagggaaacgcaatggcgcgctggaatctacccacacggactcctgaagcaggcgactccagaggcagtgaattgtaataaccacctcaa

SEQ ID NO: 574228 - DNA, 402 bp, Homo sapiens
  misc_feature (402)..(402): n is a, c, g, or t
ggcacgcgggataatactatatataacctcagaagagtttttctttgcaggagatttctgagcctcttacacacattagactatagcctataccccaacttggaaggcacatgtggccccaacacagcattacacccgctataataccctagaagtgccacttctaaacacattcgcattacttgcattaagagtgtcaatcacctgagctcaccataggctaataggaaacaaccggaacccaataattcaagccctggttattaccattttacacgggctctattttacccttctacacagcctcagaggactttgagtgttcctttacacaatttcgacaggatttaccggttaacaatttttgtgggcacaagctttcacggactctaaaaaaaaaan

SEQ ID NO: 574229 - DNA, 549 bp, Homo sapiens
gcttttgcaattatatagtattgtggttttcatgtttttctctttcttttagagatggggtcttaccatgttgcccaggctggtctaaaactcttgggctccagtgatcctcccaccttggcctcccaaagtgctggaattataggaatgagccaccatgcctggctgtcctgcctttttaaataagagcttatattcaaggtgacattagacacttaatgaatcgtgagattttagacagtggcagtgctgtgaaggaaataactctgacgtgtaatcttgcctccatccctgtcactgtgccgaaaaagatcactgctcactatctttctgttttttaaacttaactatgggtttttaagacttagaaaaaaggagagaggctagcagagggaaccattgctcagtgacagcggctgtcaggcacaacagcacaaatgatgctgtttttatattcccctttcctcccccttttctttctcactttggtgtttgaaagccccttccagacattgcatcacatcaccctgggcctgggcctggtggtgc

SEQ ID NO: 574230 - DNA, 388 bp, Homo sapiens
  misc_feature (243)..(243): n is a, c, g, or t
cagcttatcattatcttctttctttggagagggtacaaaggatagctgctcgtcacgatggtcctcagcttcccgagtagctgggactacaggcgcccgccaccacgcctggcaatttttttttttttttagtagagacggggtttcactgtgttagccagggtggtcttgatcttctgacttcatgatcctcccgcctcagcctcccaaaatgctgagattacaggcctgagccgccccggnctgaaaagtcttttttttaaaagtcaggggctcggtcacccaagcgggagtgcagtggtgtgatcacagctcacggcagcctcaaactcctggggctcaaatgatccctcagcttcagcctcctgaacagttgaggaccatcgtg

SEQ ID NO: 574231 - DNA, 288 bp, Homo sapiens
aatcacagccccctttcccggggccaggggccttggggccctgccctcccccccagggttgggtccccccggggccccccctgggggaataaaaaggggatggaatgggggaaaagggggggcagggggcccttatcctttttttgccctggggggggggccccccccctttggagggccgggggcaggggggggaaacccccgggggggggtttttttaaacggggttttttttaatttttattaaattttcgggttttccctaagggggcccattccccctttgga

SEQ ID NO: 574232 - DNA, 299 bp, Homo sapiens
  misc_feature (117)..(117): n is a, c, g, or t
aaaaccctttaaaaaccccgggggggggggcccttttttcccccccaaaaatggggccccggtggtgtttttccgggggggccccctttttcccgggggcattttgggccccccccnaaatggttttttccccccccccccccaaaaagggggtttttccgggggggccctcccccgggggtttgggggggggcggtttttcccccccaaaggggggttctaaaagggcccccgggggggggctttttttttggtttttcccccagggtttgggaaaaaaggcccttttagggtgggga

SEQ ID NO: 574233 - DNA, 1041 bp, Homo sapiens
gggtgttctaatatacaattctcggaatctcgcgtccctctgcttcacacaggtgccccctatgctaatttgttttctcttgcacatcaagtgtgatctccacatgctcgtacttctcgtttttcacgatccctctgttgagaatccatgacaatggcgtccttttagtagtattatagtattgggacgttcaaaactggtgacttaataattgtcctccgtggaaatgattttccgttatcacatacaatttcttgcttcactgagtttgtggtacgttcgctcgctggacagcagatattaggatctgtcgtcgaggtcattaattcagagctacttgtgccacgcaattctctttagatcacaataaatattattttgcagataactcctgtacatttcctgcgagtgacgctgggaaactcctctcacagtgttctcacggagggtcacaattgctcgaacagcgtattgtatgcaattgtcatccgtggaacctctcatcagtcacactggcattatcatttccaccgaaattgcgattatactctccatatgatcacccgtggcgcgtccctcatgattgcttcgtcataccatcctccctcccacattctcagcaatcaacgcgctcagtgcccccctttcccactgttgggaatctatgaaatgcggttgctcgaacttaatcattcgattctcgagcttagtctgtaagctcgctatcagttcgtcgttcgcaaaggcaaaatgtctcgcactatcgtacggcgtattgacccatcatatccgaaactacaggattgttccagaataataaagataatagatatacataatgctgggactttcattttagcacctctgagtggaactgtacgtatctccacaggaagtaaacaaactgcccttggtccttggagacaaaagatttaatattacaatccatgtggccttaaggctgaccagatcaaagtggtgtctaatccattctacatgtcaagtagtaaatgaagccagactgcctgtgactttatgaat

SEQ ID NO: 574234 - DNA, 676 bp, Homo sapiens
tgtgggcggcacggacgcccggtacatcaagcagacggagaagctggaaggggcagcgggctgaagcacgaggtacacagcgacagcaggctggccgtcacgatgtatctgcgcctgtgcttcgcggctgccgtgctagtctggcatgttcccaacaggtgctctcatcgtgttaacctgcgagcaccagcaacattctagaacgtgaccacgacaccctgaccgatgtgcaatcaaggtccttcacgcgaacctcacatcgggggcaccactaatacactccacgtacacaaaacctgccagcaaaccttagaagacatgccatgggcaacctggcaagcagcgaccgagcaaaagacaccggcacggcaagcagcaacagaatcaagagccatgcacacgcaccgcgacggagctactgacaacgcaggagcgcaccaccgccaagcaacaggaactaatcagaaccgagcaaggacaccgacagctataccaaaaaacaaacatggctcacgaccggcaccacggagtaagacctgaacgaaaacactcagaagacgatcgacaacgcaattacccgaggtgccacaacacagccgaacaaagactacaacgacacagccacacacccaagtaaaaaagagaaatagcgcaatataaacgaataacaaccgcg

SEQ ID NO: 574235 - DNA, 761 bp, Homo sapiens
agatgcacaccacccggctgagctgaagcctgggaccaaccaagtgtggacccccacgcccagctgggaacatggggacgacctccgggataccccgaatgagatttcagagatgaaccgggccatacagaggctcaggctgagatccaccacatccagaaccagcctgccacaattggaggcccccattccgaggctgaggagcctggggaactggcgctcaaggatgctcgtgcccaaccggaggagctggaaaccgccctgcagcggggccacaggatatggcacggcaactgcgtgagttacccggaactcatgagcgtgaaactggcctggacatcgagatcgcccacctaccgcaaactgcttgagggcgaggagaacccgttggctggagatggagtgggaaccctgaataatctctgtgatgagattccactggtggcagtatcatggcggtggcattgggctgaccctcgggggaaaccactgggcagcaaatgaccctgagcttctccagcagtgcgggtcctgggctcctgaaggcttattccatccggagccgcatccgccccgtcgcaaggagtgcccgcgactgagccgcctcccaaccactccactcctccagccaccacaccaccatcacaagaagatttccacccctgcctcccaagcctggttccaagacagatgagacagtttggaaagatgatgtcagaatagcttccaataaaagcagcctcattttgaggcctgagtga

SEQ ID NO: 574236 - DNA, 276 bp, Homo sapiens
gtcgcggccaggagcacgcatggtatagacttaaaaggttcatttgtgtgtgtgcacattgtgtgtctggtgtactcctgtgggactcccaggtagtaaataaaggtttctctttttttttttttttttttttttttttttttttttttttttttttttttttttttttactccctgggagacacttcattgggggggaagacaccacaacaaccgtagcagcaaccccacacacacaagagcacccccccgcgggggacaacaacacaaaaaaac

SEQ ID NO: 574237 - DNA, 245 bp, Homo sapiens
  misc_feature (22)..(22): n is a, c, g, or t
  misc_feature (26)..(26): n is a, c, g, or t
  misc_feature (36)..(36): n is a, c, g, or t
  misc_feature (40)..(40): n is a, c, g, or t
  misc_feature (64)..(64): n is a, c, g, or t
  misc_feature (68)..(68): n is a, c, g, or t
  misc_feature (93)..(93): n is a, c, g, or t
  misc_feature (98)..(98): n is a, c, g, or t
  misc_feature (103)..(103): n is a, c, g, or t
  misc_feature (106)..(106): n is a, c, g, or t
  misc_feature (111)..(111): n is a, c, g, or t
  misc_feature (149)..(149): n is a, c, g, or t
  misc_feature (155)..(155): n is a, c, g, or t
  misc_feature (211)..(211): n is a, c, g, or t
  misc_feature (226)..(226): n is a, c, g, or t
tccccaaactaatatatgttantaanacctctgtanaaanatgggggaggcctttggtactgangttnccctccccatgctatttgaaaaggngattntactnggncgttnctgtaaatcttgagataaactgtttggagatttaaccncctctntgatgggggaccaactctatggaaattgtaaatacgttttatttataaacctggcnctgtattcaataaanatttctgcagcctttcatc

SEQ ID NO: 574238 - DNA, 426 bp, Homo sapiens
  misc_feature (21)..(21): n is a, c, g, or t
  misc_feature (29)..(29): n is a, c, g, or t
  misc_feature (48)..(48): n is a, c, g, or t
  misc_feature (134)..(134): n is a, c, g, or t
  misc_feature (306)..(306): n is a, c, g, or t
  misc_feature (419)..(419): n is a, c, g, or t
aagtggtggggaaacatttcnaagccccnctcctacagcctattttgnaaatatataatgccaatgttattaaacctatagtcacctcctactctgcctattgaatataagacctcattcctttcctaggcccnggcatgattgatcacgccctgtagtcctcagcactttgggagacccgaggtgggagaatcacttgagccccaggagatcaagacccagcctcaacacagtgggaccttgtctcaacaaaaaatttttaaaaacttagctgtgcatggtggcacatgcttgtagtcccagttncctgggaggctgaggcaggaggatagcttgagactgagcagtcgaggctgcagtgagccgtgattatgcaactgcacttcagcctgggtaacagagtgagaccttggtctcanatatttt

SEQ ID NO: 574239 - DNA, 84 bp, Homo sapiens
agcgggagcggtgagggcggctttcaccctagctccactgcttttttagcgtcggaagggcagccctagtgggagagagaaaaa

SEQ ID NO: 574240 - DNA, 970 bp, Homo sapiens
catttctttacataacagacgaggtaacgaatcctcccttaccatcagaatcaactggcaccaggaaggttgaactgagcctacgagtacaccgacatacggcggacataatgttcaaatcctacatacttcccccattattcctagaaccaggcgactgggactccttgacgtagacaatcgagtagatactcccgattgaagcccccattcgtataataattacgtcacaagacgtcttgcactcatgagctgtccccacattaggcctaaaaacagatgcgatgcccggacgtctaaatcaagaccacttgcaccgctacactgaccgggggtatactacggatcaatgctctgaaatctgtggagcaaaccacaagtttgcatgcccatcgtcctagaattaattcccctaaaaatctttgaacatagggcccgtatttaccctaataggcaggccccctcgtaaccccgctctaagaaggccgaaaaaaaaacttgcacagagcagcgcaagcatagtgtacacacagagaacgcagctcagcagtagtaggacgtcccaagacagcgcggtaccaagcgaacgaccctgtgtgcaaccacaccatcatagggtagaacaggcagagcggtcccactgtgaacgcctcgcacaagtggaatcacaggaggggagagggacactccactccacacgggagaggaagacgcccagcaaagaaagtgcaatgaagacataacacacaagggtgtacccacccacggaaagcgacagggaaaaagtagaacaaacgcaaagggcaatacacacgatacgcgcacacccaatcgagtgggcacggaaggacgcagcaccgcggcaacacatacatcatcggagctcacgagagacggagagaggaaggccgaacacgctgcaacgacggagagctgaacgacaggcggccaacaacaaaaagggccgcga

SEQ ID NO: 574241 - DNA, 276 bp, Homo sapiens
aaaacccgggcccccccgttggtttccccccgggacccttttatttggggggaagggccttccctttttttcccaccccctttggaaggggagggggaaattttttgcccacccaagggataaatggtttgctttttcctttaaaagggaaatgtttttttaaaattaaaaaccttggttgggccgccaaataatttcccgtttgttttggtttttgaaggccccccccggggagggggaccccccccttaaatgggaaaaaatgaaaggtaacca

SEQ ID NO: 574242 - DNA, 307 bp, Homo sapiens
ggtcgacaaaatgtcatgaggccaggcacagtgactcaatgcctgtaattcgagcactttgggaggcctgggcgggaggatcacttgagtctaggagtttgagaccagcctgaggatcatagtgagaccttgtccctacaaaaatttaacaaaattagttgggcatagtgatgcatacctgtagtcccaggtactcaggaagctgaggtgggagtattgcttgagcccggaaggttgaggctgcagtgagttatgatcatgccactgcactctagcctgagtgacagactgaaacccgcatctcaca

SEQ ID NO: 574243 - DNA, 686 bp, Homo sapiens
gcaagagatcaagaccagcctggccaggcatggtgaaaccccgtctctactaaaaatacaaaaattagctgggtgtggcggcgcgtgcctgtaatcccagctacccaggaggctgaggcaggagaatccgctttgaacccgtgaggcagaggttgcagtgagccaagaccatgccacgtgcactttcagcctgggcgacagagggagactccgtctgaacaaacaaacaaacaaacaaggtcccggaatgctgtggggagactgatgttgagatactaggaagtcccagtgactttagcgaggccaaggtagcgtggatcatttgagcgctcgggagattccagaccaggtctggccaacatgggtgtaagagaccccgtcctcttattaagacattgagtaaaacacgttgaagactctgaagttgttgtgcgcgggcagaggcatgcccctcagttatattaccccccacagacgaaccatttaccacggcggcagcaaaaagggacaccaacaaaaaaaggggggggcccccaacaagggcaggatttcggagaaacagtttctcaaagttccctttggaacagaggcacaggggaaggttataaacgggcccacgcacttcaagaactgggggaaacacaccgactcctacttagcaattacgaaaaattactagcgcatgg

SEQ ID NO: 574244 - DNA, 395 bp, Homo sapiens
  misc_feature (92)..(92): n is a, c, g, or t
  misc_feature (99)..(99): n is a, c, g, or t
  misc_feature (277)..(277): n is a, c, g, or t
  misc_feature (281)..(281): n is a, c, g, or t
  misc_feature (285)..(285): n is a, c, g, or t
gtgatttataaccatttattagtgaaagtgtttttaagcacagtcagggtgtaaacagtgcagcattcctgcttccctccgtgggaacagcngtctccnttttcaattcatgtgactacagaaggcacttggtgaactgtgcgtgtctgaggtgtggaaaccaggagagggggaaagaattctcaaaggcctgacgtgagaagttggaaaggtttgcaggttagggaatgaattgggagtgggggccggcggcacccatttcggtgacttttttttncccntttncccccccccatttcatgtaaacagaattgccagggaccggttaccgtggatatgtttttctaaaaactcagtgtctgcacaatccattgatagaactggaggatgtgtct

SEQ ID NO: 574245 - DNA, 702 bp, Homo sapiens
gggaagcggcggcggaagcttccgtggagggcggctcgcaggtgaggaggcccgggaccgctatcctgatccgacgaagcctgcgccaagtcctggtgttccgcggccgctgacaccggtgtcccggctccactgcagaacagcccgcgctggggccccgtaacgtcgcgggtagggcgctctctggggctcgcccccggagtcttcctcccactggtagtccgcagcccgtgcatcccgtgtgcttgacccggtcctagtcagggagagcctgaggcttgtggggcgacagggacccggagttctgtgcgggtcacggtttccgtctcccgactcctggcggtctttctcggagccgggcacgggatttctgggaagcctcgagcggctccgttccgacggtgattgcccgcacgggagactccatggtcactcgttatggggacccccaaattctcttgaacaaccgtgttgggttaaccagggtacctagcagggaggagacctgttaaatccggaagaacaccctgaagagcggagattgtgggaagcagaggacatggagggaagggactccggacaagttcgaaagtataagaccgcggatccaatagacggcgtgctgcgttcgtgaataatccggggagtgagacggatatctttcccgcacatgcaccgaggcgaaagaaattttgaggatac

SEQ ID NO: 574246 - DNA, 389 bp, Homo sapiens
  misc_feature (29)..(29): n is a, c, g, or t
  misc_feature (48)..(48): n is a, c, g, or t
  misc_feature (111)..(111): n is a, c, g, or t
  misc_feature (389)..(389): n is a, c, g, or t
cgtggaggaaaaccccttattttaaaaanggatgaaaaaaataaattnccctaaatgcagattttttaaaattaatttatttttttgagacagaggctcgcctctgtcagnccaggctggagtgcaattgctgtgatctgctcactgcaacccttcaccctcctgagctcaagcaattcctcattccttagcctcctgagtagctgggattacaggtgtgcacccaccatgctcggctaattttttttatttttagtagagacaagattttgctgtttggccaggctggtctcgatctcctgtcctcaaatgatccacccacctgggcttctcaaagtgctgggattacaggcatgagccaccacacccagtcctaaatgcagaattan

SEQ ID NO: 574247 - DNA, 405 bp, Homo sapiens
tctgactggcgtggtaggtagagatgcttgtcactgtgaggtcataagcttgggatagcttgccgggtacctgcaagcgtttatccctcggcgattagtcaggtcttagcatcgccagacgtaccgctccaatcgatatcatgtcagctatcgtcgataacagccttcagatgctcagtcgatactttggacacgtgtacacactaggtctcaacgtttagtacgatctcttgtaaggcattcatatctcagtccagcgcctagaatccgctaggatggtggtggcagcagcatgtaactctttgagttcgcatgatcaggcaacttccagccttgaatagcatgatcccttgtcccagtagcactatggtcagcataaggaggctcggtcactaaagggcgttg

SEQ ID NO: 574248 - DNA, 118 bp, Homo sapiens
tggtgctctagcggatcttatacccgatccctcatcacggcgaatgagtacattcagattgatttggagactggcaggattactgatttcatcaagttcgacactggtaacctgtgta

SEQ ID NO: 574249 - DNA, 314 bp, Homo sapiens
cccccccgggggggggggccgggggggccccctcccccccgttattatcaaaagggttttccccgggggagaaaaaagggttttttcctttcaaaagaggggggcccccccgggggggcttttttagcggggttttttttccccccccacgggtttttggtgggggaaaaaagggggggggggggccccccgggcttttttttttttttttttccccggggggggcggataatttccctccccccccgggggcccccaaaaggggggggggaggggggccccttgggtttttttttttggcttttaaattttta

SEQ ID NO: 574250 - DNA, 319 bp, Homo sapiens
  misc_feature (256)..(256): n is a, c, g, or t
  misc_feature (279)..(279): n is a, c, g, or t
tcgcgcttgttgcccaggctggagtgcaatggcacgatctcagttcactgcaacctccgcctcccgggttcaagtgaattctcctgcctcagcctcccgagtagctgggaccataggcacgtgccaccacacccggctaactttttgtatttttagtttcaccgtgttagccaggatggtctcaatctcccgacctcgtgatctgcccacctcggcctcccaaagtgctgggattacaggcgtgagccactgcgcnccgccacattcagctcttatcanagaaataacccagacttagtcttgaatgatacgattatgc

SEQ ID NO: 574251 - DNA, 270 bp, Homo sapiens
caagaggatccgtttgaggccgagtttgagaacagcccaggcaacatagcgagactctgactctattgaaaaaaaaaaaaggtagctggatgcgggtggacaagcccgtggtaccagctatccaggaagctgaggtgggagggccacgggagcctaggagtccgaggctgtagtgacctatgactgtgccatcatactccaccctgggcaagagtgagatcctgtctcagggaagaaaaaacaatttgtcatagtacttgaggatactga

SEQ ID NO: 574252 - DNA, 339 bp, Homo sapiens
  misc_feature (6)..(6): n is a, c, g, or t
  misc_feature (60)..(60): n is a, c, g, or t
gagtanctctggagttagaaagaaaaccaggttcctgcaatgctgtagagcccagggaanaatatgttcttaaaaggagagagtaggagctgggtgcggtgtctcatgcctgtaatcccagcactttgggaggccgaggcaggtggatcacaaggtcaggagatcgagaccatcctggccaacatagtgaaaccccatctctactaaaatacaaaaaataagctgggtatggtggcatgcacctgtagtcccagctactcaggaggctgaggcaggggaataacttgaacccgggaggcagagattgcagtgagccgagattgcaccactgcactccag

SEQ ID NO: 574253 - DNA, 254 bp, Homo sapiens
  misc_feature (34)..(34): n is a, c, g, or t
  misc_feature (49)..(49): n is a, c, g, or t
  misc_feature (66)..(66): n is a, c, g, or t
  misc_feature (128)..(128): n is a, c, g, or t
  misc_feature (173)..(173): n is a, c, g, or t
  misc_feature (203)..(203): n is a, c, g, or t
gctcactgtaatccccttctcccaggttcaagcnattctaatgcctcancctcctgagtagctggnattataagcatgtgccaccacacctggctaatttttgtatttttaagtagagactgggtttnaccatgttggctgggctggtctcgaacgcctgacctccacctttnttggcctcccaaagtgctgggattaccgtnatgagccactgcacctagccttcatagagaggtttttgccatcaggccaca

SEQ ID NO: 574254 - DNA, 222 bp, Homo sapiens
  misc_feature (194)..(194): n is a, c, g, or t
aaagcggctcggaggcaagttggtgtcagatggacagagttgatcagtctgctgtaggctttgaataccaggcgaagactgagaagcatgcctcccagaaaagactactccagtggtttttggcggcaaagtatgggcgtgcaggccgacccgagtagaacaagagcgcgggtgggccttcgacttaccagggncaagaaccggagaaagcaccgagtcaca

SEQ ID NO: 574255 - DNA, 420 bp, Homo sapiens
tcttacgcactcccactctaaggcatgtgggtctcaacgggatcggagattgctgcacagatccttgatcaggagacctagagcgaacttgtttgaacattcatatgagagatgtgagggggactattacacttaaaggactgggatgtaccctggcgctgatgagagatccgtggtctcccatcatacccgtcatttccatcgggacctgtctctctcagtagcgtcctggaaacaatgtcgtgttctgttactcaatgataatcttcatggatgccagtgtaggcaagccaatctatagataaatgcacgagtgcatgatattctcgtcttgactgtagaccatctggtcgcgggagactgggtaggcaggacttttcgtatgcatggtcgtgaggcatggctcgccctgcactctgt

SEQ ID NO: 574256 - DNA, 954 bp, Homo sapiens
  misc_feature (279)..(279): n is a, c, g, or t
tcccgtgatagcatgctcaatggctactcatgcagcaattccccaggttcgcacaacgggatgtggacttggagctgccgtggtcttagtgagtgtagctagatgggtattctgctggtaggactgttgctgacagtagatttgccagcgtggttgcaagctggcatccgtgatatccatcgagagtgacgatttagggacgcagaacagaagttagcaggtcatgacaagacccaatcggagccgatggtaggataggaagtagcgtagtgagtccangtgccatggagcactccgtcgcagtatcatcgttttgatagaaggccatgtcgcttttgcgcgccgttgctgtcagttgaacaatgacaattcgcgaatatatgagcagtgtttgcccaagaccctgtcagcgagagtcgtgcgcgctcttgtacaagactttgcatgattgccacttgccaggagaatccagggagtgagaagacatagagccaccaagttccacgtgtgcctaggctggggaggagacagtgcccaccaagtgatggggcaatgctggttaatatcaacttcgtacatgaaccatagtcgcattcgaatttggaacgcttgcttagtgggcattacatggtggggcttggagtggggggctccattggctgtttgacaaagttgcatggtggttggacgcctgcccattgggagccctcttggtcttcgccttggcaggcgataggggggtggcaggcctttgggctccctaagcgaaagtaggggtgatccccagggtgtgatggtccggctccgaacaaggacgccgtggcgtcccaattctcgttccccaacgtccatggaaccatcaaggtcttccaacggggttatcaggttggggaccttcctaggaaggaggggggggttcaacggtggttcgccaaaaaaattacataaaagaaa

SEQ ID NO: 574257 - DNA, 347 bp, Homo sapiens
aataaaatctgggggattttctaaggtggcaattatgttgtttgcaaataaggacaattttatttcttccttcctaatctggatatcttttatttatttttcttttcttattgctccctttcttttttaaatttttttattttattatgaatataccttaagttttaaggtacatgtgcccaacgtgcaagtttggtacataagtatacatgtgatgttgaataagaatggggagcatggtcattgccttattcccaacattacaaggaaaagcgtcaatctcttatcattaaaatatggtgccagctgtggtgattttacaaatgccccttatcgggttgaggctt

SEQ ID NO: 574258 - DNA, 1060 bp, Homo sapiens
  misc_feature (238)..(239): n is a, c, g, or t
cggccgcccttttttttttttccctctgattcactttgccatgtttccttcacatccagatccctgtcggtgttagttccactcttggtctttcacgctccccttgcctgtggaacattgtctggtcctagctgtggttcccattgttcccccttcacccttctctgttaaccttgtgcctgtctcctgtatgatcacatcaccaaaaagggggaggggggagaagactttttttttnngccatttggtaatcgtttaaaaattagtagacaacgtgcttaagtggtgtggggttttttcacaattttaaacattaggtgattttataaccgtgttgtgcaagtttaaagggttggtcatgtgtttctttaaaaaaaaattacaataagtgccccatattccctatgtgcattaaaggtgcttctctcatattaaataaggtttgacacatccgtgacatacaccctttaagcctttgaaaaaaaacacaaaaacaaaaagtgggaacaaaaaaccctgtgtatttggcgcgacacatatatacctttccctggattaggagagctgtgtacatgggcagcgaaacctgtgtacgcctgactatggacacctataagaaactcgcttaccctcccaaaaaacgcggatctctgggaaaaggatctagaatccctgtcgcgcaaaagccaacaagacaaagagcttaaaaaaaaaccagaagagcaaactctgccacacattaacaagaacgaggtccaccgaaaaacaaaacgaacaacaaaggggcggagcaaccaagagaacaccccaggggcgcccagatattaccgacaccccgagcatctgtcgcacaaaaggtggcccaataaacaacacccaaataaagcgaggggatcgacgcgccgataaaaaaaccaccatgggaaaactggcgactgggactcttgtcaagaacgacacaaggggagcgacaaacggaacacagacaaaagaaaacacaggcaaaaacaaagcacagaggacaagcacagcaggaaagaggaccaaacaatagcgacaa

SEQ ID NO: 574259 - DNA, 332 bp, Homo sapiens
ctggttaggctgcagtgcattccagcctgtgctactagagtgaatctgtctccaataaaaacaaaaaacaaaacaaataaaaaaaacaggctgggcacagtggctcatgcctgtaaacccagagctttggaaggccaaggcgggtggatcgcttgaggccaggagttcaagatcagcctagccaaaatggtgaaaccccctctctactacaaatacaaaaattagctgggtgtggtggcatgcacctgtagtcccagctactcgggaggctgaggcaggagaattgcttgaatctgggagatggaggttgcagggagccgagattgcgccac

SEQ ID NO: 574260 - DNA, 375 bp, Homo sapiens
  misc_feature (238)..(239): n is a, c, g, or t
cggccgcccttttttttttttccctctgattcactttgccatgtttccttcacatccagatccctgtcggtgttagttccactcttggtctttcacgctccccttgcctgtggaacattgtctggtcctagctgtggttcccattgttcccccttcacccttctctgttaaccttgtgcctgtctcctgtatgatcacatcaccaaaaagggggaggggggagaagactttttttttnngccattttattaccttctcacataatttcacatctgcttaaggttgggttttatatcatattctacattagtgattttttttttcgtaggtcgtcaatgtcttgtcattgttcattctataataaatcatttctgc

SEQ ID NO: 574261 - DNA, 202 bp, Homo sapiens
atctagcaggatccttgagctcaatgtgatcctctgcttcgaataatcttcctatggcagggcctggtggctcatgcctgtaatcccagcactttgggaggcaaggcaggtggatcacaaggtcaggagttcaagaccaccctggccaaccctggttgaaaaacccctatctctactaaacgggatacaaaatattagctat

SEQ ID NO: 574262 - DNA, 102 bp, Homo sapiens
agtagagagggaatgtggtgcttgacacccttagtttactgccttcaacacaatggacagtgagagggaaaaaaacactagacaccagcaggtgcagccagt

SEQ ID NO: 574263 - DNA, 1040 bp, Homo sapiens
  misc_feature (1029)..(1029): n is a, c, g, or t
gttctagatcgcgaacggccgccctttttttttttatgtgcatatgcggcttatatttcgggtaagggatacccggaaaccgtaagatgataatagctaatgacagaaggtaaaacatgaggcatcagtttctctaaccacgtcctacaaaaatgtgtaagataggttattgggtcagtaacagtggtttactttggatattggtctcatttagtacatagtgtcatattaattaatgtggtagaattacggctaagtagggtgatccgtgcattttcaggttaagcgggtagggtggaaaagtccagaatttcctcattggaggaaacagagctccttgaggaacactccactaagcgagaagcaggggacttctgtgcgagtctctcctcgatgtttacaccacgtgtggtcaccaagagaagtcgagaaacaaacgtactgtagcgttgcacgagaggggaaatctcagacgtgagtctcactggtggggggtgcacacagtgttcattattcccgagtggtgtgaagtggaacgagtcccgtggggcgcgcgtggcgatcaaaatctcgccccccttcatagagaagtttttggggcggggatatcacatctcccgtatagggacagtgaaaatttctcaaggcactgtgaccgagcgaaaacatctcgtggagggggggccatacaagaaataatgtcttccaagtggccaagagttttgtcccgaaaacaacgcccgatattaaaaagcggatatgtttgtgggcgcttatttcaagtgttctaaagacagccaccaaaaacacttatatttgagatttttagagagcagacctgtgatcttacaaaaaagggggaactgacgcaggtggttaataagaattgtggggctacaacacggcctctcccgatgaaaaacggcttatttacaggatggggtcgcaccagatgtgtttcccccctcttgtgtgaaaccccgaggggctctcggaaattcccctcagaggggggtctatctccatacnacttttcccca

SEQ ID NO: 574264 - DNA, 226 bp, Homo sapiens
ttggtgctcatcccccgggatcggcatggctgctcggtccagtgcgacaggcaggggcacggcggaatgtgtgcaggcaggagaagagccacgttctgcttctgggttgtgaggcttccggtcacagtgtctgggcggtccccaggtttctcaagccactggcccgggtggcacctggcccgctcctactcccttgcaggagagggcttgcgttcaggaaaccttc

SEQ ID NO: 574265 - DNA, 772 bp, Homo sapiens
cctgaagaaatgaaaggaaaacaaacagaaacacagacccccaacaaaaacaaaaaaacaccaaaaaaaacaacaaaaacaaacaaataaaaacacacagagagccacgaaggaaggtggcggaggggagagggagacagagacggccgcggcaacgcaacgcgagggacagcgccgggggcggccacgagcggcaggcaagccaacacgcacaactggcacacaggacagcacggaagagccgcacgaccgacaggaaaccgaaagcagacggccggacggcgccacgagcggccgccgagcgcaacacaacacagacgaacacacgaagcagacagccaggatcggacgcccgcgcagacggcgcgacgcgccaaggagcagacaaccgcaaaccgcgaacgcagccaccgaaggcagcccacgacggcacggccagagcaacagacgacacacgggccacggacacaacacgagcagccaaccaagcagcacagcgccaggccacacacccacacccacccctccgcgaagagcgccaccacgcgagaccgagcaccgacgaactcgcgaccaacggagacacgtaaacgacgcaacgacacaccacaagaacgagtcagcaaccaacggacaaaacaacaaaccaacaacagccgacagccaaccagcgccaacaccacagcaacaccggccgatgcgagacagcatgacaaacgaacgcgcgcacagcgaccaaccaagccacagcacgaccagcacatacacgcca

SEQ ID NO: 574266 - DNA, 205 bp, Homo sapiens
gtgtggtccgatacgaattgctactccgcctccaaagtgctgggattacaggtgtgggcgctacacctgtaatcccagcactttgggagggcaaggcaggcggatcacctgaggtcaggagtttgagaccagcctcaccaacatggaaaaaccccatctctactgaaaaaatacaaaattaaccaggtgtgatggcacattcctg

SEQ ID NO: 574267 - DNA, 349 bp, Homo sapiens
gagctgacctagaggatcccgctcccacaagaaggttattttaagaaaagaaactgagaggagcttctgtctgagttaggtcagagaccactctcttacagactaagaggttttcttcttttggtttgcttggaatgagatagagtccacactctcacctgggatggagtgccatggcgagaacttggctcactgcaaactccgcctccccagttcacgccaatctactggctcagcctccaaatagctgggattacaggcacacaccaccacaccaggctaaattttagtattttcagtaggcattgggtttcactattgttggacagacctggtctcgaaactcctg

SEQ ID NO: 574268 - DNA, 176 bp, Homo sapiens
cgttgttgcactactcatagacattagttcctgaaacaatagtttgcatgcgtacggcattcgctaccatagaaatctgggttttattgcggtcagcccctgcattcattatgtatgggtcctggtgttggccatcgccattattccacaaagattgcaaacataaacctgggcaa

SEQ ID NO: 574269 - DNA, 144 bp, Homo sapiens
cacgagggttcccaacacattggatcacgacatttgggcatacattcgaggcagaatctccctccgtcagtgatgccacccccatgcttatcctcatatcccacaggcactcaccactccaggaacaacgatagcaggccatca

SEQ ID NO: 574270 - DNA, 342 bp, Homo sapiens
cactttacacctggtgtccactggcttgctacgtcttcttcctcttctgggctggacactggcctgtggctggggttactgttccctattgaaacagcacagcacctgggtcagcctggaccctactcgccctgcataactactgtgaatgcccaaccgattccttcactccagtgtgtggggcagatggcatcacctacctgtctgactgctttgctggctgcaacagcacgaatactcacgggctgtgcgtgcctcaccaacgtacatgctgagaacgacaacgaggatcctaagaaaatactccactcaaccacacaacacgtgtgtcactcggggcat

SEQ ID NO: 574271 - DNA, 258 bp, Homo sapiens
gaagcagctgtggttcccatcaaactacgtggaagacgatggcaaccccgtgccctggagccggagagggagcacttggacgagaacagccccctagggactttcttcggggggttttggatgttccgccttttcagattgccatccgtctgagggcaagaacaaccggcttttgtcttctcatcagcatggcgtcggtggccactggtccttgatgttgctgccgacttacaggaggagctgcaggactgggtaaaa

SEQ ID NO: 574272 - DNA, 708 bp, Homo sapiens
cacggttacctttttcaactcatttttatcgaacggaacccatcgggacaaatagggctatctatcaggccaccgcccacttcacatagcaaacaattcagaccactaccacatgtaaatcgtcatcaaacgaaaatactttctcaaatcatcttacttaatacagtttctaacgccaccactcactaaccactcacttcccactaccacatttttcacactattcccattatactgcgatcagtagacttaacacttcctaccttccgaaacacttaatccagtcacaacgccaattgcctgcattcgtccaactacagatccgcccatttacaatacactcccccaaccctacataactcttaattcgctatcagcatacattctctcgacctacgctgcttccactcaatccctactcatcaacctaattcccactgcgccctgtataaaagacattaacccaaggtgattaaaagaccttgaaatccatgacgcagggagaattgggtcatttaaggctagttaacgcatttactaaacgcagacgataatggaagattaattggcagtagtaagatgaaacaattttgagaacatagaaacttggacagtgaatactggatactccagatctgcgaagctaaacgatcgcgcacctcagagaaacttcacaggttatatcatacttttttgtcacaatacttc

SEQ ID NO: 574273 - DNA, 411 bp, Homo sapiens
tgaacacccatcgaatagaaataatggacctcacaggaagaaacagtatggataccatacacaggcttccagaggccaggcccagtaattcaccatgagacagaagcctacaggtggcggtgcttggacggggcggggattatggatacattacggatacttcacttcttctataagcatatgtaaaaggagtgctacggaaagtggaaggcacagcttccggggagtcatgaactcttccactaatctcatccggtgaactccttgctgcggggcctgggggctacggcgggatcaaggcgtggaagaacctctaaggagtgcctatctggagctcaccgggtgagctatggctcggcgaggtgtaatccttcctggatctggctcagagctggtcggccgtcctcagag

SEQ ID NO: 574274 - DNA, 827 bp, Homo sapiens
ggagacaggtcgtgttcgctgtgcagtgccggtgttgcagggagtgagggcagctggagtgcgttctgccgaagcttgtggttgcacgcccatcgtcttaggggctaccttccgtgaccagtgtccgaagtctctgaagaagttggtggaggagagccgggagaagaaccagcccgaggtggacatgagtgacgcggggcatctccgaacgatgctggatgtcgaacgggcgtcttgaccttatcccatatctagggacaactggtccgtcagccataacaagctaacaatggtgccagcgaacatcgcagaactgaagaatttggaggtgctcagagcttttttaagtaaccaaatcgaggagctgcccacacaatgatcagtagcgcttcagaaagtcaaacgaccgtgaaccttggcatgaacaggctgaacactgttgccacgaggctacggctccctgccagctcttgaggttctggacttgacgtacaagaactggagcgaaaattctcttcctggaaaattcttcgtaccgtgaccgaccctgcgtgcgactctatctgaaagttgacaacgatttcgggacatcctggccggcagatcattgggggaacgctcaccaacagttgcagatactcagggcttgggggattacgacctggtctcgttgcctaagaatccggggagcttaccaagttaaggagctccaccttcagggaagcgctacacccgttttggcccccaaattaggaacttgggcttaaccggccagagccgtattcacagcgaaaacaccctggtggcccccttgggacacctccctg

SEQ ID NO: 574275 - DNA, 231 bp, Homo sapiens
tgaaccgggtacaggaggatccctagagtgagcaggctcagtctaaacgatattcggcggtcagcacggctgctcacgtgtcgacggaacttgtacagggccggcatgcaccgcagtgggtgaatagacgtcgaccaggctccagctaaccgatattcggcggtcacgcacggtgctcatgtgtcgacggaactagtacagggaggcatgcacccgcagtggtgaacacac

SEQ ID NO: 574276 - DNA, 3613 bp, Homo sapiens
  misc_feature (2)..(2): n is a, c, g, or t
  misc_feature (8)..(8): n is a, c, g, or t
  misc_feature (3611)..(3611): n is a, c, g, or t
tngggcgngaggtccggacactggcggccatggaactcaccggtaatagaggacacatctcttaactgggttgctctaagaactgatgtctaaaccgtctcagcatggcctgtagaggaggagctgggaatggccaccgtgcctcagctacactctctcgggttagccctggaagtctttacacatgtagaacccgtacccataatatatgcatggtatctgactttttctacccaaatatgggaggcgtggaaagccacatttaccagctctctcagtgcctgattgaaagagggcataaggttataattgtcacccatgcttatggaaatcgaaaaggcatccgttacctcaccagtggcctcaaagtctattacttgcctctgaaagtcatgtacaaccagtctacagccacgaccctctttcacagtctgccattgctcaggtacatatttgttcgggagagagtcacgataatccattcacatagttctttttctgctatggcccatgatgctctcttccacgccaagacaatggggcttcagacagtcttcacggaccattccctttttggatttgctgatgtcagctcggtgcttacaaacaagcttctaaccgtgtctctttgtgatacaaaccacatcatttgtgtgtcttatactagtaaggaaaatactgtactaagagcagcactgaatcctgaaatagtgtccgtcattcctaatgctgtagatcctactgacttcactccagacccatttagaaggcatgatagtataactattgttgttgtcagcagacttgtttacagaaaagggatcgatttgcttagtggtataatacctgaactctgtcagaaatatccagatttaaatttcataattggaggagagggaccaaagagaatcattttggaagaagttcgggaaagataccagctgcatgacagggtgcgtcttttgggagctttagaacacaaggatgttagaaatgtcttagttcaaggacatatttttctgaatacctcccttactgaagcattctgcatggcgatcgtggaagcagccagttgtggtttacaggttgtaagtaccagagttggtggaattcctgaggtgcttccagaaaaccttattattttatgtgagccttcagtaaaatctttgtgtgaaggattggaaaaggctattttccaactgaagtcagggacattgccagctccagaaaacatccataacatagtaaagactttctacacctggaggaatgttgcagaaagaactgaaaaggtatatgaccgggtatcagtggaagctgtgttgccaatggacaaacgactggacagacttatttctcactgcggcccagtaacaggctacatctttgctttgttggcagttttcaacttcctcttcctcattttcttgagatggatgactccagattctatcattgatgttgcaatagatgccactgggccacggggtgcctggactaataactattctcacagtaaaagagggggtgagaataatgagatatctgaaaccaggtagaaggaagcctagattgtaagattttaaacatttgtaatagttctataaagactatggaaaataaccttgcttttggggggtttttgtttttttagagttaatttagtaagttatgctacctctatatcattcaatattttctgttgaggaaagataaaaatgtatgcaattcctgagtgtagaaacttcttgcacttatttaaaatttaggagagaacatttaagccactcaggtatgcaatttttcagactactgaaatccctgtagcagagatgttttaacattatattttgagagctttgggtgctgaagggccaaacgttttctgggcattttttggccagtttttaatgtaacaccattagacactcaccagatgtttacaagttttctttaggggaactacaacaattatatgaactgttttatatcatgttcatatacatttattaggaatctaaatcatgtctttgaacatttattaggttcactcagtaggtgttacatgtaattaacaggttccttgagtaagatagtccatcagttaccagcacattttgaacccctgctctgtgtagaatgttgaactagatgcttcccgccattaaggaccaggggtgcattcactctttgtttaccattcaaatggcttacttcatcataattgtggttgatatgagatcaatatccaacatgccaaaaatgctcatgccagttaatgccaggaaaaaaatcaccgacacactactagtactttgttcctgttgtatgcattctcctaggtagagcctccatcttcagttgtgtttgtgaaggtattttttgctttttaaatactggggaccgatatcactgttgatagtgcagagaaaccctccacatttttcagtgcataattgagttttctataaatgccttcgtgttttctgagcagaatgtacgaggtgtgccatcccaaaaccagctgctaccctgtccttttaatgtaagtcactccccttcactgtggcctcgctgatgtctgataagtattgtcagtgtgcaaaaggctttacttcagaatggtttatttatagcaaactaagttgaaaattttagaaacagtctttgtgggtggatgttattaactgtcattgttgttgcccagagccatgggttttttaaccccaaattatccacatggtgtgtattatgaattctttgaactcttaaggtttttgtgagaaaaggactgtgaattcaaaacaataaggcacttgtgggtgcactacatagattctgacagtgttgtgattctgtataggatttttaaaaatgacaacattcacaaaatttattactttttaaaaaataacatgcctattaactggttgcactgatataaaagaaatatatttgtgttttgtttgtactaaaatgcaaaagcaagagtgcaatttttaaaatctagaagttaggggttttgttggagaaaaatggactgatctttaaactattcagtcttactgggatttttatgcatagaaactcacatataaacatgaaataaacagtgccagtattcataggaaagtgagaaactgtaatatttggccattattctattcaacaggttttagaggcatgccaccattttttccttatatttttgcttaatttttttaaattgtcatttaattcttaaactgtcatttatttgagatggaaataagatctaaagttagttgcctttgcctgtaaaacatgtgatttgcaaattattatttttctttttttttaacaaatggaagtaaatttgtttcacgtaaatcttaattttcaacctttctggataccttaattgtaactgtcagtttgcactggtcggtatatggaaacacattgctctaccctgctacttagttgattttaaagtgaatttacagtgatgagaaatttgtgaaaaatatattgtatttcttttgatgtttcaaaaggttgcctatgaaaaactgatttgttaaaacatgctacatgtccaaaaataaagaccagaatgacattttgataanaa

SEQ ID NO: 574277 - DNA, 3239 bp, Homo sapiens
  misc_feature (2)..(2): n is a, c, g, or t
  misc_feature (8)..(8): n is a, c, g, or t
  misc_feature (3237)..(3237): n is a, c, g, or t
tngggcgngaggtccggacactggcggccatggaactcaccggtaatagaggacacatctcttaactgggttgctctaagaactgatgtctaaaccgtctcagcatggcctgtagaggaggagctgggaatggccaccgtgcctcagctacactctctcgggttagccctggaagtctttacacatgtagaacccgtacccataatatatgcatggtatctgactttttctacccaaatatgggaggcgtggaaagccacatttaccagctctctcagtgcctgattgaaagagggcataaggttataattgtcacccatgcttatggaaatcgaaaaggcatccgttacctcaccagtggcctcaaagtctattacttgcctctgaaagtcatgtacaaccagtctacagccacgaccctctttcacagtctgccattgctcagggatcgatttgcttagtggtataatacctgaactctgtcagaaatatccagatttaaatttcataattggaggagagggaccaaagagaatcattttggaagaagttcgggaaagataccagctgcatgacagggtgcgtcttttgggagctttagaacacaaggatgttagaaatgtcttagttcaaggacatatttttctgaatacctcccttactgaagcattctgcatggcgatcgtggaagcagccagttgtggtttacaggttgtaagtaccagagttggtggaattcctgaggtgcttccagaaaaccttattattttatgtgagccttcagtaaaatctttgtgtgaaggattggaaaaggctattttccaactgaagtcagggacattgccagctccagaaaacatccataacatagtaaagactttctacacctggaggaatgttgcagaaagaactgaaaaggtatatgaccgggtatcagtggaagctgtgttgccaatggacaaacgactggacagacttatttctcactgcggcccagtaacaggctacatctttgctttgttggcagttttcaacttcctcttcctcattttcttgagatggatgactccagattctatcattgatgttgcaatagatgccactgggccacggggtgcctggactaataactattctcacagtaaaagagggggtgagaataatgagatatctgaaaccaggtagaaggaagcctagattgtaagattttaaacatttgtaatagttctataaagactatggaaaataaccttgcttttggggggtttttgtttttttagagttaatttagtaagttatgctacctctatatcattcaatattttctgttgaggaaagataaaaatgtatgcaattcctgagtgtagaaacttcttgcacttatttaaaatttaggagagaacatttaagccactcaggtatgcaatttttcagactactgaaatccctgtagcagagatgttttaacattatattttgagagctttgggtgctgaagggccaaacgttttctgggcattttttggccagtttttaatgtaacaccattagacactcaccagatgtttacaagttttctttaggggaactacaacaattatatgaactgttttatatcatgttcatatacatttattaggaatctaaatcatgtctttgaacatttattaggttcactcagtaggtgttacatgtaattaacaggttccttgagtaagatagtccatcagttaccagcacattttgaacccctgctctgtgtagaatgttgaactagatgcttcccgccattaaggaccaggggtgcattcactctttgtttaccattcaaatggcttacttcatcataattgtggttgatatgagatcaatatccaacatgccaaaaatgctcatgccagttaatgccaggaaaaaaatcaccgacacactactagtactttgttcctgttgtatgcattctcctaggtagagcctccatcttcagttgtgtttgtgaaggtattttttgctttttaaatactggggaccgatatcactgttgatagtgcagagaaaccctccacatttttcagtgcataattgagttttctataaatgccttcgtgttttctgagcagaatgtacgaggtgtgccatcccaaaaccagctgctaccctgtccttttaatgtaagtcactccccttcactgtggcctcgctgatgtctgataagtattgtcagtgtgcaaaaggctttacttcagaatggtttatttatagcaaactaagttgaaaattttagaaacagtctttgtgggtggatgttattaactgtcattgttgttgcccagagccatgggttttttaaccccaaattatccacatggtgtgtattatgaattctttgaactcttaaggtttttgtgagaaaaggactgtgaattcaaaacaataaggcacttgtgggtgcactacatagattctgacagtgttgtgattctgtataggatttttaaaaatgacaacattcacaaaatttattactttttaaaaaataacatgcctattaactggttgcactgatataaaagaaatatatttgtgttttgtttgtactaaaatgcaaaagcaagagtgcaatttttaaaatctagaagttaggggttttgttggagaaaaatggactgatctttaaactattcagtcttactgggatttttatgcatagaaactcacatataaacatgaaataaacagtgccagtattcataggaaagtgagaaactgtaatatttggccattattctattcaacaggttttagaggcatgccaccattttttccttatatttttgcttaatttttttaaattgtcatttaattcttaaactgtcatttatttgagatggaaataagatctaaagttagttgcctttgcctgtaaaacatgtgatttgcaaattattatttttctttttttttaacaaatggaagtaaatttgtttcacgtaaatcttaattttcaacctttctggataccttaattgtaactgtcagtttgcactggtcggtatatggaaacacattgctctaccctgctacttagttgattttaaagtgaatttacagtgatgagaaatttgtgaaaaatatattgtatttcttttgatgtttcaaaaggttgcctatgaaaaactgatttgttaaaacatgctacatgtccaaaaataaagaccagaatgacattttgataanaa

SEQ ID NO: 574278 - DNA, 158 bp, Homo sapiens
  misc_feature (52)..(52): n is a, c, g, or t
  misc_feature (149)..(149): n is a, c, g, or t
aggtgttctacagagaactcttctattccattcccgcagctccacttgatgncatgaaacatgggcttcagctgtgcccaacaactcctaccgggagccacttcagccgactctccgacggtccgctgcctgatgggaaccaaaagatnggggctgca

SEQ ID NO: 574279 - DNA, 2958 bp, Homo sapiens
  misc_feature (2)..(2): n is a, c, g, or t
  misc_feature (8)..(8): n is a, c, g, or t
  misc_feature (2956)..(2956): n is a, c, g, or t
tngggcgngaggtccggacactggcggccatggaactcaccggtaatagaggacacatctcttaactgggttgctctaagaactgatgtctaaaccgtctcagcatggcctgtagaggaggagctgggaatggccaccgtgcctcagctacactctctcgggagggatcgatttgcttagtggtataatacctgaactctgtcagaaatatccagatttaaatttcataattggaggagagggaccaaagagaatcattttggaagaagttcgggaaagataccagctgcatgacagggtgcgtcttttgggagctttagaacacaaggatgttagaaatgtcttagttcaaggacatatttttctgaatacctcccttactgaagcattctgcatggcgatcgtggaagcagccagttgtggtttacaggttgtaagtaccagagttggtggaattcctgaggtgcttccagaaaaccttattattttatgtgagccttcagtaaaatctttgtgtgaaggattggaaaaggctattttccaactgaagtcagggacattgccagctccagaaaacatccataacatagtaaagactttctacacctggaggaatgttgcagaaagaactgaaaaggtatatgaccgggtatcagtggaagctgtgttgccaatggacaaacgactggacagacttatttctcactgcggcccagtaacaggctacatctttgctttgttggcagttttcaacttcctcttcctcattttcttgagatggatgactccagattctatcattgatgttgcaatagatgccactgggccacggggtgcctggactaataactattctcacagtaaaagagggggtgagaataatgagatatctgaaaccaggtagaaggaagcctagattgtaagattttaaacatttgtaatagttctataaagactatggaaaataaccttgcttttggggggtttttgtttttttagagttaatttagtaagttatgctacctctatatcattcaatattttctgttgaggaaagataaaaatgtatgcaattcctgagtgtagaaacttcttgcacttatttaaaatttaggagagaacatttaagccactcaggtatgcaatttttcagactactgaaatccctgtagcagagatgttttaacattatattttgagagctttgggtgctgaagggccaaacgttttctgggcattttttggccagtttttaatgtaacaccattagacactcaccagatgtttacaagttttctttaggggaactacaacaattatatgaactgttttatatcatgttcatatacatttattaggaatctaaatcatgtctttgaacatttattaggttcactcagtaggtgttacatgtaattaacaggttccttgagtaagatagtccatcagttaccagcacattttgaacccctgctctgtgtagaatgttgaactagatgcttcccgccattaaggaccaggggtgcattcactctttgtttaccattcaaatggcttacttcatcataattgtggttgatatgagatcaatatccaacatgccaaaaatgctcatgccagttaatgccaggaaaaaaatcaccgacacactactagtactttgttcctgttgtatgcattctcctaggtagagcctccatcttcagttgtgtttgtgaaggtattttttgctttttaaatactggggaccgatatcactgttgatagtgcagagaaaccctccacatttttcagtgcataattgagttttctataaatgccttcgtgttttctgagcagaatgtacgaggtgtgccatcccaaaaccagctgctaccctgtccttttaatgtaagtcactccccttcactgtggcctcgctgatgtctgataagtattgtcagtgtgcaaaaggctttacttcagaatggtttatttatagcaaactaagttgaaaattttagaaacagtctttgtgggtggatgttattaactgtcattgttgttgcccagagccatgggttttttaaccccaaattatccacatggtgtgtattatgaattctttgaactcttaaggtttttgtgagaaaaggactgtgaattcaaaacaataaggcacttgtgggtgcactacatagattctgacagtgttgtgattctgtataggatttttaaaaatgacaacattcacaaaatttattactttttaaaaaataacatgcctattaactggttgcactgatataaaagaaatatatttgtgttttgtttgtactaaaatgcaaaagcaagagtgcaatttttaaaatctagaagttaggggttttgttggagaaaaatggactgatctttaaactattcagtcttactgggatttttatgcatagaaactcacatataaacatgaaataaacagtgccagtattcataggaaagtgagaaactgtaatatttggccattattctattcaacaggttttagaggcatgccaccattttttccttatatttttgcttaatttttttaaattgtcatttaattcttaaactgtcatttatttgagatggaaataagatctaaagttagttgcctttgcctgtaaaacatgtgatttgcaaattattatttttctttttttttaacaaatggaagtaaatttgtttcacgtaaatcttaattttcaacctttctggataccttaattgtaactgtcagtttgcactggtcggtatatggaaacacattgctctaccctgctacttagttgattttaaagtgaatttacagtgatgagaaatttgtgaaaaatatattgtatttcttttgatgtttcaaaaggttgcctatgaaaaactgatttgttaaaacatgctacatgtccaaaaataaagaccagaatgacattttgataanaa

SEQ ID NO: 574280 - DNA, 167 bp, Homo sapiens
tttcagactcgcattcgctgctcttcatgtaatgtgggtcaggtactcctcagcactcgcatgtcgctgcctcttcatgtgaaatgtggcgtcgggtatctctccagcactcgcatgtcgcctgctcttcatgtgaaatggtggcgtctggtgaacccccccgcact

SEQ ID NO: 574281 - DNA, 1006 bp, Homo sapiens
  misc_feature (131)..(131): n is a, c, g, or t
tcccttcagtgccaccacccccggaaggccttccctgacccagccaggaacaaacaagggaccaagtgtgcacacattgtgcttgaaagccgtctctcctgtgtgtgccttcccccgccccatctccccgngtcttcggtgtggtgttttgccaggcttcaggcagaggcgcctgtgttcccgtgcttcttttctgaccgggaaattaaatgtgccccgtgaaggaaaaaaaaaaaaaaaaaaaaaaaaaaaaaaaaaaaaaaaaaaaaaaaaaaaaaaaaaaaaaaaaaaaaaaaaaaaaaaaacaaaaaaaaaaaaaaacaaaaaaaaaaaaaaaaaaaaaaaaacaccaacaaaaaaaaaacagagagtcacaaaacaaatataaaaaatataaaatatcataaagcaaaataataagaacagaaaactgaaacctacacagtaacatcaccaaagagacacaacaccgaacacaacaaaagaaccatataatataaaataatgacacaaacacactatagagtataaaaacacaactacaccacaacacaaataatacatatcatactaaaacaaacatataatagtatcatataacatgtcacaccacagtgagaaatcgaagaaggaaatccagaacacacgtgtcagtgtctgataactaagataaagagagaagaagaaagaagaaaaaagagaaagaaagggaaaaaagaagaaagagagaaagagaaagaagaggggggagggaaaaaaggaataaaggaaatgagaaagtgatcgaggataaggaggggtagcgaaatgcagaagaaggtacatagcgacagagacaaggaagagatgaagactaagctagtctttagaggttatagaacgagcgagtaagatagagaagaaggagatgatagaggaggagagaggggatagatagagaaagagatgatgatagaggtgatacgagaggatgaggagtgtagagggggggtgtgaaagttagggg

SEQ ID NO: 574282 - DNA, 703 bp, Homo sapiens
  misc_feature (136)..(136): n is a, c, g, or t
  misc_feature (247)..(248): n is a, c, g, or t
  misc_feature (250)..(250): n is a, c, g, or t
  misc_feature (282)..(282): n is a, c, g, or t
  misc_feature (378)..(378): n is a, c, g, or t
  misc_feature (480)..(480): n is a, c, g, or t
  misc_feature (501)..(501): n is a, c, g, or t
  misc_feature (625)..(625): n is a, c, g, or t
  misc_feature (639)..(639): n is a, c, g, or t
  misc_feature (643)..(643): n is a, c, g, or t
  misc_feature (651)..(651): n is a, c, g, or t
  misc_feature (668)..(668): n is a, c, g, or t
tgacccagaggattacggatgagggtggaatggtctgggcagaggtcagtccgaaacttcagccctggagtgagctggagctggggcttatcttgctctctttccttatttaacttaatcttgtctttattagttntatagagatagggtctcactatgttgcccaggctggtcttgaactcctgggctcgggaaatcctttcacctcagcctcacaaagtgctgtgattacaggtatgagccactnnanccagctctttcctccttttaaaaacaagaaanctggccaggcacggtggctcatgcctataatctcaataccttgggaagctgaggcaggctgatcacttgaggccaggagttcgagaccagcctggncaacatggtgaaaccctgtctctactaaaaattcaaaaattagctgggcatagaggcacatgcctgtagtcacagctgctcaggaagctgaggcggaagaancgcttgaatccaggaggtggngattgcagtgagccgagatcgtgccactgcgctccagcctgggcaacagagcaagactccatttcaaaaacaaacaaacaaacaaaacaacaaacaaagcgaaattttagggacagatggattnttctctggaatatngacncaaccagncacatatggattgcttngaacagcaggtcagtctgcagtgggaccaatctga

SEQ ID NO: 574283 - DNA, 3107 bp, Homo sapiens
  misc_feature (2)..(2): n is a, c, g, or t
  misc_feature (8)..(8): n is a, c, g, or t
  misc_feature (3105)..(3105): n is a, c, g, or t
tngggcgngaggtccggacactggcggccatggaactcaccggtaatagaggacacatctcttaactgggttgctctaagaactgatgtctaaaccgtctcagcatggcctgtagaggaggagctgggaatggccaccgtgcctcagctacactctctcgggttagccctggaagtctttacacatgtagaacccgtacccataatatatgcatggtatctgactttttctacccaaatatgggaggcgtggaaagccacatttaccagctctctcagtgcctgattgaaagagggcataaggttataattgtcacccatgcttatggaaatcgaaaaggcatccgttacctcaccagtggcctcaaagtctattacttgcctctgaaagtcatgtacaaccagtctacagccacgaccctctttcacagtctgccattgctccagggtgcgtcttttgggagctttagaacacaaggatgttagaaatgtcttagttcaaggacatatttttctgaatacctcccttactgaagcattctgcatggcgatcgtggaagcagccagttgtggtttacaggttgtaagtaccagagttggtggaattcctgaggtgcttccagaaaaccttattattttatgtgagccttcagtaaaatctttgtgtgaaggattggaaaaggctattttccaactgaagtcagggacattgccagctccagaaaacatccataacatagtaaagactttctacacctggaggaatgttgcagaaagaactgaaaaggtatatgaccgggtatcagtggaagctgtgttgccaatggacaaacgactggacagacttatttctcactgcggcccagtaacaggctacatctttgctttgttggcagttttcaacttcctcttcctcattttcttgagatggatgactccagattctatcattgatgttgcaatagatgccactgggccacggggtgcctggactaataactattctcacagtaaaagagggggtgagaataatgagatatctgaaaccaggtagaaggaagcctagattgtaagattttaaacatttgtaatagttctataaagactatggaaaataaccttgcttttggggggtttttgtttttttagagttaatttagtaagttatgctacctctatatcattcaatattttctgttgaggaaagataaaaatgtatgcaattcctgagtgtagaaacttcttgcacttatttaaaatttaggagagaacatttaagccactcaggtatgcaatttttcagactactgaaatccctgtagcagagatgttttaacattatattttgagagctttgggtgctgaagggccaaacgttttctgggcattttttggccagtttttaatgtaacaccattagacactcaccagatgtttacaagttttctttaggggaactacaacaattatatgaactgttttatatcatgttcatatacatttattaggaatctaaatcatgtctttgaacatttattaggttcactcagtaggtgttacatgtaattaacaggttccttgagtaagatagtccatcagttaccagcacattttgaacccctgctctgtgtagaatgttgaactagatgcttcccgccattaaggaccaggggtgcattcactctttgtttaccattcaaatggcttacttcatcataattgtggttgatatgagatcaatatccaacatgccaaaaatgctcatgccagttaatgccaggaaaaaaatcaccgacacactactagtactttgttcctgttgtatgcattctcctaggtagagcctccatcttcagttgtgtttgtgaaggtattttttgctttttaaatactggggaccgatatcactgttgatagtgcagagaaaccctccacatttttcagtgcataattgagttttctataaatgccttcgtgttttctgagcagaatgtacgaggtgtgccatcccaaaaccagctgctaccctgtccttttaatgtaagtcactccccttcactgtggcctcgctgatgtctgataagtattgtcagtgtgcaaaaggctttacttcagaatggtttatttatagcaaactaagttgaaaattttagaaacagtctttgtgggtggatgttattaactgtcattgttgttgcccagagccatgggttttttaaccccaaattatccacatggtgtgtattatgaattctttgaactcttaaggtttttgtgagaaaaggactgtgaattcaaaacaataaggcacttgtgggtgcactacatagattctgacagtgttgtgattctgtataggatttttaaaaatgacaacattcacaaaatttattactttttaaaaaataacatgcctattaactggttgcactgatataaaagaaatatatttgtgttttgtttgtactaaaatgcaaaagcaagagtgcaatttttaaaatctagaagttaggggttttgttggagaaaaatggactgatctttaaactattcagtcttactgggatttttatgcatagaaactcacatataaacatgaaataaacagtgccagtattcataggaaagtgagaaactgtaatatttggccattattctattcaacaggttttagaggcatgccaccattttttccttatatttttgcttaatttttttaaattgtcatttaattcttaaactgtcatttatttgagatggaaataagatctaaagttagttgcctttgcctgtaaaacatgtgatttgcaaattattatttttctttttttttaacaaatggaagtaaatttgtttcacgtaaatcttaattttcaacctttctggataccttaattgtaactgtcagtttgcactggtcggtatatggaaacacattgctctaccctgctacttagttgattttaaagtgaatttacagtgatgagaaatttgtgaaaaatatattgtatttcttttgatgtttcaaaaggttgcctatgaaaaactgatttgttaaaacatgctacatgtccaaaaataaagaccagaatgacattttgataanaa

SEQ ID NO: 574284 - DNA, 888 bp, Homo sapiens
  misc_feature (748)..(748): n is a, c, g, or t
atattcgatcaccgaaatgagagttcttaagtgctaattgacaaacgcgttagcaattcagttagggagtcatctcccttgatgtgtctctctttcctgtcaatgtttcatagacctaatttgcataactcaatgcgggatctaacaattgcccagctgaaaatgttagacagttttaagataacttgtgaagatagtttattttgatgccttgccagtctggggagtatgcctttttatgtagtgttgggtgttttctcttaatgtgctgtgttaataatactttctgaaagaaagaggagagttacccaaaaacttgaatctgaaatgtcttacattaagaatatcttgaatgttgtgtatatattttaaaaagcacttgtggcaaaagtagttggtacatttatttcctaatttatacatgattttcggtgtccaagtatatttgaagtgattaagtaaccagaatgttttaatctaatgtgctgtccatgttatgtagcttgttatggggaaagtgatgccagctgttcctttgcattattctatctgctggtcatatgaaatgttgagcaaagtgtggcaagctgaattgttgtgaggtgggcgtgaggtgcggtcctcatctgactacgtctattggagggccgtgaagagccaggcaagactgaaaattggcgctcgttctctgctgatgttcctgtcttcagcaatcgcgtttttgcacctgtgggccgttcccatgtgnggctccctctggcttcaagcgccttcccttcggttggcggtgttccagacgccctttaaattgcccccccttgtggttggggccccccccggtgggggcccctcagacaccttgggggcctctgtttgggccccccattt

SEQ ID NO: 574285 - DNA, 331 bp, Homo sapiens
ctgagaaagaccttgacgaaaagaagaaagaacctgcaattacatcggggaacagccctgaggcaagagaagaaaggtacttcacagtatagacatatatttatattgaaagtcatagttttacttcctgcatcaattcccctgtctaatgttcccctatttacactccttttttgttttctaatcaaatggaagtagtaaatgtatgtagccatgtattctaatttattttttttttcagattccttgaacatttgagaggtagaggacattgaataaataagaagttatttatatcgtactcaacatgtttaattgaatgggattgctg

SEQ ID NO: 574286 - DNA, 2781 bp, Homo sapiens
  misc_feature (2779)..(2779): n is a, c, g, or t
agaacattagcagcaataagaatttaagtgtaatataaatagcagacttggtttataaattaaatttcttttgtagcatgagttttcactcctttcttcccctctcatttaaaaaatcagggtgcgtcttttgggagctttagaacacaaggatgttagaaatgtcttagttcaaggacatatttttctgaatacctcccttactgaagcattctgcatggcgatcgtggaagcagccagttgtggtttacaggttgtaagtaccagagttggtggaattcctgaggtgcttccagaaaaccttattattttatgtgagccttcagtaaaatctttgtgtgaaggattggaaaaggctattttccaactgaagtcagggacattgccagctccagaaaacatccataacatagtaaagactttctacacctggaggaatgttgcagaaagaactgaaaaggtatatgaccgggtatcagtggaagctgtgttgccaatggacaaacgactggacagacttatttctcactgcggcccagtaacaggctacatctttgctttgttggcagttttcaacttcctcttcctcattttcttgagatggatgactccagattctatcattgatgttgcaatagatgccactgggccacggggtgcctggactaataactattctcacagtaaaagagggggtgagaataatgagatatctgaaaccaggtagaaggaagcctagattgtaagattttaaacatttgtaatagttctataaagactatggaaaataaccttgcttttggggggtttttgtttttttagagttaatttagtaagttatgctacctctatatcattcaatattttctgttgaggaaagataaaaatgtatgcaattcctgagtgtagaaacttcttgcacttatttaaaatttaggagagaacatttaagccactcaggtatgcaatttttcagactactgaaatccctgtagcagagatgttttaacattatattttgagagctttgggtgctgaagggccaaacgttttctgggcattttttggccagtttttaatgtaacaccattagacactcaccagatgtttacaagttttctttaggggaactacaacaattatatgaactgttttatatcatgttcatatacatttattaggaatctaaatcatgtctttgaacatttattaggttcactcagtaggtgttacatgtaattaacaggttccttgagtaagatagtccatcagttaccagcacattttgaacccctgctctgtgtagaatgttgaactagatgcttcccgccattaaggaccaggggtgcattcactctttgtttaccattcaaatggcttacttcatcataattgtggttgatatgagatcaatatccaacatgccaaaaatgctcatgccagttaatgccaggaaaaaaatcaccgacacactactagtactttgttcctgttgtatgcattctcctaggtagagcctccatcttcagttgtgtttgtgaaggtattttttgctttttaaatactggggaccgatatcactgttgatagtgcagagaaaccctccacatttttcagtgcataattgagttttctataaatgccttcgtgttttctgagcagaatgtacgaggtgtgccatcccaaaaccagctgctaccctgtccttttaatgtaagtcactccccttcactgtggcctcgctgatgtctgataagtattgtcagtgtgcaaaaggctttacttcagaatggtttatttatagcaaactaagttgaaaattttagaaacagtctttgtgggtggatgttattaactgtcattgttgttgcccagagccatgggttttttaaccccaaattatccacatggtgtgtattatgaattctttgaactcttaaggtttttgtgagaaaaggactgtgaattcaaaacaataaggcacttgtgggtgcactacatagattctgacagtgttgtgattctgtataggatttttaaaaatgacaacattcacaaaatttattactttttaaaaaataacatgcctattaactggttgcactgatataaaagaaatatatttgtgttttgtttgtactaaaatgcaaaagcaagagtgcaatttttaaaatctagaagttaggggttttgttggagaaaaatggactgatctttaaactattcagtcttactgggatttttatgcatagaaactcacatataaacatgaaataaacagtgccagtattcataggaaagtgagaaactgtaatatttggccattattctattcaacaggttttagaggcatgccaccattttttccttatatttttgcttaatttttttaaattgtcatttaattcttaaactgtcatttatttgagatggaaataagatctaaagttagttgcctttgcctgtaaaacatgtgatttgcaaattattatttttctttttttttaacaaatggaagtaaatttgtttcacgtaaatcttaattttcaacctttctggataccttaattgtaactgtcagtttgcactggtcggtatatggaaacacattgctctaccctgctacttagttgattttaaagtgaatttacagtgatgagaaatttgtgaaaaatatattgtatttcttttgatgtttcaaaaggttgcctatgaaaaactgatttgttaaaacatgctacatgtccaaaaataaagaccagaatgacattttgataanaa

SEQ ID NO: 574287 - DNA, 1598 bp, Homo sapiens
  misc_feature (760)..(760): n is a, c, g, or t
  misc_feature (1246)..(1246): n is a, c, g, or t
ttcgtgtttgtcggtctcgtgtggtgcgacgtcggtgtgctgtttgtgtgttcgtcgatgttctgttgtcgtctggtggttggtgtttctgtttcgtggttgtgtctgctggtgtgtcgtggtgtgttttggttggtgtgttggttggtgtgttgtgtgtgtgtgtgtgctgtggcgtctgttgtgcgtgtcttggggcgggtgcggggggggttggtggagaggatagtttttgtgccccccctttctccgtggaagcccctcccccccggtggttgtgcccccgctgatagagcccgcggggctctatccccctccgcgggtttttttggttctcttggcccgcgggggggggtgataacctgtttttcccccccagcagccctcgttgtgtgccccccttgtggctcctcttcttgttgggggccccccccctattgtagagcacgcacgggtgctgcccccacagagacccgcgcgcgctggggttggtccccggttccctgcggatttcttcctccgcggggctgtttttgtgtcgtcaccccacgacggtggtctcccccgcgtgttttatgggcgctttcttctggggagcccccccgcgctttttttgggcgcccagcacgccagtgggcgcccagggtgttcctcatgtgggggtcccgctctccgttgtcgctgccgcagccccctcgtgtctcccgcgcagttggggcgcgcgcacggacaagtgggggttttcaccgggtgcccctcntcgtgtgtctgccacaggagtgtcgcgaggagtgttttctcttataaaaggggggggagaacaccccccacgtgttctcttttgggaacacatatcggcgtgttgtccccacagagagtgccgccccccccaagataggggcgcttttataataatgagtttctcgcggcgcccccactcatatgtcgcacaagggcgcacattgagtgtggcgcacacttttctctcagaagggtgtttttcacaggcgcgcttctttttagaagcccccccagagagaggtgtttatagtccccccacagagtgtccgcacacacagagaggtgtctacacccccgcgcacagagtgtgtgtgtgtgtggacgttttgcgcgcgcactcatatgtgcgcgcccccccccacacactcttgtgggaacacgcgtggtgttttgttgcgcccccgtgttttttcctcacacagagagggtgtatacacggtgtgtntttctcgcgcgcgcacacataggcgccacagtgcgccacactagtgctcacactggcgcacacagtgccacacagagtgtgcctctctcctccacaggcgccccgcgcgttctccgccccacaggtttatttgttcacagcttcacaggggtgtgcccacaccgtgttcccgcgcgccctcatcacaaagaggtttctcagagagtgagaagaagttttttctccacacacagagggagcacacaaagagggttggtgggcacgcccccccacccccccccctcgggggtcccttttccttgggggtggggtttttttttttttttttttccccattacccctgggccggga

SEQ ID NO: 574288 - DNA, 257 bp, Homo sapiens
gccaccgaggtacctgtgtcctgggagagcttcaacaatggctgactgcttcatcctgtgacctggtgcaacaacactccaccatgtggtgttggttccaacatgcacatcggtatgaaacgactgaatgtgccacacatgtgtgtccaagtggcataccggtgacaactgagctgtgagtggccttggccctgagttgcacgtgtactgagtgagggcacttgagccctgatggcgatgctccagtgtgcttgggc

SEQ ID NO: 574289 - DNA, 3553 bp, Homo sapiens
  misc_feature (2)..(2): n is a, c, g, or t
  misc_feature (8)..(8): n is a, c, g, or t
  misc_feature (3551)..(3551): n is a, c, g, or t
tngggcgngaggtccggacactggcggccatggaactcaccggtaatagaggacacatctcttaactgggttgctctaagaactgatgtctaaaccgtctcagcatggcctgtagaggaggagctgggaatggccaccgtgcctcagctacactctctcgggttagccctggaagtctttacacatgtagaacccgtacccataatatatgcatggtatctgactttttctacccaaatatgggaggcgtggaaagccacatttaccagctctctcagtgcctgattgaaagagggcataaggttataattgtcacccatgcttatggagtcatgtacaaccagtctacagccacgaccctctttcacagtctgccattgctcaggtacatatttgttcgggagagagtcacgataatccattcacatagttctttttctgctatggcccatgatgctctcttccacgccaagacaatggggcttcagacagtcttcacggaccattccctttttggatttgctgatgtcagctcggtgcttacaaacaagcttctaaccgtgtctctttgtgatacaaaccacatcatttgtgtgtcttatactagtaaggaaaatactgtactaagagcagcactgaatcctgaaatagtgtccgtcattcctaatgctgtagatcctactgacttcactccagacccatttagaaggcatgatagtataactattgttgttgtcagcagacttgtttacagaaaagggatcgatttgcttagtggtataatacctgaactctgtcagaaatatccagatttaaatttcataattggaggagagggaccaaagagaatcattttggaagaagttcgggaaagataccagctgcatgacagggtgcgtcttttgggagctttagaacacaaggatgttagaaatgtcttagttcaaggacatatttttctgaatacctcccttactgaagcattctgcatggcgatcgtggaagcagccagttgtggtttacaggttgtaagtaccagagttggtggaattcctgaggtgcttccagaaaaccttattattttatgtgagccttcagtaaaatctttgtgtgaaggattggaaaaggctattttccaactgaagtcagggacattgccagctccagaaaacatccataacatagtaaagactttctacacctggaggaatgttgcagaaagaactgaaaaggtatatgaccgggtatcagtggaagctgtgttgccaatggacaaacgactggacagacttatttctcactgcggcccagtaacaggctacatctttgctttgttggcagttttcaacttcctcttcctcattttcttgagatggatgactccagattctatcattgatgttgcaatagatgccactgggccacggggtgcctggactaataactattctcacagtaaaagagggggtgagaataatgagatatctgaaaccaggtagaaggaagcctagattgtaagattttaaacatttgtaatagttctataaagactatggaaaataaccttgcttttggggggtttttgtttttttagagttaatttagtaagttatgctacctctatatcattcaatattttctgttgaggaaagataaaaatgtatgcaattcctgagtgtagaaacttcttgcacttatttaaaatttaggagagaacatttaagccactcaggtatgcaatttttcagactactgaaatccctgtagcagagatgttttaacattatattttgagagctttgggtgctgaagggccaaacgttttctgggcattttttggccagtttttaatgtaacaccattagacactcaccagatgtttacaagttttctttaggggaactacaacaattatatgaactgttttatatcatgttcatatacatttattaggaatctaaatcatgtctttgaacatttattaggttcactcagtaggtgttacatgtaattaacaggttccttgagtaagatagtccatcagttaccagcacattttgaacccctgctctgtgtagaatgttgaactagatgcttcccgccattaaggaccaggggtgcattcactctttgtttaccattcaaatggcttacttcatcataattgtggttgatatgagatcaatatccaacatgccaaaaatgctcatgccagttaatgccaggaaaaaaatcaccgacacactactagtactttgttcctgttgtatgcattctcctaggtagagcctccatcttcagttgtgtttgtgaaggtattttttgctttttaaatactggggaccgatatcactgttgatagtgcagagaaaccctccacatttttcagtgcataattgagttttctataaatgccttcgtgttttctgagcagaatgtacgaggtgtgccatcccaaaaccagctgctaccctgtccttttaatgtaagtcactccccttcactgtggcctcgctgatgtctgataagtattgtcagtgtgcaaaaggctttacttcagaatggtttatttatagcaaactaagttgaaaattttagaaacagtctttgtgggtggatgttattaactgtcattgttgttgcccagagccatgggttttttaaccccaaattatccacatggtgtgtattatgaattctttgaactcttaaggtttttgtgagaaaaggactgtgaattcaaaacaataaggcacttgtgggtgcactacatagattctgacagtgttgtgattctgtataggatttttaaaaatgacaacattcacaaaatttattactttttaaaaaataacatgcctattaactggttgcactgatataaaagaaatatatttgtgttttgtttgtactaaaatgcaaaagcaagagtgcaatttttaaaatctagaagttaggggttttgttggagaaaaatggactgatctttaaactattcagtcttactgggatttttatgcatagaaactcacatataaacatgaaataaacagtgccagtattcataggaaagtgagaaactgtaatatttggccattattctattcaacaggttttagaggcatgccaccattttttccttatatttttgcttaatttttttaaattgtcatttaattcttaaactgtcatttatttgagatggaaataagatctaaagttagttgcctttgcctgtaaaacatgtgatttgcaaattattatttttctttttttttaacaaatggaagtaaatttgtttcacgtaaatcttaattttcaacctttctggataccttaattgtaactgtcagtttgcactggtcggtatatggaaacacattgctctaccctgctacttagttgattttaaagtgaatttacagtgatgagaaatttgtgaaaaatatattgtatttcttttgatgtttcaaaaggttgcctatgaaaaactgatttgttaaaacatgctacatgtccaaaaataaagaccagaatgacattttgataanaa

SEQ ID NO: 574290 - DNA, 890 bp, Homo sapiens
  misc_feature (161)..(161): n is a, c, g, or t
caatttaagctgctttcgatttcagctaaccaaggatcacaggtgccctctacacataacactgaccagacccataacattaccatcaccaatcttcagtgcacatcctcatccaccatggtcaacaatggaaccagcttccattgtgtcaactccgcatnacaacacattctctttcagggaccatttttcatcaaacgtccacctgtcctccatcagtccctcatccttttctccagcatttcccatttcgttttttaccatcccaacccagccatcacatcatcaacacacacttgtcagcctcagccaatcacaagcctccacattttcggggctttattggtttctatagtcttcacaccacacatggccaaggtgcacagcacattggggcatgtctgtgtcttcatagggcctcatcttggcgcccccttttcagtcaagaacaaccagcactcaacacaggtcaaaaggcacacacggcatcccatcagggcacccagcccatcccattgcaaccaaatcttcctggcaatacttctcaaaccaaacaagcagcaaccatcctttggcaaaaccccagttcctaggtcactttgacacaccttacttgaaacattgatccgcctggaaacgtgactccctggggctggcttttctataacatcaaagtcagactacacgccacagacctggttctccaacaccgttgaccaaggtggacgtccgttaaccgcgtggcacggcactccatcagtggccccttgttggcagtttgtcaccttggaaacttctggcatccttgactccagggacaccattgcttcaccaagtctcggtaaacgccaggtggattataaaaatgggccgtttattccctactgatt

SEQ ID NO: 574291 - DNA, 1674 bp, Homo sapiens
cggggggcgcgtctaaggtcaggtggcggtagcgtgagactagagggtttgtgcctctaaccgtatagggtgggagggggccgagacagagcagtagtactaagtgttgagttgttctttctagctatggaggtgcggggctctcttgacttagtatgagagagatagtgccagcctgttcttctcttctcgttcggtcgtcccactgcttagttgagtgactcgacggcttaatctactaagttatccatctgctgccaacttactgatggtatcggtggtcggccgcaagcaatcacttttgttgtctgtgtgtggtgggtacgagacagcaaacgaggtgctacggacaaaagtcacgcccagctgtttgtttcagcctctgcccactttggtgtggttcacgaccgtcgttgtctcttctattctgggtggggtggtgcgagactgatgttgtgtgtggcgatgaggagtgatgtgtttgttggcgcgtgctggtggtggctgcgtcggaggggtgttttgtgtgtcttctctcagcgaggggagtgacttcttttgtgtatcggctgcgccgctccacaaaaggttggtgttctagctccactacccctgtacggttggttggttgtacggttgagggtcgccccctccctcgtggtgagttttgtggttcttgttgtgggtggcgagccgcttgttcttgtcgttctctcctgcttcatccttagagggtgggtcggcgatgtatgagtaattgttgtgtctaccactcttctggtcagtatcatctttgtgcgtgctcgtctacattgttgttgtcgtcccacgaactcgtctgttcgtctagaaaacaacgacggtttctgctgtattggtggtctctcgctgaacacaccagggggttctccacacaccgcggcggagtttgtcactactctcgccgctgcgtgattgcgctgctgtgcgccgcctgtgcgccctccttgtgatatgagacatatattgtgaccaacagcgcgtgttttctctgatcactctctgggtgtctcccacaactgtgtctctctccgattggaggaccccggtgtgtgagttcatctcttttgggtgcgcccgctgagggcctccgcgcgtggttgttatgagcagcctgtgttgtctatatagagagatgggtcgcgaatataagagatatattgtctctctctctctctttctaagggcgccgcttttctgtcgagagaaattctcggggcgccgactatgtgagagagagagcccgcggtgagagttctcctctctcgagatctcccgcgcgttctgcgagtgcgtcttgccgctctctctttttgtggggggtctctactatatttgtgtcgtcacagcgggcttccgcgctttttttgttcccctctgtgcgcgcgccacacgcgccccgtctactgagagggggcgcccctcttgttatgtgctgtcgctgtggaggctatactgggctggcgggaggggggcgcccacccctcttttgttttttttttgcgtcgtggcacgttcttatacgtgtatattatcgattctttaaaaatcacgtaactttttataatgggaaaccaacttgagcccaaaattctgtcacagaaatttgggacccctttaaaaagtttaatgaga

SEQ ID NO: 574292 - DNA, 307 bp, Homo sapiens
ggcatcgagctcggtaccgattacgctcctagacggcagcctcccaagtagctgcacataggcacgttaacacacctggctaattttggtaaaattttttgtagcgatggagtctcactattgttgcccaggctggtcttgaactcctggacccaagcagtcctcctgccttggtttcccaaagtgctgtgattagaggcatgagccaccctgcctggccttatttttttttaggagaaatgtcttgctctgttgcccaggctggaatgttgtggcatgatcacagcttactgcagccttaaactcc

SEQ ID NO: 574293 - DNA, 83 bp, Homo sapiens
gttctgatggcagaatgcggtggtggtgggggtcttttgtactgttggattaataaaatgattttaaaatcccaaaaaaaaaa

SEQ ID NO: 574294 - DNA, 377 bp, Homo sapiens
  misc_feature (182)..(182): n is a, c, g, or t
  misc_feature (188)..(188): n is a, c, g, or t
ttttttttccccctcccccccagcaaggggcctggggaaacttgagcaaatgtttcattttggccgggccagtgggtaaaacccaggcctccaatgccttgtgcctttgggttccccacagcttttccaagaagggagaggggcctcccccagccggggttttcctgttccctcctccctgntgcaantgcaggcattttaaggggcaacgtgggggaagggcccgggaggcatgggattttaattgtttcttcccccctcccccggggcaaaaaaccagcccgccctcttcaggggttttttggatttttggggagggccaaagaaatctttttcccgtttcaaattatgttccccaaaaaaaaatggccttttta

SEQ ID NO: 574295 - DNA, 588 bp, Homo sapiens
  misc_feature (157)..(157): n is a, c, g, or t
gcgataccacggccaggcagctatatgtatcgttagtagagacagtgtttcagctctagtcggccaggctggtcacaacactccttacctcaggagatttgactagactcggtttcaacagtgctgggattacaggtctgagtccactgcacacggnccgtccctacaaatcttatccttcataccttataagctttccttctgtcctgtgtcatgggcagagattcttctgtccttcaatatgtgtatagttcaatgacgcagactcattctgtcatgtcgccttatcttgtgcttatctttgagggtcagagacagcgtttggtctgcctttgccatccttgcctagtctcctgattaaataggtataagaggctgataggtagccaaggttgttgtcacagattaagtccaaaagggaggtagaggtcatagatgcagcccatcactgctgagtagtctgccctttcaaacaagaggtgagtcacctttttgcttagatcttatcactggtctcatactctcgggatgccagttaacaaagacctaggctcactttttagcaggttcaagttcagcagagacaga

SEQ ID NO: 574296 - DNA, 873 bp, Homo sapiens
cgaggccgcggtccccggggtcctgtatatgtccctgatgaaaaacatgacccggtgaaagctggtgggagtcagtgaggccccgtgcgatgagtgatttgctgatgaatgtgaatgcaggctcgtgaacgcctgccatgctgcatgcgtatttggtggatcttgatgtgccatgctgtcttgctgcctgccatttgctggtggatgtgcttgtccatcatgatgcatgtgtcttggctgctgcctggttggcttggacctggccccatggatgcccatgtcacctgtggctgtcatttggctcatggctgctggggccctcgtgcaacctttcctcccagccccgggtcctactcgctgagctggctgggctagctggcaagctaggagtgaaatgaattggatagagggatggcatagaagcgaatcgcagtatgtgttagatagaaggaatagataaataagacagaggacaaaatatatgatatagaaatataatttacattcaaaagtaagtcagctaaggatgggcaagagtgagagtcgatcgtaggctagactgcaccgctttgagttcacacctaaaccatccacgcaatcacctcactcaaagcgtgccaaacaaaggatgaaaaagagcggatcttcttcctttatctctcccttcatatccttcacaatgcctgacgactccttactgctgattttggagtccaagtggacttgaatgatgctggcagggccacctgcatgactgctgatgacgggcgtgacgaacacagctataaacaccctcctttattcatcaactcggacaactcacgacgcatactcgtaagaagtatctgctacgggtaatcgcgacattttacg

SEQ ID NO: 574297 - DNA, 287 bp, Homo sapiens
  misc_feature (49)..(49): n is a, c, g, or t
  misc_feature (87)..(87): n is a, c, g, or t
  misc_feature (95)..(95): n is a, c, g, or t
  misc_feature (97)..(99): n is a, c, g, or t
  misc_feature (102)..(104): n is a, c, g, or t
  misc_feature (204)..(204): n is a, c, g, or t
  misc_feature (241)..(241): n is a, c, g, or t
  misc_feature (270)..(270): n is a, c, g, or t
  misc_feature (272)..(272): n is a, c, g, or t
  misc_feature (276)..(276): n is a, c, g, or t
caatgcacccctgtatacctggtcctggcagtagacaatctgttccatntggaagtggagacggatcagcttctcaccttctctctntttggggngnnntgnnntttcttcaattttggacttggcggttctgtggaggttaaaaaactcttcaaaattttttatcgaaacatctgtgaaagcaagccggaccatatccgtcanggtgtgacatatccacagccagctcttccagtccttngtttgcatgtcaccgcgtcccaatccatnancccnggagaaccaca

SEQ ID NO: 574298 - DNA, 269 bp, Homo sapiens
  misc_feature (49)..(49): n is a, c, g, or t
  misc_feature (87)..(87): n is a, c, g, or t
  misc_feature (95)..(95): n is a, c, g, or t
  misc_feature (97)..(99): n is a, c, g, or t
  misc_feature (102)..(104): n is a, c, g, or t
  misc_feature (204)..(204): n is a, c, g, or t
caatgcacccctgtatacctggtcctggcagtagacaatctgttccatntggaagtggagacggatcagcttctcaccttctctctntttggggngnnntgnnntttcttcaattttggacttggcggttctgtggaggttaaaaaactcttcaaaattttttatcgaaacatctgtgaaagcaagccggaccatatccgtcanggtgagaagctgatccgcctccacttccagatggaacagattgtctactgccaggaccaggtggg

SEQ ID NO: 574299 - DNA, 123 bp, Homo sapiens
ttcggcgggctgggcgtgatggcggtcgcgtcgcgcctggcggtggcgcgggtggtccagccggacgggggcgcggcgagcgggaggagggggcggcaggggttcgcggtggtagggctcccc

SEQ ID NO: 574300 - DNA, 705 bp, Homo sapiens
  misc_feature (475)..(475): n is a, c, g, or t
ttgaggcactccaattctttatggaaaattaaaagtccttcaattaaagaaccggggaaagggttttggaacagacccagtgtttcctcattaaaggtccctatagaaaccattgcgccgtgataaaaaaacgggcgtccaaagaaacttgcacgttggggttcaaaataatcaattcctgggggaaaacaccccagtatttctactcactcaaaggggcatatgcagcagcggtatcctgtctcggccccgttatcagccctaggtcctgcaaaaggggtgagatggttgccattcacattcagcagagtgacaatcctgcttctagcatttgggtagtccctaaatcaatagacaccactaaggtcatcatcgatgagcttgactcttcagtggcgcacacgcagcgagcttcaaccttaaatagtcagtgcagaaaacttactttcccctcgtctagacacgtgtaaggttnctggcgcccccgttttggagaccacatcccatgtttatcccaggaagagacaaggtccccagatcctgtgtattgcgagcgattggccaaaatgcctagtctcccctcgtcatgtgtacagtggtgaatccccttctagcataggtgcctcagcttcttcgacccgtttattcaataactggccccttcggtggaagacattaaagcgcgggtgagtgtgaaaaaaaaaa

SEQ ID NO: 574301 - DNA, 1073 bp, Homo sapiens
taacatgaatggacctggcaccgacagggtgttcagtatctgctcgaataatcgctctatcggtttaccaagccccggccccgaactaaggactcgaatgtgaccgggacagaggcacctcatcaggggcagtgccagtgagacaggcggagaaagtcatcccttcccgcaggccttggaattgaaaatgttagagcacaccatttatctagcaagccatgtagcatagagtaccgagtactcggactccagacgacccaggacgtatcacattgtaggcccctgtatggggatgtcagagagcgtccatgggaggcacgaaaagcctggacccgagcagaagaacagagtcgcaccgagggagctattaacgcgcgcgccttaagcacaggaggctgcacgaaccttataacctgccgaccgtcgtgattaacccccagttgcgatttccacccccttgcccccgcgaacacttctagtgttatccacgcgatcgaagaagttgggaaggatgcggtgtaggtactcatggaccctaggcatgagatgatatccttagctcaccgcctgtgcaattcgcagggctgctgctggaacatgggggaaatgggtacgaggcattatgccgtaactggtttgcttactgtcggcataggctgctgatgtgcttccccttatgcaaagttagtctttgctttccccagacctgcagtccccggtatcccctacaacgatatatgcctctaatacatggggcggaacagaattcactattcaagtgttcctgcccccgttaggccatgagtggatgcgtcagaggacctgggtgcccagtaggccgcatgggatccgggggaaaggggcaaagggtacagggtgtgttgagcacctacgaacattctcttgaaggattggtgcattcctcccttcggttgttccacacaagtcaatgtagcatactttacggcaggtggtaggaaggaccagttacacaattgggatttaaggtagaagagaccatccaccctgcaggagattaggcgaggccgtgcgcaacaaaaccacccaggaaa

SEQ ID NO: 574302 - DNA, 852 bp, Homo sapiens
tacaggtagctatttcctgatgaccaaatctctcaacgaagtcatgtaattaatacactatttttagcactcatcagtattctccaatgtgaccttctcattggagtacacagaaggaacgcaaagaagagcatctggacttctaagctctggattaacagcctctctaccaggccgaagcaagagacccggcggcacgagatccccggcatcagacctgggtgggtgataacctcaaagaatggctctggttctatggacagaaaacccacttgatttggcttctgagttagcagtcagaagaccctctaagtacaatagaagtgctcttaacgggactctgcctgtgtgaatcccaggccccggagtctccatctctctcggtaagccacctgcccaagaacagttggaggctgtactcatggtggttctcagcgctcagggtacctccttggagttgtgcacccgtcccaaactcctccatgcaagttctggattcctcttatcagtaccacaatccaggtacacgtactacacattacacaccaggcaacatacgggtgggcaaccgaccagcactaccctggtacacactcacgttggcatccttggggaacaaggtgctaaaaggttgagttggcaataaacgttgggtttcaaataaggtgttgcaggacacattcttcctaacgactttgggggaaaccttatacaactcaagcaaaaattccgcgacgcttagatatagctccatagaattgataacagggaactcatgccacctttatagaacctctaactgtaaacaagtgcccaaattccggctaccggcggggtacattactgcacaaa

SEQ ID NO: 574303 - DNA, 254 bp, Homo sapiens
ttgaatgtttgaatatcaccgaatgtgcatgccacgctttgtgtgtattggagaccttcctccgagctgtgaatcatgccgcaggtacccaataaccaattccgtttcgggggcttgcgggaaatatcgcaggcggcagcagttgtcatataaggtataggtccaggccaggatgcttgccaggagccaggagggcctcatctgcagcaggagccggcacttgggattctggcatatgtcaagcccagctgcgg

SEQ ID NO: 574304 - DNA, 332 bp, Homo sapiens
catgtcttgaggccaggagttcacgccaagcctgggcaacacagtgtgaccccatctctacaaagaaaaacgaaaaaaaaaagagtgaacaggcgcacatatccaaaatacagggcagtaagtatgaccacacaaattcaagaaaattttccctgtgacgttctgggatgggaacgtgcctgagctcagtagatataaaacacatttcccacattgcagacacatccattgtagaaatttcagaaacattgggggcagaaaacaatctatacaagcttccaggcgaggcaaaaaccagatttcataaacggccatggaagtacataggcagc

SEQ ID NO: 574305 - DNA, 171 bp, Homo sapiens
gtcgacctgagaacacgcagcaaactccggggaaagtctgcttctcctcaaacagaccacatctcctatccttttccttatacacttccttccatccatgcatcatcaatcccgtgtgcacacacggcagacctctctcccataaaagatggttgaagtcaccatgttaag

SEQ ID NO: 574306 - DNA, 123 bp, Homo sapiens
tatcagaaaaaaatttcaaatttgatgtgaaagacataaatacccagctacacgggaggacataggtctctcctgttacgctgggtatttatgtctttcctccaatttgaaattttctgatat

SEQ ID NO: 574307 - DNA, 897 bp, Homo sapiens
agcgggtcataaggctgtggcagccatggcgtgctatttcgatgaaccacgagtgcccagccatcggaccctgacaggagacgctaaccaacatgctgctggagctcgtgaggtcacttgtcaataggatggactttgaagacttgggtgtcggtagtagattgggacctatcacctgtctccaccagctgtcatgactgtggttgagaacctccccaggacagtgatcagaggctctcaggctgagctcaagtgccccgtgtgtctccttggaacttatgaggagagatgcgagacgtgcctagttgatgatgtccttgtcctatcaccttttccattctccatgctgcattgctgcctctggtcggtaagcaaccgcgatcaaatttcctgtccacttgctgcctgctattaggctgcccctagctcgaatgagcgactacgttattcgagggaagcggcatgacggactagtaatggctcagaaaatcaagctaggctaggcgaacacctgaacttggaggatagcctccaatgtgagccggtgtactaccgtgaggtgacggttgggggtgaggtgcgtggcccctcttgcgtcattaccttattagcccgttggggctcgctcagtttaatacggtgttcttgtatccgcgaacagcaagataaaaattaagttcgcgtccccacgcgggatgcgaatcgacggcggcatacggggcgcgaagacaaccttgccagcagaggggagcgcgcccctgtgtccaccttccttttgaggttgcccctttctggagggaggtaaagttacacgagctttggtgccggataacctgagggccataagcttggtccctgggttgtgaattgtggtaacccgggccataaattccacta

SEQ ID NO: 574308 - DNA, 1091 bp, Homo sapiens
  misc_feature (409)..(409): n is a, c, g, or t
gcaaacgagtatggcctagagtagtagtaacgctacagctagtccctagcgctgaaactacctcggccctgacaattgatattactaccactgagcatgactgaccagaaaccgcgtatgtggaatcagcacacgcagccacagcctaattattcaggcatcatccccctactataaaaaaacaatacttcaaacgaataactcatcatttcacgtctcgtttcccactacaacactatttgccctccgaacaccacactagcaatccccctcctacatagacaataactgacatgcgcatactcctctcgacaaaatcgatgagcaagatgcgcaaactgactcactttgataccaggtagaacacacatatctccgaagaagagtgtctaacctcatctatatctantctctctatcctctatcctatcactcatatccattcaacagccacagacacatacatctgtatgatgctatctgcctggcagaaaccgagaggtatatcctctcagacttttggactaagtcagtgctacttacagattgaatcgctagaccaagcactagaagagggatcgtgatcgactggctattatcatgtcctaatacatgattaccaatagtaagaacgcctttccacttgttcatcgcgcctaactgtacagctcataaaaagcaatatgctcagaataccatgggtactacacaatgatcgattgccgaaaagctatctacagtcctgatccattgaccctctatgcactggctaacgacgctcgtttggatggtaaaggtgctcttgacggggagtcgaatttatgattgctgaaagccatgtaagaaaggccggtcggttgatacaaaagtccttgcgggatagtcataaactagcggtgtagggaactagagcgtcaaatgttttggaccctgtagaaggcatagctagcgtcctgaaaaacggggggtcataaaaggcccaggtaaaaagcaaacgcaaggatttcaaacacttgcgggaaaagtttgaaccccaaacggggataaagccacaaatattgtgcacaaggacgtactaggtacacactgtg

SEQ ID NO: 574309 - DNA, 340 bp, Homo sapiens
  misc_feature (66)..(66): n is a, c, g, or t
  misc_feature (333)..(333): n is a, c, g, or t
tatccatgcacgacagagcacagattcttgtagagacgggagtggtgggtagtgccagtgcggatnatacagcatgacggtgtcacagacaggcgagtagaggacaggagagctggcagctcttacaagagaaagagaaagactgttatctgggcttggaggcaggatggtaactgcaaagcagggagaaggcggtcgggctggacgtactcctctgtcatgatccaggagaagtttgggccccttcttctgctgtgatggcgatacttgatactcggctggtggggcaagaagatccaagactcgatctgcaggagtggcagacacgtgaanagcagct

SEQ ID NO: 574310 - DNA, 515 bp, Homo sapiens
taaaagtggtccaggagaatgttttttagaccagcagaattgtgccttttattctcccctcttaaagaaaaggaatttggactttcttatggcaggccgtttctaaataatgtcttcttttggggggtcttccatggaacacgcataagtttggggccctagtttgattattatgtttattcccatttttaataaattgaaaagggaggttcaaaaatatggaattaaattgatggggctatctttgtttttttaaaaagtaaggcccagtcattcagttttaggtaaaaaatgtcctttcttaaaatgttaaaactcatgaaaattgggatttgatgcctccccctttgattggtacccccaggggttgtaaaacttggttgctgaattgagttgtttttatgttaagggtcaaaatgaaagggtagggaaagtccaggtggtggggacaaatgcattaaaaattttgttagtgttcccatttaaaaaaaatggaataaaccggggttaagcca

SEQ ID NO: 574311 - DNA, 425 bp, Homo sapiens
gaacaagtggacccgactggcgcttgtgcattccagcgtgctttcctttagaagtgatgagctctgcaggggacattgtctggcatcatgcatagcacgccttgttatggatgggacggtaggtatcaaagatatatgtgtcggggcaattaacagcgtcttcgttctgtatgtagccttgtatgtaaacaagtggggcgtgatgtgcccccggtagcttggggtcattcccatgggaaggaggctaacatgactcgtctgtgcacgaaggcattgtgaaaatcactccccaggttgtgtaggtcatactcttggagattccgatgcaagtggaatagacggtggcaatgactaaagctccgtcaaaaatgataggtatcaaaaaaaaacaaccaagagcacaaaaactcgagactagttctctc

SEQ ID NO: 574312 - DNA, 227 bp, Homo sapiens
ggcctttactcgggtctctgggctgaacgcccagctcatttttgtgcttctagaatagacacggtttcaccatgttggccaggctggtctccaactcctggctcaagtgatctgcctgcctggcctcccaaagtgctgggattacaggtgtgagccactgcaccctgcctcagtacctccattctttccacacaccctcctcacgtgctccttcctgacttctgggc

SEQ ID NO: 574313 - DNA, 288 bp, Homo sapiens
caattccattccagcgtagccagatctttcggttatgtcggacgggtagtaggtggtaggtgcctctacacgggttaatcagggggtgctagaaggttctagaaaacagagagggtgaactatatgtaaaaccagtaaattatcctcagtcctatttctcttggtagatggaaagccccagtatgcattctttccctttgggtggggaggatataaaaattagtccataagtggtggggggtgtgtaacaaatgaggtggctataacccttacgctggaatggaatgg

SEQ ID NO: 574314 - DNA, 4998 bp, Homo sapiens
aacctttgccagccttgtgggagggggctagggtacttggcttgctttgctatgtgtgtgaagttgccttcattactgcccttctcttgctgcctcctgggcagggcctgcctcctctggctcagtgtgagattgaaatccaggccctactcacatgaatttggaccctgagtccagagtttagagaggggagggagagagaagagcaccagaaaggtagatgagagacccttattttggctgtgtggaggctctaggcagctgatcgctttgaagtgtcacttgatgcttatgggcctgctgaggccttacatcctgggggagaggggaacagtgatggtgagtgggtacagactaggaggacgtgtcaagactgcttccagccctaggacagtgtattcaagagttgagtgctgagggtctgtggcgtatgcccagcccttagtttctggcccacgtgaagcaggggggcactaggacccagaggctagcacggttcctgacaagtctagagcagcactagcgcagagtgagactcatcagctggcaagcaggattctgtgtctctgggttcaggaatcctcaggcagcagaggggacttgctcctcagcccccatcactgcccccacccctacccgtgtaggccaccgagtgaggcccatggactggggagggctgtgcctgacgactcctgtgtccctctatgagggcccagcgccctgaccctcctgcctaggtttctaccttttctctctgtctttggccagctgggggagtgggtagaggccgggtgagcaacatggcacagagcaagaggcacgtgtacagccggacgcccagcggcagcaggatgagtgcggaggcaagcgcccggcctctgcgggtgggctcccgtgtagaggtgattggaaaaggccaccgaggcactgtggcctatgttggagccacactgtttgccactggcaaatgggtaggcgtgattctggatgaagcaaagggcaaaaatgatggaactgttcaaggcaggaagtacttcacttgtgatgaagggcatggcatctttgtgcgccagtcccagatccaggtatttgaagatggagcagatactacttccccagagacacctgattcttctgcttcaaaagtcctcaaaagagagggaactgatacaactgcaaagactagcaaactgcggggactgaagcctaagaaggcaccgacagcccgaaagaccacaactcggcgacccaagcccacgcgcccagccagtactggggtggctggggccagtagctccctgggcccctctggctcagcgtcagcaggtgagctgagcagcagtgagcccagcaccccggctcagactccgctggcagcacccatcatccccacgccggtcctcacctctcctggagcagtccccccgcttccttccccatccaaggaggaggagggactaagggctcaggtgcgggacctggaggagaaactagagaccctgagactgaaacgggcagaagacaaagcaaagctaaaagagctggagaaacacaaaatccagctggagcaggtgcaggaatggaagagcaaaatgcaggagcagcaggccgacctgcagcggcgcctcaaggaggcgagaaaggaagccaaggaggcgctggaggcaaaggaacgctatatggaggagatggctgatactgctgatgccattgagatggccactttggacaaggagatggctgaagagcgggctgagtccctgcagcaggaggtggaggcactgaaggagcgggtggacgagctcactactgacttagagatcctcaaggctgagattgaagagaagggctcagatggcgctgcatccagttatcagctcaagcagcttgaggagcagaatgcccgcctgaaggatgccctggtgaggatgcgggatctttcttcctcagagaagcaggagcatgtgaagctccagaagctcatggaaaagaagaaccaagagctggaagttgtgaggcaacagcgggagcgtctgcaggaggagctaagccaggcagagagcaccattgatgagctcaaggagcaggtggatgctgctctgggtgctgaggagatggtggagatgctgacagatcggaacctgaatctggaagagaaagtgcgcgagttgagggagactgtgggagacttggaagcgatgaatgagatgaacgatgagctgcaggagaatgcacgtgagacagaactggagctgcgggagcagctggacatggcaggcgcgcgggttcgtgaggcccagaagcgtgtggaggcagcccaggagacggttgcagactaccagcagaccatcaagaagtaccgccagctgaccgcccatctacaggatgtgaatcgggaactgacaaaccagcaggaagcatctgtggagaggcaacagcagccacctccagagacctttgacttcaaaatcaagtttgctgagactaaggcccatgccaaggcaattgagatggaattgaggcagatggaggtggcccaggccaatcgacacatgtccctgctgacagccttcatgcctgacagcttccttcggccaggtggggaccatgactgcgttctggtgctgttgctcatgcctcgtctcatttgcaaggcagagctgatccggaagcaggcccaggagaagtttgaactaagtgagaactgttcagagcggcctgggctgcgaggagctgctggggagcaactcagctttgctgctggactggtgtactcgctgagcctgctgcaggccacgctacaccgctatgagcatgccctctctcagtgcagtgtggatgtgtataagaaagtgggcagcctgtaccctgagatgagtgcccatgagcgctccttggatttcctcattgaactgctgcacaaggatcagctggatgagactgtcaatgtggagcctctcaccaaggccatcaagtactatcagcatctgtacagcatccaccttgccgaacagcctgaggactgtactatgcagctggctgaccacattaagttcacgcagagtgctctggactgcatgagtgtggaggtaggacggctgcgtgccttcttgcagggtgggcaggaggctacagatattgccctcctgctccgggatctggaaacttcatgcagtgacatccgccagttctgcaagaagatccgaaggcgaatgccagggacagatgctcctgggatcccagctgcactggcctttggaccacaggtatctgacacgctcctagactgcaggaaacacttgacgtgggtcgtggctgtgctgcaggaggtggcagctgctgctgcccagctcattgccccactggcagagaatgaggggctacttgtggctgctctggaggaactggctttcaaagcaagcgagcagatctatgggaccccctccagcagcccctatgagtgtctgcgccagtcatgcaacatcctcatcagtaccatgaacaagctggccacagccatgcaggagggggagtatgatgcagagcggccccccagcaagcctccaccggttgaactgcgggctgctgcccttcgtgcagagatcacagatgctgaaggcctgggtttgaagctcgaagatcgagagacagttattaaggagttgaagaagtcactcaagattaagggagaggagctaagtgaggccaatgtgcggctgagcctcctggagaagaagttggacagtgctgccaaggatgcagatgagcgcatcgagaaagtccagactcggctggaggagacccaggcactgctgcgaaagaaggagaaagagtttgaggagacaatggatgcactccaggctgacatcgaccagctggaggcagagaaggcagaactaaagcagcgtctgaacagccagtccaaacgcacgattgagggactccggggccctcctccttcaggcattgctactctggtctctggcattgctggtgaagaacagcagcgaggagccatccctgggcaggctccagggtctgtgccaggcccagggctggtgaaggactcaccactgctgcttcagcagatctctgccatgaggctgcacatctcccagctccagcatgagaacagcatcctcaagggagcccagatgaaggcatccttggcatccctgccccctctgcatgttgcaaagctatcccatgagggccctggcagtgagttaccagctggagcgctgtatcgtaagaccagccagctgctggagacattgaatcaattgagcacacacacgcacgtagtagacatcactcgcaccagccctgctgccaagagcccgtcggcccaacttatggagcaagtggctcagcttaagtccctgagtgacaccgtcgagaagctcaaggatgaggtcctcaaggagacagtatctcagcgccctggagccacagtacccactgactttgccaccttcccttcatcagccttcctcagggccaaggaggagcagcaggatgacacagtctacatgggcaaagtgaccttctcatgtgcggctggttttggacagcgacaccggctggtgctgacccaggagcagctgcaccagcttcacagtcgcctcatctcctaagcactcctttcccctgctgtccccttcgaccctcagccctctggtgccgctctgcccgatgcacagccacctcagccagcccccaggtagaaacgtgggttaagctcttcctgccccgttcagcttcactcccaccctttcagcgtcctgccccttcaccttgacccgggttcccccactcccattccctggcctctgccataatttgttgttcaactgctccctccttcctgaggggcctcagggcttgtggggggtaggctgagaccccaccaccaaaggttaagtgaggtccccttgattgaggacttcaccccttgattaaagcaacttctgcttcagtgaaaaaaaaaaaggatcg

SEQ ID NO: 574315 - DNA, 756 bp, Homo sapiens
  misc_feature (142)..(142): n is a, c, g, or t
  misc_feature (284)..(284): n is a, c, g, or t
  misc_feature (289)..(289): n is a, c, g, or t
  misc_feature (324)..(325): n is a, c, g, or t
  misc_feature (381)..(381): n is a, c, g, or t
  misc_feature (398)..(398): n is a, c, g, or t
  misc_feature (419)..(420): n is a, c, g, or t
  misc_feature (471)..(471): n is a, c, g, or t
  misc_feature (473)..(473): n is a, c, g, or t
  misc_feature (510)..(510): n is a, c, g, or t
  misc_feature (558)..(558): n is a, c, g, or t
tgggacaatctacaaacacttttattagcaaaaggagtaagtgcagcaggggaaaaagaggggctcctccttcccctcaaaggctatcatctgccccttcccaaggggcaggccagcagggaacaagaggaccccagggttngcaagcaggctgtggaattcagacaaaagtgatccggtgtccgggaagcattgaccgtgccagacattgtgagcctcctcattattcactccaagagccgccgtggaacgtgggcggggtgtgaagccacgagatacacagngctgntcgtgcctcagagaaaccggacacttcggcccccnngagaccagttcacggacgggggcaaatatcacatctgcgtggtctcgtgagctccnagagtgtctgccccttngtctcctagaagagagtcctnngacatctccattagccgtgagggcttcattcacttcttctttctccaccanantccaccattctcagacgtgccagagcagtggaaaggngcaggatagccagcagggtccgggcagaagtatagggggcatccttanatagcccaagcctctcgcctaatctccacgtatgctgctgagatgtactcggcagagactcgtggcccatgggctgttctcacgggaacatggatttgtacgcataagaaagtcatgtcaagaggtcaccgtggaggggtcgccggtggctggcgcctaggtatgggtcgcccctggttgcctgtggccgctgtatcg

SEQ ID NO: 574316 - DNA, 445 bp, Homo sapiens
aacctctcagagagccatcaaagctcagaaacaaggtcgcacatcctgagtccactcgagcaggctttggacgaataaactgggccaatgcccttttttgttgtacccaaattttgtcctgcttgttcttgtctctgttgttcctggataccatcagctgcttgatgaaaatcaagtacaatgtgagctctgggggggggggggggccttttttcccagccttctagagctggtcctttttgaacatttttctctgcttcttcaaacagtgcaggtagatggggtaccacaccatttccaatgaatgcagtgacatttggattaattattccactgggtaagagatgaaaatcatattccacagaatccacaacaactgtatggccagcattatttcctccctggcagcggcacacgatgtcggcgtcctgcgccagcaggtcca

SEQ ID NO: 574317 - DNA, 5040 bp, Homo sapiens
aacctttgccagccttgtgggagggggctagggtacttggcttgctttgctatgtgtgtgaagttgccttcattactgcccttctcttgctgcctcctgggcagggcctgcctcctctggctcagtgtgagattgaaatccaggccctactcacatgaatttggaccctgagtccagagtttagagaggggagggagagagaagagcaccagaaaggtagatgagagacccttattttggctgtgtggaggctctaggcagctgatcgctttgaagtgtcacttgatgcttatgggcctgctgaggccttacatcctgggggagaggggaacagtgatggtgagtgggtacagactaggaggacgtgtcaagactgcttccagccctaggacagtgtattcaagagttgagtgctgagggtctgtggcgtatgcccagcccttagtttctggcccacgtgaagcaggggggcactaggacccagaggctagcacggttcctgacaagtctagagcagcactagcgcagagtgagactcatcagctggcaagcaggattctgtgtctctgggttcaggaatcctcaggcagcagaggggacttgctcctcagcccccatcactgcccccacccctacccgtgtaggccaccgagtgaggcccatggactggggagggctgtgcctgacgactcctgtgtccctctatgagggcccagcgccctgaccctcctgcctaggtttctaccttttctctctgtctttggccagctgggggagtgggtagaggccgggtgagcaacatggcacagagcaagaggcacgtgtacagccggacgcccagcggcagcaggatgagtgcggaggcaagcgcccggcctctgcgggtgggctcccgtgtagaggtgattggaaaaggccaccgaggcactgtggcctatgttggagccacactgtttgccactggcaaatgggtaggcgtgattctggatgaagcaaagggcaaaaatgatggaactgttcaaggcaggaagtacttcacttgtgatgaagggcatggcatctttgtgcgccagtcccagatccaggtatttgaagatggagcagatactacttccccagagacacctgattcttctgcttcaaaagtcctcaaaagagagggaactgatacaactgcaaagactagcaaactgcggggactgaagcctaagaaggcaccgacagcccgaaagaccacaactcggcgacccaagcccacgcgcccagccagtactggggtggctggggccagtagctccctgggcccctctggctcagcgtcagcaggtgagctgagcagcagtgagcccagcaccccggctcagactccgctggcagcacccatcatccccacgccggtcctcacctctcctggagcagtccccccgcttccttccccatccaaggaggaggagggactaagggctcaggtgcgggacctggaggagaaactagagaccctgagactgaaacgggcagaagacaaagcaaagctaaaagagctggagaaacacaaaatccagctggagcaggtgcaggaatggaagagcaaaatgcaggagcagcaggccgacctgcagcggcgcctcaaggaggcgagaaaggaagccaaggaggcgctggaggcaaaggaacgctatatggaggagatggctgatactgctgatgccattgagatggccactttggacaaggagatggctgaagagcgggctgagtccctgcagcaggaggtggaggcactgaaggagcgggtggacgagctcactactgacttagagatcctcaaggctgagattgaagagaagggctcagatggcgctgcatccagttatcagctcaagcagcttgaggagcagaatgcccgcctgaaggatgccctggtgaggatgcgggatctttcttcctcagagaagcaggagcatgtgaagctccagaagctcatggaaaagaagaaccaagagctggaagttgtgaggcaacagcgggagcgtctgcaggaggagctaagccaggcagagagcaccattgatgagctcaaggagcaggtggatgctgctctgggtgctgaggagatggtggagatgctgacagatcggaacctgaatctggaagagaaagtgcgcgagttgagggagactgtgggagacttggaagcgatgaatgagatgaacgatgagctgcaggagaatgcacgtgagacagaactggagctgcgggagcagctggacatggcaggcgcgcgggttcgtgaggcccagaagcgtgtggaggcagcccaggagacggttgcagactaccagcagaccatcaagaagtaccgccagctgaccgcccatctacaggatgtgaatcgggaactgacaaaccagcaggaagcatctgtggagaggcaacagcagccacctccagagacctttgacttcaaaatcaagtttgctgagactaaggcccatgccaaggcaattgagatggaattgaggcagatggaggtggcccaggccaatcgacacatgtccctgctgacagccttcatgcctgacagcttccttcggccaggtggggaccatgactgcgttctggtgctgtgctcaagcctcgtctcattttgcaagtgcgttctggtgctgttgctcatgcctcgtctcatttgcaaggcagagctgatccggaagcaggcccaggagaagtttgaactaagtgagaactgttcagagcggcctgggctgcgaggagctgctggggagcaactcagctttgctgctggactggtgtactcgctgagcctgctgcaggccacgctacaccgctatgagcatgccctctctcagtgcagtgtggatgtgtataagaaagtgggcagcctgtaccctgagatgagtgcccatgagcgctccttggatttcctcattgaactgctgcacaaggatcagctggatgagactgtcaatgtggagcctctcaccaaggccatcaagtactatcagcatctgtacagcatccaccttgccgaacagcctgaggactgtactatgcagctggctgaccacattaagttcacgcagagtgctctggactgcatgagtgtggaggtaggacggctgcgtgccttcttgcagggtgggcaggaggctacagatattgccctcctgctccgggatctggaaacttcatgcagtgacatccgccagttctgcaagaagatccgaaggcgaatgccagggacagatgctcctgggatcccagctgcactggcctttggaccacaggtatctgacacgctcctagactgcaggaaacacttgacgtgggtcgtggctgtgctgcaggaggtggcagctgctgctgcccagctcattgccccactggcagagaatgaggggctacttgtggctgctctggaggaactggctttcaaagcaagcgagcagatctatgggaccccctccagcagcccctatgagtgtctgcgccagtcatgcaacatcctcatcagtaccatgaacaagctggccacagccatgcaggagggggagtatgatgcagagcggccccccagcaagcctccaccggttgaactgcgggctgctgcccttcgtgcagagatcacagatgctgaaggcctgggtttgaagctcgaagatcgagagacagttattaaggagttgaagaagtcactcaagattaagggagaggagctaagtgaggccaatgtgcggctgagcctcctggagaagaagttggacagtgctgccaaggatgcagatgagcgcatcgagaaagtccagactcggctggaggagacccaggcactgctgcgaaagaaggagaaagagtttgaggagacaatggatgcactccaggctgacatcgaccagctggaggcagagaaggcagaactaaagcagcgtctgaacagccagtccaaacgcacgattgagggactccggggccctcctccttcaggcattgctactctggtctctggcattgctggtgaagaacagcagcgaggagccatccctgggcaggctccagggtctgtgccaggcccagggctggtgaaggactcaccactgctgcttcagcagatctctgccatgaggctgcacatctcccagctccagcatgagaacagcatcctcaagggagcccagatgaaggcatccttggcatccctgccccctctgcatgttgcaaagctatcccatgagggccctggcagtgagttaccagctggagcgctgtatcgtaagaccagccagctgctggagacattgaatcaattgagcacacacacgcacgtagtagacatcactcgcaccagccctgctgccaagagcccgtcggcccaacttatggagcaagtggctcagcttaagtccctgagtgacaccgtcgagaagctcaaggatgaggtcctcaaggagacagtatctcagcgccctggagccacagtacccactgactttgccaccttcccttcatcagccttcctcagggccaaggaggagcagcaggatgacacagtctacatgggcaaagtgaccttctcatgtgcggctggttttggacagcgacaccggctggtgctgacccaggagcagctgcaccagcttcacagtcgcctcatctcctaagcactcctttcccctgctgtccccttcgaccctcagccctctggtgccgctctgcccgatgcacagccacctcagccagcccccaggtagaaacgtgggttaagctcttcctgccccgttcagcttcactcccaccctttcagcgtcctgccccttcaccttgacccgggttcccccactcccattccctggcctctgccataatttgttgttcaactgctccctccttcctgaggggcctcagggcttgtggggggtaggctgagaccccaccaccaaaggttaagtgaggtccccttgattgaggacttcaccccttgattaaagcaacttctgcttcagtgaaaaaaaaaaaggatcg

SEQ ID NO: 574318 - DNA, 2303 bp, Homo sapiens
aacctttgccagccttgtgggagggggctagggtacttggcttgctttgctatgtgtgtgaagttgccttcattactgcccttctcttgctgcctcctgggcagggcctgcctcctctggctcagtgtgagattgaaatccaggccctactcacatgaatttggaccctgagtccagagtttagagaggggagggagagagaagagcaccagaaaggtagatgagagacccttattttggctgtgtggaggctctaggcagctgatcgctttgaagtgtcacttgatgcttatgggcctgctgaggccttacatcctgggggagaggggaacagtgatggtgagtgggtacagactaggaggacgtgtcaagactgcttccagccctaggacagtgtattcaagagttgagtgctgagggtctgtggcgtatgcccagcccttagtttctggcccacgtgaagcaggggggcactaggacccagaggctagcacggttcctgacaagtctagagcagcactagcgcagagtgagactcatcagctggcaagcaggattctgtgtctctgggttcaggaatcctcaggcagcagaggggacttgctcctcagcccccatcactgcccccacccctacccgtgtaggccaccgagtgaggcccatggactggggagggctgtgcctgacgactcctgtgtccctctatgagggcccagcgccctgaccctcctgcctaggtttctaccttttctctctgtctttggccagctgggggagtgggtagaggccgggtgagcaacatggcacagagcaagaggcacgtgtacagccggacgcccagcggcagcaggatgagtgcggaggcaagcgcccggcctctgcgggtgggctcccgtgtagaggtgattggaaaaggccaccgaggcactgtggcctatgttggagccacactgtttgccactggcaaatgggtaggcgtgattctggatgaagcaaagggcaaaaatgatggaactgttcaaggcaggaagtacttcacttgtgatgaagggcatggcatctttgtgcgccagtcccagatccaggtatttgaagatggagcagatactacttccccagagacacctgattcttctgcttcaaaagtcctcaaaagagagggaactgatacaactgcaaagactagcaaactgcggggactgaagcctaagaaggcaccgacagcccgaaagaccacaactcggcgacccaagcccacgcgcccagccagtactggggtggctggggccagtagctccctgggcccctctggctcagcgtcagcaggtgagctgagcagcagtgagcccagcaccccggctcagactccgctggcagcacccatcatccccacgccggtcctcacctctcctggagcagtccccccgcttccttccccatccaaggaggaggagggactaagggctcaggtgcgggacctggaggagaaactagagaccctgagactgaaacgggcagaagacaaagcaaagctaaaagagctggagaaacacaaaatccagctggagcaggtgcaggaatggaagagcaaaatgcaggagcagcaggccgacctgcagcggcgcctcaaggaggcgagaaaggaagccaaggaggcgctggaggcaaaggaacgctatatggaggagatggctgatactgctgatgccattgagatggccactttggacaaggagatggctgaagagcgggctgagtccctgcagcaggaggtggaggcactgaaggagcgggtggacgagctcactactgacttagagatcctcaaggctgagattgaagagaagggctcagatggcgctgcatccagttatcagctcaagcagcttgaggagcagaatgcccgcctgaaggatgccctggtgaggatgcgggatctttcttcctcagagaagcaggagcatgtgaagctccagaagctcatggaaaagaagaaccaagagctggaagttgtgaggcaacagcgggagcgtctgcaggaggagctaagccaggcagagagcaccattgatgagctcaaggagcaggtggatgctgctctgggtgctgaggagatggtggagatgctgacagatcggaacctgaatctggaagagaaagtgcgcgagttgagggagactgtgggagacttggaagcgatgaaccgccgggatgctgaggaatggttccacgccaagagtgcagagctgaacaggaggtgtctacaacactgccatgattcagaccacagcaccacgatcgcc

SEQ ID NO: 574319 - DNA, 176 bp, Homo sapiens
cccctttttttttaaaaaaaaaaattttgccggggggggggggggggccctggaatttccaccttttgggggggggaaaggggaaaaatcggttaaaccgggggggcaagggttcaaggaagttaaattgggcccttggcctttaggggggggggaaagggggggttttttcccca

SEQ ID NO: 574320 - DNA, 510 bp, Homo sapiens
  misc_feature (270)..(270): n is a, c, g, or t
taaattgctattaaaatttagagtgtactccgggatatgctgggtcacgcctgtactcctggcactttgggaggccaaggcgggcaaatcatttgaggtcaggagttcaagaccagcctggccaacatggctgaaccccatctctactaaaaatacaaaaattagctgggcatggtggtgggcacctgtaatctcagctactcaggaggctgaggcaggagaatagcttgaacctgccactgcactccagcctgggtgacaaaagcaagnttctgtctcaaaaaaaaaaaaaaaaaaaaattacagtgtaaattagctgggcatgtggtggtacatgcctgtaatcctgtagtcccaggtactcgggaggctgaggcatgaggatctcttgaacccaggaggaggttgcagtgaattgagattacgctactgcactccagcctgggcagcagagccagaccctgtctcaaaaataaataagcagagccagactctgtctcaaaaataata

SEQ ID NO: 574321 - DNA, 358 bp, Homo sapiens
ggcacaaggcgatctctgctcactgcaacctctgcctcccatgttcaagcgattctcctgcctcaacttgccgagtagctgggattacggtcacccaccaccacgcccggctaatgcctgcattcatagttgagactgggtctcaccatgtaggccaggctggtctccaactgctacccttaatgatccgccctcctcagccttccaaagttctgcgattacaggcgtgagccactgcgccccacctataatgactttaatgctacaaattaggcagaggattggctatttttcctctgggaaagataggacgtctccatttctgttttgccgtggcagtattcatgataccatgatt

SEQ ID NO: 574322 - DNA, 234 bp, Homo sapiens
cgctgactctagagcataaaaggacgcccacgcaagacggtatttatttgatatatagctgcatgcaaggaagcaaaaactgatcttcccatgagcagcagattcgagtgttacatgtcggggtccagagcggatagaggctgtgcgcagttgctctcctggaggctgctccctggttacttggtgacgtgcatagctctctctggggggctgcagctcgtcttgcggggactg

SEQ ID NO: 574323 - DNA, 877 bp, Homo sapiens
agttgttcctcatcctgcctccttggctcgccgcatgcctgcctccgcgcgcgcgcctcctccgccgccgcggactccgcgcagtctttatcgccagagtccctgaatctctcgcttcctttttatagtcccctgcatcggatcaccgtgtgtgtgcccctaaccattgtcaggacgctagcctgtatcatccccatgctccgaatctcaccaccattggacttaagtggatgcatagactggaagttgtggtagaggcagtaactggatggagtagcgcccctgctaccgggaagtgctaagtgcggcaaaagtggggctgccccgtggtctgattctattgatggctacgcaccgagacgaaggagggagaggaacggttggtggcatggagactgaccggatgggacggaaaagaaccaccatggtcgacttgcgttgaggggcccgcaggccttggcacgtttgacccgaactagactggaccctcttgaccttcagctctgcggggcacagcggtgcctcgtcttgcacagactgtatgaggagtggacgagtggtccgatttccccacgatatgcttgcaagagcctgacccgacgggtatggatcctccgatcaggcaagcattgatcgtgtgaccccggttaacacgtatagagatatcacaaagaaaggcctgcccgttggaccctattttcacactcgttccaagttcccctggcctcaaggaaatcgttaaaatcggttgggtcaccctttctggtgctttgaggtgggccccggcccgttccccccggtgggggccagttgcccccccccgcaaaatttaaaatggcggggcttccaggccatcccaaccctataccctgttgag

SEQ ID NO: 574324 - DNA, 89 bp, Homo sapiens
aagaagctgccgttgttctgggtactacagcagaagggtatgcggaagcgagcaccccagtctgagatggctcctgccggtatgagccc

SEQ ID NO: 574325 - DNA, 1333 bp, Homo sapiens
  misc_feature (1333)..(1333): n is a, c, g, or t
tgtagacatgataagaagaaacatgttgtatgttcttgagagggatgctttaaccgaaccctcttcctccccgtcattgtactgtaactgtggacgagacagaaataattggggatatgtggaatttttaagcaacagttaaatggaaaagcatagacatattattgtagacatgataaaagaaactatttgtatgttcttatgactcgtaaggtttgataaaatgtacctttgcatgtggtgacagttgtgtgttgcattggctaggtttctcccgtgtgttgttatactaaaaatggaattgataaaccatttttttactaaaaaaaaaaaaaaaaggtagaaaaaaaaggagaaagagagaaaaataaaaaggttgacgaaggagcgcgaagaaagacgaggaatgatgcggaaacttaaacccaaggcttgataaataaacaagactgataaaatacattcaactacgtatctagaaccggaaacccagccaagacaggcaggaatgccacagacagacagtagagaaagcaggaggccggggtagacatggcaaaacacgcgctcgtccgcggaacatcacagagcactgatgaaaaacaaggagaccacagagaaccatggaacaagaagacacacaaatcaccagataggacacagagactcaactacacactcataaaccgtccggtatgatctcacaaggtgcgccatgacttattacaaagcgtattaccacatatgtaccaaatgaatcccattattaactcgatgcgatctacacctgggtacaagcagggacaccgcgtgcaactggcactgtccacggaacataagtgagggtatcacgcccaagcaaacaacaggaagaccatagaacacacaaaataaaacgtggcatatacaacgtggggcagcagtaatacccagaagagaaaagaggacaccaacgcaaaacgacaacaaacagaacagaaaagatagaagaacacacggagaaacacacagagggcgacgcaaactacagaataaagaaacagagacaagaaaccatccccaccaccaagaagtgtgagggcaacacaccacaacgcaagaaacccccagatcacaacgacacaagacgtaagagaccgccctcacagcggaggaagcccaacaaaggcggagagacaacgagacgcccccgaactaagccgttaataaccgaggggagcggaagccaacgagcagcgaacacgcactgccacacaccacgaagccgccgatagagcaccacaaaactgcgagacataggcacagacaacaagggcgacagagtaagtatgan

SEQ ID NO: 574326 - DNA, 103 bp, Homo sapiens
ctacccttttttctaagtgtttgtttttagttttgattttggaaagatgttaagcatttatttttagtattcattcccctaatttcaacataaaaaaaaaaaa

SEQ ID NO: 574327 - DNA, 998 bp, Homo sapiens
gcgtacacacgacttgagtcttctgtcacatggacggacgagctgatacgtcgttcggcagcagaggtactattgacaataaacccacgagacaccatggcaaccggagtcgagtataattggagttactctctttccctcaaccaaggcaggaatttcagccaatactgcagcagcccttcaagctggcaatggcaaataggctggtctgaaacctgctgataggcttctcaagtatccattggcagaaggtggccgaggctcactgacaaatatcattcatggctagctggggctactggaaaaatgattcttctcttatgatgattaattctttcatggatttcctatgtaattagaggtactgtctttcccccagttgtacttaccctatcttttctttaattaacattcgattccatgagcttcttatgtgcaaaactaagattcttctttagcagagcagaagcagaagagtacaactctatggtatagctagcaatattccctatgccatcggtctcaaatcaaagagtcatcatacgtaggcaacatacatgttacgtggtcacttgggcctgagtgtgcatcccagtaattctttacttgatatcgattaattccataccttggattaaaacatgctagtccacaataagaacgctcagttaccaagggcttacaagcctaactaccttataagggtctctagttctctgattaggcattggacgcaatgggcctctgcaacatttctgacctaatcaccctcattttacagctaatctcacttgggtggtgtaagccctttgggaagggccgcaatacctatattcccgggaacacctctagagtcccacgagtatctcccaaattataacaatacccacaatgggtgagcaacgaccccatttgcgcaatcaaacatgtgaaaaattaccaaagtgacatcaccgtgcatagctgacactgtgtggcgtgcattgtgatccactatc

SEQ ID NO: 574328 - DNA, 571 bp, Homo sapiens
agtatgccgtctctgatcatacagcccacgttcaagggtgtcagaccacgcaggaacaactgccttggtccttcacccttagcagcaagtcccgcttttctggggaaggggcaagtaccccaaccccttctctccgtgtctctaccccttctctgcttttccggggacagggcaagtaccccaaccccttctctccgtgtctctactccttctctgcttttctggggacagggcaagtaccccaaccccttctctccttgtctctaccccttctctgcttttctggggcaggggcaagtacccctcaaccccttctccttcacccttagcggtaagtcccgcttttctagggggcaggggcaagtaccccccaaccccttctccttcacccttagtggcaagtcctgctttcctggggcaggggcaagtaccccttaaccccttctccttcacccttagcagcaagccccacttttctagggggcaagaaaccccaaaccccttccctccgtgtctttacgctctcttttctctgggtttgcttccttcactatgggcaaccttccatcct

SEQ ID NO: 574329 - DNA, 980 bp, Homo sapiens
gctctcgccaggcgtcctcgatgaagtgatatcgtgctttaaagcctgcgtggaaatccctgacgcaccgacgtgatgcccatggaagacatgcgtggacctgggcaagttgtctccgagactactgtcgcgttaagatcatcgcgaagctgattgtgagtgatggatgccggaaacatgttgtcatctgtggggaagtccagaccatactgtgggcatccaacgccaagatgcaaggagatcctgcatgtcccttcgcgtgcgtaaggtcggtgtggtgctgtatgggcaaagaatgaccgatgatgtgcaaggtcgtactcccgagggcagcctggtaagaacaatgccaggctctggaagtaatgtttggtgccattcgatattgcgggggcaaatagtgggctattcgctgtacaccaagggagtgtccgtctactgatcatcgagggactatgtcggcttgggccaaatggggtcgccagctgatggcctgtgctggtgccagttgcccgactgtgaatgtccccttgtgccaggccagaacaattggtctcggggcccgagaaggacctccttttatccatggctttaggtatcaacactaaaggtctccatggggcacccttgataatgcctgagtgatcgtgcatgcttgagtcacgattgcgcgagcacagggggacgccagcgatggcacgcttgatgaaagtgtcaatattgccgcctttttccttggaggtggcattcagcaggtggtcggctagtggggggatcttagacctgaagtgtttggatccagagggaatctggtttgcgtcctgggggtccgaagtgcccgtgtggttggactcgggtgccagtgttagcccactatataagcggcaagagacggcggctggggggtgccacctccgaggagggtcggggaccccgggggccggggccagctgctcgccataaaaaggcggggagtgttc

SEQ ID NO: 574330 - DNA, 270 bp, Homo sapiens
  misc_feature (24)..(24): n is a, c, g, or t
  misc_feature (34)..(34): n is a, c, g, or t
ccgcggtatgtcttacggagacanagatcccctncaccctcacatgcaaaaaagaaattaatttcacttttcctcagcttcattatcttcttaattgtctttcttgccccctcagtagcaaggactgtctgtggatttctaggcagcctttctaggctgctaggttccagaaggagagtgggtttcatgctactatgtaaccactttgatattaagagtacaagaatgatactccatcccactcagctaccctcgtaagacataccgcgg

SEQ ID NO: 574331 - DNA, 122 bp, Homo sapiens
tgggcgtgtagtgctgtccagaggaaggcgtgaggtatgccccaacctacacccctcgtcactgactgctttcaactgtacaagaccagtaagtatctcacgtctggtcgagtggtacattc

SEQ ID NO: 574332 - DNA, 305 bp, Homo sapiens
aaaactttgtgtctagctcagggattgtaaacgcaccaatcatcgccctgtcaaaacagaccactcggctctctgtagaatggaccaatcagcaggatgtgggtgtggccagataacagaataaaagcaggctgcctgcaccagcaggggtaacccgctcgggtacttttctgtacgggtgtctatccacgctgtggaagctctgttctgtagtctttttgccaggtgaagctctgctactgtctcagtctatgggatccacactgccgttattagctatatgctctctctggtgaatgtctggg

SEQ ID NO: 574333 - DNA, 1300 bp, Homo sapiens
ggagctggtgcatggaatcgggagactgactgcctatgaatttgctcaacacttcaccacagcacagctggttctctgggcatcatcacaatccagccatggactggcaggcaacaccagctgcccaacatgcgaagggcactgggtgccaaggttccatacactttgtggtagcactgcgagccaaccgcagcaagcatcatttcaccagctcctgccaacagcacaggtgcaaggccagcacacattggcagcatgttcagtcatttatcagacaaacatcaatgcgtggtgtcagtctcatcacatccagcattatgtttagctcaccaccacagcatccatcgcagcattcgcaacacagcacattaatatgcacacgcttcacatagtcacattgccaccaatatatcatcggcacatcaccacacaggcccatcttcttcacatgcaacatgcacgcaagcacatcaacccatgagcccatcatttgtcaacatgctaggctatcgagacagcctgggacaccatgctcctacgagatcacccatatacgtatcacatggacttcacttgtataccacagcaagagtttagcaagcatagattagagcattatcaataaaacactattgcaccagcatgcaactaggatgaccattacacacacatcacactggcgaggtcccaaaaaccacaacattgtcctcgtagctccctcaaatttacagtacacacacacctgggcttccatacacacacaataccaaagttaacaagattaaggagacaccacactactcggacaccttgacggcaagcttggtcaacacagcgccttgaatggccaatggggacattccttgaacgtgcaaacagcacacgcactgcatatctgagattcccacgtcatcatactagccattttatttcacacaacacattggggaaccaggaatccttttcatgaaagcgattatccctggggacagcttcacaaccgcgaacacaaacacacggataaaagatatgacgcagactattgagaacacttaaactgcacaacgcggcaccacaggaagcgtcaaatagacgcggaaacacggggataacacacggacacggcagagaggccgagacaaaccgagacccgaaacatacgcgggagacacacacaggacgcgaacacaaaccacaacacgcgccaaccacgagcaggagcatgcgacaccaatccaccacccgagaacagaaaccgagcacactaacagacaaacctatcaacgaagcggcaacagac

SEQ ID NO: 574334 - DNA, 181 bp, Homo sapiens
gacgctcctcctctcagcactgtggggtatgttgtgttggggtgtttatggcaagtcactttaccttgcggatggtgggatcctgatgtctttcatccatttgtagtcaaagctggtaaagcttatcttactcctggttccctaccagtatttctaaacatgccgctgatccgattactga

SEQ ID NO: 574335 - DNA, 422 bp, Homo sapiens
  misc_feature (133)..(133): n is a, c, g, or t
gtgtatatcctgtctctccactagcactgtgaaccctcgaagccaggtgtatatcctgtctctccactagcactgtgaacccctcgaagccaggtgtatatctgtctctccactagcactgtgaacccttcangccaggtgcacatcctgtctctccactagcactgtgaacccctcgaagccaggtgcacatcctgtctctccacgtgttctttatgtctgtcacagcactgggaaaattaagaaactcaaaacatgcttgctgagaaaaggaggtccagaaaggcagggggacttgtcccaggtcaacagagagaagctcacaacaaggccacacagagaagacagccaggccctccctatgtcctctgcctccccctgtgccagtcctaccactacgcgcccagggcccaacctccaag

SEQ ID NO: 574336 - DNA, 121 bp, Homo sapiens
agaccgtgtggttggcgctgagaagtcgagatgcagcgtcagctatgtgatgtactacgagctgtcctacggcttgcggcatctgagatgcatcacgcaggtctgagactcgtcagaaggc

SEQ ID NO: 574337 - DNA, 926 bp, Homo sapiens
agctgccaaatcttgaggctgttggcgactcgcgtcgagtgggacgtcccggaaggtaggtagttgtgtgtaccgggttctgaggccatacattatatgttgacattttccacctcatagggcacagggatgcgaggattataccagagggtgggaggaggtacttcgcagggtggtgttgagaaagacttatagctggcatgatacacatatgagggcacggtgtgtgtcctagaaatataggcatgctgagtggggagacttggtgtgttacagtaacagatgattaagtagtgttggttgtaataaaacagagcaagatcaagatgtacagacatgatgtgagaaattaccacagatacaaacctaatgcgacttgaatgtgtaagccatggaagcccgcaaatgtaaccatggaaaactgaagtgagattggtgggaaacgtgaatgactttggtccgtgttatcttaggaaggtagattatctttggattcagagaaacgtgttgggacagaaggtacttaattgtaaagtaaggtggggtggttcgagaagcttggaggtcatgtctgtaatttctgttaattgattttagagaggctagggatgcaaagtgtttaagttaagaaagccttatttaactttgtggaactcgaaccagaaatgcatttgtcttagaaagtggagaatattggtgtgaggtaaagcatgtaaattgttcctctggcaaattgttcaggaattgaagtggatattaggaaaaccagtttgtaattagtctctttcttaaagaacgtaatgtaccttgggcatcagttttggctaagtttgtgggcaattaatggtggggaacacaaagttgtaaagggcaaaggtaagggaatgaaggaagtgtgtaaaaaagaaaggggggatatgaaatga

SEQ ID NO: 574338 - DNA, 717 bp, Homo sapiens
actttgacgcacgccggttttcagagtaattggccagggtctagcagacgcctgaaccgagagcgtgatactaggccatgacccagtgactgcgatagtatcgtactctcttaacagaacacacttatagctccctaaagcccatgacgccggcgggaccggcggctcagtagcccttgccggagtagtctgacaaccaggccagtcaggtatacgacgcctcacattcgatctgacgctcatcacactgctcagaccagacagactccttgtcctactcatatgagccgaagctatgacaggcagcagcttactacggcaaccagacgtccacacggtcatcgcgtactctttaatcagacatatagaccccgtcggatcagtgcttttcctacatgccataagtacagtcaccgcagcagccattcacctgctcagcagacggactgacctacatcacgactatacacgctagccaacccatgctacgagcggactaacagtcgaatcatcatcaatcaagtgcattagacccatacttcgcatataggattgtgacgacgtctagtacgtagccttcaccacgcagtacgcctcaccattaacctactgccagaacaccttaggctatgacccacgtctcaccggccagatcatgactcgactacttaccggaccctgcctactatgtaccgggcctattgccctccgtttccg

SEQ ID NO: 574339 - DNA, 1001 bp, Homo sapiens
tccaggctaaaactgatcgtaccaacaattatatgactacccacggacatgacgtttgcaaaaaatacataatttgaatcaggacaagcacccacagcctaattattagctatcatccctctacaatattttggaatcagatcaagaacaactatggagctgttgccggaactgtggctccgagctcgctctaatgagcacgcccctgcgtatggtactaagtactctgactgctgacccctcgacaatcatggggtaagcacaatgccaatttagtgcagtgaagcactatcaggcgaaaagaactctaccgtctgtatactgaatctcacctacaagtctacctgtgaagtgtatgaacattgcacagtcgaacagaactgaatgcgatgatttctatgatcttcttgcgaaaccacagcttgatacccggccttggctatcagtcacccgatgaggcgaagcagtcagaacgcctgaaggcgaggcagcatacattccctatgtctacaacgctagtaggtgtccctgtccgcctactcaatcgccagcatgatttaggactctgggacaggcctaggctcagctagaacattctactactcagtctcactgaccaagaatatcaaagtcctgagcggaacaagttaatatgactagcttacacaatggctttgatagtaaagatagctctttacggactccacttatgagttcctaaaaggcatgtagaagccccatcggggggaatacgtattgccgaggtactctgtaaaactaggcggtatgggtaatagcgcgcaatttgtcgaagcctggagaaaaattagtgagcttcgtggaaatcccaagagggaaatataaaggggctgcgggacaagacaaagggcgggaactaaccgcaagccggagaaatctcaaccgggacgggggatgtaacacagggaaccacaatcgagcgcaaggcggcaacccggaaacaattagagcgggcccgagaa

SEQ ID NO: 574340 - DNA, 165 bp, Homo sapiens
cccggggagtccacagagacacatcgtgaatgtcatccagccagtgctcccagcggacagtaactaaccatagcgtctactgcatccaccaagggataccctgagacatgctgaccaaggtgacaggccctatgcgcgcgggccccacaatgatccgatgtgaat

SEQ ID NO: 574341 - DNA, 1003 bp, Homo sapiens
ggttcgggctgcgtgggaagccacgaggggcttctacccacatctgctgcttgctgctggtcacacagctgcacaagctggccgcagacctgtgctcccccgacatgcccaacctttgggttctgtcccacgagggccacacatagccatgccagctgtgctgtggaggcttgaatgtgctgtcaccggggatggagtgccgcaatggtgtgtcacgtgcctggagcaggcaggaggctgcactgaggctggttgggagcccaccccaacactggagggcgtgctgactgactgaacaggtgcatatggtggcacatgccagaccaacaactgcggatgcctcttcgcagacttgctcactccggacttcgcaagcagagaacgacccgcagtgtatcactggctatagctaacttcacaggatgtacgcaaagacaggtcccatacctgtcaagtgttcactgtgttcaagtgaaggtcaatcctgtgacacgatatcctcatcctggaatgtgaagaaccctcgaaaaccgaatggtgcggatggatttgtgccatggtgggcctgtggtacacacatttggcctgaaataggcacgtatgtcgtctggcaagagtacaatcacgctgacttgcggtggaatcctgtcgggcacagtgtgcgacatgtgacgcgatggcttttggtttctagggctgttgaaggactgcaggcacccgtgatgaggaccgagtcggctgtcggagtctgatcgtcgatacttgtactgaattatcattgcgtaatggacaatttacaatacccagacaaggccacaatcttgaacataacatgagcacttgagcatcccatgacatgatctgatcattagtatggtcctgtacacagcgaggacggtgacagcgacctgaaccgtgacgtcaatgcgttaatcaaccgacgtactaagcgaagcaaataatggcgcaggatacggacatacttgccaagaaggttcagcgc

SEQ ID NO: 574342 - DNA, 120 bp, Homo sapiens
cacgagagaggcaggtaatgctcaagtgctgaaaagacactgatcagagatagtacaaccggcaccttgctaaatattaacttattttagtaatcaatatcccattaatggctaagacaa

SEQ ID NO: 574343 - DNA, 555 bp, Homo sapiens
aacaggtaaaaaaaaaaaattttattaaaactgggaaagaaaaaaacctcccaaaattaaaaaaaaaattttaccccggccaaaagggccaaattccggggaacaaaaaaaagggggcgcttcccgaaaaaaaaaaaaaaaggcggccaaaaaatgggagcggggggaaaaaaagaaaaaaggggtttccggggaaaaaatggggccccccaacaaaagggagaggcattttaatttttggcccccgggaaaaacccaaaaacccgccagaattttccacccgagaaacccggttaaacctcccccggggggagcgggtaaaaaacactaacccatatttttgggataaccacacaccctttgaaaaaaaaagaaaacctcccttgcgtttataaaggggcacccaaaaaagatcgcgacaaaaaaaacaaaagagtttcctggggaaaaaaggtgccgctccaaaaaaggcccacaaaaaaaaatcgctggggcaaaaaagagatacccccgcggcccccaaataaaacgggcctcaccacaatacagcgggcg

SEQ ID NO: 574344 - DNA, 331 bp, Homo sapiens
ctcaagtgatctcgtactttgatttatatacttgttagttatgatgaaaaaaaagaaaaaagaaataatggcgagttcttccaatgctaaagaatatgtcactatgatacaagtagcagttagccttataattaactgtaaacactgtctgtgggtataaagttttacctagagcattggatattaacagaccattaagcccaactttcaaaaatatgaaccctatggggacttgacaacttgaagtcaggatcttgtatgccttgaggcgaggtcaacatcatgtcatgacaatcacaacgcgtggctgattgcgcccaaaattctaggg

SEQ ID NO: 574345 - DNA, 348 bp, Homo sapiens
ctttggaggaagctgggcaggccagacctgtgccatcccaggacttggttccagtctctctctgcccctcagggagggtgctaggccactgctcattcatacaacctcaggtgtctgcaaccaggttctttctctgtgcatgtcacattagaatatggcgggttttgctaaggacaccatcaacagcttacaaaggaggaatccttatttgctgactagtaataatgtgagggggaggaggtcaaaggctgtacaacagttcctatcagactcttcactttgtttaagagttggtagccaaggtctctgagctcagtcaccattcacatagacactttgcatccagag

SEQ ID NO: 574346 - DNA, 283 bp, Homo sapiens
catggcatacgtacgtctacatctgtctgcgattgacaaggtacgtctacttgctgatctagccatggaaaggtaggcctactctgtatgtgatggaaatgtaggccttctctgtctgggatggaaaggtagggctactctgtctgggattgacaggtagggctactctgtctgggatggaaaggtaggtctactctgtctgggatggaaaggtaggtctactctgtctgggatggaaaggtagggctactctgtctgggatggacaggtaggtctactctgt

SEQ ID NO: 574347 - DNA, 142 bp, Homo sapiens
tttctttttggggggttttttcctttttgggtggccattatggctgggggttttccctttttggccccgtttcccctgctttttggtttccggttttcccctttttaatttggccctgttttttggggtttctgccccccca

SEQ ID NO: 574348 - DNA, 232 bp, Homo sapiens
aaaaaaaaatctaaagccaaattagaaaataactcccactttccaaagtgatttttagttaatgtatcatgcagcttttgagagtctttacactgggaagtttgtagaattttaaaataagtttatgaatggtgaataatatgcatgatttaagattgccattatgtaatctgggttattatgctgatggatcaccatctcttgtaattgtgttaggtttggttattttgtc

SEQ ID NO: 574349 - DNA, 328 bp, Homo sapiens
cgctgctggggcttggtgagctcaccagcactgaactttctttcatgaattcccactgatcacaaaccccacaccaccatctcactgacaccatgttcaaccatgtcttttacttaacaaattccaggaactggtcttaggaaatccaagtatcaaaccaaggttgtggagtattccacctcaggaaggaatgctgaacaactgatttacagacttgttgccccagctagaccaccaggtagcccattactcaaggtaaccattacaaccaaatagtgctaacctgcataccctacccctcacatgctttgccaagccccagctgcgg

SEQ ID NO: 574350 - DNA, 462 bp, Homo sapiens
  misc_feature (82)..(82): n is a, c, g, or t
gcacggttcgcccggctgatttagaagaaccaaatgagtgccgggaagaaggaggagctcccgaagagctttaacatcctgnctcccttccaaaaaaagggggccgagaaaaaggagctgtaaaaaggctgtctgttattttcccgggtttggtgggggtagggaggggaaagttaccccgctggctgtgagtcccttttggaatataagggggtagtgggaaaagtggtactaccccccgattttgagccctgagtatgcctggcccttgatgctaacatgccccagcttgggatgtctctaagtggttttggggaaagctggagcccttactcagggggctggtgaaatgccccccccaaaggaatgagtgctataaaaaggagagaggagtgtccccccccggtttttgcccaatgtaattttccttccattaaagtttccgtgttttggttaagtgga

SEQ ID NO: 574351 - DNA, 244 bp, Homo sapiens
tggatcgatgactccccggaataacctcactaaagactctcataccatacttggtgaggatacttcgctcaacctcttcttccctaggtcaaagccactatcatctgatgtgttagggatgggttctggatggaagaaataaatcagctcccaatgggagcccacggaactaagtagggtcccaagaaaaaaaacgggagctatttcacagagctgagcttctgccaaatttcattcctccaac

SEQ ID NO: 574352 - DNA, 841 bp, Homo sapiens
  misc_feature (30)..(30): n is a, c, g, or t
  misc_feature (69)..(69): n is a, c, g, or t
  misc_feature (78)..(78): n is a, c, g, or t
  misc_feature (108)..(108): n is a, c, g, or t
  misc_feature (123)..(123): n is a, c, g, or t
  misc_feature (149)..(149): n is a, c, g, or t
  misc_feature (183)..(183): n is a, c, g, or t
  misc_feature (226)..(226): n is a, c, g, or t
  misc_feature (236)..(236): n is a, c, g, or t
  misc_feature (309)..(309): n is a, c, g, or t
  misc_feature (547)..(547): n is a, c, g, or t
  misc_feature (609)..(609): n is a, c, g, or t
  misc_feature (633)..(633): n is a, c, g, or t
  misc_feature (648)..(648): n is a, c, g, or t
  misc_feature (688)..(688): n is a, c, g, or t
  misc_feature (697)..(697): n is a, c, g, or t
  misc_feature (728)..(728): n is a, c, g, or t
  misc_feature (757)..(757): n is a, c, g, or t
ctggcacccccccgggcaccatgccccacnctttgcctccgtaaccagccactcctcccggcactgtgnctatgtgcnagaacacactttggtcccaaacccccaccntcctcccagtgtctnaccccagcattctgcgggcaacctcncctggggcatcacagcaccccacacgccctgtgncacaagcccctggccacaggtgtaattctgggggccttgggcnacacacaggnggcagacagggctcacaaggagtcactcacagggtccacacatgcacactgagagaatttctagggaagtcantcttacattggcacattctgaaggtccatcacacataagaatcatcctaacaaaagtaagcttattgaacacctctatgtgccaggctctgtgttgggtactttgatcaatgcccctgtttcagtctcatctgtactcacggcagccctgtggagtacggtgtactggcccagcttacagatgcagaaagcgagacgttctgcatcagataaagtcacgtggctctttagtaacacgnacaaggctcctcgcaaggaactcgtggcagaagagggcagcagttggcagtagctgccgatntctgccccagctccaccattcctncctgtggctgtgccntgctcgtggtttcagtgccgtggtccatgtgctgccttangagctcganctggtgtgcttggcggcccaggctgtgagtnctctccctgctgcggcgccccacccgatncctctcccagaagcggtgggatgggccccatgaactgcacaacatgctgaggggccatgtgctgccttgataagaacagcttta

SEQ ID NO: 574353 - DNA, 889 bp, Homo sapiens
  misc_feature (121)..(122): n is a, c, g, or t
  misc_feature (124)..(124): n is a, c, g, or t
  misc_feature (175)..(175): n is a, c, g, or t
  misc_feature (207)..(207): n is a, c, g, or t
  misc_feature (430)..(430): n is a, c, g, or t
  misc_feature (433)..(433): n is a, c, g, or t
  misc_feature (455)..(455): n is a, c, g, or t
  misc_feature (486)..(487): n is a, c, g, or t
  misc_feature (499)..(499): n is a, c, g, or t
  misc_feature (507)..(507): n is a, c, g, or t
  misc_feature (509)..(509): n is a, c, g, or t
  misc_feature (514)..(514): n is a, c, g, or t
  misc_feature (518)..(518): n is a, c, g, or t
  misc_feature (528)..(528): n is a, c, g, or t
ctctgtgctagtttttctttttctgttattagcctcatcccaggatataaagctttgtgaagtacaattaacttaatgtacttgaatgaatagaacttgctacttttgtttttttttttgnnancaacagagtttggctctcattgcccaggctggagtgcgggtggtgctattncagttcaccacgaacctctgcctcctgggttncaagcgattctcctgccttagcctcccgaatggctggaattacaggcacgcaccaccatgcctgactaatttggtatttttagtagacatggggtttctccatgtgggctcaggctggtctcaaactcccaccttcgaggtgatccgcccacctcggcctcctgaggtgctgagattacaggcgtgagccattgttgccagcttgctaattttcacagaagtnganggcaattcttcacttgtaaccngtgccagtgcacagaacctttatatattttnngaagccagtacngtgctcgncntatancaangctgcttcanggatgagacctttttctaaaagcatgtaatgtgagaagccggctgctaatatcttccctctttagtgattaacaatggttggtgcagggccgggggctccaggctgtgatctagcattgggaggcgagccaggaggataactggagcctacaagtttgaggcagctgcccagaatagcagactggtctctccgagaggtaaaaatacccagtggggaggggcctggaacccagcatctgggccaggaaggaccctactggagaagagcccgagaaccgcaagcgggcaccctgggagggcctttcgaacacaatttttttttcggggcccccagaggggcccacccataaaaagctcgaga

SEQ ID NO: 574354 - DNA, 205 bp, Homo sapiens
aaaggcacatatatccacacatgcacacacagcacacacacaaacgcacacgcacacacaaacgcacacgcacacacgcacacacagcacacacacgagcacacagcacacaaacgcacagcacacgcacacacatgcacacacagcacacacactagcacacagcacgcacacaaagacacagtacacatggaatgcacacaca

SEQ ID NO: 574355 - DNA, 291 bp, Homo sapiens
  misc_feature (19)..(19): n is a, c, g, or t
  misc_feature (32)..(32): n is a, c, g, or t
  misc_feature (198)..(198): n is a, c, g, or t
  misc_feature (236)..(236): n is a, c, g, or t
  misc_feature (259)..(259): n is a, c, g, or t
ggcacagtgagcaggtctngatttcccaggtngtgtcaagacagatgggtaggccaggcacagtggctcacacctataatcccagcactttggaaggccaaggcaggcagatcagttgaagccaagagctcgagaccagcctggccagcatagcgataaccccgtctctactaaaactacaaaaattagccaggcatngtggtgcatgcctacagtcctagctacttgggaggctnaggcaccagaattgcttgaactngggaggcagagtgagccaagatcgtgctacta

SEQ ID NO: 574356 - DNA, 109 bp, Homo sapiens
tttgttgtgttgagctccgcttactgaactccgcttactgacgcttactgatgctccgcttactgatgctccgcttactgagcccgcttactgatgctccgcttactga

SEQ ID NO: 574357 - DNA, 243 bp, Homo sapiens
tcataattaacaaacaaaaagttaatatttctaatttctatgtaattactagaatatacttagaactatctccttatttaatacattctcacatggggttggcaataagcatagtcaaagttactttgatctagtcagtgaacatagaaggttctaactatctaataagtcattaagagcaaaattatttaacggttactacaagcaattcttcagctgatattaaccccccagggataataa

SEQ ID NO: 574358 - DNA, 142 bp, Homo sapiens
ggatgcctatatcccagcgcttttgggaggcaaggtgagaggatgcttaagcccagaaacgtgagaccagcctgggcaacgtagtgagacgctgtctctgtattacaaaattttttaaaaaacggtttgtaggtccttaagt

SEQ ID NO: 574359 - DNA, 296 bp, Homo sapiens
tgctgtgtgattagagtcttttagagaggggctgcaaagaagaaggtcgtccacatattgaagatgactgggagacaggtttaaggaagtgaggtttcgggctagagcttgtccaaagaaatgagggctatccctgaagccctgatggaggacagtccatgtgagttgttgtgactggagggtgtcagggtcagtccaggtgaaagcaaataggtttggggaatcagggtgtagggaaatggtaaagaaggcatccttcaggtcaattgcagtggcgaggctaggatgggtaccga

SEQ ID NO: 574360 - DNA, 366 bp, Homo sapiens
cgcttgttcaggaaaatggaagggaagtgaaaataaacgtgtattcaagtaaaataaacattcgcttctgacaggatcacaaacatttatcacagtttcatacatttctacgagggaaggaaaggcagcagagaagaaaaaaaaaatgctctttcagcctaagagacctgcatttgaaggcagggtccaccactcatggctgtgtgtaactggctagttaattggtctaagtttacatttccctatactataaaattgagataataggccgggcgcagtggcttacgcctgtaatcccagcattttgggaggccgaggcaggaggatcatgaggtcaggagttcgagatcagactgaccaaagctt

SEQ ID NO: 574361 - DNA, 1156 bp, Homo sapiens
ggcttggaccagagctggacatatgcgcgcatacgcgatgtagggatcataattacgagtcggacaccctcttgcactcgtctcaagtcctagcggccttctggagtctcccgtcactcaggacatcatctgcgacgtggggatgcctgtaatgcaccgaaccgtccgctacaactgcacgagtgatatacctcaacaggaagatcctgctcactcagacccaagatggccatggccaactgaaggcaactaccgcgagctgcgctggcttcaccccgctggctcgaggagctcgcgcaccacagaggcagtacttactgcctcggactgatacaggacctgacaaagcagcgaaaccgctacccttcggcagatgcggtgctggctgacatgggacacctgcatcgcgaagtgagatctgtgaggagctctggaacacccacagcccgcacatcgaccatggcgcctggactggcgctggcagatcatcaccaacgcctcgggcaagccacccacgtgctgcgcacacagcccaccaccaagcggctggatctcgtgacccactggtcaccagcaagaacggagggatacactctggctggccacccgcaacgcggttgcgcacgggcgcaccgcctgtactacggacggctcgtgccatgactccgccatgaaccggaaccgcctcggctcaacggatcccagaccactctggcatgaccgtgccacccccacacacacggcccacacaccgccacacacggccaccacaccgccaagagcacaaatacaaaccacaagcatcattcaaacccatgacccaacaccggacaacacacggcacagccccacccccgccacgcaccaacacggctccaacagaagcgtatctccaaaagaacaaaagcaagaaccacgaacacggcaccaaacggaccgccacacccggcaccaaacgggacagtgccaccacaacccggacacactcaagaccgacgcactacccgcacgacacgcacacagccttacagacgaggacgcacccacgacaaccacacgcaccaaacacaccaacatcgcccagcacacccataaccacacacgcccacagcccgcgaccacccccacacgcaagaacacaccaacggcccaaccc

SEQ ID NO: 574362 - DNA, 741 bp, Homo sapiens
gatgggcagggtagaggaaagggagacacgacgatgatccatctctgaagctgtcacggtgcttagtgcccgaggacagagacgaccacaaagccggtacgtgcgcaagctggatcacgaccggagctgcgaggcctccgagtcgtaatgcaggcgcgcttggtaaactctcctgcagcggagcgcacaggccgagtctggcatgctgacgactgtccgtctctggagctgggaggtgcgatgcaggatgtatgagggcaccgtgtcgtcaggacgtgcagtcacgcgtctcggatggtcgtgcagatgctcaatctaggctactgtcgggagctcttgggtgacttggatggagactcacggagtcatggaacgttgtatctctgggggaacgtgtctaggctacgagcgagagtattgtcgcagttgtgaagcaggggtgtcaatgtctggtgggtgggggaagaatgggtggtgcttggccaatggtgtgatgaagttcctaggcaggatcggctacaggttcctactgcatcgcgaggctctgtgcaactcagggcttacgaatgggtggacgggcagacacagtaacgtcccatagttcccaggctggggactggcttggccgttgtgggaaggctgggggcggattctcgttacttcgtgatgtgtgggagtcttgtcggccgcaagcggaacttccctgcgcctgccgcggacccgtgcagggtgagtgggatg

SEQ ID NO: 574363 - DNA, 211 bp, Homo sapiens
  misc_feature (50)..(50): n is a, c, g, or t
  misc_feature (86)..(86): n is a, c, g, or t
  misc_feature (103)..(103): n is a, c, g, or t
  misc_feature (119)..(119): n is a, c, g, or t
  misc_feature (182)..(183): n is a, c, g, or t
gagttgcctgagcaggtgtttggttggctcagattgccggcgcccctggnagcattggtggacacctcatcctgggaggaccaagncttcttcagccgctctnggctgcagcggtaccnattgggataataggaatccatttccaagatggcttccttggccttctggggaatagtggcatnntggttctctaggatgagcctcttgatgt

SEQ ID NO: 574364 - DNA, 129 bp, Homo sapiens
attgtcattccgaggatctaccatttgaaggagaatagggcatctcgaaagagacttgctatggggtacaaattcttccatcatcttctttagagggtgagcataatccacaagtcatctggccagaga

SEQ ID NO: 574365 - DNA, 124 bp, Homo sapiens
gagacgtagctggtaggcaagcgcagcacacggcccgggccggctttgccgcacagtggtgggagggccggggcggcgccggctgcaggtgtgggtgtggcaaggttcctggaaaaggggctgg

SEQ ID NO: 574366 - DNA, 125 bp, Homo sapiens
ctaaacatcatcaagagcaagtgatcccactgcacatcaacatggctttaaactccacacacgtttctccttctgctcgatattgaggatttcgtgcccagactccagttccaactgtaggctcc

SEQ ID NO: 574367 - DNA, 435 bp, Homo sapiens
aggccctggtctcactcttcccctcttcctggaagccttcctgctgccaccccgcgtccctccatactgtgtgccgtgcgcgcgttcgcctgcgctgggcaatctggtacaagtggtgctgggggccctggtctgttggccctgcaccgactttcccatgagttcaagagggtgtctggcttgctgcagtgaccacagaggaggcccattgcatgagttattcccaaatgaatgaatgaatgagtgagtgaatggatgcattcctctcattttacagatgagtaacccgaagcccctagaggagtggtcacctgcctgagggcacttctgtcccaccagcatcagaccaggtgtgtgcaggccgaaccgagtccccggcaccatgtttgggaagaggaagaagcgggtggagatctccgcgccgtcgcctacgca

SEQ ID NO: 574368 - DNA, 681 bp, Homo sapiens
  misc_feature (177)..(177): n is a, c, g, or t
  misc_feature (182)..(182): n is a, c, g, or t
  misc_feature (450)..(451): n is a, c, g, or t
  misc_feature (484)..(485): n is a, c, g, or t
  misc_feature (511)..(512): n is a, c, g, or t
  misc_feature (559)..(559): n is a, c, g, or t
  misc_feature (574)..(574): n is a, c, g, or t
  misc_feature (576)..(576): n is a, c, g, or t
  misc_feature (586)..(586): n is a, c, g, or t
  misc_feature (592)..(592): n is a, c, g, or t
  misc_feature (595)..(595): n is a, c, g, or t
  misc_feature (597)..(598): n is a, c, g, or t
  misc_feature (617)..(617): n is a, c, g, or t
  misc_feature (626)..(626): n is a, c, g, or t
tatgtagtgctcagcactccgtgggggcttcagactggagaagagaaaactgcccttccctttcaaggacatcctccaagggccagaatgctcagttccgtaaaattaactctccactgcctacttttttttttttttttaagacagtctcactcggggccccaggtgggagcgcanggggngtgatctgggctcactggcaacctccgcctcccggggttcaagcaattctcttacctcagccttccaagtagctggggattacagggcatgcgccacctcacccagctaattttggtatttttagtagagacgggatttcgctatctgggccaggcgggtctcaaactcctggacctctagtggatccattggcctcggcctcccaaagtggctagttattacaggtcatggagccaccatggcctgggcctggctggcctatttaanntagcaagcagttacatgttaaaagaaaagaccnngggcctgggggacgctgccaagggcnncctaatctggacacttctttcatggtgggaccaggggatctggaacnggtggtttcttccanancttttgggangctggngtncnntggggggtaagctaaatanggggccccnaaatataccccttatataaccctggtaaccggtgaatatcatctggacataaggg

SEQ ID NO: 574369 - DNA, 165 bp, Homo sapiens
tggcgtggtggtaaaacctgtaatcccagttactcggcaggctgaagaagagagtagcttgaactctggaggtggcggttgcagtgagccaagacagtgccagtgcactccagctctcggtgacgagcgcaaggctcctgtctcaactcattaaaacaaaagaaa

SEQ ID NO: 574370 - DNA, 155 bp, Homo sapiens
agaggatccgagattaggcaagcgggtagatcagtaaacattcctttttattttaaaatacttcacaaagatggtatatgttcatgatgtacagttatgtttggatgtatatatatacattctggtaagggttaccacagtcaaattaacacatg

SEQ ID NO: 574371 - DNA, 430 bp, Homo sapiens
gcactccagaaaaaaaggtgggcacacacagaccacggcgagaaagggagcaaaaccccacacgctaccccgaaagggggggtgccccgccgcgagctaggagcaacaaccacaccaccgaccagggtttgccgagtctacaaaccagcccacacctccctcgcgcaccccgcgcgcgtgtgcagccacgcgcgagggctcctccccccgtatgcacgcgcgagcgggtgctcggaaagactcctccatcataggcgaatgtggggcgaaaccaccggcaactaggcgtggacctctcccgccgccacagacaggcaagaaaggagcaggcccccgccgccgccgggccacgtcgagagacgagcgtgcgcccccgcccccgccggcgggtttcaacgaagaaagaaatatccccgtctcaccaagacga

SEQ ID NO: 574372 - DNA, 596 bp, Homo sapiens
gtgaacggatgggcccccccgagcgcgctgggccccgcggtcaaggtttaacaaactcctcagtgtcatagtgtgtcccccggtgtgtcagccagggatggctcccatgccaggcacagcagtgcagctgcagaagctcaacaaccagtatttcaaccatcatccctacccccacaagcactacatgccggatttgcaccctgctgcaggccatcagatgaacgggacaaaccgagcacttccgagattgcaaccccaagcacagcggcggcagcagcaccccctggcggctcgtggcggcagcagcatccccggcggctctggcagcagctcgggcggcggcgcgggcagcagcaacatgcggcggcggcagcggcagcggaacatgcccgcatccgtggcccaggtccccgttgcaatgcttgcgccaattgtcatagacactgatttcatcgacgaggaacgtcttatgtccttggtgatagaacatgggttgggaccgcatcaaaggagctgcccgaacatctggctgggggcaaaacgagtagggaatctcatggaccggacttcgtgttgcaaacagcaagcccagcaga

SEQ ID NO: 574373 - DNA, 507 bp, Homo sapiens
  misc_feature (25)..(25): n is a, c, g, or t
  misc_feature (47)..(47): n is a, c, g, or t
tggctatcccaggagtgttttagcntgagttttcatagatggaacancctgaagaacagaagttgtttggtctggaagaaagcaagcttggtgaaagatgggcaggggagagacggaaatgctgatctcagagaaactagagttgctgtgtgacactggaaagcaggtcaaggaccaatggacccattcagattaataaggaagatttctctaacagctactcaaagaaaaaattctgtgtgtgttgagggaagggtgggtagcaaggctccttggaggtggtcagtacccaattacaaaaagcattcaagtaagcacagactagcaaacacttagctgggatctatcaaaagggttccttttgtaagctgtggcctagaagacttttattttagagtcttattttagagacagggtcttgctatattgtccaggagatggaggttgtcgtgagctaggatctgccactgcactctagcctgggtgacagtaagacccttgtctcaa

SEQ ID NO: 574374 - DNA, 866 bp, Homo sapiens
  misc_feature (533)..(533): n is a, c, g, or t
  misc_feature (535)..(535): n is a, c, g, or t
  misc_feature (632)..(632): n is a, c, g, or t
  misc_feature (659)..(659): n is a, c, g, or t
  misc_feature (671)..(672): n is a, c, g, or t
  misc_feature (677)..(677): n is a, c, g, or t
  misc_feature (732)..(732): n is a, c, g, or t
  misc_feature (739)..(739): n is a, c, g, or t
  misc_feature (744)..(744): n is a, c, g, or t
  misc_feature (843)..(843): n is a, c, g, or t
  misc_feature (846)..(846): n is a, c, g, or t
  misc_feature (854)..(854): n is a, c, g, or t
ctgggaaagcgtttctgcgtcagcttccttttagaggagatgatggcacactatttgatgacgacttttattggaggaaagaaaacaagggctggagcagtttatatacaaggtcgctggtcgtcctctggcacagacacgcaacgttgtcttcacatgtttttactggatgaatataagtagataaaagctatactccatgtaaaatatgacatgcctgaattttggcaaggatgggggaaaaacgtgactattaatgattgataatgcaccagtgaagaagttctaatcttttagcatgctgcacagaaactggtataacatgccttcagtatactaacatctcatatgctcagttatgtctagttttggcagttgacaagaagttaatttgctttagtaaaaatccctcattccagcctttctatataaatagctctttcttgctgtcttgaatgtggtgcacactatagcctcacaaacctgttattccagtgtaatctgcagtgtcgtaactaaagttactggcttgntnttatttgcacagtttttgcgtcttgtttgcttcttgcatctgattaactagaatatttctctttccccccttttaatttgtgatgtcacttggaccncatttatgtgtaggagcactacaccanttggtttccaannactgncacacataagatacatacttgtgtgcagaaagtatcttcctccaggcttgtaatncccttcncatgnaagattaatgagggaaatctttatattctgtataaaaacaaaatcaaatttatatactaaaatcatttgtctaaaatttaagttgttttcaaataaaanttnaaatgcanttctgatatgaa

SEQ ID NO: 574375 - DNA, 419 bp, Homo sapiens
  misc_feature (419)..(419): n is a, c, g, or t
tgaatgaacacacctgtgatctatgccttgtcttgtaattgtggattaatgtgactgttaatcactccctcaaagggagagataagttggacctttttccttgctgtgccatattcagcatttgattttcatgggccccaccatttatgtgtagaatttgagacggttgtcacctttctctgaggacagagcttgcagtctgcacatcagctgctgctggagattcaaagcccagctgtgggtccgagagggaagctgactgcgctggctgaagaatgaagaccactggactctgcgctaatctgtatggggtatgcttatcaagaacgcttctgaacaatggagactttgatgcgagccatttggtccatgtgcttatctatttattagagactttctttcccttgcctgaggacccn

SEQ ID NO: 574376 - DNA, 599 bp, Homo sapiens
  misc_feature (41)..(41): n is a, c, g, or t
  misc_feature (102)..(102): n is a, c, g, or t
  misc_feature (365)..(365): n is a, c, g, or t
  misc_feature (392)..(392): n is a, c, g, or t
  misc_feature (404)..(405): n is a, c, g, or t
  misc_feature (410)..(410): n is a, c, g, or t
  misc_feature (465)..(465): n is a, c, g, or t
  misc_feature (472)..(472): n is a, c, g, or t
  misc_feature (477)..(477): n is a, c, g, or t
  misc_feature (576)..(576): n is a, c, g, or t
  misc_feature (579)..(579): n is a, c, g, or t
  misc_feature (587)..(587): n is a, c, g, or t
ctcatccgcaccaatgaagaagtgtaactaactaggcattngcgcagacactggcataggcatgccctggggtacaactaacactcaacctgctcccctttngttccggctggtctgggcagtggacaaggacattcgttggctttagtgaaactccctcgctccagcctctctaagtagctcttcccgctgtgtccgtgtgcacactgtagccccacagccccgtagaacctgcaagtgtcctggactaaagctgccgacttgctctcaatttgcacagtttttgcgtcttgtttgcttcttgcatctgattaactagaatatttctctttccccccttttaatttgtgatgtcacttggaccncatttatgtgtaggagcactacaccanttggtttccaannactgncacacataagatacatacttgtgtgcagaaagtatcttcctccaggcttgtaatncccttcncatgnaagattaatgagggaaatctttatattctgtataaaaacaaaatcaaatttatatactaaaatcatttgtctaaaatttaagttgttttcaaataaaanttnaaatgcanttctgatatgaa

SEQ ID NO: 574377 - DNA, 446 bp, Homo sapiens
  misc_feature (13)..(13): n is a, c, g, or t
  misc_feature (88)..(88): n is a, c, g, or t
ttctgccctaaanactccgtgggagaccccaggaggttcacatttgtggaaaacgattccgtgtgtcctacagcctatgtggtcacantgcctaggtgtctcgtttacctgagacagacagcccagtcccaggggggaaacacagtaaacaaagagttactgttggccgggtgcggtaactcacgcccgtaatcccagcacgttgggaggccgaggcaggtggatcataaggacaggagttcgagactagcctggccaacatggtgaaaccccgtctctacaaaaaaatacaaaaattagccgggggttggtgccggcgcctgtaatcccagctactcgggaggctgaggcaggagaatcgcttgaaactggcagtggaggtcgccgtgagccaagatggcgccactgcactccagcctatgtgacaagaccaaaactgtttcaaa

SEQ ID NO: 574378 - DNA, 146 bp, Homo sapiens
gtgggtgatctagaggatcgcgtatgtatgttcacgttcccccaaaattcacaggaaatcttactatcaatggatgatatttggagacgggactttgggaggtcgttgggtcaggtgaggtcatgagggtggaggacagattgagt

SEQ ID NO: 574379 - DNA, 242 bp, Homo sapiens
  misc_feature (112)..(112): n is a, c, g, or t
ccccaaagtggcaagccaacattccatccaattcatgtgcaagcaatcgttccggcatgcatgcacccaagcaggctcattccaagcatctctggccagtggcaggcaagtnctctttcaagcaacacatcagtttcaacaccacattagttcaaaaccattttccggtcttcatttccatttgctgtacacagttgcatcatctggctggtcccttttacatacatgccagcagtgcagca

SEQ ID NO: 574380 - DNA, 388 bp, Homo sapiens
aattttcaaatgacatttagttcatctgtattcagtattaaggtttcttcttcacttagctgagctctataaacacctgtcagtggcactatgagatacagcctttagaatattgctgtttcattcacacagtggactgtagggaggagaaagccagtgccagggagggctccttagttattgagacctcaccttcccacctctgttgtgtgctcttgggagctctaggtaggggtctcactcaagtaaggctgtgagaggtatctgggtgatggatgtgcttcaggaatgcatttcacagcagatgtttttccagacttgctgttagggtgcagtttcctccttcagggagggtttagtggctcaggaaattaataaagtcagacag

SEQ ID NO: 574381 - DNA, 889 bp, Homo sapiens
ggccactgtggtgccgggtgtttgttctgtgtgggcgctcactggaggctgttcctcgcgggcggctgttggtgaacattctcgtcttccccgcccggttctgttgtggttaacccctgcctcgggacaggccggttgtgttccaccctcgcctgttgttggggtggtgcgtttttttgtccttttggggtcattgcttcccccccccgctcgggtcgggcactccgacgcttccatggcgcgccgcggcgcgccgcccccgcagttgtggtggtgtgcacccacgatgggcgctgcccccccccccaccctccttcctgccacactcatttctctgtgtgtgtgagctgaccgtcgtttgcggtcggtccatcctctcttctcttctcgcacccccctgcttctgtcgccccgctccctctccctcaccacctcgctccgcccgtgtcttcgcactcacctcccccctccctccgtccgcgactctctctttgttgtgtgtgtgtatatagaggcaccccgtcctctcttcggggcgcccctcctatgcatacacaccggcgcgtgccacccccctccctcatccgtgggggctctgtctgttgcctcccccccgccctctctctctctgttgtcgtgcgctcgcctcctctcactgcagctccgagcgccttcttcttcgcgtctgcatcctgctgcgcccccacctcctcctcgcttgttgtgcccccgcctggtcgtcgtcgtttcttttcttgggtgtggcgcccgcctgtcggttgtggggggagacctcgtgccgccccactcaaaaaccccccccccccgtattttccctcctccccccccccccaacactcccaaaaaatataacaaaaaaatgagggga

SEQ ID NO: 574382 - DNA, 782 bp, Homo sapiens
agatcctgagaggagctacaggatgaattctagaaacagcgcacttcaggaatcatgttgcaggtgttgtgcatggatccaacacagtcggctgaaactgacaactcaagacaagtggaccagccagcaggacccagatcatccaactcggctgatcctgagacgggaccaaactgctgccgaagacgacgacctgtctctggtcactccggaggctaaccagcctacgcatggctgaagttcgaggaaacaacaagcccctgctctagctcacacactgaaagctgaactagtctatgcacggcccaacagcttgaggactcatcaacggcaagtaaatgtagttaagacatcttacaactagctagtcctcccttgtacactattcaactgcgctctacctactagtcacttgtacacatgtgctacaaccacatcctctacccaacctaaggaccctcttctgtccttactagatatgaaatatactgtacaatgtactcacagtcgtgacgcccacttaacacactgccctagacagaaaccaaccgcagacgaccgggccgtccccccaaccggcaacccaataccataccctaggcccacgcaacacacccgcataccaccaagcgaccccccacacaccagcaaaacgcctacacactgcagactacacgagcaccacaccccaaacaccaccgcaaagccgcagcgaagcgcacctcaagcacacacaagcaccccaaggcacaaggcccagccaccacacgaggacagcaaag

SEQ ID NO: 574383 - DNA, 203 bp, Homo sapiens
tgagtacatggtataatatattatcacaggatatatattacagtataactgttggatacattttcttgtccataggtcaacttcaattaagttgttaagtgttcatttaacagcttgtcttaatatatttatacttcctatttaaaacgaaaatagtacctgtgtcattgtactgatctgaaattacacactaaagcctcgtt

SEQ ID NO: 574384 - DNA, 260 bp, Homo sapiens
  misc_feature (2)..(2): n is a, c, g, or t
angagtgctcatcagcttcgaggaggagcgggccatgtgtcttcaagatttacacgctctgttgaacaccagagctgggcagggaggacacgctccactgaccacctagagctgggccagggactcaacaatggggacagaagtcccccagtgcctgacagggcttggagtggaggttcaggagcaaggtgcttctggtcctccagcccctgtactcggccattgcctgtgatcactgcggtatgcgaccctaatttgtg

SEQ ID NO: 574385 - DNA, 230 bp, Homo sapiens
ataagtacttattctagtctttattctctcagacgacacccgcctgtttgcctgacagcagagatgccggccattattcatcattcttaaagagaagaaatttcaacccagatttcatatccagccaatctaagcttcatacgtgaaggagaaataaaatcctttacaggcaagcaaatgctgagagattttgtcaccaccaggcctgctttacaagagctcctgaagga

SEQ ID NO: 574386 - DNA, 371 bp, Homo sapiens
agagtcacacgctaaaatctgtaagaggataggtgacaacgaaaatcaaccatcatgacgaaaccaatggaaagtaggaagaccgccagaaaacagacaatgttccatcgtgcgcacgagttgcggcggcgagcagaggactaccacaaatgccaaatccccccttctgcaaaagaggctcttatgcaaactgggtctgagtgccgacagcgaatcatcgtcattcttcaggattgccctactgggtcctacctcacagctgaaactttaaaaaacaggatgggccaccagccacctcctccaactcaacaacattctataactgataactccctgagcctcaagacacctcccgagtgtctgctcactcc

SEQ ID NO: 574387 - DNA, 102 bp, Homo sapiens
tcccatttagagtgccacggatccctttcccttgacttcttaaacagagtttagagtgggatcctgcagtgcgcatgaccccaggccaagccccagctgcgg

SEQ ID NO: 574388 - DNA, 308 bp, Homo sapiens
atcaaccatggaggatgctagcagcgaagctaccagttctgagatacgcagctcgtccccaagctgtgcgccgtggtagaacacccatggccccgtggagcctgacaagagacaatatccgacaggagaccctacaccctagacccagaggcttcacctgggatgctttggacctgggcgatcgtggtgtgctaaaagaactgtacaccctcctgaatgagaactatgtagaagatgatgacaacatgttccgatttgattattccccggagtatatatagtgggctctccggccacccggctgaatc

SEQ ID NO: 574389 - DNA, 462 bp, Homo sapiens
gagctgaagttgctaccggcagtcagccgcagccacagctctggttcttcctcatcgtcctcctcggaggccaaggaccgggactcgggccgtgagcagggtcctagccgcgagcctcaccccacttaacataatctgcggggaggaggagccccaggggtgctagtctggactgctgggactcggggccctggggcttaagagggaccccggctgcaactgaaatatgaagattatgggtttttttttttttttttttttccccccccttttttttgggccccccccaaaaagggagggggcctttttcccccccccctccctgcttgtccccaagtcctcacctcaaactccctccaagtcccatgtatataggtcctgatgccttcccaaccccgcccctcaccctgttgccaccttgtttcatttgtaaaaggaaatacagaaaccccccccagaaaa

SEQ ID NO: 574390 - DNA, 310 bp, Homo sapiens
gcgtccagatcaatgatctcctgtctcagcctcctgagtagtggtggatacaggtgtgcgccaccaactcctgacaaattttttatttttagtagagattgggtttcatcatgttggtcaggctggtgtcgaactcctgaccttgtgatttgcccgcctcagactcccaaagtgctaggattacaggcatgagccaccgcgcccggccgggctagacactcttttaagcaccttacatgaatgagttcactgaatgcttacagcactgccatgatacaggtcctgtgattattcctaagtcgtatccaaa

SEQ ID NO: 574391 - DNA, 344 bp, Homo sapiens
tcgctcttctacattatatacaaactggctgccagcattgatagataactcctaggccagacgtgtttcttgtccttggagctcctataccagtaacttggctgggatgttttcagagttgggcccgagatacagagtttcgccagatagaagaaatcacagatatactttagatagcatccactagtgcatccttggattagggtcaatccagatagtgagccactgctccactctgggtggctgagtctcaagtcacggcatgtgcgagctgggttctttctagagccttcaggagtaagaagggtctcaatctggttgttgagagacttcagagtagcatc

SEQ ID NO: 574392 - DNA, 462 bp, Homo sapiens
gaatagtgtcataaaaggatatcatcatcatcctcacttgattcaaaggcaacccctttcgataattgaatctgggacatgatttggctggatgatgttctggaccacctttgatcctgctttgaagtggtagggaaaaatgtcttcttccacatctgattcatctacctcaatcacctctgaataattcctagtagtgacatttcgggaaggctgctggtcttgtagatttaaaggccatctataatagacattatttctagatgctgacccaacagtctttgagttcctgctacgggtagaagtctccagaccagtgtctgctcttcctctttgagaccctcctctcgatgctgaattctgccctcttccagctcttcgaactcttcctcgggctcttcctttgttggtagctgcttagatgctatcatcagagtcattaaccctatgttctgctaaatc

SEQ ID NO: 574393 - DNA, 447 bp, Homo sapiens
gtatacagaaccaagtgtatgctaaccagatgcatcgctcgcttcagatccatggcgctctcctaccacgctatatgtgataaagataattgggctgagtacaaagagaagttacctgagatccaagaatgcggaaatgtatctgacaaaaaacatcaaactcattagcaaaacataggactcagaacgttcctgtacaagtacagactaaagtctcacggactacggcttccttggactcatatgacttgtcaagattgccacagttccgatctcaacagtgtggggtgaaacaagaagactgtctcttcagcctttttcctataatcatggatgattaggtcttattcaaaaggaccgcacatattagtactcttaagagcatcttccaagactccagcagtgagcatttagagagtgtgttgtcttccagagtcatgaatgatt

SEQ ID NO: 574394 - DNA, 137 bp, Homo sapiens
cgggtctgatctagaggatcccgaagcgcacgagtggggtgtccgtcgcttccagattgctacagatacaagtgccttgtgttcaaggtatagccaatagacactcagctacaggtaagcaggtttcttgacatcat

SEQ ID NO: 574395 - DNA, 381 bp, Homo sapiens
ggagaagccacatgcagtcgtgtgtcacttggggtggtgtgcatgctcacttgtgcgcgattgtcccttagtggttgatcacctccagaggaaggtcctataccagacaaacaccaccatttccccccctacttacgccccatgctataagaacagatcaggggctgggcaggtgtggctcacgcccagcactttgggaggccccggcaggtgagatcatttgcaggtcaggcagttcaagacctagcctggccaacatggcaaacaccttgtctctacatcaagacattttaaaaaattagccaggtgtggtggcaggtgcctgtactctcagctactggggaggctgaggcaggagaatcacttgcctctgggaggcag

SEQ ID NO: 574396 - DNA, 102 bp, Homo sapiens
atatccactttaccatgagttaaaagcacggcctggtgatcaggcgcccccgtctaggatcagtaatccctgtctagtgagcgtaatcgtggtacgcgagct

SEQ ID NO: 574397 - DNA, 129 bp, Homo sapiens
tgaaggcaattagcattgagagatcccttaatagcccattccttgagcatgccagtaatgtgcagtttatattcattgatgtgattactatatcccaggtattcttggtagtgactcttgtagagaagg

SEQ ID NO: 574398 - DNA, 394 bp, Homo sapiens
gatcccggataatatcaaggtgaaggtgatgggatgtgctgagagtcatcagtgggatgtgcaaagagggagtcatagatgtctgagcagagagaaggacctcgctggcatctacagtgaagggagggacctcgctggcatctacagtgaatggagggacctcgctggcatctatagtgaagggaagggtcacgctggcatctacagtaaagggagggacctagctggcatctacagtgacgggagggacctcgctcacatctacagtaaagggaggggccacactggcatctacagtaaagggaggggccccactggcatcaacagtgaagggaagaaccaccctggcatcaacagtgatggcggatgggcgaccagtgcagcggtgtctgga

SEQ ID NO: 574399 - DNA, 461 bp, Homo sapiens
gactctggctggcgacgtccacatcgtgagaggagacttcgatgagaatctgaattacccagaacaaaaggttgtgactgtgggccagttcaagatcggtctgatccacggacaccaagttattccgtggggagacatggctagcttagccctgctgcagaggcagtttgatgtggacattcttatctcaggacacacacacaaatttgaagcatttgagcatgaaaataaattctacattaacccaggttctgccactggggcctataatgccttggaaacaaacattattccatcgtttgtgctgatggacatccaggcttctactgtggtcacttacgtctatcaactaattggagatgacgtcaaagtagaacgaattgagtataaaaagtcgtaaagccaggctggtctccaccacttattttgtcctcatttcattgtttaaatcaaataattaa

SEQ ID NO: 574400 - DNA, 84 bp, Homo sapiens
cagctcctaggtatttgtctgactactatccccatgttagaaattcacacaacaacaacactggtcgaatcggccgcgaattta

SEQ ID NO: 574401 - DNA, 1348 bp, Homo sapiens
  misc_feature (268)..(268): n is a, c, g, or t
  misc_feature (272)..(272): n is a, c, g, or t
ggttgagagacagaggcaccccggtacagagacgtgaagcactgaataaatagatcagaagagacggaaaaatgccccagagccgacatgtggaggaggagtgacgatgagtgagctgggacaggaagctcaattataatgcctccgacctactaggatagtccctgaatagagctgcaggaagatggacaaagatgagtgagagctctaatttaagtacaagtaaaacgctgtctgggagatggtcctgtggtgcacaagacttccngaanacgcgccacacaattggtccgtttcgtcagccacggtctacactccatggattctgttgcaagaggatgcgcaccggcgcacctcaaatcaactcaatagggtagccgtgtcagcattggcaggaatcgtcgggaaggtccccgttcagatagagagggtacacaaccccagttggttgcttttacaaagcgacacgagttgtccatgaaagtgacttaggacggtctacaatatttgccactgtgcgagagagaatgcaaccaggggggattatttgcttgtccagggccctcgcatacatgacggttccgagccaccaaccgttaccagtgcaacttgggggggtggaaaaggtatggggattagacacgtcaatagattattcatgggttctcgagccaagtcttaatcgaggaaccccttcggggcctcctcgtaggcggacagcttaattcgaagcttttggccttttcaagcctacccccaacggcttgggcacgcggagggggtttcactcccacaaggtgggacaataggcttaggggcggcagtgacggtccggaccaggatgaagcccattcaatattccgaaacgcttactcctggtttcttctaacctaggccggaatccgaaattgggaacccaaaggggcaaaaggaaacagccaacctcgttcgaagcacttgtgggcacgcactggtgaagagccgcctaggttccctgggattcgtgacaaggaagaagtggacgttcggggcaaccgcgggacaacgttcgctcacctgggcaagtaccacaaaccaactccctatttggcacccgctaatacaccttgtggccccgaccatcgttgcggacaaacggcaacatgtctcgctgccgttacaaaggcggtctaggctcgggttctcccaatgggaaagcgctcacgtgggatccgcgcgtttacactttcctcccacttggttgcgcccacacttaagggcccttcggtgtgggctatccgcgccccgttctcgtctcaccaacactaaggcgttgggtccccacactaagtttccaccgcttgtgatg

SEQ ID NO: 574402 - DNA, 276 bp, Homo sapiens
cccccccccccgggcctggggaaggggtaaagggtggggggtggggccccccccctctgggtaaaaggggccccccctttgggggggggggtttttttccggggggtccggggccccaaaagcggggccccggggtttgggcccccttttgggggggggggccgggggtttttaaaccggggccccccccccctttggggtttaaggggccccgtttttttgttttgggttccccccttttgttccgttttgggtttaggccccccttttgtccga

SEQ ID NO: 574403 - DNA, 210 bp, Homo sapiens
cactgcactccacgcctgggtcgacagagtgagactctgtcagaacaaaaacaaaaactaaaaaactggtaagttctgactaagtttctgataaggtttgactacttccagcacagctaggggcatggcttactccacgtgtccccaggtccttacctagtctggaaagcaggcaagtttaaccattttcaaatagccacggtctaccca

SEQ ID NO: 574404 - DNA, 402 bp, Homo sapiens
  misc_feature (62)..(62): n is a, c, g, or t
  misc_feature (222)..(222): n is a, c, g, or t
cctttgaaagtgcgccctcagaaatgttcccccctatgattaaagaccttacctctccccanggaaaagggcctttaccccagagtccttatcccccatcctggggagaagatagttcctctgactcgagtcaccctcctagattccctgtgtcaacctaaggaaggaggaaaaaggttaagaaacatttgtaaaggtcacagtacagcaacataggcccanccaaaagattgagatgtaatcctaagaaaatggaatgcttcccttccccactccttaccaccacagcaacagggctccttataataacagtggattacagctgaaagagctgcaagatgcagacaccggctggccaaggagagggggtctcaggaaagtccaaagaaaaaaggagagatg

SEQ ID NO: 574405 - DNA, 487 bp, Homo sapiens
  misc_feature (3)..(3): n is a, c, g, or t
  misc_feature (115)..(115): n is a, c, g, or t
ttnactccctgaccttggactggtcctcgtccgtggtcgttccgcgccgtcatgtctgtcctgacgccactgctgctgaggagctgaccggctcggccggcggctcatggtgccnggctcaaggtccactcgaaagccggcgcgggacaagctcggggtcctggatatcaccattgggctcacttcctgcttcgtgtgttgtcttctgcctgcgggctgggtcctgtcacacctggagagctacaagaagcgggagtgaagggagcaagtcttccctcatcctttgactagaccacttttgccagcccaccttgatcatgttgcctgcattcctggctggccttccccgggatcatgttattcaattccagtcacctcttctgcaatcatgacctctcgatgtctccatggtgacaactgggaccacatgtattggctctgcttggtggggtccccctttgtaacaataaagtctatttaaacctga

SEQ ID NO: 574406 - DNA, 108 bp, Homo sapiens
gggttttggcccccccggggggggggttttttcccctgggcggggttttttttcaaaaaccgggtttttttttattttggaaaaaaatggttcccggcccccgggcca

SEQ ID NO: 574407 - DNA, 364 bp, Homo sapiens
cctcacgttcatgtcacactatcttggtaaatggctttacacctgcaaatgacctagttgttgctaccgatatagtttgggtggtcccacccaaattaacttggatttgtagttcccataatccccatgtgtcgtaagaaggaaccggtaggaggtaatcgaatcatgggggcaggtgttttccccaataggtctccgtgaaagtgaatacctttcacttaattcctattggtttataaagggcagtttccctgctacgtgttctcttgtgtgtggtgcctatggataacttacctttttgggccctctctttggctcccaccatgattctgaggcctctccaggcttttggacattggcgtga

SEQ ID NO: 574408 - DNA, 179 bp, Homo sapiens
atggagcgtttcggtcggactcggtcactctccgaggaacgccggtttgcgccactctaggaaagctctcgttcccttttgcttgtgcgcggtctagaacatcaggccgaattgcgcggtttcgaagccgatgcctttcttgatcgcgcattctccgccgacgttgactcagtcgagga

SEQ ID NO: 574409 - DNA, 192 bp, Homo sapiens
ggaagtgctttgggagtatataacattcagaaaggccctttccaatggatgtaagtgtaaagttaataacatgaaagtgaaacgtgggaccatttttagtatcctttatcagacttccaagcacacgagaacggggcatgccgttcgcacactttacttgtgtcagaatgccgcaagggatcatggttagtt

SEQ ID NO: 574410 - DNA, 326 bp, Homo sapiens
ttttttttttgagacggagctgtgctctgttgccagggtgcagtgcagtggcgcgatcttggctcactgcaacttccgcctccggggttcaagtgattctcctgcctcagcctccggagtagctgggattacaggtgcacgccaccatgcccagctaattttgtatttttagtagagatgggttttcaccatgttggctaggatggtctcgaactcttgacctcatgatccgcccgcctcagcctcccaaggtgctgggattacaggctgagtcactgtacccagctggaccaattatgatcttttaagtcccaacccttcattcg

SEQ ID NO: 574411 - DNA, 379 bp, Homo sapiens
atctagcaagctatggtgctcatccccagatgtctgctatcttcactcaggacacttccctccgagactgacgtctgggctttctcatttcaccccaggctgccacccatgagcacccctaaatctcatctctccacccagcacccccagcctggctccagtctgaagaccccctccttccccttccctccagaacagtggggaaagcgagtctcggtccacccctaactgcggaaggagcaacggccaggagggcagcaagtgttcccttctccggtcctggcccagccagctcctgcgtgagtgggcgggaacccactgcgctcaacaccaggtctcacctccctctctccaggggggatggagcacccattggtac

SEQ ID NO: 574412 - DNA, 80 bp, Homo sapiens
aagtaatagtacttttaataaaattaagttcttaatagcacatttaatacattaaccctcccccttctgtcgtcttctcg

SEQ ID NO: 574413 - DNA, 719 bp, Homo sapiens
  misc_feature (598)..(598): n is a, c, g, or t
cgacatcctgggcggacgtaaacatactagtgctcactctacatgcgcaatactatcacactccctgagccaccgccctaatatgacgagctcacacactatcttgtatacgcaaatatgccatcttacgcgactccactaatgactccctaaagcccatgtggaagccacgatcgatgggtcaacagaacttagacaagtactctgaacactaggcgagatatggcataatacgccttacactcattctcaccccgctgaccacatctcctaccccttccttgtactatccctatgaggcataccgatagacaggcccatctgcctactactaacagacctgaaatcactcattgaatactcttcattcaaacacataggcctcgttgtaacagacattctcatacaaacaccctgtagcttcaccgtcgcaaggagatatcataagcgtccacagacttacatgctcattactattctgcgtaccatactgatactaccaacacgctgacaggatcatgataatcctatctcgaggacttcaaactctactgccactcataagcaattgatgactgtagcaagcctcggttacctngacttaccacccactagttacctactgggagaactcattgtggtagcacagtcttctgattacatatttaccacacagaacgggggttactacccacactttacaaggggcccccctccac

SEQ ID NO: 574414 - DNA, 841 bp, Homo sapiens
atcccagcacttgggaggctgaggtgggtgggttgcctgagatcaggagttcaagaccatcccggccaacatggtgaaaccccatctctaccaaaaatacaaaaattagccaggcgtggtggtggacttctgtaatcccagctactcaggaggccgagacaggagaatcacctgaacccagggagcgaggttgcagtgagccaagatcaggccattgcactccagcctgggtgacgagaaactccatctcaaaaaaataaaaatgaactttattccatgtgtgtatatagtcatatatgttttatgtacaaaactaagatcatattgtatacacaggttgagtattacatatctgagatgcttgggacaaaagtgtttcagatttcagattttttaagatttggaacatttgcatatgcctaacgagatatcttgaggatggaacccaaatctaaacacgaaattcatttatgtttcatgtacatattatacacataagcctaaaggtaattgtgtgcaatattttaaataactttgtgtgcaaacaaagtttggttcagtacttacatatggaatttccacttgtggtgcagttgcaccaaacgttcaagattgcgagtattagatttgattcggataggatgctcatccgttaggattaacaccagaccaggttctaaatataatgtttctcattgagtcaataggatagcaatacttcatctgggggccaaatgcattaacggaactgagaagctgcgcatcactggataccggttgggactacacgcagcgtacgtgtgcaccctattggcaacactgccatgcagaggaaaagagg

SEQ ID NO: 574415 - DNA, 432 bp, Homo sapiens
gaagccactttcctttacactagaagactcaaaaaaatctagccgcaaatgtgcatcactaatcactgagcaaatatattttacttgcttgcctgagcggagcatgacgacggtaggatagcacttacacacatatgcgagacactaatagccaagggcaaaataagatacagtctttgaatgcatctttcaaggttctaacattaccccagaaacaacgtaagttaaaatggaaggtttccatttatcttctgctgttttatatcacaatctcttgatacaaaaaacaaaagccaggaaccaagaagtctatgcacaaattcaggagagctctattatttataaacaagatggctcaaccacagcatgttataacaggacacagactattgatcacatggctttttgggggtttgtactagtcataaaacc

SEQ ID NO: 574416 - DNA, 468 bp, Homo sapiens
  misc_feature (4)..(4): n is a, c, g, or t
  misc_feature (13)..(13): n is a, c, g, or t
  misc_feature (24)..(24): n is a, c, g, or t
  misc_feature (27)..(27): n is a, c, g, or t
  misc_feature (35)..(35): n is a, c, g, or t
  misc_feature (39)..(39): n is a, c, g, or t
  misc_feature (44)..(44): n is a, c, g, or t
  misc_feature (63)..(63): n is a, c, g, or t
  misc_feature (78)..(78): n is a, c, g, or t
  misc_feature (87)..(87): n is a, c, g, or t
  misc_feature (136)..(136): n is a, c, g, or t
  misc_feature (157)..(157): n is a, c, g, or t
  misc_feature (159)..(159): n is a, c, g, or t
  misc_feature (161)..(161): n is a, c, g, or t
  misc_feature (166)..(166): n is a, c, g, or t
  misc_feature (173)..(173): n is a, c, g, or t
  misc_feature (176)..(176): n is a, c, g, or t
  misc_feature (178)..(179): n is a, c, g, or t
  misc_feature (182)..(182): n is a, c, g, or t
  misc_feature (189)..(189): n is a, c, g, or t
  misc_feature (195)..(195): n is a, c, g, or t
  misc_feature (200)..(200): n is a, c, g, or t
  misc_feature (203)..(203): n is a, c, g, or t
  misc_feature (239)..(240): n is a, c, g, or t
  misc_feature (244)..(244): n is a, c, g, or t
  misc_feature (252)..(252): n is a, c, g, or t
  misc_feature (267)..(267): n is a, c, g, or t
  misc_feature (307)..(307): n is a, c, g, or t
  misc_feature (335)..(335): n is a, c, g, or t
  misc_feature (348)..(348): n is a, c, g, or t
  misc_feature (352)..(352): n is a, c, g, or t
  misc_feature (356)..(356): n is a, c, g, or t
  misc_feature (368)..(368): n is a, c, g, or t
  misc_feature (387)..(387): n is a, c, g, or t
  misc_feature (399)..(399): n is a, c, g, or t
  misc_feature (402)..(402): n is a, c, g, or t
  misc_feature (452)..(452): n is a, c, g, or t
tcgnggggggggntcaggtttaanggncactatgngggnatcgnacatcgttccaagcccggnccccgccccagcccnccctcagcngggaacacagccaggggcccccagacccctggctctgcacaaggggggnctgcccccccgccccagctanananacganagcccanccngnnggncgggganaaaagnggggngcncctgggcccagtcaggggcccctacagtccaccagnngggngggggggnccagggggccactgnggggccagggagtttctcaaaacccagggcccagccccanctgggcccctgccaagccccaggcctgngtgcggggatggngccnccanactgagggtggnaaaagctgaactcaaaagnagcaatgagagngcngggggggcttggggggatggggagcaggcgcccacccagagcctcctctnaaggaggggacgctgc

SEQ ID NO: 574417 - DNA, 1278 bp, Homo sapiens
  misc_feature (370)..(370): n is a, c, g, or t
  misc_feature (662)..(662): n is a, c, g, or t
tggccagttttttttttatttggtaaagctctgccataaatcttctagcgtgtgccaagggtacacctgccacactcgcaccaggtgttgtgtccctgtgtgtacccagcaaaacaagatgttctgggccatcagcaagaccaggccagggaaggtggcactgggggtgggttctggccttagctggctgggtactggataatctttcttggtcttcatgttcattctacaatggatctctttcccctctctaaatacccccaatattcttgagatgcgctggggcgcctgtgtgggcaagaacactggctcatgaagcgggtttaagggctgagaacgcacaggggcgtgttgagatgagtattgcccnccacctattctaacgcggtggtgaaagggtggtttggctctctccgggtgagagatatcccctataaaactatggcgctctgggcctatctctctgtggctctccacagagagacgcacccaagaggagagatccacatctctggggagagaagacagggtacacccgtgtgtggtcacaagaattagcgcctgtgtgtgtgtgcgcccacatgtgtgaggtgtggggtctcttcacaagtctgtgggcagagtgtaagagcaccagggtgtacaaataacctctgtgaganccccatgtctgtgtgtgcccacaggcccaacagaggagaagaacagatgagataaagaggagtatgagctgcgctgagtatgtgggcgacagacaaacatcgcggggaacaacaaaaagaaacaacccaccattttctgggaaagtgggggctccctcaaatcctctgagaggacccacggtgtgtttctttttcggcgaaacaacaccccccgagggggtttatttccccaataaaaggactcatggggagaggggttataaaatctactccccggagagaaattcccccaaaggaaaggaccaacatttttttggcgcccgggtgtttctgctccccaaagacagggcgaggaaaggtcgccaccgcatcttcctcacggacacaacttttccctgttgggggtgtaatgtggggccccccacccataatattttcggcgcctccgtcaggggttgagagttcggccccccgtcgtggtggaaggaaatcaccacccaggagaagggcggcccaggtaggttccacacaccccccgagaggaagcccttggtaaagaggcggaccatctggtggcgccctcttgggggcgagagatattaccaccgctttctta

SEQ ID NO: 574418 - DNA, 190 bp, Homo sapiens
gcagaaattctgactttcaataactttgcaaaggtctcatggagagcagtacttagagttatataaccacttccagagcaggaattaaatgtgagcagttgttgctgatgtctagataaggatccgtgtagtgattattatgatgtctattcttattctgagaggactatatgcacatcagtgctctctc

SEQ ID NO: 574419 - DNA, 184 bp, Homo sapiens
ttctagaggaccccggctctctacctgggtctaggggatgcacatctcctcagaaaacttctcttatataaactatgggataacttagctttcagtttaaagtaattgattggggtagtattaccacttttctattttatgggcttttaaaagcaggggtaccggagctctgaatctcgtaatc

SEQ ID NO: 574420 - DNA, 3362 bp, Homo sapiens
ccccctgcccctgggtttctctgagtttgtgtaaacaggttgcagggaaaggtttgccctgccctgctagggccatgtgctcccacggctattctccctttttgtggaaagctttatgttgtaggtctccgggatagagaaaggaatgtcatcacaccctcccgagggaggccagtggggtctggggccaggcagcatacagaggggaacaagagggcagtccctgtgcagtaagtaactcagaatgactttactcaggaaatatgaccatgactcactggctaggagtgccccatgcccagttcttagagacccttgatagctcctagaagacaggaggctgccgtggtcaagaagggccaagccttgaagtctcacggcaccccctgtggtggaggtataaggctcaggggccaactactgggtcttgcagtccccatcgttgctgtgggctgtcttcaccttctttagttccttctgtagctcagactcggccaccacaacctcctttggcttctggtaagagatgatcagggtgcagttggcgtgggcaaagctcagcaaggcgtcatccagaggtagctggtgtctatctagatcaggaatggagaacttcttgtagtacttcttgttggttgttctgacaatgatgcagcgctccttctggtccacagagacactatagacatccttaggataggggaggtttcgaatccgccactggaaactcatcttggtgtccttgcgcatgaagataggattggcattgctttccttgatgagttcaggccccaggttccctgctcctaggggcgctgggtctcctacttcaagctgccactggcccatggctcccagggcacttttcacacgccactttctcacaagtagttcactcgtcttctcgtcatattcttcagccatttccttgccgtctgggaataaatagtgaaccttccttctccccctccataggcaaaggggttggagggcctcaattctggatttccacgtgcagcagccctgaccaacgctccaataggccgggatccagccatacttcaatggatcccaggggtatcttgaaggcatttcccaagcggcagaaaattcatgctgatgcatcatcaaaagtacttgcaaagattcctaggagggaagagggagaagaagcagaagagtggctgagctcccttcgggcccatgttgtgcgcactggcattggacgagcccgggcagaactctttgagaagcagattgttcagcatggcggccagctatgccctgcccagggcccaggtgtcactcacattgtggtggatgaaggcatggactatgagcgagccctccgccttctcagactaccccagctgcccccgggtgctcagctggtgaagtcagcctggctgagcttgtgccttcaggagaggaggctggtggatgtagctggattcagcatcttcatccccagtaggtacttggaccatccacagcccagcaaggcagagcaggatgcttctattcctcctggcacccatgaggccctgcttcagacagccctttctcctcctcctcctcccaccaggcctgtgtctcctccccaaaaggcaaaagaggcaccaaacacccaagcccagcccatctctgatgatgaagccagtgatggggaagaaacccaggttagtgcagctgatctggaagccctcatcagtggccactaccccacctcccttgagggagattgtgagcctagcccagcccctgctgtcctggataagtgggtctgtgcacagccctcaagccagaaggcgaccaatcacaacctccatatcacagagaagctggaagttctggccaaagcctacagtgttcagggagacaagtggagggccctgggctatgccaaggccatcaatgccctcaagagcttccataagcctgtcacctcgtaccaggaggcctgcagtatccctgggattgggaagcggatggctgagaaaatcatagagatcctggagagcgggcatttgcggaagctggaccatatcagtgagagcgtgcctgtcttggagctcttctccaacatctggggagctgggaccaagactgcccagatgtggtaccaacagggcttccgaagtctggaagacatccgcagccaggcctccctgacaacccagcaggccatcggcctgaagcattacagtgacttcctggaacgtatgcccagggaggaggctacagagattgagcagacagtccagaaagcagcccaggcctttaactctgggctgctgtgtgtggcatgtggttcataccgacggggaaaggcgacctgtggtgatgtcgacgtgctcatcactcacccagatggccggtcccaccggggtatcttcagccgcctccttgacagtcttcggcaggaagggttcctcacagatgacttggtgagccaagaggagaatggtcagcaacagaagtacttgggggtgtgccggctcccagggccagggcggcggcaccggcgcctggacatcatcgtggtgccctatagcgagtttgcctgtgccctgctctacttcaccggctctgcacacttcaaccgctccatgcgagccctggccaaaaccaagggcatgagtctgtcagaacatgccctcagcactgctgtggtccggaacacccatggctgcaaggtggggcctggccgagtgctgcccactcccactgagaaggatgtcttcaggctcttaggcctcccctaccgagaacctgctgagcgggactggtgacccatggctgggggtgctgaggagagccgagttggactggctacccctcctggccacccagtactccctccagcctcagctggctgaacctcgccgctccaaccaccagcttcctcagcgagcagggcccagggctctgggcctgaagcaagagccagcccggctcccagtgtctgcccggctcccagtgtctgcccagccctctcccagacaggagcaggctgccaccccttctacctcaccactgcccctcgaagaattttgcaaatggccccttgccccattttaagcaggagcaggtggctggtttgaagccccaggtatcccccttccctgctatgggaaaggccaagctgctgggtggggacagaagctgcaggggagagggaagcagccgtgctgtcaacatcatccggcaccctctggggtaggagaacagccattccacatgtgttccctctatccgtcctgcttcctgggcagctggtggtgctgggaatggggtgccccagccttggtgaggacagtgttgggaggcccaggggcccagtaaagtgcatttgacattga

SEQ ID NO: 574421 - DNA, 828 bp, Homo sapiens
gggcggcggcggcggctcggcaggcgggttcaggcttcgggggcctagccgctgacatgtatcctgctggaaggtgaacaagcgacatcatcggaggacgacgctcgcgtctcagagttcgatgaactgcggcgcgcgcggaatacaatagccggatagcgagtagaagtaacattgtgctagatctcgagtgggcgtcctgcgtatcactattctcaagatcgctaatgtgatgacaatgacagaaagtgagtggtcatgtgagtgttcgttttggagagagttctactaatgtgaatccttcagtgctacagtggtagcatgattgaagttgatctagaagcgagcggtcgtaactggcggaagtttacttgtgggttgagagatgccatcgaaatgcgacgggattagtagattggtcttgcatgtatgctcgttacgtgatgtacccgtttgaagagaagttcttacctggacgatatccgataggtagtatgcctagttgattgcactgctaatggctgggaccactgtcttcgcaaagcaggacatagtgtgctgttgtggccatgcgtagatgcagttttggcacatacacagtcaccgttcgctacaatgtccgtaacgaaaggaaggggggcaacggcacaagggcaggacgtaacaatggtgcataggttagtcacagtgtgagctaggcgagttgatcgaatgaacgattgtgattgttcggacgtcctgaatcactgtgactaggaggtcgaggaaggtaacttactgacgatgcatcaacggtcggttgtgacaggggaatcgaccggaactgca

SEQ ID NO: 574422 - DNA, 395 bp, Homo sapiens
ggtttaaagaataacccatttaagggtaaggataagagtttctttcaaagaacacatgtatcacactgtaccttttatctttaaaatctggatgagttcttttgttatcaatctactgtaacatgcgctatggcagaggtttgattccagagcttaaaaaaacatttgtgaataaaatttctttttccctctccttttcctctccaatacatttgttagtgcggcatgcaagtaagaaaacagtctccgcagcaataaaacattttcgtttactggcttattgaagttgtgctgtaagtgtgtattttaattgcagaatatcgcagttcaaagactttgtatctttttctttcatagggacagttgaaagttttaataaaaagcctggaacatga

SEQ ID NO: 574423 - DNA, 3518 bp, Homo sapiens
aggccctgtccaaacgggcactaattggccccgggtatttaggcgccccctttttttttttgcagtaagtaactcagaatgactttactcaggaaatatgaccatgactcactggctaggagtgccccatgcccagttcttagagacccttgatagctcctagaagacaggaggctgccgtggtcaagaagggccaagccttgaagtctcacggcaccccctgtggtggaggtataaggctcaggggccaactactgggtcttgcagtccccatcgttgctgtgggctgtcttcaccttctttagttccttctgtagctcagactcggccaccacaacctcctttggcttctggtaagagatgatcagggtgcagttggcgtgggcaaagctcagcaaggcgtcatccagaggtagctggtgtctatctagatcaggaatggagaacttcttgtagtacttcttgttggttgttctgacaatgatgcagcgctccttctggtccacagagacactatagacatccttaggataggggaggtttcgaatccgccactggaaactcatcttggtgtccttgcgcatgaagataggattggcattgctttccttgatgagttcaggccccaggttccctgctcctaggggcgctgggtctcctacttcaagctgccactggcccatggctcccagggcacttttcacacgccactttctcacaagtagttcactcgtcttctcgtcatattcttcagccatttccttgccgtctgggaataaatagtgaaccttccttctccccctccataggcaaaggggttggagggcctcaattctggatttccacgtgcagcagccctgaccaacgctccaataggccgggatccagccatacttcaatggatcccaggggtatcttgaaggcatttcccaagcggcagaaaattcatgctgatgcatcatcaaaagtacttgcaaagattcctaggagggaagagggagaagaagcagaagagtggctgagctcccttcgggcccatgttgtgcgcactggcattggacgagcccgggcagaactctttgagaagcagattgttcagcatggcggccagctatgccctgcccagggcccaggtgtcactcacattgtggtggatgaaggcatggactatgagcgagccctccgccttctcagactaccccagctgcccccgggtgctcagctggtgaagtcagcctggctgagcttgtgccttcaggagaggaggctggtggatgtagctggattcagcatcttcatccccagtaggtacttggaccatccacagcccagcaaggcagagcaggatgcttctattcctcctggcacccatgaggccctgcttcagacagccctttctcctcctcctcctcccaccaggcctgtgtctcctccccaaaaggcaaaagaggcaccaaacacccaagcccagcccatctctgatgatgaagccagtgatggggaagaaacccaggttagtgcagctgatctggaagccctcatcagtggccactaccccacctcccttgagggagattgtgagcctagcccagcccctgctgtcctggataagtgggtctgtgcacagccctcaagccagaaggcgaccaatcacaacctccatatcacagagaagctggaagttctggccaaagcctacagtgttcagggagacaagtggagggccctgggctatgccaaggccatcaatgccctcaagagcttccataagcctgtcacctcgtaccaggaggcctgcagtatccctgggattgggaagcggatggctgagaaaatcatagagatcctggagagcgggcatttgcggaagctggaccatatcagtgagagcgtgcctgtcttggagctcttctccaacatctggggagctgggaccaagactgcccagatgtggtaccaacagggcttccgaagtctggaagacatccgcagccaggcctccctgacaacccagcaggccatcggcctgaagcattacagtgacttcctggaacgtatgcccagggaggaggctacagagattgagcagacagtccagaaagcagcccaggcctttaactctgggctgctgtgtgtggcatgtggttcataccgacggggaaaggcgacctgtggtgatgtcgacgtgctcatcactcacccagatggccggtcccaccggggtatcttcagccgcctccttgacagtcttcggcaggaagggttcctcacagatgacttggtgagccaagaggagaatggtcagcaacagaagtacttgggggtgtgccggctcccagggccagggcggcggcaccggcgcctggacatcatcgtggtgccctatagcgagtttgcctgtgccctgctctacttcaccggctctgcacacttcaaccgctccatgcgagccctggccaaaaccaagggcatgagtctgtcagaacatgccctcagcactgctgtggtccggaacacccatggctgcaaggtggggcctggccgagtgctgcccactcccactgagaaggatgtcttcaggctcttaggcctcccctaccgagaacctgctgagcgggactggtgacccatggctgggggtgctgaggagagccgagttggactggctacccctcctggccacccagtactccctccagcctcagctggctgaacctcgccgctccaaccaccagcttcctcagcgagcagggcccagggctctgggcctgaagcaagagccagcccggctcccagtgtctgcccggctcccagtgtctgcccagccctctcccagacaggagcaggctgccaccccttctacctcaccactgcccctcgaagaattttgcaaatggccccttgccccattttaagcaggagcaggtggctggtttgaagccccaggtatcccccttccctgctatgggaaaggccaagctgctgggtggggacagaagctgcaggggagagggaagcagccgtgctgtcaacatcatccggcaccctctggggtaggagaacagccattccacatgtgttccctctatccgtcctgcttcctgggcagctggtggtgctgggaatggggtgccccagccttggtgaggacagtgttgggaggcccaggggcccagtaaagtgcatttgacattgaacaaaaaaaaaaaaaaaaaaaaaaaaaaaaaaaaaaaaaaaaaaaaaaggggggggcggcgccccctataaaataccccccctcgggggggcgccccccacttttgacgcctccccccaggtttcttcttctggacaccagaggggtgccccacctataatggggggcgcgccatttctatagcgcctgatcggcagtgggtgccgtcgctttataaaaccggtcgctcgacgtggggaaaaagcggtccacgctggtggaacttctgtggagagggaacccttactttgggggggcgacactgttgggggccagatatttg

SEQ ID NO: 574424 - DNA, 300 bp, Homo sapiens
tgaaatatgtggcagctgagatgagacctctggatcaggtgaggataggtggtctcctgagatcggacctcttggctcaggggaggataggtgtctccctgaggtcggaccctcttggctcaggtgaggatcaggtggtctccctgagatcgggaccctcttggctcaggtgaggatcaagtggtctccctgaggtcgtgtaccctcttggcccaggtgaggatcaggtggcctccccgaggtcgggaccctcttggctcaagagaggatgagtgtggtttttctcagcctggtctccat

SEQ ID NO: 574425 - DNA, 2920 bp, Homo sapiens
aggccctgtccaaacgggcactaattggccccgggtatttaggcgccccctttttttttttgcagtaagtaactcagaatgactttactcaggaaatatgaccatgactcactggctaggagtgccccatgcccagttcttagagacccttgatagctcctagaagacaggaggctgccgtggtcaagaagggccaagccttgaagtctcacggcaccccctgtggtggaggtataaggctcaggggccaactactgggtcttgcagtccccatcgttgctgtgggctgtcttcaccttctttagttccttctgtagctcagactcggccaccacaacctcctttggcttctggtaagagatgatcagggtgcagttggcgtgggcaaagctcagcaaggcgtcatccagaggtagctggtgtctatctagatcaggaatggagaacttcttgtagtacttcttgttggttgttctgacaatgatgcagcgctccttctggtccacagagacactatagacatccttaggataggggaggtttcgaatccgccactggaaactcatcttggtgtccttgcgcatgaagataggattggcattgctttccttgatgagttcaggccccaggttccctgctcctaggggcgctgggtctcctacttcaagctgccactggcccatggctcccagggcacttttcacacgccactttctcacaagtagttcactcgtcttctcgtcatattcttcagccatttccttgccgtctgggaataaatagtgaaccttccttctccccctccataggcaaaggggttggagggcctcaattctggatttccacgtgcagcagccctgaccaacgctccaataggccgggatccagccatacttcaatggatcccaggggtatcttgaaggcatttcccaagcggcagaaaattcatgctgatgcatcatcaaaagtacttgcaaagattcctaggagggaagagggagaagaagcagaagagtggctgagctcccttcgggcccatgttgtgcgcactggcattggacgagcccgggcagaactctttgagaagcagattgttcagcatggcggccagctatgccctgcccagggcccaggtgtcactcacattgtggtggatgaaggcatggactatgagcgagccctccgccttctcagactaccccagctgcccccgggtgctcagctggtgaagtcagcctggctgagcttgtgccttcaggagaggaggctggtggatgtagctggattcagcatcttcatccccagtaggtacttggaccatccacagcccagcaaggcagagcaggatgcttctattcctcctggcacccatgaggccctgcttcagacagccctttctcctcctcctcctcccaccaggcctgtgtctcctccccaaaaggcaaaagaggcaccaaacacccaagcccagcccatctctgatgatgaagccagtgatggggaagaaacccaggaggcctgcagtatccctgggattgggaagcggatggctgagaaaatcatagagatcctggagagcgggcatttgcggaagctggaccatatcagtgagagcgtgcctgtcttggagctcttctccaacatctggggagctgggaccaagactgcccagatgtggtaccaacagggcttccgaagtctggaagacatccgcagccaggcctccctgacaacccagcaggccatcggcctgaagcattacagtgacttcctggaacgtatgcccagggaggaggctacagagattgagcagacagtccagaaagcagcccaggcctttaactctgggctgctgtgtgtggcatgtggttcataccgacggggaaaggcgacctgtggtgatgtcgacgtgctcatcactcacccagatggccggtcccaccggggtatcttcagccgcctccttgacagtcttcggcaggaagggttcctcacagatgacttggtgagccaagaggagaatggtcagcaacagaagtacttgggggtgtgccggctcccagggccagggcggcggcaccggcgcctggacatcatcgtggtgccctatagcgagtttgcctgtgccctgctctacttcaccggctctgcacacttcaaccgctccatgcgagccctggccaaaaccaagggcatgagtctgtcagaacatgccctcagcactgctgtggtccggaacacccatggctgcaaggtggggcctggccgagtgctgcccactcccactgagaaggatgtcttcaggctcttaggcctcccctaccgagaacctgctgagcgggactggtgacccatggctgggggtgctgaggagagccgagttggactggctacccctcctggccacccagtactccctccagcctcagctggctgaacctcgccgctccaaccaccagcttcctcagcgagcagggcccagggctctgggcctgaagcaagagccagcccggctcccagtgtctgcccggctcccagtgtctgcccagccctctcccagacaggagcaggctgccaccccttctacctcaccactgcccctcgaagaattttgcaaatggccccttgccccattttaagcaggagcaggtggctggtttgaagccccaggtatcccccttccctgctatgggaaaggccaagctgctgggtggggacagaagctgcaggggagagggaagcagccgtgctgtcaacatcatccggcaccctctggggtaggagaacagccattccacatgtgttccctctatccgtcctgcttcctgggcagctggtggtgctgggaatggggtgccccagccttggtgaggacagtgttgggaggcccaggggcccagtaaagtgcatttgacattga

SEQ ID NO: 574426 - DNA, 237 bp, Homo sapiens
gtttagaaaaagagagatagtatgagcaagtgagctactcaagagaatctgggcctaggtggaaaaaaaaaacgggtcaaatactaaatccacgacatttctgtcctgaaaatgggctgagaaactaaacacatcccccaagaaagggaagcttgtgtgggggttgggtacccaagctaggaaaacagtacatacagagtttgcgttttggcttgtccgacagcaaccagtagcaag

SEQ ID NO: 574427 - DNA, 158 bp, Homo sapiens
ccccccccccaaaaagcccgggggttcttttgccctcccctttttttttgccttttgggggggggccctttttgttttttttcccttttttcccccaatccccccccccctccctcccccatcccggtgttcctttacccctttttgggccgttggga

SEQ ID NO: 574428 - DNA, 3043 bp, Homo sapiens
aggccctgtccaaacgggcactaattggccccgggtatttaggcgccccctttttttttttgcagtaagtaactcagaatgactttactcaggaaatatgaccatgactcactggctaggagtgccccatgcccagttcttagagacccttgatagctcctagaagacaggaggctgccgtggtcaagaagggccaagccttgaagtctcacggcaccccctgtggtggaggtataaggctcaggggccaactactgggtcttgcagtccccatcgttgctgtgggctgtcttcaccttctttagttccttctgtagctcagactcggccaccacaacctcctttggcttctggtaagagatgatcagggtgcagttggcgtgggcaaagctcagcaaggcgtcatccagaggtagctggtgtctatctagatcaggaatggagaacttcttgtagtacttcttgttggttgttctgacaatgatgcagcgctccttctggtccacagagacactatagacatccttaggataggggaggtttcgaatccgccactggaaactcatcttggtgtccttgcgcatgaagataggattggcattgctttccttgatgagttcaggccccaggttccctgctcctaggggcgctgggtctcctacttcaagctgccactggcccatggctcccagggcacttttcacacgccactttctcacaagtagttcactcgtcttctcgtcatattcttcagccatttccttgccgtctgggaataaatagtgaaccttccttctccccctccataggcaaaggggttggagggcctcaattctggatttccacgtgcagcagccctgaccaacgctccaataggccgggatccagccatacttcaatggatcccaggggtatcttgaaggcatttcccaagcggcagaaaattcatgctgatgcatcatcaaaagtacttgcaaagattcctaggagggaagagggagaagaagcagaagagtggctgagctcccttcgggcccatgttgtgcgcactggcattggacgagcccgggcagaactctttgagaagcagattgttcagcatggcggccagctatgccctgcccagggcccaggtgtcactcacattgtggtggatgaaggcatggactatgagcgagccctccgccttctcagactaccccagctgcccccgggtgctcagctggtgaagtcagcctggctgagcttgtgccttcaggagaggaggctggtggatgtagctggattcagcatcttcatccccagtaggtacttggaccatccacagcccagcaaggcagagcaggatgcttctattcctcctggcacccatgaggccctgcttcagacagccctttctcctcctcctcctcccaccaggcctgtgtctcctccccaaaaggcaaaagaggcaccaaacacccaagcccagcccatctctgatgatgaagccagtgatggggaagaaacccaggcagagaagctggaagttctggccaaagcctacagtgttcagggagacaagtggagggccctgggctatgccaaggccatcaatgccctcaagagcttccataagcctgtcacctcgtaccaggaggcctgcagtatccctgggattgggaagcggatggctgagaaaatcatagagatcctggagagcgggcatttgcggaagctggaccatatcagtgagagcgtgcctgtcttggagctcttctccaacatctggggagctgggaccaagactgcccagatgtggtaccaacagggcttccgaagtctggaagacatccgcagccaggcctccctgacaacccagcaggccatcggcctgaagcattacagtgacttcctggaacgtatgcccagggaggaggctacagagattgagcagacagtccagaaagcagcccaggcctttaactctgggctgctgtgtgtggcatgtggttcataccgacggggaaaggcgacctgtggtgatgtcgacgtgctcatcactcacccagatggccggtcccaccggggtatcttcagccgcctccttgacagtcttcggcaggaagggttcctcacagatgacttggtgagccaagaggagaatggtcagcaacagaagtacttgggggtgtgccggctcccagggccagggcggcggcaccggcgcctggacatcatcgtggtgccctatagcgagtttgcctgtgccctgctctacttcaccggctctgcacacttcaaccgctccatgcgagccctggccaaaaccaagggcatgagtctgtcagaacatgccctcagcactgctgtggtccggaacacccatggctgcaaggtggggcctggccgagtgctgcccactcccactgagaaggatgtcttcaggctcttaggcctcccctaccgagaacctgctgagcgggactggtgacccatggctgggggtgctgaggagagccgagttggactggctacccctcctggccacccagtactccctccagcctcagctggctgaacctcgccgctccaaccaccagcttcctcagcgagcagggcccagggctctgggcctgaagcaagagccagcccggctcccagtgtctgcccggctcccagtgtctgcccagccctctcccagacaggagcaggctgccaccccttctacctcaccactgcccctcgaagaattttgcaaatggccccttgccccattttaagcaggagcaggtggctggtttgaagccccaggtatcccccttccctgctatgggaaaggccaagctgctgggtggggacagaagctgcaggggagagggaagcagccgtgctgtcaacatcatccggcaccctctggggtaggagaacagccattccacatgtgttccctctatccgtcctgcttcctgggcagctggtggtgctgggaatggggtgccccagccttggtgaggacagtgttgggaggcccaggggcccagtaaagtgcatttgacattga

SEQ ID NO: 574429 - DNA, 926 bp, Homo sapiens
  misc_feature (366)..(366): n is a, c, g, or t
ccgagggttttaattattttaagccagagggggttcttgtgctttttgggggggatacgtcgcctggctcacggtgttcgcccccctctggtagtgagcctccccgtgttccacccccctcgttgtttgttagccctcccccctttggtggtggggacactcccgcgggggacgcgagatgttccacgacctctttcccgcgaggtcttgtttttggcgctcttgtgggccccccgcgcggggggccagcgtgatgttgtccaccgaggtgtttgcgccacccacgcggggtgatacacagcatcttttttgtcccgccactttttggggccccctctctttttttagaggtgggcacacgctctnatgtgggcggacaccaagaggttttggtgcccacacaacaagatactcccatgagcctggtgtgtacccgcggtttccgggggtttttttctcggggggtgtgacccccctgtggtcccaagacttgtccagtctcagggctcatccacttgtcgccccctctccgtggttggcaccattgtcgcgggttatgccccagagaagtttcttgtggggcccccagggagggttttttcccgcacaccggtatggatttttggttaccggggggcccccacatgggcggtcttccttcccgcattgggcggatatttttgcggcgcccccagggtttgccacaaaggagtgggaggcctggagccctggtggggcaaattgtgtctctggggcgaacgacaacacatgcgtccacacatccaagccctgggggtgtacagcacccgtggttcaccaaagttataaccttgggggcaaaagattctgggtgccacactgggcccccgggttatattcgagccctgtttcccaccagagcctcagttataacccctgggacacca

SEQ ID NO: 574430 - DNA, 3049 bp, Homo sapiens
aggccctgtccaaacgggcactaattggccccgggtatttaggcgccccctttttttttttgcagtaagtaactcagaatgactttactcaggaaatatgaccatgactcactggctaggagtgccccatgcccagttcttagagacccttgatagctcctagaagacaggaggctgccgtggtcaagaagggccaagccttgaagtctcacggcaccccctgtggtggaggtataaggctcaggggccaactactgggtcttgcagtccccatcgttgctgtgggctgtcttcaccttctttagttccttctgtagctcagactcggccaccacaacctcctttggcttctggtaagagatgatcagggtgcagttggcgtgggcaaagctcagcaaggcgtcatccagaggtagctggtgtctatctagatcaggaatggagaacttcttgtagtacttcttgttggttgttctgacaatgatgcagcgctccttctggtccacagagacactatagacatccttaggataggggaggtttcgaatccgccactggaaactcatcttggtgtccttgcgcatgaagataggattggcattgctttccttgatgagttcaggccccaggttccctgctcctaggggcgctgggtctcctacttcaagctgccactggcccatggctcccagggcacttttcacacgccactttctcacaagtagttcactcgtcttctcgtcatattcttcagccatttccttgccgtctgggaataaatagtgaaccttccttctccccctccataggcaaaggggttggagggcctcaattctggatttccacgtgcagcagccctgaccaacgctccaataggccgggatccagccatacttcaatggatcccaggggtatcttgaaggcatttcccaagcggcagaaaattcatgctgatgcatcatcaaaagtacttgcaaagattcctaggagggaagagggagaagaagcagaagagtggctgagctcccttcgggcccatgttgtgcgcactggcattggacgagcccgggcagaactctttgagaagcagattgttcagcatggcggccagctatgccctgcccagggcccaggtgtcactcacattgtggtggatgaaggcatggactatgagcgagccctccgccttctcagactaccccagctgcccccgggtgctcagctggtgaagtcagcctggctgagcttgtgccttcaggagaggaggctggtggatgtagctggattcagcatcttcatccccagtaggtacttggaccatccacagcccagcaaggcagagcaggatgcttctattcctcctggcacccatgaggccctgcttcagacagccctttctcctcctcctcctcccaccaggcctgtgtctcctccccaaaaggcaaaagaggcaccaaacacccaagcccagcccatctctgatgatgaagccagtgatggggaagaaacccaggttagtgcagctgatctggaagccctcatcagtggccactaccccacctcccttgagggagattgtgagcctagcccagcccctgctgtcctggataagtgggtctgtgcacagccctcaagccagaaggcgaccaatcacaacctccatatcacagagaagctggaagttctggccaaagcctacagtgttcagggagacaagtggagggccctgggctatgccaaggccatcaatgccctcaagagcttccataagcctgtcacctcgtaccaggaggcctgcagtatccctgggattgggaagcggatggctgagaaaatcatagagatcctggagagcgggcatttgcggaagctggaccatatcagtgagagcgtgcctgtcttggagctcttctccaacatctggggagctgggaccaagactgcccagatgtggtaccaacagggcttccgaagtctggaagacatccgcagccaggcctccctgacaacccagcaggccatcggcctgaagcattacagtgacttcctggaacgtatgcccagggaggaggctacagagattgagcagacagtccagaaagcagcccaggcctttaactctgggctgctgtgtgtggcatgtggttcataccgacggggaaaggcgacctgtggtgatgtcgacgtgctcatcactcacccagatggccggtcccaccggggtatcttcagccgcctccttgacagtcttcggcaggaagggttcctcacagatgacttggtgagccaagaggagaatggtcagcaacagaagtacttgggggtgtgccggctcccagggccagggcggcggcaccggcgcctggacatcatcgtggtgccctatagcgagtttgcctgtgccctgctctacttcaccggctctgcacacttcaaccgctccatgcgagccctggccaaaaccaagggcatgagtctgtcagaacatgccctcagcactgctgtggtccggaacacccatggctgcaaggtggggcctggccgagtgctgcccactcccactgagaaggatgtcttcaggctcttaggcctcccctaccgagaacctgctgagcgggactggtgacccatggctgggggtgctgaggagagccgagttggactggctacccctcctggccacccagtactccctccagcctcagctggctgaacctcgccgctccaaccaccagcttcctcagcgagcagggcccagggctctgggcctgaagcaagagccagcccggctcccagtgtctgcccggctcccagtgtctgcccagccctctcccagacaggagcaggctgccaccccttctacctcaccactgcccctcgaagaattttgcaaatggccctctggggtaggagaacagccattccacatgtgttccctctatccgtcctgcttcctgggcagctggtggtgctgggaatggggtgccccagccttggtgaggacagtgttgggaggcccaggggcccagtaaagtgcatttgacattga

SEQ ID NO: 574431 - DNA, 3266 bp, Homo sapiens
aggccctgtccaaacgggcactaattggccccgggtatttaggcgccccctttttttttttgcagtaagtaactcagaatgactttactcaggaaatatgaccatgactcactggctaggagtgccccatgcccagttcttagagacccttgatagctcctagaagacaggaggctgccgtggtcaagaagggccaagccttgaagtctcacggcaccccctgtggtggaggtataaggctcaggggccaactactgggtcttgcagtccccatcgttgctgtgggctgtcttcaccttctttagttccttctgtagctcagactcggccaccacaacctcctttggcttctggtaagagatgatcagggtgcagttggcgtgggcaaagctcagcaaggcgtcatccagaggtagctggtgtctatctagatcaggaatggagaacttcttgtagtaccagaggggtgccatgcacacctgcacaccgcatggccagaggggtccagagaagcctccaaccagtccgcttcttgttggttgttctgacaatgatgcagcgctccttctggtccacagagacactatagacatccttaggataggggaggtttcgaatccgccactggaaactcatcttggtgtccttgcgcatgaagataggattggcattgctttccttgatgagttcaggccccaggttccctgctcctaggggcgctgggtctcctacttcaagctgccactggcccatggctcccagggcacttttcacacgccactttctcacaagtagttcactcgtcttctcgtcatattcttcagccatttccttgccgtctgggaataaatagtgaaccttccttctccccctccataggcaaaggggttggagggcctcaattctggatttccacgtgcagcagccctgaccaacgctccaataggccgggatccagccatacttcaatggatcccaggggtatcttgaaggcatttcccaagcggcagaaaattcatgctgatgcatcatcaaaagtacttgcaaagattcctaggagggaagagggagaagaagcagaagagtggctgagctcccttcgggcccatgttgtgcgcactggcattggacgagcccgggcagaactctttgagaagcagattgttcagcatggcggccagctatgccctgcccagggcccaggtgtcactcacattgtggtggatgaaggcatggactatgagcgagccctccgccttctcagactaccccagctgcccccgggtgctcagctggtgaagtcagcctggctgagcttgtgccttcaggagaggaggctggtggatgtagctggattcagcatcttcatccccagtaggtacttggaccatccacagcccagcaaggcagagcaggatgcttctattcctcctggcacccatgaggccctgcttcagacagccctttctcctcctcctcctcccaccaggcctgtgtctcctccccaaaaggcaaaagaggcaccaaacacccaagcccagcccatctctgatgatgaagccagtgatggggaagaaacccaggttagtgcagctgatctggaagccctcatcagtggccactaccccacctcccttgagggagattgtgagcctagcccagcccctgctgtcctggataagtgggtctgtgcacagccctcaagccagaaggcgaccaatcacaacctccatatcacagagaagctggaagttctggccaaagcctacagtgttcagggagacaagtggagggccctgggctatgccaaggccatcaatgccctcaagagcttccataagcctgtcacctcgtaccaggaggcctgcagtatccctgggattgggaagcggatggctgagaaaatcatagagatcctggagagcgggcatttgcggaagctggaccatatcagtgagagcgtgcctgtcttggagctcttctccaacatctggggagctgggaccaagactgcccagatgtggtaccaacagggcttccgaagtctggaagacatccgcagccaggcctccctgacaacccagcaggccatcggcctgaagcattacagtgacttcctggaacgtatgcccagggaggaggctacagagattgagcagacagtccagaaagcagcccaggcctttaactctgggctgctgtgtgtggcatgtggttcataccgacggggaaaggcgacctgtggtgatgtcgacgtgctcatcactcacccagatggccggtcccaccggggtatcttcagccgcctccttgacagtcttcggcaggaagggttcctcacagatgacttggtgagccaagaggagaatggtcagcaacagaagtacttgggggtgtgccggctcccagggccagggcggcggcaccggcgcctggacatcatcgtggtgccctatagcgagtttgcctgtgccctgctctacttcaccggctctgcacacttcaaccgctccatgcgagccctggccaaaaccaagggcatgagtctgtcagaacatgccctcagcactgctgtggtccggaacacccatggctgcaaggtggggcctggccgagtgctgcccactcccactgagaaggatgtcttcaggctcttaggcctcccctaccgagaacctgctgagcgggactggtgacccatggctgggggtgctgaggagagccgagttggactggctacccctcctggccacccagtactccctccagcctcagctggctgaacctcgccgctccaaccaccagcttcctcagcgagcagggcccagggctctgggcctgaagcaagagccagcccggctcccagtgtctgcccggctcccagtgtctgcccagccctctcccagacaggagcaggctgccaccccttctacctcaccactgcccctcgaagaattttgcaaatggccccttgccccattttaagcaggagcaggtggctggtttgaagccccaggtatcccccttccctgctatgggaaaggccaagctgctgggtggggacagaagctgcaggggagagggaagcagccgtgctgtcaacatcatccggcaccctctggggtaggagaacagccattccacatgtgttccctctatccgtcctgcttcctgggcagctggtggtgctgggaatggggtgccccagccttggtgaggacagtgttgggaggcccaggggcccagtaaagtgcatttgacattga

SEQ ID NO: 574432 - DNA, 147 bp, Homo sapiens
ctttttagttaactgggaatataaaaaaacaagttgcgaaaaagaactggattctcatgtatatccatttagcttctggaaacctttgtcttaagaggctgcagaaattatgtggtgatctgagccccaattctgccttccaagatc

SEQ ID NO: 574433 - DNA, 2249 bp, Homo sapiens
aggccctgtccaaacgggcactaattggccccgggtatttaggcgccccctttttttttttgcagtaagtaactcagaatgactttactcaggaaatatgaccatgactcactggctaggagtgccccatgcccagttcttagagacccttgatagctcctagaagacaggaggctgccgtggtcaagaagggccaagccttgaagtctcacggcaccccctgtggtggaggtataaggctcaggggccaactactgggtcttgcagtccccatcgttgctgtgggctgtcttcaccttctttagttccttctgtagctcagactcggccaccacaacctcctttggcttctggtaagagatgatcagggtgcagttggcgtgggcaaagctcagcaaggcgtcatccagaggtagctggtgtctatctagatcaggaatggagaacttcttgtagtacttcttgttggttgttctgacaatgatgcagcgctccttctggtccacagagacactatagacatccttaggataggggaggtttcgaatccgccactggaaactcatcttggtgtccttgcgcatgaagataggattggcattgctttccttgatgagttcaggccccaggttccctgctcctaggggcgctgggtctcctacttcaagctgccactggcccatggctcccagggcacttttcacacgccactttctcacaagtagttcactcgtcttctcgtcatattcttcagccatttccttgccgtctgggaataaatagtgaaccttccttctccccctccataggcaaaggggttggagggcctcaattctggatttccacgtgcagcagccctgaccaacgctccaataggccgggatccagccatacttcaatggatcccaggggtatcttgaaggcatttcccaagcggcagaaaattcatgctgatgcatcatcaaaagtacttgcaaagattcctaggagggaagagggagaagaagcagaagcagggcttccgaagtctggaagacatccgcagccaggcctccctgacaacccagcaggccatcggcctgaagcattacagtgacttcctggaacgtatgcccagggaggaggctacagagattgagcagacagtccagaaagcagcccaggcctttaactctgggctgctgtgtgtggcatgtggttcataccgacggggaaaggcgacctgtggtgatgtcgacgtgctcatcactcacccagatggccggtcccaccggggtatcttcagccgcctccttgacagtcttcggcaggaagggttcctcacagatgacttggtgagccaagaggagaatggtcagcaacagaagtacttgggggtgtgccggctcccagggccagggcggcggcaccggcgcctggacatcatcgtggtgccctatagcgagtttgcctgtgccctgctctacttcaccggctctgcacacttcaaccgctccatgcgagccctggccaaaaccaagggcatgagtctgtcagaacatgccctcagcactgctgtggtccggaacacccatggctgcaaggtggggcctggccgagtgctgcccactcccactgagaaggatgtcttcaggctcttaggcctcccctaccgagaacctgctgagcgggactggtgacccatggctgggggtgctgaggagagccgagttggactggctacccctcctggccacccagtactccctccagcctcagctggctgaacctcgccgctccaaccaccagcttcctcagcgagcagggcccagggctctgggcctgaagcaagagccagcccggctcccagtgtctgcccggctcccagtgtctgcccagccctctcccagacaggagcaggctgccaccccttctacctcaccactgcccctcgaagaattttgcaaatggccccttgccccattttaagcaggagcaggtggctggtttgaagccccaggtatcccccttccctgctatgggaaaggccaagctgctgggtggggacagaagctgcaggggagagggaagcagccgtgctgtcaacatcatccggcaccctctggggtaggagaacagccattccacatgtgttccctctatccgtcctgcttcctgggcagctggtggtgctgggaatggggtgccccagccttggtgaggacagtgttgggaggcccaggggcccagtaaagtgcatttgacattga

SEQ ID NO: 574434 - DNA, 158 bp, Homo sapiens
tcatctcccttcacgtcctcatctcccttacccgtcctcatctcccttaccgtctcatctcccttaccgtcctcatctcccttaccgttctcatctcccttacgtccacatctccctatacgtctccaaggtcactccaattccctatgaacaaaaaa

SEQ ID NO: 574435 - DNA, 179 bp, Homo sapiens
  misc_feature (15)..(15): n is a, c, g, or t
catgtttgaaggcantgtaatgttgctatgggtttctggtagataatctgtaaataaaggaagtttctttctacttccagcttacatagaagtttttttgtcctctacaaatcaggaacacatccaaaactttatctttttttttttttttttttttttttggaaaaaaaatttccctc

SEQ ID NO: 574436 - DNA, 2940 bp, Homo sapiens
aggccctgtccaaacgggcactaattggccccgggtatttaggcgccccctttttttttttgcagtaagtaactcagaatgactttactcaggaaatatgaccatgactcactggctaggagtgccccatgcccagttcttagagacccttgatagctcctagaagacaggaggctgccgtggtcaagaagggccaagccttgaagtctcacggcaccccctgtggtggaggtataaggctcaggggccaactactgggtcttgcagtccccatcgttgctgtgggctgtcttcaccttctttagttccttctgtagctcagactcggccaccacaacctcctttggcttctggtaagagatgatcagggtgcagttggcgtgggcaaagctcagcaaggcgtcatccagaggtagctggtgtctatctagatcaggaatggagaacttcttgtagtacttcttgttggttgttctgacaatgatgcagcgctccttctggtccacagagacactatagacatccttaggataggggaggtttcgaatccgccactggaaactcatcttggtgtccttgcgcatgaagataggattggcattgctttccttgatgagttcaggccccaggttccctgctcctaggggcgctgggtctcctacttcaagctgccactggcccatggctcccagggcacttttcacacgccactttctcacaagtagttcactcgtcttctcgtcatattcttcagccatttccttgccgtctgggaataaatagtgaaccttccttctccccctccataggcaaaggggttggagggcctcaattctggatttccacgtgcagcagccctgaccaacgctccaataggccgggatccagccatacttcaatggatcccaggggtatcttgaaggcatttcccaagcggcagaaaattcatgctgatgcatcatcaaaagtacttgcaaagattcctaggagggaagagggagaagaagcagaagagtggctgagctcccttcgggcccatgttgtgcgcactggcattggacgagcccgggcagaactctttgagaagcagattgttcagcatggcggccagctatgccctgcccagggcccaggtgtcactcacattgtggtggatgaaggcatggactatgagcgagccctccgccttctcagactaccccagctgcccccgggtgctcagctggtgaagtcagcctggctgagcttgtgccttcaggagaggaggctggtggatgtagctggattcagcatcttcatccccagtaggtacttggaccatccacagcccagcaaggcagagcaggatgcttctattcctcctggcacccatgaggccctgcttcagacagccctttctcctcctcctcctcccaccaggcctgtgtctcctccccaaaaggcaaaagaggcaccaaacacccaagcccagcccatctctgatgatgaagccagtgatggggaagaaacccaggaggcctgcagtatccctgggattgggaagcggatggctgagaaaatcatagagatcctggagagcgggcatttgcggaagctggaccatatcagtgagagcgtgcctgtcttggagctcttctccaacatctggggagctgggaccaagactgcccagatgtggtaccaacagggcttccgaagtctggaagacatccgcagccaggcctccctgacaacccagcaggccatcggcctgaagcattacagtgacttcctggaacgtatgcccagggaggaggctacagagattgagcagacagtccagaaagcagcccaggcctttaactctgggctgctgtgtgtggcatgtggttcataccgacggggaaaggcgacctgtggtgatgtcgacgtgctcatcactcacccagatggccggtcccaccggggtatcttcagccgcctccttgacagtcttcggcaggaagcagtcccctctgttgggccaggttcctcacagatgacttggtgagccaagaggagaatggtcagcaacagaagtacttgggggtgtgccggctcccagggccagggcggcggcaccggcgcctggacatcatcgtggtgccctatagcgagtttgcctgtgccctgctctacttcaccggctctgcacacttcaaccgctccatgcgagccctggccaaaaccaagggcatgagtctgtcagaacatgccctcagcactgctgtggtccggaacacccatggctgcaaggtggggcctggccgagtgctgcccactcccactgagaaggatgtcttcaggctcttaggcctcccctaccgagaacctgctgagcgggactggtgacccatggctgggggtgctgaggagagccgagttggactggctacccctcctggccacccagtactccctccagcctcagctggctgaacctcgccgctccaaccaccagcttcctcagcgagcagggcccagggctctgggcctgaagcaagagccagcccggctcccagtgtctgcccggctcccagtgtctgcccagccctctcccagacaggagcaggctgccaccccttctacctcaccactgcccctcgaagaattttgcaaatggccccttgccccattttaagcaggagcaggtggctggtttgaagccccaggtatcccccttccctgctatgggaaaggccaagctgctgggtggggacagaagctgcaggggagagggaagcagccgtgctgtcaacatcatccggcaccctctggggtaggagaacagccattccacatgtgttccctctatccgtcctgcttcctgggcagctggtggtgctgggaatggggtgccccagccttggtgaggacagtgttgggaggcccaggggcccagtaaagtgcatttgacattga

SEQ ID NO: 574437 - DNA, 897 bp, Homo sapiens
tcagaatcattcagtaaagcttgtgacaaatgctgactcctatggaaacccaggagtgttctgcattctactcatgcgattaacatcgataggtttcgtaagatgagaggatcttgacacgaggtagctaagtctccctagtatcgattctaattacatgcgacgagtgccgagcatcgcccaacactatgtacagcatcttgcatgcgtgtatcagtgtccccataagcacggctattagaccttatgcaggccttggttatcgcactgatcgtcgaccgtttccacgtaatcagtcactcaaattaaacggaacgtacactcattcggtctctttatagttaaccataccgatttattcctaaactactgtaaattacgttactgactaaacaacttgaggtcagttctccccatcaattttgatatgtcaattaactcgaactgtaacaggtgaccatgttacttattcatagagctggattttatacatggggaatcaccacgacaaattgcacgcgcattgcggcagcataacatactctttttcatggaactacgaagccgccctccattacataatccctagaaatactcgaaaaacttcgggttaaaagtagacccttaattggaggcgtcgtttcccttccaaaacatttggtgatgggaatcccgtccttttcggcttagaacatccaagggaatatacctcaccattaattcttcatgaaccttagcattgtccttcataacccaatttaaaaagtaagctgcgaagaacgccttttcgagacctgggctcctttgttaagaacgaaagctcccatttagctctagaataccgtccgaatacgtgagcaaatggtaacctaatttctattatccggcgatgaagag

SEQ ID NO: 574438 - DNA, 3236 bp, Homo sapiens
aggccctgtccaaacgggcactaattggccccgggtatttaggcgccccctttttttttttgcagtaagtaactcagaatgactttactcaggaaatatgaccatgactcactggctaggagtgccccatgcccagttcttagagacccttgatagctcctagaagacaggaggctgccgtggtcaagaagggccaagccttgaagtctcacggcaccccctgtggtggaggtataaggctcaggggccaactactgggtcttgcagtccccatcgttgctgtgggctgtcttcaccttctttagttccttctgtagctcagactcggccaccacaacctcctttggcttctggtaagagatgatcagggtgcagttggcgtgggcaaagctcagcaaggcgtcatccagaggtagctggtgtctatctcagaggggtgccatgcacacctgcacaccgcatggccagaggggtccagagaagcctccaaccagtccgcttcttgttggttgttctgacaatgatgcagcgctccttctggtccacagagacactatagacatccttaggataggggaggtttcgaatccgccactggaaactcatcttggtgtccttgcgcatgaagataggattggcattgctttccttgatgagttcaggccccaggttccctgctcctaggggcgctgggtctcctacttcaagctgccactggcccatggctcccagggcacttttcacacgccactttctcacaagtagttcactcgtcttctcgtcatattcttcagccatttccttgccgtctgggaataaatagtgaaccttccttctccccctccataggcaaaggggttggagggcctcaattctggatttccacgtgcagcagccctgaccaacgctccaataggccgggatccagccatacttcaatggatcccaggggtatcttgaaggcatttcccaagcggcagaaaattcatgctgatgcatcatcaaaagtacttgcaaagattcctaggagggaagagggagaagaagcagaagagtggctgagctcccttcgggcccatgttgtgcgcactggcattggacgagcccgggcagaactctttgagaagcagattgttcagcatggcggccagctatgccctgcccagggcccaggtgtcactcacattgtggtggatgaaggcatggactatgagcgagccctccgccttctcagactaccccagctgcccccgggtgctcagctggtgaagtcagcctggctgagcttgtgccttcaggagaggaggctggtggatgtagctggattcagcatcttcatccccagtaggtacttggaccatccacagcccagcaaggcagagcaggatgcttctattcctcctggcacccatgaggccctgcttcagacagccctttctcctcctcctcctcccaccaggcctgtgtctcctccccaaaaggcaaaagaggcaccaaacacccaagcccagcccatctctgatgatgaagccagtgatggggaagaaacccaggttagtgcagctgatctggaagccctcatcagtggccactaccccacctcccttgagggagattgtgagcctagcccagcccctgctgtcctggataagtgggtctgtgcacagccctcaagccagaaggcgaccaatcacaacctccatatcacagagaagctggaagttctggccaaagcctacagtgttcagggagacaagtggagggccctgggctatgccaaggccatcaatgccctcaagagcttccataagcctgtcacctcgtaccaggaggcctgcagtatccctgggattgggaagcggatggctgagaaaatcatagagatcctggagagcgggcatttgcggaagctggaccatatcagtgagagcgtgcctgtcttggagctcttctccaacatctggggagctgggaccaagactgcccagatgtggtaccaacagggcttccgaagtctggaagacatccgcagccaggcctccctgacaacccagcaggccatcggcctgaagcattacagtgacttcctggaacgtatgcccagggaggaggctacagagattgagcagacagtccagaaagcagcccaggcctttaactctgggctgctgtgtgtggcatgtggttcataccgacggggaaaggcgacctgtggtgatgtcgacgtgctcatcactcacccagatggccggtcccaccggggtatcttcagccgcctccttgacagtcttcggcaggaagggttcctcacagatgacttggtgagccaagaggagaatggtcagcaacagaagtacttgggggtgtgccggctcccagggccagggcggcggcaccggcgcctggacatcatcgtggtgccctatagcgagtttgcctgtgccctgctctacttcaccggctctgcacacttcaaccgctccatgcgagccctggccaaaaccaagggcatgagtctgtcagaacatgccctcagcactgctgtggtccggaacacccatggctgcaaggtggggcctggccgagtgctgcccactcccactgagaaggatgtcttcaggctcttaggcctcccctaccgagaacctgctgagcgggactggtgacccatggctgggggtgctgaggagagccgagttggactggctacccctcctggccacccagtactccctccagcctcagctggctgaacctcgccgctccaaccaccagcttcctcagcgagcagggcccagggctctgggcctgaagcaagagccagcccggctcccagtgtctgcccggctcccagtgtctgcccagccctctcccagacaggagcaggctgccaccccttctacctcaccactgcccctcgaagaattttgcaaatggccccttgccccattttaagcaggagcaggtggctggtttgaagccccaggtatcccccttccctgctatgggaaaggccaagctgctgggtggggacagaagctgcaggggagagggaagcagccgtgctgtcaacatcatccggcaccctctggggtaggagaacagccattccacatgtgttccctctatccgtcctgcttcctgggcagctggtggtgctgggaatggggtgccccagccttggtgaggacagtgttgggaggcccaggggcccagtaaagtgcatttgacattga

SEQ ID NO: 574439 - DNA, 2401 bp, Homo sapiens
aaaattctggccatttgccctccttccccccttcgtccgctctcattggctctgctgcagccctgaccaacgctccaataggccgggatccagccatacttcaatggatcccaggggtatcttgaaggcatttcccaagcggcagaaaattcatgctgatgcatcatcaaaagtacttgcaaagattcctaggagggaagagggagaagaagcagaagagtggctgagctcccttcgggcccatgttgtgcgcactggcattggacgagcccgggcagaactctttgagaagcagattgttcagcatggcggccagctatgccctgcccagggcccaggtgtcactcacattgtggtggatgaaggcatggactatgagcgagccctccgccttctcagactaccccagctgcccccgggtgctcagctggtgaagtcagcctggctgagcttgtgccttcaggagaggaggctggtggatgtagctggattcagcatcttcatccccagtaggtacttggaccatccacagcccagcaaggcagagcaggatgcttctattcctcctggcacccatgaggccctgcttcagacagccctttctcctcctcctcctcccaccaggcctgtgtctcctccccaaaaggcaaaagaggcaccaaacacccaagcccagcccatctctgatgatgaagccagtgatggggaagaaacccaggttagtgcagctgatctggaagccctcatcagtggccactaccccacctcccttgagggagattgtgagcctagcccagcccctgctgtcctggataagtgggtctgtgcacagccctcaagccagaaggcgaccaatcacaacctccatatcacagagaagctggaagttctggccaaagcctacagtgttcagggagacaagtggagggccctgggctatgccaaggccatcaatgccctcaagagcttccataagcctgtcacctcgtaccaggaggcctgcagtatccctgggattgggaagcggatggctgagaaaatcatagagatcctggagagcgggcatttgcggaagctggaccatatcagtgagagcgtgcctgtcttggagctcttctccaacatctggggagctgggaccaagactgcccagatgtggtaccaacagggcttccgaagtctggaagacatccgcagccaggcctccctgacaacccagcaggccatcggcctgaagcattacagtgacttcctggaacgtatgcccagggaggaggctacagagattgagcagacagtccagaaagcagcccaggcctttaactctgggctgctgtgtgtggcatgtggttcataccgacggggaaaggcgacctgtggtgatgtcgacgtgctcatcactcacccagatggccggtcccaccggggtatcttcagccgcctccttgacagtcttcggcaggaagggttcctcacagatgacttggtgagccaagaggagaatggtcagcaacagaagtacttgggggtgtgccggctcccagggccagggcggcggcaccggcgcctggacatcatcgtggtgccctatagcgagtttgcctgtgccctgctctacttcaccggctctgcacacttcaaccgctccatgcgagccctggccaaaaccaagggcatgagtctgtcagaacatgccctcagcactgctgtggtccggaacacccatggctgcaaggtggggcctggccgagtgctgcccactcccactgagaaggatgtcttcaggctcttaggcctcccctaccgagaacctgctgagcgggactggtgacccatggctgggggtgctgaggagagccgagttggactggctacccctcctggccacccagtactccctccagcctcagctggctgaacctcgccgctccaaccaccagcttcctcagcgagcagggcccagggctctgggcctgaagcaagagccagcccggctcccagtgtctgcccggctcccagtgtctgcccagccctctcccagacaggagcaggctgccaccccttctacctcaccactgcccctcgaagaattttgcaaatggccccttgccccattttaagcaggagcaggtggctggtttgaagccccaggtatcccccttccctgctatgggaaaggccaagctgctgggtggggacagaagctgcaggggagagggaagcagccgtgctgtcaacatcatccggcaccctctggggtaggagaacagccattccacatgtgttccctctatccgtcctgcttcctgggcagctggtggtgctgggaatggggtgccccagccttggtgaggacagtgttgggaggcccaggggcccagtaaagtgcatttgacattga

SEQ ID NO: 574440 - DNA, 250 bp, Homo sapiens
tgatactaacttgataggaaaatagaggacatgtacatacagagtagaaggcaataggacagggaagccagcttagatgttagagtatggatcaatcgaggaggcataaccactcttgtgggtggctatagggctggaaaatgctgaagatgactgctttcactgatggtcaaggtattgtagatattgccagtcttctgtaaatgccattcaaagccacgaagctttctatcagatgactctgtgctct

SEQ ID NO: 574441 - DNA, 177 bp, Homo sapiens
ggctgtgcactgtggcgcttttcatttcatttggtgcacactagggtcccccagcacccctcgattcagcacacgtcacggtgcggcctacaggttctgggcatccgagggccttcagtctccttcagtccgcgctgccgaagccccatgcagacgcacagacgtagtccacaacca

SEQ ID NO: 574442 - DNA, 229 bp, Homo sapiens
ttaggcagacacgagaacagccaggcaacatggcgaaaccagtctctacagaaaataaagtgggtgggcatggtggcacgcgcctgttgtcccagctgcttgagaggctgaggtgggagggttcacttgggctccaggaggctgaggctgcagtgagccgatatcacaccaccgcactccagcctcggataacagcagtgagaccatatctcaagaaaaaaagcaaagt

SEQ ID NO: 574443 - DNA, 325 bp, Homo sapiens
tctgaccacattgaaataaaattaaatatcaatataaagagaaatattcaaaaactgtacatatacatggaaattaaacagcatactcctgaacaaccaatgggtgacacaataaattagggatgaaatttaaaacttcatggaaacatataaaaatagaaacacagcactatcatctatgagacacagcaaaatgtacttacgagacaattatgtagcaatagatgcatacgtcacgaacctagatagatgtcacttaatcagcctaacattgcatctcaagggactataaacgtaggagcaacccatcccccatgttagcagt

SEQ ID NO: 574444 - DNA, 686 bp, Homo sapiens
tacggctaggtaggggcgggtgttgaatcggccgaggccgactccgacctctacttcctttctgtgcttcgtgtcctgtgacggttacatttgtgtataattgattatattattagttattattattatatttttggtaattgggagttctcgcttggagagggggatgctctcatcccctctttctggtaccccccaccattttcactggctggggggctctctttttcgcgggaaggggggacacttgcacgtgtacacatatgctgcaggaagggggtggggggcccaataaggccttgggaaaggacaggtgccgagccctgcatgtggagccactacacacacccagccccagatagagggaaataaccaaaaaactaccaaacaacagaaaaccacactctagactgaaaccccaaagtgggctagatgggagggtaagagtagcaaggggaaagtgaggcagaggttctgaaaagggtctcaggcaaagtgttcatgtagccataggcacatggagacagaatacttaagcctggccaccacaaaatgccctggacaaacacgtgccaaccagcgccgattctgagtgtagctgacccccaagggtgtgggtgcaggatgagcaacgggacggaagggcgctgggcatagaagagagacagggtagagaggggcccctg

SEQ ID NO: 574445 - DNA, 189 bp, Homo sapiens
tctattcgtcagcgaccctcttaccatccagcgctaccgaatgatgatttcatacaaaggacagagaacactcagttggctgtctagtgctaccggtggctgttctttggaagaattctcatatgcgtcgagggaagaatcactcttaaatgaacatggggactgcgagtccctctcagcctccccggc

SEQ ID NO: 574446 - DNA, 871 bp, Homo sapiens
taggcggcggttgatcccagtgattgccgagttgctggcggaccgaggcggcgagctggggcccggtgccgaccctaagtgcagcctgacccgccctcgcgcgcggcgccctccccggccgggcccctcgcctgagcgcccagccataaacctggcgagccaggagcggggagtgcctggctgccggccaggtgctctatcgccaacttcgaaccaaggacgaacacgtccctagctgttggtaggtaaaagtccgcgttattcaattttttctccctatcttctagtggataacgccaggcaaccacgtaatcatatgacattgcacccgaatagcgcgcaaacgaatgtgagcatttgctagggagaggattttatatcttctcagacaaatacaaaagatgagcccaatacgtatgaggaccataaaacagcacccaaaaggaaaggcataaaaggagatttgccagttattaaaaaagggggaaccctttgcagtgaattctatgtcacgctttactaggctataatgctttcccagagcgaccgggatatcttgcgccgttgattgcaacgtccattcaagcgaggtgtacatgcaagggccttgattacgaaatttgcacctaagaaagtgatgtacccactttattaacaattaccacaaacaacacaagtaacagagagacagactaagaagagtacgcaatggagataaacgaaattcatcggcgaaagagcagacatccctaaaacccttatagtagaggcacattgtattaagcataagaataacatatcaagcaaaagaaacaaaacatggataaatataggatcgtatccccatcggtagaggtatgacccaatatga

SEQ ID NO: 574447 - DNA, 161 bp, Homo sapiens
ctagtgatactgtgcaggggcctgttcagggctacacggcagcctcattctcccgggccaggtgatctttccacctcagctttctgagcagtgggaaccacgggcttgtgacaccaccaggccgggataatttttttttttttttttttggaaaaaaattc

SEQ ID NO: 574448 - DNA, 756 bp, Homo sapiens
gcaaggtggggctttaaactttcaaggtacaaaagtatgtcttttaaaatggaagtaacgtgggtttagcatagtgaatgtgacaatatattttatgtatataatgagtctaatgtaattttgatcaacttggtaatgatgttattaaatagcaaaacaagtgcagtgtattaaagctaaacactacattgaaacgcaaacaaaattctggtgaaataactgggctgttgatgcaggtcaggtggaagctgagaaataaatgtatataaatatgtagctgaggatattaattcccattatataaccataattctgtgacttgtaataaaccaagctgtacaatttagtttataatagcagtatctgagctgctccaaaatatatatatcaacagtggtaaatactgtagatttatatatatatatatatatatgcaaaaaatatatatatacacacaagcactatatttcttatgtcatttatgcacattttattatctgtatacttttgtagatgtgattgtaataaaaacatgctaacaagtaataagtatattgagtgtctatagatgatgcatctatgacatcacggcaaacatggtgcaccccctgaatgcttcagaaggctaattctccttctaatcgaagtagctgaagccataaatattccacctgtgataactacagtctatcgccacagttctatgttcaaatgctctcactaattcaccagaagactatttcaaaactaaaaaaa

SEQ ID NO: 574449 - DNA, 939 bp, Homo sapiens
gtaaaaacacattttcccaaagaacactgaattaccgttcaaactggttgttgatgggtaataagggctgtttttgctgccccaaaagggcttaacaatttaggcggatagtttacttaaaaaaaaaaaatccttgggagacatactgaaaatgcaaactagttctctaaattatcaattccctacatgaagaagcagtttgccacgagtttagtctcagaaaatgactggtgggctctatttaaatcagaacccaatttctacgcgtgtcgaataaggtaacagccttcgatgaatttccttcacaacatggttcctagtgaagcaaacatttttctttcaaagggcatgggccttcctagtttcatcccttttcatgaactaaacttctctcatttaaacagtcccatggtcgtttctgaaaacctacagtattctcagaagtttgtagcacgcagtaaacaacaaaacacgctgtgctccacactcagctgcatgggcggccgcattacaccgtgatattgggtaaaacccacatttggccacagttcaccgtgcttcaaacttttacccctctctaaaaaccgctgacattaactaccccagtgtgtccctaaagagggacaacatattgctgctggcacacctacacgatatacttccggctaacagctacacatccactctttgcacacaattagaggcatttggggatatcaaacacaaagttctccccggctaactatcataactagtcgccacgaatctgggaaacccctcgtggcgagtacatctcttggggagagtttcccaacgtaaatgtgtacaacacaattataggctcgaaacatcattaacgaccgtgttcactgtgtgtgccaaaggtggtaacatggaaaacggactactctggctaccccctattttcctaaacgcgat

SEQ ID NO: 574450 - DNA, 455 bp, Homo sapiens
  misc_feature (18)..(18): n is a, c, g, or t
  misc_feature (35)..(35): n is a, c, g, or t
  misc_feature (116)..(116): n is a, c, g, or t
gagacctggggaaaaaanaggaagagggacctatngaattaataaaggaagtggggataatagatgggaatttagcctcatacctatgttaaagaaaaaccatcaaaaattttaanggagccaaaaggacctataatatcattgcccaattgtactcctaatttttatatgaacacagcttttgttgttgttgtttttgaaacagcattttgcttttttgccccaggctggagtgcagtggcatgatcacggttcactgcaaccttgaactcctgagctcaagcagtcctcccaccttagcctcctaagaagcctggactacaagcagaagctacctcgcccagctaattttttaatttttagtagagacaaggtctcgctgtgttgaataggctgatcttgaatttctgggttcaagcaatcctgccttggcctcccacaatgctgggattaca

SEQ ID NO: 574451 - DNA, 288 bp, Homo sapiens
ctgtatcaaggaatggtgtgtacatataaagcaggcagtagatatgaggacttcagacaatgtaggaagcacccatcagctgcgtctcacatccagtctgacgagagaaggagcttcatctttcaagataacccgtggaatcgaagcacgtggtcgggaattaagtgtgaccgcgacaagggaaaacatggcttatactgcggaatgcctgcggggtgatgttgatattctaatggagttcctgctcaatgtcaccacagcaccagaatttcgtcgttgggaagtagc

SEQ ID NO: 574452 - DNA, 186 bp, Homo sapiens
gcggcccaattacaccgtaaggggcggcggaggtggggtggcaggcctctcttggtctggggctattcaagtctgggattcatccactcttcaacgtataaaacacactggagtcactcaacaaatagtcggctactttcatctggagaggtcttcaaatttctatacaacatatccttgaagggg

SEQ ID NO: 574453 - DNA, 572 bp, Homo sapiens
  misc_feature (8)..(8): n is a, c, g, or t
  misc_feature (35)..(35): n is a, c, g, or t
  misc_feature (73)..(73): n is a, c, g, or t
  misc_feature (106)..(106): n is a, c, g, or t
  misc_feature (126)..(126): n is a, c, g, or t
  misc_feature (129)..(129): n is a, c, g, or t
  misc_feature (134)..(134): n is a, c, g, or t
  misc_feature (147)..(147): n is a, c, g, or t
  misc_feature (347)..(347): n is a, c, g, or t
cccagacntggagttgtattggaatgtgtgcttcnatttctgttttagcaacaactcttgtcccccctagccnttacaaaattcctaattttaatatttaattttngaactttctttacagccganttncaaanagagtaactaacnagaaagtgagattgtgatgggataccggaatgtccaagtctaattgtcgggaaaagaccaaaataacatggggattgccaatccaaatgggactaaggacttagaagatccgaaactatgaagctactaaaagaaacattggggaatgcctccggacttggtctgggcaaagatttcttgagcataccttaaaggacagncacccagcaaaatggacagatgggatcacatcaagctaaaaaacttctacacagcgaaggaaacaaagtgaacagaataacatgggaatgttttctgtaatttagtagtaactggcaatagtttacaaacacattttgtgtatactgctgtcattgcactgattaccttctgttgtagtgactttgttctattagtccactcaattaaaatatttggttttgttt

SEQ ID NO: 574454 - DNA, 1247 bp, Homo sapiens
  misc_feature (297)..(297): n is a, c, g, or t
  misc_feature (311)..(311): n is a, c, g, or t
  misc_feature (868)..(868): n is a, c, g, or t
aatcgtccatctggtggcgtatcgtatgatgacgtcttcgagactgcatagcgacgggcctgtgaacggctaagaagtttaatacaggcagggtaattctatattcccgtgatgtttcatgcgtgccgctctgcggtcactcatactagtgtgcagggtatccatgacagttgaatctgcgccgagtaatttacatgcagttgggcgtacattggctaaccgcggggtactgtactcaccccgcacagcctcacaacctggtgccatcagattgagcgaacgtgggcgcggacctantgaccagctggcangagttcttgtatacttggcagcttcgcattaccatcgctgtgtcgctacacctacaggagccagacgacagactgcggtctgtcaaaattttgctatagtcacaggattagactagagactcatcggtcatacgggggacgatataaatgcaagggacccaggtgtgccaagaaagatttaccttactgggttcgggagaaggtgaatggccaaaaccaatcggtcgattattaccccggttttcgcacctcgcaaattaaattacttcgagcttgagccagacaggagactgcgaagaccacggcgtctgtacttaggagagggtagtctgtggccaacttatacaattcaggtaggtacccaagagggacacggatgggcaacgttctagaggcatgacataatcgtgttggctactactcctgtacgaggcaaggtggggtcaattccggaaaaggggatcgagaagcgattggctcctgaacgaccatattagaaccggtggtaccagcccttttgacttagaaatcttcgatcaattagattcccaaagagnagattatttcccaagggcttgtgtgtccgataagtattaaggacgggataaacgcggtggcattgcgggctaggtaatcaccgtgctcttggatacgtcactcgtctcaactgaatcattgggagacacttgtgcgcttggcaagtttgctctaaggcaagccctggcaaggaattgtgttcgccgctaattgaatggcgcaccttggaggtgcctaggaccgatggccaatataacacagaaaatattatcgttgccagtgcgtggaatagaaagagaacgttgggccccggcggaacacgacccgtggggattgcgcagtaaattgcacccggtggcggacacaaaatacccgggttgggggcaaaacgttccccag

SEQ ID NO: 574455 - DNA, 528 bp, Homo sapiens
aaaacggaagaggggccccaattctttaaggttgggaacgcgccccttgttatatgggttccgggcaaaccaagtgtggtgaaaggcttctcaaccaaccccccttggggcgcttttctggttggtatattaaacaaaccagttcgggggggggtctcaaaacaatgggccaaaaaggttttgggggtgggcagggtccccaattttgcccaaaaagcccaaaggggtaaataaattttttcctccgacccgccccccccctttttaacaggggggggaaaacgggttccaaaccggttggtttcaatgggccctttaggtttggggggaaaaaccgggttattttaaccaaggcttggtaacccctccaaaaggaaagggaaaagtttttggggcccccttgggttttttttttggggggggggggttttaggtttttggtttttaaaaccgggcctttttaaggggaccccctggcccaaaaattgggcccgaaattttgggcccccttaaaaaggtttattggga

SEQ ID NO: 574456 - DNA, 85 bp, Homo sapiens
ggatttgctggtgcagtacaactaggcttaatagggaggctcgaattcgaggctcgaattcgaggcaaaaaggaagagaaggcca

SEQ ID NO: 574457 - DNA, 208 bp, Homo sapiens
tgctgggattacaggcatgtgccaccgtgcccagctaattttgtatttctagtagagataaggtttctccacgttgaggctggtctcaaactccgaccttgggtgatccgcccgcctcggcctcccacagtgctgggatgacaggcgtgagccaccgcgcccggccacctgtgcctatttcttgacgatgacatcagttatggggcct

SEQ ID NO: 574458 - DNA, 3147 bp, Homo sapiens
ctgctggtaagtggtctattcctgcccacccccgggtgactagcttggccagtagtcgaccccacccggggaccgactctgggggttggagagactcttggggccggggtcgggcactccagctttcttctagccccgagctgggattccctggcctgcgccagctgcgtacacggcgagtacaccgcacctgcccgggacttcacccgcagctgcgagactcctccattcccggagggctccccacacctgctgcggccgtgccccatctccccgcagctgcggcgctgagcacccccatgtcgagaggctgagaccaggacaggtgcagggcgttcccactcacccccgaaagtcctcctccttcctctgcgagtctgtgttggaggtagagaaatagtatgtggggtttatgtgcaggtcctccccaggctccgctccatcccctaaagctccatttcctagcccagcatcccatttggtaaagcccttcgaagtgggccgcagcagggctgtgctgaatctttagcgcaacccctctgaggaatggtgtcgtttcctactcctcaaaagtacccccgatggcaccagccttcccctcatttcccgtaatactccaacttcgaaaggctggggagtgtgaagctaggctaaaccactgaagtttaaccgggtttgaagagaccccctcccccgacccgcttccccaaactgggctgctacccccaaagcctggtcaggaaagaccctacctccataggcaaaggggttggagggcctcaattctggatttccacgtgcagcagccctgaccaacgctccaataggccgggatccagccatacttcaatggatcccaggggtatcttgaaggcatttcccaagcggcagaaaattcatgctgatgcatcatcaaaagtacttgcaaagattcctaggagggaagagggagaagaagcagaagagtggctgagctcccttcgggcccatgttgtgcgcactggcattggacgagcccgggcagaactctttgagaagcagattgttcagcatggcggccagctatgccctgcccagggcccaggtgtcactcacattgtggtggatgaaggcatggactatgagcgagccctccgccttctcagactaccccagctgcccccgggtgctcagctggtgaagtcagcctggctgagcttgtgccttcaggagaggaggctggtggatgtagctggattcagcatcttcatccccagtaggtacttggaccatccacagcccagcaaggcagagcaggatgcttctattcctcctggcacccatgaggccctgcttcagacagccctttctcctcctcctcctcccaccaggcctgtgtctcctccccaaaaggcaaaagaggcaccaaacacccaagcccagcccatctctgatgatgaagccagtgatggggaagaaacccaggttagtgcagctgatctggaagccctcatcagtggccactaccccacctcccttgagggagattgtgagcctagcccagcccctgctgtcctggataagtgggtctgtgcacagccctcaagccagaaggcgaccaatcacaacctccatatcacagagaagctggaagttctggccaaagcctacagtgttcagggagacaagtggagggccctgggctatgccaaggccatcaatgccctcaagagcttccataagcctgtcacctcgtaccaggaggcctgcagtatccctgggattgggaagcggatggctgagaaaatcatagagatcctggagagcgggcatttgcggaagctggaccatatcagtgagagcgtgcctgtcttggagctcttctccaacatctggggagctgggaccaagactgcccagatgtggtaccaacagggcttccgaagtctggaagacatccgcagccaggcctccctgacaacccagcaggccatcggcctgaagcattacagtgacttcctggaacgtatgcccagggaggaggctacagagattgagcagacagtccagaaagcagcccaggcctttaactctgggctgctgtgtgtggcatgtggttcataccgacggggaaaggcgacctgtggtgatgtcgacgtgctcatcactcacccagatggccggtcccaccggggtatcttcagccgcctccttgacagtcttcggcaggaagggttcctcacagatgacttggtgagccaagaggagaatggtcagcaacagaagtacttgggggtgtgccggctcccagggccagggcggcggcaccggcgcctggacatcatcgtggtgccctatagcgagtttgcctgtgccctgctctacttcaccggctctgcacacttcaaccgctccatgcgagccctggccaaaaccaagggcatgagtctgtcagaacatgccctcagcactgctgtggtccggaacacccatggctgcaaggtggggcctggccgagtgctgcccactcccactgagaaggatgtcttcaggctcttaggcctcccctaccgagaacctgctgagcgggactggtgacccatggctgggggtgctgaggagagccgagttggactggctacccctcctggccacccagtactccctccagcctcagctggctgaacctcgccgctccaaccaccagcttcctcagcgagcagggcccagggctctgggcctgaagcaagagccagcccggctcccagtgtctgcccggctcccagtgtctgcccagccctctcccagacaggagcaggctgccaccccttctacctcaccactgcccctcgaagaattttgcaaatggccccttgccccattttaagcaggagcaggtggctggtttgaagccccaggtatcccccttccctgctatgggaaaggccaagctgctgggtggggacagaagctgcaggggagagggaagcagccgtgctgtcaacatcatccggcaccctctggggtaggagaacagccattccacatgtgttccctctatccgtcctgcttcctgggcagctggtggtgctgggaatggggtgccccagccttggtgaggacagtgttgggaggcccaggggcccagtaaagtgcatttgacattga

SEQ ID NO: 574459 - DNA, 1491 bp, Homo sapiens
cctccccccatgctaagtttctcctggatatactggaagttagattgtttcccagtttaagacacttgacactaatatctcctaagaaacactctgagctccactacttgctcttttactgtctacttaggctagcaactctcatagcactgtttacaacgctcatatcccttatccccacctaagacaactacgactatctctatagtgagacggaatactagctactgctggcgacgctgctactcaacactacctattcacaaggctgctctaccagcacactcctcttcaaactcaacactggcacactgcgtactcacaccctctctccactctacgctacgctgatacggacctcctacgtactacgcgtgtcatctgtttcaccgcctacgtccagccacagagtattggtcacgcctacgttcaggagcagtttacgcccgcctcggtccgtgagactttcgtcgataccttaggcgtgtctaccctaccaagacacacggcttaccatagtcccatctcgtggcttggatcgcaacacggcctaagctctccgacgtctcccgagccgctgggctgctagcgcactaacacacatcacgtgacggcctccgtacacacttcacggcgcactctgtccctcaaccttcccccaacacactctctcggacattaatccataaacccatcctctattaacaccctcgcatccctcggcgcccggcagcacagacttgtcacacagtgctgcatattcccttgccacgctgggcctccttacacctgctgggtcgcgtacatcaccgtcaactttcctctaacagccacaccacactcctctctctatcagcacacatctccaactctaccgtcgcggcttccccacgctcctactgctggacatccgacctgctacaagccaaacccttgccctccaccaaccgtggcggaccacctcttctctatagttgaccgcacgagctccgggcacatattggactcacatcttgtgaaccgctctctactacgccgtctcacgtcttcttcaccacgcgacctcctccctcccgcccccgccgcctctcgcgctcccggcgccgctgccggctccacccctctgccacccacttgggcccgcccccgcccccccccccccgcttcctcccgccgctcacttctcctccctctcgccttctgttaacttagctctcacatcctgcgctccttccacccctgcgtcccttctgcgtctccggcaacccgttcatcctgcttgcctcttgcctgctgttgccgtcgtcctcactctctcacccttcccctccctcgacgtcgcaccacaccccctctcactccgccgcatcacctgccccctcccctccctccgcgcgccctaacccccaccactttcaccccgctgctttaccatcccgcccgctcgcctcccctctctgccctccttgtcctacctccgaccgccctctt

SEQ ID NO: 574460 - DNA, 3480 bp, Homo sapiens
ccccctgcccctgggtttctctgagtttgtgtaaacaggttgcagggaaaggtttgccctgccctgctagggccatgtgctcccacggctattctccctttttgtggaaagctttatgttgtaggtctccgggatagagaaaggaatgtcatcacaccctcccgagggaggccagtggggtctggggccaggcagcatacagaggggaacaagagggcagtccctgtgcagtaagtaactcagaatgactttactcaggaaatatgaccatgactcactggctaggagtgccccatgcccagttcttagagacccttgatagctcctagaagacaggaggctgccgtggtcaagaagggccaagccttgaagtctcacggcaccccctgtggtggaggtataaggctcaggggccaactactgggtcttgcagtccccatcgttgctgtgggctgtcttcaccttctttagttccttctgtagctcagactcggccaccacaacctcctttggcttctggtacctagggcttggggctagaactgaggactcttatgggatgggaagtgggcagggaaagaggaagactctccctgatgcagtgtccaagaagtctgggtgaatcttacagagatgatcaagagatgatcagggtgcagttggcgtgggcaaagctcagcaaggcgtcatccagaggtagctggtgtctatctagatcaggaatggagaacttcttgtagtacttcttgttggttgttctgacaatgatgcagcgctccttctggtccacagagacactatagacatccttaggataggggaggtttcgaatccgccactggaaactcatcttggtgtccttgcgcatgaagataggattggcattgctttccttgatgagttcaggccccaggttccctgctcctaggggcgctgggtctcctacttcaagctgccactggcccatggctcccagggcacttttcacacgccactttctcacaagtagttcactcgtcttctcgtcatattcttcagccatttccttgccgtctgggaataaatagtgaaccttccttctccccctccataggcaaaggggttggagggcctcaattctggatttccacgtgcagcagccctgaccaacgctccaataggccgggatccagccatacttcaatggatcccaggggtatcttgaaggcatttcccaagcggcagaaaattcatgctgatgcatcatcaaaagtacttgcaaagattcctaggagggaagagggagaagaagcagaagagtggctgagctcccttcgggcccatgttgtgcgcactggcattggacgagcccgggcagaactctttgagaagcagattgttcagcatggcggccagctatgccctgcccagggcccaggtgtcactcacattgtggtggatgaaggcatggactatgagcgagccctccgccttctcagactaccccagctgcccccgggtgctcagctggtgaagtcagcctggctgagcttgtgccttcaggagaggaggctggtggatgtagctggattcagcatcttcatccccagtaggtacttggaccatccacagcccagcaaggcagagcaggatgcttctattcctcctggcacccatgaggccctgcttcagacagccctttctcctcctcctcctcccaccaggcctgtgtctcctccccaaaaggcaaaagaggcaccaaacacccaagcccagcccatctctgatgatgaagccagtgatggggaagaaacccaggttagtgcagctgatctggaagccctcatcagtggccactaccccacctcccttgagggagattgtgagcctagcccagcccctgctgtcctggataagtgggtctgtgcacagccctcaagccagaaggcgaccaatcacaacctccatatcacagagaagctggaagttctggccaaagcctacagtgttcagggagacaagtggagggccctgggctatgccaaggccatcaatgccctcaagagcttccataagcctgtcacctcgtaccaggaggcctgcagtatccctgggattgggaagcggatggctgagaaaatcatagagatcctggagagcgggcatttgcggaagctggaccatatcagtgagagcgtgcctgtcttggagctcttctccaacatctggggagctgggaccaagactgcccagatgtggtaccaacagggcttccgaagtctggaagacatccgcagccaggcctccctgacaacccagcaggccatcggcctgaagcattacagtgacttcctggaacgtatgcccagggaggaggctacagagattgagcagacagtccagaaagcagcccaggcctttaactctgggctgctgtgtgtggcatgtggttcataccgacggggaaaggcgacctgtggtgatgtcgacgtgctcatcactcacccagatggccggtcccaccggggtatcttcagccgcctccttgacagtcttcggcaggaagggttcctcacagatgacttggtgagccaagaggagaatggtcagcaacagaagtacttgggggtgtgccggctcccagggccagggcggcggcaccggcgcctggacatcatcgtggtgccctatagcgagtttgcctgtgccctgctctacttcaccggctctgcacacttcaaccgctccatgcgagccctggccaaaaccaagggcatgagtctgtcagaacatgccctcagcactgctgtggtccggaacacccatggctgcaaggtggggcctggccgagtgctgcccactcccactgagaaggatgtcttcaggctcttaggcctcccctaccgagaacctgctgagcgggactggtgacccatggctgggggtgctgaggagagccgagttggactggctacccctcctggccacccagtactccctccagcctcagctggctgaacctcgccgctccaaccaccagcttcctcagcgagcagggcccagggctctgggcctgaagcaagagccagcccggctcccagtgtctgcccggctcccagtgtctgcccagccctctcccagacaggagcaggctgccaccccttctacctcaccactgcccctcgaagaattttgcaaatggccccttgccccattttaagcaggagcaggtggctggtttgaagccccaggtatcccccttccctgctatgggaaaggccaagctgctgggtggggacagaagctgcaggggagagggaagcagccgtgctgtcaacatcatccggcaccctctggggtaggagaacagccattccacatgtgttccctctatccgtcctgcttcctgggcagctggtggtgctgggaatggggtgccccagccttggtgaggacagtgttgggaggcccaggggcccagtaaagtgcatttgacattga

SEQ ID NO: 574461 - DNA, 295 bp, Homo sapiens
ggagagacagcaaggggccgcaggtgtcgatgggcccccaggcttctccaggacagcacagggaccccggatgaagacgcgtggccccctcaggcattcagctgcccacggagtttcctgcaccctggaaaagccccccacccttcctctgggaaactgacagctgtcttccacagcctctgatgtggacctggtactgaggagcaagactgtccagttctcctccacatggggcatcccagaatcaggatctgggactggcagggtcccctcctgtgtctcatctcttgcagca

SEQ ID NO: 574462 - DNA, 3409 bp, Homo sapiens
ccccctgcccctgggtttctctgagtttgtgtaaacaggttgcagggaaaggtttgccctgccctgctagggccatgtgctcccacggctattctccctttttgtggaaagctttatgttgtaggtctccgggatagagaaaggaatgtcatcacaccctcccgagggaggccagtggggtctggggccaggcagcatacagaggggaacaagagggcagtccctgtgcagtaagtaactcagaatgactttactcaggaaatatgaccatgactcactggctaggagtgccccatgcccagttcttagagacccttgatagctcctagaagacaggaggctgccgtggtcaagaagggccaagccttgaagtctcacggcaccccctgtggtggaggtataaggctcaggggccaactactgggtcttgcagtccccatcgttgctgtgggctgtcttcaccttctttagttccttctgtagctcagactcggccaccacaacctcctttggcttctggtactgatgcagtgtccaagaagtctgggtgaatcttacagagatgatcaagagatgatcagggtgcagttggcgtgggcaaagctcagcaaggcgtcatccagaggtagctggtgtctatctagatcaggaatggagaacttcttgtagtacttcttgttggttgttctgacaatgatgcagcgctccttctggtccacagagacactatagacatccttaggataggggaggtttcgaatccgccactggaaactcatcttggtgtccttgcgcatgaagataggattggcattgctttccttgatgagttcaggccccaggttccctgctcctaggggcgctgggtctcctacttcaagctgccactggcccatggctcccagggcacttttcacacgccactttctcacaagtagttcactcgtcttctcgtcatattcttcagccatttccttgccgtctgggaataaatagtgaaccttccttctccccctccataggcaaaggggttggagggcctcaattctggatttccacgtgcagcagccctgaccaacgctccaataggccgggatccagccatacttcaatggatcccaggggtatcttgaaggcatttcccaagcggcagaaaattcatgctgatgcatcatcaaaagtacttgcaaagattcctaggagggaagagggagaagaagcagaagagtggctgagctcccttcgggcccatgttgtgcgcactggcattggacgagcccgggcagaactctttgagaagcagattgttcagcatggcggccagctatgccctgcccagggcccaggtgtcactcacattgtggtggatgaaggcatggactatgagcgagccctccgccttctcagactaccccagctgcccccgggtgctcagctggtgaagtcagcctggctgagcttgtgccttcaggagaggaggctggtggatgtagctggattcagcatcttcatccccagtaggtacttggaccatccacagcccagcaaggcagagcaggatgcttctattcctcctggcacccatgaggccctgcttcagacagccctttctcctcctcctcctcccaccaggcctgtgtctcctccccaaaaggcaaaagaggcaccaaacacccaagcccagcccatctctgatgatgaagccagtgatggggaagaaacccaggttagtgcagctgatctggaagccctcatcagtggccactaccccacctcccttgagggagattgtgagcctagcccagcccctgctgtcctggataagtgggtctgtgcacagccctcaagccagaaggcgaccaatcacaacctccatatcacagagaagctggaagttctggccaaagcctacagtgttcagggagacaagtggagggccctgggctatgccaaggccatcaatgccctcaagagcttccataagcctgtcacctcgtaccaggaggcctgcagtatccctgggattgggaagcggatggctgagaaaatcatagagatcctggagagcgggcatttgcggaagctggaccatatcagtgagagcgtgcctgtcttggagctcttctccaacatctggggagctgggaccaagactgcccagatgtggtaccaacagggcttccgaagtctggaagacatccgcagccaggcctccctgacaacccagcaggccatcggcctgaagcattacagtgacttcctggaacgtatgcccagggaggaggctacagagattgagcagacagtccagaaagcagcccaggcctttaactctgggctgctgtgtgtggcatgtggttcataccgacggggaaaggcgacctgtggtgatgtcgacgtgctcatcactcacccagatggccggtcccaccggggtatcttcagccgcctccttgacagtcttcggcaggaagggttcctcacagatgacttggtgagccaagaggagaatggtcagcaacagaagtacttgggggtgtgccggctcccagggccagggcggcggcaccggcgcctggacatcatcgtggtgccctatagcgagtttgcctgtgccctgctctacttcaccggctctgcacacttcaaccgctccatgcgagccctggccaaaaccaagggcatgagtctgtcagaacatgccctcagcactgctgtggtccggaacacccatggctgcaaggtggggcctggccgagtgctgcccactcccactgagaaggatgtcttcaggctcttaggcctcccctaccgagaacctgctgagcgggactggtgacccatggctgggggtgctgaggagagccgagttggactggctacccctcctggccacccagtactccctccagcctcagctggctgaacctcgccgctccaaccaccagcttcctcagcgagcagggcccagggctctgggcctgaagcaagagccagcccggctcccagtgtctgcccggctcccagtgtctgcccagccctctcccagacaggagcaggctgccaccccttctacctcaccactgcccctcgaagaattttgcaaatggccccttgccccattttaagcaggagcaggtggctggtttgaagccccaggtatcccccttccctgctatgggaaaggccaagctgctgggtggggacagaagctgcaggggagagggaagcagccgtgctgtcaacatcatccggcaccctctggggtaggagaacagccattccacatgtgttccctctatccgtcctgcttcctgggcagctggtggtgctgggaatggggtgccccagccttggtgaggacagtgttgggaggcccaggggcccagtaaagtgcatttgacattga

SEQ ID NO: 574463 - DNA, 2762 bp, Homo sapiens
  misc_feature (2732)..(2732): n is a, c, g, or t
aggccctgtccaaacgggcactaattggccccgggtatttaggcgccccctttttttttttgcagtaagtaactcagaatgactttactcaggaaatatgaccatgactcactggctaggagtgccccatgcccagttcttagagacccttgatagctcctagaagacaggaggctgccgtggtcaagaagggccaagccttgaagtctcacggcaccccctgtggtggaggtataaggctcaggggccaactactgggtcttgcagtccccatcgttgctgtgggctgtcttcaccttctttagttccttctgtagctcagactcggccaccacaacctcctttggcttctggtaagagatgatcagggtgcagttggcgtgggcaaagctcagcaaggcgtcatccagaggtagctggtgtctatctagatcaggaatggagaacttcttgtagtacttcttgttggttgttctgacaatgatgcagcgctccttctggtccacagagacactatagacatccttaggataggggaggtttcgaatccgccactggaaactcatcttggtgtccttgcgcatgaagataggattggcattgctttccttgatgagttcaggccccaggttccctgctcctaggggcgctgggtctcctacttcaagctgccactggcccatggctcccagggcacttttcacacgccactttctcacaagtagttcactcgtcttctcgtcatattcttcagccatttccttgccgtctgggaataaatagtgaaccttccttctccccctccataggcaaaggggttggagggcctcaattctggatttccacgtgcagcagccctgaccaacgctccaataggccgggatccagccatacttcaatggatcccaggggtatcttgaaggcatttcccaagcggcagaaaattcatgctgatgcatcatcaaaagtacttgcaaagattcctaggagggaagagggagaagaagcagaagagtggctgagctcccttcgggcccatgttgtgcgcactggcattggacgagcccgggcagaactctttgagaagcagattgttcagcatggcggccagctatgccctgcccagggcccaggtgtcactcacattgtggtggatgaaggcatggactatgagcgagccctccgccttctcagactaccccagctgcccccgggtgctcagctggtgaagtcagcctggctgagcttgtgccttcaggagaggaggctggtggatgtagctggattcagcatcttcatccccagtaggtacttggaccatccacagcccagcaaggcagagcaggatgcttctattcctcctggcacccatgaggccctgcttcagacagccctttctcctcctcctcctcccaccaggcctgtgtctcctccccaaaaggcaaaagaggcaccaaacacccaagcccagcccatctctgatgatgaagccagtgatggggaagaaacccaggttagtgcagctgatctggaagccctcatcagtggccactaccccacctcccttgagggagattgtgagcctagcccagcccctgctgtcctggataagtgggtctgtgcacagccctcaagccagaaggcgaccaatcacaacctccatatcacagagaagctggaagttctggccaaagcctacagtgttcagggagacaagtggagggccctgggctatgccaaggccatcaatgccctcaagagcttccataagcctgtcacctcgtaccaggaggcctgcagtatccctgggattgggaagcggatggctgagaaaatcatagagatcctggagagcgggcatttgcggaagctggaccatatcagtgagagcgtgcctgtcttggagctcttctccaacatctggggagctgggaccaagactgcccagatgtggtaccaacagggcttccgaagtctggaagacatccgcagccaggcctccctgacaacccagcaggccatcggcctgaagcattacagtgacttcctggaacgtatgcccagggaggaggctacagagattgagcagacagtccagaaagcagcccaggcctttaactctgggctgctgtgtgtggcatgtggttcataccgacggggaaaggcgacctgtggtgatgtcgacgtgctcatcactcacccagatggccggtcccaccggggtatcttcagccgcctccttgacagtcttcggcaggaagggttcctcacagatgacttggtgagccaagaggagaatggtcagcaacagaagtacttgggggtgtgccggctcccagggccagggcggcggcaccggcgcctggacatcatcgtggtgccctatagcgagtttgcctgtgccctgctctacttcaccggctctgcacacttcaaccgctccatgcgagccctggccaaaaccaagggcatgagtctgtcagaacatgccctcagcactgctgtggtccggaacacccatggctgcaaggtggggcctggccgagtgctgcccactcccactgagaaggatgtcttcaggctcttaggcctcccctaccgagaacctgctgagcgggactggtgacccatggctgggggtgctgaggagagccgagttggactggctacccctcctggccacccagtactccctccagcctcagctggctgaacctcgccgctccaaccancacgacgaccacgacgacagcagtcactga

SEQ ID NO: 574464 - DNA, 186 bp, Homo sapiens
ttatgaatcacaaatagacaatggtcaatagtaccgcctgaagatatcttaaaataagcaggtggatctatgtcatgtacacgatcaaaaactatccggcatatgtatggctagtgtaaatcagtaagaggtgtaatatggaaccttgttctggacagtacaccagttgccttttatcccaaagtt

SEQ ID NO: 574465 - DNA, 3259 bp, Homo sapiens
ccccctgcccctgggtttctctgagtttgtgtaaacaggttgcagggaaaggtttgccctgccctgctagggccatgtgctcccacggctattctccctttttgtggaaagctttatgttgtaggtctccgggatagagaaaggaatgtcatcacaccctcccgagggaggccagtggggtctggggccaggcagcatacagaggggaacaagagggcagtccctgtgcagtaagtaactcagaatgactttactcaggaaatatgaccatgactcactggctaggagtgccccatgcccagttcttagagacccttgatagctcctagaagacaggaggctgccgtggtcaagaagggccaagccttgaagtctcacggcaccccctgtggtggaggtataaggctcaggggccaactactgggtcttgcagtccccatcgttgctgtgggctgtcttcaccttctttagttccttctgtagctcagactcggccaccacaacctcctttggcttctggtattcttgttggttgttctgacaatgatgcagcgctccttctggtccacagagacactatagacatccttaggataggggaggtttcgaatccgccactggaaactcatcttggtgtccttgcgcatgaagataggattggcattgctttccttgatgagttcaggccccaggttccctgctcctaggggcgctgggtctcctacttcaagctgccactggcccatggctcccagggcacttttcacacgccactttctcacaagtagttcactcgtcttctcgtcatattcttcagccatttccttgccgtctgggaataaatagtgaaccttccttctccccctccataggcaaaggggttggagggcctcaattctggatttccacgtgcagcagccctgaccaacgctccaataggccgggatccagccatacttcaatggatcccaggggtatcttgaaggcatttcccaagcggcagaaaattcatgctgatgcatcatcaaaagtacttgcaaagattcctaggagggaagagggagaagaagcagaagagtggctgagctcccttcgggcccatgttgtgcgcactggcattggacgagcccgggcagaactctttgagaagcagattgttcagcatggcggccagctatgccctgcccagggcccaggtgtcactcacattgtggtggatgaaggcatggactatgagcgagccctccgccttctcagactaccccagctgcccccgggtgctcagctggtgaagtcagcctggctgagcttgtgccttcaggagaggaggctggtggatgtagctggattcagcatcttcatccccagtaggtacttggaccatccacagcccagcaaggcagagcaggatgcttctattcctcctggcacccatgaggccctgcttcagacagccctttctcctcctcctcctcccaccaggcctgtgtctcctccccaaaaggcaaaagaggcaccaaacacccaagcccagcccatctctgatgatgaagccagtgatggggaagaaacccaggttagtgcagctgatctggaagccctcatcagtggccactaccccacctcccttgagggagattgtgagcctagcccagcccctgctgtcctggataagtgggtctgtgcacagccctcaagccagaaggcgaccaatcacaacctccatatcacagagaagctggaagttctggccaaagcctacagtgttcagggagacaagtggagggccctgggctatgccaaggccatcaatgccctcaagagcttccataagcctgtcacctcgtaccaggaggcctgcagtatccctgggattgggaagcggatggctgagaaaatcatagagatcctggagagcgggcatttgcggaagctggaccatatcagtgagagcgtgcctgtcttggagctcttctccaacatctggggagctgggaccaagactgcccagatgtggtaccaacagggcttccgaagtctggaagacatccgcagccaggcctccctgacaacccagcaggccatcggcctgaagcattacagtgacttcctggaacgtatgcccagggaggaggctacagagattgagcagacagtccagaaagcagcccaggcctttaactctgggctgctgtgtgtggcatgtggttcataccgacggggaaaggcgacctgtggtgatgtcgacgtgctcatcactcacccagatggccggtcccaccggggtatcttcagccgcctccttgacagtcttcggcaggaagggttcctcacagatgacttggtgagccaagaggagaatggtcagcaacagaagtacttgggggtgtgccggctcccagggccagggcggcggcaccggcgcctggacatcatcgtggtgccctatagcgagtttgcctgtgccctgctctacttcaccggctctgcacacttcaaccgctccatgcgagccctggccaaaaccaagggcatgagtctgtcagaacatgccctcagcactgctgtggtccggaacacccatggctgcaaggtggggcctggccgagtgctgcccactcccactgagaaggatgtcttcaggctcttaggcctcccctaccgagaacctgctgagcgggactggtgacccatggctgggggtgctgaggagagccgagttggactggctacccctcctggccacccagtactccctccagcctcagctggctgaacctcgccgctccaaccaccagcttcctcagcgagcagggcccagggctctgggcctgaagcaagagccagcccggctcccagtgtctgcccggctcccagtgtctgcccagccctctcccagacaggagcaggctgccaccccttctacctcaccactgcccctcgaagaattttgcaaatggccccttgccccattttaagcaggagcaggtggctggtttgaagccccaggtatcccccttccctgctatgggaaaggccaagctgctgggtggggacagaagctgcaggggagagggaagcagccgtgctgtcaacatcatccggcaccctctggggtaggagaacagccattccacatgtgttccctctatccgtcctgcttcctgggcagctggtggtgctgggaatggggtgccccagccttggtgaggacagtgttgggaggcccaggggcccagtaaagtgcatttgacattga

SEQ ID NO: 574466 - DNA, 2733 bp, Homo sapiens
ctgctggtaagtggtctattcctgcccacccccgggtgactagcttggccagtagtcgaccccacccggggaccgactctgggggttggagagactcttggggccggggtcgggcactccagctttcttctagccccgagctgggattccctggcctgcgccagctgcgtacacggcgagtacaccgcacctgcccgggacttcacccgcagctgcgagactcctccattcccggagggctccccacacctgctgcggccgtgccccatctccccgcagctgcggcgctgagcacccccatgtcgagaggctgagaccaggacaggtgcagggcgttcccactcacccccgaaagtcctcctccttcctctgcgagtctgtgttggaggcagccctgaccaacgctccaataggccgggatccagccatacttcaatggatcccaggggtatcttgaaggcatttcccaagcggcagaaaattcatgctgatgcatcatcaaaagtacttgcaaagattcctaggagggaagagggagaagaagcagaagagtggctgagctcccttcgggcccatgttgtgcgcactggcattggacgagcccgggcagaactctttgagaagcagattgttcagcatggcggccagctatgccctgcccagggcccaggtgtcactcacattgtggtggatgaaggcatggactatgagcgagccctccgccttctcagactaccccagctgcccccgggtgctcagctggtgaagtcagcctggctgagcttgtgccttcaggagaggaggctggtggatgtagctggattcagcatcttcatccccagtaggtacttggaccatccacagcccagcaaggcagagcaggatgcttctattcctcctggcacccatgaggccctgcttcagacagccctttctcctcctcctcctcccaccaggcctgtgtctcctccccaaaaggcaaaagaggcaccaaacacccaagcccagcccatctctgatgatgaagccagtgatggggaagaaacccaggttagtgcagctgatctggaagccctcatcagtggccactaccccacctcccttgagggagattgtgagcctagcccagcccctgctgtcctggataagtgggtctgtgcacagccctcaagccagaaggcgaccaatcacaacctccatatcacagagaagctggaagttctggccaaagcctacagtgttcagggagacaagtggagggccctgggctatgccaaggccatcaatgccctcaagagcttccataagcctgtcacctcgtaccaggaggcctgcagtatccctgggattgggaagcggatggctgagaaaatcatagagatcctggagagcgggcatttgcggaagctggaccatatcagtgagagcgtgcctgtcttggagctcttctccaacatctggggagctgggaccaagactgcccagatgtggtaccaacagggcttccgaagtctggaagacatccgcagccaggcctccctgacaacccagcaggccatcggcctgaagcattacagtgacttcctggaacgtatgcccagggaggaggctacagagattgagcagacagtccagaaagcagcccaggcctttaactctgggctgctgtgtgtggcatgtggttcataccgacggggaaaggcgacctgtggtgatgtcgacgtgctcatcactcacccagatggccggtcccaccggggtatcttcagccgcctccttgacagtcttcggcaggaagggttcctcacagatgacttggtgagccaagaggagaatggtcagcaacagaagtacttgggggtgtgccggctcccagggccagggcggcggcaccggcgcctggacatcatcgtggtgccctatagcgagtttgcctgtgccctgctctacttcaccggctctgcacacttcaaccgctccatgcgagccctggccaaaaccaagggcatgagtctgtcagaacatgccctcagcactgctgtggtccggaacacccatggctgcaaggtggggcctggccgagtgctgcccactcccactgagaaggatgtcttcaggctcttaggcctcccctaccgagaacctgctgagcgggactggtgacccatggctgggggtgctgaggagagccgagttggactggctacccctcctggccacccagtactccctccagcctcagctggctgaacctcgccgctccaaccaccagcttcctcagcgagcagggcccagggctctgggcctgaagcaagagccagcccggctcccagtgtctgcccggctcccagtgtctgcccagccctctcccagacaggagcaggctgccaccccttctacctcaccactgcccctcgaagaattttgcaaatggccccttgccccattttaagcaggagcaggtggctggtttgaagccccaggtatcccccttccctgctatgggaaaggccaagctgctgggtggggacagaagctgcaggggagagggaagcagccgtgctgtcaacatcatccggcaccctctggggtaggagaacagccattccacatgtgttccctctatccgtcctgcttcctgggcagctggtggtgctgggaatggggtgccccagccttggtgaggacagtgttgggaggcccaggggcccagtaaagtgcatttgacattga

SEQ ID NO: 574467 - DNA, 763 bp, Homo sapiens
gcctgcctcagctacttgggaggctgaggcatgagaatcggtttaacccaggaggcagaggctgcagtgagccgagatcgcgccactacactccagcctggatgacagagggagaccctatctcaaaacaacaacaacaacaaaactagatggtggctgtgaaaaatattttgtggaatttaaattccattcaaatgttggtcagcgtggttagtgatctagtcgaggggaaagaccagtgcagcaccagttaccacacacgcagagcgggccgggtgcttcagatgtgactgcaggatcagggaaggcttcactgggcaggagatgagcccagaggaaaggtcaggagggaagtgcgccaggaaaggacccctggtgcaaaggcgtggaggcaagaaaacaggactgtttgggaactgtgaggcatccagctgagccaggctggggaatgagttctgatcagcaggcagctctcctggggtctacagatgtcccgcaaaactatgagacacgtggatgatttaaaaattttccagccggtgcggtggctcacgcctataatcccagcactttgggaggctgaggcgggtggatcacgaggtcaggagatcaagactatcctggctaacgcggtgaaaccctgtctctactaaaaatacaaacaaacaaacaaagaattagccgggcgtggtggcgggcgcatgtagtcccagctactttgggaggctgaggcgggtggatcacctgaggtcaggagttcaca

SEQ ID NO: 574468 - DNA, 168 bp, Homo sapiens
cgaccagcggacagtaagagagggagatgtacagcagcagagagagaggaatgtgtcccaaataggctctcttgctgaccccccctcttcctaaagggataatgccagggtctatctatctgcagagaaaggggtagcagggagagagaactgagaacataataatct

SEQ ID NO: 574469 - DNA, 3093 bp, Homo sapiens
ctgctggtaagtggtctattcctgcccacccccgggtgactagcttggccagtagtcgaccccacccggggaccgactctgggggttggagagactcttggggccggggtcgggcactccagctttcttctagccccgagctgggattccctggcctgcgccagctgcgtacacggcgagtacaccgcacctgcccgggacttcacccgcagctgcgagactcctccattcccggagggctccccacacctgctgcggccgtgccccatctccccgcagctgcggcgctgagcacccccatgtcgagaggctgagaccaggacaggtgcagggcgttcccactcacccccgaaagtcctcctccttcctctgcgagtctgtgttggaggtagagaaatagtatgtggggtttatgtgcaggtcctccccaggctccgctccatcccctaaagctccatttcctagcccagcatcccatttggtaaagcccttcgaagtgggccgcagcagggctgtgctgaatctttagcgcaacccctctgaggaatggtgtcgtttcctactcctctcgaaaggctggggagtgtgaagctaggctaaaccactgaagtttaaccgggtttgaagagaccccctcccccgacccgcttccccaaactgggctgctacccccaaagcctggtcaggaaagaccctacctccataggcaaaggggttggagggcctcaattctggatttccacgtgcagcagccctgaccaacgctccaataggccgggatccagccatacttcaatggatcccaggggtatcttgaaggcatttcccaagcggcagaaaattcatgctgatgcatcatcaaaagtacttgcaaagattcctaggagggaagagggagaagaagcagaagagtggctgagctcccttcgggcccatgttgtgcgcactggcattggacgagcccgggcagaactctttgagaagcagattgttcagcatggcggccagctatgccctgcccagggcccaggtgtcactcacattgtggtggatgaaggcatggactatgagcgagccctccgccttctcagactaccccagctgcccccgggtgctcagctggtgaagtcagcctggctgagcttgtgccttcaggagaggaggctggtggatgtagctggattcagcatcttcatccccagtaggtacttggaccatccacagcccagcaaggcagagcaggatgcttctattcctcctggcacccatgaggccctgcttcagacagccctttctcctcctcctcctcccaccaggcctgtgtctcctccccaaaaggcaaaagaggcaccaaacacccaagcccagcccatctctgatgatgaagccagtgatggggaagaaacccaggttagtgcagctgatctggaagccctcatcagtggccactaccccacctcccttgagggagattgtgagcctagcccagcccctgctgtcctggataagtgggtctgtgcacagccctcaagccagaaggcgaccaatcacaacctccatatcacagagaagctggaagttctggccaaagcctacagtgttcagggagacaagtggagggccctgggctatgccaaggccatcaatgccctcaagagcttccataagcctgtcacctcgtaccaggaggcctgcagtatccctgggattgggaagcggatggctgagaaaatcatagagatcctggagagcgggcatttgcggaagctggaccatatcagtgagagcgtgcctgtcttggagctcttctccaacatctggggagctgggaccaagactgcccagatgtggtaccaacagggcttccgaagtctggaagacatccgcagccaggcctccctgacaacccagcaggccatcggcctgaagcattacagtgacttcctggaacgtatgcccagggaggaggctacagagattgagcagacagtccagaaagcagcccaggcctttaactctgggctgctgtgtgtggcatgtggttcataccgacggggaaaggcgacctgtggtgatgtcgacgtgctcatcactcacccagatggccggtcccaccggggtatcttcagccgcctccttgacagtcttcggcaggaagggttcctcacagatgacttggtgagccaagaggagaatggtcagcaacagaagtacttgggggtgtgccggctcccagggccagggcggcggcaccggcgcctggacatcatcgtggtgccctatagcgagtttgcctgtgccctgctctacttcaccggctctgcacacttcaaccgctccatgcgagccctggccaaaaccaagggcatgagtctgtcagaacatgccctcagcactgctgtggtccggaacacccatggctgcaaggtggggcctggccgagtgctgcccactcccactgagaaggatgtcttcaggctcttaggcctcccctaccgagaacctgctgagcgggactggtgacccatggctgggggtgctgaggagagccgagttggactggctacccctcctggccacccagtactccctccagcctcagctggctgaacctcgccgctccaaccaccagcttcctcagcgagcagggcccagggctctgggcctgaagcaagagccagcccggctcccagtgtctgcccggctcccagtgtctgcccagccctctcccagacaggagcaggctgccaccccttctacctcaccactgcccctcgaagaattttgcaaatggccccttgccccattttaagcaggagcaggtggctggtttgaagccccaggtatcccccttccctgctatgggaaaggccaagctgctgggtggggacagaagctgcaggggagagggaagcagccgtgctgtcaacatcatccggcaccctctggggtaggagaacagccattccacatgtgttccctctatccgtcctgcttcctgggcagctggtggtgctgggaatggggtgccccagccttggtgaggacagtgttgggaggcccaggggcccagtaaagtgcatttgacattga

SEQ ID NO: 574470 - DNA, 345 bp, Homo sapiens
  misc_feature (27)..(27): n is a, c, g, or t
  misc_feature (74)..(74): n is a, c, g, or t
  misc_feature (82)..(82): n is a, c, g, or t
caggtggaccccatggctttgagcctnagtttactcatctgtaacatgggcataagaatagtaccagctggacntggtggcncatgcctgtaatcccagcactttgggaggccgaggcaggcggatcacgaggtcaggagttagcgaccagcctggccaacatggtgaagccctgtctctactaaaaataccaaaattagccaagcgtggtggcgggcacctgtaatcccagctactcgggaagctgaggcaggagaatcccttgaacttgggaggcagaggttgcagtgagccgagatcgcgccattgcactccagcctgggtgacagagcgagactctgtttc

SEQ ID NO: 574471 - DNA, 2377 bp, Homo sapiens
aaaattctggccatttgccctccttccccccttcgtccgctctcattggctctgctggccgggatccagccatacttcaatggatcccaggggtatcttgaaggcatttcccaagcggcagaaaattcatgctgatgcatcatcaaaagtacttgcaaagattcctaggagggaagagggagaagaagcagaagagtggctgagctcccttcgggcccatgttgtgcgcactggcattggacgagcccgggcagaactctttgagaagcagattgttcagcatggcggccagctatgccctgcccagggcccaggtgtcactcacattgtggtggatgaaggcatggactatgagcgagccctccgccttctcagactaccccagctgcccccgggtgctcagctggtgaagtcagcctggctgagcttgtgccttcaggagaggaggctggtggatgtagctggattcagcatcttcatccccagtaggtacttggaccatccacagcccagcaaggcagagcaggatgcttctattcctcctggcacccatgaggccctgcttcagacagccctttctcctcctcctcctcccaccaggcctgtgtctcctccccaaaaggcaaaagaggcaccaaacacccaagcccagcccatctctgatgatgaagccagtgatggggaagaaacccaggttagtgcagctgatctggaagccctcatcagtggccactaccccacctcccttgagggagattgtgagcctagcccagcccctgctgtcctggataagtgggtctgtgcacagccctcaagccagaaggcgaccaatcacaacctccatatcacagagaagctggaagttctggccaaagcctacagtgttcagggagacaagtggagggccctgggctatgccaaggccatcaatgccctcaagagcttccataagcctgtcacctcgtaccaggaggcctgcagtatccctgggattgggaagcggatggctgagaaaatcatagagatcctggagagcgggcatttgcggaagctggaccatatcagtgagagcgtgcctgtcttggagctcttctccaacatctggggagctgggaccaagactgcccagatgtggtaccaacagggcttccgaagtctggaagacatccgcagccaggcctccctgacaacccagcaggccatcggcctgaagcattacagtgacttcctggaacgtatgcccagggaggaggctacagagattgagcagacagtccagaaagcagcccaggcctttaactctgggctgctgtgtgtggcatgtggttcataccgacggggaaaggcgacctgtggtgatgtcgacgtgctcatcactcacccagatggccggtcccaccggggtatcttcagccgcctccttgacagtcttcggcaggaagggttcctcacagatgacttggtgagccaagaggagaatggtcagcaacagaagtacttgggggtgtgccggctcccagggccagggcggcggcaccggcgcctggacatcatcgtggtgccctatagcgagtttgcctgtgccctgctctacttcaccggctctgcacacttcaaccgctccatgcgagccctggccaaaaccaagggcatgagtctgtcagaacatgccctcagcactgctgtggtccggaacacccatggctgcaaggtggggcctggccgagtgctgcccactcccactgagaaggatgtcttcaggctcttaggcctcccctaccgagaacctgctgagcgggactggtgacccatggctgggggtgctgaggagagccgagttggactggctacccctcctggccacccagtactccctccagcctcagctggctgaacctcgccgctccaaccaccagcttcctcagcgagcagggcccagggctctgggcctgaagcaagagccagcccggctcccagtgtctgcccggctcccagtgtctgcccagccctctcccagacaggagcaggctgccaccccttctacctcaccactgcccctcgaagaattttgcaaatggccccttgccccattttaagcaggagcaggtggctggtttgaagccccaggtatcccccttccctgctatgggaaaggccaagctgctgggtggggacagaagctgcaggggagagggaagcagccgtgctgtcaacatcatccggcaccctctggggtaggagaacagccattccacatgtgttccctctatccgtcctgcttcctgggcagctggtggtgctgggaatggggtgccccagccttggtgaggacagtgttgggaggcccaggggcccagtaaagtgcatttgacattga

SEQ ID NO: 574472 - DNA, 214 bp, Homo sapiens
attactgagtcgggagttggcaaccagactggacaacccggcgaaatccgtctctaccaaaaatacaaaaaaactagctgggcatggtggtgggcgcccattcatcccagccactcaggaggctgagagcatgaacaattacttgacacacaggaggcggaggccgcagatgagccacagctcataccacctgcactccagacctggaacgcca

SEQ ID NO: 574473 - DNA, 2125 bp, Homo sapiens
aaaattctggccatttgccctccttccccccttcgtccgctctcattggctctgctgcagccctgaccaacgctccaataggccgggatccagccatacttcaatggatcccaggggtatcttgaaggcatttcccaagcggcagaaaattcatgctgatgcatcatcaaaagtacttgcaaagattcctaggagggaagagggagaagaagcagaagagtggctgagctcccttcgggcccatgttgtgcgcactggcattggacgagcccgggcagaactctttgagaagcagattgttcagcatggcggccagctatgccctgcccagggcccaggtgtcactcacattgtggtggatgaaggcatggactatgagcgagccctccgccttctcagactaccccagctgcccccgggtgctcagctggtgaagtcagcctggctgagcttgtgccttcaggagaggaggctggtggatgtagctggattcagcatcttcatccccagtaggtacttggaccatccacagcccagcaaggcagagcaggatgcttctattcctcctggcacccatgaggccctgcttcagacagccctttctcctcctcctcctcccaccaggcctgtgtctcctccccaaaaggcaaaagaggcaccaaacacccaagcccagcccatctctgatgatgaagccagtgatggggaagaaacccaggaggcctgcagtatccctgggattgggaagcggatggctgagaaaatcatagagatcctggagagcgggcatttgcggaagctggaccatatcagtgagagcgtgcctgtcttggagctcttctccaacatctggggagctgggaccaagactgcccagatgtggtaccaacagggcttccgaagtctggaagacatccgcagccaggcctccctgacaacccagcaggccatcggcctgaagcattacagtgacttcctggaacgtatgcccagggaggaggctacagagattgagcagacagtccagaaagcagcccaggcctttaactctgggctgctgtgtgtggcatgtggttcataccgacggggaaaggcgacctgtggtgatgtcgacgtgctcatcactcacccagatggccggtcccaccggggtatcttcagccgcctccttgacagtcttcggcaggaagggttcctcacagatgacttggtgagccaagaggagaatggtcagcaacagaagtacttgggggtgtgccggctcccagggccagggcggcggcaccggcgcctggacatcatcgtggtgccctatagcgagtttgcctgtgccctgctctacttcaccggctctgcacacttcaaccgctccatgcgagccctggccaaaaccaagggcatgagtctgtcagaacatgccctcagcactgctgtggtccggaacacccatggctgcaaggtggggcctggccgagtgctgcccactcccactgagaaggatgtcttcaggctcttaggcctcccctaccgagaacctgctgagcgggactggtgacccatggctgggggtgctgaggagagccgagttggactggctacccctcctggccacccagtactccctccagcctcagctggctgaacctcgccgctccaaccaccagcttcctcagcgagcagggcccagggctctgggcctgaagcaagagccagcccggctcccagtgtctgcccggctcccagtgtctgcccagccctctcccagacaggagcaggctgccaccccttctacctcaccactgcccctcgaagaattttgcaaatggccccttgccccattttaagcaggagcaggtggctggtttgaagccccaggtatcccccttccctgctatgggaaaggccaagctgctgggtggggacagaagctgcaggggagagggaagcagccgtgctgtcaacatcatccggcaccctctggggtaggagaacagccattccacatgtgttccctctatccgtcctgcttcctgggcagctggtggtgctgggaatggggtgccccagccttggtgaggacagtgttgggaggcccaggggcccagtaaagtgcatttgacattga

SEQ ID NO: 574474 - DNA, 2239 bp, Homo sapiens
aaaattctggccatttgccctccttccccccttcgtccgctctcattggctctgctagtggctgagctcccttcgggcccatgttgtgcgcactggcattggacgagcccgggcagaactctttgagaagcagattgttcagcatggcggccagctatgccctgcccagggcccaggtgtcactcacattgtggtggatgaaggcatggactatgagcgagccctccgccttctcagactaccccagctgcccccgggtgctcagctggtgaagtcagcctggctgagcttgtgccttcaggagaggaggctggtggatgtagctggattcagcatcttcatccccagtaggtacttggaccatccacagcccagcaaggcagagcaggatgcttctattcctcctggcacccatgaggccctgcttcagacagccctttctcctcctcctcctcccaccaggcctgtgtctcctccccaaaaggcaaaagaggcaccaaacacccaagcccagcccatctctgatgatgaagccagtgatggggaagaaacccaggttagtgcagctgatctggaagccctcatcagtggccactaccccacctcccttgagggagattgtgagcctagcccagcccctgctgtcctggataagtgggtctgtgcacagccctcaagccagaaggcgaccaatcacaacctccatatcacagagaagctggaagttctggccaaagcctacagtgttcagggagacaagtggagggccctgggctatgccaaggccatcaatgccctcaagagcttccataagcctgtcacctcgtaccaggaggcctgcagtatccctgggattgggaagcggatggctgagaaaatcatagagatcctggagagcgggcatttgcggaagctggaccatatcagtgagagcgtgcctgtcttggagctcttctccaacatctggggagctgggaccaagactgcccagatgtggtaccaacagggcttccgaagtctggaagacatccgcagccaggcctccctgacaacccagcaggccatcggcctgaagcattacagtgacttcctggaacgtatgcccagggaggaggctacagagattgagcagacagtccagaaagcagcccaggcctttaactctgggctgctgtgtgtggcatgtggttcataccgacggggaaaggcgacctgtggtgatgtcgacgtgctcatcactcacccagatggccggtcccaccggggtatcttcagccgcctccttgacagtcttcggcaggaagggttcctcacagatgacttggtgagccaagaggagaatggtcagcaacagaagtacttgggggtgtgccggctcccagggccagggcggcggcaccggcgcctggacatcatcgtggtgccctatagcgagtttgcctgtgccctgctctacttcaccggctctgcacacttcaaccgctccatgcgagccctggccaaaaccaagggcatgagtctgtcagaacatgccctcagcactgctgtggtccggaacacccatggctgcaaggtggggcctggccgagtgctgcccactcccactgagaaggatgtcttcaggctcttaggcctcccctaccgagaacctgctgagcgggactggtgacccatggctgggggtgctgaggagagccgagttggactggctacccctcctggccacccagtactccctccagcctcagctggctgaacctcgccgctccaaccaccagcttcctcagcgagcagggcccagggctctgggcctgaagcaagagccagcccggctcccagtgtctgcccggctcccagtgtctgcccagccctctcccagacaggagcaggctgccaccccttctacctcaccactgcccctcgaagaattttgcaaatggccccttgccccattttaagcaggagcaggtggctggtttgaagccccaggtatcccccttccctgctatgggaaaggccaagctgctgggtggggacagaagctgcaggggagagggaagcagccgtgctgtcaacatcatccggcaccctctggggtaggagaacagccattccacatgtgttccctctatccgtcctgcttcctgggcagctggtggtgctgggaatggggtgccccagccttggtgaggacagtgttgggaggcccaggggcccagtaaagtgcatttgacattga

SEQ ID NO: 574475 - DNA, 712 bp, Homo sapiens
agcgggtcagtcgcgagcgaacgaccaagagggtgttcgactgctagagccgagcgaagcgatgcctaaatcaaaggaacttgtttcttcaagctcttctggcagtgattctgacagtgaggttgacaaaaagttaaagaggaaaaagcaagttgctccagaaaaacctgtaaagaaacaaaagacaggtgagacttcgagagccctgtcatcttctaaacagagcagcagcagcagagatgataacatgtttcagattgggaaaatgaggtacgttagtgttcgcgattttaaaggcaaagtgctaattgatattagagaatattggatggatcctgaaggtgaaatgaaaccaggaagaaaaggtatttctttaaatccagaacaatggagccagctgaaggaacagatttctgacattgatgatgcagtaagaaaactgtaaaattcgagccatataaataaaacctgtactgttctagttgttttaatctgtctttttacattggcttttgttttctaaatgttctccaagctattgtatgtttggattgcagaagaatttgtaagatgaatacttttttttaatgtgcattattaaaaatattgagtgaagctaattgtcaactttattaaggattactttgtctgcccaccacctagtgtaaaataaaatcaagtaatacaatcttaactgttgtggccttttttg

SEQ ID NO: 574476 - DNA, 643 bp, Homo sapiens
  misc_feature (412)..(412): n is a, c, g, or t
  misc_feature (472)..(472): n is a, c, g, or t
  misc_feature (492)..(492): n is a, c, g, or t
  misc_feature (501)..(501): n is a, c, g, or t
  misc_feature (524)..(524): n is a, c, g, or t
  misc_feature (535)..(535): n is a, c, g, or t
  misc_feature (549)..(549): n is a, c, g, or t
  misc_feature (571)..(571): n is a, c, g, or t
  misc_feature (579)..(579): n is a, c, g, or t
  misc_feature (610)..(610): n is a, c, g, or t
  misc_feature (627)..(627): n is a, c, g, or t
  misc_feature (640)..(640): n is a, c, g, or t
acctgggagtttgcttaagccctcttcaacaaatacagattgtaattttcacaaaaggaatctttgacaatgtctttttatttgttttttgaggtagggtcttgctctgtcacccaggctggagtgcagtggtacaatcttggctcactatagcctcgacctcccaggctcaggtgattctcccacctcagcctcccaactagctgggaccacaggtgcccgccaccaggcctggctatttttttgtattttgtgtagagatggggttttgccatgttggccatgctggtctcgaactcctgggctcaagcaatccaccatcctcagcctcccaaagtgctgggattacaggcgtgggccaccacactcggccaacaatttcttaagattgaaaaggaaaagcagataggcngggcctacaatccatgccatcagtggcacagggccctgtgccctggcatctgggttcacnctctgctgttgctgtcttcnaattcctantgatgtttgaacaaaggccctangtttgcatttngcactgggccccanaaatcacatggcccatcctganaagaagantctcacacctccagtctcctaaatcacctcnggaagtttttctcaacnaaaagaactgaanctt

SEQ ID NO: 574477 - DNA, 256 bp, Homo sapiens
cacgaggatggccgacatgccggtcgaggccggcgaatcgcgcgtcagcgtaaacatcagcggacagatcgagattgaccgcaagtaagcaggcactcacgctcaccgccgcgctgctgctggcaggctgcggtacgctgacggcgccggcgcccgatgtgccggcctcgccgcagccgcctgtcgtacagacaccggcacccgcaccgacgacgggcctgcaactggccgacgacacccacgcgcaggacgcggt

SEQ ID NO: 574478 - DNA, 1316 bp, Homo sapiens
agcgggtcagtcgcgagcgaacgaccaagagggtgttcgactgctagagccgagcgaagcgatgcctaaatcaaaggaacttgtttcttcaagctcttctggcagtgattctgacagtgaggttgacaaaaagttaaagaggaaaaagcaagttgctccagaaaaacctgtaaagaaacaaaagacaggtgagacttcgagagccctgtcatcttctaaacagagcagcagcagcagagatgataacatgtttcagattgggaaaatgaggtacgttagtgttcgcgattttaaaggcaaagtgctaattgcatcattcagcagccacatcattggcatgggcatccctgcacaggtgcacactcgcaaacccaggcaagcacaaaggtcatttcctttcaacatccaagaaaccaatggaagccagctgcacaggcaaccagcaatttctggcacattggcatgcatgcgcagtcaagcacacaacgtgttcaacaattcagcagccacataatcaacatcgacaaaccagtgtacatgttctcaggttgtattctcaaatcctggtcgattttatttaacactgagggcattagggagttataatccataaaaaatggtttcattccaaaaagcatcaatggtaatggataaagggcattgagcagaggaaagcaaatttgggtcaaaggaatggcaattcactatattgaagagattaaaatggttagcggatgtcaatatcaaacaaaattcatatggcagttggcacagataaaatgtggtcgaaaacgattttaattttagaggggatttcaatttgttggtgcttggcgcctaacaaaagcttaaggtggttaaaagagattaaagaatctgcaaggtacaaattaacaaaattagtgtgaaaatgtggtagggttgaggcccttcatatataataggcattcattgcaagcaaggctttggagaataccagtggagttaataacagaggaccaaaaacaaggattacaccagaggttatatgacaattaggacatctcattattacaggtgatatttacaaacagcttcaaaggccgattactgtatgacctaagcttcacacaacaagggggtatattggggaacatgacgcaagtatgggagcgattataaattcaacaagataatattgggggcattggtatcaaaacgtatttccattactttagtagcaatcactataatcaacatatattacgccgacaatcaagaaaatgtgagttataacggacaaggttgtattatgagacacatatcacaacaacaca

SEQ ID NO: 574479 - DNA, 821 bp, Homo sapiens
cagattgctagtgtgacgtacctttactgcgcacgacatcaagggcagggtgcttactgatgtatagagacttttggtgtgctatccatgataggagaatgagagaaccgtgaaagaagaaggatgctctatttagaggcgaatcgatagatcacatctcgagggaacaaatatgctgacgttgatgatgctaatacgaaatctgttttacattagccgattagttatagctcgtactggatagtgagactttaatatgtgtatatacatcggctattgcaagattatgttctccaagctattgtatgtttggattgcagaagaatttgtaagatgaatacttttttttaatgtgcattattaaaaatattgagtgaagctaattgtcaactttattaaggattactttgtctgcccaccacctagtgtaaaataaaatcaagtaatacaatcttaactgttgtggccttttttgaaaaaaacacttaaacacagatgagcggaggctcgcgcactccttccccttgaggggggaggaatttggttaattttctttttttctctctcgccgaatggcttctttgggcgccgaaacagggtaatcttttaccgcgtctgtctttgtggggggacaacaataagccgccgagagaaaaacaaatgcgggccgaggttggctatgggggggcgggaagcccctcctagagagggcggtgatttttttcttttaaaaaccccgggacgcctggtaaaaaattctttcccctatcagtgtagtgggggcgcacacccacatgaggcgctgtatgccccggcttccc

SEQ ID NO: 574480 - DNA, 448 bp, Homo sapiens
agcgggtcagtcgcgagcgaacgaccaagagggtgttcgactgctagagccgagcgaagcgatgcctaaatcaaaggaacttgtttcttcaagctcttctggcagtgattctgacagtgaggttgacaaaaagttaaagaggaaaaagcaagttgctccagaaaaacctgtaaagaaacaaaagacaggtgagacttcgagagccctgtcatcttctaaacagagcagcagcagcagagatgataacatgtttcagattgggaaaatgaggtacgttagtgttcgcgattttaaaggcaaagtgctaattgatattagagaatattggatggatcctgaaggtgaaatgaaaccaggaagaaaagttaactcgggacaatgcggatgcaatagattcagtatttgggtcagtattccgaccctagtatgactagcgtcgcgttggtca

SEQ ID NO: 574481 - DNA, 653 bp, Homo sapiens
tgcagggagaagagatcgacagtattttgaacaaagtagaggaagatgaagaatgaggtcaggacagtactgtgcggtgcaagattaccacccataggtgcgaggaggagccatcgacggagatactggcccaccgacagaagggcgcctggttggaaatatgacatacgatgaagtggtatatgacgaagaattcaccattatcaagacatataaaaccttctaccactcgaaggaagtttggacatattctcatacttagtgggaatgtaatttggcagcagagtgattggaatatacccgggcagtcatgggccaggcggcacaggaagattaccgcgtggccacaagatgtactcaatcgcgagggtggagcacgggacggcatattgtggtgacaaataggcaaactaaaacccacggatgacactatcggtacagatgggcccacatgggggatagatgcaggtaagcacatactgcgaacaacgtgtggcgagggactaaacaaccctaaggagacggcaagaagggtcaaagagagcacggctcacgggcgagaggacacgcaagaagggagcatctggacttgcggaagagtggacaagcgcatcacacgccccacaaagactccaaggatacacggcaggccc

SEQ ID NO: 574482 - DNA, 1496 bp, Homo sapiens
  misc_feature (1384)..(1384): n is a, c, g, or t
  misc_feature (1402)..(1402): n is a, c, g, or t
agcgggtcagtcgcgagcgaacgaccaagagggtgttcgactgctagagccgagcgaagcgatgcctaaatcaaaggaacttgtttcttcaagctcttctggcagtgattctgacagtgaggttgacaaaaagttaaagaggaaaaagcaagttgctccagaaaaacctgtaaagaaacaaaagacaggtgagacttcgagagccctgtcatcttctaaacagagcagcagcagcagagatgataacatgtttcagattgggaaaatgaggtacgttagtgttcgcgattttaaaggcaaagtgctaattgatattagagaatattggatggatcctgaaggtgaaatgaaaccaggaagaaaaggtatttctttaaatccagaacaatggagccagctgaaggaacagatttctgacattgatgatgcagtaagaaaactgtaaaattcgagccatataaataaaacctgtactgttctagttgttttaatctgtctttttacattggcttttgttttctaaatgttctccaagctattgtatgtttggattgcagaagaatttgtaagatgaatacttttttttaatgtgcattattaaaaatattgagtgaagctaattgtcaactttattaaggattactttgtctgcccaccacctagtgtaaaataaaatcaagtaatacaatcttaactgttgtggccttttttgatcataagagttggtactgtttaaggccaaaagtaacagtttttatagatcttttagtttcaactcagcttttacaataaaaaggatttgtattgcattgagtttataaacttttggtttgtgaacttcatatttgatcttttctcttccaatcaaatgtctaggcttgtttgacttccacccccaatggtttttcactctttttatttacttcattttcctttaataacttaatctcttcatgttcagtttttacttcactctttattcttttctttgattatggtatgcttatttggaaagtcagtgaaactgtcaaaatgttatctcaataagatacttatatgagaactacaatcaccgaatctactgtattcaatattagcagatctaatttgataaacaacatggcttgtgtgaaaactgagcaggtgtttgtttacccatagtgttctgtgtagttattgcttagtctgcagaaaataatgacttagatgagatgtctgacttgctttcacttattaaacatgttcaccatgggatgatgtctgtaacatcagatattgttcaactagactaggatttaataaaaattgtgaaagcttactggcctaacattttattttataatattgggtatgacttatatgtagccagagatgtcattaagcnttactgttatagtaggtnatatggttagttgtagggaaaagagcatatgagcacctgcttgtgtatttggctttgcccagtagaacagacaatggattctagacttgatgat

SEQ ID NO: 574483 - DNA, 1571 bp, Homo sapiens
  misc_feature (1318)..(1319): n is a, c, g, or t
agcgggtcagtcgcgagcgaacgaccaagagggtgttcgactgctagagccgagcgaagcgatgcctaaatcaaaggaacttgtttcttcaagctcttctggcagtgattctgacagtgaggttgacaaaaagttaaagaggaaaaagcaagttgctccagaaaaacctgtaaagaaacaaaagacaggtgagacttcgagagccctgtcatcttctaaacagagcagcagcagcagagatgataacatgtttcagattgggaaaatgaggtacgttagtgttcgcgattttaaaggcaaagtgctaattgatattagagaatattggatggatcctgaaggtgaaatgaaaccaggaagaaaaggtatttctttaaatccagaacaatggagccagctgaaggaacagatttctgacattgatgatgcagtaagaaaactgtaaaattcgagccatataaataaaacctgtactgttctagttgttttaatctgtctttttacattggcttttgttttctaaatgttctccaagctattgtatgtttggattgcagaagaatttgtaagatgaatacttttttttaatgtgcattattaaaaatattgagtgaagctaattgtcaactttattaaggattactttgtctgcccaccacctagtgtaaaataaaatcaagtaatacaatcttaactgttgtggccttttttgatcataagagttggtactgtttaaggccaaaagtaacagtttttatagatcttttagtttcaactcagcttttacaataaaaaggatttgtattgcattgagtttataaacttttggtttgtgaacttcatatttgatcttttctcttccaatcaaatgtctaggcttgtttgacttccacccccaatggtttttcactctttttatttacttcattttcctttaataacttaatctcttcatgttcagtttttacttcactctttattcttttctttgattatggtatgcttatttggaaagtcagtgaaactgtcaaaatgttatctcaataagatacttatatgagaactacaatcaccgaatctactgtattcaatattagcagatctaatttgataaacaacatggcttgtgtgaaaactgagcaggtgtttgtttacccatagtgttctgtgtagttattgcttagtctgcagaaaataatgacttagatgagatgtctgacttgctttcacttattaaacatgttcaccatgggatgatgtctgtaacatcagatattgttcaactagactaggatttaataaaaattgtgaaagcttnnaaaaaaaaaaaaaaccttgtgggccgcttgggcccattcgattttaaattggaccaactttttccatccggccgaatttcggcctcattggcccaattcgccctttagggggtcgtttaacaatccactggccggtgtttaaaacgtggggcctggaaaacccctgcggttccccaattaattccctttgaaacacatccctctttgccacgttggggtaataccaaagaggcccgcacggatcgcctttcc

SEQ ID NO: 574484 - DNA, 279 bp, Homo sapiens
aaatacaaaaaattagccaggcgaggtggcgggcacctgtaatcccagctactcagaaggccgaggcaggagagtctcttgaacccaggcggcggaggttgcagttagctaggatcatgccactcactatagcctgggcaacagagggagacttcgtctcaaaaatcaaacaaacaaacacaacacaataggggttatgggctctgcatgagtctcaggagctctctatgagtaggaggataactctctatacgcttctcatgacatattcatcgcctc

SEQ ID NO: 574485 - DNA, 233 bp, Homo sapiens
cgatatcgcagaagtcatccaattccagcttggtccgcacggaaatatacacagagagaaagccagacatagatcctctcggtacccgcgtagatgtcaaacaatgcttgatcataccacactatgagaagagcccacggccccaggataaccgcattggaaggaatacagtgtccatgtgcgtaggactaacagcggctactcaccgtctggccgtcaatacccctagggcc

SEQ ID NO: 574486 - DNA, 347 bp, Homo sapiens
ggtggtctgcctgagaggaaagggttcacttacccctccttcgcacacctaaacacggagctatcagaggaggctgagtgaggtggcggccagacagacagcgccagccaaggaaggagaggtgggcaccgtgccaggcagccggaatcctcagtccagactgacagctgtcagacaggcattggtcctggcgaaccttccccttcaagtgaaagctggggggtcagaagtcatgggcatcctccctggttcaggagccggcttccctgcactctagctgtcctagccgaagagtgaagccctgtccaaatcatggcgaggctgcaagacaggcacacactactgcc

SEQ ID NO: 574487 - DNA, 811 bp, Homo sapiens
  misc_feature (699)..(699): n is a, c, g, or t
  misc_feature (717)..(717): n is a, c, g, or t
cgaaggcgagctcggtacccttcgcgtatcataagagttggtactgtttaaggccaaaagtaacagtttttatagatcttttagtttcaactcagcttttacaataaaaaggatttgtattgcattgagtttataaacttttggtttgtgaacttcatatttgatcttttctcttccaatcaaatgtctaggcttgtttgacttccacccccaatggtttttcactctttttatttacttcattttcctttaataacttaatctcttcatgttcagtttttacttcactctttattcttttctttgattatggtatgcttatttggaaagtcagtgaaactgtcaaaatgttatctcaataagatacttatatgagaactacaatcaccgaatctactgtattcaatattagcagatctaatttgataaacaacatggcttgtgtgaaaactgagcaggtgtttgtttacccatagtgttctgtgtagttattgcttagtctgcagaaaataatgacttagatgagatgtctgacttgctttcacttattaaacatgttcaccatgggatgatgtctgtaacatcagatattgttcaactagactaggatttaataaaaattgtgaaagcttactggcctaacattttattttataatattgggtatgacttatatgtagccagagatgtcattaagcnttactgttatagtaggtnatatggttagttgtagggaaaagagcatatgagcacctgcttgtgtatttggctttgcccagtagaacagacaatggattctagacttgatgat

SEQ ID NO: 574488 - DNA, 354 bp, Homo sapiens
aaaagggggggggggggggccggggggggggttttttaaaccagggttttttttttcaccccccagttcccgggggggcccccccccccttttttttccccccaaaaaaaccccgggggccctccccccccccgcctttttccttggccccggggggggttaaatttttcccccgggaaccgtttttctccttcggccctttttgggggccccattagcccagttttgtcccaaaaacgggggggggccgggccgggattccccgggtttttttcccccccccccccggtgtttgggggccccccccccggggggggggtttttttttggggggggaaagggttttttttttta

SEQ ID NO: 574489 - DNA, 228 bp, Homo sapiens
agttacctcggacagagtgcagtaatcggaggtgagttattagggtttaacagcagttctggccgtaatgtctttgtgggagtctttggagtttctttcatttctcgctgaaaagccacttgaaagtgtggtaagaagtgaagttatcttcggtatattaaccaaaagatctgggttttcagactggttccctgaaacagcatcaagaagtcatggggagggctgtgt

SEQ ID NO: 574490 - DNA, 112 bp, Homo sapiens
cctgcccctgcctcccacagtcattcccaaatcctgccaggtataccttgcagagagctcgcaaatctgtacacttctctactttccctacttgcagtaaccttggtttggc

SEQ ID NO: 574491 - DNA, 548 bp, Homo sapiens
agagattatggttatggacacatggtgtggatggaacatagtgcctcagagtgagatggagctggattggaattgatgttcgcagttgtaaaatggaaaatgtggacagttgcaattggcttgcgggatacatatgagaatagaagtactgtatgtaaaggatcaggccggacagtctcctgataaagatcgctattactataaccgtttagacagagatatagaatccatgtgaccactaaaataagcaggttgccctactctctgtgtccgtgatggttcgcatattggctgatatcctatcacagggtataactgcctagtagtggtggagttcagttctaagtgcccagaagagaagatgagtgggatgtcttactcgggggaagcttgcggtctaatccgggatacatatgggataaactatttgctgaagtctatgcaacagacacatgctttggcattcatgaatgagagagagtgtccctatgggacggtgaagtcaggatggattctatgacaaggtgtaccttgagaggcatcctgag

SEQ ID NO: 574492 - DNA, 292 bp, Homo sapiens
gggagtcggcgcagaggagcctctcctgccctggtcacgcctgactagctggtgtacctgcttaaacaagttctccaaaatacagagacctttcgtgagtatactgattttataataaaatagttatttgcataagtttagtaagagtcttttctctcaaaacaggacaattggagacacttggttattttaccaagctttgactggaataacatttgtaggtcaagttccagcaaaagtcaacttgaaaagagcctatctggccaaactcttgctggacttcatgcaaata

SEQ ID NO: 574493 - DNA, 472 bp, Homo sapiens
  misc_feature (430)..(430): n is a, c, g, or t
agtgtgttgtgattaggacaggtgccctcggagttttctgtgtgttgttggtggtttttgagagagcgtctccctctgttgcacaggctgagcgcagtgtgggtgatcccaaattcaccgtagcttcaccctcccccaggctcaagcaatcctcccacctcagccttccaagtagctgggactacaggtgtgcaccaccaccacccagctaatttttgtattttttgtggagacggggttttgccatgttgcccaagctggtctagatgaccctgggcttgagtcatccgcctgcctagtgctgggatgacaggtgtgagccactgcgcccagcctcccctctgagtttccatcattacattggcctatctgctgctggtgatagccaacctctgggaggcagaggttgcggtgagtggagatcacaccnctgcgctccagcctgagcaacagagtgagactctgtcttgaa

SEQ ID NO: 574494 - DNA, 807 bp, Homo sapiens
ccgccccattccgcttctggcgaagaacctgggaggaaggtgcgcacttgatgcctaagaagtgtgcagagaccccacccctaaaggcccccccccgggaagagaagggttcacgggaagagtaaccagaagccccacgctgatcggaaggaggagcaaaaggcgctgcccctgctcctgaggaggagatggatgaaagtgagacacgccctggctctgagcccaaaggcccaaggaccccttcgctcacctgcccccagagtacccttgtgttggatgaattttagcgccagtactcccatgaggacacactctctgtggcactgcccatatttctgggagcactttgataaggacggctggtccccgtggtactcagagtatcgcttccctggaggactccctcagaccttcatgagctgccatctcatcactggaatgttcccgcgactggaccaactgaggaagaatgccttcgcccagtgtcatcccttttgggaacccaccatagcagctcccatttctggagatctgggtcttccgaggcccggagcttgcctttccgctgagtcccagattggccaggtggactacgagtcatacacctggcggaaactggatcctggccagcgaggagaccccgacgcctggttcgagagtacttttcctgggagggggccttccagcatgtgggccaaggccttccatcagggccagattttcaaatgaacatctcttgccctcacctagctgcctgcacctgcccctcagggagatgggggtccttaaaggaaactgaaccttgga

SEQ ID NO: 574495 - DNA, 380 bp, Homo sapiens
cgcaccgatccaagccgaacttctgccccgagttccggatctgggtccaagagctctcagcgggtatcaacaaccatcacaagcggctgctgttgcctcagcgtggtcggcgtcgtacaaacaccgtccaggctcctgcccaagaagcccactgccattaagactgagggaaaacctgcagaagtcgagaagatgactgcaaagcctgtaccagctgacttgagtcgcccaaagagcaagcttacagtgcttgactgacccactcacatcatgcacaaaagaagtaggaaaggctgctttggaaccacagatagaccacatcactgagccaatcagaacagagaaagaggaagctgaggctcgtatgcgacaagcatcta

SEQ ID NO: 574496 - DNA, 1076 bp, Homo sapiens
ccaaaactccggcgccggtcacggactgggaaagcagccttcctttggtgtttaatcattgcagggatgtctctccttgtctctaccccttctctgcttttctggggaaggggcaagtaccccaaccccttctctccttgtctctaccccttctctgcttttctggggaaggggcaagtactccaaccccttctctccttgtctctaccccttctctgcttttctggggaaggggcaagtaccccaaccccttctctccttgtctctaccccttctctgcttttctgggagaggggcaagtacccctcaaacccttctccttcacccttagtggcaagtcccgctttcctggggcagggtcaagtacccctcaagcccttctccttcacctttagcggcaagtcccgcttttctgggggaggagcaagtacccctcaacccccttctccttcaaccttagtgacaagtcctgctttttctagggggcaagaacccccaaataccttatttccacaccccaagctcttatctctgtgccactatcctttatttccagtgcccaaacccccttcccgattttcaggagggtaagaacccctgaaccctttcctccatgtctctagctctcatatctctgggtttgcttccttcaatatgggcaacttcaaccctcaatctccttctctccctataccgtggttcctcaacacattaaaactcttcaatccaaccggacttaaacctaaaggttaatacatcgtgctgcggttggacacataataatcgacagaagtccaatgccgaaaagggcttggactgtccaacctgggagaacataaaatttgtgcgcaaatagacatgagtctagtgccgaacatccaggaattaaccatatgcctccaaactggtacgcaaatcccaatccttgtcccccgtgccatcacacccaggagcatattacataaatgaaccgatatccacaccagtaggtagcgacaacacaacatcctcaaacagccgtcgcgtgcccctcattagcccctcacatatatcatcatctcttctccacgacatct

SEQ ID NO: 574497 - DNA, 353 bp, Homo sapiens
acggactgacgatatcctggagactagggctggaggacgggtcaggaggagtaggggaggaggaccggtcaggaggagttagggctggaggatcggtcagggaggagttagggcaggaggactggtcaggcaggagttagggctggaggaccggtcagggaggagacttagggcaggaggatcggtcagggaggagacttagggcaggaggatcggtcagggaggagttagggcaggaggactggtcagggaggagttagggctggaggactggtcagggaggagttagggctggaggagtggtcaggcaggagttaggggaggaggactggtcaggaaggagttagggctgg

SEQ ID NO: 574498 - DNA, 302 bp, Homo sapiens
gtcccgcactcatcttatggagagaaggaacacgaagtatgaccgagtgcgtcttagattgtttagtaagcgcctgtaacggtgctttaatcggaatgggaggtgattcctagggggttgtttgatcccgtttctgtgcatgaatagtgaggtgtcgtgctgctagtggctgtgattattgagggcccgctgcagtgacatgtaacgaatcctgtcccggtgggactgtctactgagttagcctcctcagattcatggaactccgtctgtccgcaaatttgtggcactggcggaataagtat

SEQ ID NO: 574499 - DNA, 257 bp, Homo sapiens
cacacaggcttctgtcagtggtaggatgacaatccatttgaaaaggacaggctcatcctcatcaggggagccctggaagataaagttcaatcagtgagaagtaaagaaggcaaagaactttgcaccagtttatcccataatggttcagctgcttcaaaagggtatgtgtgatttcagtaaggacatgaaatattagttcatttccaccttgaggaaacccattgatagttggcagttaaacacagactgcaaaaggg

SEQ ID NO: 574500 - DNA, 2162 bp, Homo sapiens
cgggacgcgtgggtcgccacgcagtccggcttctccgacgggcctccctctgctgggctgagacggattatttttacccaagatacttagactgcatcaacaagtatgggtctccgtacaccaaaaactcaggcttcgccacctgcgtgcaaaacctgcctgaccagtgcacgcccaacccctgcgataggaaggggacccaagcctgccaggacctcatgggcaacttcttctgcctgtgtaaagctggctgggggggccggctctgcgacaaagatgtcaacgaatgcagccaggagaacgggggctgcctccagatctgccacaacaagccgggtagcttccactgttcctgccacagcggcttcgagctctcctctgatggcaggacctgccaagacatagacgagtgcgcagactcggaggcctgcggggaggcgcgctgcaagaacctgcccggctcctactcctgcctctgtgacgagggctttgcgtacagctcccaggagaaggcttgccgagatgtggacgagtgtctgcagggccgctgtgagcaggtctgcgtgaactccccagggagctacacctgccactgtgacgggcgtgggggcctcaagctgtcccaggacatggacacctgtgaggacatcttgccgtgcgtgcccttcagcgtggccaagagtgtgaagtccttgtacctgggccggatgttcagtgggacccccgtgatccgactgcgcttcaagaggctgcagcccaccaggctggtagctgagtttgacttccggacctttgaccccgagggcatcctcctctttgccggaggccaccaggacagcacctggatcgtgctggccctgagagccggccggctggagctgcagctgcgctacaacggtgtcggccgtgtcaccagcagcggcccggtcatcaaccatggcatgtggcagacaatctctgttgaggagctggcgcggaatctggtcatcaaggtcaacagggatgctgtcatgaaaatcgcggtggccggggacttgttccaaccggagcgaggactgtatcatctgaacctgaccgtgggaggtattcccttccatgagaaggacctcgtgcagcctataaaccctcgtctggatggctgcatgaggagctggaactggctgaacggagaagacaccaccatccaggaaacggtgaaagtgaacacgaggatgcagtgcttctcggtgacggagagaggctctttctaccccgggagcggcttcgccttctacagcctggactacatgcggacccctctggacgtcgggactgaatcaacctgggaagtagaagtcgtggctcacatccgcccagccgcagacacaggcgtgctgtttgcgctctgggcccccgacctccgtgccgtgcctctctctgtggcactggtagactatcactccacgaagaaactcaagaagcagctggtggtcctggccgtggagcatacggccttggccctaatggagatcaaggtctgcgacggccaagagcacgtggtcaccgtctcgctgagggacggtgaggccaccctggaggtggacggcaccaggggccagagcgaggtgagcgccgcgcagctgcaggagaggctggccgtgctcgagaggcacctgcggagccccgtgctcacctttgctggcggcctgccagatgtgccggtgacttcagcgccagtcaccgcgttctaccgcggctgcatgacactggaggtcaaccggaggctgctggacctggacgaggcggcgtacaagcacagcgacatcacggcccactcctgcccccccgtggagcccgccgcagcctaggcccccacgggacgcggcaggcttctcagtctctgtccgagacagccgggaggagcctgggggctcctcaccacgtggggccatgctgagagctgggctttcctctgtgaccatcccggcctgtaacatatctgtaaatagtgagatggacttggggcctctgacgccgcgcactcagccgtgggcccgggcgcggggaggccggcgcagcgcagagcgggctcgaagaaaataattctctattatttttattaccaagcgcttctttctgactctaaaatatggaaaataaaatatttacagaaagctttgtaa

SEQ ID NO: 574501 - DNA, 107 bp, Homo sapiens
ggatttgctggtgcagtacaactaggcttaatagggaccacagaaataaccaagtttccttgccaaccgtgtcacgaatataataaaatttcatcagatcccaaaaa

SEQ ID NO: 574502 - DNA, 407 bp, Homo sapiens
tgacaaagaccaaaatcattactgtaccccacaatacatctctatcaggggcaaacgggttaccaaactattttaaccgacaagtatgagaatatagtacatggaagtcccatatcccaccttcttattatcatcttctatgaacatggtactttttatttccaacgaatgcactaatattgatacattcttattaaagtccatactttctccagcattcttcagtctatcactccatggcctttttctttgttcaaatatatttaattgctttgtaacaattctacatatgtaggggtacatacgtcgaggtacatgcctacaattagtcataatcaaatcaggataattaagatatccatcaacacaaatatttctcatcctattgtgttagaaacattacagtt

SEQ ID NO: 574503 - DNA, 607 bp, Homo sapiens
tgcaacagaaagcccacagcctgctccattctccagtctgaacagttcagctacagtctgactctggacagggggttttctgttgcaaaaatacaaaacaaaagcgataaaataaaagcagattttcatattggtaggcggagagtgaattcaccaacagggaaattggggccttgtggctctatgccatttctgttggtagtttgggggcagtgcaggtggacctgtgtggggtgtgaaccaagggcatctaatctggccactctggccacatgtaaagctattctggccatcttggatctccaatggctggcgccagagcctctcctcttcccccctatatttccaacctgggtgtaaaggtgagggtaaaaggggcccaaacaaggtttgggctggggatctgtgtgtatattattttagagaaagactgtcaggtgtgtagatatatatttttaacaagtgtctttatggagttatcaagtggtgtggcagaacacttatattccaacaagcgagtgttctttaaacaccaaaagaaagtgcaccttgtttgctaaaaagggacaataaccggtggggctcaaaagtggacccgtgagctccg

SEQ ID NO: 574504 - DNA, 2333 bp, Homo sapiens
agcggggacgcgcccagaccgagcgcttgaggtgccgcagccgccgccgccgccgccgccgcgatgtgaccttcagggccgccaggacgggatgaccggagcctccgccccgcggcgcccgcggctcgcctcggcctcccgggcgctctgaccgcgcgtccccggcccgccatggccccttcgctctcgcccgggcccgccgccctgcgccgcgcgccgcagctgctgctgctgctgctggccgcggagtgcgcgcttgccgcgctgttgccggcgcgcgaggccacgcagttcctgcggcccaggcagcgccgcgcctttcaggtcttcgaggaggccaagcagggccacctggagagggagtgcgtggaggagctgtgcagccgcgaggaggcgcgggaggtgttcgagaacgaccccgagacggattatttttacccaagatacttagactgcatcaacaagtatgggtctccgtacaccaaaaactcaggcttcgccacctgcgtgcaaaacctgcctgaccagtgcacgcccaacccctgcgataggaaggggacccaagcctgccaggacctcatgggcaacttcttctgcctgtgtaaagctggctgggggggccggctctgcgacaaagatgtcaacgaatgcagccaggagaacgggggctgcctccagatctgccacaacaagccgggtagcttccactgttcctgccacagcggcttcgagctctcctctgatggcaggacctgccaagacatagacgagtgcgcagactcggaggcctgcggggaggcgcgctgcaagaacctgcccggctcctactcctgcctctgtgacgagggctttgcgtacagctcccaggagaaggcttgccgagatgtggacgagtgtctgcagggccgctgtgagcaggtctgcgtgaactccccagggagctacacctgccactgtgacgggcgtgggggcctcaagctgtcccaggacatggacacctgtgaggacatcttgccgtgcgtgcccttcagcgtggccaagagtgtgaagtccttgtacctgggccggatgttcagtgggacccccgtgatccgactgcgcttcaagaggctgcagcccaccagatctctgttgaggagctggcgcggaatctggtcatcaaggtcaacagggatgctgtcatgaaaatcgcggtggccggggacttgttccaaccggagcgaggactgtatcatctgaacctgaccgtgggaggtattcccttccatgagaaggacctcgtgcagcctataaaccctcgtctggatggctgcatgaggagctggaactggctgaacggagaagacaccaccatccaggaaacggtgaaagtgaacacgaggatgcagtgcttctcggtgacggagagaggctctttctaccccgggagcggcttcgccttctacagcctggactacatgcggacccctctggacgtcgggactgaatcaacctgggaagtagaagtcgtggctcacatccgcccagccgcagacacaggcgtgctgtttgcgctctgggcccccgacctccgtgccgtgcctctctctgtggcactggtagactatcactccacgaagaaactcaagaagcagctggtggtcctggccgtggagcatacggccttggccctaatggagatcaaggtctgcgacggccaagagcacgtggtcaccgtctcgctgagggacggtgaggccaccctggaggtggacggcaccaggggccagagcgaggtgagcgccgcgcagctgcaggagaggctggccgtgctcgagaggcacctgcggagccccgtgctcacctttgctggcggcctgccagatgtgccggtgacttcagcgccagtcaccgcgttctaccgcggctgcatgacactggaggtcaaccggaggctgctggacctggacgaggcggcgtacaagcacagcgacatcacggcccactcctgcccccccgtggagcccgccgcagcctaggcccccacgggacgcggcaggcttctcagtctctgtccgagacagccgggaggagcctgggggctcctcaccacgtggggccatgctgagagctgggctttcctctgtgaccatcccggcctgtaacatatctgtaaatagtgagatggacttggggcctctgacgccgcgcactcagccgtgggcccgggcgcggggaggccggcgcagcgcagagcgggctcgaagaaaataattctctattatttttattaccaagcgcttctttctgactctaaaatatggaaaataaaatatttacagaaagctttgtaa

SEQ ID NO: 574505 - DNA, 187 bp, Homo sapiens
gggtgtaggtggatctttctcatggaccaagagctggaggacgggggatgatctcccaagggaggttccccccccctccccccgcgccagttacggcaccaaatttaatgcacgtccatgtgaagagaccaccaaacaggcttgtgtgagcaacaaggctgtttatttcacctgggcccacatcgaa

SEQ ID NO: 574506 - DNA, 1969 bp, Homo sapiens
  misc_feature (1)..(2): n is a, c, g, or t
nnggtacccccccgtcagtcgctcttagggcaacttcttctgcctgtgtaaagctggctgggggggccggctctgcgacaaagatgtcaacgaatgcagccaggagaacgggggctgcctccagatctgccacaacaagccgggtagcttccactgttcctgccacagcggcttcgagctctcctctgatggcaggacctgccaagacatagacgagtgcgcagactcggaggcctgcggggaggcgcgctgcaagaacctgcccggctcctactcctgcctctgtgacgagggctttgcgtacagctcccaggagaaggcttgccgagatgtggacgagtgtctgcagggccgctgtgagcaggtctgcgtgaactccccagggagctacacctgccactgtgacgggcgtgggggcctcaagctgtcccaggacatggacacctgtgaggacatcttgccgtgcgtgcccttcagcgtggccaagagtgtgaagtccttgtacctgggccggatgttcagtgggacccccgtgatccgactgcgcttcaagaggctgcagcccaccaggctggtagctgagtttgacttccggacctttgaccccgagggcatcctcctctttgccggaggccaccaggacagcacctggatcgtgctggccctgagagccggccggctggagctgcagctgcgctacaacggtgtcggccgtgtcaccagcagcggcccggtcatcaaccatggcatgtggcagacaatctctgttgaggagctggcgcggaatctggtcatcaaggtcaacagggatgctgtcatgaaaatcgcggtggccggggacttgttccaaccggagcgaggactgtatcatctgaacctgaccgtgggaggtattcccttccatgagaaggacctcgtgcagcctataaaccctcgtctggatggctgcatgaggagctggaactggctgaacggagaagacaccaccatccaggaaacggtgaaagtgaacacgaggatgcagtgcttctcggtgacggagagaggctctttctaccccgggagcggcttcgccttctacagcctggactacatgcggacccctctggacgtcgggactgaatcaacctgggaagtagaagtcgtggctcacatccgcccagccgcagacacaggcgtgctgtttgcgctctgggcccccgacctccgtgccgtgcctctctctgtggcactggtagactatcactccacgaagaaactcaagaagcagctggtggtcctggccgtggagcatacggccttggccctaatggagatcaaggtctgcgacggccaagagcacgtggtcaccgtctcgctgagggacggtgaggccaccctggaggtggacggcaccaggggccagagcgaggtgagcgccgcgcagctgcaggagaggctggccgtgctcgagaggcacctgcggagccccgtgctcacctttgctggcggcctgccagatgtgccggtgacttcagcgccagtcaccgcgttctaccgcggctgcatgacactggaggtcaaccggaggctgctggacctggacgaggcggcgtacaagcacagcgacatcacggcccactcctgcccccccgtggagcccgccgcagcctaggcccccacgggacgcggcaggcttctcagtctctgtccgagacagccgggaggagcctgggggctcctcaccacgtggggccatgctgagagctgggctttcctctgtgaccatcccggcctgtaacatatctgtaaatagtgagatggacttggggcctctgacgccgcgcactcagccgtgggcccgggcgcggggaggccggcgcagcgcagagcgggctcgaagaaaataattctctattatttttattaccaagcgcttctttctgactctaaaatatggaaaataaaatatttacagaaagctttgtaa

SEQ ID NO: 574507 - DNA, 357 bp, Homo sapiens
acgcatgtgtgaagcagagcatgtcaaaactagcaagtatttacgccaaatcctagacagcaaaacctcattatatagcagtaaacctggtctggagaccctctcagatacatctagtctctgaagcaccttttgagttgtacggatgtaagaatagctttgaattatagaagttatatgcatctttaagaatcacattttgatgattataaaaatttttttctattttacaacataggttcagctacactgaaaaaattacactgcttattgaaatacatttcattttagaaacagactaccaaagaagtctatacaaaaactctaaaataatttctgtagtaaaataaagagtgc

SEQ ID NO: 574508 - DNA, 1338 bp, Homo sapiens
  misc_feature (17)..(17): n is a, c, g, or t
  misc_feature (23)..(23): n is a, c, g, or t
  misc_feature (31)..(31): n is a, c, g, or t
  misc_feature (34)..(34): n is a, c, g, or t
  misc_feature (38)..(38): n is a, c, g, or t
agctcggtacccagagntaggancgcgctgnccntganagccgcccgtttggagctgcagctgcgctacaacggtgtcggccgtgtcaccagcagcggcccggtcatcaaccatggcatgtggcagacaatctctgttgaggagctggcgcggaatctggtcatcaaggtcaacagggatgctgtcatgaaaatcgcggtggccggggacttgttccaaccggagcgaggactgtatcatctgaacctgaccgtgggaggtattcccttccatgagaaggacctcgtgcagcctataaaccctcgtctggatggctgcatgaggagctggaactggctgaacggagaagacaccaccatccaggaaacggtgaaagtgaacacgaggatgcagtgcttctcggtgacggagagaggctctttctaccccgggagcggcttcgccttctacagcctggactacatgcggacccctctggacgtcgggactgaatcaacctgggaagtagaagtcgtggctcacatccgcccagccgcagacacaggcgtgctgtttgcgctctgggcccccgacctccgtgccgtgcctctctctgtggcactggtagactatcactccacgaagaaactcaagaagcagctggtggtcctggccgtggagcatacggccttggccctaatggagatcaaggtctgcgacggccaagagcacgtggtcaccgtctcgctgagggacggtgaggccaccctggaggtggacggcaccaggggccagagcgaggtgagcgccgcgcagctgcaggagaggctggccgtgctcgagaggcacctgcggagccccgtgctcacctttgctggcggcctgccagatgtgccggtgacttcagcgccagtcaccgcgttctaccgcggctgcatgacactggaggtcaaccggaggctgctggacctggacgaggcggcgtacaagcacagcgacatcacggcccactcctgcccccccgtggagcccgccgcagcctaggcccccacgggacgcggcaggcttctcagtctctgtccgagacagccgggaggagcctgggggctcctcaccacgtggggccatgctgagagctgggctttcctctgtgaccatcccggcctgtaacatatctgtaaatagtgagatggacttggggcctctgacgccgcgcactcagccgtgggcccgggcgcggggaggccggcgcagcgcagagcgggctcgaagaaaataattctctattatttttattaccaagcgcttctttctgactctaaaatatggaaaataaaatatttacagaaagctttgtaa

SEQ ID NO: 574509 - DNA, 2039 bp, Homo sapiens
  misc_feature (1896)..(1896): n is a, c, g, or t
  misc_feature (1905)..(1905): n is a, c, g, or t
  misc_feature (1908)..(1912): n is a, c, g, or t
aggccctgtccaaacgggcactaattggccccgggtatttaggcgccccctttttttttttgcagtaagtaactcagaatgactttactcaggaaatatgaccatgactcactggctaggagtgccccatgcccagttcttagagacccttgatagctcctagaagacaggaggctgccgtggtcaagaagggccaagccttgaagtctcacggcaccccctgtggtggaggtataaggctcaggggccaactactgggtcttgcagtccccatcgttgctgtgggctgtcttcaccttctttagttccttctgtagctcagactcggccaccacaacctcctttggcttctggtaagagatgatcagggtgcagttggcgtgggcaaagctcagcaaggcgtcatccagaggtagctggtgtctatctagatcaggaatggagaacttcttgtagtacttcttgttggttgttctgacaatgatgcagcgctccttctggtccacagagacactatagacatccttaggataggggaggtttcgaatccgccactggaaactcatcttggtgtccttgcgcatgaagataggattggcattgctttccttgatgagttcaggccccaggttccctgctcctaggggcgctgggtctcctacttcaagctgccactggcccatggctcccagggcacttttcacacgccactttctcacaagtagttcactcgtcttctcgtcatattcttcagccatttccttgccgtctgggaataaatagtgaaccttccttctccccctccataggcaaaggggttggagggcctcaattctggatttccacgtgcagcagccctgaccaacgctccaataggccgggatccagccatacttcaatggatcccaggggtatcttgaaggcatttcccaagcggcagaaaattcatgctgatgcatcatcaaaagtacttgcaaagattcctaggagggaagagggagaagaagcagaagagtggctgagctcccttcgggcccatgttgtgcgcactggcattggacgagcccgggcagaactctttgagaagcagattgttcagcatggcggccagctatgccctgcccagggcccaggtgtcactcacattgtggtggatgaaggcatggactatgagcgagccctccgccttctcagactaccccagctgcccccgggtgctcagctggtgaagtcagcctggctgagcttgtgccttcaggagaggaggctggtggatgtagctggattcagcatcttcatccccagtaggtacttggaccatccacagcccagcaaggcagagcaggatgcttctattcctcctggcacccatgaggccctgcttcagacagccctttctcctcctcctcctcccaccaggcctgtgtctcctccccaaaaggcaaaagaggcaccaaacacccaagcccagcccatctctgatgatgaagccagtgatggggaagaaacccaggttagtgcagctgatctggaagccctcatcagtggccactaccccacctcccttgagggagattgtgagcctagcccagcccctgctgtcctggataagtgggtctgtgcacagccctcaagccagaaggcgaccaatcacaacctccatatcacagagaagctggaagttctggccaaagcctacagtgttcagggagacaagtggagggccctgggctatgccaaggccatcaatgccctcaagagcttccataagcctgtcacctcgtaccaggtacccaggggctagagtgggaggaggggtctttactggccagtggttagtaaccccagtggggttcaggtacagtggtgaagattttatggggtctaggacttgcncaaaaaaanaannnnnaaattgatgaaagcagattggcaaaatcttgatagttgttgaagctgggagatgtacgaaacttgggggttatatggatctctccacttttgaattttttaacataattaaaagttttttattttta

SEQ ID NO: 574510 - DNA, 268 bp, Homo sapiens
gcgtggtcgcggccgaggtactttaagtcctagccagagcaatcagacaagagaaagaaataaagggcatccaaatcagtaaagaagaagtcaaactgtcactgcttgctgatgatatgattgtttaccttgaaaaccctaaggactcctccagaaaggttctagaactgataaaagaatccagcgaagtttccagatacaagattaatatacacaaatcagtagttcttccatacaccaacagtggccagaaaatcaaatcaagaac

SEQ ID NO: 574511 - DNA, 2998 bp, Homo sapiens
  misc_feature (2531)..(2531): n is a, c, g, or t
agcggggacgcgcccagaccgagcgcttgaggtgccgcagccgccgccgccgccgccgccgcgatgtgaccttcagggccgccaggacgggatgaccggagcctccgccccgcggcgcccgcggctcgcctcggcctcccgggcgctctgaccgcgcgtccccggcccgccatggccccttcgctctcgcccgggcccgccgccctgcgccgcgcgccgcagctgctgctgctgctgctggccgcggagtgcgcgcttgccgcgctgttgccggcgcgcgaggccacgcagttcctgcggcccaggcagcgccgcgcctttcaggtcttcgaggaggccaagcagggccacctggagagggagtgcgtggaggagctgtgcagccgcgaggaggcgcgggaggtgttcgagaacgaccccgagacggattatttttacccaagatacttagactgcatcaacaagtatgggtctccgtacaccaaaaactcaggcttcgccacctgcgtgcaaaacctgcctgaccagtgcacgcccaacccctgcgataggaaggggacccaagcctgccaggacctcatgggcaacttcttctgcctgtgtaaagctggctgggggggccggctctgcgacaaagatgtcaacgaatgcagccaggagaacgggggctgcctccagatctgccacaacaagccgggtagcttccactgttcctgccacagcggcttcgagctctcctctgatggcaggacctgccaagacatagacgagtgcgcagactcggaggcctgcggggaggcgcgctgcaagaacctgcccggctcctactcctgcctctgtgacgagggctttgcgtacagctcccaggagaaggcttgccgagatgtggacgagtgtctgcagggccgctgtgagcaggtctgcgtgaactccccagggagctacacctgccactgtgacgggcgtgggggcctcaagctgtcccaggacatggacacctgtgaggacatcttgccgtgcgtgcccttcagcgtggccaagagtgtgaagtccttgtacctgggccggatgttcagtgggacccccgtgatccgactgcgcttcaagaggctgcagcccaccaggctggtagctgagtttgacttccggacctttgaccccgagggcatcctcctctttgccggaggccaccaggacagcacctggatcgtgctggccctgagagccggccggctggagctgcagctgcgctacaacggtgtcggccgtgtcaccagcagcggcccggtcatcaaccatggcatgtggcagacaatctctgttgaggagctggcgcggaatctggtcatcaaggtcaacagggatgctgtcatgaaaatcgcggtggccggggacttgttccaaccggagcgaggactgtatcatctgaacctgaccgtgggaggtattcccttccatgagaaggacctcgtgcagcctataaaccctcgtctggatggctgcatgaggagctggaactggctgaacggagaagacaccaccatccaggaaacggtgaaagtgaacacgaggatgcagtgcttctcggtgacggagagaggctctttctaccccgggagcggcttcgccttctacagcctggactacatgcggacccctctggacgtcgggactgaatcaacctgggaagtagaagtcgtggctcacatccgcccagccgcagacacaggcgtgctgtttgcgctctgggcccccgacctccgtgccgtgcctctctctgtggcactggtagactatcactccacgaagaaactcaagaagcagctggtggtcctggccgtggagcatacggccttggccctaatggagatcaaggtctgcgacggccaagagcacgtggtcaccgtctcgctgagggacggtgaggccaccctggaggtggacggcaccaggggccagagcgaggtgagcgccgcgcagctgcaggagaggctggccgtgctcgagaggcacctgcggagccccgtgctcacctttgctggcggcctgccagatgtgccggtgacttcagcgccagtcaccgcgttctaccgcggctgcatgacactggaggtcaaccggaggctgctggacctggacgaggcggcgtacaagcacagcgacatcacggcccactcctgcccccccgtggagcccgccgcagcctaggcccccacgggacgcggcaggcttctcagtctctgtccgagacagccgggaggagcctgggggctcctcaccacgtggggccatgctgagagctgggctttcctctgtgaccatcccggcctgtaacatatctgtaaatagtgagatggacttggggcctctgacgccgcgcactcagccgtgggcccgggcgcggggaggccggcgcagcgcagagcgggctcgaagaaaataattctctattatttttattaccaagcgcttctttctgactctaaaatatggaaaataaaatatttacagaaagctttgtaaaaaaaaanacaacaaacctcacaaaacaaaaacacacatacacacacaaaacacaaacatacaccacaaacatcttacacaccaaaaacaaaaacatcaatatatcgactaccacaaacaccaccacacccacacaactcacacatactcatcagaaggaggatgagatcgggtggaggggcgagagaagggactgctcgtggagagacgtaggtgaacgagagcagcgaagacgagggacgtgagtgacgggctggggaacgaagataaacagaagacgccagcaggtcagcgaggcaccgggtgatcccagggcgataaagcggtctgcgcatcgtgatgccctaacgaagcacaaggacgcacacatgcgggccggaggagagcagagcgaagagacgggggcggctgcggaagagacacggacgagcagaacgaaccgataagcagaatcgacgccaccgagccccaccaa

SEQ ID NO: 574512 - DNA, 1624 bp, Homo sapiens
aaaattctggccatttgccctccttccccccttcgtccgctctcattggctctgctgcagccctgaccaacgctccaataggccgggatccagccatacttcaatggatcccaggggtatcttgaaggcatttcccaagcggcagaaaattcatgctgatgcatcatcaaaagtacttgcaaagattcctaggagggaagagggagaagaagcagaagaggcctgcagtatccctgggattgggaagcggatggctgagaaaatcatagagatcctggagagcgggcatttgcggaagctggaccatatcagtgagagcgtgcctgtcttggagctcttctccaacatctggggagctgggaccaagactgcccagatgtggtaccaacagggcttccgaagtctggaagacatccgcagccaggcctccctgacaacccagcaggccatcggcctgaagcattacagtgacttcctggaacgtatgcccagggaggaggctacagagattgagcagacagtccagaaagcagcccaggcctttaactctgggctgctgtgtgtggcatgtggttcataccgacggggaaaggcgacctgtggtgatgtcgacgtgctcatcactcacccagatggccggtcccaccggggtatcttcagccgcctccttgacagtcttcggcaggaagggttcctcacagatgacttggtgagccaagaggagaatggtcagcaacagaagtacttgggggtgtgccggctcccagggccagggcggcggcaccggcgcctggacatcatcgtggtgccctatagcgagtttgcctgtgccctgctctacttcaccggctctgcacacttcaaccgctccatgcgagccctggccaaaaccaagggcatgagtctgtcagaacatgccctcagcactgctgtggtccggaacacccatggctgcaaggtggggcctggccgagtgctgcccactcccactgagaaggatgtcttcaggctcttaggcctcccctaccgagaacctgctgagcgggactggtgacccatggctgggggtgctgaggagagccgagttggactggctacccctcctggccacccagtactccctccagcctcagctggctgaacctcgccgctccaaccaccagcttcctcagcgagcagggcccagggctctgggcctgaagcaagagccagcccggctcccagtgtctgcccggctcccagtgtctgcccagccctctcccagacaggagcaggctgccaccccttctacctcaccactgcccctcgaagaattttgcaaatggccccttgccccattttaagcaggagcaggtggctggtttgaagccccaggtatcccccttccctgctatgggaaaggccaagctgctgggtggggacagaagctgcaggggagagggaagcagccgtgctgtcaacatcatccggcaccctctggggtaggagaacagccattccacatgtgttccctctatccgtcctgcttcctgggcagctggtggtgctgggaatggggtgccccagccttggtgaggacagtgttgggaggcccaggggcccagtaaagtgcatttgacattga

SEQ ID NO: 574513 - DNA, 104 bp, Homo sapiens
caacaccctcctagccttactactattaataattacatttggactaccacacctcaacggctcacatagaaaattccacccctacggagttcggcttcgaccta

SEQ ID NO: 574514 - DNA, 153 bp, Homo sapiens
atacaacgaacttgacgccctattcagactcgctttcgctgcgccttcgcctatcggcttaagcttgctcgttaaattaagtcgctggcccataatacaaaaggtacgatgtcacccagaacgtatcttgggctccatctgtttgtaggtgtc

SEQ ID NO: 574515 - DNA, 2463 bp, Homo sapiens
agcggggacgcgcccagaccgagcgcttgaggtgccgcagccgccgccgccgccgccgccgcgatgtgaccttcagggccgccaggacgggatgaccggagcctccgccccgcggcgcccgcggctcgcctcggcctcccgggcgctctgaccgcgcgtccccggcccgccatggccccttcgctctcgcccgggcccgccgccctgcgccgcgcgccgcagctgctgctgctgctgctggccgcggagtgcgcgcttgccgcgctgttgccggcgcgcgaggccacgcagttcctgcggcccaggcagcgccgcgcctttcaggtcttcgaggaggccaagcagggccacctggagagggagtgcgtggaggagctgtgcagccgcgaggaggcgcgggaggtgttcgagaacgaccccgagacggattatttttacccaagatacttagactgcatcaacaagtatgggtctccgtacaccaaaaactcaggcttcgccacctgcgtgcaaaacctgcctgaccagtgcacgcccaacccctgcgataggaaggggacccaagcctgccaggacctcatgggcaacttcttctgcctgtgtaaagctggctgggggggccggctctgcgacaaagatgtcaacgaatgcagccaggagaacgggggctgcctccagatctgccacaacaagccgggtagcttccactgttcctgccacagcggcttcgagctctcctctgatggcaggacctgccaagacatagacgagtgcgcagactcggaggcctgcggggaggcgcgctgcaagaacctgcccggctcctactcctgcctctgtgacgagggctttgcgtacagctcccaggagaaggcttgccgagatgtggacgagtgtctgcagggccgctgtgagcaggtctgcgtgaactccccagggagctacacctgccactgtgacgggcgtgggggcctcaagctgtcccaggacatggacacctgtgaggacatcttgccgtgcgtgcccttcagcgtggccaagagtgtgaagtccttgtacctgggccggatgttcagtgggacccccgtgatccgactgcgcttcaagaggctgcagcccaccaggctggtagctgagtttgacttccggacctttgaccccgagggcatcctcctctttgccggaggccaccaggacagcacctggatcgtgctggccctgagagccggccggctggagctgcagctgcgctacaacggtgtcggccgtgtcaccagcagcggcccggtcatcaaccatggcatgtggcagacaatctctgttgaggagctggcgcggaatctggtcatcaaggtcaacagggatgctgtcatgaaaatcgcggtggccggggacttgttccaaccggagcgaggactgtatcatctgaacctgaccgtgggaggtattcccttccatgagaaggacctcgtgcagcctataaaccctcgtctggatggctgcatgaggagctggaactggctgaacggagaagacaccaccatccaggaaacggtgaaagtgaacacgaggatgcagtgcttctcggtgacggagagaggctctttctaccccgggagcggcttcgccttctacagcctggactacatgcggacccctctggacgtcgggactgaatcaacctgggaagtagaagtcgtggctcacatccgcccagccgcagacacaggcgtgctgtttgcgctctgggcccccgacctccgtgccgtgcctctctctgtggcactggtagactatcactccacgaagaaactcaagaagcagctggtggtcctggccgtggagcatacggccttggccctaatggagatcaaggtctgcgacggccaagagcacgtggtcaccgtctcgctgagggacggtgaggccaccctggaggtggacggcaccaggggccagagcgaggtgagcgccgcgcagctgcaggagacagatgtgccggtgacttcagcgccagtcaccgcgttctaccgcggctgcatgacactggaggtcaaccggaggctgctggacctggacgaggcggcgtacaagcacagcgacatcacggcccactcctgcccccccgtggagcccgccgcagcctaggcccccacgggacgcggcaggcttctcagtctctgtccgagacagccgggaggagcctgggggctcctcaccacgtggggccatgctgagagctgggctttcctctgtgaccatcccggcctgtaacatatctgtaaatagtgagatggacttggggcctctgacgccgcgcactcagccgtgggcccgggcgcggggaggccggcgcagcgcagagcgggctcgaagaaaataattctctattatttttattaccaagcgcttctttctgactctaaaatatggaaaataaaatatttacagaaagctttgtaa

SEQ ID NO: 574516 - DNA, 1042 bp, Homo sapiens
agaccggtttgacttccaattcaaccttccaccccccaggaattggggcccgggggttccccaccggggtatcttcagccgcctccttgacagtcttcggcaggaagggttcctcacagatgacttggtgagccaagaggagaatggtcagcaacagaagtacttgggggtgtgccggctcccagggccagggcggcggcaccggcgcctggacatcatcgtggtgccctatagcgagtttgcctgtgccctgctctacttcaccggctctgcacacttcaaccgctccatgcgagccctggccaaaaccaagggcatgagtctgtcagaacatgccctcagcactgctgtggtccggaacacccatggctgcaaggtggggcctggccgagtgctgcccactcccactgagaaggatgtcttcaggctcttaggcctcccctaccgagaacctgctgagcgggactggtgacccatggctgggggtgctgaggagagccgagttggactggctacccctcctggccacccagtactccctccagcctcagctggctgaacctcgccgctccaaccaccagcttcctcagcgagcagggcccagggctctgggcctgaagcaagagccagcccggctcccagtgtctgcccggctcccagtgtctgcccagccctctcccagacaggagcaggctgccaccccttctacctcaccactgcccctcgaagaattttgcaaatggccccttgccccattttaagcaggagcaggtggctggtttgaagccccaggtatcccccttccctgctatgggaaaggccaagctgctgggtggggacagaagctgcaggggagagggaagcagccgtgctgtcaacatcatccggcaccctctggggtaggagaacagccattccacatgtgttccctctatccgtcctgcttcctgggcagctggtggtgctgggaatggggtgccccagccttggtgaggacagtgttgggaggcccaggggcccagtaaagtgcatttgacattga

SEQ ID NO: 574517 - DNA, 2945 bp, Homo sapiens
  misc_feature (2666)..(2666): n is a, c, g, or t
  misc_feature (2701)..(2701): n is a, c, g, or t
  misc_feature (2822)..(2822): n is a, c, g, or t
agcggggacgcgcccagaccgagcgcttgaggtgccgcagccgccgccgccgccgccgccgcgatgtgaccttcagggccgccaggacgggatgaccggagcctccgccccgcggcgcccgcggctcgcctcggcctcccgggcgctctgaccgcgcgtccccggcccgccatggccccttcgctctcgcccgggcccgccgccctgcgccgcgcgccgcagctgctgctgctgctgctggccgcggagtgcgcgcttgccgcgctgttgccggcgcgcgaggccacgcagttcctgcggcccaggcagcgccgcgcctttcaggtcttcgaggaggccaagcagggccacctggagagggagtgcgtggaggagctgtgcagccgcgaggaggcgcgggaggtgttcgagaacgaccccgagacggattatttttacccaagatacttagactgcatcaacaagtatgggtctccgtacaccaaaaactcaggcttcgccacctgcgtgcaaaacctgcctgaccagtgcacgcccaacccctgcgataggaaggggacccaagcctgccaggacctcatgggcaacttcttctgcctgtgtaaagctggctgggggggccggctctgcgacaaagatgtcaacgaatgcagccaggagaacgggggctgcctccagatctgccacaacaagccgggtagcttccactgttcctgccacagcggcttcgagctctcctctgatggcaggacctgccaagacatagacgagtgcgcagactcggaggcctgcggggaggcgcgctgcaagaacctgcccggctcctactcctgcctctgtgacgagggctttgcgtacagctcccaggagaaggcttgccgagatgtggacgagtgtctgcagggccgctgtgagcaggtctgcgtgaactccccagggagctacacctgccactgtgacgggcgtgggggcctcaagctgtcccaggacatggacacctgtgaggacatcttgccgtgcgtgcccttcagcgtggccaagagtgtgaagtccttgtacctgggccggatgttcagtgggacccccgtgatccgactgcgcttcaagaggctgcagcccaccaggctggtagctgagtttgacttccggacctttgaccccgagggcatcctcctctttgccggaggccaccaggacagcacctggatcgtgctggccctgagagccggccggctggagctgcagctgcgctacaacggtgtcggccgtgtcaccagcagcggcccggtcatcaaccatggcatgtggcagacaatctctgttgaggagctggcgcggaatctggtcatcaaggtcaacagggatgctgtcatgaaaatcgcggtggccggggacttgttccaaccggagcgaggactgtatcatctgaacctgaccgtgggaggtattcccttccatgagaaggacctcgtgcagcctataaaccctcgtctggatggctgcatgaggagctggaactggctgaacggagaagacaccaccatccaggaaacggtgaaagtgaacacgaggatgcagtgcttctcggtgacggagagaggctctttctaccccgggagcggcttcgccttctacagcctggactacatgcggacccctctggacgtcgggactgaatcaacctgggaagtagaagtcgtggctcacatccgcccagccgcagacacaggcgtgctgtttgcgctctgggcccccgacctccgtgccgtgcctctctctgtggcactggtagactatcactccacgaagaaactcaagaagcagctggtggtcctggccgtggagcatacggccttggccctaatggagatcaaggtctgcgacggccaagagcacgtggtcaccgtctcgctgagggacggtgaggccaccctggaggtggacggcaccaggggccagagcgaggtgagcgccgcgcagctgcaggagaggctggccgtgctcgagaggcacctgcggagccccgtgctcacctttgctggcggcctgccagatgtgccggtgacttcagcgccagtcaccgcgttctaccgcggctgcatgacactggaggtcaaccggaggctgctggacctggacgaggcggcgtacaagcacagcgacatcacggcccactcctgcccccccgtggagcccgccgcagcctaggcccccacgggacgcggcaggcttctcagtctctgtccgagacagccgggaggagcctgggggctcctcaccacgtggggccatgctgagagctgggctttcctctgtgaccatcccggcctgtaacatatctgtaaatagtgagatggacttggggcctctgacgccgcgcactcagccgtgggcccgggcgcggggaggccggcgcagcgcagagcgggctcgaagaaaataattctctattatttttattaccaagcgcttctttctgactctaaaatatggaaaataaaatatttacagaaagctttgtaacaccgcgtggccgtcatctgctccccgcggggttctgcacacgtagcagcgtttgggatgagcggggctgccagggctccaggccgcaccctcagccgctccaaagatccctccctcttttctgctcccagcctggttgggcngccacggtctgctccccaggagcctctgactcctntggtagtggcggcaggggctggagctcagtttacttgttctgtaaatgcggagaacgccctgctcggcccccaccacaggcagccagtcattgctgagtgaggagggcttggcacacaaangcaggctgctggggcgggcctctgagccaacctgggagggaccccgagctgggaccgagggccggaagacaccgaggcagcgcctgcacccctgtgccattcccgtccccaccctcctgcaca

SEQ ID NO: 574518 - DNA, 632 bp, Homo sapiens
ccccctgcccctgggtttctctgagtttgtgtaaacaggttgcagggaaaggtttgccctgccctgctagggccatgtgctcccacggctattctccctttttgtggaaagctttatgttgtaggtctccgggatagagaaaggaatgtcatcacaccctcccgagggaggccagtggggtctggggccaggcagcatacagaggggaacaagagggcagtccctgtgcagtaagtaactcagaatgactttactcaggaaatatgaccatgactcactggctaggagtgccccatgcccagttcttagagacccttgatagctcctagaagacaggaggctgccgtggtcaagaagggccaagccttgaagtctcacggcaccccctgtggtggaggtataaggctcaggggccaactactgggtcttgcagtccccatcgttgctgtgggctgtcttcaccttctttagttccttctgtagctcagactcggccaccacaacctcctttggcttctggtactgtggatgcagccaggaataagaaaataattcagtcactgtcccatctccttccacacacacttggggccccttctctttctgatccccttatttgcacgagaaaattg

SEQ ID NO: 574519 - DNA, 2391 bp, Homo sapiens
agcggggacgcgcccagaccgagcgcttgaggtgccgcagccgccgccgccgccgccgccgcgatgtgaccttcagggccgccaggacgggatgaccggagcctccgccccgcggcgcccgcggctcgcctcggcctcccgggcgctctgaccgcgcgtccccggcccgccatggccccttcgctctcgcccgggcccgccgccctgcgccgcgcgccgcagctgctgctgctgctgctggccgcggagtgcgcgcttgccgcgctgttgccggcgcgcgaggccacgcagttcctgcggcccaggcagcgccgcgcctttcaggtcttcgaggaggccaagcagggccacctggagagggagtgcgtggaggagctgtgcagccgcgaggaggcgcgggaggtgttcgagaacgaccccgagacggattatttttacccaagatacttagactgcatcaacaagtatgggtctccgtacaccaaaaactcaggcttcgccacctgcgtgcaaaacctgcctgaccagtgcacgcccaacccctgcgataggaaggggacccaagcctgccaggacctcatgggcaacttcttctgcctgtgtaaagctggctgggggggccggctctgcgacaaagatgtcaacgaatgcagccaggagaacgggggctgcctccagatctgccacaacaagccgggtagcttccactgttcctgccacagcggcttcgagctctcctctgatggcaggacctgccaagacatagacgagtgcgcagactcggaggcctgcggggaggcgcgctgcaagaacctgcccggctcctactcctgcctctgtgacgagggctttgcgtacagctcccaggagaaggcttgccgagatgtggacgagtgtctgcagggccgctgtgagcaggtctgcgtgaactccccagggagctacacctgccactgtgacgggcgtgggggcctcaagctgtcccaggacatggacacctgtgaggacatcttgccgtgcgtgcccttcagcgtggccaagagtgtgaagtccttgtacctgggccggatgttcagtgggacccccgtgatccgactgcgcttcaagaggctgcagcccaccaggctggtagctgagtttgacttccggacctttgaccccgagggcatcctcctctttgccggaggccaccaggacagcacctggatcgtgctggccctgagagccggccggctggagctgcagctgcgctacaacggtgtcggccgtgtcaccagcagcggcccggtcatcaaccatggcatgtggcagacaatctctgttgaggagctggcgcggaatctggtcatcaaggtcaacagggatgctgtcatgaaaatcgcggtggccggggacttgttccaaccggagcgaggactgtatcatctgaacctgaccgtgggaggtattcccttccatgagaaggacctcgtgcagcctataaaccctcgtctggatggctgcatgaggagctggaactggctgaacggagaagacaccaccatccaggaaacggtgaaagtgaacacgaggatgcagtgcttctcggtgacggagagaggctctttctaccccgggagcggcttcgccttctacagcctggactacatgcggacccctctggacgtcgggactgaatcaacctgggaagtagaagtcgtggctcacatccgcccagccgcagacacaggcgtgctgtttgcgctctgggcccccgacctccgtgccgtgcctctctctgtggcactggtagactatcactccacgaagaaactcaagaagcagctggtggtcctggccgtggagcatacggccttggccctaatggagatcaaggtctgcgacggccaagagcacgtggtcaccgtctcgctgagggacggtgaggccaccctggaggtggacggcaccaggggccagagcgaggtgagcgccgcgcagctgcaggagaggctgctggacctggacgaggcggcgtacaagcacagcgacatcacggcccactcctgcccccccgtggagcccgccgcagcctaggcccccacgggacgcggcaggcttctcagtctctgtccgagacagccgggaggagcctgggggctcctcaccacgtggggccatgctgagagctgggctttcctctgtgaccatcccggcctgtaacatatctgtaaatagtgagatggacttggggcctctgacgccgcgcactcagccgtgggcccgggcgcggggaggccggcgcagcgcagagcgggctcgaagaaaataattctctattatttttattaccaagcgcttctttctgactctaaaatatggaaaataaaatatttacagaaagctttgtaa

SEQ ID NO: 574520 - DNA, 647 bp, Homo sapiens
cacgcgtccgatgagaattagtcaaccatatagtaattgttttgagagctggtaataattttgacagataacagagttatttgaaggctttttcagtgcctgttaaccctgcttgattactaatgaccttaaaatgatcctctaaatgtagatgaggcttagcagatcacttttcattataatgacttttattaaaaataataattaacatgagaatggtgttccacagtgctctttacatatgtaattaatagtgctgtagttgctatttgctgaacacatgaaggacagatattttgctgcgtgcttggcatatattatctctaattttagcagtaatgcttaaaaaaaataggttgatggggctgggcacggtggctcacgcctgtaatcccagcactttgggaggctgaggcgggcagatcaccggaggtcgggagctcaagaccagcctgaccaacatggagaaaccccgtctctactaaaaatacaaaattagctgggtgtggtggtgcatgcctgtaatcccagctactcagaaggctgaggcaggagaattgcttgaacccgagagacggaggttgcgttgatccgagatcgctccgttgcactccagcctgggcaacaagagtgaaagtccatctcaa

SEQ ID NO: 574521 - DNA, 261 bp, Homo sapiens
cacgtatggtgatggataaaatctactcagcttttgtttgtctgggacagttgtgatcactctctcctatatgtgtgtgaagaatattcacaccaaatatagtatactagggtaaaaggatactaaccatcaacactataactatatcatgccactctcccctggcctgcaaggtttcaactagaaaagtgtcctgccagaagtattggagctccatcgtatattatttgttgattttactctagcagcttttagaatcat

SEQ ID NO: 574522 - DNA, 2577 bp, Homo sapiens
agcggggacgcgcccagaccgagcgcttgaggtgccgcagccgccgccgccgccgccgccgcgatgtgaccttcagggccgccaggacgggatgaccggagcctccgccccgcggcgcccgcggctcgcctcggcctcccgggcgctctgaccgcgcgtccccggcccgccatggccccttcgctctcgcccgggcccgccgccctgcgccgcgcgccgcagctgctgctgctgctgctggccgcggagtgcgcgcttgccgcgctgttgccggcgcgcgaggccacgcagttcctgcggcccaggcagcgccgcgcctttcaggtcttcgaggaggccaagcagggccacctggagagggagtgcgtggaggagctgtgcagccgcgaggaggcgcgggaggtgttcgagaacgaccccgagacggattatttttacccaagatacttagactgcatcaacaagtatgggtctccgtacaccaaaaactcaggcttcgccacctgcgtgcaaaacctgcctgaccagtgcacgcccaacccctgcgataggaaggggacccaagcctgccaggacctcatgggcaacttcttctgcctgtgtaaagctggctgggggggccggctctgcgacaaagatgtcaacgaatgcagccaggagaacgggggctgcctccagatctgccacaacaagccgggtagcttccactgttcctgccacagcggcttcgagctctcctctgatggcaggacctgccaagacatagacgagtgcgcagactcggaggcctgcggggaggcgcgctgcaagaacctgcccggctcctactcctgcctctgtgacgagggctttgcgtacagctcccaggagaaggcttgccgagatgtggacgagtgtctgcagggccgctgtgagcaggtctgcgtgaactccccagggagctacacctgccactgtgacgggcgtgggggcctcaagctgtcccaggacatggacacctgtgaggacatcttgccgtgcgtgcccttcagcgtggccaagagtgtgaagtccttgtacctgggccggatgttcagtgggacccccgtgatccgactgcgcttcaagaggctgcagcccaccaggctggtagctgagtttgacttccggacctttgaccccgagggcatcctcctctttgccggaggccaccaggacagcacctggatcgtgctggccctgagagccggccggctggagctgcagctgcgctacaacggtgtcggccgtgtcaccagcagcggcccggtcatcaaccatggcatgtggcagacaatctctgttgaggagctggcgcggaatctggtcatcaaggtcaacagggatgctgtcatgaaaatcgcggtggccggggacttgttccaaccggagcgaggactgtatcatctgaacctgaccgtgggaggtattcccttccatgagaaggacctcgtgcagcctataaaccctcgtctggatggctgcatgaggagctggaactggctgaacggagaagacaccaccatccaggaaacggtgaaagtgaacacgaggatgcagtgcttctcggtgacggagagaggctctttctaccccgggagcggcttcgccttctacagcctggactacatgcggacccctctggacgtcgggactgaatcaacctgggaagtagaagtcgtggctcacatccgcccagccgcagacacaggcgtgctgtttgcgctctgggcccccgacctccgtgccgtgcctctctctgtggcactggtagactatcactccacgaagaaactcaagaagcagctggtggtcctggccgtggagcatacggccttggccctaatggagatcaaggtctgcgacggccaagagcacgtggtcaccgtctcgctgagggacggtgaggccaccctggaggtggacggcaccaggggccagagcgaggtgagcgccgcgcagctgcaggagaggctggccgtgctcgagaggcacctgcggagccccgtgctcacctttgctggcggcctgccagatgtgccggtgacttcagcgccagtcaccgcgttctaccgcggctgcatgacactggaggtcaaccggaggctgctggacctggacgaggcggcgtacaagcacagcgacatcacggcccactcctgcccccccgtggagcccgccgcagcctaggcccccacgggacgcggcaggcttctcagtctctgtccgagacagccgggaggagcctgggggctcctcaccacgtggggccatgctgagagctgggctttcctctgtgaccatcccggcctgtaacatatctgtaaatagtgagatggacttggggcctctgacgccctgcgccgcgcgccgcagctgctgctgctgctgctggccgcggagtgcgcgcttgccgcgctgttgccggcgcgcgaggccacgcagttcctgcggcccagagcgggctcgaagaaaataattctctattatttttattaccaagcgcttctttctgactctaaaatatggaaaataaaatatttacagaaagctttgtaa

SEQ ID NO: 574523 - DNA, 2302 bp, Homo sapiens
  misc_feature (2068)..(2068): n is a, c, g, or t
agcggggacgcgcccagaccgagcgcttgaggtgccgcagccgccgccgccgccgccgccgcgatgtgaccttcagggccgccaggacgggatgaccggagcctccgccccgcggcgcccgcggctcgcctcggcctcccgggcgctctgaccgcgcgtccccggcccgccatggccccttcgctctcgcccgggcccgccgccctgcgccgcgcgccgcagctgctgctgctgctgctggccgcggagtgcgcgcttgccgcgctgttgccggcgcgcgaggccacgcagttcctgcggcccaggcagcgccgcgcctttcaggtcttcgaggaggccaagcagggccacctggagagggagtgcgtggaggagctgtgcagccgcgaggaggcgcgggaggtgttcgagaacgaccccgagacggattatttttacccaagatacttagactgcatcaacaagtatgggtctccgtacaccaaaaactcaggcttcgccacctgcgtgcaaaacctgcctgaccagtgcacgcccaacccctgcgataggaaggggacccaagcctgccaggacctcatgggcaacttcttctgcctgtgtaaagctggctgggggggccggctctgcgacaaagatgtcaacgaatgcagccaggagaacgggggctgcctccagatctgccacaacaagccgggtagcttccactgttcctgccacagcggcttcgagctctcctctgatggcaggacctgccaagacatagacgagtgcgcagactcggaggcctgcggggaggcgcgctgcaagaacctgcccggctcctactcctgcctctgtgacgagggctttgcgtacagctcccaggagaaggcttgccgagatgtggacgagtgtctgcagggccgctgtgagcaggtctgcgtgaactccccagggagctacacctgccactgtgacgggcgtgggggcctcaagctgtcccaggacatggacacctgtgaggacatcttgccgtgcgtgcccttcagcgtggccaagagtgtgaagtccttgtacctgggccggatgttcagtgggacccccgtgatccgactgcgcttcaagaggctgcagcccaccaggctggtagctgagtttgacttccggacctttgaccccgagggcatcctcctctttgccggaggccaccaggacagcacctggatcgtgctggccctgagagccggccggctggagctgcagctgcgctacaacggtgtcggccgtgtcaccagcagcggcccggtcatcaaccatggcatgtggcagacaatctctgttgaggagctggcgcggaatctggtcatcaaggtcaacagggatgctgtcatgaaaatcgcggtggccggggacttgttccaaccggagcgaggactgtatcatctgaacctgaccgtgggaggtattcccttccatgagaaggacctcgtgcagcctataaaccctcgtctggatggctgcatgaggagctggaactggctgaacggagaagacaccaccatccaggaaacggtgaaagtgaacacgaggatgcagtgcttctcggtgacggagagaggctctttctaccccgggagcggcttcgccttctacagcctggactacatgcggacccctctggacgtcgggactgaatcaacctgggaagtagaagtcgtggctcacatccgcccagccgcagacacaggcgtgctgtttgcgctctgggcccccgacctccgtgccgtgcctctctctgtggcactggtagactatcactccacgaagaaactcaagaagcagctggtggtcctggccgtggagcatacggccttggccctaatggagatcaaggtctgcgacggccaagagcacgtggtcaccgtctcgctgagggacggtgaggccaccctggaggtggacggcaccaggggccagagcgaggtgagcgccgcgcagctgcaggagaggctggccgtgctcgagaggcacctgcggagccccgtgctcacctttgctggcggcctgcaggtaggtgctccctgtncgctcacccgggtgaagagctccagggaggcccagcttggtcaccccagatctaacctggacaggctggggtttctggtagtgaatgcggaagaggacttgtgttttaagaggaaggagaagtccaggtgggtcgttagtggctattatggtgtctcggtgctggtcaggtcattggctgagactgagaaacacgtacgggggccggcattggcctgagtcaggccccacgaac

SEQ ID NO: 574524 - DNA, 841 bp, Homo sapiens
  misc_feature (592)..(592): n is a, c, g, or t
cacagtagctcacacctgtaatcccagcactttgggaggtgccaaatcaggtggatcacctcaggtcaatagtttgagaccagcctggccaagaaggtgaaaacctgtctctacttaaaaaaaaaaaaaaaaaattggccgaggtggtggtggcaggcacctggtaatcccagctactcgggaggcagaggcaggagaatcgctttgaacccaaggttggcaagggtttgcaggggggccgagaatggtgccatggcactccaaacggggcaacgagagcgaagtccgtcctcaagaaaaaaaataaacaaatacaaaaaaaaaacagtgtgtgctgagcggcgcctcagggagcccttgagagaaaggtttcaaacaaccccactctgtgtgtggcgacgccggggcgccccccagcagggatagacaggaacactgggggcacacacgagcgtgtggttgccctagagagaaacagctgggggcactaagacaactaaggcggctgtggactacttcactccccccaaatgttgaaaaaaacacgcgcccggggtggacaacacacagaggcggtttctggtagaacaanaaactcacaaaagatgggagatatctagggggcggagccaacacgggggcgctctcaacacaaacaagggaggactccacaagggagagcggctcagataactactaataaattaacgcccccgccgtcggctggagtgccatactacacacgtcgacatacagcacgatatagcgaacaagtagctcaagcacaacagctacgaacgtaatcgtcgccaagatagaagtacgtaaaaaaacgaatgat

SEQ ID NO: 574525 - DNA, 388 bp, Homo sapiens
tacccacggcaggtgtactgttccatgggtgaaggctctaacacggccctgtaaaaactgggtaaggagatgtaagagacatgggccaagtgctaaatggaggaagagggtaatggcagggcctaggaagggcagtagccaggtgcccaggagttacgaaatcacctgggccgggaatctgaaaggcgctgcctgatttcagcagcttttttttttttttttggagagtggagtcgtggctcggttcgcccaggcgtggagttgcaggggcattcattctcgtgctcacgtgaaagctcggcctccgcgggtttcaccccacagcgcatttctccgtgcctcagcctcttgagttagcgtgggagatcaacggggcgggggcggggag

SEQ ID NO: 574526 - DNA, 236 bp, Homo sapiens
gcttcacaaagtgtgatgcggtgagtgtctggagaaggagcacgattacagggatagcatttggtactttatccagttcacaccatgcggtaggttgctgccttcgaggtgtatcctttggaggcagctacattgtcaccgcagaggcagggctaacattttcttcatcggtagcctgtaggtcagagcggccttcttcgtctgtggcggaacctttgacaacccttcttcagagt

SEQ ID NO: 574527 - DNA, 92 bp, Homo sapiens
ttttccatccaacaagaagccacaactttattagtgatagaaacagtacaaattttaaaccaagctgtagttccacttttcaaacaccaaaa

SEQ ID NO: 574528 - DNA, 83 bp, Homo sapiens
aaactctgtttaaaaaataaggtctgtgtgaaacacacatgtgggggtgaggctggattaaagtgaaattttttcttttaaaa

SEQ ID NO: 574529 - DNA, 953 bp, Homo sapiens
gatgccctcaggtattggcagcgagatccatgtggaccaagtgccatgtagtccagacctccacatgcctttggcgccatcctggtccttgcagcatggagcctagcagagacggatcgcctggttcaacctgccagtcagtctgctggtctgaaggacgacatcataactgtgaagcctggccaggaatccgtgtgcttctctgaggcggtgatcacatggatgagcgaagcacgatctggtaccgtgcgacgccgggatggaccgtcttcccaccgccttctgcccgctcacatcccgtcagcacccggggaagaagctgggatgagcaggaacccagcagaagaccctcagtgcagcgagagccaggctcttgtccgctgtaccttgacaagtctcctgatgagtatgactctaactcaagaactgagtgactggatccatgggtcccctgatcaccggagcacagtgtacagctgacaccatgtgaaccaagtggagcgaggtctcatcacgcatgcaagatacagagtagacttggctaagaaaactataagccttgggtgcccaccggagggcttcccatgggctcggagtcttgccgtacaattcaggcgaaaaatggcccccttagccacagcgttcaattctaccctagataggcccccccagcgcatggttacactcctctccccgtagggcccaatgccaaaccaattccctaacgcttcccgagggtaactcaagggctgcacctcggggcccgtacgcatggcgccaagtacacctacggcacccttggaagttcatgtttccacacggttcgcatccatcgggaggaatccctgcggccataggttggggctagctgggacccaaggagatccggttggatcccttgggaccgcatggaatttgcacgccaagggaaccttcaaggaacaggacttcgc

SEQ ID NO: 574530 - DNA, 1090 bp, Homo sapiens
gtcaaggatctggtgtttgaggaggctgcgggtactaccagcggcggagtctgcgtggtgcccagctcactccagaacgaactgagacacagcagcacattaccgggcagctcaggctctggcctccatcctccagggaccaccgtgctccccatcatgcactgctgacggcatgtacgagagaccggagcttcgggattaccgaggcttagaacagctgaaggcccagctggtggctggggatgatgaggaggctggttggactgagctggcggagcacggaagtgcgcacgcctgctgaggactgagttgataggagaccagctagcccagctcaacaccgtatatccaagcccttcctacagcagcctggggtgccaacctcagggaccctgcagactaccagctagatgtggaatggcaagctgaggtcccaaagcacaccactgatgtagtggaagaaagtgttcgggggaataaccgcatggacaggaaccccccaactggacatactgaccacctttgaactcctgtgccagtgtctgtgccagctggagcctcgatggctgcaccctttgtggagctgggcacaagcagcagggcgggccggagactggcgggagcaggcggcccagcgaatgacacctgtatcgccaaacatactggaagagcatacgacgaacagaggggaccacagactgacgccggcactacaagctgcctcatgaaccagaggcgcacggcacaacagctgtgcaccaagaggcgggcagcaggcgcacaagcaaacagggacacgggaccggcagccgccaggcccacgaccctcaccacaccgcaccgccagaaccccacctgcggcgcccactgcccgaaccgacggccgagcacagtacccctacggaacgtgccacacaagggcccaggtcccccggccctagccgccatcacacctgaggcgccccacacaacacatacccaacacgcggagaacgcccgacacacaggagcaagtagaacaagaggacacaccgcaacccacacaagcacacaccaagataacgaaaagcccgcgtacacacaccgcccc

SEQ ID NO: 574531 - DNA, 353 bp, Homo sapiens
cttacccctcaaagacataatatgtttatgttactttctgcttgtcttcctgcatttgtttcctcacagtcgaccttttcttctttcctttggtctctgtgatgatggaaacttacatcaaatgtcaggcagtccttcactgtctatttaaaaaaagaaaaaaaaaaagccatttggcagctctctaaaaggccttccagacgactggcaggctcaaattgccaactgactttttgctatgggattcccaaatgtcagtttgtaaagatcttttcctgggttggttcagtttctccagaaagggatcctgtgttctctgctgcccccaatggggaacagtggagggaaggggt

SEQ ID NO: 574532 - DNA, 327 bp, Homo sapiens
  misc_feature (18)..(18): n is a, c, g, or t
gatacaattccagctcgntacccctaattggttcttcgatgacgaagtcgtagacgcagttgtggaagtaatagaactccaggtgcttgaactcgctcttggcggcgctgaagagttcttccacgcggtgcacgtgctcgtccatcgtgccgcccacgtccatcagcagcagcaccttgaccttgttgtggcgttcgggctgcatgcggatgtccagcaggccggcgttggcggccgtgccgtggatggtgccgtccaggtccagctcaaggtctgagccctcgcgggcgacgtcatcgaagaaccaattaggggtacgagctcgga

SEQ ID NO: 574533 - DNA, 696 bp, Homo sapiens
gtcgagacgagctggaccagacacgaggtcttctcggtaacgacgcaatctacaacgttatcgtctacacgcaccatgcattgtaataatcttcttcatagtaatacccatcataatcggaggctttggcaactgactagattcccctaataatcggtgcccccgaatatggcgtattccccgcataagacaacagtacagcttcttgacctctgtagctccgctctctccatactccgtgctcgcactcctgctatagtggaggccggatgcaggaacccaggttgaaccagtctatgcctcccttagcagggaacctacatcccgacctggagcctccgtagacctaaccatcttctccttacagctagcaggtgtcctccctctatcttagggggccatcaatttcatcagcaacaaattatcaatatagaagcccctgccataacccagatacaaatgcccctcttcgatctgatccgttcctaatcacagcagtcctacttctcctatctcctcccagtcctagcatgctggccatcactatactactaaacagaccgcaactcaataccacttcttcgaccccgcggacggaggaagaacccattctataccaacactattctgatattcggtcacctgaagttaatatgcttatcctaccaggcttcggaataatctccatatgtaatt

SEQ ID NO: 574534 - DNA, 803 bp, Homo sapiens
gaaatccgccgccccaagagggcccaaaagggggggcccccccccggtgtcgcccccccctaaagttagggaacccccgggggtacagaaattcggtcccggggcccggtacaagagggcgagggccaaattttgtgggcaaaaccagggggggagatatttggagtttcgagaaaggaatccgaagcagcagctccagtcccaaaaaggtactcttaagggtaagagggcttgcatctccccttcaagcaaaaataaatggaaaactcagtcaaaaagttttcccttgaacctttgagtaggacttccggctcctgcaatgggtcaagccagtagtccggggctctttatgtcatggggctttggcaccaaaggatgaccctcacctgcccaactgaagtgggcagtggccctcccacgctgacagacgcagtatttacatcccctcctcagctttgatttcataagccacagccccccgcacagactgatctcaggaagaatagctctctaacatcggtccacctttttaagacacaatgtgttagccaaagggctgccccaaaggggaagggacaaaaaaaccctcgggcctcacacactgtcttcaaggcccaattcccccagaacaggtccgtaaaagaggccggtgtcatgggttcccattttcatgttgggaaagcaaggaccccggatctgtttcccaagccttcacaatggggaagaaactcctgtttttacaaagggataaagttggggttaggcccctaaaagaatgttcaaaaaaaaattaaaataacttt

SEQ ID NO: 574535 - DNA, 180 bp, Homo sapiens
aaatggtagcactgtcaaatacttcatacgtaccgtcttcatagattgctttaataggtttttcattaattggctttaattgtttgtttgttttaacaaaattcttctctgcgtaattgttaatctcaatctagtctgttgctgtctttaaacgcgttataaatcagagttttaactgat

SEQ ID NO: 574536 - DNA, 2795 bp, Homo sapiens
  misc_feature (2328)..(2328): n is a, c, g, or t
agcggggacgcgcccagaccgagcgcttgaggtgccgcagccgccgccgccgccgccgccgcgatgtgaccttcagggccgccaggacgggatgaccggagcctccgccccgcggcgcccgcggctcgcctcggcctcccgggcgctctgaccgcgcgtccccggcccgccatggccccttcgctctcgcccgggcccgccgccctgcgccgcgcgccgcagctgctgctgctgctgctggccgcggagtgcgcgcttgccgcgctgttgccggcgcgcgaggccacgcagttcctgcggcccaggcagcgccgcgcctttcaggtcttcgaggaggccaagcagggccacctggagagggagtgcgtggaggagctgtgcagccgcgaggaggcgcgggaggtgttcgagaacgaccccgagacggattatttttacccaagatacttagactgcatcaacaagtatgggtctccgtacaccaaaaactcaggcttcgccacctgcgtgcaaaacctgcctgaccagtgcacgcccaacccctgcgataggaaggggacccaagcctgccaggacctcatgggcaacttcttctgcctgtgtaaagctggctgggggggccggctctgcgacaaagatgtcaacgaatgcagccaggagaacgggggctgcctccagatctgccacaacaagccgggtagcttccactgttcctgccacagcggcttcgagctctcctctgatggcaggacctgccaagacatagacgagtgcgcagactcggaggcctgcggggaggcgcgctgcaagaacctgcccggctcctactcctgcctctgtgacgagggctttgcgtacagctcccaggagaaggcttgccgagatgtggacgagtgtctgcagggccgctgtgagcaggtctgcgtgaactccccagggagctacacctgccactgtgacgggcgtgggggcctcaagctgtcccaggacatggacacctgtgaggacatcttgccgtgcgtgcccttcagcgtggccaagagtgtgaagtccttgtacctgggccggatgttcagtgggacccccgtgatccgactgcgcttcaagaggctgcagcccaccaggctggtagctgagtttgacttccggacctttgaccccgagggcatcctcctctttgccggaggccaccaggacagcacctggatcgtgctggccctgagagccggccggctggagctgcagctgcgctacaacggtgtcggccgtgtcaccagcagcggcccggtcatcaaccatggcatgtggcagacaatctctgttgaggagctggcgcggaatctggtcatcaaggtcaacagggatgctgtcatgaaaatcgcggtggccggggacttgttccaaccggagcgaggactgtatcatctgaacctgaccgtgggaggtattcccttccatgagaaggacctcgtgcagcctataaaccctcgtctggatggctgcatgaggagctggaactggctgaacggagaagacaccaccatccaggaaacggtgaaagtgaacacgaggatgcagtgcttctcggtgacggagagaggctctttctaccccgggagcggcttcgccttctacagcctggactacatgcggacccctctggacgtcgggactgaatcaacctgggaagtagaagtcgtggctcacatccgcccagccgcagacacaggcgtgctgtttgcgctctgggcccccgacctccgtgccgtgcctctctctgtggcactggtagactatcactccacgaagaaactcaagaagcagctggtggtcctggccgtggagcatacggccttggccctaatggagatcaaggtctgcgacggccaagagcacgtggtcaccgtctcgctgagggacggtgaggccaccctggaggtggacggcaccaggggccagagcgaggtgagcgccgcgcagctgcaggagaggctgctggacctggacgaggcggcgtacaagcacagcgacatcacggcccactcctgcccccccgtggagcccgccgcagcctaggcccccacgggacgcggcaggcttctcagtctctgtccgagacagccgggaggagcctgggggctcctcaccacgtggggccatgctgagagctgggctttcctctgtgaccatcccgggcgcggggaggccggcgcagcgcagagcgggctcgaagaaaataattctctattatttttattaccaagcgcttctttctgactctaaaatatggaaaataaaatatttacagaaagctttgtaaaaaaaaanacaacaaacctcacaaaacaaaaacacacatacacacacaaaacacaaacatacaccacaaacatcttacacaccaaaaacaaaaacatcaatatatcgactaccacaaacaccaccacacccacacaactcacacatactcatcagaaggaggatgagatcgggtggaggggcgagagaagggactgctcgtggagagacgtaggtgaacgagagcagcgaagacgagggacgtgagtgacgggctggggaacgaagataaacagaagacgccagcaggtcagcgaggcaccgggtgatcccagggcgataaagcggtctgcgcatcgtgatgccctaacgaagcacaaggacgcacacatgcgggccggaggagagcagagcgaagagacgggggcggctgcggaagagacacggacgagcagaacgaaccgataagcagaatcgacgccaccgagccccaccaa

SEQ ID NO: 574537 - DNA, 157 bp, Homo sapiens
gcacagactatgagtcccttcgtgtgacgtctgcgctgaaacatgttctgcatgttcatgctcaatcggcccatccaaggaggaagtgccactggaaacaacgggtcgtctcgtggtaagagagagtggatatgatgctgcattcatacccaggact

SEQ ID NO: 574538 - DNA, 2320 bp, Homo sapiens
agcggggacgcgcccagaccgagcgcttgaggtgccgcagccgccgccgccgccgccgccgcgatgtgaccttcagggccgccaggacgggatgaccggagcctccgccccgcggcgcccgcggctcgcctcggcctcccgggcgctctgaccgcgcgtccccggcccgccatggccccttcgctctcgcccgggcccgccgccctgcgccgcgcgccgcagctgctgctgctgctgctggccgcggagtgcgcgcttgccgcgctgttgccggcgcgcgaggccacgcagttcctgcggcccaggcagcgccgcgcctttcaggtcttcgaggaggccaagcagggccacctggagagggagtgcgtggaggagctgtgcagccgcgaggaggcgcgggaggtgttcgagaacgaccccgagacggattatttttacccaagatacttagactgcatcaacaagtatgggtctccgtacaccaaaaactcaggcttcgccacctgcgtgcaaaacctgcctgaccagtgcacgcccaacccctgcgataggaaggggacccaagcctgccaggacctcatgggcaacttcttctgcctgtgtaaagctggctgggggggccggctctgcgacaaagatgtcaacgaatgcagccaggagaacgggggctgcctccagatctgccacaacaagccgggtagcttccactgttcctgccacagcggcttcgagctctcctctgatggcaggacctgccaagacatagacgagtgcgcagactcggaggcctgcggggaggcgcgctgcaagaacctgcccggctcctactcctgcctctgtgacgagggctttgcgtacagctcccaggagaaggcttgccgagatgtggacgagtgtctgcagggccgctgtgagcaggtctgcgtgaactccccagggagctacacctgccactgtgacgggcgtgggggcctcaagctgtcccaggacatggacacctgtgaggacatcttgccgtgcgtgcccttcagcgtggccaagagtgtgaagtccttgtacctgggccggatgttcagtgggacccccgtgatccgactgcgcttcaagaggctgcagcccaccaggctggtagctgagtttgacttccggacctttgaccccgagggcatcctcctctttgccggaggccaccaggacagcacctggatcgtgctggccctgagagccggccggctggagctgcagctgcgctacaacggtgtcggccgtgtcaccagcagcggcccggtcatcaaccatggcatgtggcagacaatctctgttgaggagctggcgcggaatctggtcatcaaggtcaacagggatgctgtcatgaaaatcgcggtggccggggacttgttccaaccggagcgaggactgtatcatctgaacctgaccgtgggaggtattcccttccatgagaaggacctcgtgcagcctataaaccctcgtctggatggctgcatgaggagctggaactggctgaacggagaagacaccaccatccaggaaacggtgaaagtgaacacgaggatgcagtgcttctcggtgacggagagaggctctttctaccccgggagcggcttcgccttctacagcctggactacatgcggacccctctggacgtcgggactgaatcaacctgggaagtagaagtcgtggctcacatccgcccagccgcagacacaggcgtgctgtttgcgctctgggcccccgacctccgtgccgtgcctctctctgtggcactggtagactatcactccacgaagaaactcaagaagcagctggtggtcctggccgtggagcatacggccttggccctaatggagatcaaggtctgcgacggccaagagcacgtggtcaccgtctcgctgagggacggtgaggccaccctggaggtggacggcaccaggggccagagcgaggtgagcgccgcgcagctgcaggagaggctgctggacctggacgaggcggcgtacaagcacagcgacatcacggcccactcctgcccccccgtggagcccgccgcagcctaggcccccacgggacgcggcaggcttctcagtctctgtccgagacagccgggaggagcctgggggctcctcaccacgtggggccatgctgagagctgggctttcctctgtgaccatcccgggcgcggggaggccggcgcagcgcagagcgggctcgaagaaaataattctctattatttttattaccaagcgcttctttctgactctaaaatatggaaaataaaatatttacagaaagctttgtaa

SEQ ID NO: 574539 - DNA, 418 bp, Homo sapiens
  misc_feature (78)..(78): n is a, c, g, or t
  misc_feature (112)..(112): n is a, c, g, or t
  misc_feature (169)..(169): n is a, c, g, or t
  misc_feature (200)..(200): n is a, c, g, or t
  misc_feature (279)..(279): n is a, c, g, or t
ctacggacgcgtactgaaaggcggtgtcgatcagctttttgccggcctcgctgagggttccgtcttcaacccgcaggnctgcctcggtggaaagcatttgccgatgcagggngagcagttgggctgatcgtgatggctgcttgggggagcctacgggtgatcttttccngtagctactgagcgcgcctgaaaagcgggtngcgatatcgtgtgcaagcgttagcagggaacctgatgctccaacctggtttggggagcacccgcaggtccgtcaatgtnaaagcccgtttgtatgtcgcactgtgctcttcagatgttgggcgtgccagtgacggcgtttatgtggacttgcgcggctttttcgagcaatgcctccgataagattggcgtagaaatcagcacggggcgtccgtagcgg

SEQ ID NO: 574540 - DNA, 120 bp, Homo sapiens
aacttatctgtgctgggtacaattgaagaagtttctaaataacacacactatgcacattgggccaactattttgtaagcccggatagacttattgccaaaaacaaataaatagctttcaa

SEQ ID NO: 574541 - DNA, 1919 bp, Homo sapiens
  misc_feature (1861)..(1861): n is a, c, g, or t
  misc_feature (1864)..(1866): n is a, c, g, or t
agcggggacgcgcccagaccgagcgcttgaggtgccgcagccgccgccgccgccgccgccgcgatgtgaccttcagggccgccaggacgggatgaccggagcctccgccccgcggcgcccgcggctcgcctcggcctcccgggcgctctgaccgcgcgtccccggcccgccatggccccttcgctctcgcccgggcccgccgccctgcgccgcgcgccgcagctgctgctgctgctgctggccgcggagtgcgcgcttgccgcgctgttgccggcgcgcgaggccacgcagttcctgcggcccaggcagcgccgcgcctttcaggtcttcgaggaggccaagcagggccacctggagagggagtgcgtggaggagctgtgcagccgcgaggaggcgcgggaggtgttcgagaacgaccccgagacggattatttttacccaagatacttagactgcatcaacaagtatgggtctccgtacaccaaaaactcaggcttcgccacctgcgtgcaaaacctgcctgaccagtgcacgcccaacccctgcgataggaaggggacccaagcctgccaggacctcatgggcaacttcttctgcctgtgtaaagctggctgggggggccggctctgcgacaaagatgtcaacgaatgcagccaggagaacgggggctgcctccagatctgccacaacaagccgggtagcttccactgttcctgccacagcggcttcgagctctcctctgatggcaggacctgccaagacatagacgagtgcgcagactcggaggcctgcggggaggcgcgctgcaagaacctgcccggctcctactcctgcctctgtgacgagggctttgcgtacagctcccaggagaaggcttgccgagatgtggacgagtgtctgcagggccgctgtgagcaggtctgcgtgaactccccagggagctacacctgccactgtgacgggcgtgggggcctcaagctgtcccaggacatggacacctgtgaggacatcttgccgtgcgtgcccttcagcgtggccaagagtgtgaagtccttgtacctgggccggatgttcagtgggacccccgtgatccgactgcgcttcaagaggctgcagcccaccaggctggtagctgagtttgacttccggacctttgaccccgagggcatcctcctctttgccggaggccaccaggacagcacctggatcgtgctggccctgagagccggccggctggagctgcagctgcgctacaacggtgtcggccgtgtcaccagcagcggcccggtcatcaaccatggcatgtggcagacaatctctgttgaggagctggcgcggaatctggtcatcaaggtcaacagggatgctgtcatgaaaatcgcggtggccggggacttgttccaaccggagcgaggactgtatcatctgaacctgaccgtgggaggtattcccttccatgagaaggacctcgtgcagcctataaaccctcgtctggatggctgcatgaggagctggaactggctgaacggagaagacaccaccatccaggaaacggtgaaagtgaacacgaggatgcagtgcttctcggtgacggagagaggctctttctaccccgggagcggcttcgccttctacagcctggactacatgcggacccctctggacgtcgggactgaatcaacctgggaagtagaagtcgtggctcacatccgcccagccgcagacacaggcgtgctgtttgcgctctgggcccccgacctccgtgccgtgcctctctctgtggcactggtagactatcactccacgaagaaactcaagaagcaggtagggcctccgccacccagggcgtcctgaccggctngannnacgggtacgtgcgtcgcactccctggcaggggacgaagggggcccgcggtggg

SEQ ID NO: 574542 - DNA, 1198 bp, Homo sapiens
tggtggggaaaatatttaatggctgccatccccagggtgagccgcggggggtgtgagggggtgaagcgtgggtgtgggtggactcacagcattcttcgtggaatagggcgagtggcctcatccacgctttccgtggagctcgtgacttcgtgatcgtgtgggagctgtggctttcactcgtgcctccgtggacttcgagcgggcacctttgacagggattacgcccgaggcagcacggggttcccgcagacgcgtgggcctgccgcttggcgccttcaacttcgctgtggctttgcagcttgtgcccagcttcccgtgcggggtccaccagccccgtggaagctgcagggtggctggagcagcgactcagaagccagaagccacaggggcaaccctgtggggggcgggagcccccagggccagaaacagccaccacacctgtgcgcgggccagggcctggacgtagccggacaccgccgatgccagggcgcccggggcctcatccgccacttccaggaaacagtcaggccggatccggggtgaggtggtagtcggccctgcagggagcgcacggctcgcgtgatgcttagcgccagctcaggggcggttctgcctcggggtccttccaggagcactctgagggctccgggtaggggggtcacacagaggctagggggagctagcggaatcctccgggggcagcttctggcaacagtccttccgtcacgaggcgctgaaggtgaaagccagccgcatgacaagtccaggcagtgcacagggtctggcgggaacacatcagtgccaactggtgcaccccatcagcaaggtacaagggtccccaagaagaatctaacaaatgccaaaaggccaacttcgttcgcggctttggaaacagccgcgagaaatacaacagccgagaactacatatatgtgagcgcctcaaaaccttggaaacgggggtggagaaccaaaggacacaggagtcctagtccctgcacactactgagagatgtcaacacaccccaaagaacgtagcagtgactagtggtgtcaaccttaatgaaagagagaataaacacgaaacctaactactactacaccatagcgatcataactagtactgataagtactatagcatagtacttcatctaattggctaggtctaaagctcagacatcacagtaatgaggcatcaaa

SEQ ID NO: 574543 - DNA, 1541 bp, Homo sapiens
agcggggacgcgcccagaccgagcgcttgaggtgccgcagccgccgccgccgccgccgccgcgatgtgaccttcagggccgccaggacgggatgaccggagcctccgccccgcggcgcccgcggctcgcctcggcctcccgggcgctctgaccgcgcgtccccggcccgccatggccccttcgctctcgcccgggcccgccgccctgcgccgcgcgccgcagctgctgctgctgctgctggccgcggagtgcgcgcttgccgcgctgttgccggcgcgcgaggccacgcagttcctgcggcccaggcagcgccgcgcctttcaggtcttcgaggaggccaagcagggccacctggagagggagtgcgtggaggagctgtgcagccgcgaggaggcgcgggaggtgttcgagaacgaccccgagacggattatttttacccaagatacttagactgcatcaacaagtatgggtctccgtacaccaaaaactcaggcttcgccacctgcgtgcaaaacctgcctgaccagtgcacgcccaacccctgcgataggaaggggacccaagcctgccaggacctcatgggcaacttcttctgcctgtgtaaagctggctgggggggccggctctgcgacaaagatgtcaacgaatgcagccaggagaacgggggctgcctccagatctgccacaacaagccgggtagcttccactgttcctgccacagcggcttcgagctctcctctgatggcaggacctgccaagacatagacgagtgcgcagactcggaggcctgcggggaggcgcgctgcaagaacctgcccggctcctactcctgcctctgtgacgagggctttgcgtacagctcccaggagaaggcttgccgagatgtggacgagtgtctgcagggccgctgtgagcaggtctgcgtgaactccccagggagctacacctgccactgtgacgggcgtgggggcctcaagctgtcccaggacatggacacctgtgaggacatcttgccgtgcgtgcccttcagcgtggccaagagtgtgaagtccttgtacctgggccggatgttcagtgggacccccgtgatccgactgcgcttcaagaggctgcagcccaccaggctggtagctgagtttgacttccggacctttgaccccgagggcatcctcctctttgccggaggccaccaggacagcacctggatcgtgctggccctgagagccggccggctggagctgcagctgcgctacaacggtgtcggccgtgtcaccagcagcggcccggtcatcaaccatggcatgtggcagacaatctctgttgaggagctggcgcggaatctggtcatcaaggtcaacagggatgctgtcatgaaaatcgcggtggccggggacttgttccaaccggagcgaggggcgcggggaggccggcgcagcgcagagcgggctcgaagaaaataattctctattatttttattaccaagcgcttctttctgactctaaaatatggaaaataaaatatttacagaaagctttgtaa

SEQ ID NO: 574544 - DNA, 278 bp, Homo sapiens
catttcgagctcggcacccatccttccctctctacgatccttcccatccttccctttccacggatttataagcctcactcccacttttttttttatattttgaaaaggagtgtggcactgtcgtccggcctggagtgtagtaccatgatcttggctcactgcaacctttgcctcctgggttaaagtgattttcctgcctaagccccccaagtagctgggattacaggcccccaccaccaaacccagttaatttttttgtatttttaataaaaatgggg

SEQ ID NO: 574545 - DNA, 1305 bp, Homo sapiens
agcggggacgcgcccagaccgagcgcttgaggtgccgcagccgccgccgccgccgccgccgcgatgtgaccttcagggccgccaggacgggatgaccggagcctccgccccgcggcgcccgcggctcgcctcggcctcccgggcgctctgaccgcgcgtccccggcccgccatggccccttcgctctcgcccgggcccgccgccctgcgccgcgcgccgcagctgctgctgctgctgctggccgcggagtgcgcgcttgccgcgctgttgccggcgcgcgaggccacgcagttcctgcggcccaggcagcgccgcgcctttcaggtcttcgaggaggccaagcagggccacctggagagggagtgcgtggaggagctgtgcagccgcgaggaggcgcgggaggtgttcgagaacgaccccgagacggattatttttacccaagatacttagactgcatcaacaagtatgggtctccgtacaccaaaaactcaggcttcgccacctgcgtgcaaaacctgcctgaccagtgcacgcccaacccctgcgataggaaggggacccaagcctgccaggacctcatgggcaacttcttctgcctgtgtaaagctggctgggggggccggctctgcgacaaagatgtcaacgaatgcagccaggagaacgggggctgcctccagatctgccacaacaagccgggtagcttccactgttcctgccacagcggcttcgagctctcctctgatggcaggacctgccaagacatagacgagtgcgcagactcggaggcctgcggggaggcgcgctgcaagaacctgcccggctcctactcctgcctctgtgacgagggctttgcgtacagctcccaggagaaggcttgccgagatgtggacgagtgtctgcagggccgctgtgagcaggtctgcgtgaactccccagggagctacacctgccactgtgacgggcgtgggggcctcaagctgtcccaggacatggacacctgtgaggacatcttgccgtgcgtgcccttcagcgtggccaagagtgtgaagtccttgtacctgggccggatgttcagtgggacccccgtgatccgactgcgcttcaagaggctgcagcccaccaggctggtagctgagtttgacttccggacctttgaccccgagggcatcctcctctttgccggaggccaccaggacagcacctggatcgtgctggccctgagagccggccggctggagctgcagctgcgctacaacggtgtcggccgttaccatgcagcgctacggtaccgagctcgattcgat

SEQ ID NO: 574546 - DNA, 180 bp, Homo sapiens
tgcgatcgaatcgagccggtacccctagttagaagttcaatagcacaagccacattaaaaagaccacatgaaaggctgattctaatggtgtgtaggtctgaggattaagcacacaaatttcacaaacttctgttgagtaaacaaactcagccttctgtaaatatgcatgcaagttgggaa

SEQ ID NO: 574547 - DNA, 399 bp, Homo sapiens
aagaatgtggctggactttatcacagctggggcctttcgtgtccttaagatactaacacttgtaaccatgctagatgatgtaagctaatgtgacaacatcacgaaccacgagtccagaagcctaatccttaatcctacctcactcatgatgaagtctcatgctctgtgctcacacgtggttagctgcacaagatgtaaaccaaagcttcactgaaccctcgaaccaaatcagtaactcacgtgcgtcaatcataatgaaactccccgaactcagtttatatgattatatatagaggcagggtctcactctgtcgaccagactggagtgcagtggcaggatcagggctccgtgcggacccgaccttccaggctccagcgatcctcccgcctcagcctcct

SEQ ID NO: 574548 - DNA, 968 bp, Homo sapiens
  misc_feature (869)..(869): n is a, c, g, or t
  misc_feature (918)..(918): n is a, c, g, or t
  misc_feature (938)..(938): n is a, c, g, or t
agcggggacgcgcccagaccgagcgcttgaggtgccgcagccgccgccgccgccgccgccgcgatgtgaccttcagggccgccaggacgggatgaccggagcctccgccccgcggcgcccgcggctcgcctcggcctcccgggcgctctgaccgcgcgtccccggcccgccatggccccttcgctctcgcccgggcccgccgccctgcgccgcgcgccgcagctgctgctgctgctgctggccgcggagtgcgcgcttgccgcgctgttgccggcgcgcgaggccacgcagttcctgcggcccaggcagcgccgcgcctttcaggtcttcgaggaggccaagcagggccacctggagagggagtgcgtggaggagctgtgcagccgcgaggaggcgcgggaggtgttcgagaacgaccccgagacggattatttttacccaagatacttagctttattccgtgttagtggaacctcaggtgaatgctgttatctgcaaaccccttctctgagttgatgccaggctcagctccttgtcaggacgtgtaattgattttgtcctccggttttctgacctcagcactaatcacttctgaagtcattgaggaccccaaaggggtccatgttcatgtgggctgtattgactgatatttaccgtattcttaattaaaaccgaaaacactgaatagtgtttctgtttaatttgaagaacgggaatgccagacgttatctcagccatcagagcagctggtgcatgtggggcggcctctggagacccccactgtacacttgggaagggaggacagcaagaaagtgaaacccagagaccccgggtcagcccgtttaactgacaccatcttagagctcttngagagcatttcacttagaaggagagaaatgtattccagggtcttctttntaatgttgcaaagtgcattntagtaaatgtcctcttaaagggtccttccc

SEQ ID NO: 574549 - DNA, 976 bp, Homo sapiens
  misc_feature (877)..(877): n is a, c, g, or t
  misc_feature (926)..(926): n is a, c, g, or t
  misc_feature (946)..(946): n is a, c, g, or t
agcggggacgcgcccagaccgagcgcttgaggtgccgcagccgccgccgccgccgccgccgcgatgtgaccttcagggccgccaggacgggatgaccggagcctccgccccgcggcgcccgcggctcgcctcggcctcccgggcgctctgaccgcgcgtccccggcccgccatggccccttcgctctcgcccgggcccgccgccctgcgccgcgcgccgcagctgctgctgctgctgctggccgcggagtgcgcgcttgccgcgctgttgccggcgcgcgaggccacgcagttcctgcggcccaggcagcgccgcgcctttcaggtcttcgaggaggccaagcagggccacctggagagggagtgcgtggaggagctgtgcagccgcgaggaggcgcgggaggtgttcgagaacgaccccgagacggattatttttacccaagatacttagctttattccgtgttagtggaacctcaggtgaatgctgttatctgcaaaccccttctctgagttgatgccaggctcagctccttgtcaggacgtgtaattgattttgtcctccggttttctgacctcagcactaatcacttctgaagtcattgaggaccccaaaggggtccatgttcatgtgggctgtattgactgatatcatcaccgtatctgttaagtccatgcgtacgcatctggatagtcgttctccgctctatagtggagctcgcgccatattagacgttatctcagccatcagagcagctggtgcatgtggggcggcctctggagacccccactgtacacttgggaagggaggacagcaagaaagtgaaacccagagaccccgggtcagcccgtttaactgacaccatcttagagctcttngagagcatttcacttagaaggagagaaatgtattccagggtcttctttntaatgttgcaaagtgcattntagtaaatgtcctcttaaagggtccttccc

SEQ ID NO: 574550 - DNA, 163 bp, Homo sapiens
acggcacccaatatctgtaccttccagtcaattttgctgtgaacctaaaactcctctaaaaatagtctttaaaaaaaaaaagtcaggcaagaagcacagtgatggacatgtgtgagcagtttgcctaacttttaagtgggcattaaaaaaatgggcatataag

SEQ ID NO: 574551 - DNA, 239 bp, Homo sapiens
  misc_feature (139)..(139): n is a, c, g, or t
  misc_feature (149)..(149): n is a, c, g, or t
  misc_feature (156)..(156): n is a, c, g, or t
  misc_feature (166)..(166): n is a, c, g, or t
  misc_feature (174)..(174): n is a, c, g, or t
gttgagactaggagattaacagtagggtgttaaatggacaggactgatcacaatcttatatggtgaaggaagaaccaattggacttagtgacaaattaaatgtgattagcaatgaattggaaactattttgagggaatnttccccaggntgccctntccaaaaaantagttttntgaggggtgggaatagatgttaattgaaaaaagggtttctgaaaagacattttggggaatcgtat

SEQ ID NO: 574552 - DNA, 349 bp, Homo sapiens
attcgcggccgcgtcgacctggaggtttagcctgattttgaagggtatttaagaacagagggctccagaccaggtgtggtggctcacatctgtaatcccagcactttgggaggcagaggtgggcggatcgcctgagatcaggagttcgagaccagcctggcccacatggtgaaaccctgtctctactaaaaatacaaaaattagccgggcgtagtgacacacgcctgtaatcccagctgctcgggaggcagaggcaggagaatggcgtgaacccgggaggcggaggttgcagtgagccgagatcacgccactgcactccagactgggtaacagagcaagactttgtctc

SEQ ID NO: 574553 - DNA, 424 bp, Homo sapiens
  misc_feature (147)..(147): n is a, c, g, or t
tgtttttaaccccccaaaacagatcatgccaaatgagttgcctgtcaaaggctggagggcaggaggagggcctgggtttgggttttttcctcccagcctttggagggggccttgggccccttagccccagggccagggcctcccagntgaggccccagggcaagccctttttttttatgtattaaaaaccccaggatggggcactgccaaaaggatcaggaatttaggggatgatttcggtcccgtgtcccgggggctgaggggaaaggaagggggcatgattgtagacaatgagggggtttttttgatgtaaagaaaagcaattttatggtttggggcaaaaactcctattttccagtaaattaactttatttttaaagcaaattttgttttgcccccaaaagcaataaagcctttaatttta

SEQ ID NO: 574554 - DNA, 221 bp, Homo sapiens
gccatgactggcactctctggccctacctgagtgccgtgcgggccacattgcagtgctgccctctgcctggagaacttctcctcccagtgttgtggaacgacacaacaagccggaagtggaagtcaggagtagcaaagagctcctgttacaaccttgtgaccatcagacaggaatgagaaggcataaggttctgcattgagggctccatcaactctgtccg

SEQ ID NO: 574555 - DNA, 700 bp, Homo sapiens
gagaacatgtgtgtccccggtcggtcgaagagctctgcgtgactatggtcatacgtcgtggtctagggagacctcgggttgcttaggtggagggattcaaaccagtgataagaaggtgtagatgagctatggttagacgatccatggatcaggatgagacgtactgagactcgatgagagtcctcactctaataggtggctactcttgagttgtgatgatggatctttgcgcacgtgaatgtggccacgatgtggatgcggatttgatagtctaatgaggctcgcgagacatccagggatgaatggaatacgcactcagctttctgacagaaagagctgtccacaacacggtgtgggacctcatcaaatcaaaattattgcgcttgacagtggtatatgcggaaagttgactgtaggaatgaacaagaacatagatcgattagacatgggttgagtcttaataatgattggaacataagagattaaatttacgttttgcgtggagaaccgtcaaatggctggagggtgtaccattagacagttttgaaaaggtggagcggtgagaaagagagatcacatgtactgggaaatttagtgaatgggtgcaatactgagatatcgtgcaagtgcaggagtcagggatatcaaaggaggactgatgatggaaaagtttgcatgagagtaaaatcataccattggg

SEQ ID NO: 574556 - DNA, 138 bp, Homo sapiens
agccagactctagtaggatccccctcctcacagtcactaggctaccaccctttctccatcaacaacctaatgtcagaacagacaccagacacctatcaaaactaggacgtagggagtataggaaggctacagagggct

SEQ ID NO: 574557 - DNA, 98 bp, Homo sapiens
  misc_feature (68)..(68): n is a, c, g, or t
  misc_feature (79)..(79): n is a, c, g, or t
aagacaggtaggccatgaagcatacggcgcaatcaagcaagagcccctaaattcgaggatctatgtgnatgcgatgtgnccccgtggcggttgggttt

SEQ ID NO: 574558 - DNA, 1340 bp, Homo sapiens
  misc_feature (180)..(180): n is a, c, g, or t
aaaaaaaaaaaaaaaaaaaaaaaaaaaaaaaaaaagggagaacaaaacaaaaaaaaacccaaaaggagagacacaaaaaaaaaaaaaaaacgcgcgggggggccgggcaaataaggtgggaccgctaatgggggagtcgtgtgtttttagaacgacaaggatatgtggggacggacgagngtgaaccacgggtaggaggaatgggggaaaatatggaaaagatgggcgctatgttgggcagagggacaccttaactattggagggaggagatatatgatgaggggaaagactatctaccttgaagagagagaaaattaacaaggattaagaggggggaagagagatataaaagtgttgggaaaggagtgatactaaggtgggtatcaacaaaaagaaggcgaaatatggacatgagagagacgtgagcagaaagattagggagtaaaacgaggaggcaatgagagaacaaatagaggcaaacacatgtatatgaaaaacagagaggacgtgagtgagagtgatataaatcccaacagagagaaatgaaaaaacaacagcaaaaaacatataagataaacgcaccgcgacacagttacagaaaaaacaacaagaaagaaggacgaaaagcacaaaaaagaaaagagacgagaaaaaggagaagagaagaacaaagccaagggaaagcaaagagagaaaaggaaaacaggcggaaaacagaaaaaaaaaagagaagaaagacaaaaggaaagagaagaaaaccaagaaccagacggagaagagaagaagaaagcacgcgcgggacagaacgaaggaagaagaaaagacaaagaagcagagaaagaaagaagacaaaacaaaacaacggcaaaaaagagaaaaaccagaaaacaaaaaaaaaaagaaaaaaacagaaaacaacgaagaaaaaaaaaaaacgacagaagaaaaaaaaaaaagaagaggaacaaaaaaaagaaaaaggagagcggacaaaagaagagaaagagagaaaagaaggaaaaggaaacgaagcacgaacgacaacaaagagaaagaagaaggcagaacaaagagagagagacaacacacaggagagaaagacaagagcgagcagagagaagaagaagcagaaagagaagaagagagaaaaagaggaaaacagagacaacagaaagaggaaagaaaaagaggaagaaagaaaagaaaaaacaaaagcagaagaaaaaaagaaagaaaggaaagacagagaagaagaagcacgagagaagaagaagcgacagaaaacaaagaagacaagaaagacagaaaggaaagaaagagaagaaagagaaggagaagg

SEQ ID NO: 574559 - DNA, 171 bp, Homo sapiens
caggatcctcatgcgctgtcttacacacacgttctgcgtggaaagcggccctggcagcgagctcgaaggatatgttgtagcagaggtagagcatattcaccgatggcgtagttgttgtgggcgtacgcccaacaagtgtggtggtttttgccgggtaccgggcaacaaagc

SEQ ID NO: 574560 - DNA, 135 bp, Homo sapiens
tcttggtggctggctgtccgtgcgggctggccgctgctgtccagtttctccgcctccttctgcctgctgcaactccacctcgttggcctgctgagagcagtggtctggtggtcttcaaaggatggattgtaggaa

SEQ ID NO: 574561 - DNA, 222 bp, Homo sapiens
tgatctagagatccgtatgtgtgtacgttgatacctctggtcatattattaaaaagatattcacaacaaaagatatgtatcaaataaggggtgggatcttaccatggtaagatattggtgtattggaccacaggtgtgcctgatggcttctttcatggcagttagaagtagtcaagaagtggacgggtcacggtaacaccacaggaaggggtaccggggttg

SEQ ID NO: 574562 - DNA, 742 bp, Homo sapiens
  misc_feature (600)..(600): n is a, c, g, or t
  misc_feature (605)..(605): n is a, c, g, or t
catggctcacatctgtaatcccagcacttttggaggctgaggcgggtggattgcttgaggccaggagttcgagaccagcctggccaacgtggtgaaacgctgtctctactaaaatacaaaaaaatagggctgggcgcggttgctcacgcctgtaatcccagcacttttcagaggccaaggcgggcaaatcacctgaggtcaagagtttgagaccagcctggccaacatggtgaaaccccatctctactaaacatgcaaaaattacctgggcatggtggcaggtgcttataatcccagctactctgggggccaaggcaggagaattgcttgagcctgggagatggaggttgcagtgagctgagatcatgccactgcactccagcctgggcaacagagcaagactctgcctcaaaaaaaaattaaaataaatttaaatacaaaaaaaaatagccaggtgtggggtgcatgcctggaatcccagctacttgagaggctgaggcacgagaattgcttgaacccaggaggtggaggttgcagtgagccaagatcacaggagccactgcactccagcctgggtgacagagtgagactctgtctcanaaaanaattaaataaaatattataacctttcaaaaatgctgtgtgcattttcatgttcttttttttaacattactgccactctccctaatgaaatgtaccttcagaaaagcagtatttggttaaaaaaatacataaccttca

SEQ ID NO: 574563 - DNA, 978 bp, Homo sapiens
  misc_feature (704)..(704): n is a, c, g, or t
  misc_feature (714)..(714): n is a, c, g, or t
  misc_feature (726)..(727): n is a, c, g, or t
  misc_feature (731)..(731): n is a, c, g, or t
agcggagtgtggcgagcgcgagggcgggctgtgacgcggccggcgctcctcgtgcggcggggcagaggagcgagtgcagcggccagcagcacatccccgctccacagtcgccgcagtcgccgcagccgccgccgccgcccgcgcgcccaaccgccgcggccccctgccccgccggcctgccagtgagagagcggcgagggggcgcccggccggactctgagcctagtcctctcgcgctgcggccgcccgcgcctcctcggccgcctgtcgggcatgaaaaccaaattctgcaccgggggcgaggcggagccctcgccgctcgggctgctgctgagctgcggtagcggcagcgcggccccggcgcccggcgtggggcagcagcgcgacgccgccagcgacctcgagtccaagcagctgggcggccaacagccgccgctcgcgctgccccctccgccgccgctgccgctgccgctgccgctgccccagcccccgccgccgcagccgcccgcagacgagcagccggagccccggacgcggcgcagggcctatctgtggtgcaaggagttcctgcccggcgcctggcggggcctccgcgaggacgagttccacatcagtgtcatcagaggcggccttagcaacatgctgttccagtgctccctactgacaccacagccacccttggtgatgagcctcggaaagggctnctgcggctgnatggagcgaatnngcanacgaaggtcctgcaatacaagcagggaacagaagaaggccacagaggacccgcgccaccccaggcgcctgaaggaccatcgctacatggaagcgcgtaaacgtaggccctacgacgacgaacaagcgccacatgcaccccacaaccacaacgcgaaccaccacccagggcacacggaccaccgatatacccgacgccgaccaaaacaaccgccgaaatcccatgacaaaacacgaacacccacaaaa

SEQ ID NO: 574564 - DNA, 840 bp, Homo sapiens
  misc_feature (566)..(566): n is a, c, g, or t
  misc_feature (576)..(576): n is a, c, g, or t
  misc_feature (588)..(589): n is a, c, g, or t
  misc_feature (593)..(593): n is a, c, g, or t
agcggagtgtggcgagcgcgagggcgggctgtgacgcggccggcgctcctcgtgcggcggggcagaggagcgagtgcagcggccagcagcacatccccgctccacagtcgccgcagtcgccgcagccgccgccgccgcccgcgcgcccaaccgccgcggccccctgccccgccggcctgccagtgagagagcggcgagggggcgcccggccggactctgagcctagtcctctcgcgctgcggccgcccgcgcctcctcggccgcctgtcgggcatgaaaaccaaattctgcaccgggggcgaggcggagccctcgccgctcgggctgctgccgctgccgctgccccagcccccgccgccgcagccgcccgcagacgagcagccggagccccggacgcggcgcagggcctatctgtggtgcaaggagttcctgcccggcgcctggcggggcctccgcgaggacgagttccacatcagtgtcatcagaggcggccttagcaacatgctgttccagtgctccctactgacaccacagccacccttggtgatgagcctcggaaagggctnctgcggctgnatggagcgaatnngcanacgaaggtcctgcaatacaagcagggaacagaagaaggccacagaggacccgcgccaccccaggcgcctgaaggaccatcgctacatggaagcgcgtaaacgtaggccctacgacgacgaacaagcgccacatgcaccccacaaccacaacgcgaaccaccacccagggcacacggaccaccgatatacccgacgccgaccaaaacaaccgccgaaatcccatgacaaaacacgaacacccacaaaa

SEQ ID NO: 574565 - DNA, 308 bp, Homo sapiens
gggattgataataaacctttctgagatgcagagggtccaggtcaaaaaaaaaaaaaaaaaaaaaaaaaaaaaaaaaaaaaaaaaaaaaaaaaaaaaaaaaaaaaaaaaaaaaaaaaaaaaaaaccttggtgggccgccttgggccaagtcaattttaaactggagaaagttaatgcaggcggccgaaattggggctaattgggcaaattcgccctatagggaggggaataaaaattaacgggccggggtttaaaaacgtggggacgggaaaaacccgggggtaaccaaattaaatggcttggaagaaa

SEQ ID NO: 574566 - DNA, 134 bp, Homo sapiens
  misc_feature (45)..(45): n is a, c, g, or t
  misc_feature (76)..(76): n is a, c, g, or t
  misc_feature (87)..(87): n is a, c, g, or t
  misc_feature (130)..(130): n is a, c, g, or t
ggggcttggttgggtaagagtttccagatctaaatggagacaggnctgggatataggagcttgtacggataaacancacaaacaccnttgggtaagtgatacaccaagagagatcaaaatagggtaggancacg

SEQ ID NO: 574567 - DNA, 575 bp, Homo sapiens
ttttttttattttgttttatttggattggttttcaaaataggcctacggaaggggttctgacactgggtggagaaccattcattcacatattgggaaatgttacacgggggacataaaggacacaggttcacacaaaggggatatacaaccgagagccaagaacagacaccttgccctcaaggggatcccctccgtttcgggcggcccgcacacgcctccagaaaccagggtgaggccccatatggggggtctcatgatcattgcggtttaaagtggctaattgaaatacctgtggaaaatctgctttcagacccacccgcccccaaaattgtaaacccaaacattaccgagcagaacccgggcgcaaaaagagtgagttaaactcactgtactggatcgagttgacaacccggtttctggggcggcaacatagtgtgccaaacccactaaggaaaggcccaaccccacaggggaggtgattcgcgtaatgggcccctgacacggtcccctcgcacagaaccgttttgctagcccgatcagttggagcacacggggaaggccattaaaaggagaa

SEQ ID NO: 574568 - DNA, 372 bp, Homo sapiens
  misc_feature (7)..(7): n is a, c, g, or t
  misc_feature (30)..(30): n is a, c, g, or t
  misc_feature (87)..(87): n is a, c, g, or t
  misc_feature (99)..(99): n is a, c, g, or t
  misc_feature (145)..(145): n is a, c, g, or t
  misc_feature (324)..(324): n is a, c, g, or t
  misc_feature (350)..(350): n is a, c, g, or t
  misc_feature (365)..(366): n is a, c, g, or t
tttgtanttgtctgaagatcattttgaganatttgctcatattgggactttaaaaaaaaaaacacctgtcagggccgggcacggccntacgcctgtaantccagcactatgggaggccgaggcaggcggatcccctgaggttganagttccagaccagcctgaccaacgtgtagaaaccccgtctctactaaaaatacaaaattagccgggcatggtggcgggtgcctgtaatcccagctactggggaaggctgaggcaggagaattgcttgaacccgggaggcggaggttgcagtgagctgagatcgcgccactgccctccancctgggcaacaagagtgaaactttgnctcaaaaataaaaanntttttt

SEQ ID NO: 574569 - DNA, 209 bp, Homo sapiens
ttgatgtcctgcatctgtatttgagccacaggagaataaataaaagaacattttccctgctgctgcttttttttttttaaagggaaaaagttaccaggggcactgttctaggcacttacaaaagtccaatttaatatagtagagtataaaacttgaaaaatgcagatgttgaaggaataataggtatctgggtgcttaaatactttatg

SEQ ID NO: 574570 - DNA, 464 bp, Homo sapiens
cccatctcaccagagtaaaagcccaaatccttgtggtcatccccaaggcccatcatgacctgaccctgaaatgtccaagtctcctactctccacccagtcctccaacatgcctcctttccctgctttgtttttatccacatcacttactacaactacacaagtatgttacatgtctttttgttcctcctaaccagaatataagctccacagaagaatggatttaaaaaaatctgttgccatatccctagcatcaggaagagtgcctgttcaacgaatatttgtggaatggaccaatgggtccccagctcttcatgtgagtagttggagagggagaagcataaggggatgggaagtagtatattactgttctaagactccttagaggcgaagcaccatccttacacacgtagtgccttttcacctgtcgccactgggtggcatgacgagaccatcaaactgctaa

SEQ ID NO: 574571 - DNA, 4987 bp, Homo sapiens
  misc_feature (56)..(56): n is a, c, g, or t
  misc_feature (459)..(459): n is a, c, g, or t
agcttgcagagcagctcaagcaagctgaggagctcaggcaatataaagtcctggtncactccaggaacgagagctgacgcagtaaaggagaagttacaggaagggagagatgcctcccgctcattgaatgagcatctccaggccctcctcactctggatgagccggacaagtcccaggggcaggacctccaagaacagctggctgaggggtgtagactggcacagcaccttgtccaaaagctcagcccagggaggtgcagaaggctgaagagagcaaagtccctgaggactcactggaggaatgtgccatcacttgttcaaatagccacggcccttgtgactccaaccagcctcacaagaacatcaaaatcacatttgaggaagacgaagtcaactcaactctggttgtagacagagaatcctctcatgatgaatgtcaggatgctctaaacattctcncagtccccggccccacctcttctgccacaaacgtcagcatggtggtatcagccggccctttgtccagcgagaaggcagagatgaacattctagaaatcaatgagaaattgcgcccccagctggcagagaagaaacagcagttcagaaacctcaaagagaaatgttttctaactcaactggccggcttcctggccaaccagcagaacaaatacaaatatgaagagtgcaaagacctcataaaatctatgctgaggaatgagcgacagttcaaggaggagaagcttgcagagcagctcaagcaagctgaggagctcaggcaatataaagtcctggttcacgctcaggaacgagagctgacccagttaagggagaagttacgggaagggagagatgcctcccgctcattgaatgagcatctccaggccctcctcactccggatgagccggacaagtcccaggggcaggacctccaagaacagctggctgaggggtgtagactggcacagcaccttgtccaaaagctcagcccagaaaatgacaacgatgacgatgaagatgttcaagttgaggtggctgagaaagtgcagaaatcgtctgcccccagggagatgcagaaggctgaagaaaaggaagtccctgaggactcactggaggaatgtgccatcacttgttcaaatagccatggcccttatgactccaaccagccacataggaaaaccaaaatcacatttgaggaagacaaagtcgactcaactctcattggctcatcctctcatgttgaatgggaggatgctgtacacattattccagaaaatgaaagtgatgatgaggaagaggaagaaaaagggccagtgtctcccaggaatctgcaggagtctgaagaggaggaagtcccccaggagtcctgggatgaaggttattcgactctctcaattcctcctgaaatgttggcctcgtaccagtcttacagcagcacatttcactcattagaggaacagcaagtctgcatggctgttgacataggcagacatcggtgggatcaagtgaaaaaggaggaccaagaggcaacaggtcccaggctcagcagggagctgctggatgagaaagggcctgaagtcttgcaggactcactggatagatgttattcaactccttcaggttgtcttgaactgactgactcatgccagccctacagaagtgccttttacgtattggagcaacagcgtgttggcttggctgttgacatggatgaaattgaaaagtaccaagaagtggaagaagaccaagacccatcatgccccaggctcagcagggagctgctggatgagaaagagcctgaagtcttgcaggactcactggatagatgttattcgactccttcaggttatcttgaactgcctgacttaggccagccctacagcagtgctgtttactcattggaggaacagtaccttggcttggctcttgacgtggacagaattaaaaaggaccaagaagaggaagaagaccaaggcccaccatgccccaggctcagcagggagctgctggaggtagtagagcctgaagtcttgcaggactcactggatagatgttattcaactccttccagttgtcttgaacagcctgactcctgccagccctatggaagttccttttatgcattggaggaaaaacatgttggcttttctcttgacgtgggagaaattgaaaagaaggggaaggggaagaaaagaaggggaagaagatcaaagaaggaaagaagaaggggaagaaaagaaggggaagaagatcaaaacccaccatgccccaggctcagcagggagctgctggatgagaaagggcctgaagtcttgcaggactcactggatagatgttattcaactccttcaggttgtcttgaactgactgactcatgccagccctacagaagtgccttttacatattggagcaacagcgtgttggcttggctgttgacatggatgaaattgaaaagtaccaagaagtggaagaagaccaagacccatcatgccccaggctcagcggggagctgttggatgagaaagagcctgaagtcttgcaggagtcactggatagatgctattcaactccttcaggttgtcttgaactgactgactcatgccagccctacagaagtgccttttacatattggagcaacagcgtgttggcttggctgttgacatggatgaaattgaaaagtaccaagaagtggaagaagaccaagacccatcatgccccaggctcagcagggagctgctggatgagaaagagcctgaagtcttgcaggactcactggatagatgttattcgactccttcaggttatcttgaactgcctgacttaggccagccctacagcagtgctgtttactcattggaggaacagtaccttggcttggctcttgacgtggacagaattaaaaaggaccaagaagaggaagaagaccaaggccaccatgccccaggtcagcagggagctgctggaggtagtagagcctgaagtcttgcaggactcactggatagatgttattcaactccttccagttgtcttgaacagcctgactcctgccagccctatggaagttccttttatgcattggaggaaaaacatgttggcttttctcttgacgtgggagaaattgaaaagaaggggaaggggaagaaaagaaggggaagaagatcaaagaaggaaagaagaaggggaagaaaagaaggggaagaagatcaaaacccaccatgccccaggctcaacggcgtgctgatggaagtggaagagcctgaagtcttacaggactcactggatagatgttattcgactccgtcaatgtactttgaactacctgactcattccagcactacagaagtgtgttttactcatttgaggaacagcacatcagcttcgccctttacgtggacaataggttttttactttgacggtgacaagtctccacctggtgttccagatgggagtcatattcccacaataagcagcccttactaagccgagagatgtcattcctgcaggcaggacctataggcacgtgaagatttgaatgaaactacagttccatttggaagcccagacataggatgggtcagtgggcatggctctattcctattctcaaaccatgccagtggcaacctgtgctcagtctgaagacaatggacccacgttaggtgtgacacgttcacataactgtgcagcacatgccgggagtgatcagtcagacattttaatttgaaccacgtatctctgggtagctacaaaattcctcagggatttcattttgcaggcatgtctctgagcttctatacctgctcaaggtcattgtcatctttgtgtttagctcatccaaaggtgttaccctggtttcaatgaacctaacctcattctttgtgtcttcagtgttggcttgttttagctgatccatctgtaacacaggagggatccttggctgaggattgtatttcagaaccaccaactgctcttgacaattgttaacccgctaggctcctttggttagagaagccacagtccttcagcctccaattggtgtcagtacttaggaagaccacagctagatggacaaacagcattgggaggccttagccctgctcctctcaattccatcctgtagagaacaggagtcaggagccgctggcaggagacagcatgtcacccaggactctgccggtgcagaatatgaacaatgccatgttcttgcagaaaacgcttagcctgagtttcataggaggtaatcaccagacaactgcagaatgtagaacactgagcaggacaactgacctgtctccttcacatagtccatatcaccacaaatcacacaacaaaaaggagaagagatattttgggttcaaaaaaagtaaaaagataatgtagctgcatttctttagttattttgaaccccaaatatttcctcatctttttgttgttgtcatggatggtggtgacatggacttgtttatagaggacaggtcagctgtctggctcagtgatctacattctgaagttgtctgaaaatgtcttcatgattaaattcagcctaaacgttttgccgggaacactgcagagacaatgctgtgagtttccaacctcagcccatctgcgggcagagaaggtctagtttgtccatcaccatttatgatatcaggactggttacttggttaaggaggggtctaggagatctgtcccttttagagacaccttacttataatgaagtacttgggaaagcggttttcaagagtataaatatcctgtattctaatgatcatcctctaaacattttatcatttattaatcctccctgcctgtgtctattattatattcatatctctacactgcaaattttgggtctcaatttttactgtgcctttgtttttactagtgtctgctgttgcaaaaagaagaaaacattctctgcctgagttttaatttttgtccaaagttaattttaatctatacaattaaaaccttttgcctatca

SEQ ID NO: 574572 - DNA, 516 bp, Homo sapiens
actactactaaattctgcggccggtcgacaagattggtaccaattcttctttgaaggtctgatagaatttagctctgaatctatttggtcctggtctttttttggtggtgattttaaaaattaccatttctattttgctgcttgttattggtttgttcacagtttatatttcttcctggtttaaactagaagaattatatctttccaggaatgtatccatctcctctaagttttctcgtttgtgcgtatacaggtgtccatggtagacttgaaaaatcctttggatttcctgggtatcagttggaataacttccattttcatttctaatttagcttaattgggaacttctctcttcttttcttgggttaatcacactaatgggtcaagcaaattttctttatcctttccagaataccagtattggttggtacaggacaataagccaaggccggtaatcccagaacactgggaagctgccgaaggacaattcactgaaggccggagagttcggtaca

SEQ ID NO: 574573 - DNA, 635 bp, Homo sapiens
  misc_feature (562)..(562): n is a, c, g, or t
gattttttggttcatctgcatttggccttctctgatttgactctttcactgcagtaacctggctgcggctgctcaggttcccctcctcatgccccttggtaccctttcctgtctgctctcccatgccatgtacacacccacaaccctgccttacacttggaatatttttaccacctatcctgatctttgaaggtagggttaggactacttaacctctattcccactcccctgcaaactggggcttgtgggacgtgagcagccatctacctgcgtgacaacgttaacatttgcctctgaatcactttgccatgtttccttcacatccagatccctagcggtgctagatccactctaggtctttcacgctccccttgcctgtggaacattgactggtcctagctgtggttcccattggtcccccttgacccttctgtggtaaccttgtgcctggctcctgtatgatcacattaccaaaaaggaggaggagggagaggactcttttatcttggccattttgtaatcgtataaaaatagtacacaactgcttactgggtgcagttntttcacaattttaacattagtgacttgcttccctagttgcaggttaaagggctagtcatcgcttcttttagac

SEQ ID NO: 574574 - DNA, 4767 bp, Homo sapiens
  misc_feature (56)..(56): n is a, c, g, or t
  misc_feature (459)..(459): n is a, c, g, or t
agcttgcagagcagctcaagcaagctgaggagctcaggcaatataaagtcctggtncactccaggaacgagagctgacgcagtaaaggagaagttacaggaagggagagatgcctcccgctcattgaatgagcatctccaggccctcctcactctggatgagccggacaagtcccaggggcaggacctccaagaacagctggctgaggggtgtagactggcacagcaccttgtccaaaagctcagcccagggaggtgcagaaggctgaagagagcaaagtccctgaggactcactggaggaatgtgccatcacttgttcaaatagccacggcccttgtgactccaaccagcctcacaagaacatcaaaatcacatttgaggaagacgaagtcaactcaactctggttgtagacagagaatcctctcatgatgaatgtcaggatgctctaaacattctcncagtccccggccccacctcttctgccacaaacgtcagcatggtggtatcagccggccctttgtccagcgagaaggcagagatgaacattctagaaatcaatgagaaattgcgcccccagctggcagagaagaaacagcagttcagaaacctcaaagagaaatgttttctaactcaactggccggcttcctggccaaccagcagaacaaatacaaatatgaagagtgcaaagacctcataaaatctatgctgaggaatgagcgacagttcaaggaggagaagcttgcagagcagctcaagcaagctgaggagctcaggcaatataaagtcctggttcacgctcaggaacgagagctgacccagttaagggagaagttacgggaagggagagatgcctcccgctcattgaatgagcatctccaggccctcctcactccggatgagccggacaagtcccaggggcaggacctccaagaacagctggctgaggggtgtagactggcacagcaccttgtccaaaagctcagcccagaaaatgacaacgatgacgatgaagatgttcaagttgaggtggctgagaaagtgcagaaatcgtctgcccccagggagatgcagaaggctgaagaaaaggaagtccctgaggactcactggaggaatgtgccatcacttgttcaaatagccatggcccttatgactccaaccagccacataggaaaaccaaaatcacatttgaggaagacaaagtcgactcaactctcattggctcatcctctcatgttgaatgggaggatgctgtacacattattccagaaaatgaaagtgatgatgaggaagaggaagaaaaagggccagtgtctcccaggaatctgcaggagtctgaagaggaggaagtcccccaggagtcctgggatgaaggttattcgactctctcaattcctcctgaaatgttggcctcgtaccagtcttacagcagcacatttcactcattagaggaacagcaagtctgcatggctgttgacataggcagacatcggtgggatcaagtgaaaaaggaggaccaagaggcaacaggtcccaggctcagcagggagctgctggatgagaaagggcctgaagtcttgcaggactcactggatagatgttattcaactccttcaggttgtcttgaactgactgactcatgccagccctacagaagtgccttttacgtattggagcaacagcgtgttggcttggctgttgacatggatgaaattgaaaagtaccaagaagtggaagaagaccaagacccatcatgccccaggctcagcagggagctgctggatgagaaagagcctgaagtcttgcaggactcactggatagatgttattcgactccttcaggttatcttgaactgcctgacttaggccagccctacagcagtgctgtttactcattggaggaacagtaccttggcttggctcttgacgtggacagaattaaaaaggaccaagaagaggaagaagaccaaggcccaccatgccccaggctcagcagggagctgctggaggtagtagagcctgaagtcttgcaggactcactggatagatgttattcaactccttccagttgtcttgaacagcctgactcctgccagccctatggaagttccttttatgcattggaggaaaaacatgttggcttttctcttgacgtgggagaaattgaaaagaaggggaaggggaagaaaagaaggggaagaagatcaaagaaggaaagaagaaggggaagaaaagaaggggaagaagatcaaaacccaccatgccccaggctcagcagggagctgctggatgagaaagggcctgaagtcttgcaggactcactggatagatgttattcaactccttcaggttgtcttgaactgactgactcatgccagccctacagaagtgccttttacatattggagcaacagcgtgttggcttggctgttgacatggatgaaattgaaaagtaccaagaagtggaagaagaccaagacccatcatgccccaggccaggctcagcagggagctgctggatgagaaagagcctgaagtcttgcaggactcactggatagatgttattcgactccttcaggttatcttgaactgcctgacttaggccagccctacagcagtgctgtttactcattggaggaacagtaccttggcttggctcttgacgtggacagaattaaaaaggaccaagaagaggaagaagaccaaggccaccatgccccaggtcagcagggagctgctggaggtagtagagcctgaagtcttgcaggactcactggatagatgttattcaactccttccagttgtcttgaacagcctgactcctgccagccctatggaagttccttttatgcattggaggaaaaacatgttggcttttctcttgacgtgggagaaattgaaaagaaggggaaggggaagaaaagaaggggaagaagatcaaagaaggaaagaagaaggggaagaaaagaaggggaagaagatcaaaacccaccatgccccaggctcaacggcgtgctgatggaagtggaagagcctgaagtcttacaggactcactggatagatgttattcgactccgtcaatgtactttgaactacctgactcattccagcactacagaagtgtgttttactcatttgaggaacagcacatcagcttcgccctttacgtggacaataggttttttactttgacggtgacaagtctccacctggtgttccagatgggagtcatattcccacaataagcagcccttactaagccgagagatgtcattcctgcaggcaggacctataggcacgtgaagatttgaatgaaactacagttccatttggaagcccagacataggatgggtcagtgggcatggctctattcctattctcaaaccatgccagtggcaacctgtgctcagtctgaagacaatggacccacgttaggtgtgacacgttcacataactgtgcagcacatgccgggagtgatcagtcagacattttaatttgaaccacgtatctctgggtagctacaaaattcctcagggatttcattttgcaggcatgtctctgagcttctatacctgctcaaggtcattgtcatctttgtgtttagctcatccaaaggtgttaccctggtttcaatgaacctaacctcattctttgtgtcttcagtgttggcttgttttagctgatccatctgtaacacaggagggatccttggctgaggattgtatttcagaaccaccaactgctcttgacaattgttaacccgctaggctcctttggttagagaagccacagtccttcagcctccaattggtgtcagtacttaggaagaccacagctagatggacaaacagcattgggaggccttagccctgctcctctcaattccatcctgtagagaacaggagtcaggagccgctggcaggagacagcatgtcacccaggactctgccggtgcagaatatgaacaatgccatgttcttgcagaaaacgcttagcctgagtttcataggaggtaatcaccagacaactgcagaatgtagaacactgagcaggacaactgacctgtctccttcacatagtccatatcaccacaaatcacacaacaaaaaggagaagagatattttgggttcaaaaaaagtaaaaagataatgtagctgcatttctttagttattttgaaccccaaatatttcctcatctttttgttgttgtcatggatggtggtgacatggacttgtttatagaggacaggtcagctgtctggctcagtgatctacattctgaagttgtctgaaaatgtcttcatgattaaattcagcctaaacgttttgccgggaacactgcagagacaatgctgtgagtttccaacctcagcccatctgcgggcagagaaggtctagtttgtccatcaccatttatgatatcaggactggttacttggttaaggaggggtctaggagatctgtcccttttagagacaccttacttataatgaagtacttgggaaagcggttttcaagagtataaatatcctgtattctaatgatcatcctctaaacattttatcatttattaatcctccctgcctgtgtctattattatattcatatctctacactgcaaattttgggtctcaatttttactgtgcctttgtttttactagtgtctgctgttgcaaaaagaagaaaacattctctgcctgagttttaatttttgtccaaagttaattttaatctatacaattaaaaccttttgcctatca

SEQ ID NO: 574575 - DNA, 230 bp, Homo sapiens
  misc_feature (168)..(168): n is a, c, g, or t
ctgagatcgcgccactgcactcctgcctgggtgacagagcgagactccatctcctcggagatggtcatgatctgccccaggcacagctgcagggctacctgatacttcctgtcagacagcagcagctctaccggcctctcgtactgactgtgctcgatgaagacgtcngagcagcggtccaggagcgcaggatctgacgtctcatccaggtcctctgctatagggataag

SEQ ID NO: 574576 - DNA, 4480 bp, Homo sapiens
  misc_feature (56)..(56): n is a, c, g, or t
  misc_feature (459)..(459): n is a, c, g, or t
agcttgcagagcagctcaagcaagctgaggagctcaggcaatataaagtcctggtncactccaggaacgagagctgacgcagtaaaggagaagttacaggaagggagagatgcctcccgctcattgaatgagcatctccaggccctcctcactctggatgagccggacaagtcccaggggcaggacctccaagaacagctggctgaggggtgtagactggcacagcaccttgtccaaaagctcagcccagggaggtgcagaaggctgaagagagcaaagtccctgaggactcactggaggaatgtgccatcacttgttcaaatagccacggcccttgtgactccaaccagcctcacaagaacatcaaaatcacatttgaggaagacgaagtcaactcaactctggttgtagacagagaatcctctcatgatgaatgtcaggatgctctaaacattctcncagtccccggccccacctcttctgccacaaacgtcagcatggtggtatcagccggccctttgtccagcgagaaggcagagatgaacattctagaaatcaatgagaaattgcgcccccagctggcagagaagaaacagcagttcagaaacctcaaagagaaatgttttctaactcaactggccggcttcctggccaaccagcagaacaaatacaaatatgaagagtgcaaagacctcataaaatctatgctgaggaatgagcgacagttcaaggaggagaagcttgcagagcagctcaagcaagctgaggagctcaggcaatataaagtcctggttcacgctcaggaacgagagctgacccagttaagggagaagttacgggaagggagagatgcctcccgctcattgaatgagcatctccaggccctcctcactccggatgagccggacaagtcccaggggcaggacctccaagaacagctggctgaggggtgtagactggcacagcaccttgtccaaaagctcagcccagaaaatgacaacgatgacgatgaagatgttcaagttgaggtggctgagaaagtgcagaaatcgtctgcccccagggagatgcagaaggctgaagaaaaggaagtccctgaggactcactggaggaatgtgccatcacttgttcaaatagccatggcccttatgactccaaccagccacataggaaaaccaaaatcacatttgaggaagacaaagtcgactcaactctcattggctcatcctctcatgttgaatgggaggatgctgtacacattattccagaaaatgaaagtgatgatgaggaagaggaagaaaaagggccagtgtctcccaggaatctgcaggagtctgaagaggaggaagtcccccaggagtcctgggatgaaggttattcgactctctcaattcctcctgaaatgttggcctcgtaccagtcttacagcagcacatttcactcattagaggaacagcaagtctgcatggctgttgacataggcagacatcggtgggatcaagtgaaaaaggaggaccaagaggcaacaggtcccaggctcagcagggagctgctggatgagaaagggcctgaagtcttgcaggactcactggatagatgttattcaactccttcaggttgtcttgaactgactgactcatgccagccctacagaagtgccttttacgtattggagcaacagcgtgttggcttggctgttgacatggatgaaattgaaaagtaccaagaagtggaagaagaccaagacccatcatgccccaggctcagcagggagctgctggatgagaaagagcctgaagtcttgcaggactcactggatatgttattcaactccttcaggttgtcttgaactgactgactcatgccagccctacagaagtgccttttacatattggagcaacagcgtgttggcttggctgttgacatggatgaaattgaaaagtaccaagaagtggaagaagaccaagacccatcatgccccaggctcagcggggagctgttggatgagaaagagcctgaagtcttgcaggagtcactggatagatgctattcaactccttcaggttgtcttgaactgactgactcatgccagccctacagaagtgccttttacatattggagcaacagcgtgttggcttggctgttgacatggatgaaattgaaaagtaccaagaagtggaagaagaccaagacccatcatgccccaggctcagcagggagctgctggatgagaaagagcctgaagtcttgcaggactcactggatagatgttattcgactccttcaggttatcttgaactgcctgacttaggccagccctacagcagtgctgtttactcattggaggaacagtaccttggcttggctcttgacgtggacagaattaaaaaggaccaagaagaggaagaagaccaaggcccaccatgccccaggctcagcagggagctgctggaggtagtagagcctgaagtcttgcaggactcactggatagatgttattcaactccttccagttgtcttgaacagcctgactcctgccagccctatggaagttccttttatgcattggaggaaaaacatgttggcttttctcttgacgtgggagaaattgaaaagaaggggaaggggaagaaaagaaggggaagaagatcaaagaaggaaagaagaaggggaagaaaagaaggggaagaagatcaaaacccaccatgccccaggctcaacggcgtgctgatggaagtggaagagcctgaagtcttacaggactcactggatagatgttattcgactccgtcaatgtactttgaactacctgactcattccagcactacagaagtgtgttttactcatttgaggaacagcacatcagcttcgccctttacgtggacaataggttttttactttgacggtgacaagtctccacctggtgttccagatgggagtcatattcccacaataagcagcccttactaagccgagagatgtcattcctgcaggcaggacctataggcacgtgaagatttgaatgaaactacagttccatttggaagcccagacataggatgggtcagtgggcatggctctattcctattctcaaaccatgccagtggcaacctgtgctcagtctgaagacaatggacccacgttaggtgtgacacgttcacataactgtgcagcacatgccgggagtgatcagtcagacattttaatttgaaccacgtatctctgggtagctacaaaattcctcagggatttcattttgcaggcatgtctctgagcttctatacctgctcaaggtcattgtcatctttgtgtttagctcatccaaaggtgttaccctggtttcaatgaacctaacctcattctttgtgtcttcagtgttggcttgttttagctgatccatctgtaacacaggagggatccttggctgaggattgtatttcagaaccaccaactgctcttgacaattgttaacccgctaggctcctttggttagagaagccacagtccttcagcctccaattggtgtcagtacttaggaagaccacagctagatggacaaacagcattgggaggccttagccctgctcctctcaattccatcctgtagagaacaggagtcaggagccgctggcaggagacagcatgtcacccaggactctgccggtgcagaatatgaacaatgccatgttcttgcagaaaacgcttagcctgagtttcataggaggtaatcaccagacaactgcagaatgtagaacactgagcaggacaactgacctgtctccttcacatagtccatatcaccacaaatcacacaacaaaaaggagaagagatattttgggttcaaaaaaagtaaaaagataatgtagctgcatttctttagttattttgaaccccaaatatttcctcatctttttgttgttgtcatggatggtggtgacatggacttgtttatagaggacaggtcagctgtctggctcagtgatctacattctgaagttgtctgaaaatgtcttcatgattaaattcagcctaaacgttttgccgggaacactgcagagacaatgctgtgagtttccaacctcagcccatctgcgggcagagaaggtctagtttgtccatcaccatttatgatatcaggactggttacttggttaaggaggggtctaggagatctgtcccttttagagacaccttacttataatgaagtacttgggaaagcggttttcaagagtataaatatcctgtattctaatgatcatcctctaaacattttatcatttattaatcctccctgcctgtgtctattattatattcatatctctacactgcaaattttgggtctcaatttttactgtgcctttgtttttactagtgtctgctgttgcaaaaagaagaaaacattctctgcctgagttttaatttttgtccaaagttaattttaatctatacaattaaaaccttttgcctatca

SEQ ID NO: 574577 - DNA, 5094 bp, Homo sapiens
  misc_feature (56)..(56): n is a, c, g, or t
  misc_feature (459)..(459): n is a, c, g, or t
agcttgcagagcagctcaagcaagctgaggagctcaggcaatataaagtcctggtncactccaggaacgagagctgacgcagtaaaggagaagttacaggaagggagagatgcctcccgctcattgaatgagcatctccaggccctcctcactctggatgagccggacaagtcccaggggcaggacctccaagaacagctggctgaggggtgtagactggcacagcaccttgtccaaaagctcagcccagggaggtgcagaaggctgaagagagcaaagtccctgaggactcactggaggaatgtgccatcacttgttcaaatagccacggcccttgtgactccaaccagcctcacaagaacatcaaaatcacatttgaggaagacgaagtcaactcaactctggttgtagacagagaatcctctcatgatgaatgtcaggatgctctaaacattctcncagtccccggccccacctcttctgccacaaacgtcagcatggtggtatcagccggccctttgtccagcgagaaggcagagatgaacattctagaaatcaatgagaaattgcgcccccagctggcagagaagaaacagcagttcagaaacctcaaagagaaatgttttctaactcaactggccggcttcctggccaaccagcagaacaaatacaaatatgaagagtgcaaagacctcataaaatctatgctgaggaatgagcgacagttcaaggaggagaagcttgcagagcagctcaagcaagctgaggagctcaggcaatataaagtcctggttcacgctcaggaacgagagctgacccagttaagggagaagttacgggaagggagagatgcctcccgctcattgaatgagcatctccaggccctcctcactccggatgagccggacaagtcccaggggcaggacctccaagaacagctggctgaggggtgtagactggcacagcaccttgtccaaaagctcagcccagaaaatgacaacgatgacgatgaagatgttcaagttgaggtggctgagaaagtgcagaaatcgtctgcccccagggagatgcagaaggctgaagaaaaggaagtccctgaggactcactggaggaatgtgccatcacttgttcaaatagccatggcccttatgactccaaccagccacataggaaaaccaaaatcacatttgaggaagacaaagtcgactcaactctcattggctcatcctctcatgttgaatgggaggatgctgtacacattattccagaaaatgaaagtgatgatgaggaagaggaagaaaaagggccagtgtctcccaggaatctgcaggagtctgaagaggaggaagtcccccaggagtcctgggatgaaggttattcgactctctcaattcctcctgaaatgttggcctcgtaccagtcttacagcagcacatttcactcattagaggaacagcaagtctgcatggctgttgacataggcagacatcggtgggatcaagtgaaaaaggaggaccaagaggcaacaggtcccaggctcagcagggagctgctggatgagaaagggcctgaagtcttgcaggactcactggatagatgttattcaactccttcaggttgtcttgaactgactgactcatgccagccctacagaagtgccttttacgtattggagcaacagcgtgttggcttggctgttgacatggatgaaattgaaaagtaccaagaagtggaagaagaccaagacccatcatgccccaggctcagcagggagctgctggatgagaaagagcctgaagtcttgcaggactcactggatagatgttattcgactccttcaggttatcttgaactgcctgacttaggccagccctacagcagtgctgtttactcattggaggaacagtaccttggcttggctcttgacgtggacagaattaaaaaggaccaagaagaggaagaagaccaaggcccaccatgccccaggctcagcagggagctgctggaggtagtagagcctgaagtcttgcaggactcactggatagatgttattcaactccttccagttgtcttgaacagcctgactcctgccagccctatggaagttccttttatgcattggaggaaaaacatgttggcttttctcttgacgtgggagaaattgaaaagaaggggaaggggaagaaaagaaggggaagaagatcaaagaaggaaagaagaaggggaagaaaagaaggggaagaagatcaaaacccaccatgccccaggctcagcagggagctgctggatgagaaagggcctgaagtcttgcaggactcactggatagatgttattcaactccttcaggttgtcttgaactgactgactcatgccagccctacagaagtgccttttacatattggagcaacagcgtgttggcttggctgttgacatggatgaaattgaaaagtaccaagaagtggaagaagaccaagacccatcatgccccaggctcagcggggagctgttggatgagaaagagcctgaagtcttgcaggagtcactggatagatgctattcaactccttcaggttgtcttgaactgactgactcatgccagccctacagaagtgccttttacatattggagcaacagcgtgttggcttggctgttgacatggatgaaattgaaaagtaccaagaagtggaagaagaccaagacccatcatgccccaggctcagcagggagctgctggatgagaaagagcctgaagtcttgcaggactcactggatagatgttattcgactccttcaggttatcttgaactgcctgacttaggccagccctacagcagtgctgtttactcattggaggaacagtaccttggcttggctcttgacgtggacagaattaaaaaggaccaagaagaggaagaagaccaaggcccaccatgccccaggctcagcagggagctgctggaggtagtagagcctgaagtcttgcaggactcactggatagatgttattcaactccttccagttgtcttgaacagcctgactcctgccagccctatggaagttccttttatgcattggaggaaaaacatgttggcttttctcttgacgtgggagaaattgaaaagaaggggaaggggaagaaaagaaggggaagaagatcaaagaaggaaagaagaaggggaagaaaagaaggggaagaagatcaaaacccaccatgccccaggctcaacggcgtgctgatggaagtggaagagcctgaagtcttacaggactcactggatagatgttattcgactccgtcaatgtactttgaactacctgactcattccagcactacagaagtgtgttttactcatttgaggaacagcacatcagcttcgccctttacgtggacaataggttttttactttgacggtgacaagtctccacctggtgttccagatgggagtcatattcccacaataagcagcccttactaagccgagagatgtcattcctgcaggcaggacctataggcacgtgaagatttgaatgaaactacagttccatttggaagcccagacataggatgggtcagtgggcatggctctattcctattctcaaaccatgccagtggcaacctgtgctcagtctgaagacaatggacccacgttaggtgtgacacgttcacataactgtgcagcacatgccgggagtgatcagtcagacattttaatttgaaccacgtatctctgggtagctacaaaattcctcagggatttcattttgcaggcatgtctctgagcttctatacctgctcaaggtcattgtcatctttgtgtttagctcatccaaaggtgttaccctggtttcaatgaacctaacctcattctttgtgtcttcagtgttggcttgttttagctgatccatctgtaacacaggagggatccttggctgaggattgtatttcagaaccaccaactgctcttgacaattgttaacccgctaggctcctttggttagagaagccacagtccttcagcctccaattggtgtcagtacttaggaagaccacagctagatggacaaacagcattgggaggccttagccctgctcctctcaattccatcctgtagagaacaggagtcaggagccgctggcaggagacagcatgtcacccaggactctgccggtgcagaatatgaacaatgccatgttcttgcagaaaacgcttagcctgagtttcataggaggtaatcaccagacaactgcagaatgtagaacactgagcaggacaactgacctgtctccttcacatagtccatatcaccacaaatcacacaacaaaaaggagaagagatattttgggttcaaaaaaagtaaaaagataatgtagctgcatttctttagttattttgaaccccaaatatttcctcatctttttgttgttgtcatggatggtggtgacatggacttgtttatagaggacaggtcagctgtctggctcagtgatctacattctgaagttgtctgaaaatgtcttcatgattaaattcagcctaaacgttttgccgggaacactgcagagacaatgctgtgagtttccaacctcagcccatctgcgggcagagaaggtctagtttgtccatcaccatttatgatatcaggactggttacttggttaaggaggggtctaggagatctgtcccttttagagacaccttacttataatgaagtacttgggaaagcggttttcaagagtataaatatcctgtattctaatgatcatcctctaaacattttatcatttattaatcctccctgcctgtgtctattattatattcatatctctacactgcaaattttgggtctcaatttttactgtgcctttgtttttactagtgtctgctgttgcaaaaagaagaaaacattctctgcctgagttttaatttttgtccaaagttaattttaatctatacaattaaaaccttttgcctatcactctggacttttggattgtttttcacattcagtgttataatatttgattatgctgattggttttggtgggtactgatgcgaattaataaaaacatttcatttcca

SEQ ID NO: 574578 - DNA, 5466 bp, Homo sapiens
  misc_feature (56)..(56): n is a, c, g, or t
  misc_feature (459)..(459): n is a, c, g, or t
agcttgcagagcagctcaagcaagctgaggagctcaggcaatataaagtcctggtncactccaggaacgagagctgacgcagtaaaggagaagttacaggaagggagagatgcctcccgctcattgaatgagcatctccaggccctcctcactctggatgagccggacaagtcccaggggcaggacctccaagaacagctggctgaggggtgtagactggcacagcaccttgtccaaaagctcagcccagggaggtgcagaaggctgaagagagcaaagtccctgaggactcactggaggaatgtgccatcacttgttcaaatagccacggcccttgtgactccaaccagcctcacaagaacatcaaaatcacatttgaggaagacgaagtcaactcaactctggttgtagacagagaatcctctcatgatgaatgtcaggatgctctaaacattctcncagtccccggccccacctcttctgccacaaacgtcagcatggtggtatcagccggccctttgtccagcgagaaggcagagatgaacattctagaaatcaatgagaaattgcgcccccagctggcagagaagaaacagcagttcagaaacctcaaagagaaatgttttctaactcaactggccggcttcctggccaaccagcagaacaaatacaaatatgaagagtgcaaagacctcataaaatctatgctgaggaatgagcgacagttcaaggaggagaagcttgcagagcagctcaagcaagctgaggagctcaggcaatataaagtcctggttcacgctcaggaacgagagctgacccagttaagggagaagttacgggaagggagagatgcctcccgctcattgaatgagcatctccaggccctcctcactccggatgagccggacaagtcccaggggcaggacctccaagaacagctggctgaggggtgtagactggcacagcaccttgtccaaaagctcagcccagaaaatgacaacgatgacgatgaagatgttcaagttgaggtggctgagaaagtgcagaaatcgtctgcccccagggagatgcagaaggctgaagaaaaggaagtccctgaggactcactggaggaatgtgccatcacttgttcaaatagccatggcccttatgactccaaccagccacataggaaaaccaaaatcacatttgaggaagacaaagtcgactcaactctcattggctcatcctctcatgttgaatgggaggatgctgtacacattattccagaaaatgaaagtgatgatgaggaagaggaagaaaaagggccagtgtctcccaggaatctgcaggagtctgaagaggaggaagtcccccaggagtcctgggatgaaggttattcgactctctcaattcctcctgaaatgttggcctcgtaccagtcttacagcagcacatttcactcattagaggaacagcaagtctgcatggctgttgacataggcagacatcggtgggatcaagtgaaaaaggaggaccaagaggcaacaggtcccaggctcagcagggagctgctggatgagaaagggcctgaagtcttgcaggactcactggatagatgttattcaactccttcaggttgtcttgaactgactgactcatgccagccctacagaagtgccttttacgtattggagcaacagcgtgttggcttggctgttgacatggatgaaattgaaaagtaccaagaagtggaagaagaccaagacccatcatgccccaggctcagcagggagctgctggatgagaaagagcctgaagtcttgcaggactcactggatagatgttattcgactccttcaggttatcttgaactgcctgacttaggccagccctacagcagtgctgtttactcattggaggaacagtaccttggcttggctcttgacgtggacagaattaaaaaggaccaagaagaggaagaagaccaaggcccaccatgccccaggctcagcagggagctgctggaggtagtagagcctgaagtcttgcaggactcactggatagatgttattcaactccttccagttgtcttgaacagcctgactcctgccagccctatggaagttccttttatgcattggaggaaaaacatgttggcttttctcttgacgtgggagaaattgaaaagaaggggaaggggaagaaaagaaggggaagaagatcaaagaaggaaagaagaaggggaagaaaagaaggggaagaagatcaaaacccaccatgccccaggctcagcagggagctgctggatgagaaagggcctgaagtcttgcaggactcactggatagatgttattcaactccttcaggttgtcttgaactgactgactcatgccagccctacagaagtgccttttacatattggagcaacagcgtgttggcttggctgttgacatggatgaaattgaaaagtaccaagaagtggaagaagaccaagacccatcatgccccaggctcagcggggagctgttggatgagaaagagcctgaagtcttgcaggagtcactggatagatgctattcaactccttcaggttgtcttgaactgactgactcatgccagccctacagaagtgccttttacatattggagcaacagcgtgttggcttggctgttgacatggatgaaattgaaaagtaccaagaagtggaagaagaccaagacccatcatgccccaggctcagcagggagctgctggatgagaaagagcctgaagtcttgcaggactcactggatagatgttattcgactccttcaggttatcttgaactgcctgacttaggccagccctacagcagtgctgtttactcattggaggaacagtaccttggcttggctcttgacgtggacagaattaaaaaggaccaagaagaggaagaagaccaaggcccaccatgccccaggctcagcagggagctgctggaggtagtagagcctgaagtcttgcaggactcactggatagatgttattcaactccttccagttgtcttgaacagcctgactcctgccagccctatggaagttccttttatgcattggaggaaaaacatgttggcttttctcttgacgtgggagaaattgaaaagaaggggaaggggaagaaaagaaggggaagaagatcaaagaaggaaagaagaaggggaagaaaagaaggggaagaagatcaaaacccaccatgccccaggctcaacggcgtgctgatggaagtggaagagcctgaagtcttacaggactcactggatagatgttattcgactccgtcaatgtactttgaactacctgactcattccagcactacagaagtgtgttttactcatttgaggaacagcacatcagcttcgccctttacgtggacaataggttttttactttgacggtgacaagtctccacctggtgttccagatgggagtcatattcccacaataagcagcccttactaagccgagagatgtcattcctgcaggcaggacctataggcacgtgaagatttgaatgaaactacagttccatttggaagcccagacataggatgggtcagtgggcatggctctattcctattctcaaaccatgccagtggcaacctgtgctcagtctgaagacaatggacccacgttaggtgtgacacgttcacataactgtgcagcacatgccgggagtgatcagtcagacattttaatttgaaccacgtatctctgggtagctacaaaattcctcagggatttcattttgcaggcatgtctctgagcttctatacctgctcaaggtcattgtcatctttgtgtttagctcatccaaaggtgttaccctggtttcaatgaacctaacctcattctttgtgtcttcagtgttggcttgttttagctgatccatctgtaacacaggagggatccttggctgaggattgtatttcagaaccaccaactgctcttgacaattgttaacccgctaggctcctttggttagagaagccacagtccttcagcctccaattggtgtcagtacttaggaagaccacagctagatggacaaacagcattgggaggccttagccctgctcctctcaattccatcctgtagagaacaggagtcaggagccgctggcaggagacagcatgtcacccaggactctgccggtgcagaatatgaacaatgccatgttcttgcagaaaacgcttagcctgagtttcataggaggtaatcaccagacaactgcagaatgtagaacactgagcaggacaactgacctgtctccttcacatagtccatatcaccacaaatcacacaacaaaaaggagaagagatattttgggttcaaaaaaagtaaaaagataatgtagctgcatttctttagttattttgaaccccaaatatttcctcatctttttgttgttgtcatggatggtggtgacatggacttgtttatagaggacaggtcagctgtctggctcagtgatctacattctgaagttgtctgaaaatgtcttcatgattaaattcagcctaaacgttttgccgggaacactgcagagacaatgctgtgagtttccaacctcagcccatctgcgggcagagaaggtctagtttgtccatcaccatttatgatatcaggactggttacttggttaaggaggggtctaggagatctgtcccttttagagacaccttacttataatgaagtacttgggaaagcggttttcaagagtataaatatcctgtattctaatgatcatcctctaaacattttatcatttattaatcctccctgcctgtgtctattattatattcatatctctacactgcaaattttgggtctcaatttttactgtgcctttgtttttactagtgtctgctgttgcaaaaagaagaaaacattctctgcctgagttttaatttttgtccaaagttaattttaatctatacaattaaaaccttttgcctatcactctggacttttggattgtttttcacattcagtgttataatatttgattatgctgattggttttggtgggtactgatgcgaattaataaaaacatttcatttccatgtttaaaaaaaaaaaaataaaaaaaaaaaaaaataaaaaaaaaaaataaaaaataaaaaaaaaaactataaaaaaatacactaacataataacaaaaaaaaaaatttacccattaagttggaaccaaattctaaattaataaaaaaaaaattttgggcctccttttcccccttgtcttttttaaacttgcaaagttttattttgggcccgattttgggccctcttggcccaatcccccttagggggggttttaaaaaaaacgggcccggttttaaaaacgtcgttttgggccttggggtcccccaataacccccttgggaaattcccctttttcccggtgggttatacccggcgcccctccggcgcctttc

SEQ ID NO: 574579 - DNA, 756 bp, Homo sapiens
cggggcacctctgtgcagggttcccagtcaccgcgacgctcctcgggaagccatagggcgcctcccagcccgtctccccgtctccagtttatggaatcctaattcccaattcccggaccgggcccagccctgggctcttagctgtcgcgtttttgctgggacctgttccaacaaatgggcgtcttctgccttgggtccgtgggggttgggccggtaagcttgctggacgcctggtgaaggggccagtatgcagttctcttgagccagcctctgtcggggaccacttgctagtgccatcccagccaagaatggtccccggttgtggcatgagtgagcctgggacgccgattctcctcgtccgctgagtgcgcgagcagttgtggacctggatccagtaggaatcaatggccgtcgcgcctgcttcagactcgcggcccgcaacgtgcccgtggcgtcatttggagagtagctggagagatagcatccgtcacgcgggagagttcgaggcaaaccggtattttagtcaagcctaatgtggactttgttgcacgagagaaagaaatgcattaacactgttttatccaacgccctataccaaagtcttcacctggaacccagatgtgtgacatagaagatgtgaaggttgtgcatcctgggacacggatccatatcatggacctagatcaaagctcacgggctctgctttagtgttcaaaggcctgttgcgtctccgagccagtttggagaaccttttac

SEQ ID NO: 574580 - DNA, 5393 bp, Homo sapiens
  misc_feature (56)..(56): n is a, c, g, or t
  misc_feature (459)..(459): n is a, c, g, or t
  misc_feature (2171)..(2171): n is a, c, g, or t
  misc_feature (3096)..(3096): n is a, c, g, or t
  misc_feature (3098)..(3098): n is a, c, g, or t
  misc_feature (3100)..(3100): n is a, c, g, or t
  misc_feature (3108)..(3108): n is a, c, g, or t
  misc_feature (3114)..(3114): n is a, c, g, or t
  misc_feature (3120)..(3120): n is a, c, g, or t
agcttgcagagcagctcaagcaagctgaggagctcaggcaatataaagtcctggtncactccaggaacgagagctgacgcagtaaaggagaagttacaggaagggagagatgcctcccgctcattgaatgagcatctccaggccctcctcactctggatgagccggacaagtcccaggggcaggacctccaagaacagctggctgaggggtgtagactggcacagcaccttgtccaaaagctcagcccagggaggtgcagaaggctgaagagagcaaagtccctgaggactcactggaggaatgtgccatcacttgttcaaatagccacggcccttgtgactccaaccagcctcacaagaacatcaaaatcacatttgaggaagacgaagtcaactcaactctggttgtagacagagaatcctctcatgatgaatgtcaggatgctctaaacattctcncagtccccggccccacctcttctgccacaaacgtcagcatggtggtatcagccggccctttgtccagcgagaaggcagagatgaacattctagaaatcaatgagaaattgcgcccccagctggcagagaagaaacagcagttcagaaacctcaaagagaaatgttttctaactcaactggccggcttcctggccaaccagcagaacaaatacaaatatgaagagtgcaaagacctcataaaatctatgctgaggaatgagcgacagttcaaggaggagaagcttgcagagcagctcaagcaagctgaggagctcaggcaatataaagtcctggttcacgctcaggaacgagagctgacccagttaagggagaagttacgggaagggagagatgcctcccgctcattgaatgagcatctccaggccctcctcactccggatgagccggacaagtcccaggggcaggacctccaagaacagctggctgaggggtgtagactggcacagcaccttgtccaaaagctcagcccagaaaatgacaacgatgacgatgaagatgttcaagttgaggtggctgagaaagtgcagaaatcgtctgcccccagggagatgcagaaggctgaagaaaaggaagtccctgaggactcactggaggaatgtgccatcacttgttcaaatagccatggcccttatgactccaaccagccacataggaaaaccaaaatcacatttgaggaagacaaagtcgactcaactctcattggctcatcctctcatgttgaatgggaggatgctgtacacattattccagaaaatgaaagtgatgatgaggaagaggaagaaaaagggccagtgtctcccaggaatctgcaggagtctgaagaggaggaagtcccccaggagtcctgggatgaaggttattcgactctctcaattcctcctgaaatgttggcctcgtaccagtcttacagcagcacatttcactcattagaggaacagcaagtctgcatggctgttgacataggcagacatcggtgggatcaagtgaaaaaggaggaccaagaggcaacaggtcccaggctcagcagggagctgctggatgagaaagggcctgaagtcttgcaggactcactggatagatgttattcaactccttcaggttgtcttgaactgactgactcatgccagccctacagaagtgccttttacgtattggagcaacagcgtgttggcttggctgttgacatggatgaaattgaaaagtaccaagaagtggaagaagaccaagacccatcatgccccaggctcagcagggagctgctggatgagaaagagcctgaagtcttgcaggactcactggatagatgttattcgactccttcaggttatcttgaactgcctgacttaggccagccctacagcagtgctgtttactcattggaggaacagtaccttggcttggctcttgacgtggacagtgagtaccttactgtgaaggtgataagcctccacctggtcttccagataggggtgatattcctgttccaagtggcccttactgacccgagagatgtcattgccgcaggcaggacctatgggcgcatataggttgtaatgaaactgtagtctcagttggaagcctagacatgaaatgggtcagtgagcaaggctctattcctagtctccagccatgcctgtggcaacctgagcccnctctcagcacattggacccaggcagatgtaaaaaattcacagaactatgatttggactcaagggtttgtagatttcctccttcattctaatttcagtgtctaaaattcttgcatccatgaacgagctgggcatttgatgagacagggctgaatactgcagttttcctcctagaaatcatctggggcattttctttgaactgatgggaacaataaggcataactgtttgcacaaacttgggataaatgattttgggataacgatctaccagaatagggatatttcacccttggttctgagatgcaaaccaaagaatatcatgaccagctttcaggcctcctgaagtatatctctcacattgtcctgttctcatgctgaggagcctgagatccctgtgtggggattagacagtggactgttatgggtgtaggtgaattggcttattttgtctgtccctgtctgaatgtattgcaggaattaaaaaggaccaagaagaggaagaagaccaaggcccaccatgccccaggtaactgagcaattgtgaacagctacttctgtgttgacatctggagactcctggttcagggaaaacagagcgggctgacattatcgattacatcttttcaaccaagcctgaattattcctactaacattgctgttggttttcattgcagtagatatttaggtttccatttcttcctccccttatcatttactaacctactgtaggtggaccagacttcaaaaactgtattctcatggcgactgcatggaaacttgagcacattttatggaaaattattgagcacagtcttttcatgatccctgtatgctgtgtgtcctgagggcactaactcagagtgtcctgttactccctcatcagtgtgtcacctggacaattcactgagctcgttctctctctctntntntgtgtgtntgtgtntgtgtntgtgtgtgtgtgtgtgtgtgtgtgtgtgtctgtgtgtctatctgtctttctctttcattcttttccatttggccctgttctgtcccaacatgaaggcaataatttgttacctcattaatggatctatccttttagtttcttaaccacttccctatgctacccatgaaacctagttggggctctgttgtgtgtgatttcccctggcttattctttactttttcctcctttttcagcagggagctgctggaggtagtagagcctgaagtcttgcaggactcactggatagatgttattcaactccttccagttgtcttgaacagcctgactcctgccagccctatggaagttccttttatgcattggaggaaaaacatgttggcttttctcttgacgtgggagaaattgaaaagaaggggaaggggaagaaaagaaggggaagaagatcaaagaaggaaagaagaaggggaagaaaagaaggggaagaagatcaaaacccaccatgccccaggctcaacggcgtgctgatggaagtggaagagcctgaagtcttacaggactcactggatagatgttattcgactccgtcaatgtactttgaactacctgactcattccagcactacagaagtgtgttttactcatttgaggaacagcacatcagcttcgccctttacgtggacaataggttttttactttgacggtgacaagtctccacctggtgttccagatgggagtcatattcccacaataagcagcccttactaagccgagagatgtcattcctgcaggcaggacctataggcacgtgaagatttgaatgaaactacagttccatttggaagcccagacataggatgggtcagtgggcatggctctattcctattctcaaaccatgccagtggcaacctgtgctcagtctgaagacaatggacccacgttaggtgtgacacgttcacataactgtgcagcacatgccgggagtgatcagtcagacattttaatttgaaccacgtatctctgggtagctacaaaattcctcagggatttcattttgcaggcatgtctctgagcttctatacctgctcaaggtcattgtcatctttgtgtttagctcatccaaaggtgttaccctggtttcaatgaacctaacctcattctttgtgtcttcagtgttggcttgttttagctgatccatctgtaacacaggagggatccttggctgaggattgtatttcagaaccaccaactgctcttgacaattgttaacccgctaggctcctttggttagagaagccacagtccttcagcctccaattggtgtcagtacttaggaagaccacagctagatggacaaacagcattgggaggccttagccctgctcctctcaattccatcctgtagagaacaggagtcaggagccgctggcaggagacagcatgtcacccaggactctgccggtgcagaatatgaacaatgccatgttcttgcagaaaacgcttagcctgagtttcataggaggtaatcaccagacaactgcagaatgtagaacactgagcaggacaactgacctgtctccttcacatagtccatatcaccacaaatcacacaacaaaaaggagaagagatattttgggttcaaaaaaagtaaaaagataatgtagctgcatttctttagttattttgaaccccaaatatttcctcatctttttgttgttgtcatggatggtggtgacatggacttgtttatagaggacaggtcagctgtctggctcagtgatctacattctgaagttgtctgaaaatgtcttcatgattaaattcagcctaaacgttttgccgggaacactgcagagacaatgctgtgagtttccaacctcagcccatctgcgggcagagaaggtctagtttgtccatcaccatttatgatatcaggactggttacttggttaaggaggggtctaggagatctgtcccttttagagacaccttacttataatgaagtacttgggaaagcggttttcaagagtataaatatcctgtattctaatgatcatcctctaaacattttatcatttattaatcctccctgcctgtgtctattattatattcatatctctacactgcaaattttgggtctcaatttttactgtgcctttgtttttactagtgtctgctgttgcaaaaagaagaaaacattctctgcctgagttttaatttttgtccaaagttaattttaatctatacaattaaaaccttttgcctatca

SEQ ID NO: 574581 - DNA, 315 bp, Homo sapiens
ccctggagcttcccaaagccctccatctccaatacagcaacttccagctcccaggcaggccacgataggcagagatctcaacctagtgatcctgcaactccagaccgaaagctaccagtggtggatgaatggtcagagcctccctaagactcacaggtagcagctgtccaacaccaacaggaccctctttatatatggtgtcacacagtatatagcaggaccctatgaatgtgaaactacggaacccagtgagatgccagccgcagtgccccagtcaccctaaatctccatcccgtcacatctgccaaagggtac

SEQ ID NO: 574582 - DNA, 5365 bp, Homo sapiens
  misc_feature (56)..(56): n is a, c, g, or t
  misc_feature (459)..(459): n is a, c, g, or t
agcttgcagagcagctcaagcaagctgaggagctcaggcaatataaagtcctggtncactccaggaacgagagctgacgcagtaaaggagaagttacaggaagggagagatgcctcccgctcattgaatgagcatctccaggccctcctcactctggatgagccggacaagtcccaggggcaggacctccaagaacagctggctgaggggtgtagactggcacagcaccttgtccaaaagctcagcccagggaggtgcagaaggctgaagagagcaaagtccctgaggactcactggaggaatgtgccatcacttgttcaaatagccacggcccttgtgactccaaccagcctcacaagaacatcaaaatcacatttgaggaagacgaagtcaactcaactctggttgtagacagagaatcctctcatgatgaatgtcaggatgctctaaacattctcncagtccccggccccacctcttctgccacaaacgtcagcatggtggtatcagccggccctttgtccagcgagaaggcagagatgaacattctagaaatcaatgagaaattgcgcccccagctggcagagaagaaacagcagttcagaaacctcaaagagaaatgttttctaactcaactggccggcttcctggccaaccagcagaacaaatacaaatatgaagagtgcaaagacctcataaaatctatgctgaggaatgagcgacagttcaaggaggagaagcttgcagagcagctcaagcaagctgaggagctcaggcaatataaagtcctggttcacgctcaggaacgagagctgacccagttaagggagaagttacgggaagggagagatgcctcccgctcattgaatgagcatctccaggccctcctcactccggatgagccggacaagtcccaggggcaggacctccaagaacagctggctgaggggtgtagactggcacagcaccttgtccaaaagctcagcccagaaaatgacaacgatgacgatgaagatgttcaagttgaggtggctgagaaagtgcagaaatcgtctgcccccagggagatgcagaaggctgaagaaaaggaagtccctgaggactcactggaggaatgtgccatcacttgttcaaatagccatggcccttatgactccaaccagccacataggaaaaccaaaatcacatttgaggaagacaaagtcgactcaactctcattggctcatcctctcatgttgaatgggaggatgctgtacacattattccagaaaatgaaagtgatgatgaggaagaggaagaaaaagggccagtgtctcccaggaatctgcaggagtctgaagaggaggaagtcccccaggagtcctgggatgaaggttattcgactctctcaattcctcctgaaatgttggcctcgtaccagtcttacagcagcacatttcactcattagaggaacagcaagtctgcatggctgttgacataggcagacatcggtgggatcaagtgaaaaaggaggaccaagaggcaacaggtcccaggctcagcagggagctgctggatgagaaagggcctgaagtcttgcaggactcactggatagatgttattcaactccttcaggttgtcttgaactgactgactcatgccagccctacagaagtgccttttacgtattggagcaacagcgtgttggcttggctgttgacatggatgaaattgaaaagtaccaagaagtggaagaagaccaagacccatcatgccccaggctcagcagggagctgctggatgagaaagagcctgaagtcttgcaggactcactggatagatgttattcgactccttcaggttatcttgaactgcctgacttaggccagccctacagcagtgctgtttactcattggaggaacagtaccttggcttggctcttgacgtggacagaattaaaaaggaccaagaagaggaagaagaccaaggcccaccatgccccaggctcagcagggagctgctggaggtagtagagcctgaagtcttgcaggactcactggatagatgttattcaactccttccagttgtcttgaacagcctgactcctgccagccctatggaagttccttttatgcattggaggaaaaacatgttggcttttctcttgacgtgggagaaattgaaaagaaggggaaggggaagaaaagaaggggaagaagatcaaagaaggaaagaagaaggggaagaaaagaaggggaagaagatcaaaacccaccatgccccaggctcagcagggagctgctggatgagaaagggcctgaagtcttgcaggactcactggatagatgttattcaactccttcaggttgtcttgaactgactgactcatgccagccctacagaagtgccttttacatattggagcaacagcgtgttggcttggctgttgacatggatgaaattgaaaagtaccaagaagtggaagaagaccaagacccatcatgccccaggctcagcggggagctgttggatgagaaagagcctgaagtcttgcaggagtcactggatagatgctattcaactccttcaggttgtcttgaactgactgactcatgccagccctacagaagtgccttttacatattggagcaacagcgtgttggcttggctgttgacatggatgaaattgaaaagtaccaagaagtggaagaagaccaagacccatcatgccccaggctcagcagggagctgctggatgagaaagagcctgaagtcttgcaggactcactggatagatgttattcgactccttcaggttatcttgaactgcctgacttaggccagccctacagcagtgctgtttactcattggaggaacagtaccttggcttggctcttgacgtggacagaattaaaaaggaccaagaagaggaagaagaccaaggcccaccatgccccaggctcagcagggagctgctggaggtagtagagcctgaagtcttgcaggactcactggatagatgttattcaactccttccagttgtcttgaacagcctgactcctgccagccctatggaagttccttttatgcattggaggaaaaacatgttggcttttctcttgacgtgggagaaattgaaaagaaggggaaggggaagaaaagaaggggaagaagatcaaagaaggaaagaagaaggggaagaaaagaaggggaagaagatcaaaacccaccatgccccaggctcaacggcgtgctgatggaagtggaagagcctgaagtcttacaggactcactggatagatgttattcgactccgtcaatgtactttgaactacctgactcattccagcactacagaagtgtgttttactcatttgaggaacagcacatcagcttcgccctttacgtggacaataggttttttactttgacggtgacaagtctccacctggtgttccagatgggagtcatattcccacaataagcagcccttactaagccgagagatgtcattcctgcaggcaggacctataggcacgtgaagatttgaatgaaactacagttccatttggaagcccagacataggatgggtcagtgggcatggctctattcctattctcaaaccatgccagtggcaacctgtgctcagtctgaagacaatggacccacgttaggtgtgacacgttcacataactgtgcagcacatgccgggagtgatcagtcagacattttaatttgaaccacgtatctctgggtagctacaaaattcctcagggatttcattttgcaggcatgtctctgagcttctatacctgctcaaggtcattgtcatctttgtgtttagctcatccaaaggtgttaccctggtttcaatgaacctaacctcattctttgtgtcttcagtgttggcttgttttagctgatccatctgtaacacaggagggatccttggctgaggattgtatttcagaaccaccaactgctcttgacaattgttaacccgctaggctcctttggttagagaagccacagtccttcagcctccaattggtgtcagtacttaggaagaccacagctagatggacaaacagcattgggaggccttagccctgctcctctcaattccatcctgtagagaacaggagtcaggagccgctggcaggagacagcatgtcacccaggactctgccggtgcagaatatgaacaatgccatgttcttgcagaaaacgcttagcctgagtttcataggaggtaatcaccagacaactgcagaatgtagaacactgagcaggacaactgacctgtctccttcacatagtccatatcaccacaaatcacacaacaaaaaggagaagagatattttgggttcaaaaaaagtaaaaagataatgtagctgcatttctttagttattttgaaccccaaatatttcctcatctttttgttgttgtcatggatggtggtgacatggacttgtttatagaggacaggtcagctgtctggctcagtgatctacattctgaagttgtctgaaaatgtcttcatgattaaattcagcctaaacgttttgccgggaacactgcagagacaatgctgtgagtttccaacctcagcccatctgcgggcagagaaggtctagtttgtccatcaccatttatgatatcaggactggttacttggttaaggaggggtctaggagatctgtcccttttagagacaccttacttataatgaagtacttgggaaagcggttttcaagagtataaatatcctgtattctaatgatcatcctctaaacattttatcatttattaatcctccctgcctgtgtctattattatattcatatctctacactgcaaattttgggtctcaatttttactgtgcctttgtttttactagtgtctgctgttgcaaaaagaagaaaacattctctgcctgagttttaatttttgtccaaagttaattttaatctatacaattaaaaccttttgcctatcaaaaaaaaaaaaaaaaacaaaaaacaaaaaaaacccgttgccggcgcgcgggcctcagcgcctaagagaaaagcttcttcaaagaccattccggttggggcggcggggggcccccacgtggcgtgtacgttggacacttggcgccaaagcgcgtggtcccaaaggaggaacccggggccaggagacagggggggggggcagttcctctaccccaattaaaaaaaaggcgcccgggggggacacaccggagcgggcttctggacaaactctccaaagggggagctccggagggcgccaaaccaggggcgactcattctaacccgggggcccccaagggagaccccagaaaatcaaaattaaccccgggcgtcggagtt

SEQ ID NO: 574583 - DNA, 4743 bp, Homo sapiens
  misc_feature (56)..(56): n is a, c, g, or t
  misc_feature (459)..(459): n is a, c, g, or t
  misc_feature (2171)..(2171): n is a, c, g, or t
agcttgcagagcagctcaagcaagctgaggagctcaggcaatataaagtcctggtncactccaggaacgagagctgacgcagtaaaggagaagttacaggaagggagagatgcctcccgctcattgaatgagcatctccaggccctcctcactctggatgagccggacaagtcccaggggcaggacctccaagaacagctggctgaggggtgtagactggcacagcaccttgtccaaaagctcagcccagggaggtgcagaaggctgaagagagcaaagtccctgaggactcactggaggaatgtgccatcacttgttcaaatagccacggcccttgtgactccaaccagcctcacaagaacatcaaaatcacatttgaggaagacgaagtcaactcaactctggttgtagacagagaatcctctcatgatgaatgtcaggatgctctaaacattctcncagtccccggccccacctcttctgccacaaacgtcagcatggtggtatcagccggccctttgtccagcgagaaggcagagatgaacattctagaaatcaatgagaaattgcgcccccagctggcagagaagaaacagcagttcagaaacctcaaagagaaatgttttctaactcaactggccggcttcctggccaaccagcagaacaaatacaaatatgaagagtgcaaagacctcataaaatctatgctgaggaatgagcgacagttcaaggaggagaagcttgcagagcagctcaagcaagctgaggagctcaggcaatataaagtcctggttcacgctcaggaacgagagctgacccagttaagggagaagttacgggaagggagagatgcctcccgctcattgaatgagcatctccaggccctcctcactccggatgagccggacaagtcccaggggcaggacctccaagaacagctggctgaggggtgtagactggcacagcaccttgtccaaaagctcagcccagaaaatgacaacgatgacgatgaagatgttcaagttgaggtggctgagaaagtgcagaaatcgtctgcccccagggagatgcagaaggctgaagaaaaggaagtccctgaggactcactggaggaatgtgccatcacttgttcaaatagccatggcccttatgactccaaccagccacataggaaaaccaaaatcacatttgaggaagacaaagtcgactcaactctcattggctcatcctctcatgttgaatgggaggatgctgtacacattattccagaaaatgaaagtgatgatgaggaagaggaagaaaaagggccagtgtctcccaggaatctgcaggagtctgaagaggaggaagtcccccaggagtcctgggatgaaggttattcgactctctcaattcctcctgaaatgttggcctcgtaccagtcttacagcagcacatttcactcattagaggaacagcaagtctgcatggctgttgacataggcagacatcggtgggatcaagtgaaaaaggaggaccaagaggcaacaggtcccaggctcagcagggagctgctggatgagaaagggcctgaagtcttgcaggactcactggatagatgttattcaactccttcaggttgtcttgaactgactgactcatgccagccctacagaagtgccttttacgtattggagcaacagcgtgttggcttggctgttgacatggatgaaattgaaaagtaccaagaagtggaagaagaccaagacccatcatgccccaggctcagcagggagctgctggatgagaaagagcctgaagtcttgcaggactcactggatagatgttattcgactccttcaggttatcttgaactgcctgacttaggccagccctacagcagtgctgtttactcattggaggaacagtaccttggcttggctcttgacgtggacagtgagtaccttactgtgaaggtgataagcctccacctggtcttccagataggggtgatattcctgttccaagtggcccttactgacccgagagatgtcattgccgcaggcaggacctatgggcgcatataggttgtaatgaaactgtagtctcagttggaagcctagacatgaaatgggtcagtgagcaaggctctattcctagtctccagccatgcctgtggcaacctgagcccnctctcagcacattggacccaggcagatgtaaaaaattcacagaactatgatttggactcaagggtttgtagatttcctccttcattctaatttcagtgtctaaaattcttgcatccatgaacgagctgggcatttgatgagacagggctgaatactgcagttttcctcctagaaatcatctggggcattttctttgaactgatgggaacaataaggcataactgtttgcacaaacttgggataaatgattttgggataacgatctaccagaatagggatatttcacccttggttctgagatgcaaaccaaagaatatcatgaccagctttcaggcctcctgaagtatatctctcacattgtcctgttctcatgctgaggagcctgagatccctgtgtggggattagacagtggactgttatgggtgtaggtgaattggcttattttgtctgtccctgtctgaatgtattgcagcagaattaaaaaggaccaagaagaggaagaagaccaaggcccaccatgccccaggctcagcagggagctgctggaggtagtagagcctgaagtcttgcaggactcactggatagatgttattcaactccttccagttgtcttgaacagcctgactcctgccagccctatggaagttccttttatgcattggaggaaaaacatgttggcttttctcttgacgtgggagaaattgaaaagaaggggaaggggaagaaaagaaggggaagaagatcaaagaaggaaagaagaaggggaagaaaagaaggggaagaagatcaaaacccaccatgccccaggctcaacggcgtgctgatggaagtggaagagcctgaagtcttacaggactcactggatagatgttattcgactccgtcaatgtactttgaactacctgactcattccagcactacagaagtgtgttttactcatttgaggaacagcacatcagcttcgccctttacgtggacaataggttttttactttgacggtgacaagtctccacctggtgttccagatgggagtcatattcccacaataagcagcccttactaagccgagagatgtcattcctgcaggcaggacctataggcacgtgaagatttgaatgaaactacagttccatttggaagcccagacataggatgggtcagtgggcatggctctattcctattctcaaaccatgccagtggcaacctgtgctcagtctgaagacaatggacccacgttaggtgtgacacgttcacataactgtgcagcacatgccgggagtgatcagtcagacattttaatttgaaccacgtatctctgggtagctacaaaattcctcagggatttcattttgcaggcatgtctctgagcttctatacctgctcaaggtcattgtcatctttgtgtttagctcatccaaaggtgttaccctggtttcaatgaacctaacctcattctttgtgtcttcagtgttggcttgttttagctgatccatctgtaacacaggagggatccttggctgaggattgtatttcagaaccaccaactgctcttgacaattgttaacccgctaggctcctttggttagagaagccacagtccttcagcctccaattggtgtcagtacttaggaagaccacagctagatggacaaacagcattgggaggccttagccctgctcctctcaattccatcctgtagagaacaggagtcaggagccgctggcaggagacagcatgtcacccaggactctgccggtgcagaatatgaacaatgccatgttcttgcagaaaacgcttagcctgagtttcataggaggtaatcaccagacaactgcagaatgtagaacactgagcaggacaactgacctgtctccttcacatagtccatatcaccacaaatcacacaacaaaaaggagaagagatattttgggttcaaaaaaagtaaaaagataatgtagctgcatttctttagttattttgaaccccaaatatttcctcatctttttgttgttgtcatggatggtggtgacatggacttgtttatagaggacaggtcagctgtctggctcagtgatctacattctgaagttgtctgaaaatgtcttcatgattaaattcagcctaaacgttttgccgggaacactgcagagacaatgctgtgagtttccaacctcagcccatctgcgggcagagaaggtctagtttgtccatcaccatttatgatatcaggactggttacttggttaaggaggggtctaggagatctgtcccttttagagacaccttacttataatgaagtacttgggaaagcggttttcaagagtataaatatcctgtattctaatgatcatcctctaaacattttatcatttattaatcctccctgcctgtgtctattattatattcatatctctacactgcaaattttgggtctcaatttttactgtgcctttgtttttactagtgtctgctgttgcaaaaagaagaaaacattctctgcctgagttttaatttttgtccaaagttaattttaatctatacaattaaaaccttttgcctatca

SEQ ID NO: 574584 - DNA, 5171 bp, Homo sapiens
  misc_feature (56)..(56): n is a, c, g, or t
  misc_feature (459)..(459): n is a, c, g, or t
  misc_feature (5051)..(5051): n is a, c, g, or t
  misc_feature (5080)..(5080): n is a, c, g, or t
  misc_feature (5120)..(5121): n is a, c, g, or t
  misc_feature (5136)..(5137): n is a, c, g, or t
agcttgcagagcagctcaagcaagctgaggagctcaggcaatataaagtcctggtncactccaggaacgagagctgacgcagtaaaggagaagttacaggaagggagagatgcctcccgctcattgaatgagcatctccaggccctcctcactctggatgagccggacaagtcccaggggcaggacctccaagaacagctggctgaggggtgtagactggcacagcaccttgtccaaaagctcagcccagggaggtgcagaaggctgaagagagcaaagtccctgaggactcactggaggaatgtgccatcacttgttcaaatagccacggcccttgtgactccaaccagcctcacaagaacatcaaaatcacatttgaggaagacgaagtcaactcaactctggttgtagacagagaatcctctcatgatgaatgtcaggatgctctaaacattctcncagtccccggccccacctcttctgccacaaacgtcagcatggtggtatcagccggccctttgtccagcgagaaggcagagatgaacattctagaaatcaatgagaaattgcgcccccagctggcagagaagaaacagcagttcagaaacctcaaagagaaatgttttctaactcaactggccggcttcctggccaaccagcagaacaaatacaaatatgaagagtgcaaagacctcataaaatctatgctgaggaatgagcgacagttcaaggaggagaagcttgcagagcagctcaagcaagctgaggagctcaggcaatataaagtcctggttcacgctcaggaacgagagctgacccagttaagggagaagttacgggaagggagagatgcctcccgctcattgaatgagcatctccaggccctcctcactccggatgagccggacaagtcccaggggcaggacctccaagaacagctggctgaggggtgtagactggcacagcaccttgtccaaaagctcagcccagaaaatgacaacgatgacgatgaagatgttcaagttgaggtggctgagaaagtgcagaaatcgtctgcccccagggagatgcagaaggctgaagaaaaggaagtccctgaggactcactggaggaatgtgccatcacttgttcaaatagccatggcccttatgactccaaccagccacataggaaaaccaaaatcacatttgaggaagacaaagtcgactcaactctcattggctcatcctctcatgttgaatgggaggatgctgtacacattattccagaaaatgaaagtgatgatgaggaagaggaagaaaaagggccagtgtctcccaggaatctgcaggagtctgaagaggaggaagtcccccaggagtcctgggatgaaggttattcgactctctcaattcctcctgaaatgttggcctcgtaccagtcttacagcagcacatttcactcattagaggaacagcaagtctgcatggctgttgacataggcagacatcggtgggatcaagtgaaaaaggaggaccaagaggcaacaggtcccaggctcagcagggagctgctggatgagaaagggcctgaagtcttgcaggactcactggatagatgttattcaactccttcaggttgtcttgaactgactgactcatgccagccctacagaagtgccttttacgtattggagcaacagcgtgttggcttggctgttgacatggatgaaattgaaaagtaccaagaagtggaagaagaccaagacccatcatgccccaggctcagcagggagctgctggatgagaaagagcctgaagtcttgcaggactcactggatagatgttattcgactccttcaggttatcttgaactgcctgacttaggccagccctacagcagtgctgtttactcattggaggaacagtaccttggcttggctcttgacgtggacagaattaaaaaggaccaagaagaggaagaagaccaaggcccaccatgccccaggctcagcagggagctgctggaggtagtagagcctgaagtcttgcaggactcactggatagatgttattcaactccttccagttgtcttgaacagcctgactcctgccagccctatggaagttccttttatgcattggaggaaaaacatgttggcttttctcttgacgtgggagaaattgaaaagaaggggaaggggaagaaaagaaggggaagaagatcaaagaaggaaagaagaaggggaagaaaagaaggggaagaagatcaaaacccaccatgccccaggctcagcagggagctgctggatgagaaagggcctgaagtcttgcaggactcactggatagatgttattcaactccttcaggttgtcttgaactgactgactcatgccagccctacagaagtgccttttacatattggagcaacagcgtgttggcttggctgttgacatggatgaaattgaaaagtaccaagaagtggaagaagaccaagacccatcatgccccaggctcagcggggagctgttggatgagaaagagcctgaagtcttgcaggagtcactggatagatgctattcaactccttcaggttgtcttgaactgactgactcatgccagccctacagaagtgccttttacatattggagcaacagcgtgttggcttggctgttgacatggatgaaattgaaaagtaccaagaagtggaagaagaccaagacccatcatgccccaggctcagcagggagctgctggatgagaaagagcctgaagtcttgcaggactcactggatagatgttattcgactccttcaggttatcttgaactgcctgacttaggccagccctacagcagtgctgtttactcattggaggaacagtaccttggcttggctcttgacgtggacagaattaaaaaggaccaagaagaggaagaagaccaaggcccaccatgccccaggctcagcagggagctgctggaggtagtagagcctgaagtcttgcaggactcactggatagatgttattcaactccttccagttgtcttgaacagcctgactcctgccagccctatggaagttccttttatgcattggaggaaaaacatgttggcttttctcttgacgtgggagaaattgaaaagaaggggaaggggaagaaaagaaggggaagaagatcaaagaaggaaagaagaaggggaagaaaagaaggggaagaagatcaaaacccaccatgccccaggctcaacggcgtgctgatggaagtggaagagcctgaagtcttacaggactcactggatagatgttattcgactccgtcaatgtactttgaactacctgactcattccagcactacagaagtgtgttttactcatttgaggaacagcacatcagcttcgccctttacgtggacaataggttttttactttgacggtgacaagtctccacctggtgttccagatgggagtcatattcccacaataagcagcccttactaagccgagagatgtcattcctgcaggcaggacctataggcacgtgaagatttgaatgaaactacagttccatttggaagcccagacataggatgggtcagtgggcatggctctattcctattctcaaaccatgccagtggcaacctgtgctcagtctgaagacaatggacccacgttaggtgtgacacgttcacataactgtgcagcacatgccgggagtgatcagtcagacattttaatttgaaccacgtatctctgggtagctacaaaattcctcagggatttcattttgcaggcatgtctctgagcttctatacctgctcaaggtcattgtcatctttgtgtttagctcatccaaaggtgttaccctggtttcaatgaacctaacctcattctttgtgtcttcagtgttggcttgttttagctgatccatctgtaacacaggagggatccttggctgaggattgtatttcagaaccaccaactgctcttgacaattgttaacccgctaggctcctttggttagagaagccacagtccttcagcctccaattggtgtcagtacttaggaagaccacagctagatggacaaacagcattgggaggccttagccctgctcctctcaattccatcctgtagagaacaggagtcaggagccgctggcaggagacagcatgtcacccaggactctgccggtgcagaatatgaacaatgccatgttcttgcagaaaacgcttagcctgagtttcataggaggtaatcaccagacaactgcagaatgtagaacactgagcaggacaactgacctgtctccttcacatagtccatatcaccacaaatcacacaacaaaaaggagaagagatattttgggttcaaaaaaagtaaaaagataatgtagctgcatttctttagttattttgaaccccaaatatttcctcatctttttgttgttgtcatggatggtggtgacatggacttgtttatagaggacaggtcagctgtctggctcagtgatctacattctgaagttgtctgaaaatgtcttcatgattaaattcagcctaaacgttttgccgggaacactgcagagacaatgctgtgagtttccaacctcagcccatctgcgggcagagaaggtctagtttgtccatcaccatttatgatatcaggactggttacttggttaaggaggggtctaggagatctgtcccttttagagacaccttacttataatgaagtacttgggaaagcggttttcaagagtataaatatcctgtattctaatgatcatcctctaaacattttatcatttattaatcctccctgcctgtgtctattattatattcatatctctacactgcaaattttgggtctcaatttttactgtgcctttgtttttactagtgtctgctgttgcaaaaagaagaaaacattctctgcctgagttttaatttttgtccaaagttaattttaatctatacaattaaaaccttttgcctatcaaaaaaaaaaaaaaaaaactcttgttttggagcttcaagactttgcatttcctagtatttctntttgccagttctcaatttcctgtgtttgnaatgttgaaattttttggtgaagtactgaacttgcttttnntccggtttctacatnnagagatgaatttatactgccatcttacggctatt

SEQ ID NO: 574585 - DNA, 166 bp, Homo sapiens
gaagacttgcgtaactcagtggactaacattttccccgattagtatccatgaggacatgggttctttccctggcttcgctcagtggattaaggatccggcgttgccatgagctgtggtgtaggtggcacaggcgcctcatatccatgttgttgcgtctgtggcgta

SEQ ID NO: 574586 - DNA, 4960 bp, Homo sapiens
  misc_feature (56)..(56): n is a, c, g, or t
  misc_feature (459)..(459): n is a, c, g, or t
  misc_feature (2171)..(2171): n is a, c, g, or t
agcttgcagagcagctcaagcaagctgaggagctcaggcaatataaagtcctggtncactccaggaacgagagctgacgcagtaaaggagaagttacaggaagggagagatgcctcccgctcattgaatgagcatctccaggccctcctcactctggatgagccggacaagtcccaggggcaggacctccaagaacagctggctgaggggtgtagactggcacagcaccttgtccaaaagctcagcccagggaggtgcagaaggctgaagagagcaaagtccctgaggactcactggaggaatgtgccatcacttgttcaaatagccacggcccttgtgactccaaccagcctcacaagaacatcaaaatcacatttgaggaagacgaagtcaactcaactctggttgtagacagagaatcctctcatgatgaatgtcaggatgctctaaacattctcncagtccccggccccacctcttctgccacaaacgtcagcatggtggtatcagccggccctttgtccagcgagaaggcagagatgaacattctagaaatcaatgagaaattgcgcccccagctggcagagaagaaacagcagttcagaaacctcaaagagaaatgttttctaactcaactggccggcttcctggccaaccagcagaacaaatacaaatatgaagagtgcaaagacctcataaaatctatgctgaggaatgagcgacagttcaaggaggagaagcttgcagagcagctcaagcaagctgaggagctcaggcaatataaagtcctggttcacgctcaggaacgagagctgacccagttaagggagaagttacgggaagggagagatgcctcccgctcattgaatgagcatctccaggccctcctcactccggatgagccggacaagtcccaggggcaggacctccaagaacagctggctgaggggtgtagactggcacagcaccttgtccaaaagctcagcccagaaaatgacaacgatgacgatgaagatgttcaagttgaggtggctgagaaagtgcagaaatcgtctgcccccagggagatgcagaaggctgaagaaaaggaagtccctgaggactcactggaggaatgtgccatcacttgttcaaatagccatggcccttatgactccaaccagccacataggaaaaccaaaatcacatttgaggaagacaaagtcgactcaactctcattggctcatcctctcatgttgaatgggaggatgctgtacacattattccagaaaatgaaagtgatgatgaggaagaggaagaaaaagggccagtgtctcccaggaatctgcaggagtctgaagaggaggaagtcccccaggagtcctgggatgaaggttattcgactctctcaattcctcctgaaatgttggcctcgtaccagtcttacagcagcacatttcactcattagaggaacagcaagtctgcatggctgttgacataggcagacatcggtgggatcaagtgaaaaaggaggaccaagaggcaacaggtcccaggctcagcagggagctgctggatgagaaagggcctgaagtcttgcaggactcactggatagatgttattcaactccttcaggttgtcttgaactgactgactcatgccagccctacagaagtgccttttacgtattggagcaacagcgtgttggcttggctgttgacatggatgaaattgaaaagtaccaagaagtggaagaagaccaagacccatcatgccccaggctcagcagggagctgctggatgagaaagagcctgaagtcttgcaggactcactggatagatgttattcgactccttcaggttatcttgaactgcctgacttaggccagccctacagcagtgctgtttactcattggaggaacagtaccttggcttggctcttgacgtggacagtgagtaccttactgtgaaggtgataagcctccacctggtcttccagataggggtgatattcctgttccaagtggcccttactgacccgagagatgtcattgccgcaggcaggacctatgggcgcatataggttgtaatgaaactgtagtctcagttggaagcctagacatgaaatgggtcagtgagcaaggctctattcctagtctccagccatgcctgtggcaacctgagcccnctctcagcacattggacccaggcagatgtaaaaaattcacagaactatgatttggactcaagggtttgtagatttcctccttcattctaatttcagtgtctaaaattcttgcatccatgaacgagctgggcatttgatgagacagggctgaatactgcagttttcctcctagaaatcatctggggcattttctttgaactgatgggaacaataaggcataactgtttgcacaaacttgggataaatgattttgggataacgatctaccagaatagggatatttcacccttggttctgagatgcaaaccaaagaatatcatgaccagctttcaggcctcctgaagtatatctctcacattgtcctgttctcatgctgaggagcctgagatccctgtgtggggattagacagtggactgttatgggtgtaggtgaattggcttattttgtctgtccctgtctgaatgtattgcaggaattaaaaaggaccaagaagaggaagaagaccaaggcccaccatgccctcagcagggagctgctggatgagaaagggcctgaagtcttgcaggactcactggatagatgttattcaactccttcaggttgtcttgaactgactgactcatgccagccctacagaagtgccttttacatattggagcaacagcgtgttggcttggctgttgacatggatgaaattgaaaagtaccaagaagtggaagaagaccaagacccatcatgccccaggtcagcagggagctgctggaggtagtagagcctgaagtcttgcaggactcactggatagatgttattcaactccttccagttgtcttgaacagcctgactcctgccagccctatggaagttccttttatgcattggaggaaaaacatgttggcttttctcttgacgtgggagaaattgaaaagaaggggaaggggaagaaaagaaggggaagaagatcaaagaaggaaagaagaaggggaagaaaagaaggggaagaagatcaaaacccaccatgccccaggctcaacggcgtgctgatggaagtggaagagcctgaagtcttacaggactcactggatagatgttattcgactccgtcaatgtactttgaactacctgactcattccagcactacagaagtgtgttttactcatttgaggaacagcacatcagcttcgccctttacgtggacaataggttttttactttgacggtgacaagtctccacctggtgttccagatgggagtcatattcccacaataagcagcccttactaagccgagagatgtcattcctgcaggcaggacctataggcacgtgaagatttgaatgaaactacagttccatttggaagcccagacataggatgggtcagtgggcatggctctattcctattctcaaaccatgccagtggcaacctgtgctcagtctgaagacaatggacccacgttaggtgtgacacgttcacataactgtgcagcacatgccgggagtgatcagtcagacattttaatttgaaccacgtatctctgggtagctacaaaattcctcagggatttcattttgcaggcatgtctctgagcttctatacctgctcaaggtcattgtcatctttgtgtttagctcatccaaaggtgttaccctggtttcaatgaacctaacctcattctttgtgtcttcagtgttggcttgttttagctgatccatctgtaacacaggagggatccttggctgaggattgtatttcagaaccaccaactgctcttgacaattgttaacccgctaggctcctttggttagagaagccacagtccttcagcctccaattggtgtcagtacttaggaagaccacagctagatggacaaacagcattgggaggccttagccctgctcctctcaattccatcctgtagagaacaggagtcaggagccgctggcaggagacagcatgtcacccaggactctgccggtgcagaatatgaacaatgccatgttcttgcagaaaacgcttagcctgagtttcataggaggtaatcaccagacaactgcagaatgtagaacactgagcaggacaactgacctgtctccttcacatagtccatatcaccacaaatcacacaacaaaaaggagaagagatattttgggttcaaaaaaagtaaaaagataatgtagctgcatttctttagttattttgaaccccaaatatttcctcatctttttgttgttgtcatggatggtggtgacatggacttgtttatagaggacaggtcagctgtctggctcagtgatctacattctgaagttgtctgaaaatgtcttcatgattaaattcagcctaaacgttttgccgggaacactgcagagacaatgctgtgagtttccaacctcagcccatctgcgggcagagaaggtctagtttgtccatcaccatttatgatatcaggactggttacttggttaaggaggggtctaggagatctgtcccttttagagacaccttacttataatgaagtacttgggaaagcggttttcaagagtataaatatcctgtattctaatgatcatcctctaaacattttatcatttattaatcctccctgcctgtgtctattattatattcatatctctacactgcaaattttgggtctcaatttttactgtgcctttgtttttactagtgtctgctgttgcaaaaagaagaaaacattctctgcctgagttttaatttttgtccaaagttaattttaatctatacaattaaaaccttttgcctatca

SEQ ID NO: 574587 - DNA, 153 bp, Homo sapiens
cccagctgttgtcagttatttgggggtatgtatcaggagtggaattgctgagtcatatggtttagtgatgacaaagaggctattcttagattaccggatagtgactctagtcactcctgtaaccgtgccgaatacccagcttgagacaggcga

SEQ ID NO: 574588 - DNA, 191 bp, Homo sapiens
atattttttatttccaaaaaaaattcattaattgctttttaactctttttataaccaagcaatttaattccaattgttaaaactgaaatactggaaaaagatatttttcctgtcattgatgaaatatatcaaagtaactggagtagctgggatttactagtagggtaaataaaattccctcttcaatccca

SEQ ID NO: 574589 - DNA, 318 bp, Homo sapiens
  misc_feature (82)..(82): n is a, c, g, or t
  misc_feature (140)..(140): n is a, c, g, or t
  misc_feature (153)..(153): n is a, c, g, or t
  misc_feature (228)..(228): n is a, c, g, or t
gatttaaaaaaccaggtcccccagaagcaggggggaggctctgcttccagcggccgctcggcagcctggacctgtggacccnggttgtaaagagtaaattgaatcataggaaaccagtgtcacctttaaaaacaccaatnaatttaaaagaanacgcgtcaaacatttccgggaacggaagtgttaatttcaccgcactacaggggaccaactgggaaacaaatgaantgtaaggcatttaacacgtgtcctgaataagccacaacctggaaattgaagcaaaccaagcctttgaaaaaaaatttaaaaacccccaaa

SEQ ID NO: 574590 - DNA, 204 bp, Homo sapiens
ggacaattggagatactaattcaaggctgtctctaacagagtttaacatatccgtaaacatcagtgcttctgataccctccccttgcattcagatactggtacacactttagcacaccttcacccactagtcagcatgtcacaatgtagaaaggctgtaagtatcaaactaacttctcatcttgataccccaaacaacaactct

SEQ ID NO: 574591 - DNA, 962 bp, Homo sapiens
  misc_feature (962)..(962): n is a, c, g, or t
ctgaagatggctgacaaagggcctcgtggtggatggtctgtggtgtcatatgtatcctgagagaacatcatgctgaaaatatgtgtagacgatagaacatgattgttgaccctagagaaagggggcttgttgaggcgagtttgcgttcatttgaaatcgatatgaggtgttggaagtggatctagcgattacgaacgtgaaatacaagattattgtatgtgagatggctgcgaattttctagcttatgggtcaatgcattaaagttgagtacagagggaagacgtgtcagagcagagcctagataccaaatatatggtcctgtaacatagtgtggttaactttaaatcggaacactggaaaaaacggaaaatactcatagaggagaataaagtcttcgttgggagaattatgttggtgaggggttgaggatgagatcttgactaccaatttttgtaacgaaagcattaggaaggaagagttgcgcttgattgactggtctccatataagcgggtgtttgtctaaggggtagggatgtatgtgtggagataggttgtgtggataaagcttctaatggtgggatgtgttgggctactaaaggtggcttgcctgagaatgtaaatgagttttaaggcagggaaatcaaatgttgactgatcattaggtcagagggttcaagggtgggggattgcgaatgtctatctgtggacgttggagaaattgagggtcatctaacaaagtgagtgcatttggatgttcaaaagttttttgctgtggtgaaacgatgcgatgggatgcggcaaagcagtgtgatttgaaatttttgtaagagaaagcacgatgtggtgtgtttcgcacatcagatgaaactgatttggtaggggaaaataggaaggggtaaggtaaaagagagagaattaaaagagttattaaaacaaaaatgagagtggattgtgagctatn

SEQ ID NO: 574592 - DNA, 388 bp, Homo sapiens
  misc_feature (90)..(90): n is a, c, g, or t
  misc_feature (338)..(338): n is a, c, g, or t
  misc_feature (343)..(343): n is a, c, g, or t
aggtttttctttttgaaaaaaggtcttgctctgtaacccaggctggagtgcaagtcatacaatcatgactcactgcagcctcgacctccnaaagcataaatgatcctcctacttcagcctccccagcagctgggaccacaggcgtgcgctaccacgcccaggctaatagtttaaaaaattttttggcagagacagggtctcatcatgttgccctggctggtcttgacctactgggctccagcgatcctcctgccttggcctcccaaagtgctgggattacaggcgtgagccaccgcacccggccacacttttccaaattgtaagcaggtaggaggccncttanctcgtcggcccattgtgcagggtggccactgtccaaagagatggg

SEQ ID NO: 574593 - DNA, 415 bp, Homo sapiens
ctccacgtttgggcatctcccttgggtttcccgggaaaccaggggcttggtggctaaaacggactggcttggacctttcacagtttggtattttctcagagaggtagccagggttagctctggtaaacgggatgctgctggcaaactggctcttctcggtatccaggagcaccagctgttggcaagtacacaggaggtctgggtggcttggaatggctgtggattcatcctaacggtcagttctttaaaatgcccgttaatcgagtatctggcctactcgggccactcacatggtccaatgcggcatagaggcagcatgcttctcaggaccaccggtggttcatggaaaagaccgggccccacgagatgtacacatgtgtggattatttttaaacccctgcaggtgagagcccag

SEQ ID NO: 574594 - DNA, 689 bp, Homo sapiens
tcggtctaggtgcgaggctggtttgaattcggccgagggtgatggctgctggagtctggcggcgctgggagctgaccctgcgtgggtccctgggtggggtgatgttgggatgcctgcgaatgcccccactgagtgcctgcgctgcctgggcctcccctcccccccgtggctgggctgccatgcgtgggtgatgccctgggcgactgcggagctggctggcatgcgctggggtcgcctgttcgaggagctggacagtaacaatggatggcctgcgtggactgtgcacgatgttgcgccatgggtgctggccatggctgtggctggggtgcaacccagaccccggcgcccaacagggtatctcctctgagggtgatgctgacccagatggcgggctcgacctggaggaattttcccgctatctgcaggagctgggaacagcgtctgctgctcatgtttcacagtcttgaccggaaccaggatggtcacattgatgtctctgagatccaacagagtttccgagctctgggcatttccatctcgctggagcaggctgagaaaattttgcacagcattggaccgagacggcacaatgaccattgactggcaagaatggcgcgacacttcctgttgcattcgctggaaaatgtggaggacgtgctgtatctctggaagcatccacgctctcttct

SEQ ID NO: 574595 - DNA, 115 bp, Homo sapiens
ttaaaagggtgaggatagtataacacaatattacccacgcaaagaaacacattggtttctaagaaaagaaacataaaactatacatatccgtgagtatcattggtaacttctgtt

SEQ ID NO: 574596 - DNA, 466 bp, Homo sapiens
ctttgctgtcgctgctagatggatccccaatgtctctccttgctgaaccttccgtgggccctcttgactccatcgtcataggatcttggattaaatgggggtcaccgtaagcctatctctaggtcttatccatctttccccacgtctgggttaggtatccccagagtgattggcttgtatcttctgcttactccatctgaggtacttattgccagctggcttatctatctccctactcaatactacgagtgtatgccttgttcacctaaattctactgtctagctcaacattttattgaatcaactaatcatcaaaaggcctaacaaattatttcacattcattaaaatacagctgtgcagtaaatacaagttatcagtgaaattttacctaccattaatgagtaataataggttctgttcaacaagttttccatttgacctgccatgttataaactagaaatatt

SEQ ID NO: 574597 - DNA, 104 bp, Homo sapiens
  misc_feature (14)..(14): n is a, c, g, or t
  misc_feature (38)..(38): n is a, c, g, or t
  misc_feature (61)..(61): n is a, c, g, or t
  misc_feature (78)..(78): n is a, c, g, or t
  misc_feature (85)..(86): n is a, c, g, or t
  misc_feature (98)..(98): n is a, c, g, or t
aaactgcgtttatntccacccacactatcatagattgnttaggtaaatacaatgcttatcnagtggtattctacttgnacacagnntactgggtgaanatgtgt

SEQ ID NO: 574598 - DNA, 1115 bp, Homo sapiens
  misc_feature (930)..(930): n is a, c, g, or t
atttatatctgcgggggatcagctgacgctccgcatgcagactgcggagtcagacggcgctatgtacgccctcttcctcctggccagcctcctgggcgcggctctagccggcccggtccttggactgaaagaatgcaccaggggctcggcagtgtggtgccagaatgtgaagacggcgtccgactgcggggcagtgaagcactgcctgcagaccgtttggaacaagccaacagtgaaatcccttccctgcgacatatgcaaagacgttgtcaccgcagctggtgatatgctgaaggacaatgccactgaggaggagatccttgtttacttggagaagacctgtgactggcttccgaaaccgaacatgtctgcttcatgcaaggagatagtggactcctacctccctgtcatcctggacatcattaaaggagaaatgagccgtcctggggaggtgtgctctgctctcaacctctgcgagtctctccagaagcacctagcagagctgaatcaccagaagcagctggagtccaataagatcccagagctggacatgactgaggtggtggcccccttcatggccaacatccctctcctcctctaccctcaggacggcccccgcagcaagccccagccaaaggataatggggacgtttgccaggactgcattcagatggtgactgacatccagactgctgtacggaccaactccacctttgtccaggccttggtggaacatgtcaaggaggagtgtgaccgcctgggccctggcatggccgacatatgcaagaactatatcagccagtattctgaaattgctatccagatgatgatgcacatgcaacccaaggagatctgtgcgctggttgggttctgtgatgaggtgaaagagatgcccatgcagactctggtccccgccaaagtggcctccangaatgtcatccctgccctggaactggtggagcccattaagatagtacgaggtcccaggaaagtctgatgtgtactgggaggtgtgtgaattgcctggtgaatggaggtgaccgaagtcgtgatggatcaacgagagagtactgagtaaagaaatactcgacgcttgtgacatagatgtggtcgaa

SEQ ID NO: 574599 - DNA, 568 bp, Homo sapiens
ttctagatcgcgagcggctgccctttattttgttttttaaagtcttctaagtccttttaatggtccttataaagctagcataagatataaacttaagtagtacacatgagtttataattgactaatctcggacagatagctaagcatagcacatcagagcataacacagggtggagggaaatacggtggtccaaggacatcttctattctgggacctaataattcaatagagaaagaactactggtagtcacgggggttacagaaggtttcatgggacagcgaacataaagctctactagctaacaaataggtcttaagtgataaaaagggtgggccttcagagaagctaagggtaccaatgtgtggtggcagtccaaaattacgaggaaaagtgagttcccttcaggggttcacattcagcaatttattttttccccctttggagacagagtctggctctggttggcccaggtgggatgtgcagtgggcatgatctaggcccatgggaacactccgcctcccggggttcaagcaattctcatggcctaagcctcccgagtacgctgg

SEQ ID NO: 574600 - DNA, 1128 bp, Homo sapiens
  misc_feature (943)..(943): n is a, c, g, or t
gcacaacagaaatagtagagcgcgataccccgcttgttatttcaggcactcaggtgctggagctttgcttgtatattactgttcccttgccgtgatcaattctcctgggcgcggctctagccggcccggtccttggactgaaagaatgcaccaggggctcggcagtgtggtgccagaatgtgaagacggcgtccgactgcggggcagtgaagcactgcctgcagaccgtttggaacaagccaacagtgaaatcccttccctgcgacatatgcaaagacgttgtcaccgcagctggtgatatgctgaaggacaatgccactgaggaggagatccttgtttacttggagaagacctgtgactggcttccgaaaccgaacatgtctgcttcatgcaaggagatagtggactcctacctccctgtcatcctggacatcattaaaggagaaatgagccgtcctggggaggtgtgctctgctctcaacctctgcgagtctctccagaagcacctagcagagctgaatcaccagaagcagctggagtccaataagatcccagagctggacatgactgaggtggtggcccccttcatggccaacatccctctcctcctctaccctcaggacggcccccgcagcaagccccagccaaaggataatggggacgtttgccaggactgcattcagatggtgactgacatccagactgctgtacggaccaactccacctttgtccaggccttggtggaacatgtcaaggaggagtgtgaccgcctgggccctggcatggccgacatatgcaagaactatatcagccagtattctgaaattgctatccagatgatgatgcacatgcaacccaaggagatctgtgcgctggttgggttctgtgatgaggtgaaagagatgcccatgcagactctggtccccgccaaagtggcctccangaatgtcatccctgccctggaactggtggagcccattaagatagtacgaggtcccaggaaagtctgatgtgtactgggaggtgtgtgaattgcctggtgaatggaggtgaccgaagtcgtgatggatcaacgagagagtactgagtaaagaaatactcgacgcttgtgacatagatgtggtcgaa

SEQ ID NO: 574601 - DNA, 359 bp, Homo sapiens
  misc_feature (19)..(19): n is a, c, g, or t
  misc_feature (29)..(29): n is a, c, g, or t
  misc_feature (237)..(237): n is a, c, g, or t
  misc_feature (343)..(343): n is a, c, g, or t
gacaaagtaaccaaatctncagccagctnccgggcagagaagaaagcagagcccccacctagcaagcccacggtggccaagacggggctggcactgatcaaggattgttgcggggccacccagtgcaacatcatgtagcccccacgtgggtgaccctgggccatggggacccccccccaccctcttgtctttatagcccccggtgaaatgggggctattaaagacaagaggggttgnaagggcaagcccgtgactgttcaccagagggccatgggcacggcaggcgggctgggccaccctgttacagagttttaggcagttagggatcttttcaccgttcgcntggttccttccccaga

SEQ ID NO: 574602 - DNA, 914 bp, Homo sapiens
gggaaggttgtgcatggaggccactgaaagctgacatctgtataaggccttcaatggaatgagaaaccaggccctgcgtcaggcagtgtgagtttgccgtttgtccttaactttctttttatttttatttaaaaaaagaaaagtttaaaacaaatctccgctttaaagacggaataccgatcgttgggtgtctggcaacaagggtaatttccaacttattgcgtatgaggttattctgttcgtgcaaggtctcaggatatttttcgagccctataagaggcccccgtgagttttatgccctttctaaaaagaaagaaaacatgaaaaaaaacatgacaaacaaaagagagagggctggccgcgacctccccatgagagacgtacacacgccacgagagtgagaggacccccaaatggttgatcagtggcacatgaccccaccgcgattgttgtcgggccacagagaggggtgggcacccacctaaacagctggagagcaccagacgtctataataaaaacgccacaaagagcaacacgcgaacgcgaacaacaagctaatccaacaaaaacgaaatcgacgaagacaagagtgagacgacacaaaggaccgtgctgcaagatgagcgatgatgttgcgcacaaaatcatacgccgtaggagagagggccgcagagcgacaacacactcaaagcacaaacaggcgagaggcggtgcgtccacagacgccacaaaacgatgatgtacgaacagaagacaccaactgccacgctcctctcacaccaggccagaggaaagatcaatccgcgagcacgaggttagagcaacacgacgaagcgcgaagtgacctcatgaacaacaagcccaggtaaggcaacaaacacacctgcgtgcacaccctaacccatgcagacgt

SEQ ID NO: 574603 - DNA, 929 bp, Homo sapiens
gacgccgggagctatctgcgtcttgctacagtccgggcgtcgggtccacagacgtcgaaagggccctcgcaatggcttgggaaaccgctgaccacacggtctcctattcccagtagccccgtgctgctgtacgcccacactacctcttccttagacggcttccggtcccccgcatcctcagtacctctgctatctcttttgcagaagtccaggttcaggccccgtcctgttagttgcgtgcaactccctcacccacagcagtacctgaggtggcttctggagagactgcacatgtagctccaaactgctgcagagcaaagcttcgcgtgaactggggctggggtcatacaccccagtgccgactgatccagaatccactggcaatctctgcgtgtcgatctgggcctaccttgcgtgcgggggccatcgctgcgtgtacagtctttgcccgctgcctgattcttcctctcatcgcgacgggccagcgagaggcagccaggatccacaatcaccttgccagagatccagacagtacaccaagtcgaatcagagaggccaagtcagcaggagacccacattcgcagctactacaaaggcttacctcggaccatgggcacctcaaccacaacaaagccattggcatccaacccctaattacacacctcatcattcgtccctggtgactccacgccccccaaagccttcaagcactcacttcctcacattggctcttgacccacccacaccggccccaaaagccatacacatgctgtacccaaaacctggcacgaaaccggcgccagcactccaagcaaaggctatcacaacgaattcccaccgcgccaacccgaacatcacaatcacagccgcatattataccgccctgcgcagccccaacatggcatccacaaatgtatcgccctgaccac

SEQ ID NO: 574604 - DNA, 329 bp, Homo sapiens
ggaattccacccatcacaacttcattcaggaaccataaaacagtcctgcgtgggcctgtacgcccaaaccccgactgactggtgtgtctgataggcgacacagatattaattaagtagctgccgcaaaacctttccgcctggcacccgtgtgacccgtgcctttatcacccatgctgcttcccatggagtttatggaagcatgtgcaatgtccttaccatgatgatgatgcccttgctttttgatcaaatgggcgatgtgaatcgcatgaaaactaagcgagctgaagtggctctaaatgatttgaagatggctttggggctttggatc

SEQ ID NO: 574605 - DNA, 175 bp, Homo sapiens
gcacttgagctgcgacctgatcggactccgacctgggcacgttcactctagtcattaggcaacctcgtggttcccggctcccgacagtataccatattgacgccgaacttagagcggacacccgatcggcatagcgcactacagctcataactcctggccgcaagctaaccgagc

SEQ ID NO: 574606 - DNA, 462 bp, Homo sapiens
gaatacatgcatataccaacacacctgcctaattttttattatttgtagagatggagttgtccttatgttacccaggttggtctcaaactcctgggttcaagcaatcctctcaccttggcctaccaaagggctgggattacaggtgtgagccaccatgcctggagtacattctatatattcatatgatttctcaagctgggtgcagcacgtcacgcctgtaatcccagcaccttgggaggccaaggcagacggatcacaaggtcaggagatcgagaccatcctggccaacacggtgaaaccccgtctctaccaaaaatgcaaaaaattagccaggcatgatggcatcatgtgcttgcagtcccagctactcgggaagtagaggcaggagaattgcttgaacccaggaggtggcggttgcagtgagccgagactacaccactgcactccagactgggcatcag

SEQ ID NO: 574607 - DNA, 960 bp, Homo sapiens
ggttttgtgtgcggtgtgtcttgagtgggtttgcttgggcttgcgcgtgtgtcgcgtgacaggacgaccgatgagggcggtgtcccgctatggtgctcccctgccgggccgtttgtggatggcccgaattgcggccaccagtagttgtaccttgcgccgggatgaccgtgtcttgtctttctgtcggggttcgcctccttctataaaggggccatgtttggcctcgcgttgatggccggttctcgtgccttgcatgggtttgtcatcaaccacccccacgtgcagggggggttttaacgctccctcatatgccacatagttgtgacttgagctgctagctccgccgtaggtagaattagacggttttttgtccggggtgatccctgctatagaatcctgttggtattgattgaacgctatttgtttttttcgctgaatttttcgacgccatggtcccatttgcgcattgtgtccgcctccccccgggcccgccctcaatagtttcgacgccacggttaaataggaatatcaaaggggtgttcaactcactggtgtagcctctcgctcccccgcgtcgcccgtcgcccctttggggacgcgctccccgcctcgcttacgcagcgtgtttatttgacccaaataggcaccgctttacgtagatactccctcacatatacacattagcctctcacttaagccccgccccattctttaaggcccccctaccgcctcgccccttactccttacatcattactataattcgccttaattcatgtgactaccccctaagacccactagcttcaccccaaattttgacacacacacgtcacatccaaccggccctctttgttaacacaaaaccaaaaaccgccccccctgtctgccgccccccctatcttccccctccccgcgatttctcccttttcccccttttaataaaaatctgcaacaaaaaca

SEQ ID NO: 574608 - DNA, 149 bp, Homo sapiens
cacagcctgcctgctcggtctccaaaagctccttcaggtcggcgctggcctctgagcggatgatctccaggttgatccctgctgcttgcgagggctgttccatgtcccggggcagctgccggaggtcggggtggctcttttccgcttcc

SEQ ID NO: 574609 - DNA, 183 bp, Homo sapiens
accactccaccttactaccagacaacttagccaaaccatttacccaaataaagttaggcgatagaaattgaaccttgcgcatagatatagtaccgcaaggaaagatgaaaaattataccagcatattatagcaggctaccccttactctgcatatgattactgattacttgcagggagccagc

SEQ ID NO: 574610 - DNA, 286 bp, Homo sapiens
aaaccccgtctccactaaaaatacaaaaaattagctgagcgtggtggcacatacctgtaatcccagctactcaggaggctgaggcaggagaattgcttgaacctgggaggcagaggttgcagtgagctgagatcgcaccactgcattccagcctgggtgacaaaattaaataaaaaaaaaaaagaaagctttctcactagctcgacttttcctttttttcttattgcgcgttacatgtgtacttcggtttttcatgatcagataattcttccttttttggaaaagt

SEQ ID NO: 574611 - DNA, 1186 bp, Homo sapiens
atgatgctctccttatacggtggtgaaccagtgctcagtgtgcagcggtacctcagttcccgcacggagaatggctgctgtgctactccatgttatgcagtgttcccctatccagcaggtgtccctcatgcgtgggctagcctcatatggcctggtcatgttcgctgtattaccagtgagtatcccatgagcattcagcaagtgctcaggcagccccagaccagttctgtccttgtacttatgtgatggatctcctgaatggtgcctgccaggcctgccagtggctcttcatttgcctgcctcttcagccggctctctcagcacatatatcctctgcttataattcatttggcaactatgttacgatgtgaagacctgattacgacctatggtaccctgcagttctcttgaagccctgtggaccatacaatgctattccagaaggcctatgcccttttggcctatgaggctgcttattgtctagcgacatggccctatattatcctacccagatgggaccctgttgcttgcacggcaagcaaatcaggcatcttttggcactgcgtagaggggacacgcattgctgtggaaccatctatcatgccaatatggggaaaaatgatacataataccaattgattgccataaaccttccatggttgcatggatgtgaggcactaaatgagaatgggcatccgatatggaccttactggaattggcatcggaaggcatcagatgaaccaaaacatgtggcttccagcaatgcccaacccatctacactatctaattgtagtccatgatttcctccccttgcccaccaagtcttaaaccgtattgccacctggttgacccaaacttggctgccctttgactaacctactacaaaagccgcacatgggtttagaagcggggtcctaattcccttgtgcctacactaatctgcaacaaggttgggtcaacaaaatcccacccgccgtgaattgttggtgtgacctgattgtctaagacaaacaaccacgggtgcaacatttaaacggcggacctgtgacccttgctacagatatacccagagggtgtacaacgctcaatggacaaccgatcaagtatcactagaaagtggccacgtaacgtacactggactgagaccacataagaggtgccgtcctaagacgggcactctaacg

SEQ ID NO: 574612 - DNA, 4251 bp, Homo sapiens
  misc_feature (56)..(56): n is a, c, g, or t
  misc_feature (459)..(459): n is a, c, g, or t
agcttgcagagcagctcaagcaagctgaggagctcaggcaatataaagtcctggtncactccaggaacgagagctgacgcagtaaaggagaagttacaggaagggagagatgcctcccgctcattgaatgagcatctccaggccctcctcactctggatgagccggacaagtcccaggggcaggacctccaagaacagctggctgaggggtgtagactggcacagcaccttgtccaaaagctcagcccagggaggtgcagaaggctgaagagagcaaagtccctgaggactcactggaggaatgtgccatcacttgttcaaatagccacggcccttgtgactccaaccagcctcacaagaacatcaaaatcacatttgaggaagacgaagtcaactcaactctggttgtagacagagaatcctctcatgatgaatgtcaggatgctctaaacattctcncagtccccggccccacctcttctgccacaaacgtcagcatggtggtatcagccggccctttgtccagcgagaaggcagagatgaacattctagaaatcaatgagaaattgcgcccccagctggcagagaagaaacagcagttcagaaacctcaaagagaaatgttttctaactcaactggccggcttcctggccaaccagcagaacaaatacaaatatgaagagtgcaaagacctcataaaatctatgctgaggaatgagcgacagttcaaggaggagaagcttgcagagcagctcaagcaagctgaggagctcaggcaatataaagtcctggttcacgctcaggaacgagagctgacccagttaagggagaagttacgggaagggagagatgcctcccgctcattgaatgagcatctccaggccctcctcactccggatgagccggacaagtcccaggggcaggacctccaagaacagctggctgaggggtgtagactggcacagcaccttgtccaaaagctcagcccagaaaatgacaacgatgacgatgaagatgttcaagttgaggtggctgagaaagtgcagaaatcgtctgcccccagggagatgcagaaggctgaagaaaaggaagtccctgaggactcactggaggaatgtgccatcacttgttcaaatagccatggcccttatgactccaaccagccacataggaaaaccaaaatcacatttgaggaagacaaagtcgactcaactctcattggctcatcctctcatgttgaatgggaggatgctgtacacattattccagaaaatgaaagtgatgatgaggaagaggaagaaaaagggccagtgtctcccaggaatctgcaggagtctgaagaggaggaagtcccccaggagtcctgggatgaaggttattcgactctctcaattcctcctgaaatgttggcctcgtaccagtcttacagcagcacatttcactcattagaggaacagcaagtctgcatggctgttgacataggcagacatcggtgggatcaagtgaaaaaggaggaccaagaggcaacaggtcccaggctcagcagggagctgctggatgagaaagggcctgaagtcttgcaggactcactggatagatgttattcaactccttcaggttgtcttgaactgactgactcatgccagccctacagaagtgccttttacgtattggagcaacagcgtgttggcttggctgttgacatggatgaaattgaaaagtaccaagaagtggaagaagaccaagacccatcatgccccaggctcagcagggagctgctggatgagaaagagcctgaagtcttgcaggactcactggatagatgttattcgactccttcaggttatcttgaactgcctgacttaggccagccctacagcagtgctgtttactcattggaggaacagtaccttggcttggctcttgacgtggacagaattaaaaaggaccaagaagaggaagaagaccaaggcccaccatgccctcagcagggagctgctggatgagaaagggcctgaagtcttgcaggactcactggatagatgttattcaactccttcaggttgtcttgaactgactgactcatgccagccctacagaagtgccttttacatattggagcaacagcgtgttggcttggctgttgacatggatgaaattgaaaagtaccaagaagtggaagaagaccaagacccatcatgccccaggtcagcagggagctgctggaggtagtagagcctgaagtcttgcaggactcactggatagatgttattcaactccttccagttgtcttgaacagcctgactcctgccagccctatggaagttccttttatgcattggaggaaaaacatgttggcttttctcttgacgtgggagaaattgaaaagaaggggaaggggaagaaaagaaggggaagaagatcaaagaaggaaagaagaaggggaagaaaagaaggggaagaagatcaaaacccaccatgccccaggctcaacggcgtgctgatggaagtggaagagcctgaagtcttacaggactcactggatagatgttattcgactccgtcaatgtactttgaactacctgactcattccagcactacagaagtgtgttttactcatttgaggaacagcacatcagcttcgccctttacgtggacaataggttttttactttgacggtgacaagtctccacctggtgttccagatgggagtcatattcccacaataagcagcccttactaagccgagagatgtcattcctgcaggcaggacctataggcacgtgaagatttgaatgaaactacagttccatttggaagcccagacataggatgggtcagtgggcatggctctattcctattctcaaaccatgccagtggcaacctgtgctcagtctgaagacaatggacccacgttaggtgtgacacgttcacataactgtgcagcacatgccgggagtgatcagtcagacattttaatttgaaccacgtatctctgggtagctacaaaattcctcagggatttcattttgcaggcatgtctctgagcttctatacctgctcaaggtcattgtcatctttgtgtttagctcatccaaaggtgttaccctggtttcaatgaacctaacctcattctttgtgtcttcagtgttggcttgttttagctgatccatctgtaacacaggagggatccttggctgaggattgtatttcagaaccaccaactgctcttgacaattgttaacccgctaggctcctttggttagagaagccacagtccttcagcctccaattggtgtcagtacttaggaagaccacagctagatggacaaacagcattgggaggccttagccctgctcctctcaattccatcctgtagagaacaggagtcaggagccgctggcaggagacagcatgtcacccaggactctgccggtgcagaatatgaacaatgccatgttcttgcagaaaacgcttagcctgagtttcataggaggtaatcaccagacaactgcagaatgtagaacactgagcaggacaactgacctgtctccttcacatagtccatatcaccacaaatcacacaacaaaaaggagaagagatattttgggttcaaaaaaagtaaaaagataatgtagctgcatttctttagttattttgaaccccaaatatttcctcatctttttgttgttgtcatggatggtggtgacatggacttgtttatagaggacaggtcagctgtctggctcagtgatctacattctgaagttgtctgaaaatgtcttcatgattaaattcagcctaaacgttttgccgggaacactgcagagacaatgctgtgagtttccaacctcagcccatctgcgggcagagaaggtctagtttgtccatcaccatttatgatatcaggactggttacttggttaaggaggggtctaggagatctgtcccttttagagacaccttacttataatgaagtacttgggaaagcggttttcaagagtataaatatcctgtattctaatgatcatcctctaaacattttatcatttattaatcctccctgcctgtgtctattattatattcatatctctacactgcaaattttgggtctcaatttttactgtgcctttgtttttactagtgtctgctgttgcaaaaagaagaaaacattctctgcctgagttttaatttttgtccaaagttaattttaatctatacaattaaaaccttttgcctatca

SEQ ID NO: 574613 - DNA, 4034 bp, Homo sapiens
  misc_feature (56)..(56): n is a, c, g, or t
  misc_feature (459)..(459): n is a, c, g, or t
agcttgcagagcagctcaagcaagctgaggagctcaggcaatataaagtcctggtncactccaggaacgagagctgacgcagtaaaggagaagttacaggaagggagagatgcctcccgctcattgaatgagcatctccaggccctcctcactctggatgagccggacaagtcccaggggcaggacctccaagaacagctggctgaggggtgtagactggcacagcaccttgtccaaaagctcagcccagggaggtgcagaaggctgaagagagcaaagtccctgaggactcactggaggaatgtgccatcacttgttcaaatagccacggcccttgtgactccaaccagcctcacaagaacatcaaaatcacatttgaggaagacgaagtcaactcaactctggttgtagacagagaatcctctcatgatgaatgtcaggatgctctaaacattctcncagtccccggccccacctcttctgccacaaacgtcagcatggtggtatcagccggccctttgtccagcgagaaggcagagatgaacattctagaaatcaatgagaaattgcgcccccagctggcagagaagaaacagcagttcagaaacctcaaagagaaatgttttctaactcaactggccggcttcctggccaaccagcagaacaaatacaaatatgaagagtgcaaagacctcataaaatctatgctgaggaatgagcgacagttcaaggaggagaagcttgcagagcagctcaagcaagctgaggagctcaggcaatataaagtcctggttcacgctcaggaacgagagctgacccagttaagggagaagttacgggaagggagagatgcctcccgctcattgaatgagcatctccaggccctcctcactccggatgagccggacaagtcccaggggcaggacctccaagaacagctggctgaggggtgtagactggcacagcaccttgtccaaaagctcagcccagaaaatgacaacgatgacgatgaagatgttcaagttgaggtggctgagaaagtgcagaaatcgtctgcccccagggagatgcagaaggctgaagaaaaggaagtccctgaggactcactggaggaatgtgccatcacttgttcaaatagccatggcccttatgactccaaccagccacataggaaaaccaaaatcacatttgaggaagacaaagtcgactcaactctcattggctcatcctctcatgttgaatgggaggatgctgtacacattattccagaaaatgaaagtgatgatgaggaagaggaagaaaaagggccagtgtctcccaggaatctgcaggagtctgaagaggaggaagtcccccaggagtcctgggatgaaggttattcgactctctcaattcctcctgaaatgttggcctcgtaccagtcttacagcagcacatttcactcattagaggaacagcaagtctgcatggctgttgacataggcagacatcggtgggatcaagtgaaaaaggaggaccaagaggcaacaggtcccaggctcagcagggagctgctggatgagaaagggcctgaagtcttgcaggactcactggatagatgttattcaactccttcaggttgtcttgaactgactgactcatgccagccctacagaagtgccttttacgtattggagcaacagcgtgttggcttggctgttgacatggatgaaattgaaaagtaccaagaagtggaagaagaccaagacccatcatgccccaggctcagcagggagctgctggatgagaaagagcctgaagtcttgcaggactcactggatagatgttattcgactccttcaggttatcttgaactgcctgacttaggccagccctacagcagtgctgtttactcattggaggaacagtaccttggcttggctcttgacgtggacacagaattaaaaaggaccaagaagaggaagaagaccaaggcccaccatgccccaggctcagcagggagctgctggaggtagtagagcctgaagtcttgcaggactcactggatagatgttattcaactccttccagttgtcttgaacagcctgactcctgccagccctatggaagttccttttatgcattggaggaaaaacatgttggcttttctcttgacgtgggagaaattgaaaagaaggggaaggggaagaaaagaaggggaagaagatcaaagaaggaaagaagaaggggaagaaaagaaggggaagaagatcaaaacccaccatgccccaggctcaacggcgtgctgatggaagtggaagagcctgaagtcttacaggactcactggatagatgttattcgactccgtcaatgtactttgaactacctgactcattccagcactacagaagtgtgttttactcatttgaggaacagcacatcagcttcgccctttacgtggacaataggttttttactttgacggtgacaagtctccacctggtgttccagatgggagtcatattcccacaataagcagcccttactaagccgagagatgtcattcctgcaggcaggacctataggcacgtgaagatttgaatgaaactacagttccatttggaagcccagacataggatgggtcagtgggcatggctctattcctattctcaaaccatgccagtggcaacctgtgctcagtctgaagacaatggacccacgttaggtgtgacacgttcacataactgtgcagcacatgccgggagtgatcagtcagacattttaatttgaaccacgtatctctgggtagctacaaaattcctcagggatttcattttgcaggcatgtctctgagcttctatacctgctcaaggtcattgtcatctttgtgtttagctcatccaaaggtgttaccctggtttcaatgaacctaacctcattctttgtgtcttcagtgttggcttgttttagctgatccatctgtaacacaggagggatccttggctgaggattgtatttcagaaccaccaactgctcttgacaattgttaacccgctaggctcctttggttagagaagccacagtccttcagcctccaattggtgtcagtacttaggaagaccacagctagatggacaaacagcattgggaggccttagccctgctcctctcaattccatcctgtagagaacaggagtcaggagccgctggcaggagacagcatgtcacccaggactctgccggtgcagaatatgaacaatgccatgttcttgcagaaaacgcttagcctgagtttcataggaggtaatcaccagacaactgcagaatgtagaacactgagcaggacaactgacctgtctccttcacatagtccatatcaccacaaatcacacaacaaaaaggagaagagatattttgggttcaaaaaaagtaaaaagataatgtagctgcatttctttagttattttgaaccccaaatatttcctcatctttttgttgttgtcatggatggtggtgacatggacttgtttatagaggacaggtcagctgtctggctcagtgatctacattctgaagttgtctgaaaatgtcttcatgattaaattcagcctaaacgttttgccgggaacactgcagagacaatgctgtgagtttccaacctcagcccatctgcgggcagagaaggtctagtttgtccatcaccatttatgatatcaggactggttacttggttaaggaggggtctaggagatctgtcccttttagagacaccttacttataatgaagtacttgggaaagcggttttcaagagtataaatatcctgtattctaatgatcatcctctaaacattttatcatttattaatcctccctgcctgtgtctattattatattcatatctctacactgcaaattttgggtctcaatttttactgtgcctttgtttttactagtgtctgctgttgcaaaaagaagaaaacattctctgcctgagttttaatttttgtccaaagttaattttaatctatacaattaaaaccttttgcctatca

SEQ ID NO: 574614 - DNA, 827 bp, Homo sapiens
gagcgggcagtggctgttaccgcaggcaggcggcggtagacatggcggagtgagcggctggcgtcggggcttcacaacaacagtggtggccgtagcatcggcggcagcagcgtcaatagcatcggcgcacgagcctgagcttcagctaccaggacctagcgtcgtgtgccagcatgctcgctgtcctcggagcttctctggagcgtgctgcaagcatcgtccgcggtggggctgtggccggcgccggacagaccggacgaaagggagcagagcagaacgcagcggcggcggacaggccggcagctgtgcatactggcactaccctgcctgggggcggggcacacgacccgacttgaccacaatgaaacactgcgtttacgcgggtacacagtcacccagtcgacgaaactaagaccctggcagtgaatcccacacgtccagccatcccgcccgtgcggtgaaggaagacgcccggatgactccggcctgagcgcctagaagggccgacagggcagtgaggagccggaggtcacaccggacggcccgacgcgactgccaatgagctgggactcgccatggcagggcttcgcgaaaccgacgatcagcgaacagagggtgggccggagggagcccagaacggcccaacaggtaataaacggggtaaccccgagacggacagggaaagcacgacccggctgcactcctagccccaagatcctccattcacgcgacccggcgcgtgacaacaccggcacaacaccgagaaagacacggggcccggagaacccggaggcctacagagccaacaaccaccctggcgcctccat

SEQ ID NO: 574615 - DNA, 4859 bp, Homo sapiens
  misc_feature (56)..(56): n is a, c, g, or t
  misc_feature (459)..(459): n is a, c, g, or t
agcttgcagagcagctcaagcaagctgaggagctcaggcaatataaagtcctggtncactccaggaacgagagctgacgcagtaaaggagaagttacaggaagggagagatgcctcccgctcattgaatgagcatctccaggccctcctcactctggatgagccggacaagtcccaggggcaggacctccaagaacagctggctgaggggtgtagactggcacagcaccttgtccaaaagctcagcccagggaggtgcagaaggctgaagagagcaaagtccctgaggactcactggaggaatgtgccatcacttgttcaaatagccacggcccttgtgactccaaccagcctcacaagaacatcaaaatcacatttgaggaagacgaagtcaactcaactctggttgtagacagagaatcctctcatgatgaatgtcaggatgctctaaacattctcncagtccccggccccacctcttctgccacaaacgtcagcatggtggtatcagccggccctttgtccagcgagaaggcagagatgaacattctagaaatcaatgagaaattgcgcccccagctggcagagaagaaacagcagttcagaaacctcaaagagaaatgttttctaactcaactggccggcttcctggccaaccagcagaacaaatacaaatatgaagagtgcaaagacctcataaaatctatgctgaggaatgagcgacagttcaaggaggagaagcttgcagagcagctcaagcaagctgaggagctcaggcaatataaagtcctggttcacgctcaggaacgagagctgacccagttaagggagaagttacgggaagggagagatgcctcccgctcattgaatgagcatctccaggccctcctcactccggatgagccggacaagtcccaggggcaggacctccaagaacagctggctgaggggtgtagactggcacagcaccttgtccaaaagctcagcccagaaaatgacaacgatgacgatgaagatgttcaagttgaggtggctgagaaagtgcagaaatcgtctgcccccagggagatgcagaaggctgaagaaaaggaagtccctgaggactcactggaggaatgtgccatcacttgttcaaatagccatggcccttatgactccaaccagccacataggaaaaccaaaatcacatttgaggaagacaaagtcgactcaactctcattggctcatcctctcatgttgaatgggaggatgctgtacacattattccagaaaatgaaagtgatgatgaggaagaggaagaaaaagggccagtgtctcccaggaatctgcaggagtctgaagaggaggaagtcccccaggagtcctgggatgaaggttattcgactctctcaattcctcctgaaatgttggcctcgtaccagtcttacagcagcacatttcactcattagaggaacagcaagtctgcatggctgttgacataggcagacatcggtgggatcaagtgaaaaaggaggaccaagaggcaacaggtcccaggctcagcagggagctgctggatgagaaagggcctgaagtcttgcaggactcactggatagatgttattcaactccttcaggttgtcttgaactgactgactcatgccagccctacagaagtgccttttacgtattggagcaacagcgtgttggcttggctgttgacatggatgaaattgaaaagtaccaagaagtggaagaagaccaagacccatcatgccccaggctcagcagggagctgctggatgagaaagagcctgaagtcttgcaggactcactggatagatgttattcgactccttcaggttatcttgaactgcctgacttaggccagccctacagcagtgctgtttactcattggaggaacagtaccttggcttggctcttgacgtggacagaattaaaaaggaccaagaagaggaagaagaccaaggcccaccatgccccaggctcagcagggagctgctggaggtagtagagcctgaagtcttgcaggactcactggatagatgttattcaactccttccagttgtcttgaacagcctgactcctgccagccctatggaagttccttttatgcattggaggaaaaacatgttggcttttctcttgacgtgggagaaattgaaaagaaggggaaggggaagaaaagaaggggaagaagatcaaagaaggaaagaagaaggggaagaaaagaaggggaagaagatcaaaacccaccatgccccaggctcagcagggagctgctggatgagaaagggcctgaagtcttgcaggactcactggatagatgttattcaactccttcaggttgtcttgaactgactgactcatgccagccctacagaagtgccttttacatattggagcaacagcgtgttggcttggctgttgacatggatgaaattgaaaagtaccaagaagtggaagaagaccaagacccatcatgccccaggactttcagcaattgtggatgcttaattctgtgttaacacctggaggcaacagattcagggaaaccagagtgtgtttgatgacatgttttcaacgaaggctgaattactcctactgtcattgctgttggttttcattgcagtagatgtttaggtttccatttcttcctccccttatcatttcctaacgtaccataggttgaccatacttcaaaagctgtactctcatggccactgcatcgaattttgagcatattttatggaaaactattgagctcactcttttcatgatcacagtttgctgtgtgtcatgagggcactaactcagagtgtcctttgactcccttaccagtatgtcacctggccaattcactaggtcactttctctctgtctctgtctctgtctctgtctctctctgtctttctctttcattgttttctacctggccctgttctatcccaacataaaggcaataatttattacctcattaatggatctgtcctttttcttttctaaacacttccttatgtgacttctgaaatctagtggggctctgtggtgtctgattttccctggctgcttctttagttttgtctccttttgctcaacggcgtgctgatggaagtggaagagcctgaagtcttacaggactcactggatagatgttattcgactccgtcaatgtactttgaactacctgactcattccagcactacagaagtgtgttttactcatttgaggaacagcacatcagcttcgccctttacgtggacaataggttttttactttgacggtgacaagtctccacctggtgttccagatgggagtcatattcccacaataagcagcccttactaagccgagagatgtcattcctgcaggcaggacctataggcacgtgaagatttgaatgaaactacagttccatttggaagcccagacataggatgggtcagtgggcatggctctattcctattctcaaaccatgccagtggcaacctgtgctcagtctgaagacaatggacccacgttaggtgtgacacgttcacataactgtgcagcacatgccgggagtgatcagtcagacattttaatttgaaccacgtatctctgggtagctacaaaattcctcagggatttcattttgcaggcatgtctctgagcttctatacctgctcaaggtcattgtcatctttgtgtttagctcatccaaaggtgttaccctggtttcaatgaacctaacctcattctttgtgtcttcagtgttggcttgttttagctgatccatctgtaacacaggagggatccttggctgaggattgtatttcagaaccaccaactgctcttgacaattgttaacccgctaggctcctttggttagagaagccacagtccttcagcctccaattggtgtcagtacttaggaagaccacagctagatggacaaacagcattgggaggccttagccctgctcctctcaattccatcctgtagagaacaggagtcaggagccgctggcaggagacagcatgtcacccaggactctgccggtgcagaatatgaacaatgccatgttcttgcagaaaacgcttagcctgagtttcataggaggtaatcaccagacaactgcagaatgtagaacactgagcaggacaactgacctgtctccttcacatagtccatatcaccacaaatcacacaacaaaaaggagaagagatattttgggttcaaaaaaagtaaaaagataatgtagctgcatttctttagttattttgaaccccaaatatttcctcatctttttgttgttgtcatggatggtggtgacatggacttgtttatagaggacaggtcagctgtctggctcagtgatctacattctgaagttgtctgaaaatgtcttcatgattaaattcagcctaaacgttttgccgggaacactgcagagacaatgctgtgagtttccaacctcagcccatctgcgggcagagaaggtctagtttgtccatcaccatttatgatatcaggactggttacttggttaaggaggggtctaggagatctgtcccttttagagacaccttacttataatgaagtacttgggaaagcggttttcaagagtataaatatcctgtattctaatgatcatcctctaaacattttatcatttattaatcctccctgcctgtgtctattattatattcatatctctacactgcaaattttgggtctcaatttttactgtgcctttgtttttactagtgtctgctgttgcaaaaagaagaaaacattctctgcctgagttttaatttttgtccaaagttaattttaatctatacaattaaaaccttttgcctatca

SEQ ID NO: 574616 - DNA, 968 bp, Homo sapiens
cgtggctgaagtgctggtgctggtcggcatcatcttcatctacgagaagcgccggaggcccgaggacgtcctgtggagtgagttgatcgagcgcccgtgctctgcatccctgaagatgcagcgggctggaccagaatgactcaaggcaaggaacgtcacgccagagggtacactacttgcccgtgaggcaggtggggccgttaggaacagcgtccactgacgtaccgctgtctgcagcacgtgcaggtcccgtgaggtcctattcgcacatttgctgtgcgagtattccaaggttctcacctgcttaagagaatgagcccatcactggacactatccacatttgattcatagcattcccgtatcgtttgtgtctaaaagaaaaaggctctgggggtgttcctcgcaattgcaagcgatatctgtattccagttaaggatttatatcctctcgtctcatgaagagtgttatctagcgagaaggcccagggaggctggaattggcccatggccgagccccccagtgcttggtgggctattcaaggccctcgtggaggtctcgatgttcacatgggcgcagttccgtggcgcggcagccaggcacctttcatctcgatctggtgcccggtaggtcacgttggcccacgggatccgtatagccccgtttttgggtgcgaaaacggtcgacaggggtcacgaaactaggaacggtgggtggcaccacccaggtgtgaaatcccattggcgcggtaggcttcgttggaacaacggcccccaacttggccttggttcttggggctatttgccttccaccaagcaacagatgtgataataaagttgaatcgattgcacaggatacaaaacgacacgtgaattaattaaaagacaccaaacgggtataccaaatcactccacagtagcgggaggggtcggtaattggccccgcaataaggtagtatgcgtccacatg

SEQ ID NO: 574617 - DNA, 4935 bp, Homo sapiens
  misc_feature (56)..(56): n is a, c, g, or t
  misc_feature (459)..(459): n is a, c, g, or t
agcttgcagagcagctcaagcaagctgaggagctcaggcaatataaagtcctggtncactccaggaacgagagctgacgcagtaaaggagaagttacaggaagggagagatgcctcccgctcattgaatgagcatctccaggccctcctcactctggatgagccggacaagtcccaggggcaggacctccaagaacagctggctgaggggtgtagactggcacagcaccttgtccaaaagctcagcccagggaggtgcagaaggctgaagagagcaaagtccctgaggactcactggaggaatgtgccatcacttgttcaaatagccacggcccttgtgactccaaccagcctcacaagaacatcaaaatcacatttgaggaagacgaagtcaactcaactctggttgtagacagagaatcctctcatgatgaatgtcaggatgctctaaacattctcncagtccccggccccacctcttctgccacaaacgtcagcatggtggtatcagccggccctttgtccagcgagaaggcagagatgaacattctagaaatcaatgagaaattgcgcccccagctggcagagaagaaacagcagttcagaaacctcaaagagaaatgttttctaactcaactggccggcttcctggccaaccagcagaacaaatacaaatatgaagagtgcaaagacctcataaaatctatgctgaggaatgagcgacagttcaaggaggagaagcttgcagagcagctcaagcaagctgaggagctcaggcaatataaagtcctggttcacgctcaggaacgagagctgacccagttaagggagaagttacgggaagggagagatgcctcccgctcattgaatgagcatctccaggccctcctcactccggatgagccggacaagtcccaggggcaggacctccaagaacagctggctgaggggtgtagactggcacagcaccttgtccaaaagctcagcccagaaaatgacaacgatgacgatgaagatgttcaagttgaggtggctgagaaagtgcagaaatcgtctgcccccagggagatgcagaaggctgaagaaaaggaagtccctgaggactcactggaggaatgtgccatcacttgttcaaatagccatggcccttatgactccaaccagccacataggaaaaccaaaatcacatttgaggaagacaaagtcgactcaactctcattggctcatcctctcatgttgaatgggaggatgctgtacacattattccagaaaatgaaagtgatgatgaggaagaggaagaaaaagggccagtgtctcccaggaatctgcaggagtctgaagaggaggaagtcccccaggagtcctgggatgaaggttattcgactctctcaattcctcctgaaatgttggcctcgtaccagtcttacagcagcacatttcactcattagaggaacagcaagtctgcatggctgttgacataggcagacatcggtgggatcaagtgaaaaaggaggaccaagaggcaacaggtcccaggctcagcagggagctgctggatgagaaagggcctgaagtcttgcaggactcactggatagatgttattcaactccttcaggttgtcttgaactgactgactcatgccagccctacagaagtgccttttacgtattggagcaacagcgtgttggcttggctgttgacatggatgaaattgaaaagtaccaagaagtggaagaagaccaagacccatcatgccccaggctcagcagggagctgctggatgagaaagagcctgaagtcttgcaggactcactggatagatgttattcgactccttcaggttatcttgaactgcctgacttaggccagccctacagcagtgctgtttactcattggaggaacagtaccttggcttggctcttgacgtggacagaattaaaaaggaccaagaagaggaagaagaccaaggcccaccatgccccaggctcagcagggagctgctggaggtagtagagcctgaagtcttgcaggactcactggatagatgttattcaactccttccagttgtcttgaacagcctgactcctgccagccctatggaagttccttttatgcattggaggaaaaacatgttggcttttctcttgacgtgggagaaattgaaaagaaggggaaggggaagaaaagaaggggaagaagatcaaagaaggaaagaagaaggggaagaaaagaaggggaagaagatcaaaacccaccatgccccaggctcagcagggagctgctggatgagaaagggcctgaagtcttgcaggactcactggatagatgttattcaactccttcaggttgtcttgaactgactgactcatgccagccctacagaagtgccttttacatattggagcaacagcgtgttggcttggctgttgacatggatgaaattgaaaagtaccaagaagtggaagaagaccaagacccatcatgccccaggctcagcggggagctgttggatgagaaagagcctgaagtcttgcaggagtcactggatagatgctattcaactccttcaggttgtcttgaactgactgactcatgccagccctacagaagtgccttttacatattggagcaacagcgtgttggcttggctgttgacatggatgaaattgaaaagtaccaagaagtggaagaagaccaagacccatcatgccccaggctcagcagggagctgctggatgagaaagagcctgaagtcttgcaggactcactggatagatgttattcgactccttcaggttatcttgaactgcctgacttaggccagccctacagcagtgctgtttactcattggaggaacagtaccttggcttggctcttgacgtggacagaattaaaaaggaccaagaagaggaagaagaccaaggcccaccatgccccaggctcagcagggagctgctggaggtagtagagcctgaagtcttgcaggactcactggatagatgttattcaactccttccagttgtcttgaacagcctgactcctgccagccctatggaagttccttttatgcattggaggaaaaacatgttggcttttctcttgacgtgggagaaattgaaaagaaggggaaggggaagaaaagaaggggaagaagatcaaagaaggaaagaagaaggggaagaaaagaaggggaagaagatcaaaacccaccatgccccaggctcaacggcgtgctgatggaagtggaagagcctgaagtcttacaggactcactggatagatgttattcgactccgtcaatgtactttgaactacctgactcattccagcactacagaagtgtgttttactcatttgaggaacagcacatcagcttcgccctttacgtggacaataggttttttactttgacggtgacaagtctccacctggtgttccagatgggagtcatattcccacaataagcagcccttactaagccgagagatgtcattcctgcaggcaggacctataggcacgtgaagatttgaatgaaactacagttccatttggaagcccagacataggatgggtcagtgggcatggctctattcctattctcaaaccatgccagtggcaacctgtgctcagtctgaagacaatggacccacgttaggtgtgacacgttcacataactgtgcagcacatgccgggagtgatcagtcagacattttaatttgaaccacgtatctctgggtagctacaaaattcctcagggatttcattttgcaggcatgtctctgagcttctatacctgctcaaggtcattgtcatctttgtgtttagctcatccaaaggtgttaccctggtttcaatgaacctaacctcattctttgtgtcttcagtgttggcttgttttagctgatccatctgtaacacaggagggatccttggctgaggattgtatttcagaaccaccaactgctcttgacaattgttaacccgctaggctcctttggttagagaagccacagtccttcagcctccaattggtgtcagtacttaggaagaccacagctagatggacaaacagcattgggaggccttagccctgctcctctcaattccatcctgtagagaacaggagtcaggagccgctggcaggagacagcatgtcacccaggactctgccggtgcagaatatgaacaatgccatgttcttgcagaaaacgcttagcctgagtttcataggaggtaatcaccagacaactgcagaatgtagaacactgagcaggacaactgacctgtctccttcacatagtccatatcaccacaaatcacacaacaaaaaggagaagagatattttgggttcaaaaaaagtaaaaagataatgtagctgcatttctttagttattttgaaccccaaatatttcctcatctttttgttgttgtcatggatggtggtgacatggacttgtttatagaggacaggtcagctgtctggctcagtgatctacattctgaagttgtctggacaatgctgtgagtttccaacctcagcccatctgcgggcagagaaggtctagtttgtccatcaccatttatgatatcaggactggttacttggttaaggaggggtctaggagatctgtcccttttagagacaccttacttataatgaagtacttgggaaagcggttttcaagagtataaatatcctgtattctaatgatcatcctctaaacattttatcatttattaatcctccctgcctgtgtctattattatattcatatctctacactgcaaattttgggtctcaatttttactgtgcctttgtttttactagtgtctgctgttgcaaaaagaagaaaacattctctgcctgagttttaatttttgtccaaagttaattttaatctatacaattaaaaccttttgcctatca

SEQ ID NO: 574618 - DNA, 660 bp, Homo sapiens
  misc_feature (27)..(27): n is a, c, g, or t
  misc_feature (346)..(346): n is a, c, g, or t
  misc_feature (629)..(629): n is a, c, g, or t
  misc_feature (640)..(640): n is a, c, g, or t
gaactcgagttcgacccggagacactnacgtatcagaggctagccgagaacaacttaaaattcttctttaaacttccacattgagtcatattatttggaagacccattaaaagaaacataatatacggaatgtaattagttaattagtgaatggctgtccctcttcgtacctcccctattcaggtactagccttggctatgagaaatagaagagaaagcatactttacaagcacatcctctgataaccaggcttgtgaaaaaataagtccttagaaggaaaactggagagccacagatgtaagtgatcagaacagtgtgttttacataccttaacatatgacctcnagtggctctccaatccttcctcatggcactgggcaaccacatgaataatgaccctacacaccacaggagtgaatcaagcaaagaatatgtaaaaatggaaacatttcattattatcacagcagtagtagaacaatgatgatgctatcagcacttaggaaacaaggagacaaggaattagatggggtccttacacatgggatccaagacatttcttaaatataatgttcagcacacagtagcatcccagctatgcatgactatcctccagatgtggaagactanaagtcgaagtngtcccgggaatctctagagt

SEQ ID NO: 574619 - DNA, 516 bp, Homo sapiens
gttcagattacagtctaaatctacactgtgagtacagccatctgggttccgattgtaacgtctgtaatatggcatagaaaaggcatagctctcaggtctgtggggcaaaggttatacctcctttttgataaaagccctcctcagaaaccaggcaccatacatgtcactatgtacatctttgttcaaaatctcggtcatgcgcgacatatggtctgcatttctcttccaccacttgtaatccccaaaagaagtcgaacttgttattggtttcgtctgctatagcatgtgatcctggctactttccaagacccattcagactcattcttagaaacagtgaatacgatggtagatcagcaggatgtgcacaactccatgcctccaggtgcggggcggttccaggaaggtacccatttacagccagaaacggttaactatactcttagcatcgttttcagaatctgtatagaggtccaatgggtaacagctaggtacccaacgtatgacaacgcgtatag

SEQ ID NO: 574620 - DNA, 829 bp, Homo sapiens
gagcggagtggggccgggacgcggagctgtgtgcatctcctacgcaggctcgctcgctcccgggagccgccgcaggtttccgccggcggtggctagggagcggcgaagagcgccatcagcgggcgccttacggaccccaggtccgtcgcggacgcgcggtccgctcgcgcacctcttcgtcctgcctcaagcctgctggtgcgtgtggaaggcgtgaggcgacgacaaggcgaggcgcctcgagcagggtaagccgctgcgggcggcggtcctccctccacctcctcgctcgggaccgcctctcgcgttccgcgtcgctccacagcttgcgacggagctcgcgggcgtgtcggcaggccgacggctcgacggctgctggcacggaacataaaggaaggaccccaggcggcagtgagggagtgccgccaactgccgtctggtagctcggagccgattcgcccggttcacgccgggcaggcgggcatgctatgggcggccccgtgcatccaagccattcactcggaagggccattcgagctcacggacacttccagtcgttgaccgggcttgcagcagcggaagaaagccccggctttgcgcatttcggggaacgctctgccgtgctatgaatacaataatgggcttcgaaggagacatagacgctaggaacctcgctggggtgccacaatgccttgtggttaggaaacagtggatgttgggctgtgggaatgtgaagattcctaagtggacaaagattgggagctgtggttccagtgtggattaagaaagaaacatgcttcggcaggggagaaaaaagtagtaggagaaa

SEQ ID NO: 574621 - DNA, 140 bp, Homo sapiens
ttccttgaaagcttttgaaaaggggaaagggccttttggggcctttcccccttttttgtttttaaaaggcccccaaatccccagccctataaaggggtgggtttgaacttttccctttgaattaaagatgtttaccctga

SEQ ID NO: 574622 - DNA, 5189 bp, Homo sapiens
  misc_feature (56)..(56): n is a, c, g, or t
  misc_feature (459)..(459): n is a, c, g, or t
  misc_feature (4963)..(4963): n is a, c, g, or t
agcttgcagagcagctcaagcaagctgaggagctcaggcaatataaagtcctggtncactccaggaacgagagctgacgcagtaaaggagaagttacaggaagggagagatgcctcccgctcattgaatgagcatctccaggccctcctcactctggatgagccggacaagtcccaggggcaggacctccaagaacagctggctgaggggtgtagactggcacagcaccttgtccaaaagctcagcccagggaggtgcagaaggctgaagagagcaaagtccctgaggactcactggaggaatgtgccatcacttgttcaaatagccacggcccttgtgactccaaccagcctcacaagaacatcaaaatcacatttgaggaagacgaagtcaactcaactctggttgtagacagagaatcctctcatgatgaatgtcaggatgctctaaacattctcncagtccccggccccacctcttctgccacaaacgtcagcatggtggtatcagccggccctttgtccagcgagaaggcagagatgaacattctagaaatcaatgagaaattgcgcccccagctggcagagaagaaacagcagttcagaaacctcaaagagaaatgttttctaactcaactggccggcttcctggccaaccagcagaacaaatacaaatatgaagagtgcaaagacctcataaaatctatgctgaggaatgagcgacagttcaaggaggagaagcttgcagagcagctcaagcaagctgaggagctcaggcaatataaagtcctggttcacgctcaggaacgagagctgacccagttaagggagaagttacgggaagggagagatgcctcccgctcattgaatgagcatctccaggccctcctcactccggatgagccggacaagtcccaggggcaggacctccaagaacagctggctgaggggtgtagactggcacagcaccttgtccaaaagctcagcccagaaaatgacaacgatgacgatgaagatgttcaagttgaggtggctgagaaagtgcagaaatcgtctgcccccagggagatgcagaaggctgaagaaaaggaagtccctgaggactcactggaggaatgtgccatcacttgttcaaatagccatggcccttatgactccaaccagccacataggaaaaccaaaatcacatttgaggaagacaaagtcgactcaactctcattggctcatcctctcatgttgaatgggaggatgctgtacacattattccagaaaatgaaagtgatgatgaggaagaggaagaaaaagggccagtgtctcccaggaatctgcaggagtctgaagaggaggaagtcccccaggagtcctgggatgaaggttattcgactctctcaattcctcctgaaatgttggcctcgtaccagtcttacagcagcacatttcactcattagaggaacagcaagtctgcatggctgttgacataggcagacatcggtgggatcaagtgaaaaaggaggaccaagaggcaacaggtcccaggctcagcagggagctgctggatgagaaagggcctgaagtcttgcaggactcactggatagatgttattcaactccttcaggttgtcttgaactgactgactcatgccagccctacagaagtgccttttacgtattggagcaacagcgtgttggcttggctgttgacatggatgaaattgaaaagtaccaagaagtggaagaagaccaagacccatcatgccccaggctcagcagggagctgctggatgagaaagagcctgaagtcttgcaggactcactggatagatgttattcgactccttcaggttatcttgaactgcctgacttaggccagccctacagcagtgctgtttactcattggaggaacagtaccttggcttggctcttgacgtggacagaattaaaaaggaccaagaagaggaagaagaccaaggcccaccatgccccaggctcagcagggagctgctggaggtagtagagcctgaagtcttgcaggactcactggatagatgttattcaactccttccagttgtcttgaacagcctgactcctgccagccctatggaagttccttttatgcattggaggaaaaacatgttggcttttctcttgacgtgggagaaattgaaaagaaggggaaggggaagaaaagaaggggaagaagatcaaagaaggaaagaagaaggggaagaaaagaaggggaagaagatcaaaacccaccatgccccaggctcagcagggagctgctggatgagaaagggcctgaagtcttgcaggactcactggatagatgttattcaactccttcaggttgtcttgaactgactgactcatgccagccctacagaagtgccttttacatattggagcaacagcgtgttggcttggctgttgacatggatgaaattgaaaagtaccaagaagtggaagaagaccaagacccatcatgccccaggctcagcggggagctgttggatgagaaagagcctgaagtcttgcaggagtcactggatagatgctattcaactccttcaggttgtcttgaactgactgactcatgccagccctacagaagtgccttttacatattggagcaacagcgtgttggcttggctgttgacatggatgaaattgaaaagtaccaagaagtggaagaagaccaagacccatcatgccccaggctcagcagggagctgctggatgagaaagagcctgaagtcttgcaggactcactggatagatgttattcgactccttcaggttatcttgaactgcctgacttaggccagccctacagcagtgctgtttactcattggaggaacagtaccttggcttggctcttgacgtggacagaattaaaaaggaccaagaagaggaagaagaccaaggcccaccatgccccaggctcagcagggagctgctggaggtagtagagcctgaagtcttgcaggactcactggatagatgttattcaactccttccagttgtcttgaacagcctgactcctgccagccctatggaagttccttttatgcattggaggaaaaacatgttggcttttctcttgacgtgggagaaattgaaaagaaggggaaggggaagaaaagaaggggaagaagatcaaagaaggaaagaagaaggggaagaaaagaaggggaagaagatcaaaacccaccatgccccaggctcaacggcgtgctgatggaagtggaagagcctgaagtcttacaggactcactggatagatgttattcgactccgtcaatgtactttgaactacctgactcattccagcactacagaagtgtgttttactcatttgaggaacagcacatcagcttcgccctttacgtggacaataggttttttactttgacggtgacaagtctccacctggtgttccagatgggagtcatattcccacaataagcagcccttactaagccgagagatgtcattcctgcaggcaggacctataggcacgtgaagatttgaatgaaactacagttccatttggaagcccagacataggatgggtcagtgggcatggctctattcctattctcaaaccatgccagtggcaacctgtgctcagtctgaagacaatggacccacgttaggtgtgacacgttcacataactgtgcagcacatgccgggagtgatcagtcagacattttaatttgaaccacgtatctctgggtagctacaaaattcctcagggatttcattttgcaggcatgtctctgagcttctatacctgctcaaggtcattgtcatctttgtgtttagctcatccaaaggtgttaccctggtttcaatgaacctaacctcattctttgtgtcttcagtgttggcttgttttagctgatccatctgtaacacaggagggatccttggctgaggattgtatttcagaaccaccaactgctcttgacaattgttaacccgctaggctcctttggttagagaagccacagtccttcagcctccaattggtgtcagtacttaggaagaccacagctagatggacaaacagcattgggaggccttagccctgctcctctcaattccatcctgtagagaacaggagtcaggagccgctggcaggagacagcatgtcacccaggactctgccggtgcagaatatgaacaatgccatgttcttgcagaaaacgcttagcctgagtttcataggaggtaatcaccagacaactgcagaatgtagaacactgagcaggacaactgacctgtctccttcacatagtccatatcaccacaaatcacacaacaaaaaggagaagagatattttgggttcaaaaaaagtaaaaagataatgtagctgcatttctttagttattttgaaccccaaatatttcctcatctttttgttgttgtcatggatggtggtgacatggacttgtttatagaggacaggtcagctgtctggctcagtgatctacattctgaagttgtctgaaaatgtcttcatgattaaattcagcctaaacgttttgccgggaacactgcagagacaatgctgtgagtttccaacctcagcccatctgcgggcagagaaggtctagtttgtccatcaccatttatgatatcaggactggttacttggttaaggaggggtctaggagatctgtcccttttagagacaccttacttataatgaagtacttgggaaagcggttttcaagagtataaatatcctgtattctaatgatcatcctctaaacattttatcatttattaatcctccggctggctcatataaatcacaaattacccggaaaattgggcccacttttaccggcccttgtttacaagggcggtttgcaaaggaagcattctttggccgggtttaatttggccagggtatttaaccaatccataaacctttgccaaaaaaaaaanacccaattgggccactggccaattcccccttaggggcgggtaaacatcaatgggcgcgtttaacaaggggggtggcctcgggccacacaaataccttgtgaaacgctctttcgccggggcactcaaagagcgcccccaaggcttttccaaggggcgccctcttgcgcgcaacaatgcgcgcatcttttcaccgctatcttgaccccttatctaccggcgcctcccc

SEQ ID NO: 574623 - DNA, 3807 bp, Homo sapiens
  misc_feature (56)..(56): n is a, c, g, or t
  misc_feature (459)..(459): n is a, c, g, or t
agcttgcagagcagctcaagcaagctgaggagctcaggcaatataaagtcctggtncactccaggaacgagagctgacgcagtaaaggagaagttacaggaagggagagatgcctcccgctcattgaatgagcatctccaggccctcctcactctggatgagccggacaagtcccaggggcaggacctccaagaacagctggctgaggggtgtagactggcacagcaccttgtccaaaagctcagcccagggaggtgcagaaggctgaagagagcaaagtccctgaggactcactggaggaatgtgccatcacttgttcaaatagccacggcccttgtgactccaaccagcctcacaagaacatcaaaatcacatttgaggaagacgaagtcaactcaactctggttgtagacagagaatcctctcatgatgaatgtcaggatgctctaaacattctcncagtccccggccccacctcttctgccacaaacgtcagcatggtggtatcagccggccctttgtccagcgagaaggcagagatgaacattctagaaatcaatgagaaattgcgcccccagctggcagagaagaaacagcagttcagaaacctcaaagagaaatgttttctaactcaactggccggcttcctggccaaccagcagaacaaatacaaatatgaagagtgcaaagacctcataaaatctatgctgaggaatgagcgacagttcaaggaggagaagcttgcagagcagctcaagcaagctgaggagctcaggcaatataaagtcctggttcacgctcaggaacgagagctgacccagttaagggagaagttacgggaagggagagatgcctcccgctcattgaatgagcatctccaggccctcctcactccggatgagccggacaagtcccaggggcaggacctccaagaacagctggctgaggggtgtagactggcacagcaccttgtccaaaagctcagcccagaaaatgacaacgatgacgatgaagatgttcaagttgaggtggctgagaaagtgcagaaatcgtctgcccccagggagatgcagaaggctgaagaaaaggaagtccctgaggactcactggaggaatgtgccatcacttgttcaaatagccatggcccttatgactccaaccagccacataggaaaaccaaaatcacatttgaggaagacaaagtcgactcaactctcattggctcatcctctcatgttgaatgggaggatgctgtacacattattccagaaaatgaaagtgatgatgaggaagaggaagaaaaagggccagtgtctcccaggaatctgcaggagtctgaagaggaggaagtcccccaggagtcctgggatgaaggttattcgactctctcaattcctcctgaaatgttggcctcgtaccagtcttacagcagcacatttcactcattagaggaacagcaagtctgcatggctgttgacataggcagacatcggtgggatcaagtgaaaaaggaggaccaagaggcaacaggtcccaggctcagcagggagctgctggatgagaaagggcctgaagtcttgcaggactcactggatagatgttattcaactccttcaggttgtcttgaactgactgactcatgccagccctacagaagtgccttttacgtattggagcaacagcgtgttggcttggctgttgacatggatgaaattgaaaagtaccaagaagtggaagaagaccaagacccatcatgccccaggctcagcagggagctgctggatgagaaagagcctgaagtcttgcaggactcactggatagatgttattcgactccttcaggttatcttgaactgcctgacttaggccagccctacagcagtgctgtttactcattggaggaacagtaccttggcttggctcttgacgtggacaaaattgaaaagaaggggaaggggaagaaaagaaggggaagaagatcaaagaaggaaagaagaaggggaagaaaagaaggggaagaagatcaaaacccaccatgccccaggctcaacggcgtgctgatggaagtggaagagcctgaagtcttacaggactcactggatagatgttattcgactccgtcaatgtactttgaactacctgactcattccagcactacagaagtgtgttttactcatttgaggaacagcacatcagcttcgccctttacgtggacaataggttttttactttgacggtgacaagtctccacctggtgttccagatgggagtcatattcccacaataagcagcccttactaagccgagagatgtcattcctgcaggcaggacctataggcacgtgaagatttgaatgaaactacagttccatttggaagcccagacataggatgggtcagtgggcatggctctattcctattctcaaaccatgccagtggcaacctgtgctcagtctgaagacaatggacccacgttaggtgtgacacgttcacataactgtgcagcacatgccgggagtgatcagtcagacattttaatttgaaccacgtatctctgggtagctacaaaattcctcagggatttcattttgcaggcatgtctctgagcttctatacctgctcaaggtcattgtcatctttgtgtttagctcatccaaaggtgttaccctggtttcaatgaacctaacctcattctttgtgtcttcagtgttggcttgttttagctgatccatctgtaacacaggagggatccttggctgaggattgtatttcagaaccaccaactgctcttgacaattgttaacccgctaggctcctttggttagagaagccacagtccttcagcctccaattggtgtcagtacttaggaagaccacagctagatggacaaacagcattgggaggccttagccctgctcctctcaattccatcctgtagagaacaggagtcaggagccgctggcaggagacagcatgtcacccaggactctgccggtgcagaatatgaacaatgccatgttcttgcagaaaacgcttagcctgagtttcataggaggtaatcaccagacaactgcagaatgtagaacactgagcaggacaactgacctgtctccttcacatagtccatatcaccacaaatcacacaacaaaaaggagaagagatattttgggttcaaaaaaagtaaaaagataatgtagctgcatttctttagttattttgaaccccaaatatttcctcatctttttgttgttgtcatggatggtggtgacatggacttgtttatagaggacaggtcagctgtctggctcagtgatctacattctgaagttgtctgaaaatgtcttcatgattaaattcagcctaaacgttttgccgggaacactgcagagacaatgctgtgagtttccaacctcagcccatctgcgggcagagaaggtctagtttgtccatcaccatttatgatatcaggactggttacttggttaaggaggggtctaggagatctgtcccttttagagacaccttacttataatgaagtacttgggaaagcggttttcaagagtataaatatcctgtattctaatgatcatcctctaaacattttatcatttattaatcctccctgcctgtgtctattattatattcatatctctacactgcaaattttgggtctcaatttttactgtgcctttgtttttactagtgtctgctgttgcaaaaagaagaaaacattctctgcctgagttttaatttttgtccaaagttaattttaatctatacaattaaaaccttttgcctatca

SEQ ID NO: 574624 - DNA, 315 bp, Homo sapiens
  misc_feature (21)..(21): n is a, c, g, or t
  misc_feature (228)..(228): n is a, c, g, or t
  misc_feature (252)..(252): n is a, c, g, or t
  misc_feature (272)..(272): n is a, c, g, or t
  misc_feature (308)..(308): n is a, c, g, or t
tggcttccacccacccaccangttatccttaaaaactctgctccccgaatgctcagggaggctgatttgagttataataaaactccagtctcctgcacagccagccctgcatgaattaccctttctctattgcaattcccctgtcttgatgaatcggctctgtctaggcagtgggcaaggtgaaccccttggacagttacccaaggcgatcctcctgccttggcttgnttttttatttctttatgtacctgnttaccattggattatacctnttcaaggcaagggccatgtctcatcatctttttggnatcttta

SEQ ID NO: 574625 - DNA, 606 bp, Homo sapiens
  misc_feature (2)..(2): n is a, c, g, or t
  misc_feature (66)..(66): n is a, c, g, or t
  misc_feature (70)..(70): n is a, c, g, or t
  misc_feature (148)..(148): n is a, c, g, or t
  misc_feature (161)..(161): n is a, c, g, or t
  misc_feature (217)..(217): n is a, c, g, or t
  misc_feature (247)..(247): n is a, c, g, or t
  misc_feature (253)..(253): n is a, c, g, or t
  misc_feature (342)..(342): n is a, c, g, or t
  misc_feature (385)..(385): n is a, c, g, or t
  misc_feature (388)..(388): n is a, c, g, or t
  misc_feature (396)..(396): n is a, c, g, or t
  misc_feature (542)..(542): n is a, c, g, or t
  misc_feature (544)..(544): n is a, c, g, or t
  misc_feature (550)..(550): n is a, c, g, or t
tnccagaagggggcagaatggggtccttggggagtctctgtcccagcccggacaggcagatctcanttcnagaagagcacaatatccagaaaaagcagccagaccggggtagaaggcccagggacagcggtgggaagggcagggcgcngtagtgtgagtgntccaagcacaccctgggctagcgctagccaggaaagggctgccagccctcggccantgacagtggcgcctcctgcagctcccgccncaggancaggctgccaaggcgcgtggctgccgggctggtcagccccagcagggcagcatagagggtccggggcccatgaggcttggcaagcgccncgctggagacaccatggtggatggccagccggcagcccagtgngangttggtgngggcgaatgccgccccgctgcagtgctaggtagctcagggctaccagcttcagtgccatccagcccctgtctggggcctgtgtgcttaccaccctgtaagccacaggccggtgggtattgtggggcagggccaggcccgctgcctnantcgccngcagtgtccgccccccagcctcagcctctgccactgggacgtgctgggtggccacg

SEQ ID NO: 574626 - DNA, 4935 bp, Homo sapiens
  misc_feature (56)..(56): n is a, c, g, or t
  misc_feature (459)..(459): n is a, c, g, or t
agcttgcagagcagctcaagcaagctgaggagctcaggcaatataaagtcctggtncactccaggaacgagagctgacgcagtaaaggagaagttacaggaagggagagatgcctcccgctcattgaatgagcatctccaggccctcctcactctggatgagccggacaagtcccaggggcaggacctccaagaacagctggctgaggggtgtagactggcacagcaccttgtccaaaagctcagcccagggaggtgcagaaggctgaagagagcaaagtccctgaggactcactggaggaatgtgccatcacttgttcaaatagccacggcccttgtgactccaaccagcctcacaagaacatcaaaatcacatttgaggaagacgaagtcaactcaactctggttgtagacagagaatcctctcatgatgaatgtcaggatgctctaaacattctcncagtccccggccccacctcttctgccacaaacgtcagcatggtggtatcagccggccctttgtccagcgagaaggcagagatgaacattctagaaatcaatgagaaattgcgcccccagctggcagagaagaaacagcagttcagaaacctcaaagagaaatgttttctaactcaactggccggcttcctggccaaccagcagaacaaatacaaatatgaagagtgcaaagacctcataaaatctatgctgaggaatgagcgacagttcaaggaggagaagcttgcagagcagctcaagcaagctgaggagctcaggcaatataaagtcctggttcacgctcaggaacgagagctgacccagttaagggagaagttacgggaagggagagatgcctcccgctcattgaatgagcatctccaggccctcctcactccggatgagccggacaagtcccaggggcaggacctccaagaacagctggctgaggggtgtagactggcacagcaccttgtccaaaagctcagcccagaaaatgacaacgatgacgatgaagatgttcaagttgaggtggctgagaaagtgcagaaatcgtctgcccccagggagatgcagaaggctgaagaaaaggaagtccctgaggactcactggaggaatgtgccatcacttgttcaaatagccatggcccttatgactccaaccagccacataggaaaaccaaaatcacatttgaggaagacaaagtcgactcaactctcattggctcatcctctcatgttgaatgggaggatgctgtacacattattccagaaaatgaaagtgatgatgaggaagaggaagaaaaagggccagtgtctcccaggaatctgcaggagtctgaagaggaggaagtcccccaggagtcctgggatgaaggttattcgactctctcaattcctcctgaaatgttggcctcgtaccagtcttacagcagcacatttcactcattagaggaacagcaagtctgcatggctgttgacataggcagacatcggtgggatcaagtgaaaaaggaggaccaagaggcaacaggtcccaggctcagcagggagctgctggatgagaaagggcctgaagtcttgcaggactcactggatagatgttattcaactccttcaggttgtcttgaactgactgactcatgccagccctacagaagtgccttttacgtattggagcaacagcgtgttggcttggctgttgacatggatgaaattgaaaagtaccaagaagtggaagaagaccaagacccatcatgccccaggctcagcagggagctgctggatgagaaagagcctgaagtcttgcaggactcactggatagatgttattcgactccttcaggttatcttgaactgcctgacttaggccagccctacagcagtgctgtttactcattggaggaacagtaccttggcttggctcttgacgtggacagaattaaaaaggaccaagaagaggaagaagaccaaggcccaccatgccccaggctcagcagggagctgctggaggtagtagagcctgaagtcttgcaggactcactggatagatgttattcaactccttccagttgtcttgaacagcctgactcctgccagccctatggaagttccttttatgcattggaggaaaaacatgttggcttttctcttgacgtgggagaaattgaaaagaaggggaaggggaagaaaagaaggggaagaagatcaaagaaggaaagaagaaggggaagaaaagaaggggaagaagatcaaaacccaccatgccccaggctcagcagggagctgctggatgagaaagggcctgaagtcttgcaggactcactggatagatgttattcaactccttcaggttgtcttgaactgactgactcatgccagccctacagaagtgccttttacatattggagcaacagcgtgttggcttggctgttgacatggatgaaattgaaaagtaccaagaagtggaagaagaccaagacccatcatgccccaggctcagcggggagctgttggatgagaaagagcctgaagtcttgcaggagtcactggatagatgctattcaactccttcaggttgtcttgaactgactgactcatgccagccctacagaagtgccttttacatattggagcaacagcgtgttggcttggctgttgacatggatgaaattgaaaagtaccaagaagtggaagaagaccaagacccatcatgccccaggctcagcagggagctgctggatgagaaagagcctgaagtcttgcaggactcactggatagatgttattcgactccttcaggttatcttgaactgcctgacttaggccagccctacagcagtgctgtttactcattggaggaacagtaccttggcttggctcttgacgtggacagaattaaaaaggaccaagaagaggaagaagaccaaggcccaccatgccccaggctcagcagggagctgctggaggtagtagagcctgaagtcttgcaggactcactggatagatgttattcaactccttccagttgtcttgaacagcctgactcctgccagccctatggaagttccttttatgcattggaggaaaaacatgttggcttttctcttgacgtgggagaaattgaaaagaaggggaaggggaagaaaagaaggggaagaagatcaaagaaggaaagaagaaggggaagaaaagaaggggaagaagatcaaaacccaccatgccccaggctcaacggcgtgctgatggaagtggaagagcctgaagtcttacaggactcactggatagatgttattcgactccgtcaatgtactttgaactacctgactcattccagcactacagaagtgtgttttactcatttgaggaacagcacatcagcttcgccctttacgtggacaataggttttttactttgacggtgacaagtctccacctggtgttccagatgggagtcatattcccacaataagcagcccttactaagccgagagatgtcattcctgcaggcaggacctataggcacgtgaagatttgaatgaaactacagttccatttggaagcccagacataggatgggtcagtgggcatggctctattcctattctcaaaccatgccagtggcaacctgtgctcagtctgaagacaatggacccacgttaggtgtgacacgttcacataactgtgcagcacatgccgggagtgatcagtcagacattttaatttgaaccacgtatctctgggtagctacaaaattcctcagggatttcattttgcaggcatgtctctgagcttctatacctgctcaaggtcattgtcatctttgtgtttagctcatccaaaggtgttaccctggtttcaatgaacctaacctcattctttgtgtcttcagtgttggcttgttttagctgatccatctgtaacacaggagggatccttggctgaggattgtatttcagaaccaccaactgctcttgacaattgttaacccgctaggctcctttggttagagaagccacagtccttcagcctccaattggtgtcagtacttaggaagaccacagctagatggacaaacagcattgggaggccttagccctgctcctctcaattccatcctgtagagaacaggagtcaggagccgctggcaggagacagcatgtcacccaggactctgccggtgcagaatatgaacaatgccatgttcttgcagagaacactgagcaggacaactgacctgtctccttcacatagtccatatcaccacaaatcacacaacaaaaaggagaagagatattttgggttcaaaaaaagtaaaaagataatgtagctgcatttctttagttattttgaaccccaaatatttcctcatctttttgttgttgtcatggatggtggtgacatggacttgtttatagaggacaggtcagctgtctggctcagtgatctacattctgaagttgtctgaaaatgtcttcatgattaaattcagcctaaacgttttgccgggaacactgcagagacaatgctgtgagtttccaacctcagcccatctgcgggcagagaaggtctagtttgtccatcaccatttatgatatcaggactggttacttggttaaggaggggtctaggagatctgtcccttttagagacaccttacttataatgaagtacttgggaaagcggttttcaagagtataaatatcctgtattctaatgatcatcctctaaacattttatcatttattaatcctccctgcctgtgtctattattatattcatatctctacactgcaaattttgggtctcaatttttactgtgcctttgtttttactagtgtctgctgttgcaaaaagaagaaaacattctctgcctgagttttaatttttgtccaaagttaattttaatctatacaattaaaaccttttgcctatca

SEQ ID NO: 574627 - DNA, 250 bp, Homo sapiens
ctgacgaccgggtcctccagttcccgtgactcactgtagatactggtgccgcggcttctggtgtcggggacctccgtgccgttggggaatgacacagcagcagtagccgatgctcccatagcactgaagtggcagataagtagccgtatctcgtcgcacttgggcctgaatgaacccgggtagaacagaaaggatgtggctagacctcttcctggcacttggtcagtactttcggtggagcttcccggag

SEQ ID NO: 574628 - DNA, 4931 bp, Homo sapiens
  misc_feature (56)..(56): n is a, c, g, or t
  misc_feature (459)..(459): n is a, c, g, or t
agcttgcagagcagctcaagcaagctgaggagctcaggcaatataaagtcctggtncactccaggaacgagagctgacgcagtaaaggagaagttacaggaagggagagatgcctcccgctcattgaatgagcatctccaggccctcctcactctggatgagccggacaagtcccaggggcaggacctccaagaacagctggctgaggggtgtagactggcacagcaccttgtccaaaagctcagcccagggaggtgcagaaggctgaagagagcaaagtccctgaggactcactggaggaatgtgccatcacttgttcaaatagccacggcccttgtgactccaaccagcctcacaagaacatcaaaatcacatttgaggaagacgaagtcaactcaactctggttgtagacagagaatcctctcatgatgaatgtcaggatgctctaaacattctcncagtccccggccccacctcttctgccacaaacgtcagcatggtggtatcagccggccctttgtccagcgagaaggcagagatgaacattctagaaatcaatgagaaattgcgcccccagctggcagagaagaaacagcagttcagaaacctcaaagagaaatgttttctaactcaactggccggcttcctggccaaccagcagaacaaatacaaatatgaagagtgcaaagacctcataaaatctatgctgaggaatgagcgacagttcaaggaggagaagcttgcagagcagctcaagcaagctgaggagctcaggcaatataaagtcctggttcacgctcaggaacgagagctgacccagttaagggagaagttacgggaagggagagatgcctcccgctcattgaatgagcatctccaggccctcctcactccggatgagccggacaagtcccaggggcaggacctccaagaacagctggctgaggggtgtagactggcacagcaccttgtccaaaagctcagcccagaaaatgacaacgatgacgatgaagatgttcaagttgaggtggctgagaaagtgcagaaatcgtctgcccccagggagatgcagaaggctgaagaaaaggaagtccctgaggactcactggaggaatgtgccatcacttgttcaaatagccatggcccttatgactccaaccagccacataggaaaaccaaaatcacatttgaggaagacaaagtcgactcaactctcattggctcatcctctcatgttgaatgggaggatgctgtacacattattccagaaaatgaaagtgatgatgaggaagaggaagaaaaagggccagtgtctcccaggaatctgcaggagtctgaagaggaggaagtcccccaggagtcctgggatgaaggttattcgactctctcaattcctcctgaaatgttggcctcgtaccagtcttacagcagcacatttcactcattagaggaacagcaagtctgcatggctgttgacataggcagacatcggtgggatcaagtgaaaaaggaggaccaagaggcaacaggtcccaggctcagcagggagctgctggatgagaaagggcctgaagtcttgcaggactcactggatagatgttattcaactccttcaggttgtcttgaactgactgactcatgccagccctacagaagtgccttttacgtattggagcaacagcgtgttggcttggctgttgacatggatgaaattgaaaagtaccaagaagtggaagaagaccaagacccatcatgccccaggctcagcagggagctgctggatgagaaagagcctgaagtcttgcaggactcactggatagatgttattcgactccttcaggttatcttgaactgcctgacttaggccagccctacagcagtgctgtttactcattggaggaacagtaccttggcttggctcttgacgtggacagaattaaaaaggaccaagaagaggaagaagaccaaggcccaccatgccccaggctcagcagggagctgctggaggtagtagagcctgaagtcttgcaggactcactggatagatgttattcaactccttccagttgtcttgaacagcctgactcctgccagccctatggaagttccttttatgcattggaggaaaaacatgttggcttttctcttgacgtgggagaaattgaaaagaaggggaaggggaagaaaagaaggggaagaagatcaaagaaggaaagaagaaggggaagaaaagaaggggaagaagatcaaaacccaccatgccccaggctcagcagggagctgctggatgagaaagggcctgaagtcttgcaggactcactggatagatgttattcaactccttcaggttgtcttgaactgactgactcatgccagccctacagaagtgccttttacatattggagcaacagcgtgttggcttggctgttgacatggatgaaattgaaaagtaccaagaagtggaagaagaccaagacccatcatgccccaggctcagcggggagctgttggatgagaaagagcctgaagtcttgcaggagtcactggatagatgctattcaactccttcaggttgtcttgaactgactgactcatgccagccctacagaagtgccttttacatattggagcaacagcgtgttggcttggctgttgacatggatgaaattgaaaagtaccaagaagtggaagaagaccaagacccatcatgccccaggctcagcagggagctgctggatgagaaagagcctgaagtcttgcaggactcactggatagatgttattcgactccttcaggttatcttgaactgcctgacttaggccagccctacagcagtgctgtttactcattggaggaacagtaccttggcttggctcttgacgtggacagaattaaaaaggaccaagaagaggaagaagaccaaggcccaccatgccccaggctcagcagggagctgctggaggtagtagagcctgaagtcttgcaggactcactggatagatgttattcaactccttccagttgtcttgaacagcctgactcctgccagccctatggaagttccttttatgcattggaggaaaaacatgttggcttttctcttgacgtgggagaaattgaaaagaaggggaaggggaagaaaagaaggggaagaagatcaaagaaggaaagaagaaggggaagaaaagaaggggaagaagatcaaaacccaccatgccccaggctcaacggcgtgctgatggaagtggaagagcctgaagtcttacaggactcactggatagatgttattcgactccgtcaatgtactttgaactacctgactcattccagcactacagaagtgtgttttactcatttgaggaacagcacatcagcttcgccctttacgtggacaataggttttttactttgacggtgacaagtctccacctggtgttccagatgggagtcatattcccacaataagcagcccttactaagccgagagatgtcattcctgcaggcaggacctataggcacgtgaagatttgaatgaaactacagttccatttggaagcccagacataggatgggtcagtgggcatggctctattcctattctcaaaccatgccagtggcaacctgtgctcagtctgaagacaatggacccacgttaggtgtgacacgttcacataactgtgcagcacatgccgggagtgatcagtcagacattttaatttgaaccacgtatctctgggtagctaaggtcattgtcatctttgtgtttagctcatccaaaggtgttaccctggtttcaatgaacctaacctcattctttgtgtcttcagtgttggcttgttttagctgatccatctgtaacacaggagggatccttggctgaggattgtatttcagaaccaccaactgctcttgacaattgttaacccgctaggctcctttggttagagaagccacagtccttcagcctccaattggtgtcagtacttaggaagaccacagctagatggacaaacagcattgggaggccttagccctgctcctctcaattccatcctgtagagaacaggagtcaggagccgctggcaggagacagcatgtcacccaggactctgccggtgcagaatatgaacaatgccatgttcttgcagaaaacgcttagcctgagtttcataggaggtaatcaccagacaactgcagaatgtagaacactgagcaggacaactgacctgtctccttcacatagtccatatcaccacaaatcacacaacaaaaaggagaagagatattttgggttcaaaaaaagtaaaaagataatgtagctgcatttctttagttattttgaaccccaaatatttcctcatctttttgttgttgtcatggatggtggtgacatggacttgtttatagaggacaggtcagctgtctggctcagtgatctacattctgaagttgtctgaaaatgtcttcatgattaaattcagcctaaacgttttgccgggaacactgcagagacaatgctgtgagtttccaacctcagcccatctgcgggcagagaaggtctagtttgtccatcaccatttatgatatcaggactggttacttggttaaggaggggtctaggagatctgtcccttttagagacaccttacttataatgaagtacttgggaaagcggttttcaagagtataaatatcctgtattctaatgatcatcctctaaacattttatcatttattaatcctccctgcctgtgtctattattatattcatatctctacactgcaaattttgggtctcaatttttactgtgcctttgtttttactagtgtctgctgttgcaaaaagaagaaaacattctctgcctgagttttaatttttgtccaaagttaattttaatctatacaattaaaaccttttgcctatca

SEQ ID NO: 574629 - DNA, 150 bp, Homo sapiens
gaccatgctgctgcagcccgcggggtccctcggctcctacagctaccggagtccccactgggcaagcacctactccgtgtaagttggtggagaccgcttacgcccagtaccgcgttgttgtacaagccaggcagcaagggcccctcggga

SEQ ID NO: 574630 - DNA, 116 bp, Homo sapiens
cagcgccagggtcgaaagaatcaacagggtttttttcatggtacgaaggcctcggttaaaaaacgcgcagtgggcggggcggcgtgaagcgttggactggaaaaccgcaatttagt

SEQ ID NO: 574631 - DNA, 3525 bp, Homo sapiens
  misc_feature (56)..(56): n is a, c, g, or t
  misc_feature (459)..(459): n is a, c, g, or t
agcttgcagagcagctcaagcaagctgaggagctcaggcaatataaagtcctggtncactccaggaacgagagctgacgcagtaaaggagaagttacaggaagggagagatgcctcccgctcattgaatgagcatctccaggccctcctcactctggatgagccggacaagtcccaggggcaggacctccaagaacagctggctgaggggtgtagactggcacagcaccttgtccaaaagctcagcccagggaggtgcagaaggctgaagagagcaaagtccctgaggactcactggaggaatgtgccatcacttgttcaaatagccacggcccttgtgactccaaccagcctcacaagaacatcaaaatcacatttgaggaagacgaagtcaactcaactctggttgtagacagagaatcctctcatgatgaatgtcaggatgctctaaacattctcncagtccccggccccacctcttctgccacaaacgtcagcatggtggtatcagccggccctttgtccagcgagaaggcagagatgaacattctagaaatcaatgagaaattgcgcccccagctggcagagaagaaacagcagttcagaaacctcaaagagaaatgttttctaactcaactggccggcttcctggccaaccagcagaacaaatacaaatatgaagagtgcaaagacctcataaaatctatgctgaggaatgagcgacagttcaaggaggagaagcttgcagagcagctcaagcaagctgaggagctcaggcaatataaagtcctggttcacgctcaggaacgagagctgacccagttaagggagaagttacgggaagggagagatgcctcccgctcattgaatgagcatctccaggccctcctcactccggatgagccggacaagtcccaggggcaggacctccaagaacagctggctgaggggtgtagactggcacagcaccttgtccaaaagctcagcccagaaaatgacaacgatgacgatgaagatgttcaagttgaggtggctgagaaagtgcagaaatcgtctgcccccagggagatgcagaaggctgaagaaaaggaagtccctgaggactcactggaggaatgtgccatcacttgttcaaatagccatggcccttatgactccaaccagccacataggaaaaccaaaatcacatttgaggaagacaaagtcgactcaactctcattggctcatcctctcatgttgaatgggaggatgctgtacacattattccagaaaatgaaagtgatgatgaggaagaggaagaaaaagggccagtgtctcccaggaatctgcaggagtctgaagaggaggaagtcccccaggagtcctgggatgaaggttattcgactctctcaattcctcctgaaatgttggcctcgtaccagtcttacagcagcacatttcactcattagaggaacagcaagtctgcatggctgttgacataggcagacatcggtgggatcaagtgaaaaaggaggaccaagaggcaacaggtcccaggctcagcagggagctgctggatgagaaagggcctgaagtcttgcaggactcactggatagatgttattcaactccttcaggttgtcttgaactgactgactcatgccagccctacagaagtgccttttacgtattggagcaacagcgtgttggcttggctgttgacatggatgaaattgaaaagtaccaagaagtggaagaagaccaagacccatcatgccccaggctcagcagggagctgctggatgagaaagagcctgaagtcttgcaggactcactggatagatgttattcgactccttcaggttatcttgaactgcctgacttaggccagccctacagcagtgctgtttactcattggaggaacagtaccttggcttggctcttgacgtggacagtgagtaccttactgtgaaggtgataagcctccacctggtcttccagataggggtgatattcctgttccaagtggcccttactgacccgagagatgtcattgccgcaggcaggacctatgggcgcatataggttgtaatgaaactgtagttccatttggaagcccagacataggatgggtcagtgggcatggctctattcctattctcaaaccatgccagtggcaacctgtgctcagtctgaagacaatggacccacgttaggtgtgacacgttcacataactgtgcagcacatgccgggagtgatcagtcagacattttaatttgaaccacgtatctctgggtagctacaaaattcctcagggatttcattttgcaggcatgtctctgagcttctatacctgctcaaggtcattgtcatctttgtgtttagctcatccaaaggtgttaccctggtttcaatgaacctaacctcattctttgtgtcttcagtgttggcttgttttagctgatccatctgtaacacaggagggatccttggctgaggattgtatttcagaaccaccaactgctcttgacaattgttaacccgctaggctcctttggttagagaagccacagtccttcagcctccaattggtgtcagtacttaggaagaccacagctagatggacaaacagcattgggaggccttagccctgctcctctcaattccatcctgtagagaacaggagtcaggagccgctggcaggagacagcatgtcacccaggactctgccggtgcagaatatgaacaatgccatgttcttgcagaaaacgcttagcctgagtttcataggaggtaatcaccagacaactgcagaatgtagaacactgagcaggacaactgacctgtctccttcacatagtccatatcaccacaaatcacacaacaaaaaggagaagagatattttgggttcaaaaaaagtaaaaagataatgtagctgcatttctttagttattttgaaccccaaatatttcctcatctttttgttgttgtcatggatggtggtgacatggacttgtttatagaggacaggtcagctgtctggctcagtgatctacattctgaagttgtctgaaaatgtcttcatgattaaattcagcctaaacgttttgccgggaacactgcagagacaatgctgtgagtttccaacctcagcccatctgcgggcagagaaggtctagtttgtccatcaccatttatgatatcaggactggttacttggttaaggaggggtctaggagatctgtcccttttagagacaccttacttataatgaagtacttgggaaagcggttttcaagagtataaatatcctgtattctaatgatcatcctctaaacattttatcatttattaatcctccctgcctgtgtctattattatattcatatctctacactgcaaattttgggtctcaatttttactgtgcctttgtttttactagtgtctgctgttgcaaaaagaagaaaacattctctgcctgagttttaatttttgtccaaagttaattttaatctatacaattaaaaccttttgcctatca

SEQ ID NO: 574632 - DNA, 4478 bp, Homo sapiens
  misc_feature (56)..(56): n is a, c, g, or t
  misc_feature (459)..(459): n is a, c, g, or t
agcttgcagagcagctcaagcaagctgaggagctcaggcaatataaagtcctggtncactccaggaacgagagctgacgcagtaaaggagaagttacaggaagggagagatgcctcccgctcattgaatgagcatctccaggccctcctcactctggatgagccggacaagtcccaggggcaggacctccaagaacagctggctgaggggtgtagactggcacagcaccttgtccaaaagctcagcccagggaggtgcagaaggctgaagagagcaaagtccctgaggactcactggaggaatgtgccatcacttgttcaaatagccacggcccttgtgactccaaccagcctcacaagaacatcaaaatcacatttgaggaagacgaagtcaactcaactctggttgtagacagagaatcctctcatgatgaatgtcaggatgctctaaacattctcncagtccccggccccacctcttctgccacaaacgtcagcatggtggtatcagccggccctttgtccagcgagaaggcagagatgaacattctagaaatcaatgagaaattgcgcccccagctggcagagaagaaacagcagttcagaaacctcaaagagaaatgttttctaactcaactggccggcttcctggccaaccagcagaacaaatacaaatatgaagagtgcaaagacctcataaaatctatgctgaggaatgagcgacagttcaaggaggagaagcttgcagagcagctcaagcaagctgaggagctcaggcaatataaagtcctggttcacgctcaggaacgagagctgacccagttaagggagaagttacgggaagggagagatgcctcccgctcattgaatgagcatctccaggccctcctcactccggatgagccggacaagtcccaggggcaggacctccaagaacagctggctgaggggtgtagactggcacagcaccttgtccaaaagctcagcccagaaaatgacaacgatgacgatgaagatgttcaagttgaggtggctgagaaagtgcagaaatcgtctgcccccagggagatgcagaaggctgaagaaaaggaagtccctgaggactcactggaggaatgtgccatcacttgttcaaatagccatggcccttatgactccaaccagccacataggaaaaccaaaatcacatttgaggaagacaaagtcgactcaactctcattggctcatcctctcatgttgaatgggaggatgctgtacacattattccagaaaatgaaagtgatgatgaggaagaggaagaaaaagggccagtgtctcccaggaatctgcaggagtctgaagaggaggaagtcccccaggagtcctgggatgaaggttattcgactctctcaattcctcctgaaatgttggcctcgtaccagtcttacagcagcacatttcactcattagaggaacagcaagtctgcatggctgttgacataggcagacatcggtgggatcaagtgaaaaaggaggaccaagaggcaacaggtcccaggctcagcagggagctgctggatgagaaagggcctgaagtcttgcaggactcactggatagatgttattcaactccttcaggttgtcttgaactgactgactcatgccagccctacagaagtgccttttacgtattggagcaacagcgtgttggcttggctgttgacatggatgaaattgaaaagtaccaagaagtggaagaagaccaagacccatcatgccccaggctcagcagggagctgctggatgagaaagagcctgaagtcttgcaggactcactggatagatgttattcgactccttcaggttatcttgaactgcctgacttaggccagccctacagcagtgctgtttactcattggaggaacagtaccttggcttggctcttgacgtggacagaattaaaaaggaccaagaagaggaagaagaccaaggcccaccatgccccaggctcagcagggagctgctggaggtagtagagcctgaagtcttgcaggactcactggatagatgttattcaactccttccagttgtcttgaacagcctgactcctgccagccctatggaagttccttttatgcattggaggaaaaacatgttggcttttctcttgacgtgggagaaattgaaaagaaggggaaggggaagaaaagaaggggaagaagatcaaagaaggaaagaagaaggggaagaaaagaaggggaagaagatcaaaacccaccatgccccaggctcagcagggagctgctggatgagaaagggcctgaagtcttgcaggactcactggatagatgttattcaactccttcaggttgtcttgaactgactgactcatgccagccctacagaagtgccttttacatattggagcaacagcgtgttggcttggctgttgacatggatgaaattgaaaagtaccaagaagtggaagaagaccaagacccatcatgccccaggctcagcggggagctgttggatgagaaagagcctgaagtcttgcaggagtcactggatagatgctattcaactccttcaggttgtcttgaactgactgactcatgccagccctacagaagtgccttttacatattggagcaacagcgtgttggcttggctgttgacatggatgaaattgaaaagtaccaagaagtggaagaagaccaagacccatcatgccccaggctcagcagggagctgctggatgagaaagagcctgaagtcttgcaggactcactggatagatgttattcgactccttcaggttatcttgaactgcctgacttaggccagccctacagcagtgctgtttactcattggaggaacagtaccttggcttggctcttgacgtggacagaattaaaaaggaccaagaagaggaagaagaccaaggcccaccatgccccaggctcagcagggagctgctggaggtagtagagcctgaagtcttgcaggactcactggatagatgttattcaactccttccagttgtcttgaacagcctgactcctgccagccctatggaagttccttttatgcattggaggaaaaacatgttggcttttctcttgacgtgggagaaattgaaaagaaggggaaggggaagaaaagaaggggaagaagatcaaagaaggaaagaagaaggggaagaaaagaaggggaagaagatcaaaacccaccatgccccaggctcaacggcgtgctgatggaagtggaagagcctgaagtcttacaggactcactggatagatgttattcgactccgtcaatgtactttgaactacctgactcattccagcactacagaagtgtgttttactcatttgaggaacagcacatcagcttcgccctttacgtggacaataggttttttactttgacggtgacaagtctccacctggtgttccagatgggagtcatattcccacaataagcagcccttactaagccgagagatgtcattcctgcaggcaggacctataggcacgtgaagatttgaatgaaactacagttccatttggaagcccagacataggatgggtcagtgggcatggctctattcctattctcaaaccatgccagtggcaacctgtgctcagtctgaagacaatggacccacgttaggtgtgacacgttcacataactgtgcagcacatgccgggagtgatcagtcagacattttaatttgaaccacgtatctctgggtagctacaaaattcctcagggatttcattttgcaggcatgtctctgagcttctatacctgctcaaggtcattgtcatctttgtgtttagctcatccaaaggtgttaccctggtttcaatgaacctaacctcattctttgtgtcttcagtgttggcttgttttagctgatccatctgtaacacaggagggatccttggctgaggattgtatttcagaaccaccaactgctcttgacaattgttaacccgctaggctcctttggttagagaagccacagtccttcagcctccaattggtgtcagtacttaggaagaccacagctagatggacaaacagcattgggagagcccatctgcgggcagagaaggtctagtttgtccatcaccatttatgatatcaggactggttacttggttaaggaggggtctaggagatctgtcccttttagagacaccttacttataatgaagtacttgggaaagcggttttcaagagtataaatatcctgtattctaatgatcatcctctaaacattttatcatttattaatcctccctgcctgtgtctattattatattcatatctctacactgcaaattttgggtctcaatttttactgtgcctttgtttttactagtgtctgctgttgcaaaaagaagaaaacattctctgcctgagttttaatttttgtccaaagttaattttaatctatacaattaaaaccttttgcctatca

SEQ ID NO: 574633 - DNA, 1195 bp, Homo sapiens
  misc_feature (273)..(273): n is a, c, g, or t
gggggggggacattaaaaaagtggtgatgacccaaatttttgagccaattaatgtttggcggggtgggtggtgcttacgctggtgggaatcctggaatgggttctataacagtgaactagctgggcttaatggcagccagcgtgctggggcagcagaacatattcattcttactgggaaatactattggctgggttccaaaggtgatgattttcaacgcagactattggtgtctaatatgggtgctggggtgtaaggatctgtggtggcccangctctaatcagagctcggcctaacctgggcaaagctggcgctacccttcaagtggggaaaattatatatccattggtgttaaccaagggttcacccttctccaccctggttcctaaaggacctttggtggacatgtgctggcggatatttcctggcgtcaatagcaaggtgggtagcctcgggttacattttaacgaacagtgggagcgctgagggccttggtcatcaatactgtgtgcgaatcccaaagaagttccccttgggtaacacttaaggggaaaggatctgggtatggatttaacccatttcctaatggcctggggctatgtgacgatattcattccctcttttacaaacgtacaagggggctgaacaaatgtttggccattggggccatcggaccaaaggggggtgcactattagggggcacaatagtatattataaaaccctgggtaaaggggtctttcaacaagtggtctttgactctttacacagttttggggacacgtggggacgtggaaattgtgtacgcccataagacgacagatacccggcgaggagcacatgctctaacacactaattcacaggggacggggggttgagtattcccccaaggttgcgagcaaaaaccgacaagagacggcgcgcgttgcaaagaatagtatcgacgaagaatatacatcggggggactagcagggggacaaaatacgaggggggattgaagtgttgtgtcccacgagaaacggggagaaacaaacggggggcacaacctagtggtgaccaccgaaaacgatgtggcgtatagcacgcggtggaaaaactgggttcgcgaaaaaagcggaaatgagcgagcacacgacgcgggaacggaggagacaccaaaacaaggtgggcggcgggcgcacactaaaaacacacg

SEQ ID NO: 574634 - DNA, 350 bp, Homo sapiens
tgattgacggcctgctgagtttgtcagagggaggcgcctgaggagagcttcatccagaacctgtctttggagctggatcttctgagctgtgagcagaaatcgctggctcaggacagtgcacacacgggcagagtacatgaggcccccaagcacagatcagagctgtagtaccaggtgcacctgtagttgactggagaacactgtcagtggctgcagcttggaccaggcacagccagagcctgtgctaccacacgaagtgactgagagtctcttgacacctctagatgtcctttcggatgggcctcactggactggagatgacccatcatgtgtcagttcaggcagctgat

SEQ ID NO: 574635 - DNA, 464 bp, Homo sapiens
tggggtggagcacggggtacttaatggagggtccatgtgacaggggtgcggcttcccttaggccccttccccttctttcagggggctcatacatgtggcaacgtggtgagggaggggagatttcaggtggtgggtggggtgacgtgagtgtggtggcgagggaactccccagcgaggtggagggttcctcttctctcttctccctctgtggtgtgctctcatgtggcgtgggggcgtgggtggctccagggggggtctcttaaaacctcctgtgtggaggcgccatgtgtgtgtgggcacatgtgagtggctcacaccaactcgctgtgtgtgtgctgtgttacgcacagagattctcggtgtgctacataatacacgagagaaaacagtggaagctctgcgagaccaaacgagtgtgagggctgcgtgctgagagagtgcgcccacaagtgggcacgaagacc

SEQ ID NO: 574636 - DNA, 205 bp, Homo sapiens
atcccaccttgtggtcccagagtgctgggattacaggcatgagccaccttaccaagccaaatcataactttgaaaacacagtgaaccactaaaatagtgtagccactttggaaaatagtctggcaattcctcaaaacattaaacacagttaccacagatcccagcaaggacactcctaggtatatacccaagagagcacacaggt

SEQ ID NO: 574637 - DNA, 120 bp, Homo sapiens
tggcacgcgctggttttgaactcctgacctctctgatcccccgcccgcatgatgatcacatgctctctctccgaccagcgcccaggcaatttctggccaccttgtgcccttgcagatcac

SEQ ID NO: 574638 - DNA, 844 bp, Homo sapiens
  misc_feature (47)..(47): n is a, c, g, or t
  misc_feature (65)..(65): n is a, c, g, or t
  misc_feature (92)..(92): n is a, c, g, or t
  misc_feature (100)..(100): n is a, c, g, or t
  misc_feature (105)..(105): n is a, c, g, or t
  misc_feature (107)..(107): n is a, c, g, or t
  misc_feature (141)..(141): n is a, c, g, or t
  misc_feature (157)..(158): n is a, c, g, or t
  misc_feature (163)..(163): n is a, c, g, or t
  misc_feature (180)..(181): n is a, c, g, or t
  misc_feature (189)..(189): n is a, c, g, or t
  misc_feature (198)..(198): n is a, c, g, or t
  misc_feature (203)..(203): n is a, c, g, or t
  misc_feature (205)..(205): n is a, c, g, or t
  misc_feature (207)..(208): n is a, c, g, or t
  misc_feature (214)..(214): n is a, c, g, or t
  misc_feature (217)..(218): n is a, c, g, or t
  misc_feature (223)..(223): n is a, c, g, or t
  misc_feature (227)..(231): n is a, c, g, or t
  misc_feature (235)..(236): n is a, c, g, or t
  misc_feature (238)..(240): n is a, c, g, or t
  misc_feature (246)..(247): n is a, c, g, or t
  misc_feature (251)..(251): n is a, c, g, or t
  misc_feature (254)..(255): n is a, c, g, or t
  misc_feature (262)..(262): n is a, c, g, or t
  misc_feature (276)..(277): n is a, c, g, or t
  misc_feature (284)..(284): n is a, c, g, or t
  misc_feature (286)..(288): n is a, c, g, or t
  misc_feature (290)..(290): n is a, c, g, or t
  misc_feature (310)..(310): n is a, c, g, or t
  misc_feature (314)..(314): n is a, c, g, or t
  misc_feature (318)..(318): n is a, c, g, or t
  misc_feature (320)..(320): n is a, c, g, or t
  misc_feature (337)..(337): n is a, c, g, or t
  misc_feature (339)..(339): n is a, c, g, or t
  misc_feature (351)..(351): n is a, c, g, or t
  misc_feature (357)..(357): n is a, c, g, or t
  misc_feature (361)..(361): n is a, c, g, or t
  misc_feature (366)..(366): n is a, c, g, or t
  misc_feature (371)..(371): n is a, c, g, or t
  misc_feature (376)..(378): n is a, c, g, or t
  misc_feature (388)..(388): n is a, c, g, or t
  misc_feature (401)..(401): n is a, c, g, or t
  misc_feature (420)..(420): n is a, c, g, or t
  misc_feature (428)..(428): n is a, c, g, or t
  misc_feature (435)..(435): n is a, c, g, or t
  misc_feature (467)..(467): n is a, c, g, or t
  misc_feature (514)..(514): n is a, c, g, or t
  misc_feature (524)..(524): n is a, c, g, or t
  misc_feature (543)..(543): n is a, c, g, or t
  misc_feature (548)..(548): n is a, c, g, or t
  misc_feature (550)..(550): n is a, c, g, or t
  misc_feature (560)..(560): n is a, c, g, or t
  misc_feature (574)..(574): n is a, c, g, or t
  misc_feature (577)..(577): n is a, c, g, or t
  misc_feature (580)..(580): n is a, c, g, or t
  misc_feature (582)..(582): n is a, c, g, or t
  misc_feature (590)..(590): n is a, c, g, or t
  misc_feature (603)..(603): n is a, c, g, or t
  misc_feature (610)..(610): n is a, c, g, or t
  misc_feature (613)..(613): n is a, c, g, or t
  misc_feature (742)..(742): n is a, c, g, or t
  misc_feature (756)..(756): n is a, c, g, or t
  misc_feature (761)..(761): n is a, c, g, or t
  misc_feature (791)..(791): n is a, c, g, or t
aaaacattaagttgacttcccattaattaaatactttaacactgagngtagaaaaacttgggcanatccaagaaagagaatttatgaaaganccgggganaaagncngccccgtacctctaggctattgataaaaccagcngggagggggaacagcnncaggnagggtacaggggaattnngggggggnaagagaggnggggngngnngggggnaannggggngacnnnnncganncnnngggagnnaganaannaaaaaangggaagggaaaaannggggggngnnngnagagcggcggcggggggggngggngggngnggggggggggggggggngngggggggggggngggggngggnggggnggggnggggnnngagggggggnggggggggggcangcgggggaagcagggggcnggggggcncccggancgcaggcgggggcggcggcgacgggggcgganggcgggggcacgaacgcaagagcagggacgggggaaccgaagaggcngcgcaaagcnaacagccccccccagaagncccgngnggccccgagnccctacagggcagnggnggnanaaacccancacccagtgagcnggccagnagntcagccccaccacatgcggcagcggccgcaagacacattcaccaggcagttgcccaggcctctcacccatggggggaacacatctggccactttttttttttctgtaaacctcaaatgaaacagaatcncacagatgtggggnccccnccaaattgtaataaacgttagagaaatgcnccagaaaggaacaaagggagaccctctcagatcagcctaaaaccagagtggaa

SEQ ID NO: 574639 - DNA, 439 bp, Homo sapiens
acccaagattatcatggggtcctctacaggatctttggttggttggttggttggttggactataggctgagtctggttttctgtagttactgcaaataaggtgttgctggaagatcatctgtgtatgtccagcaccactccccaccatgccagtctgcagtagttaacacatgcgttgtgaatagcccacagagcctaccatctggttcctaagcagttgcacctctgtttaggactttgtttttctttgttcttctttgtaattcttaagttagctttcccaggttagtctctgagctagtgcttacccttcttatgttagggaaaccttcacatcatgaaaagacatttagataggaaactagtaagttgcttgtgataggttttgaaagtttattatctgaaggaagttttttagtatatgcaggcatgtcgacgc

SEQ ID NO: 574640 - DNA, 340 bp, Homo sapiens
  misc_feature (45)..(45): n is a, c, g, or t
  misc_feature (235)..(235): n is a, c, g, or t
  misc_feature (287)..(287): n is a, c, g, or t
  misc_feature (340)..(340): n is a, c, g, or t
tctattgcgagtctgtttatggtccgaatatgggcgcggcttttnggagggaaatttttagggggcacttagggggtttaaaggttgggtttaaaattttaaacaaattgggaattttttgggggccaaatgggggaaatttttccccgttctaaaaaaggggccccaaaaacttttggggggggataaaggggggggaacacggggggggttttttgagagcggcccccccccnagcaaaagagggtttccccccccccgggggggggggtttttccccccccccnaaggggcaaaacaccccccccgggggtggtggaaaaaagggggtgattttttn

SEQ ID NO: 574641 - DNA, 214 bp, Homo sapiens
accggtctgccgaagaaatggaggacacactgaatcatctgagttcctcaatgtgctgagtcccagggcgtcacatcccaaactgtgacaagaaggggttctataagaagaaacagtgtcgcccttccaaaggcagaaagcggggcttctgctggtgcgtggacaagtacgggcagccattgccaggctatgacaccaaggggaaagacgacgt

SEQ ID NO: 574642 - DNA, 268 bp, Homo sapiens
actgatggtgtggtgcagaggggccgcagggtcggtgtggtcgtcgatgtgaagctggcgagcctctaggtcccaccacttgcgggtagaaacctgaccgtcaatggtgactgtttctgtcccgccgcgcgtgtcgtagctggtcatgatgccatcagggccggtgtggctggtgagacgcccggccgggttccaggtgtaacggtgggttccgccggcgggatcggtggattcgacgatctggtcgagctggttgtatcgataggtg

SEQ ID NO: 574643 - DNA, 227 bp, Homo sapiens
cgcgtgacatgatagatccagactactcgggaggctgaggctggaggatcgcttgagtacagagagattctgggctgtaggtgcgctatgccgatctgggtgtccgcactaagattcggcatcaatatgagtgacctcccggagagcgggaagaccaccagtgttgccataaggagagggtgaacctggcccagtgtctggaaactggtgcgattgagcccaaacgg

SEQ ID NO: 574644 - DNA, 155 bp, Homo sapiens
acgaggaacatctagctaccggataatttcttcatattagtatcatcccacagccaacagattgaagggtcactatttgcctgacagatcatccttaaatgggattttcagagcatgtcacccttttgcttcaagtcaggtttggtggaggcacc

SEQ ID NO: 574645 - DNA, 411 bp, Homo sapiens
  misc_feature (17)..(17): n is a, c, g, or t
  misc_feature (220)..(220): n is a, c, g, or t
  misc_feature (258)..(258): n is a, c, g, or t
  misc_feature (348)..(348): n is a, c, g, or t
  misc_feature (378)..(378): n is a, c, g, or t
gcctgtaaaccccagcnactgttaggcccaagatggggcagattgctcccccaggagtccgagacccaacccgggcaacacagggagaccctgtctcctacaaaatttacaaaaaatcagcccaagtgtagtggtacgctcctgtgttccccagctactcagaaggctggggtggaaagatgctagagcccagggaggtcaaggctgcagtgagccaagntcataccactgcactccagcccccacaacaaagcaagnccctgtctcaaaagacaaaaataaaaccttctaaaacagtgagcttgctaagcacatgtgtcacgcctgtaatcccagcactctgagagnccaaggcaggcagatcacgaggtcaggagntcaagaccatcctggctaacacggtgaaacccc

SEQ ID NO: 574646 - DNA, 425 bp, Homo sapiens
gtcgaccatgcaatcggtgctgtcatgctgcgacgggcgtgtccggatgactcctctctcgcggatgaaatactggaaacttgccgtgctgagataatggcatcactgccaccgagtcaaaaaagcagcctctagagcaccatcggcgatgatgatttcactggtgccagcttttttccaaggccaggcccagtgtcggagccgtcagtgcatcatcagcttcgagacacagatcaaggctcactttgaaccctcctttgtcagcctataacgcccattctccgaatgaaatggtgagttattcgacgactacatctgatcgataatgagaattggttttaactgcgaatagtttgctataacatgcttgggtgttgttggcgtttttaccctctgcattgacctattcgtaaaggttttcctct

SEQ ID NO: 574647 - DNA, 142 bp, Homo sapiens
ggtcggaggtgtgcacggtccacagaaaaaagttaaactgctgctgatgaagattatgacgatgattatgaagaggatgatgattaagatgatgatgatgatgattttgattgatgaggaagctgtaagaaaaagcgcccgt

SEQ ID NO: 574648 - DNA, 404 bp, Homo sapiens
  misc_feature (1)..(1): n is a, c, g, or t
ngggccaggcaccacggctcacatctttaatctcagcctttaggaggcccaaagcaggaggatcacttgagctcaggagttcaacaccagcctaggccaagagagcaagaccccatatcattttttaaaaactcatagagaggaagaaaataatatctaaaataaaaaaaacacactggattgaattaacagtagaaagcaatgacatagcaatagaaatgattgaagttgaagcagtgagagaaaataagaattaaaaagaaatgaataggccatatagtctaacatacatatgagctctaaaagagagaggaaagaaagtgaagaatacagccaaagctttccaaatttgaataaaactataaacccatggatccaaaaactttaacaaagtaaagtccaag

SEQ ID NO: 574649 - DNA, 377 bp, Homo sapiens
acgaggttacagaccgaaggaggctgcacggagacaagatactgagcccatgaacactgaggcctgaatgacccagcagacctgatgaccttcagcaagcaagatcatgactgggggcttcttccacaacggaggagtccaggcctcatgcctccctaccggctcttcaacacctggctggtgcacccgtccaagatccctgtatgctggctgaggtcatcaagatcatcatgcggggaggtacctgctaaatattgcagcccatgccgatcatggcctgctcacaggactgctggacctccaggccctgtccccccagtacatcagcagtgtgagaggacgaggcaccttttgctccttcgatactcccgatgatt

SEQ ID NO: 574650 - DNA, 1227 bp, Homo sapiens
  misc_feature (306)..(306): n is a, c, g, or t
  misc_feature (363)..(363): n is a, c, g, or t
ggtgtggctgaaactgtctggtggtctgaggctgggagagccggaagccgacttgttccctctccctccccaggagcttctgtgactcctgggccacagacggtccaaggcatgggtaaagggccgtggtggactacctcccgtgatcttgtgccctcgcttgctccaatatctggtcagtgggggctcagtgcttgggcagcaatgcaccactcttttcacgctcaagcttattggagtcgtccgtgccacagccaatgacccaagatacaaatccacgtccaaggaagtgagtctcttgctcantccgactggcaaggagagggggcgttctggggtccaccgcgcgcgcaccggaggganggctgccatgtccggcatgtcatggcattctgatccgctggtggcccagtccgtggccgtctcttctggcttggtggacgccgtaggtcccactgtagtccctgatgttcctgttgcttcccccgtgaattgatgcaaccttgaggcatgtggcaattgccggtcgtgcgaggtaggcgcccatggggtcttaagggggcgggagccacggatatggtgcacgtcgtgattggattggcgcagagggcgagtcggtaaggcgagcaaggtcattagctgacatagttgacgtggtccgtcggtacttccctttaatcgccagtgacgaatgatgaaccaaacgcttggaaaatagacagtgttcccgctcgggtcgactcgaggagcttccgtgccttgcgaaccccgtgtgggcccccattcctgcgtggagtgacgcatgcgcagctgggacctctctgtccaacagtgggatcaattggtgccaaatttaactgtgcgcacaaacaggtgggagtgagagtcgcacaatacggggaatcaaggaagcggacacccttcattctgagaaaaggccacgagcggtgcccaattctctctaacttgggggacttacacgggtttaaccaatgtgcggctttcgcgcagaaaggcgtgagtaggccttggttcccgagcaaacagatcgcgcagcgtgcgaccccaatgctgtgcgttttcgggggcaacacccacgagagggctcttaccggagtcttcatcacgacagggctcgggggccaattctatacggctcagagtgttagttcgcatggattgcgggaccgacccgaacgttcgctcgaagagtgggcgcgctcccaa

SEQ ID NO: 574651 - DNA, 429 bp, Homo sapiens
ctactctgaggaccccggcactgcttcgtgattctgaggcagcgcacatctggagaagatgagtactttgtgtgccctagcatcagctaagggagtagtttatcaatcaacacaagctttcctgcttgccttgaatcatggcctgcagctgaaagtcagtggcatcagggctgtgggttatcggaaattttcttagaatttctcctctgctccattgatcagggtagggatggttactgcacttcctccaatcccatcattggtgttgatgagattgggcatgttgtgcttgatttgcccccttggtccggaaggaaaagttcttctcgaggatggcacggtagtactttttcttggatattggtcagttccacctcaatgatcgtctccttgtatgggagcaaggttcttttccacatcatctttcag

SEQ ID NO: 574652 - DNA, 128 bp, Homo sapiens
tctggcctgctgctgtcgtctctgtcccggttccccttggcgtgagcggcgcgtctggcctaacctcgacccctgtggggcctgctggtgctcccgactcttcctgcaacgggaattgaagcactcca

SEQ ID NO: 574653 - DNA, 4854 bp, Homo sapiens
  misc_feature (56)..(56): n is a, c, g, or t
  misc_feature (459)..(459): n is a, c, g, or t
agcttgcagagcagctcaagcaagctgaggagctcaggcaatataaagtcctggtncactccaggaacgagagctgacgcagtaaaggagaagttacaggaagggagagatgcctcccgctcattgaatgagcatctccaggccctcctcactctggatgagccggacaagtcccaggggcaggacctccaagaacagctggctgaggggtgtagactggcacagcaccttgtccaaaagctcagcccagggaggtgcagaaggctgaagagagcaaagtccctgaggactcactggaggaatgtgccatcacttgttcaaatagccacggcccttgtgactccaaccagcctcacaagaacatcaaaatcacatttgaggaagacgaagtcaactcaactctggttgtagacagagaatcctctcatgatgaatgtcaggatgctctaaacattctcncagtccccggccccacctcttctgccacaaacgtcagcatggtggtatcagccggccctttgtccagcgagaaggcagagatgaacattctagaaatcaatgagaaattgcgcccccagctggcagagaagaaacagcagttcagaaacctcaaagagaaatgttttctaactcaactggccggcttcctggccaaccagcagaacaaatacaaatatgaagagtgcaaagacctcataaaatctatgctgaggaatgagcgacagttcaaggaggagaagcttgcagagcagctcaagcaagctgaggagctcaggcaatataaagtcctggttcacgctcaggaacgagagctgacccagttaagggagaagttacgggaagggagagatgcctcccgctcattgaatgagcatctccaggccctcctcactccggatgagccggacaagtcccaggggcaggacctccaagaacagctggctgaggggtgtagactggcacagcaccttgtccaaaagctcagcccagaaaatgacaacgatgacgatgaagatgttcaagttgaggtggctgagaaagtgcagaaatcgtctgcccccagggagatgcagaaggctgaagaaaaggaagtccctgaggactcactggaggaatgtgccatcacttgttcaaatagccatggcccttatgactccaaccagccacataggaaaaccaaaatcacatttgaggaagacaaagtcgactcaactctcattggctcatcctctcatgttgaatgggaggatgctgtacacattattccagaaaatgaaagtgatgatgaggaagaggaagaaaaagggccagtgtctcccaggaatctgcaggagtctgaagaggaggaagtcccccaggagtcctgggatgaaggttattcgactctctcaattcctcctgaaatgttggcctcgtaccagtcttacagcagcacatttcactcattagaggaacagcaagtctgcatggctgttgacataggcagacatcggtgggatcaagtgaaaaaggaggaccaagaggcaacaggtcccaggctcagcagggagctgctggatgagaaagggcctgaagtcttgcaggactcactggatagatgttattcaactccttcaggttgtcttgaactgactgactcatgccagccctacagaagtgccttttacgtattggagcaacagcgtgttggcttggctgttgacatggatgaaattgaaaagtaccaagaagtggaagaagaccaagacccatcatgccccaggctcagcagggagctgctggatgagaaagagcctgaagtcttgcaggactcactggatagatgttattcgactccttcaggttatcttgaactgcctgacttaggccagccctacagcagtgctgtttactcattggaggaacagtaccttggcttggctcttgacgtggacagaattaaaaaggaccaagaagaggaagaagaccaaggcccaccatgccccaggctcagcagggagctgctggaggtagtagagcctgaagtcttgcaggactcactggatagatgttattcaactccttccagttgtcttgaacagcctgactcctgccagccctatggaagttccttttatgcattggaggaaaaacatgttggcttttctcttgacgtgggagaaattgaaaagaaggggaaggggaagaaaagaaggggaagaagatcaaagaaggaaagaagaaggggaagaaaagaaggggaagaagatcaaaacccaccatgccccaggctcagcagggagctgctggatgagaaagggcctgaagtcttgcaggactcactggatagatgttattcaactccttcaggttgtcttgaactgactgactcatgccagccctacagaagtgccttttacatattggagcaacagcgtgttggcttggctgttgacatggatgaaattgaaaagtaccaagaagtggaagaagaccaagacccatcatgccccaggctcagcggggagctgttggatgagaaagagcctgaagtcttgcaggagtcactggatagatgctattcaactccttcaggttgtcttgaactgactgactcatgccagccctacagaagtgccttttacatattggagcaacagcgtgttggcttggctgttgacatggatgaaattgaaaagtaccaagaagtggaagaagaccaagacccatcatgccccaggctcagcagggagctgctggatgagaaagagcctgaagtcttgcaggactcactggatagatgttattcgactccttcaggttatcttgaactgcctgacttaggccagccctacagcagtgctgtttactcattggaggaacagtaccttggcttggctcttgacgtggacagaattaaaaaggaccaagaagaggaagaagaccaaggcccaccatgccccaggctcagcagggagctgctggaggtagtagagcctgaagtcttgcaggactcactggatagatgttattcaactccttccagttgtcttgaacagcctgactcctgccagccctatggaagttccttttatgcattggaggaaaaacatgttggcttttctcttgacgtgggagaaattgaaaagaaggggaaggggaagaaaagaaggggaagaagatcaaagaaggaaagaagaaggggaagaaaagaaggggaagaagatcaaaacccaccatgccccaggctcaacggcgtgctgatggaagtggaagagcctgaagtcttacaggactcactggatagatgttattcgactccgtcaatgtactttgaactacctgactcattccagcactacagaagtgtgttttactcatttgaggaacagcacatcagcttcgccctttacgtggacaataggttttttactttgacggtgacaagtctccacctggtgttccagatgggagtcatattcccacaataagcagcccttactaagccgagagatgtcattcctgcaggcaggacctataggcacgtgaagatttgaatgaaactacagttccatttggaagcccagacataggatgggtcagtgggcatggctctattcctattctcaaaccatgccagtggcaacctgtgctcagtctgaagacaatggacccacgttaggtgtgacacgttcacataactgtgcagcacatgccgggagtgatcagtcagacattttaatttgaaccacgtatctctgggtagctacaaaattcctcagggatttcattttgcaggcatgtctctgagcttctatacctgctcaaggtcattgtcatctttgtgtttagctcatccaaaggtgttaccctggtttcaatgaacctaacctcattctttgtgtcttcagtgttggcttgttttagctgatccatctgtaacacaggagggatccttggctgaggattgtatttcagaaccaccaactgctcttgacaattgttaacccgctaggctcctttggttagagaagccacagtccttcagcctccaattggtgtcagtacttaggaagaccacagctagatggacaaacagcattgggagagcccatctgcgggcagagaaggtctagtttgtccatcaccatttatgatatcaggactggttacttggttaaggaggggtctaggagatctgtcccttttagagacaccttacttataatgaagtacttgggaaagcggttttcaagagtataaatatcctgtattctaatgatcatcctctaaacattttatcatttattaatcctccctgcctgtgtctattattatattcatatctctacactgcaaattttgggtctcaatttttactgtgcctttgtttttactagtgtctgctgttgcaaaaagaagaaaacattctctgcctgagttttaatttttgtccaaagttaattttaatctatacaattaaaaccttttgcctatcaaaaaaaaaaaaaaaaacaaaaaacaaaaaaaacccgttgccggcgcgcgggcctcagcgcctaagagaaaagcttcttcaaagaccattccggttggggcggcggggggcccccacgtggcgtgtacgttggacacttggcgccaaagcgcgtggtcccaaaggaggaacccggggccaggagacagggggggggggcagttcctctaccccaattaaaaaaaaggcgcccgggggggacacaccggagcgggcttctggacaaactctccaaagggggagctccggagggcgccaaaccaggggcgactcattctaacccgggggcccccaagggagaccccagaaaatcaaaattaaccccgggcgtcggagtt

SEQ ID NO: 574654 - DNA, 230 bp, Homo sapiens
acgccacgggtaggtacagcttgatttgagaggccagtgttaggcatgacctgggctgtctaggctgctgggagacacgcaggaatctggccaggaaggttgccatgagacgaaagttgggcctggaaaggcccttgtgaagcatgagcttggcctaaagaggccactgggtggcaggagctgggtgtgtagaagctcccaacctttcagcagctgttactcacccgtgg

SEQ ID NO: 574655 - DNA, 3988 bp, Homo sapiens
  misc_feature (56)..(56): n is a, c, g, or t
  misc_feature (459)..(459): n is a, c, g, or t
agcttgcagagcagctcaagcaagctgaggagctcaggcaatataaagtcctggtncactccaggaacgagagctgacgcagtaaaggagaagttacaggaagggagagatgcctcccgctcattgaatgagcatctccaggccctcctcactctggatgagccggacaagtcccaggggcaggacctccaagaacagctggctgaggggtgtagactggcacagcaccttgtccaaaagctcagcccagggaggtgcagaaggctgaagagagcaaagtccctgaggactcactggaggaatgtgccatcacttgttcaaatagccacggcccttgtgactccaaccagcctcacaagaacatcaaaatcacatttgaggaagacgaagtcaactcaactctggttgtagacagagaatcctctcatgatgaatgtcaggatgctctaaacattctcncagtccccggccccacctcttctgccacaaacgtcagcatggtggtatcagccggccctttgtccagcgagaaggcagagatgaacattctagaaatcaatgagaaattgcgcccccagctggcagagaagaaacagcagttcagaaacctcaaagagaaatgttttctaactcaactggccggcttcctggccaaccagcagaacaaatacaaatatgaagagtgcaaagacctcataaaatctatgctgaggaatgagcgacagttcaaggaggagaagcttgcagagcagctcaagcaagctgaggagctcaggcaatataaagtcctggttcacgctcaggaacgagagctgacccagttaagggagaagttacgggaagggagagatgcctcccgctcattgaatgagcatctccaggccctcctcactccggatgagccggacaagtcccaggggcaggacctccaagaacagctggctgaggggtgtagactggcacagcaccttgtccaaaagctcagcccagaaaatgacaacgatgacgatgaagatgttcaagttgaggtggctgagaaagtgcagaaatcgtctgcccccagggagatgcagaaggctgaagaaaaggaagtccctgaggactcactggaggaatgtgccatcacttgttcaaatagccatggcccttatgactccaaccagccacataggaaaaccaaaatcacatttgaggaagacaaagtcgactcaactctcattggctcatcctctcatgttgaatgggaggatgctgtacacattattccagaaaatgaaagtgatgatgaggaagaggaagaaaaagggccagtgtctcccaggaatctgcaggagtctgaagaggaggaagtcccccaggagtcctgggatgaaggttattcgactctctcaattcctcctgaaatgttggcctcgtaccagtcttacagcagcacatttcactcattagaggaacagcaagtctgcatggctgttgacataggcagacatcggtgggatcaagtgaaaaaggaggaccaagaggcaacaggtcccaggctcagcagggagctgctggatgagaaagggcctgaagtcttgcaggactcactggatagatgttattcaactccttcaggttgtcttgaactgactgactcatgccagccctacagaagtgccttttacgtattggagcaacagcgtgttggcttggctgttgacatggatgaaattgaaaagtaccaagaagtggaagaagaccaagacccatcatgccccaggctcagcagggagctgctggatgagaaagagcctgaagtcttgcaggactcactggatagatgttattcgactccttcaggttatcttgaactgcctgacttaggccagccctacagcagtgctgtttactcattggaggaacagtaccttggcttggctcttgacgtggacagaattaaaaaggaccaagaagaggaagaagaccaaggcccaccatgccccaggctcagcagggagctgctggaggtagtagagcctgaagtcttgcaggactcactggatagatgttattcaactccttccagttgtcttgaacagcctgactcctgccagccctatggaagttccttttatgcattggaggaaaaacatgttggcttttctcttgacgtgggagaaattgaaaagaaggggaaggggaagaaaagaaggggaagaagatcaaagaaggaaagaagaaggggaagaaaagaaggggaagaagatcaaaacccaccatgccccaggctcagcagggagctgctggatgagaaagggcctgaagtcttgcaggactcactggatagatgttattcaactccttcaggttgtcttgaactgactgactcatgccagccctacagaagtgccttttacatattggagcaacagcgtgttggcttggctgttgacatggatgaaattgaaaagtaccaagaagtggaagaagaccaagacccatcatgccccaggctcagcggggagctgttggatgagaaagagcctgaagtcttgcaggagtcactggatagatgctattcaactccttcaggttgtcttgaactgactgactcatgccagccctacagaagtgccttttacatattggagcaacagcgtgttggcttggctgttgacatggatgaaattgaaaagtaccaagaagtggaagaagaccaagacccatcatgccccaggctcagcagggagctgctggatgagaaagagcctgaagtcttgcaggactcactggatagatgttattcgactccttcaggttatcttgaactgcctgacttaggccagccctacagcagtgctgtttactcattggaggaacagtaccttggcttggctcttgacgtggacagaattaaaaaggaccaagaagaggaagaagaccaaggcccaccatgccccaggctcagcagggagctgctggaggtagtagagcctgaagtcttgcaggactcactggatagatgttattcaactccttccagttgtcttgaacagcctgactcctgccagccctatggaagttccttttatgcattggaggaaaaacatgttggcttttctcttgacgtgggagaaattgaaaagaaggggaaggggaagaaaagaaggggaagaagatcaaagaaggaaagaagaaggggaagaaaagaaggggaagaagatcaaaacccaccatgccccaggctcaacggcgtgctgatggaagtggaagagcctgaagtcttacaggactcactggatagatgttattcgactccgtcaatgtactttgaactacctgactcattccagcactacagaagtgtgttttactcatttgaggaacagcacatcagcttcgccctttacgtggacaataggttttttactttgacggtgacaagtctccacctggtgttccagatgggagtcatattcccacaataagcagcccttactaagccgagagatgtcattcctgcaggcaggacctataggcacgtgaagatttgaatgaaactacagttccatttggaagcccagacataggatgggtcagtgggcatggctctattcctattctcaaaccatgccagtggcaacctgtgctcagtctgaagacaatggacccacgttaggtgtgacacgttcacataactgtgcagcacatgccgggagtgatcagtcagacattttaatttgaaccacgtatctctgggtagctacaaaattcctcagggatttcattttgcaggcatgtctctgagcttctatacctgctcaaggtcattgtcatctttgtgtttagctcatccaaaggtgttaccctggtttcaatgaacctaacctcattctttgtgtcttcagtgttggcttgttttagctgatccatctgtaacacaggagggatccttggctgaggattgtatttcagacaccgtcgaagaagatcggctagagtcatc

SEQ ID NO: 574656 - DNA, 3921 bp, Homo sapiens
  misc_feature (56)..(56): n is a, c, g, or t
  misc_feature (459)..(459): n is a, c, g, or t
agcttgcagagcagctcaagcaagctgaggagctcaggcaatataaagtcctggtncactccaggaacgagagctgacgcagtaaaggagaagttacaggaagggagagatgcctcccgctcattgaatgagcatctccaggccctcctcactctggatgagccggacaagtcccaggggcaggacctccaagaacagctggctgaggggtgtagactggcacagcaccttgtccaaaagctcagcccagggaggtgcagaaggctgaagagagcaaagtccctgaggactcactggaggaatgtgccatcacttgttcaaatagccacggcccttgtgactccaaccagcctcacaagaacatcaaaatcacatttgaggaagacgaagtcaactcaactctggttgtagacagagaatcctctcatgatgaatgtcaggatgctctaaacattctcncagtccccggccccacctcttctgccacaaacgtcagcatggtggtatcagccggccctttgtccagcgagaaggcagagatgaacattctagaaatcaatgagaaattgcgcccccagctggcagagaagaaacagcagttcagaaacctcaaagagaaatgttttctaactcaactggccggcttcctggccaaccagcagaacaaatacaaatatgaagagtgcaaagacctcataaaatctatgctgaggaatgagcgacagttcaaggaggagaagcttgcagagcagctcaagcaagctgaggagctcaggcaatataaagtcctggttcacgctcaggaacgagagctgacccagttaagggagaagttacgggaagggagagatgcctcccgctcattgaatgagcatctccaggccctcctcactccggatgagccggacaagtcccaggggcaggacctccaagaacagctggctgaggggtgtagactggcacagcaccttgtccaaaagctcagcccagaaaatgacaacgatgacgatgaagatgttcaagttgaggtggctgagaaagtgcagaaatcgtctgcccccagggagatgcagaaggctgaagaaaaggaagtccctgaggactcactggaggaatgtgccatcacttgttcaaatagccatggcccttatgactccaaccagccacataggaaaaccaaaatcacatttgaggaagacaaagtcgactcaactctcattggctcatcctctcatgttgaatgggaggatgctgtacacattattccagaaaatgaaagtgatgatgaggaagaggaagaaaaagggccagtgtctcccaggaatctgcaggagtctgaagaggaggaagtcccccaggagtcctgggatgaaggttattcgactctctcaattcctcctgaaatgttggcctcgtaccagtcttacagcagcacatttcactcattagaggaacagcaagtctgcatggctgttgacataggcagacatcggtgggatcaagtgaaaaaggaggaccaagaggcaacaggtcccaggctcagcagggagctgctggatgagaaagggcctgaagtcttgcaggactcactggatagatgttattcaactccttcaggttgtcttgaactgactgactcatgccagccctacagaagtgccttttacgtattggagcaacagcgtgttggcttggctgttgacatggatgaaattgaaaagtaccaagaagtggaagaagaccaagacccatcatgccccaggctcagcagggagctgctggatgagaaagagcctgaagtcttgcaggactcactggatagatgttattcgactccttcaggttatcttgaactgcctgacttaggccagccctacagcagtgctgtttactcattggaggaacagtaccttggcttggctcttgacgtggacagaattaaaaaggaccaagaagaggaagaagaccaaggcccaccatgccccaggctcagcagggagctgctggaggtagtagagcctgaagtcttgcaggactcactggatagatgttattcaactccttccagttgtcttgaacagcctgactcctgccagccctatggaagttccttttatgcattggaggaaaaacatgttggcttttctcttgacgtgggagaaattgaaaagaaggggaaggggaagaaaagaaggggaagaagatcaaagaaggaaagaagaaggggaagaaaagaaggggaagaagatcaaaacccaccatgccccaggctcagcagggagctgctggatgagaaagggcctgaagtcttgcaggactcactggatagatgttattcaactccttcaggttgtcttgaactgactgactcatgccagccctacagaagtgccttttacatattggagcaacagcgtgttggcttggctgttgacatggatgaaattgaaaagtaccaagaagtggaagaagaccaagacccatcatgccccaggctcagcggggagctgttggatgagaaagagcctgaagtcttgcaggagtcactggatagatgctattcaactccttcaggttgtcttgaactgactgactcatgccagccctacagaagtgccttttacatattggagcaacagcgtgttggcttggctgttgacatggatgaaattgaaaagtaccaagaagtggaagaagaccaagacccatcatgccccaggctcagcagggagctgctggatgagaaagagcctgaagtcttgcaggactcactggatagatgttattcgactccttcaggttatcttgaactgcctgacttaggccagccctacagcagtgctgtttactcattggaggaacagtaccttggcttggctcttgacgtggacagaattaaaaaggaccaagaagaggaagaagaccaaggcccaccatgccccaggctcagcagggagctgctggaggtagtagagcctgaagtcttgcaggactcactggatagatgttattcaactccttccagttgtcttgaacagcctgactcctgccagccctatggaagttccttttatgcattggaggaaaaacatgttggcttttctcttgacgtgggagaaattgaaaagaaggggaaggggaagaaaagaaggggaagaagatcaaagaaggaaagaagaaggggaagaaaagaaggggaagaagatcaaaacccaccatgccccaggctcaacggcgtgctgatggaagtggaagagcctgaagtcttacaggactcactggatagatgttattcgactccgtcaatgtactttgaactacctgactcattccagcactacagaagtgtgttttactcatttgaggaacagcacatcagcttcgccctttacgtggacaataggttttttactttgacggtgacaagtctccacctggtgttccagatgggagtcatattcccacaataagcagcccttactaagccgagagatgtcattcctgcaggcaggacctataggcacgtgaagatttgaatgaaactacagttccatttggaagcccagacataggatgggtcagtgggcatggctctattcctattctcaaaccatgccagtggcaacctgtgctcagtctgaagacaatggacccacgttaggtgtgacacgttcacataactgtgcagcacatgccgggagtgatcagtcagacattttaatttgaaccacgtatctctgggtagctacaaaattcctcagggatttcattttgcaggcatgtctctgagcttctatacctgctcaaggtcattgtcatctttgtgtttagctcatccaaaggtgttaccctggtttcaatgaacctaacctcattctttgtgtcttcagtgttgcttccagatggtggtaccggctcgct

SEQ ID NO: 574657 - DNA, 103 bp, Homo sapiens
cccggcaagtgaggtaataaggaatcatggatacttctatattattgactggagcaaccaggaagtaactttagaaggaggatctgatggatatggcagagga

SEQ ID NO: 574658 - DNA, 3907 bp, Homo sapiens
  misc_feature (56)..(56): n is a, c, g, or t
  misc_feature (459)..(459): n is a, c, g, or t
agcttgcagagcagctcaagcaagctgaggagctcaggcaatataaagtcctggtncactccaggaacgagagctgacgcagtaaaggagaagttacaggaagggagagatgcctcccgctcattgaatgagcatctccaggccctcctcactctggatgagccggacaagtcccaggggcaggacctccaagaacagctggctgaggggtgtagactggcacagcaccttgtccaaaagctcagcccagggaggtgcagaaggctgaagagagcaaagtccctgaggactcactggaggaatgtgccatcacttgttcaaatagccacggcccttgtgactccaaccagcctcacaagaacatcaaaatcacatttgaggaagacgaagtcaactcaactctggttgtagacagagaatcctctcatgatgaatgtcaggatgctctaaacattctcncagtccccggccccacctcttctgccacaaacgtcagcatggtggtatcagccggccctttgtccagcgagaaggcagagatgaacattctagaaatcaatgagaaattgcgcccccagctggcagagaagaaacagcagttcagaaacctcaaagagaaatgttttctaactcaactggccggcttcctggccaaccagcagaacaaatacaaatatgaagagtgcaaagacctcataaaatctatgctgaggaatgagcgacagttcaaggaggagaagcttgcagagcagctcaagcaagctgaggagctcaggcaatataaagtcctggttcacgctcaggaacgagagctgacccagttaagggagaagttacgggaagggagagatgcctcccgctcattgaatgagcatctccaggccctcctcactccggatgagccggacaagtcccaggggcaggacctccaagaacagctggctgaggggtgtagactggcacagcaccttgtccaaaagctcagcccagaaaatgacaacgatgacgatgaagatgttcaagttgaggtggctgagaaagtgcagaaatcgtctgcccccagggagatgcagaaggctgaagaaaaggaagtccctgaggactcactggaggaatgtgccatcacttgttcaaatagccatggcccttatgactccaaccagccacataggaaaaccaaaatcacatttgaggaagacaaagtcgactcaactctcattggctcatcctctcatgttgaatgggaggatgctgtacacattattccagaaaatgaaagtgatgatgaggaagaggaagaaaaagggccagtgtctcccaggaatctgcaggagtctgaagaggaggaagtcccccaggagtcctgggatgaaggttattcgactctctcaattcctcctgaaatgttggcctcgtaccagtcttacagcagcacatttcactcattagaggaacagcaagtctgcatggctgttgacataggcagacatcggtgggatcaagtgaaaaaggaggaccaagaggcaacaggtcccaggctcagcagggagctgctggatgagaaagggcctgaagtcttgcaggactcactggatagatgttattcaactccttcaggttgtcttgaactgactgactcatgccagccctacagaagtgccttttacgtattggagcaacagcgtgttggcttggctgttgacatggatgaaattgaaaagtaccaagaagtggaagaagaccaagacccatcatgccccaggctcagcagggagctgctggatgagaaagagcctgaagtcttgcaggactcactggatagatgttattcgactccttcaggttatcttgaactgcctgacttaggccagccctacagcagtgctgtttactcattggaggaacagtaccttggcttggctcttgacgtggacagaattaaaaaggaccaagaagaggaagaagaccaaggcccaccatgccccaggctcagcagggagctgctggaggtagtagagcctgaagtcttgcaggactcactggatagatgttattcaactccttccagttgtcttgaacagcctgactcctgccagccctatggaagttccttttatgcattggaggaaaaacatgttggcttttctcttgacgtgggagaaattgaaaagaaggggaaggggaagaaaagaaggggaagaagatcaaagaaggaaagaagaaggggaagaaaagaaggggaagaagatcaaaacccaccatgccccaggctcagcagggagctgctggatgagaaagggcctgaagtcttgcaggactcactggatagatgttattcaactccttcaggttgtcttgaactgactgactcatgccagccctacagaagtgccttttacatattggagcaacagcgtgttggcttggctgttgacatggatgaaattgaaaagtaccaagaagtggaagaagaccaagacccatcatgccccaggctcagcggggagctgttggatgagaaagagcctgaagtcttgcaggagtcactggatagatgctattcaactccttcaggttgtcttgaactgactgactcatgccagccctacagaagtgccttttacatattggagcaacagcgtgttggcttggctgttgacatggatgaaattgaaaagtaccaagaagtggaagaagaccaagacccatcatgccccaggctcagcagggagctgctggatgagaaagagcctgaagtcttgcaggactcactggatagatgttattcgactccttcaggttatcttgaactgcctgacttaggccagccctacagcagtgctgtttactcattggaggaacagtaccttggcttggctcttgacgtggacagaattaaaaaggaccaagaagaggaagaagaccaaggcccaccatgccccaggctcagcagggagctgctggaggtagtagagcctgaagtcttgcaggactcactggatagatgttattcaactccttccagttgtcttgaacagcctgactcctgccagccctatggaagttccttttatgcattggaggaaaaacatgttggcttttctcttgacgtgggagaaattgaaaagaaggggaaggggaagaaaagaaggggaagaagatcaaagaaggaaagaagaaggggaagaaaagaaggggaagaagatcaaaacccaccatgccccaggctcaacggcgtgctgatggaagtggaagagcctgaagtcttacaggactcactggatagatgttattcgactccgtcaatgtactttgaactacctgactcattccagcactacagaagtgtgttttactcatttgaggaacagcacatcagcttcgccctttacgtggacaataggttttttactttgacggtgacaagtctccacctggtgttccagatgggagtcatattcccacaataagcagcccttactaagccgagagatgtcattcctgcaggcaggacctataggcacgtgaagatttgaatgaaactacagttccatttggaagcccagacataggatgggtcagtgggcatggctctattcctattctcaaaccatgccagtggcaacctgtgctcagtctgaagacaatggacccacgttaggtgtgacacgttcacataactgtgcagcacatgccgggagtgatcagtcagacattttaatttgaaccacgtatctctgggtagctacaaaattcctcagggatttcattttgcaggcatgtctctgagcttctatacctgctcaagtgtctgctgttgcaaaaagaagaaaacattctctgcctgagttttaatttttgtccaaagttaattttaatctatacaattaaaaccttttgcctatca

SEQ ID NO: 574659 - DNA, 929 bp, Homo sapiens
  misc_feature (520)..(520): n is a, c, g, or t
ggtggatccagagaccagaggccaaagagatgtgataaactatgtcagtgactggagccgaccctggtcagtccctggggcaggcatggcagcaagaggctggtttccacatgtgcccagagtttgcttcatggaaaggccagctctgcgcaaaggtccagggggaccagtcacgaaggtgtgaagaggcctgagtgtttgtcttccattcagctgagaaaggcagaacaccgccacactgctgcacagacggcaccttctacacctttacactcctcacactgagctccagggtccggacagctgtgcacctgccacctttagcaaagcgaaggccagggcccctgctggccttctgcaatgggcatatattttgtctacccagcattcctttcctttttgagaataactcttcaggtcaaagtagtcacgcccagtcttcctgggcaagagaaacagcccctccttccccttcttcctgggtgaatgtgatgaggatgaccaattagaatagccccancccctaggcagggtgattggctcagggctgggcatgtgacccagacccagccatactgagtcctcctggggtcttgccagagttcctgtgcaataaacccactgtctgggacggtaagcacggcactagctcacgatggccagtagccaactggtcccccttgaaacggctgtcttgccggtgcagtaaacagagctgagagatgaaggcacagcatgagccctgatgtgcgctttcttgtcctgttcctgtccttgccccttcggaaggccttgtgccagtgggcagttgggcccggagacaccaggccggcactgctctccttcggagggcaccgttgtttggtgcggaggctgaactcccgcgtggctgcagcagccacgttggccgacattggaggcttctccag

SEQ ID NO: 574660 - DNA, 365 bp, Homo sapiens
ggtatcattcggcccctatttttccaataattttcaagggctttttaaagcaaagcagacccagccgcagtcatgttgacaggggacctggttattaagctgtttgcagactccagaatcagtaaaatgtttgccagcgcaggggcaaatacggtattagcaccattgtttaatccatgtttcaagggcagaatttgaacccatgtttttgcccggagcgggctccaatggttggaaggatactgtcataaaaaaatgccaggggcccccccgggatgcccctccccagcccctgggctccccaccctcccttggacagggcatttttcataagccaaaaggtggggggttttgccatgacccca

SEQ ID NO: 574661 - DNA, 3747 bp, Homo sapiens
  misc_feature (56)..(56): n is a, c, g, or t
  misc_feature (459)..(459): n is a, c, g, or t
agcttgcagagcagctcaagcaagctgaggagctcaggcaatataaagtcctggtncactccaggaacgagagctgacgcagtaaaggagaagttacaggaagggagagatgcctcccgctcattgaatgagcatctccaggccctcctcactctggatgagccggacaagtcccaggggcaggacctccaagaacagctggctgaggggtgtagactggcacagcaccttgtccaaaagctcagcccagggaggtgcagaaggctgaagagagcaaagtccctgaggactcactggaggaatgtgccatcacttgttcaaatagccacggcccttgtgactccaaccagcctcacaagaacatcaaaatcacatttgaggaagacgaagtcaactcaactctggttgtagacagagaatcctctcatgatgaatgtcaggatgctctaaacattctcncagtccccggccccacctcttctgccacaaacgtcagcatggtggtatcagccggccctttgtccagcgagaaggcagagatgaacattctagaaatcaatgagaaattgcgcccccagctggcagagaagaaacagcagttcagaaacctcaaagagaaatgttttctaactcaactggccggcttcctggccaaccagcagaacaaatacaaatatgaagagtgcaaagacctcataaaatctatgctgaggaatgagcgacagttcaaggaggagaagcttgcagagcagctcaagcaagctgaggagctcaggcaatataaagtcctggttcacgctcaggaacgagagctgacccagttaagggagaagttacgggaagggagagatgcctcccgctcattgaatgagcatctccaggccctcctcactccggatgagccggacaagtcccaggggcaggacctccaagaacagctggctgaggggtgtagactggcacagcaccttgtccaaaagctcagcccagaaaatgacaacgatgacgatgaagatgttcaagttgaggtggctgagaaagtgcagaaatcgtctgcccccagggagatgcagaaggctgaagaaaaggaagtccctgaggactcactggaggaatgtgccatcacttgttcaaatagccatggcccttatgactccaaccagccacataggaaaaccaaaatcacatttgaggaagacaaagtcgactcaactctcattggctcatcctctcatgttgaatgggaggatgctgtacacattattccagaaaatgaaagtgatgatgaggaagaggaagaaaaagggccagtgtctcccaggaatctgcaggagtctgaagaggaggaagtcccccaggagtcctgggatgaaggttattcgactctctcaattcctcctgaaatgttggcctcgtaccagtcttacagcagcacatttcactcattagaggaacagcaagtctgcatggctgttgacataggcagacatcggtgggatcaagtgaaaaaggaggaccaagaggcaacaggtcccaggctcagcagggagctgctggatgagaaagggcctgaagtcttgcaggactcactggatagatgttattcaactccttcaggttgtcttgaactgactgactcatgccagccctacagaagtgccttttacgtattggagcaacagcgtgttggcttggctgttgacatggatgaaattgaaaagtaccaagaagtggaagaagaccaagacccatcatgccccaggctcagcagggagctgctggatgagaaagagcctgaagtcttgcaggactcactggatagatgttattcgactccttcaggttatcttgaactgcctgacttaggccagccctacagcagtgctgtttactcattggaggaacagtaccttggcttggctcttgacgtggacagaattaaaaaggaccaagaagaggaagaagaccaaggcccaccatgccccaggctcagcagggagctgctggaggtagtagagcctgaagtcttgcaggactcactggatagatgttattcaactccttccagttgtcttgaacagcctgactcctgccagccctatggaagttccttttatgcattggaggaaaaacatgttggcttttctcttgacgtgggagaaattgaaaagaaggggaaggggaagaaaagaaggggaagaagatcaaagaaggaaagaagaaggggaagaaaagaaggggaagaagatcaaaacccaccatgccccaggctcagcagggagctgctggatgagaaagggcctgaagtcttgcaggactcactggatagatgttattcaactccttcaggttgtcttgaactgactgactcatgccagccctacagaagtgccttttacatattggagcaacagcgtgttggcttggctgttgacatggatgaaattgaaaagtaccaagaagtggaagaagaccaagacccatcatgccccaggctcagcggggagctgttggatgagaaagagcctgaagtcttgcaggagtcactggatagatgctattcaactccttcaggttgtcttgaactgactgactcatgccagccctacagaagtgccttttacatattggagcaacagcgtgttggcttggctgttgacatggatgaaattgaaaagtaccaagaagtggaagaagaccaagacccatcatgccccaggctcagcagggagctgctggatgagaaagagcctgaagtcttgcaggactcactggatagatgttattcgactccttcaggttatcttgaactgcctgacttaggccagccctacagcagtgctgtttactcattggaggaacagtaccttggcttggctcttgacgtggacagaattaaaaaggaccaagaagaggaagaagaccaaggcccaccatgccccaggctcagcagggagctgctggaggtagtagagcctgaagtcttgcaggactcactggatagatgttattcaactccttccagttgtcttgaacagcctgactcctgccagccctatggaagttccttttatgcattggaggaaaaacatgttggcttttctcttgacgtgggagaaattgaaaagaaggggaaggggaagaaaagaaggggaagaagatcaaagaaggaaagaagaaggggaagaaaagaaggggaagaagatcaaaacccaccatgccccaggctcaacggcgtgctgatggaagtggaagagcctgaagtcttacaggactcactggatagatgttattcgactccgtcaatgtactttgaactacctgactcattccagcactacagaagtgtgttttactcatttgaggaacagcacatcagcttcgccctttacgtggacaataggttttttactttgacggtgacaagtctccacctggtgttccagatgggagtcatattcccacaataagcagcccttactaagccgagagatgtcattcctgcaggcaggacctataggcacgtgaagatttgaatgaaactacagttccatttggaagcccagacataggatgggtcagtgggcatggctctattcctattctcaaaccatgccagtggcaacctgtgctcagtctgaagacaatggacccacgttaggtgtgacacgttcacataactgtgcagcacatgcctgcaaaatgaatccctgaggattttgtagctacccagagaacatgggtacc

SEQ ID NO: 574662 - DNA, 707 bp, Homo sapiens
  misc_feature (415)..(415): n is a, c, g, or t
  misc_feature (634)..(634): n is a, c, g, or t
  misc_feature (650)..(650): n is a, c, g, or t
agcggtcatccaggacaggagtggctcagtgttggggatggacgctgtcgcccagccatgctccaccaggccaccaatgtgtagttggctggtggtcttcgggcatgtgagacctgctcttcactgtttccaccccacttggtggcctccaggatggtagtggcaccctcagagccccatcttcagcatgttctgaagcctcagagtgggaacaggtggagaccagcacttccctttcctgctgctgaggtagggattggggggtcagaacccactcacttttgctctgtgtggacgcctttctcccgtgatctaaaggggacactgtactcaagcttttgacctcatgccttgtgtagtaaaaaaggatttgggggttttgtttggttcctgagagggttgtgttttgttttgnttccttttgtttatgttttggcctttcctctttgtctttccatgtagaccagatatttgaaagggcagacgatggctagaggtgtaatgtgcagcttgtttatacggtattttgggaaacttaccttggatgggaaatcgaatcgtggattcaccaggccggtgttggcacactcaccctcgccctttccctccggttcagtacctattgtttctcctntcaaatatgtgattgnactagctctttccatatgaaagaattctccttattttaataaaaaaagtttaaaaac

SEQ ID NO: 574663 - DNA, 3177 bp, Homo sapiens
  misc_feature (56)..(56): n is a, c, g, or t
  misc_feature (459)..(459): n is a, c, g, or t
  misc_feature (2788)..(2788): n is a, c, g, or t
agcttgcagagcagctcaagcaagctgaggagctcaggcaatataaagtcctggtncactccaggaacgagagctgacgcagtaaaggagaagttacaggaagggagagatgcctcccgctcattgaatgagcatctccaggccctcctcactctggatgagccggacaagtcccaggggcaggacctccaagaacagctggctgaggggtgtagactggcacagcaccttgtccaaaagctcagcccagggaggtgcagaaggctgaagagagcaaagtccctgaggactcactggaggaatgtgccatcacttgttcaaatagccacggcccttgtgactccaaccagcctcacaagaacatcaaaatcacatttgaggaagacgaagtcaactcaactctggttgtagacagagaatcctctcatgatgaatgtcaggatgctctaaacattctcncagtccccggccccacctcttctgccacaaacgtcagcatggtggtatcagccggccctttgtccagcgagaaggcagagatgaacattctagaaatcaatgagaaattgcgcccccagctggcagagaagaaacagcagttcagaaacctcaaagagaaatgttttctaactcaactggccggcttcctggccaaccagcagaacaaatacaaatatgaagagtgcaaagacctcataaaatctatgctgaggaatgagcgacagttcaaggaggagaagcttgcagagcagctcaagcaagctgaggagctcaggcaatataaagtcctggttcacgctcaggaacgagagctgacccagttaagggagaagttacgggaagggagagatgcctcccgctcattgaatgagcatctccaggccctcctcactccggatgagccggacaagtcccaggggcaggacctccaagaacagctggctgaggggtgtagactggcacagcaccttgtccaaaagctcagcccagaaaatgacaacgatgacgatgaagatgttcaagttgaggtggctgagaaagtgcagaaatcgtctgcccccagggagatgcagaaggctgaagaaaaggaagtccctgaggactcactggaggaatgtgccatcacttgttcaaatagccatggcccttatgactccaaccagccacataggaaaaccaaaatcacatttgaggaagacaaagtcgactcaactctcattggctcatcctctcatgttgaatgggaggatgctgtacacattattccagaaaatgaaagtgatgatgaggaagaggaagaaaaagggccagtgtctcccaggaatctgcaggagtctgaagaggaggaagtcccccaggagtcctgggatgaaggttattcgactctctcaattcctcctgaaatgttggcctcgtaccagtcttacagcagcacatttcactcattagaggaacagcaagtctgcatggctgttgacataggcagacatcggtgggatcaagtgaaaaaggaggaccaagaggcaacaggtcccaggctcagcagggagctgctggatgagaaagggcctgaagtcttgcaggactcactggatagatgttattcaactccttcaggttgtcttgaactgactgactcatgccagccctacagaagtgccttttacgtattggagcaacagcgtgttggcttggctgttgacatggatgaaattgaaaagtaccaagaagtggaagaagaccaagacccatcatgccccaggctcagcagggagctgctggatgagaaagagcctgaagtcttgcaggactcactggatagatgttattcgactccttcaggttatcttgaactgcctgacttaggccagccctacagcagtgctgtttactcattggaggaacagtaccttggcttggctcttgacgtggacagaattaaaaaggaccaagaagaggaagaagaccaaggcccaccatgccccaggctcagcagggagctgctggaggtagtagagcctgaagtcttgcaggactcactggatagatgttattcaactccttccagttgtcttgaacagcctgactcctgccagccctatggaagttccttttatgcattggaggaaaaacatgttggcttttctcttgacgtgggagaaattgaaaagaaggggaaggggaagaaaagaaggggaagaagatcaaagaaggaaagaagaaggggaagaaaagaaggggaagaagatcaaaacccaccatgccccaggctcagcagggagctgctggatgagaaagggcctgaagtcttgcaggactcactggatagatgttattcaactccttcaggttgtcttgaactgactgactcatgccagccctacagaagtgccttttacatattggagcaacagcgtgttggcttggctgttgacatggatgaaattgaaaagtaccaagaagtggaagaagaccaagacccatcatgccccaggccaggctcagcagggagctgctggatgagaaagagcctgaagtcttgcaggactcactggatagatgttattcgactccttcaggttatcttgaactgcctgacttaggccagccctacagcagtgctgtttactcattggaggaacagtaccttggcttggctcttgacgtggacagaattaaaaaggaccaagaagaggaagaagaccaaggccaccatgccccaggctcagcagggagctgctggaggtagtagagcctgaagtcttgcaggactcactggatagatgtnattcaactccttccagttgtctgaacagctgactctgccagcctatgggttcctttatgcctggaggaaacacctgttgggtttgattctgaaagtgggagacactgatcaggcaggaggggcagaccacaccgtcaggaagatcaacagattgcagagggacgagaagcagggaagagactaaaccacatgccagggtcacaggggcagatgacaaggaccaccgaagtgggaaacgcggacgtgtataccccgcaggccgaaaacagagcatacacaaggaagctggtctatacaaacctccgcccaagggcagacatcaagagcaaacgcgctgggaacaacagagcacagaaatccccagcaacacacaccaacaaggccatccc

SEQ ID NO: 574664 - DNA, 633 bp, Homo sapiens
  misc_feature (341)..(341): n is a, c, g, or t
  misc_feature (560)..(560): n is a, c, g, or t
  misc_feature (576)..(576): n is a, c, g, or t
agcggtcatccaggacaggagtggctcagtgttggggatggacgctgtcgcccagccatgctccaccaggccaccaatgtgtagttggctggtggtcttcgggcatgtgagacctgctcttcactgtttccaccccacttggtggcctccaggatggtagtggcaccctcagagccccatcttcagcatgttctgaagcctcagagtgggctctgtgtggacgcctttctcccgtgatctaaaggggacactgtactcaagcttttgacctcatgccttgtgtagtaaaaaaggatttgggggttttgtttggttcctgagagggttgtgttttgttttgnttccttttgtttatgttttggcctttcctctttgtctttccatgtagaccagatatttgaaagggcagacgatggctagaggtgtaatgtgcagcttgtttatacggtattttgggaaacttaccttggatgggaaatcgaatcgtggattcaccaggccggtgttggcacactcaccctcgccctttccctccggttcagtacctattgtttctcctntcaaatatgtgattgnactagctctttccatatgaaagaattctccttattttaataaaaaaagtttaaaaac

SEQ ID NO: 574665 - DNA, 1219 bp, Homo sapiens
  misc_feature (393)..(393): n is a, c, g, or t
gatctccgtgggcgcggggcggcgggctggggcccagtgaggcttggcaggctgtgctgcggacctgctggccctggacggctgaaagcaggccctgtgatgtggggctggccagtcctggctgtcccagcgtcctgatggctgagccatgatagtgctggcccactggtccagtcggccatccctgtgtccctgtgccctggcgtacgttgctgcttgctgcccgacttccggctcttgtgagccgtgggtgcgcgggtccttgaccgtttcccctggcccctctccctggaccacctttgggttgggactgtgcttgttcacgcatgaaagctgcactatgccttgttgggacaccccctaaggggtaaccctgtgttaacgcgggcgctnttttgggcggaagaccttgggtgtttctgccgttgcgttgacttttggcgggaaaccgccttttggccctttgaagccttttctccttccaatgtgggcgcgtttttgcaacggacaggaagttcctataacaccggttcccaaactttctctgtggcggtctggtggcccaccaagtttgtggaacaaaactggtggaagcccctttttggggcaccgggaaagggaaaggccccgcgtaattttgcaacacgcggcaactttccgtgtggtggcgccgaattttccggtgtttcccatttcgcgtaagaaggggacacaagaaggccttttcccacaaaagggctccaaaggcgattaacggcggttgggcaaccggacaaaacttggaacagccccccgaatgggtcgcgcccgtgtttgcccccgtttgggtaaaacccgtattaatacccggattcgcgccccgattttttcgctcgttgcgccgataagacggttacacggaacacaaggggcagcaaagccttttgggggaacatttgggaacaccaccagaggtagaccagccagccagaaaaagctttttgggtatgtaaagcctaaatggggagccgccgcgacacagcttgggggaacatggtgagcccccctccgattgtgggatttacgccacccccgacaagggcaaacacaggcggacaactttgggcgaagtctggtcgccccacagatggcccgcacgcccaaaaatgggcgcagaagcacttacccgacgatttcttttggtgccacaagcgagattaatctggcgatgtgacagacg

SEQ ID NO: 574666 - DNA, 447 bp, Homo sapiens
gaaggaagcagccttgtgcagcaagaagaagaaaaggctgaacaacggaaagagctcgggctgagaagaaagcgttaaaaaagaagaaaaagatcagaggcccagagaagcgcggccagaatgaggacgatgagaaagagtagggcgatgatgaagaagagcagccttccaaacgcagaagggtcgagaacagcatccctgcagctggagaaacacaaaatgtagagtagcagcaggcccccctggaaatgtcctgccgtagatgtggagccccttcgagcagaaggagaaggcagcctcctaagaggacatgccaaggtctgcacgcagcagcaggcagcatcaccgtctttgtcagcacctcccctcagcatcaggaccgcacgagctcaggccactcttcggggcctgtgagtgtcagtcgccatctcagcacctgggattcag

SEQ ID NO: 574667 - DNA, 2798 bp, Homo sapiens
  misc_feature (56)..(56): n is a, c, g, or t
  misc_feature (459)..(459): n is a, c, g, or t
agcttgcagagcagctcaagcaagctgaggagctcaggcaatataaagtcctggtncactccaggaacgagagctgacgcagtaaaggagaagttacaggaagggagagatgcctcccgctcattgaatgagcatctccaggccctcctcactctggatgagccggacaagtcccaggggcaggacctccaagaacagctggctgaggggtgtagactggcacagcaccttgtccaaaagctcagcccagggaggtgcagaaggctgaagagagcaaagtccctgaggactcactggaggaatgtgccatcacttgttcaaatagccacggcccttgtgactccaaccagcctcacaagaacatcaaaatcacatttgaggaagacgaagtcaactcaactctggttgtagacagagaatcctctcatgatgaatgtcaggatgctctaaacattctcncagtccccggccccacctcttctgccacaaacgtcagcatggtggtatcagccggccctttgtccagcgagaaggcagagatgaacattctagaaatcaatgagaaattgcgcccccagctggcagagaagaaacagcagttcagaaacctcaaagagaaatgttttctaactcaactggccggcttcctggccaaccagcagaacaaatacaaatatgaagagtgcaaagacctcataaaatctatgctgaggaatgagcgacagttcaaggaggagaagcttgcagagcagctcaagcaagctgaggagctcaggcaatataaagtcctggttcacgctcaggaacgagagctgacccagttaagggagaagttacgggaagggagagatgcctcccgctcattgaatgagcatctccaggccctcctcactccggatgagccggacaagtcccaggggcaggacctccaagaacagctggctgaggggtgtagactggcacagcaccttgtccaaaagctcagcccagaaaatgacaacgatgacgatgaagatgttcaagttgaggtggctgagaaagtgcagaaatcgtctgcccccagggagatgcagaaggctgaagaaaaggaagtccctgaggactcactggaggaatgtgccatcacttgttcaaatagccatggcccttatgactccaaccagccacataggaaaaccaaaatcacatttgaggaagacaaagtcgactcaactctcattggctcatcctctcatgttgaatgggaggatgctgtacacattattccagaaaatgaaagtgatgatgaggaagaggaagaaaaagggccagtgtctcccaggaatctgcaggagtctgaagaggaggaagtcccccaggagtcctgggatgaaggttattcgactctctcaattcctcctgaaatgttggcctcgtaccagtcttacagcagcacatttcactcattagaggaacagcaagtctgcatggctgttgacataggcagacatcggtgggatcaagtgaaaaaggaggaccaagaggcaacaggtcccaggctcagcagggagctgctggatgagaaagggcctgaagtcttgcaggactcactggatagatgttattcaactccttcaggttgtcttgaactgactgactcatgccagccctacagaagtgccttttacgtattggagcaacagcgtgttggcttggctgttgacatggatgaaattgaaaagtaccaagaagtggaagaagaccaagacccatcatgccccaggctcagcagggagctgctggatgagaaagagcctgaagtcttgcaggactcactggatagatgttattcgactccttcaggttatcttgaactgcctgacttaggccagccctacagcagtgctgtttactcattggaggaacagtaccttggcttggctcttgacgtggacagaattaaaaaggaccaagaagaggaagaagaccaaggcccaccatgccccaggctcagcagggagctgctggaggtagtagagcctgaagtcttgcaggactcactggatagatgttattcaactccttccagttgtcttgaacagcctgactcctgccagccctatggaagttccttttatgcattggaggaaaaacatgttggcttttctcttgacgtgggagaaattgaaaagaaggggaaggggaagaaaagaaggggaagaagatcaaagaaggaaagaagaaggggaagaaaagaaggggaagaagatcaaaacccaccatgccccaggctcagcagggagctgctggatgagaaagggcctgaagtcttgcaggactcactggatagatgttattcaactccttcaggttgtcttgaactgactgactcatgccagccctacagaagtgccttttacatattggagcaacagcgtgttggcttggctgttgacatggatgaaattgaaaagtaccaagaagtggaagaagaccaagacccatcatgccccaggctcagcggggagctgttggatgagaaagagcctgaagtcttgcaggagtcactggatagatgctattcaactccttcaggttgtcttgaactgactgactcatgccagccctacagaagtgccttttacatattggagcaacagcgtgttggcttggctgttgacatggacagaattaaaaaggaccaagaagaggaagaagaccaaggcccaccatgccccaggctcagcagggagctgctggaggtagtagagcctgaagtcttgcagactcactgatagaggtgccgagctcgattctat

SEQ ID NO: 574668 - DNA, 2952 bp, Homo sapiens
  misc_feature (56)..(56): n is a, c, g, or t
  misc_feature (459)..(459): n is a, c, g, or t
  misc_feature (2563)..(2563): n is a, c, g, or t
agcttgcagagcagctcaagcaagctgaggagctcaggcaatataaagtcctggtncactccaggaacgagagctgacgcagtaaaggagaagttacaggaagggagagatgcctcccgctcattgaatgagcatctccaggccctcctcactctggatgagccggacaagtcccaggggcaggacctccaagaacagctggctgaggggtgtagactggcacagcaccttgtccaaaagctcagcccagggaggtgcagaaggctgaagagagcaaagtccctgaggactcactggaggaatgtgccatcacttgttcaaatagccacggcccttgtgactccaaccagcctcacaagaacatcaaaatcacatttgaggaagacgaagtcaactcaactctggttgtagacagagaatcctctcatgatgaatgtcaggatgctctaaacattctcncagtccccggccccacctcttctgccacaaacgtcagcatggtggtatcagccggccctttgtccagcgagaaggcagagatgaacattctagaaatcaatgagaaattgcgcccccagctggcagagaagaaacagcagttcagaaacctcaaagagaaatgttttctaactcaactggccggcttcctggccaaccagcagaacaaatacaaatatgaagagtgcaaagacctcataaaatctatgctgaggaatgagcgacagttcaaggaggagaagcttgcagagcagctcaagcaagctgaggagctcaggcaatataaagtcctggttcacgctcaggaacgagagctgacccagttaagggagaagttacgggaagggagagatgcctcccgctcattgaatgagcatctccaggccctcctcactccggatgagccggacaagtcccaggggcaggacctccaagaacagctggctgaggggtgtagactggcacagcaccttgtccaaaagctcagcccagaaaatgacaacgatgacgatgaagatgttcaagttgaggtggctgagaaagtgcagaaatcgtctgcccccagggagatgcagaaggctgaagaaaaggaagtccctgaggactcactggaggaatgtgccatcacttgttcaaatagccatggcccttatgactccaaccagccacataggaaaaccaaaatcacatttgaggaagacaaagtcgactcaactctcattggctcatcctctcatgttgaatgggaggatgctgtacacattattccagaaaatgaaagtgatgatgaggaagaggaagaaaaagggccagtgtctcccaggaatctgcaggagtctgaagaggaggaagtcccccaggagtcctgggatgaaggttattcgactctctcaattcctcctgaaatgttggcctcgtaccagtcttacagcagcacatttcactcattagaggaacagcaagtctgcatggctgttgacataggcagacatcggtgggatcaagtgaaaaaggaggaccaagaggcaacaggtcccaggctcagcagggagctgctggatgagaaagggcctgaagtcttgcaggactcactggatagatgttattcaactccttcaggttgtcttgaactgactgactcatgccagccctacagaagtgccttttacgtattggagcaacagcgtgttggcttggctgttgacatggatgaaattgaaaagtaccaagaagtggaagaagaccaagacccatcatgccccaggctcagcagggagctgctggatgagaaagagcctgaagtcttgcaggactcactggatagatgttattcgactccttcaggttatcttgaactgcctgacttaggccagccctacagcagtgctgtttactcattggaggaacagtaccttggcttggctcttgacgtggacagaattaaaaaggaccaagaagaggaagaagaccaaggcccaccatgccccaggctcagcagggagctgctggaggtagtagagcctgaagtcttgcaggactcactggatagatgttattcaactccttccagttgtcttgaacagcctgactcctgccagccctatggaagttccttttatgcattggaggaaaaacatgttggcttttctcttgacgtgggagaaattgaaaagaaggggaaggggaagaaaagaaggggaagaagatcaaagaaggaaagaagaaggggaagaaaagaaggggaagaagatcaaaacccaccatgccccaggccaggctcagcagggagctgctggatgagaaagagcctgaagtcttgcaggactcactggatagatgttattcgactccttcaggttatcttgaactgcctgacttaggccagccctacagcagtgctgtttactcattggaggaacagtaccttggcttggctcttgacgtggacagaattaaaaaggaccaagaagaggaagaagaccaaggccaccatgccccaggctcagcagggagctgctggaggtagtagagcctgaagtcttgcaggactcactggatagatgtnattcaactccttccagttgtctgaacagctgactctgccagcctatgggttcctttatgcctggaggaaacacctgttgggtttgattctgaaagtgggagacactgatcaggcaggaggggcagaccacaccgtcaggaagatcaacagattgcagagggacgagaagcagggaagagactaaaccacatgccagggtcacaggggcagatgacaaggaccaccgaagtgggaaacgcggacgtgtataccccgcaggccgaaaacagagcatacacaaggaagctggtctatacaaacctccgcccaagggcagacatcaagagcaaacgcgctgggaacaacagagcacagaaatccccagcaacacacaccaacaaggccatccc

SEQ ID NO: 574669 - DNA, 2602 bp, Homo sapiens
  misc_feature (56)..(56): n is a, c, g, or t
  misc_feature (459)..(459): n is a, c, g, or t
agcttgcagagcagctcaagcaagctgaggagctcaggcaatataaagtcctggtncactccaggaacgagagctgacgcagtaaaggagaagttacaggaagggagagatgcctcccgctcattgaatgagcatctccaggccctcctcactctggatgagccggacaagtcccaggggcaggacctccaagaacagctggctgaggggtgtagactggcacagcaccttgtccaaaagctcagcccagggaggtgcagaaggctgaagagagcaaagtccctgaggactcactggaggaatgtgccatcacttgttcaaatagccacggcccttgtgactccaaccagcctcacaagaacatcaaaatcacatttgaggaagacgaagtcaactcaactctggttgtagacagagaatcctctcatgatgaatgtcaggatgctctaaacattctcncagtccccggccccacctcttctgccacaaacgtcagcatggtggtatcagccggccctttgtccagcgagaaggcagagatgaacattctagaaatcaatgagaaattgcgcccccagctggcagagaagaaacagcagttcagaaacctcaaagagaaatgttttctaactcaactggccggcttcctggccaaccagcagaacaaatacaaatatgaagagtgcaaagacctcataaaatctatgctgaggaatgagcgacagttcaaggaggagaagcttgcagagcagctcaagcaagctgaggagctcaggcaatataaagtcctggttcacgctcaggaacgagagctgacccagttaagggagaagttacgggaagggagagatgcctcccgctcattgaatgagcatctccaggccctcctcactccggatgagccggacaagtcccaggggcaggacctccaagaacagctggctgaggggtgtagactggcacagcaccttgtccaaaagctcagcccagaaaatgacaacgatgacgatgaagatgttcaagttgaggtggctgagaaagtgcagaaatcgtctgcccccagggagatgcagaaggctgaagaaaaggaagtccctgaggactcactggaggaatgtgccatcacttgttcaaatagccatggcccttatgactccaaccagccacataggaaaaccaaaatcacatttgaggaagacaaagtcgactcaactctcattggctcatcctctcatgttgaatgggaggatgctgtacacattattccagaaaatgaaagtgatgatgaggaagaggaagaaaaagggccagtgtctcccaggaatctgcaggagtctgaagaggaggaagtcccccaggagtcctgggatgaaggttattcgactctctcaattcctcctgaaatgttggcctcgtaccagtcttacagcagcacatttcactcattagaggaacagcaagtctgcatggctgttgacataggcagacatcggtgggatcaagtgaaaaaggaggaccaagaggcaacaggtcccaggctcagcagggagctgctggatgagaaagggcctgaagtcttgcaggactcactggatagatgttattcaactccttcaggttgtcttgaactgactgactcatgccagccctacagaagtgccttttacgtattggagcaacagcgtgttggcttggctgttgacatggatgaaattgaaaagtaccaagaagtggaagaagaccaagacccatcatgccccaggctcagcagggagctgctggatgagaaagagcctgaagtcttgcaggactcactggatagatgttattcgactccttcaggttatcttgaactgcctgacttaggccagccctacagcagtgctgtttactcattggaggaacagtaccttggcttggctcttgacgtggacagtgagtaccttactgtgaaggtgataagcctccacctggtcttccagataggggtgatattcctgttccaagtggcccttactgacccgagagatgtcattgccgcaggcaggacctatgggcgcatataggttgtaatgaaactgtagttccatttggaagcccagacataggatgggtcagtgggcatggctctattcctattctcaaaccatgccagtggcaacctgtgctcagtctgaagacaatggacccacgttaggtgtgacacgttcacataactgtgcagcacatgccgggagtgatcagtcagacattttaatttgaaccacgtatctctgggtagctacaaaattcctcagggatttcattttgcaggcatgtctctgagcttctatacctgctcaaggtcattgtcatctttgtgtttagctcatccaaaggtgttaccctggtttcaatgaacctaacctcattctttgtgtcttcagtgttggcttgttttagctgatccatctgtaacacaggagggatccttggctgaggattgtatttcagaaccactgactgtcttttgacgtatgataaccacttaggtttctttgatgtgagaaccctaaaccttcaacctccaattgaattaaattcttatgaaaaacacaacttg

SEQ ID NO: 574670 - DNA, 268 bp, Homo sapiens
gagccctccaggggcccacgggatggttgggatagacaaggtcgtgtgcgtgaattcttcagcccagtgcccagcacagggtcacggttccctgagaggcaccccgctcttatttttagttattctttctaatgggaacctatttttctcctaactgccatctcacagcaaactgctgaaagggaccaggcctcctatgtctgtgcagcagtatggtgtggcgtgaacttacacctttgtcacatctacagaccccatcgccgggtac

SEQ ID NO: 574671 - DNA, 346 bp, Homo sapiens
  misc_feature (18)..(18): n is a, c, g, or t
  misc_feature (28)..(28): n is a, c, g, or t
  misc_feature (62)..(62): n is a, c, g, or t
  misc_feature (118)..(118): n is a, c, g, or t
  misc_feature (251)..(251): n is a, c, g, or t
  misc_feature (274)..(274): n is a, c, g, or t
  misc_feature (283)..(283): n is a, c, g, or t
  misc_feature (316)..(316): n is a, c, g, or t
  misc_feature (335)..(335): n is a, c, g, or t
cacacagggttctggggnaaaacaaggnaagagatcatcaattatgaatttgacaccaaggnacctggtgtgcctggggcctgagcagcatcgttggcgttctggtacctgctgaggnaagcactgggattgccaacaacctttttgggcctgggccttctcccttaatgggagtagagctcctgcacctcaacaatgtcagcactgggctgcatcctgctgggcggactcttcatctacgatgtcttctnggtattttggcaccaatgtgatngtgacagtnggccaagttctttcgagggcaccaataaaattngtgttttcccaggatcttncttggagaaag

SEQ ID NO: 574672 - DNA, 174 bp, Homo sapiens
ggcgctacggacgcctgcaggcattgactaaccgcgccacccccgcgccgttatctttgatcctgtggcaacacgcctcatagtgcttgcagagcatcacttctcaacgggagagtcgaacatgtccacccccactcccgcgagccatatggcctttatccgcgtccgtagcgg

SEQ ID NO: 574673 - DNA, 532 bp, Homo sapiens
cggctcagaagttaaatagccgcacggatgccggtgatagatagaaaaggctcccaaagctcggataggagagctggacggaaagaaatatctgtgtagccattctgatctcacagttggtcagttctacttcttgatccggcaggcggaattcatctccgagctgaggatgccttgtatatcttggtcaacaatgtcattccacccaccagtgccacaattggggtcatgctgtaccaggaacaccatgaagaagacttctttctctacatagcctacagtgacgaaagtgtctacggtctgtgaagctgcttgccctgagctggaggggggtctcattctacaaagagagaggtggcccccctttcttgacctcctcctccttcaagctcaaacaccagctcccttattcaggaccggcacttcttaatgtttgtggctttctctccagcctctcttaggaggggtaatggtggagttggcaacttgtaactctcctttctcctttcttcccctttctgaaccctgacct

SEQ ID NO: 574674 - DNA, 255 bp, Homo sapiens
gttaacaataatctactgtatatttcaaaatagctagaagagaagatttggaatgttccaacacaaagaaatgataaatgttggaggtgacggacatcccaattacccagcttttaccatgacacgttgtatgcctgtatcaaaatattacctggaccccataaatatgtacagttacaattacaatcacaatcaatgaaaaggaagagtatttgaaatgtataatccttgagcttcaatgggcccatagggatg

SEQ ID NO: 574675 - DNA, 1238 bp, Homo sapiens
gctcccggccaagaatgtctgcaccatggcaggcatgcatttccatgtgcgcatgcatgcaggcaggcactcacgcaccatggcacatcactcatgcacagcatcagtcacactaccgcagcccaacatgtaggcattatggcacaacatcacagtcacatcatcacagttacccacaccagccattcacacacagcacagcatcgcacacccacacacagcaggccatatcacaagccaagtatatcaccacaccacagagtatataataggcacaccattgcacaagggttgcacacacacagagcagcacataggaggcattttccacacaggcccacagtggcacacacccatacatcgacatttacagaggcatctccaacgtatcccacagatataggcacacacacaacgtatatcacgcaaggcacaacatggcaatagcacaattcagccaatccattcacaaggcctaggcactccatagagcgcacccgtcaattcattctcccgagacaagaattgacacaaggttctacacaacaggccacacaatatacattatccattagccacacaactacattcacccaatttcaacattatccataccaatctccatattgagcacattatccagtcaattcatctcatacaacctgatcctttcacaacaccacaagccacattatcttagccaatcgagatatactacagtcggttccccagccattcgcggcaattattacaccctgtggcaccaggggccacaattttcgtgtccattagaccaccccacgcaacaacgctaccattgcgggccacaagcccttgtatctgggcaccatcagcgcaattggccgttcaagaagctacatatggcaatctcaaggtcacctagggtatggcgatcctcttccacaggcacacctaacacaccccaacactgcatacaaagccagattaatgtgtgtcagcacacacgaattatccaacttccaatttcttgtcccagagcacactaacacgagcccaggtccagtgggacacaacatttcaatggcggacacacaacagggactagtgtagccgcacaaccaaaccatcagcaattgtgttctcgacagcggcgcccccatagaagtgtatacaccccattccgcacagcgcgtcatgtgattggcctacctagagctccaacgctgtgccaaattgccatactcgcggccaacgaa

SEQ ID NO: 574676 - DNA, 221 bp, Homo sapiens
ttttatcccatctgtatggcctttttaggattttttttttcttatagtccaaataattttcagatcccacctttggtaaatgtgttaattctcctttgtgaataaataaatgagtgttctgctaaaaatggcaattgtaaaattttgttgtatgtaatgtccatatggaaaaaaaatgttttttgttcctttttttaataaaatgttatatatggatgcta

SEQ ID NO: 574677 - DNA, 130 bp, Homo sapiens
ctgttcatatacgaacagctggaccttccattctagaatatgagaccaccttggagaaaggtgtgtggtacatgttatggaatcaggtgtatcaccgttccctatctgcctgactgtacactgtcgccgt

SEQ ID NO: 574678 - DNA, 381 bp, Homo sapiens
tgagacagagtcttgctctgtcatccagcctaaagtgcggtggcatcatcatggctcactgcagcttccacctcgtgggctcaggcgatcctgtcacctcagtctcccgagtggctgggactgtaggtgtgcgccaccatgcctggataactaaaaaaattttttttatagacgagctctcactatgttgcccgggatggtcttgaactcttggcctcaggcgatactcccacctctgccatccaaagtgtttgggattagagtgaagccacctcatccagcctataagaactcttgtaatttaataataaaaagacaaataacccaatttaaatttgggcaaatgactggaataagcatttctccaaagaagatatacaa

SEQ ID NO: 574679 - DNA, 279 bp, Homo sapiens
  misc_feature (89)..(89): n is a, c, g, or t
cagaagcaaggttcttaggtgcagtgactcatgcctgtaattccagcactttgggagtttgaggcaagaggatcacttgagctcagganttcaaaaccagcctgggcaatatggcaagaccccatctttgcagaatattagcctagcttggtagcacgagtatgtggtcctagctacttggaaggctgaggtgggaaggatcacttgagcctggtaggttgaagctgcagtgagctatattcacaccattgcactctagcttgaacaacaaagtgagat

SEQ ID NO: 574680 - DNA, 1418 bp, Homo sapiens
  misc_feature (649)..(649): n is a, c, g, or t
  misc_feature (748)..(748): n is a, c, g, or t
  misc_feature (922)..(922): n is a, c, g, or t
tgggcaacttcacaaatttatattgggggggccggggcttatatctcaaaaatactttctcccctgtgccccaaaaagggggcggggagggggcgcgcaaaaaattaaaaagacgtccctctcccttattgtgcactatgtggacccttattattaacagggcccccctgtggcttgaaggctgtgggggagacctctcttgtggcaccatctctctgtgtggatctcccctgtgctctcagagaggggacgagggtgtgcacggggggtgtggcgcctctctcacccctgtgtgtatagcagtgggcgcacctctcccagaagggcgggggcacacactctctgtggtcctccctgttgggctctcactgtgagactcccttgttgccactttctctgtgtggggcctccctcctcaaagtgtctcccttctcgctgttgaggtccccccccgtctccttctcctgttgtggcccccctgtgtgtctcccccctctctgttgggacaatgtgtgtccccccctgtgtttgtgtcggctctggggggcctctcccacaacctctcaccatatctctgtggggcctctgccggggtggtggccgcccctctggcggctctccctgtgggagacctctctgtggtctcccncctctccaccgaagtcctccgcggagagggtccccccccgagggggggggtggccaataagtgagggcttctctctctgtgagaagaaaattctccccncgcgggagaagacccactgtgtttaaaccttctggtgtgtctcaaccacgcgggcggtgggaacacggggtggtgtgccgtgttgtgttcgccccacaaaaacgccgagccgtgtgtttataaaaaaatcacgggggtgacgcgggggagaaaaaaagtctccccccctagganggggagcccactctttcgccgcaacacgtatctcgcccgtataattacagcccgccggacaatacaacaacaggccttggacaaatctctctcccaactccctcttttgaaagaggaagccgtgtgatttgatccaacccgccgggaaaggctgtccccaacaacagctgggcggccctttaaacgtgtctcctccctctacttccaaacgcgctctgctgcggggagcctcttgtgggcgttgcttctcccaatggggcccccgccgtgtcggggctctgaggaaactttctgtcctccacaggtgttccccccaggaggggggggggagggggcaccccctcttctaggggaaaagaacgcgctctcttgtggccctccctctggtgatggtgtgccgcccccgggctcctctgagctctcccccccttttagttggcctcgtctacaccaccccgctgcaggtagtgttgtgttgctctctctcgctagcacg

SEQ ID NO: 574681 - DNA, 155 bp, Homo sapiens
ccccgactagcccgacagccagctgtccccagataatcaggacacccggagcaacttggacataactgtcggctctcgtgcaacaagccacccaaggctggatcaacacataccccctgtcgggctagtcggggagacgctgtcgggctagtcgg

SEQ ID NO: 574682 - DNA, 322 bp, Homo sapiens
  misc_feature (303)..(303): n is a, c, g, or t
gagaatcttgatgacatgaatcatgaaggccactatcatcctccttctgcttgcacaagtttcctggtgctggacctgtttcaacagtagaggcttattatgactttatgcgtagaagatgagtgcttctgtggataggcccacgaagttcctagatgacctgcgacttcgagccctaccctaggcccacgtgtgcccacttccgctcgtcaatagccatcattcgacgtggtccatgtgttctcgatttagggtctaggacaacagtgccaacaggatcttccccctagacacaactctgcngtagacctgcaaaacaaca

SEQ ID NO: 574683 - DNA, 1188 bp, Homo sapiens
  misc_feature (995)..(995): n is a, c, g, or t
tctcgggggttttttgttggacaacacccacagtgttgtgttttgtcatatatattggggcttcgcccccttctttggggtgagaggcgtttttcttcgtcgcttctttgtggatggccgtttttgtcggcgaaacaaatcgtgcgtttcttgtagtgtatggtccattcaccccccacacttggggtgtgctcctggtgaggcctcactgaatgttgtttttcccaacacagtgggggtttgcctctgggaagcacccccgcgacacactattgttgtgggggcccaacaggggggggccttggtggtgaccacgagggaatgtgggctttggggggtttttcttcctcccctttgttggggcgcttttacaacgcagggggagtcttcgctcaccacccttctctctcggggctgtgtggttttttaaaaccactcagcgctcgtcttgggccacacactagtgtgtgttctctctctgggggtataactctgcgtcgcggccacagagaggagaccctttatagccttattaccccccccctcgagaaagagagcctcctgtgccacacatcggtgcaaatgtttgtccatcatacttgggccacttatagagtgattccccctattataggccccacaggggggcgcccctctctgagaggcgctcccaagagatttcaaagcgctctgcgcacacactctggtgtcgcctcgtgagagactccggagattttgggagattatgggcgccctctcggatatcgccgagagagagatatagcttacactctctctccctctttccccacactcctgtgaaggggagacccctgtggcgagagaagaatgtggggggccgcggggagaaaatggagaggtattgagaatttgtgggttataagaaggagaagtgaagaatcttctccgcttgcacaggtctaagcgccctgtcccttgtcacagggcgggctggcgtttagacttcacggccnctcgtgaagataagaggggcccacagcccacagccccaccccaccacgatgcccctcgcgttcctctgtttgtggtgttcttgttgtgaaatcacttttggcgagagagctgtattttagtaactgctgcctaacttccctgtgttctatcttgagaggcgcctgtctggataaagttgtcttgaaatttcca

SEQ ID NO: 574684 - DNA, 847 bp, Homo sapiens
  misc_feature (22)..(22): n is a, c, g, or t
caagctacctcgaaagggcccncttgtctaatgtgcagagccccccctctgggccccgctaaagacggttccggggagacctaatcccccggtctccggacagtgtaaatgcggcttctcctctcctcagggaggagctggtaaaggacacagcgccggtctcgaccccagccacgggaccccttggtcacccccccggacgaccgtgttgctggaagaaatcctgcgctgggtgcctccacgagggcacactcttgcctggcgccagcccaaacattcttgcggaacaccactttaataaggaccgccctgtgcttcccgcgtggtctccaaccaagcctggttcccccggagcaacccaccccgacccttctaagaggcgcaaaacacccaccaacccgcgaaagtgctcccaccgacgggcacaacatgagtgtcacagacagccccctcccaccaaggaggcaacacaccatttgtggcgacaccccaccctgtcagccagacgcccacattctggcgacacctagggtcccttcccagagcaccaggagaccgcgccgcgttccccggaggctcccgaactggcacggtggacacgatcgcaatccacacgggggcaaaccggagtcctcgccacgagacgaggaccccgaacctcgttcgaaaccagcactgtccctcggatgggggccttcccgcacaaatgctggccacaccccaacacccggcccacgactcttctcagggtcacaatcttgtcgcccccagacactcagtgcgggcccaacctccccatcaccaggaaacgcggggccccaaagagcacccgcgaccaaacaaaaca

SEQ ID NO: 574685 - DNA, 185 bp, Homo sapiens
tccctgccacaggctgatgctacagaaatatgtcagttaagccacagaaacagaacagcttaagaagggctgggcgcccagtctcgtcacgagcacttacagctctggcgtcatcagagagcctctatcatctccctctgcaaagactcattcaacacccgggtgcagagtctccttgagcaggg

SEQ ID NO: 574686 - DNA, 580 bp, Homo sapiens
ggggcttgcttgtttggttttggggcgacctcccccgctctcttatagcgccaggaaaatatggttgggcccgcccaaagaagcaccgagaaaaagtccgctggaggtctcgatctcaacttttagagctccccaactcgcttttatggaaaagatggggaagattacctccccctgtgggttcaccaacaccagaacttctgtaagaatggatccagaacccagggccaagacggaaatttggtcctattctcgcttaaccaacatgccccagctttggaggaaatcttgaaattaggagtacttatagcttatgttggcgtaaaacatggtgtcccatccactcaccagtgcgccacataaatatattgaactgggccccagccatgccgggaaatactaccagagtgtgcaccactggctatccattgatcccaggtgactctgacaatccattagaagccatgcccagaaccagactggtgaaaagtaaacccttttctcacctcaccaaaatttccacccgccaacaccctttaacctgccaaattttccctttaataaaatttgcttgttttta

SEQ ID NO: 574687 - DNA, 104 bp, Homo sapiens
gtatctagaggcgagcagagaactgcttgaaccaggagtagaggtgcagtcagccgaggtcgtacactgcacttcagcctaggtgacagagcatgctccatctc

SEQ ID NO: 574688 - DNA, 1099 bp, Homo sapiens
  misc_feature (21)..(21): n is a, c, g, or t
  misc_feature (62)..(62): n is a, c, g, or t
  misc_feature (110)..(110): n is a, c, g, or t
  misc_feature (129)..(129): n is a, c, g, or t
  misc_feature (131)..(131): n is a, c, g, or t
  misc_feature (143)..(143): n is a, c, g, or t
  misc_feature (172)..(172): n is a, c, g, or t
  misc_feature (174)..(174): n is a, c, g, or t
  misc_feature (182)..(182): n is a, c, g, or t
  misc_feature (196)..(196): n is a, c, g, or t
  misc_feature (200)..(200): n is a, c, g, or t
  misc_feature (206)..(208): n is a, c, g, or t
  misc_feature (210)..(211): n is a, c, g, or t
  misc_feature (284)..(284): n is a, c, g, or t
  misc_feature (300)..(300): n is a, c, g, or t
  misc_feature (345)..(345): n is a, c, g, or t
  misc_feature (370)..(370): n is a, c, g, or t
  misc_feature (423)..(423): n is a, c, g, or t
  misc_feature (484)..(484): n is a, c, g, or t
  misc_feature (494)..(494): n is a, c, g, or t
  misc_feature (510)..(510): n is a, c, g, or t
  misc_feature (536)..(536): n is a, c, g, or t
  misc_feature (551)..(551): n is a, c, g, or t
  misc_feature (595)..(595): n is a, c, g, or t
  misc_feature (597)..(597): n is a, c, g, or t
  misc_feature (630)..(630): n is a, c, g, or t
  misc_feature (640)..(640): n is a, c, g, or t
  misc_feature (646)..(646): n is a, c, g, or t
  misc_feature (671)..(671): n is a, c, g, or t
  misc_feature (721)..(721): n is a, c, g, or t
  misc_feature (741)..(741): n is a, c, g, or t
  misc_feature (808)..(808): n is a, c, g, or t
  misc_feature (854)..(855): n is a, c, g, or t
  misc_feature (885)..(885): n is a, c, g, or t
  misc_feature (887)..(888): n is a, c, g, or t
  misc_feature (892)..(892): n is a, c, g, or t
  misc_feature (904)..(904): n is a, c, g, or t
  misc_feature (917)..(917): n is a, c, g, or t
  misc_feature (948)..(948): n is a, c, g, or t
  misc_feature (960)..(960): n is a, c, g, or t
  misc_feature (983)..(983): n is a, c, g, or t
  misc_feature (1003)..(1003): n is a, c, g, or t
  misc_feature (1008)..(1008): n is a, c, g, or t
  misc_feature (1020)..(1020): n is a, c, g, or t
  misc_feature (1058)..(1058): n is a, c, g, or t
ggggacctcagcgagacgcanggactggcccgcacctctggccgccgcctcccgccgagaancgagttctagttggggaaacgtctgatatctggtcatcaaggtaagancctgatggagatattttantnggagcagttttntgccctcggagtgcgcccggacgcccggnantttcaggnacttcttgggagcntacnggaggnnngnncggctttgctccaagctgcgtccctacctgaggtctccacgggaggagcggtttggacgcgccccaccggatnggaggaggtgcttggngaagccgggccgtaccgccggtctgactcccggcttttctctgcnagtacaaccaccattacggcgtganccactccttttcctctaagaatgctgaacggtaccactctagaggcaggtgantaatgtgccaggatccttctgaagtactctgccccttgggccagtacgtataccatgtaantatatatacntatatatacaccttcntagggtggaacgaagaggagtgtgtntatgtattaaaaatnaaaccgcgcttcgtaggctcaaaaatacacatactctttcagantntcctgacaggactactgaaaccctccttttgcntttctctttnactgtntttgactttcctcaggatcagtgtncggggcgccaggcagaggtcctggttccactgaacctccagtcgtcagtngctccaggcacgcgctcctnaccctccggggagctgctgggggtcctctttcttggaagggatggaaggggggccgagaagacactntttctcacacgtgtaggggtaaactggaaactggcttcacccacanntttttgttgttgttcagtcctaacccagcncnncgtntctgcgccttanctcagcggacgcnttcggggacttctccctttatttctgcaganctgagggcaggnggcgcaacaaatctcaggtaaanagcataacaattcagaaganctgtntctagacttggngaggcccctcttggatccggggattccggccggtacancttcctttttttcaacttttctatattttactaaataggct

SEQ ID NO: 574689 - DNA, 270 bp, Homo sapiens
  misc_feature (254)..(254): n is a, c, g, or t
agtcaacagtgcctaatagctgacataacaccaattaaatttttaatgacactggagtaataaaagagcccttggcatacttctctttgcaaacatgactcaaagggtggttttccttttgcccttgcttcaatttccagatgccaggccacttataagccacttatctctttactcagagctggtattcgggggttatcattttataagaaaaggaccacaaattttagaattgcctactctaactccgaagntaatcccaatcttacc

SEQ ID NO: 574690 - DNA, 330 bp, Homo sapiens
ccggggccagctcctaagtgctgggacacaggcgtgtgcaccaccccggcgaatttttatatttttgaggtagagacaggattggccatgtgcccagactagtctctaattcctgacatcaagtgatccacccacctcggcctcccaaagtgttgggattacaggtgtgagccaccgcacctaacccaagcccgacccaagggttagaattattttttggttttgttttgtttttgagacaaagtcttgctcttgtcgccacccaggctgggcgtgcataggccactgcacgcccagccttgtcctaataaaattaagttgtatcatttc

SEQ ID NO: 574691 - DNA, 162 bp, Homo sapiens
agaactagcattaagaaatcttgtgaattcaaagaaaaggtctgattagaggtgctgttggaagcagaagcctcccaagttccggcatgagtaactagacagtatcagtgccataccctgaaccgtggaaccctgacaagtaggtttggaaagagaccgctc

SEQ ID NO: 574692 - DNA, 384 bp, Homo sapiens
  misc_feature (115)..(115): n is a, c, g, or t
tttttccttccccctcagctgaatggtaacctgtacctaaactggaagagacctggttaacagctgttagtgtgagtcgcagtccacaggtgatcctccacaagtgaggtcaccncctgaaggcagcaacagaaacactccacctttcctttttctctttgtaactcaggctgctctggaagccagggtccccctgccctcagcatcctaagtgctcaaaggtcggaagatgtgagtctgcatgcctcactccagtctcacaatctttacctgaaaaaaagcggagtgggtccttgacaccatatatttaaattaaataaaggccacctgggtgtgctgctctgatttaattccagcactcagaggcactgctaggctgatccc

SEQ ID NO: 574693 - DNA, 608 bp, Homo sapiens
ggcgggcatcacgatgtgggccacatggtgccaatgtcacaggatacttggggtgttgcttttccagacagaaacctctgtggctagtggtgcctttgcccaagttttgctcaggcctgctggttttgtttcgcccacttagcctgacaggctgtgctcagctcgtgctactggtgtggatcccatgcttgccaagggcaagccagccatggagcagcgagagctgtgtgagcaagcaagcatggggtctggccactgcacacagccaggcatgccagctgtggcagtgcaggcagctccaggtgccagcacgggcacagctgtggctggaccaggcgtaccacaggcaacttccaccgctggcactggggaatgcggtggcacctggaagcttagagacaccaggaaccgcagagccccaaagagggtatcataaccctggattggggtgctcctaggtctgggctccccaaagggctgcagcttttctctccttctctcttttctccttctctcttctctccttctcgttgcccacaacgtggcaagcaaggggtgtgtttcagtcctgtttgtgttcagatcttttagtgccccacttgtcagct

SEQ ID NO: 574694 - DNA, 124 bp, Homo sapiens
gagcgaggcagccgggtgcttcgagcggactcgatggctctgtagcacccagttggacccagtcgcccaggcaccgccgcgccccacggccgtctcctgcgcctcccagaggagggagtttgag

SEQ ID NO: 574695 - DNA, 113 bp, Homo sapiens
gggatttgaagataatggttcactcaaaggaacctattattttctctacttgaggacccaatgtagacttgcactgatatttttattactgccttatataactataggatcta

SEQ ID NO: 574696 - DNA, 1358 bp, Homo sapiens
gcaaaagcttcagctactggaaaagtcattggataagaaactaccaaaacctcttgttacacacaggtgacctatgctggctgccaggtgccatgctgtcgttgagaccagctgtccagcaggccaggaaccatgcagccatgtaaccgtgagacgctgttatagaagaacgaatacagacttatcgtccatggacgccatatattctgagttagtatacgtagcgcgtcatccaagcccgcaatggcaaacagatctggtatgtggccccgtgcagcaagatagaccgtgtggtccaggtcttcttctctggatcgtaagttccttgcaagatagagatgtactgtggattgcaccaaagatgcgaggctgttccaagagcgtgttgttgcagtgacatatgtgaacagatcattgtatgcgttatcatgagacacaacttggaggaaggagccacagcgagtcagacactaagaataccgtacatgggctcgggacacgtcgactggagaacagtgatcacgctcactcgcatacattgagcatggcttagttatcaggttcgacaatgcaaacttgcagagatatgtggcgagagagcattcatgttactaatgaactgttctcccatgattgatcgcgttcatgcgagaacttatattgctgtgtgccacgaaggacagcatgcgtgccagtccctgggtaagggagctcagctgccgatgataaaactagcaaagcctagcatagtgaagacaactgttaccactccatcaaaacttgtgtggactttgtgctttatgctgaaccttgaacaaacaagtttagtaacttaaaagcaaaccaagattcaagagcagactggaaaagtgaaagcaatccctaaggaagcatatgaaaagtctggagcacatggagatagggacatcattagcattttggcaccattatcctataacggaagaagacactttttagatgaattgggcacgaggggtggaatggtctagatcaattatcttgttagacgcgaaattacccgtgatgtgggcaacataagctagttgtttttggacactagtatgaccattgtgtggcaattgtcaccccaattctttcgaattgtcagacaatggaagccttttggcgataacacacgtgaatacacctttgtgcaactggtgacagtaggccaccagctcgttacacaaaaccgtcggacaataatcgggcggaaacatcgatcactatcaaatatgcatcggagtctagtaaagatgtacagctgcagcaacacggagatcaactgaccagctgtgtgtacacaccaactatctatgacacgtagattgagtcca

SEQ ID NO: 574697 - DNA, 454 bp, Homo sapiens
cctgcggtggtgacagtgaacagcttgccgtaagtattgccggacatgcagggcgctccgcgaatcgagtctagatcaagcgtggcagtatacgcgggctatccccgtagttcatcctcgaaccttatcctcgatgacgagtcgaaccgacactctgtagataatggcgtgataatgctgcgattgattctgatggccctgaccctgttcagcggttttgcccaagcctccgtgctgctacaacaaccgatcaccctggacaccggcagcggcgagctgttcggctcgttgctgctgccgcgctccgacgcaccggtacccgtggtgttgatcgtgtccggctcaggccccaccgatcgcgatggcaacaatcccgatggcggtcgcaccgacagcctcaagcgcctggccggggtactggccagtcacaatattgccagtgtgcgcttcgaca

SEQ ID NO: 574698 - DNA, 627 bp, Homo sapiens
agtgctagctgagctcgttgaccataataaacatcaagatttacgacaggataggagtcaggatggagactctgatcaacaggtataagagtctctacaggatgagggtgagtaagatgttaatgtttttgccacagagagcgtgtttttgcactcaggtttcagcagcttcgaagattaggtggtaccatggctctgacagctgctgccattaatcgggatcctgatatggccatataggccatgggcagacagacagagggggttatgcgtattcggtgaataaatagaacactggagctcagccttattgaacaacctagaatgtttactaggaccaatgctccaagatgtatgtgacaacagcccaaagatcaggcgagcagctgcttatggcctgggagtcacggtacataccaaggagagatatattatcgccctttctgagcataagcacttaccgctgttggaagagttattcagtgtgccgatactgagagcaaagaatatgtcaatggtacagagaactgcttttatgcagtggggatatacatgaagttcaaggcagactgggctaacctttgagaggtcctttcacactgtttggcttgggttcacaacatgaag

SEQ ID NO: 574699 - DNA, 1571 bp, Homo sapiens
  misc_feature (481)..(481): n is a, c, g, or t
  misc_feature (517)..(517): n is a, c, g, or t
  misc_feature (803)..(803): n is a, c, g, or t
  misc_feature (828)..(828): n is a, c, g, or t
tgggccaaatctcggggtgtttcgcaaaaaaaaatccaaaaaatttacaaatggcaggtggagttattctttttaaaatggcagattttacaaaacatattttttttcacagggtgggttctttttgggtggtctgggtctggctggagtggtaaaatgttggtgtatctgggaccagatctgggtgtctctctctctgggtctccacaaagagaactatcttgtggagagtgtgagagtgtgggacagagtcctctggggcgcacaggctctcgcgcgggagacccacctgtgtgtgtgtgtgacacataaaagggctctctctggggagtgtgtgtcgctctctctgatggtgataaacatgcgcgtgggggagtgattctcgagggcgttgttggtagtttatattctataagagaaacaatatatacacacaccgagacacatatatctctataacagaggaagggggtgctctttntaccacccttgggggagagcgcacaatcttgacacncaatatagcgcatacaaagtgtggttctgtgggggtataatctttaaaaagaagagagtgtgcaatatttatattctgtgggtggcgcggcctatgtgcgcgtcgcagagtgtgcagaacagccgcagacagcggcgcggcaccgccacagggggggtgtgttgtgttgcgccccctcttggtgggtgcaccccagaggatagtgtggcccccgcggggcggcttcttgagagaagatactggggcgtcgtgcgagaccaaattggcgtcttctctggagatctcncctcttggggtgacgaaaggcgtcncgcaccatgcgcacaagaggcgtgttttgtgtgagcggctctgagagcgggaggagggggccctcttgggtgttgggggagaaccctcttgggagtttcttgggggggcccccttctcaccatggtgatgtcccccagaaggggcgcacccattatggttgggccgccaaacactcttgggcgtgtttgtcagacaaccagcggtggagccttgttctccccgccccaaagagggcgcgcccgcggcttggtgttggctacaaccattttcacagcaggaaaacgcttgggggcggccccaatgtgcggacaacaaatggggcacaaaggggccactcagttgcccggggagagagagcccctctttgggtgcccaagaaaaatttcatttccccattcccacatctacttttcattccttggtgtggccccaggaacaccctcttggtggggtgttgcctccccgaaagaggggcaccaagaggggtggcgcgggaaaaaaactaccacacggcgccctaggggggacaccgcgtgtaaaaagacaagacaatgtctcccggggggcggcaacacacaaaaacaacaccccgtcgggggcgagacactactgaagcaatgatacaaacacagcaccaagacagtggggtggggtgctacaaaccttgcaatgacgcacaaacacaacaaaagaaaaacccccccagcaatgtggtggtgcaacaagaacacacagcaaacaa

SEQ ID NO: 574700 - DNA, 452 bp, Homo sapiens
gtaaaggaaatccgaagggtggtgctagaagacaagacctttgtgaatgattcacatccctttcaagtaggaggatggaggcctgcttcattaaaaagctgggggtaaggtgggggtggggagaacccccttacaacatggggccacgtcaggggaatcccccttatttctgttttgcatatgaggaaccctagagcagccaggtgaggctctttagtttaataaaaatcatggaaagacttttaaagcagactttttttaaggggtaatagggattttttcagcctattttgggtgcaggttcccatttttaaaaaaggtgagggaatctttccccccttccccaacctaatttttggaaaagcattaggggtgaaccaaagctttttcaagtttcaattttttggaaaagcctttttttcagatggatttaaccaaccaaaaccctttca

SEQ ID NO: 574701 - DNA, 288 bp, Homo sapiens
tggagagggagtctaattttggcccccaggctggagggaaggggcacaatctgggttaattgaaggctccgcctccaaggttaacgcggttttcttgcttgggcctcccaaggagtgggaattacaggccccggtggccatgccgggttaatttttggaattttaggaaaagacggggtttcaccgggtgggccaggagggcctgaatctcctgactttggggcccgcccgcctggccctccaaaagggctggaattgcaggcgtgaccccccgcccccggcctaatt

SEQ ID NO: 574702 - DNA, 160 bp, Homo sapiens
tactgggtcgcagcggggcggggtaacggcgacggttaccagaggcttgctaaaagtcatcgaaacagctattacgtggtgagttagacgctttgaacgtcctattacacgatggattattgatgccgactgtgacgtgcgattcgctaaatttcgacgt

SEQ ID NO: 574703 - DNA, 141 bp, Homo sapiens
aggagttcagcctccctagtagctgggactacaggttgagtcaccatgctcggccttatttacttttttgaaaaaagaacaggccagtcacggtggctcgtgtctccaatctcagcactttgggaagcatgaggtgggatg

SEQ ID NO: 574704 - DNA, 377 bp, Homo sapiens
agctttgagccgaatgtggtcatcagctatggtcagcacgcttctggcaaaaattttcatgtctccttggatacacaagggctcatttcccacgggcttctcgagtcagaagtcccatagtttctctgcttagcagaagtatggaaaagtgaggctgggtgcggtggcttacacctgcaatcccatcactttgggaggccgaggcgggcagatcatctgaggtcaggagttctaaaccagcctggccaacatggggaaatcccatctctactaaaatacaaaaattagctgggtatggtagtaggtgcctgtaatcccagctactcgggaggctgagacacgagaatcacttgaaccccaggaggcagaggttgtgg

SEQ ID NO: 574705 - DNA, 478 bp, Homo sapiens
tgttagggatatgagcattcaacacacgatggatgaatcaggcacatctacaggcactggtgtatctttaggtggtgtgatcttacagtccggtgctcacgacaggatataggccactcagtcagccacaccaaagtgcaacatcccaccagcaccaagacatgcttttgagatatacagaaggttctacttagccaaacacagtggtcgacagctcacactccagcatcatatgggttctgcagatctcaatgccacattttatggaccagttaaaaaggaagatggatctgaagttggtgttggaggtgcacaagtaactggctctaatacacggaagcacatattgcaagtttccactttccagatgaccatattaatgctctttaataatagagaaaaatacacatttgaggaaattcagcaagagacagatatccctgaaagagagcttgttagagccctacagtccctcgcc

SEQ ID NO: 574706 - DNA, 138 bp, Homo sapiens
  misc_feature (65)..(65): n is a, c, g, or t
  misc_feature (126)..(126): n is a, c, g, or t
ccagttttcatgtatactccggctgcattcccacgtattatttcgtttaaaaatgttggctgacncgttgaaacccgtcttcatcgcacacatacatacgaaaacaagcattccccttaattcggntaggcgctacgg

SEQ ID NO: 574707 - DNA, 117 bp, Homo sapiens
tgactatacacggctcatggcaacgcggatcgttacctactgagcaagggcaggatcaaacccgcaactcatggttcctagtcagattcgtcaaccactgcaccacgacgggaactc

SEQ ID NO: 574708 - DNA, 988 bp, Homo sapiens
  misc_feature (217)..(217): n is a, c, g, or t
  misc_feature (437)..(437): n is a, c, g, or t
  misc_feature (669)..(669): n is a, c, g, or t
agcggaaggtggtgcagtgtgactacaaactgccaggaatagagtctggttgccgacttcggttccggtctctgtaacagtcgttatcgcttagtgtgaatgaaatatcggtagtggggtccaggaatttgccggagatatcagacaattcttcgagccggcaggacctcgcgcgaccgaaagagcgttagtctcatcaagagaattgcttgatccngtcctgggtcgctggaagcgtagagctaagcggtggtgagcgtacaggtaatagtacaagtcatagccagcgtagacgctgtggtgtgagaatttggtgagacgtagtaagtgaagatgacgtgatgtctaactttggttaaccagaagtagtgcgtagagcggaagatcgagatggaacaatgtatagatgggaaagcattgccgatacgattgatatnaaatggcccttgcaaaaggattaagcatttcctaagctctacgccaggcgttgactggcccgtgccctacgcacaagtagcggttcgccctcttatgacccgggaaggcactaaagaagacgatatatgcagtgccgggacggccagaatactcccacgagcaatgactctgatatgactaaatactgctagacctgatagtcaggtgcccgtatcactatgtatcaagcantggagccttaacatgacgtttctcagggaatgcagggccctgtgcaacgagtaatccacgggatacgcaccaagttatgatactcgccagaaggccgagcgtgttcccttgaagatgtcgtgaattggggggacgaagttatgctccaaggagattgcgatggcaaactagcccctaataggcctcacccttgtttgccttgggtggacgacctcaggagacaatgtgatccccccacatttgggcaagaacaagcgcagaacctgtgggacactctggccttggatacgaataaaagaaacggcacgcaggggcacag

SEQ ID NO: 574709 - DNA, 316 bp, Homo sapiens
acccaggaaagcgggctgggactctaacaacagcttggatctttcaacctttgttcacagtctcaattggaatcaagcctcgccgttttcgcatattcaaggggtcttgccggtcgaatccacgtcactggaagcacttgagtctcgccttgttgatttctcatgcatctcgtataatcgaatgacggtatgcattattttatctatgataagttacaatcactaacctcacttcgaaaagaccgaaaacaatcgatcaacttctgtctggagaggcatctcttcgccagatatctctgagaacatctcagatgtg

SEQ ID NO: 574710 - DNA, 1078 bp, Homo sapiens
ccgggtgcagcgggggggcccggaggccctggatggccctgggatggggaaccgcggtggcttccggcggaggtttggggcagtggcattcggggccggggtcgcgggcgtggacggtggccggtggcctgaggcctgtggagttcgcgtgaggaatggccggaggatagaggagtggatagcccgttgtagccaatgttgggccgctctgtgtcaggggactttgcaaggatcaagtccgctggagggagatctatctcttctccctggcccgattagggagtcagacgatcatggatttcttcctggggggcctctctacaaggatgaggtttagagagattatgccatgtgcataagcagagccggtgtccggccagggcaccaggttcaagggcattagtcgctatcggggactacagtggccacgtcgagtcatgggtgtaaagtgctccagggatggtggacaacggcatccagtggggccatcatcctggctaagctctccatggtccccgtgcgtcaagaggctacgtgggggaacagagatcggcaaagccctagaatggtcccttgcgaaggtgacaggccgctgcggtctgtgcgggaacagctcatcccttgacccaggggcaactggtatcgtctccgacctgtgctaagaagctgtcatgatggcgggatcatgactggtacacctcagccggggctgatggcaccctggggattggccaggcactttgatcgcattcaagactagggtactgacccgacttctggagagcacgttttacccaggttcctaaaagagcgtcactgaacactcttgagaccacacgaaattctggacgaacaaggccaaggggtacacacacggcggtattagaaaaaaggggatatggtgtaaaaaaaagggcggggaagaaaatagggggggaacgacaaccttaaaagtagcaaggagcaaaaaagaagcgacagatgaaatgatgagaatttatgaacacaatttaggttttatttgtttttttttttttttttctgatctatactgctgtataagaaaaaagaaggagag

SEQ ID NO: 574711 - DNA, 716 bp, Homo sapiens
ccagcctgggcaacagagcaagaccccatctgctgaaataaatgttttataaatagagatgaaatgttttggatttaaccccatattaataatcaagtattttacattattatctggcatagactgttatatatagcatattattgttgataatacaatacaatatgctatccgtatctgtatgtgatatagtgtccattttcagtaacctgctgtacatcacagcaactcagatgaaactcaaggaaattagttcagagcaaaaagcagccaatcttgaaaacatacatgtagcaggattccatttatgtaacatctggtcgaaactaatgtaattatagagatggaaaacagattaaaggttaaccaggggtttacggttacgggactggctcgacgtggggtaggtttcatatcgaagggtagtcctgtgtgtgttcgaaaaccatctgtcagcctgactcggtggtctacatcaggggctatacatgaagttaaaagttgtgtacgagtctaggtacacacaaggagtacagatgtaactggggaaactgagtatgttctgtagactgtaccaatgtcaatttctgcgtcctgatgctgtgctgtagtgtataaggtgtttacattggtggaggctggggtcaggtacccaggacctccctagacaacctctatgcacctctacgactctatatactgtcagataagctttc

SEQ ID NO: 574712 - DNA, 299 bp, Homo sapiens
ttagaggatcccgtctagctcgaagtggaggtgttgtgaggagtaggtcatctgcggagactgcgtgagtagggtatgggctaataggcattgtgagtatgagttgctgtagaggtgatgagaagtctggctgagaggtgcggagtaggagatatgtagaatcagtggcgtgttagcttgtttcctgaactggatggtcccacctgagcgtgatgggaggaagtgacagatcaataggtattagactctcatagaacgcaccctgttgtgaaccgtgcatgtgagggatctaggttgcg

SEQ ID NO: 574713 - DNA, 129 bp, Homo sapiens
  misc_feature (129)..(129): n is a, c, g, or t
gctacccactccacctactaccagacaaccttagccaaaccatttacccatatctagtataggcgatagacattgatacctggcgcattagatatagtaccgcaagggtaagatgataaattataaccn

SEQ ID NO: 574714 - DNA, 233 bp, Homo sapiens
tgttgctggggtgctctagaggatccttcatgtcagggctttcatccacccaatcatccgccagatccgccaggctgtgctcagccttttgaggccttcgaggagtgtcttcgccagaacgaggcagctgtgggcaactgtgcagagcttttgcgccgtttcctgcagtgcgctgagcaggtgcagccgccacgctcaactgcaactgtggaggcacaggccacttcctgggg

SEQ ID NO: 574715 - DNA, 113 bp, Homo sapiens
cacagcatccccagcctgggaactgtggagttcttgtttgcctgtcaccatctgtaatgcctgagtcacagatgctctggatcagtggtgatcctactagatgtctgaacctg

SEQ ID NO: 574716 - DNA, 268 bp, Homo sapiens
gatgtctgaggtgatgcagccgctgcaggcagatggagcacttccttgacagctggaagagatttgtgacccagaagcgaatggagcacttttacctgaacttctacacggcagagcagctggtttacctgagcactgagctcaggaagcagcccccgagtgatgccgccctaacgatgctatccttcatcaaaagcaactgcaccctgagggatgtcttaagtggcctcctgtgagggttgtggagaggtgagtgcccgcccagtgt

SEQ ID NO: 574717 - DNA, 872 bp, Homo sapiens
ccagcccatggcccctaacaggggcctctcagccctcctaatgaccgtccggcctagccatgtgatgtcacttgcactccataacgctcctcatactacggctctactaagcaacacactaaccatataccaatgatggcgcgatgtaacgacgagaaagcgcatacccaaggcatgcacagcaccacctgtcgcaaaagaggcgcttcgatgacgggataatcctatttattgacctcagaagttttcttcttcgctaggattttttctggagcctcataaccacttccagcctagtcccgtaccccctacaataaggagggcgactggacccacaataggaatccacccacgctaaatccgccgtagaagtccccacatctatagaacacatcccagtaagttacgttcggcacatcgagggacgttactccaagtgcccactgacgcgtcccacgcagtagttctagatgagacaaaacaaaacgggtggaccacacgtcaatttccagggcgaagccatcactataacataggctaacgtggggccctacttaatctaagccgctgccctaaaagagcgtcctccaggagtaaaattacggaaatggtcacacgtcacacacatttgctgaccgggcaatactgacagagcaatcgagaccgttgagaggtcagccaaccagggactatgccacgagaactactgcgtcacatggatgggctcaactttgtccatcagaatctggtgtccataacgacacatgtaaattgttcaggttgtacattccaagaccattcaatataggggcaattcccaaggcgccgccctgaacacggggatatggtgacatccgggtgcacatatgcgg

SEQ ID NO: 574718 - DNA, 625 bp, Homo sapiens
acaccgcttcgttgtttatcaaccacgtcgtagagccactcttggttgaccccaaagggggtgcaccatgcctctgcagcgaaagtaatttttgcgggctcatgtattatatcaagatcgaattgtgttctcgcaatgatagaggtgctcgggacattgcataacaaattggctaaggaaaggccaaagctgtcagaaacgataaggcgggttttaatcaagcattgacaaggtgtgatttactcttctactctcggggaaacgcgtgcaaatgtactaacagttgcaagaatgcgggctaatcgcaggacttaagaatgttttgcctcacgttttaatacgttgggtaaaatatatccactgccagggtacccattgcatataatgttggttaaaagctttattgtggtgtaaaaaatgcgaaaggtcggttgaactttagaaattgtcttatggaacaacattatgtccctagattgggcgttcatcttgaccgccacgtatgtttgtggcagaagatgtatcttggcggttcttaagaacagaaacatctttggtgatgtgtgcggaacccttccccttttacactccgaaattcaaccttttttctgtccaaaaaagacag

SEQ ID NO: 574719 - DNA, 105 bp, Homo sapiens
cctcgaggatttactctaccacggactactacagttttttcccagccgctctgctctcagaacctaatacaacactcttcggaggaacgaccataacgtgtgcta

SEQ ID NO: 574720 - DNA, 757 bp, Homo sapiens
gccctggtgtgattccgtcctgcgcggatgtactctggagtcagcgtagcttttatctccggccgactgtctctcctactctaagtgcgtgccgcacccgatggaagattcgatgggcatggatatgagacccctgagggccctagaactatcttgttacgggggtgaacttaaatggccgatcaatagattagtcatctgtgaaggtggataagtgatgaccaagtgatgcaccgagatgtatctttaagaacggctacagaacaggggctggttgtaaagggatgagttgcacatggttgagaggagaggcaatgaattacgattggctgtggcatattaaagtagactaccttggcaactttgataaattgtctggtagcggccacacctgtgatatgacccgttggagggcatttgagagtaacagccgaccagtggtcttaaggggttcgaagtgtggttcatgggccatgtgcatatggaagtgagacaagcatctgtagtagcttgtggcaggaaggatgctaggagtcaggatatgatgagaggaggaggggaggagtgttgaggactcttaaagtatatctggaaagccggtcttgccccctggagggggagtagccaaggtttccactgaagaaaagtgaaggttgcgctgggtgaagatgatgacgattgatgcatgaagagggcttgtgttggaagatgattggatgatgatgaatttgatgagaagggaaggtgagaaaagggc

SEQ ID NO: 574721 - DNA, 141 bp, Homo sapiens
gtgtatgggtgacagagcacaaagactgaagatcaaggaagagagtgaggcattttctggaagcacttaaagaagaaactgagtttcattcctactttatattcacatgggtgacaggattttggcttcttgagagaagca

SEQ ID NO: 574722 - DNA, 801 bp, Homo sapiens
agcggggggtgcggcgccgcgccgaagatgcaggccaatcagagcccgggggcggggcctgggcagtcacgccctcccctcgtgtggcttcatttgagagttcatatccaagcaaattccagttccagcagcagcaggcagcagggagcaaggcagagcaggggcagcaggggcaagagcagagcagggcagagcacgcgaggccggaacaggagcgcctcagagtctctgaaagcacgcgaagagataaccgattaggaactttttccgggcaactgtcacccggcatagctgtcagagaatcatcatcaccgcaactctgacgtttcctacaagaagttagagacttaacgcagtattggcatcggatggacaactggtatgcatgctgctgtggaaaaatatccctgagctgaagaagtgcaactatgtgttgtgtgtgctaaatgcccagaagaaaccagagccagtgggtaagagagacgaaatgtggagagaatgactaaagacaaatccgtgaataagtactctggagttgctaatttggacagccgaagcaaacattttacaaggaggaaacattatgctgcttctgatttaatacgcaaagatggtggtacagatgcatggcttactatgtgtcggaacaacatgcattcctatactggacagcatagtgggcaaaggggcagaggtgagagaattaagcggtaggtctcaacataagtgatgagatataaatgatgcctgacagtgcatgaacagtactattggcaatttgagcatcatacctaaatggaa

SEQ ID NO: 574723 - DNA, 160 bp, Homo sapiens
  misc_feature (21)..(21): n is a, c, g, or t
  misc_feature (136)..(136): n is a, c, g, or t
  misc_feature (160)..(160): n is a, c, g, or t
caccctgtatttatggggtanatgtgatatttggtacgtgcattaaagttcattgctttttctccttgggaggttgaggtgggaggattgcttgagcccaggagtgttgaggttgcagtgagctgtgattgtgccnacactttccagcttaggtgacagn

SEQ ID NO: 574724 - DNA, 456 bp, Homo sapiens
  misc_feature (1)..(1): n is a, c, g, or t
  misc_feature (26)..(26): n is a, c, g, or t
naatacaaaaattagcctgagtatgnatgcatatgccaagactcttagctactctggaggctgaggtggggggatcacttgagttcaagagttcaaagttatggtgagctctgatgtgccaccacactccagcctgggtgacagagcgagaccctgtctctttaaaaaatttttttggctgtgcacggtggctcacacctgtaatcccagcactttgggaggccgaggtgggtggatcatgaggtcaggagatggagaccatcctggctaacacgatgaaaccccatctctactaaaaaatacaaaaaattagccagacatggtggtatgcgcccgtagtcctagctacttgggaggctggggcaggagaatggcatgaacctgggaggcggagcttgcagtgagccaagatttgccactgcactccagcctgggtgacagagtggactctgtctc

SEQ ID NO: 574725 - DNA, 204 bp, Homo sapiens
aactctacatgtatccccgttgggccacgcaccgtggggcttggtgttaaataggcggacggtgtagacaaaggggacattgtggtgtatactggatgcgcattatgtagcacagggtaggtggtatatcatggggtatgtggtgcctggtgtacgacaggaggacggtgcatcacataacgaggcgacacttgtcggtgttca

SEQ ID NO: 574726 - DNA, 106 bp, Homo sapiens
taagtccacgagtgcttctcagccatcgtggagggtgacagctttgaggagatttaccacaatggtgaaagcgtgtcatatgagtgtactatctgagagcacgtac

SEQ ID NO: 574727 - DNA, 163 bp, Homo sapiens
  misc_feature (159)..(159): n is a, c, g, or t
tttggggcttccataaaggaatgatgtccagaatctgctagcaagcatccaggtggcactatagtggaatcaaacacaagctaaaatttattttccattcctggcatagatgtatttgtaaaacctggattaaatccaagtggaaattcaacactcagncaga

SEQ ID NO: 574728 - DNA, 574 bp, Homo sapiens
ggtgtaggcacgagggccggtctcaaaataggatcctctttctctatccctaggtgaagtttggtattggatgtgctggcgccgttatcttttgaaatggaatgtgctttgtactcaatgggcctgctaggtatgtggactcatgatttgtagtgctgggaagtgttctttattagctctttgaaaaggtcctgtattcatttctcttcatacttgcttgggaactgctatatgagatgctgatccttccagattcttccactaacccattaaatgtcccaaccattacactctttcgtactgccttcctcctacttcaacctcccaagtaactaagactagaggggtatgctactgaacctacctaatatataaagttgggtagagataatgcgtgtgcggtgctgcttaggctgatctcaaagtcctggcctcaagcagtcgtcctgcctggccctcccgaagtgctgagatgacgggaaggagccactatccctagtcctcctaatacgtcgggtccactgatatcttctgaagcgtttagatctgatgtgttcttcttcacccttgtact

SEQ ID NO: 574729 - DNA, 167 bp, Homo sapiens
agcgactcactgaattactttgcaaaggcttgaagagccagagcgaccttcctggcatcctgggcggagcataaagttgcagactagatccagctcatcaataatatgctggacagagtcaatgagattattattggttgtggacatggcgcgatagggagatcctc

SEQ ID NO: 574730 - DNA, 1288 bp, Homo sapiens
tggaagcaagtttcccatggttctccagccggggcagcaaagtgagaccccgactcttaataaaaaaaaaaaaagaaacccaaagaaagtgtgttgagttcccgggaaatccccgagggaacagttgggccggggtctccaagaagattgagtgctgaagtaagggtagagggtggctatccagaaagagctacttgtcggattgggtatcccatattagtcgatcagggcccttaaaaattagcccaatacttttttttatgagggtccatagtatacctccaatttggtatgaggagtgggttccctaaaagaagaaataatttgcggccattattccaggggacttttcttttcacaagagaaatatcacattagagcgcggccatttctattttttgatagtatcccaacaagcttttattaaatgtgcgtctcataaacccccagagaagactcacaccagagcgcataggggcttactacacaaggggagacaaaggagaggcgccaatacgcggggagacataacactctccaatattgggcgctcctaaaacccccctgggacaggcgagataacccccggcggtaactcattcagacggggtacaacggagcgatcatgaggcataaactcctcgtggacctattgagggaccaagaggtttactcttttttgaaaggcgaattatcgaggtgttactacgttctagagaacgccagggggatggggtaacatgagttgcctatctccccgccaaaaaaatttaaaccccccttgtggagggaaacattcgagggggggggaattgtttattgacgaacgttacaataaggtggcttcgtgttaacaacgaatttattgattaaggaagcatgtggggagtacccattagaacccaatggggcaacagaaacggttttagaaccaacgtccttctgtgtggcacccttgtgtgtcacaccaacaccaaaaaaattgtgtgaaataccagtgggggcccaatgctttttttgtgaaccctgctaaaaatccgccttgccactttgtattactgcgcgttgcgcagttcatcaatagttaaaagaggaggacgcccgtagcaacatatgtgtggtactatgttgggtcataacagcaagtgtgtggtttctgtccgagcgagaaaaacagataacgtgtcctagtccagaatgatgtcgatgagaagatagggcggtcaggcctcctggtgtaaagtatagaaaggtgcagttattccagtgtggcttctgacaagaagta

SEQ ID NO: 574731 - DNA, 1048 bp, Homo sapiens
cacgcgtcggtatatcttagtagagatggggcttcaccatgttggccaggctggtctcgaactcctgatgtcaagtgatccatctgcctcaacctcccatagtgctcagattgcaaggtgtgatccaccacgcccagtgcccaactgatatggatagtggtgcaaaagcaattcagtggaggaaggatcgcctttccagaaatggtgttggaacaatgaacagccataagccccaagaaacgaaccttgatctaaacctgataccttatacaacaattaatgcagaatgaatcatagacttaacatgtaaaggattaaactatgtaacttttaggacataacggaacaagaaggcgaatcgggggtggggtgcgatacacaaagaattctcagactcaatacccaagaacagaattcataagcaggagaagattgattaattggtccccttaagagtaaagtttgctttgataaaaggcccatgataaaaatcttgtgaccaacgacagagttacgctacacattatgactataagacagaaatagcaggtgagaatcacgaaggggtcacacgccgatggggcaagtctctgtatcgtgactatcatactgagcagttatgcaagatccacgacatgcgatgaatttaggcaataaagctaacaaatcagacacacaaaacaagatacaagcacaaagtgtagggctcattaaaacgggtggaaatctgactagagccctgggctcaaggataacgtgcacactcgtgtaacccacagtaaccgaaccaaactagtaaacgccagaacaggaaacacaaagcagggggggcacccgaggcacaaggactagaaatcacgccaagtggagacatatgcacagacagcacaaacaaacaacacatactaaaaacatgaaccgcgaagacacagaaaaacaaagcggagacaaggcaacgcacgaacagaaaatagaagagaaaaacgaaaagagaacgccgcaacaaaaatacacaacaagacacaacgagcaaaaggatcaaccgcac

SEQ ID NO: 574732 - DNA, 974 bp, Homo sapiens
gatgaactctccctgtcggtatcttcgaggcgaaaactgtcacaagtgtccggaccccttgcatgtcctgtcaataaaggaccgaagatgttcttgagagttaccttggctgcccggacctcccgacttcaacgtggtgaccacatgttgatgttccactatgcccagcagctaacatactactacatagacggaaacacgtgactgagcactttaattgtcagtacagagtcatcaaagcacagagaccctgtggattaaccagctatctagcgttgcgagctcggtgcatagatatgttcgccaccttgaaatatcccatggtcgatgtctggtagtgactattcactcacagtagatatctgtaccataagaggcgaggccgcctagaaggtatatcgctcgctcgtacactaggaagaccaaaatcacaactatggcttgacctgcttcactgctctggagacctttcattaaccaggatccatcgacatgccttccgggagatccctcggagtttcctctgtcgtgttactcgaccaccaagggtcttgaccaccgacgttctcatcatcggacggacatcttcatgctctaaatcctacccttaaaccaatttggccgctcgatgtgataccacaggattttctccctcatgactggcgtaatgctcgggacctagttgtcgcaatccactccatgtcgaagcgacatcataaggagaagcgtgctagcattcagattggcgctcttgaaatgctaggttagccagtcctggcgcgtcagcggcccccattgcatgcggggcactcccgatgccgggacaccaatctcttccagttagacccgacctccttgtgaacgtgtgctactgcctggactcatggatcgctttcgtccccttgatgaatcccgggccaggatatcagatcaaaagtacctaactggttctagatagttgtctacgcgggaag

SEQ ID NO: 574733 - DNA, 223 bp, Homo sapiens
ggaaaccgtaattacgcaatgctttgtctgtatctatagagctgaacatgtggcttttctttagcactgatgatatgatgaattatttggctgaactttgaatgttaaaccagtcttagagtcccacaataaaacccgcttaattatgagatgtcatatttttctattttcatttaaatttgctgatgttaaggaatttctacgtttatgttcatgaagtatc

SEQ ID NO: 574734 - DNA, 117 bp, Homo sapiens
aggtatggaggtccaggctaggggtcgaatcacgagctgcagctgcagcctacaccacagccacagcacaccagatccgagctgagcacgccttgtgacctacaccacaggttacct

SEQ ID NO: 574735 - DNA, 129 bp, Homo sapiens
acacccatagcgtccgggccccgctttccttttcaaggggcgggttgtagatcgcagcgcgcaccctgtagagcccgctggtttgtgtacaggccctggacactgtggatagcagaacactctgtctcg

SEQ ID NO: 574736 - DNA, 454 bp, Homo sapiens
tgaacttgggaggcggacgttgcagggagccgatatcatgccactgcactccagcctgtgcgacagcgagactccatctcataaaaaaataatactcaatgtctactgtttgacaagtgtctcagaccttaatgtatcctagattaagaaactttatcctatggtctcatgaaaaattcgccggtaaggatgtaagaagtcctcaatcctatactaaaagcaatgtcttttggatggtgctaatgtccatttggtagtggtgacaagtatgaggagagagtggctggaattacaggcgtgagtcactgcacctggccgaacttttctttataaatgaatatcttcttaattaagtaagtgctgcaaactgtgtctcacatggctgttgtggggctttaaagagtacaccttctaaaatggcctaatgggatgcttgtactcattaaataatgga

SEQ ID NO: 574737 - DNA, 421 bp, Homo sapiens
ccgtgcgcatgttgttctccttctcgctcacacgtgcttgagggcctcgtgctggtgcgagacttctccctgggggttcttccagcctagagcacaactccctccttcacttccttcagtctctgcttgcctggtcacttgtccaggaggccttcttcggccactattgacactaggccccggacatcctctaatcctatcccctgccttattaccttagatatagtgttcgtatgtatgtatcagctatcttacagactagaatataagctacataacattagggacttctctttgatttaccactgcaatccctagggcccagaacaagcctgcgccacattatgttgaatacctatttgtagagcaattcaagtagactcaggtgacattacagatcacacatggtgtcctaatacac

SEQ ID NO: 574738 - DNA, 148 bp, Homo sapiens
tttaccatatcattactggtggtcttcaaggctcggactggctttgctcttcgacacatttgcttgtgacatgaccaattctatgttcttaacttataaatctgtttcatcgatcccttactcttcactctcctcttggtgggagctt

SEQ ID NO: 574739 - DNA, 141 bp, Homo sapiens
tagaatctctcctctgaataagtctttgaatatttatagcacagcagtctaagaaaattgagggaaaactcttcttgaaataaccaggtcgatatctattgttttgtatatatatgtagatatctgtgtactaacatataa

SEQ ID NO: 574740 - DNA, 165 bp, Homo sapiens
ccacatctcatggctcaagtagcgtgggaatacaggcgcatacaccacacctggctaaatgtttgtagtctctattaatttaagacgacaggatcctgttgcctaggctggaagcttgtgtagtctgacaatgataaagatgatagttaattatttagcacatga

SEQ ID NO: 574741 - DNA, 305 bp, Homo sapiens
agactgtcgacaggttgagcatgaggagaaaatcagcaatagatcgcttagagaatgccagcagctctgcaagtctggggacgtgatggagacgtggttccggggttttgtggtcgtggctctaagtgtgatcacgatgcacgaagcacttacacgagtggcctggctttctttactcagacccctgggtgtagatttccacgcccctccattgtttcgtcccttgtgctggtccctgcgtagagtggatgctggtctgatgtactctgtaggatggaggccgcgtacgaaggacgcgtcgcccc

SEQ ID NO: 574742 - DNA, 710 bp, Homo sapiens
ggtcgagcaccccatcgtcatcggtgtgtggtgagagcggcgaggcgggaagagcacacaggtgcctcaggtttctctatgaagcaggcattcgagcaggtgagagagcagcatcatcgggtgtcacggagcccgcgccagcagtggccgcacgtgggccatgtccctagcgatgtggtcgaaggtaggatgagatcttgtccctagcgcggtccgtcgtccctacgcgagcatccgggcttattgacacgcgagataccgttgtaccaagaggcacggacccagcaagtctaacgttacattcgaacggcctcggctcgttgctttgcgtctagaaggacagagttccgacagaacggcgactatcgcaatgcgtgcatagggtgcggtagcgagaccgcgactcgcgatctgagatccagcttcgcgacccgcacagagccgccaacggaacggaactgggcatgcgcgctccggtaacgcaccctggggaaccagttcccatacaactttcagaggcccattatcgctggtataccccccagaccaccctttcgggtcggacccgcttccttcctcggagcaggccttcaaagtaaggggacaaccgcctcggcgccaacctttccaaaacggtccttcggccttccaacttccactcggttccgagccgccaaccgctccttgcccgcggggctcggcaccgcgac

SEQ ID NO: 574743 - DNA, 468 bp, Homo sapiens
aagaccctagggaaagaattgcattcctggggggaggtctataaacggccgctctgggagtgtctgtcctatgtggttgagataaggactgagatacgccctggtctcctgcagtaccctcaggcttactaggattgggaaaccccagtcctggtaaatttgaggtcaggccggttctttgctctgaaccctgttttctgttaagatgtttatcaagacaatacatgcaccgctgaacatagacccttatcaggagtttctgattttggtctggtcctgtttcttcagaagcatgtcatctttgctctgccttctgccctttgaagcatgtgatctttgtgacctactccctgttcatacacccttccccttttaaaatccctaataaaaacttgctggttttgtggctcaggggggcatcatggacacccccacacgtgatgtcacccccggtggaacagatgtaaa

SEQ ID NO: 574744 - DNA, 160 bp, Homo sapiens
ctacggcactctggcatacctggaccttctggcatacctggaccttctggcatacctggaccttctggcatacctggagcttctggcatacctggagcttctggcatacctggagcttctggcataccgtggagcttctggcatgcgtggagcttctggt

SEQ ID NO: 574745 - DNA, 1031 bp, Homo sapiens
  misc_feature (521)..(521): n is a, c, g, or t
agtcccctatgaccgttgctggctggcggaattgtccacgaggcaatgcctctgacggctatccatgacagtggcacaggttctgcctgtgacctgccgccataagctttactggtaattcagggtatagtacgactgagatgcgtgttcgttattgttccacttatctgtcttgtcagctgggcgacttctctgtgattggtatttgttaagttgccgggtgaagttttggacctctggagtgtgcaggcaagtttattatgcaactaaagcgcttccatttcaggtctcataaaagctccttgctcgtgactctgtggtttaacactgtgctgggctgtggagctcctgagagtatgctgaaccccgtaccgcagtcccgctgcatcgctcccgtacgtctcccttgcctgaggcgtcgccatagcctttccctaatagatagttttatcagggacactccatggggtggctatgtctctggcccagacagggtcgttcacgttctaacgtgcagtgcntgagactggttactagcgtaaagcttgatcaaggttgacccacgttcaccttgatcatgagtgtcatttgatataaaccacatcattccttggtcgcatccgggggacgatattctttcctgtttcccagaagagagacaattacagtcctaaaataaacttaagaatggatcacgggggagccgtttgtgcatttgttaccggtgagggcaaggtcactccattacaggaccgagagtcgtggccggttctacataatactaaccttatcggggagaaccgttccatggggacactaggaccgcgcgcattttcaaccccgaaggttggagagtgaaaccctcccagataggtgtctttaagaatttacccggcaggataaattaacccagcgagagatgccaacatctcttgcgtattttatgggagcccacaatttggcgtgacggtgcagggtcacgacaatgggagcacccacgtcaatcccagtcgatcttaaagccacaaaga

SEQ ID NO: 574746 - DNA, 166 bp, Homo sapiens
tgtgaacagcacagagaggccatccagaagaagctgacaggtatcaagcatgaattgcgatgcaaagctgctacagagtagtgtcaaaggaccgctgaagcctggacagagaattctgccggtgcactgtcgtcatctcgcctggagtgcgaaactctttgtggga

SEQ ID NO: 574747 - DNA, 290 bp, Homo sapiens
agtgccaagaatgacaagatattaaaaaaaaaaaaggaaagaaaaaaaaaaaaacaccttacttttaaaggaaaatcaccttaacaggattttataattataggtaatctctaccacgtttcttttctagtttctggattttcaggctcagggcgggcattctaactcatacgggtggaagacaaggggtggtgtttgggattccaggaatattattatggaaatccggggtataagtccttaaattgggtgaaaaatataaaggaaatattcccttaaacctttaaaaa

SEQ ID NO: 574748 - DNA, 88 bp, Homo sapiens
gacagcagcttctacatctgcagtgccatccatccaggacagggaagggacattcagtacttcggcgccgggacccggctctcagtgc

SEQ ID NO: 574749 - DNA, 122 bp, Homo sapiens
tacacaaatgttagaactgcggtcactctcgtactgagcaggattacatggcacaacaatacatcagtagggtaaaactaacctgtctcacgacggtctaaacccagctcaggaggaggagg

SEQ ID NO: 574750 - DNA, 1114 bp, Homo sapiens
  misc_feature (319)..(319): n is a, c, g, or t
gatcttatggaaaacttgtttggagaggctggtatttaagttagatctgatggggctactcatgtccgtgtagccgggttcatcctcataataagaatgggcaggatctcttgttctctcgctgagtgtgctttctatctctcgctgagacgtctttctgctctccgttatccgtgttctcgttagtccttatcccctccagtcgtctgccgtaatttgtagtgtttaataacaaccgaatggtctagtaaatgactctcctctgagctgtagataagataaaatggtagtaatgaatggcagatccagggtattacgncgcaaaataaaacgaaattgtgagtgaagttcattttaacataaataacattatatagaagataaattgttgaaataaaaaggaacaaaaaatataagaacatataagaaaaaggagaaatgaaagaatatacatatacacctaagatggtacagaaaaaagaagatagaaaaaaaccaggtacaaaattgagagaccaagatagaacaatactataagactcatatagataccatcatgcaaagcgttctggacgtgaatcagagattccgtcctactttaacaaaccagaggttgtgaacatgttcgtccagttgttcaaagctggaagaaagtgagcagagtatggagtgcaggagcctgtgaagggcaaggacacaattacagcagcctaatggagccatgccatggtggacatgacaagactaacaaagtaactggaaaccctgaggacagtgaggataacatagaacaagaaactggatgggcaatggacaacgtgaagaggatagcagatcaaataaactacacgacaatatcactaacacaaggccaacacgccaaacaaggaatagggagaaaacaggactaatgctaaccacaaacagaaccggccatagcagaaaaggtcggacttaggaaccaaacgggcgacaggaatatggaggcaacatatgaacacacgaacggtacgaacaggacacacacagaaaaaagtgacagagagcgcagcgaaaagcacaaacccaaaaataacgagacacccagacaagaacagcacaaacaagggtgtga

SEQ ID NO: 574751 - DNA, 823 bp, Homo sapiens
  misc_feature (551)..(551): n is a, c, g, or t
gcagcccgagtcctcgaaatgcagaacgagcgccgtgcgagttcgtggacctgtacgtgcctgggaaatgctccggtagacaactcggatcatcggtgccaaggaccagcgcactcatccagagtgaactggtagcccaggaaggttgacaaggtacacagggccagagttctaaaattggcgcgaggtttcaacaacgtttattgcgtatcataggcgggggccgatatccggtagggatgggggttggaagtccagcattgatttcccatttctaccggaatttgtgccccaagtggtccggaagtgtggctaagtggttcttcaaaaggagaacctttattgagctaggaagaacgaaattcagcaatgaactggttggggaaaatagtttgggtccagtaagaaagtatatcactaaagcttgagatagagcgcttagatgaacatagaaaaaagaataaagaggaaacaaagaaaacaaaagaacagagaagacacacagtaccactcacacagaaacacaccaccaaaacaaaccaaaatagacncagcacaccaacagcacccggagagcgaagagaaagcaaattacatatgaaatgcagaggggtaagggtagggtcggaggcgaaactctaaaatatattcataaaggaggagaagaggaagaagatatgtacgtagtagcggaagaaaaggatgctacatacagataggagggatactaatatatgggaggggacaatgtcaagaaagtagagtaggagagaaatttaagacatataaagtgtaacacatggtggacagaaaaaagagagag

SEQ ID NO: 574752 - DNA, 208 bp, Homo sapiens
cacgcgtccggttaagttatttatggtttttgtgtatcaactttgattctgactctcttcccttctatcaacaagttaattctcaaattgcaagggtttttttctgtagtattgaacgttacatttattaagggtgggagattggttatgaggggatatttctaaaacccagtggaaaccacatttttgaataatcctccccccaaaa

SEQ ID NO: 574753 - DNA, 326 bp, Homo sapiens
attggtgcacactccagccgaggggaagatcttgtggcgcgaattaagcactcgttgtaattaagccgtgtaattgagaacaggccattagcaggagcaggtagcggcccctggagaaagtctgccagatctcgttctgcgcggccttcacagccggtcggttcctcgcaatgaccattgccagggcgaagaggaacatgagcaggccgttgtccacattcccgaacatcacagcaaacaggaaggggaaggtgatgatggtgtagggagcggggttgactcctggtagcggaccacgccgtaggcatccacgattccctggaagc

SEQ ID NO: 574754 - DNA, 301 bp, Homo sapiens
gacacaactctctgcttctatcttctgaacaagattgtagaaaataggtatattaccttccttaaatgtttggaacaattcatcagtgaacccatgtgggctttgtgctttcatgctttggaaggaacactatgtttaggtgttctctaatgtttcctgagatctgtgagtttatctcctcgactttaatattggggaaattctcagatcatagaatgcttcgaatacatgcttcatgctccttttgcatttctcctacttctaggtactcccaatacatcgtatatgacgacccagcaag

SEQ ID NO: 574755 - DNA, 535 bp, Homo sapiens
  misc_feature (196)..(196): n is a, c, g, or t
  misc_feature (209)..(209): n is a, c, g, or t
  misc_feature (217)..(217): n is a, c, g, or t
  misc_feature (240)..(240): n is a, c, g, or t
  misc_feature (257)..(257): n is a, c, g, or t
  misc_feature (275)..(275): n is a, c, g, or t
  misc_feature (280)..(280): n is a, c, g, or t
  misc_feature (284)..(284): n is a, c, g, or t
  misc_feature (308)..(308): n is a, c, g, or t
  misc_feature (339)..(339): n is a, c, g, or t
  misc_feature (343)..(343): n is a, c, g, or t
  misc_feature (347)..(347): n is a, c, g, or t
  misc_feature (354)..(355): n is a, c, g, or t
  misc_feature (364)..(365): n is a, c, g, or t
  misc_feature (375)..(377): n is a, c, g, or t
  misc_feature (423)..(424): n is a, c, g, or t
  misc_feature (426)..(426): n is a, c, g, or t
  misc_feature (432)..(432): n is a, c, g, or t
  misc_feature (448)..(448): n is a, c, g, or t
  misc_feature (528)..(528): n is a, c, g, or t
  misc_feature (530)..(530): n is a, c, g, or t
  misc_feature (535)..(535): n is a, c, g, or t
gtaagcccagaggtctccaccccacgggaggaaggctgaggccaagaccccggaagagatggaccgcgtgaccagataccccatcctgggcatccctcaggcacaccgtggcaccggcctggtgctggatggagacaccagctacacataccatctggtgtgcatgggccccgaggccagcggctggggccaggangagccgcagacanggcccacngaccacagggcccagcagggcgngcagaggcagggggtgncctacagcgtgcaggccnacacnggcnagccggccccacgggggctccacncggagaacagggaggatgagggggggcaggnggancgcnggggcgnnagggaggcnnaccatggacnnncaacagtggttatgcctctcagaggacggggaggacaagtagaggnngnttgacngccgggaggcgggggncgcggacttcaggaggcgagtggaccgggagcgggagtgcgggggcctgcagctagggctagttatgcatgaagagtatnancgggn

SEQ ID NO: 574756 - DNA, 173 bp, Homo sapiens
cggctttatactagtacagttagaaagcaaagtgttaaatggagaagatacttgtatttattaaacatatttagagattaagataaaactacattattaactgaatagtctaaatgtgattatcttttatccccccaaagttaagtcattcaaatacttattgggtttgacat

SEQ ID NO: 574757 - DNA, 206 bp, Homo sapiens
cgtcaacatttgactgcatgacacctggcatggtgtggctcagggagtgttcaagaatgttttttcctttgcctgtcatgataacatagtctttctagtgttgtcctatgcaacaatgcaaaggaatctgatgcattggccatcaatctctgagccttagttttctcatctattaagttcctgttgtctcaacagatggaagtcag

SEQ ID NO: 574758 - DNA, 504 bp, Homo sapiens
cagtcctattctatgcggccagccggcatggcccaggtgaagctgcagcagtaaggaactgaagtggtaaagcctggggcttcagtgaagttgtcctgcaaggcttctggctacatcttcacaagttatgatatagactgggtgaggcagacgcctgaacagggacttgagtggattggatggatttttcctggagaggggagtactgaatacaatgagaagttcaagggcagggccacactgagtgtagacaagtcctccagcacagcctaatatggagctcactaaggctgacatctgaggactctgctgtctatttctgtgctagaggggactactataggcgctactttgacttgtggggccaagggaccccggtcaccgggctcctcatgtggagcgcggttccaggcggaggttggctcctggcggtgggggatctgaccttgagctcacccaggttccagcaatcattgtctgcgtctccaggggcgagggtcccca

SEQ ID NO: 574759 - DNA, 256 bp, Homo sapiens
  misc_feature (69)..(69): n is a, c, g, or t
  misc_feature (120)..(120): n is a, c, g, or t
  misc_feature (174)..(174): n is a, c, g, or t
  misc_feature (213)..(214): n is a, c, g, or t
ctccagtttcagcttcccgagtatctgggattacaggcaagagccactgtccctgaccattttagccanttttaagtgtgtagttcagtggcattaagaacattcacattgtagtaccgnctaggcatggtgcctcacgaccataaacctggtactttgggaggccgtggtggnaggattgcttgagctcaggagttcaaaaccagcttgggnnacttagtgagaccttgtctctattaaaaataaataaataagt

SEQ ID NO: 574760 - DNA, 80 bp, Homo sapiens
gactggcggctcgtgatcacagttgcgtcattgtgtattaaatacttggaataaatcaagcaggtctcaacgcctccact

SEQ ID NO: 574761 - DNA, 102 bp, Homo sapiens
  misc_feature (23)..(23): n is a, c, g, or t
  misc_feature (81)..(81): n is a, c, g, or t
cagatatccccagagtccttcanatgctatcattccctttgtatattggaccatactgcatagataccgatgaaatctagntgcgagggctaccggaggctc

SEQ ID NO: 574762 - DNA, 1052 bp, Homo sapiens
cgcgggcgaatcaacgagatgccggcgctcaatctatgtgtgcgctgatagcgttcgcgccagcgaatcgtatcatcacaacacatcatgctcccaccagacggctgctccacatacactgatggtcctctgttctgtgcttcttaaacatctgggcagctgcaactcggcgaaatctacccgggcgcttggtaatctgactcggcccatatcattcgtccatgcggaatacaacggccaacagcccgagcgcttcccgacgttggcaactgcgcctccggccggcgggtgaatcaaacattgggcggctttttaccttttggtgcaatcaatgcccaattcccggggagggaagtcgccaaccagtcggcgcttcgggcggtatggaatctcctgcggctggtgtaactgcccttggtcaacgcacaagcctacttgtatctgtctcttactgtttgctgtccttggcacgtatccactgcttctatacatgggtatggcctacggtatggtgccggcgcgtatacgtgaagtcaccgtggggcgcgcacggtccagggatatgatctatcaatggtgccagatatgactgagtaatgatcactccaatgcccagtccatggggcatacagacagaagccctttgaggtgcagctggatggaaagcagcatccctgtgcctatgttggatcgttctggtcagctgggagagtgcagcatgccagacggatcaacgcagtcacatcacctagaaacagtatgtgctcatgtgatgggggcctcagcactaggacaggatgtggactgattggcagcatcgcatgcagacttgaataaatcctgaaagtcactacgctgcgtaatgagaagccctaatataatagcgcatgcgtgtgtagcagagggtgtcgagaatgcctcctacgtgacggaaagcagatccgtggttaccggcagactggcaggagcagattccaaaggcacaggaagaaggacatgcaggtagaatgtgttcatacattctgcataacccaccacagaggctggatacc

SEQ ID NO: 574763 - DNA, 101 bp, Homo sapiens
gaggtcttgtgtatgtgcactgccccatcaacatcattatccaggagaactggtctgctgttgaaatctgaaatttcttgggtgaaaaatacatctgccgg

SEQ ID NO: 574764 - DNA, 190 bp, Homo sapiens
ttgccaggtctctacctttggcaggctctctcctccgtggaaaccagtacggtgagcctcaccacccaggctttagccagactcacagtcagtctcctacttcagtgggcacagacgggataatgagctccggggatgggaaaagcaggccacttgggggtttccaggaggagagagcgtggcagggata

SEQ ID NO: 574765 - DNA, 208 bp, Homo sapiens
gggtcaggagaccagccttggccaacatggcgaaactctgtctctactaaaaatacaaaaattagctggggatggtgatgtgtgcctgtaatcccagctgctcaggaggcttaggcagaagaatcgccttaagttgggaggcaaaggttccagttacctgagattgtcccactccactcagcctggccacaaaataagactccgtctc

SEQ ID NO: 574766 - DNA, 349 bp, Homo sapiens
tttttccttttttggccccggtttcccctttttttaaaggggggggtttacccaacccatttggaatttccccccttttgggggggggccggccccccggtaggggccggtttttttaaagggggcgggaaaaagggttggggttttttgccatattagccaaatttttttttccaaaaggcccccggggggggggggggccaaaaaattttttagggggtttaaacccaatggggacccttttttccgggggcttttttttacccgggggaacgggcccccatttgggggcccgggtttacccctccctttcccccctggaaaaaccctttttttttttaaaacccca

SEQ ID NO: 574767 - DNA, 211 bp, Homo sapiens
  misc_feature (69)..(69): n is a, c, g, or t
  misc_feature (90)..(90): n is a, c, g, or t
  misc_feature (93)..(93): n is a, c, g, or t
  misc_feature (114)..(114): n is a, c, g, or t
  misc_feature (120)..(120): n is a, c, g, or t
  misc_feature (162)..(162): n is a, c, g, or t
  misc_feature (178)..(178): n is a, c, g, or t
agtcttacaaccactggagtcgattccatagggggtaatattggacttggaatcggtttaccttgtctnagaggtagcagcagcaacagngcncaccttctgggcagcttcttncttggnatgatgagcctgtagaactgctacagcttcatccaccttggngcggagagactcgggngactctaacatgtgcagcagctcagagttgtct

SEQ ID NO: 574768 - DNA, 403 bp, Homo sapiens
  misc_feature (3)..(3): n is a, c, g, or t
  misc_feature (8)..(8): n is a, c, g, or t
  misc_feature (14)..(14): n is a, c, g, or t
  misc_feature (16)..(16): n is a, c, g, or t
  misc_feature (29)..(29): n is a, c, g, or t
  misc_feature (31)..(31): n is a, c, g, or t
  misc_feature (51)..(51): n is a, c, g, or t
  misc_feature (58)..(59): n is a, c, g, or t
  misc_feature (64)..(64): n is a, c, g, or t
  misc_feature (68)..(68): n is a, c, g, or t
  misc_feature (74)..(74): n is a, c, g, or t
  misc_feature (78)..(78): n is a, c, g, or t
  misc_feature (84)..(84): n is a, c, g, or t
  misc_feature (87)..(87): n is a, c, g, or t
  misc_feature (89)..(89): n is a, c, g, or t
  misc_feature (91)..(92): n is a, c, g, or t
  misc_feature (97)..(97): n is a, c, g, or t
  misc_feature (100)..(101): n is a, c, g, or t
  misc_feature (103)..(106): n is a, c, g, or t
  misc_feature (108)..(108): n is a, c, g, or t
  misc_feature (111)..(111): n is a, c, g, or t
  misc_feature (116)..(116): n is a, c, g, or t
  misc_feature (118)..(119): n is a, c, g, or t
  misc_feature (145)..(145): n is a, c, g, or t
  misc_feature (177)..(177): n is a, c, g, or t
  misc_feature (183)..(183): n is a, c, g, or t
  misc_feature (241)..(241): n is a, c, g, or t
  misc_feature (334)..(334): n is a, c, g, or t
  misc_feature (383)..(383): n is a, c, g, or t
ccnctccncgcacnanaccgttctcgccngnttggaatagcgctcccgctncttttcnnatgtnattncaccancggntgtccntcncngnnttccnatnncnnnncnccnccctncnnccatccctcgccccccccccctcccnccccccctcccccccctccccccccccccccncccccnccccccccccgcccccccccctctcccccccccccccccccccccccccccccccccnccccccccccccccccccccccccccaccccccccccccccccctccccccccctccccccccccccgccccccgccccccccccccccgggncccccccccccccccccccccccccgccccccccccccccccccccccnccccccccgccccccccccc

SEQ ID NO: 574769 - DNA, 704 bp, Homo sapiens
attccgggggcgcaccaatcaccttgggcagcgactagcccccccacccaggggtgtccccggggaggcccaccgacaccggagacagagggtggcggcggccacacgggccacgcccgggcgttttaaagccccctcgggagagagagagcctccaacaggggtgtggccccgcgcgaatatacaccccaaaggagaagggtggcgcccggagccacaaaatctcggcgaactatttctctcggtggagatctcgacgggaaggcccggggaaacaacagtcccaccgcgaggtgcccctcgcacgagccacaacgtggcacgcgggctgagaaggaggtaaccgcctgccacaaactcactcctcctgttcccccacaggagaagccctccggccccccaaggaaagggagagaccacagtttctgcttgagagagactgagaactgggccaacccacgctgagccggagccggtcactgcccggtccgggacgtctataagaaaggaggaaagctcgaggtcatcacctcgaggagagagaagaatttcacaagccttcgctaagttctccgtatggcccgtgccacaacgcccggcttcttcggcatacgggccaaaagagccacaggaagccgcagaacaggatgttgaaaagaaaaaattaagccctcctggggacttgggatcagtcggccagtcca

SEQ ID NO: 574770 - DNA, 239 bp, Homo sapiens
atttttttacaagatacctgactgggatgagagacttgaggctttattctctaccaatacttaggtttatgaatattctgaataaaagctcaggatagaattaaacttttgattatcaaacatgtttttattactttgaaaattcaagcaaaaccctaaaatttttgtttgtttattttcttttagtttcagtaatggtctgtactgaattttagatagtcctctttaatagtaacttt

SEQ ID NO: 574771 - DNA, 424 bp, Homo sapiens
gctgtctctgactgccagagccctgatggaggagcccatgttcttacaagggtctgcacctgctgtggtttgaatgtgttccccgtatttcatgtgttggagactgaatgcccaacttagcagtattgaaagatggggcctttaagaggtgattggatcctaaggcctctgccctcatgaattgattaatccacgtgtggactaatagattaatgggttattatgagagcaggactggtggctttataagaggaagagagacctgagctagcacacccagcccccttgtcacatgatgccatgtgccgcctcaggtctctgtagagtccccaccttcaagaaggctgtgcccccaccagatgtgccccctcgaccttgtattcctccataacagtaagaaataaactccttttctttataaatt

SEQ ID NO: 574772 - DNA, 359 bp, Homo sapiens
  misc_feature (23)..(23): n is a, c, g, or t
  misc_feature (64)..(64): n is a, c, g, or t
gagcttcacagccaggatttgancttgtccagtatgactctatatcctaatgctttaaccactntgtgtaataggttaaaagtgggggaatcaggccagcccgcagtggctcatgcttgtaatcccaggctaagcaggtggattgcctgagctcaggggttcgagaccagcctgggcgaaaccctttctctaccaaagatataaaacaattggccaggcatggtggcacactcctgtagtcccagctactggagaggctgaggtgggagaatcgcttgggccttggaggcagaggttgcagtgagccaagatcgtgccactgaactccaacctggatgacagagtgagaccctgtctca

SEQ ID NO: 574773 - DNA, 357 bp, Homo sapiens
  misc_feature (47)..(47): n is a, c, g, or t
ccccaagccgtcggggccggggaagccggcgggctcccaagactccnagaaccgcgggcccatcttgtactcatcccaccccagccggcttgggactcagacaccgaagtctttttttttttcctctccgatccttggacacctcctctgtctgcccatttattagcccatgtgaacttggccacatcacttcacctccctgagcctcagtttcctcatctgtcaaatgggggtttataaacacctacctcgcagggttgttgtgaggatttaatgcgataatgtatgtaaagcgccttgcacactgcctggcacacagtaggcgctcaataaatctaagcttccctttaaaaaaaa

SEQ ID NO: 574774 - DNA, 1712 bp, Homo sapiens
ggtactctacgttgaatccagtcgcgcagaccggcgccctctgatgccgtgcccgtgcaataaccaggcactcgtctccgtgtgaccagtgaacttatgcttacttgaccgagccactcgatgctcctgactcgaattatcctaactacgtggaccccagagcatggaggacacggacatcgtagctcgtcgtgcatagtcgcatccaaccggactcagtggagcgagctcataggcctagatggtgcaactctcatggagccttggccaggaagtagaggttgcgcagcattgcgcgtaggactagttttggcctacaagactgggcctagtcaaggttgcacaagtattgggacaacacagcaccgaaaagaaacctggcaagtggcaagcatagcccggggacggccatattcattaactcaggcgcagagacgtagtactatgagctagtaaggtatgtcattggtaaccagaaagccgggtccgctagaaagaaccccacacggtaggcccaaataatgcatgttgcgctgggtatcatgtagcacttacttatccgcacatgtgcagagcaccactacacgttaaacccacaagagtacaagaggcacgtgtccatggccaatagcgaggcctggatcatctctgttaggacaactcgaccaccagatagagacttaacactaccccaccacaactcccccattcaagtgcagttccaggtgggtgggattcacggcacttgggtgaaggcctctaaattcccaatcaggtaggacatagactaggaaccccttcatagcgaggagacagtccgcggaatttggaagaagaaacaaccaccccccacaatattgtaggaactacacggaccggagcacgcaccaacacagtagcactttgggaagccacgggacatggagacaccttaaacacatcccaaacgaacgcaccagatccacaggggcgcatgcatatggtcgggcaagcacaacttgggtgataggccgcatatgggttaccaccataggacttgtgcggcgggccccaatatggatcatggcggaccacacaccgatgaataggcgatcagaagggaaacaagcggcaggaaaccccggagcggacaacgtccagttgtgggacagcccagtatccagcattggagcatcccgaaaaaaaggactgtcgccagtcggggaacaccggggcatcggagtccgcgccccatgttggacaaccacggaaagtatccggagcagcgcgataaggacatcaacaacaaaaggcagcgacacccacttcaaatatccaaacggggcagcaccaccgagtccagggcacaaccacgaggagagtcaccaacgcgagtgcgagctaacgacacaacacaagacggctaggcgcaccgccaccaacaaaactgggtaatacggcgccttgagggacggagtccgcatcacgaggagaggaattaaaaccatagtgcaccctggaaaggtagaaacagatatacagcatatgcgcgctcccaaaaggtagtcgcacaggccaacaaactactagaagcgcgcccgaccctgttattgtcgcagaggggcgacccccaaaaaagaactatcagcagactacggatcgcaaccaccccgccacacatctcggaccgatgcgagaagaatcaaccacacgctgacaacgccgcgtatggg

SEQ ID NO: 574775 - DNA, 177 bp, Homo sapiens
tgttgaaaatacataggatcaaaccaactcaagcggtataatattatacatggatgtacattattgtaagggtaccagtaaccattattattaaggaataaccgttagatgattgagttcgctccttattgtgataattgtgggggaaggggtagatcacctatctggcaatgtgtc

SEQ ID NO: 574776 - DNA, 881 bp, Homo sapiens
tatattaaaatgtgcatcaatcttttattttattttattttatttttttttatggatcattctggggtgttctcgcagagggggatttggcagggtcataggacaacagcggagggaaggtcagcaggcaaacaagtgaacaaaggtctctggttttcctaggccgagtgttggtgtccctaggtacttgagatgggggagtggtgatgactctcaacgagcatgctgccttcaagcatctgttaccaaagcacatcttgcaccgcccttaatccatttaaccctgagtggacacagcacatgttctcagagagcacagggtgggggtaaggtcatagatcaacaggatcccaaggaagaagaatatttccttagtacagaacacaatctgaaaagttctcccatgtctactactttctacaacagaccacagaaccatccaatctctcaatcttttccccacctggcacccctttttattcacaacaaaaccgcatggtcataatggccgttctcaatgagctgtgggtacttcctaccccaaaggggtgttggttgggcaagaggggtcctccattccccagtaggggcgcacgggaagagggggcccttcacttcgtggaggggcgtttgtccgaggggggtttagcccaaaaatacccccagagcgggaaagacaggagggggatacaccccacaccatccgaagggagatacgacaaaggacaacatcacagaggtggaccgaaagacccaacataaatgaacgacgggaaaagctacccgagtgaacagatcgaaccgtgaaagatagaaaaaaggaacggttaagaaacccacagacacctcaaatacagggagcgaccagcagacgaaagagg

SEQ ID NO: 574777 - DNA, 251 bp, Homo sapiens
acgccataatcctgtacacctgcttgtcattcaactcacaagtctagcacggggagtagctacaaatctaagtatacacagatgtgtcttaggcttggttgtaacaatctagaagcaatctgtttacaaaagtgacaacaaagcattttaaagaaaccaatttaatgccaccaaacataagcctgctatacctaggggacaaaaaatctcacacctaaattctagcagagtatacgattccaactagaatg

SEQ ID NO: 574778 - DNA, 891 bp, Homo sapiens
ggacagcgcgcggggcgagccagtcgagagggcgcgagcggcggcgctgcctgcagcctgagcctccggcggccggcgaccagtgcgcgtgcgcggggcggcctccggagcgaccgggcagcggactggccggcgtgtaggactaagcgagccaggcggtgtgagggcgcagagggagaagcgccgagcccgagaaggcagaacatgggggggaaccggggcaccaggcttggtttgacaagcggggccgccggttttggcccgaaacagggcgggagccgctacggaagaaacttgtgggccctcccggttatttggaaggggcgggggtgacacaagacctgcttgatgtgaacccctttcttcttcccaatttgaaggactcggaaagatttctcctcttctggtggggccctacaacagcaatttgtgctttgagggcgccccgagggcggaatccttccccgtggagaggggtccattaaggcaaggcatttggagcaagaaacacctcagtgggtttgattgggagaccaccgaaaaaagagcaccttggggacgaaggggtaaaacgggctacccggcggacgaaggcattggacaacggcgacggctggaacaaccatgtttggggcaagtgatttgttcccgtgttgctcgttgctttggaacgaaggttccccgtgaatcagagaatcgtgtgcaagtgatttccccagttatgagcagccagggttgttttcccttgaaaaagtgagcgggtgattactacgggctactttaacaagaaggtcggctctgggggcagcacgcacacaccggctgtgggtccgaagcttctgaaagcttcctaaaaggaccctttggactcagcaagagcggttgcacccg

SEQ ID NO: 574779 - DNA, 159 bp, Homo sapiens
cactcccccatctctcttccgtatgctcctccctctatcaccttctgccaagattgtaatgtttcctgaggccttctcagccatggtgtacagcctgtggaaggtatgccaattaaacctctattctttataaattacccagtctcaggtaattctttt

SEQ ID NO: 574780 - DNA, 202 bp, Homo sapiens
atcccgaagtgttctcaagaggcggtggtggctgccgcttctgtagatctgccaccaaacacatcaaggatactttctcagggaaaaggatacacatatgtgtttgcaggagcagctagctggttggtttgcaggcatcctgaatggtagacagcaagcttagctgtccaaggttttctaatcttcatgtttcttttagtgg

SEQ ID NO: 574781 - DNA, 595 bp, Homo sapiens
ggcgagtccttccttaagactggtcctgataactacccgatggcagaggactgaatttggaatagccacctttccaattattccagaagtcgtgggtcctatcttgaaacagcaatgaattctgctgggttaaaatgaagggatttcagaccaggcgcggtggctcacgcctgtaatcccagcactttgggaggccaaggcgggcagatcacttgaggtcaggagttcaagatcagcctggccaacatggtgaaacctcatctctactaaaaatacaaaaattagctaggcatgttggtgtgtacctgtaatcccagctactagggaggctaagacaggagaatcgcttgaacccagcaggcgaaggttgcagtgagggtcgcctgaggtcagaagttcgagaccagcctggcgaacatggcgaaaccccgtctctactaaaaatacaaaaatagccgggaaaggtggctcacgcctattatcccagcactttgggaggctgaagtgggcagatcacctgaggtccagggttagagaccaggctgggcagcatggtgaaacctgtctctctggaagtccaaaattaccgatttgt

SEQ ID NO: 574782 - DNA, 696 bp, Homo sapiens
  misc_feature (1)..(1): n is a, c, g, or t
  misc_feature (92)..(92): n is a, c, g, or t
  misc_feature (106)..(106): n is a, c, g, or t
  misc_feature (111)..(111): n is a, c, g, or t
  misc_feature (115)..(115): n is a, c, g, or t
  misc_feature (119)..(119): n is a, c, g, or t
  misc_feature (128)..(129): n is a, c, g, or t
  misc_feature (133)..(134): n is a, c, g, or t
  misc_feature (136)..(136): n is a, c, g, or t
  misc_feature (165)..(165): n is a, c, g, or t
  misc_feature (170)..(171): n is a, c, g, or t
  misc_feature (174)..(174): n is a, c, g, or t
  misc_feature (177)..(177): n is a, c, g, or t
  misc_feature (179)..(181): n is a, c, g, or t
  misc_feature (187)..(187): n is a, c, g, or t
  misc_feature (343)..(343): n is a, c, g, or t
  misc_feature (681)..(681): n is a, c, g, or t
ngtatctccgccatgctatagttctaataaaaatttaccgcgaaagaaaattatataaaagaaagagaagaaatagcacacgcaggaaagcnacgggaatgcacanagcantcanctcngcaattccnnttcnnanagctgtcttatcctgtagtcatccttccnggtgnnctnttntnnnctgccnttgatgttcctggaaaactggaaacctaaaagtcttggttattcaaccagaatgttaaataaacaacacatccatatgatggaatattacttaaccattacaaagtatgatcgttatgtaccaattgcaataagcccttagactgaaaagtcagtnagtcagcccaggaggtatacagcactaccctctgtagcagcaagcgtgcatagccacaggctctctctggaacgacacaggagaaagtggtggcattctggcctgcaggctcacgctctccccttaggggatgttatctgtggccacatccagtctgcctgccagaacatgctcttcccgagggtctacggagcctggtgccagtagtcttagttcagtctccaagtgaatgattcgcaatagtctgtagcttacaaattgccatccctctgactgcgggcagggccagaatcagggggtttggcgacgaccacagactgtctgtccatctgggagangggctagatgtgcgc

SEQ ID NO: 574783 - DNA, 289 bp, Homo sapiens
gactctgcgcggctacaaatgtcaatattgaatgaagcattaaaagacaaacataaagtaacttcagcttttatctagccatgccgaatgaatactaaaattagtggccaaaaaaccaaccaccaaccaccaaccaaacaaaccaaccaaccaaaaatcccacccatctttatgggtaaactttcctgctcaaggatggaagctgactctagaccatcttgcgggtcctgcggatagcacaacacaagaacatactggagataatgcccaatatcatgaccaccgcaat

SEQ ID NO: 574784 - DNA, 485 bp, Homo sapiens
gcacacacacacacacgccagtgagcaggggagctttcgggccacactcccagacgcctccctgagccctggaacccggactcgttgctcctgtgccttccataccccctggcagatcatccctgctggtcccacgcactcagatcccacttcacatctcgtcgcgcatccctattgctagcctccactcgctcgcacccatgcggtacacgaagatgtgtgacagacagtgtatgggcgagacgagggggctttaaaggccgcttgggccagggggcttcggggatcaggggcaagctgtagcagaagggtgagctgatgcttgcttgcgaactcggcgttcttggaagggctcggaacagggatgagtgaccagaagccgctctgtgacaaatgtagacaagactgatatagggatgatggagataaaggtgcgtagtattgatgggtagagaaggactgagaagacaggcaagaagaatact

SEQ ID NO: 574785 - DNA, 1480 bp, Homo sapiens
  misc_feature (1007)..(1007): n is a, c, g, or t
cacaataggtgtgatctggaaccggccaccgggagctttcgtaggagagaacgagaagagattgagcaaggtcagcaagtgcgaaggatgagcggttacatgaaaagtgcacttggtgccgggaagacagaacaagtccaaggagctgacctggcccgtgggtggcgcatcaatccggaaacagaccgaggtagtgaggcattgaccgtgaaggaatggaagatgcataacgagaattcttaagacagattgccacaattggtcagtgaaaatcgatagtagctggacgacttctttccctagagattacaggtagagcttgacgagtcccgtcggtgacgagcagatgacccgtgtggtacccatgagagcccgttgcattgtctagagacacttcttgtcatagtggtactacgaacataaccacatagtggcacactaggacgtcgcgtttaacagaacgagttccctggtaccttgagcacaatgagagtcacctctcgcaatgggtcgcgttgtcggtggcactttcgcatccgtctcgacttcatgtaggtgcatcgaggaagacattacggtatctagtgggagcatttggaaagagggggtgggagaccttccgagaggcaagcattggagacgctaccagcttgggcataacttcgtgttttgcagcaatcatcggaacactgcattcgccacgatgacccaggacatattgtccaggtagttagtgcaactcgctttattggagaatttgtgggaaaagccgctagtagatagtaagaaacaatgtctcaagcaagccgctgtatagtctccgcgaagcgggacgtccagaccattggtaggaacgactcttgcgacgggttcaccattaaaccagacatgggttatctaacacttttcttggttctttggacgttttgcacttaacgaaggttaatgaccagatctagcacaatacacgaagcggaaagattaggggaactaagaatcgcactagnacatgaactgtggcagtgcgatgtaggttagaacacagcaagttgtgcaagcacaagcaccaaatccagtaagtcccacaagagagaagctatagtgaggtatagcggacgctagggaggaacgcacatccacgtgtcaatacagaggaacgttgggtgcgtataatgataaataatcgcaggaacgagctgtggtgtaacagccacacgatatttgagttccacctccaaagaaggtcatcagtgatgagatatagttgtcaccactttgagagataatagagccatgatcgcaaggatagctgtgaaccatttcagagtgagtacgatcaaacgtacgtaatgtaatcgatgtaccctgttacgtgcggtgcactgacgaaacagacgtgagtgatgaggaggatagccgaatgcaaacgaaattagtcatgagaactaaaagcactaggagttagatatgcttaagaaaa

SEQ ID NO: 574786 - DNA, 275 bp, Homo sapiens
ggtcgacctgagttcttggctcagttagttcagtagagatctagttatttaaaagactgggggcctggtgcggtggctcacacctgtaatcccagcactttgggaggccaaggtgggcgggtcacctcaggttgggagttcaagaccagcccgaccaacatggagaaacgccatctctactaagaatacgaaatcagctgggcattgtggtgcatgcgtatattcccagctactcaggaggctgaggcaggagaattgcttgaacctgggaggtt

SEQ ID NO: 574787 - DNA, 351 bp, Homo sapiens
cagtcatcctctgcagcataattacacctggtggatgcgtgaggctaaggaacatatacggaactactactttcataacgctccgcagctgaggggaaggataggactggacagacaattagttcagctgaactgaaagtaggatagccttcacttcctcttctggtgactcaggcacagtgggcaacacagttttgctcggcaggtaggaaaaggccatcaacatatcgtcctctatagtgatggaacagcgcagtttaatttttgacatcctgttggctgatatttcccaataacaaggaaatttcactgcgttttttatcactctccatgtgccgaaacctgcacacc

SEQ ID NO: 574788 - DNA, 1148 bp, Homo sapiens
  misc_feature (463)..(463): n is a, c, g, or t
cattgaagaagacaatatatttttctttattcagtaatattttatattcgagtaatgtggggagaacactagaattatatattggattcagtttttgtttatatttttttttcctattggttacccaagaactgttatttaaaaaaaatgcaagctaattttcagtctttcaaccaaaaacttttttattttgttgggcttctaagatcttaaattccactctaatggtctatgggatggtcacgaggacttaaatctgggggagaaagccctgggcattgtgtgggagagcaatggggagtatatgggaaggcagaaatctcatggtctggatcaacaaggagttaatttcagagtttctggatataaaccctattgggtatgggtttataaacacctattaagaatgttggtgcgaagaataactctcgaggaaattgggaacttttcgggctattttccnaaagggcaagggggttaatttggggggaaacatttagagagaattcaatctgcgctacaagtacattggagaaacaatatgaggttgtaaataacccaaacttggagggtgtgtactgggttctggggtccccggggcctaatttccgcttgtgtatcccctcttatttccctccattctgggggacagacatgggggggagattaatacccgcgagatttgggacaggcccggtttcaaacccaaaatgggtggtgacgttaaagtgtaacgcctgggggggtaggtattggcgaagatgattcgtgggtttgacagataagggggttcacgaagtatgagatcacagtgttgataataggggaagtagaatttggggatgtgggcagaaacacattgtgggaaatattaatgtttcaaaaagattttgggacttacgctattgtggctgcgtccaaggaagatatttacgaaacgaagagagaaagaggttttgggggacaatggtgggtaacagggagaagggggaaccttttaagagtgttctcctcaaaaggggagaaacaatgagtttcgtccggagaggacactttcctgttgaaagaacaaagtgatatgtgataaacttagacagcgagagactttcacaggggacgtgactaataaatgtaccaaatagagtggg

SEQ ID NO: 574789 - DNA, 1028 bp, Homo sapiens
  misc_feature (36)..(36): n is a, c, g, or t
  misc_feature (98)..(98): n is a, c, g, or t
aactggagcacgtgggtcagcatgcattagcaaggnagatagaagaaaatcgcttccagtgtgacatctgcaagaagacctttaaaaatgcttgtagngtgaaaattcatcacaagaatatgcatgtcaaagaaatgcacacatgcacagtggagggctgtaatgctacctttccctcccgcaggagcagagacagacacagctcaaacctaaacctccaccaaaaagcattgagccaggaagcattggagagtagtgaagatcatttccgtgcagcttaccttctgaaagatgtggctaaggaagcctatcaggatgtggcttttacacagcaagcctcccagacatctgtcatcttcaaaggaacaagtcgaatgggcagtctggtttacccaataacgcaagtccacagtgccagcctggagagctacaactctggccccttgagcgagggcaccatcctggatttgagcactacctcgagcatgaagtcagagagtagcagccattcttcctgggactctgacggggtgagtgaggaaggcactgtgcttatggaggacagtgatgggaactgtgaagggtcgagccttgtccctggggaagatgagtaccccatctgtgtcctgatggagaaggctgaccagagccttgctagcctgccttctgggttgcccataacctgtcatctctgccaaaagacatacagtaacaaagggacctttagggcccactacaaaactgtgcacctccggcagctccacaaatgcaaagtaccaggctgcaacaccatgttttcgtctgttcgcagtcgaaacagacacagccagaatcccaacctgcacaaaagcctggcctcatctccaagtcacctccagtaacaagatggcaaaccaagtatgctcagataagcttttttcataattcaggaataaagtagtccatagaaatgtttctgtttcatatcatttggggcgagttaggcaaaagtatttgatttgactttatagttttccacagcacaatga

SEQ ID NO: 574790 - DNA, 335 bp, Homo sapiens
ctatggtcatagctgactcttgagtataaacagagccccggtcaagaacgaagtaattgtcatatctagtgccttacttgaaacatatctcttctacccaacctgtgagctttggggaaggaaatgagtctttttttgtttggttatttttctgagacagtgtctcgttctgttccccaggctgcagggcagtggtgtgatctcggctcactgcaacaggtagcctcctgagcagctgggattacaggcgcccaccgcctcacccggctaactttttgtatttttagtggagccggggtttcaccatgttggccaggctggtctggaactcctga

SEQ ID NO: 574791 - DNA, 409 bp, Homo sapiens
  misc_feature (33)..(33): n is a, c, g, or t
  misc_feature (36)..(36): n is a, c, g, or t
  misc_feature (49)..(49): n is a, c, g, or t
  misc_feature (366)..(366): n is a, c, g, or t
  misc_feature (398)..(398): n is a, c, g, or t
tataaagtggccaggtgcagtggctaatgcctntgntgcatgcctgtgntcacagcactttgggaggccgaggtgggaggatcacttgagcccaggagtttgaaaccagctagggcaacatagtgagaacctgtctctacaaaaggtaaaagactggcctggcatgttggcacatgcgtgtagtcccagctactcgggaggctgaggtgggagaactgcttgaacccgggagattgggctgcagtaaactgtgcttgggccactgcactccagcttgtgtgacagagcaagaccttgtctcaaaaataaaagcaaaaaccagggtacaaatttgcagttagttcaggaggattaagttttttgagntctattggcacagcattgtggacttgttagtnaaatgaaaaat

SEQ ID NO: 574792 - DNA, 1299 bp, Homo sapiens
  misc_feature (381)..(381): n is a, c, g, or t
cgaggggcaggaattgaaggacatagagtcgcctgcgactatcctattaacggtttccaggcgcctgagtgctgacagccctgttgtgtggggctggggatgtcagcggggctgcctctgggggcgcatcccggcagaatgctctctgactcattgcgcggttatgtctgcctagcccgtcaccggcttttcaagtcattctagaccgtcttgtatcgtacttgagcaattcgaagggctgctatggttagacccacaaggttttctgggcccttaggtcaatcgcttggaggggggagagacgtcagggtcgaagtccggaatttactgacatttattgttacgtggggcacgagagctcgacacctcgtcgtgtagtcntgttgttctgttctgtacgtatctaatatattttcctgatgacacgtgacgaatgcgcggtgccttcactcaggcttgggtcctccatcaaccatggacccatgtaggatggaatggagagctaggaagcttcagagggacatgatccgctcacttggtgcatgggttggcttgggatcgcatatggggcttcacaaggattggcgtgcattacgtccgtgggtttgatggcccatcctggggctgcagcatgggagcgccgggtcctttccgaaacgtatacgtattgggattatcatacgtactattgactgcgtggtatttggcctatgcgtttcgcctagggcccggtttcgtggggcaccggtggggccctgtgggtgccacctttacacccattaccgagtcgcgtgtccacgtgccacccatggttactcttgcttggaggacccaaccgctgtccacggaggcccttgtggtgtttggcgcgcatggtggccctactggtttcgatcctggacactactagtgcacactagggcttcactggtggtttacctaaccagtctttgcccggtggaggggccgaaacctttccaccataggaagagaacaaccaacctttttcgcgggaaacacgcaaattcccgttttcttggagcgccccaaaggaaagatgggcctggggagcctttggaaggaaccccaagtccgtccgtaacaggggcccaacaagggggcgggaagcaacgttgtgctggcgtggagtctggcgggtagggaagagggggtaatgggggtcgccagctcgattgccaccaaaggtaattccttgggggaagaagcctcccatcagatggggcactggcgccttgggtcccttgggcccatggcggggaggtgttaccaccctggctg

SEQ ID NO: 574793 - DNA, 719 bp, Homo sapiens
  misc_feature (157)..(157): n is a, c, g, or t
tactttattaaaatactggagttttatttcacatggtatattttgggtgccccccacctatttccagtgtctggacccccggctactactaatgtcctatcataacatcccataacataacttaaaaccaagccaagagggggggagtcccatcttnaaacaaacaaaagcgggcattgtggggacacacactattcgtgagggcaatagacaaccggggacaaccattatatacaaaccagccgtggtaggggaagagtatctacacgtcgtggctataactaaaagaggcacagcccagaatatacaagcgggttacagaatatgaaatacagacgggagaaatttatttacacaaatgggtgtataaactatttttctttaaaagagactatcctccattggcgcagagactctggcaaaagcctcttgggtacagtcatccgggaagcaattcttcacataatggatgaattgggcttccacttggggaagagaaccacctttaatctatactggctggcatataggcttaaaggtctacaacagaactaggtccttagggggggtaaggagctaacccggaactggaaaggatccaggcccttggaccatggggtagagaacggtaagagtctaaaccattctgaattgactttggagacataagggcgggagaaccgaaaagaattccacacggggcctacatagatcccaaa

SEQ ID NO: 574794 - DNA, 950 bp, Homo sapiens
  misc_feature (244)..(244): n is a, c, g, or t
ggaccgtaagacgggcatgaggagtcgagacaagcctgggcaactggtgaaaccctgtctctacaaaaaatacgaagtgctgggattacaggcgtgagccaccacacccggccctaacttttgtttttaaccattaattatactaatgcgaatttggcagaaccatagaatttagtcttggatgggtgacgggccatcatggtcactagccagccttccacccaacatggagataagctctccngaagcatccttcgcagatggtcatccgccctttctattgtgaacctaattggagtcactgtgagttctctgtcatgttagactgaaatcttgtatctgctgctgcccattgccccatgtgtaccttcaggagcaagacagaaaagtgatccaagggccctttatctgaaatctgtggtcttatcttcctataatctctgctgctgctaaaaacaggtatcatcatgcacttctcaggtgacgtgctgtccataccttacagttcccttagctgagacaataacccatggggtttatagtacagactttcctcggaaatgttacgctgattgaaagaagccagtcgcggccgggcgcggtggctcacgcctgtaatcccagcactttgggaggccaagtcgggtggatcacgaggtcaggggatcgataccacggtgaaaccccgtctctactaaaaatacaaagaaaattggccgggcgcggtggcgggcgcctgtggtcccagcaactcgggaggctgaggcaggagaatggcgtgaacccgggaggcggagcttgcagtgagccgagatcgcgccactgcactccagcctgggcgacagagcaagactccgtctttaaaaaaaacaacaacaaaaaaacgccggaaaaaatattcgcggttttccctggggaaaccccaaaggggaatttcgcaaaatggggcc

SEQ ID NO: 574795 - DNA, 696 bp, Homo sapiens
aatacatgaacgtgtaagatcttggaggaagacagcagagagagagagagagagcagagatcccaggggttaagagttggcagaaatttcacaggtacatcagtccaataagaggagtccatgactggagcgcagaggtaaacgttggagaggacaggaagatgtcaccccaagcgcagtagctaaaagaaggtccccccgcgaggagagtgccatgccccaaaagcaatgaaggtgaaggtctcacaaaggtcccacagcacagaacccggcttggtgctgacactaggcctaggacgacggtgtgccagcggggggctgagtaaagaatgtgatggagaggaagaagccgggcctggtcaatccattccggaggcatgttgtgcaggctgaggctgggggcatgcacaccgtgtgtctaagcaagaagtggcaggtctataccttcggctgcacatgatgagggtgccctgggtaagggacacatcagtggagggctcgagagatggtccctgggaagacgtggagctcgcaacgagaaggtggtacaggctgtcagccggagacaagtcgaaaaacagccctcacagatgatggccgtgtcttctctggggcaccttccgggacaaaaacggtgggatcggactggtgggccaatgaagaagacctggtgctgggcaggtgagctgaagtgcg

SEQ ID NO: 574796 - DNA, 161 bp, Homo sapiens
tacacgttagtaacactcatctctacaaaaaaacacaaaaattagccaggtgcggtggcgcacacctgtggcccagctactcgggaggcgtgggggagcatggcttcagccctggtgggcagaggctgagcgagcctgttgccggtgcgggtacctaagtt

SEQ ID NO: 574797 - DNA, 223 bp, Homo sapiens
tccatcgagcgtcaccactgtccttccgagtcaacgagcgtcaccactatccttccgagccatcgagcgtcaccactgtccttccgagccatcgagcgtcaccagtgtccaaccgagccatcgagcgtcaccagtgtaccttccgagccatcgagcgtcaccactgtccattccgagccatcgagcgtcaccaggtggtccttccgagccatcgagcgtcacc

SEQ ID NO: 574798 - DNA, 355 bp, Homo sapiens
cgcagggggagagcgcgcgccgcgcgcgcgcgaagcgaagaggcgcgcgggccagcgaggagcgcggagagcgccgccaccgagccgccgctgtgctcactgagccggcttcaggggcaccggcatggcgagccgcggtgggaagaagaagtccaccaagacgttcaggtctggcaaagcaggagtcatcttttccgtggggcggatgctgcggtacataaaggggcaccccaagtacaggattggagtgggggcacccgtgtacatgggcgccgtgctggaatacctgacagcggagaatctggagctggctggcaatgcaccgagagacaacacggggaccggtcacccccgg

SEQ ID NO: 574799 - DNA, 270 bp, Homo sapiens
acgtggggagaacctgcagaatagttaacttagaagtatgtctcaaattaatcatcgggtcatgatcccttaatgaaggatctcgttcagaagcacagcaacttttgtctgtcttctgaacgtaggtacagctgtggctgtagaacagaccatgtaattttcatctagattccttacaaccacaaggactattattacaatgaaagccagagaactagctcagttttgattttattactaggataaatccagccaggtagtgtggtggct

SEQ ID NO: 574800 - DNA, 158 bp, Homo sapiens
ggggctaccggtatcgatatcagtgagctgaacatggggtggtgtccactggggcgctcaggttgtgggtgtgacctgagtgaacttcaggtcagttgggtgcaggaatagtggttacggcagtctggaaccagaaggctgactctctcgcgcttgga

SEQ ID NO: 574801 - DNA, 194 bp, Homo sapiens
  misc_feature (49)..(49): n is a, c, g, or t
  misc_feature (125)..(125): n is a, c, g, or t
tggtctagcatgcatcttgtagaaacaaggcatgctggcagatgcaggnttgagatgtgtttatctgtttatattttaaaagattctgcagaaaataaaaccagaccttgttctaaagcccaggnttatggaccaactcagtgcttcaggtcttaatgtctccatacctcttcctcaccaactttacgagtagc

SEQ ID NO: 574802 - DNA, 202 bp, Homo sapiens
ttttggtggtttcctctttattgtgtgcctcctaccttcccccacaatttcagtcccttccaacaccccaaaaagaaggagtgaaaggaagggattgctggggttctgagcccttggcagtcagaaggacagaaccaaacatcactggatgtgacacagctgcatcaagaagtctacagcagtatgggaagcggcagagaag

SEQ ID NO: 574803 - DNA, 124 bp, Homo sapiens
ctattcatcggcaccccgctattcatcggcacttcgctattcatcggcaccccgctattcatcggcacttcgctagtcatcggcacctataattcacaagccaccaggtgccgatgaatagcga

SEQ ID NO: 574804 - DNA, 103 bp, Homo sapiens
acgtatatccatggctgtatctagagtatcctggtcatcctgctacactagccagatcagtaaaattttacaagggataaatgcaaaaccttacacttaagtt

SEQ ID NO: 574805 - DNA, 431 bp, Homo sapiens
  misc_feature (12)..(12): n is a, c, g, or t
  misc_feature (17)..(17): n is a, c, g, or t
  misc_feature (176)..(176): n is a, c, g, or t
gacactcggacngaccnttgatcatctgttgaatagatgactgtaagagtgctgtagacccttgcctaatgctgaggattaatcccttacacagctgtcctctgggtttggctattttcttctccaaagttaagttagaaaagttctgtgttagggccgggcgcggtagtcacgcntgtaatcccgcatttgggaggccgaggcgggtggatcacgaggtcaggagttcgagaccagcctggccaagatggtgaaaccccgtctctactaaaatacaaagaattagctgggcgtggtggcgggcgcctgtaatcccagctactcgggaagctgaggcaagagatcgcttgaacccaggaggtggaggttgcagtgagccaagatcgcgccactgcactccagcctgggcgacagagtgagattccatctcc

SEQ ID NO: 574806 - DNA, 83 bp, Homo sapiens
cgcaaatatcttttcttgtattcccatatttctagacaatgatttttgtaagacaataaatttattcattatagataaaaaaa

SEQ ID NO: 574807 - DNA, 299 bp, Homo sapiens
gtcgacgtggcgcgatctcggcccactgcaacctctgcctcctgggttcaagcgattctcctgcctcagcctcccgagcggctgggattacaggcgcgcaccaccacgccgggcttttcgtatttttagtagaaaagaggtttcaccatgttagccaggctggtctcgaactcccgacctcaggtgatccgcccaccttggcctctcaaagtgctgggattacaggtgtgaggcaccatgcctggacgatcatgaagtttaaaaattctaggtggagcatcttcgtcgacgcggccgcg

SEQ ID NO: 574808 - DNA, 322 bp, Homo sapiens
  misc_feature (134)..(134): n is a, c, g, or t
  misc_feature (152)..(152): n is a, c, g, or t
  misc_feature (162)..(162): n is a, c, g, or t
  misc_feature (168)..(169): n is a, c, g, or t
  misc_feature (173)..(173): n is a, c, g, or t
  misc_feature (186)..(186): n is a, c, g, or t
  misc_feature (197)..(197): n is a, c, g, or t
  misc_feature (201)..(201): n is a, c, g, or t
  misc_feature (215)..(215): n is a, c, g, or t
  misc_feature (236)..(236): n is a, c, g, or t
  misc_feature (271)..(271): n is a, c, g, or t
  misc_feature (286)..(286): n is a, c, g, or t
  misc_feature (294)..(294): n is a, c, g, or t
  misc_feature (296)..(296): n is a, c, g, or t
  misc_feature (298)..(298): n is a, c, g, or t
  misc_feature (311)..(311): n is a, c, g, or t
tgaaggggcctcccaagggtcatccccccccccccggttttccctgagagggatcacctccctggggtcaaccaagggaaatgtgcacgcaagggccccggcccccctggcagggggggggtttttataagggngggggccaaaacccttgngggggggccncccctnngccngtttgggggggcngcccttagggntttnagggtaagggcccngggggggggggccccccctgntcctttggggggggggccccccccccccccggggncccggggttgggacnccccccgntngncccggaaaagccnttttgcggcca

SEQ ID NO: 574809 - DNA, 736 bp, Homo sapiens
  misc_feature (45)..(45): n is a, c, g, or t
  misc_feature (63)..(63): n is a, c, g, or t
  misc_feature (108)..(108): n is a, c, g, or t
  misc_feature (121)..(121): n is a, c, g, or t
  misc_feature (123)..(123): n is a, c, g, or t
  misc_feature (137)..(137): n is a, c, g, or t
  misc_feature (142)..(142): n is a, c, g, or t
  misc_feature (146)..(146): n is a, c, g, or t
  misc_feature (149)..(149): n is a, c, g, or t
  misc_feature (157)..(157): n is a, c, g, or t
  misc_feature (179)..(179): n is a, c, g, or t
  misc_feature (185)..(185): n is a, c, g, or t
  misc_feature (187)..(187): n is a, c, g, or t
  misc_feature (197)..(197): n is a, c, g, or t
  misc_feature (208)..(208): n is a, c, g, or t
  misc_feature (210)..(211): n is a, c, g, or t
  misc_feature (224)..(224): n is a, c, g, or t
  misc_feature (249)..(249): n is a, c, g, or t
  misc_feature (266)..(266): n is a, c, g, or t
  misc_feature (284)..(284): n is a, c, g, or t
  misc_feature (287)..(287): n is a, c, g, or t
  misc_feature (290)..(290): n is a, c, g, or t
  misc_feature (296)..(296): n is a, c, g, or t
  misc_feature (302)..(303): n is a, c, g, or t
  misc_feature (323)..(323): n is a, c, g, or t
  misc_feature (342)..(342): n is a, c, g, or t
  misc_feature (354)..(354): n is a, c, g, or t
  misc_feature (358)..(358): n is a, c, g, or t
  misc_feature (373)..(373): n is a, c, g, or t
  misc_feature (377)..(377): n is a, c, g, or t
  misc_feature (440)..(440): n is a, c, g, or t
  misc_feature (458)..(458): n is a, c, g, or t
tcctgctgtcctgcgcccgcggcccgctgaggcccctcgtgttcnctgtcacgcctggcgtcncttcgcctcgggtgctaactttgagtacatcatcgcagaaaaaanagggaagaataanancgtggggttgatcnaactnaacngcnccaaggcnctcaatgcactttgcgatggcntgattnangagctcaacnaggccctgaanannttcgaggaggacncggccgtgggggccattgtcctcancggcggggtataaggcntttgcagctggagctganatnaangaaatntagaanntgagtttccaggactgttantccagaaagttcttgaagnactgggaccacntcanccaggtcaagaagcnagtnatcgctgctgtcaatggctatgcctttggcgggggctgtgagcttgccatgatgtgtgatatnatctatgcaggtgagaangcccagtttgcacagcaggagatcttaatagagaacaattacaggtgcgggcggcacccagagactcacccgtgctgttgggaagtcgctggcgatggagatggtcctcaccggtgaccggatctcagcccaggacgccaagcaagcaggtcttgtcagcaagatttgtcctgttgagacactggtggaagaagccatccagtgtgcagaaaaaattgccagcaattctaaaattgtagtagcgatggccaaagaatcagtgaatgcagcttttgaaa

SEQ ID NO: 574810 - DNA, 276 bp, Homo sapiens
ttcatagcatgagaatgtggctagaacattatttgaaatagagaatagagcatcttggtcaaccatacatctttcctttccctataagcctagcatgtcacaggtttaaaatgagtatcacaaaattaaaaatgaaaattcagaaagacatgaatccttgaagtcattttctaatgatacaagatagaattatccagagaaaagtcaggaaggatatcatgctttcctttacttgaatatttaaaagcaggtgctattgaaacttctaaaactagg

SEQ ID NO: 574811 - DNA, 355 bp, Homo sapiens
gaagcttaatagtggctaaaagaatcaaaaccttctattctctactcctgttgccactgtgaacgtatacaaaaagccttattaaacaacttagatttgttccttcaatccctcttcaagtttatatttggtgactaaatattctacccacactacttctttgatcaatttcttgctactgaagtgtgctcccgttagatgctgaatctcctttgcagcattgccttatttatattttgaggatttgacagtaagaactttaacacgagtcgcttggatgtgcatctatcacataatccagcaggaacttctgttcaacacatgttccattggacccaggctgttaagtctggga

SEQ ID NO: 574812 - DNA, 776 bp, Homo sapiens
tggtatctcaatccccgacaagtcttcgaactgagaccagggagggtccaaggaggcgctggagatgtacctggaaagatgcacaaactgcggatcctggcgtgcgggggcgacggacggtgggctggatcctctccaccctggagcagctacgccgtgaagcctgacaccccctgtttgccatccctgccccatgggtactggcaagcgacttggcccgaaccctcgaactggggtgggggctacactagatgagcctgtgtccaagatcctctcccacgtggaggagcgggaacgtggtacagctgggaccggctgggacctccacggctgagcccaaatccccgaggccagggccttgaggaccgatgactgacaggcgccagcggaccggatttgccgacctgggaatgtcttcaacagaataacttcaagatccttgggcatttgacggcccaccgttcaaccccttggggaggttcccaagagaatctcgaagagggaccaaacacatgaagaaacttcaaacagccggctattacgggaataaggatcgtatctacgccggttgaacaagcgtttacttcgtggactttcccttgactgggggaaggcttccaacgtggaaccctggccaagacacgcattccagaagtgagttgatcgctgacatggggcacatgggacactttggattccccccaaaggaattccgaggggacccgttgaacaacccacacagaggtcgctcacgaatccatcggaaacaatttccc

SEQ ID NO: 574813 - DNA, 340 bp, Homo sapiens
gcgtacatgtatgatatgagttggagaatataatatttgtgtatcaatacatgcatatgactgtattagtccattttcatgctgctgataaagacgtacccgagactgggcgggcaatttatgaaagaaaccagtttaatgaatttacaattctatgtgactggggaagcctcataatcatggtggaaggcaaggaggagcaagtcacatcttacgtagatggcaacaggcaaagaaaagagagcttgtgcggggaaactctcccctttttaaaaccatgagacttacttcactgtcacgagaacagcattggaaagacctgcccccatgattcagttaa

SEQ ID NO: 574814 - DNA, 1384 bp, Homo sapiens
gatcagcccctaaaggtactagccagtaccgtccaccaaaggagaatgcttgaggtgaagcgaagttctaaccctcctgactcgatctcagagctcagacacagagcagcagtcccctacgaagtggtagggggaaaagtagcatccagctcaaccatctgaggaaggaccaggacggcacaagcatgaaaataaagtagatgggatgcaatgcccctaaaaggccaaactggcgaactctagcccgtggtccagcgcgcacggagggaacagagcacacaggacacgcagtcagcatacgcgacaagatggcaaaaaggatcaacgactccaagcatctagcaccatgagccaacagaaacacagagcgaaaatccacgctatctaagattacagatatctagcaaagacaaagtatgcctgctcatctactgctaagatggctagacaggatgacaacatcgcagggacgcaagattcattggccgaactccgcacctccttacatacatgatgacatattaatcccatagcttacctctccacaccgtggcaacaatcacgcagcagccagagtcacaacagactcatactgcaggaccacgaccacctcttacaactaccacagtcttccctgcaagaaccatattctttagcacatttcctcgtaccacagcacatgacatgcagcctaataacaggcatagcatggatggaaccaccctacaacgcacacgcagctaacgtggacaaaatcgccaaacacgccaggagagcaacgggaccacccgacaaccaaagaggcaaaactagacacagcagatacacagacaccagccacacacccagggcccaacacagaccaaagggccccccaccaccccaccactggacaaaacaaggactaacacgcaagcaaccggcacagaccaacagcacagacacccacaacgacccccgccagccacaacacagaaagaagaaacccaccgcaaaaccaaacacacaacgcgcccacaacacacggagaaaatcaaaagcatcccaaccaacagacagaacacacaccagaacgcccgaggtgcacggaagtagaatatgactgacacgatggtcttgtactcataagctcaatatccgactagggcggcgcacctaccgggatcgagagcacgcgcgctacggaaggaggtaaggagagcgagagctgaagagggaactgcgcgcggccggcggagcgtgcaggaggcagcgacgcggagggcgcgatgacagcgggcgaagacggcggtgagatgacgtcgccgagcagaggtggcaggccgatgagcggcgacgcagcgacgggaggtgaaacgaggatgaggacgggcggcaaggggct

SEQ ID NO: 574815 - DNA, 191 bp, Homo sapiens
agctgtgatcatgccattgcactctagcctggattacagagcatgaccctgtctcatatgaaatataaacagaggaaaacaaagccggaatttttgacttttgtaaaaatgcttttccaaaattttgtttaatttgtggggaaacaaaactttggggaaataaagggcaaattttgttggaaaaaaaaccc

SEQ ID NO: 574816 - DNA, 269 bp, Homo sapiens
agtaggtgggaccggggtgagtctcaagccagtggatcagtgaggggtgagtggcactgtcgtccgaatggagcatggtgtggcatccctcgcccagtgggccttagccatgaatgcactaagtggccggccccgtcagacaggctcagggtgaggtccgcccacaggggcttttgggcccctcccatcatgtaagacgccaccccctgccatgtgggtcctgttgcccttagctgtcacattctgccttgtgttgatctcagtggagg

SEQ ID NO: 574817 - DNA, 219 bp, Homo sapiens
tgctggcttcaagaggtggggtcctccccaacatcctggcacccagtaggttactcaccagcactggtcaaaggaatgattttaatccaaagtgctgggattacaggcgtgagccaccgggcccggcctggactagtttcttaacctctctgagcccatttcctcatctgtaaaatggggtcatgtattggcagtccctcccctaaatggttcctagaa

SEQ ID NO: 574818 - DNA, 1889 bp, Homo sapiens
tggcggacacaatgaggataggtcacctggagatcccaattccatggaacagagggctgagactgaatggccaacatttagacaagaagtctgccaaggctcaatccaggtgacctaatcctcattggtggcttgatgtttgctggtatcttccaaactcagttcccagactagattgatacctggagcccagctgcctactcagcatttccacttgggtgcttcataggcatttcaaacctgatgtgtttaaaacacttgattaggctccggttttcctttggcttctgcttttcagtgaatggcatgactgcctatgtgggtggcaagccacccaggtgccgaggaaagagactgagggcacgagctgttccagtataataaaatatataaaataagaagagttatactagatctagatcatagacatgattatatgtgagtatcattaatcattagtttatagcaattactctttattccaatattataataatcctcactctacaatcataacctaggaaaaaccaggccatacagagataggagccgaggggacatagtgcgaagtggccagaagacaagagtgtgagccttctcttatgcctggacagggccaccagagggcttggtctagcagtaacaccagtgtctgggaagatgcctgttgcaaagtggaccatggtctagcagtagcatcagtgtcaaggaaaaacacccactacttagcagactgggaaaaggagcctccctttccccgggggagtttagagaagactactcctccacctcttgtggagggcctgacatcagtcaggcccgcccgcagttatccagaggcctgtctccctgtgatgctgtgcttcagtggtcacgctcctagtccgctttcatgttccatcctgtatacctggctctgccttttagatagcaggagcaaattagtgaaagtactaaatgtctgatatgcagaaataatggcataagctgtctctctctcttctctctctctctgcctctgctgccaggcagggaagggccccctgtccagtggacacatgacccatgtgaccttacctattattggagatggttcacattccttaccctgcccctttgtcttatatccaataaatatcagtggtggccccgaatgtctggctgcgctgatgtttgctggatgcagagcaaggggggcggggtggggagtgtgagtcatctccggtgattgatggggtcacgcgggtcgcgtttccaccggacggggggcccctccctgtttggcggcccaggtggagagagagaggaggcggcttatgccattgtttctgcatttcggagacttttggtgcttttactgattttgctgctgctgtctggagggcggggccgggtgtacagagtggagcaggagggtgaaatgggggcgtggccgctgaagcacagcatcgcggggagccggttaggcctccggataactgcgggccagcttggctggtgtcgggccttccacaagaggtggaggagcagagtcttctctggactcccgcggggaaggggagactccctttcctggtccgctgggtggcgggtgtttttccttgacactggggctgccgctggaccatggtccacttggcggcgggcgtcttcccggatgctggcgttgccgctggaccaaggagcccttctgctggccctgtccgggcatgacaggggcctcgcactcttgtcttgtggtcacttctcactgtgtctcctcggctcctatctctgtgtggcctggtttttcctgggttgtggttgtggagcgaggattattgtagtgttgggatggagagtggttgctgcagactaatgattgatgatattaatatataatcatatct

SEQ ID NO: 574819 - DNA, 124 bp, Homo sapiens
tattccttcagttgacaacgcagcaagctgcccaggcattccccatttatccaattgcacccaggcacaggcagcatcatttcacgttgactctcagcccgttggacccgagcacagacacaca

SEQ ID NO: 574820 - DNA, 1216 bp, Homo sapiens
caggctgtaccggtcggagagtgtatggatcgactgcggcgcatggcggtgagcggtgtggagaagacgcgcgggtggctgggccttgcattgttggcggctctcggtgaccctcgtgctacccccctttctccaggccctgggacatcttgctggggaggcagcggcggccccaggcccgggtactccctgcgcgtcccgcggagcccggcttcccggcccagtttccagcgcccggaatccttccactgtctgtctctgcccagagcaacctacgtgcagtaacgctgactccagagcgcacccgttgggcgatgaaggcggcacagcgtcgaaaaaacaaaagaataagaagaaaacgcggaacagggcctctgtggcaaatggaggcgagaaggcctcagagaaactcgccccagaagaagttcccctaagcgctgaggcccaggcaagggcgggcttcggtcgggaagggtggaatccacgggcacaacagttggcccaggaattggcttggtgtgtggagcaactggagctgggcctcaagaggcagaaacccaccccgaaacagaaagagcaggctattggagcaatccgaaccctgcgcagcaaaagaacgcccttgccccggaagaggcagctgatgcactccttgtttggagactatagggctcagatggaagccgaatggcgtgaggccctgcgggctctcagagctgctgcttattcagcccaggtgcaacctgtagatggagccaccagaaagaagagccaaagggtctgcaggcctcgctctatatggagagccaaagccactctggacatgcctgatgaagagtttaggttcaatttcttttagcgtctccccgaacctgaaacaatccccctcccttggggtggtgtaggggtttgttttgagtgcagagcctttccaggacttctgttgtcagagaaccctggagttggtctgtccctggctggtccaaggatttgtagctgttgtgaaggtgtgagaccatcagataggcaaaagaccccgttcgttttctgatgaaatgttctctctttcagaagagagagagaggtgcatttagaaaatatgcaataaattgaagtgagtgttcaaagtattgtagaagggaagataaagagaaaaaaaggggggggggcaaaaatcccgggggccaatttagcgacgttttgtaagggcccttgg

SEQ ID NO: 574821 - DNA, 573 bp, Homo sapiens
  misc_feature (15)..(15): n is a, c, g, or t
  misc_feature (481)..(481): n is a, c, g, or t
  misc_feature (486)..(486): n is a, c, g, or t
  misc_feature (499)..(499): n is a, c, g, or t
  misc_feature (523)..(523): n is a, c, g, or t
tgttacacagtattnttagttattgtacaccacaaaacttaagaacgtgagcataggttaatatttatcttcagggaaaagagtttcctttagaaggttttagaattaggaactgctgcacgcatattcactcaggaatgcttgtgtgtgcagtcataaaggtaggctgagagaaacgttgcggagctgagtgcagatggccccagggaatgatgccgagataacgcagccctgggcaggcaaaggcactttgtggaaggcactctgtcttttgtttcttaggacaaaacctggatctctgcatgccccaacccgaatgggatggggagcactttcaggtgtccactctacaccagcctgaagggaaagggcagcatctggcaggagccaaggcgaaatggttcccaggggatatagcagaccaggttgtcctgagagaatgcggacttcaccttgcgaggtgggatccgatagagcaggntgtgnggggacaggctgngcctgcagaaggtctccaagtctngcatggatgcttagcccagtaacatgtggataatctccacattaagaggg

SEQ ID NO: 574822 - DNA, 107 bp, Homo sapiens
ccctgctaggtctctctattcgtgttgaccacccaagccagcgggacaaccctgtgtgtgccatggaatgcagggccccctagccacataataggcaagggcaatga

SEQ ID NO: 574823 - DNA, 2596 bp, Homo sapiens
caggctgtaccggtcggagagtgtatggatcgactgcggcgcatggcggtgagcggtgtggagaagacgcgcgggtggctgggccttgcattgttggcggctctcggtgaccctcgtgctacccccctttctccaggccctgggacatcttgctggggaggcagcggcggccccaggcccgggtactccctgcgcgtcccgcggagcccggcttcccggcccagtttccagcgcccggaatccttccactgtctgtctctgcccagagcaacctacgtgcagtaacgctgactccagagcgcacccgttgggcgatgaaggcggcacagcgtcgaaaaaacaaaagaataagaagaaaacgcggaacagggcctctgtggcaaatggaggcgagaaggcctcagagaaactcgccccagaagaagttcccctaagcgctgaggcccaggcacaacagttggcccaggaattggcttggtgtgtggagcaactggagctgggcctcaagaggcagaaacccaccccgaaacagaaagagcaggctattggagcaatccgaaccctgcgcagcaaaagaacgcccttgccccggaagaggcagctgatgcactccttgtttggagactatagggctcagatggaagccgaatggcgtgaggccctgcgggctctcagagctgctgcttattcagcccaggtgcaacctgtagatggagccaccagaaagaagagccaaagggtctgcaggcctcgctctatatggagagccaaagccactctggacatgcctgatgaagagatccagttcttgtacgagaaacggaggttttggtagcacagattatcaaggactttgaaaaatttgcttcgttgttccagcccttaacaacatcactcctgcagcacgttaccattggaaagtcctacctcaagtctgcagatgcctccaagaagtccaaaaacaagtccgaagtccgacgagcaatggtggcgatggcgattctagttaataaaaaggggggagatgctggcgcaagccacccaggtgccgaggaaagagactgagggcacgagctgttccagtataataaaatatataaaataagaagagttatactagatctagatcatagacatgattatatgtgagtatcattaatcattagtttatagcaattactctttattccaatattataataatcctcactctacaatcataacctaggaaaaaccaggccatacagagataggagccgaggggacatagtgcgaagtggccagaagacaagagtgtgagccttctcttatgcctggacagggccaccagagggcttggtctagcagtaacaccagtgtctgggaagatgcctgttgcaaagtggaccatggtctagcagtagcatcagtgtcaaggaaaaacacccactacttagcagactgggaaaaggagcctccctttccccgggggagtttagagaagactactcctccacctcttgtggagggcctgacatcagtcaggcccgcccgcagttatccagaggcctgtctccctgtgatgctgtgcttcagtggtcacgctcctagtccgctttcatgttccatcctgtatacctggctctgccttttagatagcaggagcaaattagtgaaagtactaaatgtctgatatgcagaaataatggcataagctgtctctctctcttctctctctctctgcctctgctgccaggcagggaagggccccctgtccagtggacacatgacccatgtgaccttacctattattggagatggttcacattccttaccctgcccctttgtcttatatccaataaatatcagtggtggccccgaatgtctggctgcgctgatgtttgctggatgcagagcaaggggggcggggtggggagtgtgagtcatctccggtgattgatggggtcacgcgggtcgcgtttccaccggacggggggcccctccctgtttggcggcccaggtggagagagagaggaggcggcttatgccattgtttctgcatttcggagacttttggtgcttttactgattttgctgctgctgtctggagggcggggccgggtgtacagagtggagcaggagggtgaaatgggggcgtggccgctgaagcacagcatcgcggggagccggttaggcctccggataactgcgggccagcttggctggtgtcgggccttccacaagaggtggaggagcagagtcttctctggactcccgcggggaaggggagactccctttcctggtccgctgggtggcgggtgtttttccttgacactggggctgccgctggaccatggtccacttggcggcgggcgtcttcccggatgctggcgttgccgctggaccaaggagcccttctgctggccctgtccgggcatgacaggggcctcgcactcttgtcttgtggtcacttctcactgtgtctcctcggctcctatctctgtgtggcctggtttttcctgggttgtggttgtggagcgaggattattgtagtgttgggatggagagtggttgctgcagactaatgattgatgatattaatatataatcatatct

SEQ ID NO: 574824 - DNA, 259 bp, Homo sapiens
  misc_feature (214)..(214): n is a, c, g, or t
tcccccttaccttttcccctttttttccccaaaaaaaaaccccgggaaaagcccaaaaaagccccaattttccccggggaaaaaggaaaaaatcccccccaaaggtccccgggttttttttttccgggttttaaaaaaaaaaaggaaaaaaaagcctggccccttaattaaaaaaaaaaggggaagggggggaccggggggaaaaattttgtgnaacccccccccgggggggacccccccaaaataaaaaaaaataaaa

SEQ ID NO: 574825 - DNA, 896 bp, Homo sapiens
aatttttgtatgggcacggctcatttttgttactaggaaagggtgtttggtcgtgagagcccgtgtaccaagccctggtttgtgtaggtaccgaaaaggggggcgcgacatgtgtatcttattagaaaattggattataaatttgggaggaccttccagcgtgttgctttcaagcttaaaggctggccaagccctttgtcaacgacttcggaaggtattcccccttggaaatagttaatggaattggctaacttgagggacatgatgacatcacgtgttaagaattgttgaagagtcccagtgaaaatttagagagccatgacgattctatgcaccctatagactgctctgggagaaagccttctgattatataatagtggttcagctcccctgtgggggtcatagtcttctaggcaccagataaacttgagtgattccagtcactcttggccatttttctttaaaataggctttttagcctatattttgggaaactgcttttcttctgaggaccctattctggatgtcatccaacgttacccaaccttctaagtcccgagcgtaacttagtactgtttaaggtactattgactggattttctcattttctgtttagtcccgtgttacccaggtaagctgggggatgaagtgatacccacttctttcagagccattttaggaccattatggcagctttagaaggctgtcttgtttctagcccagggagagcccgcgcaggttttggataactagagaaagatcatttgcttgtactattgcccttttaggaagctttgatgtggattcaaattttacctctgttacttaaagcccaccattttaaggccgtagttttactggccctttaagctctttgtacagtgtccaatttgta

SEQ ID NO: 574826 - DNA, 162 bp, Homo sapiens
agcacaagcctggctcccacccggccctgtttttatgatattgatttggaccctaaacagaacaggtgaatggattattctaaacagatcaccatccatcttcaagaagctactttgaaagtctggccggaattccgcaaagatccctttgtccccatgcac

SEQ ID NO: 574827 - DNA, 414 bp, Homo sapiens
  misc_feature (10)..(10): n is a, c, g, or t
  misc_feature (121)..(121): n is a, c, g, or t
  misc_feature (281)..(281): n is a, c, g, or t
aaaaaaaagncatttatagataaacaccagactaagagtttccaatttaagtgatctatgctaaaggattttcctaaagttctgtatgtatttcaagaagaagaaaaatcaggctgggcgnagtggctcatgcctgttatcccagcactttgggaggtcaaggcaggcggatcacgaggtcaggagatcgagaccatcctggctaacacagtgaaaccccgtctctactaaacacacacacacacacacacacacacacacacaaatagccaggcatggtnacaggcgcctgcagtcccagctacttgggaggcggaggcaggagaatggtgtgaacccaggaggcagagcttgcagtgagcccagatagcgccactgcactccagcctgggtgacagagcgagactccatctc

SEQ ID NO: 574828 - DNA, 940 bp, Homo sapiens
agcgggctgagacagaaggccgcctaccggggagtgccggctagtcgcggactcgggcgaactccaccctcgcgatctgtcgaggtcatgtcccgcaagggcgtaggtcccacgtttcgggtaggaaggttcttgaagggggagtttcgtcaagaagtcacctcccgtcggcttcctttctacatcgctttctctctaggagcctggtagtcgctgcatgggaacgcattgtcgtgcagggatgacaggcgaagcggccaccgacagagggaccgagggtggtaaaactccttggaagctagcaatcgttcataacagaggatcgaccaaaggcagcacgcggtagtgtcacaaccatcgactggttgccctacaattcgacgggtcggaggacgaggggccgctatgtgcctcgagggagtgaggagccccagagagatggggttgtaagcgggcgtccgtgggcgaaaccggtgcgccggccgcatcgaaagaaagggctcgtgggcgcacatccaggaggtggcatgaatcccgcttcaacaaggacctatagaggaccgagtgtggcaacgggctcattggaacatggcggttgccaccatctcgattcgaaaggggccccatctgcgttgataattgcgtctttctctgcccctgcgtctccaagcgcggcaaagctttgggttaggtgcggggtgtttatgtgccaatggcgcatacaagttgtaacggtaatgggtattcccgaatgtagtctttaaagcggtgggttcccatgggctttggtttgtaaacaacaagggcggttgtggtcaatatgttatttttgttccttatacaatttgttaccaattaagatttcaaaggaaaaatacgcaacacattgagaccataattgaagcggagtggctttattggtagttatcttttacttggg

SEQ ID NO: 574829 - DNA, 204 bp, Homo sapiens
  misc_feature (45)..(45): n is a, c, g, or t
  misc_feature (63)..(63): n is a, c, g, or t
  misc_feature (66)..(66): n is a, c, g, or t
  misc_feature (138)..(138): n is a, c, g, or t
  misc_feature (152)..(152): n is a, c, g, or t
  misc_feature (160)..(160): n is a, c, g, or t
  misc_feature (178)..(179): n is a, c, g, or t
  misc_feature (184)..(186): n is a, c, g, or t
  misc_feature (189)..(191): n is a, c, g, or t
taaactatttattaaaaataagaaaaagacaactgtacaggattnaaatcccagctcccgggngtnaactaagtactagccctagatatgtatatatacacaaacacacacatgcacacagatctagctctgtaaaantacttagcaaatcnttagtcgnctgcagtaagtcttactnnccttnnnttnnncactccccctccc

SEQ ID NO: 574830 - DNA, 322 bp, Homo sapiens
caattgggggggggggggggcctccccccccctttttccaaacccctttccctttgcccggggcccccagatttttcccttttacccaagccccggctttttcccccccccccttttccggggcccctttttttaattttcccccccccccccgggcccccgtttttaaatttttgtggggggagggggaaaggggtgggccccccccccccccccccctttaaggggcccccctttttgggcccccccccttaaggggggggggggggggggggtcccccccttttttttttttttggtccttaaaggttttttgccccca

SEQ ID NO: 574831 - DNA, 148 bp, Homo sapiens
cacctaaacctgatctgccctgcaatgatctggcgtgccgccttcaaacttccaatggagctctttccatgttgattcataaatggccgacaaaatcaatcatttctccgccaaattcgacagtgctccatctgttcgagcaacgccc

SEQ ID NO: 574832 - DNA, 707 bp, Homo sapiens
tgatcctaagcaggggcgaacttacaagctgaggatgcgcaggaagtcaccgtcagcgtcaattgctcgacagccgatcacctttggcaaagcgccaggtgcgaatgatttccagacggtcgatgtcgttcaagtccccggtaaacggcgcaaaaggcgccgccaggcgcacgatgcgttgcgccgcctggtccagcagcggttggccggaggactccagcacctgcacttcgtacaaggtgccgtcgcggttgatcgacaccagcagtcgcaaattgccgtagatctgctggcggcgggcttcgtccgggtagttcaggttgccgatgcgctcgaccttcttgcgccactcgtccttataccaggcgcctttgtcgcgcatggtggaggcagcattcaggcggtagatccgcgggcgcttggcgtacagctgttgttcgtgggccagttcggcttccaggctggaaatttcactggagagttgcgagctatcaaacgtcggggccggcggggcaggcgtgggttcggtcttggccttttcccgttgagtgggcgctttttgcggtttgggtgcgacggtagtgacagcggccttgggtgcagcctgtttcacctccggcttgggcgctggcggtggcgtgaccttattgaccttgttgtcttgaccggcgccacttcggtgtgcttataactcggccggaccgacc

SEQ ID NO: 574833 - DNA, 247 bp, Homo sapiens
  misc_feature (5)..(5): n is a, c, g, or t
  misc_feature (207)..(207): n is a, c, g, or t
cccanggatgccacaggtaccaagcgttaccagtaccagctcacattcctttccttatttggaaagaggactaactttctagctcattacagacaccccttccccttcctctccactttcttttacatgcccaccctatctaaaaaaaaatcaaatgttcagtcaactgggattagtttagattgtatgaccccgggccagtggggnaaagggtacagggggcagggacttgcattcagggaattaa

SEQ ID NO: 574834 - DNA, 357 bp, Homo sapiens
taacattgccgcaaacgcctgcggtcacccaggtgacggataccatcgacaccaccacggctaccctgactgcgtcgcctagcgtgaccgaaggtggcgtgatcacctacaccgtgaccctgagcaaccctgcccagactccggtaaccgtgaccctgtccaacggccagaccatcaccgttgaagcgggcaagacccagggcagtgtcgacttccagaccccggcgaacgacgtctacaataacggctcgaccgtcagcgtcaccatcgagaccgccacgggcggtaacttcgagcagctgaccccgaatccgaccccggctcagaccacgatcaacgattcggtcgacaccacta

SEQ ID NO: 574835 - DNA, 124 bp, Homo sapiens
tgctctggtgtgatgatggagaactgactcctcgtgcctatggagtctgaggcaaagctttctggttctggggaagagtcacattctgcttctccctactagatgtgcgttctagtgtatatct

SEQ ID NO: 574836 - DNA, 117 bp, Homo sapiens
gtacagcacgcgctaacaattaggttcatagtaggtgcctgccagtaatgttagcggttaggcgtacggccagggccatatagattgaatgagtacggctgatggtttcgactaata

SEQ ID NO: 574837 - DNA, 303 bp, Homo sapiens
tgagacagagttttttttcgttgccaggctggagtgcagagaggctggacttctgtggtgacgggcagacaggactggtggtgttagtcctgatggtctcttaagaggaggtgggtaggccgggaacattgggtcatgcctgttatctcaccactttgggaggccgaggcggccgaatcatttgtggtgaggagttcaggaccaacctgggtccactccgccgcgaatttagttgttattagggccgctctttaggatgcaagcttaccttcgctggcttgcaacgtgatagctcttatatag

SEQ ID NO: 574838 - DNA, 581 bp, Homo sapiens
  misc_feature (581)..(581): n is a, c, g, or t
agtagttcaaccccttttgcatgttgtgcaaagaaaactggctaagatggtggcttactggggaattggcacagacaccaacacccatattcttaaccaaattctccaacattttcttggatttaaccttagctggggcttcagcaacaaatctagcaattgtggcggaatgaacctcaggcagcatggcttcaaaagccaatgtgtcaaccaatgaagacccggcactttcaagcagagggaatgattaaacaccttactcaaacaaatcaagacatagttgtacccgcttttaaatcgatgtgggacggctgcaccaagagggtaacaaactggcggacagaagcgtgagaaactcggagaccatcttcacataaaccaatcgcaatgtgttagccgagaggatccctgtgtaactgacacttaaggagaattggaagctggagggggctttgggctcctaaaggaggacggcggatttttgacaattttaggaaagagggggtccctaaatgcccaactggaggtggcctgacaaaaaaccaaatgtaggaatatcaagggggccctcgcggaattcn

SEQ ID NO: 574839 - DNA, 306 bp, Homo sapiens
atttttttcctgtagacagcaaacacttcaactataaaagcttagaaatgtcttccgaggaaaattttcgttagaatccttggcagtgtaaacctctttgccctctggataaaatgtgttaccttacgtattgtcatgggaacaattatttttatctctagtttggctatgcctctaaatctctaaacttctcacatttacattagttttttatgcttacagagtaaaatagatacacatactgagtttcacatgtctagagattttccaatacatgctaatatccgatcactaataccaactcgc

SEQ ID NO: 574840 - DNA, 696 bp, Homo sapiens
  misc_feature (127)..(127): n is a, c, g, or t
  misc_feature (195)..(195): n is a, c, g, or t
tcgggtaccattattatcgctattccccacggggggtaaggtatttagttgcctcgcccccctcccgggaagcaatataaaatgatttgtcgcagtgctctgagccctaggattctctttcttttcnccgtaggtgggcctggcggcattgtattagcaactcattccctagacttggtactacacgcaccgtantacgttgtagctccctcccactatgtcctatcaataggggctgtgtttgccatcataggagggttcattcactgatttcccctattttcagggtacaccctagaccaaacctccgccaaaatccatttccctatcatattcatggggggaaatttaacttttttcccccaaccctttttcggcctatccggaatgccccgaggtttctggggctaccccgatgcataccccccatgaaacatcctttcatttggggggtccttcctttttttaacagccggaatattaataattttcatggtttgaggagccctcgcttccaagcggaaaagtcctaatagtagaagaaccccccctaaacctgggggggctatatggatgccccccccccccccccccctttgaagaacccggatacataaaatttagccaaaaaaggaagggatcggccccccccaagggggtttcaagccccccccctggcccccctggctttttcca

SEQ ID NO: 574841 - DNA, 129 bp, Homo sapiens
tttgtttaaaaccttcagctttcgttccattactcttttaggcttaagacactcgtgttaaataccctgctgaaggtatacacaagtagctttccctcttgagacaaaagccagtattccctatagcct

SEQ ID NO: 574842 - DNA, 190 bp, Homo sapiens
agaggaggggaaggcaagctctggagccgctccctcagggaatcaaggagtctctaaacaattcttcccctggggattaagaggaagttgtcaagaatggaacctgaagatgctacagaggaaatcagtggattcctttgagctaggagaaataagagtcgtggagacggagagccttcacttcggcctc

SEQ ID NO: 574843 - DNA, 199 bp, Homo sapiens
  misc_feature (21)..(21): n is a, c, g, or t
  misc_feature (42)..(42): n is a, c, g, or t
  misc_feature (68)..(68): n is a, c, g, or t
  misc_feature (123)..(123): n is a, c, g, or t
  misc_feature (166)..(166): n is a, c, g, or t
  misc_feature (195)..(195): n is a, c, g, or t
tctcttcaagataagttgtantttaccatggaaaaatacagnatctaacattaccattcacgttaaangaagtttcctcataacatttatctctagttttatgaagtcatcgtgaccaatgtnacagtaatttctgttagctgattgtggtaaacaatgtttaatntgaaaagaaattaaaactttcttcatctnttgt

SEQ ID NO: 574844 - DNA, 129 bp, Homo sapiens
tgagagaccgtgttgcaatgtgtccaggctgctcttgaactcctggcctcaagcgatcctcttgctttgcgctcccagagtgtatggaattacagtgtgtgagccactgtgcctgccgctcaatttatt

SEQ ID NO: 574845 - DNA, 125 bp, Homo sapiens
tactacaggttgggtatgtggctcacacctgtataccagctactcaagaggctagtaggaggatctctgagcccaggagtttgagacgatgttgggcaacatagcgagaccccatttcgttttgt

SEQ ID NO: 574846 - DNA, 102 bp, Homo sapiens
aaattgggaaaaggaagttttgaatgaggatgctagagtctgagcaattccaaatgaggaagcttctttttcccagatttctgatgatagaaggaatcctca

SEQ ID NO: 574847 - DNA, 479 bp, Homo sapiens
gctcgtatggggggacatttcagggctggcagcaaaggatgggtgggcacagtgcccagaggccggtgagggtgctcttgtccagcatcctggatggggatatgatgtcgcctcgtccatagtcctgagctgaggtgtgtctgctgggcctttgagctgggagaagcctgtagcatggtctccctgaggacactgttgtttgtgggcttggagccctcctctggagggctgccggatggggtgggtcccctcgagggtgcttgtttctctggtggtggggcccggccgtgccggcagctctgctctgagctggccctccctcgtcttccttccctggggcgaagaccaggagtcgccctccagggtctgtactcacagccaccctggctctgtggagatgggtacgctgcttgccttagagtgccctgttctcccccgctatcctttggtggggtctcccggccccacagagagagcgt

SEQ ID NO: 574848 - DNA, 331 bp, Homo sapiens
  misc_feature (61)..(61): n is a, c, g, or t
tgcatattttgctggtttataaagttcgttaatataaaaagtaccatgggtaaacatatcntacatgtaaatctttgatgatatgtattattattttaggatgtgctttcaggatatgcagtggttaaggcacttgatatctactgatgtctttacacccataaaaggtatacttttctataggaattgttgtttaagtgtatgctcatcacaatggagtattttcatttttaattagtacgtaaattagatctcataattatgttaccaattttttaattaaagtaagacaattgcatagatttcttattgccatcactcctcaccaatg

SEQ ID NO: 574849 - DNA, 967 bp, Homo sapiens
atttcgtgtggaattggttttcttgtgcccggatatgatgattgttgttacgtagagttttgtccccgcacgtgattaatttcttgaggacacttgttgttacccccctagttatcctttttgagtgcggtggttttaggtgacgcccctaacggataatgtgttatctggagacaacaacagtggctaaagtatcttgtttaggtggccatgagtctgtcagcacaagcgaggctgaaattcctgaacacagtgcattctggccctccctattctccctcctcataatccaccaggtgcccacccattttaacctgtgttgcaacttcgcgttaattatctgtggccccttctgggtgatctaacaacataacacttgagtatggaactgagggagttaccactgatatagagactgagcacaccctaaataattgatggaatcaccatctaagacctacaagagagtgtacacatagagtgcttttttgaaagcgtcattagttgatcggaatcatcagaatattgaggtggtgacaacctcgggatgatctgtaatctccccacaatttactgttcttgaatgacattctcaacagctactttatttaatgagtgagtctcatccctgctttctgtgtcctctctctgcagtcttctcttggcatacggaaagtttatatttactcagtagcgtgtgtgtgtttaaataagcgttacacaaaaagatgcattcccttccctgttcacactcttaccatgtgtttgttcttccttaagaatgattgtgtgtgtgtgtgtgtcgtgtgtgtaagtgtgtaagtgtaacatcatgggttttctttcgttcacttgtaaagttttatctagaaatactttttacaggttatgttgaggtacaccgcaagataatggttctaagattgtgtattggatttggatttgtgtgtgtgtgtgtgtgtgtgtt

SEQ ID NO: 574850 - DNA, 106 bp, Homo sapiens
cacgagggggatccgtttgcttaaattatctttctgatacttcattattagtgtgtagaaatgcaacagattggtgcatgtagacttttagtatttgtgcaaagtt

SEQ ID NO: 574851 - DNA, 159 bp, Homo sapiens
  misc_feature (11)..(11): n is a, c, g, or t
  misc_feature (20)..(20): n is a, c, g, or t
gccaccacagntgctcctgntgctggcagccccagctaaggttgaagccaggaagagtcggaggagtcggacgaggatatgggaggtctctgactaatcaccaaaaagcaaccaacttagccagatttgcaaaacaaggaaataaaggcttacttcttt

SEQ ID NO: 574852 - DNA, 261 bp, Homo sapiens
gaatgaggcggaacagcagccatcgttacagccagaaggggaggtcttcgtgggggcagtgcccttgctttgcctgccctgtgggggcctccttgcgggggggaggctggcctcagcggggccaccagcagggccaggaagccagtctctagcagcaggccagtcccattgggaaataaagggaacacctgggcccacctgggcaggggttgccaggttaggttcaagcccgggtacgagagcttcgaattcggtagtcat

SEQ ID NO: 574853 - DNA, 399 bp, Homo sapiens
gtcttaagcatcctaaccagtcgtcaaaaaactttagattgattccatttagatgaaatatccagaaaaggtctagagagacagaaagtaattagtgattgtctagggatgggggaggaagaaatggggagttaactgctaatgggcatggagctttttgggggtgatgaaaatattcagaggctgggcagggtagttcatgcctataatcccagaactttgggaggccaaggtgggcagatcacttgaggtcaggagttcaagactctagcccgggcaacatggcaaaaccctgtctctaccaaagacacaaaaaattagccaggcatggtgtgtgcctgtagtcctagctatttgggaggctgaggtgggagcttgagcctgggaggtagatgctgt

SEQ ID NO: 574854 - DNA, 372 bp, Homo sapiens
  misc_feature (21)..(21): n is a, c, g, or t
  misc_feature (84)..(84): n is a, c, g, or t
  misc_feature (103)..(103): n is a, c, g, or t
  misc_feature (114)..(114): n is a, c, g, or t
  misc_feature (122)..(122): n is a, c, g, or t
agatccgcctcgctgtatgantaaagatctaggatgtggaatgacctgggctcatatggtagcatgttgcattcaactttttantacaccgtctgacagtttnccacagtggtngtaccgtnttgcttacggtttttatgggccaggggtttgtttcattccctgtggctcaacttactgtgctaccccttgagatttccacttaaagccatccaattgggttgtagtgatttcacagggtgtttgcactttgtcttgtctcgatcataactcatgtaagtcttttttttatcccccaattgcccacttgttttattctccttaataacgtgtctgtccaaatctttcgctcaatctaaatggcataatcat

SEQ ID NO: 574855 - DNA, 438 bp, Homo sapiens
  misc_feature (44)..(44): n is a, c, g, or t
  misc_feature (92)..(92): n is a, c, g, or t
  misc_feature (105)..(105): n is a, c, g, or t
  misc_feature (205)..(205): n is a, c, g, or t
  misc_feature (231)..(231): n is a, c, g, or t
  misc_feature (249)..(249): n is a, c, g, or t
  misc_feature (284)..(284): n is a, c, g, or t
  misc_feature (347)..(347): n is a, c, g, or t
tcttctaaatctagacaaccggatattgaacgtgtgctttatancatatctgtggagagggcaactcattttgatcattagtgatactgggntgaatttaatagnagacacaatccacgcagataagaataaaaaggaaaatgatcatctccttctatagcatgtgcagattcaaggcggagacgtagatgctgagatcaaaatnacagtttttacttatttgtccaggtnctggtagtataaacattntgtcctcttcacccctgctaactacctctgtaaantagttctaccagagtggagacccaatctcaggggaagaaattaaaaagtaatataaattcgcnatatattaagaacaatattgtaatatgttataatttcagaccaggaattttctggtctttacctacaagggttttcattatcaaaaaaaaa

SEQ ID NO: 574856 - DNA, 664 bp, Homo sapiens
ccggagacacaggtttttctccattttttctaaaggggcacgttcgggggctaaattgggtggttctaatttgacccccatgaggcccccctaaatgaagataccacgtgtgattaagatcaaaaggagaaatttcttcattatgtacaaacctatgtgtgtataataaatgctgtctaaggtaaacacacatgtcttgccatgaaacttcacattgaagttgaataataaaccctgagtaaatatgacgaaaatcaaatcaggtcaattaatctaaacacattacatgttttatagaatatcagtggtaaaagtaatgatagctgtgcgtgggtcacaagagatagggacggcatccttacgaactcaggggcgtactttattcctatatgataaaagatgatatattaataggcatcttggtaacaaaatataatatattactgtacgctgatttatttgaaatgactgctcttgcaaccttattaattttagccagcactttgatcgttttaataatttcaaagctcagctaccttacaatcattggcaaagtctctcatataattacaaatggcgcgaactctttttgttacttacaccgatacctctacacctcattttcgcgaccgctatttatatccattccgttctccctgccccc

SEQ ID NO: 574857 - DNA, 124 bp, Homo sapiens
tgctatacgagctcccgaccagcggggtgtccccgcgattttgacacgcaacagcggctgtacgcttccacgacacccccttaccaccacgtactcaccacgcacggggccgaccacgacgtcc

SEQ ID NO: 574858 - DNA, 352 bp, Homo sapiens
ccgtatattctgtaggggaaacctccgggagtatcctatcgggggagactagacaaggtgagctttgatattgatgataagcctcaaaaattctgtattagtagtaatactatgcgaagtctagtgtatcaaaatgaagaattcagatggtaggaggttctatagtccttttaaagctgactcttgagtagtcagttgaatatccattagataggatttggaaataacctgaggaaaagtattatgataaagatctgcacagatgcctcttagctgataggtggcaggcctgtgggtttgggttctccctcttttctctggaacatatgacaattccagattaaagaaaaat

SEQ ID NO: 574859 - DNA, 105 bp, Homo sapiens
tactttcacaggtacttttccgggctcactcctgagacaatctccatggctacccaggactgagtttgctattgcccgtaacaatagggtcctgatccctctcac

SEQ ID NO: 574860 - DNA, 181 bp, Homo sapiens
ccccccaaaaaagttctgggaaaaggctttccccgaaaaaaaccaaagaagggaaaaaaaagttggaagggggaaggggctttaaaggtacctcccggaaaggaaataaccagccaatccggcccaatttcgaaaaagaaatccggggggaaagggtaaaaaaaaagggctaacccccata

SEQ ID NO: 574861 - DNA, 327 bp, Homo sapiens
aaaagccatttctactagaaacacaaaaattagccgggcatggtggcacacacctgtaatcccagctacttaggaggctgaggcaggagaatcgctggaacccatgaggcagaggttgcagtgagcctagatcgtgccactgcactccagcttgacgacagagtgagactctgtctcaaaaaaaaaaaaaaaaaatggcagtatagtttaatgtgtatggaagggttaagaaatatttacatagcgaacaatatggcccttttaccttggcaaaaaataccgtggagaagaccttggcctatggacggggggatatcaagaagaggg

SEQ ID NO: 574862 - DNA, 682 bp, Homo sapiens
  misc_feature (682)..(682): n is a, c, g, or t
aaggagtttcaccatgttggctaggctggtctcgaactccttgcctcatgtgatctcccccgccttgtcccaaagtgctaggattacaggtgtgagccaccacaccggccttgatcatcattatcaatgcaattatttgtgacgtacttcctagccctccagagcttttaaaagaaatggaatctgactttaacttctagtgtttgaaagttttagtcccttgccatcttgcttttgagaaaccgtattagcgctgtatgttttgataggagtacagttgcttaattatggtagcaacctgaattaacttctgtgtagctctttgtggcttaccattttcatatacattaactcatttctactccacaggaagcctgccattactgattactcagccaagccgcaactgtactataatttcgaacctagtccctttgttcacataccctccttctattctgggagctcgtaatattgaacagacgcaaatgacaccggtggggccattcatcatctccttttctgacacctgctgcttaacatcactgctcactcttctttcatggtccctttagaccctcccttatacatcttggtccttcatgtgccctggtctcttcttaacctttttcttttttttctcctttaatctgctgggtcactttgccgcaacatatcctcn

SEQ ID NO: 574863 - DNA, 655 bp, Homo sapiens
gaccttcgagtggccgaagcactccacaaactaaagtcacggagtggatgaggtagacaaaaggaagagaggcagaatgcatcagtccagtccacaccccaagcaccactccgcatctcgttgcacctaagcagaggcccaggggctggttcagttctggttcttccaaagccttacctggtccaaatccttagcagcagtggactctggaaggtggggatagggacagaaacttgctcagataagtggagcctctgtggaccgagatcccttcagaagtacgattctggaagtttgtacacccaggtcgctaccgaggagcccagaagcccgtctccattggaactggatacgtgcccaaggccaaccagaatggctgaggatcgcagcagacttgaagccctccctagagatggacatcccagtgatgggaggaatacaaacgaggcgaccatggggcccataagcgtcaaatcccgtgagctgaatgtgctcacagcccatgtggctgtctagagccctctttccaggattcgtggtaaaggtggttctgtgcatcccaggtccccttttaccttggcttttgacataggaaaggtatatgtgaacaaacttaaatcagctgggcgtggtggctcagcctgtgatacccagc

SEQ ID NO: 574864 - DNA, 282 bp, Homo sapiens
ttttgactgtgtactgcgtactgtctatgattcacaggcttgcgtgccctactggtgtccctcttttatagtgactgcttaatacggagggtcataaaatactttgatgactagataaatattaataggtcctagctgttaactcttaaaacgcctagggaagcacactctctgtatgtacttcattcttctgaagtattagtgagcactaactgggcgtagaagctgtgtattagagggtatgctctagcactccattagaaaattcattctcagtcttag

SEQ ID NO: 574865 - DNA, 179 bp, Homo sapiens
tgaacagattaggaatataagcctcaagagagctcccagaaagctgagatctaaacacaaattgtctctgtatgaaacatagagaaacggaagatgcgtataacaaggtatgacgcacttttgtaaatactataaatgaagaatgatctagtaaggtagcctacttggcaagtcattaa

SEQ ID NO: 574866 - DNA, 160 bp, Homo sapiens
  misc_feature (138)..(138): n is a, c, g, or t
ctgtcgtctcgtgatagtagcagtctcacgagatctgatgcttaaagtgtgtgtcatctctttctaccatcccatcttccgctggtgagatgtctcggctctctcgtcttcaccatgatgtaagttctgagtctcttncccactctgccagggggggtac

SEQ ID NO: 574867 - DNA, 1069 bp, Homo sapiens
  misc_feature (915)..(915): n is a, c, g, or t
  misc_feature (948)..(948): n is a, c, g, or t
  misc_feature (1048)..(1048): n is a, c, g, or t
ctttgccacctttgcctccaataccagctcttccacagcaaccacctctgcctccttctcagccagcatttagtcaggttcctgcttccagtacttcaactttgcccccttctactcactcaaagacatctgctgtgtcctctcaggcaaattctcagccccctgtacaggtttctgtgaagactcaagtatctgtaacagctgctattccacacctgaaaacttcaacgttgcctcctttgcccctcccacccttattacctggagatgatgacatggatagtccaaaagaaactcttccttcaaaacctgtgaagaaagagaaggaacagaggacacgtcacttactcacagaccttcctctccctccagagctccctggtggagatctgtctcccccagactctccagaaccaaaggcaatcacaccacctcagcaaccatataaaaagagaccaaaaatttgttgtcctcgttatggagaaagaagacaaacagaaagcgactgggggaaacgctgtgtggacaagtttgacattattgggattattggagaaggaacctatggccaagtatataaagccaaggacaaagacacaggagaactagtggctctgaagaaggtgagactagacaatgagaaagagggcttcccaatcacagccattcgtgaaatcaaaatccttcgtcagttaatccaccgaagtgttgttaacatgaaggaaattgtcacagataaacaagatgcactggatttcaagaaggacaaaggtgccttttaccttgtatttgagtatatggaccatgacttaatgggactgctagaatctggtttggtgcacttttctgaggaccatatcaagtcgttcatgaaacagctaatggaaggattggaatactgtcacaaaaagaatntcctgcatcgggatattaagtgtctaacatttngctgaataacagtgggcaaatcaaactagcagattttggactttgctcgggtctataactctgaagagagtcgcccttaaaagaacaaagtcattacttngtggtaccgaccctccaaacc

SEQ ID NO: 574868 - DNA, 817 bp, Homo sapiens
gccgcatcggcgagctgcgtctcccgggtgtcggccccggcggctccccgaccgtgcccggctgtggcgaggcggctccaggcccagtcctgtggcagccggcgaaccccggggcgctccggagcccactgcgcggcagcgcgtgccaggcgtgcctgcgatggacgcgggcactgaagtcggagccgcttcggaggagccagccgaaatcctgccggccgtgcccgggacgaggaggagggaggacggaagcaggggactggcagcagggggctggacggaggaaagaaagaaggtggatccccggatccatgggagacctggacgaacgtgaaactcaggtccactggcatggaatactcaaacacgaacgtgggatgacctgagacttgacggactgctcgtgcacgaaagattcgcggtcgtgtgtcatgggttgagacgcagacgggtgcaaaacgtggcatgagcctgggtgaaggaatagcaatttggcagaaggctgttcggaagagctccaaggcccctaactgggagggcgacggaggggtgcgcgacggccaggcctccagcgtgggaacgctccagacaacgccagcgacagggactttgccatgagggggccacaagcacgtgtgcctcccgttgactcgagccaacggagagccagtctccccgtggacacgacgcacgccggactgcctggagaggcatgacaaagccgtgcaaagttcgaccatccgggctgggcacggaggattgcttgcaatcgacgccacctcaggaggcgtcattggacggctggaaccaagaccaa

SEQ ID NO: 574869 - DNA, 892 bp, Homo sapiens
  misc_feature (738)..(738): n is a, c, g, or t
  misc_feature (771)..(771): n is a, c, g, or t
  misc_feature (871)..(871): n is a, c, g, or t
ctttgccacctttgcctccaataccagctcttccacagcaaccacctctgcctccttctcagccagcatttagtcaggttcctgcttccagtacttcaactttgcccccttctactcactcaaagacatctgctgtgtcctctcaggcaaattctcagccccctgtacaggtttctgtgaagactcaagtatctgtaacagctgctattccacacctgaaaacttcaacgttgcctcctttgcccctcccacccttattacctggagatgatgacatggatagaatttgttgtcctcgttatggagaaagaagacaaacagaaagcgactgggggaaacgctgtgtggacaagtttgacattattgggattattggagaaggaacctatggccaagtatataaagccaaggacaaagacacaggagaactagtggctctgaagaaggtgagactagacaatgagaaagagggcttcccaatcacagccattcgtgaaatcaaaatccttcgtcagttaatccaccgaagtgttgttaacatgaaggaaattgtcacagataaacaagatgcactggatttcaagaaggacaaaggtgccttttaccttgtatttgagtatatggaccatgacttaatgggactgctagaatctggtttggtgcacttttctgaggaccatatcaagtcgttcatgaaacagctaatggaaggattggaatactgtcacaaaaagaatntcctgcatcgggatattaagtgtctaacatttngctgaataacagtgggcaaatcaaactagcagattttggactttgctcgggtctataactctgaagagagtcgcccttaaaagaacaaagtcattacttngtggtaccgaccctccaaacc

SEQ ID NO: 574870 - DNA, 252 bp, Homo sapiens
tctggagaccctcttgtgtgtaacaaagtggcccagggcattgtatcctatggacgaaccaatggcatgccaccacgagcctgcaccaaattcacaagcgttagacattggataaagaaaaccatgaaacgctactaactacaggaagcaaagtaagccaccaatataatgaaacacattctatggagccaagtccagatttacgctgggagaggtcccagcaactgaataaatacctcttagctgagtgga

SEQ ID NO: 574871 - DNA, 559 bp, Homo sapiens
  misc_feature (288)..(288): n is a, c, g, or t
  misc_feature (305)..(305): n is a, c, g, or t
  misc_feature (444)..(444): n is a, c, g, or t
atccatatggggtaggtcactgagaatgacagacaaagggcatttcttccatttagaactgggatttaagattcttctagtagccttatcatctaatttttttaagacagcggagcagtcacaaaatacattcatgtataaagttgccttaagatctgaagcctccacgtccatctgaggagcctggcctttgtctcaagccccagaaggtcaactgaagtattgtgcaaataaggtaacaagaagcttcaatgccactcccagtatcagaaaaagaggtcagatggntactttggtaaatatgnatccaaagccttctatgcagttgaagaactttaaaaactgatgcgtcctgttttggaaaggatggatagagattttaaaggctccagccattgaaatttcaatatgcagtgtctaacgtaacaaaattaagcagagcanaaagtaggcaattacagccatctagcttcgtccaagttcatttattccaatgaaattctaatcattctcacggagacctgcagtcaggaaatacacagagctgcccgaaggcagc

SEQ ID NO: 574872 - DNA, 325 bp, Homo sapiens
atgcgagaaacctcaaagatatctaaaaaggccaatcttaagttcagcaatagtgatgttatctgcaggagtaattaaggaagttgtctatattatgacctccagagtaatggctggcagtccttttatgtcaacaccttagcagaattcaggctcctttcctcctcctagcctggtggtctctttttaactctacaaaggcagttgagttttggggaagggctatatgtaaaccataaactaaatgtctcccaaagtcagcttgtctcaagcccaggataattaatatcagcatgaaggttaaaggcaaagaagagggaggttg

SEQ ID NO: 574873 - DNA, 222 bp, Homo sapiens
ccaacctgcccagggcacccacacaagggcagattttttacaccttttgcaaaaaggaggtgacctggagggcacaataatgaatggatttgattgcagaatagggggcgaggttaaaaagaaaatggggtgagattgaagattccattcaaaaaacttagctgtacagagaaaacatcaaggctttggtgtgaatatcaaattcaaattttttcacagatt

SEQ ID NO: 574874 - DNA, 384 bp, Homo sapiens
caggagcaagtaatatgacctgagttttagtttcttcatgtgagaggtgatagtgaaagtactggcttcatagggtggttgggaggcttaggtaagctaatccatgtaaaatgcttagctcagtactattggttttagagaagctgttactcaagaatttgttaccagccaggcgcagtggctcatacctgtaatcccagcactttgggaggccaaggtgggtgaatcgcctgacgtcaggagtttgagactggcctgaccaacacagtaaaaccctgtctctactaaaaatacagctacccgggaggctgaggcaggaggttgcagtgagctgagatcacaccactgcactccagcctgggcaacagagcgagactctgtctc

SEQ ID NO: 574875 - DNA, 865 bp, Homo sapiens
gccgcttccggaagtgggtctcgtctcctcccaatcggatgcttttgtgcctgaagctgtccggtgtctgctacggcaccgtcggtgtgctgcatgaaatccctgcgtgggccaagggctgggctgtttgccgctatggcatggcaagtcagtgacactattcgaatgccatcgatgatggcgtgactagaggtttcatggggaagggtactcggagaaggctagtgaagaaggcagatagattgtggggtgtgatcgcgagaggaacggcagcatggcacgctgcatggagccgtagaaatcgtgagtctgacgcgaggaagagcatgagaggtcttcagaatccattgattggacatgatcccagtaaattcccttatgatgaccctacttacgataaactctcatggaagactttagactagagatcgatgaggaccaatttaatagcagattgttgttgcgtgtactcaatcttcaggccagactttagaattagtgcagaaggttccggactttcattttgaggaggatggatgaacagagaccgaacgtcgaggaacagatgtgtgtgtgacgtgtttagaaatgcggtgaacgggccagacggtgctgggaagagcacgttgctccattgcccagggtgagggtaccgggttcggcccatgggcacggccttgcttccctgagggatttgctgactgtgtcacctagatagcgcgtacttggggcgcctatggccagacattgcctttgtagaggctgaaagccgtccctggcaagagcactcgtgcctttgagtttgacaggcttttccggtaggcacagtggctagctggggtctgggattgggagttgggtccgg

SEQ ID NO: 574876 - DNA, 487 bp, Homo sapiens
taccccgggctgtaggaatactgcacgagacgcctttctgtgctctcgcctgtaggacctgtgcagaatattgcgccgtgccgaccgcgcacacgcgcccatatgtgaacctcaaggacgagctgtgtgttttccaactgtggagagcgtctgtgtctcaagctctgtagggtccggtgaagcccggggcacgcatcttcttctttgacgggaaggacgtgctgagagcaccccacactggccccacaagaacgtgtggcatggcttggaccccaacgggcgcacgctgaccgagagctactgtgagacatggcggacagaggcttcctctggcacagggcaaggcttcttgctgttggggggcaagctctctggggcacagagccgcgagctgtcataacaccttagtgctctggattgagaacaggcttatgacatggcttcaagtaaccaccgcctggatgcacataggccgagggccgcggct

SEQ ID NO: 574877 - DNA, 152 bp, Homo sapiens
cggtaccatcggcgcggtgcagtctagcatcccattgcagcacaagctctagcaagtagcatgcagtcccacaactcattcagggggggagaatcatcatcatccatgtggcctgggctccatcctaacaatccccatcaccacgcagcatg

SEQ ID NO: 574878 - DNA, 447 bp, Homo sapiens
  misc_feature (104)..(104): n is a, c, g, or t
  misc_feature (309)..(309): n is a, c, g, or t
  misc_feature (312)..(312): n is a, c, g, or t
  misc_feature (362)..(362): n is a, c, g, or t
  misc_feature (368)..(368): n is a, c, g, or t
  misc_feature (401)..(401): n is a, c, g, or t
  misc_feature (415)..(415): n is a, c, g, or t
  misc_feature (439)..(439): n is a, c, g, or t
ttcgggctggatttgctaggatgggcacacaccggatcagtagaatggagctccggatcccgttcccctgtctcccatctccgatttagtcctacagtcactgngtcaacatcataatgttctccatcccaactccagagctctgtgttatgtgctgctctcatttctccacagatctccacagctcctcactattctccctacatacatagagtcctggccccagtccatctctcagctctgcgcaacaatctcaaaaattaatctggatcatgttgctcctttcacaaaaccccgatggctccccgngtntagaggataaagtcaaagtgggtacacaaggccccacaatcccactctcnaagctnaggtgtctccaggctccccctgaccctgggccnggagagtccccagnacacagcttctgagtagattcagnttggctta

SEQ ID NO: 574879 - DNA, 136 bp, Homo sapiens
tactgcaggctgtcggacatacttctggtgggcacgtgcggaaacttgaggataaatcagtgagctgcatgcacttaaaggcatggcctgtctcctcacttgagtgcaatgtccactcgaccaaagccctgttctg

SEQ ID NO: 574880 - DNA, 267 bp, Homo sapiens
atgagcatagctgtcatgggcgtgcgtcctccaaaccgagtggcagcttcagttgctccctcaaatgggcgacgtgcgcgtacacacccggcttgtcatagcgccagtgagccagccggcgaccattgctgctggcttcctgcttgcgggcctccagcgtctggcaggcgtgcccataccgagcttcccggaacgccattattaggctcgctttcagttctacaacgcggtcggtattgcgggacaacgacagcaggaaaaacgctt

SEQ ID NO: 574881 - DNA, 976 bp, Homo sapiens
tgtctcttcgtgccctgtcgttctgtccgacgcggacccccatctctgtgacttgctggagactcacttcctaatatgaggaagtgaagtcttatcaggaagatggatgaccacctgactcgagcgctccagcgaaggctgagtctgtgcccggagtggcgtgaggtctggggccgatgtagtcttcattcgaggaggactcatactactcaaggccacagacgtaagagtgccttctgaggtccgcggacgactttctgaagggggccccttggctgatagctacataagggcttctctgtggctaaaggccctctgcccgtccagtgcaaatcaagggtcgagctttatgcgtataagctagttctcgtgacaccatagctcctttgggaaccccaatatcgggacatagttacaccaggcatctcttgtcgagtcgttaaagaaacatattatagagagaggccaaacattccactcattgataactttctcctatcggcgaccgcacgcctgagatgcgcgctcttaacaacaaggttggtctatctgatgaaacgccctttgttttttgggagcgcttggcgggggggacttccccaggaagggcgcaatgaaatttggaaccaaagctgacgtggaaagacccccttgagctaatttgcacaagggagtgcgccctttggccgagacgtcgaacgttcattatagaaagttcgagccgaagggttgccttggtacactgggggggaaccaaaccacatgggcgcggggagaggtgccaactccaggtcagggctttgtggctccagatcgaagatctgctcggacaggatgccatcaaatcccaagggagagattcacgttggcacagaggggatcctctggcacgaacgacgatagtgggagggctcgaaaattgttagagctgcgagcacactatcccacaggtggaacgcaccccgcggtcgaggtg

SEQ ID NO: 574882 - DNA, 462 bp, Homo sapiens
gatccgtgtgtgtggctcagtactggggtggggattgtactagggtggtcgagagtgccgggccgatgatttataagcggccgaccggggatataggtgtacttggtggtcatccggaggccgtgctatacagggtggcaggagcagagagcagagacactacctgggacacaacgatgacatcaaatgcttggccatccacccagatatggtcaccatcgccacgggacaggtgtgcgggaaccactaaggaatgggaatgccgatgccgccccacgtgcgcatctgggactcagtttccctctccaccttacacgtgctgggcatgggggtgtttgacagagccgtgtgctgtgtgggcttctccaaatctaatggaggcaacctgctgtgtgcagtggatgaatccaatgatcacatgctctcggtgtgggactgggccaaggagaccaaggtggtgga

SEQ ID NO: 574883 - DNA, 1485 bp, Homo sapiens
  misc_feature (253)..(253): n is a, c, g, or t
gccgtaaccaacgataacgggggcgacggagaaacctcggagtcgtcgcagggcggcgggcgaaggcccagggccttggagatggagaatctctcagttgtgtaagcgtgtctcatcggctggccttcaattgatgctagacagagtgagttcgggccgtgcgactggccaacatgttgagtgacattgggggacgtcgtggactggactgcgttggtcggtggtggtgaactgccgccgcgaattctaatgnatgcattccacgatagcatatcgggcgtttcaggtgcacccttaatctcgcgaactgtgtggcacggcaggcgggagcagccgcgccgcgactgggcccctgcgccgtcggacctcctattggactcagatgcgtaccgtgggcgacagaatcattgttaggggaagtcttggacatgtcggtgagcggggtaagtgaacccgagagaagggaattccggtgctggctcggcttcactggggtaggttctcaagagggaacgagatgaggtttcagaaggagatggctccttatctcgatacgagagagaagcccatttgagaagatgggaaggaggggtagagtctaggagggtggcgaacccttagcagtcaagcaaagcgcatgtcccttcggacaacatatggggcatacccggatggagtacacaacggggcacacgcggcactgcactgggcccagacccacaacgccaaggtcccagggtcccacagaaacgcccgctggcgcatgtctagcgcttgcatccgacggctacctattacgccaaggacattcagacggaaccagcgctgtggcaaacaatcaacaacgggggccgagacgcgggggaactcagaaggattacccacttcgcggaacatccacgggggcaccagtcaggggattgggcaggggggggcacacgacaccacggcaagattgcgccgacagggaacggactaatcgaacatcccggacggcgaggcatgagacggcctaacatcccacgaggccagcaccggagcggaaaccgaagagcgaaaccgtacggaacccatggagacacagccgaaaaacccgtacggagccatagaccaaggagcagaaaacgcaaggctacacaccaacaacggcggcgaacccccacgacagacaaaaacgcagcacgaacccagcccagcaccgaacacgtccctgcacccccaacgatgaaaaggaacccagacaaggctccgccgaccccaacatcaacagcccacaccccaacaagagaagaaacgcgcagcccagccaggcaacaagcccggagagaagaaaagaaacagccaaaaaggagaagaacggaacgcatacccaccgcggcagagaggacacacacaagcggcaaccacaacagcaaacagaccgcccacgacgagcgaaatccaaaagcagcacacaccagcccggcccgcccccactcagcaccg

SEQ ID NO: 574884 - DNA, 774 bp, Homo sapiens
  misc_feature (13)..(13): n is a, c, g, or t
  misc_feature (63)..(63): n is a, c, g, or t
  misc_feature (80)..(80): n is a, c, g, or t
  misc_feature (106)..(106): n is a, c, g, or t
  misc_feature (108)..(108): n is a, c, g, or t
  misc_feature (115)..(115): n is a, c, g, or t
  misc_feature (122)..(122): n is a, c, g, or t
  misc_feature (125)..(125): n is a, c, g, or t
  misc_feature (129)..(129): n is a, c, g, or t
  misc_feature (136)..(138): n is a, c, g, or t
  misc_feature (142)..(142): n is a, c, g, or t
  misc_feature (145)..(145): n is a, c, g, or t
  misc_feature (150)..(150): n is a, c, g, or t
  misc_feature (157)..(157): n is a, c, g, or t
  misc_feature (160)..(160): n is a, c, g, or t
  misc_feature (163)..(163): n is a, c, g, or t
  misc_feature (165)..(165): n is a, c, g, or t
  misc_feature (174)..(175): n is a, c, g, or t
  misc_feature (183)..(184): n is a, c, g, or t
  misc_feature (189)..(189): n is a, c, g, or t
  misc_feature (214)..(214): n is a, c, g, or t
  misc_feature (217)..(217): n is a, c, g, or t
  misc_feature (229)..(229): n is a, c, g, or t
  misc_feature (242)..(242): n is a, c, g, or t
  misc_feature (248)..(248): n is a, c, g, or t
  misc_feature (275)..(275): n is a, c, g, or t
  misc_feature (302)..(302): n is a, c, g, or t
  misc_feature (327)..(327): n is a, c, g, or t
  misc_feature (335)..(335): n is a, c, g, or t
  misc_feature (340)..(340): n is a, c, g, or t
  misc_feature (342)..(342): n is a, c, g, or t
  misc_feature (344)..(345): n is a, c, g, or t
  misc_feature (355)..(355): n is a, c, g, or t
  misc_feature (376)..(376): n is a, c, g, or t
  misc_feature (380)..(380): n is a, c, g, or t
  misc_feature (396)..(396): n is a, c, g, or t
  misc_feature (413)..(413): n is a, c, g, or t
  misc_feature (417)..(417): n is a, c, g, or t
  misc_feature (419)..(420): n is a, c, g, or t
  misc_feature (444)..(444): n is a, c, g, or t
  misc_feature (553)..(553): n is a, c, g, or t
  misc_feature (627)..(627): n is a, c, g, or t
  misc_feature (634)..(634): n is a, c, g, or t
  misc_feature (651)..(651): n is a, c, g, or t
  misc_feature (655)..(655): n is a, c, g, or t
  misc_feature (773)..(773): n is a, c, g, or t
ctgttaagatacngacagccagtatcatcctgagcactgaggtatgctttccatggccgaganccagccctactcattgngatggtctggatgttcactacttgangngccatcnggggggngtnaggntggaatnnncccngcnaaggnaacactngcngangngcaactttnnggctaagnnaagtnttctcaaaataatcagcagtaagcnggngattggggactngcatgaggggtcnagaatnagggagttcttgtaccctctccttgtnctcttcaggaatcaagggtcctgatgnggcaaaggatgaagttttaggaagntctgggtnaaaangntnngccccctggnatttagagatagtagcccagnaggntttgccataaactggnaccagtgtgttgaagtntgangnncagctattcacaggtctttctgcnggatcctccaaaagtccaagagtagggtcagatttagggctacacagaatccgcttaacttcatcaatgccaactaagaggaggcgataatagaagagacctcggtccngtacagccatatctttttcttcctctatgcagtaatacaacaaacgtcctagcatgtcctggcactcagcaggnggggggnggaaaaggcgccgaaanagtngagcagctccatcttaacagctggaaatgtttccgacttcacattctcaacaaagtcctctaacacataaggagcattaggaattctttcccatggacaccaagtagcaaataagtgnt

SEQ ID NO: 574885 - DNA, 98 bp, Homo sapiens
gtccactcaggtccattcactttcaagtttaacaagtctcacttcccatcagtgatttctcagcaaaggaaagccatgctgattctgtgttcattcac

SEQ ID NO: 574886 - DNA, 114 bp, Homo sapiens
ctcgtcgatggatacagaaatcgtcacactaagagcatgcacacaccagggatgagaagagctatcatctgtcatctgtcgtgtccggcggtgaggttccgtgttgagtcaaat

SEQ ID NO: 574887 - DNA, 296 bp, Homo sapiens
ggggcccccttttttgggggggggggggttttttttttttccctggttttctaaaaaccccttccttttagggggggtgttggttccatttttcaaacccgctcccttaggcaaaggggttgttcaaagggttccatggggcccccccttggtttgttttggcaactgccccccccccggcctgcccccgggctggttccgcattaaggggttttccttttcaaggatggccggggcccccccccaaagcgggcctgtcccccccccccctggggattaattgggaggtggggcca

SEQ ID NO: 574888 - DNA, 724 bp, Homo sapiens
  misc_feature (24)..(24): n is a, c, g, or t
  misc_feature (286)..(286): n is a, c, g, or t
ggacgcgtgggtcgacccacgcgntcgcttcccggccaccttctgtcagaatcaatgtaccattgagctcacactcgccaacaaagtgttatgcaggcacagactttcactcatgtgggagcaactagcttgtgaatgaaagtagccagggtcgatacagaccgctccatcgatagctctttaacgaatggattgcgccagaatcgcatgggcttcaagggtgtgcgccatgaagtcttggcacgtgccgtgtgaccctgatgcgaggcccccgtggctccagttntagctggttgggccatcggtcgataagcagtagttgtgctgtctgttcgggcctccttcgagcatccgacttgttgacgggcgttgggctcatgccgtaggtatcggaccccagtgggcgctgggacctagccgtatgattccaacaagaaccattgcttacacccccgggtgcagcgctttgtgctgtggcatggcttcctagcgcgcgtcgttacccttagggacttcgctatggccttgcccttgggttgggtccgggctggaacatcccggggacccaccatcgcggccttcgtaaccggcccaaaaatggacgccgccaacccccaagcgagacgacccatagcccacatactccatgtctcttggggaaacggaacatgaggggatgcgagaaaattcccccgccccaacgttaaccgaacgtcgaaccacc

SEQ ID NO: 574889 - DNA, 102 bp, Homo sapiens
  misc_feature (21)..(21): n is a, c, g, or t
  misc_feature (82)..(82): n is a, c, g, or t
  misc_feature (91)..(91): n is a, c, g, or t
atccgcgtgatgagcatgtanctcaatggtgccgtccagcacaaggttgaggagtgggtcgaagcccttcaaggattccacntggcttcgncggccctccct

SEQ ID NO: 574890 - DNA, 362 bp, Homo sapiens
cacttaccctaagctagaactataattacccccactcccataaatcttctgctatgtctgttgacatggagtgtctgctcatatctctataccatctccaaattcaaaggaggctaacatgattagcccaagtgaaatgtggggaaggtgaacgagcaggagccatgcatgagtttccttgggtcacatctttctcctcagggaggtggcgccagcgtctcatggctcaggttccaagatgttagcgattcacttggcctaggcagctggcaggtgaccaggcaaaggtcagcaccaatggtcccaaagagccggttgccacccacttacctagtgcccacaccaagtgattgttccccgct

SEQ ID NO: 574891 - DNA, 264 bp, Homo sapiens
  misc_feature (87)..(87): n is a, c, g, or t
  misc_feature (119)..(119): n is a, c, g, or t
gaattcgtgagaccgggcatgtgatttgagctgggcatgattgatttgagctgggcatgtgatttgagctgggcatgtctgatttgngctgggcatctgattgatttgagctgggcatntgatttgagctgggcatgattgatttgagctgggcatgattgatttgagctgggcatgtgatttgagctgggcatgattgatttgagctgggcatgtgatttgagctgggcgtctaatttgggctgggcgtctgatttgggctgg

SEQ ID NO: 574892 - DNA, 1110 bp, Homo sapiens
  misc_feature (27)..(27): n is a, c, g, or t
  misc_feature (54)..(54): n is a, c, g, or t
  misc_feature (147)..(147): n is a, c, g, or t
  misc_feature (153)..(153): n is a, c, g, or t
aaatacatctctaggttaaaggagttnggatcataatacaagagaagcacaggncaaagacactgcataacctcaagaactaagaatggaaggactggccaggcctggtggtgcacacctgtaatcccagctactcaggaggctgangcgagngaatcgcttgagcctggggggcagaggttgcagtgagctgagagaacggcgggcggcagagcgagactccatctcaaaaaaaaaaagggataagggaaggacttaagcaaaatcttcctgtgtaagtagaaggatgttttggacaagaaaagttggcaatgggaaaaatgggtcctcatggtccacggagttttgtagaataaggcatcggggtgggggatgggattcagatcaaaacatggctttaatggtcggggtcttaaatacgggggggagtataccctgggtggccccagggatcgaacgacttgaccttggacccatggtatttttaagagattactcacagataacaaaaaggtatttgcatcatggattagttggggaaaacagggttaatttcacatagggtaaaacgtgcagtcctatgtaatcggtcaagaagggtaatcttaaattataggctgggggggtggcttaaactgggaagcgggccaagtggagggcacgaatcctcctgattcaacctttctaccttataactttcctggacctgtgagctggcaagcttaaactccagggggattaacagggtcaaccggggcgttccaaagctgccagcacctgacacgacaaaacagggcgagggcatcccaaggcgcggacgaggggtccaagaacacccgggggcccccgaaaataaataaaatccccactataccggtggcccaggagcaatggttggaccccttgtgaagggcccccgtacggggaaacacacccgggagtactaggtggagagccctcaaattaaagaaaccgcgccacgctgccaagagggatcacggtggtgcaccaaaccctggggggccgcaaaagactacgttagcattgcaccagcgtttacgaccgcgcaccggggagaccaccacctccaataacaaaaaaacgacggcg

SEQ ID NO: 574893 - DNA, 591 bp, Homo sapiens
ggtgacattgcaccgcgcccctcgtggggtcgcgtagcatgccatgcggactccccagctggcgcgctactaccatgtggctgtgctggtcagggccccagacccgcttcccacctgaccagccatgggggctgcggctgtttaatcgcgctagcactttcgtctgcgttcggcccggccttcgcgcttttcttgcatcactgtggctggggacccgcttcgcgttatcatcctggtcgcaggggcatttctctgcgcaggtctccctgctcctggcctctgtggtctggttcatcttggtccatgtgaccgaccggtcagatgcccggctccagtacggcctcctgattttgaggtgctgcatgtctctggtccttctacaggaggtagtaccgctttgcctactaacaagctgcttaagcaaggcagcatgacgggttagcatcgctgcagtgaggacggaagatcacccatctccatccgccagatggcctatgctttctggctctctccttcggttatcatcagctggtgtcttctctgcttatcaatattttgggctgatagcacttgggccaggtgatggattgg

SEQ ID NO: 574894 - DNA, 114 bp, Homo sapiens
atctcagctcggcaccctgctgatcatcagtggagtgaatgctttttcattcaaaccatacacttgcccaaaaattccaaacaaagacggcttcggcaaagccgcaatcaaggt

SEQ ID NO: 574895 - DNA, 1282 bp, Homo sapiens
cttttatgtgtctctgctgtttttgtgttgtggccgtgtgttgtctctctccgtgtctcctcggtgtctatcgatgttgtggctccgttgtctggttttggtgtccttcttgttcccctgtttgtggtcccttgtcctttgtcttcgctgtgattggtctcttgcttttgtttgttgattctgtgtccttggctcgtgttggtccctgtattctccttttgtgttggtggtgtcgggtcccctgtttggggtgagccttttttctagtggctactgttttgtgtattggatgcctctgggatatcgttctctgatcgtctgttctgtgccccttattagttcatattggttacttgttcttctcgcttggcgatcctatggtacattataccaccggtctttcgatgtatctttgtatcgactgggttatcctctgtcgacctacatgtgtgttttcgactgtcttggcccttgcaatgtgtgtcagtatatgtgttttatcttggttccttgtcgagtcgtttgtcgctctgtgcgtctatcctatgcatagagtcactttgatcttatatcgggtggtccctcatgttccatgcctatatcgtttcaacacgttaccatgtccccgctgaatcattcctctagtgttccttggacaattctgtttctgtcgctcgttttattgtgtgagtatgcaggtactccttcggtcacgcttgtgctgtttatgcctggtgcggagtgctgtttatgtctactcctacgaggcgagtccatggttcctccatgtggaagtcatgatgccttgtgatgctggtctattcagtctgtggttgctgggccttgtgtgtgttttgcaattgttgtcaccttggatgcttgggcatctaatccattccaatgccgccgcatcgcttgtttccacctcctgggctcggggctctggctcccctaacgtgtctaggtagagctttctcccttagtatcgtcactgtgggccgggtgctcctggagggcatgctctgtgttaataagattgtataggtttgccctcctctacctgttgccggcatgcgggtagctatgagccacctcccctcctatctgttccctagcactcggagaagggggtgctcaggtgtaggtgtggggtatgcatcctgagctcactgcttcgcgcctgctgctctgccccaactgcgtatccgcttcccggctgccctagagtggcatggatgcctgcctggtccctcgtagcatagcctgggtacatcgagttaca

SEQ ID NO: 574896 - DNA, 123 bp, Homo sapiens
tctcccccatcctcccacaaaagcaagcaagatacacaaagtaccctgtcacaggctcataccttcagagcaagtgatgctgaaggttgagcaaggtttgttaagtgaggagagaatgggggt

SEQ ID NO: 574897 - DNA, 659 bp, Homo sapiens
ctgctagagaatggggtcgcacgtatggttcgacccaggcatggtccttgaacttccatgggactacaaagtcgactcagctctcatgccgctataggccttccccaacgttgcgtgggaattacaggtcgtgagttcatcatgcacctctggccgtcagacacgggtttttattggagtaaaataagcacaaccggctgcggtgaattaattttttgtaaccaaccttgttatttatgagtgtggtgcgcatcattcccgagctggactcgtgctgatacctcactacacagaccctgaggcactctttcccattcagcacgacgtcgcgaaacaaccatcctcaggcctgttaagacctctagaacctagggcctgggttaggagtgcgctaacgctcatggaagtcccagcactttgggagtgctgaggcaggtgaatcacctgatggtcaggagttcaagaccagtcccggccaacatggcgcaactcacatctctactaaaaatacaaaaatgatccgggcgtggtggtgggcgcctgtaatcccagctacttgggaggctgagacactagaatcacttgaacccgggaggtggaggttgcagtgagctgagatcgtgtcatgcaccccagtacatcctgctgtcaaacaacac

SEQ ID NO: 574898 - DNA, 448 bp, Homo sapiens
  misc_feature (135)..(135): n is a, c, g, or t
  misc_feature (231)..(232): n is a, c, g, or t
  misc_feature (263)..(263): n is a, c, g, or t
ccaaagaaaatgaagcatgaacttgtggaggattctccaactccggccaacgttgcagctcttcacccaattcctcagcctctgcagtgctggcaagtgggggcagatggctgtttccgtgggggccgtcctccngacgtgggacctgtgcggcacccctgggcctcacccaccagaatgccaggagcatcccaccccttgtgacaaccaaaagatgcctgcagtcactgnntgagtgtcccctgggggggaccactgccacnagacccagggcagcagagggcttatgacattgatgtggcttcaccaggcagcacagaaacagccaccacatttggtagaacacgagtgagtcgcgccgtccaacaagattgccagaattaaatcactggtttagattaaaaaaaaatttgtaaaactccaattaaatatacaaagacaagaaaaa

SEQ ID NO: 574899 - DNA, 160 bp, Homo sapiens
aggctttgtacttaaagtgtaaaaagacgtgtacgtccgattcggatcggcgcgtccccgaagagggacggggacgagcgacgggtcgcgcgagtcggtaccaccgaccgtctgaacacgacagagttacacgcggctgcggagcaggcggacatggccg

SEQ ID NO: 574900 - DNA, 674 bp, Homo sapiens
ccataatctaggatgagcagatgtggaggccgcttactgtaaatgcccagggacatcaacagcccctactacccaggccactacccacccaacattgactgcacatggaacattgaggtgcccaacaaccagcatgtgaagtgtgctgcttcaagattcttctacctgctcggagcccgggctgtgcctgcgggcacctgccccaatggactacgtggagatcaattggggagaaatactgctggagatgagtgtcccagttctgtcgtcaccatgcaacatgcaacaatgatcacatgttctgcttccactcatgatcatgtcctacacctgacacctggcttcttagactgaataccatctcctactgactccagttgacccaatgccctgtgtggcatgttcactgttgcctgcactggtggctggttgtatcctgtgaatgggagcttgcgcttgtgatagtgcttgggcctgacttgcacctgaccacatgctgattgagctcaaacttggcaatgtttgcacgaacgctcagtgccaaccaggttacaactgttgcacaggaaacaaggtatcttgcaaagacccctcattcttggtgtccttgcgaccaagttgttgaacaggacaaggctgtgaggaccaaccaagctgaaacgatgacaggtgga

SEQ ID NO: 574901 - DNA, 596 bp, Homo sapiens
  misc_feature (67)..(67): n is a, c, g, or t
  misc_feature (545)..(545): n is a, c, g, or t
  misc_feature (576)..(576): n is a, c, g, or t
  misc_feature (590)..(590): n is a, c, g, or t
  misc_feature (596)..(596): n is a, c, g, or t
atgcatgcattaaattcaaagtctgactgtcaaatcatttcactttaataaaaatttgaattacctncttagggcattattaaatatcaaataaaaagtacacacacataagtctgattcccaatataatttttatatagaactctgaccagatttgtattacacatttcaagataaaagtattcataaaaaaatgaaataagaattagtcaccttagaattcctgtaccattcttaggaatttgggagcaaattatcccctttaagtaatctcagccaccaaagtaagaacacaaatatatcttccttttagaaatagtacctaaattgtaattaactcaaaactttgaaaaactacacattattcatctatcatataaagaatatggaagtatgtgaaatatacaaaatctcataaacaacatttctctgtgtgtgtgtgtgcgcgtgtgtgtgtaaaagagagagataaaataataatagtcatttagatatttagagaatggcaactctgggtctaggacaagatacaaaccaaacattcnaggggataatctcccttcattaaaagtatcntttacagggattgncattcn

SEQ ID NO: 574902 - DNA, 327 bp, Homo sapiens
tcgacaagcactgtggaaaaaacagtttagcattgtcctcaaaaagttaaaacaggccaggcgctgtggctcacgcttgtaattccagcactttgggaggccaagccaggtggatcacttgaggtcaggagtttgagaccagcctagccaacatggtgaaacctaaaaatacaaaaaattagccgggcatggtggcagacacctgtaatcccagctactcaggagactgaggcaggaaaattgcttgaacctgggaggcggaggttgcagtgagctgagatcgcaccgctgcactccagcctgagtgacagagtgagactctgtgtg

SEQ ID NO: 574903 - DNA, 356 bp, Homo sapiens
  misc_feature (38)..(38): n is a, c, g, or t
  misc_feature (342)..(342): n is a, c, g, or t
tcggtaccaagcttttaccgcacatgccactgcttggntttcaaccatcctctagcacattctgaggatcattaggagcatattagaacatgaccattttatcttcactttaccttaaaaatatttccataaggacagtcatttatttgcatgagttggttttaacataaaccctaggggcagtcagctgacctgttaagtccacttgggatgaataccctctccagaggtgggttacacagcagtctgaactgcaaatcaaaagcccactctccaactacctttatctgtaccagccaagttaaagaattcagataagaggatgaataatatttttttttnggcggtaaaagctt

SEQ ID NO: 574904 - DNA, 136 bp, Homo sapiens
  misc_feature (33)..(33): n is a, c, g, or t
tcggcccaattgttgtggtacagtgaatcaggnatttgaacacaccaagtatctataaacctagccatggcgatccccttatgagcgggcgcaatgattataggctttcgctcttagattcaagaagtgccctaga

SEQ ID NO: 574905 - DNA, 115 bp, Homo sapiens
cagttatttttgcagaggaaaaggcggtggcagatacaagagatcaagccgatgggagcagagcatctgtggattcctggcagctctgagtgaacaaggtgggtcagaacataag

SEQ ID NO: 574906 - DNA, 147 bp, Homo sapiens
ttaccggagcttatagaggcaccaaggagggagcactctcatactgcaaggagtgacagtgcctagggctctgatgtgtctctcacagcttgtaaaagtgtgagacagctgccttgtgtgggactgagaggcaagagttgttccctg

SEQ ID NO: 574907 - DNA, 165 bp, Homo sapiens
acggtggaggcacttgcttgccttgccggggcccggtgttggtggcctcgctcggccgtgcggcggacgaagccgtgcttgcagagcccccagtgggctgatgcgggcggcgggctcatactccagcattgcgcagcaccagttctttacctctgtccgagggta

SEQ ID NO: 574908 - DNA, 435 bp, Homo sapiens
agaagcaagggcctttgagataaccagcagtaggaaaccagatgggttggaacagccttcccgtcaaaaacagctaaaaaagctggacaatataagaaaatatgtgtttgaaggcatagaagactaaagaagtgaggaattgtgggggtaaggtcaggagaggaaggaaatctagaaatgatcccagctttgggggccacttttccttcctagatgagtttacctgttctgacaacagagaggctaggaagctgaggagagctttctacaaactcacagggcagaggggacaaaatttagaatcctgccaaagaggaggcaccctggcaaacatctcagggtctgtgctgggacccagaagtaagagtgaactagaccttcaactgatttctacaatttcttatgttttgctcatgatcaaaaaagccaagtgta

SEQ ID NO: 574909 - DNA, 769 bp, Homo sapiens
  misc_feature (46)..(46): n is a, c, g, or t
gctcagcattggggacgctctcagctctcggcgcacggccaggttntcttgtagcgtagaaagttcggatacactctacccggagagtttgcccgcttggttgaacaaattggcctcaggaatggctgtccttcgaaaatgtctactgttcacgaagatcctggtgcaagctcagcttggagggtgatcactctatcaacccccaagtgcatatgggtctgtcaacagccgtatactaacttggatgctgagcgggatgctttgagacattgaaacggccatcaagaccaaaggtgtggcctgaggtcaccatggtcaacatttgggaccaagcgtagtaatggcacagaagacagggatatggccttgcgctaccaagagaaggactcacatacaaggaagcttgcatcagacactgaaagtcagccttgatcgtggcagccgtggagacggtgatcttgggcctagtggaacgacatgctgctcaagtatgacgctgtctgagctaaaagcttccatgaacggggctgggaagcgagaggagtctctgcatgtgaggataatctgtcgagaataagcaggagttggaggaaatttaggagaagtctacacaggaaatgtacaagaatgatctgggaaggacattatttcggaagatttggtgaatatccgcaagctggtggttgccgggaagggtagaagagaaggatgtcatggatggaattgaatggtggcccgatggcgggatctataagttgggtggaacacg

SEQ ID NO: 574910 - DNA, 286 bp, Homo sapiens
cggggggggggttttttttcccggggtttttttttttccccccagtttggttgggggcccccccccccgttttttttcccccctttggggggcgggggccgttttccccctcgggttttttttttgggcggggggggggtttcttttttttccggggggccgttttttccctttgggccttttttgggcccctttggccccgggttttttctttgggggggggggggccgggtggggtttttgggggtttttttggcccccggggttggtgtaaaaaaaagggtta

SEQ ID NO: 574911 - DNA, 429 bp, Homo sapiens
tatcagtgtgacctacgaataacacactggccgtcgttgaacatggagacttcactgcagatatctgtagaattccagcgagacctgattactctacttttgggatttgctatttcctcttttacatctgggaagattccatccagacccccagctgcagaggtgccctctctgactgagaacatgagaaatttctcactcttttaagcaaatcttactactgtggtcttaccaccatgttcttttttgcattcggtgaaaatgaaagccctttttatttatattttctattccttgagagtctgagtagatgtcattaatcatggacttgtatatttaaaatagattttaatacttggctgagcatacttttcatgtgtttggagagctatttggtattctttagttctttatttttgccctggtgtt

SEQ ID NO: 574912 - DNA, 294 bp, Homo sapiens
ggaccgtgacatcggcgttggggtctcggcgtgtgccgtgaagatcggcgatttcggcctcgtgaagatcggcgactttggtctggacgtgaagatcggcgataatgcattgacttcaagaagtgtatggatcctcggcgtgtgcagtatggattttcggcgtgtgcacgtgaagatcggcgattttggtttcgtgaagatcggcgattacggtctggttactcggcgtgtgcaacacgccgaagatccataccgtagtcgatcggcgactttggtctgggcactcggcgtgtg

SEQ ID NO: 574913 - DNA, 356 bp, Homo sapiens
atttcaacattccatcaaaggacattgaccgtgtaccatcacaagtcagaagaggcagatgtggcgcattttttatgttaagtctacttatttcaggtagggaccaatacaaatgaagccctcccctgcgccagaaataagtagtaacagtctgggaaaagccctttcaaatttcacaaaaagcataaataagttattattcctatttaatgtagtaagtagggtaaagatcatgggactctcattcttgactgggctttattaaccagtaatctgggccctacaaagcgtgttttgcgtgatgtggaattcgcgcctgattttaaatggtgggttttcctgtgatttatacacat

SEQ ID NO: 574914 - DNA, 393 bp, Homo sapiens
  misc_feature (98)..(98): n is a, c, g, or t
gtgaatttttcttcacaccacaccagctcgtatctcctccttggaacactcttgttgttccctttgtgttttgtgcggagttcacgggtgccttcagnagggtgttgtgtgggagggccgcagtgctctgttagaagcagtatttctcacctttacaccggcttcatttctcttgtggttttacccttctgtttctttcctgtgctcagtccgtttttcttgttctatgaccatttctggttttaattttaaaattttggttcacgttattcttaatttattttcatgtatttattttgcatgcttgggcgtaattgaattcagggccttggggctcaatcttctttcccgtagttgaatccccaggctggaaagctgctggaaagctgctgg

SEQ ID NO: 574915 - DNA, 136 bp, Homo sapiens
gaatgggtggccaggtggctcctggaaacgctcacccagacacagctgccctgagctctgggcccttggtatctgtccctggggatattaatattgaataactttttactatcaatacacagagaaatagccacta

SEQ ID NO: 574916 - DNA, 500 bp, Homo sapiens
  misc_feature (177)..(177): n is a, c, g, or t
  misc_feature (426)..(426): n is a, c, g, or t
  misc_feature (468)..(468): n is a, c, g, or t
  misc_feature (481)..(481): n is a, c, g, or t
  misc_feature (497)..(498): n is a, c, g, or t
ccaaaaaagcaaggagttaggacccccagtcctgccccccaggaggacaagcagggtcccctcaatcaaggcaatgggatgggcggctgaggaacggggcaggcaaggtcactgctcagtcacgtccacgggggacgaaccgtgggttttgctgagtaggtggagctcattgctttntccaagcttggaactgttttgaaaaataacccaaagggaaagggagagccccctgggacttgtcccccctgcctcctctgttttgaaattccatcccccccaggttaggggaaagcccctttttccctttccttttcacttttgcatgtttttactgatcattcgaaaagctaaccgttttcagccctgagccttggaaaggagggctgtaaccccttcagtcagtttctggggatgaaacttttaaangctttggaaattttttccaattagatctcttttcaaaagggnttataagaacaanaaaaatcttttacttnnga

SEQ ID NO: 574917 - DNA, 386 bp, Homo sapiens
tgtgctttgatgtgcagacacgagaccctcccagccaggcggagccccgttagtgccctgagtgccctcagaccccacatgccctgtgcttgcactcccagtgctgcagaccctgatgcggcatgtctggcgtcatgatgagcttggatgaatcacagtgtgcgtcagcattgcttgttctgaccttggagtcagcctcacaatgccttcaacctgcttccttgcatgcctcgagccctggggcactaagccctatgcacagacagggcagagtcttgaggctgatgtgctcctggtcccactgtcctgccacgacaggcctgtggatcatccaacacacactcacgtgtcttgcatgctgccttgtcttcgtgtcttgcctcaac

SEQ ID NO: 574918 - DNA, 846 bp, Homo sapiens
aggaaacggaggtcgcatctgagtcaagatcatgccactgcactccagcttgggcatcacagtgagagctctgtcaaaagaaacaataaaaatgaacatgcttaaagaggtaatttagtccatcattcttatgcctgcatatattgaaataaacttggaccgcatctggttcttccagcgtaatgctgtagagatttcaagatgtgcgatggtacaatgccctatggatcatgctaggtgcccgtcgctctgaagctagcgggtatagcaatgggcatggcagaagagaccaatcagtatcccaagctcagccactggtaagagaggagtcacatcatatagacttgtgtttacgacgttttgggtgagccacgcaccaagttgtctggaatcgcactatctggtggttaaaacatatcgtaatagacggaatccctgagtgctgaggcagtactactcaaaatcacgatttatgaatccctgataatgagaaagatctaactgacacacaatagtcgtgtcgagtcgcagagtccacacatacagtgtgtattaatctatgagaggagtggttggatgtgccaggttgggggtaaagtggtgactgcattctgagaaacggaggctgtgaggctgaactcttgtgtggctgccgttctgtatacttccaggaggtgagtcttcaagtacaggccccgtgctcgtagagagagtacggtaggcacctatgtcggaagtgcgtggggcttgctgcttgctgctgtgtgagatcggctttaatcaggattttcccctcccgggaggctggggatgccgactccagcctgtggcgggaccgatgcgggc

SEQ ID NO: 574919 - DNA, 179 bp, Homo sapiens
  misc_feature (42)..(42): n is a, c, g, or t
  misc_feature (75)..(75): n is a, c, g, or t
  misc_feature (89)..(89): n is a, c, g, or t
cggcggtggacgaaatattccccgagggcgccgggccctacntggacctggacgaggcgggaggcagcaccgggntcttaatggacttngcagccaataaaaaggccgttaatgcagacttttttaacgattttaaagatctttttaatgatgatgacatccagtaaaatgccctctgg

SEQ ID NO: 574920 - DNA, 275 bp, Homo sapiens
gaatagaggaagaaaagaatgcgtttgctgaaccatggagatatatgagtgtctatgatgactccccagagatgtatgagacaatctctcaagaatttcttacaccgggaaaactggaaattaagtccgtagaattattgaaactacatatggaagaagaaaaacgacgatcataggaggaacggaagcataagctagaaatggagaaacacgaatgtgaacatctgagacaggaaatgggagaggaagaggaacacaatgatacctttggattg

SEQ ID NO: 574921 - DNA, 391 bp, Homo sapiens
  misc_feature (50)..(50): n is a, c, g, or t
atcaagtctgcagagaccaggacttttgacaccagaaacatatttttttnttgagacggagtttcgctcgttgcccaggctggaatccaatgtcgcaatcctgcaacctccgcctcccgggctccagcgactcccccgcctcagccctcccagtagctgggattagaagcacgtgccaccaggcatgggtaattttgggttgttttaatcaacttggtttcaaacagctttagattggcagaaaaactatgaatatagcaagagttcccccactttctcctttttttatttattttatttaattttttggagacggagtctctgtcgtccaggcgggagtgcgggggcgcaatctcggctcacggcaagctccgcctccggggttctcggc

SEQ ID NO: 574922 - DNA, 357 bp, Homo sapiens
acctcctaccccacgctatttgccaatgtgtagctacagtctcaattctgacaatacaaggtgtggatatagggctatatatctcatctcgattttcaaaagtagccaaaggcagttcttcagagcttagcgttgcctggctgacgctgaagattatgtaccttcatagcgagacccatgttgccagcgattttcaattcgccttgacagaaggccgactgagctttcattttaccagtcattaaagccacgaagtctgagtcagccattgtgattgggcagacagccttcttatctgagttaggaggcactgatcctttgccattcttcacatccaccacccaggcggtctcttta

SEQ ID NO: 574923 - DNA, 101 bp, Homo sapiens
tgagctggtaccatagcgaagacacggggggtggggctctcctctcccaccctacggggcctcagcaagggtgcccagggcaggagtgggggtgactccct

SEQ ID NO: 574924 - DNA, 218 bp, Homo sapiens
catgtgagtgaagagtgagacccttctcaaaaaaaagagaaagctgtaatccagcactctgggagtgctgaggtgggctggatcatgaggttaggagattgagaccatcctggccaacatggtgaaatcctgtctctactaaaaacacaaaaaatttgccaggtgaggtggctgggctgcctgtagtcccagttactcagcagtgctgcaaacagggt

SEQ ID NO: 574925 - DNA, 797 bp, Homo sapiens
  misc_feature (53)..(53): n is a, c, g, or t
  misc_feature (64)..(64): n is a, c, g, or t
actctgcgacgacgtgtgcgtgatctgtatctcgccgacgcgccccttggatngccgttgggangttccaaagcggtgtgcaggtgtataccagtggatcctccagactggaagaattcagcacgaggtcaaatttaactactatactcaattgatccaataacttgaccaacggaacaagttaccctaaggataacaacgcaatcctattctacaatccatatcaacaataaggtttacaacctcaatgttggatcaagacatcccaatagtacaaccactattaaaggttcatttagttcaacgattaaaatcctacataatctaaattcagaccaaagtaatccgaatcaatttgtatctacttgaaattccttcctatacgaaaggacggtacaaataaagcctacttcacaaaacaccttcgcgcagaaatgatatcatctcaacttaaaaaaaaaaaaacttaaagcatctaataagaaaaaagttaacaacataaatataaaataggatctgggcgtggattgtatgaaagatagtaaaaaaaaccctaaagagggacccaccgcccaattccgccttaaaaaaaccgggttacaagtggctagcccacagttttaaaaaggggaaagatgaaaaaaccgtgctttacccaactttaaatgccctgttaagaaattcccttgtttgccagttagcggaataacgaaagaacgcgcgccaataaccctttgaaaaaagttcacaagcctcaattgggagtatgcaatttttcaaccgtgaagattttttga

SEQ ID NO: 574926 - DNA, 768 bp, Homo sapiens
  misc_feature (28)..(28): n is a, c, g, or t
  misc_feature (73)..(73): n is a, c, g, or t
  misc_feature (98)..(98): n is a, c, g, or t
  misc_feature (130)..(130): n is a, c, g, or t
  misc_feature (151)..(152): n is a, c, g, or t
  misc_feature (165)..(165): n is a, c, g, or t
  misc_feature (167)..(167): n is a, c, g, or t
  misc_feature (173)..(173): n is a, c, g, or t
  misc_feature (184)..(184): n is a, c, g, or t
  misc_feature (195)..(195): n is a, c, g, or t
  misc_feature (199)..(199): n is a, c, g, or t
  misc_feature (202)..(202): n is a, c, g, or t
  misc_feature (211)..(211): n is a, c, g, or t
  misc_feature (219)..(219): n is a, c, g, or t
  misc_feature (221)..(221): n is a, c, g, or t
  misc_feature (225)..(225): n is a, c, g, or t
  misc_feature (233)..(233): n is a, c, g, or t
  misc_feature (248)..(251): n is a, c, g, or t
  misc_feature (281)..(281): n is a, c, g, or t
  misc_feature (287)..(287): n is a, c, g, or t
  misc_feature (347)..(347): n is a, c, g, or t
  misc_feature (400)..(400): n is a, c, g, or t
  misc_feature (402)..(402): n is a, c, g, or t
  misc_feature (411)..(411): n is a, c, g, or t
  misc_feature (415)..(415): n is a, c, g, or t
  misc_feature (418)..(419): n is a, c, g, or t
  misc_feature (521)..(521): n is a, c, g, or t
  misc_feature (535)..(535): n is a, c, g, or t
  misc_feature (566)..(566): n is a, c, g, or t
  misc_feature (571)..(571): n is a, c, g, or t
  misc_feature (573)..(573): n is a, c, g, or t
  misc_feature (579)..(579): n is a, c, g, or t
  misc_feature (585)..(585): n is a, c, g, or t
  misc_feature (587)..(588): n is a, c, g, or t
  misc_feature (611)..(611): n is a, c, g, or t
  misc_feature (642)..(642): n is a, c, g, or t
  misc_feature (762)..(762): n is a, c, g, or t
ttagattccgattaaatgaaaatcattntgttacctcagatcctgacatacacaatgaaaggattggaaagtnacataaccagttgcgacttaatgantcatcctttgtaaatattagaatgagggaacnaggatatgactaggaagaganncaaggggtaaaancngacgantctggcccatncctctgcagantcanggncccccagcngaggactngngggnggggcgcngaagcaaagggctgnnnngaaaatagtttgattttgacacaatggttngcaganaaggccagccaccgtggagaaaagatagagaatgaagaagttccaaatggctaagatgancatgaacttctaaacagaatgaaagctctaggattatgtccactttaagaggncngcggggganatcnggnnttagaggcaggtaatgtcttttgacaccctttcttcaaagaaaggggtaagggaaaacaagaccaaaaaaaaaaaaaaacaccttctcaggccaggcctggnggctaacacctgtnatcccagcactttgaggaggctgagaggggnggatnanaaggtnaggagntnnaaagtgctgggattacaggcatnagccactgtgcccatgcccggcccaacttangtttcatctaatgaccttattaagtgttcacttttcaaaggatcttttaacttcttctgaatgaacattagtcagctgcccctcccactagccaatctttagccctgagcacacatgggnataaaa

SEQ ID NO: 574927 - DNA, 133 bp, Homo sapiens
cgctcccggaagatgcagttcaagccgatggagatcagcccgagatgctgaacaaagtgctgtaccgggtgagggtcgcggccagtggcgcttcgggacgtgctggggtggaaagaggacgtcctcttggggc

SEQ ID NO: 574928 - DNA, 143 bp, Homo sapiens
aaccaaggtagatgacaacaagaaactaggagaatgggtaggcctcttgtaacaatcgacagagaggggaaacaccgtaaagtggttggttgcagttgtgtagtttaagaagagctattcatcactgtacttattattatttt

SEQ ID NO: 574929 - DNA, 669 bp, Homo sapiens
ggtgctgtctagaggacccggctagccactcaccaagagacgtacacaggacaggggatcgggtaagaagaacagctgtcatcaaagaaacaaaagacagagaatgtcttcgtagatgaaaccccttattcgtgcaacgtacttatattcctttgatggataatgctgactcaagtcctgtggtagataagagagaggttattgatttgcttaaacctgaccaagtagaagggatccagaaatctgggactatgaaactgaagacagaaactgacaaagaaaatgctgaagtgaagtttaaagattttcttctgtccttgaagactgtgatgttttctgaggatgaggctctttgtgttgtagacttgctaaaggagaagtctggtgtaatacaagatgctttaaagaagtcaagtaagggagaatagactacgcttatacatcagcttcaagaaaaggacaagttactcgctgctgtgaaggaagatgctgctgctacaaaggatcggtgtaagcagttaacccaggaaatgatgacagagaaagaaagaagcaatgtggttataacaaggatgaaagatcgaatgggaacattagaaaaggaacataatgtatttcaaaacccaatgcatgtcagttatcaagagactcaacagatggcgatgaagt

SEQ ID NO: 574930 - DNA, 173 bp, Homo sapiens
tttttttctttcgttaatctgtagatattaatatatatggaagcttgtttctcccaaggtgaacactttggagagaaaatttgctctcattgctgatttatgaactgcagcgtcagaaaccagcattaatttggagttaatttttccccaaagctttgcgtttacttacagtc

SEQ ID NO: 574931 - DNA, 160 bp, Homo sapiens
taccgactccagctcggggttggcgagtgcacggccggtcgcccagggacctcagcatgaacaacctcacagagcttcagtcctggcctcttccaccacctgcgtcttcttggagcgagctgcgtctcttctgggaacctatctctcacatcatcccagg

SEQ ID NO: 574932 - DNA, 1066 bp, Homo sapiens
gatcaacttgatgaaataaagcatacagacaagattagagcaaacaaagactgaaaaggaacgaacagcagcctccaagaaatatgggactcttttaaaaaagattaacaaaatagaccactagccagactaataaacgaataaaagagagaagaatcaaatagacacaataaaaaaatgactaaaggggatatcaccactgatcccacagaaatacaaactaccatcagagaataccatagaacacctctacacgaaataaactagaagaatctggaagacatggctcacattcctggacacatataccctcccaaaactaaaccaggaagaagtggaatccctgcacttgaccaataacaagttctgaaattgaggcagtagttaactagcctaccaagcaaaacaaagcccaggaccagacggacttcacagccaatattctaccagaggtacaacagaggaggtggtaccaatttccttctaaaactattctaacacaatagaacaaagggggactcctccctaactcatatcatgcaggccagcatcatcctgataccgaaacttagcagagatgtgcaccacaccgcacacatttcagggcccaataatcccgtgatgaccattcaatgtgcaaaattcttcactcacacaccggccgaatgaattcagcacgcggttcacaccttatccacaatgaaacacgtaggttactcccggtgatggcaagccggatcactttacaccatctcatcaactttactcccttcactcttcaaccctccaaaaacccatatttactcactctatcccaaaggcctatatcaattctcccttccccgctactacctctaatacaccactatcacacctcccactatccaccccttttacaccacgaataaccactgcaacacacccaccaccaagccacacaacgccacaccctctcattcgaaccgccagaatcataaagataacacacaaatactaataccgacacaccctcactacatctataaaaacaaccctaaccaataccccccacaaatgatccatcaca

SEQ ID NO: 574933 - DNA, 1201 bp, Homo sapiens
  misc_feature (218)..(218): n is a, c, g, or t
agtgagctgagatcgcaccactgcactccagcctggtcaacaagagcaagactccatctcaaaaaaaagtttttgtctcttttttggatatgtatgtataaccaggatctacggttaagacagttaagacagaagtgatgtggaataagtagttaagccctctaagaagaacttagaaaatagtgggaggctaggcgtatactctagtggtgtacacnagtggccctcgagcttataattctcattagccccttggctaaagtgtggatatatagaccataatagcctcgttggtctccagaaagggttagtgccctgtgaaaatctccctataaacccctttggggcgcatatctttctcccaccctctctataactcaatgttcaccacggaagacaaaactgcttttctccctttgagaactagaacctcttttaagccgactcttcacttttggtctcccaagcacgggcttctcttcccaagcagaagcgggctacctacaacgcggcggaaacctacttcttcactcctctctatcaagaaggcgccgcgcctgcttttaaccgctgcggccaacataaaagggtacttggtaggaaatactcccacaccttatttagcgactgggcgccaaactaattaaagatttcttctaccgagccggcgggcaatccttaactacccaaccctttctcactagacaggacgcctcttcttactcgaaccggctctatcttaccccccagttgatttatctaggccgccctagcgctttgacaacacaccggcgggcaacaccaacccgttggcgcacacgcgtatactttcatcatgctccaatccccagccctatgtattagattcgctacccccacaccagactggagttaaatcgttgtcgtactacactcatctttgagacaacaaacacgcccgcgttctgttttcacttacccccggttatatatagcgtcgcggaagggcttgggatcattaaatatccttatgctatagtgaagtcactttcaacgcaacctgtctttaaaatacttgtggttgcccccaccccgaacaaaataatggttctacttgggctgaatcctttttaaaacgggcacgggtgcattttattaatatctacacaacactaaccactacaaccgtggctagaaaataacaccgccataagcctgtcct

SEQ ID NO: 574934 - DNA, 137 bp, Homo sapiens
ggtggtgatctagaggatcccggccttaccgcacattaccatcaccctctacataccgccccgacttagctctcaccatcgctcttctactatgaacccgcctattttacaccaaccccgcgcgtaagggccagcag

SEQ ID NO: 574935 - DNA, 747 bp, Homo sapiens
tccaattggagagcaggtacggtttattaaccaaccagtttagaaaaataatcagggtagaccaccttagttcattcttctaataagccggtggatcgggtcctcccgttgtggccagcatctccaccttcatacaaaagggggggtcctttttcttcattccacctcggggagaagacaattggaggggccacaggaagttattggcctcttggaagcgtttctccaacagtatagatctcatgaatcaaatcctccagtgcagatgatgccgtatttaccaagagatcgagcaatcaagagcgtaatcggtcaaagcaatgcgcttcttatggatttggccataaccacgctggtagataagtgcattatagggacttcagatgggggtacccccaggcaatatagggtctacaatcctcagcatgttaatcgaagcctggtggagcttcacaagggtcccatggaagattgggacgaaggcgaagaagcggcaacacctttcgaacctgtgggctcactccatggatacctcggattctgattgacaaacgcgccaatgtggggtcccgcgcgggtacatagaagtggccagctttctgttggcatccctcgcattcgaattcagttctgacatcgtgcctatattcctgtggaacgggctgggttccataagattagcttcctcctggccttcgaagcatcttgtgccaaccgataggtctagatccgggagggccgctagag

SEQ ID NO: 574936 - DNA, 497 bp, Homo sapiens
  misc_feature (10)..(10): n is a, c, g, or t
  misc_feature (17)..(17): n is a, c, g, or t
  misc_feature (50)..(50): n is a, c, g, or t
  misc_feature (67)..(67): n is a, c, g, or t
  misc_feature (77)..(77): n is a, c, g, or t
cttggtcctnaagaagnaaaactaaaagcaaactgaagggtgcaaaacanagccatgaagcccaacntgcccccagnactactccccatctgccttccttccccgtcccccgtggaaagtggccccctgaatatggattgtatctgtatcccccaccccaaatcctcagggtagaattgggatctgtgtcccccaccccaagtctcaggtagacttgtaatccccagtgttggaggaggggcccagtgggaggtgattggatcatgggggtggatttctcccttactgttctcatgatagtgagtgagttctcatgagatctggttttttgagtgtgtggcccctccccctctccttttgctctcttcctctttctccggccatgtaagatatgcctccttctccttcaccttccaccatgattgtcagtttcctgagcctcccagccatgcttcctgtatagctgcgggactgtgagtcaattaaacctctttatt

SEQ ID NO: 574937 - DNA, 209 bp, Homo sapiens
gtctgggaggtggcgcacaccaatctcccgacaaaactcttcaaacggcctcatcctctaccgggttcatcttctccttcaagtcttcatttccctctctgggatcggaatgatcctctggatatcataaaggcgaggcccaaagtgggctagctcactctccagctgggatttttcctggcagatgcagggctaagatggtcgggtct

SEQ ID NO: 574938 - DNA, 234 bp, Homo sapiens
tcgagatgctgctgatcccgcaatgatttcttcaacacagcttggatcactgggaaggcttacgtcactatgtttggagcgatgcgtgaacttaggcacgcttataatcgttatgaactggctgcatctgggcttttccagtccaaggagtgttccaaactgacatgattccctgaagctgtcctctacattcaacttgattggtttccagtgttcggctgagatgtctcggtg

SEQ ID NO: 574939 - DNA, 816 bp, Homo sapiens
tgtactggccctcttcctcctggccagcctcctgggctgcggctctagccggcccggtccttgggttgaatgaatgcaccagggctcggcagtgtggtgccagaatgtgaacgacggtgtccgactgcggggcaagtgaagcactgacatgcagaccgttaggaacaagccagacagtgaaatcccttccctgcgacatagtgcaaagagcgttgtcactcgctagctggtgatatgcgtgaatggacaatggccactgaggaggagatccttgataacattggagaagacctgtgacgtggcttccgaaaccgaacatgtcgtgcttcatgcaaggagatagtggactcctaccatccctgtcagtccgtggacatcattaaaggagaaatgagccgtcctggggaggtgtgctctgctcgtcaagctctgcgagtatctccatgaagcacctagcagagctgaatcaccagaagcagctgtgagtccaagtaagatacccagagctgaacatgactgaggtggtggacccttcatggccaacatccctctcctcctctacctcaagaaggccccgaagcaaggcccccagcccaaagggattaatgggggacggttggcagtgcctgcttccgcattggtgactggcattccgactgcgggtacggaccactcagcccttgtccaggcgctttggtgcactgtacggtgacatttccccatggccctgtaatttgacatagcaaacataacagagtttaaatgtctaccacagtatcaaaacaacatatcttgtactgtagtcttagtacaaca

SEQ ID NO: 574940 - DNA, 673 bp, Homo sapiens
cacccagcatgtcacccctgttgacattggcataacatccccccagtatattacaaataatatcaaaaggtgtacacacattgtgacattagtagtagtataccgctagtatgttgtgaataattatatcagggtgtagacacctgttacattaggagtaacatccccctagaatattaccaatgatatcacagggtgtgcaccctttgcgactttagaagtatcatccccctagaatattaacgagtaatatcacccccatctcccacaatggatattacgaaccatatcacaggggggtggacaccccccacaatatggcgagtaatatcaccctactctccccgcctagatactacgaaccacttcccctgtaaagacacacatagacttaaaataatgggatgaaaagatatatttcatgtcagtggaaaccaaaaaagagcaggagtagctatacttgtatcatacaaaatagatttgaagacaaaaactataagacaaagaggcccaggcgcagtggctcacgcctgtaatcctagcactttgggaggccgaggtgggtggatcacctgaggtcaggagttcgatgccagcctggccaacatggtgaaaccccaactctattaaaaatatccaaattagccaggtgtggtggtatcaggggatcctc

SEQ ID NO: 574941 - DNA, 325 bp, Homo sapiens
  misc_feature (182)..(182): n is a, c, g, or t
  misc_feature (255)..(255): n is a, c, g, or t
  misc_feature (285)..(285): n is a, c, g, or t
  misc_feature (293)..(293): n is a, c, g, or t
  misc_feature (310)..(310): n is a, c, g, or t
gccgggcgcagtggctcatgcccgtaatcccagcactttgggaggccaaggtgggcgaatcacccgaggtcgggagttcaagaccagactgaccaacatggagaaaccccgtctctaccaaaaatacaaaattagccgggcatggcgatgcatgcctgcaaccccagccactggggaggctnaggcagaagaatcacttaaacccgggaggtggaggctgcagttagccgaggacagtagagaaaccaaactggnctctaggtggtgctttgaagcagcgtaggngaaggctngcactctttcacggtgnaaagggtattagctg

SEQ ID NO: 574942 - DNA, 766 bp, Homo sapiens
  misc_feature (10)..(10): n is a, c, g, or t
gcaggctggntacggtccgggagtcgtatggattccgagccaacggagaggtgaatccccagtacgaatagcaccttcctggtttgacaacgacttcccagactctggagcctgatgcccccagtccagagacccagtgatcatccccttttccaaggcaaagtctgctcgaggagtcttgtaaggtcatgtgcttccacccctggtctggatagtaacgctgccactcatgtcaggtccctgagatccggtgtctgtcgttgatgcagtgggcctcattcacataggagctgggtgcccagtacccttgggctgcagatctttgaaaagcaaaggtgccttgagtgggctgttcataaccgccgcaccgcccgactgccaggatatgggccagtcatgtttaccctagtccagtatattgcccatgtgtgaggagcgatctcagcaggtgcctagtaagagtcatgcatggagagcccctgtctacttggagtacagtcgccaggatctactcaggaaggaacgtctggatcctaaccgaagtgagcactggttagtactggtccccttctgggcaacatggccctaccagaggactgctgctgccccgtgcggcatgtgcggcggactacctgagactgacccctgctgagcgtgatgatctagcctccatcatgaagaagctcttgacctaacgtgatgacaagccgtctttgatgacgtcctttccctactccatgggctggcatggggctcccacaggatc

SEQ ID NO: 574943 - DNA, 105 bp, Homo sapiens
gccgccagaacaaaggtgtcgtgaaaactacccctaaaggccaaaattgggaaaggaaaggactcatatcacatagtcgtcattggacacgaagattcgggcgag

SEQ ID NO: 574944 - DNA, 112 bp, Homo sapiens
tcttctatactattattcataaagtaacatccattcatccattcatttaacccatcacatactctctatctaggcacactgtattacataggagggcatacaagtaggtaga

SEQ ID NO: 574945 - DNA, 153 bp, Homo sapiens
gaccgtatagagaaaactacctgtggggccgatctgtgattgctacagaaactaacgctcgctggcaaggggacagaggcattcaacccaattctacaacacaggcaggtggtcaaaaccaacctttccaaccggaatcgcctcagttgatag

SEQ ID NO: 574946 - DNA, 349 bp, Homo sapiens
gttcgcaaagaaaagttagggcttaacccttttttctaaaattttataattcaatttccaaaagtcccctctattttagcgtgtttctccaaaaaattccttataaaaccaaagaccaaaaattgaatatttaatgaattgcccttttatacccccccggtttttatctccggggggaatttttgaggccagaaatttataaagaggttctgtattttccccccttgaataagcataatcccataaaaaatggcccttggcagggcaagggttttgtcatttcattttaaactgggatttggggtttttttcccagataaaaatgaaattaaaccatttctttttaaga

SEQ ID NO: 574947 - DNA, 199 bp, Homo sapiens
atagagagatttaaagcgagccggcagatgtagtgcacatataagatgggaaccaagcagagggcgctggggagcggcatgtaaccatcactggctctccggtctccgtcgccctggcccagtacctcatcactgcctgtctagagacggccaagtctacctctagggggacgcccagctcggcccccgcagacctgcc

SEQ ID NO: 574948 - DNA, 290 bp, Homo sapiens
  misc_feature (17)..(17): n is a, c, g, or t
  misc_feature (43)..(43): n is a, c, g, or t
  misc_feature (66)..(66): n is a, c, g, or t
  misc_feature (76)..(76): n is a, c, g, or t
  misc_feature (86)..(86): n is a, c, g, or t
  misc_feature (101)..(101): n is a, c, g, or t
  misc_feature (107)..(107): n is a, c, g, or t
  misc_feature (120)..(121): n is a, c, g, or t
  misc_feature (127)..(127): n is a, c, g, or t
  misc_feature (158)..(158): n is a, c, g, or t
  misc_feature (197)..(197): n is a, c, g, or t
  misc_feature (200)..(200): n is a, c, g, or t
  misc_feature (240)..(240): n is a, c, g, or t
  misc_feature (244)..(244): n is a, c, g, or t
  misc_feature (248)..(248): n is a, c, g, or t
  misc_feature (253)..(253): n is a, c, g, or t
  misc_feature (287)..(287): n is a, c, g, or t
  misc_feature (290)..(290): n is a, c, g, or t
catcccctcattggaanaaaaccttaaactgggagaacctagncccctctctttcctcttcctccnccacttcccncttattgtcnccttgtaatattcanagagcncttggattatggnnctgaanagagaaatgcttacagataatcattagcccncataccagtaacttaaagatgggatggagttgtaaagtnctnttataatacaatataattgttaaaggcaagggttgacccnttgntttnttttnacatggcatgtcctgaaataaatattgattcaanatn

SEQ ID NO: 574949 - DNA, 149 bp, Homo sapiens
gcgatacccacaaagcatcttcaaggtcattggcatgaatatttagaaatttaacgaagaaatagcttgtttaccattatttaattcgacatggaaatttccttaagtttagatttcattttgttgatttcatttcgcacaaagtaaaa

SEQ ID NO: 574950 - DNA, 729 bp, Homo sapiens
  misc_feature (13)..(13): n is a, c, g, or t
  misc_feature (286)..(286): n is a, c, g, or t
  misc_feature (289)..(289): n is a, c, g, or t
  misc_feature (293)..(293): n is a, c, g, or t
  misc_feature (385)..(386): n is a, c, g, or t
  misc_feature (389)..(389): n is a, c, g, or t
  misc_feature (443)..(443): n is a, c, g, or t
  misc_feature (452)..(452): n is a, c, g, or t
  misc_feature (465)..(467): n is a, c, g, or t
  misc_feature (469)..(469): n is a, c, g, or t
  misc_feature (471)..(471): n is a, c, g, or t
  misc_feature (533)..(533): n is a, c, g, or t
  misc_feature (553)..(553): n is a, c, g, or t
  misc_feature (555)..(555): n is a, c, g, or t
  misc_feature (566)..(566): n is a, c, g, or t
  misc_feature (595)..(595): n is a, c, g, or t
  misc_feature (708)..(708): n is a, c, g, or t
ttttctccccttngccgcccactcagcaaccaacaaggaggaaagcccccgcagtgctcggccagtgccgcgccatcgccaccagggagcgccccgcgcgcggtccacgtggcagaggtcgcggcctcgcggcgcggggtggagccgcacgccacagtggcaggtcccaggccgtcactccgagctctcgccttccgggccgctgtccggcgtgggcgggaggaggggtctccggcgcgagcgcttgacccggcgcagagggctgcagcagcctccgcttcagcanagnagcnactgtgtcctggctgtccgactgtgggcccccagatagatgctctccccgcgtcggaagatttctgtgcagccgtgtgcagagcgtggccannttnagcagcaccagcaggaaggtcaggaacataaaaaaaaaaaaagcatcttaagtncgtggggtngggccccgggctnnncntngaggcgctgctgcgcgaggggccggggaagcctgacttgaacagacacagccccctgggctnccttgcccgttgggcacctnancctctgtcctntatcttgcatttcctccattctccccctncagcagggagacagtgggcacagatggggcattactctccctaccagggattcccgccatggactgcttggccttcaagctccctggggaagcagagggaaacctcagggctnagcgagtgggctggggaacaa

SEQ ID NO: 574951 - DNA, 1240 bp, Homo sapiens
agcggactctccggtgcgggtgctggacggacggacggactggggcagccgtgctcacagcctcagcagtgcggggccttggcgcgcggggcgttttcccacgggtcgcgcgtcatggccgcggaggtggccacgcccgagcggtctcgcctgagctccgggggtcgtcgaccccgcagggattgcgggtcacgtctaatgtggcctgctgcctcgtgatcacatcgtgaaactcgtctgtagcgtcacgttacgaaaggttcttgctataacactaagcctgaacatatggctctcctgtgatttacaagttacagatggtgctgaattagacaagacgtatgacgtatgcagtcgacagaagacctagtgggcacccattgcgagtaattccaagacaggcaacgtgactgggaacactatgttgccttgttaggacgaactcagcgcatgagcaggcaggcagtagtgaggcttaggaactgaatgggtgaagccgtaccaggaaagacagaactgggggaagcccaaagttagtggactctgccctcttagccatggctgtgagacatatcttcgtcgtacacctgacccgtaagcctggagacttctagctaaacgacataggctgggctacaagtaaacacagggaaaggccaccaatttgaacacaagtttggaggctataggggggcccaacatgtaaggacagtggaaacatccgattgtacttcccaccatgacattccgttaggcgatttccggttcaccacaaattgtcataacacgacactcataattcacacgtgaccaacaaggattacgtctttggggtgcgacacccaccaacggagttcggcgcaacacacggtaagggcgatcccccttgggtagcggggtcatcagtgagcccccgagaagggtcaacacagacaggggatagaggaaggaccagtcgtgcgacgaagtaccgagaaacgccttaacggtcggcgcagcctcgaacgcctcaggcccgtgagctcgatacgacacatgaggacatcggcagacggagcgcaaaatagcagacagggctaaaagacccctactggtgggagaaaccacagaagagcggaagccagcgagagtcgacgaagagaaagcgacagagcgacaacaatcagaggcgacgcgaagcgccaccacagagcacaggacacaagagagcgtaaccgcacagacgccaccagaggcgcag

SEQ ID NO: 574952 - DNA, 798 bp, Homo sapiens
  misc_feature (210)..(210): n is a, c, g, or t
  misc_feature (798)..(798): n is a, c, g, or t
cagaagcttgctacgacccacttctgttcgcacgcgtcggtccccagtacgtgtaaggctgaacaatgtctcattaactgccttgtccatagtgagagtccgtgggtcaatgacgtagatgcgtctgccaatctcgtcatccatatacacatgagagcgacccggacgggcaaacctcatgcgcttcatgaaacaaaaatcacaagaatnggacgttccctagacggagctcattttatctgggcacgtcttactcgaaccatgtgcagtcccacactgctgacgcctcagcactattcaatagttgacgcccccccggccccccttgaaatgggcggtacaacacagagagacacattggggtgacacctatacacgccgtgggttccatcaagagagagcaacacacccgcgcgggtaccacagaacagacaaaaagaagcgtgccgccatggcagaaaactcgctctcacccaagcacagcataattaaaaaacaaacacgcatcccgccgtggagacgcagagaacaaccccccacagcgacaccgcaccgttctccgaataaaacacaacaaaaataatactacccaaacaaagcagagaagagccattcatcagataatgaagccggcgacacaatatcacaccaaggagggagaccatatacaaacaacaaacgacaagaagagaacgctagtctcaaaatacgagcagcagcaggcagctgccgccgaatatgatactctacagacaatatatttaacctgcgcaaccccccgcccacctagtggagacn

SEQ ID NO: 574953 - DNA, 301 bp, Homo sapiens
gtgcatccaaaagtcgcagtgtaatagcaggacaaaatatactgtcagtcagctgaccatatatcttaatgactcctaagaatctcggggacttctaagaaagcgccaaggtctgtgcagctgttatgattcctgggttgtagcggtgctctgttggagccatccgtatagaggcggcgtcacggagtatgacactcagcacgtggcgccacctaactcataacgcagcataagagaaatcaacccacgggccgacgtttaaaacaaggaaccgaccaggaccgagaaagcggaggcacgg

SEQ ID NO: 574954 - DNA, 432 bp, Homo sapiens
  misc_feature (169)..(169): n is a, c, g, or t
ggaatttcgggatattgtcgaccacgcgtccgagttatgaaggtttccaaggacaaacgggccctcaaattttcaagaaaagggtggggcgcacatccgcgccaaaaggaagcgggaggagctgagcaacgttctggccgccattaggaaagctgctgccaagaaagantgagcccctcccctgccctttccctgaaataaagaacagcttgacagaagccctgggtttcctgctgtccgtgggtgggtgtgggtgtgtcgggggcccccagtcccctgtttgggggccgctttgagccccaccctctccggggggtggctggttgtgaatcaaaaaccgtgggccgcccccccttcccggggcagcaggtgaggaaacccccggactgcaaatggcttttatcctttaataggttttatgcccccctttga

SEQ ID NO: 574955 - DNA, 313 bp, Homo sapiens
  misc_feature (107)..(107): n is a, c, g, or t
ggggggggcccaaaaattttcaatttttgggtggggccccggggtttttcctttttttcccccccttttggggggccaggggggggggttcccagttttgggggttnggacccttttgggttacccggggaaaccccgttttttttttaaaattccaaaaattttcccggggggggggggggggccttttgttccccccttttgggggggttgggggggggattggggttttcccggggggggggggttttcttttgccgggtttgggccccttccctcccgccggggggccggggggggttttccttttcca

SEQ ID NO: 574956 - DNA, 165 bp, Homo sapiens
tgatacgaagtcagctcgagtacccccttacatgtaggacgtgtcccctacgatcttaggggcctatcaatttcatcactacgaattgatgaatataaaaaccggctgactataaaccagtacctaagcgacctcctcttcgtctgatccgtcctaatttcagta

SEQ ID NO: 574957 - DNA, 180 bp, Homo sapiens
gcaagacacgaggcgagacattcagaagcgtgggggtcaactgggctggcgggatccagcttcaggcctggggagtcctattggtccggccatgccacttattcgggattgggggcagggaagaacaatggtaatccttctggtgaaagccccttggggccttggcaggaagggcgggtg

SEQ ID NO: 574958 - DNA, 405 bp, Homo sapiens
gttttggtttcttattttctattatttttttgagccagtacttttaaagagatagtacttttttcagttagtactttttaaaagggatatatcatagtaatttttaaaagggatatgaggccaggcacggaggctcatgcctataatcccagcactttgggaggccgaggcaggcagatcacggggtcaggagatcgagactttcctggctaacagggtgaatccctgtctctactaaaaatacaaaaaattagctgggcatggtggctggcgcctgtagtcccagctactccagatgctgaggcaggagaatggcatgaacctgtgaggcggagcttgcagggagtcgagatcgcaccactgggctccagcctgggcgacagagtgagagtctatctcaaaaaa

SEQ ID NO: 574959 - DNA, 1244 bp, Homo sapiens
acaataacaatataataggaacaaaacctcacatgttaatcaatcaatcttgcaatgtggcaaggcattgcacattttcccacttcagcaagctacagcctggcagcaatggcattcaacaaattaagcatcccagctatatcattaccctgcaaggaaacacactttacctcataatggcaccatgtagcactcaaacacatcaacaggcaatggaaaacaaattactccacacgaacagaaaccgaaaagtgagtaggagtagctcatacttatgtccagatcaacaacagcactttaagtcaaaacacgagtcaaaaaaaaaaacaacaacacacacaaagaaaaaaaaaacagagggcacaaaggaaagacaaaacaggagtaacaaaaaaacagacgcacaacagaaaactacacatagaggcctacgaaaataccatgctgggtggtccacaacacggtgagacacaaacgacgacggaccatcgaagggaacccaaaacatagaacagcaacgaatacaagcagacgaaacgaacaagcacacaagcagacagaagaccgggggggcgacaaacgaccaaaccacccacaaacaaccacgacagacaaagtaagacaaacacacaacacccggagtaccgaaaacagcagacaaagtagaacaacaccgacacgtgtgaaaaaagacgcaagaaagaacgaaacaccaaagggggggaaataacaagcggacacaaccgcgggggcacaacaccacagaagcaagcttagagccagcaaaccaacagagtgagccagccaaaacagaacaacgccagaacacgaagaaaggacgcagtagccacactcacacgaccaaagggtggagaaaacatgctacgcacaacaacgaacaaaacgtgggaagcgccccgacaaacaacgagcaaccacaccagcaacatagtccacaacaccgcgaaaagaacaccacatacgccaaagtagacaccgaacaacacaccagggggcataaacagagcagccaaccaccaaggaaaccccaatggggaaaacaaacaagccaccgataaggcacgacaaccaacacaagcccccaacgcgcgaggaccggccaagccaacacaacgaaaagcacggacagacagcggccgaggcagcccacagggagcacaccaccacccaacacaacacggggagcaaaccgcacaggagaccagcacgccatgccacaaagg

SEQ ID NO: 574960 - DNA, 692 bp, Homo sapiens
  misc_feature (144)..(144): n is a, c, g, or t
  misc_feature (148)..(148): n is a, c, g, or t
  misc_feature (187)..(187): n is a, c, g, or t
  misc_feature (194)..(194): n is a, c, g, or t
  misc_feature (196)..(196): n is a, c, g, or t
  misc_feature (201)..(201): n is a, c, g, or t
  misc_feature (212)..(212): n is a, c, g, or t
  misc_feature (229)..(229): n is a, c, g, or t
  misc_feature (324)..(324): n is a, c, g, or t
  misc_feature (379)..(379): n is a, c, g, or t
  misc_feature (389)..(389): n is a, c, g, or t
  misc_feature (391)..(391): n is a, c, g, or t
  misc_feature (395)..(395): n is a, c, g, or t
  misc_feature (398)..(398): n is a, c, g, or t
  misc_feature (577)..(577): n is a, c, g, or t
  misc_feature (580)..(580): n is a, c, g, or t
  misc_feature (594)..(594): n is a, c, g, or t
  misc_feature (609)..(609): n is a, c, g, or t
  misc_feature (683)..(683): n is a, c, g, or t
  misc_feature (687)..(687): n is a, c, g, or t
ccaggcctgagccccacaatcggtcccagaggtggctccatccccacgtctacgtgaaacacggggagatcctgaggaccgagcccgtggccacaggaaactgtacatgcagctcatcccgcagcaactgctgacccccctagngccnctgttccggaactcgcgctggtccagttccacttcaccnaggaccngnagacnctgaagagccngtgccggatcatggacnatggcttcgccggctgcgtgcacttttcctacaaagcatcgtgtgagatccgcgtgcttatgctcctgtactcttcagagaagaaaatcttcatnggcctcatcccccatgaccagggcaactttgtcaacggcatccggcgtgtcatgnccaaccagcngnaggnccngcagacggaacctggagcaggagcaacagacaacgcagaggatgtggggggtaatggttaccccgcggctgggcccctcccggagatcacagatgaggcccccgccagagactgtgcttgggagcctgtggcccgacagcccccactgcacccctgccccccggtgacacgcttttgancangggcccctgggganttcaactgcccagcnacatggaggatggtgtcctgaggcctccacaggacggtccccacccctttacgtttcccccataaagccttttnaaancctta

SEQ ID NO: 574961 - DNA, 559 bp, Homo sapiens
  misc_feature (96)..(96): n is a, c, g, or t
  misc_feature (191)..(191): n is a, c, g, or t
  misc_feature (246)..(246): n is a, c, g, or t
  misc_feature (256)..(256): n is a, c, g, or t
  misc_feature (258)..(258): n is a, c, g, or t
  misc_feature (262)..(262): n is a, c, g, or t
  misc_feature (265)..(265): n is a, c, g, or t
  misc_feature (444)..(444): n is a, c, g, or t
  misc_feature (447)..(447): n is a, c, g, or t
  misc_feature (461)..(461): n is a, c, g, or t
  misc_feature (476)..(476): n is a, c, g, or t
  misc_feature (550)..(550): n is a, c, g, or t
  misc_feature (554)..(554): n is a, c, g, or t
catggacaatggcttctttctccatctgtgaggtggagaaggttggactttggtgtttctgacacctcccaccgatcgcctcccggatcatggacnatggcttcgccggctgcgtgcacttttcctacaaagcatcgtgtgagatccgcgtgcttatgctcctgtactcttcagagaagaaaatcttcatnggcctcatcccccatgaccagggcaactttgtcaacggcatccggcgtgtcatgnccaaccagcngnaggnccngcagacggaacctggagcaggagcaacagacaacgcagaggatgtggggggtaatggttaccccgcggctgggcccctcccggagatcacagatgaggcccccgccagagactgtgcttgggagcctgtggcccgacagcccccactgcacccctgccccccggtgacacgcttttgancangggcccctgggganttcaactgcccagcnacatggaggatggtgtcctgaggcctccacaggacggtccccacccctttacgtttcccccataaagccttttnaaancctta

SEQ ID NO: 574962 - DNA, 541 bp, Homo sapiens
  misc_feature (90)..(90): n is a, c, g, or t
  misc_feature (120)..(120): n is a, c, g, or t
  misc_feature (294)..(294): n is a, c, g, or t
  misc_feature (316)..(316): n is a, c, g, or t
ccggggagactgggggaaaaaaaaaagaaacccgtttctggttgccttggggggcccaatctgtgggttctccccctggggtttgtgaanaaagagaggaaggggatttcttgggtggtntttatttccaagggcctcgcgcctgggcccccaaaaaggtggcgagatcccgcccctttttctctctctttaaagagatggatggccgcccgtttgttgtaagaaagccctttaataaaaagggggagaccccctggggcccaagccccccaaatttggggttttgtttccccnccgggtcctgcggcccaaacgnggggggttttgtttttaaaaacccggggccccaaaaaaataaaaaagggggggccgaatttgtttaccttttggcccaaagaatgaaggggggtaaggggagggccccgggcccaattggggaggggcgccgcctttcccctttggggggtttttcttttaggtttggaccccggccgaaataagattttttgggggcccaaaaaataaggtccgcctttggata

SEQ ID NO: 574963 - DNA, 260 bp, Homo sapiens
agacgtgaccaggttgatcatgaatggaaagactgaagcttcttcaggcatctggaagtttacactgtgtcccaatagatacgtccagtaagctctaagtattattcgagaaggagatattaaatctattatctcacttttagaccaacatcggagaaatcacgaggtactggatgtcttgtgctcactctgtgtttgccacggggttgcaggccgttctaacccgtgatctcctcctgtgagcaatctccttaccagga

SEQ ID NO: 574964 - DNA, 733 bp, Homo sapiens
gctgtttccgggaggcgcgtggggcttgaggccgaggaacggctcgcttgtctgtcaccaaactatggtagactttgtacctgtgtcccgtgtcttagtgctcgaatgtctccaagctgaagctgaagaagccgacctggtatgctacatgcgcagtaccggccaattgactgtagtttgcttctggatggatggtgtcgtttacttccatcatctaccgcgaggaatgacatttcatggatgttgattggttgaacctcctaagtgttcggttctagtgactgtatgacacgatgtggcatcataggcctagtagtctttgcttggtcctacagagttaatatggtagcaatatgattcatggtaacgggacttgctatccagcttgcctaattgttagcaatggggaggtcttaggttgcatcaatcctgtacgcgatgctgaatgcaccttagtatcccaaaattacaatagtatttccttctgtctagttcagttggattctgtctgtgtcctattgagtctatttcatgggctatgagtattctttgatgattttgagtatgccgggctatctgatgggtatagagatgcctttgagaagaaatcatgtggttactggatgtgctcctgtcaatgaagttctaaaggttgtaccaagtcctctaatatgcaatgtggataagaatgagagcagctagtaagagaaatatctagtgaatataacaggaa

SEQ ID NO: 574965 - DNA, 159 bp, Homo sapiens
tggaaaaggagggagtatctcaggctgtgtgcagcgacaggtgcccagggctctgatgtgtctctcaaagcttgaaaagcctgagacagctgtcttgtgagggactgagatgcagggatttctcacgcctcccctttgtgacttcaagaacctccttgg

SEQ ID NO: 574966 - DNA, 1099 bp, Homo sapiens
agcgggttctacctcctagtctacatatggtccgcggtgtgcgactcttgcctatacgcccgagagcgcctgagagggcctagtgggctgggggaaggcgcaggcggttctgccgggactcccatacaggcaacgtcatgtagcgcactcagggcaacgacgggcagatacgtgcttgacctaggagattcccctgccgagcactcgttgcgaggctcgggcaggcacatgtcgagagaccctgtgcgagacacggcacgggaagggacccgcagagagtaggtcgaatgaaccaaaggtcggagtcattgtccatccactaggaccggggcacccggacagttacggctagacagtgaagatgcgcgcacacggggaacggtagttgctggcggcatatgctgtctgtggactcaggagacgagtcgctgttccaggtcgctccgagggttgagaagtaggacttatgacgcgcaatgcataattatcactattgcgcgaccgaatagtttctgggggcaaaggaacttgggcatagcatgtcagagctctagcgttggtagcttgtacgagtgaacatccgcgcggcgcgttttgggatagcccggtgggttaagccgttgtggtgttagttcccacaggacagctttggcgccattttgggctgtgaacacacacggactgggaggtatcacggacggaatataacaatccttcgggcagacaagggagaggcgcacccggattgagacggttctttaagtagaagaattacacccgtttcaggaagcgccattgcggtgggtgcttagccacaaccgtaggcaagaaacatggtgtgggcggtattggacaacattaccatggcgtgtggggcaggctacagtgttgccatgcgaggcgcagcaccgacaattccgtgccacacgggctcgaactacacaaaggcaccaggtccctatcccgcgaccgacggggctagacgccaccacagtacgaacggtcgagacaagcgagggtatggtccccggatgggtaggtcaaaacccacgaagacgcagggagctcgcaaattgccacagcgaatatcccctgacag

SEQ ID NO: 574967 - DNA, 186 bp, Homo sapiens
aggaagaaggaaggagcgcttacgatttgatggtgatgctagcaaaaaggattccaggatggagcgagtgcaatttggtgatgaaggtagcagtcggcttggcattgacataccacacggtggattgcgagcaaggctttgtgcgtagaggatcctagaccagcatgcccgtgtgccatggtcact

SEQ ID NO: 574968 - DNA, 738 bp, Homo sapiens
tcgctatagtttccggcaacaacctaggccgtagttacccctttgctccgcttgtggccccccccttggcgtccctttatttcccctccgggccccactttggggtccataacttaccaagcggcccgccccagaaagggttgccatagggcgcccccccggtggggtgccccacgaggaggggcctctgttgtcttcttcgtggcgctctctttggaggggctttgtgggcgccccccccgctccatagggcccaccccgtccggtgtgtttggagagctctctttcgggggccccacaccacaaccctgtgggagactggctggcacagccgcgggctgtgccaccaccacgagctgcagttcgtgtagaactagggttcctcttcgttgccccactggtgtttaataccacgaacgcgatccacgcaagaccaccctcttttttccccccctggtcacggggctccacacaccacgaacttaacgtatggcacctataaggagccacgccccaacccccaatgggcgcggggggacccacataatggaacacggggacaccttgtccttgaactgaaggcagactttaccgaagctcatagtgaagaaagggccccgtattctacctcccctgtcccccacggggctgtggaccaacccgctgggggactgccccgcctcccaccccgtttatttaaccttatttccgtgctttataatataaggaaaccctaac

SEQ ID NO: 574969 - DNA, 545 bp, Homo sapiens
  misc_feature (229)..(229): n is a, c, g, or t
atcatagattatttttttttttaaatctcgggtaaattctgactggcatgcccagtaaaaaatccaggtaaaacatggggaaatcctaatttgggaaatataatgggatttttttaaagtgcaggaaagaaagtatcataaagagaaatcctcaaaagaaagaaagaaagaaacaccttggaaggctgaggcaggatcgctaaaggccaggagttcgagaccagcctgnacaaaatagtgagcacctcgtcattaaaaataaaaataaaaatgagaggggcgccgggggtggtggctcacgcttgtaatcccagcacttggggaggccgagacggtggatcacccgaggtcaggagttcgagaccagactggccaacatggtgaacccccgtctctacttaaaataaattttaaaaaatcaggtgggtgggggggtacgcacccgcaatcccaggtactcgggaggctgaggcaggagaatcgcttgaccctgggtggcggaggttgcagtgagccgagatcgtgcccttccccccagactaggg

SEQ ID NO: 574970 - DNA, 248 bp, Homo sapiens
  misc_feature (18)..(19): n is a, c, g, or t
gggggggggggggccccnnaaaaagaaagtttttcccctctctaaccaccgggggggaaaaccccccctttttattaaaaaaacataaatccagccgtttggtatggtgccagcctggagtctcatcttcttgggaggttcaggaagggcaatcgctttaactgggaaggcggaggttacagttatccgagatcgcgccactgcaaccgggtgacagagttagtctctgtctcagtagaaaaataaaa

SEQ ID NO: 574971 - DNA, 309 bp, Homo sapiens
cgttgccatctgaatcggggggagggatagcattgggagatatacctaatgctagatgacacattagtgggtgcagtgcaccagcatggcacatgtatacatatgtaactaacctgcacaatgtgcacatgtaccctaaaacttagagtataataaaaaaaaaaaaggaaaaaaaaggaaattaaggaaggaaaaaagaaaagaaaaagaaagaaatcatctgatagctctcatttgttaagtgcttacggtgtcccaggccctgggctggcgacttggtatccattctctcattaaatcataaaagcc

SEQ ID NO: 574972 - DNA, 220 bp, Homo sapiens
ctcttacatctctctctctcctcctcctgcctcagacaactgatacaccacgtcccactgctgtacacactgtgtatatatagtaggacacccccacccctcggtccctcaatctgatctggctacatccactgcctctagtcatctctccatcaatttcattcttccaccactgcccactggtcatgctcccatctcacgcatcacaacatgtggctca

SEQ ID NO: 574973 - DNA, 552 bp, Homo sapiens
ctactcagtccccttctcttcttatttttcttacctaaagcaatttgaccctcttgttcataatccagatctgtttaaccttcagctcatgtatctcccatatccttgactgctctaaccttcacttccaaaccagatcaaaaaatcttagttcagatttttcatttattttaagtttatatgaaacaacaatgtgacttaacttcaaataaatgtcagtatcatcttagactgaattaagagaagtataggccgagcgcggtggcccatgcctgcaatcccagcaccccggcaggccaaggcagatggaccgcccgagccaaggaatctgagaccagcctgtgcaacatggcaaaaccccgtccccacaaaatatacaaaaattagctgggtgcagtggcgtgcgcccgcagtcccagccacaggaggccgaggcgaaaggattgcccgtgcccgggaggttagggctacagtgagccacgatggggccactgaaatccagcctggacaacagagggaatcccaagaaagaagaaaaagaagacgacgaag

SEQ ID NO: 574974 - DNA, 153 bp, Homo sapiens
gccattctcgctcgagcaccgaaactcatccgcctctacgtgggtggtgctcacgcctgcccatgaagatggtgacagagctggcacctctgggatctgttgttggtcctggctacgtaagcaccaggtccacttcctcctggggactctgag

SEQ ID NO: 574975 - DNA, 871 bp, Homo sapiens
tgggagcctgtagcctttattcatgccgccctgaaccaaatgcagtgagagacaaggcccctgaacgaaaacaactccaggggcctgggactctgggtcccctactgcagacactttcctgtgagccaaaagtgtataaagtgctggtgtgtgaccatccttgtggggaaggtcaaagggggcaagatccccaggggccctgaggaagggcagggccataggggctcaaaaaacaagtgacagctcctgggcaggagggacctgaaaatgggagccttcagaatggagccctcaggaggcttggggttgtagggggataatttctgtaccccgtgtgacgggaggggccttgtaggaaaggcctgggggatctcagagaaggggacagcccctcgcaacgctgagttctggcggaccgtggaggccagcccaagtgggccatctaaaacacttcccgcaatccctccatgggactgtggttgagcatctcaaggtagccaaagggactgatccggttcgccatgtaccgggcttcctacagaccgaggggctcctgcttcatctgggcaggatccctcctggggtgcctcgatattgggccacagggtccttgtaataccccaaccaggtatgatgggggctcgttggggcagaaaggtgcttcaccctctggggttccaccttctcaggaaatgtgtccaccgcgtgtcagggctcgtcgaatgcaacagcccatgaggttaccacacggtccgggtagaaaaaggccgatgaaaataatgcttccggccggtgtgtgcccaagacggcacacactgtgttgggcacacaacggacggatattctccaacagagggggagacaccgaatt

SEQ ID NO: 574976 - DNA, 145 bp, Homo sapiens
gaatacggagtttgtacaccctggcatcatggtgaaacccacctctactaaaaatacaaaaattagccaggcgtggtggcacgcacctgtaatcccagctaccatgcctggcctgatttttgtaccatttgtagagacaagagtt

SEQ ID NO: 574977 - DNA, 870 bp, Homo sapiens
cgcagtggctcacgcctgtaatcccagcactttgggaggccgaggcaggcagatcacttgaggtcaggagttcgagaccagcctggacaacatggtaaaaccccatctccactaaaaatacaaaaattagccaagcgtggtggcaggcacctgtagtcccagctacttgggaggctgaggcaggagaatcacttgaacccaggaggcggaggatacagtgagccatcgcaccactgcactccagcctggacaacaagaacaaaactccatctcaaaaaaaaaaaaaaaatgttattaaaaaatttgtgtgggaagatacccaatttttatgtaggttggtaacccggtacacaaacaacttaaccgggttgtacgggggagacccttaacggggaacgagttgtggtattgtactggaggtacgtggttatcagcttaaaacatccggtttttactacaagattattttatgcacgctctagggtacccataaacaatttccctatagcagcgggaggttctccacaagcgaaccagcggattcggggtctcaccacgactttcctccagcccacacccaaatttcaacacactttccaggggcaatccgcgcacagaacggggcgcgcaaaaaagaaggttccaggacaaacgcaaacaaacctctttcaacaccaaatcgccaggtaaattcgtttcccctaataaagaaaataacctctacatggttcatttttgtttaaacttcccaagagaaagacattgggcttctggcttgggtctcaacaccacacaaacacaaaccagtgtggcgccgcatggcgcagaagaaagtttgacacattctgtgggcggggccatggttggaag

SEQ ID NO: 574978 - DNA, 904 bp, Homo sapiens
aggttgtagtgagccaaggtcgtgtcactgcaacctatgcctccccagttcaagtaatcctcccaccttagcctcctgagtagctgggattacaggcgcctgccaccacacccagctaattttgaaaaatgagtaatagcttctttgtttgctctttagtcttagtatatatcatgtgccttgggatatagaatttacttaacacatttcttttaaaacaagtggctatataaagtcctctatatgcataaaactgttatgtatagtgagtatttttaaagtacccttcaggaatgtaagtacattttaaaacctgtttctatccatagtagttaaaataaaatatttgtatgcttaagggagtaaacttagctattgagacatatttatcccctgactgaataattgtgttattactgattaaatatcaatgtttgcccttaagaatctaggatccaattagggttagaaaccttaagtacataaaacatttaaataatggtacataatagaatgtgtgattagatatcaaaataggctgggctcagtggctcatgtctgtaactcagaattttgggaggctgaggcaggcagattgcttgagcccatgagttcaaaaccaggccagagcaacatggtaagaaacccatctctaccaaaaaaaaatacacaaattatccaggcatggtggtgcacgcctgtggttccagtacacggacgccaagccaagagatgctcgagcccaggaggtggagatggcggagagctatgatcaggcactgactctgccggtgacggagaaagatctatcctcaaaaaaaaaaagggggcgcagagagcctggggccaatagctccggttctgaaaggcccagggaggaaaaccgcagcgcgaacgggaggaa

SEQ ID NO: 574979 - DNA, 215 bp, Homo sapiens
acgttggcagattacatgcagtcctggacccaaagagagtattaaaaacaaaacaaaaaaacccaagaatcacaatgagtatgtgaacgcccgtagcgatcgagagtaccaggaaatgtaagcagagccaggatgcaggtctgtgactattacactggtccttccagcggtactggttttgtgcctcccctcgacacctgtcgggctagtcgggg

SEQ ID NO: 574980 - DNA, 270 bp, Homo sapiens
ctactactactaaattcgcggaggctcgactgaactcctggcttcaagcagtcctcccgctcagcctcccaggtgggtgggattacacacatgggccacagtgcacagcccagagtgatttctatttagacggagctcgctctgttgcaaggctggagtgcagtgggcgatctctgctcactgcagcctccacctcccatgttcaagtgatcctcctgcctcagcctcctgagtagctgggactacaggcgcacgcgtcgacgcgccgac

SEQ ID NO: 574981 - DNA, 108 bp, Homo sapiens
gggggccccggggggtttccccccccccccttgttccgggggttttttccccgggggcccaaaagccccccctggggttttttattttttttgggggcccccccccca

SEQ ID NO: 574982 - DNA, 828 bp, Homo sapiens
  misc_feature (157)..(157): n is a, c, g, or t
  misc_feature (823)..(823): n is a, c, g, or t
tacctttctgctcctgaggaatttgagccccttcgcactgatgaaggccctggcacttatccgggtagtacaaagaagattaagcagaccccgcagattgactacactaggggttccataatatcacagtgtagaagggccccctactggacatggngaaagcattcaggattccagaactttgccattcaaaactcatccttttcaggcttcatttgtttctgcgttaggtggagaagatgatgttatagaacatctatatattgtagaaggtgagaaaacagtggagagtgaacagattactccgcaacaacccgtgatgaattgttatcagacttaccttactcagttccaggtaattaattggtcagttaagcacccaaccaacaaaagaacctctaaatcctcattgcatcgtccccttgatctggatacaccaaccagtgaagaaagttcatcgtcatttgaacagctttctgttccaacttttaaggtataaaccaaatcattagtttccattgatatcttgatttagaaaaacagatttttaagaagttattttcataattactctcattctttttagctacctttctgagagagagactttctgaagccatagctttatgtatgataggtcacagagttattgatgaatattagaaatttaagtaaattaaattgagaaatggtttatgagttgccactgcattaatctaatcaacacatattctgtgtctgcattatactctaagattaggatcaactctctctgaattcatatcttccgtgtcttaaaaataaaattttgaagttgttttanaaaaa

SEQ ID NO: 574983 - DNA, 580 bp, Homo sapiens
  misc_feature (157)..(157): n is a, c, g, or t
tacctttctgctcctgaggaatttgagccccttcgcactgatgaaggccctggcacttatccgggtagtacaaagaagattaagcagaccccgcagattgactacactaggggttccataatatcacagtgtagaagggccccctactggacatggngaaagcattcaggattccagaactttgccattcaaaactcatccttttcaggcttcatttgtttctgcgttaggtggagaagatgatgttatagaacatctatatattgtagaaggtgagaaaacagtggagagtgaacagattactccgcaacaacccgtgatgaattgttatcagacttaccttactcagttccaggtaattaattggtcagttaagcacccaaccaacaaaagaacctctaaatcctcattgcatcgtccccttgatctggatacaccaaccagtgaagaaagttcatcgtcatttgaacagctttctgttccaacttttaaggttatcaagcaggggctcacgctaatcttgctagacagaggcatgcactttcaggatcaacttcaaatacgccgtatactccattgg

SEQ ID NO: 574984 - DNA, 330 bp, Homo sapiens
actttttttagattgcctccttaccattacactgtaatccagcctttggaggctgaggtgggcagatcacctgagttcaggtgtacaagacagccaggcaagatgttgaaacacatctctactaacaattccaaaattagccaggcgtggtggcaggcacctgtagtccccagctaatcagaagggctgaggcaggggaattgcttgaacctgggaggtggagggttgcagtgagctgagattgtggcccatttgacttcaagcttgggggaagagaggcaagactcttggctcaaaaaaggaaatgtcaagtagcctctttattcagcc

SEQ ID NO: 574985 - DNA, 179 bp, Homo sapiens
  misc_feature (178)..(178): n is a, c, g, or t
accgtcatatgtaacaacagcagagtggagtagttacaacagaaagctaggcccacgaaagcctaagatattgccacctggccctgtttttgtaaataaagttttactggaatgcatccacactcatttatttacattgttgtctcatgttaacaacagcagagtggacgtagttacna

SEQ ID NO: 574986 - DNA, 413 bp, Homo sapiens
gccaccacattcggcctggcattgataattttcttactgattgtaaatactctctctatattaatgatgttattaacactatggtatttattgtaaaattttattaacagtatttttaatatagaaattataaaaataatttataatcaagtatataaattatgtttatattttgccttgataacatgctttgaaaggccttatttgattctaagttatgtaaatattcaactatactttcttctagtaactcatttaagtccttttaaattttattgagctataacttataaaccttaaaatccacccacttaaggtgtactatccagtggtttagttgtatttatggagttatacaaccatcaccattatctaattttagtatttttatcacccttgattatattttcttg

SEQ ID NO: 574987 - DNA, 147 bp, Homo sapiens
tggagatgtcgagagattcctgagcatggtgcatgtgccgctctgtggagggcaggtgtggttatctagtgtgcgctgagtagctatctgtgacccctcccgcagtgcctctcctggggccttaaggtgctattccagtttcggacc

SEQ ID NO: 574988 - DNA, 351 bp, Homo sapiens
  misc_feature (113)..(113): n is a, c, g, or t
  misc_feature (324)..(324): n is a, c, g, or t
  misc_feature (348)..(348): n is a, c, g, or t
aagagtaaattagcatataccaagtgcttaatataacacctccccataagtgcaaagcaaatattagctattattaatagtattactcaaaagcaatgaaataatttctggangaattatcaattctaaatatcaaaaaaaaaagctcacatttctgctcagtgtggtttaaagctccaaaatcaaagattcaatttggcattctcctttagcattttaaagttcactgcacttttgtgacagtgttaggatatttgaatgtccatctcaactccttctaccatcagaggcaaatattagagctgctctaaaggctgaagccanattgaagggtcttcctcattaagnagg

SEQ ID NO: 574989 - DNA, 868 bp, Homo sapiens
gtttcgccatgggcctggggccccgagaacgcagttaaagcgtgtgcagcagtcgaagcataggatgcttgacgaaacaaagcgggtgtattagcacctcgtccatcgacaggtcaccacaagctgatggaatgtcttcctctgatcgtctatccgtcaggaagtagatctcaagctatgcgttgactggagatgaggtaaagcaagatatgtcctgcaacgtttcatcaaagatgtgatggcaaggttcgtacgtggatgtcatcgatatccctgcgtggcattcagttggcactagtcgatcagcgatcgacaagacaggtgaacatttcgcggctgtgtctatgacaccaatgggccgtttctgcattgttctagcgctatcacagtggaagaggcgaagtacacatggttgtgctacaatgtgagcgaacgattactgtgggacgctgaagggaagtccctcacctggtgactcagtgatgctcgaaccactccggatagccagactccgtgtcatcaaggtgaacgatactgatgcaggatctgagttccagagtgactggtcaaggataattcaacctttatcaacagtttgactacaggccaagtttggtgctatggatgatcgcgtggacgccaaccctcggtcgctgctggtgtgatcaccatagcagtggcaaagacatcctggtgtcgtgtatggatgtgtgatgcactgtgagaggatgccactggtcgaacagctttgccacgaggctttccaacattctcagtcattgtcaactggcaataaaccttggatgtccctgcccaggggaaacgggcgttcgacttacctgttgctgaaagagagagataagaggct

SEQ ID NO: 574990 - DNA, 390 bp, Homo sapiens
gggatttgttggcgcgttgtctcacagaaagtgctccgctcccagacatgggaccctctgctgtctccctccgaagcgcagcagaaagcattgcgggaagaggaagagcttacctatagaagacccgtgcaagccggtgcaccttaacagcctcctgtgatacaaagctggcatgactcacatatgtgcgggaaggccacaggccgggatccaaggtgaacaataaggacagtggagaggctgtgaccattgtaaagacaccacccacagtggttgtgggcattgcgggctacctggcccctctagggcttcggaccttccagactgtgtttggtgtgcacatcaaggacgaatgccagaggcggtgctataagaattgggcattatgag

SEQ ID NO: 574991 - DNA, 327 bp, Homo sapiens
catcgctgaccgtcaggaatcccatcgagctcagctatctcggcttagcacttctttgcatgtcgctgtcccagcgcaaaggttcgttctgcgctgcgactgcgttctttattgttgttgccggcagatcgaatgttgcgatcgtgagcgcgctcgctatgatccttatccatatatcccatgggcgctcagttgcacgaactacccgcctggcactcttggtagtgctgccctgcatactaattttctttgcggcgtttcttcctgatatttatcttgagccaggagcgtcgacgcggccgcgaatttagtagtagtaggcgccgc

SEQ ID NO: 574992 - DNA, 103 bp, Homo sapiens
  misc_feature (1)..(1): n is a, c, g, or t
ncccatgcgcgacgcctccatcaaagcacagactctcaaaccagaccaattaccctcactaaagggagagaagggtgagacacttgatggaagcgtcgcgcat

SEQ ID NO: 574993 - DNA, 187 bp, Homo sapiens
acaactttcttcttgatctgctccaggaaccactcatccttgccaatcaacggactgtccaggggttgtctgaggcccagaggtcgtagaagggccactctacggtgtcctggggcccgggcttgcgccttgtatgcagaagggttgaggtttcgggcctgggcccctgcgcccctcccgggacagc

SEQ ID NO: 574994 - DNA, 401 bp, Homo sapiens
  misc_feature (48)..(48): n is a, c, g, or t
  misc_feature (175)..(175): n is a, c, g, or t
attcgcggccgcgtcgaccgccaaaccacggtctactgagccgcaaancgggttttcatttccagaggttctaaacagatggccgcagtactcgtcggacaatttcatgccagggatgcggaaggtcgcgtctattccgtgcatgaattccaggaatccacgccttcagccgaangctggccggcacggagcctgtcaccacctacaaactggccattggcgatcgcgtcaacaaaatcgaccacaactcatttcagctggttcaatccggggtcacgctcacccgtgaacccgagacctcgaccgcttcctgatctgggacaacaggcgcaacagccacctgaagtcatgtgcgcagacttgagttaggagtcgacgcggccgcgaatttaatagtagta

SEQ ID NO: 574995 - DNA, 1026 bp, Homo sapiens
  misc_feature (334)..(334): n is a, c, g, or t
  misc_feature (509)..(509): n is a, c, g, or t
  misc_feature (632)..(632): n is a, c, g, or t
gcttcctggcagggtgttagccggcagaacatagggtgtcggtgaaatactacccctgagaaatcataatgggaaatggaaaatgactcactagtacaacagtgtgtctgtccttgcgcatctacagtatgattgcagaggacctcagttgcatacacatatctggtctcagtacatgaagtcttatagaagtgcagcgagtgtcagtcagcaaacgataaagggaaactcagtctgggagattatatatgtctagacggaatgggatggggtgtatttgaagatgagtgaataaaagggtcgtacctatgaaggtgagtagaactggtatctnttggtgtatcaatatcctgttacataggactcgaagcagttgaaaatggtttgggctactcccacacggtgtgcattagttctgccatgtggaggcaatagtatcggatgagggctaatggagagtataacttatctcgatgagtaatatcttgaacgtatagaattggctgggncaaagaggaaaaccattgaacgaaacttatagattcagaaaaagaaacgactgactgtaatcatggggaatcaatttgttcaagggcgtgaaaggctgggtgctttggatggccttagagatntgctcgtcattgtcaatgtgatagatgtgtgtatgacataatttagataaggcttgggggataatccttacccacttagaatttgggacatgagcgcttcgagcaagtgaagtggacccatgcgtggtctttagcaactaacttttgggctgttgcatataccatatgtcaagtgcgttcgggttgtggcaacgagaagaaagggatattcaacatgaattgcaatactttacagttacagcaaagagtatttccagcgaaaatttggttgatggaaattcaagacacttttccactcctaaagatataccattggggattgcaaggtccgaaatagtgctagctttttgttgaccaaatttactgagttagggaattggttgaaaaaggaagc

SEQ ID NO: 574996 - DNA, 109 bp, Homo sapiens
  misc_feature (74)..(74): n is a, c, g, or t
  misc_feature (98)..(98): n is a, c, g, or t
cagaagaaggagaactcatgattccagagagctttggggcttatttttaagtacttagcaaaatatttgttttncgtgatttagcttgtcattaaacnaagagctactg

SEQ ID NO: 574997 - DNA, 1213 bp, Homo sapiens
agcgggtggagaccatggagctccaaaacgcggaggtctttacgtcccggaccaacgagtgccagggacaatgtgggcgccaacttctgccaccagcctgggtccagcatgccccagaccagcccacctggaagtcctccttgtattcctccctcgcctactctgaggccttccactacagcttcgcagcccggtcccgcctgcctcacgcagcttgcgctggcgcagcgtcccagagcctcagcggcttcgtctgcgcccctcctcgctgcgcacccaatgatatctcgcacttgctcaccggcgtcttccgcaactttgtactctgccgaggtcatcggcgacgaagtgagcagcaagcttgatcaaggcccgcggcagcgagaatgagcgccacagaggaagttcgtggaccagctgcagcagaatcgggagctctataagcatgcggctggatgagtttgaaatgttggagagacatatcactcaggcccaagcacgggctattgcggaaaaaatgagcgggtcatgagcccaaggctgggagtcaccaggacctcgagagccttgtcagggtggccatccaagtgacagagtgtctccagatggtgtataagacaagcgagtagcataagggaaacgatcatattgattctcccagagaagattactacagcgatagaagtgccgaaacacatctgcaactaaaggcattccctactggattgtcgaagagtgacatttagctgtgaggaagctgtcacgaacagaagaaaggagctgaacaagaaagatggaagaatcagtgagtgtagaagagtgaaggagattgaggatgagtataaggacatggtgtgacgacttgagcatgtattaaattccaagggcaagaaaggacagagaactggtcaagagaggagactcgcacagagaaacacaatggcatgaaacaagtaaaaggtagtgcaagagagaaaacagaacaaaaaattcgtgcccagacaagggaataggcaaccaaaccaataaacaagcacgcagaacaaccatcacacgagaggcaggaacggagagaggaagacacagcgagaagagaacaaggtgaatgcatcgaaaacgcaaccaagagggataacacacaacgagaacgcaaagaaagagaagacgaacgacaacagagagcagaacgaatgaagaagagagaaaacagaaa

SEQ ID NO: 574998 - DNA, 1827 bp, Homo sapiens
  misc_feature (1482)..(1482): n is a, c, g, or t
gcctgacgaggccatggaggacggcgaggagggctcgcgacgacgaggcctgagtgggtggtgaccaaggacaagtccaaatacgacgagatcttctacaacctggcgcctgccgacggcaatgcttgagcggttccaatggccacagacgctgtgatgtgttgtgggaccaagactcctccaacatcgagtgctggggcgcatctggaagctcatctgatgtggaccgctgacggcatgctgggatgatgaggagttcgctgctggccagccaccctcatcgagtgccacagcttggagagggccactgggcttgcccggaccaaagcttagcccccaggtggccttgcgtgaccagtcgctcacagagcgaagggccaacgaagggtgcttccaggcggatgcttgatgtccaagagctctcacctacaccaataggtaccatgtcttgtgcggcataccatcgagcctaccaagatcgcggtttgccgtcgacaagagtcctccctgatgtccagagcatctagaacgaggggccaccagtgagtgcgttgcaccgaacacacgttgctccctaggttcatagagttgaagtggaacacggggtggggtatgaggatcaccgtactacttcgatcgtatgtgcaggaccggaaggtatcaagaccctgcggtgcctgagacagagcagtcaagattgcgagagaagtaggcagatcctatgagagtagccatacgaccaggttggaacatatactttcctcagatacccgaagcagcattagcagtttcaagaagatctaacgtctcgaccttagtggacgtgcctcgccctctaagcgttagatagttgtgcgcccatagtagcccaatcagttcgtaatgcgaagccttgggtgaatatttagttcctattaaggcactgcaagccgtgacactaggacacaccacagatacatagaacgatgcccgcgtatcatttggcgaaaggagagccgttttacccgaggttggaggacagaggagcaccgtttaactagcaaggtcgccactgggatgaaggtccgtgcccataaagattcgcgtatagatatgagggttcgccattccgaagcagacgcccctaacatcgatgtgagattagagacagagttcatcttcgtaggagactttatcgcattcgaacttaggccagtattgtacacgctacggagaggcccccgtatacatatgagtatacgagacaagacaatcacactagtggcagagaagcaggtaggaaacacaaagccagtaagagctcgcggagactagaataaggcgtcgtcagagggtatatggagaagagcaactagaaagaggactacaaactggagaaaggccacatacagtaaaagtagcatcagtcaaagaatatgcgagcacgtaaagcaggagaccaaccgtgccgaatttagatcggagtggaggggcacacagtgnctggaccatacacgcatgtgaatgacatggtgcggtctcttccatattgtgacatgagcgagccggcggagattcagggattggagccgccgagaacgtggcgaggaggggtgaagatttcgctgcacgacgtggtggtgtagcgcggagccagaggtgagaacgggacatgaccatggaggcggtgaagtttcgtgatggttgagatgatgctctcagcgagtacgagcaggaggtgatctgctgagaagatcgacgagggcagagattagacgctgccaagacgaagagttgtgacgagccatcacatgtgatgatgatagttcgagcacgctgaacgcgtga

SEQ ID NO: 574999 - DNA, 125 bp, Homo sapiens
ctaaacattaccaggttagtggcatcacctgtagtgccagctattcaagaagcaatggagagaggattgtttgagcccaggaggttgaggctgcactgaaccatgtttgcaccactgcactccag

SEQ ID NO: 575000 - DNA, 862 bp, Homo sapiens
ggttctggcgcatcgctgtgcctcgggttccgcgccccgattgagcagtcctggcccggagcgtcaggtcctggtaactctgtattgaaaaggcgctgttggacccagtggtggctaaaggccgagatcaggtccctcgtgtgagagcatcggatgcatgtctccttgcgtcaaagataacactctccaagggagggactgacccagattctttgaatctttactatagccattggcaccatttgcgaatccaggtgaatgctttctagtgagtgttattcctagtatggagctatctccattcctacgaataggacgttgggaaagataagcgcatgcgtagcttagcgaaaccatataccatgggacgttggtaaccacgatgactgttcagttgttgctcggaagacacataaccacgctagaccttgtagtggatctacgaacgttgggagaattgcttttccatgtgtcattaaatcgccaagatctgtggaattgtgcccttcaactattgggacgcgacagggaaagcacaggcagcctttgggaaacaggtcttgttgaaggggacacacgggaaatggacaaggatcacaattaatccccaggaagttgccttgccgcactaaaaccccacaaagagggaaccctctccggcacagggaacttgacaccaaatgtgttccaagggccatctgtagttgggcaacgcaattgctccttgactgtgaccgtgggattacttgcgttggcagcgcagacaaggcccagacagttcgccgattccaatgccgtttattgctacatcccaagtcattgcctttgtgccctgcaatggatggtatgaacacttgaagta

SEQ ID NO: 575001 - DNA, 791 bp, Homo sapiens
gcccaggcgttaaaccagccaccgcctccgccccacttcctccggctccgcttccctcgccttcccgctccttctgaggatgtgggaatccgcccgcgccccagccccctccgtggctgcggacccctctctccgcgacccagctgacctccgtggcccacttccttggcccagaggggcctgggattggcaattcggctcccgtctgtgccccgctagctcgtctcccgacctcccgctagaccatgtatcctcgtaaccagtgtgcattccgcactaggtacgcccctggtcgtccagagcggcctggacggaagagatgacagtgagcggggtgcttaatgctagccaccattcgatccctatcctcacacttcagattctatcattcataaaactgttcccagtacacacagtcgtgtcacatagatgtgactcgcctgttagcaagcaataagtcaccatacatcagggtaaatacactgggtgactatgtataagtccactcgtccccgggtgaagcctggcgaggcagcagaactttcagcctagagcaatcccttggattgccccgacacgcggggccccccacgagcaagagacagggatgggcgagctggcgccgaaggggccccattgggcaccagcgtaggccttgcaactaagactgccctgggaaggatcgaactcagactaacccactatcaagaatcgagattcccaccgaaacagcattgacaccaacgcgtgttgcatccaatcccttgcgacgaagaggacgggagatcaca

SEQ ID NO: 575002 - DNA, 1119 bp, Homo sapiens
  misc_feature (576)..(576): n is a, c, g, or t
  misc_feature (835)..(835): n is a, c, g, or t
  misc_feature (838)..(838): n is a, c, g, or t
  misc_feature (855)..(855): n is a, c, g, or t
  misc_feature (858)..(858): n is a, c, g, or t
  misc_feature (871)..(871): n is a, c, g, or t
  misc_feature (874)..(875): n is a, c, g, or t
  misc_feature (880)..(880): n is a, c, g, or t
  misc_feature (884)..(884): n is a, c, g, or t
  misc_feature (899)..(899): n is a, c, g, or t
tgctgttcaggtaagttttaaggccatcatcatgacttctggaagaaaaagagctccttgtggaggttccctgaagttctctctgagatctaaagtattctgaccccttaaaggtcgatgttcttctcaaggaatggagaaccaggttcttcgttacccaatatcaccagattctgttaccttcttgtggaagagttttggtcattctctggaaatatctgaattcattcctgagcggtgcacagggcaggtcccccgtttcttgccgaatgcccaatgttcttgggacacagccgacgatgcaagtttagcgaacccaccatgacagcagcgggaggacctcccgagccccgcttcgttacagcagaacgcgcggttcaagttttgcgcgaaaattggtggcccgccgccgcccccctcgtccccattgttgtgcagggcgaggccccggcccccccccgcccgggggcacgcagtgtctcggcgtgcctcgcgcccgcagacgcctgggaactgcggccgcgggctctgcgctcctcgccaggccctgccgccagggctgccaatccttgcccngccatgtctcgccggaagcctgcgtcgggcggcctcgctgcctccagctcagcccctgcgaggcaagcggttttgagccgattcttccagtctacgggaagcctgaaatccacctcctcctccacaggtgcagccgaccaggtggaccctggcgctgcagcggctgcagcggccgcagcggccgcagcgcccccagcgcccccagctcccgccttcccgccccagctgccgccgcacgtagctacagaaattgacaganganagaagagaccattgganaantgatgggcctgtnaanncgaangtanagaaagtccaacaanaggaaggaggaagtgatctgggaatgtctggcaactctgagccaaagaaatgtctgaggaccaggaatgtttcaaagtctctggacaaatggaaagaattctgctgcgattctgcccttcctcaaagtagagtccagacagaatctctgcaggagagatttgcagttctgccaaaatgtactgattttgatgatatcagtcttctacacgcaacagaatg

SEQ ID NO: 575003 - DNA, 442 bp, Homo sapiens
cacacctatccttctgaagagctgaaggctaattaatctgtaatggccaagaacttctacttcgatagaaaaatatttctaatgacccagtctacaaattatttcttttacacaaatatatgatgttattctttggacactaggtggtcctacacacagtaggatcaattgctaatctactttgtgaaaaagaactaagcactaatcaataataaggcttacatctaattctcaaaggtgcttatccattttcttgctaaattatccttcttgtaatttggctaaacactaaaacatggaatttttagtttgaatattttgaagtttgaggatgttgggctttccttattgtaaaaaatgttatgtttgaaattattcctgttttcaaaaatggtaattaagtcattaggataaactttctaataaaaaaaaattatgtaaa

SEQ ID NO: 575004 - DNA, 270 bp, Homo sapiens
  misc_feature (74)..(75): n is a, c, g, or t
ttcaaaattatattttagatatccatccatgtaaaattatgaagatctgacttatttacttgccttgggaagtnnatataattttctgtcttcatttttttcaatctgtaagccgtgcataattttgcttaactcataaagcatttgtgaaagttaaatgcagtgatggatttaaatgttaaatgtttgtgtgtatgtgtatgtatacaggcacacctcagagacactgcaggtttggttctagaccaccataataaaagggaatatcac

SEQ ID NO: 575005 - DNA, 81 bp, Homo sapiens
accgaggacacagccttttatcactgtgctagagatcagttttggttcgggagatactacattgactcctggggccaggga

SEQ ID NO: 575006 - DNA, 228 bp, Homo sapiens
gctaatgataccatggtgggcgatgttaaaaatttccccaatcaggggcatgttcacgccaggcgaattatgactccccagtcctccaatttagcttgtggggattggaaaggggtaggcgacctgccactcatggctgatacaggaagcatttatgttgcctttattccccccaacatttttgctgaatcgcatcccttgtaatactcaagaaatatgagaaacaga

SEQ ID NO: 575007 - DNA, 300 bp, Homo sapiens
agccctcctcaggcgcttttggcaccctgcctctcccccagccccaccatagaatataacatgctgtgctgtcacttaaaaccccctttgtcatggccgggcgcggtggcttacacctggaatcctggcattttgggaggccgaggcgggcggatcacttgaggtcaggagtttgaggccagcctggccaacatggtgaaaccccatctctactaaaaatacaaaaattagccaggtgtggtggtggcacgtgcctgtaatcccagctactcaggaggctgagacaggagaatcacttga

SEQ ID NO: 575008 - DNA, 982 bp, Homo sapiens
  misc_feature (569)..(569): n is a, c, g, or t
  misc_feature (580)..(580): n is a, c, g, or t
  misc_feature (601)..(601): n is a, c, g, or t
  misc_feature (609)..(609): n is a, c, g, or t
catgtttactggctagagatggtcctattttaccgggctcattttggaacagatgaaaccattttagatggaaaagagtatgatatttatgtatcctatgcaaggaatgcggaagaagaagaatttgtattactgaccctccgtggagttttggagaatgaatttggatacaagctgtgcatctttgaccgagacagtctgcctgggggaattgtcacagatgagactttgagcttcattcagaaaagcagacgcctcctggttgttctaagccccaactacgtgctccagggaacccaagccctcctggagctcaaggctggcctagaaaatatggcctctcggggcaacatcaacgtcattttagtacagtacaaagctgtgaaggaaacgaaggtgaaagagctgaagagggctaagacggtgctcacggtcattaaatggaaaggggaaaaatccaagtatccacagggcaggttctggaagcagctgcaggtggccatgccagtgaagaaaagtcccaggcggtctagcagtgatgagcagggcctctcgtattcatctttganaaatgtatganaggaataatgaaagggtaaanagaacaangggtgctccaggaagaaagagtccccccagtcttcatccgcagtttatggtttcataggcaaaaataatggtctaagcctcccaatagggataaatttagggtgactgtgtggctgactattctgcttcctcaggcaacactaaagtttagaaagatatcatcaacgttctgtcaccagtctctgatgccactatgttctttgcaggcaaagacttgttcaatgcgaatttccccttctacattgtctatccctgtttttatatgtctccattctttttaaaatcttaacatatggagcagcctttcctatgaatttaaatatgcctttaaaataaggcactgtttggcactctgggcactgtttgggctcgt

SEQ ID NO: 575009 - DNA, 330 bp, Homo sapiens
gactggtgtagaggttggatgttgcagtgatcaaagaggctgtgtctggctgttatgataggggtagagtatggtgatattgaaatccaaggatttcatttaaagtagagaatcaactgaacagccaaaatacgactatacccactttgccggactaacgacgactgtgtattacacggacgactgaattaggacgtttacttccaagaactactagggtgaccggactgggtccctagtgcacggactatttgcttggacctggcgacggaacggaaaacttatgaccacctttttagggacaacctaaccacggcttcccgtgacctt

SEQ ID NO: 575010 - DNA, 224 bp, Homo sapiens
tgtggcccacactgccgacgtagaaggtagctcatgagttggaccccagcgcggtgaacttctatatgctacagagtgcggccctaaaaatgcaaaaaaaaaaaaaaaaaaaaaatttgacttgcagttgtaagggaaaaatgattttgccatacctccataccagtttttgattctgttttcaccattgtaaggcccctttctccggggtggcgtggtgggga

SEQ ID NO: 575011 - DNA, 889 bp, Homo sapiens
gatcgtcgcgaggcagggtgggtcggcgggctcgtggcatggcgtgtgtctggatgtcgatggtaagggagactgcgtgcctctaccagtgtgcgtctaatgggccaggtcctggtcgctcgagagtggtagcctgccggaaggggaacgacaccggactgtgcaatgggcacccaaagaacgaatgggcatctacgcgtccatagggacacgagaaccacatcgcggttgatccgagccattgactgtgggcgagcagtgaggctgggcttagagttccactggcgtagtgaagcgatctgcagggatgtcgttagcggggacgggaacgtggttcttaactgcacccaatcacgtgctatgacgctccgtggcaatggtgcaggggcataacctcttcataatgggtcttccataagctatctaatatacctattactggccagtaatgagatcacggctgaatacctaaacgtctcacatgcattgcattggtgtaccatcacagcgaaccagatatggtggaatcaccgatgctgccacacgtcagcatctggctcctttcacctgattggacactggtggtgaaaggccatgagcctacagacggggggcaacggggccatgcgcctgcttgaactgatatgagaccaggacgcaaatcggctgccgcgacacccgcaacatggaggcaggacactcaggtcaccagagtaaacagcaagaatcaggccgaagtacacgggcacacaaagatcgaggaaaacaacaaaaaaggagggggaaagccaagacgcagcgatgcacagacgcacggatgaggctgccatacacgagcgaaaacgtgatcaagatggggggacgaatgagacgcagaaggaatctgcaa

SEQ ID NO: 575012 - DNA, 344 bp, Homo sapiens
atggactctcatcgcgttaggagattcagtttcccaaaagcaaagagacgaacctcatgtcctatgcccctaagaacacgtctccagaactggcaaagctacaggaggaacagattagtctgttgtcagcagatttctaacacctccctcagggagtggcaggtcagcaggatgtagaatgaacacgtgacgtatacttctatctgatggatctgtacaaacactgattccagcaactgcagagagcacattcttttcaagcactccacagttacgaaggctgatcataagctgccactgaccaagtttcaaaaatctgatctgataaggacgaagtttcctgg

SEQ ID NO: 575013 - DNA, 1274 bp, Homo sapiens
gggcggtgagtaccattgtgtgtgcttaccaggcttccatgggcgtgactgcgagcgcaaggctggaccctgtgaacaggcaggctccccatgccgcaatggcgggcagtgccaggacgaccagggctttgctctcaacttcacgtgccgctgcttggtgggctttgtgggtgcccgctgtgagggtaatgtggttgactgcctgatgcggccggttgctaaccggtgccaccatgcctttgacggaattaaaccggcattctccatgcctctgtcctgagggcttcgctggacgcttctgcaccatcaacctggatgactgtgccagccagccatgccagagaggggcccagctgtcggagacagtgtccacagaattcagacatggctcatgcccacagtggctatgagtggcaaagaactgtgagcttgtcttaccatgtcccagaccacccaaacaaagatggacaacccatctaagagacccacctcaaactgtagatggtaacctgcccacgagggcacaagacccaccaacaacgcaagggcatggatatgctgaggatcttcagatgaaaagacggtgcgtgcaggaaggccaaaaaggcttgcagactaaagatgagaccataagcattagagtaagagcccatgagatggaacagtaacagaggagccctacacataggatagaccatcgagatacatggcgtacactagtgttatactgaacccttaaagaggagctgggagcacagagatagtatggccacactagggaacacattgttaggaataccatagacacaaagatattggattacaaagattgacaggatcccaggaagtggtacaaggtaaaaaggctggacaaacaagagaaacacaccatggacaaggtaagaaatggaccccagaggcggaagaagaacccacagcgaaccgtaaatgacagagggaggaatatcgacacccaaatcactacacgcatttaccacccacacaatgagggcgatgcaggctaccaaccccatcaggacggggaccaccacgaggagacaaagtacaccaagcacaaatattacatcacacaaggaggaggatatcaaaaaacgtcaagcaaaaaacaagagggcagaaactaccagacgaacagccgcacactgcagacaaggtagcatagaagaggcaacgcacaagaagcacgcagccaaggagcagcaccaccatgacgtttagagacatagacgcaaggccaaacgatacaccacgaa

SEQ ID NO: 575014 - DNA, 325 bp, Homo sapiens
gcccccaacccaaaaagagtaaaagggccaaaaaaggaaggaaaaaagcaacccaaaggggccaaagctaacccggaggcacccaaagatttatccaggggctccctcaaagaaaacaggaattccctctcccaattttcaggccctgtggggcccctgaggttaagcagcgggaatgccccctctttcctccaagggcctgttgcatatggaaaggaaggagaaaccccaaagcagatccctgggaccggctttcagtggaagagggggctccccttaggagccatattcaactacagccttctaaaacctgcgccctcagcca

SEQ ID NO: 575015 - DNA, 577 bp, Homo sapiens
gactcgtcaggtcaggctcgaacggaacactagttatccgcatggccccaatgagcataagcaaaacttgaaatttaccactgggctactaattcagcttccttatcatagagaacattaaatggttgatgcaatacatgtttgtcggcctccaacaactccatcccaccctactactcatcttcaaatgctcttaaagcaaacgacatggcctcaaaacgcctttccacctcactgaataacgcacgtgaaatcctcattaacagtccatactgttaagagggctctcgtttggacatagttgtccactgtcctgcatcgttggacttggcctctcctgagctgacaagaacatccacagcatatacttcatgtacctcaaattccgctttttcatggtccttcttctgctggtctgtgggcttctggataatggtttcttctccatcgattgcatgctgcttccactggtgcgacagcataacttctattggcgtgccgttaaatgagtgggcactttgtccaggcgtctgtccttgtgtgttcttgttccaggtttgacaggcgtaggcagctc

SEQ ID NO: 575016 - DNA, 239 bp, Homo sapiens
cccctgatctctataaaaaacacaaaaattagccaggtgtggtggcgcgcacctgtggtcccagcatactcgggaggctgaggcaggaggattgcttgaacacaggggtagaggctgccatgttcgtgccactgcactccagcctgggtgacagagcatgaccctgtctcaaaaaaacaataaataaaataaaacagggatgaactggagaaactgtgaaggtgatcgtggggttgtaa

SEQ ID NO: 575017 - DNA, 341 bp, Homo sapiens
  misc_feature (303)..(303): n is a, c, g, or t
  misc_feature (311)..(311): n is a, c, g, or t
  misc_feature (331)..(331): n is a, c, g, or t
gaatccttctgtctcggcctcccaaaatgttgggattacaggtgtgagccaccacgcctggcccacgttggtatttaatagacggaatactggatttattttgttttcttccagtaatgtttctcatcatggactatcacattttactgaatgtcttcagcaatcgcctgtttctatttctgatttccagttgataattagacttctttatgcatcatttgtgttatttttttctaaatatatatgtatatttgcagcttatatgctgccctttttttctcattcagacaactttaggaatanttttcctntttattaccaatattttccnatttagtagg

SEQ ID NO: 575018 - DNA, 134 bp, Homo sapiens
gcggtgcactcgtatctgttttcctttctttgaggctgatcatttcccgagtgaagctggggcacttgcttgagcggttgttgggagacacgcgcacatggggagataggagggcgtgcgggagagaggagtag

SEQ ID NO: 575019 - DNA, 666 bp, Homo sapiens
ctaaggaaaccaaaaaaaaaaaaaagggcgaaaaaaaaaaaaaagcccccccccccgcaaaaaaaaaaatattaccaaaaaaagcccaaatttttttccaaaaaaaaaagggggaaaaaaccccccaaaaaaaaaaaaaaacgccggtaaaaactaaccaacgggaaaaaaagggggaacaaaaaaaaaaaatctttcccaccacaccgagcgggccacccctactccaaaaaaaaaatttgctccccagggcgggaacaaaaaaataaaaacaatttccccctcccaaacaaaaacaaaaggtacccgctcctcaaaaaaaaaccgctccgtgggcgcgcccccaacaaagggtgtaaaaccctccaaaatgcgcggcaacaacacaacccaaacaacggtggggcggtggggccaaacacggcaacacctaaaaatattcgccgccccacccccaaaagagggccagaagcgccgccggttccgccccaaaccacaaaaaaatgcggcgcccccccccccagagaagaaggaaaaacccccccccccacaaaaaaaggggggggacaccaaaccaccccaaaataatcttttgggaggggcgcaccgctcaatcaaataaaaaaacaaaatttaataccccccaaaaatgtagggagggccccg

SEQ ID NO: 575020 - DNA, 848 bp, Homo sapiens
gctggtgtttagcaactccgaccacctggctgctgaggagtgctatgagcgctctacagcgcgcatagaacctgatgtcccccggcccaggtgcctctcattgcgtggaacatgggtgctgtagcgcccgttgtccagacaggtccaggctcatccatggatgccgtcgatgccgattcttgtgcacggggcgagggacgtgtgcacggtcggaatggactccgtactactcgcgtgatcgtgtgcgtagttcgtgtcatcgtgggctgctctctctcgtgcttcttcttgaggacccggcgacctctcaccacaggaaattagttacttccagtgttccctggagagctcctgatgaggcatgctgcagagatgagtagatcctgctcacctgggtggatcgtccaagctatgcagtgtccggtacattgccgtcccttggcatgcgcaagaatctctaggccgcctgagcgatcgcgtcaccggtgatcgtactaacctgtaggaccaccgttcatggcgtagtcaatcgagggcatcttcagtggtctcctatcatcgcagcccaaggcatgcgcggcccagacaggagaccacggagcagagtgggaagcccatcatgagctcagccgatgccctgttggacctcatccggaacatgttcccaggacaacctagtagaagccaaattcaaacgagtaccgaagcaaggaccatcccagttgtcaagtccgcccaatggtggcaccatgaggaggccccatccatcgtgcgggatcctcgatctacgtgggtccagtgaggagacatggctcacatgtgcagaacttcgacctggaactgaacca

SEQ ID NO: 575021 - DNA, 260 bp, Homo sapiens
ctgtggactccacagcctatatccagactcgagcgcgcagcgacggaacacgtacacacttcacctccgtaggcacacctgagcttggtcgactgcctgcctgccactaaggccttcagattattagccttgccacatgtaaacgctatcaacaacaacgctgttcattgtccgatccggccctgtaaaccctgcgcataggcgctcgcctaggcgcctcgggggccagcggccatttcgatattccagctattacgata

SEQ ID NO: 575022 - DNA, 350 bp, Homo sapiens
gtggtgggacgccttatccccgcccccagggggcatggcattgtttccgcccctgtgcctaaaaaactgctcatgatgggtgggatcgatggctgctccccctcagcccgggggtgcattgcccccctggggaattttgccaaggcccccttttatgcccttttttaaacctacaggtacctgaccccccccctttggaaggagactgtattcccccagtttccctttcaggggtttcttgccccccttgtcaaaaccccccccagagtttccgtgcagcggactcaggctcccgctgtgggtcccacatagggtttttttcccaaaaaaattaagtgaatttagggtta

SEQ ID NO: 575023 - DNA, 85 bp, Homo sapiens
tctcatagatttattactgcgtcatattatatatagatatatgcatatatacctttttttttttaatacaatctatatacccttc

SEQ ID NO: 575024 - DNA, 338 bp, Homo sapiens
gtgtcaggggtgcgcagacgatgccgcccgcctctccgggcctgcgagtgggctggcggataccggagtccctgaggtcaccggcggaggatatgagacttcacaacctgctaaaaatgagctttcctaacaacgtgggacctattcttctacgcgtaaactctcttagccatgagagatcagacaaaatccaaggccagagactcattttcttccaaaattgcttactctgaaaggttttaaaaataaaagtgggaagaaatgtgaaaagaaaataactcgggaacccaattcactatgccaaaaggaaaaataaagctgaaagctgagtcatgcaa

SEQ ID NO: 575025 - DNA, 591 bp, Homo sapiens
gctgggaccgtgctctgacgtctccgccgtatcttccgaccctcgccgccgcgcagctccccgcgctcgtgccaccgccgccggtcaccctcagcgccaccgcgcatgcgggagatcgtgcacctgcaggccggccagtgcggcaaccagatcggggccaagtttgggaggttatcatgtgacgaacatggcatcgacgcccacaggtcactataccatggggacagtgatctgcaactggagagtgatcaacgtgtactacaacgaggccacaggaggaaattatgtccccagaagcggtgctggtggaccttggaatcccgggcagccagtggatctcttgtccgttctggccccttctggtcatgatctttctgagccggacaaccttcgtgttttgtgcgcaattcctggagcctggcaacaagctgtggcacatagcgggcctctatcagcggacgtggcgcatgcatgcttggtgcgacgctgtcctggaccgtacgtccgcgacagggatggccgacagagctgcgacctgtccttcacgtgggcttccctagctgacccactcgctggagggcggtggcacgg

SEQ ID NO: 575026 - DNA, 655 bp, Homo sapiens
  misc_feature (484)..(484): n is a, c, g, or t
  misc_feature (574)..(574): n is a, c, g, or t
tcccggtccaaacacagctgcggggatgaggaaactgctgtccagaataccccacggatattttgttccagccaaaaaccttggggaaatctcctgtgccatcgtgcagccacattgaaaaaaccagaggctgcgtggggaacggtggaggcagtctcagaaggaactcagtgagtgggctccaaagttactctcagattgagacgtgactcaattcgtggccttcatattccacagcagggtgtgacatagccgtgtttcatttccacagattaaagagatctcaaagaaactcctcattattacattacacataggaaattatttctccagccattcaaaattaatgtgacagcaggtgctcattttagagcaacacagatgtgaacccggcggagacctgtgccctcctatactctcacaccattcacatgtggaacccacaccagtgtggtttctccccccttcaaatctcgggcgtgantctcgtgcatctctgtgagaaactgtgcctttcatctctttagaaaggaaaaagcctcccgaggctcccctttctctcacaaggcacacncacagagcccccagaaagatgtgggatgatagttgctgtcgctagtgcagtgcggtgctattccacgcgacaccctgtggg

SEQ ID NO: 575027 - DNA, 309 bp, Homo sapiens
  misc_feature (3)..(3): n is a, c, g, or t
  misc_feature (84)..(84): n is a, c, g, or t
  misc_feature (101)..(101): n is a, c, g, or t
  misc_feature (112)..(112): n is a, c, g, or t
  misc_feature (134)..(134): n is a, c, g, or t
  misc_feature (279)..(279): n is a, c, g, or t
ggntcaaaaaagtttattttctggccccaggcacagtagcttactccctgaaatccccagcactttgggagccccaaggtgggnggatcacttgaggcccnggaattcaagnccagcccgggcgacatagcaanaccccatttctacaaaaaatttaaaaattgtcatggtggtgcacgcctgtggtcccagctactcaggaggctgaggcaggtggatcacatgagcctgagaggtcgaggctacagtaagctgtgtgatttcatcattgcactctancctgggtgatagaagtgagactttgtctca

SEQ ID NO: 575028 - DNA, 139 bp, Homo sapiens
tagcggaccctatatattctacaaatagtaattctctagccatcatttggagtatttaaaattcttcacccgtttttaatgaacacaaaaataagtcttatgtcttcattaaaaacgggtgaagaatttgaacatttgc

SEQ ID NO: 575029 - DNA, 386 bp, Homo sapiens
ctgtttgctcgactctagagatcccactggttgaatacgaagcaggtttgttcttccctttaattctacgagttcctagtgaccatggaagactgaaaagccactagccagtttatcacctctaggccgcatcgttcgtcgtggagctgtacaacttctggcggctgtgcaccaaccttgaggaatccctcttaacgaacctacgctcagttcatgccacacgcgtgctcttgagaagtattttgtaaaacattctttttaaatcacctacaccccttatccccatactagtaattatctgaaaccattaggctactcattcaaaccaatagccctggccgtacgccttagcgctaacattactgcaggccacctactcttgcacc

SEQ ID NO: 575030 - DNA, 180 bp, Homo sapiens
gaactccgatttggacaggagaggaagtgctcagagacaaaaacaactggcaaaatctccagagccgaggcgtccactggccaggatccccaagggcaggcccaggcgaggagctgggcataacagggaaaggccgcctctccagagggggatgagagcaaggtctcggagcatctaagt

SEQ ID NO: 575031 - DNA, 498 bp, Homo sapiens
  misc_feature (32)..(32): n is a, c, g, or t
  misc_feature (64)..(64): n is a, c, g, or t
  misc_feature (85)..(85): n is a, c, g, or t
  misc_feature (116)..(116): n is a, c, g, or t
  misc_feature (138)..(138): n is a, c, g, or t
  misc_feature (141)..(141): n is a, c, g, or t
  misc_feature (153)..(153): n is a, c, g, or t
  misc_feature (160)..(160): n is a, c, g, or t
  misc_feature (170)..(170): n is a, c, g, or t
  misc_feature (183)..(183): n is a, c, g, or t
  misc_feature (218)..(218): n is a, c, g, or t
  misc_feature (224)..(224): n is a, c, g, or t
  misc_feature (232)..(232): n is a, c, g, or t
  misc_feature (234)..(234): n is a, c, g, or t
  misc_feature (240)..(240): n is a, c, g, or t
  misc_feature (267)..(267): n is a, c, g, or t
  misc_feature (272)..(272): n is a, c, g, or t
  misc_feature (276)..(276): n is a, c, g, or t
  misc_feature (323)..(323): n is a, c, g, or t
  misc_feature (336)..(336): n is a, c, g, or t
  misc_feature (341)..(342): n is a, c, g, or t
  misc_feature (344)..(344): n is a, c, g, or t
  misc_feature (349)..(349): n is a, c, g, or t
  misc_feature (358)..(358): n is a, c, g, or t
  misc_feature (360)..(360): n is a, c, g, or t
  misc_feature (362)..(362): n is a, c, g, or t
  misc_feature (364)..(364): n is a, c, g, or t
  misc_feature (366)..(366): n is a, c, g, or t
  misc_feature (370)..(370): n is a, c, g, or t
  misc_feature (466)..(466): n is a, c, g, or t
  misc_feature (471)..(471): n is a, c, g, or t
  misc_feature (476)..(476): n is a, c, g, or t
ttacagcacccccacgcccctctctttttggncctcccccccaccacaacccccacccccaacncgcccaccctccccccccccncacccccccgcccccggcccccgcttccccnccccccttcccccccccccccntcnttccactcttanttttttnttttcttctnttttttttttttnttttttttttttttttttttttttttttttttttntttttntttttatntntatatnttttattttttttattttttttttctnttttntttntgcttttttttttttttttttccattatttttttttttttctgtttnttttttttttccngctcnntnttttngtttcgatntntntntntttnttatgcagtttgtgacattaatagtattgtaaagttacattttaaaataaacaaaaaactgttctggactgcaaatctgcacacacaacgaacagntgcanttcanagagttctaacaataagtaaga

SEQ ID NO: 575032 - DNA, 354 bp, Homo sapiens
  misc_feature (226)..(226): n is a, c, g, or t
  misc_feature (322)..(322): n is a, c, g, or t
  misc_feature (327)..(327): n is a, c, g, or t
  misc_feature (332)..(332): n is a, c, g, or t
ggcatagtgctgacatatattcagagtgttgtagttttaaggttagcgtgacttcagttttgactgaggatgacgctgattgttagctgttttgacattctatctatttgtatatatataaatatattaatgtatgccagtcttggctgaaatgttttatttaccatggttttatatctgtgtggtgttttgtcccggctcgggctatggcccgagagctgctttnttatgcagtttgtgacattaatagtattgtaaagttacattttaaaataaacaaaaaactgttctggactgcaaatctgcacacacaacgaacagntgcanttcanagagttctaacaataagtaaga

SEQ ID NO: 575033 - DNA, 384 bp, Homo sapiens
  misc_feature (116)..(116): n is a, c, g, or t
  misc_feature (131)..(131): n is a, c, g, or t
  misc_feature (203)..(203): n is a, c, g, or t
  misc_feature (221)..(221): n is a, c, g, or t
atctcatttacgcaggtgagaggagatggtatagtgttaatggaactgctggctgagggagtaggctgatttccgacttctctgcagttatgacacagctctctttgtaagagagngacagaactaaccanccaatggatgatttcagggggagaggtggagggcagatgtcctgggcaaaccgggccccttctgccacacanctcacttgatccttttgncaaacttgtcaaactcagtggaactggcttcccagttgcccctttgccatattccaagtccccctcagacttcatgtctctgctcatcagcactgtcccaggatcctggagagggagaacccctggccccaggggaaagaggggggggtctcccgtttcctgt

SEQ ID NO: 575034 - DNA, 111 bp, Homo sapiens
tgaccggtactgtttggacacgggtacttcctgacctcggcctgcctctacttgccactctcttctttatcagatggtactttgtcttcttggacgcttttctcccttcac

SEQ ID NO: 575035 - DNA, 356 bp, Homo sapiens
cattgacgacttgtgccaggttatgcctgtaagtatgttattgccaccttgtggttgtgttgtgctaactgccaccttatttgtagtcttctaatgctattctttctttaaaatcaggctttccttttagaactcttctctgtcttactttttaaaagtcccttccttgcagagacctattctgcaatgtgcctgaactcttacagaacagtacagattttaggtctgatggccattgatttgaatgccgaccatgccatttatgggctttgtaaacttgagtgagttatttaacctctctgagcccaaatgtccttatggcaatactaggttattttaaaaataataatgaaaag

SEQ ID NO: 575036 - DNA, 509 bp, Homo sapiens
  misc_feature (117)..(117): n is a, c, g, or t
ggttgcactaactgcaaggttgctgggaagtagagtccattggttgatgagcttgactgcggtttgggaaccttacctctcctccttagcccaatatgctgtctggggtcctattcnaaataaagttgatttctccttggtctcaaaaaaaaaaaaaaaaaaaaaaaaaatttttgtgggcggtttggcgccttggaaaaagtttttataagaccatttcttgtgtggcgcggcggcggcccaagtaatcgggtactgttgcacccttgggtccatatagcgctgggtccccaaagagaaagaccgtggccaaaggggactaaggtgggtgggttttcctcaaccaattaaaaaaaacgccccggggggaacacccggcgtcggttcctggaccaactcccagaatgggacggtcccgggagcgccaatccctggggcctctatccacccggggcgtcccaagcggagacgccggaatattcaaaattaaggccccgccggtgtaggaa

SEQ ID NO: 575037 - DNA, 225 bp, Homo sapiens
ttccctggggacccccccccccctgttttttccccccttagaaaccccggggcccgttcccccccccggctttttccttgggcccggggggggtttccttttttccccggggaccccttttgccccttgggcctttttgggggccccttttaacccgttttttccaaaaaaccgggtggggccgggccggggtttcccgggtttttttgcccccccgggccccca

SEQ ID NO: 575038 - DNA, 219 bp, Homo sapiens
ctgagtaataagcagcctgacttcactcccctcaatacgatctccgcctatggaaactcttttaatctaactggtgaatgtaatcagcaaactcggataatctcgatcgtgcaatcaggcctcacagaggagctggaacgagttaaatagtggaccttcatacctttgggagtcgacagcgaaagatcccagtccttcctggccagccagttccggctc

SEQ ID NO: 575039 - DNA, 544 bp, Homo sapiens
acgacggggtctcagaggcgatctgcagtggtcaaacacacactgggggaacgcctgtggccgcccgtgtgggacctcaggtcagcggtgaagccaaaggactcgtggacgggcagataggccttgaccacaaagatgggggtgccggccacctgggactcctcgaacacgtggccccgtttcctgtccaaaaccccgtagatgccaccgaccacctgctcgtggacactggatctccacaaggtagatgggctccatgaggcgtgggcaacatcaagatctggtgcttggggcccgagggaaccggccccaaaatcctcaccgacatcaccaaggggtgacaggtactttgacccagccaagggcaagtacaggcaagtcagccaccagccccgaagggaagaagctgcccagcaccttctgccagttgatcctggaccccatcttcagggtgtaggatgcgatcatgacttccacgaacgcggagacggcacacctgatcgagaaactggacttcaaatgtggacagcgaggacaaggacaa

SEQ ID NO: 575040 - DNA, 250 bp, Homo sapiens
ttttgtaatgtcggccggaagtagcgtatgatggcgcactgcaggcggcgcatatgcatctaggctatacatataccggagtatacgtagccggtaacgttaacaaccggacctctagaactatagctagcatgcgcaaatttaaagcgctgatatcgatcgcgcgcagatctgtcatgatgatcattgcaattggatccaaatatagggcccgggtaataataacctcaggtcgacgtcccatggccat

SEQ ID NO: 575041 - DNA, 1649 bp, Homo sapiens
gctacggtggccgcggggcggcggtggcgattggacttggtgggtcccgggccaggggcgggcgccgccatgggtaacctgttcggccgcaagaagcagagccgcgtcacggagcaggacaaggccatcctgcaactgaagcagcagcgggacaagctgaggcagtaccagaagaggatcgcccagcagctggagcgcgagcgcgccctggcccggcagctgctgcgggacggcaggaaggaacgggccaagctgctgctcaagaagaagcgataccaggagcagctcctggacaggacggagaaccagatcagcagcctggaggccatggttcagagtattgagttcacccagatcgaaatgaaagtgatggaggggctgcagtttggaaatgagtgtctgaacaagatgcaccaggtgatgtccattgaagaggtggagaggatcctggacgagacgcaggaggccgtggagtaccagcggcaaatagacgagctcctggcaggaagcttcactcaggaggatgaagacgccatcctggaggagctgagcgcaatcactcaggaacaaatagagctgccagaggttccctccgagccccttcctgagaagatcccagaaaacgtccctgtcaaggccaggcccaggcaggcggagctggtggcagcttcgtaacgtggcctcgtcttgtgggactcacggggatgccccagggactgtggcccacagagagtttgggtcacggccagcccctgaccgggttccctggagcccagtgcgcacggtgctgagcagagctgcagccacgcaggcgcattgcaggaggactccagagcgtctcctggagaccttgagcctgaacgcactcaggcgccactggcctgctctcagtccggattaactctcgaccgagcccagcttctgccggttgtgggctcccccggtggccgaggcccaggcccaacgcctctggtgctgttcccctgcagtcccagccccgcgtggctcgcgctcgtctgtgaggaagacacctccagaccttggggtccccgcgcttcctcttgctcctcgctgctcccattagctggtgcaggcttccgttaaggggtccctcccttggcctggcttcccggcgcacctcagcttccctgctggtggggggatccccaggagaccagcatgtgctgaacctctctgtgcctctgcctccgcaccctagacacccacctccagtttgaaggtggcgggccaggggctttcttgctgaattgacgactccgagagccctgactcccgccttgccactcacggctctgtccactagggctcagccctgctgagaaaggacctccgatgcttgggagacgctgctccggcaggtgcagccccggaagtttgtccatgggggtccccgcggctggggctcatggaactgcgagacccgggaccctcctgccctgcgggtccccgagccaccagcagccaggaccggaggctgtggggcatggcgtgacttctcgtgcacagggctggtttggttatgagacgatctcgctgggaccgcccctgcccgtggaaagccacaaggacaaagggagcggccacctcgacccccagacaggccggcccgtattaaagttggccctgca

SEQ ID NO: 575042 - DNA, 354 bp, Homo sapiens
agctcccacactgcacggagttagctcatgtgtcacaggttctgggggctgggcatcctgagatagagatctccaccacttcttgatgcagagaccccgcctaccagccccctgcacatgcatggccgtgcaggcatagacatacgtgccattacctggcgtgtgaaaggtggcccaggtgttgtgtccccttcctcagctgctgactgcttccccggtgcaggttcccacacctgcacgggaaccgaaactggttgggcaggcagatggcgtcacagtccgcctcgtctgagcggtcctgacagtctgcctcgcagtcgcagcgcaggggcaggtccaaacactgaccggacc

SEQ ID NO: 575043 - DNA, 867 bp, Homo sapiens
gctacggtggccgcggggcggcggtggcgattggacttggtgggtcccgggccaggggcgggcgccgccatgggtaacctgttcggccgcaagaagcagagccgcgtcacggagcaggacaaggccatcctgcaactgaagcagcagcgggacaagctgaggcagtaccagaagaggatcgcccagcagctggagcgcgagcgcgccctggcccggcagctgctgcgggacggcaggaaggaacgggccaagctgctgctcaagaagaagcgataccaggagcagctcctggacaggacggagaaccagatcagcagcctggaggccatggttcagagtattgagttcacccagatcgaaatgaaagtgatggaggggctgcagtttggaaatgagtgtctgaacaagatgcaccaggtgatgtccattgaagaggtggagaggatcctggacgagacgcaggaggccgtggagtaccagcggcaaatagacgagctcctggcaggaagcttcactcaggaggatgaagacgccatcctggaggagctgagcgcaatcactcaggaacaaatagagctgccagaggttccctccgagccccttcctgagaagatcccaggtatttccatgtttgattcttttgaatggttggaattcgcaggagaacaagtggattctagaagggaacagacagaatgctcccaggccttcctgtgccgtgggcgagcctgctgcctggctgtttggcttgggggcgttgcgttgctggccttggggttgggcttgggttaccaggggttcggtaactgggcaacctcataagagaggccatacccattcaaagagacacattcagaaatcaaactg

SEQ ID NO: 575044 - DNA, 520 bp, Homo sapiens
gtttacgggctacacattcaccgtgtgttcaatgaactcctaccctttggcatacactctattggacctgcccgctaacactcgttagcttccctaacttcctcgaagagaaaaggtcccgtcatcgagggctttcggaaacatggcctttgggagtgcgtccttcggagtcttcaaccaccgtgccacgtttcgccaggaggcacccggcttgctgactggaagacgctccccggagctcactttccggactggcactctcgcgcgttacctcggtgttcccaaggtcagtcacaaagtggcctgtgtgtaccggccttgccaggggccgcatcggccacccagtatcctcagccacggtaagtcaacatgttcctcgtgtctcccacagccgccagcaacaggctgctctaccccgggcaggaggtggtccaggccacgcatggtggtcctggccttggccatggtgcccatgcctgctgctatggcacacccctgcacctagcatgcaccgcacacc

SEQ ID NO: 575045 - DNA, 619 bp, Homo sapiens
gctacggtggccgcggggcggcggtggcgattggacttggtgggtcccgggccaggggcgggcgccgccatgggtaacctgttcggccgcaagaagcagagccgcgtcacggagcaggacaaggccatcctgcaactgaagcagcagcgggacaagctgaggcagtaccagaagaggatcgcccagcagctggagcgcgagcgcgccctggcccggcagctgctgcgggacggcaggaaggaacgggccaagctgctgctcaagaagaagcgataccaggagcagctcctggacaggacggagaaccagatcagcagcctggaggccatggttcagagtattgagttcacccagatcgaaatgaaagtgatggaggggctgcagtttggaaatgagtgtctgaacaagatgcaccaggtgatgtgccctgcgggtccccgagccaccagcagccaggaccggaggctgtggggcatggcgtgacttctcgtgcacagggctggtttggttatgagacgatctcgctgggaccgcccctgcccgtggaaagccacaaggacaaagggagcggccacctcgacccccagacaggccggcccgtattaaagttggccctgca

SEQ ID NO: 575046 - DNA, 460 bp, Homo sapiens
  misc_feature (42)..(43): n is a, c, g, or t
  misc_feature (101)..(101): n is a, c, g, or t
  misc_feature (107)..(107): n is a, c, g, or t
  misc_feature (133)..(133): n is a, c, g, or t
  misc_feature (135)..(135): n is a, c, g, or t
  misc_feature (406)..(406): n is a, c, g, or t
  misc_feature (443)..(443): n is a, c, g, or t
cgcgagtgatccctgacagaacggcccccctctccgccctgnnggagccgggagatgtgcagccccagtcctcctgctcggcggactccgcgcgcgcaganctagcngacttcgccgctcattactaatactntncgcgggccagaccaatcccctttctaatgcaccattttcgactgagaacatcaagaggccagaaacttccaagtcagcttgcagacgcagacgcctcctggggtcctggctttaagaaccacgatgccaacattcccggacaagtttatggcatccggatccctcaagggtgctcatctgcaagttgagaagtgttagtagcaattatttatctgtccttggaagaggagttcctgaacataaaatgtcctctgctgggccctaaaactgnggggccggaagctgtgtgtttttggggttgggggttngggggccgaatgtttcc

SEQ ID NO: 575047 - DNA, 2007 bp, Homo sapiens
  misc_feature (1677)..(1677): n is a, c, g, or t
gctacggtggccgcggggcggcggtggcgattggacttggtgggtcccgggccaggggcgggcgccgccatgggtaacctgttcggccgcaagaagcagagccgcgtcacggagcaggacaaggccatcctgcaactgaagcagcagcgggacaagctgaggcagtaccagaagaggatcgcccagcagctggagcgcgagcgcgccctggcccggcagctgctgcgggacggcaggaaggaacgggccaagctgctgctcaagaagaagcgataccaggagcagctcctggacaggacggagaaccagatcagcagcctggaggccatggttcagagtattgagttcacccagatcgaaatgaaagtgatggaggggctgcagtttggaaatgagtgtctgaacaagatgcaccaggtgatgtccattgaagaggtggagaggatcctggacgagacgcaggaggccgtggagtaccagcggcaaatagacgagctcctggcaggaagcttcactcaggaggatgaagacgccatcctggaggagctgagcgcaatcactcaggaacaaatagagctgccagaggttccctccgagccccttcctgagaagatcccagaaaacgtccctgtcaaggccaggcccaggcaggcggagctggtggcagcttcgtaacgtggcctcgtcttgtgggactcacggggatgccccagggactgtggcccacagagagtttgggtcacggccagcccctgaccgggttccctggagcccagtgcgcacggtgctgagcagagctgcagccacgcaggcgcattgcaggaggactccagagcgtctcctggagaccttgagcctgaacgcactcaggcgccactggcctgctctcagtccggattaactctcgaccgagcccagcttctgccggttgtgggctcccccggtggccgaggcccaggcccaacgcctctggtgctgttcccctgcagtcccagccccgcgtggctcgcgctcgtctgtgaggaagacacctccagaccttggggtccccgcgcttcctcttgctcctcgctgctcccattagctggtgcaggcttccgttaaggggtccctcccttggcctggcttcccggcgcacctcagcttccctgctggtggggggatccccaggagaccagcatgtgctgaacctctctgtgcctctgcctccgcaccctagacacccacctccagtttgaaggtggcgggccaggggctttcttgctgaattgacgactccgagagccctgactcccgccttgccactcacggctctgtccactagggctcagccctgctgagaaaggacctccgatgcttgggagacgctgctccggcaggtgcagccccggaagtttgtccatgggggtccccgcggctggggctcatggaactgcgagacccgggaccctcctgccctgcgggtccccgagccaccagcagccaggaccggaggctgtggggcatggcgtgacttctcgtgcacagggctggtttggttatgagacgatctcgctgggaccgcccctgcccgtggaaagccacaaggacaaagggagcggccacctcgacccccagacaggccggcccgtattaaagttggccctgcaaaaaaaaaaaaaaaaaaaaaaaaaaaanaaaaaaaaaaaaaaaataaaaaaaaacaaaaaaaaaaaagcggggggccatggggggggcggaacaacgagagaaaagacgggcaaggtcacaaagaggtgttgcaccgcccactctttctacgaagggaggggagcgagggcaggccccacaagggaggggagaaaactccgacgcgggtcccgtattgtcgtcgactagccgagggccgacgcaggggggggcaaccacgctacaagacgctgcaacactcaccgacaaaacgccactgcacaccataactaaccacacacaggacgccacacctcaggacacgcagcgcgaacagca

SEQ ID NO: 575048 - DNA, 605 bp, Homo sapiens
tttggccgggggccaccccgtaggcgcccaagggtgcaccccggtggcgtgaaaataaatgtgcgcgaatcgtgccgccggtgtgaaattcgctgcggctccccctttgggagggatcgagagaagctatttggccctgtcttgcaaagtaccacggggagacgtaaacagcgctcttcaggacccgcttttttaaggagccccccatatccagcaaggtctcttgtttcgatcccgcccaaattggggctccccttgtgaggcgaccaaatagtgtggaaagtaaatggattttctgtggtaacaagcacgcctgcttttgttatctgactagatctctcgtcccgcaagtctgtggtctgtacagagacgaaatacaagtccccaacagtcgcagaagagttgtggttttgtggtatacacgctctgggaagatttttgtgtatctctctagagaatcatcggtggcgtttgtagacaaacccacaagaggtggtgttcctcgtaaagagaccgacgtttctagaggatgtgtgttctgtctggagacattcccaaaaaagatgtacaccggaattccgcaaagaacaattgatacaaaacaa

SEQ ID NO: 575049 - DNA, 1380 bp, Homo sapiens
gctacggtggccgcggggcggcggtggcgattggacttggtgggtcccgggccaggggcgggcgccgccatgggtaacctgttcggccgcaagaagcagagccgcgtcacggagcaggacaaggccatcctgcaactgaagcagcagcgggacaagctgaggcagtaccagaagaggatcgcccagcagctggagcgcgagcgcgccctggcccggcagctgctgcgggacggcaggaaggaacgggccaagctgctgctcaagaagaagcgataccaggagcagctcctggacaggacggagaaccagatcagcagcctggaggccatggttcagagtattgagttcacccagatcgaaatgaaagtgatggaggggctgcagtttggaaatgagtgtctgaacaagatgcaccaggtgatgtccattgaagaggtggagaggatcctggacgagacgcaggaggccgtggagtaccagcggcaaatagacgagctcctggcaggaagcttcactcaggaggatgaagacgccatcctggaggagctgagcgcaatcactcaggaacaaatagagctgccagaggttccctccgagccccttcctgagaagatcccagaaaacgtccctgtcaaggccaggcccaggcaggcggagctggtggcagcttcgtaacgtggcctcgtcttgtgggactcacggggatgccccagggactgtggcccacagagagtttgggtcacggccagcccctgaccgggttccctggagcccagtgcgcacggtgctgagcagagctgcagccacgcaggcgcattgcaggaggactccagagcgtctcctggagaccttgagcctgaacgcactcaggcgccactggcctgctctcagtccggattaactctcgaccgagcccagcttctgccggttgtgggctcccccggtggccgaggcccaggcccaacgcctctggtgctgttcccctgcagtcccagccccgcgtggctcgcgctcgtctgtgaggaagacacctccagaccttggggtccccgcgcttcctcttgctcctcgctgctcccattagctggtgcaggcttccgttaaggggtccctcccttggcctggcttcccggcgcacctcagcttccctgctgctcatggaactgcgagacccgggaccctcctgccctgcgggtccccgagccaccagcagccaggaccggaggctgtggggcatggcgtgacttctcgtgcacagggctggtttggttatgagacgatctcgctgggaccgcccctgcccgtggaaagccacaaggacaaagggagcggccacctcgacccccagacaggccggcccgtattaaagttggccctgca

SEQ ID NO: 575050 - DNA, 1326 bp, Homo sapiens
gctacggtggccgcggggcggcggtggcgattggacttggtgggtcccgggccaggggcgggcgccgccatgggtaacctgttcggccgcaagaagcagagccgcgtcacggagcaggacaaggccatcctgcaactgaagcagcagcgggacaagctgaggcagtaccagaagaggatcgcccagcagctggagcgcgagcgcgccctggcccggcagctgctgcgggacggcaggaaggaacgggccaagctgctgctcaagaagaagcgataccaggagcagctcctggacaggacggagaaccagatcagcagcctggaggccatggttcagagtattgagttcacccagatcgaaatgaaagtgatggaggggctgcagtttggaaatgagtgtctgaacaagatgcaccaggtgatgtccattgaagaggtggagaggatcctggacgagacgcaggaggccgtggagtaccagcggcaaatagacgagctcctggcaggaagcttcactcaggaggatgaagacgccatcctggaggagctgagcgcaatcactcaggaacaaatagagctgccagaggttccctccgagccccttcctgagaagatcccagaaaacgtccctgtcaaggccaggcccaggcaggcggagctggtggcagcttcgtaacgtggcctcgtcttgtgggactcacggggatgccccagggactgtggcccacagagagtttgggtcacggccagcccctgaccgggttccctggagcccagtgcgcacggtgctgagcagagctgcagccacgcaggcgcattgcaggaggactccagagcgtctcctggagaccttgagcctgaacgcactcaggcgccactggcctgctctcagtccggattaactctcgaccgagcccagcttctgccggttgtgggctcccccggtggccgaggcccaggcccaacgcctctggtgctgttcccctgcagtcccagccccgcgtggctcgcgctcgtctgtgaggaagacacctccagaccttggggtccccgcgcttcctcttgctcctcgctgctcccattagctggtgcaggcttccgttaaggggtccctcccttggcctggcttcccggcgcacctcagcttccctgctcagcagccaggaccggaggctgtggggcatggcgtgacttctcgtgcacagggctggtttggttatgagacgatctcgctgggaccgcccctgcccgtggaaagccacaaggacaaagggagcggccacctcgacccccagacaggccggcccgtattaaagttggccctgca

SEQ ID NO: 575051 - DNA, 129 bp, Homo sapiens
aggataagatccgtgctgtatagcagatgtagtttggtcgtaagtaagtgtctataccagcaagtctcacctctccttctctatgccatggtcttccattagggatgtatttagtctagggttctgtac

SEQ ID NO: 575052 - DNA, 196 bp, Homo sapiens
tgcttgatgtactgcatcacccccagccctgattgtgcctctcaccatcatgaataggaaactgatgaacaccaatgatctggaggagtcaggcagctcacggaggaagatccagcggcatctggatgccaggcaacctcattgagaaagtcatgtgcgtaaggatcggtctcgcttgcttggcagcggtccggat

SEQ ID NO: 575053 - DNA, 1365 bp, Homo sapiens
gctacggtggccgcggggcggcggtggcgattggacttggtgggtcccgggccaggggcgggcgccgccatgggtaacctgttcggccgcaagaagcagagccgcgtcacggagcaggacaaggccatcctgcaactgaagcagcagcgggacaagctgaggcagtaccagaagaggatcgcccagcagctggagcgcgagcgcgccctggcccggcagctgctgcgggacggcaggaaggaacgggccaagctgctgctcaagaagaagcgataccaggagcagctcctggacaggacggagaaccagatcagcagcctggaggccatggttcagagtattgagttcacccagatcgaaatgaaagtgatggaggggctgcagtttggaaatgagtgtctgaacaagatgcaccaggtgatgtccattgaagaggtggagaggatcctggacgagacgcaggaggccgtggagtaccagcggcaaatagacgagctcctggcaggaagcttcactcaggaggatgaagacgccatcctggaggagctgagcgcaatcactcaggaacaaatagagctgccagaggttccctccgagccccttcctgagaagatcccagaaaacgtccctgtcaaggccaggcccaggcaggcggagctggtggcagcttcgtaacgtggcctcgtcttgtgggactcacggggatgccccagggactgtggcccacagagagtttgggtcacggccagcccctgaccgggttccctggagcccagtgcgcacggtgctgagcagagctgcagccacgcaggcgcattgcaggaggactccagagcgtctcctggagaccttgagcctgaacgcactcaggcgccactggcctgctctcagtccggattaactctcgaccgagcccagcttctgccggttgtgggctcccccggtggccgaggcccaggcccaacgcctctggtgctgttcccctgcagtcccagccccgcgtggctcgcgctcgtctgtgaggaagacacctccagaccttggggtccccgcgcttcctcttgctccgatgcttgggagacgctgctccggcaggtgcagccccggaagtttgtccatgggggtccccgcggctggggctcatggaactgcgagacccgggaccctcctgccctgcgggtccccgagccaccagcagccaggaccggaggctgtggggcatggcgtgacttctcgtgcacagggctggtttggttatgagacgatctcgctgggaccgcccctgcccgtggaaagccacaaggacaaagggagcggccacctcgacccccagacaggccggcccgtattaaagttggccctgca

SEQ ID NO: 575054 - DNA, 297 bp, Homo sapiens
cgccgcgccgtgtccttcacggttcacgccgttatcacctctagctctcattctcctattatataccacatgattgcattacaatctatctttatatgcggcttcaccccttcttcgtcctttatggaatactcatgctttgaactatcgagtgagccgacctcattctgggtacgatacctgttagactgtttctttgactattgccggatgcggaatgcccgtcctgtgtaccgtttgatgtgctgagaccatttgtgggggtccacctggacttggcctgcatgcatggtcaca

SEQ ID NO: 575055 - DNA, 535 bp, Homo sapiens
aaaatgataatgatctcatagaaatgaacaaacgaatgagcgcatgacagcgttcgtcagtaagctagaagaagccaagaagaagaagagaggatgccctaatgtgagaccaggaagtcagagacaaggctgaaggagctcccaggagtgtgcgattgagaccatgatggtcctctgggaagagtgtcagccctggctgaaacagacctgcatgaagttctactgcacgcgtgtgcggaagtggctcaggcctggttgggcgccagcttgaggagttcctgaaccagagctcgcccttctacttctggatgaatggtgagcgtatcgattccctgctggagaatgagcgggaggagacgcacatgctggatgtcatgcaggatcgaattcagccgcgcgtacagcatcatagacgagctcttccaggacaggttcttcacccgggagccccatgatacctaccactacctggccttcagactgccccaccggaggcctcacttcttctttcccaagtcccgcatcgtccgcagct

SEQ ID NO: 575056 - DNA, 300 bp, Homo sapiens
atgtgagtgcggggcagaaagaagaggatgaggccagtcctctgggggtgtcatctttgcgcagcagttgacaggcagtgggtgtgaaggtctatatggcaaggatctacacacgcgggaggagggaggtactctgcaaagtttgcagcgtgggtaggaaatgactgtggagcagtgaggaaagttgatcagtgatggtgtactaggttagagagtgatggtggtgtaggtggagagtgagtgtgtgatggtggagttggtagagtgagtgtggtgatggtgttgtgggtggagattgag

SEQ ID NO: 575057 - DNA, 122 bp, Homo sapiens
  misc_feature (33)..(33): n is a, c, g, or t
  misc_feature (62)..(62): n is a, c, g, or t
actgcaatcgtctcagcctagctctaaccgatnatatacagagttctgacttggaaaacccnctgggaccagaaatgttattgaaagatgtctaaactaagagtcaatagggggacgggcat

SEQ ID NO: 575058 - DNA, 1326 bp, Homo sapiens
  misc_feature (453)..(453): n is a, c, g, or t
tcaccgcttatttcactttttttttctggtttaaaacccctatgttgtgtacccacagtgtggaccctgagtctccgcgtgcagcggaaactcgtgggtggtgggttcttgacgagggtggctcaggtgaactccgtgaatagggagaactgtggtgaatacagtctccttccagaaggtctcgggggctcaggtatagcgtggtaggtctcttataaaagatgtggcactcaaagggtggcctttggcaaagtttgcccaggggtggcagtgtgccagccccgggcgtgagagttgttagcagctcattcgaattaccagccacattcagtgaaggcaggtttttataggcacaccgaggtgtcgcggaagaaacgaatccccgagtgtgccccgcggtggtgtgaccagggaaattggagggcgttaccacagcccaaacagagaccccgnaaggcgtgtccgttgttccaccttttgccaagtgggacgaccacgtttggtcggggcgctttttgccagatctcttttgttccccccacaggtatgcgccccttgtgcagccacgggggagaccaatgtgggaagacgcttgtggcccagagagttttgatttgggccccaagggtgatgtgtgcgggggtggacacccttccctgttgggagagccaccttttagaacacccacataaacacgatatgctgggccccatgtgtgattgtggctccccccgcgatattagcaaagcaaaatagtgccctttgaaacccgtgggttggcgcttgggcccgagacacggggggtatattgaattcagtgagcaggtggaaaataaccctttttaaaaaaccctatattccctttgaaagagaagggcgccccagagaaagaaaaaatcaagaggaaactctgaataccctaaaggggggacgggaacacacagaacgtagaaatttccctccgaagaggaaattggtacattacattcgtctcttgttaaccaaggcggcccacatcgtgtagacagggaatacccacactatatctacggaattgtcaccacggaaacacccggggaccatgcgcccgagcgcgtaaaagcgggaacccgcgcagaaataccggttgaacctctgtgagaacacacgggtgtccaacccggggccagggagtgtgctcccacgttacatgatacaccattgcacgcgcgttctgcagatagctgatcaaaattatgacgatatataaacgagatgcaatgtacgaactttagaactgtgagcatattaataatgaagtataaagacgtcacgagtatactcgat

SEQ ID NO: 575059 - DNA, 340 bp, Homo sapiens
agacagtttaaaaggatagagatggtagtatctgtcatataggtcagtcctctatcatattcggctccatcgcggaaacccaccctctctaatcaggagactcacgtctttcagtaatcctagtcatatgtagagtgtgtactggcccatgggctgtgtcaatcatacttaataaaatgataggcctgaatggagcattcaagtttctctagatgccaatccatctaattttacagattttcaacaacaccaaggcccagcagcaaggtaaccacctcatttcacagaaccacgccgcccagccatgtgcaaacaggctcaatatcctatcactgaccat

SEQ ID NO: 575060 - DNA, 837 bp, Homo sapiens
  misc_feature (29)..(29): n is a, c, g, or t
  misc_feature (71)..(71): n is a, c, g, or t
  misc_feature (129)..(131): n is a, c, g, or t
  misc_feature (133)..(133): n is a, c, g, or t
  misc_feature (139)..(139): n is a, c, g, or t
  misc_feature (157)..(157): n is a, c, g, or t
  misc_feature (162)..(162): n is a, c, g, or t
  misc_feature (179)..(180): n is a, c, g, or t
  misc_feature (197)..(197): n is a, c, g, or t
  misc_feature (206)..(206): n is a, c, g, or t
  misc_feature (220)..(220): n is a, c, g, or t
  misc_feature (222)..(222): n is a, c, g, or t
  misc_feature (233)..(233): n is a, c, g, or t
  misc_feature (242)..(242): n is a, c, g, or t
  misc_feature (256)..(256): n is a, c, g, or t
  misc_feature (259)..(263): n is a, c, g, or t
  misc_feature (286)..(286): n is a, c, g, or t
  misc_feature (292)..(293): n is a, c, g, or t
  misc_feature (297)..(297): n is a, c, g, or t
  misc_feature (301)..(301): n is a, c, g, or t
  misc_feature (307)..(307): n is a, c, g, or t
  misc_feature (321)..(321): n is a, c, g, or t
  misc_feature (324)..(324): n is a, c, g, or t
  misc_feature (332)..(333): n is a, c, g, or t
  misc_feature (335)..(335): n is a, c, g, or t
  misc_feature (338)..(338): n is a, c, g, or t
  misc_feature (345)..(345): n is a, c, g, or t
  misc_feature (351)..(351): n is a, c, g, or t
  misc_feature (358)..(358): n is a, c, g, or t
  misc_feature (361)..(361): n is a, c, g, or t
  misc_feature (364)..(364): n is a, c, g, or t
  misc_feature (372)..(372): n is a, c, g, or t
  misc_feature (379)..(379): n is a, c, g, or t
  misc_feature (390)..(390): n is a, c, g, or t
  misc_feature (394)..(394): n is a, c, g, or t
  misc_feature (438)..(438): n is a, c, g, or t
  misc_feature (465)..(465): n is a, c, g, or t
  misc_feature (476)..(476): n is a, c, g, or t
  misc_feature (481)..(481): n is a, c, g, or t
  misc_feature (505)..(505): n is a, c, g, or t
  misc_feature (683)..(683): n is a, c, g, or t
  misc_feature (827)..(827): n is a, c, g, or t
tcctagcttgtcaatattctgttttatcnttttcattaacaaagcagattacaatgtagccctattttgcnttataattagttgttacaagacactgcacattctcctgaagccacacaatgatttccnnngncccagnccactcttccaatcagtnactgncgagcccactggcaggnncagggctacttcctgtnttccaatgntgtgcctgacatancnctttgcaagangagcgtggnttatgtggacacanttnnnnnggaatttccattacacatttggnagaagnntgcntaanttaatnttactattagtgtnttngtgttgtnntnttntgaaggnatattnttttccnttnttntgcttagntcaaggnagattaaagtntttngtccaaaattttaaccagattatgagctatttcctaagctaaanttacaaagtaaattctgaggttaatantgatgttatanttctnttcacatggcctttactgtttgtnaactgtgttatttaaaatcctgagcttaacaaaaatctttataaatcaactcatcaaaacaggcatttggccaataagaatttaatttcacatcaataaaactttagactttagatttatttagggctgtttgcatatgtttatagaatagtttactctaaaagatgacaagacagcnccccctcagtgagaccctggcctaaatatatttgctttatttatatagcaagaggataacattaaacatgggagctttcaatttgtggcactgaataatctacacagggcatccttcaaaggctacaattaaaggatccacctnacttttcagc

SEQ ID NO: 575061 - DNA, 1341 bp, Homo sapiens
ggacatagctcagctcgcaagcaagctaaaactgttatcatgacatgaccaatgaatcctgacagccagtgtgcctccccgcactgcaactgacagggaaggctttctcgctgagtccatgcccccatgactcagagtggcccacctacatcatggaccccagtgacctatgcctgcacttgcttgtgagcatgatctgggtgtcttgaatgtacctgcactggtgttgtgcaggatgcaagtgactgtggaccatcgcgtcagtctcttcttgaccactcaactgagacgcgaccatgacacgggaaatatggcactcactgcctgcatatagaggcgccaatgacggaacgcatgacctgtcctgccatatgagcctgctgagcaacagcaggtggcaccatgcaccaaccactggggatagcccatgtgatgcctggccttactgacactgataccggtcatggatgggctggcagactgccaacgagtctccgcctattctcagccttgctacaattgcggcctgtctgaggatggtcacgcaggcaccaacataacggtggtggccaccgtgcaagatgtccatgggaagccaagtgaccgcatggctgccagcccgacgcgcaggagaagaagcctatgcacctgcactgcacgcccaacggcaccccgacggaccactggtgcagggaacatcatacccaaggctccacgggcactgcgcggacaaccaacatagtatagtgtggaccccattgggtaggccagatgagggtaatctccaatggccaccttctgaatcacaatgtggcgactccaacgtcaatggcataggatcagtcccctttgctcccaacatcagctccttatggatgcccgtgagatacacattacattcagaacgggtaaggacggcagctatagcagaaccacaaaaggtgatcatcaccatgatggaatggcaacagcaccgaaatgtcagttgagaggtcccattaaggcatacgggtcccccccgcgcaaggagtatgaaacagacacacaaaggggagactcagcggggaaaacggtggagtccacgcatgtcactaaggggcccacaaagaaagacaccgatcacaccgacaagacgaaaccacgagggagaacacgcacccgtgtagacatgaaaccagcggtgagactcacagtaccaacgaactttgacaggaacacatacaacacttggataggcactacaagcaggcgacgccaccaagaacagtcaaggtgcacatactacggcagtggtcacgagtcaggtcgacttcgttaaagcacgagacacatagctcgaag

SEQ ID NO: 575062 - DNA, 242 bp, Homo sapiens
tgccaaagcgtatgtacccaaacctgtgtccttccgatctgtcctggctgcctccctaacctcttttcacactcctctccatccagacttttcttctttctctctctttttttttgggtctcactctgtcactcaggctggagtgcagcggtgtgatcatggctcactgcagcctccaacccctgggctcaagcaatcctcctgcctcaccctcctgagtacttgggtactacgctttggca

SEQ ID NO: 575063 - DNA, 165 bp, Homo sapiens
cccctgcttgtgattgaaggcgctcagtcagcagaatgtgagcattgacttggccacgttcatgaagctgcggacggatgcggtgctgccgttgactgtggctgactgtgcagaaacttcttgggaccccacgttgtagggccttgaaggcggagtgagcggcac

SEQ ID NO: 575064 - DNA, 379 bp, Homo sapiens
acatctacctgaatttcaattataaggctacagtaaccaaaagagcatggtactggtacaaaacgcagacacattgacggatggaattgaatagtagaacctcatgaaataaatccacacacctacagctgtcaaatcttcaacaaagtttacaaatatcagcattgggactataactccctactctatacatggtgctgtgatggttgactagccatatatagaagagatgatacttgatccgtactagcagcatatgcaaaacttaattcaacatggattatagatttgattcttagacctctaactgtcagagtcctataagaaaacctaggatacacaattctggacttcagcctgtggacataatttatgacta

SEQ ID NO: 575065 - DNA, 188 bp, Homo sapiens
gacgaggatgacttagatccatactgactgttaattccaagcttacattcattcccatatgctctggttaatatgattatggtttactaagaggggttttgtttgtttgttttagcatgttctatatttctataatgagcatgaattttataaaaattactataatagttacatatctaattaagtat

SEQ ID NO: 575066 - DNA, 257 bp, Homo sapiens
tggggtggaccaaggggaatttaatggggagggtcacaagtgacacaagagggtggggttctcccttaaggcccctctccctcttctttagagaggggtctctaacgtgtggcaaagtgtgtgtgagaggagaggggaaaatattcagaggtggtgggtgggggacacgtgagagtgtgtgtgcgagagggagactctctctcccacagagcagagtgagagagaggctctctctctctctctctctctctctctgt

SEQ ID NO: 575067 - DNA, 345 bp, Homo sapiens
acgtgctgacataaggctagagcctcttgcaagtctctattaaagtaaaaggggtggggtgcggtgagtcatgtttgtaattccagccctttgggaggctgaggcaggcagatcccttgagtccaggagttcaagaccagcctgggtaaaacagttaaaccccatttcaactaaaaataaaaaaaatttagccaagcaaggtggggcatgcctgtagtcccagctaccagctcatcaggaggctgaggtggtaggataacttgagcccaaaaggtccaggctgcaataagccaagatcatgcccctgtggtccagcctgggcaataaagttagaccctctttcca

SEQ ID NO: 575068 - DNA, 391 bp, Homo sapiens
ggtcaggccggtcttgaaatactgacctcgtgatccacccatctctgtctcccaaagtgttgggattataggcgtgagccaccgcatccggcctaacaaacctctttaatatctgaatgatagaacaaagctggtttcttatatctgcctctgtgtggaacctgttgtgataggttgttctgattgaagtatttgaagaaatattttattggcttttttagagaattgtggatatttttctttgatgctgtaccaaaccatgacaagttagtttctcaagggttaggtgtagtgtagaagctaaaaccaatcagtggcttttccctacactgttacgtgaaagtccattggtctgtcttgtcctctgaatggatatcttggccatgcgtgg

SEQ ID NO: 575069 - DNA, 713 bp, Homo sapiens
gggggctgggagttctcctgagggaagaggagtggagtaggggggacgcgagcggcggcgttgacaatagagaatattcttggaaggcttttttggtccaatttgtgagatcgatattgctcttaatgatggggaaaccaggaaaatggcagaaatgaacaactggaagatggcaaagtagaaaacaacactatcatcttctatgacggagtcaactccgtttcagcgaaaggtacaacctagacctattaagtcaaccctggcaaacgtaggctagaaaacaccaagcgaactccacgacactcgcaatttcgctaggtcaaacattggaacttatttcaatatacaaagagtacatactccatgaattctgtcacacctagctgaacagaactaggccttacctggagaactgactcagagcagcacgttatgacttccgcattttattgcaaagtttgcaacaaggccatatgaatcttaccatcggtgccaatgtccgctttgagcgtatattactttaaaggtgacaatacgtgcagacagacttgaacagactatggtaagaagaaggtatgagtcctttcaatggtacacacaggctatgcccaacatactccctaattgtgaaacaacgtctaattaagactggacagatgcgcaattagaacgatctgtctacaaataatagaactatgacttatataataaaa

SEQ ID NO: 575070 - DNA, 431 bp, Homo sapiens
  misc_feature (8)..(8): n is a, c, g, or t
  misc_feature (13)..(13): n is a, c, g, or t
  misc_feature (141)..(141): n is a, c, g, or t
  misc_feature (173)..(173): n is a, c, g, or t
  misc_feature (233)..(233): n is a, c, g, or t
  misc_feature (387)..(387): n is a, c, g, or t
  misc_feature (407)..(407): n is a, c, g, or t
  misc_feature (431)..(431): n is a, c, g, or t
aagcctancctcnacaccaattaacgaagctcctgtatcatggagagttcgaattgctctggcgttaaaaggcattgactatgagatagtgcccatcaacctcataaaggataggcgagcaacagttcactgaggaatttnagaccctgaaccccatgaagcaagtgccagcnctgaaaattgatggaatcaccattgtccagtcactggccatcatggagtacctggaaganactcggcctatcccacggctcctgcctcaggacccacagaaaagagccatcgtgcgcatgatttcttgacctcatcgctagtgggcatccagccccttcagaacctgtctgtcctgaagcaagtggggacaggaggaaccagatgcaatggggnccaaaaggtttattacttcnggctttaaccgctctgggagaagn

SEQ ID NO: 575071 - DNA, 738 bp, Homo sapiens
  misc_feature (71)..(71): n is a, c, g, or t
  misc_feature (208)..(208): n is a, c, g, or t
  misc_feature (214)..(214): n is a, c, g, or t
aggcaaggaggcatctgcaaacaaagtatgctcaatctataataacagcagcttttatttccaggaaaagncttgtatgaaataagcctttattgattggtttatagataaaattttttaaatattaagtatattataaaaatgcagtcattgttgtattttgcctgtattatcctttcactcacattcactcatttttggcctcacnttatanaaagtaagattggtactctgattttttttatttatgcttttttaagtctgtttaatgtctaaggaacgtaactagttagaacagctacttatttggcagtctcaagctatggaatgcatactgatgtgtcatgggttcagcaaaataataataaataaatgtgtatataaaaggatagttgagtctcagcaaataactaatcctgtgctctaaacgcgtaagcactttaagtagaaagtagcctctaagtccccactccatatctttttactctttacacacatacacgaagacctctgtgtttgagtacactctgcctcaaatctttgcctcgcccccttcgttagtgaaaacatctcttgtacatggtggtagatgtagatagtacaaaagaatgttgagtgataaattcatgtgagacaattttaataaacatgtttccctgcctactccagatttgagtaacaagttaaaaggtggacaagcacaataataatagcaaatagggtcaactgaaccagcaa

SEQ ID NO: 575072 - DNA, 897 bp, Homo sapiens
gggatgcaggagctgccggctctcaggcttgcactgtccatctcctttagaaatttattttttattgtatttattgtatttttgagacagagtctcgctctgtcgcccaggctggaatgcagtggcgtgatctcagctcgtagcggcctttggtttcaggttcgagtaatgtctcctgcctcagcctccttgagtagctgggattacaggcgtgcaccaaagagagaccggctaatgtattagtattgtcagtagagacagggttttcaccatgtggccagctggtctagaactcctgacctcaaggtgagtcctcccacgctcagtctcccagaagtgctgggattacgggcatgagccactgtgctttggccttagaaatttatcttttctcactgaactgaatcatttgcaacaccaaaagccagttccctggatgaggaccgaatcaccaatatggaagttatttcctaggcttccccaaattgacaaaggaagatcaagtgagcgtcgcagtacatcagctactgttgctcacaggctttttattccttaacataatgaggacaacatcattaccaagctcccatgtgtgagataccagacgttaatccatagacgacatgaggtccctcaccagggactggtgcgaggaccgcaaggtccacctctgtcagcaataattatacccatcagtgggcgatgggtgtgtcggtggcttatggatcaattgtctgtgcgtttttctgataatctacagctgtggttggggggcaaatgttgcttccgcatgggacggtttaacgtttcccatctaacggtttggtgcacatcgtgaccagggggcctcggaaaagaacggccggtatccatataaaggagagtacgtatagggcc

SEQ ID NO: 575073 - DNA, 1885 bp, Homo sapiens
  misc_feature (154)..(154): n is a, c, g, or t
attacattattatttttattttaaaaaccctcctcaataaatgtgagacttacaaaaatcagtccaaccccacaatctttaccaaacatgtcagaatctaggcgtggggctttccaaagcccacaaggtgcatagtatgggcgatgctacaagntgcaacataatctaagatagggcgggatacacacgccacacatacagctgcaggacaagattgagcccaacaaagtagcacgcgtcagagactcccggggaaaacccgtgtggagtcctcacaccaaaaacagtggtgtgcgacccggacaaatgaccgggcgagcaacagtgggtgacacagggaaacactcgaagagaacacccgtgagagaggctgtgctaaagacagaggctacacaacataaacaacaacccccacacatacaacacaatgtgcttacacttgcacgcccacgtgacgttctgctgcacatcatatcaattcggtgagtaattgcgcggtgtggatttatttcatatcatatacacacacctcatcgatgagtgtagacgcccctccacggcggtagcaacatgtagagacacaacacatccgcgtgaacagcgacgacgaccgaataccacacaacacgcgcgaaacctgcgtgcagtaaacactgagaggcacaagagtagtgaggacgacacctatcacaacaagagcggagcaccatcaacactacacagccgcggcggcgcgacggaaacaagcaccgccgcgtgacgatgaggcgaggatgccaccccaccagaagggccgcccatcccacaacaaaaatgctggaagcggcggcgcgtacacaagacggcggacccacacagagcactatccggcgaacagacgacggtgctaccacacacaacgacgcggatgccttaccacaaaacaaaaaaaacagtcaccgcagtagaggagagccacaacaacacaacaaaaaacaacaaacacaacccactatcgtaagacaagggagactacacaaacaacacaaacacacaaaggagaacattatacaaacaaccccccggacgcactccgcgcaacaaggggcgccaccatcatatagtaggcgaacccacaccgcaggtagacgcatactcatactagagcgctagcacaccacaaaagcgaaccaacacaacagacgacacaaactacacaccagcgaggtaataaacacaaatccgacagcgccacaaaaacaaccacggagaaaacaccaaggggacccaacaacacaatgtaacacacgcacacaacaacagcgcacccaacacaccacacttaacgagcgaaccgccacaacaactcagccaacgacgtgacaaccgaatgaacacaacaccacacacgagtggcacacacagaccagacaaacaaaacccaaaaaaacaaaaaagagattaacataactaagagccgccacccgctaaacaaacgaccaggaatacataataatgagcaccgacgagccagaatcaacacaatctacctcaaaacacgcgacatcgattaactgccagacgcaacacaaacaaacgatggcgtcgaaaccacacgcgacacatgacagcagccaaccacacacacccgtccgcaaaccacgaaagcagcagcggcaaaaaagcgcgccaacgcgacacaccaaagcgagaccaccacgcaatcccccacccagtgggaacgacacaccaccacacacagaacgccccgacaacgcacacacagacaaacatgagcctacacacccagcaccaccacacggcgccaacacaacacgcaacacacacacacaacacaccaaatgaagcaccaacagaccacacaacaagaacgaagcacagcaag

SEQ ID NO: 575074 - DNA, 251 bp, Homo sapiens
cgacgatcaacacttggcagtcagtgacaaagatacaggcaggcacaacagacagtgattcaccaggggtggtggctcaccactgtgatcccagctcctagggaggctgaggcagaagaattgactgaacctgggaggtggaggttgcagtaagccaagattgcgccactgcactccagcctcggggacagagggagactccgactcaaaaaaaaagagagtggacacccaacccatgtgatatcccagcc

SEQ ID NO: 575075 - DNA, 200 bp, Homo sapiens
ctggtcccgcgcaacggaggtatcacttagcatataaagcttattcacctgttcctcctctgggccgctgtgcccctcacgcaggccctcagctctccctcgtgggcctcctcctctgttgcattcgtggtgccgtcttcagattccttctcctcctcattgctgcaagtagctccatcgatctgccgagtccgctgcat

SEQ ID NO: 575076 - DNA, 171 bp, Homo sapiens
caaaattgacaaactgcaatatgttcaaacggagaagaaatcaaatccaactcaacattcatataggaaatggcactaggtataaattttggctggagaagtgggtggaattttgataagcagaaacatctttcgtagaggatatatcttatacgttctataaaatgacca

SEQ ID NO: 575077 - DNA, 247 bp, Homo sapiens
acaagagccttgaatcacccggacataaagatgtactcgattagaagagtccgttgtctgactggtaaatttaaggatgtgtgtgaccctcgtgcattataacagacaattggcgcggtgcggtggctcacgcctgtaatcccagcactttgggaggctgaggcaggcagatcacaaagtcaggagatccagaccatcctggctaacacggtgaaaccccatctctactaaaaaaaaaaaagtcgac

SEQ ID NO: 575078 - DNA, 220 bp, Homo sapiens
taaacatacgtaacaacccactactaggcttgctacagtagagctaagctacggataaattagaatggtcagtctactaccactacccaaaatagcagagatccaatatgtgcctatccataatgaagagttcttaattgtatagctccgtaccttccactatgcacaaatatcaaaggtcattccggaaagccgtccatgcatcagtatcacatttgga

SEQ ID NO: 575079 - DNA, 675 bp, Homo sapiens
tctcacttccacctccatgaacgctcctcatagctaggcctactcaacctacacctaaccatataccaatgagtggcgcgatgtaacacgagaaagcacataccatggccaccacacacccacctgtccagaagaggccttcgatacgggataaatcctatttgagtacctcagatcgttttgtgttcttcgcaggatttgttcctgagcctatttaccactccagcctagcccctaccccccaattaggagggcactggcccccaaccaggcagtcatccccgctaaatcccctagaagtcccactcctaaacacatccgtattactcgcatcaggagtatcaatcagcctgaggctcaccatagtctatatagaaaagacaagccgccagaatcctaaatatattcaagcacgtgctttattacaatatttagctgggtaccgtctattgttaccctcactacaagcctacagagtagcttcgagtctcccttcaccatttccgacggcatctacggctcaacattttttgtagccacaggcttcgcacggacttcacgtcacttaatggctcaactttcctcactatctgcttcatccgccaacgtaatatttcagccgtttacatccaaacatcactttggcttcgaaacaattgcctctactgcacttat

SEQ ID NO: 575080 - DNA, 426 bp, Homo sapiens
  misc_feature (214)..(214): n is a, c, g, or t
  misc_feature (312)..(312): n is a, c, g, or t
ggaaaagaaaggaggaggagctggtgagcgagcgcacagaagccttcactattgcccgcaacctcctgacagcggctgcagatgccattgagcggatcatgtcgtcgtacaaggaggtgacggatgctgtgctgtgctacactatgcccgggtgcacgagattgttccaggtatttgaacgatgttcagctgctgtcacttcaagatgtgcccnagggatgctacgaagcggaccgcttcaaaggcgagggggttctttgggggaacccagtaggccggtctggtgtccgtgtggagggcccctctgagagnaatccgatgtgccaaggggttgggttgggactgtggaacaggggatcatctgcgagaacatccccatcgtcacgccctcaggagaggtggtggtggccagcctcaacatcaggg

SEQ ID NO: 575081 - DNA, 997 bp, Homo sapiens
  misc_feature (843)..(843): n is a, c, g, or t
tgtcgcaggagagagaaaaacattcaggttcactcacagtgttttagaacacttggaagagggtcggctttatcctcctttgaataccattagagatgtgggtctgaaaattgcacaaaacattgtgaaggatgcataccaagaaaagacagacacggataatggctgaaccggacaacaaagaagcgtttgtcctattcccacatgtagttgactgagtatgagcagaggctccctgagtggcatacaccgcctagtcaggggggggaaaatacatactgaacgttgacacggaggagtgttgcctgcatggatggagggcttattgagatttatttcatctcgcgtagggtggtgagggcgggcagcatgagattatggattacgcgaagctgatcattacagacattactgggacaggctctatactgactctgtatattattattcgtcattacgcgcgtagacaatttatttattctctgctttcgcgcggggcgacattatcgtacggaaccgcgatttccgccgtcgtgttgaagcttctcctcgggctcctcgttgtgagcacccgcaccgtatggctaaggtaggttgtgtattccatacgcactaggccttttttctgtcatctgtatcgatgtcctgtctgactcatcggcgtgggatgttcgtattgagtataattatacttgacgtatcatccagcctcggtctcaccactgaccgtctcttagtctattagtcgtacggacgcgacccactcggtgtgtgtctccccgttcggtcacgagcggaaacgagatagcgagtgtccgagcgtactcccccttctcctcgacntcttgcacaccgaaatttgggagtggcgggtgtcggcgttgcgcagggtcatgggtgtatatcgcgatcctctcacgcataagcgatgatgtggatccacatggtttggggtaggcgtccaactcccgacgcgtcgcggggtttgtggcggcgg

SEQ ID NO: 575082 - DNA, 132 bp, Homo sapiens
aaaatctgcgcggcacatttaaagttgaacataagattctatcttggacaaccagactatcaccaggctcggtcaggtttgtcgcctctacctataaatcttcccactatttagctacatagacgggatgtg

SEQ ID NO: 575083 - DNA, 219 bp, Homo sapiens
  misc_feature (2)..(2): n is a, c, g, or t
  misc_feature (30)..(30): n is a, c, g, or t
  misc_feature (34)..(34): n is a, c, g, or t
  misc_feature (40)..(41): n is a, c, g, or t
  misc_feature (61)..(61): n is a, c, g, or t
  misc_feature (90)..(90): n is a, c, g, or t
  misc_feature (155)..(155): n is a, c, g, or t
  misc_feature (184)..(184): n is a, c, g, or t
  misc_feature (186)..(186): n is a, c, g, or t
  misc_feature (210)..(210): n is a, c, g, or t
gngtgagccaccgtgctcagccactagctnttgngttttnncaaacatagattatattccncaagatgaagggcttaacatatccacagncttcctcagctttgcctaactccccatgcgctctgtctgctgcaaggcacagttattctaggttntatgctgctaggatgcagctgcttccctngntgcctggtgcatttgtcccctctnatgatgctg

SEQ ID NO: 575084 - DNA, 339 bp, Homo sapiens
  misc_feature (111)..(111): n is a, c, g, or t
  misc_feature (151)..(151): n is a, c, g, or t
  misc_feature (252)..(252): n is a, c, g, or t
gcccatcaaccccgcatttcggttcaaggttgatgggtttttttgttatctaaaacttatctactaccctgcaaccctctcaaccatcctcaaaatctcctcgcgcgatangccttacggtcggtgacaaaatgcagcgtcatcccctcanataaacgcatcaagcgcgcgggcggttccgggttcaaaccattgttcgagcgttgctgactgcgctgcatccagttttgcattaccgtttttaatagcggntttcggctagccagcgcgtagagctggtacaatcagctccatgttatccggcggttgcaaccctgtgaccctgtaggacaattacgg

SEQ ID NO: 575085 - DNA, 214 bp, Homo sapiens
gtggtgagaagacagaccctgtcgttgtcgtgtgggtgtgtactggctcaacaccagtcatcagtgaatcaagcaattcctggagtagctcagttagttccagatcaaataataatgggcacctggccaacatggtgaaaccctgtctctactaaaaatgcaagaattagctgggcatggtggcgcatgcctgtagttccagtaaggggtaagg

SEQ ID NO: 575086 - DNA, 555 bp, Homo sapiens
taaaggcgtcccaatggggcgaacatgagtcgtccgcggtctttattttttgaccaaacccgtagggcccagtcggtcctttttgaggacaccccccacgggggccccaaagttggaaccctgttcatgtgcaggagattccatggcatttcccatgtatcgatcctgtctcttttataaaggcggagactttgtgttacgccagcgggcccgagtctcccgtagtgcggataaagcgccaccccgaaggagggtggatgcagaatacggcggtagagcatgattcagacattctggccccccgttgtagagtactactctgttaaatagtttgtagacacacgtcgagtactggcccccaccaagaatcatcttcaagttttttagggcagcattttgcatcgtttgcgggaccaacgtggagtctttagtgcggtgtgtaccccgtggcttgttagaaaatagttgcttgtgctcttatggaggaaacaggaccactcaggagaaagaacaacgacttttttcctgcgcgggcggatacaatagaccgagaaa

SEQ ID NO: 575087 - DNA, 259 bp, Homo sapiens
cggggattgggggagtcttgggggttgtagcagggtgcatcaaacagcactcgcatggaataaacatatcttgcacaggaacatatggcaggtaattgaatagttggatttgaattatgtaaagacatgatcctgatggtcagcacaggcatggtcacagcagtcacccacacatgaggctaaacagatgcaaggtgaatgaactcagctatagctcagagagaccagctgcaggcaggcagttcacagcagcattgca

SEQ ID NO: 575088 - DNA, 407 bp, Homo sapiens
aaccctgtctgtgcggaggcggaccctgagagggggatggccaatccatgcctcccccagtgttttggttttggttttttttttcagaaagagtctcgctctcctcacccaggctggagtacagtggcgcaaccttggctcactgcaacctccacctcctgggttcaagcgattctcctgcctcagcctctccggtagctgggattacaggcgcaccccaccacgcacggctaattattgtattttcaatacaggtggggtttcaccatgttcgtcaggctggtcttgaactcttgacctcaggtgatccacccgtctcggccacccaaagtgctgggattacaggcttgagccgcactcgacccagtgtacacacttggaacataaacggattctctcgcgaggta

SEQ ID NO: 575089 - DNA, 225 bp, Homo sapiens
tgtcacccactccaccttaactaaccagacaaccttcagcctaaaccatttcaccctcatcacaagtataaggcgcataagaaacattgaacaccccgccgcaatagatatagtaccccacggccacagatgagacaaattatacaccaagaataatatagtcacggaactaacccctataccttctgactaatgacttaactagaaataactttgcgaggagag

SEQ ID NO: 575090 - DNA, 1604 bp, Homo sapiens
  misc_feature (1604)..(1604): n is a, c, g, or t
gcgtcccaaattgcctgctgtttctctcgactaggctctattcctgtttcgtctggttctgccacctcaggggtgaacgactggccagtggatgtcctatcagctcacgtgtcgcgccgtcgccgtcggagcgctggctattcgtgccgtagcaagatacttgaaggactgcttgccctgactctccttcgtacactcctgtcacgcattacacaggctggacacgcacgctcctgcgcactgactgcgtactacgtgtgcaacgccttaccatgtcacacatcctagctccgcgacgccctctctaggcggaacaggaacacacctagtccttgggctgacttgacgcgcgggacactactttacaccaaagacaacgtcacttgctgcgacacttgcccaagtgtacccaaggcagcacaacggctaccgccgctacgcgtaccttgagctctaacgcagctttacactgcacagcgcttactttgcgcacgccacgaaaccaaacggccacattaaaacctcgcaaacggctagggtccgccgcaacgcacaacagacccccttataccaatctactactgattccagtcaacttagccgcgcaaaactagcttcccagccattgttcccttggggccacggcatatcttgacggcccacatgcgctcagcacctcgggcgaacacaacaaccttggtggccttgcttagccatctcagtagccagccaacacgcacgcaagacccccatttaggacgacaacaaaccgctgactcagacttcgaccccaacgtttggccttggacgcgcaacacacgctaaccagcggcacaccacgccaaccagcgcggccaacgccaacgccccaccaccgaccaccgccaaacgcaaaccaaccgacaacatctggcaatccacctccccttccccgttggcggccatttgcacccccacatacgaaccactgtcaacaacccttcggcaacgtctaacacaaccaaaccataaccgccgatacttggcaaaccacatacctcttggcactcatcggcggcaccctacctactgccaacaacgctaacccggcggcacgatttgccaaccttccacaaccagaccgcgccaacaatcactaaactctggtgcaacccttacacgaaacggcacaaaccccaccccggcccatccaacttggcgcacaacacaaaaccctttgggtcgtcgcaccaaccacgcacagcctcggcaccaaccttcggctccccacaaaggcacattacccgcagccattacgtgcgcaaatccactcataaacgcacaaacacacagcctttacccgctttcccgattctcccccacataccgcaaacacacacatcacttctgcgccacagcccggcacacggcgcgaccacagccgtgacaaccgtcatagacattccactggtggcagccgacaacacacaccacgccccatatcatacgcgcaaaaatgagaccacacatttaattgaggcaccccaccgcattggtgcgactacgtcaaatactcctctgatcatttgagtacgaacaatatgggacagacacactgcactcgn

SEQ ID NO: 575091 - DNA, 176 bp, Homo sapiens
ggactagatgatcctataaacattgtaaattgacagctgaggaacactacttgggccatcaactgcttgtataagattcatccgaaaaatttgaaaattatacatgcagcgcttatcatggctacccatgacacatcaaatcgtataggaaataagcaatatggatggctacgccg

SEQ ID NO: 575092 - DNA, 240 bp, Homo sapiens
acacaaccaatgcattcctggaggatatatccctcactgtctttggacaattattctgccaatgttatggtagatggaaacccggtgaatctgggcttatggatacagctggacaagaaggttattacagattcgccccctatcctatccgcaaacagatgtgttcttaatttgctttcccttgtagtcctgccatatttgaaatgccgtcaaagtgttctgggggcggaccctgtcaca

SEQ ID NO: 575093 - DNA, 428 bp, Homo sapiens
ccgccatctcagcaaatttcaagcccagaccgtgttcgattctgcgcacttcgcggtccatggtgaaggcctcaatgtctaaatgagcatggtaaagaatggtgcctgcaggggtctcgtagatacctcgggacttcattccaatgaaccggttctcctcgatgtcaatacggctctcaccatgcttgcccgcgacttcgttcaggtacatgaagagctccaagcaggtctggtgcgtggtgccatccttgacgttggtcaccttcacagggaccccgtcatttgaactcatatctcgagaatgtcagggcgtgttgagggctttgactgggtcttgggtcttcgtgtagagacctgtaggcacttggttcatggggttctacaagattccagcctcgtagctgatgtgcatgaggttctcctggtcc

SEQ ID NO: 575094 - DNA, 488 bp, Homo sapiens
  misc_feature (280)..(280): n is a, c, g, or t
aggagtcagaacactggtaatgctgaattcctgggaatagatcagactacgatttaagtatttggcaccagataagtgacgttatccaaacagaatgttgaaaagtactgaaatataagagaataagggagaagtaagtttcagcgaatgtgactgtgaaatatattaaaaacaaaatcaggctgggcaaggtggctaatgcctgtaattgcagcactttgagaggctgaggtgggtggattgcttgtgcccgggagttccagactcgcctgggcaacanagtgagaccctgtctctgcaaaaaaaaaaagtttaaaaatttgccagatgtggtggcacatgcctgtagtcctagccactttggaggttgatgcgtgaggagggtttgtgcccagaagtcccaggctgcagtgagctttttgtgtgccagtgcactccagcctgagtgacagactgagaccctgtctctaaaaaaaacagaacacgtc

SEQ ID NO: 575095 - DNA, 919 bp, Homo sapiens
gggtgtccgctgccttgcgctgcgggcggcgggccatggtggtttggattgagcctgggccggccggggcgccgagtcgcgaggtgcgtggcagtgagcggcgtgcagaggctacggggctcggtttggctgactggggagtcgggcgaggcgtgcaggaaaccatgtcgaggactcgatggcgtgtagcctgcgtgcttgttgcccggcccggctctgcctctcgcctccttctgcttgctgggttacatggcgccgctgtccacctctactccggggtctagtacagctgctggcgctacgtgcaaggtctgcctgtgctccctggctctgcaagtcctttggggtgcattgacaccgcgtgttggattgctgcctttggagcctgtctactggctggtagacaacgtgatccgtggtttggagtggttgtacgtggtcctggtgatctgtgctgacgggctccattgtagctatcgcctacctgtgtgtcctgcctctcatcctccgaactactcagtgccacgatctgctggcatttcttctataagccactggaatctgatccttgattgtcttccactactaccaggcatcaccactccgctggtacccacccccagtggcaggaatgatatcggccaccgtcttccatctgtaagaggtgcatttaccccaagccagcctgaacacgacaactgatgcatctggaacagctatggaagttgggaaccttttccgggaggcttatgctggcattgggaaactgaaacagtccgacaggaccaactacggggttccaccaaattttaccataaccaccaccactttcctttcgggaaggtgccccagaagtttgttacctgggcctggcctctgggtttcctggtccacagattggggtccacaccgcgggaac

SEQ ID NO: 575096 - DNA, 133 bp, Homo sapiens
  misc_feature (25)..(25): n is a, c, g, or t
ccaggagcagaaccattaagctggnccaggcaagttgactccaccatttcaactccagcttctgctaatcctgtgtccaatgcttgagttagcttctctttagacttcagtagctattctcatccttccttgg

SEQ ID NO: 575097 - DNA, 207 bp, Homo sapiens
gatgcaaaattggattaagtcttcgccttaatacttgtttatatcgtgtatatgaatgatgagccttcgctgccaccgcgttccccctttaagtcccccaacttgagatgtatgaaggcttttggtctccctgggagtgggtggaggcagccagggcttacctgtacactgacttgagaccagttgagagggccagtgtggagagag

SEQ ID NO: 575098 - DNA, 156 bp, Homo sapiens
  misc_feature (41)..(41): n is a, c, g, or t
  misc_feature (101)..(101): n is a, c, g, or t
  misc_feature (129)..(129): n is a, c, g, or t
  misc_feature (141)..(141): n is a, c, g, or t
aggacagggtctcctcacccaggctggagcgcggtggtgcnatcacagctcactgcagcctcaaactcctgggctcaagcaatcccctacacccccaaganttcctagtagctgggacaacaggcacgnacccctactctnggcttttaattaatt

SEQ ID NO: 575099 - DNA, 333 bp, Homo sapiens
gtaataaattaataggtttcaaataatgtacaaactcacgtgtaatttctctaataaaccgtattaactgtttctattttaaagacatggaataaactgatagtccacatatacaccatataaatacagacacgacacatatctgttgtgtatatgaggatttgaatttatatacaacgatattgttcgatttctaatgatacaattctaattaagtaattttttagataatataattttaacgtagacgtaagtttcgtctttacatttttttgtttagtcacatgatttatgtgtgccttaaatgtttcattaacttttactttattttta

SEQ ID NO: 575100 - DNA, 166 bp, Homo sapiens
atgtgccttgccaaacatattctgtatagaacttcattttcctaacaagcatcgctgaattactgagctgttgtatcacttcatgtcaaagttttcattcttatgtaccaaagtactagttggaatttgtaatgagtctgatggtatattccaatttgtggcttgg

SEQ ID NO: 575101 - DNA, 337 bp, Homo sapiens
ttgccagcaagggaacagaactggacggagaatgagtttgatgaattgacagaagtaggcttcagaaggtggataataaactcctccaagctaagggagcatgttctaacccaatgcaaggaagctaaaaatcttaaaaaaaagattatagaaattgctaactagaataaccagtttagagaagaacataaatgacctgatggagctaaaaaacacagcatgtagaacttcgtgaagcatacacaagtatcaatagctgaatcaatctagcagaaaaaaggatatcagaggtagaagattgacttaatgaaatgaagtgtcaagattagattagaga

SEQ ID NO: 575102 - DNA, 588 bp, Homo sapiens
gaggaagcgtcctggagtgggtgcgggcccggactccgacccccgtgggcgcttcgagccccccagcatggtcaccgaggcaccgctgattcacccaggcccagatagccgaccccatcgacgcaccacacaggacccagacctcacacagcagctgccaagagcgagaacacacaggagactccacctacgggacacagacgtgagaggcaagggagatacagatgagttcatcatcggagatcatcgagagaacgcagagatgcagacaacaccatgtagtgcaccgagaccaaacaggaccaatgcaatgacggaaagaacaatgagagacggagtttgacaaagaagacaatatcgggaagagagacgccgccagtcaccgacaaacagagatgacaggggcaggagaaagaaacaccagtgtagttacaccaaggagagatggaaactatcacattggcagataagacgtggaacgatattgcacgtcccataagcagaacccagaggttatatggacaactacttcgcagttggaaaacaggcggaaatggcaccatatccgatacctatgacgaaattaat

SEQ ID NO: 575103 - DNA, 145 bp, Homo sapiens
ttttttttttttcccccccggggggtttggggggggcccccttttacccaaaaaatccccctttccccttttggggggcccaaaaaaagccttttgggccggcttgggtttgggccaaaaaaatttgtaaattgtttttttggga

SEQ ID NO: 575104 - DNA, 788 bp, Homo sapiens
  misc_feature (14)..(14): n is a, c, g, or t
  misc_feature (97)..(97): n is a, c, g, or t
gcactccgcgcagnctactcgactccagatgcttgttattctcttgccttgtgactgattgaagggaacaggcacaatgcaactaattacccctggnaaataattcatcgctatgtggacattacttgacaagtatttcggcagtgtctgtgaactagatatcatctttaattttgagaaggcttattttattttggatgagtttcttttgggaggggaagtccaggaaacatccaagaaaaatggccttaaagcatttgagcaggctgatctactgcaggaggaagctgaaaccccaccccgtgttcttgaagaaattggactgacctaactctcctcccttgttgatgacttcttgtggcatttcacacactgtagatggtcactcccttcatgtccatgttagctcatggtgtaagatgacgtcttgtcagtattactgctttgctaagccgcttcattcatgcctacacaatttttttttaaaagggaactttagttaattacgtgataagggacttacacatgaattagaatggggccgaaagagataccttttctggatattctaaagattacaggtcggctgctcttaatctgattgtgtcgccctctgaaaatggcacactcatatacatgttaaatcacgcagtgtgcatttctcaattgctgtatttgacacaggaaactcttacatataatgtgaaacctggctcttgagaccaaacactacgcagcctttcacctatgcaaaatatcacataaaaggcctcgttggccccacccgg

SEQ ID NO: 575105 - DNA, 462 bp, Homo sapiens
ggatatgaacgagaccggaggtagggataaaagttaggcacagtgtggttataacttaatggggattttgaattagggtagtagccataggaatggaaagggatgaattttgagaatcacattattgaggtgtagttaataagtaattcgatgaggggaaatgagaactctgggaaggccatttttgagatttgagtggtgatgccattcatacaggagtcagcaaaaggaggaccttggtgcagagtggagaaattgctacatttgattctggatctgttaaatttcaggcatccgtgggctagttacgacaagagctctgaaaagagactgagactagagaaaagaatttaaggtttgaaacagcaaaaagtaagacttccaaggaggctgtttggaggcagatgtgaactacgttgaagggcgaaactggaagcaggtacatttagagggcaagaagag

SEQ ID NO: 575106 - DNA, 1526 bp, Homo sapiens
tggaggggtgtcctttttatgggaaaccttaaatacggtccaaaaagaatatttcttcaatcaagggccctgggtgcagccaacacagaaaaaagtgaagcctttgtggggtttagggcgcaagggagaagaagaacgagatacagaaggaacaaagaaccccttcagcgagtgaaagtgcctcttcagccgagcctatactcagccttgtggccacagctttcttcaagtgggttcccaccattattaacaaggccgtgtccgtgggaaagtggctcatatttacaccgtgccaaaattcgtgcgtggaactcccttgaagggatctcctttcaggggttacccagttttccccaaatatgtgacctgtggtgaaagacctctcagacaacctgtggaatgtggctgtgacagacaagagaaaacgctgtgatattttccccgggtgccacggggagaccacggggtcaaactgtggggtcttacctctcaagaacaggtttccactccattaaccccgaggagtggccaaagtgaaatactccgtggaaggggaacaaagacacatagctcttcggagggacactcatagtgactcgagaggtgccggcagaaacagcagggctaagtgaaacaggggcccccaaggggccccaataagacgtggtctacgcgagaagcccccaaggcttatagcgtgtgtacccacatgtggggcgtaccgaactcatgagcgcgggtacacaccccataattcagataggaggtgccggtactacaacatcttccccgaaataaacgcccaaaggggataaacccctggccattaaatagaaccttcgccgggcgacaaaaagaacgagactacaggcagaccaaccaaaagacagcacaacaaccacagacaacacgaccaaagacacaaaaaacaagacgccgccagcgggagcaacatcacaaccacacgcacatcggagacacaaacacacacataaaagcccgaccgcacaccacgacacaacgcaacacctaccatcgaaccacaatacagagacaacacgcaaccacacaccacccacaccaaacaccgcaccagcacatctcaaacaacaccaaaccactcacactacacacacacaccacacccaccaccacaatcagcacacacacccaccgatgcgaggacagcggaacaagagagaagaacaacgcccatcgcacgaaagagacaacacaacgcgagcaaggaaacgaacaagagaaagatagagacgcacacaaagaaaccccacacgagacaaccacgcgcacagacagacaccagaagagacacagcagaaaaacgaccaccacgagacacacaaaagacagcaaacaaacgagaacgaacaacgaagacacagacagagcaacgaaaaccacacggccacccaacgagatagaacgcaagaaccagacaagcaagctaggaacgaagcggaagacaagcagcgacgccgaagacacgcgaaaacaaaaccggggat

SEQ ID NO: 575107 - DNA, 641 bp, Homo sapiens
  misc_feature (53)..(53): n is a, c, g, or t
  misc_feature (265)..(265): n is a, c, g, or t
  misc_feature (289)..(289): n is a, c, g, or t
  misc_feature (433)..(433): n is a, c, g, or t
  misc_feature (436)..(436): n is a, c, g, or t
  misc_feature (442)..(442): n is a, c, g, or t
  misc_feature (445)..(445): n is a, c, g, or t
  misc_feature (498)..(498): n is a, c, g, or t
  misc_feature (502)..(502): n is a, c, g, or t
  misc_feature (505)..(505): n is a, c, g, or t
  misc_feature (532)..(532): n is a, c, g, or t
  misc_feature (551)..(551): n is a, c, g, or t
  misc_feature (556)..(556): n is a, c, g, or t
  misc_feature (561)..(561): n is a, c, g, or t
caggcatgtactcagtgcgatgccaggagcggataatgctggttacgcgggtnttcgcgatcaggccaatcatcattacacgcgcatcttcgggtctgcactgctgatgtcaggtgtgacggctgcgtcgtcgtatgcgacggatcgaaacagaaacaacagtggcatctacagccaaccaaccgccagtagtgagttgagtcaggcactcggccaacagctcggcaacgtaacggcgcagatgatctcgaagaatctgaacatngctccgactctccaaattcgcccnggctatcgtttcaacatcatcatggtgaaggacctcaatttcacaaagccgtacaaatctttggattactgacgccaaggagccatgagcatgagaacgttcttgaaaaatgctttaaccatcaaaaatgctggcatagcggtngtnctgctngtnggcatctcgcagcaaacacaagccggtatgccggtgatcgacatcagcaatcnggancanaatatcgtcagtgcagtgcagcaggtngcggctgtcgagaagcagnttcancagtnccagacacagttacaacagtatcaaaacatgtggcaaaacacggttgcaccgagcgcttccatttgggaccaggcagtca

SEQ ID NO: 575108 - DNA, 303 bp, Homo sapiens
ccttgctcccgctgtgcaaaaaagaatccaggcccttccacgcgcgttttgggtgccggggccccgaagtgctcgtgggtccccgctagtctccgctggggcaggaccggaatcatgggtgggacacagcaccgccggtcacttcgaggcggacgagattagacatcaccgtgtaagggcatccgcttcggaaatgtattatcgatgaggatctctcatctggtcgagtctcacgtatctgtctatgtgctagttctatgagattaaagagagtagctagagctgcattgacagcagaagatc

SEQ ID NO: 575109 - DNA, 1429 bp, Homo sapiens
tgcccccgcgtgcaaaccagtaagccgaatacacaaacattattataataaacaccctcaccactacaatcttcctaggaagattgtagttggtgaggcgtgccctatgtaatatctaaatgatacggtgtacttggcgaccatggaacgcactacatgctatccgtccgctgctgctgtatgaaatgcgaacagagataccgcgccgagttccggctaacgaccaagctcagtacgacctcctcatgaaaagaacgtgtcctacccacgtcacccgtaggcattgacttatatagaatatgtctccgatacccagttacaagtctccgagcattccccgctcaaaagaaaaaacagaaaaaagaaagaacaaaaaaaaaacaaaacaaaggagggggcgacccccatatatatctaattttttatactgtctcacagctgatatagaaatccacacacacgtctcaacaagtgagaactagaagaaaacataacgcaaacagaggcggagggaggaagaaaacgagcagatgagcgacagcaagaggagaagaggcagaaagagacgaacgcccgagacgacacgtgagcacggggggttcgaccttattaaagagaacacgcggagcggcgcgagaagccgcaggggagaaagagaaggagggcagagaacagaggggagggggcagaagagaagaggagcggcggcgagacaagagaagaacgcacagggagtagcatcacgacgaccagccgagcagagactgaggagaagggaggaggaggacgaggaaagaaaggatagacataacagcaaagacagaaagcagaaagcagcggaggaagagagcgacagaagagcgagagagaaagacaccaacgcctagagacgactgtaccacaacacagaacgcaagaggaaaagaaaagagagaagacggtagcgtgccgaccagcaagcagcgcaaggcaaaggcgaaaagagagaagaggcaaagaccatagcggagaccacgacaggaaagataaccgcgagccgaacagaacccgcacagagagagaaaggaacaagagaagcaagaaaatcccgacacagcaacccgtcaaacgcagataacagacgcagcaaagtagccgcaacacgtgcagcgacgaacagcagaaagcagccgcacgctgtgaacagacgaacaacgcaagaagaagatacgcaagccacagtcaataccgtccaggctgcaggtaagacacgcacgacagcacaacgacggcccacacaccgctcgtaacagcgcagcagagtactaccgagatagcactagaacagaaagcaagacaacggcaagcacacgaacgagcagaacaaaagagacagggagaccatatcgagacaagacaaccagcaatcgaaagcaccagacacgcactg

SEQ ID NO: 575110 - DNA, 159 bp, Homo sapiens
atttttcggttggtttccggagaccgatgccccccacagtcagggggattttttttctagaaaaggggacaggtgctgcacgggcgcgggagcaggtcacagggaggcagggccaggggcatccccttttaaacacaacctaggcggggaaccgagctc

SEQ ID NO: 575111 - DNA, 130 bp, Homo sapiens
ccaagcatgtactgtgtaccttaccaagggtctggtaggtcgtgaggactgagcaatcaggacagcagtatgcagatgcttccctgcttcagactgacacacatcttagtgcatggcatgggcactaaaa

SEQ ID NO: 575112 - DNA, 302 bp, Homo sapiens
ggcacccgccgatgggtgaggaggcattgctccccttgcgtgcggtgggatgctatggacgcggagtatacccagtatgctagcgctcgtcgttggcaggagttgggtggggtgtgtttggctcgctggatgcacaccttggcttgctcgtcgtccgcagagactttatagcctatgatgcgccgcaccacgttttcgtctgcgttcgggtgtacgccgggtggagcgtggaaaccctggatgtacccaaactatccgtctgtggccgattcgactttccacaagacacctttacggtagga

SEQ ID NO: 575113 - DNA, 158 bp, Homo sapiens
cccaggctggtctcgaattcctggtgtcaaatgattctcctgcctcagcctccaaaagcattgggattacaggcatgagccactgtgcccagcctgttttttaacaatatagtctatgaagtgaagtttctctgttagtggagacattatgatttact

SEQ ID NO: 575114 - DNA, 338 bp, Homo sapiens
tgacccagagtcagatgaagccctttatctactgacccagagtcagatgaggccctttatctactgacccagagtcagatgaagtcctttatctactgacccagagtcagatgaagtcctttatctactgacccagagtcagatgaagccctttatctactgacccagagtcagatgaagccctttatctactgacccagagtcagatgaagtcctttatctactgacccagagtcagatgaagtcctttatctactgacccagagtcagatgaagccctttatctactgacccagagtaagatgaagtcctttgtcgacgcggccgcgaatttagta

SEQ ID NO: 575115 - DNA, 221 bp, Homo sapiens
  misc_feature (11)..(11): n is a, c, g, or t
ccccttgattnttccgagtattgtaaagggcttaacataactaaactgtatgatggacaatgtgaaaactcttgaacgtacgacaaagaattataaaacctactgaatctccagattgccaagtgaaacacaatggttgcctcttcaaatatatcccctttaattactaatggttggatcaaactcgttgatttatgtcttcaataaatgattcttagcag

SEQ ID NO: 575116 - DNA, 404 bp, Homo sapiens
  misc_feature (124)..(124): n is a, c, g, or t
ctaagatcgattagggtaccaagattgatcaattcttcgtagctgtgctcgggaggcgagagagcgtggctgttcatgatttacctcttttaacaaagaatcgtgtgagatctctgagatattnctcatatgcccatgttccaaggccttttttacctttccaaggaggacaagatatgaccctcatataaagggaccctctgccacttatgtcctcaagctggttacttggtccaagcttgccaaagacgcatgtgggggcagcattctgaaaatgaaggcccagggtcacaggtttgccccagcacacaggggcggagctgggaccttgtgccttcctttccattgcattggaaagcctttctgttggaagctggagtactttagggttaacttgtttaatc

SEQ ID NO: 575117 - DNA, 194 bp, Homo sapiens
tgatgtctccaaaaatctccatctgcaaagcttctgccaatccccttatggcaagacttgtgatgcagacgtagtgctgtgaaaccgaataatccctaactgtcctgcctgtggaggacaaaacaggatcctgcccacctggtgctccttcatggtggtgatcactgcccggcttgggtacctacgctttggca

SEQ ID NO: 575118 - DNA, 417 bp, Homo sapiens
catccttgttctagctacctccatgtggatggcctttgcaattgacttcccccttcctatggcctctgaaagaggtcagctagacaaaacaatagttgaatgcctcaagaatgtaaataagtgctggtttttatcctacatcaagcccagtgaacctatttgtggcagtgaccaggttacctacagtagtgactgccatctgtgctccaaaattctatttgaagggcttaacataactaaactgtatgatggacaatgtgaaaactcttgaacgtacgacaaagaattataaaacctactgaatctccagattgccaagtgaaacacaatggttgcctcttcaaatatatcccctttaattactaatggttggatcaaactcgttgatttatgtcttcaataaatgattcttagcag

SEQ ID NO: 575119 - DNA, 125 bp, Homo sapiens
tagtttcttctttgtaaatatcctattggtggggtaagattttactatattcttatagttttaaatttctggctgtgtaagactctggcagtctgcctctatggtagccgaaaccaagctttttt

SEQ ID NO: 575120 - DNA, 716 bp, Homo sapiens
  misc_feature (598)..(598): n is a, c, g, or t
ttggaaaacctgtgaatatttcactgcaacctctttaaaaagctcaaaaatgagttgtaaactggttaggtttgtggataatctttagtattttatgctaattatatttatacaaatgttaactttgttgaaaagtgatgctttttaaataactctaaagtaaatgtaacttttactcatgcaacaaaaaggcttcagaaaacacagtgtacaagaaaaccattaaacatgtagagacctcacagaatggaaacttgtacgtgctgcatgtcctctaaccaacaatatggctccagatacctcccaacctaggcatgcagtgaggggcatttccctgatgttacaaatggtgcttacctctagttaagtagaaattatcctccgattgaaaaaaggcaatcatttaagatataaatttgaatttctatattactttttaaaaaatattctggaccaggcaatataatcacatggtttaaacttcaaaataaaaaagtgtaaactcttcccccactactatccaattcttttcctcacagacaacttatgtggttggaatatttatatatcatttgagatatttcatgtaaatacaagnaaatacaaacaaatctatatatagctatcatttgctttcattatccaaatggtggcatgttgtataaattgttttgtacctgaagtattcacttagtaaaatttcttgatcaaatttc

SEQ ID NO: 575121 - DNA, 349 bp, Homo sapiens
cacgggctcccgaggtctcactttgtcacccagctggggatgaatggcacgatcttggttcactgcaacctccacctcctgggttcaagcaattctcctgcctcacatccccatggctgggattacaggtgcccaccaccaagcctggatttgaagggcttaacataactaaactgtatgatggacaatgtgaaaactcttgaacgtacgacaaagaattataaaacctactgaatctccagattgccaagtgaaacacaatggttgcctcttcaaatatatcccctttaattactaatggttggatcaaactcgttgatttatgtcttcaataaatgattcttagcag

SEQ ID NO: 575122 - DNA, 156 bp, Homo sapiens
  misc_feature (45)..(45): n is a, c, g, or t
attcgcggccgcgtcgaccaagttaacttgaaattgtatttaatngattgcttaagaaagtatgttggtatgggcttctcgctcttcccttctttttatcatgcacttaacctaccttcctctcccgtcgacgcggccgcgaatttagtagtagta

SEQ ID NO: 575123 - DNA, 421 bp, Homo sapiens
cggtttctgaattcaggctttagtgataggaaggctcctggttgtcagtggcctcagtgctataacgggctccgcccttatttacactgacaacaaagtggtattggcgtgttatagggtcacggaaaataccttcaattatcaattataggttttacatataccctggcttatcaaggaatagggcacactgttttatgattttgtttaagtattaagtatactatttctttactcttaatttctttgactctgtaactactgtactactccccttcgtctccctctctacttctctcctccgtctctctctctcacctactgacatctacactgtctctacctctagtctcactctagtctctcctactgtctctctctctactctactactagatactctactcctacacatctctct

SEQ ID NO: 575124 - DNA, 138 bp, Homo sapiens
ttgggacaggtggaacagcatgctttcctcttaccatccttgtatccagctcacgtcaggaacgagcagagctaaaacagcatatctgagactttccagcaagtgtacgctagcatgatgggatgggtaaggtagcca

SEQ ID NO: 575125 - DNA, 249 bp, Homo sapiens
cggcagtcagatcttagtggggctgtgatccacaggcgtcggttctcatcaggacttgtgacacagcttcgcaacatccaggacccaagtttgccctgcctggagttccccctggctctaggacactctaacaagctcggtccacgggtctccccattcccaccaggccctggacacacccactccgtaacctctcccctgtacctgtgccaagcctagcacttgtgatgcatcggacccgagaggcga

SEQ ID NO: 575126 - DNA, 139 bp, Homo sapiens
ctacattctccccgcatctctgcaaaaatcgatcctttgtccggtagaaatactacttgatgcttaaatcgctctttaaatcttattcttctcgagatttgatgtcgatacataaataactaaatgttgtttgctgcga

SEQ ID NO: 575127 - DNA, 1209 bp, Homo sapiens
tggaaaatgaattgtttcccatcataggggattcttaagcacgttctccacgttatgcggcgttgctagcgtggagtgttctttgggcataatgtgttcacacgtttgggcagtggatagcacacaggttggggtgctcttcaaaaaggccaaccagaataggccttcatgtgtgcctccgtgcaaagcaccgatagcgtgcgcctcgtggaaggcgccagattcgtggtttaaaagtctccttgagccaattttcttcgcaccagaagcgccgtggacagggaagtttgtgcgaattcaaaagttctcaggtggaactttcgtgaataacgttcataaattctcagcggagcggccaaaggataccagggccttgataacagaatagaggtttctttcaccccttccaggataagaggggcgcgcacttctttgcaggagccggcttttgtgatacgccagtttgcttctccgttgggtgcttattacccaccgggtcagaatttagaggcggggcgaggttctgcgcttttgagtaacgagacggcctatgtgtgtaaccaggaaagaactctcctctttaatctgtaaacccccccccctctttatctcctcttatacgagacgtactggagaacagctcccgcgagagaacaggcgagagagatggcgggggccgcattaggctgtatgggagcgcgaacgaacgacgggggggaacagaccataagcgttccttccagagaaggcttattgaggtctaagttataagatagaatgtagttaagttaacatcttattaatcttaccaacaggaggtattatttcagctgatgagcaagccactcccctcacaaagagcgtcactagtggagagaatggaggcgaccaacaacccccccttctctaccgaagagaggaccaggggggaggaaaaaagaagttgcccaccagcatctagataaaggcagactgggccccccactcatgtgcagtgggggagggtagtagagacaggcccatattatatagtggccgcaagtagaaagacaaggcggggcttagctgttggggtaaaaacccaagagtaagagtgacgagaccaccccccccgtttgtgtataacagcgagggcgagcggagccaaataatagcgcagccacatggaggggaacacttgcccttgaacgcgcagaacagagacatctt

SEQ ID NO: 575128 - DNA, 187 bp, Homo sapiens
gatctacgagcgcatcttcaggctattaattataacatttataccttttccatttacttcatgtcctgaccacactgatcccttactctgtgcttgtgtttttgtgtgtgtgtgtgtttttttttgggaaatggaaaaaaaataagtggcccaggttggagtgcaggggggcttgaaggggttaccg

SEQ ID NO: 575129 - DNA, 333 bp, Homo sapiens
aaaaagggacctaaaggacatgaaacagaatataaaaggatactagaactattaaaataatgaaataacaaactaaaaactcaaatatacatagagtagaatataaaaaagagtaaatatctagatcactgatgacaagttcgctataaagtacatagaagatatatagtgatgcctgctgccctctgaataaaggaatcaaaaccttcttcacaagtccctgaaacgaagagcctcgaatacagctgacaaaaggggaattcattttagccacaagaggtatacgatactggttatatggagacaaaatacttgatgattcctttatagaag

SEQ ID NO: 575130 - DNA, 335 bp, Homo sapiens
gctatccccattttaaactcattctttcatttaccaataggtgcaggtagactcgttagcctcccaaccttagcttaatactcgtgatgttagcctaggttcctgtgtgtgttcagcttgaatcctagacagtttcccttctcttcattaagctgagaagaacaaaaaattatctccatctaggcccacgggaattctgtgcatagactgtttgaattggtctgaaaagtgtgactagctacctaccttttcacaatgcctagaaaatgggctaccagattttgtagtggtcaaagcccgacttcccttgtctgacggtaactgtggttttcgaa

SEQ ID NO: 575131 - DNA, 668 bp, Homo sapiens
ccggactgcaggaattcggcacgaggctgagcatgctgtgtgcttgcatcgcgttgtgcagaaggagtagagatcctgcttacgagctcctcatcactggctgaacctatgcatagttgacaactcaaacctgacctttttggtcttgatctcatttgcaaggtgaattgatcacgtctgctgctgctggcctctgaagctcatttacgtaaagcacatgtacactgttgttcaacaaagcagcttatcttttcatgtacccacctacttacctactacctacaactttctttttccttattctagctgactcttcatacccctaacattttaaataccatcttaaacattctaatttcagaaccaatttccaatcatttattatcgtataattaaatcgatacaccaaccttcttctattacctccactttattacaacacttaatcctgaattttaccaccatctttcaaactttactacttataactctttgctcaaaaattttttcccacttttcaaacttccttgcccctttatgtatattactttacacttttatcattcgctcttcccatcctttaaccattgtcttctcttactctatcgcccttgtctcaattccccctatttatctatcgtttctacctttcttttcctcgtttgtcg

SEQ ID NO: 575132 - DNA, 1210 bp, Homo sapiens
  misc_feature (351)..(351): n is a, c, g, or t
cccacgcgctcggaatagatgagaaattataaccagagcagtaagcatagcgaaggatctaacccctataccttctgcataatgaattaactagaaactacacttctgcaaggagagccaaagctaagacccccgtaaaccagacgagctacctaagaacagctaaaagagcacacccgtctatgttagcaataatagtgggaaggatttataggtagtaggcgacaacatgctagccgagcctggtgatagctggttgtgccaagatagaatcttagttcacagctttaaattagcccacagaagccctctaaagtccccttgtagaatttaactgtgtaggtccaaagnaggacacagctctgttggagcagctaggagaaacaaccgttggtgagacgagaggtaaaacacactttaacagcccgatagctaggccgtacacagagcagaccaccaatttaaggaaagcgttcaatgctcgatgacctcacttacctaacaaaattcgcctaaacatataagcgtgaagcatccatcagcacccaagttggaccagatctatgcaccctataggaagaactaatgttagtatacagtacacatgaaaacattgcgtcctccgcataagcctgcgtcagattaaagagcactgaacgtgacaattaacagcccaatatctacaatcaaccaacaagtcatttattaccctcactggtcacccgacacaggcatgctcataaggcaccggtgacaacaaatggttccaggagactcggggaaatcttaaccccgccctgtgtacccaaaagaattcacctctaagcgatcagccagtattaagacggcgacggcctggcccaagtgaacaccatgtgttagcacggcgacaggaacactaaacgtgcaaaggtggctaatcacgtagttgtcctaataaagagcacgcataaagaaggggcgcccacaggggacgaaggggcatacagtataaaccagggaaagacatacccggacaaagggggagcgaacagcaaagagaacaacggaggaggtgtatacaagagcagacagacaagcacgaaacacagcacaaaaataggggcggaggaaccagcagtacgatgcaagcgacacaaagacacacagaacagagcaatcacaaacaaacagggcgagcaatcacgcaggcacaaacaccaaccacagt

SEQ ID NO: 575133 - DNA, 304 bp, Homo sapiens
ttatgtgtagtaggggtatagggggtacatgaaaggcttcgcacattcgtcagaaatgtagggtgtctcgtccacatatgaattgtcttatgtgtagtagagctagagaagtacttgaagactttgccacattcttcagatttgtagggtttctctctagtatgagttatctttggcctcccatggtgttggggtagcaggcatgagccactgtgcctggctgacaaagctttttaaggaagtcctcaacccttataacacataattcatactggacagaaaccctacaagtgagaagctgtgg

SEQ ID NO: 575134 - DNA, 154 bp, Homo sapiens
tatgcacttgccaacatctgaaataccacatggtgatgaaatcctggttagctggaggcatctggggccctgtgtgctggctaaatgtctctccaaggtgacaatgctggaagtcagcttgaaaaacaatgtggtgagtgtcagtgtgagaaga

SEQ ID NO: 575135 - DNA, 187 bp, Homo sapiens
atcatcttttcattgcgtatggcaatagtggcaagtagaaataggtaatttcattttctgaccatgtgattctccgtgttagtctcctgagtagctgggattagtaggtgcgccaccatgcccagctactcaggagactaacacgggagaatcacttgagcctgggaagcagaggttgcagtgagcc

SEQ ID NO: 575136 - DNA, 960 bp, Homo sapiens
tgacctgttaggagagtagatgcggggagggctgctgagctctgtgtgttcctatgtcgtgaaactcttctctccaagatcccaggcctggagttcgcagcacctatccggctgtgcaactatgaaagtcagcacctggtctggttcgtccagacttgtctcaaatgagtagtccgaaggtgtattctaatgtcgatgctttagcacttgagagagaagaatgaatcgttggagattccttgtgttgctgggaatagatcacgggaggaacatgggtgttagataaatggggtgatcatatatagaagtattttatatgattcggtgtgagtttgagggaacttatgttacatcgtaaataaggtcatgggatgatcgataagatggacccccggtagtctatcttattctaggtgggcctgaattcatattgtctgctatactaggagtagagtttatctacttcatcggttcctaggtacagcatgttagtgcttgtgggacagagatccattgatgacaacggaaatgacttttgaataataagaaataattctggatcaccattgtcacacggatagcgcaccgggtaatgtaatttttctgtattcgtatattagagtgctaggagggtgtaaaaggtgttacttgtcgatcgaattatttatgccgatgttaaggagatgtggccggaattgcatgtaggtgtgttgtgactagaaatgttggcgtgtcattccatgcgtgcaactatcgttattcgttttaacatagtcattaatgtaagatggatcctgggggtctaccaaagttatcagtaagaccgtaaatggggagacgcaatgggaatatagatccggtctttgaagtagcaccaggggtgataatacgccgaaagtttcggggcgcttgtgaaaatcctggggagcgggtgaaggaagaaaagaggggggtgaaatg

SEQ ID NO: 575137 - DNA, 383 bp, Homo sapiens
tgcgtattgatggctatcttgctaccctattctggagccccacaatggatctccacctggctagcccgcatcttcaccgctactcctaatttgcctggttaagcacgctcctgctcattccgccaagcctcgagaagcccctcaaccattaactccaattctcccttggccactatcatggctgtgctcctcatagccccgatgtgcttgttaccgtcttctcatgctcccaacccagcgccaacccatcgcctctgctccattgcttcatcgggatgcccaatccatctgtagtcccaacccgcgagctctggtgctctccccctctctatctctccaatccctgcttgggatctcatggcctctctgggcctgtaccttcc

SEQ ID NO: 575138 - DNA, 227 bp, Homo sapiens
tagcttaggtgcctctcatcatcaaaatgaaaaccttcttagtagtcgcttttctttatgtctttcttcccctttgggagagaatgaattacgtttgctcttggaatatttctctctcttatccacattgatactgctagatactcggtgtctcttgtctcgatctggctctctgggcttcctgtgtctcctctcgccttcttctttataaagccagtacttgagag

SEQ ID NO: 575139 - DNA, 533 bp, Homo sapiens
ggtgacgtgaaacatgtctatgaaaggctgaggacatcacatctgcattcatgcgggcttcctagaacccacagtactcattcatccaaggagatcatgtcagtgcctggtggccacactatacaaggaatcgtggagtatcaggaataaggcacgaccctccctttccttaggacagttccagttcacagggagatgaggcacatacatcagtaaccccaaagtccaggaaggtgcaaagagtcatgtggggctgcccaggcagaggtgacaaatgccactggtgacaggacactggtggacatagagggaaaagtccacacagacaggttcccaggcagacaggaagtcaaggcagttggggacgggagtcaaaacaagtgatgctgggacacagctctgaggtttgtgggcatctctgattgagggagatggaaggtgaggtcagagaatgaggttctcaattcatagatttgggctcataggggtgtgagagtgtgtgtgtgtgtgtgtgtgtgtgtaagagagcaaga

SEQ ID NO: 575140 - DNA, 212 bp, Homo sapiens
gagaactcggagcagcacttggaagacacaatgaagagtccctccattgttggagtcctgtcacaggttcacaggagttaatgtggttgcctcgggaccgtgtcaggtgagcagtcgtggatgtagtagtcgtcgtcgtagcccagcaagcagcgtaagcgtaaccgtgtgaccctcacgtagtattcctcgtcgtgtgtgtacgagtcaca

SEQ ID NO: 575141 - DNA, 150 bp, Homo sapiens
ctgactgcatctgtgctcccaggttcaatgcgattctcctgctcagcctcacatcaccacaccgggctaattttgcatcccgagtagagatgggctttctccatgttggtcaggctggtctcaaactcccaaccgtaggtgatctgcccc

SEQ ID NO: 575142 - DNA, 123 bp, Homo sapiens
agatactcttatcatatagctgcaagaaggcgccgcctctctcgtcttgtcgtctgtggtcccttcttcctctaccctcacctcctccattcactatgggagcctctcagtctacccctccca

SEQ ID NO: 575143 - DNA, 401 bp, Homo sapiens
  misc_feature (129)..(129): n is a, c, g, or t
ccctgtttcagttaccagaataaagagtgaatttgaatgaccttggaacagcctaatgatatcacggaagataggaggagttagtatggcagcctattgagagtcaggatcgaccccggccatggttgncttgtgccctgtaatcccagcaccttgggaggctgaggcgggtaaatcacttgaggcccaggagttcaagaccagcctggccaacatggcgaaaccctgtctcaactaaaagtataaagattagctggacgtggtggcagacacctgtaatcccagctactggggaggccaaggcaggagaatcacttgaaccgggtaggcggagattgcagtgagccaagatcacatcactgcactccaacctgggtgacagagtgagacttcatctctta

SEQ ID NO: 575144 - DNA, 83 bp, Homo sapiens
gaggattggctgtccggggctagggagcgcttctccgggaacgcggctgtgagggaggtggcccggacagtttggggctgcgt

SEQ ID NO: 575145 - DNA, 304 bp, Homo sapiens
  misc_feature (30)..(30): n is a, c, g, or t
  misc_feature (35)..(35): n is a, c, g, or t
  misc_feature (304)..(304): n is a, c, g, or t
ccccgttccttggccaaaggcttaaggaantggancgtacagtttcgcttgtgggggttccttttcctgttgatgcttccatgattgaaaattctagacatttggggcagttttattgggggagaaatttggggcaggttgagaggagagctttttggcatcctggaaatgtgctgtccagaggtttccctttccacaaatgatgcgtaacacacgtgcgcttgagcgaggcccgtgaaaggccttgcattgcttttctgctctggagcgccgctgcacaccccagccctggacagtcttgagn

SEQ ID NO: 575146 - DNA, 319 bp, Homo sapiens
tttctttttttagccattcttcatccagcatttattgggacaaccaccaacatttcaggcaccaggttacctgatgcagccggtatcaggaagctagcagttgacaaaaacagagtacactggcagactctgtggcagaagtgtagtggaagccccacagccctgggagtctctgcacttagcgtgtgtttcatggcgttggggtacctgatagctggccaagagagctattccttgaaatatctcagcctctggtaagggcctatgacgatgtatctgatcatgttatttttaactaattagttttgacgcagttgga

SEQ ID NO: 575147 - DNA, 1063 bp, Homo sapiens
cccaaaataaaggtggtgaatgttgagctgcctattgaagccaacttggtctggcagttagggaaagaccttcttaacatgtatattgagacagagggtaagatgataatgcaagataaacttggcaccaagaacggaatgatgctaaacaatgcagttgacggacatactgtgtactgacgttcagagacaagctgtgtggaacatatgacaacacatttatatgtgagcaggatcactcaaaactctactgagacatcctcacagaaactgaagactggctgtatgaacgaaggcgaggaccaagctaaacaagcatatgtcgaccacgttggacagacttaatgacacaattggcactccagttaccgttcggttctcaggaagctgaagaacggtcaaaaatgtttgaagaactaggacagagcgctgcagacattatgccaacgatagcagcctgacctttcagaaactacaggatgaggacaatacaagccatactatgactgacgtctgcaacattgaaccacaccagcacaaaaaaaaatcttcacggccatcacaaccccgatgcagcacaccaaatcatcgtagcacttgccacttggtctcataatgatcggagaccccaaattcaagaaaaaaacagagaagactatgacgacaaacaccaaaagcagaccacaaaaacgaaaaaaaaacaggaaaacccggaataaggacaagaacaaaacccaggaaaaaaaccaccacagacaactagacaaagcccggggtcataccacctagcataacaaaaaacggcaagaaaccaagaaaaccaacgaagaaaaatacgagttataacaaacaacgactaaacacacagagaaacaaaaaagttaatacaaatagagtaataacaaaaaaaacgataaaggagaaaaacagaaaacagctcagactagatctgggaggggtagacacagtagaacaagaaatgaacataaataaagaaaaatcacagaagaagaaaaaaaacataagacagtagacgaaaatagctagtagttcttgaacaaag

SEQ ID NO: 575148 - DNA, 136 bp, Homo sapiens
ggtgaaacttgtgtctacacaaagttttaaaaattagccagtcctggtgtgcacacctctgtggtctaagctactggggaggctgtggtgggagtaagctcttcagcctgggagtttgaggcaacaatgaaccatg

SEQ ID NO: 575149 - DNA, 855 bp, Homo sapiens
  misc_feature (3)..(4): n is a, c, g, or t
ttnnggaagatgaaaacgagtcacgacccgatatacgccgagttcacttttcgcctgtctttcccccaccgtaagctgctatgcctatttcacgacaagcgtaggtacagatatgtacagggtcaccgcgtcttggaaaatgtgcctgcgtcctatttataagtttgtgagttaagcatagattgttgtagtttgtatgcagagggtgttgtgccgtcgtaacttccgagagttttgttgtaccatgtgatgggtaatccaaggcacacaattggaagcaacccatgtgttgtatcatcaagtcacccgtggagattcggaaaatcatccagtgcgtgatgttgttggtcatcaccgggatacttaaaatatcttggatggggttctactctcccccccgggatttttggaaaggcgcaaggcccccccgactacccgggaataattttgcggaaatggtataagccctctgccttgagctttacttggtacgtcaagccagactgggctcccacgctcccaggggatccccgtgtctccaccctgtctaaaaacttgtgcgtggctttctgaagccacaattttgttttttttttgagacagagtctcgctctgtcaccaggctggagcacagtggcccaatattggctcattgcaacctccacctcccgggttcaagcgattttcctgcctcagcctcctgggtggctgggactgcaggcatgcgccaccacgcccagctaatttttgaatttttgtagagacggggtttcatcatgttggtcaggccattcttgaactcctgatttattcccctcatctggacagggacaaagcccccccccaaaataacaa

SEQ ID NO: 575150 - DNA, 379 bp, Homo sapiens
aatcgcttgaacctgggaggcggaggttgcagtgagctgagatcgcaccactgcactccagcctgggtgacagagcaagaccctgtctcaaaatagtaaaacttaaaattcaggacctcctcaccagagctatactttgagtgcacagtagccatatgtctatactgcagaaaacatttccatcctcccagaaccttctctcatgcagcttctgtgagcctcgcatcagttgtgttcactgaactcatctaactcaaagcacatgcatcaaagctggaatttcagggttatcggtttgcaggtgagagccgtaatggtccagtggaagtgtacagctggaagggaatgtcgtcagctcctcctcctcacctgaaggctc

SEQ ID NO: 575151 - DNA, 840 bp, Homo sapiens
ccctttccctccccttcgcgccaattttttaagcctttctcgccttaattttcccccgccttcctactcaattccggtctagcccctccctgtaaattctccgatagaggcctccattactccgaatttcaccgttaacaatagaagtcctgggacctcaaaggttccaaatttgaaaaccactcgcccaccactggcaatatcactatcgccacaaattcacgcttcctggaacaattttcatcaatattctctcccgaaaaagtcccctgtaaaattataaaaagggggaaccccaacaggagactcacccacctttgttactgccccggcccaaaattttactctcaatactttcccccttattggtttaattctgcactcttttaaagaagagccactatacgacccaccggcttgagcgaacgcccttcaattacctctggactccattatgatcccgggttgtatacccctttagaatacataattttaccggaattcctcggggatctacaaactcggcataactcctgtgcccctggatgacaaccacacctctctacgacattccacccttggcagcaataactcacgttgcccaacttgctggattctcctcgattaagacacgactcgtaacatcttagtaaaccccaccatttctatttcacaacccgatgggattccccgcgcctctttcaaaacgtgttacagtatgattattctctttaacaaagctgccctcgctatcttctggaaagataaatctattgggtacccaacgtatgttcccctacttgcacacaacaaaaaacccttttaaaagtcaacaaaaca

SEQ ID NO: 575152 - DNA, 1376 bp, Homo sapiens
tccacaggagttaaacgttcctcgtaattttcgctctgctcggaacgaacttgaagaaggacaacaaacggagtaggcgacggtacagcttagctggggccctgcaacgactgactgaagatactgacaccttacacaggctggacacggcactgacctctacttcgggccaccacaggcacaaacttactgaaacacagaactactatagccctgcaacagctagcaactgctggaccctacaaataccccacgcaagcctccctccgcctcagctcttagcactcttgctaacacacacaaacacttacattactgcaaccgcgcacataacactaactctcccagctgcggactggctggactgcccccggcatggcacttaacctacggctgctctacgccaaacacactgcgcccaacaacattccactactacgccactctacaacgctctgctaccctttcacacgcacgccctcaacgcaccgactcctacactggaactgctcccaaacacgcacacacacctacctgcaaacgcccttctccccaccaagcccccacccccacgcaaacgggcaccacacaccactcacacaccgacactttacacctttctcctacgcgctggcgcacgtcatccgaatacccttggctccctctacactacttcctcaaccaacccccttctccgtaccttccaaatggcgctctcacagcctgcgctccctttcgcccctctctcacaccacgtccattcgcacccacaatctgggccgatcacgctcactcactctaccacttttctcacacggcctctcaccactcacgccacactctctccccagcgcgctggcgtattgctcgcgctcacttgacagccccgctggggcacacccactctctggctcccacgccacgctcacttcactcgctcagcgcctcactcattgggctttaccgaccgcgccaatcctcccttcgccttctcccccccagcggcctcacaccccacgccgcctgctcgcatgccaccctctttgccctgcctgcccgctcactcctgcgatcgcgacatcaccgctcccactggcacaccaccgccggccccgcttcgccccccactcacccacgccaccccgcatgaacacgcaccggcgcaacagcgcaacaccccggaacgacctccaccgcacactcccacagcgctcacacacgcaccgcacaggccaacaccccccgccgcacggcacacacacccgcgcacgcacacccgcgcgcccgcaccgccacaccgcccagcccaccgccctccccacacacacccgccccaccacctctcgcgccgaacaccagcgccacacgagccacag

SEQ ID NO: 575153 - DNA, 1052 bp, Homo sapiens
ccacagcgtacgaaccgggttcgagacaccggttggggggtggctggtgtgccaccgcccaacgggttccgagcaccggagctggtgctgctccctctttggagcaaagttttatgcaaagagggtgttattgaaactttcggtgcacggtgattatatacttttttacaggtcccataattaggaagagtcgactcgcttaggcccttgtatattccctatctagtgcaaagccacgaatttggcagccatgtttctctgacctttggattaggtcggtttacacctggtgtactcacatttctacaatcgtctcaagtgaccagttagatactcattcatcagcagcactcgtgcgcggaatagatagggcaatccttgccatgggatcatatacttagtgtctaggacatacttcagcaagatcgcccctgaacagcgacctgtatcccatgcaacagcgtaccggacttacgacctctgtgacacttagaccccgattacagagagaaactatgacatcctacatcgcagccacatactaccttagcacctcggaactttcaaccgagtagcgctctgcaattgatcagcacacacattgtcgctcacaaattaaacccaagcaaactatttcggggctatatcaccacttctcccccgatttgagccttaaaggctctaagcctttcgacaacggcggtgccgctcatcagtatcgtggattcctaccattaacacagtctgtacaacatcgtgggccatcaaaccgcaacttcagaacaacatcaagttagtctcaaatgatcggacacatgataagtcagtcaaacgaacacgctcaggacaattcacccatcacaacatacctaattgcggaccacaacaaatgctgtacgtaacgtcccctctacaacacgaaaaggacctccggaactacaagggtgcaacaacaaacgaggttacaactacgcgatcaatgctgcaccaatgtatttgcagtgcgtgggacaaacacaaccagcataggtatctgagcaacgacacgcgca

SEQ ID NO: 575154 - DNA, 695 bp, Homo sapiens
agcgcgagaggcggtaacgatgcctggagttactgtaagagacgtaacaaccatgcacgagttcgtacagtagctctggcagccttcctctaaaaagtccgggaagctgaatgtccccgaatgggtggcataccgtcaatgctggtccaagcacaagagagcttgctccctacgatgagaactggttctacacgcgtagctgcttcctcagtcgcggcacctgtacctccggggtggcgctggggttggctccatgtaccatggatctatgggggacgtcagagtagaacggcgtcatgcccagtccacttcagccgtaggctccaagacgtgttggtcccgccgggttccgtccaatgtccctggaggggctgaaatatggtggaccaatggatccattgtatggcggttcgctaatctgatcatcctcagtggatcaatatgacgactctggatctgcacactcgccggacaggtgcgctagctgcccaatcatagaagccattagcacatcaataacccactgactgtggcttatactaatatatgcccctcatttcggtagacacacaaaacacaaaaaacaacaacacataattacaataaatacaacacacacaataataccctctccttcaataaacccacatttactcacataagacaactcctacaaataaagaccacatactacc

SEQ ID NO: 575155 - DNA, 442 bp, Homo sapiens
ccatatcgtgattaacgaagtagcccaaacggtcatccaccgccagctcctccatcagtgccgcgcccatgcccatagtcattgcgccaatgacctggctgcgcgcattttcggattcaggatgcgtcctgcagcacacacagcgagcatacgccggacccgaacttctcccgtcgcgctatgcacgccgacctccacaaaatgcccggcaaaggtcgactgctggtactctttgctcagtgttccgaattcaatgctctcttccgctgtcagtctgccgcctgcggtggcttcatgtagcgtggcgcttcgggtaccttggtaatcttgccgtcggcaaactgcgactgctcaggatcaaacccgactgccgaggcaatcatttcgcggggttcatacaggcggcgtaacgcggaggtggaggtattcgcgcccattgtcc

SEQ ID NO: 575156 - DNA, 399 bp, Homo sapiens
ttttttttgccgacggactaggaatcagggatatagcaggggacaaaatgcgacaataattcctgtcctgaagtttacattcccctccaatggccacaggcaacagacaggtaaattcttcagtactggcggacaatgtcaagaactgcgcagaaatttaaatcagggagggacatgagggttggaggaggaaggtgattttgttcttttaaatgacacagtcagggagggcctggggagaagatgagctttgggcagaggcctggaggagggggatgaatggggcagggatccggtgtcaggcggccagtgcacaagggaggaacagggacagccagaggagagaaggaggagatgtagccctggccactcgtggggctttgagtcgcgtaattttcg

SEQ ID NO: 575157 - DNA, 527 bp, Homo sapiens
tggaaagtaggtggatgtgtctgaaataggcccttggcatttttctgaaatgaaaaggagcagagtgtcattttctaatattgctcagcctccaaaaatagaagaggggaggcaaaaaattattaatttagtaacagtgaagctcgagtggtgattacttcatgatgtaaaatcagaggttgatctgatggtgagcacggggtgctcagatggtatagagagagaaaagaagtgagggcactatgcatccatacccagctctaccgggcacagcagggtagactggaggccaggagaggaaaggcaccctgaggagagggctctgcagccagagaggggcctgaggactgtggaaccgagagctagcagacgcactttagtgcttatagctctcccggcgggaggaggagggggtggtgtactggaggggggaacggccgcctcaaacagagctggaggccacccccatgggctctgccatggctggaactgaagccacctccaaggcaaagaccagtgccatagga

SEQ ID NO: 575158 - DNA, 141 bp, Homo sapiens
acatgttgccacggtggctgataaacggtcctcttcgcggatttccctttaagcttttctggtaaggcgggtctaggggggataaatccggttttaatcggagaaagtctggatcatcccttggtttttggaaagacagga

SEQ ID NO: 575159 - DNA, 628 bp, Homo sapiens
tctgtcggtgtactatgcactggggttgacagattagaagcaaccaggaacacatactgagtgaaatttttgttgttgggatttcagatagagtctggtttataacaaagcaaacagggccaacgtccacaccaaattcttgatcaggaccaccaatgtcatagggtgcaatatctacaataggtagtctcacagccttgggtgatcgatattcaaagactgttttgctccattccccagtgtgtaacgtgcaaccatcaaccagaactgtgtaggtgaatttgctatttccttcagcctgaattcaccttcatttgaccccatcagcttcagggccttctttacatttccactgggctgatccatgtatgcaatgctatttttgcagtgatatgtgatgtactgggaagctcggctggagagaaagtcgacggaatgccagcttgcacatcaaggacatcttcaggaagttcaggattgccgtagcttaaactgaaaaccaccatccatggactctccaaaccaaaggtgttcttctcagcactagaatcttgtccaccagtgttccgtggaacattcaaggattggccttatgcttgttcccagttcatatacagatacttgtagc

SEQ ID NO: 575160 - DNA, 445 bp, Homo sapiens
ggctcgggttagtggcgcaatctcggctcacgcaacctccgactcgctggttcaagctattcttctgcctcagcctctcgagtagctgagattacaggcatgtgccactacacccagataatttttgtatttttagtggagacggggttcaccatgttggccaggatggtcttcatcccctgaccttgtgatccgcctgcttcagcctcccaaagtactgggattacaggcgtgagcaaactccttattttatagtgtttatgttggctcctatgatgctattggatgagattttcaggttccctttgggctttctggagcgtgtgagtcccctgggggtcttgttgggatgaagattctgatttggtggctttgagatgaggcataagattctgcatttctagcgatctccccgggtatgcctgtcctgatggtctgagagcca

SEQ ID NO: 575161 - DNA, 198 bp, Homo sapiens
cagtactgtaatgcacggatgcagttaaacatgtgaagtagtgatggtttaagaaataagctattacaatatagggatcttgaaggctcccgggggtaactattttataacttagataaaatggctagtcatatctgtgtgttagtaaagttatttttttaatattttaagattacaattttaacaaactgaaatgag

SEQ ID NO: 575162 - DNA, 768 bp, Homo sapiens
catgcatactcaccagacgcctcaaccgccttttcatcaatcgcccacatcactcgagacgtaaattatggctgaatcatccgctacttcacgccaatggcgcctcaatattctttatctgcctcttcctacacatcgggcgaggcctatattacggatcatttctctactcagaaacctgaaacatcggattatcctcctgcttgcaaactataacaacagccttcataggctatgtcctcccgtgaggccaaatatcattctgaggggccacagtattacaaattactatcagcatcccatacattgggacaaggacctagtcacatgactctgaggaggctacctcagtagaacagtcccaccctcacagattctttaccttccacttcatcttgccttcattatgcagccctagaagaattcaactcctatacttgcacgaaaaggggatcaaacgaacccctaggaatcaccctcccattccgattaaaatcaccttccaccctttatacacaatcaacagagccctcggttactttcttccacattctctcctttattgacttaaccattattctcaccaagacctcatagggaccccaaacaattattctctaagcaacccttaaaaccctccccatattagccgattgatattctatcccactaacaatctcgatcggtctaaaaataagagggtcttgccttatatcatctatctgatatccatctctatccacaagctatttccatacaatatttgcc

SEQ ID NO: 575163 - DNA, 1188 bp, Homo sapiens
ttggctgcttgtgctgttttgttgtagttgtgcgttctctgtgcgttgtgtggtctgttctctgtcgcgtgttgtgttggtattctcacttcgcgagccttcttctgcggtgtgtttatatttgcctcgctatccggctcggtgccagtgtggcggtttgttttgttctagtctcttctcctttctgctgtctctatcgtgggctcaggctcgagtgctgtctgtgtcactctgtgtaactggttctgctgtcagcgccatcttggtgtggcgtgtcgcgggtccttgggttttgtgttcctgttggctgctcttccgtgtcggtttgttggtgtggtccccttctgcatctggcatgtctctacttccttgctttgtctttgagaagtggatccttacatggttttatatgtcagtgctcatcccttctctacggtgggcctgctgggtccctgtctggcctggtcacatcactcgtactttctggaaacgccatggctgagtttaacaagttcttgtagtttcccaatgctaagtggaatctataaaccagtgagaaaagttgcagagtgtagcttgtgaattgcattcaagaagtacacttctttcccattgctccgtggctcttggagtctccgtgatgccaggctagagtctgattactataataattcgaaattggtaactcccaaggtaatgctttcttccatttcatcaggatctgtttatccccagtgcaccccctccccttctcccttgcctatctggatggcttctcagaagctcggccctagtcctccctgccttggcggggaccagagcccagctactgctgatggcagcactgctctcgtcacgctgtgttgcctttaccaagtgtcttcagagggttatgacgttagagtagctggcctggggatgagggtgcctccctggcgatttgatctttagggtctgactttctgcagagaagatgtctattacagatgctgtcaaatgctgatagtaatagtgcgattgcggggacggaaatccacgatccgcgagaagctgtgttgtcatgcgtgggtgtgcaactgcctatgtgatcctctgtcttaaaatgaattctgtctgtgctccgaaacaaagaacaaggtgaggttattttcttgttcttgtaagtaatataaagctgtgtgtttctga

SEQ ID NO: 575164 - DNA, 208 bp, Homo sapiens
  misc_feature (10)..(11): n is a, c, g, or t
  misc_feature (30)..(30): n is a, c, g, or t
  misc_feature (44)..(44): n is a, c, g, or t
  misc_feature (169)..(169): n is a, c, g, or t
  misc_feature (188)..(188): n is a, c, g, or t
gaaaacagannagcaataattcaaagttanttcaaagtactggncctggccgggcatggtaattcatgcctgtaatctcagaactttgcgtggccgaggcaggaggatcactttgaggctaggagttcaagaccagcctgggtaacatagcgagaccctgtctcaacanaaatgattgtttaaaaatnggcccagcatggtggcatgt

SEQ ID NO: 575165 - DNA, 263 bp, Homo sapiens
  misc_feature (142)..(142): n is a, c, g, or t
  misc_feature (211)..(211): n is a, c, g, or t
  misc_feature (216)..(216): n is a, c, g, or t
cgaggaattatgctaaatatactctgcttgtgctctataaaatggaacaacaaagcctagattacagcacatccatttacagcatggtttactgaatattttgagtagatgctcaatgcagaagcactatggttacgtttgncagtacgccagtttgcatgaattcaaaatgaatctgagctttcccccttccacttttctttcagtttgnatacnagaacactttacctgagatataggccgtgaaggtgtccacttcctgg

SEQ ID NO: 575166 - DNA, 496 bp, Homo sapiens
  misc_feature (50)..(50): n is a, c, g, or t
  misc_feature (61)..(61): n is a, c, g, or t
  misc_feature (220)..(220): n is a, c, g, or t
  misc_feature (316)..(316): n is a, c, g, or t
  misc_feature (377)..(377): n is a, c, g, or t
  misc_feature (383)..(383): n is a, c, g, or t
  misc_feature (398)..(398): n is a, c, g, or t
  misc_feature (407)..(407): n is a, c, g, or t
  misc_feature (426)..(426): n is a, c, g, or t
  misc_feature (468)..(468): n is a, c, g, or t
  misc_feature (476)..(476): n is a, c, g, or t
tctattggtctgtgtgcctgttttgcatcagattatgctattttggttantgtagccctgnagtatagtttgaaggtgggcaacatgatgcctccagctttgttctttttgcttaggattgccttggctattcgggctcttttttggttcccatatgaattttaaaattcatataaaatttaaatttaaatttatgttcatctaaattttaaatttaaanttatataaaaatttcagccagacatggtggctcatgtcctgtaatcccagtactttgggaggctgaggcaggcggatcacctgaggtcaggagttngggatcggcccggccgacatggtgaaacctcatctctactaaaaagtaccacaaaattggnccgggncgtggtggcacatgncctgtggtncccagctagctcgggaggnctgaggtcaggagagtcgtttgaacctgggaggtgggggttncggtgggnccgaggtcacgcaactgcac

SEQ ID NO: 575167 - DNA, 150 bp, Homo sapiens
gtggagccggcggcacctctgttccgcttggactgcacggcgactctctctcgtcactgtcgctctctgctgccgttcacttcacccgcccgaaccggaattgctgtcctctcggtcgtctgctttcgcgttaatagcgcgtatcttcac

SEQ ID NO: 575168 - DNA, 1362 bp, Homo sapiens
gcggtgctctcagaatccggactacgcggcagcggctcttcaaagacggagccgggagtttttggcttacatgttgtttacgatcaccatgagtacgcacactaataatgattgagacttgtagttcttgagagtaagatcattataaaaactagctagggaggatcatacgaggggcgtatcgtgccctaatcatgctagggttgaagcgtgttttctatgtgaatgcatgctctggcaggagatattgagtgtacgtaggcaattcattacggaatgcctgtggacgcgttggtgggtgtcttgggatggtgccctttaacgtagccaaggcgcaattggaacaccagaacctgcgcaaactagtgggcattgcggcgtgtcgcctgtggcattcggtgccgatgcgaactacgtaattgagtgcgttttgccctcgaatgttccctagtgttcatggcactagttgcggctttgggctcagtacgagggagcacactggggcgacgacctttcaggtaatgagaagtaggaccactcagaaatgctaagttatgtaataccgccccatgacggagcggtcgatctgccgggtctcaggaagagtaccagcggatcgtgggaaacgtaactggctctagtttcaaacggaaaacaaagattgcaggaattcgagcggaggttggagtcgtgaccaggcccatcgttcgcaaatgacggagcccaagctgggttccccgagagcctccatggtatttgatccgaccacttatgggttcggttaggcgcgcgatagcgttgtgctaaggactctgccgcacactcgctcgagaattggtactctgtcgaagaaggactcacgcgtagggccagagccgttgaggacaccaatctggcgtgggtagcacacctgacggtcaccttatcaacgaaacagcttcgggtagcctgcactacgccgaggcctagataacctaccaggaggacaaggacaccgagcgcagaacggccaggcttacagcgcagccaggcaaatgcgccgggaaccacgccggggaagccctgactacaaactgggacaagtggctagcccatggccacaggcggacggccgcgcaagggcgacctacagccacgtggaccacggagcccacgtccagcgcgcacgcggtgggaaaccacaccacgcgatgaaggaaaacggtcaagtccacaagtaccaccgccaggagcgaacacctgacgccgcagcggaccacgacggggacatagaatagcacgggctacgcgagccagaaacggctaccgggcatggaaacgagcatgacaatagacgtgaggggcatcttcacagcggcaatg

SEQ ID NO: 575169 - DNA, 181 bp, Homo sapiens
actgaaggactgtatctctcatctctcacctattgatgagatccatccagaccaggctgaaccctcttgtgatcagtgcatgtaagcattccctcctggtcctctacctctaaagcctggaagagatctacacatacaaatagtggtccagatacccattttctctgtatggccttgatta

SEQ ID NO: 575170 - DNA, 556 bp, Homo sapiens
tcaaaagtcattcagcaattgcttttttgtttgttattgacacaaggtctcaccctgatcatccaggctggagtatggtggtgcaatcatagctcactgcaaccttgaacttctaggcttaacggatcttcttgcctcagcttcctgagtagctgggattataggtgcacaccattgcatgtggctaatttttttgttttttatagagacaggtttttgccatgttgcccaggctggtcttgaacttctgacctcaggtgatctgcccatctaggccttccaagtgctgggattacaggtgtgagccaccagtcccggccaaaatttccacaaatttaaatgtatttgactcatccagtgttccacatagctttattttatacaccttacccccacagatatgcctgattggtattcagaaattatttactgaacacctattatggctattatgtggcaagcccacagataataagcacaagggcaggtgtcatgtcccatttatttccatatatcccattgttttgcatgtgataggtctgcgataagaattcac

SEQ ID NO: 575171 - DNA, 565 bp, Homo sapiens
gaaaaccactgaattaacacatgttaagtgcttggagtgatgcctggcacacagtaagtactgtatttgttagtcatcattttattattattgtttgtgtatatttactatatatcatcactgactaactcctgaacaaatttatggttttaatgaaggagcaggagatggcattacaaccctctattgtatgctcatgttaatttagcacacaggcagatgggtcatgtgctgcaggaaatgaacagaatagtaacatccaactcatcttttttgttttgcaccaacctaaaatatatgctcccaaaagaggagcacgttgctgtttgcagcttttctttccctctttccttttattttagacacacttaatgattctctgatgccgcaagaaaactggtattcctaccaagctcttggagacacccaaggctgccctttgagaaatattttcaacaaaatatgtttcttgacagacagaacacaaaggacacttgggagagagagaacccaagctcctgtgtagctgggattgatcccataaaggatgtgggaatatagggct

SEQ ID NO: 575172 - DNA, 545 bp, Homo sapiens
  misc_feature (36)..(36): n is a, c, g, or t
  misc_feature (61)..(61): n is a, c, g, or t
  misc_feature (67)..(67): n is a, c, g, or t
agcccccaggtcttcatgaatatctagttgaactgnctaaagaagagggccctgtaacagnacagancaccaggagcctgaaccccgcatcttctacccttatcctgcatttatcctgcctgcattcaagcctgtccagctgcaccactggaggttaccatggcaactaaacccagaggcagccggtaactgagatacagctgccaagagcaactgatggtggaaaaggccaacagcagagactcttagaaggaagagaagtacacaggaggaggccccagaaccctgagggtgctacactcaaatctaatcctactcacaactcagcaggcagtcaacgtcttgcacaaactgccatatcaccaaccagaggcacagatatggacacaatggggccaatttgcagagatgtttgcaactatggatgcagagtagcacaggtgggacacatgttgtttagcccaaaagcaacgggtcttggtgaaaacgaaaatgggtagggtaccattgctgtttccaatgaaacaatgaattttgtgtacaaa

SEQ ID NO: 575173 - DNA, 521 bp, Homo sapiens
ggagggctgaggcaggcgactggcgtgaaccctgggacggcggacgctcgcagtgagctgagatcacaccactgcgcactccagcctgagggacagagcaagactccgtctcaaaaaaaaaaaagaaattgggaaatttaaatatcaaaactcacccaatgggcggcaagactatgcagcaaaccagtaagatgttatccattttaatttctagaaacgagggtctcactctgtcacccgaggtgggagtgcaagggccagatcacttgctcactgcagccttgaattacccagagatcctccagcctcagaccccccggtagctagaaactccgggcacatgccaaccatgcccaagctattttttttaatatttaggtggagcacagagtctgactacttggcccaggtgggtctccaattcctgagctccagagatcctccaagcttgggcctccccaagtggtggggactacaggtgtgcgctcatggcaatctggataatgtttcccattttagaa

SEQ ID NO: 575174 - DNA, 339 bp, Homo sapiens
gtacctgtgggtatgcatcaataatggaggtccccaggttggggacgagccccaagttgagaacagtatagtgaaccattgttgtactgaaccacttagttacggatgactcgctgatcatcaaacaacctgtgtgtaatatgtattaccttacacacgtagcacccttcagcaggaccctataaaactttcctccagcccttgcctctttgcaggtagccccttctctgctgagctgcccactgcaacatattttcacaatttctctaataaatctgcccttctttacctacaactatcttggtaaatggctttaccacctgcaaaactgaccctagg

SEQ ID NO: 575175 - DNA, 309 bp, Homo sapiens
  misc_feature (19)..(19): n is a, c, g, or t
  misc_feature (227)..(227): n is a, c, g, or t
  misc_feature (255)..(255): n is a, c, g, or t
  misc_feature (297)..(297): n is a, c, g, or t
ggcggctccaaaagggtgnacgtggagatgttgccgctcccgcccagggctgctttgcactcggggagagatcctgggctgaagagatttaaggacggcggaccgcatcgggcgcgaattcagctctgggcccaaatatgaagtgggcatccggtgtgaggctcgactggggcggtgctcgagcgctgctgggggaagcccagggcctccaagcctcaggggcgcgncgaccgaccgcgctgcgctttccaggcnggagctgcgggcttcgctcctggccgctctgggcctgaaagntgtcaccgccac

SEQ ID NO: 575176 - DNA, 1202 bp, Homo sapiens
ggtatgtgggtctgggtggcctgctgctccggcctccggggccttgctggagactacaccccttacagcgtacgctgcccccagctcagctcttacttgctgtgtgcctgctcctgacggctggtccatcctgtcagggactatgctgtgcgcaaactatcgtccattcgcccaaaagcaggcgccgccacctgtggcgcatcgtgggcggtcatttggcgcacgtggtggacgtccagtttgatgcagggactaccaccaattctaaatgccctggcaagtgcacatggccagggagcaccagcactggttttgggcaggttggcccagcataatgggtgagcagcacagtcaaggacttattggctaatgcgatggtccatgcaagggctagggtctagcatgggccatgcacacagtcactgggactcctgtggttgcaccaaatcaacaattccctgtagggatccctgagaccctttgggtgcacgcaactcacttgcactggtcacttgcggacgacaccatactgtggatgacacacgcacggtcccatcaaaagactccaagacacacacttgggctccccagttcattgctgacggcttccaagcagttcatagggaccattgagtggtcggagccaggacacattcttggttgactgggctactcaaggtctgggaccgatcctgctaagcctacacctattgaccacagcgactggccaaacacactttggcgcgcatttctaactgggcattgggcatgcctggcagcttagggccaaaggaccttggtaccttgcactccagtgcgcatgcttcacccttccaactccacactggttccgacccaacatggccccatgttggctgggctaacctcccgtgctggttcttggccggcgactggacctggccgctcaccgacagggcacccctgtttgaacggggtccaacggcacttcaaattgcccccccgtgcacacattcggttctgacaccccttgcggttggtgtagctccaacgatttatcccacccgcattgccacaccccataaacggggaaacagcgctagggacatcattgcgcacaagctttgaattttagccccccccctttgtgtcgtcctcatcgcaccacggggatacgacatcataaccatgggtgggcagagccacatggggctgacgcaacg

SEQ ID NO: 575177 - DNA, 516 bp, Homo sapiens
tggtgatagctgggtgctgtccaagaggcgacagggcgtcgttaggggagcgagtcgtgaccggttgggcacacacgtcaccgtgggacgaagcttcgccatactgtttgactacgatgcgtgcagccatccgcctcggactgtcggccctcgaacaagagcagtgcaccatcggcgcgccattccctctcggcgcactctctaccctggcagcgggtggcaggtcacgacgcggacgaccaaggactgcgacactgggccctggcacagacaagcgcggacccttttcccctgcttcccttgagacgtacacgtacttctggacgtccatcggaacgactgtaagaacgctcggagacactgcacacacctggcgccaacgcgcactcacctcacactcacacgctcctaccacaggcacgtgggcgcctcaggaccggagctccaacagtccctggtctcccgttcatgcattgggtacggacgcgctcccatttcttgcccctctctccttct

SEQ ID NO: 575178 - DNA, 370 bp, Homo sapiens
  misc_feature (5)..(5): n is a, c, g, or t
agtantggacgcttcagagccttctgcagattgaatgacctgtcctgtgagtacaatgttgcctgaggtgtcgccctaaagcatgggtgtacatagatcctcttgatagtagagtgtgtacctgttcacacaccacctttccttgtacatcttcctatagttcaattggtgattcctgctgtgatgtaatcgtatgcaggggtagtggaaaccagaacttcgcctggcgaacagcgtgcaaccagtgtaaggccccaaagcctgacggttccctcccgccatcctttccgcccccgggtaggtgcaggttccatgagtgtcccctcagcctcccttggtgccttcatgggggtaccagacgctcgaatta

SEQ ID NO: 575179 - DNA, 150 bp, Homo sapiens
ctagggaatctgtgctggtgtgggatcgtgctggtgcttgaaatcattttcactcattgtcgtggctttagatgaagaattactcttctggaaggaggtttcttcatctaaagccacgacaatgagtgaaaatgatttcaagcaccagga

SEQ ID NO: 575180 - DNA, 164 bp, Homo sapiens
ccctgttagagaagagacgagatgtacaagagaagagacagatgcttatgttgtttatgcggggaaacgctcatatcgggggcaccgattattaggggaactagtcagttgcccactgcctccgcaatgtgattgggtattactcctgaatgaagattattaca

SEQ ID NO: 575181 - DNA, 255 bp, Homo sapiens
gattccactggtagatatcagatgacattaactgtgagggtattatcacaatgggtcatgtaaccattggaaagttagtaacctagaactgtaaagggaactctttcggggaaggtgtttctaaagaaaaaaaaaaaaaatctacattgggcccatgttgaccttttcacttccggttaattaattcagtcctcagtcatctcactagctttcaatgctcccaaacggtccccacccctccctgtgcccttttcc

SEQ ID NO: 575182 - DNA, 1133 bp, Homo sapiens
aatgtacattggcctgggtgcggtggctcacgcctgtaatcccagcactttgggagtgccgaggcggtgcggatcatgaggtcaggagattgagaccatctcctggctaacacggtgaaaccccgtctctactaaaaagtacaaaaaaagaaaaaaatttagccaggtcgttggtggcgggttgcctgttagttcccagcctacttcaggaggtcttgaggcaggaggaaatggcattgaaccttgggaggcagagctttgcagttgagcccagaatcgcgccacgtgcactccagccgtgggcaacagaccgagacatccgctctcgaaagaaaaacaaaggagagagaagtggtacattaagggaaccaattggttcccccaaaggaagagccaggccaatgtgcctctggggaaagccttcctaataagagatgtgaactctcctgtgcgtgtggaggggtgtgaaaacaccagagcgcgaaatttccccaatttgcacgcccggtggtctccccagtggggtatacccgtgaacaggagattgtgcccactccgaccctgtggtgatctcggggggaagtggggaactcgcgggctgcgacacccattcaagcgcgtaagagccgcttgaaagcgaccaggcaagggggggacacacacaggggccgtgtaaacgcgacgcgataaactctgcgacagtcatgggggaacaacacccgcgggggagtggggtccacactccgaagacgagtggcacctgggcgagctttaggaagaccaccgcgcgggtgtcgggcgacgcgaaccattggggggatattaggggcacaccacagaagattgtgggcgcacccgtgtgagagcgacgagatggtggtgtgccactgttacgcaccacttgtgcagagaggaaattgcggccccctgcagcagcgcacacccgcgggggggggcacgcttttgcaccacatgtccggtgtgtaacccccagatttaacactaacgccatttaactaaatgatccaccactcgttgctgcggaaaacactgggtgtggacaaaaacgatgtgcaaacacagcgcttcacggaagataggagggataccaaggcgtgtggggcaacgttaac

SEQ ID NO: 575183 - DNA, 919 bp, Homo sapiens
  misc_feature (5)..(5): n is a, c, g, or t
  misc_feature (13)..(13): n is a, c, g, or t
  misc_feature (15)..(15): n is a, c, g, or t
  misc_feature (17)..(17): n is a, c, g, or t
  misc_feature (23)..(23): n is a, c, g, or t
  misc_feature (39)..(39): n is a, c, g, or t
  misc_feature (42)..(42): n is a, c, g, or t
  misc_feature (47)..(47): n is a, c, g, or t
  misc_feature (65)..(65): n is a, c, g, or t
  misc_feature (69)..(70): n is a, c, g, or t
  misc_feature (78)..(78): n is a, c, g, or t
  misc_feature (83)..(83): n is a, c, g, or t
  misc_feature (92)..(92): n is a, c, g, or t
  misc_feature (102)..(102): n is a, c, g, or t
  misc_feature (108)..(108): n is a, c, g, or t
  misc_feature (118)..(118): n is a, c, g, or t
  misc_feature (123)..(123): n is a, c, g, or t
  misc_feature (128)..(128): n is a, c, g, or t
  misc_feature (158)..(158): n is a, c, g, or t
  misc_feature (161)..(161): n is a, c, g, or t
  misc_feature (164)..(165): n is a, c, g, or t
  misc_feature (167)..(168): n is a, c, g, or t
  misc_feature (173)..(173): n is a, c, g, or t
  misc_feature (197)..(197): n is a, c, g, or t
  misc_feature (199)..(199): n is a, c, g, or t
  misc_feature (206)..(206): n is a, c, g, or t
  misc_feature (209)..(209): n is a, c, g, or t
  misc_feature (212)..(213): n is a, c, g, or t
  misc_feature (221)..(221): n is a, c, g, or t
  misc_feature (238)..(238): n is a, c, g, or t
  misc_feature (241)..(241): n is a, c, g, or t
  misc_feature (257)..(257): n is a, c, g, or t
  misc_feature (265)..(265): n is a, c, g, or t
  misc_feature (287)..(288): n is a, c, g, or t
  misc_feature (290)..(290): n is a, c, g, or t
  misc_feature (301)..(301): n is a, c, g, or t
  misc_feature (304)..(304): n is a, c, g, or t
  misc_feature (306)..(307): n is a, c, g, or t
  misc_feature (318)..(318): n is a, c, g, or t
  misc_feature (337)..(338): n is a, c, g, or t
  misc_feature (344)..(344): n is a, c, g, or t
  misc_feature (353)..(353): n is a, c, g, or t
  misc_feature (362)..(362): n is a, c, g, or t
  misc_feature (393)..(393): n is a, c, g, or t
  misc_feature (400)..(401): n is a, c, g, or t
  misc_feature (407)..(407): n is a, c, g, or t
  misc_feature (425)..(425): n is a, c, g, or t
  misc_feature (428)..(428): n is a, c, g, or t
  misc_feature (430)..(430): n is a, c, g, or t
  misc_feature (437)..(437): n is a, c, g, or t
  misc_feature (441)..(441): n is a, c, g, or t
  misc_feature (912)..(912): n is a, c, g, or t
cgcancccgcagngnantttggnggcgccagagcggagnaangcacncgagtttgtgtttgaggncaanntgaggatnggganagctgttcntttgggctgnagaaantccgctgagnagaanttgcngccagaatgctcctcctgttgctgagtatnatngtnntnnaagtngcggtgctggtgctgctgttcgtntncaagatngtnagnnaatggatngtgggcaatggaaaagnaantgatctctggcagaantgtagcanctcttcctcaggaaatgtccannantgtttctcatnatnannaaaagaatggntgcagtctgtccaggccannatgatnctgtcgatnatcttcagnattctgtctctgttcctgttcttctgccaantcttcannctcaanaaggggggcaggttttanatnantggaatnttcnaaattcttgctggtctgtgcgtgatgagtgctgcggccatctacacggtgaggcacccggagtggcatctcaactcggattactcctacggtttcgcctacatcctggcctgggtggccttccccctggcccttctcagcggtgtcatctatgtgatcttgcggaaacgcgaatgaggcgcccagacggtctgtctgaggctctgagcgtacatagggaagggaggaagggaaaccagaaagcagacaaagaaaaaagagctagcccaaaatcccaaactcaaaccaaaccaaacagaaagcagtggaggtgggggttgctgttgattgaagatgtatataatatctccggtttataaaacctatttataacactttttacatatatgtacatagtattgtttgcttttatgttgaccatcagcctcgtgttgagccttaaagaagtagctaaggaactttacatcctaanagtataa

SEQ ID NO: 575184 - DNA, 217 bp, Homo sapiens
  misc_feature (127)..(127): n is a, c, g, or t
ggggaacccctttgggttttgggccccaatttttccttttggtggaaaaggggggggaggttttggcccccccaggggcaaaatttcctagggggggtacccctttgggggtttgtccatttatccngttgttttaacccttggccccagggttggccccgcccaaattttttcctgtttttaaaagtttttataaacccccccttttcgggcccca

SEQ ID NO: 575185 - DNA, 294 bp, Homo sapiens
gtgaatgcagctgaaagacagaggtggctggtcgctctcgggagctccaaagcatgttttgactgatacaagggacttaaaaaaggaaaaaggaattaggtgaaaccagtgaatcgttgaaaaccaaaatgtctgaacttcgcctctactgtgacctctaaatgcagcaggttcatacaatacaggaatttgttcacatgatgagatcattcatctctagtgcagagtctttgtgtaatttttcagacatgaatgagctctctctcttggtgcacgtgtacacatcatcacacg

SEQ ID NO: 575186 - DNA, 505 bp, Homo sapiens
ctaggttgaagcgagtactgttctgctggctgtgggggggacccgggtatgagccccggagcctgctgaggtgctgctgtgctgtgctgctgtgctgtgctgctgtgctgtgatgctgatgctgctgctgtgctgctgctgctgctgctgctgctgctcagtcttgtgtcccggcgtctggctcagactgactcatgttgggcagcagagtggaataggcctccagctgggagctgctgtgatggagtggtggctgctgcggtcgagtgcactgaactggtgacggggttggcggttggggggatcagctgtgatgggatgaagctggcataggtaccagtgtattgggaggaccaatgaagtggaagggtgtgcgtcaggtgagcgtactggactgggtacaccggtggtccctggctgcggggagtgcgtacgcgggaggcaagggtggttgccacggggacagaccttgggacgctgggcgaggagtagtccagccttgtga

SEQ ID NO: 575187 - DNA, 1041 bp, Homo sapiens
actcccgctctcgttttccctccttcgccgactccgtctgcctgccgtctctctctacacagtccgtgtcgcatcctcggggctgctctcggcgcccgtgcttggcgctcggctgctgccgcgcggctgtcgagccggtcccgcctcgtgcgcctgtcggtcctccacgcccgccacctctgtcctagcgaggcttcgctcgtgcgggctccctctctctgcttttctccgcctgtgctcttccgccattccgcggtcttgccgtctctgcggcgcctgtcttccccgtcttggccgtctcgtgctgctgggtccgcctctgccctccccgccttggcgcctgtcccgctcgtgcgcggccactgccctcccccccgccggtgctcctctgccctcgggctgccgcccccggcgtcgccgtccgcgcgcgcttccggactcggtactcgccgctccgccgcggttgtctggtcgcgcggcgctcgcgccctccggctggcggagggaactcggcgcggtgtgacgcggcgtcgcctctcctctccttccgcggccgcttcatgctcgcttctctttctcggccgcgtgctcgctgtccggccctcccggcgtggcgcgcgtcgcccggtttcgctcctcgtcttcgcgttctcccctcgccctcctgccgtcccttccctctggttccgctcgcttgctctgctctctgtcctgtctgtgcgcctggtctgctcagcattgccctttgtggccgctgtcctcccgctcgcgtggcggctcgcttgtggggcgccgtgctcgtcttggctccgctccgcgggcgccttctgtcgcctgccccgtctgttcttccctcgtcccgtctgcccacttctttgttttttcttctggtgcctgtctggtgcttatcgcgctgagcgagtcccgacgagttcagatttaatgaatcttcctaagttgaagtaattaaattctttgaactgaaaagaccaataaaaaaaaaaattaataaagatagtactaaatttagatataatataa

SEQ ID NO: 575188 - DNA, 492 bp, Homo sapiens
  misc_feature (339)..(339): n is a, c, g, or t
  misc_feature (410)..(411): n is a, c, g, or t
  misc_feature (447)..(447): n is a, c, g, or t
  misc_feature (482)..(482): n is a, c, g, or t
  misc_feature (487)..(487): n is a, c, g, or t
ctttcccagggtcacgtcattaggttcaaggtcacagagctagtaaatatgtattgagccaggattagaattcagctctgtctggcattacagcctgagcttttaaccagtatgatcttttttaaaggtttcttaccaagaggttgtgttatttgttttgaaagatgaaataaccccatggtttttttttcttctttcttttatttttttattttgacatggggtctcactgtgttgcccagcttggagtgtagtggcacgatcttggttcactgcagcctccgactcctggggttcaagcaatccacccatctcagcctcccgagtaactggggactnacaggtgtggcaccaccatacttcagcagattttttatatttttggtagagacagggttgtgccatgttgnntcaggctggtcttgaactcccgagctcaagcaattntccacctcagcctcccaaagctggggatacaggtntgagncacca

SEQ ID NO: 575189 - DNA, 288 bp, Homo sapiens
agtcaatcactgggacttattcatcagaggcgggcagttgatgatgcggagtgtgaaccagacccagctacgcgaaatcttagcatacgcctcaattacccacataggatgaataatagcagtgctaccgtacaaccctgagataaccattcttaatggaactatttatattatccgaactactaccgcatgcctactactcaacttaaactccagcaccacgaccctactactatctctacctagaaaaagaggaccatccctcattaccaccattccttgttaatt

SEQ ID NO: 575190 - DNA, 241 bp, Homo sapiens
aggctccagtcttaacgatatttggaggtcagcacggtgctcacgtgtcgacggaactatgtacatgggaggcatgcaccggcagtggtgaatacacagtcgacctggctgcatgtatgcgtgattgggaggtgagctacggtgctcatgtatacgagcggaacttgtccagggaggcatgcaccggcagtggtgaatacacgtcgaccatggaggcatgcatgcatgctcgggtactgga

SEQ ID NO: 575191 - DNA, 429 bp, Homo sapiens
ctttcccagggtcacgtcattaggttcaaggtcacagagctagtaaatatgtattgagccaggattagaattcagctctgtctggcattacagcctgagcttttaaccagtatgatcttttttaaaggtttcttaccaagaggttgtgttatttgttttgaaagatgaaataaccccatggtttttttttcttctttcttttatttttttattttgacatggggtctcactgtgttgcccagcttggagtgtagtggcacgatcttggttcactgcagcctccgactcctggggttcaagcaatccacccatctcagcctcccagctgctcaggaggatcacttgagcccaggtgttcgaggctgcagtgatctgtgatggtgccactgtcctccatcctggttgccagagtgagaccctgtctcccaa

SEQ ID NO: 575192 - DNA, 287 bp, Homo sapiens
cgacttctagaggatccacacagttgaccaacagaactgggtctgcgttgcttaaccagcttgccacccttcaggcctgtgggccccagaagctcagggcacccattgtcttaaggaaccattgggaggacagtctgagagcaggaacttcaagctgtgattctatctcggctcagactttgggtgggaaaaagatcttcatggccccaaatcccaggaaacctgccttagaccctggtgtgagcaggccaccaggttcctcttgtcaagtccagacttgcttgatt

SEQ ID NO: 575193 - DNA, 139 bp, Homo sapiens
  misc_feature (6)..(6): n is a, c, g, or t
gattanaactgtgcagaggacagtggtgagaagggggttggtcccccactttccataaactataaacagaaacatgaacacagagaatcacaaataagaggtgtctttcctcaatgtctccatctcaccccgattcttc

SEQ ID NO: 575194 - DNA, 252 bp, Homo sapiens
tacagcaggtagactctactattcaggtaagtgaaagaggtcacaaacattataggttgtgtggagcagtaaaaatgcatcacagcaattctaagcacaacaagttttctgtaaggccttctctgaaaaaagagaaggaattacttattaaaactaagcacacttagcaacttctttcccaatcgctatctttattcgttagccgggatgccacaattatgctggaccctttttaaatatgcaaagccttac

SEQ ID NO: 575195 - DNA, 246 bp, Homo sapiens
cttagctattacggtttccttcatgggagagccctcatctctatacagatatgattcagctgggatatacattggtccctttatttgctggcaaatggtttccttaccatccgttatttgaccaacatctcctttctggttcttaaaatatatcactcttagaacttgtcccctttcttctctgattgaatgcataatatcctttaacagtggtatatatgctctcaaggaattttaaatctcttc

SEQ ID NO: 575196 - DNA, 211 bp, Homo sapiens
tgtctagcggatcccgttggtcgatcactgtactccagcgtgggcacggagcagactgtctcacaaaagcacaaaagcaaaaaaaaaaaaaaaaaaggggggtcttcctccagattctttcggttaaaaaaaaccctgcattttttttaaggttgaaaaaaaaaccggggccaggcattccggtgttcgcccaggggttccggacctcaat

SEQ ID NO: 575197 - DNA, 112 bp, Homo sapiens
ctaccttcatgcttggcactaaccccagatgaatccatcttccaccatgcagccaaaaaggccttcaaactctactcccactaatagctttttgatgacttctagcaagcct

SEQ ID NO: 575198 - DNA, 154 bp, Homo sapiens
cacgaggtttatctaaaagtgcacatgtgggcttaacgctgccaaacagcacgcatatctacatcaacaagggcttctattccatctacaacttggatcgggggaaaagggacatgtaggagaggaaggaaatcacaggggaaaaatataccat

SEQ ID NO: 575199 - DNA, 575 bp, Homo sapiens
tcaggttttagtagcctgaagcaacaaaggtgtgtgttcattggggattcacagttcattggccaggaggaaccacacggctgcaaccacaagaggccaggaagtgccccacactccccgagggaggagaactggaagtctcggttgagcagcacgagggatgccacaccagcacgtagccaggcagcttgtgctgtgaaccggccacctttgctgcccaggctttccctcgattttcctcctgggcttccctatctgcagtaggagagggtgggctgtgtgacacttcacctccctctaggcctctgctccaggaggtggtggagtggacggggcaggtgctcggggagtcagaccagggagaatgtggcctctgctctctcagcaccttcgggcgtggcgtttggcatctcaggatctttttgtaaattaaactattgtgaccattgtaaattcacatacagttgtgagaaataatacacagatcctgtgcactcttcacccagttttccccgtggtagctttgtgcagaacgaggacagtagcacagccagcggattggccgacgcggccgc

SEQ ID NO: 575200 - DNA, 121 bp, Homo sapiens
gcaggatccctagacagccggaccccaccaccgggtatgcaggcggcggggggcgtgggcctcccctcacatgctgcaaggaccctccacttgacttcacgcaaggcggcagcttgctgca

SEQ ID NO: 575201 - DNA, 620 bp, Homo sapiens
  misc_feature (311)..(311): n is a, c, g, or t
  misc_feature (324)..(324): n is a, c, g, or t
  misc_feature (327)..(327): n is a, c, g, or t
  misc_feature (368)..(368): n is a, c, g, or t
  misc_feature (420)..(420): n is a, c, g, or t
  misc_feature (424)..(424): n is a, c, g, or t
  misc_feature (445)..(445): n is a, c, g, or t
  misc_feature (545)..(545): n is a, c, g, or t
  misc_feature (590)..(590): n is a, c, g, or t
tcccccgaacctgtcgaggctagagctttggggagagaaggggaaagacagatgggacagaaaagaactgagagaggcaggcgatcctcccacctctgcctcccaagtagctatgactacagccacatgccaccacaccaggctaatttttgtagagacacggtttcgccatgttgcccaggctggtctcaaactcctgagctcaagggatccaccctccttggtttcccaaagtgcagggactacaggcttgagccaccatgcccggcctgtatagacactttctatcccacttttaaaacaggcatgtnctccctatgcttnaanatgcctttaaaatatttctaatggtgctaattctctaattngggagtgtctaatttgcttccagtttttaaaaactattttttattatagtanttanccttttaaatacatgaatctngggcatatttttaatgatttccttaggagagattccttacagtgaatttcttgagtaaaaggaggttaactgtaagattcttgatataccttgctaaatngtcttctagaaagcttgaaccaagttctgcacattttagcaaagnatgaaatgtccttctctccatatcttcatc

SEQ ID NO: 575202 - DNA, 839 bp, Homo sapiens
tgtagaagcgccgtgttgtggcgtcgagagtggttcgccgcaattggttgatatcccccaggtcgagattcgctaaggcgccaacatttgaagggttgggaattttgataacccccgagaaccccccaggcgtatcccgccgaaagagttgtgttaggccagtacttcctctttccgagttgtacccgcaccctctaatggaatgggagtatagtagccccggttttttatgcccgggaacaatgtccccgtttataaggtggcgccactttttgtagaatgtttaagccaatgttgaaatgagttaatgccgtgaacgcgtaagttttgccgcacaaatttcgctagctatagtcacaactgtaaaacttccagggcacccacgcgagcccgtatactaactattttttcgacaccgcgtgaaaacacacagggtaaaacaatgagctataccacccccgttaaagttcccactccacccgctccgtttccctatggagggcctgcccccgcgtaaaccggctgtttgtgcccacaaatggggccacttaatcgaaagaaattcacccacaaaacacaatatgcgctctattctatatccccaccccacatcaataagcgcacaccatcaccctccttaacctctaactttctacctacgcctaatttactccaccctcatatcaccacctacttccccacatatttaacacaacgtgataaaataaaatgagcacgtttgagaacaataccacaaaacccaccccattcctccccacactcatcgcccttaccacggtactcctacctatttccccttttatactaataatcttata

SEQ ID NO: 575203 - DNA, 933 bp, Homo sapiens
  misc_feature (271)..(271): n is a, c, g, or t
ggctggtactggtcctgggaggtttgggatctcagaatgtggcaaaggcgacgcctgctgtggcaggcgcttttggaaaagtaacactgcgtctatcctttatttttttttatgccatgatgtgtgttacaatagaaaagtggtcacttccacaaaagtgcccttataaaggtgaccaccgaaatgggctaaggtgcattatggtattcatccataaatcagcaattttctttcacagaacagtgcacttcgagacatttaaacaggtcanaaaagtgcacccgtgtataggcatgggggcgaactacacacgatttatcagcttaagagggtctcaaagcattattaactcggcatcacgttgatgccttgcaaagctgtgttatacaagcaacccgtggcgttacaaatacagtgggtatacgagcgcctttcttgccaccaacacaaaaaccaacaggtagaggggaccacatatcacacgcgaacgcggatcaagacacgctcaagaataccagacaacgaaacatcaccgttgcgggaatatcacacagttggcccccaaagcgagcacccaagagacaaacatacaatgagggacaaaagcatcacatcaacatccacgcacagagagacagacaagacgagcagcgggcgtgaagggaagaaaaacacaaccgacaagagaccacacaaagaaggggcacaccacgggaaaacaagatagacacggagacaccagaagaagaaacaacacaaagagggaaaccccaccagtagtgccaccaccagacaagcgacagacaccatcaccccaaggatcacaccagtacaaacaaaagaccacaaccagcacccgaacaacaaatggagcagacgacacaccgaacggaaacaacacagcgaaagagaacagaggagagaagaaccaac

SEQ ID NO: 575204 - DNA, 911 bp, Homo sapiens
gcccatgcagcaggccaaggctgtgctcaagcatttcaacgtgcgtgtcacccacgcagacatcttcagccgctgccaggcctgtaactgtgaccagtacctaaaggtctccaggacatgatgaagcagctcatgtggctcagcagtcaccaggaggggcccaggagctcaggtgacgaggccacccagagccaggcggtgcaggagccaggcccagccccagacgcagcccctgagggctgcacctatgaccgcccctgccgctggctgcagatggctgacctgcgggcggagacaccggacatgctggccgacggcacccggctgcagctggcaggggtcccggtgggtgtgctgaggacacctgggctgcggtgcttctactgctgcacgggctgtggaaaggtcttctgggacggctcccacctgggtcgtgttgccacccacttccgagacatgctggagagcgcccccagcccctgcgagccgagcccagcccccagcccggccagcagtcccttctgaggacagccagacaataaacatggaaagtgcccgactgctgggcccatggccgtgaaagcatacctgataccgaaccaaccatggagcgtgggacttcatatgtgaggccagtacttcatctacggaatcttcctgaacaaccgtgggtggtctgccgcagggagtaccctgttgggggaccaggtcaattgcagaacgactcatcactggttagaacagcagaaggaactgctcttcagtgggactttaattgcattgaaaagtgggctgcacattgatacattcataactaacgctggtgtgagcaactacgcacctgggacaggcacatagagacagacacacaacttggagggggggcagacaaagctgggatacgtccagag

SEQ ID NO: 575205 - DNA, 804 bp, Homo sapiens
ccccgctggctgccaagccccatccctaggacagtcccggaccagctctcttccttgactgacaggtgacgaggccacccagagccaggcggtgcaggagccaggcccagccccagacgcagcccctgagggctgcacctatgaccgcccctgccgctggctgcagatggctgacctgcgggcggagacaccggacatgctggccgacggcacccggctgcagctggcaggggtcccggtgggtgtgctgaggacacctgggctgcggtgcttctactgctgcacgggctgtggaaaggtcttctgggacggctcccacctgggtcgtgttgccacccacttccgagacatgctggagagcgcccccagcccctgcgagccgagcccagcccccagcccggccagcagtcccttctgaggacagccagacaataaacatggaaagtgcccgactgctgggcccatggccgtgaaagcatacctgataccgaaccaaccatggagcgtgggacttcatatgtgaggccagtacttcatctacggaatcttcctgaacaaccgtgggtggtctgccgcagggagtaccctgttgggggaccaggtcaattgcagaacgactcatcactggttagaacagcagaaggaactgctcttcagtgggactttaattgcattgaaaagtgggctgcacattgatacattcataactaacgctggtgtgagcaactacgcacctgggacaggcacatagagacagacacacaacttggagggggggcagacaaagctgggatacgtccagag

SEQ ID NO: 575206 - DNA, 313 bp, Homo sapiens
gtatccccctggcaacccacgcatggcgtagggtggtcggggattcattgaattgtggttggcaggagcaagccctgcgtcacactctcacactcgcaccccgaattgtcaaacgatacagattgtaaaaatctaccatccctcagtctcactcactatatataaaatcacatgtcccctacgaacccagagtcagactacatgctgtagcatttggcagggacagtcataaaggagacaatgtaaaacggtcagatcgactcaggccgtgtagattagactgagggtagagtgaccatcgggaccctgtctg

SEQ ID NO: 575207 - DNA, 172 bp, Homo sapiens
gacggggacgtgacgagacacacacaggacgggtctgacgacttactcactccgctgagggtggagctgactgctctgttctacggactctccctcttctcggtacttttcttcctcgggttttaaactggatacacagaactgttagacatcagggtgtggtctccctcca

SEQ ID NO: 575208 - DNA, 121 bp, Homo sapiens
cacatttagtatggaaggacatgggatcaggtgcatcaaagccaaatggggaaaaaatcaaggatttaatacaagggcaaatttcaaacagggcacaaagggctaaagtggctctctctac

SEQ ID NO: 575209 - DNA, 265 bp, Homo sapiens
aaaaacccccccccccccccccagggggggtttggccaaggggccccctttatatttttggccccccccccccgggggtccccgggggggggttttttttttccccgtttttttttttttaaagggggggggggcttccccccccggggggcctttttttccccccggggggcccccctttttggggggttttttcccctttttcccccccccggggggggggttttttttgggaccccccccattaggggggggggtcccccca

SEQ ID NO: 575210 - DNA, 111 bp, Homo sapiens
cggcattgcagatccacagtatggggtctggcctgaggagggcggtaacagagcatggattcaaaatcagagcagagctgggtgccgtggctcatgcctgtaatcccaaca

SEQ ID NO: 575211 - DNA, 313 bp, Homo sapiens
  misc_feature (238)..(238): n is a, c, g, or t
  misc_feature (252)..(252): n is a, c, g, or t
tcaaaaaattagctgggcgtggtggcaggcacctgtggtcccagctactcgggaggctgaggcaggagaatggcgtgaacccaggaggtggagctttcagtgagccgagattgcgccactgcactccagcctgggcgacagagcaagactccatctcaaaaaataaaataaaataaaataataataataataataataaggcttgtggtgtccttcaggctaccggagaaggtggttnctggtgggcgcgantgctcctgactgttcagaaagggagctgctcagtggttcacggctgtcatcccagcacttt

SEQ ID NO: 575212 - DNA, 652 bp, Homo sapiens
gttcagtgccattttatactttctctctgtgttctctgtattgtactaaccaacctcccaaatcgctgagctgcttgtttaaaaaaaaaaaaagggaaaagggaaaaagcaatgacatttgtgtatcgatttttggttgttgaccaaaatcacacacttggaaaccttgtaattcaacagagtggggaaagctagcagattctgggcttagtattactaataggcaggattggtacaatggagcaactatcagattattcctttcaggggttcttatgggcatccaaattactggaataacattattaatccattaatcagtggaatcaaatttatgattacaattatcaaattgaatggctcagcattaattggaaaactggtttggttgaaacatggtttacccagaaaagtagcattctataaatactattaaacaatttagctatattattttcaagtattacattatttgtcaagcagttaaagtgaatttcagagtaacaagtaaggcatgtttctgagcaacatggataatttcttaattggcaaatttcttctaatttgggtactgggaatatagtgtggagattttaatttctaaattgggggtatcttctattacataaatgctttgacaattataaaatgg

SEQ ID NO: 575213 - DNA, 342 bp, Homo sapiens
ttatttatttattttgaaacagggtctcactttgtcacccaggctggcgtgcagtagagcaatcacagctcactgcagctgcaacctccctaggctcaggtgatcctcccacctcagcctcccatgtagctgggaccataggtgcatgaccccatgtctggctaattttgtatttttttttagagatggggtttcatcatgttgcccaggctggtcttgaaactcctgggctcaagcagtcagcccacctcagcctcccgaagtgctggcattgtaggcgttacgacgtgtgccccgccacattctctatcaaggctttatttaattgcttttttttcttct

SEQ ID NO: 575214 - DNA, 701 bp, Homo sapiens
  misc_feature (29)..(30): n is a, c, g, or t
  misc_feature (34)..(34): n is a, c, g, or t
  misc_feature (36)..(36): n is a, c, g, or t
  misc_feature (44)..(44): n is a, c, g, or t
  misc_feature (46)..(47): n is a, c, g, or t
  misc_feature (50)..(51): n is a, c, g, or t
  misc_feature (53)..(56): n is a, c, g, or t
  misc_feature (59)..(59): n is a, c, g, or t
  misc_feature (61)..(61): n is a, c, g, or t
  misc_feature (64)..(64): n is a, c, g, or t
  misc_feature (67)..(67): n is a, c, g, or t
  misc_feature (71)..(72): n is a, c, g, or t
  misc_feature (74)..(74): n is a, c, g, or t
  misc_feature (77)..(77): n is a, c, g, or t
  misc_feature (80)..(80): n is a, c, g, or t
  misc_feature (82)..(82): n is a, c, g, or t
  misc_feature (91)..(92): n is a, c, g, or t
  misc_feature (96)..(96): n is a, c, g, or t
  misc_feature (234)..(234): n is a, c, g, or t
  misc_feature (240)..(240): n is a, c, g, or t
  misc_feature (281)..(281): n is a, c, g, or t
  misc_feature (320)..(320): n is a, c, g, or t
  misc_feature (332)..(332): n is a, c, g, or t
  misc_feature (410)..(411): n is a, c, g, or t
  misc_feature (462)..(464): n is a, c, g, or t
  misc_feature (488)..(488): n is a, c, g, or t
  misc_feature (504)..(505): n is a, c, g, or t
  misc_feature (521)..(528): n is a, c, g, or t
  misc_feature (537)..(537): n is a, c, g, or t
  misc_feature (539)..(540): n is a, c, g, or t
  misc_feature (549)..(549): n is a, c, g, or t
  misc_feature (551)..(551): n is a, c, g, or t
  misc_feature (560)..(560): n is a, c, g, or t
  misc_feature (569)..(569): n is a, c, g, or t
  misc_feature (591)..(591): n is a, c, g, or t
  misc_feature (596)..(596): n is a, c, g, or t
  misc_feature (600)..(600): n is a, c, g, or t
  misc_feature (604)..(604): n is a, c, g, or t
  misc_feature (611)..(614): n is a, c, g, or t
  misc_feature (618)..(618): n is a, c, g, or t
  misc_feature (626)..(627): n is a, c, g, or t
  misc_feature (659)..(659): n is a, c, g, or t
  misc_feature (683)..(683): n is a, c, g, or t
  misc_feature (701)..(701): n is a, c, g, or t
ccgccctctcgtgacagctcagcccctcnnatgnanatttggangnngtnntnnnntananttnaanaaanntnacntantntgaaaaaannaaanaaaaagcaaacaacaacagcaaaaaaaaaagaagaagaaaaacaaggaaacaacaagaaagaagcagcaaaaaacaaagcacagcaaaagcaaagacaaagaaagacaaggaaaaacaaacaagcagcaggagacgcngagcgnagaaaagacccccgggagcccagcccacaccaaaagcccancgccgaaacaaacagccagcaaaagaaacccaaagcggnaaggaacacccnaaaagggaagaaaaaggaaaaccccagggggcgcagaagcaaaaagccagcaaacccagaacggcgcaagccaccaannggacccgagagatggggagagtgtcgtccaacgtgtcgtgtgtgtcaaacnnngtaaagtgtgtagtagtgtagtcnggtgtgtcaacaagtnnttagtatcccgtcagnnnnnnnntgtattaantnntgtaaagtntngtggagttngtcagtttnaagtaagtttttgtaagttaangtccntctnaaancgttgtnnnnaaangttgtggnnaaatgtttatgtcgtattcttataagttgttnttctaattcttattgttctccgtngtttttgttttagttgtn

SEQ ID NO: 575215 - DNA, 316 bp, Homo sapiens
gcgggggtttcaccaagacttacactgttggctgtgaggaaggcacagtgtttccctgttaatccatccccggcaaaaagaagaggggcactcattggttggggaggggccagttcctccaaggttatgaaaagggcttccagtcccgtccccttgcctgcctgcctgggaagccagggttgtgcacctgccagtccctggggtcccagaaagcatgaatcctgcccggagtggaagtttaagcctgcacagtgtcccccttgttcccactcccattttttttccggacaacgaaataaagggttcccccccagca

SEQ ID NO: 575216 - DNA, 1260 bp, Homo sapiens
  misc_feature (125)..(125): n is a, c, g, or t
  misc_feature (435)..(435): n is a, c, g, or t
  misc_feature (539)..(539): n is a, c, g, or t
  misc_feature (562)..(562): n is a, c, g, or t
  misc_feature (632)..(632): n is a, c, g, or t
  misc_feature (748)..(748): n is a, c, g, or t
  misc_feature (761)..(761): n is a, c, g, or t
  misc_feature (767)..(767): n is a, c, g, or t
  misc_feature (784)..(784): n is a, c, g, or t
  misc_feature (788)..(788): n is a, c, g, or t
aggagctctccagcctcggctcctgggcagagggcccggaaaccctcggaccagagtgtgtggaggaggcatctgtgtggtggccctggcactgcagagactggtccgggctgtcaggaggcggnagggggcagcgctgggcctcgtgtcgcttgtcgtcgtccgtcctgtgggcgctctgccctgtgtccttcgcgttcctcgttaagcagaagaagtcagtagttattctcccatgaacgttcttgtctgtgtacagtttttagaacattacaaaggatctgtttgcttagctgtcaacaaaaagaaaacctgaaggagcatttggaagtcaatttgaggttttttttttggtttttttttttttggtttgtgggaacgtgccccagaattgaggcagtgggcaaacttctcaggacaatgaatctccttccngttttccttttaattgccacacagggcttggtttttcataccggctggtcttaattttagaataattttagaaaaccaaaacaagaggcggttttccctaattngggctatgaaccccccttgtgtnccaatatgaagacggctatcacgaagcagttccaaagaggaaaagctggggcggtgcccagcgtgcccgntgcccatcgacgtctgtccgggggacgtggagggtggcagcgtccccgcctgcaccagtgccgtcctgctgatgtggtaggctagcaatatttgggttaaactcatgttggtgacngtacccattggtntgaatnttttaaagaaataaaantccnggaaaaaaaaaaaaacacaacaaagaacacacacacaacaacacacaccaaaaaacaacaacaaaaaaaaaggggggggccccaccaataaaatcccccgggggggcacaataaaccacccactttttgtaaaagggggccccaaagggagcgatctaaaactcagcgagccgggcggcggacacaccacacctgcggggcagaacatcagtgccgcgattctgggacaggcccaaccgtggcggggaggactggaggcccacctcagaaaataacgccccagggaacaacactctagtgtagcgcggaccccactattttctcggcgggagatggccgcggatgataaaataaggacgcgagatcaaagcgactcacaccacaccatgcatgagtccaacacaagcacatcgaacacaagcctcacgacaaatccacacacgtaccacatctcgcactagacgacgaacga

SEQ ID NO: 575217 - DNA, 336 bp, Homo sapiens
gagagtggtgaatcagatgatatgactagagagaagatagtagggatgacaagtttgggggatagcaccaggagatatcagcggtgatggctgggagaggaagtgtaaactggcagtgtaaacaaaagtagagcatctatgagtagttgagaatggtgaatcagagtatgactagacagaagatagtagggatgacaagtttggggggcacagtcaaagtagtgggggtgactgcgtagagccctgctgtaaaaagtagtagggtaaggatgaatagacctaatagaataaaggaatgtattaggctcatatgggttattactactcgggaaagtg

SEQ ID NO: 575218 - DNA, 695 bp, Homo sapiens
  misc_feature (125)..(125): n is a, c, g, or t
  misc_feature (435)..(435): n is a, c, g, or t
aggagctctccagcctcggctcctgggcagagggcccggaaaccctcggaccagagtgtgtggaggaggcatctgtgtggtggccctggcactgcagagactggtccgggctgtcaggaggcggnagggggcagcgctgggcctcgtgtcgcttgtcgtcgtccgtcctgtgggcgctctgccctgtgtccttcgcgttcctcgttaagcagaagaagtcagtagttattctcccatgaacgttcttgtctgtgtacagtttttagaacattacaaaggatctgtttgcttagctgtcaacaaaaagaaaacctgaaggagcatttggaagtcaatttgaggttttttttttggtttttttttttttggtttgtgggaacgtgccccagaattgaggcagtgggcaaacttctcaggacaatgaatctccttccngttttccttttaattgccacacagggcttggtttttcataccggctggtcttaattttagaatacttcacattaaccaccccaggtttttattccctaattgtgcaattaacctcttttgtttcaattcagactgtattcttaacccgctcacgccgttcgcccgtgctcatcgcgcctctttctactcacgtctggctctgcccccacttgtccgacgttttcaccatttcttcatattttctctttttgtgtctcccc

SEQ ID NO: 575219 - DNA, 107 bp, Homo sapiens
gcgagccgcttgttccaatgccgctggacctctacatcccgccggatgcgctggaggtcttcctggaagccttccagggcccgctggacctgctgctctacctgatc

SEQ ID NO: 575220 - DNA, 270 bp, Homo sapiens
accctaggcgcacttctccacaattggggaggcgatagagagtgctaccctcacacatgatattcatgcattattcagagccacacctgaatattgtgtgcacgtactctgagaggtatctagactgctccaggactctctaaggattacatggccggcttgagtcacctaccacaatctggaggccttcatctctgataagagaagactatggcctacaggctgtggaagcaggtgttcacttcggggccccagaagtgcgcctgggtt

SEQ ID NO: 575221 - DNA, 529 bp, Homo sapiens
gatcggcgctgagacagggatacggcaacttgacttcgacgggtcgtcaccttgcatagacgccaaatcggtctcagttcggaagtacggtagtagccgctctgttacttgaagcttagttcccctccttctctgatagtgtagcctttcgacagtaaggtcgctgtacagtagtagcagaagacctgacagtatagtctctaaggcccatataggaggagttagtagcaggctggcccttggaccttgatgttatcttgggtgtgtccttttgcaacatacctgtggtggagacaacataggaacagtctttgtagttggtttaagcttttgccatccaagggttgtcagaatcctttagcagagcactcttgagcctgcaatcaaattagtcacatctgcgactggcatcctttgtagcaggctcataagcatggacacttagatcaatgttaataattagtgccttcagcagtagcatatgcaaccggcattgtctctctggatggctgctgtttgtttcgagcac

SEQ ID NO: 575222 - DNA, 338 bp, Homo sapiens
agcgcaaggctccgtctcaataattaaaaaaaaaaaaaaaaaaaaaggccgggcgcagtggctcaagcctgtagtcccagcactttgggaggctgaggcgggcagatcacctgaggtcaggagttttgagatcagccttggcaacacggtgaaaccccatctctactaaaaatacaaaattagccaagcatgctggcacatgcctgtaatcccagctactcgggaggctggggtacgagaatcgcttgaacctgggaggcagaggatgcagtgagccgagatcacgccattgcactccagcctgggggacaagagtgaatctgtgtctcaccaaaaaa

SEQ ID NO: 575223 - DNA, 101 bp, Homo sapiens
cacctggttttccagtgagactccagggttttaaacaaaggccagttttggcccctcccccccccccccgggggccccaataaagggttggatagctccca

SEQ ID NO: 575224 - DNA, 325 bp, Homo sapiens
aaatccatttggaatcaaaaaacggtggattttggcaaaaggtccctgggcccccccccctcatccctggtttggtcccctgttgcctatagcccttttcccttagccccccccccacagaatgggggccagcccccttgcctgcctgtgtttttcccccaacccccttagatggggagggaaaaggaggaaaggggagggggcctgccccctcctcagggatttgggagggccctgcccccctgggcttttcccttccctggggggtttttcccccacccctttgtttaaatccaacctgaataaaaattccagttttatatta

SEQ ID NO: 575225 - DNA, 182 bp, Homo sapiens
ccccacagagagctctgcacgtcaccaagtaaccaggccccagcctccaggcccccaactccgcccagcctctccccgctctgggggggtgcattctaacactcgactctgccgctcatgggaagacagaattgctcctgcatgcaactaattcaataaaactgtcttgttgggagcttggt

SEQ ID NO: 575226 - DNA, 483 bp, Homo sapiens
  misc_feature (56)..(56): n is a, c, g, or t
  misc_feature (202)..(202): n is a, c, g, or t
  misc_feature (299)..(299): n is a, c, g, or t
ggtcaccagtcttggcccagtacaggaaaaggaatccgctttgtggccacagatgngggctggggagaagcggacctcagatcctgcatctcttcacccgctggacacaggagggctatgaaccactgtgccgtggtgcaccactggctggagcagagccaggcctgggagaggcaggtggccccatcggcccctgctctgnaccacccctcccagatgacagagccatatgtcttccacgtgtctacacactcacagactcacgaatgtaatcgctcagtctcacaacaagcacacgnagtcacacacctgcccacaggcacatacgccacataagcatgcctgtatgctcacacagtcatactgccacacgctattacacattcacagccacagccacacatgccttgcaatccattcaaagcaccagtggctactttgtcagacacagccacaccacagtcctatgcacatccgtactgg

SEQ ID NO: 575227 - DNA, 225 bp, Homo sapiens
ttgcaggcgagctcttctccagcacggtcagccggggcctccagctgggagatggcctggctgcagctctggtaccacgccacgcagactcgggttctccacttccagacgggcaatccggacgacgagctcaccggggtctccgcgggtgccgcgggaggcccgggggcctgagcttccagccagggatttcgggatgttctctctggctctcgcaaggtcacg

SEQ ID NO: 575228 - DNA, 968 bp, Homo sapiens
  misc_feature (636)..(636): n is a, c, g, or t
ttgactgtgggatagaacagagtcccagatagtttgccggatgcatatgatgagtgtggcacgaacagatgtgaggggtccgacagaagagtatgtctttcaaagtacttaatagttgtcgctttggagtatgtgaacatacattgcttttgccggtggtgtggtgcaccggagatccggtgattggagaagaagggttattctcgaagatgagagtctaactttgtattggggattctaggtggagctgaagtgcattgaattccagtcgatgttcgtgtatcagatccgaataaggatgacgaggatcatgtggctcattgtgcaagtggtagacattctggctaaatattagttatgtagatactctaagattaatatgataacttgtgtaggcttttcagtcataagtaatcggactgatgtgagagtgaaaatgagtgaattaagccttgtgtgtgatgcagcggtacggatttggtgaaccatgtgcagttgtgtcaatagagtccgtttggaatagatagaagcaataggaacgatgccctagaatgcatttcgacgtttgtgacctgatatgacattcccggttaagatactctcgcgaatagagtcatattgtggtacacagtttcntttagttgatgtactagtgcttgtcaaggatcgtttgagtaggctctagtatgacgttgtatgcgatgagttattctgcaaggaattgaatatgacggggagtggataggaaacgaagctccaacttagtgtgattgatcaacccaggtggataaattatgtaccaaggttcttcttccagaaaaacatggggactttctggaatctattagttaggatggtattcaaatggtgaggttaaccagtttgaattaaatgggttcaacgtgtgggggtgaccgaatcttgcaaggctagattaaaaggcaatatgttctaaaaaaaacaaaaaa

SEQ ID NO: 575229 - DNA, 1306 bp, Homo sapiens
  misc_feature (1293)..(1293): n is a, c, g, or t
  misc_feature (1306)..(1306): n is a, c, g, or t
gcagtccctcggttgtccgatcgcggtgatcgttgctagctggagtgtacgatggtgcacgtggtcatgcgatgtatgcagtcgctcccagggctctggcattgtaccatcaagcttggaaggacatggatcaaggtggtgcatggtttcgtgcttgatcgttgcagaatcttagaagtggaggctgtagcatcttgaggagaggagagattcggaatagggctgcgatttacaggtaggatattaagtctcaagatgtatagaggccgtagtgcattcgtaggtggtctttggaatggcaaggatggattgaattggaatcggttgggagacagttcgtggaagtggacaacgaagatgttgtgttaattttgcgcttattatcatgtggatttaccatggggggaaaccccaatgaatcaatatgactagaggaaaagggcaatttgggactttgtacaaaggctctcattgaattgaaaaaagactggggggcacgaagtattacgagcttgaacaaggtgatagtacacctgcgcgcgagctcgtacttttggaagaagttgcgccgagtttaggtattcaacgcaaaaaacctttttattctcaagaagtgcgcatttgcgtattcaaaagtaaattacttcgggatagtttcaagggcaattagatcagttacgagttgattattggaggtataggctttctattggactatggttggagggttagattccctctgttgggtgagttgtagccattctcgacgggtgacgaattatctccaatagagtggagggactttgggaagtctagacggttttatggaaaacaatggggagtttccgttgggagatggagaaaggtgctttatagcgagtcgtggggtgcaacatgggaacaagccccctatataaggaagagggtacaccattttaccggtcgggaaacatttgcgcagcggttgcgtcacacaacacagtcggatatgggttgggtggtgtcccaaaaggaagcccgtcggttgggcttgcgggcgccaagaggatacacccttaggtgaacaatggggtccccacacagtcgctatttggtgtgcccccccagaggcgactctgttttgcaccacacatgcaataacacccaccggggcctcttttcgtgaaccacactcgtctttttacacaaccacactcctggaggacgggacactaaatacttataccaaccactacgacagacacacaggagacgagtccacacgcctcaaacactacactccgaactatgcgngccctccttacan

SEQ ID NO: 575230 - DNA, 118 bp, Homo sapiens
  misc_feature (23)..(23): n is a, c, g, or t
  misc_feature (57)..(57): n is a, c, g, or t
gaccgggccaggagcgcctggcntacagcctgcagaagctggaggaggccgagaagnggcttgactgagagcgagagaggaatgaaggtcatcgaaaaccgggccatgaaggatgagg

SEQ ID NO: 575231 - DNA, 302 bp, Homo sapiens
ggggggttgggggggcccccccaaccaaattctttcttgtttggaaattttttttggggggggggggcccccttttccccccctttggggggggggggttggggcccccccttttttttttccttgggggaattttggggtttttttttttttggggttttttttccctttccgcgcccccttcccggggggcccccccctttttttcccccccctttttttttttccccttggggggggggcccccaacttttttttttgcccccttttttttaaaaatttttttttgattttttggggga

SEQ ID NO: 575232 - DNA, 111 bp, Homo sapiens
aaacaccgcaatcttcactattctcacattccttaagagctttctcgcagattaaatgtgcataaccggggacaatgtttttttccccatcacgactcggggtaccgagct

SEQ ID NO: 575233 - DNA, 270 bp, Homo sapiens
tagtcacaggcgctcctagctctcctatctctcccagtcctagactgctggcagtcactatactagctatcagaccgcaacctcaacaccaccttcttctagcccgccggaggaggagaccccattgtataccaactcctattctgatattacggtccgcctgtaagataatattcttatcctaccaggcttcggaataatctcccatattgtaacttactactccggaaaaaaagaaccatttggatacataggtatggtccgagcgga

SEQ ID NO: 575234 - DNA, 790 bp, Homo sapiens
  misc_feature (280)..(280): n is a, c, g, or t
  misc_feature (343)..(343): n is a, c, g, or t
  misc_feature (435)..(435): n is a, c, g, or t
  misc_feature (503)..(503): n is a, c, g, or t
  misc_feature (704)..(704): n is a, c, g, or t
ggtgaaggaatgacttctcaccatctgggcctgagctggcaggactccagccactgctgtctccttagctgctcacatatggatactttcacagttcacgattccactgcaatgagctgtgtggaggaataatttctggatcatcttatctgtggcccatcatggcttgtctcgtgctggagtcgtgggacctcgagtccctgatacgtggtgtcatgatcaatcgtggcaagcgtctagcacagacgcgcgagagcacaatgcgcgcacagattgccgnaacgcctgcgttgaaacgaacaagccatagtcatgagtgcacaagcaagacacgcatccgtcntcgcaacgagagtgtctctgttaatgtcgacggtccgaccgagtatgcaatgttacccgttcttcctggtcacctgcggaggaacctcgggncttcctcctagaagcacgtcgttcccacagcatggtaagtccccaacgttcagcccgcccgagtacantaactcatctggctaaattaaagattaaaaatactaagaagactggtgttccattctccaagtcgtacaattgaggcctgaaggatgactatgacgatgttgaaattccgctgcagaagtacgtgaagaatagggagtcagttgtggaacacagcgcatttctgtcttttttggcaagaactggaagagggttcacacaangttatttgaaaacaatcaagaatggttgaacttcagtaggtctctgggccctgaaagccagtggtgattttatgaagctctataag

SEQ ID NO: 575235 - DNA, 351 bp, Homo sapiens
  misc_feature (15)..(15): n is a, c, g, or t
attcgcgggcgcgtngacttttttttttttgtagtagagacaggatttcaccatgttgaccaggctggtgttgaactcctgacctcaagtgagccaccaggcccagccttgcccagttattatataaacaaggtctcagtatgttacccaggctgatctcgaactcctgggctcaagccatcttcttgcctcagcctctcagagtcctgggtttacaggccactggacccagccaccttttgccattttaaagttggtttggttgggtcgttgagttgtacgagttctcttttatagattctgggtattaaccccctcggcagctatgggatttgcaaatactttcgttcg

SEQ ID NO: 575236 - DNA, 326 bp, Homo sapiens
  misc_feature (56)..(56): n is a, c, g, or t
  misc_feature (176)..(176): n is a, c, g, or t
taaaatcactagatcaattaagtttaggtgaaccacgtttattagaagttgataancgttgtgttactccttgtgatactaacattcgtttttgtattacatctgctgatgttattcatgcttgggcattaaactctttatctgtaaaattagatgctataagaggaattttaagnacatttagttacaggtttcctatagtgggagttttttatggtcaatgttcagagatttgtggagcaaatcatagttttataccaattgctttagaggtaacattattggataattttaaaagatgatgttttggtactatagaataattt

SEQ ID NO: 575237 - DNA, 636 bp, Homo sapiens
caatcacatttaaagcaaaatttcaaaaaagtgctaccctcgcatttgtgaagatatcacgacttagcaacccaccgtagaaggataaggtgttcaggagtggttctgattaaagccgcaggattgtcggagcgtggcatgtcctattacagacatcgtcagaggagataggcgctaagatgctcacagttctctgaagagtattgttgcttctcttcccaaccatcgctcatatactggctgtgtcagaaatgtggataggaactagaagacatgatgagaacaggatctacaaacaatgtttagctgcttgccatttactatgaagaaaatatatcataggccagcgcttaatgactgccatgtgatggaagacactgatgttagtatccgtgtagaatcaaagctgagtagagaagattcttctcaacatttctgcagactgctcaacagagtgatagttccttcctcagagatcacctatgggatggtcgtggcagacctgtgccactccttgtgggagtcagtgcagaaccttgtgtataacagattcagagcgcttgcgtgtcagatgaacaacatgtatccattagcaacaagattctccctcctggtattttatgctgacggttgtca

SEQ ID NO: 575238 - DNA, 188 bp, Homo sapiens
acttgcagcgacgcgagaagcctcggaagcgggcgtaaaggcggcagaacagtcatggtggtggtcgtaagtcctgaccacacgggcagtccgctgttccgttcgttaacaaagggcattcatcatgcgtgcgtccattgataatcagcgcggcgagccagctcgcaggccgattgtagaagtgcaaa

SEQ ID NO: 575239 - DNA, 238 bp, Homo sapiens
tcaccggtgctagccaggatggtctcgatctcctgacctcatgatcctgcccacctcggcctcccaaagtgctgggaatacagggcgtgagccaccgcgcccagcctcatcagtcacgcttgatgttcacttcaaccacaaatttctcaaactcagagcctcctcctcacctcattttttttttttaaataaaaaaaaattagaggtggggccgggcacatgtgggctcacaccgtga

SEQ ID NO: 575240 - DNA, 152 bp, Homo sapiens
tcgagtagtaggaatgcggtagtagttaggataatataaatagttaaattaagaatggctatgttaggggtgtacggtagaactgctattattcatcctatgtgggtaattgaggaggaagaggaaggggagggaagcttcccaagagtagc

SEQ ID NO: 575241 - DNA, 332 bp, Homo sapiens
gtatgcccacgtcctgttcctacaattgcactcagtggaccctcgctgtcgccgactgtcttcaccagagtgccttcctggtacggccacaccctcatcctagcctttcatgttcgcgcctgggcgatctggtacccggccatggcacccaaccccgctgtgtcgcccctcagcagggtcttttttgcctcctggaggttcgtgctggaaagtggcattgaccccatcctccgtggcctcatggccacccctgccaagctgaatcgtcagaaccaaattgcagtggatgagatccgggaacgattgtatgagcaggtcatgaggattgggct

SEQ ID NO: 575242 - DNA, 597 bp, Homo sapiens
  misc_feature (589)..(589): n is a, c, g, or t
ggagcatcgggagagccgcatctgatatccggaaaaatgcctgggctaagcccctaggcgcggtctggcctgccatagaggtgtccactggacaatgggtggcgcgtgggtcgcatcccacagtggaacgttgggctgtcttggggccgactcgcctgtttgtcattgtggggtgtgtggcagcgtctctgatggtcagttgcttgccctaggaacttgatccatcctaggttggtctgtccatccctcctctgcacaccctatggaaccctgcctctgcgcatccccgaacgtcccccgaggctccgctgtccactgcgcctgcccgggtctaggcgccgcctccgtcgcagggttaggaggagtcaaggattagggggtcgtgcagccacagaccagcaggagggactgaggccctgctaggaggaaagcaacagagggagggggccctacattcgcttcagacgccagttttcccccaccctccttaccccgcatgggctaggtctccgccagggctggcctcagtgtctcctcaacaggcctgggggcagcccttccctgccagtccccgcctgagtgccagccntacccccc

SEQ ID NO: 575243 - DNA, 1707 bp, Homo sapiens
gttatactttggacacaaaagcatcaaataaagaacatttaatcaaagtaaaaaaaaaaaaaaaaaaaaaaaaaaaaaaaaaaaaaaaaaaaaaaaaaaaaaaaaaaaaaaagagggggggcgcgcgccgccaagaatcttctctctctccttaggggggccccactcttccgccggccccccggtttttatgttatcaagagaggggcccacctataatggggagagggtgtattattatatataagaagaagaggcgcgcgggcgcgcgcggtgttttatacaaacagaagaaggagaagtggtggaaaaagagagcgcgaaaacgaggtggatctctttggagagaaagagaggacccatctattatctgtggagtggaggggaggggagagaacaatataggtgtgtggagagacatatatatctctctatctagagagagagtatatatttatagaagaaggttcatgaggaggaggaatatttatatataaaaatatattatagacagagaggtgatatatatagagcggggggtgatgataccacaacacataaagcagagggggagactactaatgtgctgcagctggagccgcaagggagtgtagagagaacaaaataatatgtgtgcgcgcatatcatcgtagagagaggagtatcatgatgatgataatctactagtgtgtagaaataccatattttattttttactcatcaccacaccgcagggagaagcagctcctatgagcgtggtgggtcatagtaaaagagtaagcgcggggaagaaggagcggagaggagagagggccggcgcaaaagccggtgagggaggcgaagccagagaaaggaagcacagaggacgaagcgagccgaaggggccgggagcgccagagcagaggagtaggcgatggagagggaggaagggacgagggagccgggaggcagccgagagagcggtaggccgcagcagtacgaagacagaagcgcagcaggcgcggagcgcacacgaagagagaagaaaagagaagaagagagcggagcagagaaagcgaggaaggaacagcaagagaagagacagaaagacagaagatgcagagcagacacgaaggagacggaccgagagtcaggagagagagagacggtggacaaaaagacgacgtcgagagaaggaagaaacgacagagacaacaacagctcagaagagcgaacagaggacgggagaccccgagccacatccacacgacgaaccccgaagagagaaagacgaccacagacgacgcgcgcaagaagggcagccggaagcagcatagagacgggaagggggacgagccagaaagaccgcggaggaggcagaggccgaagcaagagcgagagcgggaacaagacgcaggagcagcgaggaagcgagcggaaggcacgaagaaagcagcgcgagacgagaaagagaacaaccaacgcaccacaccaacacgaaccgaaaaaacaaccaccacccagcagagccgaacaaccgccacgaagacacccagacaacaacaaaacagacacagccacagcagcacccgacaacccaagcacccacgtcccaacacgacgcgaccaaccgcgcgaggcgacgcgccccgacagaaagcaccacgacacaccacccccgaacgacagcagacggccgagaaccacacaacacacaagcacgagccc

SEQ ID NO: 575244 - DNA, 378 bp, Homo sapiens
atagttttagttgtagacaccccaccttcagcttgtacttgaaagctttatctcggtataaataagtgcacggtcaattaggggaagtatgtccggtggctaaagggattctcaaacctgccatccccaaggaaaatcatgtattagtatggctaaatgatggtctgtatcttcttggtttggaaggtggctagatgtaggcggtaaacttgatggggagaattatattcttaaggtttacacccccttataagcctaaagccatttaaatggataaactgagagagcatactagatttggctctagggtataaaatccattatctgatcatattcctgacctccccccgactccaagtaaaggtgctgaagggtacc

SEQ ID NO: 575245 - DNA, 1172 bp, Homo sapiens
gcatgtccgcccgggcagcatctgcgaggcagcggctggagagggaaccatggggactgtgcacgcccgtgagtatcggagcctcttccatcaagtggacctgattcatggcggattaggagaagaagctgaatcagtatgaagttgagcctgaagctaaacaggaacattcttgaaaacacaacatgtggatagtacaacatgtgcattttgatggacttggaaggactaaagatgcatcatcatcactttgtgaaattggccgatgttactcaaggccaaaaagctaattgcggtcatgcggaaatctcatgaagccccgtgcaaaaaattgctaccgtacttggaatcaatagacaagtggctgtccacgattgacacatgtcacggtgatgacgcacttccaaatgggttagacgtaacctttgcaagtacactgacttgaggacgcatcacgaggcagtaataacaaccatggttgggaacaatgaaggcagcatggtactttggcctcaagcttcctactctgcttggacagtgcagacaaggtgaccctctccagtttaccctaatggagacaaacgaagcgttcgtatggcctgtaccttcttacaaccaaggaccggaaaacttcggaaagaaacttctcgtgtcagcctatttcacggtacttggcacgaccctttgacctcactgcggatccgcccgaggcatgctcccgcagatccagtatcccatattggaagacacgccaacgtcacgatggacacggcaataggagaactggcgtgctctcagagagcagcaacgtgagaccaaaacgagcaaacacgaaacatatctcgacgcacggccacagacgcaactaacaacaccacagacggcgccgcaagataaagcggacaccacaagagcgcagtgcgctctagaagctgagcaggaaagaacaataagcaacgataccaacttcacatcacacaaacgaaataaacaacacaatctccacatatacagcgaccacatactcccgctccttcccacaacaaaacactaaaacaaccaccacacaaccaacaactcgccaccaacccaacaatcccacaaccaacatacccattaaccatacaaaaccatcaaaaaataccacaaaacaacacacacacatcaccact

SEQ ID NO: 575246 - DNA, 189 bp, Homo sapiens
atatgaaggtcgatctagaggctccctcatattctctccaaatggagcttcttcaggaagacttctctgaccaccctatctattctgggctccttacagggatgagacccctacctaagacatgcatgtatctgcatacttatatatatctgtactcctattctaccgacaatctgacagtgaacacag

SEQ ID NO: 575247 - DNA, 273 bp, Homo sapiens
gtgcggctcattagcacatcatgcacctcagcaaggtctggagtgtgaagcagcactcatgggcactgtcgctagagagatttcaaccctgaatctcaggatgggcaacgcttccttaggctgagagtgggtcacgaagcggcatcgaccaggtagtctctgcctcgaacacctctcttcttcctccttttcttcaaccccccttattcccatctgtacggcaaggaaaaggtcagtacgcacagccctatcttggtattctctccaaagctc

SEQ ID NO: 575248 - DNA, 369 bp, Homo sapiens
attcggcatgaggactcagtctcctgggggtgggcagcccctgctgagcccaccaaggtggatgcagctgagggtcgtccggcgcacggtgcgcgtgtattgagcgggaccctatgagcatcctgagaggctgcggcagttgcagcaggagctggaggcctttcggggtcagctgggggatgtgggagctctggacactgtctggcgagagtgcaagatgcgcaggaacatgatgcccgaggccgttccatcggcattgcccgctgctactcactgaagaaccggcaccaggatgtcatgccgtatgacagtaaccgtgtggtgctgcgctcaggcaaggatgactacatcaatgccagctgcgtggag

SEQ ID NO: 575249 - DNA, 192 bp, Homo sapiens
tcatcagtgtagttggggtgtctatcaactagcaagcgtatattaggcacagtaagtagactacctttctggatgttttcaccagggagagcctttgtgtagggtatttatttgaagctgactttgtgtctctggcttcaaagggggttatgttagtgaggcatttttggtgttgaagttttgtgtttttag

SEQ ID NO: 575250 - DNA, 393 bp, Homo sapiens
tattaggaggtagtctggcaaaactcaccacacaggctaatactctgggattctaaataaaattgaaaggcattctaggccacaaagactgcaactcctaagcaattcctagagctgttccaggctcagagcaagtgtacttgggggacacgtgaactagtaagacaccaagctggggtggccaaagatgttgcagctctgaaagagactcctttcttttttctgtagaaggagagggaagagtaaagaggactttatcttgcaacttagatactacatcaggcaacagtggggcagtggagtaaggcactgggcagtctttttttttttttttttttttggagacagggtctttctctgtgtccctaggcgggagtgcgggggcacatctcc

SEQ ID NO: 575251 - DNA, 419 bp, Homo sapiens
  misc_feature (77)..(77): n is a, c, g, or t
ctagaggatcctgcaggagagagactgggttacttatgtgttgcgtgagcaagttatcacattttgagcctcctgtntcattatctataaaatgctgacacgttctcagggagacgtcggtgtgaagatgtatataaagtgtttagctggggttttaaaaaattttattttactttaagttctgggatacatgtgcagaatgtgcgggtttgttacataggtatacatgtgtcatgatggttagctgcacctatcaacccgtcatctaggttttaagccccacaggcaggggtatttttcctaatgctctccctctccttagcccccaccactcaacaggccccaatgtgtgatattcccctccctgtgtccacgtgttctcattgttcaactctctggagcttattaaatagggcttt

SEQ ID NO: 575252 - DNA, 210 bp, Homo sapiens
tcacacttgtactgcatgtgctggtcagtgtgcacgatgaactgctgtctgagctgtgatcaaattagagcagcatacctcatccacgattctatcatctcgtgagtacacatggggcatgtacagtgtgcacggtacggtggaattcgtatgacggggtctctatctgaactacacttactgaacagctacgaatgcctttcgccttct

SEQ ID NO: 575253 - DNA, 211 bp, Homo sapiens
ctgctcatacctgttatcaggggagtctcacctcgcacggtggatgtgcatgggaatcatctggagcgcatctgaaagcatacgtgccaggccccttccattgtggccgaacagtctcatctgcaaccggactcaggactggggcttcatctcctgggtcatctcccacccaggccaggtatccagcgggacttggccttgccatatgcaa

SEQ ID NO: 575254 - DNA, 799 bp, Homo sapiens
gatctgcaactgtgtgaaagagacattgagaattgtgaactgactctctcagtgatgatgtagttgaagcctttcatgcaatttatctgttagaactctccggagtaagatagtggacttagtgtggttctttgatcatgaaaagcctgggatggagaatgtcaggatatggagagccttatgttcgaggcaggatgtgggttgtatgagtatgactacatgatgaagtttgtgcaaatgttgttcaggataaactaatgggcatctaatgggcatctcatgtagagggcatgattgaagattagaggtatcatggagcacgtggcacatgaaatcgaagaagtgagtgaatctgatggaatgtctgacctgtgtagggaaaggttttaatatcaagatcgattgctgagtgctctaaaagtaatatacagcttgaacagttaaaactctattgtatgttggactttcgggttgtattagtaaggatttgcacagaaaggttcttggtgtggactagaatttgtctctaaaagagttgaacttgttgttcatatggcgagctgaatcggagataagctacagtgaatgtgggatcctgcgagagatccagtggttgattaatttatcaagtggttaacccttggagcctttagatgtcaatgcagaggtctgtgctccatgaacagttgttggggggggatgtgcaggattcaagcacggaagatggaaggtcgggtgagatcttctggtcaagttcaatgacgcagatttgttttgaaccagaagtcggaatggttat

SEQ ID NO: 575255 - DNA, 526 bp, Homo sapiens
gtcttgctcttgttgcctacagtggagtgcgatggcacgatctcggctcacgtacaaccgtccacgtgtaggcaaccaagagcaagactccagtctcaataaaaacaaaagtaaagtgaagtgacagcaaatgtgacttccctggggtgtttcataatccgagattattcgcttgtgagaaagagcaccagatagctcctatagttagcatattttccaagtgtcttgggtcctcagacaacatgcaccaaagttaagccaggttcatgttatctggaagagggcctttggctccgtcacaccaagtagcctcccacaaatttgtctaggaagtagcaaacctctacagcgagaacatgtacgaatgcttgtggaaaccgtggggcttctcaagagataacttagggaatttactaagtggtacaaagggaccgggttatagccttaaggagttggacattcgctttaaacaagctgtggcacaaggttagacagacgaaaaggtaacaccacaatgtgggcacaa

SEQ ID NO: 575256 - DNA, 377 bp, Homo sapiens
gagagaacctagtttcgagtttttctatatatttttatacgcacaaaaagcttttattcccaccagaggaaatcaggaaatgctggaggcaccctcgttagctgtgtaatcagggacggggacatagggcggaaacccgtcttcaatccatgtttgggcagcttccctaaccccaccaaggtttgtcctgggtctacacgagaagacagcttttagctgggagctcgcgcagtagtagtagttctagacacagcgaacgagtcagcgcctcacacacaattagggagtcctatctcgtggcaccactacgagaacacggctcaacacatcctcaggtgcaccaaccaacgctagcacaactacacacacaacctcta

SEQ ID NO: 575257 - DNA, 342 bp, Homo sapiens
ggagttcaagacctactgggcacatagggagataatgtctctattaaaaccaaacaaggccgggcgcagcggtcacgcctgtaatcccagcactttcggaggccgaggtgggcggaccacccgaggttcagagttcgagaccagcctgaccaatatggagaaaccccatctctactaaaaatacaaattagccgggcgtagtggtgcatgcctgtaatcccagctactcgggaggctgaggcaatgagaatcgctcgaacccgggaggcggaggttgcagcgagttgagatcgcgccatttcactcccgcctgggcaacaagaacaaaaccccgtctccaca

SEQ ID NO: 575258 - DNA, 248 bp, Homo sapiens
tgccaaagcggtagtacccaaaaaatacaaacacatgttaggaaggtactgtcatgggctaggcatggtggctcacacctgtaatcccagcattttgggaagctaagatgggtggatcacttgaggtcaggagtttgagaccagcctggccaacatggcgaaacccctctctactaaaaatacaaaaatttgccaggcgtggtggcgggtgcctgtaatcccagctacttgggtactacgctttggca

SEQ ID NO: 575259 - DNA, 333 bp, Homo sapiens
ataaaaaggtaatctctcagctctgtgtcctgagagctgaagctctcctaagttgaaacaatgctcttcttgaactatctcctcacaaattggaagcacagagttctgtaggtcttgcaccagagcttagacatgtagttaataccaaggcaccatgtggctgggcaatatggtttctgtcccagcctgtatgacgtcatatatggatttgtcatttgcaccatggaaatttcacatcaggacaaaccaccatggtttgtgaacatgggacatctctgaggaacacagaactttcatatggccacggagtgtggttcttctctgtgtgaactc

SEQ ID NO: 575260 - DNA, 355 bp, Homo sapiens
cttgacatcatcctctgagcccgatccagatactcataatagtatcatctacatttagcatgctgctgaaacaagtgctgagtatgtaatagactgtgtaagtaatctggcacttctaatcatcagcgcaggctcttatcgtcgagtgtgcataagccctgcaccagcaattcctaatgggtccttctgctttgactgcgcgtaaggatctccattccacatattgtgtatatactcacagatgtctccagttaatctgttctatactgtgtaaagtttattcctaggctgtagttaatgacacgtatatatcatgagtgtgttgctgttccacaccgttatttgtccatgacac

SEQ ID NO: 575261 - DNA, 379 bp, Homo sapiens
tgatattggaggcaggagggaggaggacagtgggcacatggggctgtacgatcaaaactgcattccatcaaatcacaattacttttgcaccaccctaatacaatagctccacttttacctatgtcaaaagggtttttttttaaaaaaaaaaacaaaaacaaaaactttttttgagacaagatctcgctctgtcacccaagctggactgcagtggcaccatcacggctcactgcagccttgacctcctgaacccaagcaatcctcccacctcaatctcatgagtagttgggactataggcatgttccaccatgcccggctactttttaaaaaaaatttcttacaggtggaatctccctatgtttcccacgctgctctcaa

SEQ ID NO: 575262 - DNA, 186 bp, Homo sapiens
tcccgtctgtctctagagcatcgggaatccaataacccgacttgggagcagcattgggccctgcctcactggatcaccattgcagcagataccctgctggatccggaggggtgtaagtcagtggtggtgtctgcaacaacagcaatcagcagtggtagatagcgagcgaaagctcagttcgaactc

SEQ ID NO: 575263 - DNA, 1382 bp, Homo sapiens
agacgaaatgaagaagaagagggaaatggatgaacttaggagctattcatcactaactgacaacgttgacacacactactgtcttcaaatcacggactggcaactgacttcagatgacacgttcatgtaaaacggacgacacacacggacgacacacacggacccttctgacaacgactgtgacatgtacgacgaccaactctgcagcaccgtttgtggtattcatcgtgtgcttctagcacacatcatcaacaatcaccacacacaacacattcataccctatccatccctcaccacaacgaaacatctccatcgcactactcacaaagattatacacacacacacaccacttgtcacacgatcttctacacctagccatcgcacccagccacacaacagcgccatcccacgcatcatcgctcatcaacacaatcagctctcgcacacctctgccaccacgcccattcattacacgtatacaacagctgcacccacactagtaaatatatagccccaacgcacacccactgctcctttgcgttaccacttctgctgacacaacagcaacagcgccattgacatcacataatgaagttacacatccagcacagcaattaagcacacctcatatcaagcacaccttcggacacaccctacgatcttcactgaacacgaccaaagctaaccatacactctggacaatcgctccatcaatggcaggttcccataacataccacagccagtggaacaacacaaacccacggcactaggtttcccttcttcggcacaaccacgccgagcgctgtcgtcgctcgccagttcatatccgcccttcatcagcgacgcagcactacagacgtctcttatccaccacccttattccactccggtttcacacccgacacacacagcgaaccacctactaggatttagtcagctaggcagccgttcagaaagttctctacacttcggctcggcacgacctcgggtaaaccagcgaccccatcaggacatccccaacccactaggaggtgtctctacgccattcacggcaatatcttcacagcgcggcacgttcacacttgggcagcgatatcacatcgggccaacgcaccagcgtccaacgcgaacgctcgcattcaccacccggcacaccagccacgtcacgggtcgcaaacagacacaggttctcacccgctcataagtttccccacttggacaatcaccccccaacctcagcacacgagctctcgacctctcctatgcgcgagcatccaacacaggcatacaccgcttcagcttacggtattgaaatcgcaccactaccaaaggtctagcggcaagcacttgcataacgacatgcacccacgacagcggtc

SEQ ID NO: 575264 - DNA, 252 bp, Homo sapiens
aatggtaaacgtataggtctattctaatttttttactcctttttcccctgcacattttaatgttaattaccttttagaattccactttaactgggtaccgactttttatgcatacctatttccatgatctatgtgcaagtgctatagggaatacagtatacactcaagtgcttatattctattgaaggtttttttaaaatagatttattgtggtataatggatatgaaacaaaggtcgacgcggccgcgaat

SEQ ID NO: 575265 - DNA, 206 bp, Homo sapiens
attgacttcccagagatcccatgggtttctggagaaggctgagcctgtgagcccaggatgtgtgaagctggcagggcatgagggcctggtggagactgtgctattgatggagccatggtgcgatgcgcttcctgcagctctaccatgaggaccttcttgcgggcctgggagacgtcgctctcttgccactagaaggtccaggtatg

SEQ ID NO: 575266 - DNA, 105 bp, Homo sapiens
tctacctgaggatccctgaatcgacggttctctggagctacagatagcaacaacaggctgaggatcgggcgtcggagctgtgccaggctggcagcgtgtctgtgc

SEQ ID NO: 575267 - DNA, 536 bp, Homo sapiens
ggctggcctgcccagccctgtcaggacattaagatgagagccagttatttctctacagctacgcctgcgagatgaacagcattatgcctgagctctgctgtacctccagatcacttcataatgggcaataacacgtgcacacgctgtcttataccagaccaagcccatgcctcccgtcatacagctcaggacttacgtgcgcacactttcttgtctagacaacctgctagccccaggcattcaaatggccgctgactagctaatgcttattactggtgcagacatgttggttgcatactcagtctacaatccaccctgaacattgtgctatcatgcaatgggttactagacgacactccgtatcatctagatacaccgtttcagaaatttggacacaagtcactagtaggacctaactaatggccacatcagggccgcgctataaagtgcaatctctcaagacccaaatagcaggtgcatcaactcgtcatcaatgcgttggattgcatacccagtgatatttacactctggtttc

SEQ ID NO: 575268 - DNA, 124 bp, Homo sapiens
aaactgcgctagacccaacttatcaacttcttcttcatcttcatcttcttcatcttcctcctcctacctcatcctcttcatctatcctcatcttcctcctcttccttctttttcttgctctctt

SEQ ID NO: 575269 - DNA, 229 bp, Homo sapiens
ctcgatactccagacctatggtcttggtcagagatggtcacaggaggtcatgaggaggcagaggagaagtctgtggtgctgcttgtatgtaaacggtctgtagcccacctcagccatcttcgtggaggtccttgcaagcatgcggcagatgggttggcccaggtctgtggccaatgatgatgtcccgcatacagatccagaaatgcgcgtgatagtaccttccggggag

SEQ ID NO: 575270 - DNA, 1182 bp, Homo sapiens
tcggacttctgcgtctccgttcctctttttttcctcctttggttgcttctcgtctcctgcgcttttcgcgtctccttttttcttgctgtttttctcgcttctgcctctctctctcttttgcctggcttggctgtcttcgttgcgctctgctctttcgcttttcttgcgctgcttgtcttcgcttgtcctctcttgcctcttcgcgtactactgcttcgcccggtctctcctcgcgtgctgccgcgcaccctgtctcttttgttggtgtgtgtcgtgtgtgcgtgtgtgtgttttgttgtacgtgttggttgtcgtttttctggttcttctgtctcgtgtgttgtgttcggttcttgttttgcttgtcggtttttgtgggtgcgtgaaggtattcagtcgtggtcgtacagaggcagaaaaggaggaacagtggacctttttcacatgttcgttggtaattgcgttcctcccggaattttggttcgggagctttgggcccctttaatgtccccagaggtgtagaatatatgtttccgagaaactccactgggtcgaaaaagagtgcacagggtgtgcttttaagtccatctttttgtccgcctcggaaaattgttgggattgaatggttaagggtgccataaaatttgtggctacaggaaatctgttttgcgcatatcaactttgggcagtaagcgttgtggcagcagaacatccccggcctggaagatagccgcctaagtcgctccttgcaccagatctatggggaaagataatgttgtcgaaaaacaaggaccatgcgcgggtcactttgattatgcgaagagagcgtaggtcccccgcccatagaggaccggtgagctttagctttcccctctcgttagacttctaaatttccccgctctcgccgatccctgtttagatatctcacactgggctttccccctccgggctaaacaactttggtgtgttggaatccccacccgaggtaaagaggaacgggttttatcttctcttaaatgtaaaattattaatatcccactatcattgtgtcccctccatacgagatagttcttttttatttatacctattacacacacattatttcatcttaaagcagtacattttatccacttacacgggaaacatattttcccacactttcccactcaataaacaaaaaa

SEQ ID NO: 575271 - DNA, 252 bp, Homo sapiens
agtgcagattcagaagtatgaggcgccatagcgagtgaaacgtagctgtaatgatgcagccataataatacgtctcgaagtgatgatgggcgataagatgaaaaggcggttgagagcgtctgtgtgagtagtgcatggctaagagaatagtcctgtggatgcatttggaggatcagtgcaggcgcacaaggacgtgagccgacagtttcatcatgcggacgatgttggactcggccccgaagaggcgagggt

SEQ ID NO: 575272 - DNA, 783 bp, Homo sapiens
ggcgctggaccgaaggcctcatctcgggctccagggtgtgggctggggagccagacagctggatgtgaggcagctgactagaggtggtgcttcacacgggcaacgtatgatgagctcatcgtctgctcccagcgagatcgctgtcagcatgggccagttggatggcaggcactccaaggtgaaggccaatgagcacatgcccccatcctgtagcgcggctgctaggtaattgttcgtcgcagcaggtccaaatgaggaggtgctgtgcaagtgtggtggtcgtccaccaatgtcaggctcaggacgcagattgaggacagagacatcgcatggatttctccggctctgtctcctcatcaagcttgatagaagcaggagatggagactgcatggtgcgtgtccttggagctggtaggaacgactgctggatggtcgtgaaccagcatgcgagcgtgggggcagttgcgtgaagcattgcagcgtacgctgcgtggcttggggctagtcagggcacgccactggaagagtgaggtggatcagtcgcggctgcagacactgacacgcccgaaaagatggtagctcgcccaaggagagaccgagtcgcgagcgcaccagtagaatcacctaggtgtggcgacccctaggacacgtgagcgcgaaccgaggctttgacctaaacaactggatgggcatcatagccgagctcaaaactcggttgaacctacgtagtgccgacccgaagggcgtccatgcgaagggtcgtgcttggttgacacgtgcctg

SEQ ID NO: 575273 - DNA, 432 bp, Homo sapiens
  misc_feature (133)..(133): n is a, c, g, or t
  misc_feature (205)..(206): n is a, c, g, or t
  misc_feature (222)..(222): n is a, c, g, or t
  misc_feature (273)..(274): n is a, c, g, or t
ggctgtgcgaatacggcacgcggagaatctcatgacacacctcgtggacgacaggggatacgcgtctgtgccacgagagagtgaaaggggagacacgatgagcgcacgaaaatgcgacacacatctcagagcncagagcacacacgagatgtggacacctgtgctctacaaaaaaacccacaatataacacacacacacacacannaaaaaacatatatatnatatttcctatattgtgtcatatacatatgagtcacagagagagtatatannaaaatattttcacatatagacgtgtgtgtgcgtgtgatactctcttctctacatctgagacgccacagagagagctcagagcgtgtgatatgaggcgtcaagtagacacaacacactatgcgacatcttatgacgctcgtggtgagcaacgaagatga

SEQ ID NO: 575274 - DNA, 121 bp, Homo sapiens
gcctcagagaagaggtcatccagaagggtcccagctccccatgaggaatgaactagggaaactaagggaaatgagcaaagacccaaggggtccggcagcataaacctatggtggacgtgag

SEQ ID NO: 575275 - DNA, 179 bp, Homo sapiens
ttgtgaaggggtagaagatctatgaaacttgtcttgagattgacctcattccctgttccacaaacccatatgtatcctttcctatacctcatcctttcccaattaatttcaaccattgttcgatgtttgggcttgtgtacgttcgtaaaaagattaaagatgttctgagttggggtgga

SEQ ID NO: 575276 - DNA, 929 bp, Homo sapiens
  misc_feature (873)..(873): n is a, c, g, or t
cagagattataagattaaaaaaaaaaaacccaactatatgctgtctacaagagacacgttatagtcaaacacaaataggctgaaagtaaaatggtggataaaaatataccataaaaactataagcattagagagttggattctatattaatatcagacaaaatagacttttaagacaatgattattattagagaaaaagatggatattctataataataataagactcatcttaaagcttcaaaatacttgaggcaaaacctgacagaattgaaaggagaaatagactaatcatcaagtacagttggagattttaatattcgtctcagtaactgatagaacatatagacagaaaattagtaaggatataaaatatttgaacaacactcttagtcatcttggcctagctgatgtctataaaacacccaacaacagcaaatgttgtttggtgttgaacattcaccatggtagaccatttgctgagttacaaggcaggtctgaatatattaagtcttaaatttatgaatgtaaaagaattgaagtgacacacgtatgtgttctgatttgcaactgagttaaattagaaatcagtaaccatgaaaaatctctaaataaattaaaatgaaaaagcccactagtaaataactcattgatcaaagaagaaatgaaagactgtcttaaactgaatgatactgaaaactcaacatgtcagaacttgtgggatgcagctgaagcagtacttagaaggaaatttatagttttaaaggctaaattagctgggcacagtggcatatgcctgtcattccagccacttgggagactgagatgggatgatccctggtgctaggagttcagggtggcagtgtctatgatngtgcctgtgcatagccactgtactctagccagggcaacatagtgagaccggtttct

SEQ ID NO: 575277 - DNA, 363 bp, Homo sapiens
  misc_feature (15)..(15): n is a, c, g, or t
  misc_feature (25)..(25): n is a, c, g, or t
agccaatggtagttnggaaaatacnggttcccccgagtcctgcagatcctcctagatgtcctcattttattatgcagtattttaaaaatcaccactaatctcagaaaagtttttaagttttgggtatcgatcaagttgaagttggaagatacaagttttcccaaaattcctaattatcacttgaaagacaaaattttattgttggcgataaatactgtcgttttacttgaagtgacagtctcatttttttcattttcaagaaaatatctgcagatacccacttctggataatagtttgtctttatttacagtaaactgtttacagtactttcaagtaaaaatgttttccatgaaaaaaaaaaa

SEQ ID NO: 575278 - DNA, 190 bp, Homo sapiens
  misc_feature (2)..(2): n is a, c, g, or t
  misc_feature (42)..(42): n is a, c, g, or t
  misc_feature (92)..(92): n is a, c, g, or t
  misc_feature (166)..(166): n is a, c, g, or t
gnactgcttttatttacctacttatttttatagagttgaggnctcactatgttgcccaggctggtctcaaactcctaggctcaagtgacctncggccttggcctcccgaagtgctgagattacaggcatgagccaccgcaccacctgcctgtcttactgtgtgagnaaaaaaataaacggtgatgtgatt

SEQ ID NO: 575279 - DNA, 237 bp, Homo sapiens
caggtcgtctacgacggctcccctgtacgctcaagccactgcagtgacagactctagaaagacatttaacagaggaacttctcttttcatgtgtgacggagccactaatggatagcagtgtcaagctagatagatgtactatatttattctgtatgataactacatactgcactcctcttggggaccattctactatgtgagcatagcgttttatattttttatgaatgctgatctt

SEQ ID NO: 575280 - DNA, 1042 bp, Homo sapiens
tgctgttctcttttgtttcctgtggtgtgtgtgcttcgctcttgctcgtttgttgtcgtgcgctccttctccggttgtgtcttttgcctgctgctctttttggacgttgcttgggttgttcgtcgctttcggtggtggtggtgttgttcgtttgtgcttggtttgtgtttgtggttgcccgttttcttttcgtgtgtttgtgtgcgttttgtgctttgtctcgtttttgctcggtgtggtccctttttatttggtcagctggttggtgttttggtgtgtttctcgttgtttcgagtctcgtgtttcttattgttgtcttttgctagccctgggtggggtggcttctttggtgggcttatgttctccttggtgtggtttgtgttcatccttgtttgctggttactttgggttccatcccttccttggttcttgtggttttccttggtgtctgcgctttcttctcgggcccctcgttgcgcgcggggttctggtttgcctgtgtcaggatttgctgaggcctttgtgcactagtgatatgtattatgacgctcttatatttgctcttttgggcccttgcacccggctggtcttagcactttgtcttgtgtttgtgagacctgctgtccggggagttatggacattgattgggactattgtggaaccaatgcttgtgactagtatttcaccatgaccctgcctgttagacccttgactaggcttgttgaccgattgccaagggtaatgggacattggctgagctcttgacctttgctaggactgttggacttgtgcctggctgtttagaacagtgactgtgctgtttgaactagtgactaggactgttgaccgtagctagctgttgaccgtgctggctgtcgaccgattctgggtgttgactatgctagctgttgactgtgctggctgcttggctgtgctaggtctgttggctgtgctgactgttgactgtgctgactgttgactgtgctagctgttgggcttggtgttataggcatgtctttactacttggacattacattttt

SEQ ID NO: 575281 - DNA, 351 bp, Homo sapiens
actcgacacgtcagtttgcgcgcaatcattggcttgagcagccagcccagggcgcctgcaaagcgcgggaagcggaagtgggtcaggatgtccagaaaggccttgtcactgaacaggcgcgccagcactgccgggacttcgctgtcgttgtaaggtcggatggtatcgaattcgcccatcatgctctcttgttagaaacggctagggtaagtaaaaggaaatgtcagggtgcggtccgaataaggggccggccaagaatagccctgtaaatagaccggcgattatacgcacaagtcacctaggagactgcgatgctcgaaactgcgctgtacgattgtccttattgtggcg

SEQ ID NO: 575282 - DNA, 1192 bp, Homo sapiens
tgcaaagctccttattattttctaagactgtttgttcatcagtatcactggatgaggcacgatagaaacacctaggtaactaacaaagatttttttttattatttttctttttctttggggaacaacacaacgtgggcgatccgcgcgggggtccttccacagcgcggggagccgccaggaggtatttgcccagggccgaaactattttcgcctccagtggcgacgccgctctgaaacacactctgcgctcccagagaagaggtgatcactgctctctctttcttgagaacactctttggtgtgacgatgtgaagcgggggcgttggcaccagaagacttggggaagactctcttttcttcgtgggaataataatgataatggagacaagacaaattattatcgggggaatcaacacagttgtggtcagaacgagcggttgtttagggtcagccgcagagagacatttattccgcgtcccatgcgcgtaacacatcattggtggccgggggtcgcgggagataaagaaaggcctctaacgtgccatcttctctcttttgcgatttgtcgcaggagacttctgcacaccaggtgcgtatatttactttgttgagtggttgtgcgagcaaacccatcaatgaattcacgcgcaaaaaagaccaaggtagagcgtggaaataccgtcgatgtaaatgaggagagagagagcgctgcgtgtgggaacgacatctctctcgtgttgagccccccgataatgggtttcgtttgcctatctacgaagctagagtattatttgttcagacagacatctctcctgggcgggggggtggatacaatggcgagcagacactaccagtggcttgtttcccagagagagaggaagagctcccttcaatgcgctggcggtgctcctccaactatagacatgatcacagacgggggcggatctaaataacagcgcacgatatacattgcgtgggggcggcgacaaagatcccttgatagggtgggggcttccccccggtggtgagccacaccaacgtcttggtcggggcctcttacagaggaggccgcacttcgtcggctggatttatacacataaacttcttttcgttagtccggtgttagctacaagaacgctctgtgggcgtttctcttgtggtggcccccttgctgttttcaccggaaaaaaa

SEQ ID NO: 575283 - DNA, 390 bp, Homo sapiens
tcgtgtccgtgacttggtgctctcggacatatacaaggtatgaatgcggctcaccgatggccctgccgagcaggtatgtctcaggaggcttgtcgccccatgaattgttatactgaaaaggtattcataccttgcatagagatgatgtgtacttttgatcctactttaactgtctcactttgtacaaactaattgttggaatacagctcatcacggatcaattctgctcacttgttgactagtacctactggattctgtgtagatgcgtgtttggacaaatcggggctgggggtaggcacgggttatgttacgaatttctagaaccagagcttctttctgtggcgttgtaacagctgtgctttgcctcctagagtcttagagagcctcct

SEQ ID NO: 575284 - DNA, 262 bp, Homo sapiens
  misc_feature (45)..(45): n is a, c, g, or t
  misc_feature (60)..(60): n is a, c, g, or t
  misc_feature (83)..(83): n is a, c, g, or t
  misc_feature (85)..(85): n is a, c, g, or t
  misc_feature (110)..(110): n is a, c, g, or t
  misc_feature (227)..(227): n is a, c, g, or t
  misc_feature (242)..(242): n is a, c, g, or t
catagtgagaccctgtctcgtacaagtacattttaaaaattaacntggcatggtggtgcncacctgtagtcctcgctactagngnggctgaggtgggaggatcacttgancctgggagtatgaggctgcagtgagctatgaccttgccactgtactccagcctgggcaaaagagcaagactttgtctttaaagaaaaataagtagtagtaaagagtataagattccncagggtgaataattntgaccaaaaaacaccccaaa

SEQ ID NO: 575285 - DNA, 493 bp, Homo sapiens
  misc_feature (66)..(66): n is a, c, g, or t
  misc_feature (488)..(488): n is a, c, g, or t
  misc_feature (491)..(491): n is a, c, g, or t
tttggggataaagtgtcctgattgcctgtaaccttccaaagggtccaacaaccaccgaaacgatgnttattgggtaaagtattatatatagagaaaaatattaaccatttttaaaaaatttaaatgaaagatgtaccaggagtgtgctgtactggtcttcccgtttctctgaatgtatgaaacatttcccataatagaaagttgtggggagcccaggcatgctggttcacacctgtaatcccggcactttgggaggccaaggcaggcggatcacctgaggtcaggagtttgagaccagcctgaccaacatggtgaaacccctgtctctactgaaaatacaaaaattagccgggcgtggtggcaggtacctgtactcccacctactcaggaggctggggcaggagaattgcttgaacctgggaaatggaggttgcggtgagccgagattgtggcattgtactccagctctgtctccttttgagacagcnaantc

SEQ ID NO: 575286 - DNA, 412 bp, Homo sapiens
agagacagggtctcactctgtcacccacagtggagtgagtgatgcaatcatggctcactgcagccttgaactcctgggctcaagcgatcttcccatctgtctcctgaatagttagaactacaggtgtgtcccaccacgcctagctaatgtaaaaaatatacatttgcagagatggggtctcactgtgttgcccagactggctcaaactcctggcctcaagtgagtcttctgccttggcccctcaaagcgttggtattataggcctgagccagtgcacctggcctcacatgacttttattgcattatactgttataactggtctcttttattattagctgataatcgcttaccgggcctattttataaattaaatcttatcatatgtatatatgcataggaaaaaacatagca

SEQ ID NO: 575287 - DNA, 296 bp, Homo sapiens
cccccccccttttttttccccccccctttttttccggtccccctttggggaatggaaaagggggtttccaaaaatttttgcctgcttgggcccctgtgggttttggggatatggtattaacgggtccccttttcccccccaattggggggggatttttttggcttttgagggtcccctttttttaagtgggtttaatgccccatggggggctgtttttttgttttttaagggggggtttaacccaaaagtttttgggggtttgggttttttaaaaaaataagggtttgggccccca

SEQ ID NO: 575288 - DNA, 188 bp, Homo sapiens
tcagtgtctgagtaaggtgtagaggctggttagcagtcttgtgatggtttctgggtggtcttggccagctggtcatggctttctgccccgcctctgtggcctggtcaccacttgctgagctgccgctccggccgctgacacggcttccaggcgccatctagcacagcctggccctgatctccgggcag

SEQ ID NO: 575289 - DNA, 480 bp, Homo sapiens
gagagagagagagagagagagagagagagagagagagagagagagagagagagagagagagagagagagagatatagagttatagactgcttcatatactgacacttgcctgtctcctcctaagcctttttctcttctcttttccttcttttatcgctctttcctcctcgccctctcgctcttctacccttttgttctcacttatctctctctctcctgtcactccttctttcgtttttacctctgtgttctccgctctgcttttctttctcttaaccttcttcctgcttttcatctctctccttttcatctctctgattgccctttttgctctcctcctcttcattcctctttctgacccttcttttactgtttctctcttcttcctccttctatgctttttcccctccccgtgttcccctctttattccttctcatttccttctttcccccctcgatctccttgtttcctttccctcc

SEQ ID NO: 575290 - DNA, 690 bp, Homo sapiens
agcgggacttggacgtgcgagtcaacaaggtacaggacacatttctctccggggaaatcttgtgtgggcgccgaggcccgggacgtagcaaccaaacgtcgggaagaggcgccaaataggatgctgggccgtggtctccttgaagcccgggttagcccgtttgtgagagccacaagcgaagaaatagaaatctagcacagagggggccactatctgcggcgagatacgccctctcgggcgctcctccagctcccaggccccctccctactcgaacggatggctgcagctcctccaagttactgtactcgttgccttccctccaagatgctacaggatggtctggatggtatttcgggaaaaattcagcccggcccagagatgaaagtgcaagaggttgtgtaattcatcgaggtgctgatcagcgaaccggagagcaaggtggaggtagcacttacatgtcaagtcgaagcaagttccgaaggacctatgccattaatgataacgcagaacccgtctggctctgggagaagtagaaatgggagccaatgaacatggatttgtgcagtagccacatgaaagccatcaataacgagagaagccaacttgccagaaatagaatgccttgctgggggatggcatctggtcaggcttgggataagaaagaaggggaacagagctaaagaagccta

SEQ ID NO: 575291 - DNA, 1561 bp, Homo sapiens
gcctggatgtgattccgtcctgcgctggttgtatctctggagcagcgtactttatatctaccgtccgccttctctcctacctaagtgcgtgccgccacccgatggcacgattcgatggaccatggacattgagccccctgaggccccagaactatcttttcgggtagtgtgacctaacaggcccgacacaacgattatcactttaacgggtggcatacctgcatgaacaattgagcaccacgtatactcttctcaacgaacggctcacgttcaagcgggctggctgccaacagcgcatgacgttggccacactgtgctgtcgaacgccacgcagcgcaccctcgcaatctcacgaatgggcacgtcccaaatttcacactgtaaaccatctggggcccaacctcttggccacacattgtctcctgtccacatgccccaacccgggcttccccccctaatggcggcggcccctctttggaaaccatcacatcaccccacccaagttgcgctacttcaacaccgcggttcttgcaaccgctggatcgggcatatatcaagcgggcccaacgttggccaattaacttcacagttgcggaaccaaggccaccttaaaaggtcaggccctgtgtgggccacgcgcacaacccactggcacacgacaagcttccacgcgaacccgactcgcacccggcaggccgaaggcgcagcagccatctgcttggccgacaccctctcgctctaacaagcataatctactccttggggcacaaacagccccgggtcttcctaggcccgcccccttggcacatcgcgcttggcgcatcacgcccacacgcgcgttctccccaccacagcggcaccaccaccacatgcggttacacaacactccttcggccacttggcctcggcactcgcacaccgcactattgaatcagcacgcgcgagtggcaatcgatctgcacacgccagcgcacctgcacctcgacatccgcaaccagcaactggaccgtgactcgggcaactggactgcgacctcactcggacctgcacacgccagcacaaccgctgcgaacacccaacacacgcgccgcccccaccgtggcaccggacgaactcgtaataccgcgcaagcaactacctgtccacagcgcccacacacaacgtgtgcccccacaccagcgtccgaacacactcacggaccggtgccgagacgccctcacgacccccccgctacacccttcacaccccgccagccactccacaccgtgcgcgccccacaacaccccgctcacgcgaccaccccgcggtcgacacaccgctcgtcacacagcagctgacaagcgtgcaccaacctccgcgtagagcagcaccatcacaagcccaaactctgcacgacgccgatatatcaacacaacacggggggcccactaccccgaagcgggcgccccaagccaacacacgtgaagcacgctgcccgcaacgcccacgcgcgcaacacactggacgacgacggcactgtacccaacgctcatcgtacccgacatctcacttccctgcacga

SEQ ID NO: 575292 - DNA, 461 bp, Homo sapiens
  misc_feature (64)..(64): n is a, c, g, or t
aaagagctgaagaataaaaatatgctgtctggctgacattaatggccaatatttaaaaaacttncatatccccttgcagtttatagctcttagatttttaaatatttatttttttacatacaaaaatacttggggttgtttatattaacaatttgaaaaagatcctatatacaatgtataaacagacaagaaggaaacctactaaaatgttagcgattaaaatctctaggtggtgagagtataagcgagtttattctttacagttttcttaggtttccaaatattctcccatatgaatgtgatatttttagactcagaaatgaatatacaagtatacaaatttccattttcattgtgactatggtgagtttttttgtgtgtccttatcctacattccttgaaattttctctaaagagatttgtgttcttattgaaacagtaaattttataaaaataaaaaa

SEQ ID NO: 575293 - DNA, 773 bp, Homo sapiens
gaggcagaagaattgcttgaacccgggaggcggaggttgcagtgagctgagatcatgccactgcactccagcctgggtgacagagcgagaatgtgtctcaaaaaaaaaaaaaaaaaaagaaatttaaaataaggtctttatcccccttaaaaaaccttccagaattatttttcaatgtgagagctcagtgaagttagcatgtgttatttcgggattataaacgcattttttgggttaactgattggtaaatttttttccacattgaacagacatttttttaaatcttctaagtttttagaactaagccattttaatttggtagtagtgtctcctatcctggggggatacatttccaaaaagcccaggggattgccttgaaaccacacattaggtaccaaaccccacattattacggttttttccctaatattttacattacctattgatcaagttaaattaataaatttacgacacagtaagagatttaacaattaaataaaatagagcaatttataacaatatacggtaatacaaagtttatttgattgtgagctcttgttagcatatcttggtaactttactcaccctccttaggattgaagtgaacgtgtataaagatacctcataatgagaataagtgacgggtgaatgacataggccgctgttgattgtagcatagaggctacatatgtccttctgaccattctgtccagaagggaggttcactctgttaggggctatcctagaatcattgacgcatgacgattcgag

SEQ ID NO: 575294 - DNA, 107 bp, Homo sapiens
gcacgaggagctccgcatgcacgacaaccgtatccgtaaggtgcccaagggagtgttcagtgggctccggaacatgaactgtatgaagatgggcgggaacccactgg

SEQ ID NO: 575295 - DNA, 106 bp, Homo sapiens
tacttctgagtagctgggactataggcacatgtcaccatgcccagatacttttttatgctttttgtggagacatggttttgccatgttgttcaggctgatctcaaa

SEQ ID NO: 575296 - DNA, 321 bp, Homo sapiens
taattttttgtatttttagtacagatggggtttcaccatattggccaggctagtctccaattcctgacctcaggtggtctgcctgccttggcctccccaaagtgctgggattacaggcacctgccactgcaccctgccagtttttcttttcttctctttttttgagatggagtttcactcttttgcccagcctgcagtacacattttaaatttgggtgtgttgtattggtctatgctgctggagacctgggtctgtacttgactcatccagctgaccactggaaaggatttcataaattcgtgtttgtcttgtcatcagtt

SEQ ID NO: 575297 - DNA, 198 bp, Homo sapiens
ccccgcgcatgacataagcacggaggattgagataagcacgtgtgtctggttagcatgaaacagaggtttagcatagctgctttctctatcaaagcctccaccatgtcattcttcagagcttctagtatagatttgtctgcaaaactctgcacagacctcagcccattgaccatttcctttgtttttccacagtatat

SEQ ID NO: 575298 - DNA, 501 bp, Homo sapiens
  misc_feature (238)..(238): n is a, c, g, or t
atcagcatagactattaccgttaagtacctggtggctatattagtggagaaagtaaactagggcctcttcggatgcatctagctatagatggaatccatgtagaaaggcaccaaatcttggcgtgaagtcccataggttctctacaatagatgtgcatagtttccataaaacactgacactggaggttaatatacctattgtgggccaattccgcataaaatacactcgctgttatgntaatcgtgcaagctgttgctcacctggattactaaccaaaagttaccacgttatgtggtaccacaccacactttgtgacaaatagttttaaaaataacacgcaacaactatggctgttatgcttttaatggaagcagatacaaaattcatcaatgcaaaagaatgttttacatactcattaacatagtgattaatgtaaattatattttgacttgtaaaatacagtgtgtttggcctcaagaaactacagagctgcaactcaa

SEQ ID NO: 575299 - DNA, 176 bp, Homo sapiens
  misc_feature (58)..(58): n is a, c, g, or t
  misc_feature (97)..(97): n is a, c, g, or t
  misc_feature (109)..(109): n is a, c, g, or t
  misc_feature (146)..(146): n is a, c, g, or t
atttcctgcctgcaggccccaaggtccaccctgtttggccacaggcaccgcctccatnccatgttccgcccagccccgcccccaacccaaggtgttnaaagatttccanctgcacaggcccccgccccagggggtggccgctgttncaaaaacaataaaccctgatgggcatggca

SEQ ID NO: 575300 - DNA, 268 bp, Homo sapiens
ctggaactaatggttttaccccccttcccccccggcatcccccctctccccaaggtgaagggagggtgctgtggtgacctgccccctccaaagttccggtccccctgggggggtcaccctcccctgccttcgtagggagggaggggagttttttttgtggtttttatttggggtgtggggggggcgggggggttttttataaactgtatcattttctgctggggggggggggtcccccccttttaatcaaggggattgtgattttgac

SEQ ID NO: 575301 - DNA, 389 bp, Homo sapiens
caaagggccttttagccctaatgaccttttggatggggctgcaactcatggctatcctgatattaaaaaaaagggctttgtttattttttcccccatagctttgctgggtaggtttacattttactcagaatccctacacattcctttagttttcctccaaggtccagagccattgggacaaatgctttatttaaacttaataccttattccccccaattagatgaaggcaatatagaagtccgcatagttatcataattccgttccttggccggtttaggcagctcagtgggttagcccagtcaaaccaacccccagctttcctcccgacttcaaaattttatggtaatttttttggatttttccagttttttaataagtgtttgagt

SEQ ID NO: 575302 - DNA, 250 bp, Homo sapiens
tgacttcaccttcgtctgccccacggagatgggcgacctctccgaccactaccaggagctgcaagccatgggagtcgaggtgttctcggtgtccaccgattcgcacttcgtgcacaaggcttggcataccgactccgacaccgtcggcaaggtgaactacaccatgattggcgacccgaaccttcagctgacccgcaacttcgacgtcgagcgtgaaggggccggacaggctgatcgcgccaccctcctc

SEQ ID NO: 575303 - DNA, 1018 bp, Homo sapiens
aaaatatttgctgtatagctatgctaataggttgtttccttgtttaggtatatgtaaccagtacctatattattaaaatagatggatatagaagccagcataattgaaaagcacatctgcagatctcttttgcaaacgtagttaaatcacagaacattaactactttatgtgtaatgtgtaaattctataccatattttgttatattctgtgagtaatgtcgactatgatttacggattgacttaaatttgggctcttgtttaatgatcactcacaaatgtatgttgcttttagctggccagatactgtttgagtatagcccctatagtttgaacttgcatctacaaatgcattgtgtcttttaataacattggccctacttgtgcttgatgtctcttgtcatgtattatgacagtaagctacctgggtccaggttgtgctttccttttatttagttgcacacgaaatagatgggttcgaggttcagtggtcttcatcttccgatgcatcattactaaccaagtcagacgttcagcagaatcttgatgttaggaaaaggcggaatgttataagatacatcagaaacttgaatgtagacgagtgttcacttgtagcaacggagttgagggttctattctaagactctagaatctgttacttgagttacagaaaaggtgtcctctagcctgggttttcctcactgttttgggaaacatcctactgggtttctcacagaggggcctttataggagccatctcggcttaagacaagggccaacatacggcggcagtggacagcaaacattcagggactgcagacgggaaaagcacggtagagaaggtgcatgggtttcacagagattaagggtaacaggtctgaagaaaagggcagccaatgcgtagacaaaacttgcccgggggacgaacacaggcggacactgaacagcacactggaaacaaggggaagaacgcgcaaacaaggagacacaaggaggttcacagacacaaaccagattct

SEQ ID NO: 575304 - DNA, 204 bp, Homo sapiens
ctatgattctgcaaggaagatgtagtactagctacatacatctgtaatatatgatattattatgttatcatgctattcgctgtctgagcactttaagattaaacctggtattaagtgcagcatactcaactagatgtagacttcacttcatagaatttaaatctgatggcactatatgcatacgcatgatacttgtgtgtgttg

SEQ ID NO: 575305 - DNA, 1210 bp, Homo sapiens
agcgtggtgtacgcaagccagctcgtagggggctgggcggtcagcggggtcaagggacagccacgctgggacggaggacggggacaggggagcccctgcaggcgccacttcttcctctccgagtcctgtctgcccttgatggagccactggtggggttacttgcttggcggtcggccactttcgcccctccctcgccagcccgcagctcccgtaaggtttgagtggctctcactgtcagcaccacacctcagtgttgagctaagtgaggacgtcccccagcaaaactgtatggacggaaggaaacgctgtgcggcgaggacggcggacgacaacgtaggccaaccggggctcaagtggtgagaagaggcagccaggcagggctggccacggtggggtgtcgccagccttgctgggtgtcccaacctgtgcctgtaggcgagcgcgctggcagggtacgtgtgggcgtgggccaggggcgggccatcattgctcctcattcccacctcactctttccccaggaaacacaatccaaaacactacttccaacgccccctgtgtgtgcggctgctgcgccaggcagctcaacccgtcctcgcatgtcttgcacgcgtcccactagagcgacacagaccgcagaatctactaagggacacccagggtgctcgcgaattgccctgcccaagcggcggaacggccaggctgggcatagcagagaagcccacgcaccacattttcccaaaatccaaacccatgtgcgacatcttgcagacagataccgaccaacaaccaccaaacgtgaacacctaccagaccgtctgcctgggcaacggtgagggcacaacggcagagcgaatcgcctggaagcgggaatgcctcggtcggtcaaggacacgcacaaaccggaaggcaccaaggcgccgccgtaacgcggggaaacacacacaggtcaaaagcagggcaaccgcacccgccggacacgctcactcaaaacgtggtgtgcccatggaggacaccagacacgacctaacgagagagaatgcacatactcaccacaccccgtgagcaggctaacgaggagacccgtacagcggcaccgcaccacagagcgcgatccacaagaaggcacacgagcaccacacaagaccaggcgcaccccacacggggccccataccatcatacagcgaccacgcagtcgcgccacagaaca

SEQ ID NO: 575306 - DNA, 635 bp, Homo sapiens
  misc_feature (494)..(494): n is a, c, g, or t
  misc_feature (510)..(510): n is a, c, g, or t
  misc_feature (568)..(568): n is a, c, g, or t
  misc_feature (591)..(591): n is a, c, g, or t
  misc_feature (613)..(613): n is a, c, g, or t
aaagtatccgtcctataatttttttttcttttttgggacacggtctctttctgtcacccaggctggagggcagtggcacgatctgggctcactccgcctcccaggctgaagcaatcatcccttctcagcctcctgagtagctgggactactcctgagcccaagcagtccgccggccttggcctcggcctcccaaagcgcagggattacatgcgtgagccaccgcacgcagcctgcgctgtgatttttaaacggtagtttctaatgtcccgtacacgtcttgtttggatgtggtccaggctgggaacatagccagcacctacaagcatatttctaggggaaaccacattctgaatttcaacttggtctgtgagttcctgctgggtttcccatctagcccttccgttttgaggaagaaaaagatagaatgatgcattttgccaattccttttacataaagtttttgccaagattgtttggaaaccacatggaaaantggggtgcaggtattnagcttaagactcaaagaagatgccaggcagcaatttactgtgtagaaatgcagctgancttgactaatcggaattgacttnggttgcaagggaaaaaactcancttcattttgggtggacaaaag

SEQ ID NO: 575307 - DNA, 136 bp, Homo sapiens
tttgaggatccgcatttctctgcgcttcacattgtccggtgctcctatcccagtcgtgcctcgtcctgcttgcaggccaggagagttggggaagctgtcacgcttgcacttgagcagtcaaataaaagccttcagg

SEQ ID NO: 575308 - DNA, 781 bp, Homo sapiens
tctttatcgtgagtaggcctagaaataaacatgctagcttcttattccagtgctaaccgtgaaaataacccctcgtgccacagaagctgccatcaagctatttcctacaggcaaggcgaaacgagatccataatccttgctaatagactgatcctcttgcaacaatatactctccggacaatgaaccataatcaatactaccaatcaggtactgcatcattaataatcgatgaatggctgatagcaataaatactaggaatagctcccctttcacttactgaagtcccagaggtttacccgaggcacccctctgacatccgggcctgcttggtggctcacatgacaaaaagctagcccccatctcaatcatatagcaaatctctccctcgactaaacgtctgccttctccctcactctcgtcgaatcttatccatcatagcaggcagtgaggtggattataccatacccagttacgcaaagtcttcgcatactccgtcaattacgcacataggatgaatactagcagttctaccgtacaaccctagacagaatcattcttagttgtagctatttatattatgctaactacgtagcgatgcctactacatcaacttaaactcagaccatgaacctataaatatctggcagctgaaacaaggtaaggatgataagagcctttagttcatcaccctctctccttaggaggctgccccgtaacgggtttggccaaaggcgatattggaagaatccgaaaaaaggttttattccgcaattaggccg

SEQ ID NO: 575309 - DNA, 1774 bp, Homo sapiens
caaacccactccaccttactaccagacaaccttagccaaaccatttacccaaaacaaagtataggcgatagaaattgaaaacatggacgcaaatagatcatcagtaccgcaagggcaaagcatgaaaaattcataaccgaagcaatcaatcatcagcaaggcactcaaccccatcatcaccgttcatgcgatcaatagacactaaaaatcagcaacatacacttatgcacaggcagcagaccgaacagcgtaaaagacgccaccagaacacaccaagaagcgagcatacatatcaagcaacaccagccatcaacaagaagcaacaaccacagaacgtcagtagatacgccaaagaaataagatgcggcaccgcatccaacatcagagctcacgacaggcccgcaccacacacacctaacccagacgaccccatcggaccgcacatcagaacaaggacgaacgaacaccacgcaaagagaaccatcctaacaagcgtcacacacaccatcagacaaaacaacgtccaagacacacaacacgcacacaacccccgatccagtacaaacacatccacacacccagatggagacgaacgaagagacaacacacgtgggctacacagcacacacacaaagacgacacagagaccaacgcaaaagacgtcacaacgcacagacaaacaacgacaacaggagggacaaacaacgagaccaccaaagcgtcacacgacacgcaaacaacagagacaacaaacgcacaaacagctacacaaacacacaaacaaagacaagagaaacggagacaccaagccacaacaacagcaacaaggacgaccaagacacgaacaacagccgccaacaagcacaaagacgcgacgacaggatcacacaaaaacgagacaagaacacaagacgagaagacccacccacatccgagcgcaaacccgcaacgcacgaagaccggagagaaaaagaacgacccacgacgagcaaccgacacgctgccacggacagcacacgacagcggacaacagaacgagtgcgcaagaagtacgcagcacacgaagccacaccacacgaaaccaaccgcggggcgacgcacagccaaagcaggcgagcgagatgaggcgtaccagacggccgcccaggagtaatatgactagagaatacacgaaggacagcgagagagagaacacaacagatgagggactgacaagaccggatacacagtaaagcaacgacgggagacaccacaagcaagatggaaaacgacaccacacagcgacgtgagaacgagcgccagcaatcccacggcaaccccaagactaccaagggcccccactagcgacgagacacccaagcgagcacagcacacacaacgtagcgaaacacacgacgtgggacaagacaccagcagcgaacaggagaaccggaccaccgaccagacagacgaccagacaaccaagcacacagtcaaaccacccaaagaccgagacacaaacaccacgaaagccccaagaacgcacgacagcacgcagataacgaacgaccgccgacgcaaccacacacggcagaacccacacaccagacacgacgaaccacacccacagacgagaagccgcgcgacgctcacaggaactaacagggacacaccgacccacgcgcataccagcagacacacgacaaagacacgaaacagcacagcacgactagagcagcaagcgagaaagcgaaacagccaaaaacgagacagcagagcccacgaacgcacgact

SEQ ID NO: 575310 - DNA, 256 bp, Homo sapiens
gttgcatctcctgggactccgctcctgtgtcctgggatgccaggtgctcactaccctgcccagctcatttttaattctgtttttggtaacgacagattctcgctatgtggcccagacgggtcttgaactcctggcctcaactgatcctcccacttcagcctctgaagagctgggattacaggagtgagccatcgtgcccagcctaaatatgggatataaggcattaagcagggacaggtgtacggttgagcggaga

SEQ ID NO: 575311 - DNA, 866 bp, Homo sapiens
  misc_feature (491)..(491): n is a, c, g, or t
  misc_feature (701)..(701): n is a, c, g, or t
  misc_feature (705)..(705): n is a, c, g, or t
agcggaggcgcggagctgggaaaagggaggcagaggaggcggaggcagaggcagaggcagagcccggtgcctgagaccaagcgacagaccggcggggctgggcctcgcaaagccggctcggcgagctctcccgacacccgagccggggaggaaaagcagcgactcctcgctcgcatccccgggagccgcactccagactggcccggtagtcaggggctcaggagcagatcccgaggcaggctttgctcagcctccgacgagggctggccctttggaagtgcgccttcaacagccggaccaagacaggccaccatgaccgatgaattccactgtccgcccctgcggccaaggcccaatgcgggccaaggccatccaagaagtccacagaccaacccaatgtattcagacattgatcgtggctgccatccaggcccgagaagaaccgcgctggctcctcgcgccagtccattcagaagtatatcaagagccanctacaaggtggtgtgagaacgctgactcgcagatcaagttgtccatcaagcgcctggtcaccaccggtgtcctcaagcagaccaaaggggtgggggcctcggggtccttccggctagccaagagcgacgaacccgaagaagtcagtggccttcaagaagaccacagaaggacatcacagaacggtagccacgccaaagaaggcatccagnccangaagctgctccaaagcccagcaagaaagccaaagccacccggtcaggaagccaagaagaagctggtggcacgccgagaaagccaaaaccccaggactggcagggccagccggcaaggatccaagcccaaaagggcaaaccagtggaaccaagcaaagtcca

SEQ ID NO: 575312 - DNA, 1347 bp, Homo sapiens
  misc_feature (37)..(37): n is a, c, g, or t
  misc_feature (94)..(94): n is a, c, g, or t
agaaaaagcagtgtggactatagacaccagtgtttanaaaaaacgcaggcatggtaccaggatccgagatattcaccaggagagtagtcagatngcaccactactgcgatcctgcccgaagacaccacatcacaccgtatacatacgcatgcacaaccgctatacgcgcaagacacacttgtcacccgaacaataacagatcatagagcagactcagcacaatctgcaacaccgatgggcgctacatagcatcatcagataccagccacaggtgcaacagcatgacaacacattatagccaagccataatatagccaaggactaaccccatataccattctgccataatgcacattaactagcaacataactttgcaaggagagccaaagctaagacccccgaaaccagacgagctacctaagaacagctaaaagagcacacccgtctatgtagcaaaatagtgggaagattcataggtagaggcgacaaacctaccgagcctggtgatagctggttgtccaagatagaatcttagttcaactttaaattcgcccacagaaccctctaaatccccttgtaaatttaactgttagatccaaagaggaacagcatctctcggacactaggacaaacacctgtacagagagtcaaacaaatcaacaaccatagtaggcctaacagcagccaccaattacagacagcgtcaagctcaacaaccactacctaaaaaatcccaaacatataactgaactcctcacacccaataggagcaatctatcaccctatagaagaactaacatgttagaatcaagtcacatgacacaccttctcctacagaataacgcctgcgccagcactaaaaccacttgcaccggcaccatcaccagaccaaaaatctcacaaatccaacgcagcaagaccggcatcacccatcacacgtcaacccaacaacggcatggccacaacggcacggctaaaaaaagcaacagcgaccggacaaacatgaccagacggatgaccaaaagcacatcaagccacacagagcttgcaggcacgcctggaccaagaaacagttaacgcagcacgagacccacaaccgaaagaagaaacaaaacaacaaggaccgcaaacagggcccaagagacaatgaaccacaacgacaacacaccacacacagcaaagacaaacacgacgaccaagacagagcatcggaagcgaccccacagacaacacatgctgcgcgacaagcgagaaaaccagcacgcagccgcagaaccacggcaaagaccaacacaacagagacaggaaacactcacgcgacgaagctcagaaacacacaaagaaga

SEQ ID NO: 575313 - DNA, 1154 bp, Homo sapiens
  misc_feature (329)..(329): n is a, c, g, or t
  misc_feature (354)..(354): n is a, c, g, or t
  misc_feature (366)..(366): n is a, c, g, or t
  misc_feature (384)..(384): n is a, c, g, or t
  misc_feature (386)..(386): n is a, c, g, or t
  misc_feature (437)..(437): n is a, c, g, or t
  misc_feature (903)..(903): n is a, c, g, or t
  misc_feature (915)..(915): n is a, c, g, or t
  misc_feature (954)..(954): n is a, c, g, or t
  misc_feature (1005)..(1005): n is a, c, g, or t
  misc_feature (1020)..(1020): n is a, c, g, or t
  misc_feature (1056)..(1056): n is a, c, g, or t
  misc_feature (1060)..(1060): n is a, c, g, or t
  misc_feature (1080)..(1080): n is a, c, g, or t
  misc_feature (1097)..(1097): n is a, c, g, or t
  misc_feature (1120)..(1120): n is a, c, g, or t
  misc_feature (1128)..(1128): n is a, c, g, or t
  misc_feature (1152)..(1153): n is a, c, g, or t
caccttgtccatctataggggcccataaagttggccattcagatttcttaaggcacgttggaccaaggcggggcgatccttacgcaaggtctgggaacaaagcggcgcgcaacggagagtgaccgcgtgtcagggcgcatctaaagatagcgaacgccttgcagcccaaggagtaatagatcttctgaaatatgtggtgaattccttctaccctgtgtatcaaacgctgtggatgtaataatttgtacaatgtgaacacgagcaaacaatgtcattagaagactgaagtgactgactaacgtgcagaacgatggagcaggagcagcagntccggaagaaagatgagactaatgngaagatggagtntgaggggggtgcagagantntgttgaggaggggacctactggatgatgatgataatgaagatcggggggangaccagctggagttgatcaaggatgatgaaaaagaggctgaggaaggagaggatgacagagacagcgccaatggcgaggatgactcttaagcacatagtggggtttagaaatcttatcccattatttctttacctaggcgcttgtctaagatcaaatttttcaccagatcctctcccctagtatcttcagcacatgctcactgttctccccatccttgtccttcccatgttcattaattcatattgccccgcgcctagtcccattttcacttcctttgacgctcctagtagttttgttaagtcttaccctgtaatttttgcttttaattttgatacctctttatgacttaacaataaaaaggatgtatggtttttatcaactggctccaaaataatctcttggtatgcagggagtaccagtcttttcattcatacataagttcagtagtggcttccttaactgcanagggcatctcantttagtgagtagctcttgggaagcagctttgagtagaangtatgtgtgtacacccttacattagtgtgctgtgtggggcagtcaacacanatggtacatgtattntgtgatgagagtggcatgtcaatgcatctctagaanatantagtgtatagcttaagattngttctaaagtgtactgngggtatttgtgacagcctgtgtntggacttnttcctcaaatacagtctattaccnng

SEQ ID NO: 575314 - DNA, 184 bp, Homo sapiens
gctggctgctcatccggggggcatcgggtcgtgtgggaccaagccttgctgttgcgccaatgttggtcgtgttgtttgctggccagccaatgcaccttcgcagcgattgcttgccatcaactgtgccttccattctggtagtcggtttcactcggggcgacatgggttgagtgggctcgttgtc

SEQ ID NO: 575315 - DNA, 170 bp, Homo sapiens
tggtcggtacctctctgtggggtgtggtttggaaacgaggttgttcataagctgctctggtggccaccatgcagtgcaacggtgactgtcagaggccacctgcttgacatctccatcaccaaatctccagtgaagaccctgtttcctatgtgaggccattgcccagccca

SEQ ID NO: 575316 - DNA, 609 bp, Homo sapiens
cctgtccctgtgtatcttgtccccctccgtgttctgttgttgcccatcgggctaccgttgtcctgggcactgggcgcgccttcgagccctcttccgtggaccgaggtaccgtttgcaccttctgctgcaggtttcgcacattcccacgtcagatgtcctgctcttggcatgcttcggggcatcttgagtgcggagtcatgtgtgacctgatcctgggaagcccctgaccaacatcccggcccggtgcccgccctcctccccaggccacggttctatcgacggaacagcagtcagctcggagcagggccctcgcaggaaagcctgcaccgctgtccacagagcccaggggcccaggatcccctcgccaggacaccccgcaagcccccggtccacccagctcctgaagagcagctgcgcctggctctggagttgtccattcacgggatcaggaggagcgggaccggcgcgggcagcaggtaggtaggatggacttacagcggatcctgcagctgtcactcactgcagcaatgagccatagtccccgggagggctggccaggccacacctcctgcccgcttgtgtaatttatttatttataaactctctgcc

SEQ ID NO: 575317 - DNA, 958 bp, Homo sapiens
cacttggacccggtcccgtatgttagccgcgtaaagtgctctggctttaccccactgacctacctggtattcaatctctctacgcgtgccggtaatctatgtcgcctcttctgttgtcttagcctgaagggagatctgtccgtacctgcacatgctcactgtggcgtaacatgttgagactaaattagtgttttggatgtgtcctttctcttctagtagaacaaggttcacgtcttcatgcccgtgcgagtgctcgtattgcccaagtgtttgcaagagcattagtgcatctagtgttctaagcataaagtaaacttcgctagatcatcaaaaatctcgtagctcttcgccaatcttcaagacctgtccatgaagttatcctgagggagactctaccagagacagagcagagaactcgatcctagatgcatgagtcatataatggtcatgcactcgtgagtctcgtgagcatcgagttcgagagtgtgagagagagacgcgcgatgatgctcactctaatgcttagatcccatgtcaggcatgtaccatactctgcactgtacgctgcaagccatatgccttgctgtgctctcaactattttcccgatagttggtctgtggattagcgggttgatgaggtcactggcctgtgttcagagctcgcaagattattgctaaaatgcttcaccatagataagagtctctggattaatccactcctttaaatgaagccatggtaggaatacagaacttgtaacagaggatgcaccgtagaatcattaatgatggccaagagagttggggcgggggggcacgcagaaaaagttggaagctttttttgcccctttgagaaaactttctggccattttaaggtttctaatctttttccagggccaaaaacccaaatggggtattccttttcataccaaacaatttttcaaattgaaacccttatga

SEQ ID NO: 575318 - DNA, 170 bp, Homo sapiens
gtgacccctaatcctgcccgccagagaaacaacccccctttttcctttacatacccaaatcctataaaacagccccacccttatctcccttcactgactttcttttcggactcagcccacctgcacccaggtgaaataaacagctttattgctcacacaaaaaaaaaaaa

SEQ ID NO: 575319 - DNA, 149 bp, Homo sapiens
ccgagcttatacccactcttaatgtttccatgtcaggtagcatggcgggccttaacacacacacctctgctgttccgcaggactgcagtgaaacaattccaggccatgcccccaggcagcaatgtgctattgaaacttctaaaactagg

SEQ ID NO: 575320 - DNA, 225 bp, Homo sapiens
ctgaggtgggcagctatgaattcactactctgaccactgtggctgcgtggtgtcatcgagatacaaaggtcgcaagatccagctcctgtgatctcccaggtattattgaagggtgccaggcatgcgaacggtagaggtcgtcaagtcattgcagtgggccggaacctgtaacttgatcttgatttgtttcttggtgtcctgaaacctttgggacgtaagaagata

SEQ ID NO: 575321 - DNA, 352 bp, Homo sapiens
tatgtggtgctcatcccccccccctctaaaaaattaaaaagttagctgggtgtggtggtgcgtgcctgtagtcctcgctacttgggagggactggggtaagaggattgcttgaacccaaagaggtcgaggctgccgtgagctgtgatcacaccactacactccagcctaggtgacagagtgagaccttggctcaaacaaaacaaagtaaaataacaagatacaattttaaatcttggtcaacttagtaaagatagcaaagaaagccagccgagtgcagtggctcacactgtaatcccagcactttgggaggccgaggcaggtggatcacgaggtcagggagatggagaccat

SEQ ID NO: 575322 - DNA, 374 bp, Homo sapiens
gccccaaattaaatcacacacctacagccaactcatctatgacaaaagaggcaacaatatccaacagagaaaagacagtcccttcaataagtggtgctgggaaaactcgacagctacatataaaggaatgaaattagagcacttatcctaacaccatatgcaaaaagtcaaaatggattagtggcctaaatataagaccagatagtataaaactcttagaggaaaacataagcccaacactctctgacataagccccacagcaaaatcttgtcagatccacctcctattgtcaacctggaaccggtacgattgataacgtgtacgacaatgtgacgggcctggtcaaagcggtcatcgagatgtccagaaaaat

SEQ ID NO: 575323 - DNA, 218 bp, Homo sapiens
tgacttagaggatcccaagctccaacaagatgagctgcagccccccagagagagctctgcacgtaccaagtaaccaggccccagcctccaggccccaactccgccagcctctccccgctctggatcctgcactccaacactcgactctgctgctcatgggaagaacagaattgctcctgattgcaactaattcaataaaactgtcttgttgggagctt

SEQ ID NO: 575324 - DNA, 420 bp, Homo sapiens
  misc_feature (284)..(284): n is a, c, g, or t
  misc_feature (376)..(376): n is a, c, g, or t
  misc_feature (403)..(403): n is a, c, g, or t
  misc_feature (417)..(417): n is a, c, g, or t
tcagaaatcttgggtaaccaggggcattgtcaataaacagtaatattttgaaaggaatattttctgagcagtaggtcttcaactgtgagcttaaaatattcagtaaaccatgctgtaaacagatgtgctgtcatccaggctttgttgttccatttgtagaatacagtaagtctagatttatcatgatttttaaggccctagaattttcagaatggtaagtgagcattggcttcaacttgaagtcaacaactgcattaggtcctaataagagagtcagcctgtgnccaggaaaggtggccgccccctcgcccgttcacggcaatggcatgttcgtgggggaacctgggtggcttaaactatttcataggatggaccntgcttctggggttccgggtttttgttntgtaggcagagcgnctt

SEQ ID NO: 575325 - DNA, 1138 bp, Homo sapiens
  misc_feature (307)..(307): n is a, c, g, or t
  misc_feature (1138)..(1138): n is a, c, g, or t
tggaaacggattcccgctctgtcccccaggatggagtgcaggtggcgcggctctcggcttcacgtgcaaccttctgtgccctccgtgggtttcaaaggtgattctccgtgcctcagccctcctgaggtggcgtgggaatgtgcaggtgtgcccaccaccacacccagcataattttggatatttgtgggtaaagacagaggtttctcgccagtgtgtgtggccgaggcgtggtctccttgaaactctcctgtgaacctcgagggtgaactcccacccaacctgtcgggcctctccccagaggtgtgncttgagaatgtgcgagcgctgtgaagccaccaacaaccttagaacatgagcggtggggtggtaactcttgtgaactcacacatagtggggcttaagagggtgcggtggtgtgtggccagaggggtatctctctcccactgtggtcaaaatatgtgcaggaaactatttctccgctgtgtggtgacaaaacttacacaccagagaaaactcttctcgccacttttgtgaaagagccgtggtgtgtgaaaagtgatctttaaatcttcttttaaaaaaattttgtgtgcgctataagggtgggattttctaaatttttctcgcaatgttcatctacgagaggatggaaatctcggtgggcggctgataatataaaccggagggggtattataacacctggtgtataaggtgccttttgtggccctataaaaaaaaaaagaagcagagagtaaaaagaaaaaactgctgggaggagggggcaatctcttataatgtgagatacagggggtgtggcgggcgaaaaacaaacaacggaggggtggtcaatacttgagacaagtcgtggggcggcccccacaaggtgggtggctcaaaagaaaagcgatggtgtgtactcccagatggagaagcccccacaagggtgtttccgatcttttggtgtcacacaaccagggggggggggtggaagaagaatcactgggcgcgcgcggggtgtgaccccccccccattaaaaaaaggacgagacggacggcaaagaatcaaaacacttccgcaacgaataaacaagcgccaccggtggtgtacaacccacggggggactataatctagcan

SEQ ID NO: 575326 - DNA, 434 bp, Homo sapiens
tggcggagggcaaggcgggagacgagaggcctgaaaggtcgcagctgatgctggagccgccggtaggacctgaagaagaaggcagagaaaagcctgtgaaaaactaaagactgtttcttccagtaatggacggggaaagttccagtcgcagcgctgagaagcgatcagcctgacagcacacgaaagcctgggccggaaccctccccaaacaaaaaagtcctagcaaaagatcgtccaaggttggatttgccataggtagtcagacgacaaagaaaggcattcaagcccaataattcgcaagttcgaaaaagcgttggggggcaatttccaaaagggttcaaaaggcccctttaagaaaggaaaagagcgtgggttttccccaaaaccttccttgacttccctaaaaagaactcttttcaggtagcagacacgct

SEQ ID NO: 575327 - DNA, 193 bp, Homo sapiens
tcgcgtcgttccctgtgccccggccttgtgtgccgtggtgtgcatccgctctctgccgccttgtccctccgtgcagctcccagctgcagttccgtgcctcgtgctcccggaggcagctgggcacccaccaggccatgtgcccacccaccgctggcccacatttttcccatgttttcagtcacagcacgcagca

SEQ ID NO: 575328 - DNA, 2203 bp, Homo sapiens
  misc_feature (660)..(660): n is a, c, g, or t
  misc_feature (1925)..(1925): n is a, c, g, or t
  misc_feature (2050)..(2050): n is a, c, g, or t
  misc_feature (2104)..(2104): n is a, c, g, or t
  misc_feature (2112)..(2112): n is a, c, g, or t
cccagcagcccacatgtgttcaggacgcctcccttgccagcgcagcgtcgcgcgtgtacgtatctgatcgaccagtgatacagtgttgtgccctgtgatgcgtgtggtgccagcagtcgcctgaggcatgcctcgagccgaggcgtcaagtcgtaatactaggtacgagtcatcatgcggctcatgtacgttaccacttgggcgcggaagtatccacgagtggtcgtagtcgcctgtcgactatacaacgtcgctactatgcgcacaccacctcatccactggacttacgtatatgcatccattcaagactcggggttgcgcgaggatactctgtgtgagtggagccaagtccttagcgtgcaggccattggggacatgggacactgggagacgggcaagtggattcactccctactcatttactagccagtgcacgagcttccctagtgcggtagagagtgcccatgtatcacgcccgcaatgttcccccatcataagccacaagcgcccataggcatacgtcttgcaaatttgggctaaggtcagtatgggaggaattccatgcgtctcaaaaatcaatgctcgtccaaccgtggttgcggcagggcatcccgtaattctcgaaggcaatccactaagtgcacctcagaggacctttntgtccgccaacggagcggagtccgcaggacggcactccgccgtggggccttaggtgaggacccactaagggggcgacaaaccttttgggcgcagtcacccaaacgcgtaaccagagccggacgttgccaaccaacacaacctaaagctatttgagtgttggtcgcgtcccattggaggaaaacacacaccgcgccaccctacgtctgaaccaaagagttgcatgtggttatgagacaacatacgggttagacaacgagatgacctctcacatttggaaccttcggcggtctcgcaaataaccacgggtaagcagccaatccaccccaagagacaggtacttggtgggcgacccaaaccggaagggacaccaagagacaaaaacggcaacagtcgggcagcacaaagaggacacgggactgggtacgacatacgatacacgcccacagagaggagagcagaacacgcgcggtggagcacaagggggacacgccaccccaagcagatatgtaacgaccaccgcgacaggcacccaccgggggcggtaactgatagacagaggggagacgcaccaccgccaagtgggagggcgaggatcggactaacacaccaagacaacaatgagactacgggtaaaagagggactaattggcgacacaagatcggtgagagaacaccgaacgagccatggtgtagaaagcagacaacagtaccgcacggaactacacacgcgacacaaaaacaaaggtcagcccaaaaaagacgaccgacagacacataaccgctccacgacatgagcgacaccaactcacacagacaacacgagcccagccagcgaacacaccaaacacgacgtacgccagaacacatagacgagcacaccaacagacacaagaggaacgagtcgaaacggacgccactcgaagcggaacacaccacgacaacaaagacagagcccagcacagcgaagagataccagcgccatcagacgaccgacagaccacgctgactgcggaaacacacgaaggatgccgactaccacacacagaacagagcacgagctgcgacacaaacgacacgcacagcacgacagacactgcgagacacgcgcgagccaccaagaccaggtgccggatcaaccgacacagcaacgcacagcgacaagacgatgcgacggctacacgagacgcacacgacacaccaccacactcgaggctgggtgcgaacactgacctgcagagcagctagcacgacacgacgcacaganagacgcagacgacatggagcagaagacacagacaaccgacacgacggacggacagacaccacacgagcctgctccaggtgagagaggcagcacatagctagacactagagcacagacgaagagangagtcaccaacagagaaccagcagcgcacacgcaagcgacgacagcggcaaccncacgagtngagcaagttgacacagccacactactaccgcagcagacactatcaaggaccgcgtagagctgacgagccaaggcgagactcagaacagcct

SEQ ID NO: 575329 - DNA, 104 bp, Homo sapiens
gccgatggatgataattgttgcgcagcaactacgtccacaagatctgattgagagaagtgtatggtcattcggcgtgtgcatgtatggatgctcggcgtgtgca

SEQ ID NO: 575330 - DNA, 470 bp, Homo sapiens
atcgggggtttgattgaggcgactcctgggctttatcagctcccctccgggcccaaccatgcctggaaggccaatgccataggccggggtgccaagtcagggcgtgagttcctggaaaaaaactattctgccaaagccctttgcacagatgatttgcccctttagctgggtgatcaaggccctcctggaagtggttcagtcaggtggcaaaaacattgaacttgctgtcatgaggggagatcaatccctcaagatttttaatcctgaagaaattgagaagtatgttgctgaaattgaaaaagaaaaagaagaaaccgaaaagaagaacccaaagaaagcctcctgatgaataaaatgtctttgcttgtaatttttaaattcaaatcaatcatggatgggtctcgaggggtgggcctttcccttccctttattccccctgggggtcccccaataaacttccgtttttttta

SEQ ID NO: 575331 - DNA, 190 bp, Homo sapiens
  misc_feature (42)..(43): n is a, c, g, or t
  misc_feature (116)..(117): n is a, c, g, or t
  misc_feature (183)..(183): n is a, c, g, or t
agccagtatggagagattgcaagattacctagaaagttaccnnaaggctatgctctggaatataaagaagaagctgggatcaggcttgcttcctacaggagaagcaagaagaaggnnaggacccagaggacacccccactgctagcaccccagagagtgaggagtggagcagcagccagcctngtacggt

SEQ ID NO: 575332 - DNA, 588 bp, Homo sapiens
cagacctagaggatccccattgatagcggataggggtatatcttggaatgtgtgtcgagagtaaactcagcagcctctcagctgcagctcctggagtgtattaggactggaaacgactcagatcatttatgaagtctatgctttccgttatagaagagaaaactgagggctaatacaagggctatgacttggcccagggtgcttaagcccaggagcttgggctagactattccaagctatcctgcagtttggttttgtcacaaaccccaggcaggaagttgtctgacatacagacttagctgaggaattctatattcttcaaaacagagagaattctggaatgagaaagagtggcctttcaaattatgggccttgctgggggaaggacaggggcccttcttctggggtggggaatcctgattcatttgtacttaccttcacagcccttagggctgcgtgttgccatgcggtgtgagaacccaggagtgaagtcaccatgtgctcgggttccttttgtacctcaattggtgatgtcagaaacaaaacaagcagcactccgtctactggggtgcaggctttttcgggggg

SEQ ID NO: 575333 - DNA, 467 bp, Homo sapiens
  misc_feature (222)..(222): n is a, c, g, or t
cggaacttagtccacccggatccggtggacttttggagggccgaacttgagccctggcccgcccgcccaccaatatgggcccccgaattttgggaatatcttgaccccggaattcggcacatgtgatcacgctacacgacttgtcacccgcttcgagcacggcgcgcctattccgccacacgcttttcaccttaagggaatcccccatggttttgcgcccgnactttcgcggagtctttttttcgcgtggtgcccccgtttgtagtgttttatcttatctacaccactgggggactcgaacgagtttcgagagatcccaagaggagagaatccacgctgcctatgagaaatgagccaatgaggccacgcatcccggatgacggttccctgtttttgaaagacctttttttggaagaggagtctgcattgtagtgtttccaagacaccataaacttcctatggtctta

SEQ ID NO: 575334 - DNA, 160 bp, Homo sapiens
ctccataatgtgtgcccactaggcactcgcattccacgcccggctccacgccagcccagcactttcaatttccttcaagaactttacctttgcattcacaatgtgactaagtgtttagcacaagagacctagccttcagccagtcttgcattttgacatg

SEQ ID NO: 575335 - DNA, 109 bp, Homo sapiens
gatacaatcgagccggtaccctcaagtgattctgtgcctcagcctataagtagctgggattataggcacatgccaccacgcctggctaattttgtatttttaataaaga

SEQ ID NO: 575336 - DNA, 428 bp, Homo sapiens
tctagaggatccctgagagaccgtgtgaatgttatactgataaaaggttctatacacacattatagagatatgtgtgtgtgtgtgtgtctgtgtgtgtgtatatatatatacttttttccccccaagatggagtctcactctgtcgcccaggctggagtgcagtggtgcaatcttggctcactgcaatctccacctccctggttcaagtgattctcctgcctcagtttcccaaagtgctgggattacgtggcatggcactcgcggccaagacagcttcgtatcccctaggttctgatgaggttctctatggtactgctctcagggtataactgcagactagaagactgtacagcggtgctctagaactggcttcgtccgcaacagtgtacctgtgactggcatggcaccagcggctctcaggtaccga

SEQ ID NO: 575337 - DNA, 194 bp, Homo sapiens
ctgcctcagcctctggagtagctaggactacaggtgcgtgccactatccctggctaatttttacattttttgtagagatggggtctcactattgttactcaggctggtctcaaacagctggtctcaagggatccatcccgccaaatggttccaaaagtgctgggctcacaggcattagccacacgttcggctgt

SEQ ID NO: 575338 - DNA, 184 bp, Homo sapiens
ttggaattatatctgcgaattcgggagtggcattacatatcaatattgaacaagatagcaactatattgaccgagcaacaacaaggtggtcgcaaatttgtctcaagggaagaagcaagccatacaacctttcctggttctttgataccctcccttgcctgccacttagaaactgaaacggaaa

SEQ ID NO: 575339 - DNA, 81 bp, Homo sapiens
ttttcccccgcccccccccttttttcccccaaggttttgcccctgtgtttttgtttaaaagggttggggaggggcccccca

SEQ ID NO: 575340 - DNA, 373 bp, Homo sapiens
tgaatcatttatgggtaagttaaatactttatagcccccaaaaattcattgttttttctccaaagaaaaggctagtctcttaccaaggtagtaactcgatttcatggctggatagttcggatagtggtcgtgaaacctggacatgtaacatcagaaatctgtacaatttgcagtcttaaaacatctgatggtgttaaaacatcctccgtccttcctttcgcggatagcatagaacccaatgagggaagctcaaatgtgcacgtctatagagccactgtacagcctcagcgagctgctcactatcagaaaaaatctcgcatgatgatgtgtatcctgtagcttgtcctgtcagtgattattctaatattgggac

SEQ ID NO: 575341 - DNA, 251 bp, Homo sapiens
ttatctaatatctctagaagaacctgtagatctgggttggtgataaaatattaaggacggaggaatgaaggaaaaaaaaaggtttgaggaaatcaggcatattaatttataatttacattagatcttttctattatattctaataatttggttttcctaacttcataacaaaaaacttaaactggattatggattacatattacaaagtcctaaatgtggcatatggatatacagtacattctatgggtgt

SEQ ID NO: 575342 - DNA, 137 bp, Homo sapiens
  misc_feature (22)..(22): n is a, c, g, or t
  misc_feature (71)..(71): n is a, c, g, or t
  misc_feature (94)..(94): n is a, c, g, or t
aaaacccatcccagtgaccccnaacatggggccctgtcagccctcctaatgacctgcggcctagccatgtnatttcacttccactccataacgntcctcatactaggtctactaaccaacacattaaccatatacca

SEQ ID NO: 575343 - DNA, 91 bp, Homo sapiens
gcatcctttcctcctcgccggtgctggacgtgtcgctgctgctgctgacgtgccgtgccgccgccgccgccgccgccgctgctggagctcc

SEQ ID NO: 575344 - DNA, 1059 bp, Homo sapiens
  misc_feature (163)..(163): n is a, c, g, or t
  misc_feature (409)..(409): n is a, c, g, or t
ggagagcccggtttgaatgaacataagaatgaacaggatatggcgaaggccacgccatgcgtgctgcaaggaggccgaaggaagaattcaggtcaccggtcgacgtaatccatagcacgatacatcttccctgactctcactgcgagggcacctactctactncacgaagatgatctgattggcgttacaaaggtcgcgctagtaagtggtgcgttagattgactgagacatcgcttcgtgagaatggcagatgtttccgtgattacttgagcacaacgacgagatacacgtggaaggaatacttggtcgggagggataagctggaggaacgacgagggttaggcagcgagctaggcaggacgggagaacagcctagtcgtcgcgttgggtccttgttaatcatcgaangcgattatccctcccgcatgccccgcgaataaggaacgcgtgaatttgagtccctacagcatcgtggggttggtagtattgcggtgatccagaacccccgaggtaggcggggcacgcgactggtgaagatacacgacgtaggaaggatcgcgtgcgattcttgtatcatggcttgtgccgaggttgagagaaacataggtctaacgaagataaccaataggccaaacttgtggctcacctttaaacttataagagaaatttccaggggtggagagaatgggtaaatagagagagataggccaaagaaaagggaaaatccgtgcgtgagggagctaaatacaaaaatttgcccgggcgagatgcgcgatggaaggaaagggagaggttgcaacgcgcgaaacgagtgggtccccatccgtgggcccaaaaatacgagggaggggtaccacggtgaagccccagaatgggtatattactttgtgtgtcaccccaagggcgtgggatatgccaaactcttttgcccgggcgtaactatccccctattaaataagagtgcaccgctccgggtattataacatttatctggggattcaaacgcccaagggggttaccaacggctgtgtcgatttataatggaaccgtgggggcaa

SEQ ID NO: 575345 - DNA, 555 bp, Homo sapiens
atatttcagtactggctagcgttcatttacatcactgactcttggctgtcgatgatacactattatcgaggcatgacaatgactcatagcacagacataagtctccgtaattcgagccgatctagccagcaatgtaacctactagctaatgagcacatctacaacgtaatcctgtcacagcacatgcatgagtaataatcttcttcatagtaatacccatcataatcgagtaggtggcactgactagttcctctaataatcggtgcccccgatatgcgtccccgcataaacaacataagcttctgactcttacctccctctctcctactcctgctcgcatctgctatagtggagggccggagcagagaacaggttgaacagtctaccctcccttagcagagagaactactcccaccctggagcctccgtagacctaaccatcttctccttacacctagcaggtgtctcctctatcttaggggccatcaatttcatcacaacaattatcaatataaaaccccctgccatgagcccaatacgcaaaattaaccccca

SEQ ID NO: 575346 - DNA, 440 bp, Homo sapiens
tgcgggaccctatcatcctcggtggcctatgagctccgtaccagccactcaacatagtgtctgaacagaaccgctccgctgactggtagctgggtctgaggattcaggattgtggcgttattctgagaggagactttgtaattcctcgatggctggcaatgtgaagtccaggtgcctctggtggagggtcatctgcttttctcagactgtggttgtgaaccggctccttctccaagaaaggttgcatgctgacaacatccagaggtgagactcatacaccttgaaagtgactgccttcagggaggtttaacgagttcttcctgatcattccacttgttactggtttcgatactttgcccacgggtttgtttccccgtcctcttcttggaccaggctcctggtatttcaggggctggttggctgctctgaccgcccctctt

SEQ ID NO: 575347 - DNA, 1402 bp, Homo sapiens
gaattagaattttgtctttgtgtttgtgtttcgtgttaagtgtcttgtggtattttgctttatgtaaagtaggttgaagtggttgaggagttggacgtgttttgtcttttcgtggtggttgtgatgtctttgtgcctcttaattaatgccttgtgacagtgtggtagtgtgtctggttagataggtgatatactgtagtgtcttttcggtatgtttgttatatgtattagtttgttactgactatggtgttgtatgtatgaaaattttttgcatttgaggtggttttttagttgtaatgttgtatacgttctgttaagggtggtatagcatgtaggggtatgtgtttaagtgcgtttactatatattggtgttgggaagtgggcatatttggatgattgttattgctttatatgtctgatggataggtagttatttgtattggttgtttgtatgtcctattggttgatcatttgttatgtgtataaatgtctctgtgggctattgtgtgtttttacaaaaggtcgcaatggttatgtattcccatagttagtgtaggggataatggtttttttaggtcttggctatatcttagttgagtgtgtgtagtcattcgttttgagttaggagtgtatatggctgaatcgaggtattgtgccattgagacttagagtaggttttgattactggtgtgatgtgtaagctagctagtggtgataatgtttataggttctaaggaatgtgtttacgtattgatatgtaatctaagtgtgtatctggtgaatcgttggttgtggtttgattcgtgtatgtgatctctgcgaatattattcttagtgcagaatttatacatggtgtttatccatggatagggtgtgtgcagtgtatatagggatatgtgttaggtccatcagtctgaggtgcatagccgtctaacgttatgcaccaggttagtaatatatctagggtccaggacgcagtgtattatcatattgtgtacaggtagttctagtggctgatactaccttggatactcctagtaatcctagacccagcaggtgtagactgcgttcacagcatctcgtgggttctgagacaaagctctggaaaacactcacacttcatgttgtcatgtgtcatgctgaggtgaataatagcaaaactgttttcatttcccgttaagttgtccgtttcgctaagcattatgtaataggtttggccattaaatatcattgcccgtattttccctattactgctagtatgctacttcttacatacccaaaagaaagttcagttatttattgtatatttattgtattcataatatgattgaaataaatggcatggatttattttgttcctaactatttggattaaagatatagtggttcagcgcaaacaaa

SEQ ID NO: 575348 - DNA, 337 bp, Homo sapiens
  misc_feature (252)..(252): n is a, c, g, or t
aggccgcacgcgcggtcaaatatctatagatccagtttgtacatattccacaggtatactgataaaatcatctatgatgccatttttttaaatggcagttcttatatagctcgaacattaagatcaacaaattctcagatgaagtcacattaataagacacctcagaagtgaaacaaagcctagtttttactaaaagcgatgggataaacggtagtgtctaatgctgaagagcagcttcaacttgtttcccncacgagaaaaagcgccaagaatttcttggaggataatttaacaaactaagccaatacaggccaggcacggttggctcatgccttg

SEQ ID NO: 575349 - DNA, 215 bp, Homo sapiens
gccattaacggtgctagacagtataaacgtcaactggtcatctgcaggcaggccagtcacagaggaggtcctaggatttatatatcagagtcacattctttctgcagtgatattatttcttatccggatagcagtatacctcgtaaacatatagcaggaggtcagctattggaagagtaatccagtgtaacttaatctttaaggtgttatctaga

SEQ ID NO: 575350 - DNA, 292 bp, Homo sapiens
tgtcgttctggatgtccgctatgatattgcgggtggcggagtgcgctctgccgcgccgtgatttgtttctcggtgtttccccgtcctctggatattgtgcgcgccctgggtgaccttgatgttgcttcccctgctgtgagctgctgtccgtaccaagtcttctcgcaccatgatccctccagatctgctctgacttgctggactctggatctcaagatacgccatgttgggcgcggagtggtgcctgctctcccggattctgatgatctcccctgccatgccccagtggtgg

SEQ ID NO: 575351 - DNA, 1668 bp, Homo sapiens
gtgccttcgctgcccggctttcgcggccgttcgtcgctccgtgtctgctggctgccggcctgggttggtgcggagttgcgttctgtgtgtggcggcctgctgtgctcgcgctgtcagcttgcgcgaggtatccctcgtcgctttccgcgctttgcgtcttgggtggggccttgcgcgtctggggtcgggcgctgtcctcgctgtggcgcccggggctccgttggggggggccgggtgggtcgcgcctggctttcctcgcgtgtgccggttgctgttcgcgcggtgggtgtgtccgtcgtctgcttgccgttgcggcctggtcgctaagtgcgggtttgtgttgagtttcttgcgctcgctgctcctgtgtctgttgtgctgtgtccgtccggtgtccgccggggctgtcacctggtgttctggtagtggggggtcccttgtgggaggtggtcgtcgatgggccgtagttaatgctcgcgtggtgtctggattggtgcatgtcgtgtgtttagtgcgtgggttgcgcgtgggcgctggtccactggtcctggtgtagcgcgtgggctgctcgttgttgtgtttccggctgcggagcgcgtgtgctgtcgggcatgggtgcccgcgtggccgtgtgagccgtgtcgtggcgttgtgttgccggcggggttaccgtcggcgggtcggattgccccatgcaggcatgtcggtggggtgtttgttggccctgtcaagggatggttgcgtctgggttggctgctcgcccctctgggctgggtccgcgtcgtttttgcatcccgtgcgtgcccttggctgtgccagatgcttgcggcctctctgtcggggttcttcgtgtgttggtgtcgcgatgttgtagtgcgccctgtgcgtcccttgtgtttgtcctcttagcatttgtttggggcggtgcatgttgccgtggtgagtgggtgtttcgcatggtagcctttgggtgtgtggctgcagtctcgtggggctgttgatgttacgttgtcggggcttcgtggatgtgtggcggatcgctggttcttggtggtctttctcagtcgctgttgcttgtcggtgtggggggtgtcctctgtgctcgcgcgctagggtgcagtctatggtatgttggtggggtgcatatggggatatccaggttctgttgtgttcgctctaggtagtcctgcgcctgtgtatgtggttactgtcttagcctcgagatgggggtccgagttgctgcgtgggggcccctgtcgtgcgatgtcgtgagtgtaagagtaccgaaggtggttctggtagctgtgcgcccgaactgctagcccttgtagtgttggcctgtgctgatgctacgtatgactgtgcgtgtggggctctcatctgagtgtctgagtcagaggtatgctggtacctcccaggatattttgggtcgaaatgaagtaggatgaaacctacaagtactacttagcgtggtagtaagtctggtgatctagtatctgagtaatcagcctgagcggtacacagctggggtcggcgactcgcgttttgtagacttttgctgtaactagttgtaccgtaggacagaatgtgacggaggaagtaacacacagaggaggatgtgtgtgtatgcatgtgtcgtgaattcacataggatagtaaatgtattga

SEQ ID NO: 575352 - DNA, 856 bp, Homo sapiens
  misc_feature (582)..(582): n is a, c, g, or t
  misc_feature (635)..(635): n is a, c, g, or t
  misc_feature (658)..(658): n is a, c, g, or t
  misc_feature (681)..(681): n is a, c, g, or t
  misc_feature (695)..(695): n is a, c, g, or t
  misc_feature (700)..(700): n is a, c, g, or t
  misc_feature (709)..(709): n is a, c, g, or t
  misc_feature (711)..(711): n is a, c, g, or t
  misc_feature (714)..(715): n is a, c, g, or t
  misc_feature (723)..(723): n is a, c, g, or t
  misc_feature (731)..(731): n is a, c, g, or t
  misc_feature (735)..(735): n is a, c, g, or t
  misc_feature (742)..(742): n is a, c, g, or t
  misc_feature (746)..(746): n is a, c, g, or t
acccggtcatttgctacacaatgtactaggtttaaatgctattttatttcatgtttatattcatgaatccctagatatgggcacactacagcctaatattggagtgaatgcattaacgaatgagcaaaaacaacttatatactgtgtacaaaaggcttttccgcttctagagtttatctttggttcttctcatcagtgttactttttcagtcacatagtttctttgaatttcatacttgaatacgcagaaacttttaggcccccaaaataactcagatttgtgaggagaaagatactgactttaaaagcccaggatcagtaagagaccctgagattcctgaggctacctggaaaacattacaggggaagtgtatgaagaaacagtatttggaggagaaagacctagaggaactgaagtctgttagtgaagcttgaagcttgatcagccttttgtgagaacagccaaaaagcacagtgccaggattgaactctacttgtgcaggattgaaccccattagtctttttatgccagggaatggtggagaaagaaaccagctgtagttctctgttttgatatacccnaccggtatttggaaagtctggagtcagttgtaaagaagaatacaatacagatnattcatcataattgggtggtcanactggggagaccatctggacctntactttctgtaggntaatngccatagcntnatnncagggcanacatagtnaatntcctttntgtnaaaattttttaaaaatggtaatagttatgttaggatacttgttagaatctagaatgtgaaataacgtacttcatgtgtcttcttaccaaaaatacaagataggggaaaag

SEQ ID NO: 575353 - DNA, 360 bp, Homo sapiens
  misc_feature (29)..(29): n is a, c, g, or t
  misc_feature (112)..(112): n is a, c, g, or t
  misc_feature (135)..(135): n is a, c, g, or t
  misc_feature (151)..(152): n is a, c, g, or t
  misc_feature (171)..(171): n is a, c, g, or t
  misc_feature (189)..(190): n is a, c, g, or t
  misc_feature (232)..(232): n is a, c, g, or t
  misc_feature (328)..(328): n is a, c, g, or t
tgatgtggaaagagacaccaggagtaganaaactgtcctctttacctgctcagcccctgtggaataacagactaccgaagctctttacacgctcccttacaccgcttgtacnccaagaccttagaaaaaggccgnaaggaggagaggcagnnaatttggatgaattcctcnaagaatttgaaaatccannggttcctagagaggaccagcaacagcagcatcagcagcgtgnatgttatcgatgagcccattattgaagagccaagccgcctccaggagtcagtgatggaggccagcagaacaaacatagatgagtcagctatgcctnccaccaccacctcagggagtttaagcgaaaag

SEQ ID NO: 575354 - DNA, 231 bp, Homo sapiens
gggactggctctcagtaatcccacgtaaggtacctgccgtcggaagatttgaactttctacttggacaactaacacccacagtcctccaggtgggtcctaaggatcttaggagcaacgatggggggtcctaagccagggggggatgagggtctggctctcagtccctgcctcgcggggggtgcctcccccctctgcgatgggggtcctaagagccagtgggggaaccaggg

SEQ ID NO: 575355 - DNA, 558 bp, Homo sapiens
gagaaacgggaaaatcctcccgccagtagaaagtgcgcgaaaactggcgtgtcccctgggtaccttctctgggtactctacacagcgctaacctcgacgatgggaacacatcccgcccaggggttccgtttttggcccccttgcgccctagtagggccctctggggccgggtacagtaaaagtttcttgttgcgtcgtgactctggccccattcgatgcactctaaacacagctcgacctcctgccctgtagctgcttgccatagtcagagaaaccaggatccaagaacgagatacggaccaaggcgagctgctttagccttgctgatggaattcaagaagggtcgtacatacgttgcaggaggtgcacgtcgcagaggcctcctagcagtcttgtccagtctttgccaggagagatcccagttccaggatgctctgctctttgacttgcactgcctcttcatcgttttcctgaatgtcacgcttcacgatggagtggaggatgtcgatggaggcctcccggtcggtgctgagtagagactgggctctctggaactcc

SEQ ID NO: 575356 - DNA, 104 bp, Homo sapiens
gtggttagaagctacgggaagcagtcagctgaatgaacactgccaaaatcattccacaagagcagtctggatactacattggaactctagacactttagtcaac

SEQ ID NO: 575357 - DNA, 477 bp, Homo sapiens
  misc_feature (392)..(392): n is a, c, g, or t
  misc_feature (397)..(397): n is a, c, g, or t
agctggtttcgccaaggcctttcaagtagagactctaggaccagtccgtgacaagcacgccggccggactgctccgggtcccagaccagctcgtgcgggccagagccggggacatggctagggagggatccccgggggcccggctcggccactctcccaccgtacgctggtcagtccgtgagtcagcagccggcgagggggttcgtggatatgctcaagccctcccacaagagtgagacctgtgagattatgcgtgagtctgagcggcctgtgcccccggcccggcccccctcacacagtgagtcagcagcatcagagccggctagccggccccctctccgctgccgccgaccgacataagccgagctgggccgcgggggcgagtaggcagngcggngagctttaccgatggagtggaggatgtcgatggaggcctcccggtcggtgctgagtagagactgggctctctggaactcc

SEQ ID NO: 575358 - DNA, 300 bp, Homo sapiens
gtctccaccccaccaggcaacccatgatatgctttatgtaactatacattaatttgtatttcctagaattttatataattggaatcacacattgtatattctgttttatctggcttctttcactcagcaaaattattacgagattcactgacgttgtagcatgtatcattagttcattccttttattactgagtagtattcaactgtagggatacaccagtgattttacccattcccttattgatgaacatattggttgtttctagattttggctattgcaaataaagctgatatgaaca

SEQ ID NO: 575359 - DNA, 711 bp, Homo sapiens
gaattatctttgggcacaacaggattacagctgagatggcaggatagaacaacaccaagaagtcctcgttgtgagtgactgttattcgtggaagttctgtaactgtaccagaaattgcaaggagtcctttggttgaaggatgatggcaacgaagtcctggaaaaagcgttatttactcttgcgagcatctggtatctactatgttccctcaaggaaaagcacaaggtctctcgggatctggtgtgctattctccagctggtatcatgtcaacgttacattatggcgcaggactatcggaacaattacaaagcacctacagactattgtctggtgctgaagcatccactaaatccagaagaaatctcaatatatcaatataccttggttgtgatgatgtgaggacgactgcatcagtgggtcaatgggatcctgctattggaaagtatgggaagcagctctatatgaaactaccaatgaagtcgcttgatagaggacgggacgtcaagctatgatttggacttccttatccagctccagcattaaatcgggatccagttcttccagcatccagagtctcagatcagacactccaaatcagtctgatagcggagtttctgacaaccagccagacaggacacgtccgttccagagcattgtgagctccgtattctctgaaggctggaacgaggcactcagttggaaaagtcaca

SEQ ID NO: 575360 - DNA, 404 bp, Homo sapiens
tgtctccactggttgttacaagtcttgttcagtggttacttccctgacactggctgcctccctcccagcattggcagtgactgtcattgccttagttaattttttctggtttggtttttgtttggtggtatggttgttggaagaagcgttttagtctgtggccaaggttgaagtgcaggggcgcaatcaaagctggctgcagccttgaagtcctgggctcaagcattcctctaacctcagaaactaaggactacgggcacttgccaccaggctgggccttctaattaatttctgtgtcaacaaatataaaattcaggcctagagaattagttgggtcaagaaattacagagggattatagatatccattaattcaatgggaaacattaagtcatcattcagagt

SEQ ID NO: 575361 - DNA, 253 bp, Homo sapiens
  misc_feature (11)..(12): n is a, c, g, or t
  misc_feature (35)..(36): n is a, c, g, or t
  misc_feature (53)..(54): n is a, c, g, or t
  misc_feature (56)..(57): n is a, c, g, or t
  misc_feature (70)..(70): n is a, c, g, or t
  misc_feature (76)..(77): n is a, c, g, or t
  misc_feature (79)..(79): n is a, c, g, or t
  misc_feature (81)..(82): n is a, c, g, or t
  misc_feature (87)..(88): n is a, c, g, or t
  misc_feature (91)..(94): n is a, c, g, or t
  misc_feature (97)..(97): n is a, c, g, or t
  misc_feature (113)..(113): n is a, c, g, or t
  misc_feature (120)..(121): n is a, c, g, or t
  misc_feature (157)..(157): n is a, c, g, or t
  misc_feature (208)..(208): n is a, c, g, or t
ggttatgtttnnggggaataaacccactgtgtttnnggatggggggctttaanntnnctaaggggttttntttttnncnanntactnntcnnnnttntaccctgtttacttgnatttttnncccactcaactgcacaaacatttttgaatcatctcnatgaattctgctttccaatttacatttttgcccttttgtcttttcctcttngctgttaaacttcctgaaaaaataaaactagttgattcacttctt

SEQ ID NO: 575362 - DNA, 402 bp, Homo sapiens
cccatcccattcaagcatagctggtacacatatctaccttcagatgttagaatatggcttgcattgcaatctggaggcattgaagtttatgtgatctctatagcaagtctctacctaacctgtgtgaagcaagtccttaagtggagaatcactaatgcttagtctctcccccactaggtacggagggcaccagcgaagcttcagggatgtgggcgtgactgtagagtgctgtgtctgcggtgggaaggccagggaattggaggcatgaatgcagagaaaagaggaggccttttgttcttggaaggactcttctgggtcagttgtaacctaagcatttatggttatttcccctctgctggataattttccagggaactctagctggtggaagggagggtaccg

SEQ ID NO: 575363 - DNA, 832 bp, Homo sapiens
  misc_feature (206)..(206): n is a, c, g, or t
ataactcccctgggccgacccgcttgatgtagtctaccatcttggcaggcgcactcatcagaggcgctgagagctcgcactgatgaataagctgcagtaggcctagtaaataaacatgcgtagctgttatgcccagattcgaactcgaaggaataataaagccccatcgttcgacaagaagcgggcctagtcgatagtagtttccntcatcagcagaagcaatcctgcatccgataagtcctttcttaaattagcgtatccatcttctcaacacatatacattctcccgtgaccaagtgagacctagtacatgcaattacttacccaagtcacaatatcgtcactcgatttggtagagtctagttaatggcgtactagcaatgaaatactgaggaatagctcctccctattccacttcatggaagtcccaagagtgttcaccctacaggtcacctcctcttgcacatccgtggctgcattcttctcactatgacaaataacttaggcgcggatctcgatcatattagcaaatctctgcccgtcactagtcgtgaagtcttgctcctcactctctcaatccttatccatcatagcaggcagctgagggtggatgaaaccaaacccgagactagggcgaaaatctgtagcatactcctcgatgtacccacatggggtatggaatagtcagccagtgctacctgtacaatgcgaagataaccgttccttaatttgcatattatgttctactaatactaacggcgttcctactaatccaattaaaatccgagaaaccagaacctgttggtatatcgcaccggaaaaaggcaacccg

SEQ ID NO: 575364 - DNA, 476 bp, Homo sapiens
tggaatccatttcctatccccatagtgtcttcctcacttacatttggatagagtgtagtcctctagctgatttcactgtattttatataggtatgcctctctcagctaaatggtctctcctgaactgccaccttcaggggtttccaggcaaactacaataccatctttcctctgtgcagcgtgcattcatgcattaaagaccctgtttccagttatgttttcatggtgaactggcatgtattcctccacctttatccttcttatgcaggccatactcagtgaagaggctcagatctagagtcacaccactcaggttcaaatcctggctgacacttaatccctgaaatctgatgctatataagttctagaatctggctaagtctcagtgttcttagtcaccagacaggaactagggcttcccacgaggctaatgcctggtgacaatgtgatgcgcaataaatactgtccaatcagac

SEQ ID NO: 575365 - DNA, 187 bp, Homo sapiens
ccgcccacgcaagacgaaaaaacaaaaaacaggatagaggcagcaaacacaaattctgagggagaggaaagggacagttgagtaagacggctgggggaactgagaagcctgaggtgatggaaactctgccttaggcctcctcttcggcctcctcaccgaaatcctgctcctcgtcttgcggtgtctg

SEQ ID NO: 575366 - DNA, 123 bp, Homo sapiens
  misc_feature (82)..(82): n is a, c, g, or t
  misc_feature (107)..(107): n is a, c, g, or t
gcggtcgctctacgacggactcccccctctttcctaccggacgacacgacgggcctacttctcctacacggacgacacgacnggggggtacccggacgctcgacacnttcgtaccactcactg

SEQ ID NO: 575367 - DNA, 924 bp, Homo sapiens
  misc_feature (4)..(4): n is a, c, g, or t
agtngaccagaagaacagaggaggcaaagcaaggcagcggagagcgcaagcgctccgctctaggatctcgcgacccccctctctcgtgtggcgcaaggtacggcctgccaggggacgaactccgccgagtgcaagaccgttggtagacacaacccgggccttaaaccgagccggaaaagatgtcctcaacgggaaccagggtaattctcctgctcaacggacattccgccatctatacccagacggtcgtccagtgtcctcgtcaacgaacagcagaatcgcgtgtggtaccctatctctcccccggccggggaccagccttgttgataccgcccccccgggaaggggagatttgccacaaaggtggaagcacagcaagccctcggcccaaccatgttcgaggaaggacgaccctcttgacccaaagactggggaaaaagtgctcgcaacaaagggccgaacaacacgaccgcgtttccacgtctgccgctggcaccccacgctccgctcgcgggggacaccgtaagcatcgtccgcgacctacaatccatacatgcagtctctgggaatacaccccacatgttcaacaccagggccaaagcgcgtgcccagattggtatcaaaaaccacaacacttccagagaaatccactcacttagctcttagagtgccagaataaccccctctcgtctgtggttcgcctaaaattgaacaagagcggcgtgtacagaccaccttacagtgcccaaaaaacagggatccccgaaacagccccggagacctagagggcacctatgagaccgcgctcattatgcactacgctccggaagattctttttctgcaagccgtcccgttgtaacaaactttctgggggaaacacttcggggcaaaaaaattggaaccaaaaggttctctacaaaaca

SEQ ID NO: 575368 - DNA, 509 bp, Homo sapiens
ctatgcagcacagacacaagacagtcactatataccgcataacggagtcaatcagcaagaggctataacactgttgaatatctatgcactcaaaactggagcaccgagacatacaaaggaaatatacttagcgctaaagagagagctcggctcccaataccaatcaatagctggagacttcacacaccccattttcagcatgggaagcgatcttccatacaaacaccatcaacaacagacaccgtcagacttcaatctgcttacacacgaccaaatggatccaatagatatatacagcacatttcatccaagggctgcagcatgccccattctttaactcagcacatggctcatcctcaaggacagaacatatgtacggtcctcaaaccaagccttacaccattcaaacacaattgcaaatcaggtccagtgtctcctctcaaccacaagggaatagcgctgcaaattactaccaagaggacctcccgaaactctacacttacatggca

SEQ ID NO: 575369 - DNA, 241 bp, Homo sapiens
  misc_feature (46)..(46): n is a, c, g, or t
ggctgagttgggtggaccacccttgaactcaggagttcaagatcangcctggcaacatggcaaaactttttctctacaaaaaaaatacaaaaattggctggacacggtggctcacacctgtaatcccagctactcggggggctggggcgggggagttgcttgagcccgggaggcagaggtgagccgagatcgcgttattgcattccagcctgggcagcaagagggaaattccgtctcaaaa

SEQ ID NO: 575370 - DNA, 1603 bp, Homo sapiens
  misc_feature (860)..(860): n is a, c, g, or t
  misc_feature (1603)..(1603): n is a, c, g, or t
gcaacggttctgatgagattggagaacttcagatgaaaccaacaatgtcagaagtaaatactgcgcttctgtgctggatgaatttcaacaggcatggcctttgagtaaggctgggggcgcggtgcacctagagcatgcaaagggcggacagtcatagcacttacaaggaactacgggtgctgaagcaaaggtccccaggatggagtggccagaagctcttgctatggagactgcagaagtgaagatgatgaagcaacagaatggattacatttccaggtcaaacgtgtaaagaaatcccaaatggagatcataaggaaatactcctgtgtgatataatgtagataacaggtcagatagaatatggacatcgttaccaagcaacacctatgagatcactgtgccccaaaggtgcgcgatctcctgggccataatgggctactagactggcaagaccaggacaacgtgccatgagacctaatgtagtctggtatttcagcaaggcatttaacgagagcctcttatgatatccttgtgaaccagcatggcagagatgtgggcttgaagtcttcccattgctacaggatatagttcgacacttcctagtgtggtgtacaaagacccttttacaggcgcggctctgtgtacccttcaacagcatttgcttgaacaaccatggtcgtgggtttactcaagtgccttggacattggaatcctctggctggaatgaccgtgggcccctgtgcatctgcgggggaaaatcacacacgttagttaaaaaagggagcacacctgtgaagaaacgcgataacaaccaaaccacaggggagtatttcagagctaccagaggggggggttagantatacatcggcggtagaggaggaaatattcgtccaagtgacaaagtgtcctattgttgtccgatatagtgtgttggtcgttacgctcgattctactaccgcaagcaagagaacaagaaacaagaaaaacgagaaaaaagatacagaacagcaggacacaacatacaagaagcagcggaaggagaaaggagcgggagagagagcagagggggggagagaaacgggaagagagcgaaagggaaaaaaggaaaagaagggaaaggcaagccagagggagcaggagggagggaacaggagcgagaggaagcaggggacgaaggcggccgcaggaggagcgaggcgcacagcggaaagagggggaagaagagaaaaagcagagagaagacaacagagagaggagggacgaggaaacaagaggaggggaaaaggggaggcgaagaggaacgacagagacaagacgaagaagagcaacgagcgcgaagaagaggggaaagagaaggagagagagcaggagagggaagggaaagagaggagagggagagcagagacacgaggaggaaaagagagaaagaagaagagagacagagggcagagagagagagacgacggaggcgaagagggaaaaagaagacagaggcgaagaggagaagaggaagaaaagaacgcgaaagaggaaggaggcggaggagagagaaggcgagggaaggacagaggaaaagacacaagaaggagaagacgggcgan

SEQ ID NO: 575371 - DNA, 396 bp, Homo sapiens
  misc_feature (77)..(77): n is a, c, g, or t
  misc_feature (101)..(101): n is a, c, g, or t
caggtggaaaaaagcgccatgaaccctggcctgattaatggttaaacctttttaaattgggttagataggccctttnatccaagtaaaaagcaaccccctnccagaatttaaagggatctgtttaacctttcctcagtcaagttcagagtcttcagagacttcggtaataaaggaacagagtgagaggcctccttccagggagagaaatcatagtttaactgcatttaaattttataacagaattaaagtagattttaaaagataaaatgtgtaattttgtttatattttcccctttgggctggaactggctgccctgctaaaagattatagaagtagccaaaagtattgaaatgtttgcataaagtgtctataataaaacttaactttcatgtga

SEQ ID NO: 575372 - DNA, 269 bp, Homo sapiens
  misc_feature (13)..(13): n is a, c, g, or t
  misc_feature (190)..(190): n is a, c, g, or t
ttccagagtttcnaggtgtcttgaaatgtctgtcagtagggacatgcgggtcccactggagattttagtacatatttcttccttccacaatttgtacagtaacagtcaatggcaaacaactacatacatgtggtggtggtgtggtggttggtgttggcccaggctggagtgcagcagggcgatctaccgntccgcggcctggacctcctgggctggggcgatcctcccacctctgcctcctgagcggctgggaccacaggttcaagcta

SEQ ID NO: 575373 - DNA, 746 bp, Homo sapiens
  misc_feature (365)..(365): n is a, c, g, or t
tggtaaatataccgtcatatataagctaaaatttctcttagggtgggggggttggctggcagggaaagggacaggttgaacctacaatggcttatgtaataaaatcctaagggggggacaaagacgctgaggcagctcttacgcctggaacgcaaaatgaaaagggacacctcgcttctggacttactgttgtgtacgtcacaacaccacttagggagaatgtctggtggacacaacaccacggattcaagaaatactccataaatatttatacaacgcttggtgaacacgatataatctggagatattcactattgtttattcaatggggaacaattatctatccaaatataatgtcacccctntatgggcatctaaatctggcctggaggtttccatattcccgctattggaggatcctccagatgtcaagaataacgccttttagcaccaatttgtggctcctggtggtaaagtacacaaacgatgtggccatgccccgaggaactaaaacccgtggggaaagaattctccctctgggaagttggagattgcgggtgggcgctaatcaagaactttggggctaatcttctcacaacggggacttttggaggcaaaccttcaatctttgggcccaaagattattcgggcgggggcagaaaaattggagtctcggactcaggctgcatacctgtgacatttcatgattcagtatcattggattggagagcttcttatgtcgtccc

SEQ ID NO: 575374 - DNA, 113 bp, Homo sapiens
tattggtttcgagatcatatgcaaacgactacggtcagaagatgggcagcctaatggtgctcaaactcaatggactggcctcctggcggaagattttcgagacatgatgccaa

SEQ ID NO: 575375 - DNA, 406 bp, Homo sapiens
  misc_feature (340)..(340): n is a, c, g, or t
atcatgccactgcactccagcctgggtgacagagtgaaactgtatctcaacgacaacaacaaaaatttagccaggtgtggtgggcaggctgcaatcccagctagtcaggtggctgaggactataggcattcactaccaagcccagcttatttttgtatttttagtaaaaacagggtttcaccctgttggccatctctacaaaaaatacaaacaattagctgggcgtggtggcatgcgtctgtggtcccagctacttggggggctgaggcaggagaatggcgtgaacctaggaggcagagcttgcagtgagccgagatcgtgccagtgcactccagcctgngcgacagtgcgaaactccgtctcaaaagaaaaaaaaatagtacagagatttcccatgcacccctca

SEQ ID NO: 575376 - DNA, 369 bp, Homo sapiens
atgctctcgagaagtgggaaatgcagatcttcgatcgcctgttcccgcgcatttccgagatcgttcgcgagattgaccgtggttggggcgaggacatgaacaagcgcggtgtggacggtcaaaccatcgagtacatggccccggtggcggactcctggtacgggttccggaaggacaagatcgatgagttggccctgtcgctgaaggtgttcgagtgaccgacccacggatcctgatcaccggttcccgtcagtatgatcgacccggcatcatccagggagccattctcagtgccaaaatccgtgcggacggcggactcggacgttcagccgggttcgggccgaatctccgattccccatcggtgtcat

SEQ ID NO: 575377 - DNA, 158 bp, Homo sapiens
aactgcacgctgcagtgagctgatgtctcactgcattccattctgggcaacagagtgagctcctgcctataaaaataaaagacttccacaagataggacatagacacggtaggcaggaacaatccaagtagtaatggcggccgagaagctgtggcggg

SEQ ID NO: 575378 - DNA, 85 bp, Homo sapiens
gcggccgcctactactactactgctcgaattcaagcttctaacgatgtacggggacatgctgggttaataaatcatctcattcgc

SEQ ID NO: 575379 - DNA, 300 bp, Homo sapiens
aaattgctgaaaacaggctgggtgagctggctcgtacctgtgatcccaacactttgggaagtgaagttgggcgagatcacttgaggtgaggagtttgagaccagcctgcccaacatggtgaaactcgtcatctactgaggatagtaaaattggccaggcatggtggtaggcgacatgtagttccagctattcaggtagttgaggcctgaagaattgcttgacactggaggtggagttagcagcagtcgagattgcaccactcactccagctagggtacaaacgagactcttctcaaaaaa

SEQ ID NO: 575380 - DNA, 208 bp, Homo sapiens
atataaaaattaataaaatttattaaaagtatacatcacaaaagaacaataattgcaacacaaacatcgacaaaaaaaactattatacatatctattaatgatcgaatagccgcgtaaaaataaattcgttaaaagaagtaaatctaatccataaaactaagatacaaaatttataagaacatttgaagaaaactaaatccatttcga

SEQ ID NO: 575381 - DNA, 410 bp, Homo sapiens
  misc_feature (17)..(17): n is a, c, g, or t
  misc_feature (31)..(31): n is a, c, g, or t
  misc_feature (305)..(305): n is a, c, g, or t
  misc_feature (314)..(314): n is a, c, g, or t
  misc_feature (339)..(339): n is a, c, g, or t
  misc_feature (377)..(377): n is a, c, g, or t
ttcccccttttaccttncatggcttttatcnagtgtatcctggtgtgtcatttattgcctcctttatccttgatttttttaacctttttaaaaatttgcaaaatcctatgaaagtataaatcagtataataaaactcccttggatgggcacagtggtttatgcttgtaacccccagcactttgggaggtcgaggcaggaggatctcttgagccccaggagtttgagaccagcctgggcaacgtgctgaaaccccatctctacaaaaaatacaaaaattccctgggtgtggtggtgtgcacctgtncccgagctncccgggaggctgaggtggagaatcncctgagcctggggaggtagaggctgcagtgagccatgntcacacccactgcactgcagcctaggcaacaga

SEQ ID NO: 575382 - DNA, 312 bp, Homo sapiens
  misc_feature (3)..(3): n is a, c, g, or t
ggngtgtgtgtgtgtgtgtgtgtgtggggaagggtgtgggtgctgggatgggggtgaatttcaagttgaaacacgatgatgtggtctgcttgctctctgcttagacaggctttaagaccaattggattttcatggaggccaggacagagagtggtaattgatggcttgtgtacagacaagcatttatccaggttgcgttatccaaactgatttgttaaagctccaggtcacgttcttacactaagaaaatcattcagtaaacatgagacaagtttaggaaaaactaataaaataaacctgtcttaaacttga

SEQ ID NO: 575383 - DNA, 488 bp, Homo sapiens
gaagtagagcgtgtgaaccctaatgaatcagaaagtgggatcttgtcactgcaggcgtacgttgtcactatcaaacacctgttattgcggagagcagcctcttgacctcaagtcggttggcgccgggaataaaattctatcagcggcagctacgggcgtctcaactgaacaggtgttcgctagagcaaaactcaattccccgacgtgtaagcgagcgcccaaattagagtttcccgttaggcgatgggcgaacttaaggtgcggaccgatggcaccgcattcggcgaagtaggaacgagcttcaagtatcgaactaccagtctgctaagaaagcgtagcacgatacaatgggcttgagcgaggccggtctgctggcactagaatgctatctctgagcggtgctctctattagctgcttagcctcgccaagctgggtcgagtgccacaggcggtgtagtcgcatgcctactaactgctggacagcgcgg

SEQ ID NO: 575384 - DNA, 157 bp, Homo sapiens
tcagctcgccctcattagcggagcatcagtagcggtccgcctgctggggtatgttgtgtgaccgcttactgatggtcatcgaaaccctgtatgtaggtgatgtgtgatctttcgtccctcccactacaggcataacgcgttattagggtttcgatga

SEQ ID NO: 575385 - DNA, 562 bp, Homo sapiens
taccccccctttattttttgcccccaaaaacaaattaaaacccccccccctttttaagggggggggggggaaaaaaaaaaaacccaaaacccccggggaaacccccggttttggtgccccccgctttttatgcccctggatggtgtattggggtttcacatcttgccccgtgttggtttggggggtgggattgggggggtgggaccccttgtggggggcgatgggcaattgtgaagccccctttgggaaaatctcaggggggatgtggacagaaggcgccctttgtcgggctgggtgttggggggacagtggttgtggttccaaaaagtcccgggagggcgggaagaggggggggttgtagaggagcagggctccccagaggggtgtcaacaaagaggggggttgcctcgaggcgcgccaccgagagggggggcccacgagggtgcccaagagatgtgcgccagaaggacaaccggcgtaaaccaggtgggttgccaccaaaagagcgtgccccacaggggggagaagagggggcgccgtccccagacgcgagagaaacgac

SEQ ID NO: 575386 - DNA, 149 bp, Homo sapiens
ggcctgcagtaaagctctggtgaggtccgtatactgctcctggacgtgcaacagtcgggtgcgtccgacctgtggtatagtgggcgaaagacctaactcgacaccatctacgtgatctgggttcacctccgtaaggtttgctcctcgag

SEQ ID NO: 575387 - DNA, 534 bp, Homo sapiens
  misc_feature (81)..(81): n is a, c, g, or t
  misc_feature (244)..(244): n is a, c, g, or t
taggggaaatcagtgaataaagcctcctatgatggcaaatacagctcctattgataggacatagtgaaagtgggctacacngtagtacgtgtcgtgtagtacgatgtctagtgatgagtttgctaatacaatgccagtcaggccccctcgggtgaaaagaaagatgaatcctagggctcagagccctgcagcagatcatttcatattgcttccgtggagtgtggcgagtcagctaaatactttnacgccggtggggataacaattattatggtaccggaggtgaaatatgctcgtgtgtctacgtctattcccactgtaaatatatggtgtgctcacccgataaaccctaggaagccaattgatatcatagctcagcccatacctatgtatccaaatggttctttttttccggagtagtaagttccaatatgggagattattcccaagcctggtaggataaaaatataaacttcagggtgccccaaaaatcaaaataggtgttggtataaaatggggtttccccccctcccata

SEQ ID NO: 575388 - DNA, 899 bp, Homo sapiens
  misc_feature (1)..(1): n is a, c, g, or t
nagtatgacttacgttgtacgtggccttgtgtggtttcgaccactattggtcgattatgtgtgtgttgtatggtgtcttcttctgctgtggtggggggccgctattgttgtttatgtggtcgtacgattgtgttgcttctatcacttgcccgtacccactcggggaccggtccccgctggggttaccccgccccggttgtttcgcccctctatggcggtttttcccccaccgtatgtcccggccgcgaattcttttggtgggatcccgccgcctaaactttcgttttgcccacccttttacgagtttccctcccggtcccgaaataattgccgcgggttttgcccacttttccgcgggttcctttttagggggcaccaatcaggccctcaatgaatatcggggtgtcctttgggtttccccccctggcgggaaaccattgggagccccctgtctaagaaaaggtttcgaagcacccggccgcctttgtgcagacgcgggtctcccccacgcaagactcccccgtgtttacactccttgtccaggagaagaacacctggagtgttcccccccgccgtcccaggagcgcatggcccgcttaagaggggcacactcttcgtggccgcggaagcacaccacaacgaggtgggcaccccacccgcgggccaccaaacaacctgggcaaccaaacgcgtgggagagccacctgcgtggtcaagcgacacttcttccccgggataaaatgtttgcacggcccgacattccccttatgctgtcggtctcccgcacctccttgcccccaggtggtggcaaaggggggccctggttgccccgggtcccccccccggggtcttaatctgctttctccctttaaaacaaccttgggaaaacccaaaataaa

SEQ ID NO: 575389 - DNA, 802 bp, Homo sapiens
  misc_feature (47)..(47): n is a, c, g, or t
  misc_feature (72)..(75): n is a, c, g, or t
  misc_feature (79)..(79): n is a, c, g, or t
  misc_feature (86)..(86): n is a, c, g, or t
  misc_feature (89)..(89): n is a, c, g, or t
  misc_feature (107)..(107): n is a, c, g, or t
  misc_feature (111)..(111): n is a, c, g, or t
  misc_feature (121)..(121): n is a, c, g, or t
  misc_feature (143)..(143): n is a, c, g, or t
  misc_feature (159)..(159): n is a, c, g, or t
  misc_feature (180)..(180): n is a, c, g, or t
  misc_feature (694)..(694): n is a, c, g, or t
  misc_feature (705)..(705): n is a, c, g, or t
acaagcgtaaggagtaaaagtgcgtggtcagtcgatgcaggtgtaangtacgtccagatgcgtgtaaccagnnnntagntagatgnagnaaagtaagagtagtcagntgantaggtcgaanacgagtcccggtcacgagtcgngtgtgtgtcagtccgnaaccgtcagtccgcgagtaancggtgtggtgtagtggaggaggtcgtgcgtgagagtagtccgtgtcccgtgtcagtgtagccaatagccagtaagtgccccaccgtgtagaacagtatgccatgagagcgtttgccgacgcactggaggtcatccccatggccctctctgaaaacagtggcatgaatctccatccagactatgaccgaagtccgagccagacatggtgaatggagatgaaccctgctcttggcatctgactgtttgcacaaggggacaaatgatatgaagcaacagcatgtcatagaaaccttgattggcaaaatagcaacagatatctcttgctactctaatggttagaatgattttgtagatttatttcattcgtaagcctggagaatctgaagaatgaagacattgagaaaactatgtagcaagatccacttctgtgattaagtaaatggatgtctcgtgatgcgtctacagttatttattgttacatccttttccagacactgtagatgctataataaanatagctgtttngtacggagggactgggagcagttccaagaccaccccactcctggtactatatcaactgcttttgtattcattgtattaaaagaatctgtttaaacaa

SEQ ID NO: 575390 - DNA, 368 bp, Homo sapiens
  misc_feature (7)..(7): n is a, c, g, or t
  misc_feature (110)..(110): n is a, c, g, or t
aacgagnccatggcctgaagacccatgtttcccccaaagtgcccttgaagcaaataactggccccggtgcctcctcaaataaaatataaatcggggccccaggccgcggntgtcacgccctgtaatccccagcactttgggaggccaatgtgggcagatcacctaaggtcgggagttcaagaccagcccgaccaatatggtgaaaccctgtctctactgaaaacacaaaattagcctggcatggaggcatgtgcctgtagtcccagctactcaggaggctgaggcaggagaatcgcttgaatccaggaggcggagtttgcagtgagccgagatcgcgccattgcactccagcctgggcaacaggagcg

SEQ ID NO: 575391 - DNA, 559 bp, Homo sapiens
  misc_feature (12)..(12): n is a, c, g, or t
  misc_feature (50)..(50): n is a, c, g, or t
  misc_feature (94)..(94): n is a, c, g, or t
  misc_feature (329)..(329): n is a, c, g, or t
  misc_feature (361)..(361): n is a, c, g, or t
  misc_feature (376)..(376): n is a, c, g, or t
cccacgccggtntggcatagttgggcagggacgctgcccacctcgtctcnagaacgcacggccctgtgcagacgcacgccaagcaggagccctntcccgtcgtcacccctctgttggacactggggcgctgtcccagccggcgggcatgcctgtcttcctccagtgtgagaatgcgcagcccagcggctccttcaagattcccggcattgggcatttcccccaggagatggcccacaagggaggctccagcccgagggctgcctgcccccttccctgacctccgtcgtcgtaattgtgtgcggaggccacaacatccccagccgagagntgcaggctccgcaaacccacctgggccaggtntgaggggtcccatcntggccccaaagacccctgacaggcccatgcacagtcctgtgtttgcaccaggaggcctcagtgctggcagatggcagtggaagctgccctgtgccactgtgccggctgcctcctgaaggaagccctcctggactgcttcttttggctctccgccaactccggccaataaaccctttctgaatt

SEQ ID NO: 575392 - DNA, 174 bp, Homo sapiens
ttcttgtcactctcctacgagaagcattccgtatatccacgatgtccatcggtggcctgtagagagctagcttgattctcctcaggtcatagccttttccttgtttttgaaactgtgcttatagttgatggctgtgttcccactgatcccagatccattgatggaaactgtggc

SEQ ID NO: 575393 - DNA, 456 bp, Homo sapiens
tcccgctctggggcttggcgcatatttgcgcatagtgatgttagtctcatgagtatctggtcatccggagagtatagctgtagccgcgtaccatcggtcttgtctccacttctcggccaatgtgagactgtgctactccttgcttgggcttccactgtgattgggagcttcctgatggtccccggaagctgattctggtttatcgtttcatgtgcatgctacataagtgttcaaccattgaggtcttcttattcttataaattagccaggctcaggctatttcgtggagtagcatgtgctagaactgactagtacgatggtcaactgatttttgaccaggtgtgccatgaccattcaaaggggacagaatagccttcaacaaatgctgctgggacaaactggatagcaccatgcaaaagaacagaagttgtacccttacctcacaccatgatgcag

SEQ ID NO: 575394 - DNA, 171 bp, Homo sapiens
caatgaattattagcttttagtactgcgggagatttttttttttcaagagtaccaatgtgtccggaattggtgggttcttggtctcacttcaacaatgaagctgcggaccctcgtggtgttacagctcttaaggtggcacgtctggagtctgtcccttctgtcgtcttctc

SEQ ID NO: 575395 - DNA, 982 bp, Homo sapiens
  misc_feature (4)..(4): n is a, c, g, or t
  misc_feature (66)..(66): n is a, c, g, or t
  misc_feature (73)..(73): n is a, c, g, or t
  misc_feature (87)..(87): n is a, c, g, or t
  misc_feature (115)..(115): n is a, c, g, or t
  misc_feature (175)..(175): n is a, c, g, or t
  misc_feature (184)..(184): n is a, c, g, or t
  misc_feature (197)..(197): n is a, c, g, or t
  misc_feature (216)..(216): n is a, c, g, or t
  misc_feature (238)..(238): n is a, c, g, or t
  misc_feature (240)..(241): n is a, c, g, or t
  misc_feature (253)..(253): n is a, c, g, or t
  misc_feature (259)..(259): n is a, c, g, or t
  misc_feature (266)..(266): n is a, c, g, or t
  misc_feature (272)..(272): n is a, c, g, or t
  misc_feature (293)..(293): n is a, c, g, or t
  misc_feature (296)..(296): n is a, c, g, or t
  misc_feature (302)..(302): n is a, c, g, or t
  misc_feature (316)..(317): n is a, c, g, or t
  misc_feature (327)..(327): n is a, c, g, or t
  misc_feature (336)..(336): n is a, c, g, or t
  misc_feature (339)..(339): n is a, c, g, or t
  misc_feature (342)..(342): n is a, c, g, or t
  misc_feature (345)..(345): n is a, c, g, or t
  misc_feature (358)..(358): n is a, c, g, or t
  misc_feature (365)..(365): n is a, c, g, or t
  misc_feature (367)..(370): n is a, c, g, or t
  misc_feature (372)..(373): n is a, c, g, or t
  misc_feature (377)..(377): n is a, c, g, or t
  misc_feature (403)..(403): n is a, c, g, or t
  misc_feature (415)..(415): n is a, c, g, or t
  misc_feature (417)..(417): n is a, c, g, or t
  misc_feature (447)..(447): n is a, c, g, or t
  misc_feature (449)..(450): n is a, c, g, or t
  misc_feature (452)..(455): n is a, c, g, or t
  misc_feature (458)..(458): n is a, c, g, or t
  misc_feature (463)..(464): n is a, c, g, or t
  misc_feature (485)..(485): n is a, c, g, or t
  misc_feature (546)..(547): n is a, c, g, or t
  misc_feature (611)..(611): n is a, c, g, or t
  misc_feature (665)..(665): n is a, c, g, or t
  misc_feature (669)..(669): n is a, c, g, or t
  misc_feature (686)..(686): n is a, c, g, or t
  misc_feature (697)..(697): n is a, c, g, or t
  misc_feature (708)..(708): n is a, c, g, or t
  misc_feature (715)..(715): n is a, c, g, or t
  misc_feature (854)..(854): n is a, c, g, or t
  misc_feature (903)..(903): n is a, c, g, or t
  misc_feature (912)..(912): n is a, c, g, or t
  misc_feature (915)..(915): n is a, c, g, or t
  misc_feature (917)..(917): n is a, c, g, or t
  misc_feature (967)..(967): n is a, c, g, or t
tagntatgtttctgaaatatccaaataaatgttttttttttttcttcattcagcaaattagaagtnggggganttttctacacagtngctgctatgagcctgttttttttttccnaattttttctttttttcattcttttttttttctttgccatgggatgtagcaacattaggncaaaaacgngttacatgcattnatacattgtattttacagngttacaataagtgtttgtgatngnntttctcaaaagncacatntctttcntttatntcatggtcagttttgtttgtnacncgtttnctttcaacacttanntatacaaagngcaaatagnttnttnttnaggtaaaatatanggtacgngnnnngnncagngccctgttaattgttaatgagtgtanaaagcagatttnantgcttcttttaattagcttcattagtcatngnncnnnnccncagcnncctccccctccccaagatgtnctctggtggatcttttttcattttctctacagtctcccattagcccaggttcatggcgtgnntgatgttcatattcagtcattttaatacaccaataaatgcgaggaagggcaatcaagactaaanaaggtgcaatggcatggagctggcactggtgctagctacaaaagtgacttgtcnacantagacacatgggatccncctgtgatggncaaatctgggntgaaggnacgcattctgcattactctgaccttttagcagaccttctggtctggcagtagtggattgctctgaagtgaattcaaatggccattgatgagagctgtaggtctatcatgttcacaaaataaactgccattgatgttgtnataccgatctcccgggtccaggcgattccggcaggtagagcatgtatancacttaagntgntncacattgccttgcgccctcatgacgagttcactcgcaggaatcgactgtncgcaagcgctgcaag

SEQ ID NO: 575396 - DNA, 412 bp, Homo sapiens
  misc_feature (65)..(65): n is a, c, g, or t
  misc_feature (116)..(116): n is a, c, g, or t
  misc_feature (151)..(151): n is a, c, g, or t
  misc_feature (168)..(169): n is a, c, g, or t
  misc_feature (172)..(172): n is a, c, g, or t
  misc_feature (256)..(256): n is a, c, g, or t
  misc_feature (311)..(311): n is a, c, g, or t
ccgcccaccatgcccacggagaccctacagacaggtagcatggtgaagcggtcagccccgcgacncttcacctctgctgtgccctgcgcatcctgaacaaggggccagactacttncgcagcaggccgagccaaccccaagaggctcagcncgtggagaggctggagnngcnaacaaggtacgtcaagagccaggaggtgatcaacgccaagcaggagcccgtgaagcccgccgtgctggccaagcccccggtgtncccgctgccaaggcgcactgggcagccccacgctcaaagtgttcggcaaccacgncaagaccgagagcggcgtgcagagggagaacctgaagctggagatcctgaagaacatcatcaatagctccgagggctctagctcgggctcggggcacaagc

SEQ ID NO: 575397 - DNA, 111 bp, Homo sapiens
gagcatgggagagtctagctgcttagctggcatgtggcgcatgagatgcagtgagaccttccctgccatggagagtaggctgcgccccccagccccttcctgacgctcagc

SEQ ID NO: 575398 - DNA, 123 bp, Homo sapiens
acaaattttcccatctgtaatgacgaaattttgattctaaaattttttctattatttataagggcaaattttttaaaaaagtgtccagctttttaaaagtaataaaggtttagcataaatcca

SEQ ID NO: 575399 - DNA, 130 bp, Homo sapiens
ggcctatttcggatcacagagcgaatagcataagcacggcgaaggatcaggtcagttaatgtattgacaccacggtggggggcctcttctcaggctcgcggaacagtgctgaatttcctgtttggagtga

SEQ ID NO: 575400 - DNA, 1283 bp, Homo sapiens
  misc_feature (598)..(598): n is a, c, g, or t
gcccagaactgagccgcgtcacctcagatacacaggtacagtagtccagttgtccatgagaatgcggacgaaacttggaggagcgggcacgagagagcaaagagaattgatggacacccggactctccagcgaagggtgatgacgactcagtacatcatctctgtgccgagcaaaagtaacaagtagttatgcgctggtccaacagtgcccactctgggaggccttgtgttcctggtcgagcatgtggaaagtctaagaggtgacccatattcgtaccctatccactcggttgagcgttacttaggccagaaacagaggaaaagtagcggaataccagaccagaatcgagtcgtgatgcatctttttgaccgtagaacactagccatttcccagagccacctgaaggctcgtaacgttcgtggatcgattcgatacgacgcgatgcgaaggaggccgcatcggacctatggcaagataccgatatgttggagcagcacatggagtcgcacccaaacacggtcgttcgagatccattcgcgatagcggaatctcaagttcaggttacaatagggcgtagcgccattaatcattgagccngcagaacagccaaggcagaaggcatggaacttcccgcgggtcccttcctagtaaagtacgacgcgttatctctaaaaggtgctttggcatgttaggttccctaaccttaggtatccaagataaaccgccacactaacaggaaagttgatcgccccagtaactcttcccaatatcggaaacttgtagaattcctgtgagagcgaacgttaaaacacaagcgccgggcgatccgagggattggataaattatccaaactcgccagaacactttcccctggagattgatacgctggaaacgacacaactttaggcatccgcgtttcggaaagaacccaatattgctctaaagagatgttattgcccccggttgggaaatttaaggaggacggaatctccgggaagttaggcggtagcaacaccccccaaaagagcacagcgccaaaagaggaacaccacccgaataattatttactcaccagcagacagaatccacaagccgaatgtggggagagttaaactcagtgaaccaacagagaaaagggagagatccgaacgctaaaggtgaagcaacgacgacctcttatgcggccacaaagagagagggagcaactttggctcactttcactctaaagcctttggaacagcggaaataggttgtacggaatccgcggaggcgtagagcac

SEQ ID NO: 575401 - DNA, 159 bp, Homo sapiens
tgcagcaggacactgcgtctcagcttttcttaagtacctctccgtctcctgcttggccttgacgtgtccccaatgcagttttcccgtgggtgccctctcacggtccatctttgtgtcgctgactttcccatggtcgtgtaagtgatggtagtgcccggt

SEQ ID NO: 575402 - DNA, 389 bp, Homo sapiens
  misc_feature (134)..(134): n is a, c, g, or t
ggctagcgggtccaccagcaccagtagctatggcaggggcagaagatttttaattaggaaccaaaagctagcaggagaggagagccacaaaagtgacagggaagcttcaggttcaaacaaatttgtaactcaancaagcccaggggggcagggcctagctgctacaaaaaagacatgttttagacaaaaaactcatgtggatgggcaaaaaacccgagggctggatttgtggctaattgtaaaacagggtattttagtttctgttctgtggaaagggtaaagcattccaacaaaggggtttaatgtagatttttttttttgccccccacgctgttgattgctaaaaggaacagtctgatcggggcgctgaaaaaaagtcttttttttta

SEQ ID NO: 575403 - DNA, 1101 bp, Homo sapiens
  misc_feature (32)..(32): n is a, c, g, or t
  misc_feature (62)..(62): n is a, c, g, or t
  misc_feature (78)..(78): n is a, c, g, or t
  misc_feature (111)..(111): n is a, c, g, or t
  misc_feature (126)..(126): n is a, c, g, or t
  misc_feature (135)..(135): n is a, c, g, or t
  misc_feature (139)..(139): n is a, c, g, or t
  misc_feature (154)..(154): n is a, c, g, or t
  misc_feature (158)..(159): n is a, c, g, or t
  misc_feature (162)..(163): n is a, c, g, or t
  misc_feature (165)..(165): n is a, c, g, or t
  misc_feature (172)..(172): n is a, c, g, or t
  misc_feature (185)..(185): n is a, c, g, or t
  misc_feature (198)..(198): n is a, c, g, or t
  misc_feature (202)..(202): n is a, c, g, or t
  misc_feature (209)..(209): n is a, c, g, or t
  misc_feature (211)..(211): n is a, c, g, or t
  misc_feature (216)..(216): n is a, c, g, or t
  misc_feature (222)..(222): n is a, c, g, or t
  misc_feature (228)..(228): n is a, c, g, or t
  misc_feature (232)..(232): n is a, c, g, or t
  misc_feature (234)..(234): n is a, c, g, or t
  misc_feature (241)..(242): n is a, c, g, or t
  misc_feature (253)..(253): n is a, c, g, or t
  misc_feature (257)..(257): n is a, c, g, or t
  misc_feature (263)..(263): n is a, c, g, or t
  misc_feature (284)..(284): n is a, c, g, or t
  misc_feature (301)..(301): n is a, c, g, or t
  misc_feature (312)..(312): n is a, c, g, or t
  misc_feature (320)..(320): n is a, c, g, or t
  misc_feature (388)..(388): n is a, c, g, or t
  misc_feature (406)..(406): n is a, c, g, or t
  misc_feature (414)..(414): n is a, c, g, or t
  misc_feature (441)..(441): n is a, c, g, or t
  misc_feature (467)..(467): n is a, c, g, or t
  misc_feature (519)..(519): n is a, c, g, or t
  misc_feature (744)..(744): n is a, c, g, or t
  misc_feature (878)..(878): n is a, c, g, or t
  misc_feature (890)..(890): n is a, c, g, or t
  misc_feature (1077)..(1077): n is a, c, g, or t
  misc_feature (1080)..(1080): n is a, c, g, or t
  misc_feature (1085)..(1085): n is a, c, g, or t
  misc_feature (1092)..(1092): n is a, c, g, or t
cacagtattgagcagcatcgagggttagcacnaggccacaactggggttgtgtgtgttttcntttggcacattctgcncacatggccacacacaccattgcatcttctgcnacacactgcttttcncagctgtgnaccntcattctggcacttnattnnagnnanatcgtcnttgcactcagttnaggcttcttggcnacanacagcananacacnattttngtttgnatgncnagtttcnnagttcatccanaggnccagcncattgtgtgtctgtgtcatgnccccatgttttcacccnagttgcatgcnatgctctnaggccagccagctgtcttctcctggatgagacagactccagagggtaaggagtagcgccatggtggcntgcagtatgcagagcccngcaggacncagcgtgggcgccattcacaagcttcntctagctttgggcatatgctgtcccntgcaggcacctagggaagccacttgcaactatgcggccttcagacttcctcntcagcacacctggcacactgagacagcatagcctgggtaacaggaacagccacctaaggcaagaatggaacggacacaacttgctcctttctgagcccgtttcccaaaaccccccttcacaggtgcttctaatgggtgttgccatagcagacgctgctaatgcatcacagcattctttgaaatggaaccagacacagcctgcctctcaatcctcagctgggggcncctagcagcctcttgtatttactcagagttgacacatcacacagatcctgtttggcattcctaccttaccggacgtctccagggggtgaccagggaccaggcagagcccccggtaccaaaccagaccaaggctngcagtccaaatngggagggtcccaggtgtcccgtgttggagggctgggatcttgtagggcctgtgcgtcctggctgaggatcaaaccacatatgttattgggagaaacgatttctgttgacgtagatattgaaagaataatgaaggcagaagagaaaaacgaagtgtggaatttggggttgtcctgtgtaaattacacnatnaagcnaaagtcngttattgta

SEQ ID NO: 575404 - DNA, 803 bp, Homo sapiens
  misc_feature (2)..(2): n is a, c, g, or t
  misc_feature (73)..(73): n is a, c, g, or t
  misc_feature (76)..(76): n is a, c, g, or t
  misc_feature (79)..(79): n is a, c, g, or t
  misc_feature (85)..(85): n is a, c, g, or t
  misc_feature (101)..(101): n is a, c, g, or t
  misc_feature (141)..(141): n is a, c, g, or t
  misc_feature (143)..(143): n is a, c, g, or t
  misc_feature (148)..(148): n is a, c, g, or t
  misc_feature (152)..(152): n is a, c, g, or t
  misc_feature (172)..(172): n is a, c, g, or t
  misc_feature (176)..(176): n is a, c, g, or t
  misc_feature (245)..(245): n is a, c, g, or t
  misc_feature (248)..(248): n is a, c, g, or t
  misc_feature (266)..(266): n is a, c, g, or t
  misc_feature (350)..(350): n is a, c, g, or t
  misc_feature (427)..(427): n is a, c, g, or t
  misc_feature (725)..(725): n is a, c, g, or t
  misc_feature (800)..(800): n is a, c, g, or t
angggaggttgatctctctcagggagaactgtggggtggggatgtagcctaaaaaggacccttcaggaagtanganaanggggtnggggagtgtggtaganccagaaacttctggggacgtcagtaatagttactaatatnangaggnagtnggggatgctggccccaaggntgangtatcagttagagcagaacaattggacctagagctggtttttcctttgggtttaggtgttagtcaactnttntcattggcgtggggaccncgcgacacagggttgtcactgtccagccctacacagctgcgggcacacagatggtacacattcccagacagacacataggtagncatgtggctgttcacccatgcccacccacacaatcacgcatacctgttggcatgtgtgttaaccccacatgcccccncccccccatgcctggcagtccacagaactgtttgcttccttttgtcccaggctggggccttgagtgataggcaaggggtctgtgatgggtagatagtgtggttggagacacggatttcttcctgaacaaagtccctcccctacatggtggacatgggatgagacggccttcagttacttcctcttgacccccaggcctgcctgccgcctcatgtaggacaggatgtccatcttgacgttgctgaccgtggtccggtggtgccagcccatgacgggtataccatctggccccaccaggnacttctcaaagttccagcggatgtcgtgaaccttcatgggttcccagaagaggcggtcagatgttcccaggagcnccg

SEQ ID NO: 575405 - DNA, 636 bp, Homo sapiens
ccatttttttcctactcacacccctcacacacacatatttttcccgccccacatattgtctttatctgattgagccaccgcagccccagactctctctcggagtaccaacactttcgaacaccgctgatttcacacactcctcgctgcgcagtgttaaatctcgctccgcgcacctgtagagtaccccccccactctctctgtagataaatagacattaagacgacacccgcgccacagagacactctctgggcgcgcacctctctggcagtgcactttgtcccgccccacacgctatgtgggctctttcatagaaccgcacagcagtggcccgctctttttctctcgcgcaggcggctttcttatagaccccgctcttcaccctcacttcttattccttctcccgctctctttcgctctcgctcgcacgcgggttgatagtatatctctcacgcggcactacatcttcttaaacatctgtgagcacagacacccacgattcttgagcccacatgttccttgaaagagtttatctcctcctctataatattttataaataaggtccgccgctctttttacgcaccttacccacacccccctatcactccccttcttcagcccaacaaataaccaaa

SEQ ID NO: 575406 - DNA, 1412 bp, Homo sapiens
  misc_feature (1245)..(1245): n is a, c, g, or t
gttctaatcctccgggcggtttttttatatatagttaattccggaacttatttttggtttccgcaggctctgaactgatttatttgggcaaaccttttggccaacgaattaagagagcaactagggcgaaaatactcaaagtcgccagcgatgttatgtttctcagctgcaaaatacctttgcagggggcccaaaatattcggttttacgggccactggggaattggggggcactgggttgaggatgggctctggggttattatcccttctcaagcaaactgggacaaaggcttcggaactgtattggctgggctgaattatttggtactatcttctccttgcctcaagaaaatataaaacgcgggtgtcttcccaataatctccccagtcgctgtagacatgttggaaattcccaaatctcccaaatctggtgtccatggcgggcaatatattccagtctttcgcgtcttaagtctttcccgcccacagatctccccaaagggctatagatgtcgtctagaccggaagcggtaaactttcgcgggccagaaaaacagaaagaagagattaaaacccatgtccccccgtgttatgtggggccaccccagaagaaagtgtctttagatgtcccaggtgtggtcttacagaaatgttgtgtcccgtccagagacacagtctctcttttgagaacccgcggtctgaggctctctataaaggtgtgtgtctcactttgtgacaaaaaggttctatagagaatattcccggctacaactcgttatagaactctctccggccaatgtggtctatatacggacaattgtgcgggatatatctccctctcggcccttgtgaaaaaaaaaacccaacccaaaaacgcggggggcactccttgttgccgtagggggggctcaataagacatgtgggattatacccccaggggttttgtctgtgtatccacaacgcgaatagctgggggaacccccaacaaatatggtgtcgccgagaaacaaagagaggtccatcactattcacaaagtctgtgggggacaaaccggattatctctgtgtggggctcccaccccaatgtggttctctttccatatatttctccccaagcggcaatggacagactttgggccaaccattggtattctatatggggttagaagacatatagggagaacacacacaccccacctatatttgtggctgtagctttagcccggggtgacccaaaggaganggtctgctgaaacatcttccacaccctttcggggatttttatcctgttccacaaccaacgcggcgcgcggcaaaaaatactcccctgtggggcccaaaacggggtggcaaacgacgggccccaaagaaacctccagaggggggctatactataattatacccaaagg

SEQ ID NO: 575407 - DNA, 121 bp, Homo sapiens
agctgatatggtgcacaccaccacgcggccaattattttcttcttttctttcgtatagatagggtctttttaagtcagggtcttgctgtgttgcacaggctggagtgcagggtgcaatctg

SEQ ID NO: 575408 - DNA, 579 bp, Homo sapiens
  misc_feature (45)..(45): n is a, c, g, or t
  misc_feature (209)..(209): n is a, c, g, or t
gatcgacgtgagcaacccgcagaccgtgggggtcggccggggctntcaccacctacgagatcagggtcaagacaaatcttcctatcttcaagctgaaggaatctactgttagaagaagatacagtgactttgagtggcttcgaagtgaactagaaagagagagcaaggttgtagttcccccactccctgggaaagcatttttgcggcanttccttttagaggagacgatggaatatttgatgacaatttcatcgaggaaaggaagcaagggctggaacagttcataaacaaggtcgctggtcatcctctggcccagaatgaacgttgtcttcacatgtttttacaggatgaaattatagataaaagctatactccatctaaaataagacatgcctgagtttggtgagaagaagcaaaacccgagaccattaatgattcatccgcaccaatgaagaagttgtaactaactagcatgctgcgcagacactggcatagcatgccctggggtacactaacactcacctgctccccttcggtccgcttgtccttggcagttgacaagacattcggttgccttag

SEQ ID NO: 575409 - DNA, 428 bp, Homo sapiens
tctggctctatcactgctcatctgagtactctggtcacctgctctgtctgagtatccctggtcagctgctctgacctgagtcatcctgagtcacctgttctgtaacccgtcttccccgctaaacaacgcaccccaccactctgactcatacccctgctctctttaaaatagccaattggaattggcttagactgtgtcgtcccaccctagccaataggggaacaacacagcagtaggggctacctgtgtcaggaataagaaccccttcccctcccttgttcagatgtgctctcgccattgctccatccacgaggtgcgcccttctatagaagtaaaattgccttgctgagaaaattaaatttatgttcgagtgctatttcttttgtggcatcaaaaatttatttctaacacagtcattctattcctag

SEQ ID NO: 575410 - DNA, 247 bp, Homo sapiens
ggagctcggtaccgaatctcgacaggtgtgcatatttatagggtacagagtgatatttcagtataggtatacgaagtgtgtaagtgatcaagtcaagataattaggctatacatgacctcaaacatttagcatgtcttggtgtggggaacattcagaatcctcttttctagttgctggggtttttttttggttttttttttggagactctgttccccccaccaaaatagaaggcgggctgggtgaca

SEQ ID NO: 575411 - DNA, 281 bp, Homo sapiens
  misc_feature (126)..(126): n is a, c, g, or t
  misc_feature (153)..(153): n is a, c, g, or t
  misc_feature (155)..(155): n is a, c, g, or t
  misc_feature (193)..(193): n is a, c, g, or t
  misc_feature (219)..(219): n is a, c, g, or t
cgggaaggtgtgggtggatgggtgggggaacaccctcatagaagaaaggggggggggataggatggggaagtccatggataggaaccaggaaaggggatgacatttgacatgtaaatttaaaaaantccaataaaaactcaaataaataattntntatctcttaaaatgccgtcaaatctaaaactcattaancaattggctgttttatttagacaatncttcccaatatgacatgaaattgtgtgttatctgtccaaagcagtgtgggtcttaagagacc

SEQ ID NO: 575412 - DNA, 679 bp, Homo sapiens
  misc_feature (130)..(130): n is a, c, g, or t
caatgtcagtacttctttacacccaaggagaaaatctgttcgcagttgtgtcaattgaagggtcagcttgttcagggtccccgatttgtgctatttccaagatgaatgccgtgatttaccctgatgaacnccgatatcttatctccccactaggtattagcccctatcacctagagtctatacccatattccagtagaatttcccctgatcgcttagagatttttttttctgtcatctgaggatttgcccttctttcccagccagatatatttttaagccattttgatccaccatagaagaaaccatttgtaaataattttagccatgccagtgttgtcccaccattgactctgtcccccgttttttgaaaccaaattctcccaaatgtttcccattctctatagcactggtaaaatgttacattaacttttcttccttctttttgtccataaagccactgctgaccatttaactatgtgcctggagctagaatataaaatttataacatcacggtctttatcttaggtttttaatccattttggatcctttttgtagagaagctcgatattctccactaaatatcgtaatagtatatttgaatctcatcgtgtaaactattgtggtcatgcttataaagtttcttgacttgacctaatccaagactgattatatgcca

SEQ ID NO: 575413 - DNA, 351 bp, Homo sapiens
  misc_feature (42)..(42): n is a, c, g, or t
  misc_feature (83)..(84): n is a, c, g, or t
  misc_feature (110)..(110): n is a, c, g, or t
  misc_feature (131)..(132): n is a, c, g, or t
  misc_feature (214)..(214): n is a, c, g, or t
  misc_feature (282)..(282): n is a, c, g, or t
  misc_feature (289)..(289): n is a, c, g, or t
gttgggcattaccttacggagccagattttctaatttcgtcntcttcctttctctctctctctctgtttttctttttttcttnngagacagagtctcactctgttgcccnggctggagtgcaacggcatgnnctcagctcactgcaacctccacctccgaggatcacttgagtcttggaggcagagtttccagtaagctgagatggtactactntactccagcctaggtgacagagccagagcaagaccctgtctcaaaacaaaacaaaaaaacaagaaagngagaganagcgagagaaagaagaaggaagaaagaaagaagaaagaagaagaagaagaagaaggaagaag

SEQ ID NO: 575414 - DNA, 356 bp, Homo sapiens
gtgcccagccagcagttaaggacccaaacaatctgtgggaaatcctcgaggattggtggccccattcagggcatctctgttgtcgccctaagccaggaggacgctgataaacactaaagcaataccttctgacaccaggcccagcccaggaccctgggagtaccactagtgcagtcctcactagccagacaaccagaagagatctgtgccaacatcatccgagagaagctcctagaacacctgccccaggaggtgccttacactgtacatgagaagacagcagtgagggaggaaggacacggggggagctggatatcaacggagcttctggttgccaagaatctatgtgaaattct

SEQ ID NO: 575415 - DNA, 646 bp, Homo sapiens
tatgctggcttttacctgaaatcccagcacttgggaggccgaggcgagtggatcgcctgagatcgggagttgagaccagcctggcaacatggtaaaatcctgtctctactaaaaatataaaaattagccaggtgtagtggcgcgcgtctgtaatcccagctactcgggaggctgaggcaggagaatggcttgaatccgggaggtggaggttgcagtgagcctaggtcgtgccactgccctccagcctgggtgacagagcgactgcgtctccaaaaaaaacaagggtaaaacttaacaatttaaacaaacttaataattaacccagtatttgggtttactaaaattaaaaggccttggtagaaaaaaaaaaaaaaaaaaaaaaaaaaaaaacttggggggcgggctcggaggcccttcgagaaaagagggttttatagcaacacaatagctcgtatgcgggggggcggggggcgcccaaatgtagaggtcagggagagcacatgggtggcaaacaccggtgggtcccccgaaggagaaaacccgggggcgtacggagaacaacaggggcgctgggggtattccacaccacatgagaaaacacccccccggcggcgggaacccgcagggcggcgtccaggaagaacgc

SEQ ID NO: 575416 - DNA, 115 bp, Homo sapiens
acacaggagaaggttggggtcagtgagcaggccagaggaagaggggcggaaaagcgcaggacaggctgcattggggccaaacacagaatcagcaaagaggaggccatgcgctggt

SEQ ID NO: 575417 - DNA, 387 bp, Homo sapiens
attccatataggtcgacctgcaggcggcgcgaatacactagtgattacagagccatcaagcagtccagtcaacaccagaagagatcatacctacagttaaaatttgcagtagtaactaacggggaagagaacatgtcacatcagaaagtattacaaaagaaggattaaatatatcaagctgtccaaacactataagaccacatagcttaatacagcggccatgcaaacaagcccgcaaaaccaatggagcgggcagaatatgggacaggcctcctccagtcagacgggcacagggcgcaagaagcagcagaggacggcaagggagcgctaggaggtactagctgaaactaaagcctaccgaaccgacgaagagaagacaaaaaacct

SEQ ID NO: 575418 - DNA, 236 bp, Homo sapiens
  misc_feature (42)..(42): n is a, c, g, or t
tagcatctcccacctcagcctcctgagtagctgggactacanggcgcccgcaccatgcgtggctcattttgaagtattttttttgtagaaactgggtcacgctatgctgcccaggttggtcttgaactctgggcttatgcaatcctcccgccttggcctccgaaagcgctgggatcacaggcatgagccgctatgcccagtccctccctgccttgtgttaacatgagtacgactca

SEQ ID NO: 575419 - DNA, 752 bp, Homo sapiens
agacttagactcccacacaataataatgggagactttaacaccccacgtgtcaacattagacagatcaacgagacagaaagttaacaaggatatccaggaactgaattcagctctgcaccaagcggacctaatagacatctacagaactctccagcccaagatcaacagaatatacattcttctcagcaccacaccgcagcttattctaaagattgaccacatagttggaagtaaagcactcctcagcaaatgtaaaagaacagaaattataacaaactgtctctcagaccacagtgcaatcaaactggaactcaggattaagaaactcactcaaaaccactcaagtacatggaacactgaacaacctgctcctgaatgactactaggtacataacgacatgcaggcagaaatcgagatgttctttgaaaccaatgagaacaaagacacaacataccagaatttctgggacacattcaaagcagtgtgtagagggaaactgcatagcactacaatgcctcaagagaaagcaggaaagatctaaaattgacaacctaacatcacaattaaaagaactaagaccaggaagaagctggtcaccttcacaaaagctagcagaaaggccaagaaaatcactaagatcaggagcaaaactggaacggagatagagaccagaaaaaaccattcaaacgaagtcactgaaatccagggagctggtaggtcgaaaagattcaacaaagactgatagaccag

SEQ ID NO: 575420 - DNA, 379 bp, Homo sapiens
cttctgtcaaccttacacgcctttggcacaatgaagtggttaacctttatttgccttctttgtctctttagctctgcttattctaggggtgtgttccgtcgagatgcacacaagagtgaggttgctcatcggtttaaagatttgcgagaagaaaatttcatagccttggtgttgattgcctttgctcagtgtcttcagccgtgtccatttgaagatcatgtttagtgaatgaagtaactgaatctgcagaaacatgtgatgctgatgagtcagctgcaactctttgtgaaatctatggtgtggctgactgctgggcacaaccagaacctgagagcaatgaatgctttttgatcacatagatgacaccgcccctcttctc

SEQ ID NO: 575421 - DNA, 323 bp, Homo sapiens
agtgttgaggtaaagggctaagcatagtggggtatctaatcccagtatgggtacttagctatagtgtgtacagatatgttagggccactttcgtaggtctatttttgtgtcaactggatgtttttacaactcaggtgagtttaagctttatttgggtgaggtgggtgatctaaaacactctttatgccggcttctattgacttgggttaatcgtgtgaccgcgtgtgctggcacgaaattgaacaaccctggggttaggtatagcttagttaaaactttcggtttatagctaaagtgttaatcacttgcatgttacccggtgg

SEQ ID NO: 575422 - DNA, 290 bp, Homo sapiens
gtcatttccagcaccaccgactagactatcctttccaatattacctgttaatgtatcaccaccagttgtaccaataatctctaaacctatcttagggatatctgaagatattatggtctgatccgagaaagtaaacttctcaatgtcatgataagtattaaagaagcccttgatcgtaatcccgtcaccttcgttatagccggatagcttcaggtcagttccttctttctggaactttacctcctcaaacttcacatctgtaaacttgataatgtcatcaccggtcgacg

SEQ ID NO: 575423 - DNA, 185 bp, Homo sapiens
tcctcttcctcccacgtaggctgggattacaggtacacgccactacacctgggtacttttgtattttcagtagagacggtgtttcaccactgtggccaggcgtggtctcaaagctcctgcacttcgttgatcatgcccgacctcgtgccatcccataagtgctgaggattacagcgcgtgggcct

SEQ ID NO: 575424 - DNA, 546 bp, Homo sapiens
agctataccaggaaacagctatttaccaggagcatcggctataccaggaagcagcaattaaccggaaagagagataactctcgcagacatgagataactctcgcatgaatacagccaccctgctaaagttcacataaatcactttcacgtaaagaatgagcaatataaaaattttgaggtagaattctatccaaagtgataaaaaaaaagggacagaataacatcttacacaaaatgaaagcattcatcaggacatgtcattacttgagtgtgaactataacttcaaaatgagctaacagacaattaagaataagatatacggactgaacgaattacataagtcaagccacgataaagtggatcacaactgtaatcccagcactatggaaggccgaggtgggaggatcacttgcactcacgagtttgcagccagccagggcaagcatggcgagacgctgtccccacaacaaaatacaacgaaatagctgggtgtggtggtgcgtgcctgtgatcccagctatgtagggaggctgagaaatggggga

SEQ ID NO: 575425 - DNA, 842 bp, Homo sapiens
  misc_feature (16)..(17): n is a, c, g, or t
  misc_feature (22)..(22): n is a, c, g, or t
  misc_feature (33)..(33): n is a, c, g, or t
  misc_feature (35)..(35): n is a, c, g, or t
  misc_feature (64)..(65): n is a, c, g, or t
  misc_feature (69)..(69): n is a, c, g, or t
  misc_feature (96)..(96): n is a, c, g, or t
  misc_feature (103)..(103): n is a, c, g, or t
  misc_feature (114)..(120): n is a, c, g, or t
  misc_feature (130)..(131): n is a, c, g, or t
  misc_feature (169)..(169): n is a, c, g, or t
  misc_feature (173)..(173): n is a, c, g, or t
  misc_feature (175)..(175): n is a, c, g, or t
  misc_feature (256)..(256): n is a, c, g, or t
  misc_feature (266)..(266): n is a, c, g, or t
  misc_feature (269)..(269): n is a, c, g, or t
  misc_feature (279)..(279): n is a, c, g, or t
  misc_feature (282)..(282): n is a, c, g, or t
  misc_feature (284)..(284): n is a, c, g, or t
  misc_feature (288)..(288): n is a, c, g, or t
  misc_feature (311)..(312): n is a, c, g, or t
  misc_feature (322)..(323): n is a, c, g, or t
  misc_feature (325)..(325): n is a, c, g, or t
  misc_feature (343)..(343): n is a, c, g, or t
  misc_feature (383)..(383): n is a, c, g, or t
  misc_feature (391)..(392): n is a, c, g, or t
  misc_feature (415)..(415): n is a, c, g, or t
  misc_feature (418)..(419): n is a, c, g, or t
  misc_feature (425)..(425): n is a, c, g, or t
  misc_feature (446)..(446): n is a, c, g, or t
  misc_feature (455)..(455): n is a, c, g, or t
  misc_feature (458)..(458): n is a, c, g, or t
  misc_feature (481)..(482): n is a, c, g, or t
  misc_feature (487)..(487): n is a, c, g, or t
  misc_feature (512)..(512): n is a, c, g, or t
  misc_feature (515)..(516): n is a, c, g, or t
  misc_feature (518)..(520): n is a, c, g, or t
  misc_feature (524)..(524): n is a, c, g, or t
  misc_feature (530)..(530): n is a, c, g, or t
  misc_feature (539)..(539): n is a, c, g, or t
  misc_feature (558)..(558): n is a, c, g, or t
  misc_feature (739)..(739): n is a, c, g, or t
  misc_feature (771)..(771): n is a, c, g, or t
  misc_feature (773)..(773): n is a, c, g, or t
  misc_feature (776)..(776): n is a, c, g, or t
  misc_feature (823)..(823): n is a, c, g, or t
ggtgcccgggtgaccnnccccnccctgcaccancncccgtcccgaaccccagccgggcccctgnnagcncccactccagccccggcccggccgagnatcccgnagctcccggcnnnnnnngccggtgtcnngcttgcctcagctcacaggcttttcccgagcgccagtncctncnaggacctccgcagccagcaccttctcttgcgacctttttcttaccctctcattcctccctcgccccttcagccctgtcaantcctccttcntanatggcctccngtntncttncctttccactgattttatttttnngtttccaaannancgtcttgtgatgcctgcnatgcttgcgtaccttgcaggacctgaacccgcggcggganatctcctnntggctggcccagtggttccctanaannccagcnaggtccgtggtggccctgaanaaccccatnaangtggagctggtggcagggaaaanntaaangtggtgtgtgtgtggccgcagcaanaannannncttntgtganggctcccanttcttccaacgcactggcntatctccactcaagttcaaggcccaagagacccgcatggtggcactctgtacctgcaaggccactcagaggcccccgtactgcgatggcacccacaggagtgagcgcgtgcagaaggcagaagtgggctccccactctgagggggctgctgctgtccagccacaggtggccttggctccangcctctgacaggcacccccttctgtgggaaangnaanaggtgctgagcccaagagactctggtacccactgctggctcatgaangaagaattattccttataa

SEQ ID NO: 575426 - DNA, 422 bp, Homo sapiens
ggagtggcagagaagctgccgtgcttgataatcatgtggccacccaaagggagctcctgtcagtgcttaaaaccaaaatcctggcacagttcactgagagaagtccgtgaatcgagcggaagaaatcagttcttgcccccttgtaccccatcctctccatcttcagcttaaggaatcaagcccaggccttgggcacttgtccgggaaccaggggaatggggagggaccttcgcatggcgctgcagttccttcctggtgtccgcgccagtgccttgcctccacctgcacctggagcccatctcttgctgcctgggtgctgagaccttctgccaccccaggggtgaactttgaagcaggtgtcttcaagagcccaggggacactcatattttgaggtgtcaccattttaagcatctttaaaata

SEQ ID NO: 575427 - DNA, 1514 bp, Homo sapiens
  misc_feature (1064)..(1064): n is a, c, g, or t
cgtggtcgctctcatgcgttgttttgtgcttaggattattatgacctgctttgggtgagccacgtggttttttgagagggttcgtgttgccccatggagctatttgggtcggtttctaccgcgttgttgccatgcttacttgggcacaatgttccgtagtgttgcaagtgtagaatctagtgttgtcgtggtgatccgaaaatttgtggcgcccagagtttttgtggaggagattgttgggggttaatctggggtttgtctccccgccgatttgagtgagcgcttgtgaactcctgtgtgtgatattcgttgggtttttgttccccccggggacacgggtcattgtgcctgttgtgttctcttgtatgagtggccccccaaagaggaatgtgtgttgttgcgcatatggttctgtgttccataatctggccccctattaatttctccaaatgtgtgctcacaaagggggtttgggttattttggggttgttgtccatgggggcccaaaataaatgtgtgccgaaagcgcgtttattgtggtggtgggcgttctattttgtctaaaaaagggggaaactgtcgacgcacatccctgggttgtatattgttatagggagaagagattttggcgtgtgaaaccttcgtgaaggtttttaaggtgggtgtgacacatgtgtttgacaaatgagtttttgttcaccccacgttttagttttatacgcactgttgagatttgttccacatggggggttttttctcccccggttaatttgcacccgtgttccccagtgtccctcgtcacatttgtgggggaaattgtattgtttttggaattttatgggggaaacacagggggttaaaaagaatgtgtgagaaagctttatagagttttgaaagagagcttgtgagaaaccacagcgttatacagagagtccacggcgtttcacagctctcgaaactgtcattgcgtttgtgatcaccctcccacacgctcccacagaggagagggtttttgtgggggatattttgagagagagggggacacaggggagaatatctgtgangagagcctctctcttgtccacacctccccactattaaccctcgtttaacacaaagttatgggagaaaaatttataagcgtctcccgcgccctaggccgccgcgtgacacctcacacacacctgtaaatctccgagtacatttttccggggcctccaaggtgggagaggaattgcgcttgagaggccacaccactgggcacaacacatatgtgagaacccccacatttttatcacacaaaaataaacaacacttatagctgggcgcttctgggcacatggtggcacacaacacacccgtatagtcccacactaacttgaaaaggctgaaggcgggaggaatggctttataccacccatagtcaaggctgccgtgagctcatgatcataacccctgcacttaacttggccaccgggcaagaacccgtccccttaaataaatttaaaggaaaa

SEQ ID NO: 575428 - DNA, 166 bp, Homo sapiens
caaggagtgaggagagtctcaggagtatagtgagctcccacctggggtgtggagaattagggtggtagcagcctcaaaaatctcaagagatatggaatagaagcatgaccacaactatgctttccatgctgacgtttctttttactctctctctctcctatttttt

SEQ ID NO: 575429 - DNA, 182 bp, Homo sapiens
tcggccggctgagcaagatcatatctgcccccatggatcactctgacatcagcctccagatgggcacgaacaagtgcgccagccaggtgggcatgacggctcccgggacccggattgcggctggacaggaaggacaccttccaggacacttctggacacatgtaggatcttggactcgtgcc

SEQ ID NO: 575430 - DNA, 268 bp, Homo sapiens
cgcccccccccccctggtggccctttcctttaggttaaccccctttcccttttgggcccttttagggcccccttttggaggttttttcctttccaaccccaggatggccgggtccttcccaaacccgttccccccttggggggtccaggccttggttcccggccctttttccttttgggggtgccggggcctttggggtacaggggcccccaacccccccccccttccaaatttttcccccttggggaattaaaccctttttcgggga

SEQ ID NO: 575431 - DNA, 176 bp, Homo sapiens
atcagaaacagcacaccggcaagcataccaaagatcaggatgatgatgaaagccggagataaaaacgaattgtcgcccatgcggaactcctgacagtcttgcgcagcacagggctgcgatgaggttagcctagcgagcagcctgcttgatcgcgtgaaatgcatggtttgctgcag

SEQ ID NO: 575432 - DNA, 526 bp, Homo sapiens
attgcaccactgcactccagcctgggcgacagagagagactgtcacaaaaaaaaaaaaaaaaaaaaaaaaactttttcgggcgcggcttgggccttggaaaaaggtttttaaacccttccggttgggcccggggccccaggttggtgttaggtgtgacctgtgtggtccataggcgtgttccctggggaagaacccgggggccatgtactaggtggctgtgggatttctctcaccaatttaaaacaagcccggggggacacccggagggttctttgagacaaatctccagagagggcggttctcgaggagcggccattcacggggagactttattacaaagggggaggctcaaaggcaggaggcccggaaatactcaaaattttaacgcccccggtcccgtggggagtcacactaatgaaaaagaagagcaacaaaagacaatacatagaaacgaccaaaacaaacgaacatgacaaacaccaaataaataacacacagacgaagagacagagaaaaacacaaaat

SEQ ID NO: 575433 - DNA, 290 bp, Homo sapiens
ttttaaagggggaaaaaaaaaaaaaaaaggaaccccttgggttccccggggccctttccaaaccctcccccccccgattttggggtttgggttcccgggttgggggtttcccaaggttaagggaaccagacggggccccccccccttagaaggaggggattttttttccccctgggggggccccccccccccttttttttttctttttttggggggattttttttaaaaaaaaaaaaccttttgggacggccatttgccggtttaaaacccaaaaacccccgtttttcca

SEQ ID NO: 575434 - DNA, 149 bp, Homo sapiens
cgggccgcgtcgacggaaaggacaggggacatgcatccctacactgctacagctacaggtcaaagacaccgcacaaaggaaaggacaggggacatgcacccgtacactgctacagctacaggtcaaaggtcgacgcggccgcgaattta

SEQ ID NO: 575435 - DNA, 306 bp, Homo sapiens
ggaacgtatacaggaaacagctgtacagggatatgcgtgacaggaaagtataaaatcgttaaagcagagtaggaggctacatgtaaataagatgcagacactttaacggtaagaaacaaaatctccaaaatagttctcctacctacccaatctgccatattccactttctccaccaatttcaggagtttccgccacatggttcggctccaatgagccagtccttgcagaatccacagacacgaattggatctgtgtttcgtatatcaacagataagttcaattgcttcatggtctacatgcaatca

SEQ ID NO: 575436 - DNA, 163 bp, Homo sapiens
acgctccactcggcacatcaatattggaccctttattgtgaagattgcgctctgtaggtgtagattctcttcccaggtgtccctttactcctcccctagtgtccttaatgtctcctccacatggaacatctatttatggctttgatgtttaataaacgtagaa

SEQ ID NO: 575437 - DNA, 243 bp, Homo sapiens
  misc_feature (69)..(69): n is a, c, g, or t
  misc_feature (77)..(77): n is a, c, g, or t
  misc_feature (231)..(231): n is a, c, g, or t
gagaaatgcagagtgacacttcaatgagatacaattagcacatccaccggattggcaaaattagaaacnaaaaccgnaacaccagcactgaccaagatatggagaaatatggtttggatatttgtcccctgcaaatatcatgttgaaatgtgatccccagtgttggaggtgagggctggtgggaggtgctcgggttatggggatggatatctggatccctcataaatggcntggtgccctgtt

SEQ ID NO: 575438 - DNA, 195 bp, Homo sapiens
agcttgatctcacagcatcaagggatccatcccgcatcagctccccgcagtacgcccggctaacttatatagcatttttagtagggacagagttttcaccatgttggccaggctggtctcgaattcttagactcaagtgatccgccccccttggcctcccaaagtgctggtattacaggcatgggccaccacacc

SEQ ID NO: 575439 - DNA, 425 bp, Homo sapiens
  misc_feature (19)..(19): n is a, c, g, or t
  misc_feature (161)..(161): n is a, c, g, or t
  misc_feature (399)..(399): n is a, c, g, or t
  misc_feature (405)..(405): n is a, c, g, or t
tccctgagcaccatcaacnatgatgagtttcccaccatggtgtttccttctgggcagatcagccaggcctcggcttcgcccggccctccccaagtcctgccccaggtccagccctgcccctgctccagcatggtatcagctctggccaggcccagccaagnttccagtcctagcccaggcctcctcaggctgtggcccacctgcccccaagccaccaggctggggaaggaacgctgtcagaggcctgctgcagtgcagtttgatgatgaagacctgggggcttgttggaacagacagacccatctgtgttacagacctggaatccgtcgacaactccgagttcagagctgtgaaccagggatacctgtggccccaaaaactgagccatgctgatgatanctgagntataatcgctagtaaagggc

SEQ ID NO: 575440 - DNA, 120 bp, Homo sapiens
  misc_feature (59)..(59): n is a, c, g, or t
  misc_feature (62)..(62): n is a, c, g, or t
cctggagaagctattgaagatgatgatgatgattatgatgaagaaggtgaagaagcggntgngggttatcagctctttgaagaagtcaaaagctgcagtaaacttttccaacgttggctg

SEQ ID NO: 575441 - DNA, 766 bp, Homo sapiens
  misc_feature (538)..(538): n is a, c, g, or t
  misc_feature (650)..(650): n is a, c, g, or t
cacctgtggagtggcggccccgctcagggctggcatacgagatggctcagaaacggccctgccctacaggtgccccgcccagggagaaggacagatggagtccccagatgcctcccagacaacgtggctgcccaaaggcaaggctggggaggcaccttggtgcccatggtggcgagcaccccagggggtgaagggcttcccaacggaagcagaatgcagaggccttgccgtgagcccacatgggccagggaaggctttctgagaggctcctgccgccccccatacccatctcatacagagccaccctcacctgtggggtgtgtgccttgaggggagcgtgactcagctgggcctgcacttggaggagcttggggaggttccccaacttctctgggcctcattccctcacctgtgaagtgaagctgatgacggacctgtcttgtggggcacgggaggactgaggtagctacgtaagtgtgttcccagcacccagcactcagtcagcactggaaaagagtagccactaaggtccgggtgngatggctcatgcctataatcccagcactttgggaggctgagggtggatcacttgagcaaacccaagagttcgagaccagcctgggcaacatagcaagaacgtgtaacctgtntacatgaaaaaaaagaatggccaatataaagggaaaagccagtataaaaatgtgggatttggggcactttccccattatgtttaaaacttttttataaaacatgtagtaatttcaa

SEQ ID NO: 575442 - DNA, 488 bp, Homo sapiens
  misc_feature (440)..(440): n is a, c, g, or t
gagacccaactcaggtctggatttataatgaagaccatgaattgattttaaacaacctcctttgccttgacatgtcagaaactcgctcatcggatccaccccgactcatgaagtgccatgggtcaggaggatcccagcagtggacctttgggaagaacaaccggctgtaccaagtgtccgttgggcagtgctgagagttatggacctgatggatcagaagggctacgttggcatggcgatctgcgatggctcctcctctcaacaagtggcgtctagaaggttaaaggtgggccctggctggacacaacataattcaccttggttttgtcatgcctgccataaatcaaggtgctttaaggttgctgactgcagcagacaagaaccttggtggaagggcgaccatctcaggagcgccactgggatttgggtttacttccgangctgctgttaagggattcttgtttatccagggaaacagaaaataattt

SEQ ID NO: 575443 - DNA, 667 bp, Homo sapiens
tttattcgtccagtctttgactcccactaaacctacccatcattagcaagtgccagagaaatcgtcttgcaattgtgcatcttctcctttgacgtaacagttgcaggcaaattgtgcataatgaggctagtcagtgaccatgcaataaaggttacatcttttaagctatgtgatattattattattccagaaacatatttgtgtgtgccacatccacaaaaggttatttgagtcactgtcatcacgttcatgagtaccttgtagcaaacttttaataatgatagatgagtagctctctctacatgacctcacctttttagttgatgttcccagtacatctaacagactagcatataggccatgtgtatgtggtaataaatgaaatggcaggggtctcattgagttatttagacattaagatctgataagacaatttcgaactggagttacacacttccctttagcttctatcagaagctctaagctcacagtgtatcccaggtataagaaattctgttcacaggtttatagtcctccacccgaaatatttggctcccaacctatccccatttcatcatcacccggtatggtcattacaccagaatcaattttgcttcgaggctggtattgttgttttcttccattttattcccatattcctttcctt

SEQ ID NO: 575444 - DNA, 524 bp, Homo sapiens
  misc_feature (228)..(228): n is a, c, g, or t
acaccaaaaaaagttcgattcgcttcttccacatttaccaggcgaaaaagaggaggaaagccagggttaattctcctttatctggaaaattttggatgagttcttgaaaaaaacttgggaacccaaaaggtggtttatccttgtatctctccagggtggattgcccaaaaaattggaaatcatagtcaaagggcttcccttggttcccccctcatttatttggaaccngacttctttttttttcggcttaaaaatttcaattctcgtggtaaacccaaagtaaaaggaaagggtgcctttccccaactcaccccccttggggaggcaaatccgggtgtggaggtgtgggctaaaggtagtgcctgttttattttaaaaagggggcctgccagttgtatctgttgcttttttcaatgattcagggaaacaaatgggcttttctccttccttaaaaaaaaaccccccctctttttaaaattctctgtgggaaaaagcctgccaataaaatgggggtttttgggcca

SEQ ID NO: 575445 - DNA, 102 bp, Homo sapiens
atctagaggatccgtgtactggcacaatcttgtgtcaccacactccacctcctgggttcagcaatattcttgcctcagcctcccgagcagctgggactatag

SEQ ID NO: 575446 - DNA, 335 bp, Homo sapiens
gacatatatccctgagacacagacacaaaaatcctcaacaaaatactagcagattaaatccaacagcacatcaaaaagagaatacattatgatcaggtgggatttatcccagggatgcaaggatggttcaatatatacaaatcaataaatgtgatacatcacataaacagaattaaggacaaaaaccacatgattgtctaaatagatgcagaaaaagcattcaatagcctgggcacagtgacttatatctgtaatccagcacttgagaggacaaggcaagtggatcacttgaggtcagtagttcaagaccagcttggccagcatggtgaaacccc

SEQ ID NO: 575447 - DNA, 258 bp, Homo sapiens
cggcacgagggcaggtcccaagccctgctccgcggggaggcagctgaggcccagcgagaattcgagcgtggcgcgagcgggccggaagtgctgtggtacccggtgcaccctccacagctgctggcccgggtgctaagcccctcactgcccagggccagcggcaccagccggctgctccaagtgcggggcctggtgagcccatgctgagctggaactcgtgctggcccacgagtgccacgcacctctccttccacctca

SEQ ID NO: 575448 - DNA, 337 bp, Homo sapiens
  misc_feature (48)..(48): n is a, c, g, or t
  misc_feature (198)..(198): n is a, c, g, or t
  misc_feature (208)..(208): n is a, c, g, or t
  misc_feature (291)..(291): n is a, c, g, or t
  misc_feature (316)..(316): n is a, c, g, or t
gcattttcagattgagtaatttgatgaataaagaagaagagagaagtnagggggacagggaagccctaagagataatgtcataaccacccccaacacatacagacccccagggctaagtgagggggagctcttactgaactcacaggtagaaagagctgccaggagggctagtggcaggggctgtgtagcagatactncgagggcctncccacagccctggctttgaccatttcggcacaccagcctgacttccagctgcaaagacttgcatttctttgcctcagggtttnttcttaggcagcggactggcttttngcttcaccttacagagcaggc

SEQ ID NO: 575449 - DNA, 83 bp, Homo sapiens
acctgggcaacaaaaaggcccctgtctctgataaaaagaaaaaaaatgaaaaaataaaaatgcccaggtataaaaagaaaaaa

SEQ ID NO: 575450 - DNA, 288 bp, Homo sapiens
ggtcctagcgaggtgcgggagattagcgaggtactcgcttagtgccccgcggttccaggggccaggctgggagcccacagccaccccgctatgccgcaggcccgcctaaccaccgtcaggcagcctatgggacgcagggccccatttgtccctcggtcgccgtgtggccagagtgggtccgtcgtccccaacactcgtgctcgctcagacactttggcaggatgtctggggcctcaccagcaggagcgcgtgcaagccgggcaggcggtccacctagacccacagccc

SEQ ID NO: 575451 - DNA, 436 bp, Homo sapiens
caacaacatgtttaggctgtctacaaattcaagctacaagactgtgtacaaattcattgtgtgtcacaaaaacatttaatactgaaagagattcttattcaaataggcagtgtgtaaatgtggggtctgttaacagttcaaattgcagattcctttccttctttaagttttcattgcaccaccacgaactaaaccatttaacatacctcagaggtctccgggtacctagtctctcagaggcctttggaggcccacgaaggcttatcttaactaaaattggcagggctggctgataaagttaacggaactccccattttggaggcagacttagtaatggtcaaacgaagaaactgttgtggtctgttcttaaaaagctactagtatttagtgcttcacagaggaagtacagacagcaatacatccgagatgaggagg

SEQ ID NO: 575452 - DNA, 171 bp, Homo sapiens
gcctgacattgccaacatgacgacttgctgccatgtcagcttcatcctttcatactgctccctgcctctgtgacaggtgccataaacggataccagccagtcacgctgagggaacagctcagttaccttaagggtgataatttttttaggtttacttgttcggattgctca

SEQ ID NO: 575453 - DNA, 108 bp, Homo sapiens
tttattaagacaaattccaattgttctctggctgtttttttcagttgtgtctagcaaattatttatctgccctttgaaataaaatgtttttgtttataaaaatctctg

SEQ ID NO: 575454 - DNA, 213 bp, Homo sapiens
atccaaacattgattctgctggaaggatttgtctggatgttctaaattgccaccaaaaggtgcttggagaccatccttaacatcgaactgtgttgaccttattcagctgctcatgtcagaacccaacctgatgacccgtcataggctgacatagtaaatatccccatttttctctgcacacatatcctacctcgtctatacgctaactctcct

SEQ ID NO: 575455 - DNA, 325 bp, Homo sapiens
ccatggtggcagccctgggacaaagaacggtgtggctttggctgcctttgcatggaatcttgccccggactccttaagactgcccaaggaatgaggaagatcaggggcaacctgggaactgaataactttcaaagccagtggtcagcttttttgctccggactagggtttacaggttttaattcaaaccagatgcctggactagtttttagaccccaagtcaacctttttgagccccagcttcccgctgggaataatgatgcctgccctatttacctcccagacttgttatgaggataaagtgagatttaactgcccccaagtga

SEQ ID NO: 575456 - DNA, 137 bp, Homo sapiens
caccttcaggcactcagtcagcatgcccagcttgtctgttgctccacctgccgttccatgttccatgggctgtcttgccattttcatcttgtcagcactgcaacagcttgtcttgttgctccagctgcatgttccat

SEQ ID NO: 575457 - DNA, 210 bp, Homo sapiens
ccgagggcgccttcgtcgccgactcgttcccgctctgggccgggctgatggacaccatggaggtggtggacggggccgagccgcgcgtcgcgctcacctgcgagagccgcctcgtcgacctcgagcgcgccgaggtgcgccgctacaccgatgccgaccagcaggccgagtatccgggcgaccgcttcttcgagttcgtccccgccctgc

SEQ ID NO: 575458 - DNA, 148 bp, Homo sapiens
ttaactgccgtcatgttaagtagagtttctaagagcccgaaccgctgaggaagtcttcattggagggtgagcttgaaacacctcatgagagcctaggagccattttgagcaatggggaacgctcacggactctgttgtaatgagagat

SEQ ID NO: 575459 - DNA, 322 bp, Homo sapiens
agaggatcccctggcgaggctctctacctctcactctcctctggtacagtgggagtcgggtgtgttttctggaagggtaggagacagcttcaccttgaacttggaatttctcagcagcggctagtggggctggcggggataaatcttcgagctgggctcccccaaaaactatgtacgtatctgaagcagggctctggtagacatcgggtttggtgatgacaaagaggatattcttagagtccgggatagggactctagtaactccggtaaccggccgaagacccagtggggacatagccttcggtaggtagagagccgggca

SEQ ID NO: 575460 - DNA, 1105 bp, Homo sapiens
gcgcgtccgtcccgcaagcactgagtctcgcctttgccgattcggcgcccgtccacatccgcggtccagctcaccatgtgtatgatgatatcgccgcgctcagtcgtcgacgaatggctccggcgatgtgcgaaggccctgcattcgcggagctgaggatgtccctcacgtggcctgtcttccacgcgtcgcatcgtggggcgcaccctaggcaagcagggcagtgatggtgggcatgggtcaggaaggattcctatagttgtgagccgatttatggcctccaaggagctacacgtacgtatggcatcactctacccctcgcatgtaagcctcgattcggatccacaggcgatcggtcgaccgaagcattggggaacagagcattggaagaagaatcctgggcagcgcaactacctttcgttaacagacttgtaaggcattgactggttgttgtggcataccccaggaagggatggcagcccccctggttggtcatgggccttgaacgccggaaggggtccccccgcccttggaaatcgcccccagatggggccccaatacctgactggaaggaaaggattgaacgcccagggattccaatggtttgtcggacggaaccctttccagaacgaacctccacaagtcctaagttgttaccggttttgcattaattctcgaggggcttggtaggccttagtcccccgttgttaccagcccattcttgagccctgttaacctaacgttgtggccaattcggtctgaatttgggaactccccgggttgaaccggggggtccaaaccctagcaacattgttggcccccacttcttaccggaacgggggttaattgcccccttcccccccattgcgcaattccccttgctgtccttgggaacccttcgggcttgggccccggggacctttgaacttggaacttaccccttcattggaaaggattccctttccaacctggatgtccggctgggtctttacaaggcttttcaagccaaaaccaagcgggtgccgaagccggggggaaaattcccgtgccggttgaaccattcaaccggacgacacgcttgttggcttacgttccggccccttgg

SEQ ID NO: 575461 - DNA, 504 bp, Homo sapiens
aacatagatatagcatttgacaccacacgagaagctctgcaggataatcagacccaattgatcatggaggacctgatcgaagtttgcaacaactcccacagcaagatcatgtacgccagggacgtggatcagagaagctcaacattcaagaagtctctacagatcggaacagagtttcagagacgagcgacagccatgatcctgcgggcgcatgtgcttcgtaaccagatacatgtatagtccccttctaaaaaaaatcagtcaagtgtagctcacacctgccaacagccaaacatgaatgagcaccaacatgtgaagactcgaccagatgcctctcctaggaaagtacacggggccactgccgcatcttaggccccctgtttagaaatcaattatttccccgctgaagagagaaaaatcacaatctaaagactttaagttgggaagaagatctctgttgtctgtattaaagacaagcacaccctgtcgctcaaatgaaaagga

SEQ ID NO: 575462 - DNA, 838 bp, Homo sapiens
gcccaccaagaaaggtagaaaggctgtggatgaggcccacatatgcctattccttcaagtatttaacagaacaagcctgttaaggaactgagagatgaccagtttctcaagatatgcctggctgaagacgaagggctcctcaccactgacatcagcatagatttgaagggagtggaaggctatggcaacgaccagacatatgcgatttttatccaacagttttactaccgagatgcgttcagccaccaggtgcaggagtggacccggaagcgcaccatggccatcgaacgggctttacagcagttcctctatgtgcagatggccaaagaactcaagaacaagctgcctggctgaagccacaggacatactgtcactaaaggcctgtagtcgaaagctctacaatctggtcgagagatggcaccctaccgaccagatcagccaggtggaacgaagatgacgactcaaatggacgagaaccaagggcagggcatacgagatccacggacatcgacataaactcctctgcacagagcatccacccatgacgtcatgccgcacctggctcaaccgggacacggagacgcgaccagcacctaaacatacgacctgaccacataccacaacacaacgggcagaacaccaggcacttggacgaagaaggcaaagaagccggagcacaaacaaccggagaccaaagcacaaagacaaaaggccaaaccgaaaaactagcccaccagcacgaaacagacaggacacaacaaagaaatacaggaccgcccgccacaacagacacacaccagaggaccacacaccacatagaggaacggcaacccacgt

SEQ ID NO: 575463 - DNA, 720 bp, Homo sapiens
atggctaagaacccaaaagcaattacaacaaagacaaaacataaataaatgggacctaattaagaagcttctgcacagcaacagaaataatcatcaaacagacaactcacagaatgagagaaaatatttgtaaactgtgcatctgacaaaggactaatatctagaatctacaaagaactcaagcaaatcagcaaggaaaaaagagaaagacaagtaatcccatcaaaaagtaggcaaatgacatgaactagatatttctcaaaagatgacttacaaatggccaacaaacatgaacaaatgctcaacatcactaattatcagggaaatccaaattaaaaccgcagtgagatagcaccttaccccctcaagaatggacattatttcgaacagttaagaaacaatagatactggaacggacgtggtgaaaggggaacgcttatacagtactggtgggaatgtacatcagtacaggtctatggaaaacagtatggagatgccttaacgagctaaaagtagatctgcacatttgattcaacatttccactgctgggtatctacccaaagggaaagctaaatcacttctattcacaaaaaagacacctatacacattatattaaattgccagcacaaattacacaattacaaaggatagggaaccaacttcagtgaccatccatcacacaatggaaagaaacagaaacaaaaacaacaacaaaaaa

SEQ ID NO: 575464 - DNA, 365 bp, Homo sapiens
  misc_feature (43)..(43): n is a, c, g, or t
  misc_feature (50)..(50): n is a, c, g, or t
caggtccagaaacatgacaagtaggactttcctgcctcttggnaaacagnaggaggaaaggcagcagaagccgcagctctgcgggtctactttcagtgacacagatcctgaattccagcaaaagagctattgccaaccagtttggagaccgcccccccgcctctccccaagaggaactgaatcagcatgaaaatgcagtttcttcatctcaccatcctgtattcttcaaccagtgatcccccacctcggtcactccaactcccttaaaatacctagacctaaacggctcagacaggcagatttgaggtttccccctgtctccttattcggcagccttatgattaaacttccttctctgctgcaaa

SEQ ID NO: 575465 - DNA, 814 bp, Homo sapiens
tcgccaaagcggttaatttgaaagacccggttgaacaaattcccccaagaagcacgcgccctgcagctgtacttattcctttagaatcccccccccctcccctccccccaggggcatggttaatatatctctactccgctccctcacccaaagaagaaagcttggtttgacacaaaccacgcgcccttgttgcccacactccctcacgggataatagaatacctcaaccatcaacctttcctcccccgcgagtcctctcatgcactaactagcgaggaaatatttctctctccccccgcacactgcaagcacctccggagcgccaacccaactcccccacacaggctgcaaccctcgcgtgtgcggggctcagtgagtatgttacagaggacccacgaggtgtatgtagagtacgtgatgcacacacaatagactcgagataattaaaagcaacgcgtgttgtatttagaacacgcacgcccacgaatggttcttcccctaatcgaaccggcctgttgttttttcatcgctgtgtcacacgctgccccatgtgctttgatcacgccccgaggtatgtgttttatgacgcaccaagatatcgtgaggtaaatgtttacgagggtgatgtttcatgattatctgtggcgaggaacacaacatcttgtcacaccgaaaggaaaggagttctctggggcacaaccgcactcaacacacctgcgtagaggaaaaccactattctttgtgtggaaaataacgccccgtcagggagacacagatctcctaacaaaaaagaaaaaaaacgcccacaaaaaca

SEQ ID NO: 575466 - DNA, 1429 bp, Homo sapiens
ccgtctcttgttcctgagtattctctcttctgcggtgcactcttctcctcgtgttgtgcgcacatttgtcactcgttttcacaaaacagcgtgttgctcccgtgtctatctccggcggggttttctctcgcccccccctgttcctcctcctctctcttccggcgccagcatggctttgtagccgccggttttcttgctctcccccgggggtcccttgccctgtttaaacgcaccgcgccgtggtcctacacagcgcgcgtctctcacacacagcgggggcccccgcctgaacgtcccagatcctttccttctttgaggggaccctctgtgattggggggacaacccccgcccattggctcaaaaggccatctcccttgggggtgaaaacccagggggttaccacctttttggtgtgacctggtgagccccatccttgtagggggttttttggggccacccacggaggggttttcccccctcgccccgacctctcttttgagcctctttatagagaaggagctgcccccaaagggccctttttggtggggaccccaaagatttgggccccccgctgtttcccagcaaaaataaattttgtggtgggggttttaaaatttggaagccctttctgttgggagtacacaaacctggcgcccacatagggatattccccccgtgtaaattgtgtaagagggatggtaagggccccctaccggcgttgcctctcgcgggaaactcttggcctccacaaaatttctagtatatgccccaacaggccccggagggagaagaggtcttcccacccacgctcaccccacaacactttgtctacgcccccctctaatatgccacgcgaaaaaggagaaaagatggccaccgcgctatgaaaaaaggtatcatcccgcgcgctttggtagaaaaaaattgaaagagcctctctttggttataaagttatgaagcccacgcgatccccacaaatgagaattttatctcgagccccacactcttattcttttccacgagaaatgtaaccctggagaaaaattttcgcctctttaatatatataggaaaggcccacaaccaccacaaaaaagccttcttccaaacccccacaaaaccctccctcgtaagcactttccacgccggcttgagcccacttagcctcatggtcacccaagaagagttggcgctggtaaaaggaaattgcacgccccccctcgaaagagcacccacttaccaagttctgggggaagccacgttttaacactcacgtgcaccacgctgctgctggtggccctgcacgtgtacgttttcaccctcttaatgcttatagttggaactaaagcacagtttgtaaaactttcactccttttttttgtaaattccccaagctttggaaggagaacccataaatttttgttttcca

SEQ ID NO: 575467 - DNA, 758 bp, Homo sapiens
  misc_feature (44)..(44): n is a, c, g, or t
  misc_feature (63)..(63): n is a, c, g, or t
  misc_feature (116)..(116): n is a, c, g, or t
  misc_feature (125)..(125): n is a, c, g, or t
  misc_feature (129)..(130): n is a, c, g, or t
  misc_feature (166)..(166): n is a, c, g, or t
  misc_feature (169)..(169): n is a, c, g, or t
  misc_feature (185)..(185): n is a, c, g, or t
  misc_feature (189)..(189): n is a, c, g, or t
  misc_feature (194)..(194): n is a, c, g, or t
  misc_feature (198)..(198): n is a, c, g, or t
  misc_feature (228)..(228): n is a, c, g, or t
  misc_feature (230)..(230): n is a, c, g, or t
  misc_feature (236)..(237): n is a, c, g, or t
  misc_feature (243)..(244): n is a, c, g, or t
  misc_feature (248)..(248): n is a, c, g, or t
  misc_feature (255)..(255): n is a, c, g, or t
  misc_feature (259)..(259): n is a, c, g, or t
  misc_feature (271)..(272): n is a, c, g, or t
  misc_feature (275)..(275): n is a, c, g, or t
  misc_feature (282)..(282): n is a, c, g, or t
  misc_feature (299)..(299): n is a, c, g, or t
  misc_feature (302)..(302): n is a, c, g, or t
  misc_feature (307)..(307): n is a, c, g, or t
  misc_feature (313)..(313): n is a, c, g, or t
  misc_feature (328)..(329): n is a, c, g, or t
  misc_feature (335)..(335): n is a, c, g, or t
  misc_feature (345)..(345): n is a, c, g, or t
  misc_feature (347)..(348): n is a, c, g, or t
  misc_feature (350)..(350): n is a, c, g, or t
  misc_feature (356)..(356): n is a, c, g, or t
  misc_feature (360)..(360): n is a, c, g, or t
  misc_feature (362)..(363): n is a, c, g, or t
  misc_feature (369)..(371): n is a, c, g, or t
  misc_feature (384)..(384): n is a, c, g, or t
  misc_feature (393)..(393): n is a, c, g, or t
  misc_feature (410)..(411): n is a, c, g, or t
  misc_feature (413)..(414): n is a, c, g, or t
  misc_feature (416)..(417): n is a, c, g, or t
  misc_feature (420)..(420): n is a, c, g, or t
  misc_feature (453)..(453): n is a, c, g, or t
  misc_feature (459)..(459): n is a, c, g, or t
  misc_feature (475)..(475): n is a, c, g, or t
  misc_feature (487)..(487): n is a, c, g, or t
  misc_feature (548)..(548): n is a, c, g, or t
  misc_feature (560)..(560): n is a, c, g, or t
  misc_feature (569)..(569): n is a, c, g, or t
  misc_feature (579)..(579): n is a, c, g, or t
  misc_feature (589)..(589): n is a, c, g, or t
  misc_feature (591)..(591): n is a, c, g, or t
  misc_feature (633)..(633): n is a, c, g, or t
  misc_feature (644)..(644): n is a, c, g, or t
  misc_feature (647)..(648): n is a, c, g, or t
  misc_feature (670)..(670): n is a, c, g, or t
  misc_feature (744)..(744): n is a, c, g, or t
tttttgttcctcttttttcttttgtcctttttccttcgcctttnctttttgttaatggcagtnttctatgcaatgtgttcagaaagttacatttaaatcgttatttaagggttttnggttgggtntgtnngggcaccattccgccccacacgtttatgtgattttngcnttttcttctgtttttntgtnttttntctnttgttactttgttgtcttcatttttacaancncggccnncccagnncccngcccccntggngggccccggggnnccngcgcccnccttgggtggaccttgnttntttcnttcctntgccaggttttcgtnncgggcngccccccacncnntngttttnttcntnngttttnnntaacccgtctcgngggggcttnttcgcctcgtcctcgcnntnntnntcntcgtattccccttgttcgtcggccgtggcgtcntggttntgttggttttcggtcnctctggtcgttnttgttgctctcggcctcggtgaactccttctcgtccatgccctcgcccgtgtaccagtgcnggagggccttgngccggggcnatggccgtgnactgctcggngntgcgcttgcaccagctcctggctggcgcgtgctgttgcgcgngtggaggtggncgnngtcttcaagccgcggggcgggntgtcgcacacggccgtcttcaagttgttggggttccatccaagaattactgctgttcttgttatgccagttganacactgctcgtccc

SEQ ID NO: 575468 - DNA, 217 bp, Homo sapiens
tgatttctcgggacccgcactgtaggtccccgcaagtcgacgactatctcctagtccagacgccatggggtcatggcacagaaggagaccggcttatcacaagcctgtggggcacgtgaatgttgagaatggggacgaaaaccagaaggcccagttgtcgacttggaccaaagtctttgactggtttggcaatgtccctgcctctggttcaaggcgc

SEQ ID NO: 575469 - DNA, 326 bp, Homo sapiens
tggtccctagtatgctttggagctgtaaggtttagggacaaagcctgacatgcacacatctccttaagaaataccctgcatcgtgagctgggatcgcgccactgcactccagagcctgggcaacagagcgagactccatttcaaaaaaaaaaaaagaaaaatttaaaaacagaaagacaattaggggttgaaagacaaccgcaagagatggtattcacagcagcacaggttggctctggttttgctactagaggatccaggaagaagcccaggtggatttctgctcaaattctgagcactgcgcctatgtctttgaattttccaca

SEQ ID NO: 575470 - DNA, 150 bp, Homo sapiens
  misc_feature (58)..(58): n is a, c, g, or t
  misc_feature (80)..(80): n is a, c, g, or t
  misc_feature (89)..(91): n is a, c, g, or t
gaccatcattgcggtgagcatcagtatgtactgaggaatgaatgagtcatgtgtgaangcttgcttgaatggtcatcagncaagtagannngagaaaagaaagagtcgtgatttattatgcactgaggaaccagaaatgttattgaacag

SEQ ID NO: 575471 - DNA, 274 bp, Homo sapiens
tctccttcaaggacacataggacccaccagataatccaagataactctcttttgttttgttttgttttttgtttgttgttttttgtttttgagactgagtctggctctctcaaccagctgcagtcagtcgtgccttctctgctcactgcaaccctgcctcccggctaaagtgattctcctgcctcagcccccgagtaggtgggattacaggatgaccaccgtctggctaatttgtatatttaagagaatggggttacacgtcgcagctggctta

SEQ ID NO: 575472 - DNA, 351 bp, Homo sapiens
gattttttttaaaatcttcaaacacttcacttagtgaaaaaatgggccaatctggaacagagacattttatttggttagggcaagagtgaaagcaagcatttgttaaccctgacacatttatcagtggacaaaggtttttgcttctggtaatgaattattagaaaaaggaagattttgttcaatggttttggcccccaggttaactgtgtaaatctgcaattttggtggtaaatccccttgccacagattcagtagcttttggtaaacttcactgtttttaaaggaccttttgtgtaaaataaagaaccaatttttaaaacaaaaggcaaataaaaacaggaaaagctgga

SEQ ID NO: 575473 - DNA, 269 bp, Homo sapiens
gccgcgtgctagccactctagccagtctagccactctagccacgtctagccagtctagccagtctggccactctagtcaattgttgcagatgttcctgataactcttctctttctgttccatcatctcctcatgcttctgtggtatttcctccaacatttgcttggcagcgtacggcagattcagccttgatacgttccagttcaatcgctgcttcctttgctgagagtgactgatcagtctgtagaagtgcatcagccagatcctcct

SEQ ID NO: 575474 - DNA, 580 bp, Homo sapiens
  misc_feature (29)..(30): n is a, c, g, or t
  misc_feature (54)..(54): n is a, c, g, or t
  misc_feature (152)..(152): n is a, c, g, or t
  misc_feature (394)..(394): n is a, c, g, or t
aagagagagtgtttatatatgtgcacaannacacacacgcagagacatctgcgngcgcatcgtggtgatatcactcacgatgtgagcacacgtctagacacagagggcacacagagagagatagtgctcatagaagagcgctctcacacgcnctgtgcgtctacgatgtgagagcacgaggcacgagagacacacacaggacgctatcacatcactcttgaagaaggtgttgtgtctctagatatcactgcgatatgaaagatgttctgcacgagtgtactctgagatgtatatagagacgcacgtggtctcgtgcgcgagtgttgtggtcacttctctagaagaagagtctctgtgctcctcgtgctcctgtgtgtggggtgataagatgtanaaaagagagtgtgcgtctgtgagtatcctcctctagacacgcgcatctatattgtgatcatctcctctgcgtttctcagaaagagccccagtatcgcagtataataaacaccacatcttgcacgatgtgtatcgcgtgtcacagggtgtgcgcgtttgtgtgactctgcgtgccagttattcgcta

SEQ ID NO: 575475 - DNA, 139 bp, Homo sapiens
atatggttggtctcacaggagatggtttttcaacaaaccagatatctggtttctcatacctcaaagtggtcggtcataataaaaggaagttacagaattccattcaagggaaagtactggtctttggtgtaagggacat

SEQ ID NO: 575476 - DNA, 453 bp, Homo sapiens
  misc_feature (15)..(15): n is a, c, g, or t
  misc_feature (71)..(71): n is a, c, g, or t
  misc_feature (80)..(80): n is a, c, g, or t
  misc_feature (147)..(147): n is a, c, g, or t
  misc_feature (327)..(327): n is a, c, g, or t
  misc_feature (362)..(363): n is a, c, g, or t
  misc_feature (372)..(372): n is a, c, g, or t
  misc_feature (385)..(385): n is a, c, g, or t
  misc_feature (394)..(394): n is a, c, g, or t
acatctggttggaantcagaaagtactagacctcctcttacctaagaagtgtctatactccatcagcatgnaacgctgtnagacatgtttagctggatctgcccactgtgcactccatcatcagcaaaatgatcattaatgaggagntgatggcctccctggaccagccaacacagacagtggtgatgcaccgcactgagcccactgcccagcagaacctggctctgcagctggccgagaagctgggcaccctggtggagaacaacgaacgggtgtttgaccacaagcagggcactacgggggtctacttccgagaaccagaaggancggtaccgcaaaaacgagggtctacatgcgtccgnnggtgtaacncccagcagcagtnctcagaggncctactgagctctccactctgtttccgcctgggccatccaaccttgaagtcctaaacca

SEQ ID NO: 575477 - DNA, 549 bp, Homo sapiens
  misc_feature (53)..(53): n is a, c, g, or t
  misc_feature (61)..(61): n is a, c, g, or t
ctgggggagacctgggctctaatggatggttaaagatcccccatgtaattgtnaatgggcngcaaatattggttaacaaactgttgatgccaggggtaagccaaactacatctgccagacctctggcctgccgcgcctaatactgcctggagtagtgtgatttttacttttatttttttttttgggatggagtttggctccagcctgggcaacagagtgagactcccatctcaaaaacaaacaaagaaaaagagaaaagcaccaggagacccaatgcagtggctcacaccagtaatcccagcactttgggaggtcgaggcaggcagacgacttgaggccaagagtttgagaccagcctggccaatgtggtgaaaccccatctctactaaaaatacaaaaaattagccagacatgatggcaggagcctgtaatcccagctaatcaggagcctgaggcaagagaatcgcttgaacctgggaggcagaggctgtagtgagccgagattgcaccactgcactccagcctgggtgacagagcgaaactcccgtc

SEQ ID NO: 575478 - DNA, 80 bp, Homo sapiens
ggatttgctggtgcagtacaactaggcttaatagggctcgaattcgagctcgaattcgaggttagaagcttgaattcgag

SEQ ID NO: 575479 - DNA, 1595 bp, Homo sapiens
ggcaagttctcccagtgagaaagccatgttacagattcgagcgccaagatcggtgaagcccaagtggcgagaagccggacgatgttcgacgtccggctatctcccaggcgtctatcgtagtgatgctggacgactgagactctggtacctcaatggctcagtctcaggggagctgaattattacggcaggctacagggaaatctgacagattggtatgcgttggtcggtgcatccagctgatccattaatcgttttgttacctccggtgtccttcgcaacgtatgatagtcctgtatctcgcagcacacaatctcgaatgtctcaggcataagtcaccgcgcgagacttggacagtgaaaacactgtctcagcgtggcgtaaggcagtgtgtcgctgctatcttatcgtcttcagtgagcgcagtgacgattctgcccctagaggccacaactcggacatcgaaagcccgtgtactacaaccaaaattatagggcacagaaacggccgttcactccacgagaaggcccgattagctttccgtagaagctagacatggatgtcaacgggattggcgcaagtacccctttggcaggggaagctctggaggttcctttagccgcatagggcgcggcagaagcttctggatggagggcaccaaaagggaaggcaaacaattccccggacggatacccaacagacgccataaagcaaacttcgcgtcccatggaaccccctgggcctgtccgaagctgaacagcactgaggattaatcgacggtatacgcggggcacccagaataaggtgacgagccgcaaggcccgcagcggacgacacttacgcagcggggcggccggcacaaacgaaacctagagcaagcgggcgtactattggcaacaacaaccccgtttttggctcatattacccatttggggaacgtagggttgccagtttaatttttagaagcgcaaaaacggagccatttccaatgcgtggtggtcggggccaacataaggggggaaaatgttgggttatctaccaaacatactatgtggtcaggaacaatagtttagtagccaccaccgcaacggaaaacgcgtatcgatagaccccaaaaagattatagggctatacaacaacagcggacgcaagtcaaagacgcttggacacgcctcttcatacaacgctttaaagccccttcacaccgggtctaagttttaccttttaagcttttccccaatggcagctacgtgctgtcaagcggactatagaacgacacgtcaacaaacaacacaaggcaatcgaaaacgcaaaaacagtgagcacacagaggcagaagggccacaaacgatcccaccaaaaagcacatcacagagcgaacaacgtgacggcggacgaaaaccaacacgggcgcgacggacgactcaaaccacggacacaacctagctggcgccagcacgacagagaacggagcggcgcacaacagagacgacccgcgggctgcgcaatcacacgccccgatggcaaaacggctccacagaacgaccctatcgtcacacctgcaacggagtcacgaccaacacagagtgacgtgaga

SEQ ID NO: 575480 - DNA, 174 bp, Homo sapiens
cgcttttagaagtacactcgcatgtgaaatgtggaaacgtcgtacagcctacacaccatctatgtctacccacacagacaatcataactgacgtatagcacacacacaagcttcatagcatctcaacttatgggcctatgttcaagattattacattataaggacttttggagg

SEQ ID NO: 575481 - DNA, 290 bp, Homo sapiens
cgggacgaagtgtgccgcaggttatgactcattggtgcggcgacgcttccagcagatggatgtgctggaggggcatcaacctgctcgtcagcatctcatgtaatcagtgacacaagctgggggtgtattacctgtcctggctccgtgaacaagattctgcacaatgacccagtacttggagaagaagcagggcttggaccagcgtgggaggacatggagtggctgcgggcactaccgtgtagtgaactacgagcgtattaagttcctggtcattgccctcaagagctccg

SEQ ID NO: 575482 - DNA, 299 bp, Homo sapiens
  misc_feature (209)..(209): n is a, c, g, or t
  misc_feature (211)..(211): n is a, c, g, or t
tttaaaagaatgacacttctggccaggtgtggtggctcatgctgtggtcccagcactttgagaggctgaggtgggttaatcacttgaggtcaggagttcgagaccagcctggccaacatggtgaaaccctgtctctaccacaaaatacaaaaattggccaggtgtggtggtgcatgcctgtggttccagctacttgggagcctgagggngnacatcgtttgaactcgttgaacccgggaggcagaggttgcagtgagccgagaacgcaccactgcattcgagagtgagactctgtcaga

SEQ ID NO: 575483 - DNA, 149 bp, Homo sapiens
tagcatagtgctgtcctgtgactagaatgatgtaaaatacttcgggcagggcggggtggctcatgcctgtaatcccagccacaatatatacttgtgcagtgcatatattcacaattgcacgtgaatcatattctcaaaataagaagttt

SEQ ID NO: 575484 - DNA, 115 bp, Homo sapiens
cacgaggggggagctgactccattgcatgtgggaccttcagccgtgaactgcacacgccagagaagatgagtcaaggacctacacttttctcttgtggaaatatggaaaatgaca

SEQ ID NO: 575485 - DNA, 101 bp, Homo sapiens
aggagctggatggactggaccccaacaggtttaaccccaagaccttcttcatactgcatgatatcaacagtgatggtgtcctggatgagcaggagccttag

SEQ ID NO: 575486 - DNA, 93 bp, Homo sapiens
gcacgagtacacaatggtgctattctgtgtcaaacaccattgtgtaggataaaacatcaattgatattaaaaatgaaaagattattggaaagt

SEQ ID NO: 575487 - DNA, 341 bp, Homo sapiens
agattagccatggaatagaaagagaaaaatccagagattgaggtgggctttgaggtttcttttccctgaggagggtctacagcttcggcaagatgtagtttagaggttgagtggagctcatgagacacatgtgggtgctcggggcctatattagttgcctgtagctgctgtaacaaatgaacacaaatgtggttgcttaaaacaacagtcatttgttgtctcgcagtcctggaagtcgaaggttggaaacaggtctcactgagctacagtcaaggagttggcagggctgtgttccttttggaggctctagaagagaatgcatctctttgcttgttccgctg

SEQ ID NO: 575488 - DNA, 447 bp, Homo sapiens
agcggagccgcccccaccgcctccgccccaggcaaggccggccggcgccgcggaaagcagcctcggggaaggaggaggaagaggggcaggtgtagggagtgaagaagcaaaaagaggaggaggaagaggagctcagggccgtccccgcgcaattaatgggcggctcctgcgccctggaccggcccgcccgaccaggccctcagaccctgtagccccggcaggggaggaagggcagacccacaggtcaggtatgacgaatcatgttgcagtgacgcaagggaccggcagaagcttcttcagcgatgttcagtatctgcgggacatgcagcctacggtggactctgagtatcaggcttgtcgtgagacgacgggaatatagaagagagcgccagtgagaagaaacgcgactccgttttgggggcaatgacaccagtgttgacgagatcc

SEQ ID NO: 575489 - DNA, 1432 bp, Homo sapiens
taaaaaaaaaccctttttttcccttaaggctttcctacccaaaatttctctttaaacttctcggaggacctctctacttagcccctggggccgtacccatttcttggtgtcagaaattattctaaccaacccgccctcaacacatacgcaagtgtgtgtccgagggtgcgtgcgtgcgtgctccaggaaagaacgcgtagacacccgtggagagcgcgccccctcgaggtgcgcgcgcggagagaagcagcgggtgtgccccgagagagagaggaaccagaacgagtgtggcacaactcagagagagcagcgtattccccccaagagtgtgaggtgtggcccgccacgcgggggccccgagaagaggtgcgaaagagcgaaccccccgtgggaaaactcccccagacacacacactctctctctctttgtgtagaaacaccccagaaggcgctgtgtctcccaaaaacaattctttcaccccgcgcccgtgaaaaaagagacgggcggcacaaaaagagggggcccaaaaaaaatgtaggggcgcaccaaaaatactcgctcccggagttgtgagcccgcgcgaaccaatattctccccccggacgcgcacccgcggccacacaaagtgtgtgtaaacccagaaaagccccccgaaagagacaccaaaaaggtggctcctctgacaccacaacaccgtgtgcgtacagtgaaaacatcccaaaaggcacccaaaaaaacaattaggggagggaacacacgtgaacccacacacggggggcggcaaacaaacaagagacgctcggcgcgaccactgacacccgaaaaaaagaacccactctggggggcagaaaccacacaacacacccatatgggcaaaccccccccaggtcccaaaaaaaaaaaacaaccggagcaatatgggacaaccccgagtcccatcacacacgccgtacacccctggggagacgacaagagaccacaaacaaactccacaacaaaaacacaagaacgccctatgcaagcacacaacagagaacccaacacccccaaagagtttcccaccagagggccccccgcggtccacggccataataaaaccccagcacagtaccccaaagggaagaacacccacaccaggagggaacagcgagaactccaacaaacccgcgcggttacacccccaaacggggggcgcccccaaaaattgtagaaacccccagcgaggaacacccactgacaaaacgagggcaaaaaaaaaacagccaacacaacaaagaaagaaggacaacaacaacaatatgacgagagagaaaatagagacaaccagacacccaaaacaccgtagacaagaccacaagccacaatagcccctgaaacaccccacgcgaaaaaacaacagcagcacacaaacaccacaacaccgataaaagc

SEQ ID NO: 575490 - DNA, 507 bp, Homo sapiens
gcatgttctgcacagatatttgagaacttaaagtataataataataataaagaatatatacttgaaaatgtaacaacaacaacaaaaaatacaaattttagttgtacagctgaaggagttttgacaaggtatattaacacagaatatttacatcaccccagaaattactcatgtgctccctttccggcaaaacgaacttaaaagtaagcgcttttaaaaattccagtccttatagtttaaatttgcctgttcttttcatttataggaatagaatcatacagtatatatgattttgtgtctagcttccttcacttaataaaatatctcagattcatgcatgtttttcaatcagtaatttactactttttgttgcagagtggtattgcattgtatgacaaaaccttaaattattttatcattttatttgttcatgacagttggattattttcactctttgccttttataaaataaagttgataagaatattcttgtacaataaaaaaaa

SEQ ID NO: 575491 - DNA, 498 bp, Homo sapiens
ttcttacagagctcacatctcagacttgatcttcatgagaatgtacttagtttgtcacgctagtaagtcataatctaagacgcaattctgatatatatatataatactatccatggaacagtgtcaacgttcattgagcttcatcttggacacaggattgcctagtaagtctctctccataaagcgcatttacaatttgagaccacttcataagaaacttctattccactttcgtgactgtggccacaattactcttacaggctcaacacctctgccaaagcctcttggtaggtcaacggcgtctcttttcttccttaatttgcgtgtcaacatattcactgtcagatcaagatcttctttttgtcacctcttttccttggcaagctttctgagagataagctccgcttcaaccaattctgcacaatataggctttccagagtgttcccgagtagtgtccgcatctgtacatcacatacacctcactcaatatcagct

SEQ ID NO: 575492 - DNA, 314 bp, Homo sapiens
cactggacgaggagtcagacctagtttctagttattgaagctgggtgaccttggtaagcatctttaagcctcgctttcctcacctttcaaaagggataataatataggcctctttccttgtaggagtgacaaacagcacatgaaaaggaaggacttttgtccaggatgtgatgattgactgttataatcctatggtgtttctgagatggttgcagttgtttatcgtttataggactcattagtgttgtcttattttgtgcctttgggtgtcagtggtttctataccgatgtggggttctgggggccaaacatat

SEQ ID NO: 575493 - DNA, 227 bp, Homo sapiens
tggaaaacagcaataaccacagtacatatacggtagttctctatagtttacatacattcataccataactctgtctctcctctttttggtttccaactttaaaaacaaaaataaaggatgataatcttaacggggtgaaagggagtggaaaaataaatcaaacaaagtgcaacccagtttgggtgagaaaaaaaaaaaacagccgccggaaaaaaaaaaaacaaggg

SEQ ID NO: 575494 - DNA, 406 bp, Homo sapiens
gcaacagtccagtaataaaagcccaccctccactctgcagcagctgcgacgaagaagacaccaggacagacgacgtctaaaaacggacgcgatgaccaggatcacacggtggcaacctctcatggtaccatcaaaaaggcaagaagcatagcccctccaccaagagactaaccaagcaagtggatcaggcaagaagaaagcttcatcaaaagcaaacaaaagaccagaaaatgtctacgctacatcaaccccattattcatgcacactcacttatattccattcgcatggcataatgctagcactccaagtcctagtaggtagcatcaagagcagcaggttcatagcattagctataaacctagacccaagtaacaagggatcccaggcaaccccaatgaatgggg

SEQ ID NO: 575495 - DNA, 1063 bp, Homo sapiens
ttaggctggtgtgtggctgtggtgagtgtgggtgctgcagtgaccccaatgtggtgtggtccctgtgagccagagtggccaattcctgtcccctccagcatgcatgtgcatctgtgtgctgaaccctctgagccctcttgccccacttgccctgcctggggtcccacctgctcgatggacttcgatggtacttggattggggtttgagtgatgcagagtggtgagtgatgtgaatgagtgatggatggaaggagtgatggaatgagtgattgacctgatgttgatgctgccacctgctggaggtgacatgggacaatccccggcggaggaggctggagcatgcctggggccctggccctgaggagttccttgcttgccattggatgccctgatgccctgccccagcccctggccccagaagagtggctggacattactggggaactgggcttgtctgagggaacgaagacgctggtcccagggcctgccaggttcgagccgcccggtcaagggccaggtggtcaccgtacatcttgcagacgtcgctggagaatggcacacgggtgcaggaggagccggagctggtgtcactctgggtgactgtgacgtcatccaggccctggatctcagtgtcccactcatggacgtgggggagacggccatggtcactgctgactccaagtactgctacggacccaaggcagcaggagcccatacattacccccgcaacgcggccatgtgcctgggaggtgccctgaagacggctgtggacgggcctgacctggcacaattgcctcacgggggcacgtagacgcgatggaccctggccaaacgggaaacggagagtgcggcaaaggcccactaacaacggcgggccattttgtcgcagggcccgcccaagtctataagagagctgtgcactcaaggggtataccacgtcagggccacaggtggacgtatagttaggcgcagaatgtagcgaatactagtacgtcaacgttcgtgtttttcacaacgatgtgcctcccgcgagctcgcgaccatatgggagcatactgccca

SEQ ID NO: 575496 - DNA, 744 bp, Homo sapiens
  misc_feature (744)..(744): n is a, c, g, or t
ggagagagaactagtctcgagttttttagatattttttaagggggttaatttggcgtatgggggtcatggcagggggtttaatatggataatggtggtgatgaaattgatggcccctaaaataaaggaaacaccggctaggtgtacgggagaacaatggtaaggtcaacggaggctccacgggtgggagtagtcccgtgcaaagggagggtagacggtcaaccggtacctgctccggcctccactatagcagatgcgagcaggagtaggcgagagggaggtaagaagttcaagaagctatactgctcgatacattgccgggagaaaacgcaccaattcgggggagcacacgaatcaatacagggcacccctagctcagtctgcccaaacgcactcccgaaaatataatgactgggactactacatatgcacacgaagacattattcacaaaatcgccatagcactgtagacaccaaacaaacaaccgttgcgcaaacccgcgcgtaggcaccgacacaaacccccacaaaaaagaggtacccgcccagaagggacatggaagagcccaagcacaccagggcaccagcacaatacaagcgaacagcggctaaagaaagcgtacgtcgcaacacaaaggaaccgcccacaggcccacacacgcgcgcaacgaaagcaacaagaacagcaaaccaaaaaggacgaacaaacgggacaaataacgaaggaaatcgaacagcacgaaan

SEQ ID NO: 575497 - DNA, 142 bp, Homo sapiens
  misc_feature (3)..(3): n is a, c, g, or t
gtngatctagaggaccctcgatcgaggtctctgttcgaaggagtaattaatagatcatttattgggctcaatacagttttctgttaataatcctcacgaaaaataaaatgaaaacttctttttttttccccgcaatggggta

SEQ ID NO: 575498 - DNA, 203 bp, Homo sapiens
taagaaggcatttaccaccacccacggaatcgagaaagagccatcaagtctgtcaagtccgtgtcctgtgtactgggccgcggtgaggtttcccgtgttgatctcaatattagtcccacagtactccacgtccttggtgtctgccctctccgctcacacttccttttaatgtttcgagctattggcaaccattacctccgccc

SEQ ID NO: 575499 - DNA, 887 bp, Homo sapiens
  misc_feature (35)..(35): n is a, c, g, or t
  misc_feature (111)..(111): n is a, c, g, or t
  misc_feature (114)..(116): n is a, c, g, or t
  misc_feature (122)..(122): n is a, c, g, or t
  misc_feature (156)..(156): n is a, c, g, or t
  misc_feature (167)..(167): n is a, c, g, or t
  misc_feature (260)..(260): n is a, c, g, or t
  misc_feature (276)..(276): n is a, c, g, or t
  misc_feature (310)..(310): n is a, c, g, or t
  misc_feature (349)..(349): n is a, c, g, or t
  misc_feature (355)..(355): n is a, c, g, or t
  misc_feature (390)..(391): n is a, c, g, or t
  misc_feature (576)..(576): n is a, c, g, or t
  misc_feature (579)..(579): n is a, c, g, or t
  misc_feature (600)..(600): n is a, c, g, or t
  misc_feature (605)..(605): n is a, c, g, or t
  misc_feature (619)..(619): n is a, c, g, or t
  misc_feature (627)..(627): n is a, c, g, or t
  misc_feature (636)..(636): n is a, c, g, or t
  misc_feature (645)..(645): n is a, c, g, or t
  misc_feature (649)..(649): n is a, c, g, or t
  misc_feature (683)..(683): n is a, c, g, or t
  misc_feature (699)..(699): n is a, c, g, or t
  misc_feature (732)..(732): n is a, c, g, or t
  misc_feature (867)..(867): n is a, c, g, or t
ggcggcggagcgattaacacaaccatgagagccangaacgcccaacgccgccagcggcgagggcgcaacgggagagggcccgccagggcgggcgcagggcagagcccagangcnnncggccnggccagcaggaaccctccccaaggagcaggcacnggggcaggctngggggggcaccagtaaccccaaaggaaatccgggagggatggaacaggacaggattggaggggagggggcggggaaagggggcgcaagaagcngcagcaggaggcgggncggcgccgacggaccggagaaacagagaggaagnaccagggacaccaacacccaggaccaaggaggcacacangaaccntcccaggaaggggaggggggggaacacaggggcgnngaagcacacgccaggcaagccacagaagagcggacccagccggggggcagacacgcacgcagggggacgcaacgggcacaggcacgcacacccgggcgcggcgcgggggacgcggaggccgcggggagaagaaggacggcgcgggcgccggcagaggaggcgtggcaaggcgtggaggggggctngtnacgccggccagcagacaactnttctnagatgctgaagatnctgccatngccgccatngccactgtnggtngagggagttgccatacagatggaggggcagtttncgctcacacccacttnatacagcagcaggcccagcagcaaaagcgagcncaaggcagccagagcaatgcccacagacagcatggcggccagcggcgaggcagggggcaggggcggcggccagcccggccagggtcaggccggtgaccagcagcacgaggccacttagcagcaccacgagggcgntggcccctccaccactgcgc

SEQ ID NO: 575500 - DNA, 152 bp, Homo sapiens
  misc_feature (61)..(61): n is a, c, g, or t
  misc_feature (80)..(80): n is a, c, g, or t
gaaaccaaaaatattcaagcactgccttatacaattttactggggttctattttacccctnctacaagctcagagacttnggagtctcccttcaccatttccgcggcatctacggctcaacattttttgtagccacaggcttccacggactt

SEQ ID NO: 575501 - DNA, 1134 bp, Homo sapiens
gcttctttccgcgccgatagcgctcacgcaagcatggttaacgtccctaaaaatcctgccggcactttctgtcagcacgtgtggcaagcaccaaagcccataacgttgacccagtacacgaagggcacagggattctctgtacgcccagggacaagcgggcgttatgacaggcacgcagagtggctatggtggggcaaaattaaggccgagtttatcctggaaacaaggcttaaaaacatagaaagaagatggtgctaagggcatattgagtgctgttgagccccaaagtgcgaggaatctaaggagaatgctggttattaaaagatgcaagcatttgtggaaactgggggcaggcagcattcaaggacagcagcacaaggtgccaagttgcatcccagtatcctaaaggtggtcaatctttcgaattaatttgcaagcacgattaaaacatctgtgcaggttctcagtgtccaaaaaagagaaacaagaaaaaagaggaggcgagaaaacccgaaggcaacacgtgcgacagcggacggaccgcgaacgcccacaagagacaaaagacaaaagaagaatacccagagagcgcagaagtcgaaagaccgaagccgcccccccgagaaacgagtcacgggagaacacagagggggacacaagacgacggggtaccacacagaggcagacaaccgcacgtgcacaaaagaaaaacacaagagagccttggtgagtactactccaaaaacacaaacaatcggaaagcaagacgccacacgggggggcagcaacaccaagcgagcagaagcgtcaggacaacaacagaacacacagacggagtacgaccaccagaggagagagcaccaaaaacggggaagaaaaaaacaacaaaaagagaagaggtaggcacgcaaagaaatgagacagaccacccgtcgaaataccaacaaacactataaaaggccgccgcgacgcggtggggggccagagacacgcaacgcagacagagctgaaccgccacaacacaaaatcggacagaggcacagaacaccacaatgagaaagcaacaaagaagagaacacgagagacaagaacgaacacggaagcgcaacgacacagccacaagccgaaatagc

SEQ ID NO: 575502 - DNA, 1083 bp, Homo sapiens
ggagtgcacctgtaatcccagctacttggaaggctgaaggcaggagaatcgcttgagcccaggaggtggaggttgcagtgagccgaggtcacgccacttcactccagcctgggcaacagagcaagactctgtctcacaaaaaaaaaaaaaaaaaaaaaaagggagtgtaagcctggaattgggggaccccaaaaaccggtggtggctctcccctaatggggggcttgagctgggacccttatgggtgtaagacacagtcccctttaagctttaagtcttgtggtgtttcctaaaacagggaggcagcgtctttgcactggtacgccacctagcatcgttgggggaattggtcgtggggctacccccttgaacgccagcaaaatttcaaagaggtcgtcattgccaagggccaatgagaccgaacctccgtggggtacttcagctcgcagggtcattccagggcccagggggcctcttttcggatccaggcagggtaatggtatctccttggcacggacggggcgtttttccccttccaggggagtagcggttcccttttgggccggggtgggtcatagacactgttcgttccaggatgttgagggcctatatcggcggggccttcacactctctgcccagggccatatcttaatgggggtagaagctgggtactccagcgtgttcagcacggtcctctttactcttggcccttggctccgtgcagcagggaacgaaagggcgctccttctatatgtgcgtgcacttggttttgggcgctggtatgtagtccagcccccctgtaagtagtgccgggggggtatctccctggattacatgtcgccttagttgcagcgcttaaagccccgcctgcgtgctgatagctgagcgtgcggtctctgtgtcgcatacacgggtgtacggttgtttgggacccacgggttcgcccaccgtgttgctcgggtacccccctgcgcggggggtctccgttgtgccgggccaaccccagtgtgcggtgtggccccctttccggcggtcgcgtctcccggccctcgctgtgcaggtgctggggggcgccactccgt

SEQ ID NO: 575503 - DNA, 143 bp, Homo sapiens
tttttctttttctttcattctttctttccttctttctttctttttttctcttctttacacgttaattctgagcatattcatttctcttctaagtcgtgaagtctctgaaggcataaattagttctaatttttcctggtctcct

SEQ ID NO: 575504 - DNA, 668 bp, Homo sapiens
ctgacgtcaacccaatcaacattatcatagtactttaactataggcaaaatatgtttttaaaataatgagcaagggccgggagccatattgatgccgaacttagtgcggacacccgatcggcatagcgcactacagcccagaactcctgggctcaagcgatcctcccacctcagcctcccaagtagttgggagtacaggtgcacaccaccaggccccagctaatttttgtatttttagtagagatggggttttgccatattgaccaggctggtcttgaactcctgacctcaagtgatgcgcccaccttggcctgccaaagtgctgggattacagacgtgagccactgcacccagctccagccttgaaattcttaatcagatataggttgagtatccattatttgaaatatgagaccagaattgttcatattttggattttttggattttggaatatctgtagtatacagatattccaaaatgctctctagtgagcatttcctttgacatcaaaaagtattagattttggagcatttcagatttcggattttcgtgtgttccttgagacagggtctcgctctgttgccagagtttagtggcataatcacggctcacttcaggctttaacttctgggctcgggtgaacctcctggctcagactcttgagt

SEQ ID NO: 575505 - DNA, 217 bp, Homo sapiens
acacatgaaacaacaccataatgcataagtggcctatttagaacccaagactttgcaaactgatctctcccccgtgaaggagtagagcacattagcaacaatgtacattaatttatggattttcattttcatagttttatttatgtaaataattatcatgatgttatggagcttgcagtatacatgactgtcaaatatagattcttgtactttgtac

SEQ ID NO: 575506 - DNA, 197 bp, Homo sapiens
gattagagtttgccaggccgaatagataatgaggatgtaagtccggtgggctattatcagaatgactgccccggtaaacaacagggggtttggatgagaatggctgttactacgagggctatgtggctgattgaagagtatgcaatgagcgattttaggtctgtttgtcgtaggcagatggagcttgttataattat

SEQ ID NO: 575507 - DNA, 964 bp, Homo sapiens
gtctgtatgaggcgcgatcgaaagagaactgtgatccactgggaacgtactgtgaagtggtgagtctctgaccagggcagctctcattctggacccgtaaccttccatgtatggactaagctgggacaatggcagatggtggtgagatcatatataataatagggtgtatgttgtattcccaatgtgatagttgatgccctgtggttggctcaggagagataagagagtatcagtctcgcacgtcatgcatatggagtcagcgggggaaaagtagatggtgcttgagaatggtgtgaaatggttgccatctcaggagtagatggcccggctcacttctggttatctgtcaacctgagcccatgagctgccttttagggtacagattgcctacttgaggaccttggccgctctgtaagcatctgactcatctcagaaatgtcaattcttaaacactgtggcaacaggacctagaatggctgacgcattaaggttttcttcttgtgtcctgttctataatgttttaaagacctcagtaaccatttcagcctctttccagcaaacccttctccatagtatttcagtcatggaaggatcatttatgcaggtagtcattccaggagtttggtctttctgtctcacggcattgtgtgtttgtccgggactggttgggtggacaacgttagaattgctgaagatcaaccattcagactgtgtgtctgtggaggtcacgaaggggggggaaccttctgggtcttggacttccacctctccatttcattgggtccacggttgccctgactttggagcacgggtgctgccggttgcttggggcttgaggagcacctcggcaaggcctcgcacgccttcccaagcaaagaagagcccagagagaatcattaggaaccccgggggatactcaccgcattctccagggcgacttatagtactttactactttttttg

SEQ ID NO: 575508 - DNA, 337 bp, Homo sapiens
tacagagtgaatgtagagaagagtctcattctgtcacccagactgacgtacagtggagagatcatagctcacggcacagcctccaactcctgggctcaagcagtccgcctgcctcagcctcccaagtagctagaactaaaggcacacaccaccacgcctggctaaatttttaaaatttttttgtagagacagggtcttgccatattgcccaggctggtcttgaactcctgatctcaagtgatcctccacccttggcctcccaaaatgctaggattacaagcatgagccactgtgtcctgcccctgacttcacttttaaaggaaatgtatctcatctt

SEQ ID NO: 575509 - DNA, 708 bp, Homo sapiens
agagctgagtttgaggcgctggatgacccgctgcccttagagagagcgcgctctgctccctgacttagcgctactcaacccagccacacgtaactcaaggacagactcaggtacccagggacaccccctgccttgcctagggacttatgggagtcgaatcgaaccttgttttgggagagttgtagctaggaggagctaacatttggaggctggtgagacagaagcaatcaaactgagagcccaggcctgatgatgttccaggtaaaaagccacgggacacctccattgttgtgcactctgctaatgaggcatgacttctttcggacctgtcttagtattaattattgctttatttttttgaccagataacatacttgcggcatatgtcataaattttcactggaactaagggaggatcactgcatttatggaaaactataggaagatcagataccatgctactacttgatagaactctggcctagcacatacgagaagggacaggtaacggcacgatcatagatgataaggctaaggattgagttgtggaatttggacgcacgttcagacactgcgaaaatcctttgttgacaatagggatacataaatccatgttagtatgcacccggctcctccaaagagggcgttacagtacccgttggttccactattcagaagataccgtcgattgctcacaaagggaataac

SEQ ID NO: 575510 - DNA, 285 bp, Homo sapiens
atggcgggcgcccctcccccagcctcgctgccgccttgcagtttgatctcggactgctgtgctagcaatcagcgagactccgtgggcgtagcaccctccgagccaggtgcgggatataatctggtggtgcaccgttttttaagctggtccgaaaagcgcagtattcgggtgggagtgacccgattttccaggtattctccactggttgaatgcaaatggaagccagaggaaaagggaacccttgacacagttttcatatagattggcctccagggcagacagcag

SEQ ID NO: 575511 - DNA, 353 bp, Homo sapiens
  misc_feature (66)..(66): n is a, c, g, or t
  misc_feature (75)..(75): n is a, c, g, or t
  misc_feature (78)..(78): n is a, c, g, or t
  misc_feature (92)..(92): n is a, c, g, or t
  misc_feature (233)..(233): n is a, c, g, or t
  misc_feature (291)..(291): n is a, c, g, or t
  misc_feature (325)..(325): n is a, c, g, or t
ataaatgtaaagttctaatttttgtttgtagctaaaggttgactcttagggataatatttatattnatagtattnatntatttatttatttngatacggtgtctcactctgtcgcccaggctggagtgcagtggcatgatcttggctccctacatcctccacctcccgggttcaagtgagtcttctgcctcagcctcccgagtagctcggactacaggcacatgccgccacgntcagctaatttttgtatttttatagagacgggggttcaccgtggttggccaggctggnctcgaaatcctgacctttgtgatccgcccacttnggccttccaaagtgctgggattacagtt

SEQ ID NO: 575512 - DNA, 82 bp, Homo sapiens
ctggccgcatcggtatttattctgtgacattttcctcattgaagatattttaacatagattaaaatacatcaatatttcatg

SEQ ID NO: 575513 - DNA, 456 bp, Homo sapiens
  misc_feature (92)..(92): n is a, c, g, or t
  misc_feature (102)..(102): n is a, c, g, or t
  misc_feature (107)..(107): n is a, c, g, or t
  misc_feature (112)..(112): n is a, c, g, or t
  misc_feature (128)..(128): n is a, c, g, or t
ggtccttcccaatgggctcagcacccaaccttgcagatttcattgccattggacgccgtcacaggcaacttgccaatctgagtaaggagttntctgacatanaatanatacnaccgagggtggccaantttttattcaatccaagcggaatcaccaataacctgtgccactcattcaaatttgtcgtaacgaatgttctcagccttcacacccaacttcgaaaacttggcaattgctgcatcaatcatcgcgggcggcccacacaagtaggcctgaacctgcggccaatccaactctagcttgtccagctcatctgtcacgtagccacgcgcaccgttccagcttgaattggcgggttcctctgacaacacctgcttgaagttcagtgagcctcgccagccttgctgaattcgacctatttcctcatcggcatacaagtcgcgctgggtacgggca

SEQ ID NO: 575514 - DNA, 412 bp, Homo sapiens
gaattagtggtaattccagcagtttagtggcataaaatactgatacccccacatgaaaatctcattgccatcaccaatttttgattcagtagtaccaggtagtaacatttacaaacctacaaggagggtcaggtgcggtggctcattcctgtagtcccagcactttgggaggtttaggcatgtggatcgcctagggtcgggagttccagactagcttgaccggcatggagacaatctgtcttttgctgggaatacaaaattggccgggcatgatggtgcatgcccatggttccggctgctctggagggtgaggcggtagaatctcttgaacccggggggcagaggttgcggtgagctgagatcacgccattaaactcctgcctgggcaacaagagtgaaattccatctcaaa

SEQ ID NO: 575515 - DNA, 116 bp, Homo sapiens
taggggggctccccttgcccttccctccctatcactccaaattggggtgggctggaggaggccccagcccagctattgtaaaagcttttttttttagtaaaatatcccgaggttta

SEQ ID NO: 575516 - DNA, 267 bp, Homo sapiens
cacggcggcttgtgcctgtagtcccagcactttgggaggcaagatgggcagatgtcttgaggttaggagtttgagaccagcctggccaacatagggagaccctgtgtctattttttaatttctctttcttttttcttttttttttttggaaacggattctcactctgtcgcccaggctagagtgtgcaggggcgcaatctgggctcaaggcaagctcggcctccggggttcatgacatttctccggcctcatatgtcagtttccggg

SEQ ID NO: 575517 - DNA, 392 bp, Homo sapiens
  misc_feature (46)..(46): n is a, c, g, or t
  misc_feature (91)..(91): n is a, c, g, or t
  misc_feature (185)..(185): n is a, c, g, or t
caaagtttctcagtgcgattccaggggaaagttggaaaccaacatnaaaaaatcaaaaaatacaattcaggatataaatgaaaaattatcntaaaaacaaatatttctttaaaaaacaaaacaaaaaaaaacagaattagtggggcgcaatgactcatgcctgtaattccagcactttgagaggncaaggcaggcagatcatgaggtcaagagatcgagaccatcctggccaacatggtgaaaccccatctctactaaaaatacaaaaattagctgggcatggtggcacacacctctagtcccagctactagggtggctgaggcaggagaatcacttgaacccgggaggcagaggttgcagtgagctaagatcgcgccactgcactctagcc

SEQ ID NO: 575518 - DNA, 430 bp, Homo sapiens
ccgggagcccttaacccttccaagaatagaaaaaagctctatagtacattaccgtagattattaattgtaacctgctaaagtcaacagtcctggccaggcacagggacaggttcacacctgtaatcccagcactccgggaggccgaggccggtggaccacttgaggtcaggagtttcaacacagtgaaaccccgcccctaccaaaaatacaaaaattggctgggtgtggtggcgcgcgcctgtaatcccagctacttgggaggctgaggcaggagaatcgcttgaacccgggaggcagaggctgcagtgagctgagatagcaccactacattccagcctgggcaacagagtgagactctgtctcaaaaaaagaaaaaagaaaagaaacttggaagccatttcagaaagactccaggaaggccagcagcca

SEQ ID NO: 575519 - DNA, 117 bp, Homo sapiens
cccgcggtacagtgcgcaataccaaacgcccctctatcgtctgatccgtcctaagtcacagcactgtcctacactcgtccatatctcgtccctatgtcctaggctgcatggacatca

SEQ ID NO: 575520 - DNA, 407 bp, Homo sapiens
attccaaagcattcaatttggttacccccaggtttttccaagcccttcgctgttaaaagacggtcaggtaattggaatgggaccccctataaggcggattgggtaccgggccccccccccaggtatttttttttttttttttttttttttttttttttttttttttttttttttttttttttttttttttttttttttttttttttttttttttttttttgaattgtattttttattgaaaagaattcaggctgaggtgggaggattacttgagctcaggagtgtgagatcagtctgggcaacaaagagagaccattgtctcaaaataaataaataaataaataaataaataaataaataaataaataaaaatttcaaaggaataaaaatgagaaagtagagctggg

SEQ ID NO: 575521 - DNA, 418 bp, Homo sapiens
  misc_feature (330)..(330): n is a, c, g, or t
ttctcgctacaacagctaaaacgtatgtagcaatttccattacgaattcttctctcggcgactggttacgtggtgcagtgtgccagctaattctaaatactaggagtatcactttgctgatttctaggttaactccacttgggtcaagagcacactccagaggaattcaattcaccgagataagcggaggttttggtcaacgttccatcagcgtgtaaagggggcacacagcctgtcaggggtgggttccctattcttcctgtcaggtgaaatgtgtgaatctggctttgaaatcttcatgctgacttgtgagtacagctgagctgctgngacaaaggcccaccatcccaggccccaagtccttcccttgtgttagcccagggcaggggtcaaacttcacccttcaacaccttcctgg

SEQ ID NO: 575522 - DNA, 469 bp, Homo sapiens
attatatcctgaatggaaaaaaagtacatcagcaggccgtgtgaaatctgaagactgtagattagataacggcactgctatcaatgtagaatgtccttaggtttaggaactacacatagaagtatttagtgctttttcaaagtgccacagtttggatgataaatggtgatggtgtggtctcccttcccagaacccagtgagaacccagccctctccactcccaggctgtggacctgtcaccatcaaccacctcagatggccactcaactcctcaccactgagagggcattcagatgagccaggggctggtatgccctgggacacacaggaccccttgtcagcaccatgccaacctgtgcacccacaaagtgtgtccgttcctctggcaccttgagtccctgataaggtctcagccaggtggggccaccactcagctgtgcccggcagtcagaagtaagagtctcgggac

SEQ ID NO: 575523 - DNA, 631 bp, Homo sapiens
  misc_feature (55)..(55): n is a, c, g, or t
  misc_feature (174)..(174): n is a, c, g, or t
  misc_feature (204)..(204): n is a, c, g, or t
tgttagtaggggtactctaggttgttagtgggtgaattctgttggtggtcagaanctcctaattcgggtgttggtgctaggcttgagtggtagaaagctcaaaagaatccagtgaagaacagaacctcggaaataataaataaaattataccgtatcgtaagcctttttggacnactgatgtgtggtggccttggaaagtgctntctcgaataatgtctcgtcaccattggtatattgtcaaagtattggttaatagtcctagagatagtaagagtatagagttaaagtggaatcatataattaggcctgatgttattaaaagggctgatagggctccggtaagtggtcatgggcttgggtttactatgtggtatgcatgtgtttggtgggtcattatgtattgtcgtgtaggtataagcttactagcagtgtaaacacataagcttggatcagagctactgcaaattcaagaatagttaataggatgaggatagtaaatgtgataaaagctgttatagtgttgatgttgagtagtgctaatgtggcccctccaattagatgaattaataggtgccctgctgtaatgttggctgtcagtcgtacggctagggctactggttgaataaatag

SEQ ID NO: 575524 - DNA, 324 bp, Homo sapiens
ctaattggttcttcgatgacggagggtgacgggcggtgtgtgcgtgcttcatggccttattcaatcaagcactctattcttgatttactgctaaatcctcctttggtttttagtttcataaaaactttcgtatggtgggtattcttatgtagaaaatgtagcccatttctttccaacccataagctacaccttgacctaacgtttttatgtgttatgattgtgcttactattgttcctttttagggtttgctgaagatggcggtatataggctgaattggcaagggcgtcatcgaagaaccaattaggagtaccgagctggaat

SEQ ID NO: 575525 - DNA, 4587 bp, Homo sapiens
  misc_feature (55)..(55): n is a, c, g, or t
  misc_feature (174)..(174): n is a, c, g, or t
  misc_feature (204)..(204): n is a, c, g, or t
  misc_feature (852)..(852): n is a, c, g, or t
  misc_feature (4286)..(4286): n is a, c, g, or t
tgttagtaggggtactctaggttgttagtgggtgaattctgttggtggtcagaanctcctaattcgggtgttggtgctaggcttgagtggtagaaagctcaaaagaatccagtgaagaacagaacctcggaaataataaataaaattataccgtatcgtaagcctttttggacnactgatgtgtggtggccttggaaagtgctntctcgaataatgtctcgtcaccattggtatattgtcaaagtattggttaatagtcctagagatagtaagagtatagagttaaagtggaatcatataattaggcctgatgttattaaaagggctgatagggctccggtaagtggtcatgggcttgggtttactatgtggtatgcatgtgtttggtgggtcattatgtattgtcgtgtaggtataagcttactagcagtgtaaacacataagcttggatcagagctactgcaaattcaagaatagttaataggatgaggatagtaaatgtgataagggtagtgtagataatgggattaattagtatgggaagggtatgaaccaacattttcggggtatgggcccgatagcttagcttagctgaccttactgtagaatgtggtgtattttggtagcacggagaattttgaattctcaggtttaggttcgagtcctattgttctagaaataagagggtttgaacctctattttttactctatcaaagtaactcttttatcagacatatttctatgattgtgggggaatgcttgctgttataatagggagtgagatgtgtcatatacatagagctagtgttaggggcaggaagctttttcatagtaaatgtattagttggtcntatcggaatcgtgggtatgatgctcggattcataggaaggtgattgttaatgcgagtgtttttagtacgaagttgattgtatatagttctgatgtgtgtgggtcgtggaatgctcctaggaagagaattgctgtgaatgcatttattatgatgatgttggcatattctgctatgaagaatatggcgaaaggtccggctgcatattctacgttaaagcctgatacaagttctgactctccttctgtaaggtcgaacggggctcggttggtttctgctagggttgagataaatcatattatggctaggggtcaggatgtaaagattattcaaatgtgctcttgtgttgtgattagggttgatagagtatatgatccatttattaggagtactgatagtaggatgattgctagtgttacttcatatgagattgtttgggctactgctcgtagggccccgatgagtgcgtattttgagttggatgctcatcctgatcataggatagagtagactgctaggcttgacatggctagcatgaatagtactcctagatttatgttgattagagggtagggtattggtagtggaactcatattgttagtgctagggataaggctaggattggtgcaataatgaacatggagattgaggatgtggctggtcgtaggggttctttggtgaatagttttagggcatcggcgatgggttggagtaggccgtaggggcctacaacgttgggtccttttcgtagttgcatataacctagtacttttcgttctactagggtgaggaatgctacggccagtaggataggaatgattaggcttagaatgttaattatgaacatgctattagggagaggagttgaacctctggtaataaaggtttaagttttacgcaattaccggtctctgccaccctaatgtgccctgttctagggctggatttattatgagttaattaggttaagattatatcattaattatctctgagacgcgtttgtgaggttggtcccatttctcttgtcctttcgtactgggagaaatttataatagatagaaaccgacctggattgctccggtctgaactcagatcacgtaggactttaatcgttgaacaaacgaacctttaatagcggttgcaccatttgggtgtcctgatccaacatcgaggtcgtaaaccctattgtcgataggaactctagaataggattgcgctgttatccctagggtaacttgttccgttgatcaaaattttggatcaataagtgatgttatggttattttgactggtttgtctagattaaaatcactcggagggttttttgtactccgaggtcaccccaaccgaaattgctagtccatgttaagttatgttttatccctttgtggttgaattgtttaacttttggaatagttaattaaagctccatagggtcttctcgtcttatttttttattcccgcctcttcacgggaaggtcaatttcactgattggaagtaagagacagtaaaaccctcgtgtggccattcatacaagtccttatttggagaacaagtgattatgctacctttgcacggtcagaataccgcggccgttaaactggtgtcactgggcaggcattgcctctaatactagtaatgctagaggtgatgtttttggtaaacaggcggggtttgtgtttgccgagttccttttacttcttttaatctttccttggtgcactcctgtgttgggttaacaatataattaataaacgctttagtgttgttttggtttattgattgttaattatcagtatattattagttactgatgtaagcgtgtgcgaggagaaaggcttcttgttactcatattaacattattgcttctatgtttcaatagattagtccggtattgggctaggagtttgttattagtttttgggattatgttggtgaatttgttgagctttaacgctttctcaattgatggctgcttttaggcctactatggtagtattaagattttactctctagtcaaggttgtatccgtttctaaaaagctgtacctttttagactatctcttaaaaatacattggaatttagggtttttggggtatttttaaggttgaactaaaattctttctcggacaaccagctatcaccaggctcgttaggcttttcacctctacctacaagtcttctcactattttgccacatagatgagttggttcttttaaactgctcataggtagctcgtctggtttcggggtatctagctaaagttctctttgttagattttttctggttaaaccattatgcaaaaggtagaaggggtaatctttgcttttttttacttttattttattctttcatctttcccttacggtactatctctatagcgtcaggataaaaatttctatctcctatactttaatgttaggtgaatgttttattttattttggtgtatttttgtatttgtttagtatgttgagctagctttggttcaaagtacccatacattgtgggatcttctaggtgtaaactaggtgctttagtttaagctatgctttggtaatccaagcacactttccagtatgcttaccttgttacgacttgtctcttcttgcatggttgtgtaattgaatataggttatttttattactacatgcttgaggagggtgacgggcggtgtgtgcgtgcttcatggccttattcaatcaagcactctattcttgatttactgctaaatcctcctttggtttttagtttcataaaaactttcgtatggtgggtattcttatgtagaaaatgtagcccatttctttccaacccataagctacaccttgacctaacgtttttatgtgttatgattgtgcttactattgttcctttttagggtttgctgaagatggcggtatataggctgaattggcaagggttggtaaggtctatcggggtttatcgattatagaacaggctcctctaggtggatgtgaagcaccgccaagtcctttgagttttaggcagttgcgagtagtactctggcgaatagttttgttatgtaactatttgggtttagggctaggcatagtggggtatctaatcccagtttgggtcctagctatcgtgtgtcaggattattagagtcactttcgtgggttattttattttaactagggctttttacagcttagttataatttaactctattgtggtttttttttcttaaacactctttacgccgtggatctattaatttgggttaatcgtatgaccgcggtggctggcacgagatttaccaactctaattaatataacttagtcaaactttcgttcatggcttaatttttatcactgctgtttcccgtgggggtgtggttgagcaaggcgttatgagctaccgttataggtgtgcttgatacctgctccttttgatctttangatctggagggcattctcaccggggcgcggatacttgcatgtgtaattttattaagaattaatagaaaggccaggaccaaacctgtgtgtttatggggctgtgaggctcatctaggcattttcagtgccttgctttgataatttaagctacattaactataagctatattcagattgtgggcgtatgcttaataggtgcttatattctgggaggttattgtgttgtaattctaaactaatcttgtgctaggtttgtcctccaaatctagggtgatacgtgtgtccgaagtacggcccaggt

SEQ ID NO: 575526 - DNA, 615 bp, Homo sapiens
  misc_feature (382)..(382): n is a, c, g, or t
  misc_feature (558)..(558): n is a, c, g, or t
  misc_feature (607)..(608): n is a, c, g, or t
  misc_feature (610)..(611): n is a, c, g, or t
acacccaaactaatttttgtatttttaatagagacgggatttcgccatattggccaggctggtcttgaactcctgacctcagatgatccacctgcctcggcctccgaaagtgtttggattacaggtgtgagcccggcctgagattatttttttctaaacacttatttaaatcttggaatttgtaaattaacattcattcaatcataatatggagtttataggaaaacagaaatgactcatatttaactaccattctcctctgtctccatttttccttctaaatgttataatgatttttttcttagttgtttactatacatatacacacatatacatatgataagaatttggtgtactcagtgtcatttgacaaagaaaaganttgaggatgtaaaatgagtttgtttcttttggtggagtgagaattttgttataatcaagttagctaataattaagtagaaatattgaaaaagagataaaagactacacattgggtacagtgtacacggcttggatgatggttgcaccagaatcttagaaatcaccactaaagaacngtattcatgtaaccaaatactacccattccccaaaacctattgaagtcnncnntgac

SEQ ID NO: 575527 - DNA, 544 bp, Homo sapiens
  misc_feature (70)..(70): n is a, c, g, or t
ttaagagtatacttggaaccctcggagtcctccatggaccaggaaccagggtggcccatggacttccaancaaaggctccactgtggggctgcttttggggagagactcacagctggacttctctatccgacccatgcaatgttagccagcaacccaattaccccaccaatgctttgccccataaggagataggaaataatgggaacttcacaggaagaaaccagtattggataacatacaccaggcttacaggaggccaggccccaagtaattacccatgagacagaaagcctacagggtgggcgggtgcttttgactggctggggattattgatacattactgatacatcacttcttttataagcatatgtaaaacggagtgctactgaaagtcgaaggacagcttccggggagtcatgaactctttcactatctcatccgtgacctccttgcgccgggcctggtgctctgcgatcaagggctgcagaacctctatgagtgccttcttgagctcaccggtgagcactggtccgctggtgtaa

SEQ ID NO: 575528 - DNA, 4212 bp, Homo sapiens
  misc_feature (76)..(76): n is a, c, g, or t
  misc_feature (477)..(477): n is a, c, g, or t
  misc_feature (3911)..(3911): n is a, c, g, or t
cccctcccgagtcctatctgtcagttgggtccctagttattgattataggtttatttcgaatccgattcagatgantagtcagtgtgagctgattattactagtatggttccggacattactgttatgataagggtagtgtagataatgggattaattagtatgggaagggtatgaaccaacattttcggggtatgggcccgatagcttagcttagctgaccttactgtagaatgtggtgtattttggtagcacggagaattttgaattctcaggtttaggttcgagtcctattgttctagaaataagagggtttgaacctctattttttactctatcaaagtaactcttttatcagacatatttctatgattgtgggggaatgcttgctgttataatagggagtgagatgtgtcatatacatagagctagtgttaggggcaggaagctttttcatagtaaatgtattagttggtcntatcggaatcgtgggtatgatgctcggattcataggaaggtgattgttaatgcgagtgtttttagtacgaagttgattgtatatagttctgatgtgtgtgggtcgtggaatgctcctaggaagagaattgctgtgaatgcatttattatgatgatgttggcatattctgctatgaagaatatggcgaaaggtccggctgcatattctacgttaaagcctgatacaagttctgactctccttctgtaaggtcgaacggggctcggttggtttctgctagggttgagataaatcatattatggctaggggtcaggatgtaaagattattcaaatgtgctcttgtgttgtgattagggttgatagagtatatgatccatttattaggagtactgatagtaggatgattgctagtgttacttcatatgagattgtttgggctactgctcgtagggccccgatgagtgcgtattttgagttggatgctcatcctgatcataggatagagtagactgctaggcttgacatggctagcatgaatagtactcctagatttatgttgattagagggtagggtattggtagtggaactcatattgttagtgctagggataaggctaggattggtgcaataatgaacatggagattgaggatgtggctggtcgtaggggttctttggtgaatagttttagggcatcggcgatgggttggagtaggccgtaggggcctacaacgttgggtccttttcgtagttgcatataacctagtacttttcgttctactagggtgaggaatgctacggccagtaggataggaatgattaggcttagaatgttaattatgaacatgctattagggagaggagttgaacctctggtaataaaggtttaagttttacgcaattaccggtctctgccaccctaatgtgccctgttctagggctggatttattatgagttaattaggttaagattatatcattaattatctctgagacgcgtttgtgaggttggtcccatttctcttgtcctttcgtactgggagaaatttataatagatagaaaccgacctggattgctccggtctgaactcagatcacgtaggactttaatcgttgaacaaacgaacctttaatagcggttgcaccatttgggtgtcctgatccaacatcgaggtcgtaaaccctattgtcgataggaactctagaataggattgcgctgttatccctagggtaacttgttccgttgatcaaaattttggatcaataagtgatgttatggttattttgactggtttgtctagattaaaatcactcggagggttttttgtactccgaggtcaccccaaccgaaattgctagtccatgttaagttatgttttatccctttgtggttgaattgtttaacttttggaatagttaattaaagctccatagggtcttctcgtcttatttttttattcccgcctcttcacgggaaggtcaatttcactgattggaagtaagagacagtaaaaccctcgtgtggccattcatacaagtccttatttggagaacaagtgattatgctacctttgcacggtcagaataccgcggccgttaaactggtgtcactgggcaggcattgcctctaatactagtaatgctagaggtgatgtttttggtaaacaggcggggtttgtgtttgccgagttccttttacttcttttaatctttccttggtgcactcctgtgttgggttaacaatataattaataaacgctttagtgttgttttggtttattgattgttaattatcagtatattattagttactgatgtaagcgtgtgcgaggagaaaggcttcttgttactcatattaacattattgcttctatgtttcaatagattagtccggtattgggctaggagtttgttattagtttttgggattatgttggtgaatttgttgagctttaacgctttctcaattgatggctgcttttaggcctactatggtagtattaagattttactctctagtcaaggttgtatccgtttctaaaaagctgtacctttttagactatctcttaaaaatacattggaatttagggtttttggggtatttttaaggttgaactaaaattctttctcggacaaccagctatcaccaggctcgttaggcttttcacctctacctacaagtcttctcactattttgccacatagatgagttggttcttttaaactgctcataggtagctcgtctggtttcggggtatctagctaaagttctctttgttagattttttctggttaaaccattatgcaaaaggtagaaggggtaatctttgcttttttttacttttattttattctttcatctttcccttacggtactatctctatagcgtcaggataaaaatttctatctcctatactttaatgttaggtgaatgttttattttattttggtgtatttttgtatttgtttagtatgttgagctagctttggttcaaagtacccatacattgtgggatcttctaggtgtaaactaggtgctttagtttaagctatgctttggtaatccaagcacactttccagtatgcttaccttgttacgacttgtctcttcttgcatggttgtgtaattgaatataggttatttttattactacatgcttgaggagggtgacgggcggtgtgtgcgtgcttcatggccttattcaatcaagcactctattcttgatttactgctaaatcctcctttggtttttagtttcataaaaactttcgtatggtgggtattcttatgtagaaaatgtagcccatttctttccaacccataagctacaccttgacctaacgtttttatgtgttatgattgtgcttactattgttcctttttagggtttgctgaagatggcggtatataggctgaattggcaagggttggtaaggtctatcggggtttatcgattatagaacaggctcctctaggtggatgtgaagcaccgccaagtcctttgagttttaggcagttgcgagtagtactctggcgaatagttttgttatgtaactatttgggtttagggctaggcatagtggggtatctaatcccagtttgggtcctagctatcgtgtgtcaggattattagagtcactttcgtgggttattttattttaactagggctttttacagcttagttataatttaactctattgtggtttttttttcttaaacactctttacgccgtggatctattaatttgggttaatcgtatgaccgcggtggctggcacgagatttaccaactctaattaatataacttagtcaaactttcgttcatggcttaatttttatcactgctgtttcccgtgggggtgtggttgagcaaggcgttatgagctaccgttataggtgtgcttgatacctgctccttttgatctttangatctggagggcattctcaccggggcgcggatacttgcatgtgtaattttattaagaattaatagaaaggccaggaccaaacctgtgtgtttatggggctgtgaggctcatctaggcattttcagtgccttgctttgataatttaagctacattaactataagctatattcagattgtgggcgtatgcttaataggtgcttatattctgggaggttattgtgttgtaattctaaactaatcttgtgctaggtttgtcctccaaatctagggtgatacgtgtgtccgaagtacggcccaggt

SEQ ID NO: 575529 - DNA, 1115 bp, Homo sapiens
ggtgtacaccatctttgccatcctggcagtacactgttgtcttaaccaacatggcgttccacatgacggcctggtgggacttcgggaacgaggagctgctcataagcctctcagccttgaggaaatagcgattctgatacccttcattcctgctatggagaggacgcaatgcccatctgaccagaaacaatgattacacgataccatttctggccttcctcgcaccgccaggatcctctcttgggcttacgtgaagatggggcgaagggtaagaacggaagggtgtaggccgaaagctcacgccctagtgctcgctgcgctatctcctctctcagccctcagtatggcgccgtggggtcctccatgacgatcacctttacctgacgaggccccagagagagctgacctcgggcgagagaagcttccacccattgtgctgctacacatagaatagagaaacatttctcgtggcaggttcccaattggacccgacttatatgccaagtgtgtgctcgtggccctcttttaccacgagggccgacggctattcaactatcgggcggccagggatagtcacccgcgtgcaggccgttgtgagctgtgcgtacgccgtgttcaaggcccagcgggttcccatctcttctgctgtgcgaccgcgcggtgggtcgctcgcggctatgggcaccgtgaaccggtttctttgtcactgttgtcccatatcttggccttaggcattctgcacggccgcttgttgtgccccggagcggtctctccccgtgtcggtggaacgtgcggccaccaaggggagttccctgtagagtccccgttgaacttttcgcccatttatgggagttcaggggtgcggtggttgccccctagggggcgttttgtgtaccccctgtttcccccaatttcttgttagccccatcgggatgttgtgccccagtggatgttcttgcgccccggagcggaaatatggctaagacacgtgtaattagcactgtccccaaagagggtggtgctacattaatccaaaggatcagagggtcgggacatccatggactagtattcactccgaagttgtgaaagagtagtggtggttcaccgaaaatcg

SEQ ID NO: 575530 - DNA, 3759 bp, Homo sapiens
  misc_feature (3458)..(3458): n is a, c, g, or t
ggtaggtagggctcatctagaaccagaattaggaataaggattgagaagaaaactcagcaagggtgattgttaatgcgagtgtttttagtacgaagttgattgtatatagttctgatgtgtgtgggtcgtggaatgctcctaggaagagaattgctgtgaatgcatttattatgatgatgttggcatattctgctatgaagaatatggcgaaaggtccggctgcatattctacgttaaagcctgatacaagttctgactctccttctgtaaggtcgaacggggctcggttggtttctgctagggttgagataaatcatattatggctaggggtcaggatgtaaagattattcaaatgtgctcttgtgttgtgattagggttgatagagtatatgatccatttattaggagtactgatagtaggatgattgctagtgttacttcatatgagattgtttgggctactgctcgtagggccccgatgagtgcgtattttgagttggatgctcatcctgatcataggatagagtagactgctaggcttgacatggctagcatgaatagtactcctagatttatgttgattagagggtagggtattggtagtggaactcatattgttagtgctagggataaggctaggattggtgcaataatgaacatggagattgaggatgtggctggtcgtaggggttctttggtgaatagttttagggcatcggcgatgggttggagtaggccgtaggggcctacaacgttgggtccttttcgtagttgcatataacctagtacttttcgttctactagggtgaggaatgctacggccagtaggataggaatgattaggcttagaatgttaattatgaacatgctattagggagaggagttgaacctctggtaataaaggtttaagttttacgcaattaccggtctctgccaccctaatgtgccctgttctagggctggatttattatgagttaattaggttaagattatatcattaattatctctgagacgcgtttgtgaggttggtcccatttctcttgtcctttcgtactgggagaaatttataatagatagaaaccgacctggattgctccggtctgaactcagatcacgtaggactttaatcgttgaacaaacgaacctttaatagcggttgcaccatttgggtgtcctgatccaacatcgaggtcgtaaaccctattgtcgataggaactctagaataggattgcgctgttatccctagggtaacttgttccgttgatcaaaattttggatcaataagtgatgttatggttattttgactggtttgtctagattaaaatcactcggagggttttttgtactccgaggtcaccccaaccgaaattgctagtccatgttaagttatgttttatccctttgtggttgaattgtttaacttttggaatagttaattaaagctccatagggtcttctcgtcttatttttttattcccgcctcttcacgggaaggtcaatttcactgattggaagtaagagacagtaaaaccctcgtgtggccattcatacaagtccttatttggagaacaagtgattatgctacctttgcacggtcagaataccgcggccgttaaactggtgtcactgggcaggcattgcctctaatactagtaatgctagaggtgatgtttttggtaaacaggcggggtttgtgtttgccgagttccttttacttcttttaatctttccttggtgcactcctgtgttgggttaacaatataattaataaacgctttagtgttgttttggtttattgattgttaattatcagtatattattagttactgatgtaagcgtgtgcgaggagaaaggcttcttgttactcatattaacattattgcttctatgtttcaatagattagtccggtattgggctaggagtttgttattagtttttgggattatgttggtgaatttgttgagctttaacgctttctcaattgatggctgcttttaggcctactatggtagtattaagattttactctctagtcaaggttgtatccgtttctaaaaagctgtacctttttagactatctcttaaaaatacattggaatttagggtttttggggtatttttaaggttgaactaaaattctttctcggacaaccagctatcaccaggctcgttaggcttttcacctctacctacaagtcttctcactattttgccacatagatgagttggttcttttaaactgctcataggtagctcgtctggtttcggggtatctagctaaagttctctttgttagattttttctggttaaaccattatgcaaaaggtagaaggggtaatctttgcttttttttacttttattttattctttcatctttcccttacggtactatctctatagcgtcaggataaaaatttctatctcctatactttaatgttaggtgaatgttttattttattttggtgtatttttgtatttgtttagtatgttgagctagctttggttcaaagtacccatacattgtgggatcttctaggtgtaaactaggtgctttagtttaagctatgctttggtaatccaagcacactttccagtatgcttaccttgttacgacttgtctcttcttgcatggttgtgtaattgaatataggttatttttattactacatgcttgaggagggtgacgggcggtgtgtgcgtgcttcatggccttattcaatcaagcactctattcttgatttactgctaaatcctcctttggtttttagtttcataaaaactttcgtatggtgggtattcttatgtagaaaatgtagcccatttctttccaacccataagctacaccttgacctaacgtttttatgtgttatgattgtgcttactattgttcctttttagggtttgctgaagatggcggtatataggctgaattggcaagggttggtaaggtctatcggggtttatcgattatagaacaggctcctctaggtggatgtgaagcaccgccaagtcctttgagttttaggcagttgcgagtagtactctggcgaatagttttgttatgtaactatttgggtttagggctaggcatagtggggtatctaatcccagtttgggtcctagctatcgtgtgtcaggattattagagtcactttcgtgggttattttattttaactagggctttttacagcttagttataatttaactctattgtggtttttttttcttaaacactctttacgccgtggatctattaatttgggttaatcgtatgaccgcggtggctggcacgagatttaccaactctaattaatataacttagtcaaactttcgttcatggcttaatttttatcactgctgtttcccgtgggggtgtggttgagcaaggcgttatgagctaccgttataggtgtgcttgatacctgctccttttgatctttangatctggagggcattctcaccggggcgcggatacttgcatgtgtaattttattaagaattaatagaaaggccaggaccaaacctgtgtgtttatggggctgtgaggctcatctaggcattttcagtgccttgctttgataatttaagctacattaactataagctatattcagattgtgggcgtatgcttaataggtgcttatattctgggaggttattgtgttgtaattctaaactaatcttgtgctaggtttgtcctccaaatctagggtgatacgtgtgtccgaagtacggcccaggt

SEQ ID NO: 575531 - DNA, 103 bp, Homo sapiens
tggatcccctcccaagaatgaggaactgaaaactgttccatcaagcagtacactcatttatataccatgttgggtgctcatgactcatggaataatcgaattt

SEQ ID NO: 575532 - DNA, 719 bp, Homo sapiens
cgcgtttaagataaaacactctcgatgggaaatttgtagcaaaacggtttataatgcgaagcgcgtgttctttcagagctttcaaaatcggaaaacaaggggtagaacagtcttaggatcgtgaaaagttgattataaagacagcctaattctatttgtgtcataacaaagttggggcatgccttattctccttaaggccaagacagggtaatgtcccacaaacacttggtgactcaacagtacttagcaaatgcttaaagagctgcctggcgttcccttccgtttacgtaagcgtcatgcacaataacccgtgtatatgaagacattctaatatgtatagtcacaccgtgacacttttggcaattaggatcctagtgaggagcatgggcggtcgtggaacttctctctggtatgataggatttagttaggtaattcagctgtggatcactcggcttctctcacaaaaaaccaagtataccctggatttgttagaggcgacaacagtgcagatgttcttggtcatttaagcttagattttgagcgtatgagtccttagcagagtggttggcatacatatgtaatttatatgaatgcaatcggctcttgcaccagtatcagtatgttaaagagaatacgcacctgtctgggagaaaaacagttaaagacttgatgtattaaacaagcggataaatagtagaaaaagctaataaaattaaa

SEQ ID NO: 575533 - DNA, 393 bp, Homo sapiens
aaggatctctgcacacggttgggtcaagactacatagcctacaacttgctatgcccgttccctcccacacatctctaatgcgaatgacacactgattaacacctgtatgggaacggcaggctcacaggtttaagcattggtttctactacaaggagtgggatatggaggtggtcaagtcttacgggtaatatcaacattctctctagatcgcagggggtcagtctggctgactcgaccatacgtctgtgtaccacataagggatacattagtaaagtagggaaagggttatatgtgtggctggcctgttctttagagaggaaggtgggatggtatctgctgtgtacctgtctcagaccaaacctggggctggaccagtggccctttcttctca

SEQ ID NO: 575534 - DNA, 3687 bp, Homo sapiens
  misc_feature (3386)..(3386): n is a, c, g, or t
gggtcaggatgtaaagattattcaaatgtgctcttgtgttgtgattagggtgggtcgtggaatgctcctaggaagagaattgctgtgaatgcatttattatgatgatgttggcatattctgctatgaagaatatggcgaaaggtccggctgcatattctacgttaaagcctgatacaagttctgactctccttctgtaaggtcgaacggggctcggttggtttctgctagggttgagataaatcatattatggctaggggtcaggatgtaaagattattcaaatgtgctcttgtgttgtgattagggttgatagagtatatgatccatttattaggagtactgatagtaggatgattgctagtgttacttcatatgagattgtttgggctactgctcgtagggccccgatgagtgcgtattttgagttggatgctcatcctgatcataggatagagtagactgctaggcttgacatggctagcatgaatagtactcctagatttatgttgattagagggtagggtattggtagtggaactcatattgttagtgctagggataaggctaggattggtgcaataatgaacatggagattgaggatgtggctggtcgtaggggttctttggtgaatagttttagggcatcggcgatgggttggagtaggccgtaggggcctacaacgttgggtccttttcgtagttgcatataacctagtacttttcgttctactagggtgaggaatgctacggccagtaggataggaatgattaggcttagaatgttaattatgaacatgctattagggagaggagttgaacctctggtaataaaggtttaagttttacgcaattaccggtctctgccaccctaatgtgccctgttctagggctggatttattatgagttaattaggttaagattatatcattaattatctctgagacgcgtttgtgaggttggtcccatttctcttgtcctttcgtactgggagaaatttataatagatagaaaccgacctggattgctccggtctgaactcagatcacgtaggactttaatcgttgaacaaacgaacctttaatagcggttgcaccatttgggtgtcctgatccaacatcgaggtcgtaaaccctattgtcgataggaactctagaataggattgcgctgttatccctagggtaacttgttccgttgatcaaaattttggatcaataagtgatgttatggttattttgactggtttgtctagattaaaatcactcggagggttttttgtactccgaggtcaccccaaccgaaattgctagtccatgttaagttatgttttatccctttgtggttgaattgtttaacttttggaatagttaattaaagctccatagggtcttctcgtcttatttttttattcccgcctcttcacgggaaggtcaatttcactgattggaagtaagagacagtaaaaccctcgtgtggccattcatacaagtccttatttggagaacaagtgattatgctacctttgcacggtcagaataccgcggccgttaaactggtgtcactgggcaggcattgcctctaatactagtaatgctagaggtgatgtttttggtaaacaggcggggtttgtgtttgccgagttccttttacttcttttaatctttccttggtgcactcctgtgttgggttaacaatataattaataaacgctttagtgttgttttggtttattgattgttaattatcagtatattattagttactgatgtaagcgtgtgcgaggagaaaggcttcttgttactcatattaacattattgcttctatgtttcaatagattagtccggtattgggctaggagtttgttattagtttttgggattatgttggtgaatttgttgagctttaacgctttctcaattgatggctgcttttaggcctactatggtagtattaagattttactctctagtcaaggttgtatccgtttctaaaaagctgtacctttttagactatctcttaaaaatacattggaatttagggtttttggggtatttttaaggttgaactaaaattctttctcggacaaccagctatcaccaggctcgttaggcttttcacctctacctacaagtcttctcactattttgccacatagatgagttggttcttttaaactgctcataggtagctcgtctggtttcggggtatctagctaaagttctctttgttagattttttctggttaaaccattatgcaaaaggtagaaggggtaatctttgcttttttttacttttattttattctttcatctttcccttacggtactatctctatagcgtcaggataaaaatttctatctcctatactttaatgttaggtgaatgttttattttattttggtgtatttttgtatttgtttagtatgttgagctagctttggttcaaagtacccatacattgtgggatcttctaggtgtaaactaggtgctttagtttaagctatgctttggtaatccaagcacactttccagtatgcttaccttgttacgacttgtctcttcttgcatggttgtgtaattgaatataggttatttttattactacatgcttgaggagggtgacgggcggtgtgtgcgtgcttcatggccttattcaatcaagcactctattcttgatttactgctaaatcctcctttggtttttagtttcataaaaactttcgtatggtgggtattcttatgtagaaaatgtagcccatttctttccaacccataagctacaccttgacctaacgtttttatgtgttatgattgtgcttactattgttcctttttagggtttgctgaagatggcggtatataggctgaattggcaagggttggtaaggtctatcggggtttatcgattatagaacaggctcctctaggtggatgtgaagcaccgccaagtcctttgagttttaggcagttgcgagtagtactctggcgaatagttttgttatgtaactatttgggtttagggctaggcatagtggggtatctaatcccagtttgggtcctagctatcgtgtgtcaggattattagagtcactttcgtgggttattttattttaactagggctttttacagcttagttataatttaactctattgtggtttttttttcttaaacactctttacgccgtggatctattaatttgggttaatcgtatgaccgcggtggctggcacgagatttaccaactctaattaatataacttagtcaaactttcgttcatggcttaatttttatcactgctgtttcccgtgggggtgtggttgagcaaggcgttatgagctaccgttataggtgtgcttgatacctgctccttttgatctttangatctggagggcattctcaccggggcgcggatacttgcatgtgtaattttattaagaattaatagaaaggccaggaccaaacctgtgtgtttatggggctgtgaggctcatctaggcattttcagtgccttgctttgataatttaagctacattaactataagctatattcagattgtgggcgtatgcttaataggtgcttatattctgggaggttattgtgttgtaattctaaactaatcttgtgctaggtttgtcctccaaatctagggtgatacgtgtgtccgaagtacggcccaggt

SEQ ID NO: 575535 - DNA, 4508 bp, Homo sapiens
  misc_feature (55)..(55): n is a, c, g, or t
  misc_feature (174)..(174): n is a, c, g, or t
  misc_feature (204)..(204): n is a, c, g, or t
  misc_feature (852)..(852): n is a, c, g, or t
  misc_feature (4145)..(4145): n is a, c, g, or t
  misc_feature (4147)..(4147): n is a, c, g, or t
  misc_feature (4153)..(4155): n is a, c, g, or t
  misc_feature (4161)..(4162): n is a, c, g, or t
  misc_feature (4167)..(4167): n is a, c, g, or t
  misc_feature (4473)..(4473): n is a, c, g, or t
tgttagtaggggtactctaggttgttagtgggtgaattctgttggtggtcagaanctcctaattcgggtgttggtgctaggcttgagtggtagaaagctcaaaagaatccagtgaagaacagaacctcggaaataataaataaaattataccgtatcgtaagcctttttggacnactgatgtgtggtggccttggaaagtgctntctcgaataatgtctcgtcaccattggtatattgtcaaagtattggttaatagtcctagagatagtaagagtatagagttaaagtggaatcatataattaggcctgatgttattaaaagggctgatagggctccggtaagtggtcatgggcttgggtttactatgtggtatgcatgtgtttggtgggtcattatgtattgtcgtgtaggtataagcttactagcagtgtaaacacataagcttggatcagagctactgcaaattcaagaatagttaataggatgaggatagtaaatgtgataagggtagtgtagataatgggattaattagtatgggaagggtatgaaccaacattttcggggtatgggcccgatagcttagcttagctgaccttactgtagaatgtggtgtattttggtagcacggagaattttgaattctcaggtttaggttcgagtcctattgttctagaaataagagggtttgaacctctattttttactctatcaaagtaactcttttatcagacatatttctatgattgtgggggaatgcttgctgttataatagggagtgagatgtgtcatatacatagagctagtgttaggggcaggaagctttttcatagtaaatgtattagttggtcntatcggaatcgtgggtatgatgctcggattcataggaaggtgattgttaatgcgagtgtttttagtacgaagttgattgtatatagttctgatgtgtgtgggtcgtggaatgctcctaggaagagaattgctgtgaatgcatttattatgatgatgttggcatattctgctatgaagaatatggcgaaaggtccggctgcatattctacgttaaagcctgatacaagttctgactctccttctgtaaggtcgaacggggctcggttggtttctgctagggttgagataaatcatattatggctaggggtcaggatgtaaagattattcaaatgtgctcttgtgttgtgattagggttgatagagtatatgatccatttattaggagtactgatagtaggatgattgctagtgttacttcatatgagattgtttgggctactgctcgtagggccccgatgagtgcgtattttgagttggatgctcatcctgatcataggatagagtagactgctaggcttgacatggctagcatgaatagtactcctagatttatgttgattagagggtagggtattggtagtggaactcatattgttagtgctagggataaggctaggattggtgcaataatgaacatggagattgaggatgtggctggtcgtaggggttctttggtgaatagttttagggcatcggcgatgggttggagtaggccgtaggggcctacaacgttgggtccttttcgtagttgcatataacctagtacttttcgttctactagggtgaggaatgctacggccagtaggataggaatgattaggcttagaatgttaattatgaacatgctattagggagaggagttgaacctctggtaataaaggtttaagttttacgcaattaccggtctctgccaccctaatgtgccctgttctagggctggatttattatgagttaattaggttaagattatatcattaattatctctgagacgcgtttgtgaggttggtcccatttctcttgtcctttcgtactgggagaaatttataatagatagaaaccgacctggattgctccggtctgaactcagatcacgtaggactttaatcgttgaacaaacgaacctttaatagcggttgcaccatttgggtgtcctgatccaacatcgaggtcgtaaaccctattgtcgataggaactctagaataggattgcgctgttatccctagggtaacttgttccgttgatcaaaattttggatcaataagtgatgttatggttattttgactggtttgtctagattaaaatcactcggagggttttttgtactccgaggtcaccccaaccgaaattgctagtccatgttaagttatgttttatccctttgtggttgaattgtttaacttttggaatagttaattaaagctccatagggtcttctcgtcttatttttttattcccgcctcttcacgggaaggtcaatttcactgattggaagtaagagacagtaaaaccctcgtgtggccattcatacaagtccttatttggagaacaagtgattatgctacctttgcacggtcagaataccgcggccgttaaactggtgtcactgggcaggcattgcctctaatactagtaatgctagaggtgatgtttttggtaaacaggcggggtttgtgtttgccgagttccttttacttcttttaatctttccttggtgcactcctgtgttgggttaacaatataattaataaacgctttagtgttgttttggtttattgattgttaattatcagtatattattagttactgatgtaagcgtgtgcgaggagaaaggcttcttgttactcatattaacattattgcttctatgtttcaatagattagtccggtattgggctaggagtttgttattagtttttgggattatgttggtgaatttgttgagctttaacgctttctcaattgatggctgcttttaggcctactatggtagtattaagattttactctctagtcaaggttgtatccgtttctaaaaagctgtacctttttagactatctcttaaaaatacattggaatttagggtttttggggtatttttaaggttgaactaaaattctttctcggacaaccagctatcaccaggctcgttaggcttttcacctctacctacaagtcttctcactattttgccacatagatgagttggttcttttaaactgctcataggtagctcgtctggtttcggggtatctagctaaagttctctttgttagattttttctggttaaaccattatgcaaaaggtagaaggggtaatctttgcttttttttacttttattttattctttcatctttcccttacggtactatctctatagcgtcaggataaaaatttctatctcctatactttaatgttaggtgaatgttttattttattttggtgtatttttgtatttgtttagtatgttgagctagctttggttcaaagtacccatacattgtgggatcttctaggtgtaaactaggtgctttagtttaagctatgctttggtaatccaagcacactttccagtatgcttaccttgttacgacttgtctcttcttgcatggttgtgtaattgaatataggttatttttattactacatgcttgaggagggtgacgggcggtgtgtgcgtgcttcatggccttattcaatcaagcactctattcttgatttactgctaaatcctcctttggtttttagtttcataaaaactttcgtatggtgggtattcttatgtagaaaatgtagcccatttctttccaacccataagctacaccttgacctaacgtttttatgtgttatgattgtgcttactattgttcctttttagggtttgctgaagatggcggtatataggctgaattggcaagggttggtaaggtctatcggggtttatcgattatagaacaggctcctctaggtggatgtgaagcaccgccaagtcctttgagttttaggcagttgcgagtagtactctggcgaatagttttgttatgtaactatttgggtttagggctaggcatagtggggtatctaatcccagtttgggtcctagctatcgtgtgtcaggattattagagtcactttcgtgggttattttattttaactagggctttttacagcttagttataatttaactctattgtggtttttttttcttaaacactctttacgccgtggatctattaatttgggttaatcgtatgaccgcggtggctggcacgagatttaccnangcctannnatagtnnccctnctctcaataggaggcctgcctccactatcaggatttatgccaaaatgaataattattcaagaaataacaaaaaatgaaagcatcatcatgccaacactcatagcaataacagcactgctaaacctctatttctacatacgactagcctactcctcctcactgactatgttcccatccaccaacaacataaaaataaaatgacaattcgaacacacaaaacaaataaaattacttcccacaataatggtattatcaacactagtcctacctataacaccagccctctcgtccctaaactaggaattnaggttaacacagaccaagagccgtcggctaattta

SEQ ID NO: 575536 - DNA, 3791 bp, Homo sapiens
  misc_feature (3490)..(3490): n is a, c, g, or t
cacgccgatggtggtgtggagaaaagggaaccctgttacactgttggtgggattgtaaattggtgcaaccactgtggaaaacagtatggtgattcctcagaaaactagaatagatctaggaatcccactcctgggcatctatccagagaaaaccatgactcaaaaagatgcatgcactcggatgttcactgaagcactattttcaatagccaagacatggaaacaacctaaatgtccatcggcagaggagtggatcaagaagatatggtacccatcggcgacacgccgatgggtcttctgtaaggtcgaacggggctcggttggtttctgctagggttgagataaatcatattatggctaggggtcaggatgtaaagattattcaaatgtgctcttgtgttgtgattagggttgatagagtatatgatccatttattaggagtactgatagtaggatgattgctagtgttacttcatatgagattgtttgggctactgctcgtagggccccgatgagtgcgtattttgagttggatgctcatcctgatcataggatagagtagactgctaggcttgacatggctagcatgaatagtactcctagatttatgttgattagagggtagggtattggtagtggaactcatattgttagtgctagggataaggctaggattggtgcaataatgaacatggagattgaggatgtggctggtcgtaggggttctttggtgaatagttttagggcatcggcgatgggttggagtaggccgtaggggcctacaacgttgggtccttttcgtagttgcatataacctagtacttttcgttctactagggtgaggaatgctacggccagtaggataggaatgattaggcttagaatgttaattatgaacatgctattagggagaggagttgaacctctggtaataaaggtttaagttttacgcaattaccggtctctgccaccctaatgtgccctgttctagggctggatttattatgagttaattaggttaagattatatcattaattatctctgagacgcgtttgtgaggttggtcccatttctcttgtcctttcgtactgggagaaatttataatagatagaaaccgacctggattgctccggtctgaactcagatcacgtaggactttaatcgttgaacaaacgaacctttaatagcggttgcaccatttgggtgtcctgatccaacatcgaggtcgtaaaccctattgtcgataggaactctagaataggattgcgctgttatccctagggtaacttgttccgttgatcaaaattttggatcaataagtgatgttatggttattttgactggtttgtctagattaaaatcactcggagggttttttgtactccgaggtcaccccaaccgaaattgctagtccatgttaagttatgttttatccctttgtggttgaattgtttaacttttggaatagttaattaaagctccatagggtcttctcgtcttatttttttattcccgcctcttcacgggaaggtcaatttcactgattggaagtaagagacagtaaaaccctcgtgtggccattcatacaagtccttatttggagaacaagtgattatgctacctttgcacggtcagaataccgcggccgttaaactggtgtcactgggcaggcattgcctctaatactagtaatgctagaggtgatgtttttggtaaacaggcggggtttgtgtttgccgagttccttttacttcttttaatctttccttggtgcactcctgtgttgggttaacaatataattaataaacgctttagtgttgttttggtttattgattgttaattatcagtatattattagttactgatgtaagcgtgtgcgaggagaaaggcttcttgttactcatattaacattattgcttctatgtttcaatagattagtccggtattgggctaggagtttgttattagtttttgggattatgttggtgaatttgttgagctttaacgctttctcaattgatggctgcttttaggcctactatggtagtattaagattttactctctagtcaaggttgtatccgtttctaaaaagctgtacctttttagactatctcttaaaaatacattggaatttagggtttttggggtatttttaaggttgaactaaaattctttctcggacaaccagctatcaccaggctcgttaggcttttcacctctacctacaagtcttctcactattttgccacatagatgagttggttcttttaaactgctcataggtagctcgtctggtttcggggtatctagctaaagttctctttgttagattttttctggttaaaccattatgcaaaaggtagaaggggtaatctttgcttttttttacttttattttattctttcatctttcccttacggtactatctctatagcgtcaggataaaaatttctatctcctatactttaatgttaggtgaatgttttattttattttggtgtatttttgtatttgtttagtatgttgagctagctttggttcaaagtacccatacattgtgggatcttctaggtgtaaactaggtgctttagtttaagctatgctttggtaatccaagcacactttccagtatgcttaccttgttacgacttgtctcttcttgcatggttgtgtaattgaatataggttatttttattactacatgcttgaggagggtgacgggcggtgtgtgcgtgcttcatggccttattcaatcaagcactctattcttgatttactgctaaatcctcctttggtttttagtttcataaaaactttcgtatggtgggtattcttatgtagaaaatgtagcccatttctttccaacccataagctacaccttgacctaacgtttttatgtgttatgattgtgcttactattgttcctttttagggtttgctgaagatggcggtatataggctgaattggcaagggttggtaaggtctatcggggtttatcgattatagaacaggctcctctaggtggatgtgaagcaccgccaagtcctttgagttttaggcagttgcgagtagtactctggcgaatagttttgttatgtaactatttgggtttagggctaggcatagtggggtatctaatcccagtttgggtcctagctatcgtgtgtcaggattattagagtcactttcgtgggttattttattttaactagggctttttacagcttagttataatttaactctattgtggtttttttttcttaaacactctttacgccgtggatctattaatttgggttaatcgtatgaccgcggtggctggcacgagatttaccaactctaattaatataacttagtcaaactttcgttcatggcttaatttttatcactgctgtttcccgtgggggtgtggttgagcaaggcgttatgagctaccgttataggtgtgcttgatacctgctccttttgatctttangatctggagggcattctcaccggggcgcggatacttgcatgtgtaattttattaagaattaatagaaaggccaggaccaaacctgtgtgtttatggggctgtgaggctcatctaggcattttcagtgccttgctttgataatttaagctacattaactataagctatattcagattgtgggcgtatgcttaataggtgcttatattctgggaggttattgtgttgtaattctaaactaatcttgtgctaggtttgtcctccaaatctagggtgatacgtgtgtccgaagtacggcccaggt

SEQ ID NO: 575537 - DNA, 3538 bp, Homo sapiens
  misc_feature (3237)..(3237): n is a, c, g, or t
cgtccgtcgaccgctgagctgtgagaatgaccttgacttctgtccactacatggagccatgttcaggttggtttctgctagggttgagataaatcatattatggctaggggtcaggatgtaaagattattcaaatgtgctcttgtgttgtgattagggttgatagagtatatgatccatttattaggagtactgatagtaggatgattgctagtgttacttcatatgagattgtttgggctactgctcgtagggccccgatgagtgcgtattttgagttggatgctcatcctgatcataggatagagtagactgctaggcttgacatggctagcatgaatagtactcctagatttatgttgattagagggtagggtattggtagtggaactcatattgttagtgctagggataaggctaggattggtgcaataatgaacatggagattgaggatgtggctggtcgtaggggttctttggtgaatagttttagggcatcggcgatgggttggagtaggccgtaggggcctacaacgttgggtccttttcgtagttgcatataacctagtacttttcgttctactagggtgaggaatgctacggccagtaggataggaatgattaggcttagaatgttaattatgaacatgctattagggagaggagttgaacctctggtaataaaggtttaagttttacgcaattaccggtctctgccaccctaatgtgccctgttctagggctggatttattatgagttaattaggttaagattatatcattaattatctctgagacgcgtttgtgaggttggtcccatttctcttgtcctttcgtactgggagaaatttataatagatagaaaccgacctggattgctccggtctgaactcagatcacgtaggactttaatcgttgaacaaacgaacctttaatagcggttgcaccatttgggtgtcctgatccaacatcgaggtcgtaaaccctattgtcgataggaactctagaataggattgcgctgttatccctagggtaacttgttccgttgatcaaaattttggatcaataagtgatgttatggttattttgactggtttgtctagattaaaatcactcggagggttttttgtactccgaggtcaccccaaccgaaattgctagtccatgttaagttatgttttatccctttgtggttgaattgtttaacttttggaatagttaattaaagctccatagggtcttctcgtcttatttttttattcccgcctcttcacgggaaggtcaatttcactgattggaagtaagagacagtaaaaccctcgtgtggccattcatacaagtccttatttggagaacaagtgattatgctacctttgcacggtcagaataccgcggccgttaaactggtgtcactgggcaggcattgcctctaatactagtaatgctagaggtgatgtttttggtaaacaggcggggtttgtgtttgccgagttccttttacttcttttaatctttccttggtgcactcctgtgttgggttaacaatataattaataaacgctttagtgttgttttggtttattgattgttaattatcagtatattattagttactgatgtaagcgtgtgcgaggagaaaggcttcttgttactcatattaacattattgcttctatgtttcaatagattagtccggtattgggctaggagtttgttattagtttttgggattatgttggtgaatttgttgagctttaacgctttctcaattgatggctgcttttaggcctactatggtagtattaagattttactctctagtcaaggttgtatccgtttctaaaaagctgtacctttttagactatctcttaaaaatacattggaatttagggtttttggggtatttttaaggttgaactaaaattctttctcggacaaccagctatcaccaggctcgttaggcttttcacctctacctacaagtcttctcactattttgccacatagatgagttggttcttttaaactgctcataggtagctcgtctggtttcggggtatctagctaaagttctctttgttagattttttctggttaaaccattatgcaaaaggtagaaggggtaatctttgcttttttttacttttattttattctttcatctttcccttacggtactatctctatagcgtcaggataaaaatttctatctcctatactttaatgttaggtgaatgttttattttattttggtgtatttttgtatttgtttagtatgttgagctagctttggttcaaagtacccatacattgtgggatcttctaggtgtaaactaggtgctttagtttaagctatgctttggtaatccaagcacactttccagtatgcttaccttgttacgacttgtctcttcttgcatggttgtgtaattgaatataggttatttttattactacatgcttgaggagggtgacgggcggtgtgtgcgtgcttcatggccttattcaatcaagcactctattcttgatttactgctaaatcctcctttggtttttagtttcataaaaactttcgtatggtgggtattcttatgtagaaaatgtagcccatttctttccaacccataagctacaccttgacctaacgtttttatgtgttatgattgtgcttactattgttcctttttagggtttgctgaagatggcggtatataggctgaattggcaagggttggtaaggtctatcggggtttatcgattatagaacaggctcctctaggtggatgtgaagcaccgccaagtcctttgagttttaggcagttgcgagtagtactctggcgaatagttttgttatgtaactatttgggtttagggctaggcatagtggggtatctaatcccagtttgggtcctagctatcgtgtgtcaggattattagagtcactttcgtgggttattttattttaactagggctttttacagcttagttataatttaactctattgtggtttttttttcttaaacactctttacgccgtggatctattaatttgggttaatcgtatgaccgcggtggctggcacgagatttaccaactctaattaatataacttagtcaaactttcgttcatggcttaatttttatcactgctgtttcccgtgggggtgtggttgagcaaggcgttatgagctaccgttataggtgtgcttgatacctgctccttttgatctttangatctggagggcattctcaccggggcgcggatacttgcatgtgtaattttattaagaattaatagaaaggccaggaccaaacctgtgtgtttatggggctgtgaggctcatctaggcattttcagtgccttgctttgataatttaagctacattaactataagctatattcagattgtgggcgtatgcttaataggtgcttatattctgggaggttattgtgttgtaattctaaactaatcttgtgctaggtttgtcctccaaatctagggtgatacgtgtgtccgaagtacggcccaggt

SEQ ID NO: 575538 - DNA, 1455 bp, Homo sapiens
gatgcctggaccagctgactgtcatataaacctttcttatttgagctacggcttgacaccagaccgtgaccctacgacacgacaaccttgacagcctacacacgacgacacgtggggattgtggtgggctacgtctcttccaacgcttcgggtgacacccctgacatacggtgacacacacgttcattcacgactgcgacgacacacaattcgacgtccatacatggacacacacagacttgatatacgtgactttcgccatctatgcacttcttatggaatcgacacccacgtgtgtaccacagttgaacaagaaatctatcctacaagtacctatgagcgcgcataacctaacacaattgtatgaggctgagaacaacggctgtacacattacgtacctgcagctagcgtaatgtgcctattctgccgcagacacgttacgtggaacacgtataacacggtacacggtgtgcctaacgcgaacaacacggacacttagcctctaccattccccttacacctacacctttgtgccgtgtctctcaccttggacactggatttcgcacaaacatgttgggcatttctgacaggggggaactatccacttaacatttttccttaagttagggattgggacaccacgcaccgtgtctacacttgtgtgtgccttaagcaagaaccgagtcaggcacagtgcttaacaccgatagcttggttgtgacacgagcaagtcttggcgttaataacgaatcaacgttacaaacagcgttaacaacattaagtgcttaccacgccgccgggattaaacgaggcttcaactcttacaaagctttgagcacgaatgcccgacgacatgttgccaacgcgctatgggttagttaacattgttgccactggtatcggagccttaagatgggccgcctttacgccgtgcttgggtaacaatctttggggcggataagggcatttaaaatattaaaaaggttgtaatctaatttattcaaagggaacgcgagcatcattataacacagggggtaaataaccatttagacgttggacttcgcactgtatagaagacatggggggacagatcaagttgggtgtagcgtaaacggggggaacgtacgtatagatatatgggtatgataatgtaactatgcggtttggaagaaagcaaaaccccgacgagcgtcacaaacaatggccacacggaccgacaacggcgcgcacaccgtaccgctagaccacacacatcgtatacacggcacgacaggaatggagccattctaccatcaggggaaacacactcccgatacaaaagcagaatggtggctcggaccaccagacgctgggcacacaacacacgatctacctgttcacagccccacaaccaaacccgactactagctgcaaacgccacgcacaaccggagcgatacacaaagaagggggg

SEQ ID NO: 575539 - DNA, 112 bp, Homo sapiens
cttgattagaggatccccccgactagccgacagctctgcttcgcagctcagtgcgcttcctgcgcgcactgggaggcgcttaagcgtcaccaagcacactcacttaatgaaa

SEQ ID NO: 575540 - DNA, 3528 bp, Homo sapiens
  misc_feature (3227)..(3227): n is a, c, g, or t
ctcggcccgaattctaattacggggagaagggggctggcgaggttattaagaaaaggttggtttctgctagggttgagataaatcatattatggctaggggtcaggatgtaaagattattcaaatgtgctcttgtgttgtgattagggttgatagagtatatgatccatttattaggagtactgatagtaggatgattgctagtgttacttcatatgagattgtttgggctactgctcgtagggccccgatgagtgcgtattttgagttggatgctcatcctgatcataggatagagtagactgctaggcttgacatggctagcatgaatagtactcctagatttatgttgattagagggtagggtattggtagtggaactcatattgttagtgctagggataaggctaggattggtgcaataatgaacatggagattgaggatgtggctggtcgtaggggttctttggtgaatagttttagggcatcggcgatgggttggagtaggccgtaggggcctacaacgttgggtccttttcgtagttgcatataacctagtacttttcgttctactagggtgaggaatgctacggccagtaggataggaatgattaggcttagaatgttaattatgaacatgctattagggagaggagttgaacctctggtaataaaggtttaagttttacgcaattaccggtctctgccaccctaatgtgccctgttctagggctggatttattatgagttaattaggttaagattatatcattaattatctctgagacgcgtttgtgaggttggtcccatttctcttgtcctttcgtactgggagaaatttataatagatagaaaccgacctggattgctccggtctgaactcagatcacgtaggactttaatcgttgaacaaacgaacctttaatagcggttgcaccatttgggtgtcctgatccaacatcgaggtcgtaaaccctattgtcgataggaactctagaataggattgcgctgttatccctagggtaacttgttccgttgatcaaaattttggatcaataagtgatgttatggttattttgactggtttgtctagattaaaatcactcggagggttttttgtactccgaggtcaccccaaccgaaattgctagtccatgttaagttatgttttatccctttgtggttgaattgtttaacttttggaatagttaattaaagctccatagggtcttctcgtcttatttttttattcccgcctcttcacgggaaggtcaatttcactgattggaagtaagagacagtaaaaccctcgtgtggccattcatacaagtccttatttggagaacaagtgattatgctacctttgcacggtcagaataccgcggccgttaaactggtgtcactgggcaggcattgcctctaatactagtaatgctagaggtgatgtttttggtaaacaggcggggtttgtgtttgccgagttccttttacttcttttaatctttccttggtgcactcctgtgttgggttaacaatataattaataaacgctttagtgttgttttggtttattgattgttaattatcagtatattattagttactgatgtaagcgtgtgcgaggagaaaggcttcttgttactcatattaacattattgcttctatgtttcaatagattagtccggtattgggctaggagtttgttattagtttttgggattatgttggtgaatttgttgagctttaacgctttctcaattgatggctgcttttaggcctactatggtagtattaagattttactctctagtcaaggttgtatccgtttctaaaaagctgtacctttttagactatctcttaaaaatacattggaatttagggtttttggggtatttttaaggttgaactaaaattctttctcggacaaccagctatcaccaggctcgttaggcttttcacctctacctacaagtcttctcactattttgccacatagatgagttggttcttttaaactgctcataggtagctcgtctggtttcggggtatctagctaaagttctctttgttagattttttctggttaaaccattatgcaaaaggtagaaggggtaatctttgcttttttttacttttattttattctttcatctttcccttacggtactatctctatagcgtcaggataaaaatttctatctcctatactttaatgttaggtgaatgttttattttattttggtgtatttttgtatttgtttagtatgttgagctagctttggttcaaagtacccatacattgtgggatcttctaggtgtaaactaggtgctttagtttaagctatgctttggtaatccaagcacactttccagtatgcttaccttgttacgacttgtctcttcttgcatggttgtgtaattgaatataggttatttttattactacatgcttgaggagggtgacgggcggtgtgtgcgtgcttcatggccttattcaatcaagcactctattcttgatttactgctaaatcctcctttggtttttagtttcataaaaactttcgtatggtgggtattcttatgtagaaaatgtagcccatttctttccaacccataagctacaccttgacctaacgtttttatgtgttatgattgtgcttactattgttcctttttagggtttgctgaagatggcggtatataggctgaattggcaagggttggtaaggtctatcggggtttatcgattatagaacaggctcctctaggtggatgtgaagcaccgccaagtcctttgagttttaggcagttgcgagtagtactctggcgaatagttttgttatgtaactatttgggtttagggctaggcatagtggggtatctaatcccagtttgggtcctagctatcgtgtgtcaggattattagagtcactttcgtgggttattttattttaactagggctttttacagcttagttataatttaactctattgtggtttttttttcttaaacactctttacgccgtggatctattaatttgggttaatcgtatgaccgcggtggctggcacgagatttaccaactctaattaatataacttagtcaaactttcgttcatggcttaatttttatcactgctgtttcccgtgggggtgtggttgagcaaggcgttatgagctaccgttataggtgtgcttgatacctgctccttttgatctttangatctggagggcattctcaccggggcgcggatacttgcatgtgtaattttattaagaattaatagaaaggccaggaccaaacctgtgtgtttatggggctgtgaggctcatctaggcattttcagtgccttgctttgataatttaagctacattaactataagctatattcagattgtgggcgtatgcttaataggtgcttatattctgggaggttattgtgttgtaattctaaactaatcttgtgctaggtttgtcctccaaatctagggtgatacgtgtgtccgaagtacggcccaggt

SEQ ID NO: 575541 - DNA, 207 bp, Homo sapiens
gcaaaattggaattgagaagcagattcctttttttaaggtgctttgtgctaaggatgaggatacaattcctcagctcttggtagacttttgggagctcacctagtgccatgtctcccagatgtggtactccaggactctctttcaactcacatcacagtacacctggagattgtctagaggcagcctcctgacacacacattgcgac

SEQ ID NO: 575542 - DNA, 738 bp, Homo sapiens
cgcggtggctcatgcctgtaatcccagcactctgggaggtggaggcgggtggatcacctaaggtcgggagttcaagaccagcctgaccaacatggagaaaccccatctctactaaaaatacaaaaaattagctgagcgtggtggtgggtgcctgtaatcccagctactcgggaggctgaggcaggagaatcacttgaacccgggaggtggaggttgcggtgagccgagatcatgccattgcactacagcctgggtaacaagagtgaaactctgtctcaaaaaataaataaataaataaataaaaataacttcagccaggcgcagtggctcacacctgtaatccctgcactttaggaggccgaggcgggtagatcacccgaggtcaggagcctgagaccagcctgaccaatatggtaaaactccgtttctaccaaaaaaatacaaaattagccaggcatggtagctcatgcccgtaatcccagctacttgggaggctgaggcaggagaatcacccgaacccgggaggttcacctgaactgcgggagaagttcaggttcagggttcacctgaacccgggagaatcacctgaactgcggaggttgcagtgaggcgagatcacaccactgcactccagccttgggcaacaagagcgaaactccatctccaaaaaaacaaaattctcaaaacaagggctagtggaacatgagaaaataggagttctaaggtatatgtcaaagg

SEQ ID NO: 575543 - DNA, 873 bp, Homo sapiens
gggctaatatccaaaatgtattaagaaacccaagcccaatagcaagaaaacaactgtctttaaacagggggcaccaaggacctcaacttaacatttttcagaggaagacatgagtggccaattgattgatacatgcaacaaaaatgctcaaccatctctaatcattcagtgagttgcaaatcaaaactgcaagatattaccttacaccttttagaatggctattattaaaaggatgaaagacaggtgctggcaaggatgtggataaaaggaagtcccaacattctgttagtgggaatataaattagtatagccaatttaggaaatatatggtgggtcacttaagaaacatataagtgtacaagattatatgatgcatcgtcaacgaatttactactgaggtatatatccagaaggaattgaagcagtatgtgagatcttggacttcacttattttgaaattgatgacaaagctaataaatggacaaagacttacgttatcataacagatgaatggacatggaagatgtgtgataatatacatattggaactatatataaaatcctgggaaaaagacaggaaacaacgtgcatatggtgacaaccaatgggatgaaattctgggaagggttatcaccctagtgcacctaaaggatggacgcaaaaagaaacacaggggacaaccagaaacgcaacgggcgacaatttagcgtaacactccagaaacaagcggacagacatgcagcaaatcaacaacagaaacaggagcgataaaccatcagcttaacaacagtcaggacaaccgattgggaatagcacagcatgaggcacagccaagcgaacaaaccagaccgtgacagggcaaaacaaccacg

SEQ ID NO: 575544 - DNA, 350 bp, Homo sapiens
aacgtcagaggacaaaactaaataagtagagaaagtataatactggagtaaataggagtggactgggtgctgcctgtaaatagggaggactccaagccgggaaggaaaattcgctttgccacacctgtatcaattttttacaacttttttcctgaaagcagtttagtccatacttcgcacggacatacttgtgccttctgtgctaaggtaaggtatccgagcctcgatgcaagtccagctgggggtgttcttagggtggaatgtgatgtgcaggagcaaacgtggcaagagagtggccttctgttggtgactttgaaaaggcccacatgatacaattagagaatgccaag

SEQ ID NO: 575545 - DNA, 941 bp, Homo sapiens
  misc_feature (346)..(346): n is a, c, g, or t
ggtatttacgagcgcagcggctgacgggccggatcgccttcgtcggcgcccggccgcaaccgttcgtgcccggacgcgtgcctcgcctgtcgcggcgctcacagattaacctgtgagatgagccgacttcgggacaaccaaatatgctctgaacaggcactgagaattcgcaagaaagaagacaaggaacacgtgaggaacaaaaaaagcaggagtataaggaagcgaaaaaggactggcatacgaaacatatgtatattgaaaagacaagaaaacattccgctacatacgagtcatgcatagatacacgtacaaagaaacatagagcaacaatgaaacacaaagntaaaacaacatgaatccaagcatgagtcacaataaagaacaaaatgataaaaacgaatgcagtcaaaacaaaagaatgcaacatccaatgcagacctgaaaaaataaaaaccaaaagtccctaacattaagaaccataacatcacaaaaacccaaaaaaatccaatggactaattctacataaagacattgacaataaacatgtcctaaaaaaacaaaaaagaaaacaaaaaaagaaaagaatacaaatttgaaaaaacaaaaacataacaaagaaataccagaaaaaaaaacaaaagaaaataaaaaaaaaaaaacaaaaagaaaaacaaaataaagtgatacatcgaaaaaaaaagaaagaaaaaccagaagacttaatttcacaaaaaagatgaaagacacaacaatacaaaacaaaaacatattaaaaaaaaaacgaaatgaattaataaaccatacaaaacaagaataaaaacaacaaaacaaacaacaaaaaaaataaaaaggaaataaccagtaacacaaacacaaaaaatgaaaggaagaaaaaaaacacaataaagttaaaaaaataacaataaaaaatagaaatt

SEQ ID NO: 575546 - DNA, 812 bp, Homo sapiens
  misc_feature (354)..(354): n is a, c, g, or t
gctatcacggtgctgctgatttagtctcgaacacactctctcatggtatagctccgtatcggctctacagtggcagcgagtgcagagcagtgagagggttcagtgacgtgcaagtgggcgcccgtcacgcgagtgcgcgcggtgcgcgaatgtgtgagtcgcggttgcgcgaagtcgcgttggatgcattgcgcgcgcgatcgcgatgtgccccggtgcgcctcgagtgaagccttgcgtttgcgatgcctttgccggtaggcgcctttgcctcgggggggttgggaactgcgaattttggttcgggaagggcgccccgattggggaacccggtggcaactggcggtactaaantgcgcgagggggacgtacttacgggagccactcttgcccgcagatgcttgatagcgccaggctctgtggtgacccgaaagatccagcaaagggtcgggcccatatatctatttaagtcagattttttcctcccaaaaaggggggcggaaaaagagtgcgccccacaagtagcgaaaacaaacctttggtgtgtgcgccatatgataatcattaaccgcgcaaagacgacactggcgacggggagacactaccgcgcgtataaacatttttaccccacggggaggagtgttttatagaggggacaaacaggagcacattctcctacacaaggtttttttatgagggccccgcacttattaacggggggacaacaacgttttttgaggggccccccaaaaaatgtgtctcacgccccagcaaaaagggttttagatgtggccaacaattgtcttcacaag

SEQ ID NO: 575547 - DNA, 536 bp, Homo sapiens
ctacggtgtatacatatgtactgatgacatgatgcgtacagattctagcgtgtaaagcagcccaagacgctctagagaccatgcaagcatatatgctccggttctctaacaagttaatcaggcgctacaaatacctggagaaaggtatagaagatagaagtaaaaaagctagctagctgtactatagcacgggtcaattcagacgtcggagaggaacaatgctagctatagtatgcactaggtgtacttctaggctaaatggaacacttacatagcatccattcttacatagcctttataatagaaaataaggttaaagcaggcgtttcagcaagctatatgcttgtgaagctacaaaaatcatggataaatgaacaacagctatcaatagccagaagctgcaagtcttcggacagtcagcatggataacaagacttgatggaacactaacctgccaataatgccaagttgtagtcacactaccacaaaatataaacctgaggcaggctagacatacctttccgactatgttcgga

SEQ ID NO: 575548 - DNA, 306 bp, Homo sapiens
ccacgcactcagggcttttcaatccaggttatagagaaggggtcagatttgtcaaacaaattgtattatcaaatctctttgaaaatgtctaatgtcctaatacaccaagaaatgaggcaaatagaattctgatatgggaaaatgtctcaatattttctaaagagaacctttaaaccagaagagaaatgtgtactactaagcttggaagcaaataacaaaaggatcaactttctaaatagtttgcagagaggaaaaatggctcaaataagtttaaatggcagctaataaatattccttttatgaaaa

SEQ ID NO: 575549 - DNA, 345 bp, Homo sapiens
  misc_feature (313)..(313): n is a, c, g, or t
  misc_feature (335)..(335): n is a, c, g, or t
tgagttcaaaatgggtcataacgcagcagagataacttgaaacatgaacagcgcatttggcccaggaactactaacgaacatacagggcagctgtgattcaagaagttttgcaaagcagaactagagccttgaatatgaggaacacagtggccagccattggatgcttcacttcttgaagcatcttgacagctttttgcaggtgaaatgcttccacaccagcaggatgcaggaaaaatgctttccaagagtttgttggaatccaggaagcatgggtgtttatgctggcagggattaaacaaatttattttctncgttgggcaaaaaagtgtttgnttgtaatggt

SEQ ID NO: 575550 - DNA, 172 bp, Homo sapiens
cgaggagagaggtaggaaaacgatagagaaagacataagattataaggctcctcgacttggcactgactccacattcctcctagctctggcactaacccttaagagcagaagcagtcattccccagtcctcccttcccccgggatacagctccccgggaatacagggcggac

SEQ ID NO: 575551 - DNA, 341 bp, Homo sapiens
aagattttttttttaccccccaaatggggggtttccccccaaaaagggttttttaaaaaaaaaaaaaaaaccggggttttttgggcccccaggggagggttttgggagcccaaaaaagtccttttcccccccgggggggggttgggagggggttccccccccccttacccccgctttttttaaaacccccgttttttttagggggttttttttttcccccttttcggggggggtttttaaaaccaaactggggggtttccccctggaggggttgttgggccccttttttgggttggggcccttggggtttttttaaaaaaaaaaaacccttttttttggga

SEQ ID NO: 575552 - DNA, 1120 bp, Homo sapiens
gccatggggcttgtcggctcctgaagctggcaggcgacgtccgcgtccgcccgggtcgtggcggcgggcgcccagcgcggtgcagaggaagttcagtagctcagtgtgcaggggcaaactgcgctatggaatgtggccatttccgtacttggggagtaaagcaagcaaaagactggcagaacgcagcagagtgataactgtagatggcaatatatgtactggaaaaggcagacttggaacacagaaatagcagagaagactaggcttcaagcacgtttcctgaagcggggattcattatccagacagtaccacaggcagatgggcaagcccctcgccaccgactataatggcaacttgtagttcggagaaattttacagatgatccgagaagcaatgatcggcaacagttaccgactgcaggcctggttgtacagcagatcgccatgcgtgcagtactcagatgccttgtgagcacgttgcatgacctagaggacaagggtgtggcgtcggagcgctccatcttcagggactttgtgttcctggaggcgaagtgtacaaccagggattcatccgaaagcagtgtgtggaccactacaacgaggtgaagagcgtcaccatctgcgattaacctgccccccccactggctgattacatcgatgtgcccgttccagaggtccagaaggcggattcagcaagaaaggagatccacatgaaatgaagatcactctggctatctacaggacatcgggaactggctattaagaaaacctttcttctctgcagatgcagtgaacacagtgccgcggttccccaaaatcctgccaggagagacccacgattcccaaaacgggggtaaggcacatgtgacacccgaaagtccaaacaggggccacagcaacagaggagcaaccgcagtagtaaacacgggcaaacagagccgcgaaacaacagggggagacaaccaagagcaagagtccgcgcgagaccacgagccacaacacaacacggcgaccaccaacacgcagcagaaacacggtgaccacagagaagacagctaagacgacgctaggcctaaagagcaccgcacaaatgagctacgaacgcaccaaaacgagact

SEQ ID NO: 575553 - DNA, 416 bp, Homo sapiens
gctgctaaacagaaaaatcacagcgcgcggtccagccccgtgcgccccgcgggctacaggcctcgccctgcccgcccgcccgcatcccagggacaggcagacccgcatccccgccgccgtcggtcccgggactccccaggctccgaggccccccacgcccggctcccgccccgacccctcggaggcgccgggccactcctacgccccgagctgcccggccgccgcccctctgtcccgcgcgccaatcggcggcctccttgactaaataaggccaggagcgccgggcgggcgccccccgtccgttacttccgccccccgcccgccgtgactcaggcccggcggcgggcggggatggcgctgccccgggccgggcttcccggcggaggcgggcggggctccggcggcgccgaagtcgc

SEQ ID NO: 575554 - DNA, 367 bp, Homo sapiens
tgctacttagttatgtgccagcgattattaaagtggctcctcctgacttaccatcggaaagctgtgtgagaggctctctcactcacttatgtttggatctccgtaaacacagtttttgttcttggtctatctctggctacaaccaagtgtgcttatgaataattttattgtctaatcatttgatgtttgttttcctgtatgattcataaacagagtcacataacaggtgtaatatctcctttattctttccttttctatttcctcgatttcaacagttgctgccacgtgcttttcaatgcatggtccattccgagaggatctgcttcaaactgttttattgcctaattgaggataaatccgtgaggg

SEQ ID NO: 575555 - DNA, 512 bp, Homo sapiens
aagagaaaaaatggtaaatagacatgaaaaggtatctatcaaaatatctctaaggaagttggtatacaagttggctacatattagatggattctagttttcctatgatctttataaaagcttatcacttataagaaaaaaagttattttcattttggaaaaatatctataccctttactaagtccctttacattcaatgaccaagattcccacaacactctgggaagctgaaagatctgaaagtaacacggccattacatagatgaaggcagcagacctaggaaatgtaaccccgatggactgactctgggctggcattctcccacccctgcggctactccagactcagaggaatgtggcaagtcagatgccagcttgggccaaaaaaactccgatcattttaggagtctcaccaagcccagttacttcctctgagatggtaacagcaataggggaacacttcaaagacaaagcattcagaatgattcatgctgcaccacctccccctggtg

SEQ ID NO: 575556 - DNA, 651 bp, Homo sapiens
ttgcggtgagcatctcatgtgggcacagttcatgtgccccaaaacaattacaacagtaacgccaaagaccactgatcacagatcaccataacaggtatgataataatgaaaaagtttgaaatattgcaagaattattaaaatgggacacaaacacatgaagtgaacacgtgatgtgagaaaaaaatggcaccgatagactcagagttgagccagccgtgatattcaattcatgaaaacgcagtatctgcagagcacatatagcgaagtccagtaaaacaggtgcacccatggaattcatgttcattctagagcaactggaaaatacacccttgccaaagaaagtctaatgtcccctcatgtgtccaaacgttctggccaggtgtggtggctcacgtctgtagtcccggcactctgggaggccgaggtgggaggactgcttgagcccaggtggttaaagctacagtgagctaggatcacgccactgcactccagcctgtgcggcctcaggctctggggctcaaatgaacctcttgcctcagcctcacgagtagctgggactgtaggtgcaggccgctatgctcagctaattttttattttttgtaggatagggtctccccatgttgcccacgctgtgctcgcgccaaaggag

SEQ ID NO: 575557 - DNA, 193 bp, Homo sapiens
gtaaagcagggttaagactgcatgatatgtggaaacagccagtttccaatgtttagagccatccaggcaattatcaatattccatgggagcctttcggccaggagcaggtcaacccccagatgaaatgatttactgctggaagtggaggaggtttcctgccacctctgatgaggagatgagccattgccagga

SEQ ID NO: 575558 - DNA, 181 bp, Homo sapiens
gttggcaattcgtcgtcgtcgtgtggtctcagtagcatctgtcacacgagcccttcttggttgggctgacattccccagagtggtgacaaaccctgagctggtctgcttgtaaaagtgtccttaagagcatagacactcacttcatatttggtgaccaccacgacgaattccggcacgacg

SEQ ID NO: 575559 - DNA, 624 bp, Homo sapiens
cccacgcgatcggccccacccaccacgagtgtgaggccggtcccccccatgacacgctgcgcctcactgcattgcccgactacaccctgaccctgcggcgctccccggatgacatgccactcatgacccccgaacaccatcactatgatccccaactccctggtagggctgcgagacattgcaccccttataacacctttgccgcagggttcaacagtaccgggctgacccactcacactccacgtacccgggttatagctccatactcagaagcacagacctaatctccagtgctcacctctcctcccagagtccatggaacacattgcacacgacactacacacatcacgacgcagacacacacaacacacagcacatatactgtatacgacactgcacccacagcccatactagcagtatcacaccatgacacaacacactagacgagaatgttggcacatgcatccccgctatagtacagaaacacactaacatacgggaacgtaacaccgtgacacaacaccacctttacaactggcggacagcagactgaagtccctcggataacaccagaggcacccgatgaaaacgagcacgctgacagccgagctccctgacacc

SEQ ID NO: 575560 - DNA, 1161 bp, Homo sapiens
gacctcgggactgtgtggaagagagagtgactcgacagcagccagtgacagccagctgaatgccaggccagtacgaacgtatgttgtcgggtacggtgattcctaggcgtgccgttgactgcactgcccatcacgaggtcgtaaacctggagggcaccaagacggaggtagtgtgatcacctgctgatcattggcttcgctgccaggcgtctggcgtcgcgaggagttgcaagcgagtggctcgcgtgtctcagcgctcccggggtgagtggtggattgaaagaggtagtccatcgacagaactattgtaactgcgttggattttgcgctaagtcttaccatgaggaggtatttctccgaaatctaaggcttcgtgagcataggtgcatcgaagacttacctcgggcctagtatatttagacttgcaatctctgacatacggtgaatcttctcccaataagggtcgcttttgcgaactatacagggaaacttgttgaccagccatagggcttacatttaactcaaaataggcatcccacacagagatcccttctacgttcacgttccttcctagaggacttaaggtagcggaacttgaaaaccttttaacttacaacggtatacaagtcctataaggagccacatagcagcaaactgacgcaaatgtggagctaaacaacaatgggaatccaaatgttggtaggaaaaggaactggtaacggaatcacaggacgtggaacattacaacacaagtatcaccacatattcatatatagtaagccactagagcgcaactttccatcctgtggcgactgagtcggacattaccttctgtggtgacctagcgtatcattagggcaaagcaagaaaacaaggaaccagtatctgaggagcccactgtgggcctgtggtgtggaacgaatgctgcccaaagtcgtcccgatccacgcgtagtggcactggcggcagccagtgaaacaaatgcagtaacacgacttcaaagcccgaaggcgagtgtacagtggaacccccagcgatagcatccccggagacggaatgcggtgacagcggctcgtgacagtatacgaagcccaagttcaggaaccagatggttgtgtctgccgcggacgccaaacggcctaggcggacagaggacattaa

SEQ ID NO: 575561 - DNA, 813 bp, Homo sapiens
  misc_feature (17)..(19): n is a, c, g, or t
  misc_feature (210)..(210): n is a, c, g, or t
  misc_feature (284)..(284): n is a, c, g, or t
  misc_feature (296)..(296): n is a, c, g, or t
cggctccagcgccatgnnncatccaggaagttcttcgttgggggaaactggaagatgaacgggcggaacagagtctgggggagctcatcggcactctgaacgcggccaaggtgcggccgacaccgaggtggtttgtgctcccctactgccctatatcgacgttcgcccggcagaagctagatccaagattgcgtgtggctgcgcagaacntgttacaaagtgactaatggggcttttactggggagatcagcccttggcatgatcaaagactgccggacccacngtgggtggtccntggggcactcagagagaaggcatgtctttggggagtcagatgaggtgattgggcggaaagtggtccatgttctggcagagggactcggagataatcgcctgcattggggagaagctagatgcatgaagggaagtcctggacatcagcttgagaaggtggttattacgatgcgagacaaatggtcatcgcacgataacgtgaaggactggagcaaggtctgtcctggcctatgagcctgtgtgggccattggtcctgggcaaggactgcaacagcccaactaggtcccaggaagtaacacgagaagtctccgacggactggctgtaatgtccaacgtctctgatgcggtggctcagagccacccgtatcatttatggaggctctgtgactggggcaacctgccaggcagctggtcagccgactgatgtggaatggttccttgtgggtggtgctacctcaagcccgaatgcgtggacgtcatcttggccaaaaaggagcccattcatttcctaccttcg

SEQ ID NO: 575562 - DNA, 330 bp, Homo sapiens
  misc_feature (81)..(81): n is a, c, g, or t
ggtgtagtaaactaggtctatggtccttagctggagtatctgtgatacaggtcattacagatgccaaggatgtgctaagcnctttctgttaactcattgaattaccaaaaatgattttataggccagtatctttgatccatcgaaacgtaaaaattctcaacaaaattttagcctactgaatccaactacatataaaaaagatcatacaccatgaccatgtgggattcatcccaaattcacaaggatgagtaaacatgtacaaaacattcaatgtcatacaccacattaaaaaaaaaggagagttaaaaaccagaagtgaagttcgacag

SEQ ID NO: 575563 - DNA, 1050 bp, Homo sapiens
gagtaaattctgcagacgtgtttgtccctgcggcgctccgatggggacagtgtggttgagagctggggaacatcgggcactatgagcggctgcggtgtctttctgggcaccatgggtgtggtcgtgcgtgccggggtctggtggtctctaccgagtaaccggtgtgtagtgcgcatcatgtccgctgtatgatgctttcgtgctccagcatgcttttcctgaggcgatgtccaggatgagtgacgtttatcctcatttgcgcagaaagatttaggcgagagatgaatcgttcatttgcaaatccagtcgatgctcgttgcgcgcacccgttggcgaagtattcttcacttgaacgaaggctggtacgtccctgatgctagttgaccgaggagagcgtgccaactccgcagatgcaaaaggttgggggagagagattgaccgagcctagggcggtgttggaggcttgcagatcccacaaagattatggtgtccatggcgctttctccgaataccaatgtactcacgatgtagaggtgagagtcattcaggccatggatgggtccactcattgctgtaggcctggcaagacggcatcaggctatttggagctcatggggggatcatcttgggtttggtgctgaggaggctatgaaagccaatagtatgtttgtgctaaaggctggtctctcgcggagtcgcatttggagcttctgccttcacggaagtccgagcccagtggggagcgattgtgaggctcactgcggagctgagcgcacttctagttgtgagacagaacgtcttatattctccatgtttccaatggtctggagttactactggaaggacggccactatttactgtgttgcacagactgaggtcgttgattccggtgattagtgaaagaaaaaccacagctcctttgaacgagattggggcgcgtatgggaaccgaaaaaaatggcatcggccaactggtaatcttgtagaccccatttggacacctggaggcgaatggtttggtgcaacaacacaaagcgaatgagcatggtc

SEQ ID NO: 575564 - DNA, 142 bp, Homo sapiens
aggcaggacactgtagtaccaaggttagatagaggggtggtgtttgtggtatgactggtgatcatttctgtgcttgggacaggtgtagaagatacaatgctactggtgacgtggtgataactgtattaggtggctgctgggc

SEQ ID NO: 575565 - DNA, 277 bp, Homo sapiens
tttttaaaaaaaagtttttttttttgggccccccgccaaacaagtgggggaacccaggggacaacggggaacccttggtaatttttcaaaattccccccaaaaacccgggcccaaaagaaaaccaaggggccgggggtgttttttgccccccggttttttccccccccaagaaaaaaattttggaaaaaccccccttttctggtttttaaaaaataagttcccccccgccaggttacaaagaaagcccgggcccaaaaaaaggtttttcccccttta

SEQ ID NO: 575566 - DNA, 116 bp, Homo sapiens
aaagctgtatattacttaaatgtacataaatcctttccacaaaggttcttgcgcactatgcatgggaatgtcgttcttcttcggcaatcatgctccttcccttctgtcgtcttctc

SEQ ID NO: 575567 - DNA, 228 bp, Homo sapiens
acgggagtgtaaaggatggcgagtatagctgttccggtgattgtaaaggagggcgagtgatagctgtttccgtggttgtaaaaggaggtgtcggagtcttagctgtggcgctgattgtaactggaggttgagtgatagcggagtggtgattgtaacaggagggcgagtttaagctgagatctatgggtaaaagaagctctctctataacctgagagctggggccttct

SEQ ID NO: 575568 - DNA, 218 bp, Homo sapiens
cgaaaatacacacacatcacaccacagacacacacaccacatatacacacaccacacacacacaccacatacacgcacaccacatgcacacaacacatacatacacaccacatacaccatatatacactcaccacatacacaaacaccacatacacacacaccacatacacgcacaccacattcctctggctatacactgtttgtaggaggtagcact

SEQ ID NO: 575569 - DNA, 180 bp, Homo sapiens
tggagtgtgtgcgtgcaggtctctgtgtgtgtgtgtgtgtgcggggatgtgtgtgtgtatgtctgggtctaggtctctgtgtgtgtgtgtctgggtccaggcatctgtgtgtgtgtgtgtagtatgtgtgttggtgtgcagagtattggtgtggagagtggtgagcaggtgctggtgtga

SEQ ID NO: 575570 - DNA, 266 bp, Homo sapiens
atccccccatttacctcgggataagggttgggtttttgtaaaaaaaaaaccctttaaggttcctttattttttttttgggctgcgggtaggctttttttccaaacttttttttccatcgccccttaatttaaagtggggtcccttaatagtttcccgtccgttttttttttaagtgtgggtggggttccaaacaaacccaatttttttcaaagaaaaaaatttgcaaatttaaagttaaaaaaaaataaaatttctttttttttta

SEQ ID NO: 575571 - DNA, 351 bp, Homo sapiens
caagtatataaaatgcacattgttttataaatctcctcaaggaaatcaagggcagtgcgaaattcttttggttcatgaggtggtgtaaggtaatagaatgaatgggtcaaagttgtgcaaagtgatgcaggtttagtgtcctttatctgaaatgcttgtgaccagagttgtttcatattttgtatttttccatattttgtaatattttcatataccatatgagatcacttgtggatagtaacccaagtctaaacattatattgatttatgtttcatatatatctcttatacactttgcccgaaggtccttttatattatatttttagtaattctgtacattgtagattgga

SEQ ID NO: 575572 - DNA, 370 bp, Homo sapiens
  misc_feature (100)..(100): n is a, c, g, or t
  misc_feature (164)..(164): n is a, c, g, or t
cttttgaaggtcaaactgggggagctgccaaactggatctttatgcgggacttcagtcctagggcattttcggagggtttcaaaaaggtttctcccggtncttccaccagtacctccatgttaagaaggggagcatttcggggattaccatgggggtggcatgntacgggctctttagatactcctttttctacaagcatttcaagcacgagcgggtccgcaaataccccttaaaagggccccctttgccccccccccccccccggccttgggccgagcccctttgttaggaacccaatttccatcggtggtgaatcctttcatatcctaataggaattaaccccccaataaaacatggctggggcgtga

SEQ ID NO: 575573 - DNA, 686 bp, Homo sapiens
  misc_feature (556)..(556): n is a, c, g, or t
gctgggactagaggtgcacaccaccacgcctggctaattttttgtatttttagtagagacggggtttcactgtgttagccaggatgatctcgatctcctgactatgatctgtctgcctcagcctcccaaagtgctgggattacaggtgtgagccactgcacctggcctaatattttaaattggaaatgacccagatgtttaatgagtacctattatttaacttaatataattttagattctaaattatataacaagtttaatcacaagcatttattccattacatttacctaattaatttttttaatagtttactcagattacttttgaaaactgagagttatcattgaaagttatttcccagttaatcatttttatagactgcgaatttcaggttttcctaagtaagaaacttaaggttagataaatggcttctttttttttttttttgccaataacttaggatttagctgctttcattaactaaacaatattaaatgccttatttatgaaattttacatagagataattttcctttgggctgcattcattgctntataaccctcatgccaaattttggcatttagcagagataaatatgaaaccactggttcattaaacttaaccaatagtggatgttgacacttctgaaccattctaattctaatttaattcatgactacttt

SEQ ID NO: 575574 - DNA, 568 bp, Homo sapiens
gatcccatctaggaatgtgagtggagcatctctgccctggcgaccatcgtctgagatgtggtggtgatgctgcctctgcccctgcacccgtctgggatgtgatgtgagctgcctgtgtgccctggctgctgacccgtctgggaggtgaggagcgtctctgcccgggctgacctgtctgagaagtgaggagaccctctgcctggcaacttgcccctgtctgagaagtgatggatgcccctccggccctgcttgcaacaccccgtctgggaacgtgaggagtggtctccacccagccatgacaaacacacaagtaggagaagggacagatgggagcgcgaccaggaaacacagtaacaaagcaagaagagagcaaggaagtggaaaaggcaaggaatggtttgaaggagagaagcctggcgcatgagctggtgcgagtgagagaaaatgataacaacagaagagtgaagggacagataaaagcacaaagagacagaaccaaaaagagaagaagaagaaaggaagaaataactaagacgtaaagaaagaagcgacctaatagaagagaaaa

SEQ ID NO: 575575 - DNA, 235 bp, Homo sapiens
agctcaacccatcccactccaaccccacccaacacacatagcagtgcacaccccacatcacaccctactgtgacataagcccatcctggagattctccaactatagcctggcgttgtagacctatttctgcagatgcacctaggcgcacacacacacacacacacacacacacacacacacacacacacacacacacagactctgctatgtgtgtatatagtctacacacatata

SEQ ID NO: 575576 - DNA, 107 bp, Homo sapiens
tggggactattctgaaccagccagacttctccagtaatgacatctcgaccatgtgtggaggtgtcatatgctgggtcccctgcacctccagagttggtccgagcgga

SEQ ID NO: 575577 - DNA, 420 bp, Homo sapiens
  misc_feature (373)..(373): n is a, c, g, or t
  misc_feature (394)..(394): n is a, c, g, or t
taaattatgctagacattacaaaatttgcctctagattcttgtgggtcttctaggtacatgaccctatcatgtgggcacaaagtaagctctgtttcttcttcagcttcctctgagatattctcttcatctgcagtgttgtgcagtttcaaaatattttatctgggaatggatttctgcttatttttgactggttttcattgaccacttgggtgtttagagaggtctttcataaattttggaaacgtatcaatcttttaagtattgtctctgcaccctactgtctgatgaacttggttgttcccaattggccaatgatgtaatctaaaaataattaaagttttctattactttgatagggtgttttgaattccngtttgactttcagagggaggnggaaaggccataggatgggcctaaac

SEQ ID NO: 575578 - DNA, 870 bp, Homo sapiens
gtttaccgagaataacctacataggcagtgccatcaggtgccaaagttgaagggccaaggaaggctgttagcagtcaggcagtttaaaacggcggcagtgaattggaaccggcccctataggggcagatggggaccggcccaccccacgaggttgatacgttgatttttcaaaagcagtgttatttatacccagggctatcactgtttctaatagatgactctgatcccgtaggatatatatttaataatcccacaaacggaggccagacttctgcgttaacttcagtaacacaagcttctttaagccaaatacatcacttgccactatcattgctgtttgacttgctttgtataaaatgctatgtgtagaggttttattatcacaggtgacatagttcagcaggaggcatggaagggctagatcttcattagttacattcatgaaattgtgatggtaacgtattatacagaatgtatccatcaggcagacaaggggtctgaagtcacaggctcagtagcccaactcagacacaaagccacagacaatatggatgatggtcctcttacccagaaactggagacaactttgcaggcaccctggctgcgttcctgataatgcctagagcatgtagcaatgttcaaggcaggtgccttggaatctgctgtgagttatgcagtactaaccaaacaaagttgctaaggatgagatgttgcaacatttcttgtgtgcacttttttttcctgacatctttttttccttttaggattcattaagtcatatacttagtcccctgcaaagaagaagacagatgtcccagagcagactgaaagcggggcgtgggatcctaggcaatgcaggagggcaggtg

SEQ ID NO: 575579 - DNA, 949 bp, Homo sapiens
  misc_feature (23)..(23): n is a, c, g, or t
  misc_feature (28)..(28): n is a, c, g, or t
  misc_feature (43)..(43): n is a, c, g, or t
  misc_feature (62)..(62): n is a, c, g, or t
  misc_feature (67)..(67): n is a, c, g, or t
  misc_feature (297)..(297): n is a, c, g, or t
  misc_feature (351)..(351): n is a, c, g, or t
  misc_feature (378)..(378): n is a, c, g, or t
  misc_feature (380)..(380): n is a, c, g, or t
  misc_feature (413)..(413): n is a, c, g, or t
  misc_feature (430)..(430): n is a, c, g, or t
  misc_feature (450)..(450): n is a, c, g, or t
  misc_feature (453)..(453): n is a, c, g, or t
  misc_feature (456)..(456): n is a, c, g, or t
  misc_feature (459)..(459): n is a, c, g, or t
  misc_feature (486)..(486): n is a, c, g, or t
  misc_feature (490)..(490): n is a, c, g, or t
  misc_feature (511)..(511): n is a, c, g, or t
  misc_feature (520)..(520): n is a, c, g, or t
  misc_feature (546)..(546): n is a, c, g, or t
  misc_feature (551)..(551): n is a, c, g, or t
  misc_feature (590)..(590): n is a, c, g, or t
  misc_feature (667)..(667): n is a, c, g, or t
  misc_feature (688)..(688): n is a, c, g, or t
  misc_feature (694)..(694): n is a, c, g, or t
  misc_feature (707)..(707): n is a, c, g, or t
  misc_feature (711)..(711): n is a, c, g, or t
  misc_feature (713)..(713): n is a, c, g, or t
  misc_feature (720)..(720): n is a, c, g, or t
  misc_feature (726)..(726): n is a, c, g, or t
  misc_feature (734)..(734): n is a, c, g, or t
  misc_feature (746)..(746): n is a, c, g, or t
  misc_feature (786)..(786): n is a, c, g, or t
  misc_feature (790)..(790): n is a, c, g, or t
  misc_feature (794)..(794): n is a, c, g, or t
  misc_feature (804)..(805): n is a, c, g, or t
  misc_feature (811)..(811): n is a, c, g, or t
  misc_feature (889)..(889): n is a, c, g, or t
  misc_feature (927)..(927): n is a, c, g, or t
ttttttttaagaaagatgccagntcttnattaccagggaagcngtgtgcacgcgcgtggagngtccnttggagctgaccgggcccttaccttctcctgcttgtcagaggtgagtcctggtacccagcacggtggcctccgggaggctttgataggtcagcctttgctgcctcccagctcagggctcctccaaggaacctgcggggccccatgtgcccacagcccgaggagggaagcaccgaccgccctcctcgtggcacgctgcactccagcgctgggcacttcacctgcttcctgncttgcggtggtcaggctcgatactgactccactgatcggcacattgagttccanaagcatgcaaaccgcgtggatgctgtngngacattgtttgcaccgtttatacaaccagacanctttttagactaaattngtgtccaaactaacacgcanggnaanggnctccagctgcagctccctgggtctgtnaggncggggagcggttctaccggantattttttnttttttttgtattttttcttttttantcganaaggcggtctggatgtgctcatacgtgggcaggtcagtnaggtcacccagggcggccactgccggcttccctcggagcatcttagaagcgactctcttcacatcttccggcttcangttgcggatgagcgtgcacanctcgtncggcactttctgnaacnantggcagnacctgnctccccanatcctcgaagancacaggcctggattccaggttcatcatgagcattgatggnagcngcgncttggctcgnnccagcnccaccgggtccacggttccgcccattaaaataaactcctttgtgatgatttctaccatttctcgaacctgtcttgggncggcgctggcatggatgcaaaggagggcagtgtcctcntagctgtggtggtaggaggtcg

SEQ ID NO: 575580 - DNA, 180 bp, Homo sapiens
cacaaacaaatggtgtaatgctagcctggtcatccaaatattataatttttttttatattttttgggatttgttttgagacagggtctcactctgctgcccaggctgcagggcagtgatgcaatcatggctcactgtagcctcgacctcctgggctcaggtgatcctccctaagacccta

SEQ ID NO: 575581 - DNA, 1990 bp, Homo sapiens
  misc_feature (23)..(23): n is a, c, g, or t
  misc_feature (28)..(28): n is a, c, g, or t
  misc_feature (43)..(43): n is a, c, g, or t
  misc_feature (62)..(62): n is a, c, g, or t
  misc_feature (67)..(67): n is a, c, g, or t
  misc_feature (297)..(297): n is a, c, g, or t
  misc_feature (351)..(351): n is a, c, g, or t
ttttttttaagaaagatgccagntcttnattaccagggaagcngtgtgcacgcgcgtggagngtccnttggagctgaccgggcccttaccttctcctgcttgtcagaggtgagtcctggtacccagcacggtggcctccgggaggctttgataggtcagcctttgctgcctcccagctcagggctcctccaaggaacctgcggggccccatgtgcccacagcccgaggagggaagcaccgaccgccctcctcgtggcacgctgcactccagcgctgggcacttcacctgcttcctgncttgcggtggtcaggctcgatactgactccactgatcggcacattgagttccanaagcatgaaggcatgtcagagcgggagcgacaggtgatgaagaagctgaaggaggtggtggacaaacaacgcgacgagatccgcgccaaggacaggaagctgggcctgaaaaatgaggacgttgaggctttacagcagcagcagacacggctgatgaagatcaaccatgaccttcggcaccgggtcacggtggtggaggcccaggggaaagccctgatcgaacagaaggtggagctggaggcagacctgcagaccaaggagcaggagatgggcagcctgcgagcagagctggggaagttgcgagagaggctgcagggggagcacagccagaatggggaggaggagcctgagacggagccggtgggagaggagagcatctccgacgcagagaaggtggccatggatctcaaggaccccaaccgcccccggttcaccctgcaggagctgcgggacgtgctgcacgagaggaacgagctcaagtccaaggtgttcttgctgcaggaggagctggcttactataagagtgaagaaatggaagaggaaaaccgaataccccaacccccacccatcgcccacccgaggacgtccccccagccggagtcgggcatcaagcgactgtttagcttcttctcccgagataagaagcgcctggccaacacacagagaaacgtgcacatccaggagtcctttggacagtgggcaaacacccaccgcgatgacggttacacagagcaaggacaggaagccctgcagcatctgtgaccttggcccatctccaccctccaacctggactgcccgccaccagcgcctgcaaccgaactgcagcccaggggtcattgctgcctcaagcctctcggtgcagatgcaccctgaaaactgacccctcaaacagactgtctgatttgaggatggacattgaaaaactgacgccaaactctaaagaaatgtttatttatacccagggctatcactgtttctaatagatgactctgatcccgtaggatatatatttaataatcccacaaacggaggccagacttctgcgttaacttcagtaacacaagcttctttaagccaaatacatcacttgccactatcattgctgtttgacttgctttgtataaaatgctatgtgtagaggttttattatcacaggtgacatagttcagcaggaggcatggaagggctagatcttcattagttacattcatgaaattgtgatggtaacgtattatacagaatgtatccatcaggcagacaaggggtctgaagtcacaggctcagtagcccaactcagacacaaagccacagacaatatggatgatggtcctcttacccagaaactggagacaactttgcaggcaccctggctgcgttcctgataatgcctagagcatgtagcaatgttcaaggcaggtgccttggaatctgctgtgagttatgcagtactaaccaaacaaagttgctaaggatgagatgttgcaacatttcttgtgtgcacttttttttcctgacatctttttttccttttaggattcattaagtcatatacttagtcccctgcaaagaagaagacagatgtcccagagcagactgaaagcggggcgtgggatcctaggcaatgcaggagggcaggtg

SEQ ID NO: 575582 - DNA, 358 bp, Homo sapiens
ctggaatgggaagtcttttccccactggatgtgcctgtttggtgggttttggaccttcccagactacatttttaggaaaggcctgtttggagtagtacacttaaagaccctggccttttttggtggaaaactgttccaattttgggggttttttaagtgggtaattcttttcccatcctgtttttttttttcatttcaggcagcatggggtccacttttgtccccaaacctaatgttttaatccaaatgcaaattggttccacatttttactggagggtaatcagtttttaaaattcacacacatgtaatcgaaacgcaatactataaagttctactggtgagactcctgaaaaaaaa

SEQ ID NO: 575583 - DNA, 1772 bp, Homo sapiens
tctgggcgcccggcattggaaccccccggcccaagcctgtcaagccccgcaacagcagcggggtcagaaaaccaagcagttcatgcccaccctctcccaaagggatgtcaacttctcagaggaggagttccagaagcataaaggcatgtcagagcgggagcgacaggtgatgaagaagctgaaggaggtggtggacaaacaacgcgacgagatccgcgccaaggacaggaagctgggcctgaaaaatgaggacgttgaggctttacagcagcagcagacacggctgatgaagatcaaccatgaccttcggcaccgggtcacggtggtggaggcccaggggaaagccctgatcgaacagaaggtggagctggaggcagacctgcagaccaaggagcaggagatgggcagcctgcgagcagagctggggaagttgcgagagaggctgcagggggagcacagccagaatggggaggaggagcctgagacggagccggtgggagaggagagcatctccgacgcagagaaggtggccatggatctcaaggaccccaaccgcccccggttcaccctgcaggagctgcgggacgtgctgcacgagaggaacgagctcaagtccaaggtgttcttgctgcaggaggagctggcttactataagagtgaagaaatggaagaggaaaaccgaataccccaacccccacccatcgcccacccgaggacgtccccccagccggagtcgggcatcaagcgactgtttagcttcttctcccgagataagaagcgcctggccaacacacagagaaacgtgcacatccaggagtcctttggacagtgggcaaacacccaccgcgatgacggttacacagagcaaggacaggaagccctgcagcatctgtgaccttggcccatctccaccctccaacctggactgcccgccaccagcgcctgcaaccgaactgcagcccaggggtcattgctgcctcaagcctctcggtgcagatgcaccctgaaaactgacccctcaaacagactgtctgatttgaggatggacattgaaaaactgacgccaaactctaaagaaatgtttatttatacccagggctatcactgtttctaatagatgactctgatcccgtaggatatatatttaataatcccacaaacggaggccagacttctgcgttaacttcagtaacacaagcttctttaagccaaatacatcacttgccactatcattgctgtttgacttgctttgtataaaatgctatgtgtagaggttttattatcacaggtgacatagttcagcaggaggcatggaagggctagatcttcattagttacattcatgaaattgtgatggtaacgtattatacagaatgtatccatcaggcagacaaggggtctgaagtcacaggctcagtagcccaactcagacacaaagccacagacaatatggatgatggtcctcttacccagaaactggagacaactttgcaggcaccctggctgcgttcctgataatgcctagagcatgtagcaatgttcaaggcaggtgccttggaatctgctgtgagttatgcagtactaaccaaacaaagttgctaaggatgagatgttgcaacatttcttgtgtgcacttttttttcctgacatctttttttccttttaggattcattaagtcatatacttagtcccctgcaaagaagaagacagatgtcccagagcagactgaaagcggggcgtgggatcctaggcaatgcaggagggcaggtg

SEQ ID NO: 575584 - DNA, 377 bp, Homo sapiens
ctttccaggaagaagaaacaactggccatcagcaaagatctggagtcatgaaactaccccccgaggatggctgggaaaagaagatccaggaactgctggtgtctgtactagttaccgccctgataggaaaggcagaagccatagctctcaccaaacctccagcatttaaactttgctgtggagtctacgtgaccccaccacgaggtgaccctcacctttccctccatacctggggagacagacatggcagtggtcactgaaccctgggatgacacgctacctcatcctttatgacaccctttgatatgttgcttttgatgcatttctttgtatcccatttggtttcatttttagcaataaactcattcttggtaaaa

SEQ ID NO: 575585 - DNA, 1448 bp, Homo sapiens
  misc_feature (23)..(23): n is a, c, g, or t
  misc_feature (28)..(28): n is a, c, g, or t
  misc_feature (43)..(43): n is a, c, g, or t
  misc_feature (62)..(62): n is a, c, g, or t
  misc_feature (67)..(67): n is a, c, g, or t
  misc_feature (297)..(297): n is a, c, g, or t
  misc_feature (351)..(351): n is a, c, g, or t
ttttttttaagaaagatgccagntcttnattaccagggaagcngtgtgcacgcgcgtggagngtccnttggagctgaccgggcccttaccttctcctgcttgtcagaggtgagtcctggtacccagcacggtggcctccgggaggctttgataggtcagcctttgctgcctcccagctcagggctcctccaaggaacctgcggggccccatgtgcccacagcccgaggagggaagcaccgaccgccctcctcgtggcacgctgcactccagcgctgggcacttcacctgcttcctgncttgcggtggtcaggctcgatactgactccactgatcggcacattgagttccanaagcatgaaggcatgtcagagcgggagcgacaggtgatgaagaagctgaaggaggtggtggacaaacaacgcgacgagatccgcgccaaggacaggaagctgggcctgaaaaatgaggacgttgaggctttacagcagcagcagacacggctgatgaagatcaaccatgaccttcggcaccgggtcacggtggtggaggcccaggggaaagccctgatcgaacagaaggtggagctggaggcagacctgcagaccaaggagcaggagatgggcagcctgcgagcagagctggggaagttgcgagagaggctgcagggggagcacagccagaatggggaggaggagcctgagacggagccggtgggagaggagagcatctccgacgcagagaaggtggccatggatctcaaggaccccaaccgcccccggttcaccctgcaggagctgcgggacgtgctgcacgagaggaacgagctcaagtccaaggtgttcttgctgcaggaggagctggcttactataagagtgaagaaatggaagaggaaaaccgaataccccaacccccacccatcgcccacccgaggacgtccccccagccggagtcgggcatcaagcgactgtttagcttcttctcccgagataagaagcgcctggccaacacacagagaaacgtgcacatccaggagtcctttggacagtgggcaaacacccaccgcgatgacggttacacagagcaaggacaggaagccctgcagcatctgtgaccttggcccatctccaccctccaacctggactgcccgccaccagcgcctgcaaccgaactgcagcccaggggtcattgctgcctcaagcctctcggtgcagatgcaccctgaaaactgacccctcaaacagactgtctgatttgaggatggacattgaaaaactgacgccaaactctaaagaaatgtttatttatacccagggctatcactgtttctaatagatgactctgatcccgtaggatatatatttaataatcccacaaacggaggccagacttctgcgttaacttcagtaacacaagcttctttaagccaaatacatcacttgccacta

SEQ ID NO: 575586 - DNA, 1260 bp, Homo sapiens
  misc_feature (1)..(1): n is a, c, g, or t
  misc_feature (725)..(725): n is a, c, g, or t
nttctggagggggtctcccccccaggtgtgggtcccgccatatatccgcgggcgtgtgttatgacgctgtgcggggccccgtgtgtactgttttgcccgggtctccttaaggggtttatcccggagggcgccctttgggggttgtcgcggaaaatttctggcgcccacctgtggcgccggggtttatcctccgggctccgccccgcgtgggtgcgacccccagtggggacgccccccccgtgtggcgcccgacacgcgtttgttgcgttcgcctgggtctcgaccaatgacgggcccacagcgctttccccacatttagtccgagagagaggtgctccaaacgagagaggagtccaacgcgagaatgttggtcatatatatcctcgcggggggcggctcgccgcacgcacacacccccttggggtgaccccctcgaagacggtgtctcgcccgctgccgggagtttcccacacactgtcccgctcacgcgctgagagagccccttctccccgtgtgtctcttcgggagccacacactgttgggctgctgtctgtgggtggtccgcgcctcctgtggtgtcacacacacacccccttctctggttcacatggggagacacaccccgctcgtgcttgtccctctcgtgggtcttttccacatatggcgcacatgtttgcctcgtatactctccgcgtgtaagatttctataggggacacacgcgaanagaaatgtggtttgtggcgaacacgctgagtaccgcggggagcccaacagaggccatatatgcgcctctcacacccgccgcacacaggtgtccgctgagaacacatcttgtgggccccctgagatttgtgtggacacattttctacagtgagaccacagttctgtgtgttgtggtcacatctaatctcccaccgggtgttgggtctcgttccacaggcgccacagtctgagatatagagatcacacgagaggcgcacactcactattgagaggccacagagaagcttcttgccccggtgagaccctggatatctccacccggatctcttatattttccacattctctctgcccctgccccccagagggccacaggagactcttgccccttgaaccctgatattccacacttatcctccacccttccacattcctctgccctggtctcccaccacacccgagagtcctgcatcagcccctttatcctcacccgcttttttaccatggccttccataaagtgtaaaagtttctggta

SEQ ID NO: 575587 - DNA, 1496 bp, Homo sapiens
ctggccacagtttcctgactgacattaaacagatacagaactatttaaattagagatactcatccgtttacaacagaatcctcttatattccacacggttttcaagtattcctttctctgcgtcattagggtaattaaagaaacccaagatttgtttcagcagcttttgatttccactggtaacgggataaatcctccatagcggctaacgtggaagacacctcacacatcacatcagcatgcatgccttgcccataccgcgtgacctccaaggtaccgtgtccaaatgacacgcagaataccctgctgctttcttggaataactttgacctgcacccccaactttgtctttcacaccttgaattgatttgctcccttctaagtttgctgctatatgtctccggcattgcaaaaaacgtgacttgcacagcaaagggtcagctctcatttctgtgtttgctttcccttccaaaggtttagcttcttctcccgagataagaagcgcctggccaacacacagagaaacgtgcacatccaggagtcctttggacagtgggcaaacacccaccgcgatgacggttacacagagcaaggacaggaagccctgcagcatctgtgaccttggcccatctccaccctccaacctggactgcccgccaccagcgcctgcaaccgaactgcagcccaggggtcattgctgcctcaagcctctcggtgcagatgcaccctgaaaactgacccctcaaacagactgtctgatttgaggatggacattgaaaaactgacgccaaactctaaagaaatgtttatttatacccagggctatcactgtttctaatagatgactctgatcccgtaggatatatatttaataatcccacaaacggaggccagacttctgcgttaacttcagtaacacaagcttctttaagccaaatacatcacttgccactatcattgctgtttgacttgctttgtataaaatgctatgtgtagaggttttattatcacaggtgacatagttcagcaggaggcatggaagggctagatcttcattagttacattcatgaaattgtgatggtaacgtattatacagaatgtatccatcaggcagacaaggggtctgaagtcacaggctcagtagcccaactcagacacaaagccacagacaatatggatgatggtcctcttacccagaaactggagacaactttgcaggcaccctggctgcgttcctgataatgcctagagcatgtagcaatgttcaaggcaggtgccttggaatctgctgtgagttatgcagtactaaccaaacaaagttgctaaggatgagatgttgcaacatttcttgtgtgcacttttttttcctgacatctttttttccttttaggattcattaagtcatatacttagtcccctgcaaagaagaagacagatgtcccagagcagactgaaagcggggcgtgggatcctaggcaatgcaggagggcaggtg

SEQ ID NO: 575588 - DNA, 187 bp, Homo sapiens
cccgacggaaaggagcatgcaacaagcgggcttgactcgagaatacgggtcagtctgcgactgtcttgtcagagtgactgatgaattgaccttaatgaacagcgtctcgataatcgattacaacccgctgtctttcgagcgaagtcgaacgggcaaggacccgaccaggacaatgtcgaaaaacggt

SEQ ID NO: 575589 - DNA, 691 bp, Homo sapiens
gagcgtagactatgctctacaagccataatgacatcggaacacatagaggctatcatctcggggcctgcgactggtgttctaggtaccggtctcagcctccttagtcgagccgacgtgtgggcgcaccccgtggtatgcttcttaggtacttgaccgatatactaaccagcggttgatcggtcacagggccgtgacggttatgtaactaagtgctatcgttcgaataagtcaatgatccgcgactctagtagatgcggcatgtgcttgtggccatcttgacctatattacgcgccgtaagtaactcggggcccgccggatatggtgtttccccgtatctgccgatgtatgcttctgattcttatcatcgcgtttctcctactctctgctcgcatctgctagtagtggaggccaggagcaggaacaggttgaacaagtcgtacccgtcccattagacagggaacgtactcccacccgtggagcctccgtagacgctaacgcatctttctccttaacacctagcaggttggtctcctcgtatctgtaggggccatcaagtttgcagtcacaaacaacttatcaactattgaaaccgccgctggctataacccaagtaccaaaacgcccctcttcgatctgatccggtcctaagtcacagcaagattcctacattctccgtatctctcccagta

SEQ ID NO: 575590 - DNA, 281 bp, Homo sapiens
  misc_feature (15)..(15): n is a, c, g, or t
gcctctggagtgtanagaataggtggcatcatgatcgtgatggtccggtggactgtcagcagttgcgtggtggagacagaggtggcttccgtggtgcgcggggcatggaccgaggtggctttggtggaggaagacgaggtggccctggggggccccctgggactttgatggaacagatgggaggaagacagaggaggacgtggaggacctggcaatacatggataacaggcgagcatcttcagggacgcgccagaaatcggccctactagatgcagagacc

SEQ ID NO: 575591 - DNA, 237 bp, Homo sapiens
ggctatcacatatcacgggagtaactatccacttccatgctatcggatgtgtagggctccatgcaagaacttggaagaaaaaacagggcgggatggcttttgtttaaatgagcccgatcattcctttttctgcaactgagaattatattttcatcattggcttctagaagtcctgcaattctttacttttctttggtgcattattatctaaggtgccatcactggataatgtgatag

SEQ ID NO: 575592 - DNA, 442 bp, Homo sapiens
gagctgtagagagtgagttgagcatagtttgtgattttgagggcctctaaaagtgttaaagcagcggcagccgctgcacggagacatgagggctaggctaaaacagtaaggtcaagttgtttgggcagaaaggctacagggtgcggtcctggctcttgtgtaataattctgaccgaactaaccatgcctaggaaggaaaggagttgttgttttgtaagggatcgaggtttgggagattaatcggacacaagcagcagggagagcacgtgtgtttttatgagaattatgccaagataggtaacagatgaggatgaaatttgggcttgactgaagtaatggggtctgtctgtgaagccttgaggcagtacagcccaggtaatttgctgagcctgattggtgtcagggtcagtccaagtgaaagcaaagagaggctgggatgaca

SEQ ID NO: 575593 - DNA, 134 bp, Homo sapiens
tggtgctagggctcgccataggtacttgtgatatcattttccttaataggtagggaagccagccaactatcttggcatctctggaggtaggtgtaaagcgaagctcaagtatatacaagcattcaaatatgctc

SEQ ID NO: 575594 - DNA, 191 bp, Homo sapiens
aactatcatcagtgatacagcaattgaaaagctcaagaaagcttattaactttaaccacaaattaataaacattccaaccgaaagatacctcttattagttcccttcatctaattcagagggtttgttgacattatctgtgcctttgcatgcccttatgctgttttctagtactcacatatataatctgta

SEQ ID NO: 575595 - DNA, 143 bp, Homo sapiens
ggtgggcttgcccctaaagcctggcttgggttgaaaagtgttcccgccctaaggccttggtgccctgtaacctctttatgtcctaccggggttcttcctgaatttgagttttcctttaaatactcccttttggagggaatttt

SEQ ID NO: 575596 - DNA, 241 bp, Homo sapiens
agccgtcacaaacaatcatcgccctcctgctctgaggacagctctttgcagtgaactcaggcaatgacgccacggatatcgcagatgacgactgcccgaagccccccgagattgaacatgactatgtggagctctcgacccgctactagtgcaagaactactacaaactgcatacagaagaaggcagagtaccattttaacggtgggtgtcgtgaataaataaggttatagaatatgcacc

SEQ ID NO: 575597 - DNA, 123 bp, Homo sapiens
agttgcccgacacccccgtaagtgcccacaaggcagcttcctgtgtggcctatggcacagcccctcgtagtgagtaatttggggggtcctgccgtgtgctgtgggtgggtttcgtctgccgct

SEQ ID NO: 575598 - DNA, 416 bp, Homo sapiens
agatgggtttctagagtatatcccatcagaaatattgcaactagcttaaaataccagtacacgtgagtgtgaacattttaagtagttttatagtgtcccccagtcccgggtaggcaccatacgaactttctgagagtgtgactactttaaatcctgcatatagatagaatcatgcaatactatgcctgtggaaggtggttgcgtgcattgagggataatgacctccaggtacccccatgacgtggcatatgacgaggatttcccctttgtaaggttgaataatattcctgcgtgtgtgtgtgtgtgtgtgtgtgagttagtggattatctatagttgaaccgggggtgtgctgtattggtgctgaaggtagattcaagacctcacgaatgtcaaattcctggagccggatagcttg

SEQ ID NO: 575599 - DNA, 438 bp, Homo sapiens
gctctcagtgagagtatactatgatgagtatgaggaattgatatcaccgggttgaaggtcagagggaagctggcaaggtatgctatttgtgctatctaatggcgacaaaaatacaatattgcttcgatttactttagggagtgtaggcagagaagtcgtggctagtatctggggctatctttaggtccttcctaccataatagtcctcatggaaccaaaatgggggtacagacatgttacttgagtatgtctctcttacactatacaatctaggacagaggccaggcgtggtggttcatatcttgtaatccccacacttaggaggccaaggcaggagtgatccctctgagtccaggagttcgagaccagtgtaagcaatatagtaagacctatgttctacaaaaaatacaaaattagccaggcatggtggtgcaaacc

SEQ ID NO: 575600 - DNA, 913 bp, Homo sapiens
aaggataatgggaagtcgatcggatccctgcggatgcctggtcgctgcggcgatctcatcatgaccgcatttacgtcgtatgtgcctcgaacccggagtaccgttccattcatggtgctggtaccttgcttcaacacgtggctgtggtgcgagtgggaggaggcgcctcgaggacatcgcagtggaagtcgttgatggactcatcttgaggggctacggacggagtcagctcctttgaatatgggtatagcctgggcgacacttaacgaaaacgaggcatgagtctgtgggagaggtacttggctgcacggagaaggagtggatctcccaagactgtacattagcttggggaccacgtctggattcctagactggcacttggggagaggatagagaaagagacagggcttggagtaatccctaagcattcagtgcatgctattgagaatccggtggcctaatcgatgtgcaatgttgtttgcggcacggtttgaccgtgggtatatttgacctcacacacacgacatgtgttcttgactcgacgttagataactagtgctacccctctaccatcttcactttaagaactcctgcattgacctgccaaggaatttcgcggagtccagtgacccttgacgggaccagacctaagtgaaggtaggcgaaacgaccggatctccacaaaactattcgactggccctgggggttttaactgaattcttgtacgaagttcttgcgaacctcttaaattcagttacctcaatagattcactagagctgttgtaggctgtttaacccctcttgaaaagatactgggagcacctacagttgagaagtgggccaagccttgcatagagggtgatggaagccttgctggcgtaaccaattaccggcatggggcataatataagg

SEQ ID NO: 575601 - DNA, 838 bp, Homo sapiens
  misc_feature (111)..(111): n is a, c, g, or t
  misc_feature (615)..(615): n is a, c, g, or t
  misc_feature (620)..(620): n is a, c, g, or t
  misc_feature (649)..(649): n is a, c, g, or t
  misc_feature (673)..(673): n is a, c, g, or t
  misc_feature (747)..(747): n is a, c, g, or t
  misc_feature (751)..(751): n is a, c, g, or t
acagtgcttgttcggggcgctccgctggcttcttggacaattgcgccatgtgtgctgctcggctagcggcggcggcggcccagtcggtgtatgccttctcggcgcgcccgntggccggcggggagcctgtgagcctgggctccctgcggggcaaggtactacttatcgagaatgtggcgtccctctgaggcaccacggtccgggactacacccagatgaacgagctgcagcggcgcctcggaccccggggcctggtggtgctcggcttcccgtgcaaccagtttgggcatcaggagaacgccaagaacgaagagattctgaattccctcaagtacgtccggcctggtggtgggttcgagcccaacttcatgctcttcgagaagtgcgaggtgaacggtgcgggggcgcaccctctcttcgccttcctgcgggaggccctgccagctcccagcgacgacgccaccgcgcttatgaccgaccccaagctcatcacctggtctccggtgtgtcgcaacgatgtgcctggaactttgagaagttcctggtgggccctgacggtgtgcccctacgcaggtacagccgcgcttccagaccattgacatcgagcctgacatngaagncctgctgtctcaagggccagctgtgctanggcgccccttctaccccggtggtntggcagttgcagtgctgctgtctcgggggggttttcatctatgagggtgtttcttctaaacctacgagggaggnacanctgatcttacagaaaatacacttgagagggtggtgtctgttgatcccagttttgcaacagggagttccatataagtgcggggttggg

SEQ ID NO: 575602 - DNA, 825 bp, Homo sapiens
  misc_feature (111)..(111): n is a, c, g, or t
  misc_feature (615)..(615): n is a, c, g, or t
  misc_feature (620)..(620): n is a, c, g, or t
  misc_feature (649)..(649): n is a, c, g, or t
  misc_feature (673)..(673): n is a, c, g, or t
  misc_feature (747)..(747): n is a, c, g, or t
  misc_feature (751)..(751): n is a, c, g, or t
acagtgcttgttcggggcgctccgctggcttcttggacaattgcgccatgtgtgctgctcggctagcggcggcggcggcccagtcggtgtatgccttctcggcgcgcccgntggccggcggggagcctgtgagcctgggctccctgcggggcaaggtactacttatcgagaatgtggcgtccctctgaggcaccacggtccgggactacacccagatgaacgagctgcagcggcgcctcggaccccggggcctggtggtgctcggcttcccgtgcaaccagtttgggcatcaggagaacgccaagaacgaagagattctgaattccctcaagtacgtccggcctggtggtgggttcgagcccaacttcatgctcttcgagaagtgcgaggtgaacggtgcgggggcgcaccctctcttcgccttcctgcgggaggccctgccagctcccagcgacgacgccaccgcgcttatgaccgaccccaagctcatcacctggtctccggtgtgtcgcaacgatgtgcctggaactttgagaagttcctggtgggccctgacggtgtgcccctacgcaggtacagccgcgcttccagaccattgacatcgagcctgacatngaagncctgctgtctcaagggccagctgtgctanggcgccccttctaccccggtggtntggcagttgcagtgctgctgtctcgggggggttttcatctatgagggtgtttcttctaaacctacgagggaggnacanctgatcttacagaaaatacaccccagaaaggtggggggcccgtttaccacacccttgcacacgcagtttcccct

SEQ ID NO: 575603 - DNA, 1171 bp, Homo sapiens
  misc_feature (111)..(111): n is a, c, g, or t
  misc_feature (948)..(948): n is a, c, g, or t
  misc_feature (953)..(953): n is a, c, g, or t
  misc_feature (982)..(982): n is a, c, g, or t
  misc_feature (1006)..(1006): n is a, c, g, or t
  misc_feature (1080)..(1080): n is a, c, g, or t
  misc_feature (1084)..(1084): n is a, c, g, or t
acagtgcttgttcggggcgctccgctggcttcttggacaattgcgccatgtgtgctgctcggctagcggcggcggcggcccagtcggtgtatgccttctcggcgcgcccgntggccggcggggagcctgtgagcctgggctccctgcggggcaaggtactacttatcgagaatgtggcgtccctctgaggcaccacggtccgggactacacccagatgaacgagctgcagcggcgcctcggaccccggggcctggtggtgctcggcttcccgtgcaaccagtttgggcatcagtgctgcgccgggcggattcggggcggggcggggggcggactgtgcggtagatggctggtgggctgccggccggtgtgcatagcgtgggtgccgtacggctccatagcggcggagcagtctgggctgactactcgtcgttctcctttcgtagtagctgcggaagcattgcgtcgaaattccgtctccgccgcttggggatagccgcatggcagggcacaaatcccgtggtgactcataggaagatctcgcctgggttggtggtaaagaacgttatctcatccgtacctctttgaccccgtgtttcgtaagcatggccttctctcctgtaggagagagaacgccaagaacgaagagattctgaattccctcaagtacgtccggcctggtggtgggttcgagcccaacttcatgctcttcgagaagtgcgaggtgaacggtgcgggggcgcaccctctcttcgccttcctgcgggaggccctgccagctcccagcgacgacgccaccgcgcttatgaccgaccccaagctcatcacctggtctccggtgtgtcgcaacgatgtgcctggaactttgagaagttcctggtgggccctgacggtgtgcccctacgcaggtacagccgcgcttccagaccattgacatcgagcctgacatngaagncctgctgtctcaagggccagctgtgctanggcgccccttctaccccggtggtntggcagttgcagtgctgctgtctcgggggggttttcatctatgagggtgtttcttctaaacctacgagggaggnacanctgatcttacagaaaatacacttgagagggtggtgtctgttgatcccagttttgcaacagggagttccatataagtgcggggttggg

SEQ ID NO: 575604 - DNA, 693 bp, Homo sapiens
ggtcatctgatagccttattgcagtcttcatcattttcatcattggttcctatgtagattattggacagtttattgtagcactacataactgtattagtaagacatatgctgtcacacatgcatattaggcactttcatcattgaaacaagtcctgcatagcctatgtatacaaatagcaagaatgtttgctgttatatgaacaagatgtaatggggtggggggcaggggtaatttcaagttattaagtttataaaatgaactagcaattttgtacctggttgactctgtggtgcacttacctctgatagtgacgttgaattccggtatgtagaacaggggtgtagatggtattgtcagtttgctgttaacaagagtgagcaatgtccctctgtgtcctgtcagacttaaaggctgtcagtgtacacgtgggtattcgaataccagaccttacgtgtcacatagaataaatacaaggtggtatctagacgcatgtgaaatcggagtataaagttgctggctcttaggagagtgtgatctgaatgagtatggactgaagcatctatatatgcaatctagttgaaaagaagcttaattgcgggtattatggtcttgattgtgattgcagttttatggtatttataaggagatttgagctcattggggctgtttgaaatgctgtggctagaagggg

SEQ ID NO: 575605 - DNA, 892 bp, Homo sapiens
  misc_feature (111)..(111): n is a, c, g, or t
  misc_feature (518)..(518): n is a, c, g, or t
  misc_feature (653)..(653): n is a, c, g, or t
  misc_feature (658)..(658): n is a, c, g, or t
  misc_feature (687)..(687): n is a, c, g, or t
  misc_feature (711)..(711): n is a, c, g, or t
  misc_feature (785)..(785): n is a, c, g, or t
  misc_feature (789)..(789): n is a, c, g, or t
acagtgcttgttcggggcgctccgctggcttcttggacaattgcgccatgtgtgctgctcggctagcggcggcggcggcccagtcggtgtatgccttctcggcgcgcccgntggccggcggggagcctgtgagcctgggctccctgcggggcaaggtactacttatcgagaatgtggcgtccctctgaggcaccacggtccgggactacacccagatgaacgagctgcagcggcgcctcggaccccggggcctggtggtgctcggcttcccgtgcaaccagtttgggcatcaggagaacgccaagaacgaagagattctgaattccctcaagtacgtccggcctggtggtgggttcgagcccaacttcatgctcttcgagaagtgcgaggtgaacggtgcgggggcgcaccctctcttcgccttcctgcgggaggccctgccagctcccagcgacgacgccaccgcgcttatgaccgaccccaagctcatcacctggtctccggtgtgtcgcaaaaancccggaaaaattaagttttttttgggcccccctgcgatgtgcctggaactttgagaagttcctggtgggccctgacggtgtgcccctacgcaggtacagccgcgcttccagaccattgacatcgagcctgacatngaagncctgctgtctcaagggccagctgtgctanggcgccccttctaccccggtggtntggcagttgcagtgctgctgtctcgggggggttttcatctatgagggtgtttcttctaaacctacgagggaggnacanctgatcttacagaaaatacacctcgagatgggtgctggtcctgttgatcccagtctctgccagaccaaggcgagtttcccccctaataaagtgccgggtgtca

SEQ ID NO: 575606 - DNA, 1252 bp, Homo sapiens
agcggatattgacccgaggccccggtccaatatggcgagctccacggtgtcgctggcttctcctccggcttggcactattcggcttcctctgggaagcgtccggcgcgctcaactcgggggcctcccgtcgatcgagcgaacttgactactggccctatccacggcgcgcgcgcgacgcctaccccacgggactgcacacgggtgctgcgccgagaaagccgggattgcacgatgagttggcctccgcctcccgcgaactcccggtcgaccgagtcggtctggctcgtgcgacaactcttcgtgtcgcacttcggagggaccagcgcggtaggcaacggccaccgtagacgcgggccgtgagagcccctgagcagcacttactgcggtgctggagcccggtgggcccggcggctagcgcggcgagacagacgcgaccaccgtggaggagacggtgcgggcggcgactgccgtgtcgcccagaagcggagggttcctaacctggatgaactcagggcgagtgcctgggtgaacgtggtgagcgacgagcggcagggtgagcagtctccgggggtgctgcagaacgcgcagttcgggatccaggcgtgagggaccctggtcacctgggtacctgactgacgaggaggtgctggacgactgagaacccatttgcgcagctgctgagtggcggtcgctgtggctcattcgtaagtggaagcattagctcaacgagagccgacccacaagagtgtgacgacgacacccgagacacggtcttttacccgatttgtgcatgtcatactccgcaggacaggccattggcaacaccggaagaggcagatggccccacctccctgcacgacgcgcgaaaccgaccagcggtgcatacaccggggagaaacggccaggtcctcacccaacaagacgctgccacgcccccgacccggactcgggggggacacacccaagcgcaacaggacccaccaacggacaacaaaccaaagaggacacgggacctcgccggaccccgacgtatccaacgccacgcagagacaccagagcgagacagcgaatagacgcagcgaacagacagagcaggcaacgaagggacacaacaagagcacaacgcaggagcgagcgaccagcaaaagagctcacacgacggtcccggacgagagacgacacgaggacccagcagcaacgaccaagacgtccaggacacgcagggcacacggccgcggccgggcgccgtgg

SEQ ID NO: 575607 - DNA, 635 bp, Homo sapiens
tggggatcttgctcctggagtgcagatgcggagcctgctggagagcgacagtgcaccctgcttccagtgtcctcgtgagccgcgcttgtggggtgctgggggtcccctgctgcccattgactacctccaccccgagctgtcctgtgctgttctggtgtgcagcagacggcagtgctggcatatcctgcggagcaggaagtgcgacagaacttcctatgtccttgctgtggggtcatggtgcatggcgtgtctgtttgtggagtttcgttatgttttgtatgtaagtactaacccaggacctggaatgccccttctctgatcagctgccttcttaccagctttgaatgcggcagtggcccagtgcgggtgcggggactgcctctgctcctccttggtgacctaaatcacaggagtccttggccacgttcagccataagacattattcacttgtggctgcgaaactcctggcaactatataggcatgggtgaggcccaagcccctgttgtgacagagacgtagtagtcatgttgtcaccccgtaagggctttcacaaggtagcgtgggttccattgtccacggagagatcagggtggcgcatatgtacataggtctatatctatagatataactgcg

SEQ ID NO: 575608 - DNA, 612 bp, Homo sapiens
  misc_feature (4)..(4): n is a, c, g, or t
  misc_feature (24)..(24): n is a, c, g, or t
  misc_feature (33)..(33): n is a, c, g, or t
  misc_feature (58)..(58): n is a, c, g, or t
  misc_feature (206)..(206): n is a, c, g, or t
  misc_feature (241)..(241): n is a, c, g, or t
  misc_feature (468)..(468): n is a, c, g, or t
tcanaaaacaaaacaacaaattanggatagggnttgagagaatggcaaagaggcaggnatgatttctgataatttgtgacaacctggagctgtgatatagggctcaatatatttaagatttagaatttaaacacaggcaagcattaagtatgtttagggaaaatacaagtgataaagaatgtattttttggccgggcgttggctgntcacgcttgtatcctagcactttgggaggccgagntgggtggatcacaaggtcaggagattgagaccatcctggccaacatagtgaaaccttgtctctactaaaaatacaaatattggctgggcacagttgtcacgcctgtaatcccggcactttgggaggccgaggtgggcagatcacctgaggtcaggagttcgagaccagcctggccaacatggcgaaaccccgtctctactaaaaatacaaaaattagccgggcatgntggcgcacgcctgtaatcccagctactcaggaggctgaggcaggagaatcacctgaacctgggaagtggaggttgcagtgagccgagattgtgtcattgcactccagcatgggtgacagagcaagactctgtctccaaaaaaaa

SEQ ID NO: 575609 - DNA, 519 bp, Homo sapiens
  misc_feature (9)..(9): n is a, c, g, or t
  misc_feature (12)..(12): n is a, c, g, or t
  misc_feature (519)..(519): n is a, c, g, or t
catcgaccnccnatttggagggaccgtgcgcaattgcgtgggacccgggaaattgggccataagggccggcctggcattaatgcactaaggcttttctgaacctatcggaccgataggaggctaagctgaccaagactgagttagaacaacatggttgaaacagatacctgtagtaaaactcaacctattagccggacatgctaggagttacccggacaacgagatctactatactcagttgctccaataactggtccaactgaacaggttactttaggatagccaggaagtgctattatagtgcacatatgagcgatagaggatgactaccttctatgtagaatcagggacatcccgatggtgcagccgctattaaaggatcgcatgtctaacgattaaggcccaaacgagatcttgaattcagaaccgtttaaagtatcaggccggattctaggtactattagggtcacttcgtgtacaggaccatgacggccctgcttgacagatctgcctgcccn

SEQ ID NO: 575610 - DNA, 635 bp, Homo sapiens
  misc_feature (25)..(25): n is a, c, g, or t
  misc_feature (37)..(37): n is a, c, g, or t
  misc_feature (50)..(50): n is a, c, g, or t
  misc_feature (102)..(102): n is a, c, g, or t
  misc_feature (128)..(128): n is a, c, g, or t
  misc_feature (167)..(167): n is a, c, g, or t
  misc_feature (171)..(171): n is a, c, g, or t
  misc_feature (219)..(219): n is a, c, g, or t
  misc_feature (233)..(233): n is a, c, g, or t
  misc_feature (260)..(260): n is a, c, g, or t
  misc_feature (266)..(266): n is a, c, g, or t
  misc_feature (269)..(269): n is a, c, g, or t
  misc_feature (272)..(273): n is a, c, g, or t
  misc_feature (279)..(279): n is a, c, g, or t
  misc_feature (285)..(285): n is a, c, g, or t
  misc_feature (308)..(308): n is a, c, g, or t
  misc_feature (355)..(355): n is a, c, g, or t
  misc_feature (461)..(461): n is a, c, g, or t
  misc_feature (472)..(472): n is a, c, g, or t
  misc_feature (493)..(493): n is a, c, g, or t
  misc_feature (533)..(533): n is a, c, g, or t
  misc_feature (547)..(547): n is a, c, g, or t
  misc_feature (558)..(558): n is a, c, g, or t
  misc_feature (566)..(567): n is a, c, g, or t
  misc_feature (571)..(571): n is a, c, g, or t
  misc_feature (574)..(574): n is a, c, g, or t
  misc_feature (584)..(584): n is a, c, g, or t
  misc_feature (597)..(597): n is a, c, g, or t
  misc_feature (606)..(606): n is a, c, g, or t
taggcgcgtgacctcggaacaactnacgacttctagnctgtccacatctngagcatagtcatgcatagctgggatgctactgtgtgctgaacattatatttnaagaaatgtactttgatcccatgttnagggaccccctctaattccttgtctccttgtatcctaantgcngatagcttcatcattgttctactactgctgtgcatctgatgacatgtntccattttgacatntgcttcgcttctattcactcctttgtngtgtantcntcnnatacangtggtngcccagtgccatgaggaaggatnggagagccacttgaggtcatatgttaaggtatgtaaaacacactgtnctgatcacttacatctgtggctctccagttttccttctaaggacttattttttcacaagcctggttatttgaggatgtgcttgtaacgtatgctttctcttctatntctcatagccnatgcttgtacctgaatagggnaggtacgaagagggacagccattcactaatttacttaatnccattccttcaatnatgtttctttnaatgggtnnccanatnatatgactcntgtggaagttaangaagaattnagttgtcttggtaggctctgtacgtagtt

SEQ ID NO: 575611 - DNA, 1094 bp, Homo sapiens
tgtagaactgtaataagaattggaagaaaatgtggtttaaaaggttactgtggggcataagaaattctcctttatgacgacttatgtaaaatttgcctaacataaggttaaatgtggatttttcttaatagtgcaatttggtttaaaaagggtttccaaatcgttaaacaatgttcaacggatttttaaaggacttttgggaaaaaccttcttgtaaaaaatgtagcaattttaatcatacgcatatctagcgaactttcagtccgacttgtagtctttcataaacctgaattattctgcggtatttaactgaatcttaaatactttccattgtcaacaggtggtcaccactcccgagttatagcttagacaatctgatagaaattacacgcatgtctctagtgtcacagtaacgggtgcctctaacttagttgtttctcattcctgtgtcatcccatcgtcttttcttacactattacggtgcttatcctctatagctgcttcctctattaaccagacctctgcgttcttatcctagggttagatctactagtcaataggggcacaatggagcccatagtgctatcggaaaccctacaacagtatggactagtatatggcaaatgggtggcaagtaccgccttatggtagtatacgggcaaccatggaatcaacaaggatttggagtagtatcatatgcaccttctgctagctctggtatggtgtgtgatttggtgctcagcctccacgcaaggacaagctcctaccccctgtaatacctcactcactgaaccgatagtccggtatataggtaatggcaagtgtacacaaacaacagtgagcacgggaatctatcaatagaaaattgtcaattcatgataggcattccgatttcactgtgacagtaagtaagacatcgaatagtagagcatcggagaaatgagaaatattgtattttaataagattgaaactgttatggaaccttatagcacagatttgtcttcggtgaaggacacgtgtcttctagttctgcctaggtaagtagtttgttcatgatggatatgacatgaattactcctgaggacaaaaacgt

SEQ ID NO: 575612 - DNA, 312 bp, Homo sapiens
atggtggtacctggttactgtttgggttatcgtgtgagcggtggtggacgaaattgacaagtcttggggtagtatagcttagttaaagtttcgtttattgctaagggttaatcagtgctgtttcccgtggggtgtggctaggctaagcgttgtgagctgcattgttgtgtgcttgatgcgtatgtcgcttttgatcgtggtgatttacgacgggtgacactcacctggaacggggatgcttgcttgtgtactcttactacgacgctacgtacgacaggctaggaccaaacctatagaccaggtagagccgag

SEQ ID NO: 575613 - DNA, 810 bp, Homo sapiens
  misc_feature (216)..(216): n is a, c, g, or t
ttgtgatgtgccccaccaccggggtgtaaaccattggcgagaggcaacaattgttctgaagattgcataggccaaagaattggttgccccgccttctggggtaaaatacactcgggacgaatgggccccctaaatatttctggaaactacctcggcgtggtagctagccgcccacctatatgtggataaaagggtttttctctggggccaagagcncaccatcgaggtgtttgtggagagcctttctcccgaactagataccaacacctctggggttcgtcatctatgcctgtgtttcgtgcggatatatagtgagcaccagaaccagcatatgtccgcgtggggtgtctcataccaaacaccagatgaggaccaagaaagagcgtgctggggagccatggccaagaggccaccaccaagtctgccacccagaaagactccagatagggctaacatagcgattattcatcccctcttattacctcgcccccccccatccttttatccactgggtggggaagagacgcgtgtctcagagcactgttttgttagtcacatatggccccatttagtcgttgtagatcagatgaaagacataggtgttgatagatgaaccaatagccttcgtgacaacctcttccaggaaggagaaggtagaatatttttgtggcgcccccttgggttttttttttgcgtggggccattttaagattattagatttttgaaaaccaagccattttttatgggaacacaaacggccccaaattgtccccggaatttgggaccccctttaaaaagttttatggaga

SEQ ID NO: 575614 - DNA, 220 bp, Homo sapiens
gggagcggggcttttgtcttttggtttccctggacttgagagagggaagattagaagccaagattaagattctcaaaatggtttattacccagacctctttgtcttgggcaagtcaaggaccatttccaacagggcatggaggaaggctcctaagggagcttcctgtccaaaggagtaaccccagagacgtgagcaccgtgctcctgatccatggcagca

SEQ ID NO: 575615 - DNA, 161 bp, Homo sapiens
gctaccttcacgccaatggcctcaattattctttatctgcctcttcctacacatcgggcgaggcctatattacggatcattctctactcagaacctgaaccatcggcattatcctcctgcttcgcacttatagcaaccagccttaataggttatgtcctcc

SEQ ID NO: 575616 - DNA, 193 bp, Homo sapiens
cccggtatcacgactaaagtctaactgaaattcctccatactagattctgaggttacctttacatcgacgagtactcgatagacacttgaggtgattctgtggtattaaaaaaaatcagagaaaaataaaactgatttagcctaaataagatttaggagaagaaatgcaagcctattaatatagcggtgaggg

SEQ ID NO: 575617 - DNA, 327 bp, Homo sapiens
  misc_feature (189)..(189): n is a, c, g, or t
ggccccccccccccccatcccgggaaacaaggattattattagggttttaggccgggaaggggcaacgcccccttttaattttggcaaattccccccacccccaaaggggtttcaaacccccccgggaaaaaaaccttgtttggttggggttgtttccagtctcttttcccccagcccctggcagggtnttggaaagcagcttttggagcccctttggttccccccccccattccttttggggggggggttttcccctcccaaaaaaaaaccccggggcgggggggttcccccccccccccaaaaaaaaaaagttttgccagggcca

SEQ ID NO: 575618 - DNA, 218 bp, Homo sapiens
tgtcgctgcccggataggggtggaggaggggacgcactgaactgttttgtccttcctatatactaatgatagtgctttagaatgagaattatgcctgaaatctggcaaccgaaaaatgttgctattgcaacaaagtgacaacaagctaacagtaaggatttatcttcacacataagctgtgataccgaatagaagcaaaacgattggctactagctct

SEQ ID NO: 575619 - DNA, 302 bp, Homo sapiens
tttttttttttgcttaaacttttaagaggatgaaaatatattgtattttcccctatttttactttttcatttgttctttctgttatccaaagattcattcttattatcatttttgatttgaaaaatttcctttattattgttcaccaactatacttcaattaaaattttaaattattttttaaaaataaatagataaaaaagaatttccttaaactgtcattttagaatagatctgctggtcacaaatctcttagttttttgtcatctgagactatccttttttttttttttggctatgatc

SEQ ID NO: 575620 - DNA, 368 bp, Homo sapiens
  misc_feature (10)..(10): n is a, c, g, or t
tttaaagggncctggtccacagaagatgtttattgatgtaacaaaacaatacagttagtgttagatccaaccacaaagagcaaaaggaatgaaaaatttgtacaatgtacatagaaaaaacaagatatttactgtgacaactatatattcctaaaataatgcttctaaaattactcaattattaacatcctttttttcatgtagatttcaataattgagtaattttagaaatctacatgaaaaaaaggatgttaatagcgacaaagtgcataaaatcaaacattgtattttgagcaaattaacatactaggcaattttgctaagaatgcatgattttttttttcttgtttacagctgctcaaaatatc

SEQ ID NO: 575621 - DNA, 209 bp, Homo sapiens
agccattcaggaacctgctttttatgtaaagttgggtctggttaataatgtagactaatgtttatgttctggatacattgaatcttccaacctgttggatagttctttacatctgcatttgttatacatgagatttcagtttccaaaaaatcagggcaaagggctgtaatgcagaattacattgaatttaatttacccagtgactaaga

SEQ ID NO: 575622 - DNA, 360 bp, Homo sapiens
  misc_feature (102)..(102): n is a, c, g, or t
  misc_feature (198)..(198): n is a, c, g, or t
  misc_feature (217)..(217): n is a, c, g, or t
  misc_feature (222)..(222): n is a, c, g, or t
  misc_feature (225)..(225): n is a, c, g, or t
  misc_feature (245)..(245): n is a, c, g, or t
  misc_feature (267)..(268): n is a, c, g, or t
  misc_feature (316)..(316): n is a, c, g, or t
cacaattgcaccagcaaacctgcgcagctggtttgccagggaggagcaagacctgttttcccacttagggctcttctcgcttctgatttcataggtggtcangtacatgtagggtttgaggtggggactgctggaagaagagtgcgggcaggaggtcattttgaccgcagcctgctttgcagaccccatagctgctgnaaggcctgggacagcagcnctacnctnactactaaccacaccctggnccgctacctgcgatgcttggcnnctaatcaggcttcacaaccaacagcagcatccggatccagaagtaccnagataggaacttcctttggtgtgactttgtaggccccttctggt

SEQ ID NO: 575623 - DNA, 1030 bp, Homo sapiens
ggacaggcagcaactgctgtggcagagaccgtggagagcctgttctacctgtaccgcgtcacagggggaccgcaaataccaggagtggtggctggtgagattctgcagagcttcatgccgcttcatcacgggtcccctcgtgggtggcgtattcttccatcaacaatgtgcaggatccttcagaagacccgcgcctacgggacaacgatgtgtagagacttcttcctgtgggggagacgctcaacgtatcttgtggcttggcgtcttctccgatgagccacaaactgtgtcaagcctgtgagcgcctaccgtgtttcaaacaccgaaagacccacacactctgtgctatcttgtagcccttgtgctagagggtggtgagtaggctgcatgggtggtgggggacatactgggtgtgtgcagatggcaccttgtcaagggtacttgtgcgcatcattccaatggtgggcgccaccgttatacaacccggcgcaaagcgccgaaagatgggccacgtgcgtcttgaaaactgggggcttgtggggtcctaccctcagacgtctagagtttaactccacggaacacacgtggagggacaacgttgagggatcagtcacggaacctttgcggatgggatgcattagccgcggggatatagtcatgtagtcgcagcctaggaaaacacacccggcccaggcgtatacacatccgccaggaaaggaacaacgcaagtcccctgacgatcaacgaaccagggcgtgaaagacctatgaagcacagggtctcataggcggagagcgaaccacaccaaaagcgtgggggcgtacgacagagcaagtgacccccctgcagctacaatacaggggatgaacccggaactatgggcacgagagcaccccagcggagtggcaagcaaccagggccagcggcacgcacgcgaacacccctcagtagtgggtcacccacaaaccacacgacagcaggcaagagacaagccgaggaagccaacaagcagcacagctgagataactag

SEQ ID NO: 575624 - DNA, 119 bp, Homo sapiens
tatggcactagtagaaccatcaaccgggtgtattgtacaggcatagagcactaatgcctgagcgatgtctcaacagactctggcggataagtcagtcttgtcttgtctactgaggactc

SEQ ID NO: 575625 - DNA, 158 bp, Homo sapiens
tctggtttagtaaaaacaatttcgctcatacaaaacaacagtttacaaaaaatcgaggtgcgtggacacaccactctgagaacaagggaggcgctgcaggcacccaggcgcccttcccccattacaacaaagacgacccctatagtttctaaactcgc

SEQ ID NO: 575626 - DNA, 627 bp, Homo sapiens
  misc_feature (165)..(165): n is a, c, g, or t
  misc_feature (193)..(193): n is a, c, g, or t
gactcctcctgggataacttgtccacacatcttccactagggtaaggctacttctggctgaggagacacttggatgtagctcaagtgctgcttaggcagtcctgatctctcctctcgtctcttcccagggagctgaaaagccagattcgacctggtagccaagcnatgtcacagcagaagcagcaatcttggnagcctccaaatgttcccaaatgctcccctccccaaagatcaaacccctgcctagctccctactcgactccttgtggtgctccccattcagaaggttgtcattccagttcccaaaggcctgaggttcagaagcctaggagggctcgtcaaaagctgcgctgcctaagtaggggcacaacctaccactgcaaagaggaagagtgtgaaggcgactgagcccagaagagttgaggcacaggtgcagttactctctccctgccccacctttgggtactaattcccccttggaaagccaggccctcaacctctcatttggactgagaaacacttcctgatccccagctctagagaagcgagaactaggctgagccacgctgctactgctctcttccattcaccccttcagctcagcaacaataaagctgctttacttgg

SEQ ID NO: 575627 - DNA, 179 bp, Homo sapiens
  misc_feature (175)..(175): n is a, c, g, or t
ctgaggacccctcttacgcggctctggagcctatacactcacgctagagatctctttaagagaattatctttctgtaaatagtttttaactattctacaacaaagattaaaaattttaaagatggcatggaatggaaacagctcttattttaacaagggcatcaaagtcactaancagt

SEQ ID NO: 575628 - DNA, 360 bp, Homo sapiens
gatccgttgttcaacagctaaaccgtcctaaaattggccttgtgcctgttaaatttttttcaatgctttcaaaggtaaattccaatttttatttactttttccttggggccgtttttctaaacaggttagggtggggatattttgttttactgtggatagtggatgttttgtactgtgtttgtggaaactttgccttaaaatatattttcatatgttttggtgggggccgggcccctttagtttggaagccaccggggtttttttttgaattggaggcaattttttcaaaattcctgtcaaggaaaggtggttttaaatgttaatggaatccccttttaaattaactgcctttggcccca

SEQ ID NO: 575629 - DNA, 596 bp, Homo sapiens
gactcctcctgggataacttgtccacacatcttccactagggtaaggctacttctggctgaggagacacttggatgtagctcaagtgctgcttaggcagtcctgatctctcctctcgtctcttcccagggagctgaaaagccaggtaggagatgcttggggtagaaagaagggaagagaagtggatccctgcaaaagaaagaccccaaataatctaacatgggagaaagccatagaagttagagggccagaaaagcagagatgggacagtcagacttaggagtctggggacagaataagacagagtaaagaaagagcagagacttggctctcctttgcacttaaccaggtggacattgggctgggaaaagtaaactgtcagctcaactaagtacaatttgtctttttttttttttaaggaagcatatatcattaacatggttattagtaagtgagtccccggggaagatttactcccaaatatttagtcctttcaagtccgtttttctcctcctgagatggagttcagggggtggtaaatgctggacttcattttggacagctccagttgggtggaggagagaaacagaagcccaa

SEQ ID NO: 575630 - DNA, 412 bp, Homo sapiens
tgcggtcgatgttccaggcgtgctgggcgtcgtaatagaccgccaattgcacacccttgtaggtctcctcggccaccctgtagcgggccgactggatggagacgaacggcatgatcggcgcctcggagacgaaacgcgcggtgcagcggccgttcttgacggtgtcggacaccttgtagcccggcgcgatcggcgtctggtcggccacggtggtcaccgtgatgtcggactggatgaagtcggcgtccttgcgcaggccgttgaactgcatcgaggcgacatcgcccagcttggccatccgctgctcgggcggcaggccgtatttacggcgcctggccctgtcggtcagcaggccgtcgcgcgacatgcccaggatcggcgcgatctccagattgttcacgaaggtcccgtt

SEQ ID NO: 575631 - DNA, 207 bp, Homo sapiens
aaagcaacgtgatatggaaggattggtgaagagatgtcagaatttctttggtctgctcataggggaggacgagcttatgatttgggactatccagtccccttgaaaggaggctccttgctgtatagacaaagctttctcgagtgggagagttcttgggtagagattgcatgggataacagagaaggagacggtgcgttggcccaacg

SEQ ID NO: 575632 - DNA, 155 bp, Homo sapiens
agaaagcaaaaattctttttaaaaaggtttccacatcttgctgaagcccaaaggtcaggtcttgtctaagcatgtctgaactattaaatttaccattttggttttcctggaataggtctgtgtacaggagtgaatatgtgaggtggtttataagg

SEQ ID NO: 575633 - DNA, 471 bp, Homo sapiens
  misc_feature (264)..(264): n is a, c, g, or t
cacgaggggccagctcccggtacacccgcgccgggcgcaggttggcgaagagctccagcgccttgcggatccgcagcagcccctgctcgggacgcttttccctgggaagcccgtcgtacttgggcgcgcccacggcgcccagcaggatggcgtccgccgtccgggcgagctccagggtggacgcgggcaacgggttcccctctgcgtccacgccggccccgccgatgggcgcctcggcccactccagatggagcccgtcgcggngcagccgctccagcaccttcaccgcctgggccgtgatttccgggccgatcccgtctcccgggaggatggcgatcttcattcagccgtaaatgctcaaccgaacagccatggcgcctcggcccgccgcttggcctcgtaggccttgatcttgtccacgtgccgcagggtgagcccgatgtcgtccaggccgttgagcaggcagtactt

SEQ ID NO: 575634 - DNA, 501 bp, Homo sapiens
caagtcatcacaaaagcaccatcacacgattctcacaatgcatgtgcatctgtacttcacgaacatggtcaacaaaatccatgtcacttcacccccgatttcatttcaaattcaagcaacaacaacttttcaataaagtggttacattcaaactttaacttccttagtaccatgctgcagatgtcagcactgttaaggtatagcaagaatgcccaaccctctggtgtctgatcatgtatctcagcacattgcagtatgaagaaaagagatgccccggtctcagcccatggactagttaatacagtgaagcaggttcctgtcttttcaccttcctgctcagaacataaaagcattaaggactaaaatcaaggaagcatgggagttttagagctggcaaaatgaagtctaaaagatagatcaaggcaaacaattactgagaacttggttgttgcttaacctggcaagtctaaaagcctttctttaaccttgtaggaattagat

SEQ ID NO: 575635 - DNA, 118 bp, Homo sapiens
ggccggtcccttatattttatgtgaagaagatagtcactgtgaaataatacagtgactatcttcttcacataaaatttaaagggttcatttattttccgtaactattaggagggattt

SEQ ID NO: 575636 - DNA, 354 bp, Homo sapiens
acggcagggtttctcaggaatatatgttataaaagtcgagcatttatgttcagctgtctatcactttgtccaggtccaggaccctggtgtagtccatgatagtgtttccagctcaacccttctttaatgtcatccaggtatggggccaggtatgaagggtagccggttaaggagcgacaggcagttatttttgggtgggattcgccacttttcccatgaagaggggagacttggtattttgttcaatcattaagaagccaaagggtttgttgaacttgacctcgggtgggatagacatgggtatggcctctatacacatggccccagcagcatcagtccctttctcgctggtcc

SEQ ID NO: 575637 - DNA, 316 bp, Homo sapiens
  misc_feature (223)..(223): n is a, c, g, or t
  misc_feature (247)..(247): n is a, c, g, or t
  misc_feature (272)..(272): n is a, c, g, or t
gtcgacgagccagcgaccactttggtcatcctctcccgacgccgtacgctcagctatcatcaccaggcgcaccaggcgatcacccaggcttgcagggtgtcgatggcgttgacactttctggcctttttccacgtcatccttgagcagttgcagcgcggcaacccccaggaatgcagcgaaaataaccacactgatgatcgacgtcggtttggcgcgcgcagngtcggcgaactgggttcgcgcttnacgaacgacagcagcaactgcggtngatattcaggtcggcgaccttgccgggcgtaatcacgtcgacgc

SEQ ID NO: 575638 - DNA, 227 bp, Homo sapiens
tggtggccactgcggccagtgtcgcgatagtaatccccttccatcttcaggtaaaatacttagctctcgtacagagtctcgctgcaattctctggatcaggtcgttatccagctaggctcagcacatcctggcatacaggcctccaactccttctctatcttctcccggtacgcacagaccatctcaatctacttctcattgccgtcagcagatatacttctgctac

SEQ ID NO: 575639 - DNA, 298 bp, Homo sapiens
attagaagttaggatgaatacatgttacactgttaacttttagcaaattttacttttgttgaaaactttgtgtttgggattttaattatccttcgcaattaataagacatcatttagtccaaattaacttagaattggtatagatgattccttcctggttctgtaagtactttaaggcttggctgagtacaaacagctcacacatttgagcagaccaattattaggcaattttcctaacttcatttctacaagagtttgtttccctattagttactggatacccatagtgtcttcttc

SEQ ID NO: 575640 - DNA, 187 bp, Homo sapiens
ccgctgtgcgcctgatatcttgacggcccaccacagcggcacagcatacccggcgttctctcaccttgtcctccctctcctcccgccgcactcacttacacagcagtggggtccggacaaccacaaatgaagaggagcatgacccggaaaaggcgctccagctgaaatatctgctgagtgcctttag

SEQ ID NO: 575641 - DNA, 449 bp, Homo sapiens
ttttcgcacaatcagtcactctgtacaaacgcaccaaatcagcactctgtgtccagctaaaggattgtaaatacaccaatcagcattctgcaaaatggaccaaacagcactctgtaaaacggaccaatcaacgctctgtaaaatggatcaatcagcaggacgtgggcagggacaaataagggaataaaagctggccaccccagccagcaactgcaacacgctcaggtcccctttcacattgaggaagctttgttcttaagctcttcacaataaatcttgctgctgctcactctttgggtccacaccacctttaagagctgtaacacttgccgtgaaggtctgcagcttcattcttgaagtcagcaagaccatgaacccagcagaaggaagaaactcaggacacatctgaaggaacagactccagacccaacacctttaagagctgtacc

SEQ ID NO: 575642 - DNA, 743 bp, Homo sapiens
gtggctcacacgtgtagtcccagctactggggaggcgggaggattgcttgagcccaggagtttgaggctgcaatgagctatgatcatgccactgcactccagcctgggcaacagagggagactctgtctcaaaaaaaaaaaaagaaaagaaaaatcagactgaaattcctcccagattacagggggaaatttccctgcagaggggatgctccttgaggaggaggaggtgtttggaccagagccattttctggcaacctcagcctagcctatggttgttcccaaagctccctttccctggaaacccttgccaacacccacaaacaaccaccgtctgaggcctccccaacccatgcccctcacagtctgggtcccgtggtctgtttctccggttacacaagcctgggtggggctgagagggtgggggactatccttcacaggaccgggattttcaggggacaaggtcaccacatccgtcctcagttcttcctgggggaattccatgaccttctgtcccgtgggacacaattattggccctggcccagagccttggggcaagaaccaagatggtctcaggggagcatggagggtcagctggtagcaccccgtgccctcacccagactagaatgtgggtaccttgcatgggaaaccccagagtgatctttcaaatggacaggaccagggagccggggctcagctggtacaaacccaagggtgacggagatgggggatacaataatcg

SEQ ID NO: 575643 - DNA, 408 bp, Homo sapiens
atttaggcctaaaaccaaatagctgctgggttttaggactcttctgatggtcaactattaataagaatgtgaaaatggaaaatggaaaaaatggaaaggcatggtagctttaatccttacatctctcataattgtggcaggagtcttaacagcagtgggatgttgtattaccccttgtgtgaggggactagcacaaagattaattaaaacagctgttaataaacaaatgcccataacttaccagcaagataacctactactattagaaactgaattaaactcactctcctatggaaaaaaaaagtaaatgacttctagagcaattcaaggaccaaaaaggcttaaatgaaaatgagaccaaaggaagtaaatagaaaagagttaatagaaaaaaaaaagagttaatag

SEQ ID NO: 575644 - DNA, 136 bp, Homo sapiens
agcatttctacactacgaagtactttcaaaacttgtagtgtttatagtaaatcaggcaataaaggtagagtagctgggacttcttaatcttctctgaactaataccctgctttttacatgacacatgggaaacagg

SEQ ID NO: 575645 - DNA, 115 bp, Homo sapiens
cctgccccccccttaaaaaatggcccctggctcccccccccccggtttccacgtggtgtatggatttgtggtcattgtccctctgcaaaataaaaattgttcaggcctgcctgga

SEQ ID NO: 575646 - DNA, 771 bp, Homo sapiens
  misc_feature (312)..(312): n is a, c, g, or t
  misc_feature (367)..(367): n is a, c, g, or t
  misc_feature (564)..(564): n is a, c, g, or t
  misc_feature (601)..(601): n is a, c, g, or t
  misc_feature (632)..(632): n is a, c, g, or t
  misc_feature (655)..(655): n is a, c, g, or t
  misc_feature (675)..(675): n is a, c, g, or t
  misc_feature (679)..(679): n is a, c, g, or t
  misc_feature (689)..(689): n is a, c, g, or t
  misc_feature (705)..(705): n is a, c, g, or t
  misc_feature (748)..(748): n is a, c, g, or t
ggacgcgtgggtcgacccacgcgtccgggccttgcggctcctgaagctggcagcgacgtccgcgtccgcccgggtcgtggcggcgggcgcccagcgcgtgagaggaattcatagcagtgtgcagtgcaaactgcgctatggaatgtggcatttcctacttggggataaagcaagcaaaagactgacagaacgcagcagagtgataactgtagatggcaatatatgtactggaaaaggcaaacttgcaaaagaaatatcagagaaactaggcttcaagcactttcctgaagcggggattcattatccagacantaccacagggagatggggaaggcccctcggccaccggactataatggtgcaactngtaggtttgggagaaattttacggatggatccggagaagcaatggatgggcaacaggttaccggcctgtgcaggtcctgtggtttgtacaggcagttcggcctggctggcagttactgcaggatggccttggggaggcactctggctggacgcaccagggaccaagggtggttggtggttggggagcggctcccatnctttcagtgggacttgtggtggttgcctggggagggnggatggtaacacacccagggggatttccatnccggaacaggcaggtggtggtgnggacccacttaacaaacggngggnggaaggaggngttcacccattctggnggatttaccctggctccccccccaccctggggtggatttttancattcggatggtgggccccggtt

SEQ ID NO: 575647 - DNA, 365 bp, Homo sapiens
acgttccatcccaacttttgatgcgggttcaccacgccaaaggttaccaccgccgacaacaatggcgatttgtgtgccaagatcgtgtacttctttcaaatcttgcgcaatttcagaaactacggcaaggtcgatgccttggctttgtcgccagctaatgcttcgcccgaaagtttcatcaatacacgtttgtatttaatatcagtcatgatttacctcatttcattatctagtccattataccaaattttcccgcaaagttggtgcgttatatgaaattaccgcctgtttataggcaattaacccaattgcttagcaacttcttcggccaagtcagtcactttcttttcgataccatcaccaac

SEQ ID NO: 575648 - DNA, 103 bp, Homo sapiens
agcggccctctccccggggacgcgcccagcccgcggccccggggagagggcgcctgacgaatcgagctggagatgggtggataatagacgtgtcgataatacg

SEQ ID NO: 575649 - DNA, 125 bp, Homo sapiens
gacaaattcccattttcaggcgatacccagaccaaaccacgccaaaaaccatgtcacaatcaaatttatcggcggaaagctatcgtttttccacaacacattttctgcccatctggaatgtcaaa

SEQ ID NO: 575650 - DNA, 159 bp, Homo sapiens
catagacaggacactgcgtgagtactcgatttggaaaacaatgtatgtatgctgaaatcccactttagtaaaagtgaagatatttccatgcacacactatgtactctagaaataaatacactaaatctctgtaatggtgtctaagttcgggggatcctc

SEQ ID NO: 575651 - DNA, 237 bp, Homo sapiens
ccactactggccctaaaacatactagatatcaacggaatatagttgtccttctaaggtagtttctttgaaagactaaatgcatattccagtgacactattagtattaacattttttttttcagaagttacctttggaaagagccattgggtgtttgaatctagaaaggagtcctctcaagagaataaaactgtgtcagaggctgaatcaagaatctttgggttgggacttattgcct

SEQ ID NO: 575652 - DNA, 182 bp, Homo sapiens
gactttctggtgactggagtccttagtaaggtcttagcaatcacaccaaattgaagtctcccttgactcttctgtgtatctgtgtgaatatgtgtgtatatgtgtgtgtatgtgtgtgtagaaattgcacacgtaccaattctcacacgatctttgttcataatcatgccaaagaacttgga

SEQ ID NO: 575653 - DNA, 197 bp, Homo sapiens
gtgcgtacggacgcacaccttcgatatccaggacggtaaatacttgaaaatctcttttttaggcgcgctccaacgctgtccatttccaggatatcgagcgatgacctctttgccgtcaacccagtcaatgtacgcggcggcaatatcgatcgtatagtcttccatcttcgctttgcgaaaaggggcgtccgtagcgg

SEQ ID NO: 575654 - DNA, 301 bp, Homo sapiens
  misc_feature (32)..(32): n is a, c, g, or t
gacaaaataacagcaacaggcccagcacattngacccacacctgtaatcccagcactttgggagactgaggcgggtggatcacttgaggtcaggggttcaagaccagcctggcggacatggcaaaaccccatttctactaaaaatgcaaaaattagctgagcatagtggcatgtgcctgtggtcccagctactcagtaggctgagtcataagaatcatttgaatctgggaggtggagattgcggtgagctaagatcgcgccactgcactccggcctttatgacagaactcgactccatctc

SEQ ID NO: 575655 - DNA, 306 bp, Homo sapiens
gtgtgacgaccttaactctctagaatataactccaaatctggaaggccatgaaagatattctcaaacatctgagagtatggttacaaagccatgccatcaagctctccttcagccagaactgatttaaaaggtatttaatagctagggtatctattccctcaggccatagaataaccagcaaactgatgaagaagaagaggcaacggatgacattacaataggcatatactgatcaccatgacaagtgacaagccaaagaaatcaacaaaactgaaaagaaggactatgcataacacaaatgtaaa

SEQ ID NO: 575656 - DNA, 783 bp, Homo sapiens
  misc_feature (349)..(349): n is a, c, g, or t
tcacgcctcgcgtagctccaaacacgcgaaacacctaacaccaacatgaactacccctaagcgcgcacccaccccctaaggctctaccggcgggatttgatggcgtgatgtctcacagaaagttctccgctcccagacatgggtccctcggcttcctgcctcggaagcgcagcagcaggcatcgtgggaaggtgaagagcttccctaaggatgacccgtccaagccggtccacctcacagccttcctgggatacaaggctggcatgactcacatcgtgcgggaagtcgacaggccgggatccaaggtgaacaagaaggaggtggctcaataaaagttattttccactgnaaaaaaaaaaaaaaaaaaaaaaaaaaaaaaaaaaaaaaaaaaaaaaaaaaaaaaaaaaaaaaaaaaaaaaaaaaaaaaaaaaaaaaaaaagaaaaaaaaaaacaaaaaaacaagagagagaggagggaggagcgagagaggaaagagagaaagagaaaaagaaacgacaggagggggggggagcggcgcgcggcggaagagagagagcgacaggaggagcgagagagagggaaggaacggagaagcagagccacgagaaccacggagaaaagcgcgagggggagagaagagacgacagaagaaacgaggagagggacgagcgcgccggaggggagaagagagagagacagagagagggagaaacacgagcaagagaagagcaaggcggaaggagagagcgaacgagccacacagaagcgagaagaggcacgggg

SEQ ID NO: 575657 - DNA, 330 bp, Homo sapiens
gcgttgctccggtgtttcctcctatggtgaagtgaccccatgacttttttggctgaagaggctgtgtggtgggaacaaaagcgggtgctcaccctccgcaagtccttgctggtgcagacgaagcggcgggctctggagaagattgaccttaagttcattgacaccacctccaagtttggccatggccgcttccagaccatggaggagaagaaagcattcatgggacccctgaagaaagaccgaattgcaaaggaagaaggagcttaatgccaggaacagattttgcagttggtggggtctcaataaaagttattttcagtggaaaataac

SEQ ID NO: 575658 - DNA, 1020 bp, Homo sapiens
  misc_feature (193)..(193): n is a, c, g, or t
gctgtgcgcgggacgagaagtctgccctaacgaggttggactggacactgggcccgcggggacccatctgacaacgcccgtgtccccaggtaagcctgtgcgagccttcggtggaccatgccaaaatagacatcaggaacatgtgttgtttgggagggaagctgtggcgcactggacactgtctcgaactagntgactgcgccacccctccagcgtcaccattccgtgattccacagcaaggttggggtacggggaatggcgtagcatggagtagagagagagggaagtgggaagaaatttggtcatcggagagtaagctactttttatgcctttgctatcagtctgcgttgcgtttctctgatccaacttagtgctagcgtaacaatttatgaccgtgctcctggctgaggaactaggccctaaagcgttcacgtgggcgtttcggggagcgtagtggaggacacggcggcaggatcagtggaaaggagagggggaaatccccatggtatctgacaaaatcccagtgtcccggaagctgtccaatgcgcagtagaacaagctccccttgggcacttccccgacgtccagatgccgtcaaccttcagccttggattgtcagagggcaatcctttgcccctctgtgtgacatcttgggcatgacactagtcaacgactgagggttaagttcatcagtgtcttctgcttttaggcctcagaggacttatcctttctggcaggggaccagatctcctgggtggcctcatcatcgactaattcacttgtgcacctgtaggaaatggctaaaggtccatactggaaacccaagactgggaagtgagggcccctagaatttagaatctgtgggggtctatgaactgtcttaagtcaggcagtctcccaaagtgtggctccgaggatccctgtggtccctgacccctttcatactggccttgtcaactgcaaagcgtccttagcctgcatttcttcaccaaacaacgttcacacgccttggttgccc

SEQ ID NO: 575659 - DNA, 1805 bp, Homo sapiens
  misc_feature (1320)..(1320): n is a, c, g, or t
atacgttgctctcgtcttcgtgtgtggtgtcgtgttgtcttatcctccatcagtggtgggtgtgtgtctgctctcgtccttctttccctccccttgcgtgatatttgtggcggtgctcttccgtctccacctagacgtcgctcgtccactatttttgttgtgtgactctccctctccgttctgctgcctcgtgagtttctccgccgcgcgcagccaggggggggcgcccccctccgtgtgcgtctgtatctctctgttttatttagtcatatgggggggagtaaattttccgtggggggttttttatctcctactggcgcggtctgcctgtcttctcgtgagtggacttcgctcttcctctcctccctccggggggtttatttttctcctccctgccgcgctctgaataaaagtgtttggttgttggtccgccccactcgtctcgcggtggggagacgaccaacatcttttgtggtggtagtagggctcctgttgtcgtccgtccccccctctggtgtggtgtgggccgacctactttgtggggggggacgcaccgtcttttttttccctgcgcccacactttttgtggggcctcctctgaaagtagtgtgtggcgctgtctttttccccccgggggaaagttcttttattaggtcggtgtgaagttgttggtggtccccgggcgcccccacctcttgtgggggccggcttattattagtctcccccgcctcttctcctcctcttctccaagggggtggtgttatcttcctcctcggaatgtggtgtgtcccccccaaggtggcccagcccacaagagtgggggttttttaatatcacgccacgggttgtttttatcgcccacagcagattttttcttgtgtggatatatcgcgctcccttcgagaggagctctccactgataggagtagccccctcttctctggaggagtcgctcctcatcttcgcgtcacacagtaaagagagtttccacctctccccaacagagagtttctctcatatagagaggagagaggttccccccctcctctgggagataaaaaactctgtgagagagaatagtcacagctgtgtgtgagaagagcgtcttatataccccccactacagtaatcgcgcacaaaggagacacaacaatggtgcgcgctccggcgggagacacaccacaacaatggtggtggtgtcgtgctccacacggcgcgcccacggcgcggtatattctacacacagatggtttccccgcgggtgtggagagtattatatagggcgccacagcttgctggggcgtgtcaccacacacacngcgcggggcacacttctctaacacaagacgcccccacatattcacgagagttgagagataagcggcgcgcgcgcggttgttccacagcgtcacacaagagagagtcctcctcgtgtgcgtgagaggtgatgatagagaaaaggtagataagagagagagcgtctgtcgtcctgtgtgtgtgtgtgtgtataaagagagacgcacacgagaagagaacgcgctcctctctgtgtgtgggagaaaaaagggcaccgcacgtgtttcccacggaatccaccccccttctgtgaaaagaaagcctctgcacagagagagaagagatacctctctacacacagagaggagagagaagaaagcctctgctggcgattaaacttcttaaaagttggagtgtatttccactaaagggccaaatccattttgtggccgactttttttgtaaaaaaggaaccctggttataccaggccaggtggggaaccaagta

SEQ ID NO: 575660 - DNA, 993 bp, Homo sapiens
aatgtagagtcaaggtctcaccatatcacgcccaggctggtctcaaacccctggcctcatagacttaatgttttaaagatagctttaggtatatagaaaaactgatcaaaaagtagagtatgtagagcgctccctacatactacccctgccttccccccttccccattatttatgtgctgtgttatgtaccatttgttaaaattgataaccaatattgatacattagtaactgagtttatatgaactctcctaccacctttttttgttttacatcattgtagtaggtttcctcttcattcaacacttaatgttgatgtgtgttctttcaatgtttttatttacatttatatacatatgtagaaactactatagttagaattttgttttttaacataaatgaggtcataccatacaaattatttggcagctttctttctaactctgccttacagatttctgcacttacagatcccctaactctgcccttctcattctctttaattgtcgtcgcattgtctctagaaccacggtacgtgtagccagttccctgctggtgaatcttcagtggttcctcatcatccgtgttacatgaaacactgcattactctcctccggcttagctttgtgtcttgcttggaaaggctgtccccactccaagtcttaaatgaaaatgagaccatttttaataatctttttaacacatctagaatttatggaggcaattgttcttctgatttagcttttagtggctttgtagaaaagtgatgaaacacgtatatgcccaatttaaaatgaagaataatcctgatttaactttctagataataaccttatcccaggtacccagggctacgtctcttgtgtccatctattctcctacaggttacttgtttccctaatagatatttaagtttcctctatgtctaactgtggcttgatagtttttataggtagtaacgtaatggtaatattagagacaagagtctcgttgt

SEQ ID NO: 575661 - DNA, 198 bp, Homo sapiens
ctctccctgtgccgctggacctctgtgcgctatgagcggttgccctgttgctctgctggacctggacgcgggagtgctggagaacatcttcggtgtgggcctgagcagccttgtggccttcctgggctacctgctgctgctccagggcttcttcactgacatctgggtcttccagttctgcctggtcatcgcctcctg

SEQ ID NO: 575662 - DNA, 135 bp, Homo sapiens
gatcctgtgtatgacgagcttctgggcagacttggtgacttgccagctcagcagcttcttgtcactgtttgatgacaccaccgaaatgtctgtctcatatcacgaacatgcaagcgtcccaaggtggatagtctg

SEQ ID NO: 575663 - DNA, 449 bp, Homo sapiens
gaggaatcggacgcttgacattggtgacacctaactgctgcgcagtagagaactgcagcatcgcgagctgttgcccctgataccattagaaataccggtgcatggacttcctgcccccagaccgctgcctgtccttcttcatcaccatctattggaagagcagcaactacatcaatgctgccctcatggacagctactaacagccttcagcttttatagtctcccagcatcctttgccaaacacagtgaaagactttgggagactggtcctggattatcactgcacatccgtagattttgctaaatgatgtggatcctgcccagattgtgtccacggtattggccagaaaacggagtacacagacacgggcccatccaggttgaatttgatctctgctgacctggaacaggcaatcatcagcaggaatattccgcatttacaatgccgc

SEQ ID NO: 575664 - DNA, 123 bp, Homo sapiens
gccaaaggggggggccctgggccttgaagtttacgggaaccctccctaacccacaccccccgcttataccgcttcaggggcgtcttgagcgggtttttcttcccaccggggggtttaaacaaa

SEQ ID NO: 575665 - DNA, 392 bp, Homo sapiens
ctgggatgacagagtgagacgtctcaaaagagtgagagaacgaagtcaggcgcctctagaagaccaacagttgcaccactctagcaaataaccaggaagagatgaaagtggatgagaaacccgtgtgatgggggcatcgtgtccacgtggataagccaggtaggattctgctgggccatcagttacatgaagcagacaaatgatatcattcttagaaatgacgtgtgacacgtgaggataaagaatttttaggctgggcacggtggctcacacctgtaatcccagcactttgggaggccaaagcgggcagatggcttgaggttgggagttgcagaccagcctgaccaacatggagaaaccctctctactaataatacaaaattagccaggtg

SEQ ID NO: 575666 - DNA, 428 bp, Homo sapiens
aggtgcgcttatcattaaagggatgaggaacatctaacaagcaacatgaaaagcagataaacacatgagaagcagggtttgcaatcctaatttcagacaaaacagactttaaaccaataaagatgaaaaaagacaaagaaggacattacataataataaattcaattcagcgagaagacttaactatcccaaatatatatgtacctagtacaggagcacccaaattcataaagcaagttcttagctacaaagagtcttaaatatttacaaaataatagtgggagactttaacactccagacaggtcatcaagggagcaaattaacaaagatattcagaacctgaacttgacattggaccaaatggatttgatagacctttacagtactccgaacccagaaaaccagtatatacattcttctcattgcc

SEQ ID NO: 575667 - DNA, 347 bp, Homo sapiens
  misc_feature (121)..(121): n is a, c, g, or t
taaaaaccgggcccccccgtttatttttgtttttgggtaaaaatgcccgatggggtccaaaaccaaggggtttccccaggtgacaacccccccccctgcagcctgagtttcccagtccccngggtttgttttcacccggggtttaaaaggttaacccccccccgtatttcaggtcgggccaaaaaattcggaggcccaaacccaaccccttggggggttttaaagctttgctttggacccccccctgtttttcccccccccaaaaacccctgtttccttttaaaaattttttgtgggctgaaagccccccgggctgtgaaatttaaaaaagggggtatgctttgcta

SEQ ID NO: 575668 - DNA, 257 bp, Homo sapiens
cgcggtcatccgtgtatctttggggcatggtaacggggcccacttaaacttctctctctctctctccctctctctctctctcagcctctctctatctctctcagagttcctgtcgtggctcagtggaaacgaaactgacgagcgttcatgcagatggggcttcgatccctgccctcgatcagtgggttaaggatctggcgttgcggtgagctgtggtgcaggttgcaaactcggctcggatcccgagttgctgtggc

SEQ ID NO: 575669 - DNA, 347 bp, Homo sapiens
gctcggtacccagtgaaacagctatgacatcgtcacgccacacgccatttggagggtttaaggaatctggaaacgggagggagctgggtgaggatgggcttaaggcctacacagaggtcaagacggtcaccatcaaggttcctcagtaagaactcgttaagagcagcatgtcacgggaagcccagatcacagatccagctaattccacaatccaccttagaccaagtgcgttgccaaagctggttttaagagccatagaacacctctttcttatgttccaaagttaacttcttagacagaaaccccacaagattaagcaattcacgtcatacgctgtttcctggggt

SEQ ID NO: 575670 - DNA, 218 bp, Homo sapiens
cttggaagtaatatggtggacggaaacttccaatttgcacctgggaagagcatccagagagtcccatgtgcacgtcaatgacattgcagagctttggactcgacaacatcaacatgaccacactacatccagcaccgtgtcatttgtgggaggacatatccatggcagttgtgaaccccgctggaccacaccaagtgtcacgtgcgccccacagcctc

SEQ ID NO: 575671 - DNA, 1005 bp, Homo sapiens
  misc_feature (121)..(121): n is a, c, g, or t
  misc_feature (184)..(184): n is a, c, g, or t
  misc_feature (192)..(192): n is a, c, g, or t
  misc_feature (205)..(206): n is a, c, g, or t
  misc_feature (209)..(209): n is a, c, g, or t
  misc_feature (284)..(285): n is a, c, g, or t
  misc_feature (302)..(302): n is a, c, g, or t
  misc_feature (304)..(305): n is a, c, g, or t
  misc_feature (313)..(313): n is a, c, g, or t
  misc_feature (318)..(318): n is a, c, g, or t
  misc_feature (323)..(323): n is a, c, g, or t
  misc_feature (329)..(330): n is a, c, g, or t
  misc_feature (339)..(340): n is a, c, g, or t
  misc_feature (348)..(348): n is a, c, g, or t
  misc_feature (377)..(377): n is a, c, g, or t
  misc_feature (387)..(388): n is a, c, g, or t
  misc_feature (403)..(403): n is a, c, g, or t
  misc_feature (406)..(407): n is a, c, g, or t
  misc_feature (412)..(412): n is a, c, g, or t
  misc_feature (415)..(416): n is a, c, g, or t
  misc_feature (472)..(472): n is a, c, g, or t
  misc_feature (683)..(683): n is a, c, g, or t
  misc_feature (692)..(692): n is a, c, g, or t
  misc_feature (711)..(711): n is a, c, g, or t
  misc_feature (729)..(730): n is a, c, g, or t
  misc_feature (734)..(734): n is a, c, g, or t
  misc_feature (737)..(738): n is a, c, g, or t
ggcccccgtgcggcggccgcgcagtgctggctcctcgcgggctcgggcggcggtctgcggcggggctatggcgagcggcggtggcgggggtgacactggcgcgggtggggggccggggatnggcctgagcctgggcctgggtctgggtctgagcctaggcatgagtgaggccaccagtgaggcngaggaggnggcggccacggcnngangcggtgggacgcctggccactgacgctgtggctgcggctccgcgtgctgggaggcggtgctggcggcggcgcagnnggttgctggtgtgggananngccgctgnacagncttgngtcacnngctggccgnngctcaacnggcctcttctggttgctgtcttcctcgtncctccggccnnttcttcctactcagngtnntcacnttnnggcctattttctgctggatctctggcagcctcgctttctccctgacgtttcaggcntcatccccagaggagccacactctgacagtgaagtggtgctggtggtcatgtgcgccactggccggcacctgctgagtgtgcccgagttgtgcagataccttggctgagagctggctcacctttccagattcacctgcaggagctgctgcagtacaagaggcagaatccagctcagttctgcgttcgagtctgctctggctgtgctgtgtnggctgtgtngggacactatgttccaggnattatgatttcctacatnngtcntgnngagtatcctgctgtggccctggtggttatcatgaggctgatccagaggatgtacactcgcctggaggcccctgctcatgcagcttggactacagcatgaagggcagaaagcccgagtggccgtggatcagaagacacgaacgaggacggaaccgtcacgcgacagaatgcagccccaagggagcgtgatgaagccactgggagcagacaggagagtgaagcgaggacaccttggctgggcttctccccagtgtgcatgtgaggaaac

SEQ ID NO: 575672 - DNA, 565 bp, Homo sapiens
  misc_feature (466)..(466): n is a, c, g, or t
  misc_feature (507)..(507): n is a, c, g, or t
  misc_feature (548)..(548): n is a, c, g, or t
tgaagttggcatcagtggttgaaaacaaagttctgtttcagaaagaatgaggagggttgtgagctgtgtgtgaaagataaggactgaagatgtggggacaagcttgtttgaagtgatgcttggccagtgaacaaacgagatctagaagagattaaacaaaaagaggggagtgggctagattttaagttgggaaggatgacagtgccaagtcacagatggaaaatgttgctctaaggaaacctgctcggttgcccccacctcttgttgcacaagtaccaccacactttctctgctttaagtactgtattgtgggaattcaacccacttctaactttctaagcattgtaggaaaaagtgcttatttcctttcctagctgtccaaatggttgcacagtcagaatctattgtgctgcctgtacttctatattagagctaatactctcacattttcatacccatatccccnaattacagcaaccaaccagtattatcctgattttcctggcnatagggacctaattggctgtttgggatctgaatattctggnaaagtgggaaaagtaga

SEQ ID NO: 575673 - DNA, 904 bp, Homo sapiens
  misc_feature (121)..(121): n is a, c, g, or t
  misc_feature (184)..(184): n is a, c, g, or t
  misc_feature (192)..(192): n is a, c, g, or t
  misc_feature (205)..(206): n is a, c, g, or t
  misc_feature (209)..(209): n is a, c, g, or t
  misc_feature (284)..(285): n is a, c, g, or t
  misc_feature (302)..(302): n is a, c, g, or t
  misc_feature (304)..(305): n is a, c, g, or t
  misc_feature (313)..(313): n is a, c, g, or t
  misc_feature (318)..(318): n is a, c, g, or t
  misc_feature (323)..(323): n is a, c, g, or t
  misc_feature (329)..(330): n is a, c, g, or t
  misc_feature (339)..(340): n is a, c, g, or t
  misc_feature (348)..(348): n is a, c, g, or t
  misc_feature (377)..(377): n is a, c, g, or t
  misc_feature (387)..(388): n is a, c, g, or t
  misc_feature (403)..(403): n is a, c, g, or t
  misc_feature (406)..(407): n is a, c, g, or t
  misc_feature (412)..(412): n is a, c, g, or t
  misc_feature (415)..(416): n is a, c, g, or t
  misc_feature (472)..(472): n is a, c, g, or t
  misc_feature (582)..(582): n is a, c, g, or t
  misc_feature (591)..(591): n is a, c, g, or t
  misc_feature (610)..(610): n is a, c, g, or t
  misc_feature (628)..(629): n is a, c, g, or t
  misc_feature (633)..(633): n is a, c, g, or t
  misc_feature (636)..(637): n is a, c, g, or t
ggcccccgtgcggcggccgcgcagtgctggctcctcgcgggctcgggcggcggtctgcggcggggctatggcgagcggcggtggcgggggtgacactggcgcgggtggggggccggggatnggcctgagcctgggcctgggtctgggtctgagcctaggcatgagtgaggccaccagtgaggcngaggaggnggcggccacggcnngangcggtgggacgcctggccactgacgctgtggctgcggctccgcgtgctgggaggcggtgctggcggcggcgcagnnggttgctggtgtgggananngccgctgnacagncttgngtcacnngctggccgnngctcaacnggcctcttctggttgctgtcttcctcgtncctccggccnnttcttcctactcagngtnntcacnttnnggcctattttctgctggatctctggcagcctcgctttctccctgacgtttcaggcntcatccccagaggagccacactctgagattcacctgcaggagctgctgcagtacaagaggcagaatccagctcagttctgcgttcgagtctgctctggctgtgctgtgtnggctgtgtngggacactatgttccaggnattatgatttcctacatnngtcntgnngagtatcctgctgtggccctggtggttatcatgaggctgatccagaggatgtacactcgcctggaggcccctgctcatgcagcttggactacagcatgaagggcagaaagcccgagtggccgtggatcagaagacacgaacgaggacggaaccgtcacgcgacagaatgcagccccaagggagcgtgatgaagccactgggagcagacaggagagtgaagcgaggacaccttggctgggcttctccccagtgtgcatgtgaggaaac

SEQ ID NO: 575674 - DNA, 216 bp, Homo sapiens
ggtgtttgtagagacttccacatgtgataaggtgatatagaactatatacacatattgtaccaatgtcagtgtcttggttttgattttgtactgcagttacatagatgtaaccattggggaagcagataaagggtacatagaacctcactgtactatcctcgcaattccctgtgtatctgtaattatttcaaaataaaaagtttaaaaagtttaaa

SEQ ID NO: 575675 - DNA, 1310 bp, Homo sapiens
tagcactgcaaggcggcggtaggaaaggtgggggtggctagtttctctaagccatccaggtgccatccatcgtcggctggcaggcgacgacacggctctcagccggccgccatggactggacgcatgatggaccctatctggggccaccctacaaggggccaaaacgggctggggtaacccaagatcgggtaaataaccccggaagttcccgggacttgagatccttctccggcctctcagaaaataaagaccatacatcatggtggcgaaactggaccaggggatagaagaccaatcttatgggaatatccaacaggcggggctacagggggggtccactaccccatatgttggtgtagtgagatgtgtggagttatactcctctacaaatgggccaggttttggcgcccttctacagggctcccctggggagactgggaaaacctctgggcgcctctgggggatttctacacaacggggacaccacccacagaaggcgatcttcgggggggccaatacccaaggcgattgtggcttagcttgtgtgggccttacttcgctcttggacaacccgggcacgatttggtcttctgggatcctcagaaagataaaacaccatacaacgtctatggggaacattacgccgtgggcgctggtgttggcacacatacccaccgggctccccggggaaggcaggacgccccactacaacaaggtggcgatgatcaagggaagcatcccgagaacatccgcccccaaacaagcgcaagccaaaccccacaaacaacggaccaccccaggggggctggggaaacaacgcctgggtccaacgggctcatggcacaccccggggggcaaacgtggaccacgtgcagatcactacacacaccacatttgggggccccaccacaggggccaatacggaaaccaaggggggaaaggggctctcacccaggaatagtgataaccctactgggccggctacccgggagagccaaagagattaggcacagcggccatggcgaaggcgagcctcaacgaaagcggccaacaccatttacacgcgcaaaagagcggggggcaaccaaaatcaacagcccccggagtgctcgcccaacaaccggaagatgagagaagatgtaacaaggccccgcaccatcctgggatataacgagacgcaccataagatcacaacgacaacgacatactacacgcagaagcagagaaccattgaccaccactcgcagagtgacgacactctgggacaaacagaaacgaaagactcaccacctaatacatacaaaaagcg

SEQ ID NO: 575676 - DNA, 351 bp, Homo sapiens
cccgtcctacatcgtgttggaatgcagacctgccaggctgcttgagaatcaaggttttgcctcccccatctggcactcatggtgggagggggtgaaggtgagccctggaggccagaaacacgtgccccattcactgtgaccacccccggactcagcctgagctgatggacaggaggcctcagtccaaggtccccgccaggcacatcaatcctcatagctgacctccagcctcatgacagaaaggcggctgatcctacacagagggtggctgcttttgctaaggacaatataccgaggcttgacatggtatgaggtcttcagtcaggagccagatattggcagccctaaggc

SEQ ID NO: 575677 - DNA, 261 bp, Homo sapiens
  misc_feature (241)..(241): n is a, c, g, or t
  misc_feature (246)..(246): n is a, c, g, or t
gcgaggtgagtgcgatcggccaggtctgctaggtcattgctgacgtcaatcgtttcgctgggactatgctgtcgtaacttgacgccacgaatgaccttgtcggatgcgtaagttattgatttaaaaggaagtccgcttcgccgacgcaaggggaatcgtgtcggacagctgatggctgccggtggctgccggatgtgtaggtcttcccatgttgtgaagtaacggtgctccaccgcctcgnatcgnccgccactggctgtc

SEQ ID NO: 575678 - DNA, 163 bp, Homo sapiens
aggaaagggtcacatttttccaactccgatggctacgtttgccactccctctatagggggggtacatagccgagaaaccctcagccagtctcatctgagtatgggagcgcaggttattgtgaagccctgccagcacggattatgatttagtatccagcatccg

SEQ ID NO: 575679 - DNA, 352 bp, Homo sapiens
aagtagcgtccattgtgaagaacatctctccgtaactcaggctcgtgcacctcgccggcccgagtccagtgcacatcaattttccctgcggtagaagtcgtaggccaggcacgtcagattcttcgtttctcctggggtctggaggctggtgaccgccacagagggaggatcacgccggtccaggcatatttatgctgtatttcaggtatttccgcagagtcgcagtgcactcctccggcaggtaagccttggcccgctgcacgtagactggctctgcctcacacttctgcttggttatctgcgctgatgctgcatgtggcacaccggctggaatgtgtaaggtcaactgatt

SEQ ID NO: 575680 - DNA, 241 bp, Homo sapiens
ctgaacattaaaaaatatacttagaggctgggcgcgtggccacgctgtaatccagcgctttgggaggctgaagcgggcggatccacttgagggagggagttcgagcacggcctggccaacatggtgaagcccagtctgtactagaaatgcagaaaattggttgggcgtggtggtgcgcggcatgttataccatctaattggcgctcagtaggagggggtaccgaggctcgaacttacgtac

SEQ ID NO: 575681 - DNA, 212 bp, Homo sapiens
  misc_feature (5)..(5): n is a, c, g, or t
agtantgtctgcgacctacaccacagctcacgacaatgccagatccttaaccactcatcaagggcagggatcgaacccgaaacctcatgtgtcctagtcagatttgttaaccactgagccacgacgggaactccagcagctttcttctttttaaatcaacttcactgaggtacaatttatatacaaaatgtatagtagtttttcaaagtgcc

SEQ ID NO: 575682 - DNA, 373 bp, Homo sapiens
aagagcagatttagaagcaaagtcaatgaatctgtttgggacacagctggaggagccagcaatcataaaaacagacagaaaaggacatcaggcagttaaaaatgcagccctgttcaagaaagaaacatgatagagtaaatggttaatgcacacacagcctttgtgtgttccaggtggttctatgagctagagcgaggaggctgagcctggacactgtgaccaaaccatggactgttcccacattctacaacctgcattcattccttgtaaatctcttgatgaatttttcacacattctggcctcagttatgtggatatggtccccaaaagatgtgaaagtccttactgggacaaaagaactctttctctcccc

SEQ ID NO: 575683 - DNA, 690 bp, Homo sapiens
gggacgaggcagagtgcaggcagatggaatcggagaaggccgaagggagcaatgagccgctggaatgggacatgaacagacactagatgcggaggaggagctaggaggaatccggaagaagcggcctgtgtgtcgagcaacgaagctggtgtagttgccaggtattgtgtacctgggccatatcccgccgcgcttccggcccctgcacgtccgcaaccttctcagcgcctatggcgaggtcggacgcgtcttctttcaggctgaggaccggttcgtgagacgcaagaagaaggcaggagcagctgccggagggaaaaagcggtcctacagccaaggactacagcgacgggatgggtggacgttccgtgacaaggcgcatatgccaaagacgctgttgggggccagttctacatgaagagcgcctatgtgggtggcccgtagggcgccagccccctttaccgtccatggatctttggtgaaagccgtcacagtgtactttgcaacccgtttttcgacgctgtgatcccagacctcagtgcgtaggcaccctccggacccttttgagagcggccaagggttggcggcaggggctggcgcatttgaagtaagccggagcggttagcgtccagtgcccaaggcgtgcagcaccggagttctaatcttccaaacgtgtggaaacggggggacaag

SEQ ID NO: 575684 - DNA, 205 bp, Homo sapiens
agggaggtaggcagtgaggtggaccatactattatgtacataacacagagttgcgtatgaaactatattccctgtaaaaacaaataggaaatatgaatgtgaatccaattagacaggttatccttgagacgcccttccttctcacaccaggatattcacacttatctccatttcccagtggcaaaagtagggtaccgagctcgca

SEQ ID NO: 575685 - DNA, 208 bp, Homo sapiens
ttttatttaaaaaaaaaggttttccctgtggtttatggggtggggcccaaattttaaattcctggtataggttccggattaaggggggcctttttttttttagaaatggttgccataaggttaaaaactggaaaacccctttgggggaagcttttgaaatgatataattttttaagatatttaaccggctctggtggtggtatttgga

SEQ ID NO: 575686 - DNA, 267 bp, Homo sapiens
tgtgtagtttgagctgttgcccaggctgggagtgcagaggtgcgatctcggctcactgcaacctccacctccggggttcgagtgattcttctgcctcggcctcctgagtagctgggactacaggcacacaccaccacacccggctaattttggtatttttagtagagacggggtttcaccatgtgggccaggcgggtctggcttgggtttttatggtttcatgatcatagattatatggaataagggcgttatgattatttttaacg

SEQ ID NO: 575687 - DNA, 234 bp, Homo sapiens
cacacgatagtgttaaacagctggaaattgctgctagaggaggaggcttggcagaatgtgtaggggaggcaggagggttgtgtatctggcttttaacctctgccggatgtggcagctgccaccagctatagaccactttatgactttgacatatacagtcctgttcagacctgtgccacagctcaaggatattagtgtaaatcaatcagaaaaaactaaattctggaaaaccct

SEQ ID NO: 575688 - DNA, 100 bp, Homo sapiens
  misc_feature (4)..(4): n is a, c, g, or t
  misc_feature (32)..(32): n is a, c, g, or t
  misc_feature (43)..(43): n is a, c, g, or t
ctantatctggattcccttctcatctcccacncacactcctangacttgacagaactctctctagagagtacccctatgaatgtaagcagggtgggaaag

SEQ ID NO: 575689 - DNA, 87 bp, Homo sapiens
gccaacccatccaccttataccagacaacttggccaaaccattacccaataaggtatggcgttagaatttgaaacctggcgcaatag

SEQ ID NO: 575690 - DNA, 176 bp, Homo sapiens
ttcatgtcagcgcttcatgcgtgtatcacctaaagctcctgtttccagcagggttcatcgagttggcctggcctctttatactttctggggggaagagagctttgaacgcgaggagggggactttagacgagggatgaaaatgagccctgggaggcatgaagggcctcgacatgaa

SEQ ID NO: 575691 - DNA, 358 bp, Homo sapiens
  misc_feature (42)..(42): n is a, c, g, or t
  misc_feature (211)..(211): n is a, c, g, or t
gtctagaggatcccacctcctaccccacgttcgtgaagcganaccggcgaactgaaacatctcagtagctggaggaaaagacatcaaccgaaattcgttagtagtggcgagcgaacgcggaccaggccagtgccgacaagtgaatttagcagaacgatttggaaagatcggccatagcgggtgacagcccccgtatgcgaaaggtgaaatncgtcggactttgagtatgggcggggacacgttgtaaatcctggtctagaacataaggggtgaccaaccctctaaagcctaaaatactccgtattgcgaaccgaatagtgaacctggtacggggtaccgaagcctcgaatttcgtaat

SEQ ID NO: 575692 - DNA, 599 bp, Homo sapiens
  misc_feature (198)..(198): n is a, c, g, or t
  misc_feature (274)..(274): n is a, c, g, or t
  misc_feature (276)..(276): n is a, c, g, or t
  misc_feature (282)..(282): n is a, c, g, or t
  misc_feature (285)..(285): n is a, c, g, or t
  misc_feature (288)..(288): n is a, c, g, or t
  misc_feature (293)..(293): n is a, c, g, or t
  misc_feature (334)..(334): n is a, c, g, or t
  misc_feature (337)..(337): n is a, c, g, or t
  misc_feature (339)..(340): n is a, c, g, or t
  misc_feature (358)..(358): n is a, c, g, or t
  misc_feature (363)..(363): n is a, c, g, or t
  misc_feature (370)..(370): n is a, c, g, or t
  misc_feature (373)..(374): n is a, c, g, or t
  misc_feature (377)..(377): n is a, c, g, or t
  misc_feature (381)..(381): n is a, c, g, or t
  misc_feature (388)..(388): n is a, c, g, or t
  misc_feature (394)..(394): n is a, c, g, or t
  misc_feature (398)..(398): n is a, c, g, or t
  misc_feature (413)..(413): n is a, c, g, or t
  misc_feature (447)..(448): n is a, c, g, or t
  misc_feature (456)..(456): n is a, c, g, or t
  misc_feature (467)..(467): n is a, c, g, or t
  misc_feature (477)..(477): n is a, c, g, or t
  misc_feature (482)..(482): n is a, c, g, or t
  misc_feature (486)..(487): n is a, c, g, or t
  misc_feature (490)..(490): n is a, c, g, or t
  misc_feature (495)..(496): n is a, c, g, or t
ctaacgggtacttctgatggtagcacgagtattatctcgtaagattgatctacagtggtgtataagcaagttttttttagtgtaggagaaatacttttccattgtttaactgcaaaacaagatgttaaggtatgcttcaaaaatttgtaaatgtttattttaaacttatctgtttgtaaatgtaactgattaagaatngtgatagttcagcttgaatgtctcttagagggtgggctttgttgatgagggaggggaaacttttttttttctatanantttttncanatnacatnttctgagtcataaccagcctggagtatgatgggcctagatngcngnngaaaacagctcctgggtngaatnggataangtnnaanggcngaaaagnattatntgtnatacctccatggggnaataagcattaacccgtgagattcttactactgnntgagaacnttatctgcatntgccaaaaanatttnaagnncantgaanngctaccaatttaaagttaccggaatctcaccattttaaaggttaattggcttggtcaaggctattaaccaccaaaattactggatcggctgaaaaaatcccat

SEQ ID NO: 575693 - DNA, 436 bp, Homo sapiens
  misc_feature (33)..(33): n is a, c, g, or t
ttccaatttggaaagccattcccaatggagggncagatagcccttttcagtaaatggtcccaagagcaagtggacgacccagaggcatgtaagcctaaccctcccaccctaaaccccccacacttcatacccaaaaaattaacccccaaataattcagactctgaaatgtaaaacataaaacaataaaacttttagggaaccaaaaaaccagaaaatttttgaaatacagggctaggcaaagagacatcaaaagcaagatccctgagaaagaaaaaatgataaatttgacatcattaaaatgaaaattttttgatttgtggaagagtctgatagaggatgaaaggacaaactacagagaaaatgtttacagactccacacctaaaaaaggactggtatgtagaatatacaaaggactctcaaaactccggagtgaa

SEQ ID NO: 575694 - DNA, 989 bp, Homo sapiens
  misc_feature (304)..(304): n is a, c, g, or t
atctcacgttctaggaatactagtatatcgactcagcccagcatcgatatcgtccctactatgcctagaaggaataatactatcggcaggttcgactcataagctactactcataaccctcaaacaccacactcccgtcattagcccaagtatttggtgcctattagacaatatgtatggtctcttgcgcggcctgacgagtacagcgcgtgggtgcataagcacgcatacctagatcgtcaattcctccaaccacgactattgtgcctagaagctgacgttacagtacatgctaagagcctanctccattaggctaagtatctaatgtacgtcagccagacctcagttaactatctaactatcctaggtgtagcatggactgtatccgaaatacaacatccctatagtctgggaaatacacagaaccgagcagcccgaaaggccttatgtttagttagtgcttctagtcccgttctcactattagttcgagccgatatacgaacaaataagcctaatgttagccttgctagcgcccaaggcttttttcccctccgggtagccccttaaggaatacccctactccctaaagtatgtacacctaacactggatgtccctaaccccggtcgagccaatccattgggcctagttcaaacgaccacgattttcagttccaggtgaagcaatattgacgacccctacaactctgacttgatctacctactgtaattctcccactagccaattctccttaacttatcacagttcaatggtcaccacagaagcttcatcataagtcttatggctctttcctttctgaacaaccagcacatgaatcctcccacctggcggtatacatcaccctgagtgaaggccaaccgggcacgaaaaagcctgatgcggtggccgtacattccgtatactacaccccctagaggtaggctcccgttctctagtcctcgcggtaaatttccggacaacatcccttg

SEQ ID NO: 575695 - DNA, 199 bp, Homo sapiens
  misc_feature (149)..(149): n is a, c, g, or t
atgattagttctgtggctgtgaatgttataattaaggagattgtagggagattcatgatttaatgactgccatgctgggtttgaacttgcatggggcctatagcccccttttttggcaggtttttccctagatgggaatatttccccanaccccttgaaccctgagttgtatgtctggaagtaaagtaatttgtttttt

SEQ ID NO: 575696 - DNA, 338 bp, Homo sapiens
gtcagcctcgactgagacacatttctggcgactagtgagaatatatgtatttgtagttgcagccactgtgggtggttaacgtttcaataactgaagaagaacatactgctagcatttgctgggagccataatgagaacttatctacatcatctcatttgaagcttacaggggtttcgagggagtagatactactcttcccatctgtacagccgcgagtcctttgccaaagttactacttgaactcaggtattttctaccagagtggggctactgccagtttttaaggtctggtttaactagaagaaaaaaaaataattaccagggtttaaagctttca

SEQ ID NO: 575697 - DNA, 182 bp, Homo sapiens
acatcagtcggtactgctaggtggagtgtggtggccaaatccacagctccatgtctcacatcaccaggctaagcaatcctcccaccttgtagctgggactacagcgcacagcacactggctaaaattttttttttggttgagacggattctctcatgttgcccaggctggtctccaggctcc

SEQ ID NO: 575698 - DNA, 826 bp, Homo sapiens
gagatcgccgaagcgtcggactaccgttggtttccgcaacttcctggattatcctcgccaaggacttcgctatatagttgtttccgtcttttctggaaggatatcgctgcttcccgaaggtcttggacgagcgctctagctctgtgggaaggtttaggagctctctggctcggattttgcaatttctccctggcggacgtgccgtaggatgccgcatccactgtggatgtgataattgcaacatgtacgctggaagagactcgtggcgtgctgactaacgcggcgctaaaagatgcagacggtgaccgccgcggtggatggagcttttggtggccagttcagactgcctaggatgctgcctgctacatggtgggggtgtacgagtcggccaagtggatgatatgtggacccagacagcgtggtccatctgcctctgtggccattgccgaggaggaggaggatgacatcggcctgtaagatccattgttcacgctctttccagtctcttctgcttgtgactaatgatcatcaatcgtctgggcgggtgtcgtggcattggatcgcttggtcgcagctcctgggagagccggtcgaggacccagggttacaacgagggccgagagcttgtattgtctcctggtcacgtgaatctcaacacgtgacgcctggtaagagcgacggctatggtggaggtggccaggtactgcgaagaaaagcggggcaacaaccagtgggtcccctacatctctcttcaggaacgcttgaggcctttccagcagcagaatctgtgaagttgttgccacaacaaaattacatagttttggac

SEQ ID NO: 575699 - DNA, 310 bp, Homo sapiens
catcccccctattggtgtttgtgccaatttagctactactggtttgatagcttccttattgtctactgttagaaattgccacaaattcagttgcttaaaccaacacagctgtcttacctttcagtttaggaggtcagagtctgtgaccacgttcactgggctgatacctatggtgttgtcatgactgggaccccccgtggagtctggaggagaatctgttttcttgacttttccagcctctagaggctgccgcttcccttcgctcaaagccccttcttcccccttcaaagccaacggtgcgttggcccaa

SEQ ID NO: 575700 - DNA, 114 bp, Homo sapiens
ctcatgttatgatgctgctgagcgtggcgcgacgcatacttgtcgatggatggtccgcacatatggcggtggcaggcttccgctggacgggatctcctgcttaatgacccaggg

SEQ ID NO: 575701 - DNA, 503 bp, Homo sapiens
ggctctcacgtttcttgtgagctctggggagggtagtgggacttttgatacgaaaaatgcatttgtgcagctggtgaggtataattccaaagcaaaagcaggggcaaaattgatttcctgaagtatctctgttcctgctggttatcctccagaatctgtcatgttgactgaaagtgcgtgcttgctttctcaggcctcctggccaatagcacaggtcttgctggaaatcacccacatggtttttcattgcctgtgcagtcaggtgatgcctctatgtttttggaaggtccacctctgttgtttcttaaccttcccagccttcccacagtttgtcccagtgatttgggaagaaaggtctcttcatattctggccactttcgacgctgaaactgcctgtatggctcatagcatcctccatctttaagtccccaggtccatgtatcgagtccgggggtaacactgcttgtaacccttgcagctcctcagctccatgagctgtacgt

SEQ ID NO: 575702 - DNA, 298 bp, Homo sapiens
tacccattctcgcaaggtgctaagcacgcggcacacggtcccgatacaaaaaaggacgattatcgtgcaatacgcaggcatattacacgattcgccccagtctgctcatacttctattctacgtgtcacccgacattttaaattaatccatggcaggaaacgtgacataaaaatgtgagtttcttaacattacacccggtcaactaactgccgtctcatcatctgtcatcccttgcaaacgatatagggtatagtaacggccgcgttggccagtaaccgatcatggtcccccgctcga

SEQ ID NO: 575703 - DNA, 278 bp, Homo sapiens
ggggggggtttaaatgttttccggggaaaaatttcaggggtttcccccccttgaaaaaaaaaaaaagtttttttttgggaccaaatttcctggggaatggggtttgttggcccccaaattttttttttttcgggcggggttcccccccaaaaaaaaaagggggtccccttaaggtttggccaatttcccttaaaaaacttgtttgggggcggggccctttttttaaaaaaaaaaggggtttggtccccaaaacggggaaaaaaattttccttttttga

SEQ ID NO: 575704 - DNA, 1088 bp, Homo sapiens
ggcgctactgaggctcgcggactccggactgcggattggggcgggaagagccgggggcgtggtgtgacagtggagcatgccgcatgactgttgagggccgatgctacctccccgccctgaggtggggtgcaccaccagtgatgagcaatgctgcccagtggagctgacccgagtacttggtgcgcagcctgcacttgccgtggccgtcccgtggggcgtccgtctactgtcccgagcagcccgatgatgccttctccgtcgtcgatcggtccattcctgcctgccttgatgaagctgaaggggccactctctgagtgtccggccgcactcgttcttgtctcgtctcggtcgcagcttcgacctgcatcttcagtctcgcatgcatctggatcatcgaactggagataccaatcagcaagagcatccagtggagaacgtctggaccgcatcggagactcatccatcgtacaaatgtttaaaacttccttcttcgatcatcttgtgtccctgtgccgtatcgttcccgcgttctctggactggcgtcctaggctagtaggccgcggtgcttggaggctccgggcacgggatgagggtgagtatgcggtcacgacgcatggtgtccacgtgcaattcctcatttgtcaaggtcatcctctcttgagctgctcaggcaaatggggcacttttggcctacctgctccccatcgtctctttttgtcctcgcctggtttggaagcaccttggttcctttgacttcacgagttcctaccccaggacagctgaagaggggcgatgggaatctttgccggccaggttgctggttggccggtgggaccccttggtggttctccgggtgactcttgtccgagggggacaagattctttttacaaccccacaagaaattcctttgccagcggtctggacaacttgacttcacgaatgcatgcacgtttgctgggaaacgacagagttctctctgctcctcgcagcgggagtacattccgcacgggggaacgcaggccacggtaaggggtgatccaacatctggccccggacagactgggaattgaggagaaactgaatggg

SEQ ID NO: 575705 - DNA, 360 bp, Homo sapiens
gaggacatgttgggcatgaatatgagctgtatcaggaggttcaattcctagaggtggaattatcgggccagagggtattgtacttataatttggacagatgctggcaaagttctatctatacgagtggtaccgatttatatatccactagcaaggtatgataatgacagatttcgaaccctcccttctgctccgggcaacattctattccctctctgaatctgccttccttatatctcattattccccaacaagagcctgatctctctgggcagggcagttaccataaagctagttctcacttcctccttctaactcgcagcggtacgattcgtgccaatctgaagcactcggtccgggg

SEQ ID NO: 575706 - DNA, 1126 bp, Homo sapiens
ttgtcgttgccgctctggtggctgctgtctttatctgtatctcgttcttgctgtcgtcgtgtttttcctaggctgttctggtttgctgtctttttcttgtttacgctcctttgtcgtgctctgcggtgtttgcagctctgccgctcggtgggtgcttccttcttcttttcgttgttccccgtgtctccgtgctcttcgggttgcgcgcgccggattgtttggcggtataccggtttaccgcatgggccccactgtttgtgcctcttcggggtgtgcaccctgtcgctgcgctgtgttttttgcgcttgtgcctctgtgaccccgatagttgcctgtccctgtgtgtattcacgcctcgtccttttgtgtgtgacacgtcgttttttgtacctgtggatgccctcctctccgctgtccccaaccccccgcggtcagcctgctacttggcctcctaattattttaccacctttagcctaccggtgactcaatcctctgaacaggggtgagcatcaaactcccaattacccccctgatcgggcccactgcgaccagtagccccacaccaatctcaaatgaagtcacccttagccatcattctactatcaacattactaataagtggctcctttaacctgtccgcccttatcacccatcccacaggacacccttctgattactcctggccatcaggagcccttggccataatatgatttatctccaccacctagcacgagacccaccggaccccctttcgaccttgccgaaggggagtccgaaatagtttcaggcttcaacatcgaataccccccaggccccttcgccctatttcttcatagccgagataccccaccacttattataataaacacccctcacccacctaccaattcttcctagggaccaacatatgacccactctcccctgaactctacacaacatattttgtcaccaagaccctacttttaacctccctgttcttatgaattcgaacagcatacccccgattccgctacgaccaactcatacacctcctatgaaaaaacttcctaccactcaccctagcattacttatatgaaatgtctccatacccattacaatctccagcattccccctcaaaccta

SEQ ID NO: 575707 - DNA, 142 bp, Homo sapiens
tacagattagcattgttccggatgtcccaggtttcctcctgtccaggtctaagctgacacgatgtttcttactaccgtcaaacaggagctccgcaccagcgtccgaactccacctccactgacaacggccatggggatcctc

SEQ ID NO: 575708 - DNA, 220 bp, Homo sapiens
  misc_feature (66)..(66): n is a, c, g, or t
  misc_feature (113)..(113): n is a, c, g, or t
  misc_feature (164)..(164): n is a, c, g, or t
  misc_feature (170)..(170): n is a, c, g, or t
  misc_feature (201)..(201): n is a, c, g, or t
  misc_feature (209)..(209): n is a, c, g, or t
ggggctggtccctgtcaggagtgggcaggtcgctgtcaagagagggtaagttccttgtcagtaggnggcaggtccctgttaggagggaactgctttcaagtcagcagccaggnttcaggcaggaaggccaggtgtctttcaccaaaaggcaggtcccaatcagnaagggngacgttctaatcaggaagttacaagctttantcaggaanccaatttccaa

SEQ ID NO: 575709 - DNA, 302 bp, Homo sapiens
cgtcatcagtgcctggattcagtgtccactcatggacgtggtgggagacggccatggtcacgtgctgactccagaatactgctacgtgcgccgaggcagcaggagcccatacatccccccgcacgcggcctgtgccttgaggtgaccctgaagacggctgtggacgggcctgacctggagattgctcacggggcaggagcgcgttggcccttgccaaccggaagcgggagtgcgggaacgcccactaccagcgggcggacttcgtcctggccgccaactcctacgacctcgccatcaaggct

SEQ ID NO: 575710 - DNA, 506 bp, Homo sapiens
tgagacggagaactcactctgttgcccagacgggagtgcaggggacgatcttggttactacaacctccgctccggggttcaagcgatcctcctgcctcagccccccactagctgggactacaaggcacatgccaccatgcccggcctaatatttcatggtattcatatagtagagaccaggcttcgccatgtttggccaggctggatctcgaaccccttgagcctcaggtgatccacctgcctacggactcccaaagtgggaaatgggtcattatacaaaaggggcaaaagtgataccaatccccttgcaactccgtgggcatccgtgctcatctcacaatgccacaaggatatggcagtggatggccaggcctgagcccccgaccaagtggcgttggagagcacaaaatgaactctgcgaggagcacgaggtgggccctgatcaacgggagggcagtgaagaccaccacagcccaacagtggattaatcaaccctatagaccaaa

SEQ ID NO: 575711 - DNA, 110 bp, Homo sapiens
tcactctatgaggatcccccattaccctatagatcagtactcctattcatcagatgctcttccacaatcctatgcctacccgccgcagtactgatctatagagagtggtg

SEQ ID NO: 575712 - DNA, 923 bp, Homo sapiens
  misc_feature (4)..(4): n is a, c, g, or t
  misc_feature (110)..(110): n is a, c, g, or t
  misc_feature (198)..(198): n is a, c, g, or t
  misc_feature (261)..(261): n is a, c, g, or t
  misc_feature (296)..(296): n is a, c, g, or t
  misc_feature (329)..(329): n is a, c, g, or t
  misc_feature (337)..(337): n is a, c, g, or t
  misc_feature (355)..(355): n is a, c, g, or t
  misc_feature (394)..(394): n is a, c, g, or t
  misc_feature (398)..(398): n is a, c, g, or t
  misc_feature (419)..(419): n is a, c, g, or t
  misc_feature (423)..(423): n is a, c, g, or t
  misc_feature (434)..(434): n is a, c, g, or t
  misc_feature (440)..(441): n is a, c, g, or t
  misc_feature (454)..(454): n is a, c, g, or t
  misc_feature (460)..(460): n is a, c, g, or t
  misc_feature (476)..(478): n is a, c, g, or t
  misc_feature (485)..(485): n is a, c, g, or t
  misc_feature (487)..(487): n is a, c, g, or t
  misc_feature (490)..(490): n is a, c, g, or t
  misc_feature (503)..(503): n is a, c, g, or t
  misc_feature (515)..(515): n is a, c, g, or t
  misc_feature (535)..(535): n is a, c, g, or t
  misc_feature (543)..(543): n is a, c, g, or t
  misc_feature (566)..(566): n is a, c, g, or t
  misc_feature (582)..(582): n is a, c, g, or t
  misc_feature (586)..(586): n is a, c, g, or t
  misc_feature (609)..(609): n is a, c, g, or t
  misc_feature (776)..(776): n is a, c, g, or t
  misc_feature (828)..(829): n is a, c, g, or t
  misc_feature (855)..(855): n is a, c, g, or t
  misc_feature (899)..(899): n is a, c, g, or t
atanaaagtacaccttataccccacttaaaggtacactgagaggaataataaaataccttagaggattttgaataatatcatatcaccttatatatgtgtcacacatatntgaaaatgagtatcttgcccaaatttgtagacccacttaaaatttgataattactttttaaatggttcaaatcaaactaaaaagtcantaaccatgaaagtataatcactgaataaggcaaatattatattacctatgttttctcatttgntataaatatttatttatatttatatggcaccttangtgtttccacatctattgtccatagtagagganttttttgngaccttaggttgcttgcnttatgacatgtagctgattttaagactttggtctttgcngtcnaactgcacaaactgcacaggnaggncagattacttntaaagnnagggtcgattcancaaatngctgactttatagcannngtgtaancnttnagactgtagaatnctttcaaagtgnttagagaaaataattttcantctttttncaagttattactatctttgaaancattttaaacccaaanttgngagtattttctaataaaagatcntcacttaaaagagcttctaacatatatgcttcaggggaaaaaaattagtgccagagtctataaaagcagaggagtgatgacacaagaaaatggtaaataacattgtctaatttgcaggacagaaaaaaaaatagtacagaactaataatacagaactaaaatgctgngcaatgatagtataattcagtaggaaagtgactgtatccaaaggtcactctnntattacataaaagaataattatattnacttcaggcttcacagaaatattaaaatatccagaagaatccangataggagtaaaataagtatttgt

SEQ ID NO: 575713 - DNA, 161 bp, Homo sapiens
gggcccccccgggggtttttctggggggggttttttttacggggccccgcccccttttccccggggggggcccggggccccctttttgggggggttttccccccccctttttttttttttggggggggaggggggttttcttaaaatttttttccccccca

SEQ ID NO: 575714 - DNA, 452 bp, Homo sapiens
  misc_feature (34)..(34): n is a, c, g, or t
  misc_feature (87)..(87): n is a, c, g, or t
  misc_feature (90)..(90): n is a, c, g, or t
  misc_feature (127)..(127): n is a, c, g, or t
  misc_feature (132)..(132): n is a, c, g, or t
  misc_feature (136)..(136): n is a, c, g, or t
  misc_feature (156)..(156): n is a, c, g, or t
  misc_feature (158)..(159): n is a, c, g, or t
  misc_feature (184)..(184): n is a, c, g, or t
  misc_feature (188)..(188): n is a, c, g, or t
  misc_feature (211)..(211): n is a, c, g, or t
  misc_feature (214)..(214): n is a, c, g, or t
  misc_feature (224)..(224): n is a, c, g, or t
  misc_feature (230)..(230): n is a, c, g, or t
  misc_feature (234)..(234): n is a, c, g, or t
  misc_feature (243)..(243): n is a, c, g, or t
  misc_feature (245)..(245): n is a, c, g, or t
  misc_feature (247)..(247): n is a, c, g, or t
  misc_feature (249)..(249): n is a, c, g, or t
  misc_feature (257)..(257): n is a, c, g, or t
  misc_feature (261)..(261): n is a, c, g, or t
  misc_feature (263)..(263): n is a, c, g, or t
  misc_feature (268)..(268): n is a, c, g, or t
  misc_feature (272)..(273): n is a, c, g, or t
  misc_feature (278)..(278): n is a, c, g, or t
  misc_feature (280)..(280): n is a, c, g, or t
  misc_feature (288)..(288): n is a, c, g, or t
  misc_feature (295)..(295): n is a, c, g, or t
  misc_feature (300)..(300): n is a, c, g, or t
  misc_feature (315)..(315): n is a, c, g, or t
  misc_feature (332)..(332): n is a, c, g, or t
  misc_feature (342)..(342): n is a, c, g, or t
  misc_feature (349)..(349): n is a, c, g, or t
  misc_feature (364)..(364): n is a, c, g, or t
  misc_feature (389)..(389): n is a, c, g, or t
  misc_feature (406)..(406): n is a, c, g, or t
  misc_feature (419)..(419): n is a, c, g, or t
  misc_feature (428)..(428): n is a, c, g, or t
  misc_feature (443)..(443): n is a, c, g, or t
gctttcaaataatgcacacatagtatcgcatggntcaaattccgtacatttcaatatggtcatgagataggctgtattccaaaattnggnatataaatccatacataatatatactatatacattgnctttnaatnatctaactatgtcatttttnanngtcaaagccacttatttctaatggnagtnaccatatgcatgccatattgccnccnattccatagncacccncccngcccccccncntngngggtgctntttntnctggngggnnggtgngngtgggggngcttccnttggngcgtgtgctgtttcncgccggcggttgggtgngggcggcttngggggtngcgggcgttattttnggtcgggccggttcggttttgagtntttaggtcattctcatncaacttcctctantttagctanaaccctcggcagggntttattgtt

SEQ ID NO: 575715 - DNA, 128 bp, Homo sapiens
cagatattattcttttcattcccatcaaatgggcaaactagttccagcaaagtttaatcaacttcaccaggcagcatcacagttcaggcaggtaggggctccaacacccagtcccagctcccagcagt

SEQ ID NO: 575716 - DNA, 635 bp, Homo sapiens
  misc_feature (90)..(90): n is a, c, g, or t
catttcatcgggaagtttggctgatacattggtgggtctgtggtctagtcagtaaagcaggacactggagttcatctcgccaccttttanatgcccagccactgatagcaaaatcatcatattcacaatgcaatgaggagaggtgacctaatttgtgcctgtgaaagccaatgccacaaattagagttggcctatgctgacgtctatgttgaacccaatgctctgtctacttaaatgatagctgccagcttcactgggggctaataacagtgtttacggaaccaggcaaagcagaaaattgagtttgtgtttacttttccccccaatatgctttagtatgccaaaatgccttaataacagctgggtggttgaagcaaagcaggcctcccaaataacaagggcattttcagaatcaatgtgggccgagcctgtgaggtccaaggagaggccttcatctcagatatgtaactgatctgtacttgacctgtgaatttatccccatgttctttaagcagctcacacccttccccacattccattcaatatcaccagactagattgtaccgtatgtgaacgatttaggaaaaaaacctgaaaccaagaaagttgaaacaaataactcacaacaggggaaa

SEQ ID NO: 575717 - DNA, 618 bp, Homo sapiens
gggaggagtgctcggccagggaggagtctgttgtcagagagcctgtgtcgtggctgtggatgaggctttctggagctgggagcaggtgtttgtataagcaatgggaaaggctctggggattatgcaggcgtgaagaccccacaccatcggggggcggaaggctgagtgatgctgagctggtgccactgcctggtgagaaagtggctcggttcaaaggtaccacggaaggagggcacggaggagaagcttctggtgtggtttgtctgtgtgtctgtgaagcatttacctccaacacactggcagatggtgccgataccctggggataatataatcaaactaaccgtctctgcgcagcctggataaaaccatgcaaaacgaaaggtatcagcttgttttcaaacatcacaaaaccattctgaagaagcaaaccaggttggatgagtccaatgactgatatgtgttcctatgacttctcctacacctgcttcctggcgtgcccatcctgggacactggcgagtctgctcactgacactggcacgggcctgtctgtacagtcacagacggattttgctccctccgaccttcctggactcctgaacccgatcaagatgcatct

SEQ ID NO: 575718 - DNA, 266 bp, Homo sapiens
ttattgaaggggcatttaattcatctggtttgttactttcactactacagtctaaatatagaattattctggagttcctgtggtggctcgttggttaatgaatctgactaagaaccatgaggttgtaggtttgatccctggcctcgctcttgtgggttaaagaatccatcattgccgtgagctgtgatgtaggttgcagatgcagctcgaatcccacgttgctgtggttctggcataggcttggcagctacaactccgatgagacc

SEQ ID NO: 575719 - DNA, 225 bp, Homo sapiens
cttggacgcttctacatgacgtggccccagcaggttggacagagatctagctagctggttagtaactgaactcagcatgctcctctgctgtccgctccttggggtcacaaggtactctcccctccacaacagcattcatcttcccacctgcatgggaggaaggccagggcacactctagatcactcatcccccattttcacagggcaggaagctaggcaacccag

SEQ ID NO: 575720 - DNA, 88 bp, Homo sapiens
ggggggggggggggaggggggtcctttccccccccccccccagttttttttttccccccaaagggaaaaagtttttttttcctttcca

SEQ ID NO: 575721 - DNA, 837 bp, Homo sapiens
  misc_feature (24)..(24): n is a, c, g, or t
  misc_feature (31)..(31): n is a, c, g, or t
  misc_feature (474)..(474): n is a, c, g, or t
  misc_feature (479)..(479): n is a, c, g, or t
  misc_feature (481)..(481): n is a, c, g, or t
  misc_feature (484)..(485): n is a, c, g, or t
  misc_feature (487)..(487): n is a, c, g, or t
  misc_feature (491)..(491): n is a, c, g, or t
  misc_feature (531)..(531): n is a, c, g, or t
  misc_feature (590)..(590): n is a, c, g, or t
  misc_feature (619)..(619): n is a, c, g, or t
  misc_feature (626)..(626): n is a, c, g, or t
  misc_feature (658)..(658): n is a, c, g, or t
  misc_feature (689)..(689): n is a, c, g, or t
  misc_feature (705)..(705): n is a, c, g, or t
  misc_feature (731)..(731): n is a, c, g, or t
  misc_feature (763)..(763): n is a, c, g, or t
  misc_feature (793)..(793): n is a, c, g, or t
  misc_feature (811)..(811): n is a, c, g, or t
ccagaccaaaacgagagaagactncacgggnagctaggatgaggccacggtagagcaacgaggccatgggccgcgaggtgaacgcactcaagagcaagctcagagggccccccccacaggaaacttcgcagtgatgcaccaggcgaggaaacgagacctctttcgttccttctagaaggtctggaggacgtagagttattgaaaatgcagatggttctgaggaggaaacggacactcgagacgcagacttcaatggaaccaaggccagtgaataagcaactttctacagttttgcaccacggcaagaaaacccaaaaaccaaaacaaactaacataaaaaaacccaacaacaacccagaacaaagcaaaacccagcagactgtacttagcattgtctaaatccattctcaaattccaaatatcacagacacccctcacacaaggaatataaaaaccaccaccctccagcctggncaacntngtnnancctnatctatacaagatttaaaaataagctgggcgtggtggtanacacctgtggtcccagctactagggaggctgagccagggaagaacgctccagcccaggncttcgaggctgcaatgggctataattgcntcattgnactcccagcctggggaacaggggccctgtttnaaccaccaccaaccaccaacaaccctacttnccctggattcaagggnaaaatttgagtttgtatggtggaagnggtggggaaaaccccaacagggaccccggganatccctccagttttttccaatggggttttnaggccctggggtttttgnaaaacatttccccggggaccggggcc

SEQ ID NO: 575722 - DNA, 1060 bp, Homo sapiens
  misc_feature (11)..(11): n is a, c, g, or t
  misc_feature (18)..(18): n is a, c, g, or t
  misc_feature (39)..(39): n is a, c, g, or t
  misc_feature (67)..(67): n is a, c, g, or t
  misc_feature (93)..(94): n is a, c, g, or t
  misc_feature (136)..(136): n is a, c, g, or t
  misc_feature (139)..(139): n is a, c, g, or t
  misc_feature (154)..(155): n is a, c, g, or t
  misc_feature (159)..(159): n is a, c, g, or t
  misc_feature (172)..(172): n is a, c, g, or t
  misc_feature (195)..(195): n is a, c, g, or t
  misc_feature (209)..(209): n is a, c, g, or t
  misc_feature (215)..(215): n is a, c, g, or t
  misc_feature (275)..(275): n is a, c, g, or t
  misc_feature (304)..(304): n is a, c, g, or t
  misc_feature (329)..(331): n is a, c, g, or t
  misc_feature (337)..(337): n is a, c, g, or t
  misc_feature (356)..(356): n is a, c, g, or t
  misc_feature (360)..(360): n is a, c, g, or t
  misc_feature (364)..(364): n is a, c, g, or t
  misc_feature (372)..(372): n is a, c, g, or t
  misc_feature (381)..(381): n is a, c, g, or t
  misc_feature (414)..(414): n is a, c, g, or t
  misc_feature (419)..(420): n is a, c, g, or t
  misc_feature (428)..(429): n is a, c, g, or t
  misc_feature (434)..(436): n is a, c, g, or t
  misc_feature (438)..(438): n is a, c, g, or t
  misc_feature (440)..(441): n is a, c, g, or t
  misc_feature (456)..(456): n is a, c, g, or t
  misc_feature (466)..(466): n is a, c, g, or t
  misc_feature (472)..(472): n is a, c, g, or t
  misc_feature (474)..(474): n is a, c, g, or t
  misc_feature (485)..(485): n is a, c, g, or t
  misc_feature (498)..(498): n is a, c, g, or t
  misc_feature (500)..(500): n is a, c, g, or t
  misc_feature (503)..(504): n is a, c, g, or t
  misc_feature (518)..(518): n is a, c, g, or t
  misc_feature (526)..(526): n is a, c, g, or t
  misc_feature (535)..(536): n is a, c, g, or t
  misc_feature (548)..(548): n is a, c, g, or t
  misc_feature (551)..(551): n is a, c, g, or t
  misc_feature (563)..(563): n is a, c, g, or t
  misc_feature (603)..(603): n is a, c, g, or t
  misc_feature (625)..(625): n is a, c, g, or t
  misc_feature (629)..(629): n is a, c, g, or t
  misc_feature (632)..(632): n is a, c, g, or t
  misc_feature (634)..(634): n is a, c, g, or t
  misc_feature (641)..(641): n is a, c, g, or t
  misc_feature (646)..(646): n is a, c, g, or t
  misc_feature (648)..(649): n is a, c, g, or t
  misc_feature (653)..(653): n is a, c, g, or t
  misc_feature (681)..(681): n is a, c, g, or t
  misc_feature (698)..(698): n is a, c, g, or t
  misc_feature (702)..(702): n is a, c, g, or t
  misc_feature (729)..(729): n is a, c, g, or t
  misc_feature (744)..(744): n is a, c, g, or t
  misc_feature (754)..(754): n is a, c, g, or t
  misc_feature (788)..(788): n is a, c, g, or t
  misc_feature (791)..(791): n is a, c, g, or t
  misc_feature (794)..(795): n is a, c, g, or t
  misc_feature (799)..(799): n is a, c, g, or t
  misc_feature (804)..(805): n is a, c, g, or t
  misc_feature (839)..(839): n is a, c, g, or t
  misc_feature (847)..(849): n is a, c, g, or t
  misc_feature (857)..(857): n is a, c, g, or t
  misc_feature (873)..(873): n is a, c, g, or t
  misc_feature (876)..(876): n is a, c, g, or t
  misc_feature (884)..(884): n is a, c, g, or t
  misc_feature (897)..(897): n is a, c, g, or t
  misc_feature (905)..(905): n is a, c, g, or t
  misc_feature (914)..(914): n is a, c, g, or t
  misc_feature (920)..(922): n is a, c, g, or t
  misc_feature (940)..(940): n is a, c, g, or t
  misc_feature (950)..(950): n is a, c, g, or t
  misc_feature (959)..(960): n is a, c, g, or t
  misc_feature (969)..(969): n is a, c, g, or t
  misc_feature (1025)..(1025): n is a, c, g, or t
tcttttgcgtngccagcngagccacatcgtctctagtanaccatggggtaaggtgaaggtcggagtnaacggatttggtcgtattgtggcttnnttggtcacttagggctttttttttaatttcttttttaatttnttnttttttccattaatnntttntttattgtttttntttattttttttatttttttttntattattttatttnttttanttttttttttttttttatggttttttatttggttattttttttattttttttattttttntttatttatttttttatttattttattancccccccaaaaaactaagtgcgggnnnaagccnggcgctgtagtacgtcggngganttcnactgcgtntcttccacnacccatggtagaaggccgtgtgctccaatatgnagggnnggatgccnnaaagnnncnanntcccccttccccctnttttgtagcnccccantntccgtacatgnggtgtgaaccaananaanntaagatcaacagcntctaagancatcagcanngcctcctgcacnacnaactgcttagcntccctttccaaggtttttcatttcatttttggtatcgtgntatgattcatgttttcagtccntgcnatnanttctacncagangnntgtngatggcccctccgggaaactgtggcgtnatggccgcggggctctncagnacatcatccctgtctctactggcgctncaaggctgtgggcanggtcatcctnagctgaacgggatgtttttttgcaatgccttccntgntcnnactnccaanntgtcatttgtggaccgaccttgtcgtctataaanatctgtcnnntattatgncatcaagaaggtggtnatnaggcgtcngtgggccccccangggtatcntgtgcacanttagtnnntggtggctcctctgactncaacagcganacccactcnncacctttgncgctggggctggcattgcctcaacgacactttgtcaagctcatttcctggtatganacgaatttggtacagcaacagggtggtggactcat

SEQ ID NO: 575723 - DNA, 798 bp, Homo sapiens
  misc_feature (24)..(24): n is a, c, g, or t
  misc_feature (31)..(31): n is a, c, g, or t
  misc_feature (435)..(435): n is a, c, g, or t
  misc_feature (440)..(440): n is a, c, g, or t
  misc_feature (442)..(442): n is a, c, g, or t
  misc_feature (445)..(446): n is a, c, g, or t
  misc_feature (448)..(448): n is a, c, g, or t
  misc_feature (452)..(452): n is a, c, g, or t
  misc_feature (492)..(492): n is a, c, g, or t
  misc_feature (551)..(551): n is a, c, g, or t
  misc_feature (580)..(580): n is a, c, g, or t
  misc_feature (587)..(587): n is a, c, g, or t
  misc_feature (619)..(619): n is a, c, g, or t
  misc_feature (650)..(650): n is a, c, g, or t
  misc_feature (666)..(666): n is a, c, g, or t
  misc_feature (692)..(692): n is a, c, g, or t
  misc_feature (724)..(724): n is a, c, g, or t
  misc_feature (754)..(754): n is a, c, g, or t
  misc_feature (772)..(772): n is a, c, g, or t
ccagaccaaaacgagagaagactncacgggnagctaggatgaggccacggtagagcaacgaggccatgggccgcgaggtgaacgcactcaagagcaagctcaggcgaggaaacgagacctctttcgttccttctagaaggtctggaggacgtagagttattgaaaatgcagatggttctgaggaggaaacggacactcgagacgcagacttcaatggaaccaaggccagtgaataagcaactttctacagttttgcaccacggcaagaaaacccaaaaaccaaaacaaactaacataaaaaaacccaacaacaacccagaacaaagcaaaacccagcagactgtacttagcattgtctaaatccattctcaaattccaaatatcacagacacccctcacacaaggaatataaaaaccaccaccctccagcctggncaacntngtnnancctnatctatacaagatttaaaaataagctgggcgtggtggtanacacctgtggtcccagctactagggaggctgagccagggaagaacgctccagcccaggncttcgaggctgcaatgggctataattgcntcattgnactcccagcctggggaacaggggccctgtttnaaccaccaccaaccaccaacaaccctacttnccctggattcaagggnaaaatttgagtttgtatggtggaagnggtggggaaaaccccaacagggaccccggganatccctccagttttttccaatggggttttnaggccctggggtttttgnaaaacatttccccggggaccggggcc

SEQ ID NO: 575724 - DNA, 164 bp, Homo sapiens
aagaaagcgctaaattaagcttaatataattgagtggtcctcaaagtgtgatccctttttagcagtattatcagcatcatcccaggcctccccagcaatgtggaactctgtgcaatcattgcacaccctcaatgaccagatttcccattttattgtcaccaagt

SEQ ID NO: 575725 - DNA, 395 bp, Homo sapiens
aaaaacccccccttcgggggttttttttataagcaggctgtacggtcggaatctgattgtgaccaccgtcgcggacgcgtgggtgaccagctcgccacgaccgattcccgggagggtttgaagatgccgcatttggcattggcatgaattcccaaaatttctgcttgcttgcttttactattgatatgcttatacacttacactttatgcacaaaatgtacgggttataataatgttaacatggacatgcatcttttccttttaattaagttttcctaacctttgtggaacgcttggctggttcttcccaatttgcttttggaagtggtaatttcttgcagcccagggttttgccttccccacagggttagtcgtcctatgcggacggggctggg

SEQ ID NO: 575726 - DNA, 586 bp, Homo sapiens
  misc_feature (1)..(1): n is a, c, g, or t
ngcttctgacacttaggaatgctagagagcattcaatactatgcttgggggccaacagtgaaatcatacacacaaaagaggacaaaaatgcaaaaaacatggccatatatagactgcaaatgatctcatttgggaacatgtgcattgggtgactaaaatttttcaccactgtgcacattgccttgaatgaccttgaaagtgctgtggaattacaaatgacttttgaagtacaaattaattttagcacacaggcgaatttccaaatacagaccaagcaaataatgatcaactataccaagaatactaagagaaaccaatgtagattagattccagtgaaattcctccaacactctaaaagcattccttggaaataaaaagaatcttattaatacctagaggacacatgccacttctgatcctaatattcatcttgctttaaacagaccaggagaactgtttcctttgtggaaggggtggggggaataccatttttgacttgaaattgtaacatggtatgttgattcatgaaatcacaaattttaactctctaaacacgagtttcatgggaatctaagtaaatcatag

SEQ ID NO: 575727 - DNA, 786 bp, Homo sapiens
gcagcaaatggcggatgacgccggtgcagcggggggtcccgtaggctgctgttggccctgggatggggaaccagcggtggcttccgtggaggtttcgtgcattggacaattcggggccggggttcgtcgtgccgtggtacggggccggtgaccgaggaccgtggtagactcgacggaggcaagggccgcaggaataaggatgtgtgatgcccgtacaccaagcttgggccgcttggctcaatggacgatgaagcatcaagtccctggcatgagatctatctcttctccctgcccattaaggaatcagaggatcattgatttcttcctgggggcctctctcaaggatgcaggttcttgcaggattcatgccagtgcagaaggcatcataccgatgccaggtggcagctgcaccagggttcaaggcactttgttgctaatcgtgggacgtacaactgggcccacgtcgtgtctgggttgttaagctgctcctaaggaggtggtgctacgcgccatctcgtgggtgcgcatctatgctgtgccaagactctgcatcgtccccgtgcgcagaggcgtactgggggggaacaagatctggcataggcccacacttgtcccttgcaacggtgacaggcactgctgctgggctctgtgcttggtactgcctcatccctgacacccatggggcatctggacatcgtcttccagcacctgtgcctaaagaaggctgctcatgattggcctggtatctgatgacttggtacacctcagatcctgggcttgagtgca

SEQ ID NO: 575728 - DNA, 158 bp, Homo sapiens
cgatagacagaggctatcccaggccttagtctttgggccttctgtctagcacgtacttcgtatcgccatgtgttgattcacttgcatctttcatcttcctcttccacctttttccgggcaactttagcaggacccttggcaccatcaaactttccttt

SEQ ID NO: 575729 - DNA, 149 bp, Homo sapiens
attggacactggaccttaagtcctttgacgtcacgctgcatctggctcacacctatatccaatcatctttggtaggctagatggcagcgtgcacgttgacttaagctcaggagtttgatgatcaatctgttctacaatctgggtactga

SEQ ID NO: 575730 - DNA, 157 bp, Homo sapiens
ctcccgcttgcgcggcgaacggtgcgtgaaaggattaaagacctgccgccatctaaagacacagtcaaggaatttgacttcaatcgccaaggtatttcgagtcgcgttcgcggcttgatctaccagcgcgccggcatttcgctggcctacagcacat

SEQ ID NO: 575731 - DNA, 286 bp, Homo sapiens
gcatactggactcctggcatatctgaccttctggcatacctggaccttctggcatacctggaccttctggcatacctggaccttctggcatacctggaccttctggaaaaccagaaggtcctctagtgaataaaagataaatctatttaagcgaatcttctccagatgtatctgggaaaggctcggagacataataggagaaatgtcgaatccgagcatagcacatcatacttagttcagcctttggatcaacgaaggtccaggtatgccagaaggtccaggtctg

SEQ ID NO: 575732 - DNA, 174 bp, Homo sapiens
gttacaaggctccttcattcattcctggtgtgtatgacaaagccaaggggaagaatttgtctgtcttctgtttccgtgggagtcctcactgcctcggatctgacagcatctgtctggacagcgggcatctttcaccaccaccatgcccagaaccttgcgctgactcgttcacag

SEQ ID NO: 575733 - DNA, 150 bp, Homo sapiens
caatacagagagcagcacatatgaagtggacagacagaggaggcagtgtaccacagcattgtcagaacagagtgaggatggtctagcggttaggattcctggttttcacccaggcggcccgggttcgactcccgcctcctctgtgctgat

SEQ ID NO: 575734 - DNA, 932 bp, Homo sapiens
ggtgaactggatgtagccgaagtcgcatgatccgcatggccaaggagtgtggggctgattggtgccaatgttccgatgaagcagtgtagctatgaagttcaagtttaatcgagacaagcctatgagagaggccgagtacacctcgaagcattccgtgggggaagaccttacggggagcacaaacgacatctggagttcagccatgaccagtacagggacgctgcacgagcgtacgccgaggaggttgggatcttcttcactgcctcatggaatggatgagatggcagcttgaattcctgcatgaagctgaatgtaccagtgtgttgacaacagttgggatctggacgacagcgtaagtaattcttccttatctgggaaaagacagccaacaaaataggtcgcccaattgggtgaatctccagtcgggactgcacgtccaaattgggaataggcgatggaaagccaaagtgttcatcgaggatccggtgaaagcccactacaacccccaaactttcctgcctgtcttcggccagatggtagccagcgacattacacccggcatccaacgcgccctggagggaccggttccagaagcgtggcagagggttcaagtgctacgagcaaattaattcaaggacacggactctttgagcctgggaccaatttgccccaataaggcggtaaatctaccatgggggccacttggacagccacgggcatttaaccagaataactactcgagagcgaccgggccacgacggcacattcctggaggagtggaccacaaggcaaggataaggacaacaagcgaaacgagcgcattgagcgtttttggggaccacaaggaaaccctgggtcaaagtgcaggaaagatgtgaacccaacatccgaggacgtaccacatggagaagaaccctgaggaatgaaacctg

SEQ ID NO: 575735 - DNA, 95 bp, Homo sapiens
gccagcaccaaccagacatctatgtacctctgtgccagcagtcccggcccaggggtccgggtacaccttcggttcggggaccaggttaaccgttg

SEQ ID NO: 575736 - DNA, 171 bp, Homo sapiens
  misc_feature (37)..(37): n is a, c, g, or t
gcgtcgaccgaaagacggccctgccttccagggctcnctagatccttggttcctgtcgtgggaagctgaggcaggagaatcgcttgcacccaggaggtggaggttgcaatgagctgagatcacgccgctgcactccatcctgggtgacagagcaagactctgccgtcgacg

SEQ ID NO: 575737 - DNA, 150 bp, Homo sapiens
caggtatccgaggtatgatacctgtcagcatgtgattttcaagggaaattgtctgtcaactgcctgctcttccaatatgtctgtagcttggacctatagaaatagatttgcttacaccgacctccattagctagctggatgttgcttctc

SEQ ID NO: 575738 - DNA, 147 bp, Homo sapiens
gaaaagggaggagttaactcaggctgcagcagtgacagtgcccaggcctctgatgtgtctctcacagcttgtaaagtgtgagacagctgccttgtgttggactgagaaggcagagttgtcctgcccttccctttgtgacttgaagaa

SEQ ID NO: 575739 - DNA, 316 bp, Homo sapiens
tcctggggttttttggctgactcatgcaaatgaggcgagaaccccttgggcctttccaagttgggtccaacccccactgggcttccttttcaggagtttaacttctgggattttcaggattccctagtttttttcccttaaaggaacacgccaagaaacacaccccttttatttaccccttcccctttaccactcccccccccttttttgttggtgttgtcaaataaagggacctgctttggggggtgatttttacggcctgtccttttttgacagtagcccccggctactttccagcctttggttggggaaagga

SEQ ID NO: 575740 - DNA, 144 bp, Homo sapiens
agaaagcaatgtgttaaatggataagatactctgtatatattaaacattattgagatttatgataactacattttaactagaatgtctaaagtgattatctatttttccccctcaagttagtctttaaatctttctgggtttga

SEQ ID NO: 575741 - DNA, 263 bp, Homo sapiens
  misc_feature (72)..(73): n is a, c, g, or t
  misc_feature (99)..(99): n is a, c, g, or t
gcctgatggtatatactgttttgcaattgcatacaactgtgcattacaaattaatagtaattatggtttggnngtaaaatcgagtttcagaataaaatnaaaaacaataaaatccaaagaacgatgtaaacaaaaaagcttttgttttgttacaaagtatattaaggattttctgctaagattcagtttaagagttttcctcgtgaaaactaagtagaaacacaatgccaacagctggccagtaatcagtgctgtgtactcca

SEQ ID NO: 575742 - DNA, 838 bp, Homo sapiens
  misc_feature (31)..(31): n is a, c, g, or t
  misc_feature (82)..(82): n is a, c, g, or t
  misc_feature (638)..(638): n is a, c, g, or t
ctaccgtaatcgatcaacggatgctcacgtngccgcgagcgccgggacgccgtggagaggagcatgactcaccgtatgtatngcgagcaccgcgttgagtctacttacacgtctgcttcaatcccaggcaggtatcggttcagaaacgaattcttgcccggccgctggcgcttgatggaaaactaccgtgcgccagtagaggggcccaatgctaccgacgttacctggcatcagtatgaaatgatttcaaggcataacaatttttacggtgttttaccgcaagccattgtgcgctggaacgttcaaaacaatgaggctctgcttgctacgcagcagcaggaaggcatgctggagcggtttttggccagtgagggcaatggccgttcaactcagagaatcatgactgctttcggcctgcgtgctacgggtatcacgcgacaggaagtttacgattatcaactgggggcggacgttgacatcatagaggttcatgtcgagcctcagcctgttctcgaacccgctccgatggttaggagcccgtccctggaggctttgactcgagcagtagagcgagacttgcgccgtgcggcgcgcaaccctgtctcacgggttgcccatcgtgtttggcgaaacatgcntagagtcattcaaggtagcagtgcccgacgtgccctgaggtaactctgtgaaggccggacagccgacggatattttgcgagtgctcctcgacctaaatgtgcgaacggggttgagaacaaaaatttcacgcttcgtgttatatcgtaacgaattgtgtgcaaatgggcgttgagcagagccagtggatctagagggttga

SEQ ID NO: 575743 - DNA, 2445 bp, Homo sapiens
gccccatgcaagtccaaaacccagcaggcaaatcttagagctccaaaatgacctcctttgactccatgtgtcacatctaggtgatgcaagaagtgggttcccagggtcttgggcagccccgcccctgtggctttgcagggtacggcccccccttctggctgcattgagtgtctgcagcttttccaggcacacagtgcaagctgtcagtggatctaccattctggggtctggaggatggtggcccctttgtgacagctctgcttggcagtaccccagtggggactctgtgtgggggctccaaccccatatttccctttgacactgccctagcagaggttatccatgaggcccccccgctcccgtgcacagcaaacttttgcctggatttccaggcattttcatacatcttctgaaatctaggcggaggttcatgaacgttaattcttcggtgcatctgcaggcttaacaccacctagaacctgaaaggcttggaacttgcaccctctgaagccatggcctgaggtgtaccttggccccttttacctgtggcaggagcagctgggatgcagggcaccaggttcctaggctgcacacagcagggggttccggactcacaagagcatttttccttctaagcctcctggcctgtgatgggagggtctgctgtgagggtctctaacatgccctggagacatttgccccattgtcttggtgattaacatttggctcctcattacttatgcaaatttctacaacccagtctcctgagaaaatagatttttcttttctgttgcatcatcaggctacaaattttctgaacttttatgctctgcttcttctcgaatgctttgctgcttagaaatttcttctgtcagataccttaaatcatctctctcaagttcaaagttccacagatctctagggaactctagaaaaaaattcttattttgactctttcccgcctatcttatgcccgtttctaatacaggtgcacagtgcctgcagtgtctttgcatagtaagagtgactttactccatttcccaacaaattcctcatctccctctgagaccacctccgcctggaccttattgtccatatcactattaacattttggtcaaagccattcaacaagtctctaggaagttccaaactttcccacattttcctatcctcttctgagccttccaaactgttccagcctctccctgttacccatttccaaagttgcttccacattttcgggtatctttacagcagcagcccactctactggtatcaacttattgtattagtctgttctcacactgcaaataaagacatacctgagactgggtaatttataaaggaaagaggttgaattgactcacagttctgcatggctggggaggctcacaatcatggtggaaggcaaggaggtgcaaaagcatgtctcacatagtggcaaggcaggagagagcatgtgcaggggagctcccatttataaaaccatcagatctcatgagacttagtcactaccgcgagaacagtatggggggaaccatccccatgattcagttatctgcacccggccccacccttgacacgtgggaattattacaatgcaaggtgagatttgggtggggacccatccaaactatgtcagtatgttttgacttcttgcttgattgctaggttgcatagaggacaaacatggaaattaatgaagtaccttaatatctggcttcagatcttagacaggatcagagggccagctcaaatttgcaaggaggggaggtagatcccaccattttatgggtgaatggcaaaatcaaacagaaattatgtgggatgggagatactgatgcaggcatctttggaaacattctacttagctaattttatgctaggctttaggtcaagaaggagagagagagctgacatgctgtggtacacacttatagtcccagcgacttggaaagctgaggcaggaggattgcttgatcccaggagtttgaggtagtgtgcgatgatcgttcttgtgaatagccactagccactgaactccagcttgggcaacattgagacaccctgtctcttaatttaaaaaaaaaaaaaaaaaaatggaggaaagaaagtggtctcagtttttaatgtaaatatttttaatgggatactgatattttaagattaatgtatattgtatatcagttaactgcaggtcaataattatataaaacttaaggtacgaaaaacatttatttttgctaacatatctgtgagttgactgttgttggcttggtgaggctgcaagctgcaaatagagtctaggtatgttttcttggggtttgttcccccttggatcagggggactacctgagaaaggggttcttgtcacagtgatagaaatcccagggaaacctccggtttgggaggtcctttttaagccctttgctcgtgcccttcg

SEQ ID NO: 575744 - DNA, 305 bp, Homo sapiens
ttccccacttgatgccccttgatgccagtcacatacactctcttagcctgtccagtcacgacatagctcaggcgttagtgaagaatccaccacctcctacagtcgaccaggctcgacgcacagcacagtcattccctgactagtcaccaccacgccaggcctcagtcggcattctacaacttcccacagcagcccaggctcgaacggatacgacactgtttcctgccctgttgttcgcccctggcccgggactcgaagggggcacctacggtctccagtcggaattctttattgccaccacccga

SEQ ID NO: 575745 - DNA, 129 bp, Homo sapiens
aagtgtgcaagagcagagctatgggatgggaatgggagtaaacaaggtactatttaacttttttctttatattacctcactgctagacggtgtgggaacttctcactcattggcttctttcccacagga

SEQ ID NO: 575746 - DNA, 2231 bp, Homo sapiens
gccccatgcaagtccaaaacccagcaggcaaatcttagagctccaaaatgacctcctttgactccatgtgtcacatctaggtgatgcaagaagtgggttcccagggtcttgggcagccccgcccctgtggctttgcagggtacggcccccccttctggctgcattgagtgtctgcagcttttccaggcacacagtgcaagctgtcagtggatctaccattctggggtctggaggatggtggcccctttgtgacagctctgcttggcagtaccccagtggggactctgtgtgggggctccaaccccatatttccctttgacactgccctagcagaggttatccatgaggcccccccgctcccgtgcacagcaaacttttgcctggatttccaggcattttcatacatcttctgaaatctaggcggaggttcatgaacgttaattcttcggtgcatctgcaggcttaacaccacctagaacctgaaaggcttggaacttgcaccctctgaagccatggcctgaggtgtaccttggccccttttacctgtggcaggagcagctgggatgcagggcaccaggttcctaggctgcacacagcagggggttccggactcacaagagcatttttccttctaagcctcctggcctgtgatgggagggtctgctgtgagggtctctaacatgccctggagacatttgccccattgtcttggtgattaacatttggctcctcattacttatgcaaatttctacaacccagtctcctgagaaaatagatttttcttttctgttgcatcatcaggctacaaattttctgaacttttatgctctgcttcttctcgaatgctttgctgcttagaaatttcttctgtcagataccttaaatcatctctctcaagttcaaagttccacagatctctagggaactctagaaaaaaattcttattttgactctttcccgcctatcttatgcccgtttctaatacaggtgcacagtgcctgcagtgtctttgcatagtaagagtgactttactccatttcccaacaaattcctcatctccctctgagaccacctccgcctggaccttattgtccatatcactattaacattttggtcaaagccattcaacaagtctctaggaagttccaaactttcccacattttcctatcctcttctgagccttccaaactgttccagcctctccctgttacccatttccaaagttgcttccacattttcgggtatctttacagcagcagcccactctactggtatcaacttattgtattagtctgttctcacactgcaaataaagacatacctgagactgggtaatttataaaggaaagaggttgaattgactcacagttctgcatggctggggaggctcacaatcatggtggaaggcaaggaggtgcaaaagcatgtctcacatagtggcaaggcaggagagagcatgtgcaggggagctcccatttataaaaccatcagatctcatgagacttagtcactaccgcgagaacagtatggggggaaccatccccatgattcagttatctgcacccggccccacccttgacacgtgggaattattacaatgcaaggtgagatttgggtggggacccatccaaactatgtcagtatgttttgacttcttgcttgattgctaggttgcatagaggacaaacatggaaattaatgaagtaccttaatatctggcttcagatcttagacaggatcagagggccagctcaaatttgcaaggaggggaggtagatcccaccattttatgggtgaatggcaaaatcaaacagaaattatgtgggatgggagatactgatgcaggcatctttggaaacattctacttagctaattttatgctaggctttaggtcaagaaggagagagagagctgacatgctgtggtacacacttatagtcccagcgacttggaaagctgaggcaggaggattgcttgatcccaggagtttgaggtagtgtgcgatgatcgttcttgtgaatagccactagccactgaactccagcttgggcaacattgagacaccctgtctcttaatttaaaaaaaaaaaaagattagcttgattgaggattgccaaaaattgcaaaacacttttctcaacagtgctgcggcaaacagttcctttacttacattcctttttccttctctttctcacccacattctgcttattttggtttaggcattc

SEQ ID NO: 575747 - DNA, 159 bp, Homo sapiens
gcaccggcgagttataagatgccagctccaccattacccctcctaagcagaggctggagagaaagccacaaacattacgaagtgccggtcctgaataagggaggtggctgtctgagcttgaaggaggaggaggtcaagaaaggggggtcaccttctctc

SEQ ID NO: 575748 - DNA, 201 bp, Homo sapiens
ggagagggttcagacatgtgcaaatcaataaacataatccagcatataaacagaaccagagacaaaaaccacatggatatcgtcaatagatgcagacaaggccttggacaaaattcaacagcgccttcagtgctaagaaactcaagtaaagttagggtattgagtgggacgctatcgtcgaaagtcgtaagcagcgtattt

SEQ ID NO: 575749 - DNA, 1979 bp, Homo sapiens
gccccatgcaagtccaaaacccagcaggcaaatcttagagctccaaaatgacctcctttgactccatgtgtcacatctaggtgatgcaagaagtgggttcccagggtcttgggcagccccgcccctgtggctttgcagggtacggcccccccttctggctgcattgagtgtctgcagcttttccaggcacacagtgcaagctgtcagtggatctaccattctggggtctggaggatggtggcccctttgtgacagctctgcttggcagtaccccagtggggactctgtgtgggggctccaaccccatatttccctttgacactgccctagcagaggttatccatgaggcccccccgctcccgtgcacagcaaacttttgcctggatttccaggcattttcatacatcttctgaaatctaggcggaggttcatgaacgttaattcttcggtgcatctgcaggcttaacaccacctagaacctgaaaggcttggaacttgcaccctctgaagccatggcctgaggtgtaccttggccccttttacctgtggcaggagcagctgggatgcagggcaccaggttcctaggctgcacacagcagggggttccggactcacaagagcatttttccttctaagcctcctggcctgtgatgggagggtctgctgtgagggtctctaacatgccctggagacatttgccccattgtcttggtgattaacatttggctcctcattacttatgcaaatttctacaacccagtctcctgagaaaatagatttttcttttctgttgcatcatcaggctacaaattttctgaacttttatgctctgcttcttctcgaatgctttgctgcttagaaatttcttctgtcagataccttaaatcatctctctcaagttcaaagttccacagatctctagggaactctagaaaaaaattcttattttgactctttcccgcctatcttatgcccgtttctaatacaggtgcacagtgcctgcagtgtctttgcatagtaagagtgactttactccatttcccaacaaattcctcatctccctctgagaccacctccgcctggaccttattgtccatatcactattaacattttggtcaaagccattcaacaagtctctaggaagttccaaactttcccacattttcctatcctcttctgagccttccaaactgttccagcctctccctgttacccatttccaaagttgcttccacattttcgggtatctttacagcagcagcccactctactggtatcaacttattgtattagtctgttctcacactgcaaataaagacatacctgagactgggtaatttataaaggaaagaggttgaattgactcacagttctgcatggctggggaggctcacaatcatggtggaaggcaaggaggtgcaaaagcatgtctcacatagtggcaaggcaggagagagcatgtgcaggggagctcccatttataaaaccatcagatctcatgagacttagtcactaccgcgagaacagtatggggggaaccatccccatgattcagttatctgcacccggccccacccttgacacgtgggaattattacaatgcaaggtgagatttgggtggggacccatccaaactatgtcagtatgttttgacttcttgcttgattgctaggttgcatagaggacaaacatggaaattaatgaagtaccttaatatctggcttcagatcttagacaggatcagagggccagctcaaatttgcaaggaggggaggtagatcccaccattttatgggtgaatggcaaaatcaaacagaaattatgtgggatgggagatactgatgcagatggccgaggtcacgcgcgaagggtctccgtctgaagaagatccttattgaggagctgggagaaggcacgggaggagaagcagaaaaagctcattgagcacaggctggggaggagtctctggaagaccagt

SEQ ID NO: 575750 - DNA, 425 bp, Homo sapiens
  misc_feature (59)..(59): n is a, c, g, or t
cgttatccaaaagctgcggaactgggcgtctgggcaagacctgcaggcgactacatgcnctaccaggagatcccaagcggacccagccacctccgaaactccccgtggccccagtcacaagctgtccaacaattactactgtactcgtgatggccgccgggaagttgtgcctccctcaatcatcatgtcctcacaaaaggccctggtgtcaggcaaggccgccgagagttctgcaatggcagccactgagaagaaggcagtgacacctgctcctcccatgaagaggtgggagctgtccaaggaccagccatacctgtgaccctgccctaggttaccttgctatatatgtctctagggccacatgactgcttttcctccttggaactcctctggggagagtgtgacctaatttgtaacaaatatat

SEQ ID NO: 575751 - DNA, 384 bp, Homo sapiens
tgccagagggtctcactctcatgtggagaaacgttaacaaggagatcgctagtcaagatagtccgtggccggaacggtcaagaaaaagctgcgaacctgaagaaagacttggcagagatgcaggaatggatgacccaggccgaggaagaatattgggagcgggattttgagtacaagtcaccagaacgacgcttgagacgtgctgtggacagacgactgccgacgggcaacagacggatgtgttgcagccggacggtgacacgtgaagattctcaagagacaacatcaagttattagctgccaaggtgccctcgtggtggccagagagttgacgtctagagctgaactgtcgtgctggaagaattaccaagattctttggtaat

SEQ ID NO: 575752 - DNA, 1106 bp, Homo sapiens
taaacaaccgggccatcaattttttaaaatagtggacttaagccttcttgtgcaaggggtgaacttctcaaccttcaactctcgcggggcctcaatacgtagagtggaagttaactcgtggtttaacaatctctcagaagaggacgtggtgcaagctcaagtgaagctcgctgtggtgaaatccctcactcgtggaaaacgattcccacgttcttaaacacctttcaccaacaagggaggtttactcgtgtggtagaggattctcctcaaaggtctgggaaagggcatttcagaaccgggctccttacacttggaaaaaattctttccatttggcgccctctatatcaaggttcatgaaccagcaccttttctccaaaggggatttttaacggttggcgggctgtgtgatacaggagggtgatatctcagaatcttcggggagagaatgtgggcgccaccttccgggctactcccagcgggggtgattattcaccgggtatattctctttaaagagcgccaggtggggttgattggcagccggcggggtatctccgtgacgcgaacgtgtggttccccctcgagggcgagagaaaaggcaaaacagacgcggggtgagaatcctccacgggaaagccgaggaaagcgcggtgggcggacaccccaaaaaataatccgcgggcgaaaaactgcggcagaggtactactcgtggggagacaccccgaagggggtgtgtgacccccccggagcccggcgggagacctacccgcgcctctgccgggccgcaaagcgaagcatgttctccccaataaacaggcggtcaataatctacgaggcaccaaaggcttccagcgtcggcagaccacacagcgagtacaagccagcccatctcgaggagaaagaggccctatagaagcagcacgagaggggcgaaatccacccgaggagacgcggtaaatacgaggggcgcacaggggaggataactcagccatttattcatcacggcagcacgaccccacaagagaaaatacaccaacaggggaggagagacaccacagcggcgaggaccccaggggggcagaataccaccgagagggaacccacc

SEQ ID NO: 575753 - DNA, 191 bp, Homo sapiens
cggaatggaccaatctatcaccctatagaagaactaattgttagtataagtaacatgaaaacattctcctcggcagaagcctacgtcagattaaaccacccaactgacaattaacagcccaatatctacaatcaaccaacgagtcattattaccctcactgtcaacccaacacaggcattgctcataagga

SEQ ID NO: 575754 - DNA, 735 bp, Homo sapiens
taaccaggggtgtgtctgacttggattcaaaaattaattttaaatttataaaaagtgaccccacaatccgggtcaatcaaaccaaaagtgaccaggccattgtgcccccgtgccggggtggctgggggcctcagggggctcaggtgctgcagcgagttgcccgggggacggggggtggcctcgtggtggctggctctgcagggggcccttgcggacagttctgcaaatggtgctgttggggtggcctctgcaggtgtggctctggtggacttgactgtgcggggtggcctcgtgtggggtggcttctgcggaaggctggttggacacccgtggctttcagcattgtcccggcacgggacagccgtgtccttcctcctgtggctttctccgccatgtggggttccttcagaagcctcagactccctgtgggcaccgcctttctgaatgtggaggggtctccaggcctccagaattttctctggggaggctcccagcatctagggccactcgggccgactattcccaacaacactttgtgtcgttgaaaacccccgggggacaacgcccagttgaataaagggcctaaccagagaaatgaccgtgggattggtttgccgcggaaaaaacataatacccggggtgatgctcaccaagcgacctcatataaataattcccatactatctataagacaaaggactgggccggaagtttgagaggcatcagaaatataggc

SEQ ID NO: 575755 - DNA, 648 bp, Homo sapiens
  misc_feature (519)..(519): n is a, c, g, or t
ccgggctgaaagattagcccacataagtgcccttcaacccccaaaccaactggacaaaatctttgatacagacctatttgctatgggtgctgcccgggatttggggtcagaatctggccccctatcttctgaccaactgagtcatgagggcggcttatctctctctcccacttttgttccccagccaagctctaaagcacatgtaggcgctgagacctcctgtgtctgctgggggcaggcttcctttacaccagacccgcgagactatcgcacgttgcatcaggccctgcccataaggatgaaccctgagccctggagcttaagggatttttctcaagccaaccccacaccagctccttacctgaagctttgagggtttcttggttggaagctgcagctggcccaaaaaaaaaaaaaaaaaactccagggggggcccgggacccaaatctccctatagtgagtcgtatttgcacacaacaggccattttttacaacgtacagactgggaaaaaccatgnccttacccacttaattcgcttggaagaacatacaccttttttaacatgggggaatacataaaaagacccgcaccaatcccctttccaacaattctccaccctgaatggctggtgtagccgtattttgtt

SEQ ID NO: 575756 - DNA, 288 bp, Homo sapiens
accccggattatttttacaacgatactcatgagaacagtgtatgatttcaatggctttattgattttcagtctgttgaacgtgggcacctggaaatttatgggctggcttcattgactctgttttgatgtaatatatagttgtttttagaatgtgctataaaaagtttctggcatctgacctttcctatagaagatcattaacctgtaatttttaaaattattttcaaaggtcttacatagagtaatagtaaatcattaattttaattttctataaaattataaaagg

SEQ ID NO: 575757 - DNA, 359 bp, Homo sapiens
taaaaacctgggggtagggtgggggtgggggcccttttacccccatggggccagtcagggggaaccccttatttttgttttgcatatgaggaaccctagaccagccaggtggggctctctagtttaataaaaatcatggaaagcctcttaatgcagcctctttttaagggttaatagggattttttcagcttattttgggtgcagtttccaatttttaaaaatgttggggtaatctttccccccttcccaaacctaattttggtagaggccttagggttgaaccaaggctttttcatgtcccaattcttgggataggccttcttttcagatgttttaaacaacccaaaccccttcccca

SEQ ID NO: 575758 - DNA, 1006 bp, Homo sapiens
ggtagaccggaatcctgctgacgggcagagtggatcagggcgggagggtcgagacactggctggctgcaggtctgagacaaggctgctccgaggtagtagctctcattgacctggaggtggccacttcattcctggagtgctgctgaggagcgagggcccatctggggatctctggaagtcggtgcccaggcctgataggactagccccccattgcgcttcccatgcgtgctgctggcccggcacttctcagaacgaacgggcagtcacttccagcccctgcggccgcaggtgacctgctgccatggcttaacccacatcaggccggacgcccctgagctgactgacttctccatgctgaagaggctggcctcgagaccagcatcatctatctgctggagcagcttcctggaaacaaaggactttcacttcattgaggcagatctccatgagcccctatggcatcgaattgccaatgtctccatcctgcacacgccacacacgaaagtagaacaacgctactacaccggtggacgaacaagccagccctcaggtccaatgaaccattgttgccttcttggtcagaccaccgcatcacggactatgcgatacattggccagatcttgtcaacttgctgacccacttcggactggccgcaccttcgccaccataccacacagctgcatctttcagcccctcacacaggttctactgcagtgtgcaaactggtgcccttgctgacacaccggcatctatgcaccctcttaggccgacgacaaccatgtcacctcggtcttgcagcacatccaactctgtgcatcacggaatcgcagttcacgctacaccgcagatacgccacgatgtcctatcccctacagacaggaatacactcgagtgcaggcgtccccacctcggccagtccatagcgcccccaccgcctcactccgcactcactacgtgtgaagcctccaccccacgcgcccacaacttgcgtcaccccgccaaa

SEQ ID NO: 575759 - DNA, 949 bp, Homo sapiens
  misc_feature (636)..(636): n is a, c, g, or t
ggtgctgctttgttcgttggtgtggttgtgcgtagtcttgtgttggtccgtcacctgttgttcgcgggtgcgcccctctcgcgctgtttgttttgggccccgattattttttcccgccgctgggaattctcccgttggctctctactccggagaggccgcttgaacccatggttgggtcgtggctatgttctcttggcttcctaggggttttcctgtgggccccccccaacatctgccgttgggattgaccgtgtgacaccccgagcctagtttccccctccccgtccattatcatcggcttttccccccccggcgtccaagttatttactggctcgcccccacctccccgggagtccatattggatgagtttgctgcagtgctttgagccctaggactcatcgtttgcttgttgcgccgtaaggtggcccgactggccttgtattagccgactcactcacctagagcactcgtgctacaccgaccccgtgactaccgcttgtagcccccttcccctagtgtcctcatccataggggctgtatttgcccacactaggaggcttcattcacctgaggttcccctatttctcacgggtaccaccctagacccaacctacggcccaaatcccttgtcanctatcatattcactcggcgtaaatctacctttcgtgccccccacaccttttttcggcctatccgggatgccccgaacgttaactcggagtaccccgatgcactacacccaccctggaacactcctatcatctgtaggctcacttcatttctttacagccgtaatattaaaaaatttcatgatttgaggagccttcgctttgaagcgaaaagatccttatagtagaagaaccctccattaacctggagtgactatatggatgccccccccccttccacaccttcgaagaacccgtatacattaaatttagacca

SEQ ID NO: 575760 - DNA, 655 bp, Homo sapiens
ttcgccccccccggggggcccgcgccccatttttcccctccgggggggtttctcccaaattgttttttggggccccgagagaggcgcgtccccccccccggggttttaattcctcgcggggccaaaaatttggtgtgggttggcgcttttctccccccccccgcggggccctttttttaaaaaagcccccgggttttttccagaaaagaggggtttgttgtgggggttataaccccggtttttcccccccccccctttgggggcccccaaaaaatttttttggtttccccccccccgcggggcccccccaattttccccaaaaaaaaaaaaatttttttttggggggccccccccggtttccccccgattttccgggggggggggcccccccggaaaaaaaaaggggggggggggccccttggggggttttaacccccccccccgggggggcccgccccttttttgtttttaccccttttttccccccccggggggggggccggggaaccccgggggggggggggggggccccccccccccctttgggggccccccaagcccccccttttttttttttgggggggttttttttgggggggggggggtttgggggcccctttttttttttttccccgcctttttttttgggcccca

SEQ ID NO: 575761 - DNA, 404 bp, Homo sapiens
aagcattgtcccgaagcgatatgcgtagagggtatcctgatgtcttgcgatccggctctcagctgccggtgcacgggatgctgacacgaggctcagaggagatttccatgggctccccttctgaccgctctccactgtcccctggggcttctgctgaggctgggcttctgcttttctttggcttatcaaaccggaagtccgcggggtacaggtgcatcctcaccatgtgatccttccggtctctgctggtcttgaacttctctgtgcagccttctaccaagcactgatacatgtcctgcctctcagacaggatctggaagagcgaatcgtgccactccaggatgtgggcgtccagcagtggtgactgccccccactccttttctgagtctgaaggcagtctgga

SEQ ID NO: 575762 - DNA, 414 bp, Homo sapiens
caccttctgagtcctggatgtgatacctagacagcatgtactgcttggggtccattcacaggtttacaactttttcattgagttgcaatctgtgaactgtgtgaggttggccagcgtaagtcaccatcaataggtcatagttgttgcttgttgagcatggtctcaaagtcatcgggaactattttcggtacttggttaaccaggctcatcaggaagcggcccatagtattgtcagctgacacctttccagacagtacatcctctgcatattgcaacactgtactcagggcatcctggatgcgacctgatgcccctcctacttggtgcaagtcacttgagagtccaatcactctgttggggctaaagcaggtcttcatgatcaggtcaactccgatgcgttcagtgtcgtagtac

SEQ ID NO: 575763 - DNA, 938 bp, Homo sapiens
cgaaaatgaagcacgagagtggagtcactttagttatcggacggctcggggcacacggtgctcggtcggtgtccaagtggcaacccgggtcagcagttcctgaagaaaggcgcctgcatgtgggctgcgcaagtgacttcctgggatcttgcgttcaagccggcgttgatcagctcatgttcatcaacggaggacctcatccctgccgcgactaccacaccttctacgatcttcatcatcagccagggcgaggggtaagagcgggtccgctctgtcagcttcgatgtgcacgatgacgtgcgcctgctcagcgacgccatccatggagaaggtacgagtcgcacgcgggcaagttggtgctgcgcagctggtacgagatagaacaagcacatcttccccgccagccgctgggacggcctatgatccccgagaagaagtgggacaaggtacatccatccgcgtaacaccacgctctgccagagcggaaaaccgggaggtatgggtggagacactcaatttctaggccccatcacctagtcactgtgactttcgtgcaccttgatgttcttcccaccaaagtttaatagaagacacgatgggttctcatgattcacattggttgtgctattgctcgatgttatgatttgattgcttggttggtcttcttctgagtattttagtgttgccacctggatttgctgcattgctctgactgagctgtatggaaaccatgactgggcccactgtcagacagaaattagaataggaggcacattttttacctggtggttatgagcctggactcgggggccacagtgactgagtttgattcccgacacagcctcctccgtgctgtgtagttttgggtaagcttattgacccccatgcctcagtttgctcacctgtataaggaaatgacaagagcacgtactgtatta

SEQ ID NO: 575764 - DNA, 303 bp, Homo sapiens
  misc_feature (103)..(103): n is a, c, g, or t
  misc_feature (293)..(293): n is a, c, g, or t
gacgctctctctgtggggccggacgggcgcctcctccgcgggtatgaccaggacgcctacgacggcaaggattacatcgccctgaacgaggacctgagctccntggaccgcggcggacacccgcggctcacgcttcacccaagcgcaagtgggaggcggccctgtgtgtgcggagcaggacagagcctacctggagggcctgtgcgtggcagtcgctcccgcagatacctggagaacgggaaggagacgctgcagctgcgcgggtaccagggtgcagtggggagccttccccnattctcctat

SEQ ID NO: 575765 - DNA, 286 bp, Homo sapiens
gcgtgacctccaaatatcgctgagctgagcctgtaacgagtctagaggatcctccagtagccgagcatacatgaatgcctgcagtgaagacgtgtacacagcactgcggttcatgcctcccatagaagaagtcccggcgacacgtgagccccgtgctgacctccaaatatctgttagctggagcctggtcgacgtgtatacaccaatgcggtgcatacctccctgtacaagttccgtcgacacgtgagcaccgtgctgacctccaaatatcgttaagctggagcct

SEQ ID NO: 575766 - DNA, 825 bp, Homo sapiens
agatcgcgccactgcactccagcctggcgacagagcgagacaccgtctcaaaaaaaaaaaaaagaaatttgtgcaaagcttaggtaaatattttcctttattaaagcttctcactgagaagccctcttttattttgggtaaattgtcactctgttggtaggagatgtctgctttcccagtgaatttgaaattagtggcgctaaagccctgaaagaggcaagactacaattgggctgaacacagtgggtattagcaaccccagagaagtgctctcatttccttttatagtagaacgcaggtccatgtctttggtgggttccctgcacttcttgggagtagttatgacttctcagttttcccccccttaaactggcttggcctattctttttccctgacttgctatcaggtatcagtgtgtggaatacattaatgctggctgtctcagacttacgtactggtcatcacccattaaaagatttgcagccttcgttggcccccagtgacctcccacaaaacaaacaacagacaaaccaatacacaaaacaacctttgttgcgccgcctcctcgggcccccttaaaaaaaaaatttttctagcacccacttcgtgtggggccgcgccggcccccccttatgttgtgtcgtcgaccccctgtgcccccagaggcggtttccccccagggaccaccgctgggcacaggcacacgctgcctggggttctcccccccagtgtagaaagcgccgcgcgggaccccccggcgtgtttctgacacatccgcatgggggaccttcgggagccccaccggcgctcccccccgggggtcg

SEQ ID NO: 575767 - DNA, 241 bp, Homo sapiens
cccccgtttttttaaaagggggcccccttccccccccccccccaagggggggggggggggggggggggccaacccccccccacccccaaagggggggttttggggccccccccgtttaaaacccccaggggggtttttttcccgggcccctttttttaccgggcccctttgggaatgccctttttccttttggggggatttttgtccccgccggggtttttttaagggaaaaaatggggga

SEQ ID NO: 575768 - DNA, 803 bp, Homo sapiens
  misc_feature (679)..(679): n is a, c, g, or t
  misc_feature (693)..(693): n is a, c, g, or t
ctagctcaaacgacgggggcctttgcaatctccacgtgcgatggatccttggacccactttgttaactcttaaactttgtgtcttgtctttatttcttttctcattccctcgtctccaccgggaaggggagagcctgcgggtggtgtatcaggcaggttcccctacatctttggcacccaacacggtctccttgaacccaggtgaagttacacctgagcgtggtcgttgtgaagaacggtctgtccaggaactcccgagaacgtgtggtcggccttgcggtaagcttgtgcactcggagcattccagggacaccatgggacaatccaaaagtaaacattctgcatatttacattttattaagctcctcttaaagagggcaggaattaaggctagcacagaaaatttgattactctgtttccaacagtagagcaatatcgtccttggtttcctgaacatggtaccatggacttcaaagattgggaacaggtgggaattgccttaaaacaagttgtaaggaaggaaaatttatccccctaacagcctggtcaaactgggctatagttaaaagcagcctcggaaccgtttcaatcggaaaatgagggcttatcctccagcagaaagaatttctgcagaggaaggtggtgatgctgctgaaggaggagaggatagtgaagcangatttggggaaatncagacaacttgggatgagtaattctttggggccctggacttcggcggtcccaaataagagagcctttttgcccgatttacacaagggcttggacacggccctgggacccg

SEQ ID NO: 575769 - DNA, 501 bp, Homo sapiens
ctagctcaaacgacgggggcctttgcaatctccacgtgcgatggatccttggacccactttgttaactcttaaactttgtgtcttgtctttatttcttttctcattccctcgtctccaccgggaaggggagagcctgcgggtggtgtatcaggcaggttcccctacatctttggcacccaacacggtctccttgaacccaggtgaagttacacctgagcgtggtcgttgtgaagaacggtctgtccaggaactcccgagaacgtgtggtcggccttgcgacaaggctcaaaggaaccatatcctgatttcattgctcgccttcaagacgcagcacagaaggctctcactgatgaaagtgccaggaaggccgggtgcggtgctcatgcctgtaatcccagcactttgggaggccgaggtgggcggatcacctgaggtcgggagttggagaccagcctgaccaacatggagaaaccccgtctctactaaaaatataaaactta

SEQ ID NO: 575770 - DNA, 621 bp, Homo sapiens
ggttcatggaacacgatgaacctattctgaagcacttgaaagatattaaagtgagatgttctcagatgctggccagcctgatggagtttgtcttatgaagtttcactttgaacccagatgaatattttacaagatgaagtgctgacaaagacagtacaggatgaggtcagaatcagatgattctgatcccttttctttggattgtgaccagtaaattatgtggtttgtcaccatgggtgctcagatcagtattgcgaagaagaaggaaagcaatcgtcactatttggacacagactgattacatgacaagaagctacgatagactacaaggtgacgtgggacatggacgtactgtgacttaaatacagttatcgcaaatgacatcttatctatgtgaactttatttggcccctcctgaagttcctgagaggggcagatctggatgatgatgctgaaagatatccgttgcatagcagacttcgaaattcggggcacttataacgtgagccgtataatcccgtagatcagtgtgatattttactggagaagctattgaagatgatgatgatgattatgatgaagaaggtgaagaagcggatgaggtaatgtttagcaaagtga

SEQ ID NO: 575771 - DNA, 480 bp, Homo sapiens
tatcgcttagaaaagtttttataaagataattgttttagtgctaaaagctcaaatttttataaggaagggatttttatataaagttatattcatctcttgatagacattgatatcaaatagagaaaagtagctagtaaaaataatcgtagtttctttccactctaccatcaaactgaaattataaaatgccccaaatgtgagcaatagaaaggcagaaaggagtacagtcttgacattatacaactcagggcaccactcacaggaatacttctctcagaaactgtgaaaagaaatttactattagggaagcaatgtggtgaaacaaaaagagcaaataagctaaaatgtggcttcagatataggcagcattctttaccttgtaatacagtggcttaaggctagtcactatttattattgttacttaaggaggccaaaataactgtagttattgttccaggtgcttaactctgcttaagcg

SEQ ID NO: 575772 - DNA, 249 bp, Homo sapiens
tgcgaataacctactgaatacagaccttaaatcagcgttattaagtggctgctgagccacatgaaattcgacatgcaatcaaacgcaggtatatgtgtatcttccctctaatccttactaaagttctgttcttatgcagaagtctcaaaaacaaaacgctcgagggacaatgtccagagtggtgtaaaacatacatacctatgtaaacctacagtgaagctgaccaagggaccagttcaagtgacttat

SEQ ID NO: 575773 - DNA, 184 bp, Homo sapiens
gtgcctcccaaagtgctgggattacaggtgtccctgccccttttaatagccaatattttgtaatccttcctttcccccctgaagtgaatgtcatttatgctataacctacccataatgtaatttcagaaaatccctgtactatcccaaaggcaatgaaaaggagaaatcaaaggggggttttta

SEQ ID NO: 575774 - DNA, 402 bp, Homo sapiens
  misc_feature (224)..(224): n is a, c, g, or t
taatataaagcctgccattaaccaaggccttgatcggacttattcaagaccaattgaagacatgtttcttagaaagcatccttggagtctgcgtaatagttaatgatagtgttagattttagtttgcttgtacatacaatctgggagatgagagactattagaaacttgaatacacaaagtttctatcaattaagtctgtcactgctttctgtgttcccatgcnatgtccatcttttcaacctcagatccagatatgtaacaatctttattctttctgaagccatcatccacgaagcccttgagaaagttgcttctgggcgaacatcaaaattagttttctttagagagtggtcacagaagtactttataaaaataaaaatgaaaaataaaacatctcttta

SEQ ID NO: 575775 - DNA, 1779 bp, Homo sapiens
gaaaaatgaaaatgctagagtttgtgcaacataacagtagcagtaaaaaccaagtgaaaagtctttccaaaactgtgttaagagggcatctgctgggaaacgatttgaggagaaggtactaaattgcttggtattttccgtaggaaccccagagcgaaatacagtttgcaaaagatgtccagatgggttcttctcaaatgagacgtcatctaaagcaccctgtagaaaacacacaaattgcagtgtctttggtctcctgctaactcagaaaggaaatgcaacacacgacaacatatgttccggaaacagtgaatcaactcaaaaatgtggaatagatgttaccctgtgtgaggaggcattcttcaggtttgctgttcctacaaagtttacgcctaactggcttagtgtcttggtagacaatttgcctggcaccaaagtaaacgcagagagtgtagagaggataaaacggcaacacagctcacaagaacagactttccagctgctgaagttatggaaacatcaaaacaaagaccaagatatagtcaagaagatcatccaagatattgacctctgtgaaaacagcgtgcagcggcacattggacatgctaacctcaccttcgagcagcttcgtagcttgatggaaagcttaccgggaaagaaagtgggagcagaagacattgaaaaaacaataaaggcatgcaaacccagtgaccagatcctgaagctgctcagtttgtggcgaataaaaaatggcgaccaagacaccttgaagggcctaatgcacgcactaaagcactcaaagacgtaccactttcccaaaactgtcactcagagtctaaagaagaccatcaggttccttcacagcttcacaatgtacaaattgtatcagaagttatttttagaaatgataggtaaccaggtccaatcagtaaaaataagctgcttataactggaaatggccattgagctgtttcctcacaattggcgagatcccatggatgagtaaactgtttctcaggcacttgaggctttcagtgatatctttctcattaccagtgactaattttgccacagggtactaaaagaaactatgatgtggagaaaggactaacatctcctccaataaaccccaaatggttaatccaactgtcagatctggatcgttatctactgactatattttcccttattactgcttgcagtaattcaactggaaattaaaaaaaaaaaactagactccattgtgccttactaaatatgggaatgtctaacttaaatagctttgagatttcagctatgctagaggcttttattagaaagccatatttttttctgtaaaagttactaatatatctgtaacactattacagtattgctatttatattcattcagatataagatttgtacatattatcatcctataaagaaacggtatgacttaattttagaaagaaaattatattctgtttattatgacaaatgaaagagaaaatatatatttttaatggaaagtttgtagcatttttctaataggtactgccatatttttctgtgtggagtatttttataattttatctgtataagctgtaatatcattttatagaaaatgcattatttagtcaattgtttaatgttggaaaacatatgaaatataaattatctgaatattagatgctctgagaaattgaatgtaccttatttaaaagattttatggttttataactatataaatgacattattaaagttttcaaattattttttaaaaaactcgtgcc

SEQ ID NO: 575776 - DNA, 172 bp, Homo sapiens
  misc_feature (43)..(43): n is a, c, g, or t
agccagcgttattcgcatcatctgaatcagccgcagatttacnatatctgtggacctatgctccagctccaggagcagaccgcttccagatatactataagagtatcacatcctcctcctcttcatctatctgactctgcatctatcctccacagactactaacgtgctgtc

SEQ ID NO: 575777 - DNA, 342 bp, Homo sapiens
cgggagcggaagacattctctcaagtcctctcgtgcgcaagcgccgagtggtcattgtggaccccgagacaggcaaggagatatcaatgtaccaaggctaccggaagggcctgattgaccaccaaacgtacctggaactttcccaacaagaatgccaatgggaagaaaacactattttcttcttggacggggtggtcaaatccatgatcattgaccggcggttcgggcgccagtaccaaattgatgatgccattgccaaaaaccttattgaccggttggcacttgaccaataccgggccggcacgcttttcattaccgaattcgccgacatgcttttgggca

SEQ ID NO: 575778 - DNA, 552 bp, Homo sapiens
  misc_feature (506)..(506): n is a, c, g, or t
  misc_feature (514)..(514): n is a, c, g, or t
tacttctggcacccaagcgggagtcatttacacttatcttaacttactggaacctttattttccgggtttaagggatttttcttgcttagcctcccaaggagctgggattacaggcatgcgccattacacccaggtaattttcggatttttaggagagatggggttttaccattgtggccagaatggtcttggactcctgaccttaagtgatacacccaacttagcctccaaagggctgtgattacaggtgtgagccaccggtgccggcacaacctttttttgttatgaacactgtgtcttgtgtgagatatgctgcaggggccgccctaatcacaagaaagcaatggatagaagcatctgacttttgcatagaaaaaaaaaaaagcaaaattgtgggaaagaggagtcccactagtcttgctgcactgtcactgggaatcagctcaagggaacatctcttttcctcccaaaacgctggaggaagtccagccctgctgttactggngtctgggnttacttgggcactcctggtgatagtggtgcctgcagcg

SEQ ID NO: 575779 - DNA, 285 bp, Homo sapiens
ggcggatgcgcgggtcggacgggtgcgcggttatggagtacaggaggcccagagcttgtcggcggtgagagtccgagtgaagacggatagctgcttgggcctgaagtcagcgggatgatgtttgctgcagaatggaatacctgcagagggcacaggtcccagatatgcagtactgactgtcgcccagcaaagacccccagtaaatacccagccccactaggagcacgttgccaggacgccaggccctccctccctccggggcagctcctaccccagctggcatcg

SEQ ID NO: 575780 - DNA, 299 bp, Homo sapiens
gcatgcggagatgggccagtgcatggtggcccacacctgatagggggagcactaagcgcggccgaggcaggtggctcacctgaggtcaggagttcgagactagcctgagcaacatggagacgccccgtccactaaagataccaacttagctgggcgtgctggcgcatgcctgtactcccagctacccaggaggctgaggcaggagactcacttgaacctgggaggcagaggttgcagtgagctgagctcgtgccactatactccagcctgggacagagcgcagctccgtctcaggaaaa

SEQ ID NO: 575781 - DNA, 499 bp, Homo sapiens
ctagaggatcctcgaaaatgacatagatggcaggaatttggcaggaacatcagacattggaagtgttagatagagactagagcagtgttggaaaactcttagtggtccccagagcagcattagagatctacacagagtgggccccaagtggctgcgactccagtgagctgagacccccgcaggtagggaggtacctactagacgtgagacactacacaaagttgaccccagttacagcaagggtacagaggaaggtctgtgagggagaagagagtaaagggccctgggtgggcaggaggctgacggagggagcctggggagagcaccagggcagggcatcaggccagtgcctaggacagtgtaggccaaagcggtctctagctgctgctctgctgctcctgctcatggatgagttaggcgatggcgccggtgatgccgcctatcaaggtccagtactcatcgaagctgatgcgcccatcatgattggcatccaggtact

SEQ ID NO: 575782 - DNA, 671 bp, Homo sapiens
tacaaatgaggcaatttattaaacccagctgggttggtgcctaagggcttctggtgggcagctggccaccggtccggcgattctggtccaaatctcttggtccctgaggggtcagttgggggccgccatctggtgtccttttccaccattttcagcccctccagggctgggaggaccctggggggccacactctgggagcctcggctgaagtggctgggcatgacgccgtattctctgacgtcccccataaatctgggtcatggagccaaccccagcgccaccccgggaggtacaggtgccgcgctgtggaagcagctcgcgtgtagaaccagttctcatcgtagggagcaagctcttggtgctgggccagcttgagggtatccacccattcggggactttcagcttcccggacttttggaggaaggctgccagagctctgacgaactccgggtggtccacgtctttacagtaactccgggctatcgggcgggctagacggagcatggcgctttctggatcaaccagatgattcaccggttgttttaaaagagaccccgtgtaacctgggggcaccccgaaaacacgcaacagagaacccgcaacaagaacacgagaaaagacaggcacatatacaccagagaacaaagacaggaaacccaccgagtcaaa

SEQ ID NO: 575783 - DNA, 853 bp, Homo sapiens
agcgggctggtggtgcgcgctgccgcttgtggcacaggcggtcccggctgcggcttctggctgcgcggtcttggcgcgcctcccgggcggattcctgccccgagcgggacatgcgctgtcgggaagcgatgagatttctctctgatcaaatcggacacgttcgaggactccaggaaatcgtacaggtgattagacatgtttcacgcgatggacaagatgaacgagtagacaagagtcaatatgcgggccacgtgatggcccagctgtttagtggatgatactttagcttgtagcccaagaaaaagaatcaaacagcctggcttcatctggtcctcataatcttacttatcctctaggtcccaggaatgaagacctctcacttgactatgcctcttcagtccagcaaatcttcagtatccctcagcataatgccccttgctgaagacatcaaaggttcttgcttccaaagtgggaataaagtggaaccatgaacctattatatgttccagaaagatttggaaacagatagtgtggggctatgcgcagtaagttcccatttcccaagcgaccagagacaagtgacgcttccttgtagatggccacactgttaagttcgtgaatccacagattttcactgctcatccggataccatgctgggaagggatgtctggaccaggagagagcagtacaacttacactcgggcccaattgaagaagtggagagtatgagattgctgacgggagtcactgggcacgtgtatttcgggcgcatgtgctgggataattaacaaaaaccgggaatcatcacattggacctgaataggaatcctaatcccaagattctaagaagat

SEQ ID NO: 575784 - DNA, 873 bp, Homo sapiens
gccgggtatgtcttgaactggaccctggtgtcatgcacagctcctgaggacaggagctgtgcatgacgaccacgggtgtgatcttgcgccgagttcctcgtgcgtcagtgcatatgtgtcttggatacaggactgtgcttgaataagcatgtagtatcactcgcactgatatatcggctagaactccgagtgttgagtacctcagccatctattggaggagagatccacacggaggccttcggtggtgcgacaactcgatcatttgcggtatgcattgaagacttcggtgtcgaacgtctccgcgtgctacgctcggcaacacgtatcacctgtactcgtagttgccttgttcccaacacgagcccattctggggcgccgtcgcgtgctgcgctacagttgtgcatgggtgccggtgccgccatccgccgttctccatgtacttcttggtctcctgcgtgaagctccgtgtctgctccccagggggcaggcgtggtcttctcgtgtatcgactattcctctctgttcaggcaggagaccacctgtgaggcagcaagacttatgggagtgtgcgtgagcggggggccgtcgttggtacgtgagggtgggcttcgaagacgcgatgatgcgcagcgtcagctcagtgaactcttgctcaactagtccctgctttgggcccccctcctgttgacctcaggggtttggcccatggtgtccctcccagtgcccttgccccaatgatttcctggccaggaatattcgtggtctcctggcctcccacttcagctgcgttctccggtctgtgaaatgttggctgggcccggggtcccccttgtgttgtggctccctgtcctgggcagattgctgcttagag

SEQ ID NO: 575785 - DNA, 138 bp, Homo sapiens
acctcgtccgtgtagcgacgtcagaacctcaaggactaagctggatggaagagatgctcggactggcccggagcctcaagaccaataccctggccgcccagagtgtcatcaagaaggacaaccagaccctgtcacact

SEQ ID NO: 575786 - DNA, 450 bp, Homo sapiens
cccagtattcccctaaatagatgtattataagtcatttaagcaggctcctagctgtgaacattttgattacttctaatttgcaaataaagctgcaatgactatcctttcacattcatcatttgatcatctgcccagttaggttgtttcttttaaaaaaaattaagtactttccaatggatttcaaatacaaatcaatatttttggttgctctttaaaggtcagacaacttggcatcactgactgccactcctgcttggcaacagtctccagagttgaggaactacatcctttaaagaaccctttcctttccagttgttctagaacccccctccctgttgtcttcccaactcctcctgcccctacaggcgtctgcatgcatgagcccctggtaagactgagaacatatgcaaatagtgcctggaatgaaataaatactcaataaatgctaa

SEQ ID NO: 575787 - DNA, 129 bp, Homo sapiens
  misc_feature (95)..(95): n is a, c, g, or t
ctctatagatacacatgcagccccggattgagtcacctctaatcacacgatcaaagggacagcatcaagcaccgagtaatacagatgttagctancacaccccacggaacagagtgataaccttagcaa

SEQ ID NO: 575788 - DNA, 791 bp, Homo sapiens
  misc_feature (85)..(85): n is a, c, g, or t
  misc_feature (129)..(129): n is a, c, g, or t
  misc_feature (146)..(146): n is a, c, g, or t
  misc_feature (188)..(188): n is a, c, g, or t
  misc_feature (194)..(194): n is a, c, g, or t
  misc_feature (222)..(222): n is a, c, g, or t
  misc_feature (224)..(225): n is a, c, g, or t
  misc_feature (253)..(253): n is a, c, g, or t
  misc_feature (257)..(258): n is a, c, g, or t
  misc_feature (269)..(269): n is a, c, g, or t
  misc_feature (275)..(275): n is a, c, g, or t
  misc_feature (278)..(278): n is a, c, g, or t
  misc_feature (289)..(289): n is a, c, g, or t
  misc_feature (297)..(297): n is a, c, g, or t
  misc_feature (304)..(304): n is a, c, g, or t
  misc_feature (315)..(315): n is a, c, g, or t
  misc_feature (318)..(318): n is a, c, g, or t
  misc_feature (327)..(327): n is a, c, g, or t
  misc_feature (342)..(342): n is a, c, g, or t
  misc_feature (382)..(382): n is a, c, g, or t
  misc_feature (392)..(392): n is a, c, g, or t
  misc_feature (396)..(396): n is a, c, g, or t
  misc_feature (423)..(423): n is a, c, g, or t
  misc_feature (427)..(427): n is a, c, g, or t
  misc_feature (431)..(431): n is a, c, g, or t
  misc_feature (450)..(450): n is a, c, g, or t
  misc_feature (452)..(452): n is a, c, g, or t
  misc_feature (458)..(458): n is a, c, g, or t
  misc_feature (468)..(468): n is a, c, g, or t
  misc_feature (486)..(486): n is a, c, g, or t
  misc_feature (494)..(494): n is a, c, g, or t
  misc_feature (498)..(498): n is a, c, g, or t
  misc_feature (509)..(509): n is a, c, g, or t
  misc_feature (514)..(514): n is a, c, g, or t
  misc_feature (517)..(517): n is a, c, g, or t
  misc_feature (523)..(523): n is a, c, g, or t
ggatgagcaaacggaagagaaagagaagtgtacaggagggagagaatctgacgaaggcgttcgcgcggagtgccgccggaagacnacaggcttggacaggtcgccagtagcttatttcgcggcgaaaanaattccagaggtggcancggtcggctggcgtccctcttcagttctctggagccccagantcaaancgtgtacgtgcctgtgcctaaaaaaaanannaaaaaaaagaaaaggaatgaggaggaanaaannaaatcccagantgaaanaanaatttcgcaanaaaatgcnaaaaaantgaaagagaanaanaaaaaaaanaaagcagaaaaaaanttggaagaaagggaaagcgctctagcgagtgctgatttanaagaagaaantcancagaaaaaagggcagaaaaggaaaaantctnaaantggtgttaaagtagcagananaaaaanaattgatganacagaagaaaaagttgtnagtaaaanaaanaaaattcaaanaaaanaanaagaanagagattaaagaatgagagaaatgtgtttgttgggaatttgcctgttaaatgtaataagaagaagctgaagtcgttttttaaagagtatggacaaatagaatctgtacgatttcgttctctgattccagcagagggaaagctatccaaaaagttggcagaaataaaacgtaaaattcatcctgatcagaaaaatattaatgcctatgttgtgtttaaggaggagagtgctgccacgcaagcattgaaaagaaatggggcccagattgc

SEQ ID NO: 575789 - DNA, 241 bp, Homo sapiens
atttgttcctcccccgccccccccccttttttttggccatttttgctttatttatttcgaagttttttgttgggggaaacccgtttatgattggaaggctttttgatgaactgacctctttattattatggaacaaatcttttcatgtctagttaaattccctgttttgaagtccctttcatttgggattaggggtgcccctcgggcttttttttgattaaagttcccatgatatttttta

SEQ ID NO: 575790 - DNA, 233 bp, Homo sapiens
gttcaatagcaggaagagttcaagagctctatgtataccatagtaactctaggattttttggtttcgttttttaatggttaagttccaggcacatgtggaggatgtgcaggtttgttacttaggtagacatgtgctgtgatgttttgctgcacttatcaacctatcgcgtaggtattaagcccagcatgcattagccatttttcctgatgctattgaaacttctaaaactagg

SEQ ID NO: 575791 - DNA, 374 bp, Homo sapiens
  misc_feature (90)..(90): n is a, c, g, or t
gcggccgcctactactactaaattcgcggccgcgtcgacgacaagtgaagttttagggtcctcacagctatcagatatttaggtacatgngactagtttttactagatttattgcttccattctggcatgtacgtcgtggaatgtttaagcttccagtgttcattttaaggagcgctagagcctacgtaagtgacgacagctctgttgcgagcgaggtggggagagaaacacgaaacacaatgacagacctttcctgtttgagcaccgcctagttatgtttcagtctccagggtagtgcttgtgctttaccactgtctgacaatggctaacccaagctttagagcttacaattaaaaaaaaaaagtcgacgcgg

SEQ ID NO: 575792 - DNA, 369 bp, Homo sapiens
cctaaatgcattgctacttgtggagattagtttagtccctcaaaaaattttcccataatgtccggcactgtggctcatgcctgtaatcccagcaccttgggaggctgaggagggtggatcacctgaggtcaggagttcgagaccagcctagccaacacggtgaaatcgcatctctaccaaaagtacaaaattagctagtcgtggtggcgcaggcgtgtaatcccagctacctgggattacagtaatcctcctgctgaggcagagagatctcttgaacccgggaggtggaggttgcagtgagccgagattgagccattgcactccagcctgggcaacaagagcgaaactccatctcaaaaaaaaagtcga

SEQ ID NO: 575793 - DNA, 1289 bp, Homo sapiens
ggcatcttgacccgtaatgaacactgtgtgccctggagaagaactcgagatcagcggccatatcgtcaggcttacgagttgcccaggaactgtggcaaagaccttaagagagatgacgagcagacttcagggagcgtggagacaggcatttgaagacaagattcccaaaaggagattctctgagatgcaaaatgaaagacgagaacaggcactagcggactgaaaataatacattgcccagagaagcatcagtgaaacacaacgtctcttccactactttatacccacttcggacctattcataatcattacattctatgacagcttctggtctctatgctgatcgtagaattatgccaaaaggaaagcatagcgtacactgcacgaatggcgactcatactccaagcacggccatggagactgcaattccattcgcatcacgtgactacaatcatgaagttgaaaaaaccagacttctgaacggctccacgcgtacggctcaagttactcacgtatgccacgtccacccacaagccagctttctgactaactccggtcatgccacgcaagttatagaccgatccgctgaccactctcttgaacggactaccagcttaccagacgcgccaaccactaagacctcgggatctgtctcaacctgctccccattcatcgcccacatggaccgcccgagctatacaccagaacatgcattagtacgcaccattagcctcctcacccaacactattgcgacacctaacgacgctactccgcccatcgcatagcatcacacacataaacgctcacaacgtcctcgaacccccacaaacatgtcagaagcacctctgactgtcctatacagaggacacacgatcattcagaagacatggccacgtgcaaaaccgtgtacgttcatcgagaagctgtaacaccgggcctagcccgtgcccgcatacctaaacatgaggactcaaccagagccaccgcggactagtctacaggcgtcccacagccggcgcgcccgccccccccacgagccacaccaagaagagctgcagacagacccgccacaaacacgggggaacaaagaaagcaagcacggcgcacgggacacgagccggctagcgcggacctgcacggggcaaacgagacccgaggtgggcacagcgcggcggctgacaaacgcgacgggacacggaggccgcgacgacgcagcacgcggcgcgcacggcgcgggcagcgaagagcgagcaaggagcgaacccagccaccccataggccaagcgg

SEQ ID NO: 575794 - DNA, 1210 bp, Homo sapiens
ggactagaaaatctgagttttacagctcatactggttaagagtccgttttgaattagacaactagacgtaaaacacgtgtagtaatagctagaagcttaacatcgattaagactatccaagccaagtagctagtaatttgtttaagggcacaataaagatgattagctcagcttgaagagtaacaagtcaggtaacgatcttaacaaatgtctcatgactgtgaagaaaatggttgagaagatatccaataccttgagagatgtacaggtatcaacttcttcacatgataatatggcagtctagcagccggattgtattaatcggggaggaaacactgcgggtgtagttgacacggccattttatggtaaactctttgaaacatttggatagaagacagtctaaaacaaataatttcgtgacgttcgggaaggaagaatcgaactttgtatgaggaattcagatcacagtatgtgcttgacagttatcgtgagtgagttcatcgtaagatctcgtttttgccccatgacatataaaacagttacaggttggcccgttggggtagtgctagtaatggatagcatccatgctaactgtctaagctatcatagaaactgatggatcaactcccgcaattggcacgagggcagtggataagcaaactgatgacttgcactccaggtagccagggggaattgtcagggcagggcttcgttgaacaagacgtaatcctacattagtccgtacgagttcagtgcatctttcacaagtgccctgagaccagttcgggctctctttcaccaattcacctgtagtgtcattaatcatgtcctgaatagtgtcaactgttcattcgcaggtcgggtttgccctcattacggaaagtcaagccaccacatggtttcacacgggttgtgaacggctcgggttgcccttgggtgacgggacatcgttaagggctgtctaccatgttggtctcacccagtgcgcagtgcgacgaagagctggagctggacaaatgttcggcagcacacgagtccgtggctagtcaatatgaagtgtgtaccccaaaaatgggaaacacgtacgcgtgggcctgggtcataagacagcttgtgtacaaggaacgtttgattggagggacccctgggtacccgtggggatggtaaaagaacaacacagggggcgtcacagatctgcaacgtggtgtc

SEQ ID NO: 575795 - DNA, 622 bp, Homo sapiens
ggccggtacggccccgggtttgggcaacctcgattacgggcggcctccagccccgccagcagcgccccgtgcatgcagccgaactgagaccgagaaagccggaacatcatatgcagaaaacagacatgcaagatcagaagacaaataacgacagaaaaaccagagacacaacacaataaaaaaagaacgacacaacacagttaaaataaacacaacaaagaaggaaaaaaacaagaacaaaaaaacatacaacagacaaaaaaaccaagaaaaccaaagaatgacacaacagacgagcaccacacacaacaatcagaacaaaacacacacaaagaaagaacacatataccaaaaaacaccgaaacaggacaacaaaaaacaccaagctaacacaacacaaaacgcaatacatgaaaaaaaagacaaaaagaacaacaaaaaaaaccaaaaaaacacaacaaacggacacaacaagcatagagcccgacacaaaaagcaaaactgaaaacagacacacatacccaacagacaacaaacacacaccaaacaacacagcgaaacgaacaaacaaacagaaaagaagaaacaaacaaaacaaccaagaaacagaacaaaacaagac

SEQ ID NO: 575796 - DNA, 167 bp, Homo sapiens
aagggtttcttttcaattttgcattgctggtgccagatgaagaaatatgggtttagaaatggagtagcaggctgagcgcaggtggctcatgcttgtaatcccagcacattggtaggcagaggcgcgccgatcacttgaggtcagcagtttgaagccagcagtttgat

SEQ ID NO: 575797 - DNA, 324 bp, Homo sapiens
  misc_feature (5)..(5): n is a, c, g, or t
gctgntctagaggatcccaaaagccatttctcttaaactctaaaattacgtgggcttacacatgacttcaggttttttcccgttgctgtggtagaaaagtgttgagaaatgtaccttagctagttctgaaggaaaatattttttttttggagacagagtctctgtcacccaggctggcgtgcagtggcacgatcctggctcactgcaacctctgcctcccgggttcaagcaattctctgccccagcctcccgagtagctgggattacaggcacccgccaccacacccagctaattttttcatttttagcagaaatgggctttgg

SEQ ID NO: 575798 - DNA, 499 bp, Homo sapiens
  misc_feature (23)..(23): n is a, c, g, or t
  misc_feature (26)..(26): n is a, c, g, or t
actctgtcttaaaaaccaaaaanaangtcctttccccattggcaatgaaatcttgttttgtcataaatgaggtgactccattagtgtgggtcagttcctggctggtgtgtctattatgaagccagtgccacactgtcttaactagctttatgataggactcactctgtgataagttcttcagctttgttcttttccaagatttccttttcaggccgggcgtggtggcttaagcctgtaataccagcactttcggagacctaggagggaggatcgcttgagtctaggagtttgagaccagcataggcaacatgatgaaacccctctttagaaaaaaaatacaaaaatcagctgggtgtggtggtgcacgcctgcaatcccagctactctcctatccagctgaggcaggagaattgcttgaaccccagaggcggaggctgcagtgagccaagatcatgccactgtactcaagcctgggtgacagagagggatcctgtctca

SEQ ID NO: 575799 - DNA, 86 bp, Homo sapiens
ctgagaacttcaggctcctgggcaacgtgctgggctgtgtgctggcccatcactttggcaaagaattcaccccaccagtgcaggct

SEQ ID NO: 575800 - DNA, 934 bp, Homo sapiens
  misc_feature (2)..(2): n is a, c, g, or t
  misc_feature (366)..(366): n is a, c, g, or t
  misc_feature (432)..(432): n is a, c, g, or t
  misc_feature (460)..(460): n is a, c, g, or t
  misc_feature (463)..(465): n is a, c, g, or t
  misc_feature (469)..(469): n is a, c, g, or t
  misc_feature (483)..(483): n is a, c, g, or t
  misc_feature (485)..(489): n is a, c, g, or t
  misc_feature (498)..(498): n is a, c, g, or t
  misc_feature (501)..(503): n is a, c, g, or t
  misc_feature (506)..(506): n is a, c, g, or t
  misc_feature (522)..(524): n is a, c, g, or t
  misc_feature (533)..(534): n is a, c, g, or t
  misc_feature (538)..(539): n is a, c, g, or t
  misc_feature (542)..(543): n is a, c, g, or t
  misc_feature (545)..(545): n is a, c, g, or t
  misc_feature (583)..(583): n is a, c, g, or t
  misc_feature (588)..(588): n is a, c, g, or t
  misc_feature (590)..(592): n is a, c, g, or t
  misc_feature (919)..(919): n is a, c, g, or t
tnatatatatgtcttgtgtgcgtgcccttaaacttccaatcttactttgtctcttggagattgttgaacgcagcttgtctaggaaggggatgggactagattctaaaatttatttgggaccatgggaatgatagttgggaagaaaactatttgcacacgacagatttctagatactttttgctgctagttttatgtaatatttattgaacattttgacaaatatttatttttgtaagcctaaaagtgattctttgaaagtttaaagaaacttgaccaaaagacagtacaaaaacactggcacttgaatgttgaatgtcaccgtatgcgtgaaattatatatttcggggtagtgtgagcttttaatntttaagtcatattaaactcttaagtcaaattaagcagacccggcgttggcagtgtagccataactntctgatgttagaaaaaacaaaaatggcnacnnnaaancaaaccacgccaangnnnnnaaacacccnccnnnaanaaaaaaaaaaaacacnnnaacaacacnnatgnnaanngnccagaatctcagatgtttgttgtgtggattttgtttanttgtngnnnttttttttttttttcagtgaatgtctggcacattgcaatcctccaacatgtggttatctttgttgtattggcataatccagtgacttgtacattcagccatagcatttgagcaagttttatcagcaagcaatattttcagttaataaggtttccaaaatcatgtaaggatttaaacttgctgaatgtaaagattgaacctcaagtcactgtagctttagtaattgcttattgtattagtttagatgctagcactgcatgtgctgtgcatattctgattttattaaaataaaaagttgaactgcacagtcccctttgttgttgtcaantgtggtttattttca

SEQ ID NO: 575801 - DNA, 179 bp, Homo sapiens
  misc_feature (154)..(154): n is a, c, g, or t
aagcatgctttgataggtctctaggtgataggctggagtgcggcatcaccactgctttactggaatatgtgatcactaatagcagaactgtttgcttccattcttgagatctgactgtatgttcagtttcattcctcgagaacatatccagtanaaatgattcctcaggctccacagat

SEQ ID NO: 575802 - DNA, 260 bp, Homo sapiens
ttctgtattggaattaatgtgctttgttggggtttaattttgggattggttttgggttttgtttttagttgttttaatggtaagtattagggcctttgtagattttacagtaaaatatggaattgtcccttcaatcgagttaatatgtgcccccatgttttccttaaatactgctagcccttctcttcaagattatgagtggatattatttttaccttatgttaaacagtaatatgctttagacaataatataaataata

SEQ ID NO: 575803 - DNA, 895 bp, Homo sapiens
  misc_feature (2)..(2): n is a, c, g, or t
  misc_feature (366)..(366): n is a, c, g, or t
  misc_feature (432)..(432): n is a, c, g, or t
  misc_feature (460)..(460): n is a, c, g, or t
  misc_feature (463)..(465): n is a, c, g, or t
  misc_feature (469)..(469): n is a, c, g, or t
  misc_feature (483)..(483): n is a, c, g, or t
  misc_feature (485)..(489): n is a, c, g, or t
  misc_feature (498)..(498): n is a, c, g, or t
  misc_feature (501)..(503): n is a, c, g, or t
  misc_feature (506)..(506): n is a, c, g, or t
  misc_feature (522)..(524): n is a, c, g, or t
  misc_feature (533)..(534): n is a, c, g, or t
  misc_feature (538)..(539): n is a, c, g, or t
  misc_feature (542)..(543): n is a, c, g, or t
  misc_feature (545)..(545): n is a, c, g, or t
  misc_feature (583)..(583): n is a, c, g, or t
  misc_feature (588)..(588): n is a, c, g, or t
  misc_feature (590)..(592): n is a, c, g, or t
tnatatatatgtcttgtgtgcgtgcccttaaacttccaatcttactttgtctcttggagattgttgaacgcagcttgtctaggaaggggatgggactagattctaaaatttatttgggaccatgggaatgatagttgggaagaaaactatttgcacacgacagatttctagatactttttgctgctagttttatgtaatatttattgaacattttgacaaatatttatttttgtaagcctaaaagtgattctttgaaagtttaaagaaacttgaccaaaagacagtacaaaaacactggcacttgaatgttgaatgtcaccgtatgcgtgaaattatatatttcggggtagtgtgagcttttaatntttaagtcatattaaactcttaagtcaaattaagcagacccggcgttggcagtgtagccataactntctgatgttagaaaaaacaaaaatggcnacnnnaaancaaaccacgccaangnnnnnaaacacccnccnnnaanaaaaaaaaaaaacacnnnaacaacacnnatgnnaanngnccagaatctcagatgtttgttgtgtggattttgtttanttgtngnnnttttttttttttttcagtgaatgtctggcacattgcaatcctccaacatgtggttatctttgttgtattggcataatccagtgacttgtacattcagccatagcatttgagcaagttttatcagcaagcaatattttcagttaataaggtttccaaaatcatgtaaggatttaaacttgctgaatgtaaagattgaacctcaagtcactgtagctttagtaattgcttattgtattagtttagatgctagcactgcatgtgctgtgcatattctgattttattaaaataaaaagttgaactgc

SEQ ID NO: 575804 - DNA, 145 bp, Homo sapiens
  misc_feature (15)..(15): n is a, c, g, or t
ttgggtgcatgcatntggacatcgagcatgagaacaacaacgctttgaggagtatgagtggtgtggacagaagcggatacgggcaccactctcctggaaagctggcttcctgaggctctggcttcatcatgtgcagcgcgcaaaa

SEQ ID NO: 575805 - DNA, 426 bp, Homo sapiens
  misc_feature (281)..(281): n is a, c, g, or t
  misc_feature (314)..(314): n is a, c, g, or t
cagagtctcacatctgttgcccaggctggagtgcagtggtgcgatcacagctcaccgcaacctctgcctcttgggttcaagtgattcttgcgcctcagcctctccagtagctgggattacagaacttggctaagattaaagagtggtgcacttcagcctgggcgatcagagtgactctgtcaaaaaggaaaggcaaaaaccggaccctgggagctctgtgggccctgattgcaggcccctccctgtgtgatgagggatgagtcagcttggggagccacttngccagcctgcatgcctgggtcatcaggaggttnagaaaagccttgaaagttgttgaagcactgaggcagattacaagtgtttgttaatttttgttaggaatttaacttttcccctttgggccctttattctccaaagttggggat

SEQ ID NO: 575806 - DNA, 323 bp, Homo sapiens
cgatatgacagatggctagtgttgctaggtcatgaaaagactctgaaaatagtttaccttcatagctaatcgctgctgtagcattattaaccaatggtcagatcctgcattaagaacaagagactaaaatcacaaatagtgtcttctttttaaatcagagatgctggacttcccaactttgagtcaggcagatatatacatgtgatggtaggtgcttcgaaaacgtttactcatgcacagagcttgatatttgctagagatagctgaacctattttaagatgactgtatgcccattttgagtttgaaccggcggtgcggcgtg

SEQ ID NO: 575807 - DNA, 385 bp, Homo sapiens
atgagtctcaagctgccgcccgtttgggtgtcacagtctgagtcatcgcatgagacaggcacggcctttacctgtgggcaacctcctcataaggtagttccgcttgcccaggttcacagcttgaacaccgccaccgtttccgccagtgcggcggtctggtgcttgaggctctcggccgccgcggcagactcttcgaccagggccgcgttctgctgtgtcacctgatcgagctggttcaccgcgtcaccgatctgtccgatgccccggctctgctcgtcactggcactggtgatctcttcgatcaagccggccaccttctgcacctgggccaccacgtcatccatggtcttgtctgccgaattgaccaatcggagttgtttttcct

SEQ ID NO: 575808 - DNA, 398 bp, Homo sapiens
  misc_feature (87)..(87): n is a, c, g, or t
  misc_feature (130)..(130): n is a, c, g, or t
  misc_feature (145)..(145): n is a, c, g, or t
  misc_feature (189)..(189): n is a, c, g, or t
  misc_feature (238)..(239): n is a, c, g, or t
  misc_feature (266)..(266): n is a, c, g, or t
  misc_feature (290)..(290): n is a, c, g, or t
  misc_feature (299)..(299): n is a, c, g, or t
  misc_feature (322)..(322): n is a, c, g, or t
  misc_feature (351)..(351): n is a, c, g, or t
gtggtcatggaggcgctgccgctgctagccgcgacaactccggaccacggccgcaccgaaggctgcttctgctgccgctactgctgntcctgtgccggctggagctgtgcagggctgggagacagagganaggcccggactcgcnaagaggagtgccacttctacgcgggtggacaaagtgtacccggnagaggcatccgggtatcggtcgccgaccacttcctgcacctaacaaagnnaagatttccaagccagcgcctactggnaaggaacagctgtgatcgatgganaaattaagnacttaagttactgatatcgtggnaaatcttggtttcttcttctacccttganttacatttggtgtccactttatcgcttttggcacagacttgagttag

SEQ ID NO: 575809 - DNA, 704 bp, Homo sapiens
  misc_feature (47)..(47): n is a, c, g, or t
  misc_feature (134)..(134): n is a, c, g, or t
  misc_feature (171)..(172): n is a, c, g, or t
  misc_feature (202)..(202): n is a, c, g, or t
  misc_feature (234)..(234): n is a, c, g, or t
  misc_feature (264)..(264): n is a, c, g, or t
  misc_feature (270)..(270): n is a, c, g, or t
  misc_feature (305)..(305): n is a, c, g, or t
  misc_feature (330)..(330): n is a, c, g, or t
  misc_feature (342)..(342): n is a, c, g, or t
  misc_feature (355)..(355): n is a, c, g, or t
  misc_feature (369)..(369): n is a, c, g, or t
  misc_feature (384)..(384): n is a, c, g, or t
  misc_feature (388)..(388): n is a, c, g, or t
  misc_feature (404)..(404): n is a, c, g, or t
  misc_feature (411)..(411): n is a, c, g, or t
  misc_feature (429)..(429): n is a, c, g, or t
tcccttttggagacggggtcttactctggtacccaggcgggagtgcnggggtacaatctgggctcactgaacctctgcctccggggcccaagggatccttccacctcagcctcccaagtagctgggactatagngtgcttgccaccatgccgggtaatctttggcagcganngggatttggccagtggcccaggctgatctngaactccggggctcaagcaatcctccctcttnagcctcccaaaattcggggattacagggcntaagcnatggtgcccatccaaagttttatttattaattttnggagagggagtctcgtaaagttacntttaaaaaaaangttctatttcccngtatgggtatctcnttaaataaaataaantatncctatggtaagtgatntgagaantttttaaccagctttatntaaaattaaaagagagacgcttgtagacatcacgtattgtgtaactgtgtctcgggttgtgtgaccaagggcaggttttttttcacccatttttataattaatcttctatcctgattaacatcagggccggcatatttaagggtacaactcactctcttgtcggaacctttccagacatcaggggggaatcccaagaacacgggtacctctgaaacctgtgacggtggatataaaagggtataaagaaatgggaaacgtccaggagagggtcacc

SEQ ID NO: 575810 - DNA, 1304 bp, Homo sapiens
  misc_feature (926)..(926): n is a, c, g, or t
  misc_feature (1089)..(1089): n is a, c, g, or t
  misc_feature (1095)..(1095): n is a, c, g, or t
  misc_feature (1117)..(1117): n is a, c, g, or t
  misc_feature (1124)..(1124): n is a, c, g, or t
  misc_feature (1130)..(1130): n is a, c, g, or t
  misc_feature (1137)..(1137): n is a, c, g, or t
cacgcgtcgagaaacttagattttttttttaactattgtaaaaacgtgaaacctattcttagctcacaggccatggagaagctggtggggaccagacccagctccttagctggctgggctggggagggggcagtgacagtggcagctgctactcactgctcagtgtggaaaacacaggacttggcaatcacagcccgcagaaccatcatgtgtggcagaagcctgagggatgcggtttcttgcccacgtgctctgttcattttctgttgtttttctgcacttaaagaattcacatggaagcatgttttataaaatgaattaccagagaaacagagatgggccgagattctcagaaatggtcccatgtgaccaagttctgctgtttgggtgacagtgctttgaagatctcctttgaggatgtgcagtctttttttttttttttttggaaatggagtttggttgcccaggctggagttgagtggcacagtctcggctcacgtgcaacctccacctccgtgggtttcaagcagttctcggtgccgcagcctcccaagttagcgtgggactacgggcttgcgccaccacgccaggctaatttgggtattttaagtagagagggggttcccaccatgttctcaaactccgtgacctcgaggcgatccacccacctcagcgtcccaaagtgcgggggattataggcgtgagccaccgaaccgggcctatgaggtggtcttttaattaggaaccaattctattggaaaggagagtttgactgaagttgggcccacaggattgtgagctgggcagtgccttcatgaaggcttgccaccttgggacgccccagtttactgggggtgtcttgcggagtgcaagaaggctttctgggcagctgcctggtttgggccagacctggctcccttcccgcnggccaaccccttagtccccttcctgtctccatttgcattcaggggtggctgctgtcctgagaactttagacctgggacgcagagatggagtcccatggattttgggggggcattattctaaactttcgtatccaagttagtccccctttttccactgtggttngccgtnctaagcagttactgatgcctgntgtgaanagctgntcacagnaggggggggcggcctggactggccctgtataggctgcgttcgacggtcttggaattcttggccgacacaattcgtcctgcgtcagattttttgctcccttggtttaattgaacccgtggtagatctccttgtgtcttggactgtctttacatggcccgtgcccgtca

SEQ ID NO: 575811 - DNA, 93 bp, Homo sapiens
tcaaaaaagaaaaaaacagagaggcagaaagaatgtagtagactactatagggcgctaggcggtcttttgtttagccgaacgaccgagcgcag

SEQ ID NO: 575812 - DNA, 141 bp, Homo sapiens
ttcgacggaagcagtgcccgtctggtgtgtgttctatacatcctcaccagctggagcttcttctcctctgtcacgtattcggaattcagtagtgcccacattgttggtttctggtccactagtcccgttcccagtgtgatc

SEQ ID NO: 575813 - DNA, 184 bp, Homo sapiens
gtccatcagcttgactattctcaaatagtgaataatcctaaaatcatctctatcaagtgtttattttaggtggtgtttttgttcttctgttttaaaggaagaattttaaaatgagatactcattttctaaacattttccaaaaaaataataataactaagtcaccctgatgggagaagactgcg

SEQ ID NO: 575814 - DNA, 364 bp, Homo sapiens
tgagcaatctgaccagaaaagaacaactcgtagtacacagctcagtgaatttaggcaacgggagcgcagccctgtgacaaacacatagctccccggaagcccctctaatgtccctccctagtcattgacacacatacccattcctgagctcacagctgtcctcacctctatcaccagagattcattttgctcgtttttaggcagcaagttcctacaatatacactcctgtgtctggctgtcttgtaatagtttaaaattaatcaatatctttactttctccatattgcatccctctttaacttactgtaactccaattacagccctcttgatttgtatgttattattgtcatgtattttaattc

SEQ ID NO: 575815 - DNA, 304 bp, Homo sapiens
gggccctggttcccccttgtccccccttttttgggggcctgcaactttttgttttttattgggtggctttttgagtattttaaccccagtcctgggtccccctcctttttccttttatgtccccccttttcggggggggggcttaggctaagggggaaatgggtttttttagggcttcccccttttccccctcccggtttccaaaaacccagctttttaaaaacagggggtgggcatttccctgcccctataaagggggcctggggcttttttgggggtgggggggaataacccctgtttttta

SEQ ID NO: 575816 - DNA, 1039 bp, Homo sapiens
gagcgggggtgcagctgagcgaactgggagcagcggcgactcgccaggggctagggcgccatggtggcagtgtgggctccgtgctgcgcggggctcccccgtgctgccagcagtgctagtgctgccctgcctgcctctgtgcctgcctcagaccatccctgcgcctgcccgcattgttgtgaactgatgtgagccaggactgcgtgcctcggctggggcccggtgccgaacggctgcggacacctgggcgccgatggagccgatgctgcctgccgcactccggcatggatcagtgcgtgacggatggaggcgcgagcttggagaaggtgctggaacaaagttcatcgaggctactggggcagacatgtgcgaagcggcgtgacctgcgaggaagccgtcactcgaagctaacaccgtgacgtgatactcacaggtcacggcaggaatcccctgcaggaaggccaatcgtggcccacagcacatgcttgtacactctatccacggggggaacaacattataccaactaatgcgtctttcggaaccaaccagaggtggccctttggtgacacgacacgaacacgtcacaccactgggaatttacccattgcgttgttcccaaaacaacaacacttttgggggacgccttcgccggaaaccgtccacacgtagaagcaaggaaagccagttctgcaaaccacgcacccacgatgggtgttacctacacgtggcggtttttggtggcgcagcaacaccaatggcaccccaacacttttggcaagcttcacaccgccgtcgcacatttgtcccgacgccgattgatgatgtaaccagagcaaagggacaagctcttttgggggggaaaacacaagcgcgcttccattttgctcccacacgattctattgcggggagccagacgctttgttgtggcggttccccgttatgttcgccacccaaacttctcacggcgcacggtcaatttggacgcaacaacgtgatgtgaatgtcacagcgcttggtggttccgcgtggtggtaaca

SEQ ID NO: 575817 - DNA, 546 bp, Homo sapiens
gagttagaacaggaatacccattcttttcccattacgaatatacgcatcccaaacatgcggatcgaatgccattgcctttttccacgtttcatttgcgtatacatcaaacaacgagccaacttcacggaaaaagcctgaatcaattaaatcttgtgctaacaactggtcacttaccactacaaaatctggtatttcctttccggaagataaggcaagtcgcaatttcgtttcaaaagcaccatttacatccgcaacgtaccaaattgtcttaatttgaattcccaactttttataagcccatctagtagcgacattatttgcaatcgtttccccgttttaaaatgataaattcggattaacagcacgaacagtactgatcgtaacaggaggatcatacatgtccttgtatccttctaatattgattttcttttaaatgaaagactttctttaatagaagaaccagataaacttgaaaatataaacataacgataattattaataccgaccgattcaacagtattctcatgaggtgatctctgcacg

SEQ ID NO: 575818 - DNA, 320 bp, Homo sapiens
tcctcagcagacgcagtcctggcatagagtgcatagaagtgtctgcaccaaagcccatggcttttcatgcacggagacaggctctggatgtgcaggcttgccatcccctgccccaatcctccctgagagctcctgcctcagtgcccggggctggtgagggagaagcctgtctgcgcctgcctaattccagctcctccaggaagcaagggcttgtagtcagagctgcagggttggccacgcggtggggcggagtccgccaggattagagagcctggccctaatccggcccgctgggttaaacaaggatcagagcggcgtct

SEQ ID NO: 575819 - DNA, 296 bp, Homo sapiens
actgaatcagctcctgagtagctgggaatacaggtgcgtgccacatgcctggataatttttgtattttatagtagagatggggtttcatcgtgttaaccaggatggtctgaatctcctgacctggtgatctacccacctcagcctccctagttttttaccagataatttctatctctttatcattatcttctatatggtaagacattgttcttctactttcttttatttctttacacatgctttcttttagtattttgaacatatttcaaatagctgatttaaagtctctgtttag

SEQ ID NO: 575820 - DNA, 522 bp, Homo sapiens
  misc_feature (1)..(1): n is a, c, g, or t
  misc_feature (29)..(29): n is a, c, g, or t
  misc_feature (204)..(205): n is a, c, g, or t
  misc_feature (249)..(249): n is a, c, g, or t
  misc_feature (262)..(263): n is a, c, g, or t
  misc_feature (278)..(278): n is a, c, g, or t
  misc_feature (283)..(283): n is a, c, g, or t
  misc_feature (300)..(300): n is a, c, g, or t
  misc_feature (313)..(313): n is a, c, g, or t
  misc_feature (329)..(329): n is a, c, g, or t
  misc_feature (338)..(339): n is a, c, g, or t
  misc_feature (350)..(350): n is a, c, g, or t
  misc_feature (353)..(353): n is a, c, g, or t
  misc_feature (357)..(357): n is a, c, g, or t
  misc_feature (363)..(363): n is a, c, g, or t
  misc_feature (368)..(368): n is a, c, g, or t
  misc_feature (384)..(384): n is a, c, g, or t
  misc_feature (395)..(395): n is a, c, g, or t
  misc_feature (411)..(411): n is a, c, g, or t
  misc_feature (427)..(427): n is a, c, g, or t
  misc_feature (434)..(434): n is a, c, g, or t
  misc_feature (468)..(469): n is a, c, g, or t
  misc_feature (474)..(474): n is a, c, g, or t
  misc_feature (484)..(484): n is a, c, g, or t
naaactagaaggaaccagcaatcattccnactgtcctggccaaggtacacctcagtactccccttcccaaactgaagtggtatgaggctagctctttccaaaagcattcaagtttggcttctgatgtgactcagaatttaggaaccagatgctagatcaaataagctctgaaaatctgaggaacattgtaggaaaggtttgttnngcatctcttaagtgccatgatgagcataacagccggccgtggtngtcgcgcctgtgnncccagcactttgggnggccngggtgggaggatgacanggtcgggagttcnggaccagcctggccancatgctganncctcacctctnctnaaantgcaanaattngctgggcatggtggcncatgcctgtgntcccggctgcttgggnggctgaggcaggagantcgcttnggccggggggcggaggttgcagtgagccgggacnntgccngtgcactccngcctcggtgacaggcaaggctccgtctcaataattaaa

SEQ ID NO: 575821 - DNA, 280 bp, Homo sapiens
cttttatgtacctggtaacctagggggggccttgaactaatgtaaggaagccaaggagtgcagatctagatagcagagaagtacgtctcatactaaaacattgcaactactgttagcgtccaacccatgaagctgaaaccgatggtgtatctatgactgactacgattagtatatatatgaacagactaaaacaaatgtggcaagctaggttggctgtgctgtctcagtgtgacatggacagaatccagataacaccctctgaagaccttggacctacgt

SEQ ID NO: 575822 - DNA, 107 bp, Homo sapiens
aagtgcgtgttgcatcgtaagtattggtgccgtcagcacctatcacgcctggagcgccatgggcgctgatatacagggtgggtaattttccgtccggtcgttcttgc

SEQ ID NO: 575823 - DNA, 680 bp, Homo sapiens
cacaggaaggaaccaacctgttaaaccactaattccgcatataagaagaaggttttccaggaattccaaaaaaggtagaagtgagggagggtcccacttggcctcctgggtccaagaggggcctcaaaaacttgtgaaactcactcatttcctgaatgggacttaccttgggtcctggatgaataaattgaaagatatgtctttaaaacattcctaacatcagaatttgcgcttgtgttttcttccccaagaaagctataacaagcgaaaattttgttgtaagcttccctgtgtcctctctccctctctcccttccccctcccctgaaactaaaaggaatgttaaaagcccacttttctgtgaccagcagaccttatctatggtcccaattccaattccttgtaaacacaatttgtaaaatcccgtgagatcctgtctcctttgccatcccgctgcaaggttataagtagagaaaacttaagttacaattccagttttcctcaagatctgagacatgttaattgtctttgtttctccctctggtaacatcttcccaccacacatatttcctgccttagagagtttaaaaggtgataaaaaaatctaacactggctaccccgctcgggaccccttccacgctgtgaaagctttgtactgtcactctgcttaataaagccta

SEQ ID NO: 575824 - DNA, 326 bp, Homo sapiens
cgagggccccactgatcgccccacccgatcacagccttcgcgattaagcgttattccgatcagacggactgcgatatcccttggcaacagcatcgctgcggcggcgttcatgcccgcagcggacgtagcgttttgagggagagcaggacatggacgcgatcaccgaaggcagcccacttagcgacccgaacaagaagcccgcagcgctgcgcagcctgctgggccgcacctcgcgcgactggtggcccgaggcgctgtcggtcgacatccttcaccagaagggcgtcagcggcaatcccgatgggcgacgacttcgactatcgctc

SEQ ID NO: 575825 - DNA, 1369 bp, Homo sapiens
  misc_feature (254)..(254): n is a, c, g, or t
gacccttctcgcctatgcgccaacgacatggtgcttcagactcttgcgtggcacgagttcgaggctggtggtggcctcatgtgcatcacattccggagcacgtcaatgccgaagcagcttggtcagcgactcgtgagaatgctctttgcgactcagaaccagtggctctagggtcagagtagggaacctatggcgcttccaagtgaggcgatgaccagggtcgcattgctcatttttgccatagattgctagtngcctagggcctcaacatagcaatgtgtacgattcccttgcgagatggtattaactcctgactaccaatggtaggcacccaccacgaagtaaatgtcatcgcttcgcgggatccgagatgtccctagcgcacaacgacaagggtgcccaagaaatctagtcttaatttgagctttatacattttgcgaggcgagagacccacctgacagggaaatgaggttgccccatccgtgaaagtgaactctgtaagccctcagagaagaggtacatcccgggccatccatgtccacccagaggggaattgcagccgaagggacttctctatggcatgcgggctattcttaaatagcccttttgatggcaaatgtagccaggtggtgacagagtcccatggcagggccacactaagcaaagtaagattcaccaagttaaattgtgatgagctttaataacgagaagcaggcgccatatgcccaccaaagaacggcggcaaggaacttgcgttacctcttgagaacaccatgggccttatccgtaagcccccagaaaaaagcaaagagcaagccccttggaggttaagccttgaagagggagtttagagcttagtgttgtggaactgtggggcttgagcccccttgtggatttgactttcggtgagtttgagccccattgggcaatttgcgccctttggccgtttgcgctatttgggccgtataaaggaattgcccataacctcgcagcgggctagagaggaaaaaaccgaaatttcagaacccctggtgtctcggctctttaaagggtaaaatcagaatgcgcctggtggcccttcacacatataggagccccaagaaggcataatatgtggtattaacacgcccttatgtgcgcggcaatatggcgaaacggcagctgcccccgcagcgagatagttgtggcccaaaagcgaaaaaaaggagctggaccggcatgacgccaattagtgcttttccccatagagtatatccggacattcgcttatagcacaaggaaggcgcttaatatagagaaaaggcgcacttcgaaaaatgtccccatcaagcaattctacgtgcgcaacttcgtatggtttccccctag

SEQ ID NO: 575826 - DNA, 210 bp, Homo sapiens
taacacgaaatgacatcagatgtaccatcactgggtccatgcctttgcctctggaacactctggacctggaattcaaggtggaggagccatagtccagagagactattaagcggcgaccagtgtctggattaagactgatgatggacgaagggaacagtaaactttttgagagtgtgatgactatcagattgtctaacgaataagtgagc

SEQ ID NO: 575827 - DNA, 229 bp, Homo sapiens
agtacgcgatcagcgcgaccaccagcaccagggtatagatgcccagcccggcgcgtccgccgtcgcccaggatcgcgaaggtgccgataccgatcagcagcaccagcgagaaggcccaggcgatgcgcgccttcaggatcagcccgagcgcgatgatatgcaggcccacgcccagcaccagccgcgggatctccagcaggccgaccacctgaatcacgtcttgccagtt

SEQ ID NO: 575828 - DNA, 490 bp, Homo sapiens
accccacccgatgagctggccttttacagtagttgctggaggagtcggtcttcagaataatgcagtccttcagcacctcccagagctgaaaaacccaactgtgagtctcatgtgtcacacacagacccaaagttccaggaagctatcaggtcacacaagaaatagcaaagcacctcaaaaattaagaaataaccaccaaagcgcgggaacaattgtgactgctgcaagagcttacattctaggccctacttcctgtatgtgagagcattttcaaacaaaattactccccaaacaaaaactcgtcaacaatcgaacctcttattgaggtcatccaccacagaccatagcagaaatcgtggtgttaagtgagacagatcatagacaggaaagaggagaaaacaggaggccctctggtttcggcttccccagggtgtccgcccttctccacctggtcaccataatccgttggctggacaccgccgaccgcgat

SEQ ID NO: 575829 - DNA, 571 bp, Homo sapiens
  misc_feature (25)..(25): n is a, c, g, or t
  misc_feature (87)..(87): n is a, c, g, or t
  misc_feature (89)..(89): n is a, c, g, or t
  misc_feature (135)..(135): n is a, c, g, or t
  misc_feature (155)..(155): n is a, c, g, or t
  misc_feature (158)..(158): n is a, c, g, or t
  misc_feature (168)..(168): n is a, c, g, or t
  misc_feature (205)..(205): n is a, c, g, or t
  misc_feature (241)..(241): n is a, c, g, or t
  misc_feature (247)..(247): n is a, c, g, or t
  misc_feature (343)..(343): n is a, c, g, or t
  misc_feature (348)..(348): n is a, c, g, or t
  misc_feature (364)..(364): n is a, c, g, or t
  misc_feature (414)..(414): n is a, c, g, or t
  misc_feature (482)..(482): n is a, c, g, or t
  misc_feature (486)..(486): n is a, c, g, or t
  misc_feature (501)..(501): n is a, c, g, or t
  misc_feature (532)..(532): n is a, c, g, or t
gggggggggggcccacatcagggcngggggccacatggggagggacagtcctgccccctgcagcccggaccccaggggggggtcttngngatgggggagggctgctgtcccgaaattccacagcccgccggagcntccttgagcgggggaaaatnagnggcccattgngctcccggggttcgtcaaaggtggtctcaaaggtccncctggttgtgggtgattggtaattcttgttggtgtnaatttnttccaagctgaactccttcttgttcaacctgattggtcgaggcagtcccattggtgtaaggtttagctgaggacgggctggtgttctgcgtattcngaatngggaaacctttcccanggtcttggtctcaggttctgaaagcacctggtcctttgaggcccttggcnccttccctttggttgaacccaacctgggttctgctggttcggagaaggaagtggatgccgtggacgancaanaagtgggggagaggnaggggggggggcccactcctccgaggagggnaagacctcttttccggagaacagggaccgaagggggtgg

SEQ ID NO: 575830 - DNA, 328 bp, Homo sapiens
gctcgacaagtgaccgggagaatggaactaagttgtgaaacacttcaggatataatccagttgttcctttccatatttagtgcctccattaggagctcttgtaaggcaggcctagtggtgacaaaatctctcagcatttgcttgtctgtaaaggattttatttctccttcgcttatgaaggttagtttggctgcatatgaaattctgggttgaaaattcttttctttaagaatgttgtatattggctcccactctattctggcttgtagggtttctgcagagagatccgctgttagtctgatgggtttccctttgtgggtaacctgac

SEQ ID NO: 575831 - DNA, 676 bp, Homo sapiens
tattaaggtagaaaatgaagacgagttaggaaggctgatgtgacagagtagaggacacttaaatctgcgcatctacgaagaagagtttgatgagaattagtcgtaagaacaacaataagaaagaacgatctcgcccttttgagccctcactattgtcaaggtcttctggaactcaggcactgggggcctgggtttcaagcaagggcagggcattgttgaaaatgggaatttggccgggcacagtggctcatgcctgtaatcccagcactttgggaggccaaggcggatggatcacctgaggtcaggagtttgagaccagcctggccaatatggtgaaaccccgtctctactaaaaatacaaaaattagctgggcgtggtgactcagcatgtctgtaaacccagctactcgagaggctgaggcaggagaatcacttcatcccgggagacggaggttgcagtgagctgagattgcgccactgcacttcagcctgggcgaacagtagcgagaacctctggttcctcaaaaaaagaagacacctaaaaaacacaacaggtgcgccagcaaaaagcggggccaccttgtggggaacgatattcccccgagaagggttacaggtccccaaagaggcccggaacccacaggggtctacgggagagcaggaccaacaaccacag

SEQ ID NO: 575832 - DNA, 112 bp, Homo sapiens
accacaggtagccacccagatgaattactactagctcacagcaatataaaaacttttattgagttgctttctagtttgctgacaagcctcattccctctgatggacttgtca

SEQ ID NO: 575833 - DNA, 974 bp, Homo sapiens
gaccggcgaacagtaggtgtgcgccctgagagcgccaggtgggtggagtatcttgcgtaggaagaagtcattgtgggaatctggcctgcaaatgccgcaaagtggtcgagaagaaactgggttttacactacttcacaggtcgactggttctgcatatgctgacagtggagagatcatgcatgtcgatttatatggagtgagttgataagaagtcctgctcagtgtgggtgtgccagaagtaagaaattgaggggcatcgtggtgctctggccctcgtgattgtcacgaagagactcacggtgcaatgcatctgggaagcctgttgtgcatgcgagagcctaatataaggtgagccccaaggatggattctacagggcctggcttgtgaccctaggtgtgccgaaggccgaggagacgagtcgaacaactgatgcaataatgtagccgtggggattctgtctcagagctacgaagtctgttggcgagcatagtaaggtcagcacatactcatgtcataagaattggggatatgcgggtccacacgctttcttctggtagactgcatgaggctgatagaaaaaatttttgggccaaaagaagcatggtggtcagtaaaaacggtatgagagtgaatcgacgtgtctgatagcatagctaacttggtacccccggttcaatgagtggcatgcgtccatgagtgaagtatcctaagagtccacgaattcgtcgtggcggtatatgcaagagtgctaactcattcaagttctattatagtgagatctagattttggatctccttagttggggattatggaccacacggggtctctagtgcgtggcagagcccaaaatagaggcgatcacacgcgggaaggggggcacgccggagagacccatttgccgggtaagaccgcgacagaatcgcgggaaaaaacgtttgcacaacggtctcgaaaggcacccaaggccaaaa

SEQ ID NO: 575834 - DNA, 752 bp, Homo sapiens
gcgcggaagtcaggccagtttctacgcgcaggcttaaggaggcttcgggctcctgggatttctgtccgcgactcctggccctcgtccttcgcggccagagcaggttcgcgaactcctcagagccttctgctcccggccgccgcatttccgccgggggcgagagcacccaggttcaaatatgacgccgtgtttggaactaacctcaggttggtggaaccagtgggaccagctatgcttggcagtgcaagatacagactaatcgacaatcccagtgaaggatattgaagtaacatcatctcctgcatgatagcattaggtatgtctgtcttttagcccaccaaccttgccggggaactttcttgattgcaggatcatgggctcactgcatgttcgctgctgtggaagttcgaagaccagtggacagacctattccaaaagcccgagcagatgcacagctgggcctgtgcttgatgtctgctggagtgacgatgggagccaagtgttacgggatcgtgtgcataacagtgccacaaatgtgggatctcagcagtaaccaatgcgataacagatcgcacagcatgatgctcctgttaaaaccatccattggctcaaagctccaaactacagctgtgtgatgactgggagctggcgataagaccttcaacgtcaccgggatactcgatcgtcgagatcctcatgcatcggtgtgcaactccctgcacagtgttactagtgctgaccgtgatataccc

SEQ ID NO: 575835 - DNA, 364 bp, Homo sapiens
tccccctaccaggaccagctaccggctcctgctgcgtgtctgttgcctctcggccttctgaccctcctccaggccatcccgtgtgtcatcattgccattcgcctgtgttttggtgtttgaagttggaatcttcagttactttcaagaacagccacaaaaatgtgttactatctagatttttgagtgtctatcaatcaggagtcttctgtgacagtcgctgttttctctagaacagtatccatacccaggatgcatcccaaatgtgttctcatcaggtgattcttggttgttgcataagttcatgtgtaatgtgggtgagtttctgttttgaatgtggtcattatatgttatttgtgaaacttta

SEQ ID NO: 575836 - DNA, 511 bp, Homo sapiens
  misc_feature (142)..(142): n is a, c, g, or t
  misc_feature (456)..(456): n is a, c, g, or t
tttattatttatttttacacagtgaaaccatttactgaatatcattgttgggtacataaaacactctaacacacgagagggggaaatgtgtgttacaacattcataaatagtcatacacttcaccagcccactctggcgganatggtaacacatattgtggcgtttaccaggagaaaacacctataaaagcagaggaggccccggaacgaagcggtctgtcgaccgaccactgcgaacaaccgcgagcggaaggggggagcataccatagaccaagcgggctccgcgccccatcacgcgggaagtgacggcccaccggaggcatacgagtgttacactagcccgcacacaccggtggctctccgccacacaacacagctgtgttacacaatgatgcagaccaaccgactgtcgggcctcgaaagccccacactctatcatgtgtgtaggcgaaccnctcaccacacagccgcacacgagcaggactagccgaagacagcctcatcaacaac

SEQ ID NO: 575837 - DNA, 477 bp, Homo sapiens
tcgtttaaaacattatctcattccgatcacggctcactcttcagcacgtgggtttctccatgtgctgcagttcccaggccccgggggattttccattatctttccacagctgctctgtgctccattcccagctgtcagagctcctctctcaaccctgtggtgtggagtaggggccgggcagtggctgggtgcatttccacatagctgaccattaattaggtcagtcttgcttatgggttgttcaaatcttctttctctccagtgatttgttttaccagttatggggcgaggtgtcttgaaatctctagctgttccctggagtagtgtctgtttctcctccagttctctggattttgctgaagcggggcgtcatcagggtgtgagatttgaggtctggccggccacctcgctccggttagtgcaagcactggtgtcttttcttttgattattttggattaaacactttttttattaaa

SEQ ID NO: 575838 - DNA, 328 bp, Homo sapiens
  misc_feature (39)..(39): n is a, c, g, or t
  misc_feature (62)..(62): n is a, c, g, or t
ccaccgtggactaggcatgggacaaggcactgcaagaantagaagcttgtggccgggtgcantggctcatgcctgtaatccaagcagagaggccaaggaggtggatcaattgaggccaggagtttgagaccagcctggccaacatggcgagaccccatctctactaaaaatacaaaaattagctgagcatgttgacacacgcccgtaatcccagctactcaggaggctgaggtgggagaatcgcttgaacccaggaggtgcaggttgcagtgagccgagattgcgccactgcactctagcctaagcaatggagcaagaccctatctcg

SEQ ID NO: 575839 - DNA, 133 bp, Homo sapiens
cgtaatcgtaacagatctcagctgtgctcacgatcaggaggtggtatgcgaggtctgatgtaccagtcaaacgagaggtggctttgagggtagcattgaattcttcctagatgccaaagaacggggatgtcac

SEQ ID NO: 575840 - DNA, 137 bp, Homo sapiens
atcgcttaagcccaaacacgtcaggttgcagtgagtctgaaatcgcaccactgcactccagcctgggtgacaaagtgagaccctgtctcaaaaaaacaaaaagaagtgggctgggagaaagccctgtaccctttgag

SEQ ID NO: 575841 - DNA, 423 bp, Homo sapiens
ctaccgccaccagcatctaaggagagtcttctttctgtttgcagatctgtgataagacagatgactcacccagcgagatgtaggaggatgaccgatggcagctctctgagagcgggagttctgactctgcagcttttgtgtcccgtcccacccttagggatcaagcctggccattccagagcagctgagtttacacaagcatgctttcaagtattgacaattgctgttaccttagactgagataccccttcgtggttacttgaacttatacttggccttcaagccatgcagtacctactcttccaggaagccttcccaacctaccctctgagctttatattggagcactgatgatcctgtgtcagtaatgcctgagacacatttgtcttgcccatgagactgagccccatgtgcataggcttg

SEQ ID NO: 575842 - DNA, 950 bp, Homo sapiens
gctgagctgtatcgatggctcctttgccggaacgctccatcacaactggaggtacttcttcgaggatccaccgatgatggtcagtgtcccagagggcgtgatcagctgatgagcatgatggagaaatgagcctccgcatgattgctatgtagctcaattcaagtagcattagtctgttgcagggacagtccgtttactcacgagaccccgacgatcacaccatttttgaaatcctagaaatcgtcttctaggtgtggagacgtctcgaacgatcgccagatgctatgaagcatgtagcccaccaatggaatgatcttccgggtactagcacaaatagtctgttcccagattttgttgaaacggattggctttgccttcgcatgggtacacattggggttcctagcaaatgatcctcaattgaattgcgttcttggcaattgcgtatgagaagcaattggaggccaatacggcgctagtttttaacaaagcgatcgggcccttcatggtgccgaacatttatggagtaggtgcgtatacttttttcgaccccggtccgttttcgcttcccacgaagaatgatttccgcattggagctccaagcttttgctcggaattcgggatcggtggtggactttggctcgaatacgccatggaatacacacgtttagtgcctagcgggcgaccagggaaaattcttattccaaattggcattgagaagtaccggcgtggatctccattgggccctcctacgaatattcccaaacaccacaggggattactctggttgccaaacaattgcgcccgttggaggtttccaaaagcagtatggcacttttggcagaacatttacccattagcaaggcaaccggttcgttagacgataagcggaaaacaaacggcaccttgaaccccccccgttggggccgaacttggttgggaaacggcgtc

SEQ ID NO: 575843 - DNA, 189 bp, Homo sapiens
atccatacttggaatatctttctagaggagggtaacccacatttctgtgcccatttcaactaaatgggcacagaatttcaataccctttgtttccttctcctgcctaattgccctggccagaacttccaacactatttgtaataagtgtggtgagagagggcaaccctgtcttgtgccagtattcacag

SEQ ID NO: 575844 - DNA, 101 bp, Homo sapiens
cgcccgcggaggcctgtgggctgcgaggaggagcttgcctagcttgcaggcagcgcagggcagacggggcaggagaagcaagatgaatgcaggctcagatc

SEQ ID NO: 575845 - DNA, 3283 bp, Homo sapiens
  misc_feature (57)..(57): n is a, c, g, or t
  misc_feature (70)..(70): n is a, c, g, or t
  misc_feature (87)..(87): n is a, c, g, or t
  misc_feature (3274)..(3274): n is a, c, g, or t
ctgtaagccttcctggtgtcctgggttatccctccttctgctgttctggaaaagaanacccagcccagtntatggagtataagaaanactgatgcacctcaaccggatgtgaaggaagaggaagaagagaaggaagaggaaaaggacaagggagatgaggaggaggaaggagaagagaaacttgaagagaaacagaaaagtgatgctgaagaagatggtggcactgtcagtcaagaggaggaagacagaaaacctaaagcagaggaggatgaaattttgaacagatcaccaagaaacagaaagccacgaagagagtgaaacaatcttaagagcttgatctgtgatttcttctccctcctcccctgcaagagtggtcctaggagaggacctggcacaccttaggttgacattcagaaaacttcaagacatcaccatcagcaggctccagttgaacactagtctgtgtaactttaaacatctagcagtaaatacttgcagttgtgatataaaggaccctgtttctgtagaaaagaaaacatttaacataatggttgtgaaatgtaacatgaagcaaactaacttttttttttttaacatctttgtttttaaaatagaatgatagaactttgccagtctttaagatcttggcttaatttaatgtattaatctgtttgtgcaaacataataccaccatttaaaaatgttagggagatgagttgcagtttttataatagattttttttaaagtttggtattgtaaaacattcacacctctgtccctcaaaattgataattacgtttaaagtgcagtcatttgtggttagaatcttgttttgtttgcttccattattgagttcctcctaaggaaattgaggagagggactgaatagaagcccaaattcatataaaagttgcgtttaagttgtattaaaaatagatatataagaaaaaattcttatatatctattttaatacaacttaaacgcaactttatatgaatgggctacggtggcacttgggcatttatattccacttgggagggtcaggctgtggccttctggagcaggtggcttgttaaggaacgctagcagggcatggcacgtgagctccggaatagatgtcttcatcacttcttccactgtgtgttgacactgttttccttacctatttcctcagatccccagctttctcctctgctatgcattttcttcacagtgcagcttgcagtccgttgctgaaaatgattataagccctgcataatgttaagctttattgtgattacgtgtatgtttcttctttcttttaagcagacccatacctttccagggtcaaagtacagaatagaatacattgatacaaagtacagaaaaatactttgatttttatccatttcttttactctgtgtaaagacttgagaagtctaattcacaggcaaaccaatacagaattgactgcagttgaacagactagaagtatttgtgggaggagtgacatgaagcatgagttatctgattttttttgtagctgctatatattttaagccttcatttgcaattcatgtaacagttgtgtcataaattacacaataaagcagtcctgttcaaatttttttttaacgtggcttgtagaatttttaaaaaagtgatcttaggtttgttttttcatgcgggatgcagatgggtgctatcagagcctctcccacaccactatagtgtaataatgttattattactctacactgaaacgtattcagagttagatattattttagcttcagttgttctttagaggctttcaaatgtaccgatgatactgtttcttgcactgaatatataaacactccacagtgtttatattgggaagatattgggaaggaaatatatttgtaaaagatgaaggctgtatctatttttttttctttttaaagtttgttcacttaaattcttttgaggatgggatgtatttttcttgctgttcagtgctttttccttttcatctgttgttctgtggtcacagtgaccttagctacatagcagactttcccaaatgtattgattacaaataaacagttgttacttagcaagacctgaaaatatgtctgcaggtttctccttgaagcaaatgtgtgggatcattgcatttccagaaatctgcctccttcaccctccgttgacagtatatgtcatgcctcactttcttctagctgagctttaaatcattagagcttaaattgtcagatcgttcattgcctttccagggttatttagtaaagtttgttgaaaacaaaaacgccttttcttggttcttttttcagttattttgaaggtccagcatcctgattaaatgtctgacacattaatgaatgaccagcagcagctttcagctcttaaaaagacacttatattttgattttacatgctggttacctgttccattgttgtcaaatgcccactctccatcagatgtgttcctccattttcttatccacaaagtactcctcacttttcaatttgtcatgttactaaatggtgttacattaaagccctgtgttaagtgtctgcttttgactgaatttcttcatagtaaccttcagtgtgtgtgtgtgactatgttcaattagtgggttgatcttcgtataattggccactatgtgagagttcactactaggcagaaactattatggaccagtgaaataatgacttttatctcaccacgtgagtttgatgcagtcttttctgtctagcccttgcctcttcctgcccatgtgattgcggtgcagtagtttctgttgtataatagtgtggacagcagctcagaaaaggagggaatgctactgataatttgtagataatattctttaagacttaggggaaccattgaactttgaaatttttattagaaaattatttgttcagaatcagactccattattttacatatacttaaatactttaggggtatttttgaaagttagcccagttttttatgtgctattaaatttttagattacatactaaagaaaagtatgtacacagaatgtagtgctcctagttactattttttctattaagaaatagtttagttctggtgtaaaatttgtttgaatgctaaaaaaaaaaaagcaggactgcattatggcacttttgccttggtggcccactttctccatttaaaacattaggatttgtatttttctgctgcgtttgtatgaagacatatttgattgttgttttctcttgattttaaaataaaacctcatgagccctaaanaaaaaaaaa

SEQ ID NO: 575846 - DNA, 195 bp, Homo sapiens
acctgtgactaggatcttggtgtacagctcggcttttccacttatcctctaacccggaacaggcttctataatctctttgccttaaaataattctctgcatccctgtgtagacgcacatcttaagcagctctccttgtttcttccgggacacttgggacacttcttttctacacgtcgccccctcaaacggtact

SEQ ID NO: 575847 - DNA, 2608 bp, Homo sapiens
  misc_feature (57)..(57): n is a, c, g, or t
  misc_feature (70)..(70): n is a, c, g, or t
  misc_feature (87)..(87): n is a, c, g, or t
ctgtaagccttcctggtgtcctgggttatccctccttctgctgttctggaaaagaanacccagcccagtntatggagtataagaaanactgatgcacctcaaccggatgtgaaggaagaggaagaagagaaggaagaggaaaaggacaagggagatgaggaggaggaaggagaagagaaacttgaagagaaacagaaaagtgatgctgaagaagatggtggcactgtcagtcaagaggaggaagacagaaaacctaaagcagaggaggatgaaattttgaacagatcaccaagaaacagaaagccacgaagagagtgaaacaatcttaagagcttgatctgtgatttcttctccctcctcccctgcaagagtggtcctaggagaggacctggcacaccttaggttgacattcagaaaacttcaagacatcaccatcagcaggctccagttgaacactagtctgtgtaactttaaacatctagcagtaaatacttgcagttgtgatataaaggaccctgtttctgtagaaaagaaaacatttaacataatggttgtgaaatgtaacatgaagcaaactaacttttttttttttaacatctttgtttttaaaatagaatgatagaactttgccagtctttaagatcttggcttaatttaatgtattaatctgtttgtgcaaacataataccaccatttaaaaatgttagggagatgagttgcagtttttataatagattttttttaaagtttggtattgtaaaacattcacacctctgtccctcaaaattgataattacgtttaaagtgcagtcatttgtggttagaatcttgttttgtttgcttccattattgagttcctcctaaggaaattgaggagagggactgaatagaagcccaaattcatataaaagttgcgtttaagttgtattaaaaatagatatataagaaaaaattctttcacttgatgtttgttagaccagaaagtgtgtgtgttctgtagctcagttcccagacagctttttaggtagtggaggaggtggcttcatgtggcacttgggcatttatattccacttgggagggtcaggctgtggccttctggagcaggtggcttgttaaggaacgctagcagggcatggcacgtgagctccggaatagatgtcttcatcacttcttccactgtgtgttgacactgttttccttacctatttcctcagatccccagctttctcctctgctatgcattttcttcacagtgcagcttgcagtccgttgctgaaaatgattataagccctgcataatgttaagctttattgtgattacgtgtatgtttcttctttcttttaagcagacccatacctttccagggtcaaagtacagaatagaatacattgatacaaagtacagaaaaatactttgatttttatccatttcttttactctgtgtaaagacttgagaagtctaattcacaggcaaaccaatacagaattgactgcagttgaacagactagaagtatttgtgggaggagtgacatgaagcatgagttatctgattttttttgtagctgctatatattttaagccttcatttgcaattcatgtaacagttgtgtcataaattacacaataaagcagtcctgttcaaatttttttttaacgtggcttgtagaatttttaaaaaagtgatcttaggtttgttttttcatgcgggatgcagatgggtgctatcagagcctctcccacaccactatagtgtaataatgttattattactctacactgaaacgtattcagagttagatattattttagcttcagttgttctttagaggctttcaaatgtaccgatgatactgtttcttgcactgaatatataaacactccacagtgtttatattgggaagatattgggaaggaaatatatttgtaaaagatgaaggctgtatctatttttttttctttttaaagtttgttcacttaaattcttttgaggatgggatgtatttttcttgctgttcagtgctttttccttttcatctgttgttctgtggtcacagtgaccttagctacatagcagactttcccaaatgtattgattacaaataaacagttgttacttagcaagacctgaaaatatgtctgcaggtttctccttgaagcaaatgtgtgggatcattgcatttccagaaatctgcctccttcaccctccgttgacagtatatgtcatgcctcactttcttctagctgagctttaaatcattagagcttaaattgtcagatcgttcattgcctttccagggttatttagtaaagtttgttgaaaacaaaaaaagaagtgcagagaaagagcaagcttggttctgcgcacacgggccataacaaaaagttttgccaaacacacgtcccgttgaggagcacgcgggggccgccggggaggaaaagcgacgaccggcgcaaaggtggcctccagggaaatccggggcctgagactcggggtggggttctccccgaaaaaaaaggcccggggagaggcggcgtgtctgggacaaacccaaagggagtcaggggccaagggggctcaaggaaggagcagcagacctgatatgac

SEQ ID NO: 575848 - DNA, 3235 bp, Homo sapiens
  misc_feature (57)..(57): n is a, c, g, or t
  misc_feature (70)..(70): n is a, c, g, or t
  misc_feature (87)..(87): n is a, c, g, or t
  misc_feature (3226)..(3226): n is a, c, g, or t
ctgtaagccttcctggtgtcctgggttatccctccttctgctgttctggaaaagaanacccagcccagtntatggagtataagaaanactgatgcacctcaaccggatgtgaaggaagaggaagaagagaaggaagaggaaaaggacaagggagatgaggaggaggaaggagaagagaaacttgaagagaaacagaaaagtgatgctgaagaagatggtggcactgtcagtcaagaggaggaagacagaaaacctaaagcagaggaggatgaaattttgaacagatcaccaagaaacagaaagccacgaagagagtgaaacaatcttaagagcttgatctgtgatttcttctccctcctcccctgcaagagtggtcctaggagaggacctggcacaccttaggttgacattcagaaaacttcaagacatcaccatcagcaggctccagttgaacactagtctgtgtaactttaaacatctagcagtaaatacttgcagttgtgatataaaggaccctgtttctgtagaaaagaaaacatttaacataatggttgtgaaatgtaacatgaagcaaactaacttttttttttttaacatctttgtttttaaaatagaatgatagaactttgccagtctttaagatcttggcttaatttaatgtattaatctgtttgtgcaaacataataccaccatttaaaaatgttagggagatgagttgcagtttttataatagattttttttaaagtttggtattgtaaaacattcacacctctgtccctcaaaattgataattacgtttaaagtgcagtcatttgtggttagaatcttgttttgtttgcttccattattgagttcctcctaaggaaattgaggagagggactgaatagaagcccaaattcatataaaagttgcgtttaagttgtattaaaaatagatatataagaaaaaattctttcacttgatgtttgttagaccagaaagtgtgtgtgttctgtagctgtggccttctggagcaggtggcttgttaaggaacgctagcagggcatggcacgtgagctccggaatagatgtcttcatcacttcttccactgtgtgttgacactgttttccttacctatttcctcagatccccagctttctcctctgctatgcattttcttcacagtgcagcttgcagtccgttgctgaaaatgattataagccctgcataatgttaagctttattgtgattacgtgtatgtttcttctttcttttaagcagacccatacctttccagggtcaaagtacagaatagaatacattgatacaaagtacagaaaaatactttgatttttatccatttcttttactctgtgtaaagacttgagaagtctaattcacaggcaaaccaatacagaattgactgcagttgaacagactagaagtatttgtgggaggagtgacatgaagcatgagttatctgattttttttgtagctgctatatattttaagccttcatttgcaattcatgtaacagttgtgtcataaattacacaataaagcagtcctgttcaaatttttttttaacgtggcttgtagaatttttaaaaaagtgatcttaggtttgttttttcatgcgggatgcagatgggtgctatcagagcctctcccacaccactatagtgtaataatgttattattactctacactgaaacgtattcagagttagatattattttagcttcagttgttctttagaggctttcaaatgtaccgatgatactgtttcttgcactgaatatataaacactccacagtgtttatattgggaagatattgggaaggaaatatatttgtaaaagatgaaggctgtatctatttttttttctttttaaagtttgttcacttaaattcttttgaggatgggatgtatttttcttgctgttcagtgctttttccttttcatctgttgttctgtggtcacagtgaccttagctacatagcagactttcccaaatgtattgattacaaataaacagttgttacttagcaagacctgaaaatatgtctgcaggtttctccttgaagcaaatgtgtgggatcattgcatttccagaaatctgcctccttcaccctccgttgacagtatatgtcatgcctcactttcttctagctgagctttaaatcattagagcttaaattgtcagatcgttcattgcctttccagggttatttagtaaagtttgttgaaaacaaaaacgccttttcttggttcttttttcagttattttgaaggtccagcatcctgattaaatgtctgacacattaatgaatgaccagcagcagctttcagctcttaaaaagacacttatattttgattttacatgctggttacctgttccattgttgtcaaatgcccactctccatcagatgtgttcctccattttcttatccacaaagtactcctcacttttcaatttgtcatgttactaaatggtgttacattaaagccctgtgttaagtgtctgcttttgactgaatttcttcatagtaaccttcagtgtgtgtgtgtgactatgttcaattagtgggttgatcttcgtataattggccactatgtgagagttcactactaggcagaaactattatggaccagtgaaataatgacttttatctcaccacgtgagtttgatgcagtcttttctgtctagcccttgcctcttcctgcccatgtgattgcggtgcagtagtttctgttgtataatagtgtggacagcagctcagaaaaggagggaatgctactgataatttgtagataatattctttaagacttaggggaaccattgaactttgaaatttttattagaaaattatttgttcagaatcagactccattattttacatatacttaaatactttaggggtatttttgaaagttagcccagttttttatgtgctattaaatttttagattacatactaaagaaaagtatgtacacagaatgtagtgctcctagttactattttttctattaagaaatagtttagttctggtgtaaaatttgtttgaatgctaaaaaaaaaaaagcaggactgcattatggcacttttgccttggtggcccactttctccatttaaaacattaggatttgtatttttctgctgcgtttgtatgaagacatatttgattgttgttttctcttgattttaaaataaaacctcatgagccctaaanaaaaaaaaa

SEQ ID NO: 575849 - DNA, 3324 bp, Homo sapiens
  misc_feature (57)..(57): n is a, c, g, or t
  misc_feature (70)..(70): n is a, c, g, or t
  misc_feature (87)..(87): n is a, c, g, or t
  misc_feature (3315)..(3315): n is a, c, g, or t
ctgtaagccttcctggtgtcctgggttatccctccttctgctgttctggaaaagaanacccagcccagtntatggagtataagaaanactgatgcacctcaaccggatgtgaaggaagaggaagaagagaaggaagaggaaaaggacaagggagatgaggaggaggaaggagaagagaaacttgaagagaaacagaaaagtgatgctgaagaagatggtggcactgtcagtcaagaggaggaagacagaaaacctaaagcagaggaggatgaaattttgaacagatcaccaagaaacagaaagccacgaagagagtgaaacaatcttaagagcttgatctgtgatttcttctccctcctcccctgcaagagtggtcctaggagaggacctggcacaccttaggttgacattcagaaaacttcaagacatcaccatcagcaggctccagttgaacactagtctgtgtaactttaaacatctagcagtaaatacttgcagttgtgatataaaggaccctgtttctgtagaaaagaaaacatttaacataatggttgtgaaatgtaacatgaagcaaactaacttttttttttttaacatctttgtttttaaaatagaatgatagaactttgccagtctttaagatcttggcttaatttaatgtattaatctgtttgtgcaaacataataccaccatttaaaaatgttagggagatgagttgcagtttttataatagattttttttaaagtttggtattgtaaaacattcacacctctgtccctcaaaattgataattacgtttaaagtgcagtcatttgtggttagaatcttgttttgtttgcttccattattgagttcctcctaaggaaattgaggagagggactgaatagaagcccaaattcatataaaagttgcgtttaagttgtattaaaaatagatatataagaaaaaattctttcacttgatgtttgttagaccagaaagtgtgtgtgttctgtagctcagttcccagacagctttttaggtagtggaggaggtggcttcatgtggcacttgggcatttatattccacttgggagggtcaggctgtggccttctggagcaggtggcttgttaaggaacgctagcagggcatggcacgtgagctccggaatagatgtcttcatcacttcttccactgtgtgttgacactgttttccttacctatttcctcagatccccagctttctcctctgctatgcattttcttcacagtgcagcttgcagtccgttgctgaaaatgattataagccctgcataatgttaagctttattgtgattacgtgtatgtttcttctttcttttaagcagacccatacctttccagggtcaaagtacagaatagaatacattgatacaaagtacagaaaaatactttgtgattttttatccatttcttttactctgtgtaaagacttgagaagtctaattcacaggcaaaccaatacagaattgactgcagttgaacagactagaagtatttgtgggaggagtgacatgaagcatgagttatctgattttttttgtagctgctatatattttaagccttcatttgcaattcatgtaacagttgtgtcataaattacacaataaagcagtcctgttcaaatttttttttaacgtggcttgtagaatttttaaaaaagtgatcttaggtttgttttttcatgcgggatgcagatgggtgctatcagagcctctcccacaccactatagtgtaataatgttattattactctacactgaaacgtattcagagttagatattattttagcttcagttgttctttagaggctttcaaatgtaccgatgatactgtttcttgcactgaatatataaacactccacagtgtttatattgggaagatattgggaaggaaatatatttgtaaaagatgaaggctgtatctatttttttttctttttaaagtttgttcacttaaattcttttgaggatgggatgtatttttcttgctgttcagtgctttttccttttcatctgttgttctgtggtcacagtgaccttagctacatagcagactttcccaaatgtattgattacaaataaacagttgttacttagcaagacctgaaaatatgtctgcaggtttctccttgaagcaaatgtgtgggatcattgcatttccagaaatctgcctccttcaccctccgttgacagtatatgtcatgcctcactttcttctagctgagctttaaatcattagagcttaaattgtcagatcgttcattgcctttccagggttatttagtaaagtttgttgaaaacaaaaacgccttttcttggttcttttttcagttattttgaaggtccagcatcctgattaaatgtctgacacattaatgaatgaccagcagcagctttcagctcttaaaaagacacttatattttgattttacatgctggttacctgttccattgttgtcaaatgcccactctccatcagatgtgttcctccattttcttatccacaaagtactcctcacttttcaatttgtcatgttactaaatggtgttacattaaagccctgtgttaagtgtctgcttttgactgaatttcttcatagtaaccttcagtgtgtgtgtgtgactatgttcaattagtgggttgatcttcgtataattggccactatgtgagagttcactactaggcagaaactattatggaccagtgaaataatgacttttatctcaccacgtgagtttgatgcagtcttttctgtctagcccttgcctcttcctgcccatgtgattgcggtgcagtagtttctgttgtataatagtgtggacagcagctcagaaaaggagggaatgctactgataatttgtagataatattctttaagacttaggggaaccattgaactttgaaatttttattagaaaattatttgttcagaatcagactccattattttacatatacttaaatactttaggggtatttttgaaagttagcccagttttttatgtgctattaaatttttagattacatactaaagaaaagtatgtacacagaatgtagtgctcctagttactattttttctattaagaaatagtttagttctggtgtaaaatttgtttgaatgctaaaaaaaaaaaagcaggactgcattatggcacttttgccttggtggcccactttctccatttaaaacattaggatttgtatttttctgctgcgtttgtatgaagacatatttgattgttgttttctcttgattttaaaataaaacctcatgagccctaaanaaaaaaaaa

SEQ ID NO: 575850 - DNA, 317 bp, Homo sapiens
ctcaggtccaggcaaagtctacgcaatatatggtgtgtcccgataacctaggatgcattgatatcatagctcagaccatactatgtatcccaatggtctttttttcccgagtagtacgtacaatatgggagattattccgaaagcctggtaggataagaatataaacttcagggtgaccgaaaaatcagaataggtgttggtatcgaatgggggtctcctcctccggcggggtcgaagaaggtggggttgaggctgcgggtctgttagtagtatagtgatgccagcagctaggactgggagagataggagaagtagg

SEQ ID NO: 575851 - DNA, 346 bp, Homo sapiens
agccgagctatcataatatcgtatggttttaatacccataggatgtataatgatgtcgcttctctccttcctgatattcaagcacgacttactgcgttttacatggtataaatttctggcatctggcaggtgctaaataaatgtttcctggatcgaaatctacagtctcaaggagtcaaggctacaattcttaagttgcttcagatgactggttctatctatttatcaatacatccatcgatccactcatccactcatccatgcatcctcctacccttcctcttccccgtcaaacattcatccatccaattggtggcttggggaaagggacaatagtttatgctgt

SEQ ID NO: 575852 - DNA, 3267 bp, Homo sapiens
  misc_feature (57)..(57): n is a, c, g, or t
  misc_feature (70)..(70): n is a, c, g, or t
  misc_feature (87)..(87): n is a, c, g, or t
  misc_feature (3258)..(3258): n is a, c, g, or t
ctgtaagccttcctggtgtcctgggttatccctccttctgctgttctggaaaagaanacccagcccagtntatggagtataagaaanactgatgcacctcaaccggatgtgaaggaagaggaagaagagaaggaagaggaaaaggacaagggagatgaggaggaggaaggagaagagaaacttgaagagaaacagaaaagtgatgctgaagaagatggtggcactgtcagtcaagaggaggaagacagaaaacctaaagcagaggaggatgaaattttgaacagatcaccaagaaacagaaagccacgaagagagtgaaacaatcttaagagcttgatctgtgatttcttctccctcctcccctgcaagagtggtcctaggagaggacctggcacaccttaggttgacattcagaaaacttcaagacatcaccatcagcaggctccagttgaacactagtctgtgtaactttaaacatctagcagtaaatacttgcagttgtgatataaaggaccctgtttctgtagaaaagaaaacatttaacataatggttgtgaaatgtaacatgaagcaaactaacttttttttttttaacatctttgtttttaaaatagaatgatagaactttgccagtctttaagatcttggcttaatttaatgtattaatctgtttgtgcaaacataataccaccatttaaaaatgttagggagatgagttgcagtttttataatagattttttttaaagtttggtattgtaaaacattcacacctctgtccctcaaaattgataattacgtttaaagtgcagtcatttgtggttagaatcttgttttgtttgcttccattattgagttcctcctaaggaaattgaggagagggactgaatagaagcccaaattcatataaaagttgcgtttaagttgtattaaaaatagatatataagaaaaaattctttcacttgatgtttgttagaccagaaagtgtgtgtgttctgtagctcagttcccagacagctttttaggtagtggaggaggtggcttcatgtggcacttgggcatttatattccacttgggagggtcaggctgtggccttctggagcaggtggcttgttaaggaacgctagcagggcatggcacgtgagctccggaatagatgtcttcatcacttcttccactgtgtgttgacactgttttccttacctatttcctcagatccccagctttctcctctgctatgcattttcttcacagtgcagcttgcagtccgttgctgaaaatgattataagccctgcataatgttaagctttattgtgattacgtgtatgtttcttctttcttttaagcagacccatacctttccagggtcaaagtacagaatagaatacattgatacaaagtacagactaattcacaggcaaaccaatacagaattgactgcagttgaacagactagaagtatttgtgggaggagtgacatgaagcatgagttatctgattttttttgtagctgctatatattttaagccttcatttgcaattcatgtaacagttgtgtcataaattacacaataaagcagtcctgttcaaatttttttttaacgtggcttgtagaatttttaaaaaagtgatcttaggtttgttttttcatgcgggatgcagatgggtgctatcagagcctctcccacaccactatagtgtaataatgttattattactctacactgaaacgtattcagagttagatattattttagcttcagttgttctttagaggctttcaaatgtaccgatgatactgtttcttgcactgaatatataaacactccacagtgtttatattgggaagatattgggaaggaaatatatttgtaaaagatgaaggctgtatctatttttttttctttttaaagtttgttcacttaaattcttttgaggatgggatgtatttttcttgctgttcagtgctttttccttttcatctgttgttctgtggtcacagtgaccttagctacatagcagactttcccaaatgtattgattacaaataaacagttgttacttagcaagacctgaaaatatgtctgcaggtttctccttgaagcaaatgtgtgggatcattgcatttccagaaatctgcctccttcaccctccgttgacagtatatgtcatgcctcactttcttctagctgagctttaaatcattagagcttaaattgtcagatcgttcattgcctttccagggttatttagtaaagtttgttgaaaacaaaaacgccttttcttggttcttttttcagttattttgaaggtccagcatcctgattaaatgtctgacacattaatgaatgaccagcagcagctttcagctcttaaaaagacacttatattttgattttacatgctggttacctgttccattgttgtcaaatgcccactctccatcagatgtgttcctccattttcttatccacaaagtactcctcacttttcaatttgtcatgttactaaatggtgttacattaaagccctgtgttaagtgtctgcttttgactgaatttcttcatagtaaccttcagtgtgtgtgtgtgactatgttcaattagtgggttgatcttcgtataattggccactatgtgagagttcactactaggcagaaactattatggaccagtgaaataatgacttttatctcaccacgtgagtttgatgcagtcttttctgtctagcccttgcctcttcctgcccatgtgattgcggtgcagtagtttctgttgtataatagtgtggacagcagctcagaaaaggagggaatgctactgataatttgtagataatattctttaagacttaggggaaccattgaactttgaaatttttattagaaaattatttgttcagaatcagactccattattttacatatacttaaatactttaggggtatttttgaaagttagcccagttttttatgtgctattaaatttttagattacatactaaagaaaagtatgtacacagaatgtagtgctcctagttactattttttctattaagaaatagtttagttctggtgtaaaatttgtttgaatgctaaaaaaaaaaaagcaggactgcattatggcacttttgccttggtggcccactttctccatttaaaacattaggatttgtatttttctgctgcgtttgtatgaagacatatttgattgttgttttctcttgattttaaaataaaacctcatgagccctaaanaaaaaaaaa

SEQ ID NO: 575853 - DNA, 3116 bp, Homo sapiens
  misc_feature (57)..(57): n is a, c, g, or t
  misc_feature (70)..(70): n is a, c, g, or t
  misc_feature (87)..(87): n is a, c, g, or t
  misc_feature (3107)..(3107): n is a, c, g, or t
ctgtaagccttcctggtgtcctgggttatccctccttctgctgttctggaaaagaanacccagcccagtntatggagtataagaaanactgatgcacctcaaccggatgtgaaggaagaggaagaagagaaggaagaggaaaaggacaagggagatgaggaggaggaaggagaagagaaacttgaagagaaacagaaaagtgatgctgaagaagatggtggcactgtcagtcaagaggaggaagacagaaaacctaaagcagaggaggatgaaattttgaacagatcaccaagaaacagaaagccacgaagagagtgaaacaatcttaagagcttgatctgtgatttcttctccctcctcccctgcaagagtggtcctaggagaggacctggcacaccttaggttgacattcagaaaacttcaagacatcaccatcagcaggctccagttgaacactagtctgtgtaactttaaacatctagcagtaaatacttgcagttgtgatataaaggaccctgtttctgtagaaaagaaaacatttaacataatggttgtgaaatgtaacatgaagcaaactaacttttttttttttaacatctttgtttttaaaatagaatgatagaactttgccagtctttaagatcttggcttaatttaatgtattaatctgtttgtgcaaacataataccaccatttaaaaatgttagggagatgagttgcagtttttataatagattttttttaaagtttggtattgtaaaacattcacacctctgtccctcaaaattgataattacgtttaaagtgcagtcatttgtggttagaatcttgttttgtttgcttccattattgagttcctcctaaggaaattgaggagagggactgaatagaagcccaaattcatataaaagttgcgtttaagttgtattaaaaatagatatataagaaaaaattctttcatcacttcttccactgtgtgttgacactgttttccttacctatttcctcagatccccagctttctcctctgctatgcattttcttcacagtgcagcttgcagtccgttgctgaaaatgattataagccctgcataatgttaagctttattgtgattacgtgtatgtttcttctttcttttaagcagacccatacctttccagggtcaaagtacagaatagaatacattgatacaaagtacagaaaaatactttgatttttatccatttcttttactctgtgtaaagacttgagaagtctaattcacaggcaaaccaatacagaattgactgcagttgaacagactagaagtatttgtgggaggagtgacatgaagcatgagttatctgattttttttgtagctgctatatattttaagccttcatttgcaattcatgtaacagttgtgtcataaattacacaataaagcagtcctgttcaaatttttttttaacgtggcttgtagaatttttaaaaaagtgatcttaggtttgttttttcatgcgggatgcagatgggtgctatcagagcctctcccacaccactatagtgtaataatgttattattactctacactgaaacgtattcagagttagatattattttagcttcagttgttctttagaggctttcaaatgtaccgatgatactgtttcttgcactgaatatataaacactccacagtgtttatattgggaagatattgggaaggaaatatatttgtaaaagatgaaggctgtatctatttttttttctttttaaagtttgttcacttaaattcttttgaggatgggatgtatttttcttgctgttcagtgctttttccttttcatctgttgttctgtggtcacagtgaccttagctacatagcagactttcccaaatgtattgattacaaataaacagttgttacttagcaagacctgaaaatatgtctgcaggtttctccttgaagcaaatgtgtgggatcattgcatttccagaaatctgcctccttcaccctccgttgacagtatatgtcatgcctcactttcttctagctgagctttaaatcattagagcttaaattgtcagatcgttcattgcctttccagggttatttagtaaagtttgttgaaaacaaaaacgccttttcttggttcttttttcagttattttgaaggtccagcatcctgattaaatgtctgacacattaatgaatgaccagcagcagctttcagctcttaaaaagacacttatattttgattttacatgctggttacctgttccattgttgtcaaatgcccactctccatcagatgtgttcctccattttcttatccacaaagtactcctcacttttcaatttgtcatgttactaaatggtgttacattaaagccctgtgttaagtgtctgcttttgactgaatttcttcatagtaaccttcagtgtgtgtgtgtgactatgttcaattagtgggttgatcttcgtataattggccactatgtgagagttcactactaggcagaaactattatggaccagtgaaataatgacttttatctcaccacgtgagtttgatgcagtcttttctgtctagcccttgcctcttcctgcccatgtgattgcggtgcagtagtttctgttgtataatagtgtggacagcagctcagaaaaggagggaatgctactgataatttgtagataatattctttaagacttaggggaaccattgaactttgaaatttttattagaaaattatttgttcagaatcagactccattattttacatatacttaaatactttaggggtatttttgaaagttagcccagttttttatgtgctattaaatttttagattacatactaaagaaaagtatgtacacagaatgtagtgctcctagttactattttttctattaagaaatagtttagttctggtgtaaaatttgtttgaatgctaaaaaaaaaaaagcaggactgcattatggcacttttgccttggtggcccactttctccatttaaaacattaggatttgtatttttctgctgcgtttgtatgaagacatatttgattgttgttttctcttgattttaaaataaaacctcatgagccctaaanaaaaaaaaa

SEQ ID NO: 575854 - DNA, 170 bp, Homo sapiens
  misc_feature (44)..(46): n is a, c, g, or t
  misc_feature (158)..(158): n is a, c, g, or t
  misc_feature (160)..(161): n is a, c, g, or t
ggccgatgctgaacagagagcttgggatacagagggctgtcacnnngagctgtttaacacttaagatgttggtggatggcgaaagctaaaagagggcgagctgtaacacatgacctctggggcgatccccgagtcatgagtaccccttctagacacancnngggggccac

SEQ ID NO: 575855 - DNA, 3176 bp, Homo sapiens
  misc_feature (57)..(57): n is a, c, g, or t
  misc_feature (70)..(70): n is a, c, g, or t
  misc_feature (87)..(87): n is a, c, g, or t
  misc_feature (3167)..(3167): n is a, c, g, or t
ctgtaagccttcctggtgtcctgggttatccctccttctgctgttctggaaaagaanacccagcccagtntatggagtataagaaanactgatgcacctcaaccggatgtgaaggaagaggaagaagagaaggaagaggaaaaggacaagggagatgaggaggaggaaggagaagagaaacttgaagagaaacagaaaagtgatgctgaagaagatggtggcactgtcagtcaagaggaggaagacagaaaacctaaagcagaggaggatgaaattttgaacagatcaccaagaaacagaaagccacgaagagagtgaaacaatcttaagagcttgatctgtgatttcttctccctcctcccctgcaagagtggtcctaggagaggacctggcacaccttaggttgacattcagaaaacttcaagacatcaccatcagcaggctccagttgaacactagtctgtgtaactttaaacatctagcagtaaatacttgcagttgtgatataaaggaccctgtttctgtagaaaagaaaacatttaacataatggttgtgaaatgtaacatgaagcaaactaacttttttttttttaacatctttgtttttaaaatagaatgatagaactttgccagtctttaagatcttggcttaatttaatgtattaatctgtttgtgcaaacataataccaccatttaaaaatgttagggagatgagttgcagtttttataatagattttttttaaagtttggtattgtaaaacattcacacctctgtccctcaaaattgataattacgtttaaagtgcagtcatttgtggttagaatcttgttttgtttgcttccattattgagttcctcctaaggaaattgaggagagggactgaatagaagcccaaattcatataaaagttgcgtttaagttgtattaaaaatagatatataagaaaaaattctttcacttgatgtttgttagaccagaaagtgtgtgtgttctgtagctcagttcccagacagctttttaggtagtggaggaggtggcttcatgtggcacttgggcatttatattccacttgggagggtcaggctgtggccttctggagcaggtggcttgttaaggaacgctagcagggcatggcacgtgagctccggaatagatgtcttcatcacttcttccactgtgtgttgacactgttttccttacctatttcctcagatccccagctttctcctctgctatgcattttcttcacagtgcagcttgcagtccgttgctgaaaatgattataagccctgcataatgttaagctttattgtgattacgtgtatgtttcttctttcttttaagcagacccatacctttccagggtcaaagtacagaatagaatacattgatacaaagtacagaaaaatactttgatttttatccatttcttttactctgtgtaaagacttgagaagtctaattcacaggcaaaccaatacagaattgactgttcaaatttttttttaacgtggcttgtagaatttttaaaaaagtgatcttaggtttgttttttcatgcgggatgcagatgggtgctatcagagcctctcccacaccactatagtgtaataatgttattattactctacactgaaacgtattcagagttagatattattttagcttcagttgttctttagaggctttcaaatgtaccgatgatactgtttcttgcactgaatatataaacactccacagtgtttatattgggaagatattgggaaggaaatatatttgtaaaagatgaaggctgtatctatttttttttctttttaaagtttgttcacttaaattcttttgaggatgggatgtatttttcttgctgttcagtgctttttccttttcatctgttgttctgtggtcacagtgaccttagctacatagcagactttcccaaatgtattgattacaaataaacagttgttacttagcaagacctgaaaatatgtctgcaggtttctccttgaagcaaatgtgtgggatcattgcatttccagaaatctgcctccttcaccctccgttgacagtatatgtcatgcctcactttcttctagctgagctttaaatcattagagcttaaattgtcagatcgttcattgcctttccagggttatttagtaaagtttgttgaaaacaaaaacgccttttcttggttcttttttcagttattttgaaggtccagcatcctgattaaatgtctgacacattaatgaatgaccagcagcagctttcagctcttaaaaagacacttatattttgattttacatgctggttacctgttccattgttgtcaaatgcccactctccatcagatgtgttcctccattttcttatccacaaagtactcctcacttttcaatttgtcatgttactaaatggtgttacattaaagccctgtgttaagtgtctgcttttgactgaatttcttcatagtaaccttcagtgtgtgtgtgtgactatgttcaattagtgggttgatcttcgtataattggccactatgtgagagttcactactaggcagaaactattatggaccagtgaaataatgacttttatctcaccacgtgagtttgatgcagtcttttctgtctagcccttgcctcttcctgcccatgtgattgcggtgcagtagtttctgttgtataatagtgtggacagcagctcagaaaaggagggaatgctactgataatttgtagataatattctttaagacttaggggaaccattgaactttgaaatttttattagaaaattatttgttcagaatcagactccattattttacatatacttaaatactttaggggtatttttgaaagttagcccagttttttatgtgctattaaatttttagattacatactaaagaaaagtatgtacacagaatgtagtgctcctagttactattttttctattaagaaatagtttagttctggtgtaaaatttgtttgaatgctaaaaaaaaaaaagcaggactgcattatggcacttttgccttggtggcccactttctccatttaaaacattaggatttgtatttttctgctgcgtttgtatgaagacatatttgattgttgttttctcttgattttaaaataaaacctcatgagccctaaanaaaaaaaaa

SEQ ID NO: 575856 - DNA, 304 bp, Homo sapiens
  misc_feature (33)..(33): n is a, c, g, or t
  misc_feature (137)..(137): n is a, c, g, or t
atgagtcattgctggaactccagtcataaaaanagacccagactaggcgtgggtgtcacgcctgtcatcctagcactttgggagactgaggctagaggatctcttgaggccaggagttccagaccaacctggtcaanaaagcacgaccccgtctctacaaaaaaattaaaaattagccaggcatggtgctgcatgcctatcatctcagctacttgggaggctgacatgggaggatcccttgagcccaggaggttgctgcagtgagctgtgattgcaccactccactccagcctggctgacagag

SEQ ID NO: 575857 - DNA, 2535 bp, Homo sapiens
  misc_feature (57)..(57): n is a, c, g, or t
  misc_feature (70)..(70): n is a, c, g, or t
  misc_feature (87)..(87): n is a, c, g, or t
  misc_feature (2526)..(2526): n is a, c, g, or t
ctgtaagccttcctggtgtcctgggttatccctccttctgctgttctggaaaagaanacccagcccagtntatggagtataagaaanactgatgcacctcaaccggatgtgaaggaagaggaagaagagaaggaagaggaaaaggacaagggagatgaggaggaggaaggagaagagaaacttgaagagaaacagaaaagtgatgctgaagaagatggtggcactgtcagtcaagaggaggaagacagaaaacctaaagcgtggcacttgggcatttatattccacttgggagggtcaggctgtggccttctggagcaggtggcttgttaaggaacgctagcagggcatggcacgtgagctccggaatagatgtcttcatcacttcttccactgtgtgttgacactgttttccttacctatttcctcagatccccagctttctcctctgctatgcattttcttcacagtgcagcttgcagtccgttgctgaaaatgattataagccctgcataatgttaagctttattgtgattacgtgtatgtttcttctttcttttaagcagacccatacctttccagggtcaaagtacagaatagaatacattgatacaaagtacagaaaaatactttgatttttatccatttcttttactctgtgtaaagacttgagaagtctaattcacaggcaaaccaatacagaattgactgcagttgaacagactagaagtatttgtgggaggagtgacatgaagcatgagttatctgattttttttgtagctgctatatattttaagccttcatttgcaattcatgtaacagttgtgtcataaattacacaataaagcagtcctgttcaaatttttttttaacgtggcttgtagaatttttaaaaaagtgatcttaggtttgttttttcatgcgggatgcagatgggtgctatcagagcctctcccacaccactatagtgtaataatgttattattactctacactgaaacgtattcagagttagatattattttagcttcagttgttctttagaggctttcaaatgtaccgatgatactgtttcttgcactgaatatataaacactccacagtgtttatattgggaagatattgggaaggaaatatatttgtaaaagatgaaggctgtatctatttttttttctttttaaagtttgttcacttaaattcttttgaggatgggatgtatttttcttgctgttcagtgctttttccttttcatctgttgttctgtggtcacagtgaccttagctacatagcagactttcccaaatgtattgattacaaataaacagttgttacttagcaagacctgaaaatatgtctgcaggtttctccttgaagcaaatgtgtgggatcattgcatttccagaaatctgcctccttcaccctccgttgacagtatatgtcatgcctcactttcttctagctgagctttaaatcattagagcttaaattgtcagatcgttcattgcctttccagggttatttagtaaagtttgttgaaaacaaaaacgccttttcttggttcttttttcagttattttgaaggtccagcatcctgattaaatgtctgacacattaatgaatgaccagcagcagctttcagctcttaaaaagacacttatattttgattttacatgctggttacctgttccattgttgtcaaatgcccactctccatcagatgtgttcctccattttcttatccacaaagtactcctcacttttcaatttgtcatgttactaaatggtgttacattaaagccctgtgttaagtgtctgcttttgactgaatttcttcatagtaaccttcagtgtgtgtgtgtgactatgttcaattagtgggttgatcttcgtataattggccactatgtgagagttcactactaggcagaaactattatggaccagtgaaataatgacttttatctcaccacgtgagtttgatgcagtcttttctgtctagcccttgcctcttcctgcccatgtgattgcggtgcagtagtttctgttgtataatagtgtggacagcagctcagaaaaggagggaatgctactgataatttgtagataatattctttaagacttaggggaaccattgaactttgaaatttttattagaaaattatttgttcagaatcagactccattattttacatatacttaaatactttaggggtatttttgaaagttagcccagttttttatgtgctattaaatttttagattacatactaaagaaaagtatgtacacagaatgtagtgctcctagttactattttttctattaagaaatagtttagttctggtgtaaaatttgtttgaatgctaaaaaaaaaaaagcaggactgcattatggcacttttgccttggtggcccactttctccatttaaaacattaggatttgtatttttctgctgcgtttgtatgaagacatatttgattgttgttttctcttgattttaaaataaaacctcatgagccctaaanaaaaaaaaa

SEQ ID NO: 575858 - DNA, 2276 bp, Homo sapiens
  misc_feature (57)..(57): n is a, c, g, or t
  misc_feature (70)..(70): n is a, c, g, or t
  misc_feature (87)..(87): n is a, c, g, or t
ctgtaagccttcctggtgtcctgggttatccctccttctgctgttctggaaaagaanacccagcccagtntatggagtataagaaanactgatgcacctcaaccggatgtgaaggaagaggaagaagagaaggaagaggaaaaggacaagggagatgaggaggaggaaggagaagagaaacttgaagagaaacagaaaagtgatgctgaagaagatggtggcactgtcagtcaagaggaggaagacagaaaacctaaagcagaggaggatgaaattttgaacagatcaccaagaaacagaaagccacgaagagagtgaaacaatcttaagagcttgatctgtgatttcttctccctcctcccctgcaagagtggtcctaggagaggacctggcacaccttaggttgacattcagaaaacttcaagacatcaccatcagcaggctccagttgaacactagtctgtgtaactttaaacatctagcagtaaatacttgcagttgtgatataaaggaccctgtttctgtagaaaagaaaacatttaacataatggttgtgaaatgtaacatgaagcaaactaacttttttttttttaacatctttgtttttaaaatagaatgatagaactttgccagtctttaagatcttggcttaatttaatgtattaatctgtttgtgcaaacataataccaccatttaaaaatgttagggagatgagttgcagtttttataatagattttttttaaagtttggtattgtaaaacattcacacctctgtccctcaaaattgataattacgtttaaagtgcagtcatttgtggttagaatcttgttttgtttgcttccattattgagttcctcctaaggaaattgaggagagggactgaatagaagcccaaattcatataaaagttgcgtttaagttgtattaaaaatagatatataagaaaaaattctttcacttgatgtttgttagaccagaaagtgtgtgtgttctgtagctcagttcccagacagctttttaggtagtggaggaggtggcttcatgtggcacttgggcatttatattccacttgggagggtcaggctgtggccttctggagcaggtggcttgttaaggaacgctagcagggcatggcacgtgagctccggaatagatgtcttcatcacttcttccactgtgtgttgacactgttttccttacctatttcctcagatccccagctttctcctctgctatgcattttcttcacagtgcagcttgcagtccgttgctgaaaatgattataagccctgcataatgttaagctttattgtgattacgtgtatgtttcttctttcttttaagcagacccatacctttccagggtcaaagtacagaatagaatacattgatacaaagtacagaaaaatactttgatttttatccatttcttttactctgtgtaaagacttgagaagtctaattcacaggcaaaccaatacagaattgactgcagttgaacagactagaagtatttgtgggaggagtgacatgaagcatgagttatctgattttttttgtagctgctatatattttaagccttcatttgcaattcatgtaacagttgtgtcataaattacacaataaagcagtcctgttcaaatttttttttaacgtggcttgtagaatttttaaaaaagtgatcttaggtttgttttttcatgcgggatgcagatgggtgctatcagagcctctcccacaccactatagtgtaataatgttattattactctacactgaaacgtattcagagttagatattattttagcttcagttgttctttagaggctttcaaatgtaccgatgatactgtttcttgcactgaatatataaacactccacagtgtttatattgggaagatattgggaaggaaatatatttgtaaaagatgaaggctgtatctatttttttttctttttaaagtttgttcacttaaattcttttgaggatgggatgtatttttcttgctgttcagtgctttttccttttcatctgttgttctgtggtcacagtgaccttagctacatagcagactttcccaaatgtattgattacaaataaacagttgttacttagcaagacctgcagaaatctgcctccttcaccctccgttgacagtatatgtcatgcctcactttcttctagctgagctttaaatcattagagcttaaattgtcagatcgttcattgcctttccagggttatttagtaaagtttgttgaaaacaaaaa

SEQ ID NO: 575859 - DNA, 2201 bp, Homo sapiens
  misc_feature (57)..(57): n is a, c, g, or t
  misc_feature (70)..(70): n is a, c, g, or t
  misc_feature (87)..(87): n is a, c, g, or t
ctgtaagccttcctggtgtcctgggttatccctccttctgctgttctggaaaagaanacccagcccagtntatggagtataagaaanactgatgcacctcaaccggatgtgaaggaagaggaagaagagaaggaagaggaaaaggacaagggagatgaggaggaggaaggagaagagaaacttgaagagaaacagaaaagtgatgctgaagaagatggtggcactgtcagtcaagaggaggaagacagaaaacctaaagcagaggaggatgaaattttgaacagatcaccaagaaacagaaagccacgaagagagtgaaacaatcttaagagcttgatctgtgatttcttctccctcctcccctgcaagagtggtcctaggagaggacctggcacaccttaggttgacattcagaaaacttcaagacatcaccatcagcaggctccagttgaacactagtctgtgtaactttaaacatctagcagtaaatacttgcagttgtgatataaaggaccctgtttctgtagaaaagaaaacatttaacataatggttgtgaaatgtaacatgaagcaaactaacttttttttttttaacatctttgtttttaaaatagaatgatagaactttgccagtctttaagatcttggcttaatttaatgtattaatctgtttgtgcaaacataataccaccatttaaaaatgttagggagatgagttgcagtttttataatagattttttttaaagtttggtattgtaaaacattcacacctctgtccctcaaaattgataattacgtttaaagtgcagtcatttgtggttagaatcttgttttgtttgcttccattattgagttcctcctaaggaaattgaggagagggactgaatagaagcccaaattcatataaaagttgcgtttaagttgtattaaaaatagatatataagaaaaaattctttcacttgatgtttgttagaccagaaagtgtgtgtgttctgtagctcagttcccagacagctttttaggtagtggaggaggtggcttcatgtggcacttgggcatttatattccacttgggagggtcaggctgtggccttctggagcaggtggcttgttaaggaacgctagcagggcatggcacgtgagctccggaatagatgtcttcatcacttcttccactgtgtgttgacactgttttccttacctatttcctcagatccccagctttctcctctgctatgcattttcttcacagtgcagcttgcagtccgttgctgaaaatgattataagccctgcataatgttaagctttattgtgattacgtgtatgtttcttctttcttttaagcagacccatacctttccagggtcaaagtacagaatagaatacattgatacaaagtacagaaaaatactttgatttttatccatttcttttactctgtgtaaagacttgagaagtctaattcacaggcaaaccaatacagaattgactgcagttgaacagactagaagtatttgtgggaggagtgacatgaagcatgagttatctgattttttttgtagctgctatatattttaagccttcatttgcaattcatgtaacagttgtgtcataaattacacaataaagcagtcctgttcaaatttttttttaacgtggcttgtagaatttttaaaaaagtgatcttaggtttgttttttcatgcgggatgcagatgggtgctatcagagcctctcccacaccactatagtgtaataatgttattattactctacactgaaacgtattcagagttagatattattttagcttcagttgttctttagaggctttcaaatgtaccgatgatactgtttcttgcactgaatatataaacactccacagtgtttatattgggaagatattgggaaggaaatatatttgtaaaagatgaaggctgtatctatttttttttctttttaaagtttgttcacttaaattcttttgaggatgggatgtatttttcttgctgttcagtgctttttccttttcatctgttgttctgtggtcacagtgaccttagctacatagcagactttcccaaatgtattgattacaaataaacagataaagccctggcctcgttggcctcagcggtggagctctgcggctagacaacaaactctcaaataatatataatgaaaaatatgattctat

SEQ ID NO: 575860 - DNA, 125 bp, Homo sapiens
gaaaaagcttaaggaatctaaaatgcacaaacatactgaattctgataagtttagttagaagaaaaacaaaacaagggatctggcaagtaaatacgtaagaagatattaatctaattattatgga

SEQ ID NO: 575861 - DNA, 241 bp, Homo sapiens
caacgcttctcaacgaatctgtgcccttgttagtactggaaacttgataatgaagatctccaccctggatcagtaacagaggaaagacctaggtcagtcttattatattttaaattatttataatatgctttcatttatgattgatgactattttacaagtttgtctgttactcataaactatttaataccagtaattatcattgctctgccaaatttgtctccattgtctgctttctccc

SEQ ID NO: 575862 - DNA, 137 bp, Homo sapiens
gctgtttagaggatccctcatcttgctgtggtctccaagcctatcttatgtcccatctatactgcaggatgggctgctaacgctgaactgctacggttccctctaggcacacagtattcactaacattcaaaggtag

SEQ ID NO: 575863 - DNA, 202 bp, Homo sapiens
  misc_feature (64)..(64): n is a, c, g, or t
ggggggccccccccccctttttttttccccctttaaaaacccgggggcggtccccccccccggntttttacttgggggggggggggggtaacatttttccccgggaaaccctttttccctttgggcctttttgggggccccattaaaacaagtttttccaaaaaaacgggggggggccgggccgggtttcccggggttttca

SEQ ID NO: 575864 - DNA, 412 bp, Homo sapiens
  misc_feature (6)..(6): n is a, c, g, or t
cccccnaaatctgtttccccctcaaactgcaataaaggaggcgaataatagtttggaaataattgtcccccagcccaaatctccatgttgaaactgtaatcccccagtgctggaggtggggcccggtacgaggtgtttggatcatggggacgggtatttccatggcttggtgcctgttttccttgatggtgaattattgcaagatacggtcatttaaaattgtgtggcacctccccctgcccccttcttgctcctgctttcaccatgtgacatgtctgatcccccttcaccttttgccatggtcataagcttcctgaggcctccctggaagctgagcagatgccagcaccatgcttcctgtacatcctgcagaaccataagccaattaaacctttttaataataaaaaaaaa

SEQ ID NO: 575865 - DNA, 303 bp, Homo sapiens
tctagaggactcccagctgcagtttcgtgagcgacaggtacagagggacttcagccgtcagggcagtgtcctgggacctgtgccctgaagatctcacatgcaaggaacgctacttgtgaccatcgtgtgatgtgtgaatggggttctaagttgtggaaggtcgtgactgagcagagcctccagttttaactacccactttgtgcattgcccattgcccatccttcaatctcatactgattgtcacccatacccagcatgccctgtgtccacgcagcttcgtcatctctgcctgggggcgggcc

SEQ ID NO: 575866 - DNA, 977 bp, Homo sapiens
  misc_feature (80)..(80): n is a, c, g, or t
  misc_feature (212)..(212): n is a, c, g, or t
  misc_feature (268)..(268): n is a, c, g, or t
  misc_feature (277)..(277): n is a, c, g, or t
  misc_feature (292)..(292): n is a, c, g, or t
  misc_feature (342)..(342): n is a, c, g, or t
  misc_feature (377)..(377): n is a, c, g, or t
  misc_feature (389)..(389): n is a, c, g, or t
  misc_feature (391)..(391): n is a, c, g, or t
  misc_feature (474)..(474): n is a, c, g, or t
  misc_feature (498)..(498): n is a, c, g, or t
  misc_feature (522)..(522): n is a, c, g, or t
  misc_feature (557)..(557): n is a, c, g, or t
  misc_feature (588)..(588): n is a, c, g, or t
  misc_feature (597)..(597): n is a, c, g, or t
  misc_feature (600)..(600): n is a, c, g, or t
  misc_feature (638)..(638): n is a, c, g, or t
  misc_feature (697)..(697): n is a, c, g, or t
  misc_feature (700)..(700): n is a, c, g, or t
  misc_feature (703)..(703): n is a, c, g, or t
  misc_feature (762)..(762): n is a, c, g, or t
  misc_feature (792)..(792): n is a, c, g, or t
  misc_feature (795)..(795): n is a, c, g, or t
  misc_feature (801)..(801): n is a, c, g, or t
  misc_feature (813)..(813): n is a, c, g, or t
  misc_feature (824)..(824): n is a, c, g, or t
  misc_feature (828)..(829): n is a, c, g, or t
  misc_feature (839)..(839): n is a, c, g, or t
  misc_feature (842)..(842): n is a, c, g, or t
  misc_feature (848)..(848): n is a, c, g, or t
  misc_feature (851)..(851): n is a, c, g, or t
  misc_feature (853)..(854): n is a, c, g, or t
  misc_feature (857)..(857): n is a, c, g, or t
  misc_feature (860)..(860): n is a, c, g, or t
  misc_feature (862)..(862): n is a, c, g, or t
  misc_feature (869)..(869): n is a, c, g, or t
  misc_feature (947)..(947): n is a, c, g, or t
aggcaggggatcgggggaggtcagagcaagtagaatgggccatcattagaatgagcagaactccttgggaatcttgagtnatcagctggcgatggggagttaatgcttggtgtggatgacaggtgtggggatgcggatatcctggcctctctccagacgccgttcacaatcaatcaaatagtttactccatcgatgaccagttgcaccagcnccacctctgatttgcctagtcggtccaaattagaaatatcaaagacaccgcctgtngcagcagtntccactcctccagtnccacgtttttggagtcttaggttctccaggatctttgggaagcggctatntttgcttagcaggggcagtttgatgtgcactcctncccgaagtccantncccaggttagatggacaggtcaagatgtatcccaaacgctcatcccacatgaactcccagccacgttcttggataagtctctncacctctttgaggcctcggcagantctttcaaacactctcttcatgtnaccacccttctccatggagatcacccgtgtatgancctcctcattcacccagatcaggaagctctnctcattgtngtnccaaattccacgagcatctggccagtgtcgagccattnctgctgcagttagcaacggggacacaggcttatcaaacagaaagtggtcatcaataagntgntgntgttgagggtgtgtgatgtgagttatggtatattaaggtggagggaggtgagggttgangggagtgaatagatggaggagaagagtttngangtgtgntgtgtgttgtgnatttgaatgtntatnnaaaaaaattngtnaaattnttnannganttntnagtgtanatgagaatagataggtgtgatgaaaatatggagaagagattttagtgggatgtaaatgggtggtgttgttgattgtgnggggtgatatgattgtttgtgtgtttgata

SEQ ID NO: 575867 - DNA, 153 bp, Homo sapiens
tagaggatcgctagaagacgcagaagggcaaatctttgacttattggctgctcagaggattactggctcgagatgtatcctgcccgtgatgctttcccccagaggcccgccagtgcagtcggtggtacctgagatggaggagtcgggagcaca

SEQ ID NO: 575868 - DNA, 195 bp, Homo sapiens
tacctctctcccagaaaaggattagcaatgttagattaaaatgcactacacagaggccaggtgcagtggctcacactgtaattccagaacttttggagtcaggcagatcgactaaggtcaggagttcgagaccagcctggccaacatggtaaaaccctgtctctacctgtagattagctgcacctgtagtctcag

SEQ ID NO: 575869 - DNA, 109 bp, Homo sapiens
tccggagtcgcggacctagcatatcaccagttaccttccctctacacttatcatcttcacaattctaatgctactgactatgctagaaatcgctggtcgccttaatcca

SEQ ID NO: 575870 - DNA, 941 bp, Homo sapiens
  misc_feature (80)..(80): n is a, c, g, or t
  misc_feature (212)..(212): n is a, c, g, or t
  misc_feature (268)..(268): n is a, c, g, or t
  misc_feature (277)..(277): n is a, c, g, or t
  misc_feature (292)..(292): n is a, c, g, or t
  misc_feature (342)..(342): n is a, c, g, or t
  misc_feature (377)..(377): n is a, c, g, or t
  misc_feature (389)..(389): n is a, c, g, or t
  misc_feature (391)..(391): n is a, c, g, or t
  misc_feature (474)..(474): n is a, c, g, or t
  misc_feature (498)..(498): n is a, c, g, or t
  misc_feature (522)..(522): n is a, c, g, or t
  misc_feature (557)..(557): n is a, c, g, or t
  misc_feature (588)..(588): n is a, c, g, or t
  misc_feature (597)..(597): n is a, c, g, or t
  misc_feature (600)..(600): n is a, c, g, or t
  misc_feature (638)..(638): n is a, c, g, or t
  misc_feature (697)..(697): n is a, c, g, or t
  misc_feature (700)..(700): n is a, c, g, or t
  misc_feature (703)..(703): n is a, c, g, or t
  misc_feature (817)..(817): n is a, c, g, or t
  misc_feature (819)..(819): n is a, c, g, or t
  misc_feature (839)..(839): n is a, c, g, or t
  misc_feature (881)..(881): n is a, c, g, or t
  misc_feature (936)..(936): n is a, c, g, or t
aggcaggggatcgggggaggtcagagcaagtagaatgggccatcattagaatgagcagaactccttgggaatcttgagtnatcagctggcgatggggagttaatgcttggtgtggatgacaggtgtggggatgcggatatcctggcctctctccagacgccgttcacaatcaatcaaatagtttactccatcgatgaccagttgcaccagcnccacctctgatttgcctagtcggtccaaattagaaatatcaaagacaccgcctgtngcagcagtntccactcctccagtnccacgtttttggagtcttaggttctccaggatctttgggaagcggctatntttgcttagcaggggcagtttgatgtgcactcctncccgaagtccantncccaggttagatggacaggtcaagatgtatcccaaacgctcatcccacatgaactcccagccacgttcttggataagtctctncacctctttgaggcctcggcagantctttcaaacactctcttcatgtnaccacccttctccatggagatcacccgtgtatgancctcctcattcacccagatcaggaagctctnctcattgtngtnccaaattccacgagcatctggccagtgtcgagccattnctgctgcagttagcaacggggacacaggcttatcaaacagaaagtggtcatcaataagntgntgntgttcagcctctgtcatctcactgagcctatagtaacgtccagccaggtcacccttcaggccactcagtgcatccaccacaacacgttccacctctcgtcgctctgctcgagtncnagccggaggcagactgagtnctcggatgcttcggccagttctgactctagaggacaatacanacctctcatcaaagtagccagaacggattttactggcatctagatccgtggtgtncttca

SEQ ID NO: 575871 - DNA, 1261 bp, Homo sapiens
  misc_feature (480)..(480): n is a, c, g, or t
  misc_feature (738)..(738): n is a, c, g, or t
ggctagccgttgtggtaccttagtgatgccgcgtgtaaggcgaagcggtatcctcgctcggctagtggcctcccgtcggcggactcagtgctgggggtcctgcagactgagagctgctgccaggcctagcaccgagctcgcgtcaggcaggcatgcacgcggtgcacccccgtctgcatcttgtgtctcttctggctggcgtgcgccccggtaggccatgtctgattgggccagatggcattcactgctgctggggtggctgtgtgctctgctgtgggtgcacatacttgtggtaaccggccagtaacctggagggacttcagtaggaggaaaggtaattggctgacggcctgcgacggacctgatgaatcatgcattaacgcagcgaagccgtcagcggatactcgcagtccatggtaaacgtgacgtatgtgatgcgctttggctctttctacttgtagcaattcaatagtacgtttntcctgtgtacgcctgttgcccccatgcatatcctaggcggattgcaactagtaccacatgcctttctagttggtacgtgcggtttttgcgatgtagcacgtgctcgtcttggagagagcttcgatcgtcgcagaaccctttgtcatatgagcgtgaagttttgtgccctagattttgataagacacaggtttccaaaacttccttagggtattgaaagactttgtgataaaacttcaaatggcgttcttcaattaaancattaaacggtttaagagtttttatgtgatttaacacagagagttagcgagaatttcggacttacggttggaaggcggggttaacttaaaaaaaggggtagataaaggggcgaatttccaggggtttatgagaatcccttctcttcgccttagcttcaaattttccccttattggtgctgttaccaccattgtgggctttttccaacgagaacacctttggacccaaggtggtgcacaccacttgagaagggggggttgataccccccttaacacttccatgctaagggaacaaaatcctaggcggcacggtgttgggccacacacttgctttttgggtagtgagccctttcgcgcgcggtaaaataaaaaacttctaaggcttttggttttaatttggttttaactgggcaatttttttaatttcccttttttggcttggcaaggttttaaaccttttcacgcaacactttaaacaaagggtttcccacatttttttcctttttcccaaaagggggttaaac

SEQ ID NO: 575872 - DNA, 197 bp, Homo sapiens
gtaaagaacggtcgcggtcaatcctagcgcgcagcatgcagcagtagcagcagcagttagcagcagcagacagcagccgcatccgctgcgggagtcctgagccggaaccacacccaagtagctgccctttcctcttctgtcatctcaccgccccagcatagaccgcgttcccctgaggaaaccggccgcccacgccc

SEQ ID NO: 575873 - DNA, 806 bp, Homo sapiens
agcggaagaggctcacaggattctgacaatatctttgaccggagaagaggcaaagtacgctcaacagccgacagccacagtctcctcctgcctgcatttctttcctgacttgtcgaattccaagctgttaatataagatgttgcaacaagggcttgctacggtctgccggctgtcttgcttgcaggagtgcgaactagatatgaaacatcggctaggttacctgctgcaaaaatctgatacctgtgaacacaattcttcccacaacaagaaggacatagtggattatttgccatgagagtgagccaagcaggaagtcaagcaaatgggctgaatcacctggaaaaccctgattagctcatgaactgtgggctggacagcttacaaaggctttcttgaaagtctgaatatagtgaggcagaatattgacttctggtatcagctgtgaacgagtacagagagaaatcagaatcaccatctaaactaatgtcccaaggccatactaagcatctatcagatgaaattcattctcagttccaggcaaccaaagaggtgaacctggattcttgcaccagggaagagaccagccggagacatgctagaagcctacaataacctggctttgatgaggcccagaagaagattttcaatcctgatggagaaggattcctaacgggccgcttcctcaaagtctcgattctatcttgatgtggtcaacccgtccagctgttgggcagaaacagcagaaaggagccaggagttcagcagactgtgcttcctggtccctcagtgtgcctaattctcacct

SEQ ID NO: 575874 - DNA, 270 bp, Homo sapiens
tgcgtgtccagcgtgccggtttgctggttgttcgcccacggagatgacgaggcggatttccttgtaacatattgcgatagacaagaaagtgatcgacggtcgacttcgtctggtactggtgcgcccaattcggggattgctgtggtgaccgacgattatccaaaagagattctacaggccacgcttggagcggattaccgcgccctggcccagctcaaaggttaataagacccgatgactagttttgcattgccgacgagggggtccctc

SEQ ID NO: 575875 - DNA, 666 bp, Homo sapiens
ggttgttaccgcgattctgagaggggggcttttagtccctccagacctcggctttagtgctgtctccgcttttctttcaccttcacagagatgtcttatggtgaaattgaaggtaaattcttgggacctagagaagaagtaacgagtgagccacgctgtaaaaaattgaagtcaaccacagagtcgtatgtttttcacaatcatagtaatgctgattttcacagaatccaagagaaaactggaaatgattgggtccctgtgaccatcattgatgtcagaggacatagttatttgccggagaacaaaatcaaaactaccgatttgcatagacctttgcatgatgagatgcctggtaatagaccagatgttattggatccattgattcacaagttttacaggaagcacgttcttcattaatattcgccgaccatgagatatattgcaccaagtaaagatttataggacccatttaccaaccccctgaggaaaaagaaccgcattgagggagggatgagggacatgtcttaatggtttaattgccgagggggccaaagagggaaccgaattttactcttgaaaatcgagaatggcacggaatatttccgtttccaagaaattgagagcttgggagaaggttttggacacatggaagtctggcctttccg

SEQ ID NO: 575876 - DNA, 127 bp, Homo sapiens
atctagaggaccccacgcgcacggcggtagcaagaggaggagcacccaatgagaacttcatggcatctgtgaatctctttgtgcagtatcttccattgattaatcagagcttcctagatgtattgtc

SEQ ID NO: 575877 - DNA, 2152 bp, Homo sapiens
  misc_feature (57)..(57): n is a, c, g, or t
  misc_feature (70)..(70): n is a, c, g, or t
  misc_feature (87)..(87): n is a, c, g, or t
  misc_feature (2008)..(2008): n is a, c, g, or t
  misc_feature (2012)..(2013): n is a, c, g, or t
  misc_feature (2030)..(2030): n is a, c, g, or t
  misc_feature (2032)..(2032): n is a, c, g, or t
  misc_feature (2045)..(2045): n is a, c, g, or t
  misc_feature (2048)..(2049): n is a, c, g, or t
  misc_feature (2058)..(2058): n is a, c, g, or t
  misc_feature (2061)..(2062): n is a, c, g, or t
  misc_feature (2074)..(2074): n is a, c, g, or t
  misc_feature (2095)..(2095): n is a, c, g, or t
  misc_feature (2103)..(2103): n is a, c, g, or t
  misc_feature (2108)..(2108): n is a, c, g, or t
  misc_feature (2112)..(2112): n is a, c, g, or t
ctgtaagccttcctggtgtcctgggttatccctccttctgctgttctggaaaagaanacccagcccagtntatggagtataagaaanactgatgcacctcaaccggatgtgaaggaagaggaagaagagaaggaagaggaaaaggacaagggagatgaggaggaggaaggagaagagaaacttgaagagaaacagaaaagtgatgctgaagaagatggtggcactgtcagtcaagaggaggaagacagaaaacctaaagcagaggaggatgaaattttgaacagatcaccaagaaacagaaagccacgaagagagtgaaacaatcttaagagcttgatctgtgatttcttctccctcctcccctgcaagagtggtcctaggagaggacctggcacaccttaggttgacattcagaaaacttcaagacatcaccatcagcaggctccagttgaacactagtctgtgtaactttaaacatctagcagtaaatacttgcagttgtgatataaaggaccctgtttctgtagaaaagaaaacatttaacataatggttgtgaaatgtaacatgaagcaaactaacttttttttttttaacatctttgtttttaaaatagaatgatagaactttgccagtctttaagatcttggcttaatttaatgtattaatctgtttgtgcaaacataataccaccatttaaaaatgttagggagatgagttgcagtttttataatagattttttttaaagtttggtattgtaaaacattcacacctctgtccctcaaaattgataattacgtttaaagtgcagtcatttgtggttagaatcttgttttgtttgcttccattattgagttcctcctaaggaaattgaggagagggactgaatagaagcccaaattcatataaaagttgcgtttaagttgtattaaaaatagatatataagaaaaaattctttcacttgatgtttgttagaccagaaagtgtgtgtgttctgtagctcagttcccagacagctttttaggtagtggaggaggtggcttcatgtggcacttgggcatttatattccacttgggagggtcaggctgtggccttctggagcaggtggcttgttaaggaacgctagcagggcatggcacgtgagctccggaatagatgtcttcatcacttcttccactgtgtgttgacactgttttccttacctatttcctcagatccccagctttctcctctgctatgcattttcttcacagtgcagcttgcagtccgttgctgaaaatgattataagccctgcataatgttaagctttattgtgattacgtgtatgtttcttctttcttttaagcagacccatacctttccagggtcaaagtacagaatagaatacattgatacaaagtacagaaaaatactttgatttttatccatttcttttactctgtgtaaagacttgagaagtctaattcacaggcaaaccaatacagaattgactgcagttgaacagactagaagtatttgtgggaggagtgacatgaagcatgagttatctgattttttttgtagctgctatatattttaagccttcatttgcaattcatgtaacagttgtgtcataaattacacaataaagcagtcctgttcaaatttttttttaacgtggcttgtagaatttttaaaaaagtgatcttaggtttgttttttcatgcgggatgcagatgggtgctatcagagcctctcccacaccactatagtgtaataatgttattattactctacactgaaacgtattcagagttagatattattttagcttcagttgttctttagaggctttcaaatgtaccgatgatactgtttcttgcactgaatatataaacactccacagtgtttatattgggaagatattgggaaggaaatatatttgtaaaagatgaaggctgtatctatttttttttctttttaaagtttgttcacttaaattcttttgaggatgggatgtattttnctgnngtccaggctttcctttnanctgtgtctgtgcncanngacttgtanttnnagacttccaatntttgtccatcacgtgtcttanagcgaaangttgnggtnctgaccaatgtgggaggttccaatgcctacccggaatttg

SEQ ID NO: 575878 - DNA, 1557 bp, Homo sapiens
  misc_feature (57)..(57): n is a, c, g, or t
  misc_feature (70)..(70): n is a, c, g, or t
  misc_feature (87)..(87): n is a, c, g, or t
ctgtaagccttcctggtgtcctgggttatccctccttctgctgttctggaaaagaanacccagcccagtntatggagtataagaaanactgatgcacctcaaccggatgtgaaggaagaggaagaagagaaggaagaggaaaaggacaagggagatgaggaggaggaaggagaagagaaacttgaagagaaacagaaaagtgatgctgaagaagatggtggcactgtcagtcaagaggaggaagacagaaaacctaaagcagaggaggatgaaattttgaacagatcaccaagaaacagaaagccacgaagagagtgaaacaatcttaagagcttgatctgtgatttcttctccctcctcccctgcaagagtggtcctaggagaggacctggcacaccttaggttgacattcagaaaacttcaagacatcaccatcagcaggctccagttgaacactagtctgtgtaactttaaacatctagcagtaaatacttgcagttgtgatataaaggaccctgtttctgtagaaaagaaaacatttaacataatggttgtgaaatgtaacatgaagcaaactaacttttttttttttaacatctttgtttttaaaatagaatgatagaactttgccagtctttaagatcttggcttaatttaatgtattaatctgtttgtgcaaacataataccaccatttaaaaatgttagggagatgagttgcagtttttataatagattttttttaaagtttggtattgtaaaacattcacacctctgtccctcaaaattgataattacgtttaaagtgcagtcatttgtggttagaatcttgttttgtttgcttccattattgagttcctcctaaggaaattgaggagagggactgaatagaagcccaaattcatataaaagttgcgtttaagttgtattaaaaatagatatataagaaaaaattctttcacttgatgtttgttagaccagaaagtgtgtgtgttctgtagctcagttcccagacagctttttaggtagtggaggaggtggcttcatgtggcacttgggcatttatattccacttgggagggtcaggctgtggccttctggagcaggtggcttgttaaggaacgctagcagggcatggcacgtgagctccggaatagatgtcttcatcacttcttccactgtgtgttgacactgttttccttacctatttcctcagatccccagctttctcctctgctatgcattttcttcacagtgcagcttgcagtccgttgctgaaaatgattataagccctgcataatgttaagctttattgtgattacgtgtatgtttcttctttcttttaagcagacccatacctttccagggtcaaagtacagaatagaatacattgatacaaagtacagaaaaatactttgatttttatcccatgtcactcctcccacaaatacttctagtctgttcaactgcagtcaattctgtattggtttgcctgtgaattagacttctcaagtctttacacagagtaaaagaacccacgcgtccgcggacgcgtgg

SEQ ID NO: 575879 - DNA, 2215 bp, Homo sapiens
  misc_feature (57)..(57): n is a, c, g, or t
  misc_feature (70)..(70): n is a, c, g, or t
  misc_feature (87)..(87): n is a, c, g, or t
  misc_feature (2206)..(2206): n is a, c, g, or t
ctgtaagccttcctggtgtcctgggttatccctccttctgctgttctggaaaagaanacccagcccagtntatggagtataagaaanactgatgcacctcaaccggatgtgaaggaagaggaagaagagaaggaagaggaaaaggacaagggagatgaggaggaggaaggagaagagaaacttgaagagaaacagaaaagtgatgctgaagaagatggtggcactgtcagtcaagaggaggaagacagaaaacctaaagcagaggaggatgaaattttgaacagatcaccaagaaacagaaagccacgaagagagtgaaacaatcttaagagcttgatctgtgatttcttctccctcctcccctgcaagagtggtcctaggagaggacctggcacaccttaggttgacattcagaaaacttcaagacatcaccatcagcaggctccagttgaacactagtctgtgtaactttaaacatctagcagtaaatacttgcagttgtgatataaaggaccctgtttctgtagaaaagaaaacatttaacataatggttgtgaaatgtaacatgaagcaaactaacttttttttttttaacatctttgtttttaaaatagaatgatagaactttgccagtctttaagatcttggcttaatttaatgtattaatctgtttgtgcaaacataataccaccatttaaaaatgttagggagatgagttgcagtttttataatagattttttttaaagtttggtattgtaaaacattcacacctctgtccctcaaaattgataattacgtttaaagtgcagtcatttgtggttagaatcttgttttgtttgcttccattattgagttcctcctaaggaaattgaggagagggactgaatagaagcccaaattcatataaaagttgcgtttaagttgtattaaaaatagatatataagaaaaaattctttcacttgatgtttgttagaccagaaagtgtgtgtgttctgtagctcagttcccagacagctttttaggtagtggaggaggtggcttcatgtggcacttgggcatttatattccacttgggagggtcaggctgtggccttctggagcaggtggcttgttaaggaacgctcactttcttctagctgagctttaaatcattagagcttaaattgtcagatcgttcattgcctttccagggttatttagtaaagtttgttgaaaacaaaaacgccttttcttggttcttttttcagttattttgaaggtccagcatcctgattaaatgtctgacacattaatgaatgaccagcagcagctttcagctcttaaaaagacacttatattttgattttacatgctggttacctgttccattgttgtcaaatgcccactctccatcagatgtgttcctccattttcttatccacaaagtactcctcacttttcaatttgtcatgttactaaatggtgttacattaaagccctgtgttaagtgtctgcttttgactgaatttcttcatagtaaccttcagtgtgtgtgtgtgactatgttcaattagtgggttgatcttcgtataattggccactatgtgagagttcactactaggcagaaactattatggaccagtgaaataatgacttttatctcaccacgtgagtttgatgcagtcttttctgtctagcccttgcctcttcctgcccatgtgattgcggtgcagtagtttctgttgtataatagtgtggacagcagctcagaaaaggagggaatgctactgataatttgtagataatattctttaagacttaggggaaccattgaactttgaaatttttattagaaaattatttgttcagaatcagactccattattttacatatacttaaatactttaggggtatttttgaaagttagcccagttttttatgtgctattaaatttttagattacatactaaagaaaagtatgtacacagaatgtagtgctcctagttactattttttctattaagaaatagtttagttctggtgtaaaatttgtttgaatgctaaaaaaaaaaaagcaggactgcattatggcacttttgccttggtggcccactttctccatttaaaacattaggatttgtatttttctgctgcgtttgtatgaagacatatttgattgttgttttctcttgattttaaaataaaacctcatgagccctaaanaaaaaaaaa

SEQ ID NO: 575880 - DNA, 1182 bp, Homo sapiens
caggagcagactattttaaaaacgcgtttgaagaacattttccttaaaaacaaagatgctgaagaatccagagaaggatcaaagaacttattgcacagggcgaatttgtacatgcacagagctacgaagcttcgtacttccttaggaaatacagagctatgaaacaacgctattacttcagataccaacaaaactaattgatcattactactttaactttacgctatcagtgccagctgtcttactgtactaccagactgtcgtaaaataattctaacttaaacatggcgaagcactatacactgtgctgaacaacaaatcccctgagctgccctactgaactaaaataggtcttcaacttctgcttcctacggagcaacgctcatcagcaaactttaatgcctccaatcttcgatacaaacactagccaatttagactatactaccgatcatacacttcactgagccaccccaattcggcactgaccacctactacataccacttctaatcctctagacttaactcagcgacttagccaaccacttcctacggtctactctcctccactctcagcttgaccaaagagaactgccatctcacccgaaccattctacataaagcaaacactaactttctttacaccaccttacttcctcttaactctctgaacaggaatccctctattccctctcaccccccaatttggggtactatttcaacaacgcaccattactccaagggcttcaccctaacgacagaccgaaacacgttcccctgggtaaattgcttctaaactggtcaacgctcataggaaaattcaactaaactattgtcttgggaggccatctaacttcctggaacccttgaaaatatagccggctttgggttgattcgggccatttcaccccttacaattaaaggtatgtcttatctcaccctcagcttcgtcccacttccacttcaatcggctcggctgcctggccaccttctggggcccttacacaccccaggttaccctcgttaggtcgtattacaatcaccctctctctcgactaaaaaggggacatgactcaagtactaggttattcgccacacacgaaagacaggaccagtacaagcaaggaccatctcttccagcgtgtcgcggactcgacgcagaacttacgccgaacccatcatc

SEQ ID NO: 575881 - DNA, 105 bp, Homo sapiens
tatctagccatctccttgagcaaactccaagtcctgctgtactcgctcacgccgtacctctgacagactccaagtcctatgatagtacgattatgggaggaaacc

SEQ ID NO: 575882 - DNA, 169 bp, Homo sapiens
  misc_feature (147)..(147): n is a, c, g, or t
  misc_feature (151)..(151): n is a, c, g, or t
gcaacattcgtggttcatcaagcgtgacaagaagctctgactgcaagtcaccagtctgcccagaagctcagaaggctaatgatatatccctaatactcacccactcttaatcagtgtgaagacgtctcagactgttgttcattgcanaatnaaactaaatgtgtacaca

SEQ ID NO: 575883 - DNA, 1117 bp, Homo sapiens
  misc_feature (57)..(57): n is a, c, g, or t
  misc_feature (70)..(70): n is a, c, g, or t
  misc_feature (87)..(87): n is a, c, g, or t
  misc_feature (977)..(977): n is a, c, g, or t
  misc_feature (1024)..(1024): n is a, c, g, or t
  misc_feature (1083)..(1083): n is a, c, g, or t
  misc_feature (1092)..(1092): n is a, c, g, or t
ctgtaagccttcctggtgtcctgggttatccctccttctgctgttctggaaaagaanacccagcccagtntatggagtataagaaanactgatgcacctcaaccggatgtgaaggaagaggaagaagagaaggaagaggaaaaggacaagggagatgaggaggaggaaggagaagagaaacttgaagagaaacagaaaagtgatgctgaagaagatggtggcactgtcagtcaagaggaggaagacagaaaacctaaagcagaggaggatgaaattttgaacagatcaccaagaaacagaaagccacgaagagagtgaaacaatcttaagagcttgatctgtgatttcttctccctcctcccctgcaagagtggtcctaggagaggacctggcacaccttaggttgacattcagaaaacttcaagacatcaccatcagcaggctccagttgaacactagtctgtgtaactttaaacatctagcagtaaatacttgcagttgtgatataaaggaccctgtttctgtagaaaagaaaacatttaacataatggttgtgaaatgtaacatgaagcaaactaacttttttttttttaacatctttgtttttaaaatagaatgatagaactttgccagtctttaagatcttggcttaatttaatgtattaatctgtttgtgcaaacataataccaccatttaaaaatgttagggagatgagttgcagtttttataatagattttttttaaagtttggtattgtaaaacattcacacctctgtccctcaaaattgataattacgtttaaagtgcagtcatttgtggttagaatcttgttttgtttgcttccattattgagttcctcctaaggaaattgaggagagggactgaatagaagcccaaattcatataaaagttgcgtttaagttgtattaaaaatagatatataagaaaaaattctttccaccttggatggtttggnaagaccagaaagtgggtgggttcctggtagccccagttcccccaggncaggcttttttaggggaagtgggagggagggtggccttccaaggtgggcaccttggggncatttaaanatccccaccttgggggaaggggcca

SEQ ID NO: 575884 - DNA, 902 bp, Homo sapiens
  misc_feature (57)..(57): n is a, c, g, or t
  misc_feature (70)..(70): n is a, c, g, or t
  misc_feature (87)..(87): n is a, c, g, or t
  misc_feature (845)..(845): n is a, c, g, or t
  misc_feature (851)..(851): n is a, c, g, or t
  misc_feature (868)..(868): n is a, c, g, or t
ctgtaagccttcctggtgtcctgggttatccctccttctgctgttctggaaaagaanacccagcccagtntatggagtataagaaanactgatgcacctcaaccggatgtgaaggaagaggaagaagagaaggaagaggaaaaggacaagggagatgaggaggaggaaggagaagagaaacttgaagagaaacagaaaagtgatgctgaagaagatggtggcactgtcagtcaagaggaggaagacagaaaacctaaagcagaggaggatgaaattttgaacagatcaccaagaaacagaaagccacgaagagagtgaaacaatcttaagagcttgatctgtgatttcttctccctcctcccctgcaagagtggtcctaggagaggacctggcacaccttaggttgacattcagaaaacttcaagacatcaccatcagcaggctccagttgaacactagtctgtgtaactttaaacatctagcagtaaatacttgcagttgtgatataaaggaccctgtttctgtagaaaagaaaacatttaacataatggttgtgaaatgtaacatgaagcaaactaacttttttttttttaacatctttgtttttaaaatagaatgatagaactttgccagtctttaagatcttggcttaatttaatgtattaatctgtttgtgcaaacataataccaccatttaaaaatgttagggagatgagttgcagtttttataatagattttttttaaagtttggtattgtaaaacattcacacctctgtccctcaaaattgataattacgtttaaagtgcagtcatttgtggttagaatcttgttttgttttgcttnccattnattggagttccctcctnaggggaaattgcagggtggaggggcctgatttag

SEQ ID NO: 575885 - DNA, 1590 bp, Homo sapiens
  misc_feature (1581)..(1581): n is a, c, g, or t
ttgctggtcggttcgctactttgcctttcgctgctgctgggttgtgtctgtctgtctgcgttctgcgtgcggtttattcatatctcccccgccgttgttgttgttctttcctatctctttttctcgtttctcatttcttctcctcgcccctcgtgagtggtctcgttgggggtggcaccctcgctgcgctcgtctgcgtgttgtagttttcttcctctgcgggggtggcttggttctcctctgtgtgaggttggtgtgtctcctctgtggtgtttcctcccccctccccttgcttgatgtgggtttttgctctttccagagtattgttcctgtctaatcgcctgtattgtttgtgtctcaccagcacgttttgttttttatacaagcacgccggctcgttgttttcttttttgttatatatgtcactgccctttttaggggtggcgccccttttttgtcatacagaaacagttgtgtgttttgattcttatctgatggtggctccccccgcggtgagattttttggggcgccccccctttttttttttttttttgttttttttttttttttttttttttttttttttttttttttttttcgccttttcttggttcttttttcagttattttgaaggtccagcatcctgattaaatgtctgacacattaatgaatgaccagcagcagctttcagctcttaaaaagacacttatattttgattttacatgctggttacctgttccattgttgtcaaatgcccactctccatcagatgtgttcctccattttcttatccacaaagtactcctcacttttcaatttgtcatgttactaaatggtgttacattaaagccctgtgttaagtgtctgcttttgactgaatttcttcatagtaaccttcagtgtgtgtgtgtgactatgttcaattagtgggttgatcttcgtataattggccactatgtgagagttcactactaggcagaaactattatggaccagtgaaataatgacttttatctcaccacgtgagtttgatgcagtcttttctgtctagcccttgcctcttcctgcccatgtgattgcggtgcagtagtttctgttgtataatagtgtggacagcagctcagaaaaggagggaatgctactgataatttgtagataatattctttaagacttaggggaaccattgaactttgaaatttttattagaaaattatttgttcagaatcagactccattattttacatatacttaaatactttaggggtatttttgaaagttagcccagttttttatgtgctattaaatttttagattacatactaaagaaaagtatgtacacagaatgtagtgctcctagttactattttttctattaagaaatagtttagttctggtgtaaaatttgtttgaatgctaaaaaaaaaaaagcaggactgcattatggcacttttgccttggtggcccactttctccatttaaaacattaggatttgtatttttctgctgcgtttgtatgaagacatatttgattgttgttttctcttgattttaaaataaaacctcatgagccctaaanaaaaaaaaa

SEQ ID NO: 575886 - DNA, 1341 bp, Homo sapiens
  misc_feature (57)..(57): n is a, c, g, or t
  misc_feature (70)..(70): n is a, c, g, or t
  misc_feature (87)..(87): n is a, c, g, or t
  misc_feature (1332)..(1332): n is a, c, g, or t
ctgtaagccttcctggtgtcctgggttatccctccttctgctgttctggaaaagaanacccagcccagtntatggagtataagaaanactgatgcacctcaaccggatgtgaaggaagaggaagaagagaaggaagaggaaaaggacaagggagatgaggaggaggaaggagaagagaaacttgaagagaaacagaaaagtgatgctgaagaagatggtggcactgtcagtcaagaggaggaagacagaaaacctaaagcagaggaggatgaaattttgaacagatcaccaagaaacagaaagccacgaagagagtgaaacaatcttaagagcttgatctgtgatttcttctccctcctcccctgcaagagtggtcctaggagaggacctggcacaccttaggttgacattcagaaaacttcaagacatcaccatcagcaggctccagttgaacactagtctgtgtaactttaaacatctagcagtaaatacttgcagttgtgatataaaggaccctgtttctgtagaaaagaaaacatttttatccacaaagtactcctcacttttcaatttgtcatgttactaaatggtgttacattaaagccctgtgttaagtgtctgcttttgactgaatttcttcatagtaaccttcagtgtgtgtgtgtgactatgttcaattagtgggttgatcttcgtataattggccactatgtgagagttcactactaggcagaaactattatggaccagtgaaataatgacttttatctcaccacgtgagtttgatgcagtcttttctgtctagcccttgcctcttcctgcccatgtgattgcggtgcagtagtttctgttgtataatagtgtggacagcagctcagaaaaggagggaatgctactgataatttgtagataatattctttaagacttaggggaaccattgaactttgaaatttttattagaaaattatttgttcagaatcagactccattattttacatatacttaaatactttaggggtatttttgaaagttagcccagttttttatgtgctattaaatttttagattacatactaaagaaaagtatgtacacagaatgtagtgctcctagttactattttttctattaagaaatagtttagttctggtgtaaaatttgtttgaatgctaaaaaaaaaaaagcaggactgcattatggcacttttgccttggtggcccactttctccatttaaaacattaggatttgtatttttctgctgcgtttgtatgaagacatatttgattgttgttttctcttgattttaaaataaaacctcatgagccctaaanaaaaaaaaa

SEQ ID NO: 575887 - DNA, 233 bp, Homo sapiens
gatccctgtggcgcgtactgcttgggcgcgtacgatgaagatcagatcatcgcccgccggagcgcaaatactcggtgtggatcggcggctccatcctggcctcgcttgtccaacttccagcagatgtggatcaccaagcaggacgtacgacagaagccggcccattccatcagtccaccagcaaatagcttctatgacacactccagcctccagtagcggggtaccgacgctc

SEQ ID NO: 575888 - DNA, 424 bp, Homo sapiens
  misc_feature (169)..(169): n is a, c, g, or t
gacaattccaggcgctcctccccagttagacaaagtggtacttagttacggcgcgttggccctaatcggcgcagtctgagcggagtattggtcgtcaccaaccgaacagaatggatcgtgtcccgggaagtggtgtaactgaaccaaccgaagccgccctgcggaagangatggttggtcatcgtggtttttggctaacgttgagtttgcgaagacctaacgaacaccaggaaaaccacgatgaccaagtccactatcgcattgaccgagctggttgagaaaggggcagacgccgatctgctcaagcaaatgattcagttcgttgcccagcgcatgatggaactcgatgtcgaaggcctctgcgacgccggcttcgacgtcaaaagcccagaccgggtgaacagccgcaacgctaccgggatcg

SEQ ID NO: 575889 - DNA, 336 bp, Homo sapiens
aagtggccagcatgtgcctcatctgttcctcaaaaatcactggcctgtattgcaggttcatcatgagcattcatgacagctgcgtgttggctcgatccagctacaccgtgtcccaggttccgcatcatcaacataatgtcctctgtgatgatttctaacatttctcgatcctgtcttaggctggcactggcatgtatgcaaagtaggtcagtgtcttagtagctgtggtggtatgagcttgtgttagacatacagtggtgcatttagagcacgtagagatagagactagagaacatgccgttgccgggttcattatgccagaggcgtccacggtcg

SEQ ID NO: 575890 - DNA, 1122 bp, Homo sapiens
  misc_feature (86)..(87): n is a, c, g, or t
  misc_feature (146)..(146): n is a, c, g, or t
  misc_feature (186)..(186): n is a, c, g, or t
  misc_feature (1113)..(1113): n is a, c, g, or t
cccccccttttttaaaaattttaaaattttttcccccaaaaggtgttttttttgattcccatttttttgccccccccttttttttnnccccccccccccccgaaaagggggaggccccaaaaatttttccccccccccttgtgggngaaaattttttaaaaaaaaaaatggggttttccctttggnaacccaaccatctaatgaatgaccagcagcagctttcagctcttaaaaagacacttatattttgattttacatgctggttacctgttccattgttgtcaaatgcccactctccatcagatgtgttcctccattttcttatccacaaagtactcctcacttttcaatttgtcatgttactaaatggtgttacattaaagccctgtgttaagtgtctgcttttgactgaatttcttcatagtaaccttcagtgtgtgtgtgtgactatgttcaattagtgggttgatcttcgtataattggccactatgtgagagttcactactaggcagaaactattatggaccagtgaaataatgacttttatctcaccacgtgagtttgatgcagtcttttctgtctagcccttgcctcttcctgcccatgtgattgcggtgcagtagtttctgttgtataatagtgtggacagcagctcagaaaaggagggaatgctactgataatttgtagataatattctttaagacttaggggaaccattgaactttgaaatttttattagaaaattatttgttcagaatcagactccattattttacatatacttaaatactttaggggtatttttgaaagttagcccagttttttatgtgctattaaatttttagattacatactaaagaaaagtatgtacacagaatgtagtgctcctagttactattttttctattaagaaatagtttagttctggtgtaaaatttgtttgaatgctaaaaaaaaaaaagcaggactgcattatggcacttttgccttggtggcccactttctccatttaaaacattaggatttgtatttttctgctgcgtttgtatgaagacatatttgattgttgttttctcttgattttaaaataaaacctcatgagccctaaanaaaaaaaaa

SEQ ID NO: 575891 - DNA, 435 bp, Homo sapiens
  misc_feature (11)..(11): n is a, c, g, or t
  misc_feature (81)..(81): n is a, c, g, or t
  misc_feature (238)..(238): n is a, c, g, or t
  misc_feature (390)..(390): n is a, c, g, or t
actcagatatncctctcctccttaatccagacatggtctttcattcgtaagcagcaaataagccatgcctctccctgttanacctttttgtcctctgaacgtaactgtcttacaggcacagacgtgtttccagacaatccagatgatgcttctgctacagcgacatggcccagtcccaaggcgcaagggccacttgtgtcagcagtgtgcaccagacagcgtgcgccggcaagatagnagaagtcatgaaaagggccggccagaagacacctactctggctggaagacacgtacccctgaagatcaagaaagaagctatctgggaacaatgtagcagttacgtcagtaccaggacacttcctgtttacaggagactataaaacctttgtncctatcatcacttgatgtggaccccattttaggcctcagcccgcc

SEQ ID NO: 575892 - DNA, 267 bp, Homo sapiens
agttcgatggagagtctctcaccatatttaatgttggtgagagagtgatctatcctaatgatcattttactgtttaataaagtttcctagccatgaagtccatgtctactgatttagacaaggtattagtggtcattactttgtacccctagtccttccaagcacttctgtttcttcagttcgtttttactgatccaccaacacctaacgaggctatgctacagtctctagcttaatggaagacacattcatccttctccctctgac

SEQ ID NO: 575893 - DNA, 152 bp, Homo sapiens
ggggagggcccccggggggggggggaagggggcaattcggcccccccccctggcgggcccccccccctgggttcccttttttgggtccccccccctcctggacccccctttttggttgggcaggattttttttttaccaaactaaaaatgga

SEQ ID NO: 575894 - DNA, 365 bp, Homo sapiens
attagaggtatggagcagtgcaacttaaactcaagttgcacttacattttgaattttaaaatgatggttttatctgttgtgtgaagtggttcacccttgaggaccaggagcctccatatcgagactgaaaacctttttgtaagacttagagaaacagtgcttttggttccttgagttctcctgtatccagataccaaatgaccttgacttttaagccttgtgaattcgtagtccaatcagctgaaattaaatcacttgggagggacgcatagaaggagctctacctactcagtgccagtgcaccactctttccaggtggcatccatttccaacaatgtacataataaagtgtaagaaaaatctct

SEQ ID NO: 575895 - DNA, 377 bp, Homo sapiens
ggccccgcgggttttaaattgggtcccaaaaggttccgcaagggtttccggcagttccgctaccagaatggggggggtccccgggaggttttccggcagttgggggagttttccccccagtggttggggcttaacatccgccccaaggaccagtttgtgaaaatgttggtgcaaaagcagttgttccccttcttgcccaggggggttggggcccgggggttccccccccgcaggaatgtgggcttcattggttaaggggtggagttggggggggccagggccgggggttttttggggattggggccatgttggggcccgggggcttgagcttgggccccccccccgttttaataaaaaatgagttttggcagcccca

SEQ ID NO: 575896 - DNA, 259 bp, Homo sapiens
ggtggcattggaaatagcagagtgcttcgcggtaacagggacaaatgtactgaggctggagcctgtgtgaacagaacagaagaagcccttcactctagtagtgctcacaggccaaccacagggtggttgcttaaaacagcttacttagatcactactgctgggggggggttgatatattctctgtgttaaccttcaagaagggcacaggccggaaaacatgagccagccactgaagaaacgggcaaagacaagacacca

SEQ ID NO: 575897 - DNA, 477 bp, Homo sapiens
  misc_feature (334)..(334): n is a, c, g, or t
  misc_feature (351)..(351): n is a, c, g, or t
tcgagtcctgcagcagaaaacagcatccctctaaacccaaggcaccttgtaatgaaagaattaaagccagtgacgtgaattttatgttcgatcccaaaaccagagttgacttggcttgtctgggttgttcacccagggtagggctctcctccacaaggcccaagccctactggggctgcttgggcaccagccacgctgtggggagggtgttaatcgtgactgaatcgtgtattccatgtgggaaacagtcctgcagtcgggggacaggaggagccaggctggaatccaacacaaacagtccaggggcagagggaacattcccgggtacctgtgnccctgagtgacttgaanatgctgaacttatactgaattctgtttaatgattatttgcgggaggggaacaggcattcttaagagatcggtttaccttaggaaatcctgtactccccctgctttccggccttccggcctccttgt

SEQ ID NO: 575898 - DNA, 146 bp, Homo sapiens
ttcaagttagctctctgaacattgggcttgagagtggttgtcagaaaggtgcaggtgctccacaaacgggtggtaaaaaggcctcggagctcttggatgtagtatttcagatcaggggcaggcaccggatttgaggctgtgcgccc

SEQ ID NO: 575899 - DNA, 514 bp, Homo sapiens
gaaagtgctaaattgccacctaaaactgtaatcatatatttatacactggagaattgtcatgagatccttaaccatttctttttacttcttttcttatttccaaattctcgtctcaatatttctgctttcttacataggatgtatttttcattcatttcactgcatttgtctaaccttttagacacaaattctaaatctgaaactaatttcttaaaaaggacttggtcaaagttgaatttgttacatgtcctagcttatgttatcaaaaaaataatagcaatatatagaaccataatatttcctttttaatatatcaaaaatagatcattcactcctgtgataatgattcctttggtaatttcttttaacatgtgttgaaatgcactgtgttttggcagaaagctcatgaaactgagagtcatatgatttgaggtctagtcccaactcttaaaacaattagcatttttgacttcagtttactgaaccactctgaactcatgattttcatcttta

SEQ ID NO: 575900 - DNA, 323 bp, Homo sapiens
ctaaggatccttacgatctcacccacccctcattctctttagtaagttccttgatctctggaggcagtgaaattggacatatagagaaggcaggcagtataaatgcaggaacaccaacggaaactgttccttcctaactatgttgggaacatataagaaagtatagctctgagactttaggagccttggcaggacctggtctccagttggtatgtggctataaacctggatttggcagaactgtttcttggtcggtttcagaccttcttgttattgaacatggagcttccgagtacctcttaacgacgaagtacatagtacga

SEQ ID NO: 575901 - DNA, 291 bp, Homo sapiens
cacattccccaaacgaggaggaatgtttggagaactccacgtgaatctttgattgggaaaccgtcacataccccaagagacccacatgggcatgtggccctcaaggctggttgagagggctcccctgtgtgttgaactatgcaggagggtgatgcggacacatttcagttggactttccaaggattgatggatagctacctcagggaccagaacccgtgggaagggttggacttgttgttcccgttcccatttgacaggctctcttttgtagttatccatcagcccttcca

SEQ ID NO: 575902 - DNA, 396 bp, Homo sapiens
  misc_feature (111)..(111): n is a, c, g, or t
  misc_feature (139)..(139): n is a, c, g, or t
tgtaaaaaaaagggtttgctagcaaagtgcagaagaagttccctgaatagagacaatagtaaaccatcagaggatctattactgtcaataaaatgatctacacttatcacngatcaacacacatatcttagtcactagntggtagacaagtgcttgaaaggaatataacagctatttataaagaatatgacaaacttccagggtaagatagtgggtccaggcagaatccccaaattcttttaaaataaaaacaaagaattacaacttcgacttatttttcttaaataccagttagcaaaaaagagcaaaagacttcagaaatctatgatgtgttccaacttccaagcagtgtcacccacctaatcagaccgagagaaaaaaactagtggcaatgtc

SEQ ID NO: 575903 - DNA, 407 bp, Homo sapiens
  misc_feature (20)..(20): n is a, c, g, or t
  misc_feature (51)..(51): n is a, c, g, or t
  misc_feature (54)..(54): n is a, c, g, or t
  misc_feature (59)..(59): n is a, c, g, or t
  misc_feature (95)..(96): n is a, c, g, or t
  misc_feature (115)..(116): n is a, c, g, or t
  misc_feature (132)..(132): n is a, c, g, or t
  misc_feature (240)..(240): n is a, c, g, or t
  misc_feature (268)..(268): n is a, c, g, or t
  misc_feature (270)..(270): n is a, c, g, or t
  misc_feature (351)..(351): n is a, c, g, or t
  misc_feature (353)..(353): n is a, c, g, or t
  misc_feature (392)..(392): n is a, c, g, or t
ggacccccctgcgacagagntgtgcaggggccctggggcaaaggtagcagncangtgancttttgggaccaggtgaggggtccacttgtctccanntgaagggcgctgaggcagnnccccaaggcgccgtgnaggtggcgagaagtggtgagaagcctctggatttcagaggtcaggctgacagggtgcgtggtggagtgggcatacagtgagagaaaacacttaatgtgggacagtgangagccttcggaggttaaaaagagcttgncntctgaaaacagggagtggtgtggaggggaagcagcctccgtcacttcccagcctcgggagcctggggctgggcctcgcttngnctcctctattgaatgaggataatggagcccatttgtgtnagtttcctgtcaatg

SEQ ID NO: 575904 - DNA, 316 bp, Homo sapiens
ggttgcagtgagccgagatcgtgcccctgcactccagcctgggagacaaaagggagactttgtctcaaacgaaaacaaaaacaaaatccttgtatgcctttgacatgtttcctccaattgtgacattttctaaaacaccagtataatatcacaactagaatactgactgtatgtgaatactgatacattgatcattatgggcttgaaaaaaataagaggttacttttttacttttttttggagacagaatactcactctatcccccagacgggaggaactgaggcacgagaatccatgagaatactacttgaattc

SEQ ID NO: 575905 - DNA, 1509 bp, Homo sapiens
ttcaagttgagatttggtggggacacagccaaaccacatcaggcaacttgtgcaatttttttcttctgttgttacttaggatcttcctgtgaatatcaaattcatcattgaggggatggaagaggctggctctgttgccctggaggaacttgtggaaaaagaaaaggaccgattcttctctggtgtggactacattgtaatttcagataacctgtggatcagccaaaggaagccagcaatcacttatggaacccgggggaacagctacttcatggtggaggtgaaatgcagagaccaggattttcactcaggaacctttggtggcatccttcatgaaccaatggctgatctggttgctcttctcggtagcctggtagactcgtctggtcatatcctggtccctggaatctatgatgaagtggttcctcttacagaagaggaaataaatacatacaaagccatccatctagacctagaagaataccggaatagcagccgggttgagaaatttctgttcgatactaaggaggagattctaatgcacctctggaggtacccatctctttctattcatgggatcgagggcgcgtttgatgagcctggaactaaaacagtcatacctggccgagttataggaaaattttcaatccgtctagtccctcacatgaatgtgtctgcggtggaaaaacaggtgacacgacatcttgaagatgtgttctccaaaagaaatagttccaacaagatggttgtttccatgactctaggactacacccgtggattgcaaatattgatgacacccagtatctcgcagcaaaaagagcgatcagaacagtgtttggaacagaaccagatatgatccgggatggatccaccattccaattgccaaaatgttccaggagatcgtccacaagagcgtggtgctaattccgctgggagctgttgatgatggagaacattcgcagaatgagaaaatcaacaggtggaactacatagagggaaccaaattatttgctgcctttttcttagagatggcccagctccattaatcacaagaaccttctagtctgatctgatccactgacagattcacctcccccacatccctagacagggatggaatgtaaatatccagagaatttgggtctagtatagtacattttcccttccatttaaaatgtcttgggatatctggatcagtaataaaatatttcaaaggcacagatgttggaaatggtttaaggtcccccactgcacaccttcctcaagtcatagctgcttgcagcaacttgatttccccaagtcctgtgcaatagccccaggattggattccttccaaccttttagcatatctccaaccttgcaatttgattggcataatcactccggtttgctttctaggtcctcaagtgctcgtgacacataatcattccatccaatgatcgcctttgctttaccactctttccttttatcttattaataaaaatgttggtctccaccactgactac

SEQ ID NO: 575906 - DNA, 369 bp, Homo sapiens
gtgggcgccccatctcttttgttttctccttcaattttaacgtcaactcccaataccgaattttgggggacattggggttgcaagctcggggaaaaactgtcaacccgttcttccttctgggaaattcaggccccggaacccagacccccaagaattccaccttcttttattctgggaccgcaagccgggggtggggttggagccttcctgcttcctcctaacttaatgcccaccccctcccctgcacttcttggggggggcttgaacccaaagaaaaaaaccccttgggttttttcctccggaattttttttccaaaagaagttttttttctccgttgtttttttactggaagggaaaaaacacaagc

SEQ ID NO: 575907 - DNA, 1453 bp, Homo sapiens
gcgccttcagagccctggagcaagatcttcctgtgaatatcaaattcatcattgaggggatggaagaggctggctctgttgccctggaggaacttgtggaaaaagaaaaggaccgattcttctctggtgtggactacattgtaatttcagataacctgtggatcagccaaaggaagccagcaatcacttatggaacccgggggaacagctacttcatggtggaggtgaaatgcagagaccaggattttcactcaggaacctttggtggcatccttcatgaaccaatggctgatctggttgctcttctcggtagcctggtagactcgtctggtcatatcctggtccctggaatctatgatgaagtggttcctcttacagaagaggaaataaatacatacaaagccatccatctagacctagaagaataccggaatagcagccgggttgagaaatttctgttcgatactaaggaggagattctaatgcacctctggaggtacccatctctttctattcatgggatcgagggcgcgtttgatgagcctggaactaaaacagtcatacctggccgagttataggaaaattttcaatccgtctagtccctcacatgaatgtgtctgcggtggaaaaacaggtgacacgacatcttgaagatgtgttctccaaaagaaatagttccaacaagatggttgtttccatgactctaggactacacccgtggattgcaaatattgatgacacccagtatctcgcagcaaaaagagcgatcagaacagtgtttggaacagaaccagatatgatccgggatggatccaccattccaattgccaaaatgttccaggagatcgtccacaagagcgtggtgctaattccgctgggagctgttgatgatggagaacattcgcagaatgagaaaatcaacaggtggaactacatagagggaaccaaattatttgctgcctttttcttagagatggcccagctccattaatcacaagaaccttctagtctgatctgatccactgacagattcacctcccccacatccctagacagggatggaatgtaaatatccagagaatttgggtctagtatagtacattttcccttccatttaaaatgtcttgggatatctggatcagtaataaaatatttcaaaggcacagatgttggaaatggtttaaggtcccccactgcacaccttcctcaagtcatagctgcttgcagcaacttgatttccccaagtcctgtgcaatagccccaggattggattccttccaaccttttagcatatctccaaccttgcaatttgattggcataatcactccggtttgctttctaggtcctcaagtgctcgtgacacataatcattccatccaatgatcgcctttgctttaccactctttccttttatcttattaataaaaatgttggtctccaccactgactac

SEQ ID NO: 575908 - DNA, 985 bp, Homo sapiens
cgccgctagcgctcgagtgctactgatagttgtaggtatcatagctgacagtaggttagatctctagatctgtctacacatcacattatgtgcaggcgtgggcctttaacatattcgggaatatgttctcgcagtataatagtatatggtgcccttaaataacccgcccgtctgggggtgtccacgcatagccattggagggtggtggctatatatcggcttattgggaatattttagcacctcggtaccatggactttgtgggttgtataccgtatccagtggaaccgatgtggggtttaaccacaggggttgggtaatattacccgtgaaaagaggcctgtcaatattcaaagttccgcgcgcaattgttcgtcgctcgagtgggttgacccaccacataatgggggccccagccgcctattggaataacgccctaatatttgggttgaatttctaaaggagggaaacctttccaaaatgtttccccccagggatgtttgtacaacagcctgccgttacacgcttgttggtggacccgacgtgttaagtggttgtggacacccggtgatttaggcgcccagaaatttttttttggtaatccccacaacaatacgtgtgggaactccaatatgggagtaaacttaaagggggttaaatcaataccaagccgtgggtccataaagtgagtctcttttaataaatgtatacatattttgtaggggtaccaccgtcgtcaaagtggttgtggcggggtaatatggaacgcccatatgtggttcgccggttctcttttataaggacgctatatatttggtcccaaacctggccgcggtgtgttaccttcaccttgaggtgtggttgtaatcttcccttcctctgttgttataagaggatgtgataagattatcaaaatacctattttttttaaaagggaagggtaatttttcccaaaaaaaaaaaagggaaaaccctgcccaaaaaaa

SEQ ID NO: 575909 - DNA, 1848 bp, Homo sapiens
ttcaagttgagatttggtggggacacagccaaaccacatcaggcaacttgtgcaatttttttcttctgttgttacttaggatcttcctgtgaatatcaaattcatcattgaggggatggaagaggctggctctgttgccctggaggaacttgtggaaaaagaaaaggaccgattcttctctggtgtggactacattgtaatttcagataacctgtggatcagccaaaggaagccagcaatcacttatggaacccgggggaacagctacttcatggtggaggtgaaatgcagagaccaggattttcactcaggaacctttggtggcatccttcatgaaccaatggctgatctggttgctcttctcggtagcctggtagactcgtctggtcatatcctggtccctggaatctatgatgaagtggttcctcttacagaagaggaaataaatacatacaaagccatccatctagacctagaagaataccggaatagcagccgggttgagaaatttctgttcgatactaaggaggagattctaatgcacctctggaggtacccatctctttctattcatgggatcgagggcgcgtttgatgagcctggaactaaaacagtcatacctggccgagttataggaaaattttcaatccgtctagtccctcacatgaatgtgtctgcggtggaaaaacaggtgacacgacatcttgaagatgtgttctccaaaagaaatagttccaacaagatggttgtttccatgactctaggactacacccgtggattgcaaatattgatgacacccagtatctcgcagcaaaaagagcgatcagaacagtgtttggaacagaaccagatatgatccgggatggatccaccattccaattgccaaaatgttccaggagatcgtccacaagagcgtggtgctaattccgctgggagctgttgatgatggagaacattcgcagaatgagaaaatcaacaggtggaactacatagagggaaccaaattatttgctgcctttttcttagagatggcccagctccattaatcacaagaaccttctagtctgatctgatccactgacagattcacctcccccacatccctagacagggatggaatgtaaatatccagagaatttgggtctagtatagtacattttcccttccatttaaaatgtcttgggatatctggatcagtaataaaatatttcaaaggcacagatgttggaaatggtttaaggtcccccactgcacaccttcctcaagtcatagctgcttgcagcaacttgatttccccaagtcctgtgcaatagccccaggattggattccttccaaccttttagcatatctccaaccttgcaatttgattggcataatcactccggtttgctttctaggtcctcaagtgctcgtgacacataatcattccatccaatgatcgcctttgctttaccactctttccttttatcttattaataaaaatgttggtctccaccactgactacaatgatttccccatggattcatttcagaggagttactaaggcatggtactatattaacctcttgcctccccttcatttatccatcccacttcttgaaaagttccgaagctgcaatgatcactattcatagccatatgccattgcgacgtcttgtgcacagaatgagtcatacttattccacgctctttaactttcgcgagatcgaggccacttgtagattctctgcatcccgtacttcttcctgtccatacaaaaggccatctcttctatccaatctgtgcacggttggccagcacacgattatcggtaaattctccaccacgacgtgtctcacgcact

SEQ ID NO: 575910 - DNA, 311 bp, Homo sapiens
tgattcctagggcccaaggttcaattcagtggatataactgaaccccctcctccctttgggcttttggttttttttatggggcttaaagtaaagagcccctcccttgccagtcatccctgttggtacttaggccttttatcttgggtccaattgttgaagaatgggggcttgtttcatgggttttggatttgggtttaatgcccgttttaacctgatagacgccatgccttggggagctagttttttgggaaagtccatcttttagggattgtttttccggtcttccataaattttttcttttaatttcca

SEQ ID NO: 575911 - DNA, 586 bp, Homo sapiens
ctcaacgctttatacttctatgaatcccaacaatatttgtgcctttttctttttgggcatttaacacattcaattttttattgtagctacttgtgcacatgatttctccctttcctcaacctccagtaggctgtaaagtgtttgagggaaagggatttgtttaatctttgtattccctacagggtctaagacacagtcttactcatagcattgctcaataaacatctgtttgtgtgtgtgtgtgtgtgtgtgtgtgtatgtaatctttttttttttttttttttggagagggagtctcactttgtcacccaggggggagtgcaggggggggatctcagctcacggcaagccccacttctcgggctcacgccattctcgggcctcagcctccggagaagcggggatcacgggcacacaccaccaggcccagctaatttccggtgttaagtagagacgggttcctccatgtggggcagccgggtctcgaactccctcacctcgggtgatccggccgcttggggctcccaaggtgcggggagtacgggtatgagccgtcgcacccagccaatcttttctctttctttcg

SEQ ID NO: 575912 - DNA, 296 bp, Homo sapiens
  misc_feature (6)..(6): n is a, c, g, or t
  misc_feature (257)..(257): n is a, c, g, or t
gtatgncgagctgaggaccaccttccttgagcctcagcctgtcacggcccacacccctgcagaatccacctgcagaaatagcggctacagcgagaggtcggaggtgacctgcatgtggggggcccgtggggacgccggacgggcactgcggcgcgcctgtgtcttgcgcgcgattgtagcggctggttccgcacgatctgtgactgatgtcttcaactggccccatcacggttggctctcatacaatgagtggctcnctccttggttgcctcttggtctcctttggttggcctctg

SEQ ID NO: 575913 - DNA, 395 bp, Homo sapiens
gctcttaccaatacctcctcagatagtgcaaactgatctgggcatcacacacaaaattcccttttttgtgctgtattaaacttggaccagttcactatacggtctcatatactgttctgctgacacaacgaaggtagtagcatgggttacccaacaacacatttgtcaaactacggcttaaataacacagccaagcaacgtctttgtttcataaaaggatgtactgactaaaagtcaggagtgcgttacataaccctgcttttctctctgctgtggaaaaacagcatttcatattgatcgttctagcctacaggttttacacagccacctacccccaccataagagctaccatcgcatggattaggctttaggttaagggaggaggttattggca

SEQ ID NO: 575914 - DNA, 536 bp, Homo sapiens
tgttgctggtggtcgatctagaggacccctggccaggctcttgaggaagccatgactgggtcggcggtatctggtgtcggcggtctcgcggggacatgaagtcaaggagggccgggaaggtcactacccccagggggtgggggtccacaaggctcatgatgcgggcaaattctgcttctcccggggggtcgtggccaatatcataacccaagctgatgaggcaggcttggaactcctcgggacccagggtgccggagtgatcccggtcaaaggggtggaaggaggcccggaactcattcatctgctccgggctgatgcccttggcatccggggtcaggatcgggttctctacctcatggatggtccgggcgatggtggtgagcagctgctcccagcccacagggatgtgctccagggtgtagtgggggtgctggtggtcgaagatgagcgcctccgggatgagcggggggtcgccctccagctgatcaatcttgggctggtagttgacgatgctcttctcatagtgccgcaggtag

SEQ ID NO: 575915 - DNA, 778 bp, Homo sapiens
  misc_feature (9)..(9): n is a, c, g, or t
  misc_feature (481)..(481): n is a, c, g, or t
atggggttnggggagaaaaaggagttaaatgtttgggtaaacaaccctcatgatacccagaaaggccgctgtttcaggctttatttcacactttgttctgttgcacttaaaagacccaaacggtccttcatcttttttttttttcccccaaagtattaaaaccgattttctcttttatctcaccggagtcatgctgattctctttggatgtctacagggaataaaatgcctctgcagcacctgggaagattgtaggacttccaagtgtctgcctctttgtccaagagaagaggaggaatagaaattgtaagagttaaaaatggaataattatctattatctaaaaatatcttctcttgctcttttctagctaactacttaggttcaacctagttgaagaaacaatgcctagaagaaataaatgcttacaaaagatacccatcagtgggtggtatgcagatagcccttgtcttcccttcagngctggacaccctgaccgccatggaggtggccacacagcatcccttcagggatgtggagtgtggagaccttcagatgcttcagagggaggatatgagtggagaagttctttgcatgtgtttctagagctagagttggtgtcctgtttttttgtggaaaggatagagtttaaaaattaatctgaactttttcttcccctttcttcagattattgttataaaaatactatggatgctcatttatttcagctgtcagtgagaggaatcagactaaaaccttgttgaagcaaaaaaaaaaaa

SEQ ID NO: 575916 - DNA, 844 bp, Homo sapiens
agcggctctctgcttcctcctgtacgacagtcagtggcatcttcttttgcgtcggcagccgagccacatcgctcagacaccatggggaaggtgaaggtcggagtcaacggatttggtcgtattgggcgcctggtcaccgagggctggttctctaactctggtaacacgtggatattgttgccatcgaatgacgccttcattgacctcaacttacatggtttacatgtgccaatatgattccacgccatggcaaattccatggcagcgtcaaaggctgagaacgggaagcttgtcatcacatggaaatcccatcaccatcttccaggagctgagatccctccaaaatcagagtggggcgatgctggctgctgagtacgtcgtgcgagtccatcctggtcgtcttacatcctacctatggaagaaggctgggtgctcatttgcatggggggagccaaaagggtcatcatctctgcccccttctgcttgatgcccccatgtacgtcatggtggtgtgaacctatgaaaagtatgacgacagcctcgagatcatcatcaatgcctcctgcaccagcaactgcttagcacccctggccagaggtcatcccagtgacaagctttggtgtcgtggaaggagtcttgatcacagtccatgccatcactgactcgccagaagactgtggatggccctccgggagactgtgtgcagtgatggccgcggggctctccagaacatcatccctgtctctactgtctgctgcagagctgtgggccaggtcatccctgagctgaacgggaagctcactggcatggcttccgtgtcccagctgcgacgtgtcagtggtgg

SEQ ID NO: 575917 - DNA, 550 bp, Homo sapiens
cggaagtaccagctgcgggaaggagctgcccactgtgcgtcttctcaacttgttgggacaaccttcctgcggaaaggagagacaaccttcctgcagaaaggagctacctgcttcaggtctactgagagctgttctgccactcaataaagctcttctccatcttgctaagcctccatttgtccgcaatacctcatctccctggacgcaggacaagaactcaggacccgcctggaggtgcccacagcagaatccacataccgtccatctggtccagcctcacgcagagccacaactgtgctggcgcctggagctgccagcctcactgcagcagccggactgacattcagacgtggagcaagttggactgcatagggacccaccagtgagatggacgctgtctgtaaacgatgcggaaattgaacaataggaagattcaacacaatgtagtcgggataagaatgaatgagaagaggcccagtccttaggaggaattgtaaccaagtttcatctgtagatctccagtgatcctccagccttgaatttgttttaa

SEQ ID NO: 575918 - DNA, 1055 bp, Homo sapiens
  misc_feature (27)..(27): n is a, c, g, or t
  misc_feature (203)..(203): n is a, c, g, or t
  misc_feature (1027)..(1027): n is a, c, g, or t
gctgaagggcaaagcaaaacaaaatgnataaaaaaataaaaagatttcttacacacgggaagtctaggctcactctataactacagtatgcatgtgatatgcctgcctccatataatctgtatcaaactctccacaaaactgaagtttcttgttctctaaatagctgactgaatgtgaatatgtggagtttaaccatacaggnaagataatgaaaatttgagtactgggacaatattcctcacagggcagtactttccttattcctcctctgtatctccaaccttaaactgctttgttggctgcagtcataaacctagtgagcctcccttttagagagtcccaggtaattcagctgattcagcccacatgcatgaagctttaatccaccactatgtgactatatatgaggacacagaatattctgtgttaagtcattgaattaaaaagtttcagagctggaagaaaccttagagataatctagtttaatcttctaatcaatgatgaaactcctccaaaaggtatgtttccctcctctctaaatgcctcacttcagtacttatttcttcctgtaagccttttttaatccctgaaagtccaggtcacaactggcatttcaaaaccaagttttctgtacatctttcattctccctgtgtgtggcctacagtccagctgaactacaagctctataagaaaaaacaaaacaaaacattatttagtgctgtatcattttagcatcctaaatgtttgtgattggtgaagatctgctgtattggtaggttttttcaacttaggaaatatacactacacccagtcaccataccttggaaagttgctcctctgactgaggttctgtaggcagaacagtccctccttgtgctttcatttcttctatgtatttattcaaagaagttaatttggccttcgcatgaagttttagttttttaattttgttatcagcagcttttctctcttcctgcccaaaaacaatgatggtaaatacataaatgtttattcccctcttatntagcacatactaaaagttggcggccgca

SEQ ID NO: 575919 - DNA, 112 bp, Homo sapiens
agctcgaccgtgacgatcggcgactttggtttggcattcggcgtgtgcacgtgaagatcggcgactatggactggatactcggcgtgtgcagtatggtcttcggcgtgtgcg

SEQ ID NO: 575920 - DNA, 227 bp, Homo sapiens
acctacaataaatgagtacgactgcgttgtggttttagaaatacggtctgactgtgtagccctggttaaattcaaactcctgggctcaaataatcctcctgcctcagtctcccaagtagctggggctccagggtcatgcaactgcacccacgctagtttacactttctttacaggtgcataagtgtaaaacgtgaagactcatagaagaacagccgtgtgtaacgac

SEQ ID NO: 575921 - DNA, 1339 bp, Homo sapiens
cgaacgggtgctccccacacctcgttcccgcttttttccggccgcgcgccgtgtgttttctccccgtgggggtggggcctccccggggggtcaccatacgacgttcaagagggtcccccccaaagagtttcggcagggaagatctttttttccggcccggcctcgcggccccctcccccttttttcccagagagtctttcgggggggaacccctggaccgaatgtcaaagctggacaaatacccactgtggccccagaacattctttttctttccccatgcagggggttgccagaaaagtggggccaccgggtaggtcccccgggtgataatattaagggaggaattgtcctcttggaagggggccttctccctctgtgttgggaaaagcccgaaatatttttgggggggggcaccaggaaattacttttggtaagtcccaccaattctgaggaccctgggtggtgccaaatcacaaaagaggtaaacacgcgcacccacagtgggccccccccaggaatataaaaggcgccccccccatgtgggtggagaaaacccccacaaagggtataatattttgagaaggagttttcttttggcaacatctcccccccctgtctccacagcctggaggtgttcaaccccgcacacagagaaagggggggcccacacacagaaagggggtgggcaacatactgtggttgttttcttggtgacacacctctccctccacacagctgccccccttcctctttctccacagcacagtctcccccacagtgtgtcgccccctcggagaggccccgcgggggggtgtccccccccactataagggagaacacacgagaaggggctcgaaagtgtggaaacaaccctccacggtgtcttctgtaaaccgagactttccggagatgtcccccccacacggtgagaacgctgtgttgggaatatattgaagagggggctatgtgaggagaaactctctctcccacgcgctataaggataactccacacactttcgacccacgcgcctcgagccccctcggagtttctggcctttcttcctgagcctctctgctgagtcctccctttcccttcttcctcgctgaggcctctccaccctctctgagccttctcacctgttcacatgccgcgagacctgtggattctcctgggaactccgagcaaaggcctgcaccgaagaagaggggctgaaaaggctgctggggctgccaccctcgctaattcccgcaataaagcacatctgcccccaaacccctttgagccttcaatttgatggacatttttatacagaaaaccatcaagatttccctttcca

SEQ ID NO: 575922 - DNA, 161 bp, Homo sapiens
cccgttatggcacagtggttaacgaatccaactaggaactatgaggttgcgggttcgatccctggccttgctcagatgggttaacgtatccagatgttacctgtgagctacgtgtgtagtgttgcagacacggtctcggatcccgctgttgctgtgtgctc

SEQ ID NO: 575923 - DNA, 116 bp, Homo sapiens
tgctgcagtgactgaactcacgcctgtttgttcatgtcactcagaagaagaggggcagtgagtggcactgcaaagggaggaagctcagatgtcgactgagaacccagtggtgtcta

SEQ ID NO: 575924 - DNA, 524 bp, Homo sapiens
tcgcaatgtgctggaattcgtgctttgaggcagaacgagacgatgggcaatgagcggctgagcggataagctcaaggcagaagcctaccagaaatacgtgggatgcagccaagatgtgccttgtgtgctagaggacctgccccagattgctgccaaaatcgctgccccacttaccaatggtcgatgagatagtaggtcctcagtggagacacacagtaaggtcacattagaagtgaacttgacttgctggactgagacttgcctgcctcttgtgcatagccactcacaggcgtggacctgtctaaagataccctgatcaagaaggccactggtgtgcaggtagtagaggctaccttgcatgcccactctctatccaacaggcacacccggccctacctcccagacaaccgtataaatcccccagaaaaaacgggaacgatactgcctctggtgacctaatctcgcaagggaccacaagtgctgtgtgtacccggccatactacttggctgtcttcctgtctcgt

SEQ ID NO: 575925 - DNA, 806 bp, Homo sapiens
ggggcattcctgaagctgacagcattcgggccgagatgtctcgtctccgtggccttagtctgtgctcgtcggcgtagtctctctttctggcctggaggctatccagcgtactccaaagattcaggtttactcacgtcatccagcagagaatggaacagtcaaatttccgtgacattgctactgtgtcgtgggtttcagtccagtccggacattgaagttgacgtgtactgaagcaatgggagagagcacatggaaaaagtggagcattcagacttggtctttcagcaaggactggtctttctatctctgtactacactggaattcgacccctcgactgaaacaagatgagtatgcctgccgtgtgaaccatgtgacttttgtcaacagcccaaggatagttaagtgggatcgagacatgtaagcagcatcatggaggttggaagatgccgcatttggatgggatgaattccaaattctggttgcttgcgttattaatcattgatatgcttatacacttacatctttgatgctagcaaaatgtagggttataataatgttaacatggacatgatctgctttatgattctacttgtgagtgcatgtctccatgtgtgatgtatctgagcaggtgctccacaggtgagctctaggagggctggcaacttagaggtggggagccgagaattctcttattcaaacatcgacatctggggtcagcattgaactcttgcactctcttgcactcaaaggttgttaagatagttgagcgtgcatagttaattccaatttacgtactctgttagaa

SEQ ID NO: 575926 - DNA, 414 bp, Homo sapiens
  misc_feature (216)..(216): n is a, c, g, or t
tgtaaactatttgtggctgtgctgcttgagtgacgtctctgtcgtgtgggtgccaagtgcttgtgtagaaactgtgttttgagcccccttttttggacaccaactgtgtcctgtgaatgtatcgctactgtgagccgttcccgcctaaccagggccatgttttaggtgcaactgtgccccgggtcaacttaaccccagtcccaaaaccaagctttnggtgtttcgggcccccatccgcccaccttggggtgaccccccctcctccatggacagtgtgagccccgggccgtgcatcctgctcagtgtggggtcagtgtcggggctgagcccccttagctgcttcagtgaatgtacagtgcccggcccgagctgaacctcatgtgttcccctcccaataaaaggttggcaggggca

SEQ ID NO: 575927 - DNA, 232 bp, Homo sapiens
  misc_feature (30)..(32): n is a, c, g, or t
  misc_feature (102)..(102): n is a, c, g, or t
  misc_feature (141)..(141): n is a, c, g, or t
  misc_feature (154)..(154): n is a, c, g, or t
  misc_feature (177)..(177): n is a, c, g, or t
  misc_feature (227)..(229): n is a, c, g, or t
  misc_feature (231)..(231): n is a, c, g, or t
ctcagcatcctgagtaaggactacaggacnnngcaagacagctgcagattcaaatgttcacaaacatttatgttctattttgatagatacataaactatgtntctcattcttatatacttatattagggcatgggattaangtcaaatagtggnaaattagtagaaataacatatcntatatccaattaagtctccaaaatcccaacatgcactcttctgtatacgnnntnc

SEQ ID NO: 575928 - DNA, 194 bp, Homo sapiens
ggaaagaaaacattagccagggtgataacgtgcccgtgtgttcccagctcactcgggaggctagaggcaggagaatcgcttgaacctgggaggcagaggctgccgtgaacagagatggcaccatggcacttcagcctgggcaacagaagcgagactgtctctaaatgcatgcatgcttgcttccatgcttgctt

SEQ ID NO: 575929 - DNA, 216 bp, Homo sapiens
cgagaaagcacataccaaggccagcaacctcaaagatcgaagatagataagcccacaaaaatgagaaagaatcaacgcaaaaatcttgaaaattcaaaaacccagagagccccttttcctccaaatgatcacaacacctctccagcaagggctcagaactaggctgagcccaagatgacagaagtaagcttcagaatgtggacaaaagccaatttt

SEQ ID NO: 575930 - DNA, 184 bp, Homo sapiens
tactagaggatccttacgactagcccgacagggtagaggccagtaacagcagtggaagagcaggcgccgtaggtgtggtgctccagcacaccctgggctagcgctgccaggaagagctgccagccctcgtgccagtgacagtggctgcctcctgcagctccctgccacatggaacagtgctgcc

SEQ ID NO: 575931 - DNA, 139 bp, Homo sapiens
cgcgctgtctgtccctcgtcactttcctctctctctcacaggtgtccattcactgtacctctcgccgatgtggccgtggctgctcagtgaggactcagtccccatcaaactgactgagggtcacacgacaccctgatgg

SEQ ID NO: 575932 - DNA, 216 bp, Homo sapiens
tcgaaagaggagggcggtcagtgaatgcagaagttcgggactccctgctctaggctcaggccaagacgctgtggtctgggccgaagcccctggcgttctacagagaagcctgtccagtgcacggcccctgtggcacttctcgtgggagcgtgtgagaccgcaggtaggggaagcacattcggtttaccttgtccgtgccgtacaaaatgtcttaga

SEQ ID NO: 575933 - DNA, 141 bp, Homo sapiens
cggccggtccgaaatgtattgagaaaatcataaggaagagaaaatattttactattcattaagcggaagtggatcatcatcaagggcttcagttttcatcaccgtcaggttgagcaggctgagcagagaggggcggagcag

SEQ ID NO: 575934 - DNA, 305 bp, Homo sapiens
cccgggaatttttcaaacccgtccttttccgttaaaagattttgccctttgaaattaaaaaccccggtttatttgattagttttatttttttatttttaccggcttaccagtctccctgttggcggtccttgtgccaaagtcaaataaccccccaagggcgccccccagtttgggtcccatattttttgcccttaagcttttccccaaaaattttgcatgtgttttccccccccttgttaaaatcgattaccaaaaaggcatggctaataattttggtggtgaaaataaataaataagttaccca

SEQ ID NO: 575935 - DNA, 167 bp, Homo sapiens
tccagagtatcccacgacggtggcgcagacatctgttgagacctgacccctagtcattggttaccagtgtgtcaggcaatctggactttccagtgatgccactgagatggcacctgtcaaaagagcagtggttccatttctagattgccagacacactggtaaccaa

SEQ ID NO: 575936 - DNA, 129 bp, Homo sapiens
tgttctttgcgtgaggtaaaggacctatgtatcatgccactgtactccagcctaggcgacagaggaaggttccgacttttcctttcttgtttgtctttttctgggagacagggtctcgctctattgcct

SEQ ID NO: 575937 - DNA, 443 bp, Homo sapiens
gttcttccccaggattccctgactccaaaccagccttttgttagggacaaactgcccaggaacccttattggtgctgtccacccatcccccaagcctctttacatttctaagccctcacctaggcaccacggtgaagccagcagactttgcttatcagaccttgctgcaatagccacacccccattacaaacccccccaccctgcacagggggaggtcatgggaaacataaacaaactttacctacaccctcctgtaataaacgtcacaaggtaatatgtagcaaaattaaccagcaaacaaccccaggatgcggccataggaaagaactccatcaaactcccctccccaatataaacccctcattctgtaagcttggggctacttcctctctgactgttaagggagcagccagcaggttaataaaaagttacctgcctaaaa

SEQ ID NO: 575938 - DNA, 552 bp, Homo sapiens
gatagagagaactcagtaattgatctctttaacatgtttggactttttcctatgcatcctttgaggataacttagtttcatccatgctaggcaaatgttctatcaatgtaccacattccctagccccaacccccaaaaagcaacttactctgaaaccaaaagacagtagaagatacaggcatatacatacatacatacatatgtataaatgttcatacatgcatgcatgtagggccgggaatgaaatatagtatagtgtctttcattgttaaaaagcacaacactccataagcagcctaagttgtagaatggttgtgattaaatcactattatcttatttttttaattgtccattccacactaaaagagaagggggaaaatgtcacttaaaattggtagatttggccaggcggtggtggcgcacacctttaatcccagcacttgggaggcagaggcaggtggatttctgagttcgaggccagcctggtctacagagtgagttctaggacagccagggctacacagagaagccctgtctcgaaaaaccaaaaa

SEQ ID NO: 575939 - DNA, 183 bp, Homo sapiens
gggcgcgaatggcgagccacacggctagggacctgccccaggtgggtgcttttcagcaattcttgagtcccctttcagctaaacacaggacctccttgggttctgtcctaggcttgaggcctctactttccttccaactcctagcctctgaaccctggtggctatcgcccatgccgcctcgcc

SEQ ID NO: 575940 - DNA, 316 bp, Homo sapiens
ctgttacacaacctagggtcagttctgcaggttatagccatttaccaagatagttgtaggtaaagaagggcagatttattagagaaattgtgaaaatatgttgcagtgggcagctcagcagagaaggggctacctgcaaagaggcaagggctggaggaaagttttatagggtcctgctgaagggtgctacgtgtggaatgaggtcattgtgcccgcaggttgtttgtgattagctgtctctaacaattgttcatacaataattgttcattattgttctcaacttggggctctccccaacctggggacccttcctta

SEQ ID NO: 575941 - DNA, 199 bp, Homo sapiens
tcccttttaaaaatcagggaaaaaataatttgttttccccttcccttaatgttccaaatgttaagtaagaaaaataggtttagccaacctcccattattttttttaaaaggtaaattttaaattattgtgtcaccccaatattattggcccataaaggtaaaaactcccaaataaaattggattttggggcccccccca

SEQ ID NO: 575942 - DNA, 772 bp, Homo sapiens
gctgatggattccaaaccaggacactagcctgagatctgcacagtcagacggacggcaggagtgtcctggctgtgaatgccaaagccattcatccccacgtcttagggcagtgccatggactttccactgcttcgttatggtggattggctgggcttcagtcttggatatttgtacttgtctgttcttaagctgttcaatcacattagccaacttctcccaaagggaccacaccccatggaggcctgacatcaacccagggagccaccgcacagacaggatgagaaggcatcacaagaacgataggtgcatgaccacaggggcactcatacgggagcctcatagatcatccagccacatccaacaacgggaccaacaggtgcatgagccacacacacagggtcgcacagggctcacaggggaatccacggacggaagccagagaccgagcagagtgcacacaggcctatatcactacaaaaaggagcccgagacaagagcacggacgggtggagggtggccgcatatcacgcccgtcccattaacagaggccggtagaaagtccccgcggggcggagcaaaagacaccatctgtgcgcccgggcccagtatacaccaacagggggacgccaacgcaccaccgccaggcaacaacgagggcgaaacaaacggcaggggggatgcacacaagagaagacccccaagagtctcaccacgggtggaagaacaagggcacccgaaaagaaaaaacattgggaaacccacaagctgcc

SEQ ID NO: 575943 - DNA, 587 bp, Homo sapiens
ggtgtccagtatcatggaccggagtgtaactaggccgtcgtattgcagagatagatgctgatgactgcggaggctgcgcggctcagaagcaaaaagtctcattacttgaaaataatcttgaacagctcactaaagtgcacaaggagttggtacgtgcactaatgccgatctccgctgtgaacttcctacagtggaaccagcgacttcgagctccacgctgagagacgtgacaagctttggaatcagcactgaaacgaagctaccagacaaatgcaatctcatgatcgcaaacgctatcagcaagacgtagatcgcataacggacagcagtcaggtcaaagaatatggacagaagagggcattccgcacagattgctaaacctattcgtcccgggcaacatccagcagcttctccaactcacccaagtgcaattcgtggaggaggtgcatttgtacagaacagccagacagtggcagtgcgaggtggaggaggcaaacaagtgtaatcgtttatacatacccacaggtgtatacaagtactcgaagtacgacgaggacatggtatcaagcagtcattcaatgaatata

SEQ ID NO: 575944 - DNA, 1049 bp, Homo sapiens
gatggcacttgcggggacgccgggtcgtacagagagacgtagtgtccgcctgttgagtgaccaggaggagcataagcagctagtactcgatcggggccctgctgtaatacagagccgctcgatacttgttatcacatccaccctagtaggtctcggcaccttgtcactctgatgcaatatccatgtaccaataggaactgtaatgagttaatagtcatgcgacacttcttcgggagaacatatggacaacacgtacgtagaggcatattcgggacggggcctattgtgcctagtatgtgcatcagctccctgcaacatgtgctgggtagtctattaaactcacacgaggagggctatcggtcgcctttccgaaagatcccccgtcatgcggcctagcctgctggtccgtagagctaaagtggtaacgaacgagctaatgtgggggtgccatgtttacaagtgcgctaccagtacgtatactgcgcgcgaaaaataacgcatagtaagcaaagtgcggtggctcgcagcactccccttctagggtgggtccgatacgcgcccttcggagaaatgctcgatcggaggacggcaagttcctgctcattctcgttcgacattatctaccgacgaacggggaacgccatgactctggagccagagtaagggtctctttctaggagtatcggtggccgggagatgcttcggtcgatcggggaagcgaccagtcaccagaacgggcgatacctaactaggactgcgtcagtcgatctaggccgcaatgcaaggtatagaaccgacagcgtgctagaagaggtggcgccaggaaccttcgtcctttgccggatttgcctagaaaaacccagttagccgggaaagctaaggtggggattaacgctggttaaggtgtccaacctggtgcctgacagtgacaagttggccccaggtggaagggaaagcgcgcgtgaccacgatggctaaagcccgacaacacaatggtgcggggtaccgagaaaaacaacggcgcgaggttgacacaagacgcgggcagg

SEQ ID NO: 575945 - DNA, 904 bp, Homo sapiens
gcggcggctctggcacccagtgtcctggcctgcgccttcccgccaggcctggacactggttcaacacctgtgacttcatgtgtgcgcgccgtgcacacctgcagtcacagctgtagccccctctgccaagagatccataccgaggcagcgtcggtggctacaagccctcagtccacacctgtggacacctgtgacacactggccacattgacctgtggccgcggacctggcgtctgctgcgaccaggagcccttacctcaccctgattataacacctgaccgccacctaactgcccctgacagaaggagcaatggccttggatcctgagagtggcagaacccacgcgtgctgttcggagaagtggctccttggagagatcagacagcggctgctatgagtgggctgcagtggcgtggacgaggcccgaacctgttatccgcgtgccctggaagacacttcgcgcgcaaggacctgagcgaggacgacgcgcgcatcttcaaggcctgggcatgtggcccgactggcaggtggccgactagcagcaggggaggtgggcccgaccacccgagggctgagactgcggagacgcgccgggttggaaaaccaacattccgctgcgcactgggacagacacagacgtcagatatcgtgatgctgcgagataaactcggggtgacccggccagaaccccggcagcaaaggttggaacgggcgcggtcacgaccggggaaacatgttgcttgggacgaagggacccagggacacgggcacaagaactagaaggcacgacaggcccccgaaaagcagggccacaacaaccaaagaggggggaaaccacggggcaaaacacggtgacaaaacaggagtgtaggcactccagaccccagggaccgctcgagtgaa

SEQ ID NO: 575946 - DNA, 258 bp, Homo sapiens
tacaacctataatatcgggcgaccatctagtgatctcttgatccaactatcgaggtcgtcgaccctatttttcatatggactctagaacaggattgtgctgttgtccctatggtaacttgttccgttgagctccaattattggatcaagtatcatctatagtagttcagctttgacttggtggttctctttgctatgtcagtctcggacgttggtttctgttccgatctcgtcaccgacctcaatttcttatgcatgt

SEQ ID NO: 575947 - DNA, 311 bp, Homo sapiens
  misc_feature (13)..(13): n is a, c, g, or t
  misc_feature (66)..(66): n is a, c, g, or t
  misc_feature (156)..(156): n is a, c, g, or t
atgtttatatggncaatatgtacatgggtgtatgttaagagcatgagccatccacaagattttagnaaagtccatttggaaagctcaatgctttgggcttccacttgctttgctgcctctgtcctcagaaggaggcttcatccttccacgtaaccngcaaatcctttatgcagagatgtacacaacacactcctctccttggctatgacaccttgaaatggtcctcttggtggcccctggtgctcatttcagagtagttcaaattaaggtgatcagctttcatgccaataactctacccccggaagttcca

SEQ ID NO: 575948 - DNA, 369 bp, Homo sapiens
cttgaccattcaacttcgaaactttaacatcaatggatccagcacacactggtgtacggtctgctatgcatgcagcctgtgctaggcaacagaagtatcagaccaggaactgacagcctcactgccacaggaagagaggcttcacacaataagcgtttcattcaacccaggctggaccctgtgcttatttgagttgaaccatcacttgggcacaaagatgcaagcccagacacccataaagagctgtaagggctgatcacagatgtctttctaccctcgaggagctctaaagtgtgggtcaggacgagaacacacatgcatgcaacccaaggggggtacccgaggctcgcaattccgtacatcattggt

SEQ ID NO: 575949 - DNA, 429 bp, Homo sapiens
  misc_feature (60)..(60): n is a, c, g, or t
  misc_feature (81)..(81): n is a, c, g, or t
  misc_feature (88)..(88): n is a, c, g, or t
  misc_feature (207)..(207): n is a, c, g, or t
  misc_feature (300)..(300): n is a, c, g, or t
  misc_feature (377)..(377): n is a, c, g, or t
  misc_feature (387)..(387): n is a, c, g, or t
agagagagagagagagagagagagagagagagagagagagagagagagagagagagaganagagagagagagagagaccanatttganggccttcaaacagatcctgcccagccaacatttctaagtcctttcctttgccctctgcttccttagaacttgccccagaccccaaatcagggaggaagatttgaacctgcctcctgtcntccttgcctggctggtcttgcaataaagtctttcttttctcaaaggcagtaccatggtattgcttccgtgtacattgagcagtgagcctgagnaggaaaatagggtcaggaggcagggaacataaggccaattcacacttcggctgtaacaggaaatatccactccatanggccgtatcntgtaagtgacctttgtaacctttacttcatcctctgcattta

SEQ ID NO: 575950 - DNA, 1701 bp, Homo sapiens
  misc_feature (786)..(786): n is a, c, g, or t
  misc_feature (1113)..(1113): n is a, c, g, or t
  misc_feature (1324)..(1324): n is a, c, g, or t
tcccgggctacctgcagaggggtccatacggggttgtcctgggatccccgtcgtaatcttaaagggaaatctttcacaatgctccggagcccttgagtgtccgtgcaaattgaaggaggaggagtgtcctataagtttccttgcagcaggaacccactttagggtggcaccaattcttgacttccagaagtggaacagtacattctataaaaggaaaaggtgagtggccactctatattattcaataaatctcctcaacgaaggacctggggaaaaagcttttcgtggcgtggcagcctccggtgcaagtgggtgtgccatgtgtgaaaaccctgtcgtgatgtgtctcaggtgtttattattcctctccgaggaattcacgtggcccaagagagggcgtgggtgcgtgaaagttgtggcggtgcgtgcccaactgtggggacgcccaacctcccaaatgtggcgtgggccgggttctcacatctcctgtggaaaaccttttcaacttaaacccgagaatcccgagggcaagcctttccgggggaggcccacgcggtgttcctgtggtggggtttatctggggccccccagggggtgctggacacaacacaggactcttcttacaagcggagggggcatctctttatctgtgttaaaccctcttaactcttaacacatgtgggggggcctggtgggtaacccacacagggtatttttctccctcttcctgtgggcgccatatgttgcgtgcgacccatttgtgccaattcccccattgtggcgaanccaaaccaaagggtggaagggcctccacactccaggggggggggtcacaacaaggggggggggggagaaatcgccgtggcctccgggagaaagatcccctgggggggccatttggggggtggggcaccccattttttccccgggggaaaacaccccccagtgtggggaggggtccgaggggcgctagaaatacgtgggtaacctcccctacaccagggaagaaattctcctggaaagcaacgtatttggccacaacacgacgaaacgaagcccaggcggctcgtctgcgctctgacaaaaacggcggctgctgtgcacccccacggnggggaggcgaactctccccggcgggggcacgaattgggaactgtggtccccccgggcgccctgagaggtgtcccccgcgggtaacacccaaacgcccggtggggtgcgttgtccaacaacggtgtgtccttagacaaggcggtggtcacacgaggtggtccccccctgtgtgtgcgcatatatataaggaaaaagttcccctaactgaggnaagaaaggggggggagcgccaacacaccgtgcacggcgaaaaactcggttctctgggcacccccccgtgtttccgacgccgctgtggtgtggttgtgtgtgcacacccccactcggggtggttgtttgacaccatgcttgtcagtgataagtgtcctcaaccacgcagcggaagagctgtgtgtgctggggaagcacacacactctttctcgacaacaaacaacgggcctcttctttgtcgtgggcaggagagaacggaagctgctgttgttcacaccatctaaggaagaggccctgattagacgtgatacttgtcttctgctcgacatcatgtgaatcacgaatgcagactactagtatcagtcgtaatctaatca

SEQ ID NO: 575951 - DNA, 448 bp, Homo sapiens
tatgctggactgacaatggatgagaagtgccccaggatataccccctacagaactacattttggggagaaatgtgttccacacaaaagtggacgaataggacgaatgccgcaaagttgttgccggaataccgcatggagacagggggccatgattgcaccttcctggttcgggagagctgagagcttccccaatgagtacgccctgtgcttctggcggtcaggccgggtccagtacttgcccggagtcggtccaccatgaagggctgggatccttgaaatacgtacttgtatttgacgtcctctactttctgcaggggtctcagtccctcattctaggatagcgccgagacgcgcctgagccgggccgagttcgagctggggctcgcgtgacctttgggcaaggccaagccccacgagtcccagccggtgtcctattagagcctgggc

SEQ ID NO: 575952 - DNA, 375 bp, Homo sapiens
gaagagctattcgcagagaaacagctcgcacaaaaagccaccgccccgaaacccggggaaatctgtttcctgtgaaaggcctggctccgggcatggcggtttccctgatcctctctcccaaattttccggcaggggattgactcgagggcgaccatctaggactgcggtgggccagggagtgtgcggttctcgtcccaaggttacaggtgaggacgtccacggccaaggccgttaccccaagatcgcgccgcccttgttagcttgcacggagggcgcccgggaattcgaaaccaacggctgtggccccaaactcctaagccctgcggaaggttcttgttgggaaacccggctcatttgcaccaactcttttgggt

SEQ ID NO: 575953 - DNA, 1000 bp, Homo sapiens
caatgaattgagaagccgcgactaagggaagatggagacaatactggagcagcagcgggctatcatgaggagaaggaacggctcatggcacgtcatggctaaagagatgctcaccaagaagtccacgctccgggaccagatcaattctgatcaccggactcgggccatgcaaagataggtgatatggaggtcagtgggaacctgagggatcagtatgatgataaggatggattcacgaacggaggagctcaatgcacattgtcaggacccgaaatgagttgctgtaatactataatagaatcatgcgatgtacaggaataccgccggaagggacccaaatgaggatctgtgtgccctaatgtcaggtggagtctacgaggaactgccctgaaggctcgcatgagaatccaagtgtacaagaggcacgaaacttggggacgttcacagatgaagagggacatggtcgttatctcgatctcgatggatgtctcctcgaagtacggtaatcggaaggcttctgagacagctggcatgatatgacataccttgtggcattcttgaacagtttattccgacgttcctcacggaaaggaagaatgcagagtataggagatagctacaagatgctgcttgacgtgtcatcaggatcacaccgatagagtgaagcctctccaagatcagactgcgactttgggggaagaatccgggaatgagacggggaacgacaggggacgaactggcgaacctcaccaggaagaagcggagggaaaacagccaggaccccgcaagcatgagcaagccccccacaggacgcccagaatacgcactaccaagagaggcgcgacccagccgaggcagcatgcaaccggccaccaacgtaggagaacgcggcggacccacaacacacgccgatcacaccagaaacagacaccaaaccgtgaccaagaacctgggacgcacgtggcagcgcacaccaccgaaagcaggaacacccacacaa

SEQ ID NO: 575954 - DNA, 100 bp, Homo sapiens
catcgagctcgacctattcacttcaccatttagtataagaacaagcactacctcatgagaattcacgtgtggggtggtatagagtggtatggtggtatag

SEQ ID NO: 575955 - DNA, 210 bp, Homo sapiens
ggatgctgcagacactgaaccgaggagccagttgacaccagagccggaggtggacccgcccagttgcccccgagcttcaagcaagggccttgattgagcttttaacaagcaacttttgagcttcaagttgcaacaggcggaccactttattcaagtctttcgctctccgggtgtgtgtccaactacaaaagccgtgattccaaccttggg

SEQ ID NO: 575956 - DNA, 751 bp, Homo sapiens
  misc_feature (736)..(736): n is a, c, g, or t
gggagttccttggcagaaacggtacggtatgccagatcctagcctgccttgttggttttgaaggatttccatcttgttacaagatgagaagttacaggtcatctcccctgttcagatgaaacccttgtttgtcgcaaattggttacagtttcgtttttgcctcccatggttcacttggctctgaacctacagtctcaaagattgagaaaagattttgcagttaattaggatttgcattttaagtagttaggaatctgcccaggtttttttttgttgttgttaagcattgatttggatagatgcacggaaagttatcttacagcaaactgtagtttgcctccaagacaccattgtctcccgtgttaatcttctcttttgtatacatttgttacccatggtgttctgtgttccttttcataagctaataccactgtagggattttgttttgaacgcatgattcgacaggcacgcatgtagcttagtagctcggttcccagtttgccatacaatgtaggttctgcttaatgtgacttattttttcgccttgaagcagtttgcatgactattagtggttcaaagtcaatttttacaaatgcacaagttataaatacagaagaaagagctaacccaccaaacctgacaaggacctcgcggacactttcatagctaagactataagtagatatcacgttgtgcgtgtattgtaagttgatacaacatctggatatacacganggcactgttgcaatt

SEQ ID NO: 575957 - DNA, 326 bp, Homo sapiens
tgacgccgtgattatgcataataatattccctccactgcgtctttacatggtttgacgggaagcctggatttctggatatgagctgtagcagacatctcctcgtttgcgtggaataagcttttttaatcagtttatctaaagcatagttgatgtagacatttagattttaatgttgattccaagcaagagtcaacatttgcttggaatagcttttttaatctctttactctcagtctctgtgtgtggttaagtctcatgtgagtgtctcgttagtggcgccatatcgtttactattttttggttcttttttttttaatctaattgg

SEQ ID NO: 575958 - DNA, 251 bp, Homo sapiens
tttacacaaaccggtgtcagttattgtcattatcagtattacatactgtacataactgaatgtgctgtacttttatacaactggcagtgtagtaggtttgtttacaccagcatctccacagacacgtgagtaatgcactaggctatgacattaaaacggctaaaacatcatgaggcaatagattttctgctccattataattttatgggaccactattgtatatgtcattatgcagtacataacgtcgacg

SEQ ID NO: 575959 - DNA, 133 bp, Homo sapiens
  misc_feature (83)..(83): n is a, c, g, or t
gctagaatgcgcgaacacggacatactgtcacccgggtgacagcccgaaagccctggactgggaaaacccatgaagccctggncgtttttttaaacaccaaacctttccaaccggaatcgcctcagttgatag

SEQ ID NO: 575960 - DNA, 476 bp, Homo sapiens
ctgtcaaccggggcgtatgtgaagcagcaaggtcatggcaggcagcaataacagttaaggctatgtccagtccaaatctcccaaggtacctaggcagtgaaatgtccatgataaagagacccctcaagacagtttggtggcccctgtccagccgccttctcagacatttccacctccctccctcccctcaaaaagtgttgcaatgcagcagaagcccacggttaatgtccggcccatggatggtcgagatcgggcccctagtgaactccctgaactgaaaccagtgccggagcagtatcgacagcagacctttgaaaaaacagagttgaaagtgcctgccatagccaagttcaccaaagtgaagatgccttctcagtcagttgaggcagacctactccaatgaatgtccattgtgtcgcagagattctgaaggaaatgacccattcatgatcgcctcctttgacagcgatagcata

SEQ ID NO: 575961 - DNA, 390 bp, Homo sapiens
attagatccttaaggcgacgcgggtatgcacgggtaacgcgctcggtctacgggaagcacagaccccctgcagaagagccagctccacatctggagctgcaggaagagaactttcttgggtgctctgtgcaaagggcttgtgattgtttcgcccgtaaagcaagccctgggaagaggtagagttccgcacgagaccacgggctcactgcttctgctgtgggagccaggataggaagtcccagaacaatgcctctgggggctcttgcagccaggccagctgtccctagagcaggggaacctccccctctaacaaggtggtctttcccattcccacttagactgtgggcagcctccctggaacattccccagggatgtccaacagtctccca

SEQ ID NO: 575962 - DNA, 765 bp, Homo sapiens
  misc_feature (92)..(92): n is a, c, g, or t
tctggaccttaggaatttcctttttatgggaaccttgctcttgggggggtttcccatatccctcggattccagtaaacccggggatcttttnatgcctctcccagcttctgcccggccttgttgcatgaggattcgcccgtcccttcccgattggagagttttctggagcccatttggacccaattccatccactccggtggtatgcgtaaaccatccccaaagaaaggcccagcaccctggaagaatttgaatgggccacacccgttcaatcgtgcagttcaaatgaatgggaaattccccccttggtgtccacatgtgggtgttcccggcgcctgtgaaggagaaggcggaggcccaagcacggggcccccctgaaggctgtccgcccagggcaactgtaagcccacggagcccgtttacccaggagaccacccaccccgtcgcccttctccgtatgctgcctgcgccaccgaagagctttgtctgggccctggctttccctgccctctgccttcacctctgtcagcacggtggccttgcctggggagccccacatgtgtggcccacccccacccacggccacatccccactaccttctggtttgaaggcgctgacactggcagagaggtaaaagggtggggccttgagaatggaggctccccgggtccctgcccccttctgttttcctaatgtttttttctataaagggtcaggcccgtcagcatcactgatggggattaaagtattaatgctttgtgacca

SEQ ID NO: 575963 - DNA, 249 bp, Homo sapiens
caggtgccggtccgtatcataaggacgagcaacactgttgctgcccggttccactctgaggagcccgtcagtcttcgaaatttgcaagttcatgagaagagccgaaaatatgcgccgtacgggtttcatgatggctgcgatcggggggggtgtctgcctcggcgcccaggcacagtcaagcggcgagacagctgccgatcgctccagactcacggtgggcgtcggcgctgcgaccctgccggactatga

SEQ ID NO: 575964 - DNA, 472 bp, Homo sapiens
  misc_feature (49)..(49): n is a, c, g, or t
  misc_feature (62)..(62): n is a, c, g, or t
  misc_feature (80)..(80): n is a, c, g, or t
  misc_feature (178)..(178): n is a, c, g, or t
  misc_feature (238)..(238): n is a, c, g, or t
aacaaaagctggaacctggcccgccctcgaagggtcgggcccttatggnccggctccctatncacattcatatccctganctgactttctggattgggcgaactagttaaagaatttgtagatctgaaatatgactaagcgccttcatgtacaagaacactgccaagaatttccctcngcccttgggtgtcatatttttgatgacccaggaagcggaacgatctctaaagcccaatanactatttatgtacgccagaaacacacatacaccaacatatgtctggaaactcttttctgacactcttcccctccccttgagtgttggctggacttagtgagtgatgctgtacactttctaagacaaggtcataacaggcactatggctttttctgacttcctgacccatgtcccgagtgcgatctcccggccatgatcttttttttttttttttttgcgatggagacctgctct

SEQ ID NO: 575965 - DNA, 472 bp, Homo sapiens
accactcctatagatcagtatctagagaatccatttatgaatgacagaagaagcaactctaatacaaattgagttgggttttaggatgtggatatataggtagatgtaggtataaactgccatttgcaaagctctttacagtataccaggcactttaacatacattctataactaaacagggaagaaatgtgttaaattacctccaatttatagatgaggaaactaagatttagagaacctaggtacttccctaagattgcatagctagtcagtagttgagccaagacttagattttctgtgtattctttccacggttccccattgtttttattccctttagtgatgaaagagaatataagtgctgtacagaagaatacatagttcagaaagtagaagcgtcaagaagacatctggggccttctgtagagaaacggaagtagccgtctgtacactgatctataggagtggtg

SEQ ID NO: 575966 - DNA, 108 bp, Homo sapiens
gtagaaactgagctgatgaggcgtattataccatatccgcctagctttaaacgagtactgcggctaagttactattgacccagcagatggggcgcttcgatcatggcg

SEQ ID NO: 575967 - DNA, 165 bp, Homo sapiens
  misc_feature (1)..(1): n is a, c, g, or t
  misc_feature (129)..(129): n is a, c, g, or t
ngtactctacagatcttataaaggcgagtcgggtatgaggaggaggagctgtggccccagcactgtggcaccaggtggctggaggaggaggcgctctgcagtggcctccaccggtcactggagccccanggtcaggtggctgagcaggaggaggctgctgccctg

SEQ ID NO: 575968 - DNA, 288 bp, Homo sapiens
cccccagcctggtagggggggacaagcccaagtcatttttgatcccccccttttccccccccagatcccaggggtttttcctggggttttggaacccccctcattcctttcaaacccaaagggggaattattggttcatttggctttattcaaatctagttatggatgggcccaaattatttgggccaaatttgaaatgtttttttttttaaaattaaaaaaagcccaaagtccgggggtttttaaaaattgttaaaattaaggaaaaaaaaaggtgaattgggtcca

SEQ ID NO: 575969 - DNA, 224 bp, Homo sapiens
  misc_feature (10)..(10): n is a, c, g, or t
  misc_feature (18)..(18): n is a, c, g, or t
  misc_feature (33)..(33): n is a, c, g, or t
  misc_feature (54)..(54): n is a, c, g, or t
gcttgcgggnctaacctnaagcatatgaggagnctttgcccggttcctagtggnataagatcttgtaaaccaccaaagctttcctaatgaagaaacgatgtggacaaaattaagctagatcaagagaccttgagagcagagaacaaatcccagtgttgctgatatatggcttctgcttctcttgtgtgtgcctcagctctgaagaagttccctgaaatgggtta

SEQ ID NO: 575970 - DNA, 1158 bp, Homo sapiens
gacagagcccgggccgaatggcatccttcctctgccaagcatcttcctgcattcctcatcacagccggccgagacaccgcgccttgccatgagtcctccaatggcgcgcgactgcaatgcatacttcaatccagttctagccccccctagctagataccgcctgtgactacctgtcagaagtggcaacattgttttgcttacactagctacctggatagcccgactggccgggcgcgacagtaaggaggcgtcgcgtgagcactacatgaactgcgctgcctagtgacttgacagaccctgtgtgggaattcaacccaagaacatccaaagtgtgaacgtgaaagtccccccgtgacctccaaatgatgcaccaaaatccagaagtcaatagacacaaaactcaagaattgggcggaaagcttggcctcaatcctgcataaccccatagttaacgaaacatcatcgacaaacgatgctgaacagtgactagatccaactgaccaggaagggaggaggaagctcactggtggctgttcctgacaggaggcccttgcccttgatacgcacacagaacgaggcacagcagagacgacaagctgacagagggccaccttggatttgtgcctaatggtgtaacgagcatcggcttaggaagaaggtccttcataatacactaattgcacttcattagtgctgacgattctactcggtctcacgtaatctctacaggctgcttaccaagacgttcaagcgcggattgaattgaaactctaaaccgttccgcacgtggtccacacttgataatgccatacaactcgggagactggtgcgagaccacacgaggttaggatgcgacacccggggaattccacattacaagcctatcgccacgggtcgcaattggttctccacagtgtgcgaccaaagaccatcgaagctgaaaagaactcccaggacgagagactggcaaacatgtgccaacaccacgcggggaaaagcacgcacgggaggcatccacagccaacacggggcacaagcagacacaaccgcagacaaagccacgggcgaccaggacgacacaccagccacgacaacggaaggagacgaaaagagcagggagcgagcacgcacagacgaacaggacaacaaagaggcga

SEQ ID NO: 575971 - DNA, 200 bp, Homo sapiens
gtctgaaattgaagatatgcttaaagtccttcagaagatgactataagaggaagaggaggacagtgatgaagattattcatcagaagcagaagagtcagactattctaaggagtcattgggtagtgaagaagagagtggaaaggattgggatgaactggaggaagaagcccgaaaagcggaccgagaaagtacggttgca

SEQ ID NO: 575972 - DNA, 722 bp, Homo sapiens
  misc_feature (317)..(317): n is a, c, g, or t
  misc_feature (324)..(325): n is a, c, g, or t
  misc_feature (415)..(415): n is a, c, g, or t
  misc_feature (430)..(430): n is a, c, g, or t
ggaagtaggaaaaggttatcacaggttcttacagctgtggttggtgcctatctttctatgatatgtaaatatacgaaaacccgtaccgactcctagccgtccagtgggtgcagtgtgcaacatccaagtcaacaatccagtgcactaggaaggaaagggctgggtcaaccaaagactgccatcctggcttccctcagtctactatctggacatgcaagatcaaactcgcagagaatctcaatgtggaagcatgaacagaaagaagaggaattctcactcgtcgcagtgggcctagtagagcggagccatctagcggnctcctanntaactctctccacgagtgagcctctcgagaagggtaagtgacgacgcaggggctagggtgttctgtgcactcctagcgtatggacaagcnggttacacgagcagngttcttccggaggggacccccacgtcaccttgcggcgcaacacaccacttgcacccgcaaaggccccctcaccgagtgcctacgtcattcctcgaaagacaccatttcatcaacagacacactcttaggacatggcgtggttggtgggcgctgagggcttgcttagtggaccctcgattgcaattccctccacggtcatcaacttccatcgcggaaagggccttggggacgtgcccatgggcacgaaagggcacgcgactgggggacgcgtttctgcgcccaccggttggca

SEQ ID NO: 575973 - DNA, 180 bp, Homo sapiens
atagtggcgcgggtcgggcggactgttaggacaggacgtcattcattccgacatgccacaggggcaggctgatggggttgagctgacactcagcaatcaggcgcccgtattcctgcccaggggggaggtagaaatgttagcatcagctgggccctgagacaagcattcatgtgcccgtcg

SEQ ID NO: 575974 - DNA, 550 bp, Homo sapiens
  misc_feature (173)..(174): n is a, c, g, or t
  misc_feature (177)..(178): n is a, c, g, or t
  misc_feature (181)..(181): n is a, c, g, or t
  misc_feature (195)..(195): n is a, c, g, or t
  misc_feature (201)..(201): n is a, c, g, or t
  misc_feature (203)..(204): n is a, c, g, or t
  misc_feature (221)..(221): n is a, c, g, or t
  misc_feature (238)..(238): n is a, c, g, or t
  misc_feature (240)..(240): n is a, c, g, or t
  misc_feature (244)..(244): n is a, c, g, or t
  misc_feature (260)..(260): n is a, c, g, or t
  misc_feature (264)..(266): n is a, c, g, or t
  misc_feature (269)..(269): n is a, c, g, or t
  misc_feature (271)..(271): n is a, c, g, or t
  misc_feature (273)..(273): n is a, c, g, or t
  misc_feature (275)..(275): n is a, c, g, or t
  misc_feature (277)..(277): n is a, c, g, or t
  misc_feature (322)..(322): n is a, c, g, or t
  misc_feature (335)..(335): n is a, c, g, or t
  misc_feature (370)..(370): n is a, c, g, or t
  misc_feature (389)..(389): n is a, c, g, or t
  misc_feature (391)..(392): n is a, c, g, or t
  misc_feature (396)..(396): n is a, c, g, or t
  misc_feature (398)..(398): n is a, c, g, or t
  misc_feature (404)..(404): n is a, c, g, or t
  misc_feature (408)..(408): n is a, c, g, or t
  misc_feature (419)..(420): n is a, c, g, or t
  misc_feature (423)..(424): n is a, c, g, or t
  misc_feature (427)..(428): n is a, c, g, or t
  misc_feature (430)..(430): n is a, c, g, or t
  misc_feature (432)..(433): n is a, c, g, or t
  misc_feature (436)..(436): n is a, c, g, or t
  misc_feature (439)..(440): n is a, c, g, or t
  misc_feature (443)..(446): n is a, c, g, or t
  misc_feature (449)..(449): n is a, c, g, or t
  misc_feature (451)..(451): n is a, c, g, or t
  misc_feature (467)..(468): n is a, c, g, or t
  misc_feature (477)..(477): n is a, c, g, or t
  misc_feature (484)..(484): n is a, c, g, or t
  misc_feature (509)..(509): n is a, c, g, or t
tccctggcattgtttccaccccctggtgcctgcaggccacccagggaccacgggcgaggacgtgaagcctcccgaacacgcacagaaggaaggagccagctcccagcccactcatcgcagggctcatgattttttacaaattatgttttaattccaagtgtttctgtttcaannaannatnaataagttttattnaaaatntnntaactttatttaaaatnatttttaacattatgananactnctcagattctaagttnttgnnnttntntntntntttttttttaagttctcatcattattacatagactgtgatgtatntttactggaaatnagcccaagcacacatgcatggcatttgttccacangagggcatccctggggatntnnctgncncatganccanctctgtcccannatnntannancnnatnatnnaannnncantnaagtgtttaggtgaannaaaagtagntaagcangcacgcacttcagcgcaccacagcntaagcctgcaaacagcctctccaagcgcgcttttcacctta

SEQ ID NO: 575975 - DNA, 177 bp, Homo sapiens
gtttagcttccgggcccctcgcttgtttggcctcctggggggatgggtagttgctgggttgtgggggggggaagcccgcttggggtttgggggccaatctttgttagcctttctttttaattcccccggggggtcttagggggatctggttctccccgtctcttgttaaaaaaaaaa

SEQ ID NO: 575976 - DNA, 139 bp, Homo sapiens
gtatcccagactactcagtgttactagaggcaggagacattacgtgtgggcgtgaaccctatgagaggctggagcttgcatgtgagcagagctgattccagtgcactccagcctgggcgacagagcaagactccatctc

SEQ ID NO: 575977 - DNA, 620 bp, Homo sapiens
agtattatggtagggatcttgaagaaatctggccgggcacggtggctcacgcctgtaatcccagcacttgggaggccaaggcagacggatcacagggtcaggagattgagaccatcctggctaacatggtgaaacccagtctctactaaaaatacagaaaaattacctgtaatcccagcacttgggaggctgaggcgggcggatcacagggtcaggagatcgagaccatcctggctaacgtggcgaaaccctgtctctactaaaaatacaaaaaaaaaagagaaccccaaaaaaaaaagaaaaaaagaaaaaaaaaatagttgtgtggggccggccgccgagaccgcagagaaaggttgaagagaccactgtgcgtgggagcgggagcgccacccaaagtgacgtaacgagcaacagcggggcgacatcagagtggtccccaaaagaaaaactcggcggagcagaaggaaaaggcggcgggaggtacgcccccccagaaagaaaacccgccggggggaaaccacaggctttcagacacacctccaaggaggacatcaaggagacaaaaggggactcaccacggggaggcaacaaggaccagataaaaatacgccgacggg

SEQ ID NO: 575978 - DNA, 466 bp, Homo sapiens
  misc_feature (6)..(6): n is a, c, g, or t
  misc_feature (47)..(47): n is a, c, g, or t
  misc_feature (62)..(62): n is a, c, g, or t
  misc_feature (94)..(94): n is a, c, g, or t
  misc_feature (190)..(190): n is a, c, g, or t
  misc_feature (457)..(457): n is a, c, g, or t
aaaaancaacggtgacaccttcaaaaccccaccgaggtttaaaatcnccctcactgcccganaaaaggcggccctgtgtacctttttaagaaanaggagtgcctgtttcctatacctaacccagtcaggacctagtacaagatgcctgcctggaccgaataaatgaaaaagcttctggccgggtgccagntgtcacgccctgtaatccccagatctttgggaggctgaggcgggcggatcacgaggtcaggagatcgagaccatcttggctaacacggtgaaaccccgtctctactaaaaatagaaaaaattagccgggcgtggtggccggcagctgtactcccagctactcaggaggctgaggcaggagaatggcgtgtggggtgaacccgggaggcggagcttgcagtgagcagagatgatgccactgcactccagcctgggcgacagaatttgnctccatctc

SEQ ID NO: 575979 - DNA, 290 bp, Homo sapiens
gcccccggggaggggcctttccaccgaggcctcaaaaaaatccctgaaatcgggggatggttgttgaaattgttttccttgtgcttgggggattgaggcccaaccccccccccttttttttccccaggggttggggttttttccccaggccggccccccagctttcccggggggggggggggggggggggggggggccctttttgttccctccccccttctttctttccccttgggggcccccctcccccgcccgattggggatttaatttccggggccgggggggggga

SEQ ID NO: 575980 - DNA, 1315 bp, Homo sapiens
  misc_feature (1315)..(1315): n is a, c, g, or t
gctgaccagcagcatgggcggttggcaagaacaagcgccttacgaaaggcggcaagaaagggagccaagaacgaaagctggttgatccattgtctaaggataagattggtatgatgtgataagcgcctgctatgttcagagtataagaaatattggaaatgacgctcgatcaccaggacccagaggaatccaaagattgcttctgatggtactcaaggtgtctggttgtgtattgagaagtcgaggtcttgactagactttgcatgagatagatgaagttgcagttttaggaagagagttcaagtctcgattactggaaagatggttgcaggggtataataactgcgcatggagctcaacttcgcatcgtgctatgggatctttacgccgtggacaacacatggtgtctccagtggtcaacaaaatgggcagaccaatgattgagagctcacgtggatgtcaagactgaccgagtgggtatacgttggctctcgtcctgtctcgtgtgatcggggtcttgacttgaacaaagcgcatctcagaatcagtatacggcaatgaaccgtcttgagtggctcagccagcgcgaagagggtccgaccaacatcgcggaagaagatgatggacaatcatgatgccgagaggtgcagacgaatatcgacgttgaaaagaaagtggtcaattaaacttgagttccagagcaggcatgtggacaagacgtagcaaagaggcttgccaatgctattatatgcctactcccgatgatgtcttcagtttagagccagttccaggatgctgcaaggaaagcccaaggtttggaattggggaaagctcatggagcttgcatggttggacgggcaggaattctcggagcagccactgggggaccagacagggcgaaagttgaacgagcagggatggcaatttgagcgcaccaagtcaaggagccgggtgcaaagagatcaaaactacaaatctggcgagataaaaacaacgaaccacgcgaggcgtcaacaacgcaacaaccaacggaaagaccccggggccacaattaacgacgggcgcaacacaacacgatacagaaagggcagagcggagacacactcccgaagaccacactgtggggcaagtggagagcacagcaccggacacctcacgtgcagccaacacagaacgcgggacgacacacaacacaaaaaaggagcaacgagagcaagccagaaaacagccaacaccaaccagccgacgtcagcgaccgccacaccaccagacgccccaccacaaccaccatcgaacagcagatcagacacaccan

SEQ ID NO: 575981 - DNA, 814 bp, Homo sapiens
taaaccaatgtttatttattcatttttcccctctcttataaaacccccccccacaccgaggaaatttattgggaggggtgccccaacctagggcctggactctgaaacccttaactctccccacttctccctcattttggtgtgacttatagggtgggggcaggtggtttcagctccaaaacgtggtgtgctcctccctattgtggactcggtgcagaaggaggcacctaggcacacacatttgggtggtggccccccccaggagggtttgaatgtggcaggcgtgggaaagaaccaaaagagtctctctcccacatataagagggccacctttatcccccctctaagagagagcggggtgtggggcagtctgtggactcgctgcgtggagacacagtgtgtgtgttgctgtctgaggggggtgagggcgaagagcagttataatctctccacagtgcgggagggagagcctataatgtgtcgccaaaatgtgtggcagagagaaacaacatgtgcgaggggaacgttctcgcccatatcaccggcggggccacctcttggcggggtctcacggttgggggcgcgtgtcctgaatatgtttctcttggtgggcgtgtcgcgaaaagcgtgcgggacacagggtttgcacccattagcgccctctcatatggcgccacaagagtaggccccgcgttttacgcgaagtgtagcgccccccgtatacccccctttggaccacaatttgggcggaagggggttccccctcttcttccacaccggggtgccacccctgtgggggggttcctcccgggtt

SEQ ID NO: 575982 - DNA, 448 bp, Homo sapiens
  misc_feature (296)..(296): n is a, c, g, or t
actctcgacttccgtgctcacgttctttcatgcttagtatccccagatgttctttggcgggcttcttctttccattgattctgtcatgacggtagacttctgttgtcaccttcatcttacggattttagctcgaaccttggattccacctgtctccataaagtaaagatgtcttccaggacaattttaattccttcctgtctacggcggttggacctcctggctctctgctgtacatccgtggatccatcatgtccattttgagacgggaagatagtcttcaggaaagacacacanaggtaagttgtgcagagggagatggcacatttataacttctcagaaacacagtaatgataagtaaccaaggacttccaccagagtcagtcccacgatgacgatggtcagccagagtattgataacccaaaggtaagttgtgcagagggagat

SEQ ID NO: 575983 - DNA, 313 bp, Homo sapiens
ccccctttttttttccccgggggccaaagggttccggccctgtttgggggggggggtttcccccttccccctttttaaaaggggcaggcctttttgggtggtccctttccccttggggggggggcccccgggggtttttcccccccccctggttttttttttttttccgccccccctttgggtttacccccgggaaagttgggggggtcggcccgggatttggggtttggtttttttttcttttccccccaaagcccccccctttgcccgtttttttttcccaccccggggattaggggcttcttttttttta

SEQ ID NO: 575984 - DNA, 296 bp, Homo sapiens
  misc_feature (70)..(70): n is a, c, g, or t
  misc_feature (91)..(91): n is a, c, g, or t
  misc_feature (176)..(176): n is a, c, g, or t
  misc_feature (202)..(202): n is a, c, g, or t
  misc_feature (242)..(242): n is a, c, g, or t
  misc_feature (249)..(249): n is a, c, g, or t
gtaggagaaccaggatttgggcaaggttctcacttggcaccagctgtcattcatgctttgggtttactgnatatacattagacattcctgntctttttggagttagtctacatcccctgaagaaacatgtgcccaggtgattcgtgaagctaagagaacagcaccaagtatagtgnatggtcctcatatcccgtgtggtggntagttggcccgacctttaaggcacattaccacattattcngaatatncttcattgctcaagtttactacttgcacttctgacccccttcccttg

SEQ ID NO: 575985 - DNA, 1694 bp, Homo sapiens
cattgcaccggaaaaaatggggttgcttccaaaaacccttcaccacgccaatttccagagcatagtaaagtaaagacccttgagaagatgagaggatggaatttagtatataagttaagcagctggatttagataggcatgtggatagttaatagatgataacagatagcatgcatatgctggtagatggggggttatagtgggagtctgatattctcatgtcatcaattctgttgtctcaaagtagaaaacaaggtgctaagctaacggaatacaagaaaaatattgtgaggttaaggaacaaggagaaagtacaaaatactctctgagatataggtggaaaaaatagactaagattgtaataagtaattttgtggcataattaaaaatcaccctgagatttgtggtagtttttataaattgaaagtgaggccagggaaatttgttagtttgttttctagccattttcagctgcctgggtataagcagagctggcataaagtgggatttagctagatttttattttcctaagttataggaagtagtcctttaataagtaataaaggcttgatagcctgagattaaaaataaattaggaaatagtcaaggaactgtttacagcattagcaaaaaaaaaaaaagtataaaaattggtctctaacgaatcatttttggtacaattgtgaaatgtttactcttgttcttttaactgaaggcattgacaagactccatcaactgaaacttttaggtcatactttagtcgttgaatttgcaaaagagcaagatcgagttcactccccatgtcccacttcaggttctgaaaaaaaaaaaaggtctgatgaccctgtcgaagatgataaagaaaaaaaagaacttggttatttaacagtagaaaatggaattgcaccaaaccatgggctgacttttcctttaaattcatgcctcaagtatatgtacccaccaccttccagcacaatcctagcaaacattgtaaatgccttggcaagcgtgcctaagttctatgtacaggtccttcatcttatgaataaaatgaatttgcccacaccttttggaccaattactgcgcgacctcccatgtatgaagactatatgccattgcatgcacctcttccacccacatctcctcagccacctgaggaacctcctttgccagacgaggatgaggaattatctagtgaagaatcagaatatgaaagcactgatgatgaggaccgacagagaatgaacaaattaatggaactagcaaatcttcagcccaaaagacctaaaacaataaagcagcgccatgtgagaaaaaagagaaaaataaaggatatgttgaatacacctttgtgtccttcacacagcagtttacatccagtgctgttaccttcagatgtatttgaccaaccacaacctgtaggtaacaaaagaattgaattccatatatctaccgacatgccagctgcatttaagaaagatttagaaaaggaacaaaattgtgaggaaaaaaatcatgatttacctgctactgaagttgatgcatccaatataggatttggaaaaatcttccccaaacctaatttggacatcacagaggagattaaagaagactctgatgaaatgccttcagaatgtatttctagaaaagaaaaaaaaaaagggcagaatctcctagagaagaaatgtgaa

SEQ ID NO: 575986 - DNA, 323 bp, Homo sapiens
cgcaacgtcaaagccgcagtggtcgatgttggctggcgcgtccggatggtggtgggcggccgccaggtggtccggtgctgggcccacaccgctgtgcaggcggaaggccggtccaacgaaggacggcgccaacgctaacggcgccaacagatggtgtgcgcacatgcgccgttgtggtcgaatggaccaagaacatgcacgtaacgtgcattgttatcgcgtcgggatggcgtctgcattcctttgataggctgtgctttcaatcacatatggcagggaatcaagctttaaagaggtatagtcggcgcatgcataaacggcct

SEQ ID NO: 575987 - DNA, 1112 bp, Homo sapiens
ctgagccccccgctgaggagaaagaggacttgctgaagaacttcggggctcagtctgtgcgggtcctgtcagataaggggcgactgaaacatacagcttttgccacattccctaatgaaaaagcagctataaaggcattgacaagactccatcaactgaaacttttaggtcatactttagtcgttgaatttgcaaaagagcaagatcgagttcactccccatgtcccacttcaggttctgaaaaaaaaaaaaggtctgatgaccctgtcgaagatgataaagaaaaaaaagaacttggttatttaacagtagaaaatggaattgcaccaaaccatgggctgacttttcctttaaattcatgcctcaagtatatgtacccaccaccttccagcacaatcctagcaaacattgtaaatgccttggcaagcgtgcctaagttctatgtacaggtccttcatcttatgaataaaatgaatttgcccacaccttttggaccaattactgcgcgacctcccatgtatgaagactatatgccattgcatgcacctcttccacccacatctcctcagccacctgaggaacctcctttgccagacgaggatgaggaattatctagtgaagaatcagaatatgaaagcactgatgatgaggaccgacagagaatgaacaaattaatggaactagcaaatcttcagcccaaaagacctaaaacaataaagcagcgccatgtgagaaaaaagagaaaaataaaggatatgttgaatacacctttgtgtccttcacacagcagtttacatccagtgctgttaccttcagatgtatttgaccaaccacaacctgtaggtaacaaaagaattgaattccatatatctaccgacatgccagctgcatttaagaaagatttagaaaaggaacaaaattgtgaggaaaaaaatcatgatttacctgctactgaagttgatgcatccaatataggatttggaaaaatcttccccaaacctaatttggacatcacagaggagattaaagaagactctgatgaaatgccttcagaatgtatttctagaaaagaaaaaaaaaaagggcagaatctcctagagaagaaatgtgaa

SEQ ID NO: 575988 - DNA, 197 bp, Homo sapiens
tgtgctctagacgctgcttatttatcccacccggaaaatctgcgcgtattgtatgcctgctgggaaatcaggtgtgtatgggcggggaggtgctgatgttaggtgaagtgtgagggcgccaaccaataagcaccaggcacaggggcagattcaccaggtgaacacagctgcccagccacgacacgcacagtggctac

SEQ ID NO: 575989 - DNA, 1091 bp, Homo sapiens
ttcctgtttccttctttgatgacaacttgtgttaaccctcgcacatctctgggccaattttgcttaaacatacagcttttgccacattccctaatgaaaaagcagctataaaggcattgacaagactccatcaactgaaacttttaggtcatactttagtcgttgaatttgcaaaagagcaagatcgagttcactccccatgtcccacttcaggttctgaaaaaaaaaaaaggtctgatgaccctgtcgaagatgataaagaaaaaaaagaacttggttatttaacagtagaaaatggaattgcaccaaaccatgggctgacttttcctttaaattcatgcctcaagtatatgtacccaccaccttccagcacaatcctagcaaacattgtaaatgccttggcaagcgtgcctaagttctatgtacaggtccttcatcttatgaataaaatgaatttgcccacaccttttggaccaattactgcgcgacctcccatgtatgaagactatatgccattgcatgcacctcttccacccacatctcctcagccacctgaggaacctcctttgccagacgaggatgaggaattatctagtgaagaatcagaatatgaaagcactgatgatgaggaccgacagagaatgaacaaattaatggaactagcaaatcttcagcccaaaagacctaaaacaataaagcagcgccatgtgagaaaaaagagaaaaataaaggatatgttgaatacacctttgtgtccttcacacagcagtttacatccagtgctgttaccttcagatgtatttgaccaaccacaacctgtaggtaacaaaagaattgaattccatatatctaccgacatgccagctgcatttaagaaagatttagaaaaggaacaaaattgtgaggaaaaaaatcatgatttacctgctactgaagttgatgcatccaatataggatttggaaaaatcttccccaaacctaatttggacatcacagaggagattaaagaagactctgatgaaatgccttcagaatgtatttctagaaaagaaaaaaaaaaagggcagaatctcctagagaagaaatgtgaa

SEQ ID NO: 575990 - DNA, 723 bp, Homo sapiens
gctgagcccaggaagaagaagtggacactgagcctgaagaacctgcggccggaggacagcggcaaatacacctgccgcgtgtcgaaccgtgcgggcgccattcaacgccaccgtacaaggtggatgtgatccagtcggacccgttggcaatgcccgtgctcacaggcacgcaccccgtgaatcacgacaggtggacttcgaggtgtggaccacgctccttccagttgctaagggtgcgcagcgagctgtgaatgccggtgatccagtggctgaagcgcgtggagtacggtccgccgagggcctgccacgaagtccaccatcgatgtgggcggccagaagatttgtgagtgcgtgccgcacggtgtgacggtggtggtcgcgtgcccgtagcggtctccatagcctcacataagctgtctcgatctaccctgtgcccgcctagggatcgatgcggtgcagtgtacatctgccttggcgccaacgaccatggttgctacgagcttccgcaagcgccttcctcaccgtgctgccagacccaaaaccgccagggtcacctgtggcctcctcgtcctcgggcactagcctgccgtggcccgtggtcactcggcgattccagccggcgctgtcttcatcctggtgcaccctgctcctgtgggtttgccaggccagaagaagcgtgcaccccgggctggcccttccctgctgggcaccgccgcggggacg

SEQ ID NO: 575991 - DNA, 1636 bp, Homo sapiens
cattgcaccggaaaaaatggggttgcttccaaaaacccttcaccacgccaatttccagagcatagtaaagtaaagacccttgagaagatgagaggatggaatttagtatataagttaagcagctggatttagataggcatgtggatagttaatagatgataacagatagcatgcatatgctggtagatggggggttatagtgggagtctgatattctcatgtcatcaattctgttgtctcaaagtagaaaacaaggtgctaagctaacggaatacaagaaaaatattgtgaggttaaggaacaaggagaaagtacaaaatactctctgagatataggtggaaaaaatagactaagattgtaataagtaattttgtggcataattaaaaatcaccctgagatttgtggtagtttttataaattgaaagtgaggccagggaaatttgttagtttgttttctagccattttcagctgcctgggtataagcagagctggcataaagtgggatttagctagatttttattttcctaagttataggaagtagtcctttaataagtaataaaggcttgatagcctgagattaaaaataaattaggaaatagtcaaggaactgtttacagcattagcaaaaaaaaaaaaagtataaaaattggtctctaacgaatcatttttggtacaattgtgaaatgtttactcttgttcttttaactgaaggcattgacaagactccatcaactgaaacttttaggtcatactttagtcgttgaatttgcaaaagagcaagatcgagttcactccccatgtcccacttcaggttctgaaaaaaaaaaaaggtctgatgaccctgtcgaagatgataaaggacttttcctttaaattcatgcctcaagtatatgtacccaccaccttccagcacaatcctagcaaacattgtaaatgccttggcaagcgtgcctaagttctatgtacaggtccttcatcttatgaataaaatgaatttgcccacaccttttggaccaattactgcgcgacctcccatgtatgaagactatatgccattgcatgcacctcttccacccacatctcctcagccacctgaggaacctcctttgccagacgaggatgaggaattatctagtgaagaatcagaatatgaaagcactgatgatgaggaccgacagagaatgaacaaattaatggaactagcaaatcttcagcccaaaagacctaaaacaataaagcagcgccatgtgagaaaaaagagaaaaataaaggatatgttgaatacacctttgtgtccttcacacagcagtttacatccagtgctgttaccttcagatgtatttgaccaaccacaacctgtaggtaacaaaagaattgaattccatatatctaccgacatgccagctgcatttaagaaagatttagaaaaggaacaaaattgtgaggaaaaaaatcatgatttacctgctactgaagttgatgcatccaatataggatttggaaaaatcttccccaaacctaatttggacatcacagaggagattaaagaagactctgatgaaatgccttcagaatgtatttctagaaaagaaaaaaaaaaagggcagaatctcctagagaagaaatgtgaa

SEQ ID NO: 575992 - DNA, 603 bp, Homo sapiens
aggtgctggactcaatgaagagagacaagaacctgaatggggcagcagccatcagaaggcagttggcgtcgattcttactgccagacgaggatgaggaattatctagtgaagaatcagaatatgaaagcactgatgatgaggaccgacagagaatgaacaaattaatggaactagcaaatcttcagcccaaaagacctaaaacaataaagcagcgccatgtgagaaaaaagagaaaaataaaggatatgttgaatacacctttgtgtccttcacacagcagtttacatccagtgctgttaccttcagatgtatttgaccaaccacaacctgtaggtaacaaaagaattgaattccatatatctaccgacatgccagctgcatttaagaaagatttagaaaaggaacaaaattgtgaggaaaaaaatcatgatttacctgctactgaagttgatgcatccaatataggatttggaaaaatcttccccaaacctaatttggacatcacagaggagattaaagaagactctgatgaaatgccttcagaatgtatttctagaaaagaaaaaaaaaaagggcagaatctcctagagaagaaatgtgaa

SEQ ID NO: 575993 - DNA, 433 bp, Homo sapiens
  misc_feature (425)..(425): n is a, c, g, or t
cgaacacgacaaccaatcgcgtgcctgttttgcccaaagtcatttgtaaagtaaaattcccaatagaaaggaaattttttttctccagttcccatttgaagtttgcttatatttctatgagagaagaatcctgttaatcattttctgttgcatttaagttattgaatacaatggaacggacaataaaagccggggcgggataaaagcgcccgcgggtgaggaagggcgctgcaatgagaacgaaaaatatgaggtaacaaagaagccactaatgtccatcgaaaccaattccttctaaatattcccccgaacagtacagttcttctcattgaaatatcgacaatgaataggcacgtattaagccaaaaaaaaaaaatctccgttctactcgaataatcttctcctcccatactcaggagggagantagtggat

SEQ ID NO: 575994 - DNA, 130 bp, Homo sapiens
catatcataagagctgaggtagcgaggatcactataacccaggagttcagggttccagtgaactatgattatgtcactagcactccagcctgtgcgagagagggagaccttgcctcatgctgctactcct

SEQ ID NO: 575995 - DNA, 345 bp, Homo sapiens
aatcacactttgaatagatcatttaagagagaacaatgacaggaacagaaaagtgacaggatataactaaaggaaccgagaggaaaaggaggcagcccgctcatctgggatcagctgggagtccagagatgcttcccaatgggaggaagttgtgagagacccccagtgttccacattcccactgtggactcctgcagtcctagccacagaagagctcctagactcacaggcacaggcactgacactaacataggaaaccacctaaagatgatgcaaaggtattgccccagagagggaggtcacactgggtcccacatacctcccaagtcctgagaagctacagca

SEQ ID NO: 575996 - DNA, 162 bp, Homo sapiens
  misc_feature (5)..(5): n is a, c, g, or t
  misc_feature (9)..(9): n is a, c, g, or t
  misc_feature (24)..(24): n is a, c, g, or t
  misc_feature (49)..(49): n is a, c, g, or t
  misc_feature (52)..(52): n is a, c, g, or t
  misc_feature (62)..(63): n is a, c, g, or t
  misc_feature (106)..(106): n is a, c, g, or t
  misc_feature (143)..(143): n is a, c, g, or t
  misc_feature (149)..(149): n is a, c, g, or t
  misc_feature (157)..(158): n is a, c, g, or t
ggatnccgnccttttttaacactngaaaacattccaaaactttaaggtnttnggtgtatttnnccagctttatttgctgtactttatttgtatttgccattcagtnctagcttttaagtatatttttttctttttctcatttntcaatncacattanntttt

SEQ ID NO: 575997 - DNA, 742 bp, Homo sapiens
tacaatttccattggactgagaactacactccgtattccccacaacagccaaagcaagccctgcccaaggaagaggctgagctcagagctcagacaggcttatccctgccccgacctgatggtctgcctctacccaccctggtagccgaatactaaggtcataatcttttgcgagatctatggccccacccaccacctgagaatcctgaatacttaaccagttgtccctagggcaagtttaccttcccccataggacctcagctgatgcactcttgaaagcatcacctcctggctggaggccaaccaacacaaaaccagcacactaaatgaaaacacaaccagagaccctcacagagtccacctcactcccctactacctccactggagcaggtgctggtatccacatctgcaagacctgaagacggatcacatcacaggactctgtgcagatactccccagtaccagcctggagcccagtagctctgctggatggctaggcccagaagaacaaaaacaattactacagttttactcttaagaagccccattcctaggggaggagagagaacaccacaccaagggagcactctgtggaacaaaagaatctgaacagcaacccagatcttccgtctgacataatctaccaaatgaaaagaaccgaaaaatattctggtatatggcaaaccagttcttacaccccatattgtacagtcccagcatattcaggcagagaacctta

SEQ ID NO: 575998 - DNA, 172 bp, Homo sapiens
  misc_feature (84)..(84): n is a, c, g, or t
gactcaacacccatttactggcacaattgggtggagagaagggaatgggtatgattgtcctgtactgctcaaggattgcagganggttcagaaggggaagagaggaaacggccaggctggagagctgtgctgattagcacttccctcgccacatgttcagacggactcactc

SEQ ID NO: 575999 - DNA, 673 bp, Homo sapiens
agcggagtgctcggcgtcagacatggcggaggcgatggatttgggcaaagaccccaacgggcccacccattcctcgactctgttcgtgagggacgacggcagctccatgtccttctacgtgcggtccagcccggccaagcgtcggctgtcggacagctcatcctgcacggcggcggtaccgtgtgccgagtgcaggagcccggggccgtgctgcatggctccagccctggggaggcgctggcctgaggcctcgggtgatttcatctccacgcaggtacatcctggactgcgtgtgagcagtcgaacgagaggtctggagctggaggcactatcaggcgtgggccccgtcctcggtcgggggacaccgtgctcggaagctaaagtcccgagtggtcgccttggctcagaggtgcgccgaaggagccggagccgatagacgagaacgaccaggtgcggatcagcgcattcgacggaatgacggacagacgtagcgcatccattacgctacagtgaaggacaaatgccacgctcgcctcagctccggtcaccaggtaacgccttgtgtgacagcgatggacgaagagctcgctcacgcagtactcgtggctagtccctgaaggaccgctagctcaagcacctgcggggccaggagcataagtacctgctgggggac

SEQ ID NO: 576000 - DNA, 284 bp, Homo sapiens
catcgtagcgggcgtatacgggctgtgacctacgtatgttgacggtcctgtaagtaggacgagtgactcttcgatcaggagaacgtggttactacgcacagagacgttctcccacgtcggttaatacgtggggggtaacggcgaggttacgcgaggcttgctagacagtcatcaacacacagctcttagctgggacgttacgacgttggacaggggatacccgagactcgacacttcgtaagtcctggttcatacgcgtgtttcctgagttgtaacacacgcga

SEQ ID NO: 576001 - DNA, 1086 bp, Homo sapiens
ctaggctaggtagcgagcgggtgttaatcggcgaggggagagcagaatgtggttgcatactcctaatgcctatgattgaatctggggtcaggatggatctggatgcatcccagctcctcagacaaatgaggctctggacccacccatgaggctggcgcgaaggaccctgagagcctttgaatcagatgtttgccacaatagaactaccaaccgaaatggaacattacaggccaggtttcaatttcggaataatctgtcgaagaacaaggagaggcaggaaaggactagaggcccaacagaccccccgaaagagggtggtgaagagagtgcaaagtttggactttcatggttggccctaatgtctgtcaaatgaaggcctagagcctccagtgtggcgagatgcagtgacttccttggagggtctgtatgtggaggccggaccagatctcatggcggtcccaggtctctcagtgacatagagggtgcgagctgacggagatcggtgttgccttgtgaatctgtgaggagctctaccgagaggaagctgttgatcgaccatcagagaagctgtaacccttcacgtgccttaccttcgctcaaatactggcagctcttcccccagaggggtggaggaacctgatgtcatcttccagaacttcttgcaaaggctgaagtaaccagttagactctttgatggggctgagcaattcacaccctgtggaggaagagcgtcatatcccatgtgaattccgtggggtacagctggaagaggaggtgtggtcgatcacaaggaccagtgtggcatgccaggcaatgaacaaccgttaagcgggggaggaccctcgatggattcccgtctagaaactacaaaagtgcagaggggtgtcacaaccggacatcgttctggtacgggggaataacaaaaaagataggggcccatgggttggcacacgcaaaaaaaagagaggcaaacagatgaagaaagccaaagatgaaagcctctttgagagacacaacgacgagagaaacatcagcaaggcgatgcacacaagtccgagaaagagagagcagcagcgaaagtggtag

SEQ ID NO: 576002 - DNA, 370 bp, Homo sapiens
ctactactactactactactaaattcgcggccctcgacgggggagtcgcttgaacctgggaggcgggggttgcagtgagccaagagcgtgccactgcactccagcctggtgacagagcaagactccgtctccccagcctccagagtggctgggactacacatgtgcactgacacgcacggctaatttttgtatttttagtagagacagggtttcaccatgttggccaggctggtctccaactcctggcctcaagtcatcctcccgccttagcctcccaaagtgctggaattacaggcatgagcaccacgcccgaccatcttcttgccggcaactcttagaccaggaagcctcggatgtcgacgcggccgc

SEQ ID NO: 576003 - DNA, 244 bp, Homo sapiens
ttcaaagcaaagttttttattaaattttataaatttttaaaccccaataggtccccaattggtttttgggggaatgacccccagcaaaaccgggaaagggccagttttctttttttttttttttggttaggtaaacaaaagttttaactactttttggggtttatgaaaatcatttagttgccaaggggcctatgccattgttaaattttttttaagtaatttaacaccagatttgctaattta

SEQ ID NO: 576004 - DNA, 1940 bp, Homo sapiens
atcacggggagtctagggaaagggggaaagtcttccagcctgtgaactttaaccagattcctacttgtgcaagaagcagaagcacaatttgaagttaatagaagctttctcatggagaactttattccgtccctgagctcttctagcaagttgttttggagttgactacgcagtgacgacggagattacccagtcaactatttttgaacgctgaaagggaaaatcacctttaaattgaaaagataattttcagaagagatttgactgtattttgtgctcctcagcattcatgcaaaggtgttcgcggagtacagaaacggagtatgatgactggacttctctgttctctttcaggtttattaatgccagaagaagaatagtacagcccatgattgaccagtcaaatcgagcagtgagccaaggagcagcatatagtccagagggtcagcccatggggagctttgtgttggatggtcagcaacacatggggatccggcctgcttgcagagcatgccaggggactacgtttctcagggtggtcctatgggaatgagtatggcacagccaagttacactcctccccagatgaccccacaccctactcaattaagacatggacccccaatgcattcatatttgccaagccatccccaccacccagccatgatgatgcacggaggaccccctacccaccctggaatgactatgtcagcacagagccccacaatgttaaattctgtagatcccaatgttggcggacaggttatggacattcatgcccaatagtataagggaactcaagggaaaaggaaacacacgcaaaaactattttaagactttctgaactttgaccagatgttgacacttaatatgaaattccagacagctgtgattattttttacttttgtcatttttcatcaagcaacagaggaccaatgcaacaagaacacaaatgtgaaatcatgggctgactgagacaattctgtccatgtaaagatcctctggaaaaagactccgagagttataactactgtagtataaatataggaactaagttaaacttgtacatttctgttgatcacgccgttatgttgcctcaaatagttttagaagagaaaaaaaaatatatccttgttttccacactatgtgtgttgttcccaaaagaatgactgttttggttcatcagtgaattcaccatccaggagagactgtggtatatattttaaacctgttgggccaatgagaaaagaaccacactggagatcatgatgaacttttggctgaacctcatcactcgaactccagcttcaagaatgtgttttcatgcccggcctttgttcctccataaatgtgtcctttagtttcaaacagatctttatagttcgtgcttcataagccaattcttattattatttttgggggactcttcttcaaagagcttgccaatgaagatttaaagacagagcaggagcttcttccaggagttctgagccttggttgtggacaaaacaatcttaagttgggcagctttcctcaacacaaaaaaagttattaatggtcattgaaccataactaggactttatcagaaactcaaagcttgggggataaaaaggagcaagagaatactgtaacaaacttcgtacagagttcggtctattaattgtttcatgttagatattctatgtgtttacctcaattgaaaaaaaaaagaatgtttttgctagtatcagatctgctgtggaattggtattgtatgtccatgaattcttcttttctcagcacgtgttcctcactagaagaaaatgctgttacctttaagctttgtcaaatttacattaaaatacttgtatgaggactgtgacgttatgttaaaaaaaaaaggtgttaagtcacaaaaagcggtaataaatatttcatttttgatttttaaaaaaaaa

SEQ ID NO: 576005 - DNA, 614 bp, Homo sapiens
ttttttttttctcctctgtgtcctcgaatgaccacaatcaggttttcttcttgatccttcagtgagccaaggagcagcatatagtccagagggtcagcccatggggagctttgtgttggatggtcagcaacacatggggatccggcctgcaggacctatgagtggaatgggcatgaatatgggcatggatgggcaatggcactacatgtaaccttcatcatgtaaagcaatcgcaaagcaagggggaagtaagtacagtcgggtgcgatctgtcttcactatcacttcagagactttattttattttttataatttgcccccattttttttttccttgcccataactgcatgcctttccaaactaaggacctgtttttaaatatatatcacccatctctgaagtcacagatgacactgatgtgcacttttgaaaaggccaactgacaagcctgcgtgtgttttaagcaggtgggactgccttttagcctatttactgtggccccaatgtgcacaaacacagacatcaggcagatattggacatttaagaataaaaataatgtcttgggggcaccagttgactgagagaaattaagcaggcttcaatgaagcgat

SEQ ID NO: 576006 - DNA, 1805 bp, Homo sapiens
tcgtgccgtatcatgagagcatggctcttccagcatctcacacatccgtacccttccgaagagcagaagaaacagttagcgcaagacacaggacttacaattctccaagtaaacaactggtttattaatgccagaagaagaatagtacagcccatgattgaccagtcaaatcgagcagtgagccaaggagcagcatatagtccagagggtcagcccatggggagctttgtgttggatggtcagcaacacatggggatccggcctgcaggacctatgagtggaatgggcatgaatatgggcatggatgggcaatggcactacatgtaaccttcatcatgtaaagcaatcgcaaagcaagggggaagtttgcagagcatgccaggggactacgtttctcagggtggtcctatgggaatgagtatggcacagccaagttacactcctccccagatgaccccacaccctactcaattaagacatggacccccaatgcattcatatttgccaagccatccccaccacccagccatgatgatgcacggaggaccccctacccaccctggaatgactatgtcagcacagagccccacaatgttaaattctgtagatcccaatgttggcggacaggttatggacattcatgcccaatagtataagggaactcaagggaaaaggaaacacacgcaaaaactattttaagactttctgaactttgaccagatgttgacacttaatatgaaattccagacagctgtgattattttttacttttgtcatttttcatcaagcaacagaggaccaatgcaacaagaacacaaatgtgaaatcatgggctgactgagacaattctgtccatgtaaagatcctctggaaaaagactccgagagttataactactgtagtataaatataggaactaagttaaacttgtacatttctgttgatcacgccgttatgttgcctcaaatagttttagaagagaaaaaaaaatatatccttgttttccacactatgtgtgttgttcccaaaagaatgactgttttggttcatcagtgaattcaccatccaggagagactgtggtatatattttaaacctgttgggccaatgagaaaagaaccacactggagatcatgatgaacttttggctgaacctcatcactcgaactccagcttcaagaatgtgttttcatgcccggcctttgttcctccataaatgtgtcctttagtttcaaacagatctttatagttcgtgcttcataagccaattcttattattatttttgggggactcttcttcaaagagcttgccaatgaagatttaaagacagagcaggagcttcttccaggagttctgagccttggttgtggacaaaacaatcttaagttgggcagctttcctcaacacaaaaaaagttattaatggtcattgaaccataactaggactttatcagaaactcaaagcttgggggataaaaaggagcaagagaatactgtaacaaacttcgtacagagttcggtctattaattgtttcatgttagatattctatgtgtttacctcaattgaaaaaaaaaagaatgtttttgctagtatcagatctgctgtggaattggtattgtatgtccatgaattcttcttttctcagcacgtgttcctcactagaagaaaatgctgttacctttaagctttgtcaaatttacattaaaatacttgtatgaggactgtgacgttatgttaaaaaaaaaaggtgttaagtcacaaaaagcggtaataaatatttcatttttgatttttaaaaaaaaa

SEQ ID NO: 576007 - DNA, 2061 bp, Homo sapiens
atcacggggagtctagggaaagggggaaagtcttccagcctgtgaactttaaccagattcctacttgtgcaagaagcagaagcacaatttgaagttaatagaagctttctcatggagaactttattccgtccctgagctcttctagcaagttgttttggagttgactacgcagtgacgacggagattacccagtcaactatttttgaacgctgaaagggaaaatcacctttaaattgaaaagataattttcagaagagatttgactgtattttgtgctcctcagcattcatgcaaaggtgttcgcggagtacagaaacggagtatgatgactggacttctctgttctctttcaggtttattaatgccagaagaagaatagtacagcccatgattgaccagtcaaatcgagcaggttttcttcttgatccttcagtgagccaaggagcagcatatagtccagagggtcagcccatggggagctttgtgttggatggtcagcaacacatggggatccggcctgcaggacctatgagtggaatgggcatgaatatgggcatggatgggcaatggcactacatgtaaccttcatcatgtaaagcaatcgcaaagcaagggggaagtttgcagagcatgccaggggactacgtttctcagggtggtcctatgggaatgagtatggcacagccaagttacactcctccccagatgaccccacaccctactcaattaagacatggacccccaatgcattcatatttgccaagccatccccaccacccagccatgatgatgcacggaggaccccctacccaccctggaatgactatgtcagcacagagccccacaatgttaaattctgtagatcccaatgttggcggacaggttatggacattcatgcccaatagtataagggaactcaagggaaaaggaaacacacgcaaaaactattttaagactttctgaactttgaccagatgttgacacttaatatgaaattccagacagctgtgattattttttacttttgtcatttttcatcaagcaacagaggaccaatgcaacaagaacacaaatgtgaaatcatgggctgactgagacaattctgtccatgtaaagatcctctggaaaaagactccgagagttataactactgtagtataaatataggaactaagttaaacttgtacatttctgttgatcacgccgttatgttgcctcaaatagttttagaagagaaaaaaaaatatatccttgttttccacactatgtgtgttgttcccaaaagaatgactgttttggttcatcagtgaattcaccatccaggagagactgtggtatatattttaaacctgttgggccaatgagaaaagaaccacactggagatcatgatgaacttttggctgaacctcatcactcgaactccagcttcaagaatgtgttttcatgcccggcctttgttcctccataaatgtgtcctttagtttcaaacagatctttatagttcgtgcttcataagccaattcttattattatttttgggggactcttcttcaaagagcttgccaatgaagatttaaagacagagcaggagcttcttccaggagttctgagccttggttgtggacaaaacaatcttaagttgggcagctttcctcaacacaaaaaaagttattaatggtcattgaaccataactaggactttatcagaaactcaaagcttgggggataaaaaggagcaagagaatactgtaacaaacttcgtacagagttcggtctattaattgtttcatgttagatattctatgtgtttacctcaattgaaaaaaaaaagaatgtttttgctagtatcagatctgctgtggaattggtattgtatgtccatgaattcttcttttctcagcacgtgttcctcactagaagaaaatgctgttacctttaagctttgtcaaatttacattaaaatacttgtatgaggactgtgacgttatgttaaaaaaaaaaggtgttaagtcacaaaaagcggtaataaatatttcatttttgatttttaaaaaaaaa

SEQ ID NO: 576008 - DNA, 2024 bp, Homo sapiens
ttttttttttctcctctgtgtcctcgaatgaccacaatcaggttttcttcttgatccttcagtgagccaaggagcagcatatagtccagagggtcagcccatggggagctttgtgttggatggtcagcaacacatggggatccggcctgcaggttggctcatcccgcctctgggcttccctgggaagtgccacctgctccaccagcctctccatccactctactatcccactgtcatggtgggtttaacatttgcctgctgcctgctctgcctgctttctttacattgggtgggggaaaaaaattcctctttgaaaaagtaaagattttaccacagtaccattatactctgccccatacacatcctttttcttttttctttttaaaccaaggcaataagtgaaaaggaatctgagtttccttctattttttcaccatcaattattgctgattttccggcctcttcttggattttatctcctttctaggacctatgagtggaatgggcatgaatatgggcatggatgggcaatggcactacatgtaaccttcatcatgtaaagcaatcgcaaagcaagggggaagtttgcagagcatgccaggggactacgtttctcagggtggtcctatgggaatgagtatggcacagccaagttacactcctccccagatgaccccacaccctactcaattaagacatggacccccaatgcattcatatttgccaagccatccccaccacccagccatgatgatgcacggaggaccccctacccaccctggaatgactatgtcagcacagagccccacaatgttaaattctgtagatcccaatgttggcggacaggttatggacattcatgcccaatagtataagggaactcaagggaaaaggaaacacacgcaaaaactattttaagactttctgaactttgaccagatgttgacacttaatatgaaattccagacagctgtgattattttttacttttgtcatttttcatcaagcaacagaggaccaatgcaacaagaacacaaatgtgaaatcatgggctgactgagacaattctgtccatgtaaagatcctctggaaaaagactccgagagttataactactgtagtataaatataggaactaagttaaacttgtacatttctgttgatcacgccgttatgttgcctcaaatagttttagaagagaaaaaaaaatatatccttgttttccacactatgtgtgttgttcccaaaagaatgactgttttggttcatcagtgaattcaccatccaggagagactgtggtatatattttaaacctgttgggccaatgagaaaagaaccacactggagatcatgatgaacttttggctgaacctcatcactcgaactccagcttcaagaatgtgttttcatgcccggcctttgttcctccataaatgtgtcctttagtttcaaacagatctttatagttcgtgcttcataagccaattcttattattatttttgggggactcttcttcaaagagcttgccaatgaagatttaaagacagagcaggagcttcttccaggagttctgagccttggttgtggacaaaacaatcttaagttgggcagctttcctcaacacaaaaaaagttattaatggtcattgaaccataactaggactttatcagaaactcaaagcttgggggataaaaaggagcaagagaatactgtaacaaacttcgtacagagttcggtctattaattgtttcatgttagatattctatgtgtttacctcaattgaaaaaaaaaagaatgtttttgctagtatcagatctgctgtggaattggtattgtatgtccatgaattcttcttttctcagcacgtgttcctcactagaagaaaatgctgttacctttaagctttgtcaaatttacattaaaatacttgtatgaggactgtgacgttatgttaaaaaaaaaaggtgttaagtcacaaaaagcggtaataaatatttcatttttgatttttaaaaaaaaa

SEQ ID NO: 576009 - DNA, 242 bp, Homo sapiens
attgaagcagtcagtcagtggaggtctattgaagcagtcagccagtcagtggaggtctattgaagcagtcagccagccagtggaggtctattgaagcagtcagccagcccatcagtggaggtttattgaagcagtcagccagccagtggaggtctattgaagcagtcagccagccagtggaggtctattgaagcggtcagccagccagtggaggtctattgaagcggtcagccagtcgacgc

SEQ ID NO: 576010 - DNA, 1523 bp, Homo sapiens
ttttttcttttcatctttgatgggtaaagtataaaaatgtttaggaatttgacccgctttctttttccctctctattttcaggtttgcagagcatgccaggggactacgtttctcagggtggtcctatgggaatgagtatggcacagccaagttacactcctccccagatgaccccacaccctactcaattaagacatggacccccaatgcattcatatttgccaagccatccccaccacccagccatgatgatgcacggaggaccccctacccaccctggaatgactatgtcagcacagagccccacaatgttaaattctgtagatcccaatgttggcggacaggttatggacattcatgcccaatagtataagggaactcaagggaaaaggaaacacacgcaaaaactattttaagactttctgaactttgaccagatgttgacacttaatatgaaattccagacagctgtgattattttttacttttgtcatttttcatcaagcaacagaggaccaatgcaacaagaacacaaatgtgaaatcatgggctgactgagacaattctgtccatgtaaagatcctctggaaaaagactccgagagttataactactgtagtataaatataggaactaagttaaacttgtacatttctgttgatcacgccgttatgttgcctcaaatagttttagaagagaaaaaaaaatatatccttgttttccacactatgtgtgttgttcccaaaagaatgactgttttggttcatcagtgaattcaccatccaggagagactgtggtatatattttaaacctgttgggccaatgagaaaagaaccacactggagatcatgatgaacttttggctgaacctcatcactcgaactccagcttcaagaatgtgttttcatgcccggcctttgttcctccataaatgtgtcctttagtttcaaacagatctttatagttcgtgcttcataagccaattcttattattatttttgggggactcttcttcaaagagcttgccaatgaagatttaaagacagagcaggagcttcttccaggagttctgagccttggttgtggacaaaacaatcttaagttgggcagctttcctcaacacaaaaaaagttattaatggtcattgaaccataactaggactttatcagaaactcaaagcttgggggataaaaaggagcaagagaatactgtaacaaacttcgtacagagttcggtctattaattgtttcatgttagatattctatgtgtttacctcaattgaaaaaaaaaagaatgtttttgctagtatcagatctgctgtggaattggtattgtatgtccatgaattcttcttttctcagcacgtgttcctcactagaagaaaatgctgttacctttaagctttgtcaaatttacattaaaatacttgtatgaggactgtgacgttatgttaaaaaaaaaaggtgttaagtcacaaaaagcggtaataaatatttcatttttgatttttaaaaaaaaa

SEQ ID NO: 576011 - DNA, 286 bp, Homo sapiens
  misc_feature (44)..(44): n is a, c, g, or t
gatccccggagggtttctttggcccagaagttggagggtgcagngagctatgattgcaccacttaactccagcctgggtgacagagcaagatatcatctcttttttaaaaaaaaaaaaaaaggaggaggaggaggaggaaggaaggaaattaaaaggtctcaccaagagggtgttccctggggcccaataattaataaggcccagggttaaaattaaaattttttcctaaagaggacccactccctgaaggcctccttgatttccaattggggtcccgggctcgaa

SEQ ID NO: 576012 - DNA, 747 bp, Homo sapiens
  misc_feature (2)..(2): n is a, c, g, or t
  misc_feature (153)..(153): n is a, c, g, or t
  misc_feature (165)..(165): n is a, c, g, or t
  misc_feature (229)..(229): n is a, c, g, or t
  misc_feature (234)..(234): n is a, c, g, or t
  misc_feature (256)..(256): n is a, c, g, or t
  misc_feature (261)..(262): n is a, c, g, or t
  misc_feature (265)..(265): n is a, c, g, or t
  misc_feature (269)..(269): n is a, c, g, or t
  misc_feature (285)..(285): n is a, c, g, or t
  misc_feature (290)..(290): n is a, c, g, or t
  misc_feature (296)..(296): n is a, c, g, or t
  misc_feature (302)..(302): n is a, c, g, or t
  misc_feature (322)..(322): n is a, c, g, or t
  misc_feature (333)..(334): n is a, c, g, or t
  misc_feature (348)..(348): n is a, c, g, or t
  misc_feature (367)..(367): n is a, c, g, or t
  misc_feature (373)..(373): n is a, c, g, or t
  misc_feature (376)..(376): n is a, c, g, or t
  misc_feature (384)..(384): n is a, c, g, or t
  misc_feature (389)..(390): n is a, c, g, or t
  misc_feature (405)..(405): n is a, c, g, or t
  misc_feature (409)..(409): n is a, c, g, or t
  misc_feature (415)..(415): n is a, c, g, or t
  misc_feature (420)..(420): n is a, c, g, or t
  misc_feature (424)..(424): n is a, c, g, or t
  misc_feature (452)..(452): n is a, c, g, or t
  misc_feature (460)..(460): n is a, c, g, or t
  misc_feature (464)..(464): n is a, c, g, or t
  misc_feature (467)..(467): n is a, c, g, or t
  misc_feature (480)..(480): n is a, c, g, or t
  misc_feature (501)..(501): n is a, c, g, or t
  misc_feature (510)..(510): n is a, c, g, or t
  misc_feature (527)..(527): n is a, c, g, or t
  misc_feature (551)..(551): n is a, c, g, or t
  misc_feature (579)..(579): n is a, c, g, or t
  misc_feature (626)..(626): n is a, c, g, or t
  misc_feature (655)..(655): n is a, c, g, or t
  misc_feature (714)..(714): n is a, c, g, or t
antgtgaggtgtatttgtttgcaagaaacaaggtggaaactagatggaccagctgagcaggggggccaaggtcatttccatctatccctaatggtgttcagtatagccctctccttcctgagacctaagaacagaagatacgcttccacaacngagatttttgantttttaatggcggcgctctcataactacattcacggaccaaccaaagccatctccaagcctagnaaggntacatactacacgcagcgaaantgccnnccnctgntccagaattttcaagntggcncctttncccagncttctatgccattcattagncataggctgcnncctgctagcctgtnggccaaattccccctctangtcttnttngcttaggngcctnngcctctttgggggtntggnttggtnggggntggnctgggggggttgggatgggtgtgtgggngtggggcntctntgnggtggtgagaaantccattcccacatggcaacanccagctggngctaacagctgttaganagcatgctgctccccgctactgcnttatacccagccagcttcatgtgtgcangttatctgcctgctattcacatcggttctccttgctcagcaaatgtnccacctcaacctcacattcaatacccttntacaggttccctaatcagagttcagtagggcaccacactatagctgggcaatccctggntgctgtgatatttgttaaccattatgttctttc

SEQ ID NO: 576013 - DNA, 1771 bp, Homo sapiens
  misc_feature (1682)..(1684): n is a, c, g, or t
  misc_feature (1697)..(1698): n is a, c, g, or t
  misc_feature (1700)..(1701): n is a, c, g, or t
  misc_feature (1719)..(1719): n is a, c, g, or t
tcgtgccgtatcatgagagcatggctcttccagcatctcacacatccgtacccttccgaagagcagaagaaacagttagcgcaagacacaggacttacaattctccaagtaaacaactggtttattaatgccagaagaagaatagtacagcccatgattgaccagtcaaatcgagcagtgagccaaggagcagcatatagtccagagggtcagcccatggggagctttgtgttggatggtcagcaacacatggggatccggcctgcaggacctatgagtggaatgggcatgaatatgggcatggatgggcaatggcactacatgtaaccttcatcatgtaaagcaatcgcaaagcaagggggaagtttgcagagcatgccaggggactacgtttctcagggtggtcctatgggaatgagtatggcacagccaagttacactcctccccagatgaccccacaccctactcaattaagacatggacccccaatgcattcatatttgccaagccatccccaccacccagccatgatgatgcacggaggaccccctacccaccctggaatgactatgtcagcacagagccccacaatgttaaattctgtagatcccaatgttggcggacaggttatggacattcatgcccaatagtataagggaactcaagggaaaaggaaacacacgcaaaaactattttaagactttctgaactttgaccagatgttgacacttaatatgaaattccagacagctgtgattattttttacttttgtcatttttcatcaagcaacagaggaccaatgcaacaagaacacaaatgtgaaatcatgggctgactgagacaattctgtccatgtaaagatcctctggaaaaagactccgagagttataactactgtagtataaatataggaactaagttaaacttgtacatttctgttgatcacgccgttatgttgcctcaaatagttttagaagagaaaaaaaaatatatccttgttttccacactatgtgtgttgttcccaaaagaatgactgttttggttcatcagtgaattcaccatccaggagagactgtggtatatattttaaacctgttgggccaatgagaaaagaaccacactggagatcatgatgaacttttggctgaacctcatcactcgaactccagcttcaagaatgtgttttcatgcccggcctttgttcctccataaatgtgtcctttagtttcaaacagatctttatagttcgtgcttcataagccaattcttattattatttttgggggactcttcttcaaagagcttgccaatgaagatttaaagacagagcaggagcttcttccaggagttctgagccttggttgtggacaaaacaatcttaagttgggcagctttcctcaacacaaaaaaagttattaatggtcattgaaccataactaggactttatcagaaactcaaagcttgggggataaaaaggagcaagagaatactgtaacaaacttcgtacagagttcggtctattaattgtttcatgttagatattctatgtgtttacctcaattgaaaaaaaaaagaatgtttttgctagtatcagatctgctgtggaattggtattgtatgtccatgaattcttcttttctcagcacgtgttcctcactagaagaaaatacataaacannntttttttgttatnntnntctattcctatttttgtntcactattgtacatgttttgtacataaaaagcagtcttgtacccccccaaaa

SEQ ID NO: 576014 - DNA, 341 bp, Homo sapiens
  misc_feature (103)..(103): n is a, c, g, or t
  misc_feature (115)..(117): n is a, c, g, or t
  misc_feature (201)..(202): n is a, c, g, or t
  misc_feature (209)..(209): n is a, c, g, or t
  misc_feature (217)..(217): n is a, c, g, or t
  misc_feature (223)..(223): n is a, c, g, or t
  misc_feature (248)..(248): n is a, c, g, or t
  misc_feature (259)..(259): n is a, c, g, or t
  misc_feature (266)..(266): n is a, c, g, or t
  misc_feature (309)..(309): n is a, c, g, or t
  misc_feature (312)..(312): n is a, c, g, or t
  misc_feature (338)..(339): n is a, c, g, or t
attattgtgcatattttacaacagtatacttccttttaccctcctccttttgtactactgtgtcatatatttcatttcaatgtatgctgtaaactccattagntaatattatttnnncaagtcagttgtctgtaaaatacaaggttgggtgcggtggctctgcctggaatcccaacactttgggaggccaaggtgggtggnncacctgnggttgggngttcangactagcctgcctaacatggggaanccccatctctnctaaaanatacaaatttagccaggcgtggtggcgcatccttaaatcccanctnctcagggggctgaggcaggagaatcnntt

SEQ ID NO: 576015 - DNA, 320 bp, Homo sapiens
cgatctgaggatcccctcaagctttatacttctcaagcttatacttcctcaaggctttatacttctcaaggctttatacttcctcaaggccttatacttctcaaggctttatacttcctcaacgctttatacttctcaacgctttatacttcctcaacgctttatacttctcaacgctttatacttcctcaacgctttatacttcctcaacgctttatacttcctcaaggctttatacttctagaaggtctggctgtgctgtaagtttttggtggggtgtgagaagtataaagcgtggaggaagtatagagcgtagaggg

SEQ ID NO: 576016 - DNA, 1200 bp, Homo sapiens
aaaaatcaaaaatgaaatatttattaccgctttttgtgacttaacacctttttttttttaacataacgtcacagtcctcatacaagtattttaagactttctgaactttgaccagatgttgacacttaatatgaaattccagacagctgtgattattttttacttttgtcatttttcatcaagcaacagaggaccaatgcaacaagaacacaaatgtgaaatcatgggctgactgagacaattctgtccatgtaaagatcctctggaaaaagactccgagagttataactactgtagtataaatataggaactaagttaaacttgtacatttctgttgatcacgccgttatgttgcctcaaatagttttagaagagaaaaaaaaatatatccttgttttccacactatgtgtgttgttcccaaaagaatgactgttttggttcatcagtgaattcaccatccaggagagactgtggtatatattttaaacctgttgggccaatgagaaaagaaccacactggagatcatgatgaacttttggctgaacctcatcactcgaactccagcttcaagaatgtgttttcatgcccggcctttgttcctccataaatgtgtcctttagtttcaaacagatctttatagttcgtgcttcataagccaattcttattattatttttgggggactcttcttcaaagagcttgccaatgaagatttaaagacagagcaggagcttcttccaggagttctgagccttggttgtggacaaaacaatcttaagttgggcagctttcctcaacacaaaaaaagttattaatggtcattgaaccataactaggactttatcagaaactcaaagcttgggggataaaaaggagcaagagaatactgtaacaaacttcgtacagagttcggtctattaattgtttcatgttagatattctatgtgtttacctcaattgaaaaaaaaaagaatgtttttgctagtatcagatctgctgtggaattggtattgtatgtccatgaattcttcttttctcagcacgtgttcctcactagaagaaaatgctgttacctttaagctttgtcaaatttacattaaaatacttgtatgaggactgtgacgttatgttaaaaaaaaaaggtgttaagtcacaaaaagcggtaataaatatttcatttttgatttttaaaaaaaaa

SEQ ID NO: 576017 - DNA, 668 bp, Homo sapiens
gacaccgtcatgcattagacgcatttcccttggcagggattcgacgaagtgaccttactcccctttgttcctccataaatgtgtcctttagtttcaaacagatctttatagttcgtgcttcataagccaattcttattattatttttgggggactcttcttcaaagagcttgccaatgaagatttaaagacagagcaggagcttcttccaggagttctgagccttggttgtggacaaaacaatcttaagttgggcagctttcctcaacacaaaaaaagttattaatggtcattgaaccataactaggactttatcagaaactcaaagcttgggggataaaaaggagcaagagaatactgtaacaaacttcgtacagagttcggtctattaattgtttcatgttagatattctatgtgtttacctcaattgaaaaaaaaaagaatgtttttgctagtatcagatctgctgtggaattggtattgtatgtccatgaattcttcttttctcagcacgtgttcctcactagaagaaaatgctgttacctttaagctttgtcaaatttacattaaaatacttgtatgaggactgtgacgttatgttaaaaaaaaaaggtgttaagtcacaaaaagcggtaataaatatttcatttttgatttttaaaaaaaaa

SEQ ID NO: 576018 - DNA, 748 bp, Homo sapiens
aatacaaagaatatatttttttgttaaaaaccagttgatttaaatatctggtctctctctttggtttttttatttggcggggggcgtggggggggttctttttttctccgtttggttcttatgtatgggggagacggggggtattggtttggatctcttatattgtcgtacattgctggtagactcatgcctttttcttaacggggaaaaacaagtctcatctatactctcactattctcttaattggctatctttcaagacctttaacacattctatgttcaacaagtaagaaagaaagaataatattcagaactgattcctgacaataaatgcaagcttataatgtatccgcgatacactatggtcgcatgtctctcgggcaagcattctttacactcatagttgcaactcgtggtggagccgttctccccagttattaaccccgtggacgtgcatcagggaaaattggtacttccgggccgttgcaacaacacgtgtacccacatctccaacacagcaagtccgtaattcttaatacctataacagtgtgggcgtggaacgccccacagccttatggctcctgtgcccaggaccttggtagcacacagtttgtgccgccctatggtaatccctccctgagtaagaccccgggggttatagcacaccaacagaaacctagcgcgcatgcatcaccctccttttatacccattgctctaatgtgtatccctagacaacatgaaggcc

SEQ ID NO: 576019 - DNA, 949 bp, Homo sapiens
ttttttttttctcctctgtgtcctcgaatgaccacaatcaggttttcttcttgatccttcagtgagccaaggagcagcatatagtccagagggtcagcccatggggagctttgtgttggatggtcagcaacacatggggatccggcctgcaggttggctcatcccgcctctgggcttccctgggaagtgccacctgctccaccagcctctccatccactctactatcccactgtcatggtgggtttaacatttgcctgctgcctgctctgcctgctttctttacattgggtgggggaaaaaaattcctctttgaaaaagtaaagattttaccacagtaccattatactctgccccatacacatcctttttcttttttctttttaaaccaaggcaataagtgaaaaggaatctgagtttccttctattttttcaccatcaattattgctgattttccggcctcttcttggattttatctcctttctaggacctatgagtggaatgggcatgaatatgggcatggatgggcaatggcactacatgtaaccttcatcatgtaaagcaatcgcaaagcaagggggaagtaagtacagtcgggtgcgatctgtcttcactatcacttcagagactttattttattttttataatttgcccccattttttttttccttgcccataactgcatgcctttccaaactaaggacctgtttttaaatatatatcacccatctctgaagtcacagatgacactgatgtgcacttttgaaaaggccaactgacaagcctgcgtgtgttttaagcaggtgggactgccttttagcctatttactgtggccccaatgtgcacaaacacagacatcaggcagatattggacatttaagaataaaaataatgtcttgggggcaccagttgactgagagaaattaagcaggcttcaatgaagcgat

SEQ ID NO: 576020 - DNA, 425 bp, Homo sapiens
agcggggggtggggcaggaggcgcccgacgaccctgggcgaggtcgcggcggccgcagggggctccggctccggagggcgccctcccgcagtcgcacccgctttccctcacacacaccggccgcccggccacaagccaagaagctgcctgcttggcccacaagccaagaagtcggcgaagctgagggcggtgggggagggggcaccggccggccaagcccggcggacgggcgtgtggcgttacctgtgtcagagagagctgggccgccgcagccatggtgtttccatcatgcaagggaggggaaggaagacgggctgactggggctcggggcggggaggaggcggagggagcggcgcaggcgaggccggggcgggcgggcgggcgtctcccctaacttccacaaatttccctccagccgccggcc

SEQ ID NO: 576021 - DNA, 117 bp, Homo sapiens
gctgtcgcgtcgacgccgctttcttattctttttgttgttttttttctgtcttttagggactttctaaatcatgggcacaggtatatatgcgtttttaaaactctatgagagtgaaa

SEQ ID NO: 576022 - DNA, 1282 bp, Homo sapiens
gctcaggctatctggctgggaactggatcgaggctctgataaagatcgtacgtccaacttcagtcccagatgttaccctaagctctcggaactctaacaaggagaacgcgctgcgatcagctacagtcacccagacatggtgccccctgacatggcctgggagcagcgggcgggctctgatggtcatcacgccggggtggccctcggctgggcggacgggtcagtctgtcagttgcctttgtgacctagcgtggatgctctcggcctgcttgtagccagcgtcttccccgacgaagcgtggcccgcggcctcctagctcgcgcacttcctgagccgtcctggccaagcacggaggatgctggagtcgggatcctggacccagtgctccgaggagcgtgagctaggtggtttgatggctcacaggagcagtactgaaccctagaggtgcctagcgtgcgctgaggggtgccagcgccaggtggcctgaggttgcccacccctggacttgatggaacgcgagctagagatagccgagcttaggtagatgcgcagaatcgggagacattacagatggccaggtagctgcgacgcacatgcttgagccacttgaggggccagcacattagagccggcgttggctacttacaagttgtcccctagcgtcaaacccatcagtgccctgctgtgaagcaacgttgacccgcacatgggagcaccccgcaaacagatgagaccgaggtcgacctaagtggcacccttaggaagtacaccgggaataggtcaacaaagaggattaactattcaggagtgccccccaggggctatgtggaagagcagttggggcaggagtactgacccccaaagtggcgtgtgggaaggaggaattcccatacaggggaacggatttgccaaccttgtgaagaaaatcccacgcaacatggaagcagtgcacattcgggacttagacagattgcaccccacgaggggaagggcgcgttacaaagtttcctccacaacccaaagggggaacgttgcacattttgtttgcagaggcaagcaccacagagaccttgcgcgacgttggacgaccattaggggagagatccttcttgcgagcatgagccatagtaaagcaccgattgaacatagcgcaccgttgaagacaactaaaagagggtggggaaataaccacagtctggaagggctgaagaggcaagagtgggcttggcccactttttgtccacaatcaatgggagagaacagtgaaaggtcgaagcttccc

SEQ ID NO: 576023 - DNA, 452 bp, Homo sapiens
gtgactctaaggatcctggggatggggtctgtacgggggtcgcatgatctggtttatcctcatcagaacgggcggcagacgcgctaggcaagtggtacatggcgtttgatgatgatgagaaacagaagctgatcgaggaggtggttggcgtggtcaccgtccgagacgccaaacacaccaactttgtggagttccggaactttaagatcatttaccggcggtatggtgggctctacttctgcatctggtgtggattgtccatgacaacaacctggcttacctggagggcattcacaacttcgtggaggtcttaaacgaatatttccacaatgtctgtgaactggacctggtgttcaacttctacaaggtttacacggtcgtggacgagatgttcctggctggcgaaatccgagagaccagccagacgaaggtgctgaaacagctgctgatgc

SEQ ID NO: 576024 - DNA, 298 bp, Homo sapiens
actgaatatataaacactccacagtgtttatattgggaagaagtttggaagagctgggattattggcaaaaacttgctagaggggtgaatctttagagctaatcactgcagaatcagagttgcagcaatatgattgcaagcaagtctgaatgcatagttttactttaattcaggcttgaaaactttgacataggtaaccccactcggggactggactgatttccgttatgcattgtgtcaaatcaatgggcaggtgtgcattctctagcaagtagttttcaggctgtgatggatggga

SEQ ID NO: 576025 - DNA, 488 bp, Homo sapiens
ggagatataaccagaaagcacttataattagagcatgtctaaactgctcacatgtgaaatgatgagcctccaggacttatttcctatcaccaatcccactgaagaccaaagctgaagagagaagcttccatacaactgaaagatagatgcaaaagcctggtctcacacattaggtttctggcatgaatggtaaactctgactccttttcttcaccactatcctactgtagcttaactgaaaacgttaagcacagtggggacaagttgacaggactaaggcagaggtaaacaagctctaaggttactgggagaatggtgtacacacctccctactggggaattactcctcaccatgttatcttttgaaaaacctctactatctctgctaggcagggtggctcacacctgtaatcttagcactttgggaggctgagatgtgtggatcgcctgagctcaggagtttgagaccaggaggtcgaggctgtagt

SEQ ID NO: 576026 - DNA, 299 bp, Homo sapiens
  misc_feature (6)..(6): n is a, c, g, or t
ctaccnggcggcattttgagacttaaagttattgaccccttgggtcaccaccctttacaacctaaagttatcagtcatactcctgaacaaacagaggcagtccatagactcctggtgaggaaattttctctatcttatcatcaacttctattcctgaagataatctgtgtataatctcttcgtcgtcacctaaggaaccacatggagaatctgtaccttgcttctgatagatttaatgatgctttccttcttgtagatgtaaaaacaacaatagtaataaaagctaacacttctgtaaa

SEQ ID NO: 576027 - DNA, 133 bp, Homo sapiens
tattgtgagaagcgttctcagcagaatcacaagtagtaaagagctcccagggcgtgatcattcaatctgccatagccatgctgatcagccgcctcttttctcctgagtagcttggggctcctgagtagcttgg

SEQ ID NO: 576028 - DNA, 139 bp, Homo sapiens
atgataactagtaggaattccactctcagagcccatcagtgtggaggagaataaatcaaagaagagaagaggaattgctagatcatatgctaattctatttttattttatatttttgacatggagtcgcccgttgtcgt

SEQ ID NO: 576029 - DNA, 797 bp, Homo sapiens
  misc_feature (437)..(437): n is a, c, g, or t
  misc_feature (472)..(472): n is a, c, g, or t
  misc_feature (499)..(499): n is a, c, g, or t
  misc_feature (521)..(521): n is a, c, g, or t
  misc_feature (533)..(533): n is a, c, g, or t
  misc_feature (548)..(548): n is a, c, g, or t
  misc_feature (550)..(550): n is a, c, g, or t
  misc_feature (583)..(583): n is a, c, g, or t
  misc_feature (605)..(605): n is a, c, g, or t
gatggcttgctcatcatagaggaggccttgtactgaaagcgtggagccacaagatagaatgctgcctggatccctgagtcaccacatgtcatcacgtggaaggcagaagccctggagagtgatggagtctccctctgtgcgccctatggcccaggctgcagtgtagtgacacagtctcagctctctgtaacttctgcctctcgggttcaagcgattctcctgcctcagcctcctgagtagctgggattacaggctggagtgcaatggtgcaatctccgctgactgcaacctccgcctcccgggctcaagcaatcctctcacctcagcctcccaagtagctgggaccccaagtgtgcgccatcacgcctggctaattttgtccttttcttttttttctgagacagaatctcactctgtcacccaggctggagtgcaanggcaagatctcggctcactgcaacctccatctccngggttcaagcaattcttctgcctcagnctccctagtagctaggattacntgtgcatgcaancatgcctggctaatntnggtgttttagtagagacaggatttggccaggtngtccaggtagtctcgaagtccngacctcaagtggatctgccggcctgcggcctcccaaggtggccggtattacgggcttgagccacctggcctagccaattttgtgtactttttgtagagatgaagtttcaccatgtgtggcaggctggtctccagctctgtgactcaagagatctacccagtttgcttcccaagggctgggtataggcattgg

SEQ ID NO: 576030 - DNA, 176 bp, Homo sapiens
cagagatgacggagaccatatgtcaggagccgtccgtatggtgctagaaatggatgaagacctatacccagtctccccagagtccgtgcctttccctgtgtgaataaagtatctagcctaaagtttccctaggcttacttgtctcagcaactttcccatctcgtctcttctcttgt

SEQ ID NO: 576031 - DNA, 884 bp, Homo sapiens
  misc_feature (468)..(468): n is a, c, g, or t
ggggcaaacgggttcgagtccaggattggggcaacggagggttccagagacaacaaggcagccggagtccagaatcggtggctacaggaccggagctccgggcgggtcctacagagacagttacgacagttacgctacacacaagcgggtgaaagcccgttccggctcaagatcgtccgttccaatggctggtgtgtttaaagaattgtgggagcttcgcgtgaacgttaatgggtagtaaaggcacctgcctggtattcccacttgtaagtagtcattgtcggttcgatctgtgtcaaacccagcctgaccgcttctgacgccgggatggcctcgtgtactagacttgtgtctgttttaagggaagtcgctgttattttgaggtttcaaacatttgaagcattacttttgaccacgagccatgagttttcaaaaaaatcgggggttgtgtgggtttttggtttttgntttagtttttggttgcgttgccttttttttttagtggggttggccccatgaagtgggtgccccactcacttctctgagatcgaacggactgtgaatccgctctttgtcggaagctgagcaagctgtggcttttttccaactccgtgtgacgtttcctgagtgtagtgtggtaggaccccggcgggtgtggcagcaactgccctggagccccagcccctgcgtccatctgtgctgtgcgccccacagtagacgtgcagacgtccctgagaggttcttgaagatgtttatttatattgtccttttttactggaagacgtacgcatactccatcgatgttgtatttgcagtggctgaggaattcttgtacgcagttttctttggctttacgaagccgattaaaagaccgtgtgaaatga

SEQ ID NO: 576032 - DNA, 998 bp, Homo sapiens
  misc_feature (468)..(468): n is a, c, g, or t
  misc_feature (886)..(891): n is a, c, g, or t
ggggcaaacgggttcgagtccaggattggggcaacggagggttccagagacaacaaggcagccggagtccagaatcggtggctacaggaccggagctccgggcgggtcctacagagacagttacgacagttacgctacacacaagcgggtgaaagcccgttccggctcaagatcgtccgttccaatggctggtgtgtttaaagaattgtgggagcttcgcgtgaacgttaatgggtagtaaaggcacctgcctggtattcccacttgtaagtagtcattgtcggttcgatctgtgtcaaacccagcctgaccgcttctgacgccgggatggcctcgtgtactagacttgtgtctgttttaagggaagtcgctgttattttgaggtttcaaacatttgaagcattacttttgaccacgagccatgagttttcaaaaaaatcgggggttgtgtgggtttttggtttttgntttagtttttggttgcgttgccttttttttttagtggggttggccccatgaagtgggtgccccactcacttctctgagatcgaacggactgtgaatccgctctttgtcggaagctgagcaagctgtggcttttttccaactccgtgtgacgtttcctgagtgtagtgtggtaggaccccggcgggtgtggcagcaactgccctggagccccagcccctgcgtccatctgtgctgtgcgccccacagtagacgtgcagacgtccctgagaggttcttgaagatgtttatttatattgtccttttttactggaagacgtacgcatactccatcgatgttgtatttgcagtggctgaggaattcttgtacgcagttttctttggctttacgaagccgattaaaagaccgtgtgaaatgaannnnnnccggaaaattcccttgattggaaccaaaaaccccttgttgggggctcctgaagcaagacctgggcagaaagagaaggtggggaggagcgggtctgcaagccttccta

SEQ ID NO: 576033 - DNA, 81 bp, Homo sapiens
gtcgaggacacggccgtatattattgtgcgagagagtgccctatgtgagtatttccgtcttttgactactggggccaggga

SEQ ID NO: 576034 - DNA, 1316 bp, Homo sapiens
  misc_feature (468)..(468): n is a, c, g, or t
ggggcaaacgggttcgagtccaggattggggcaacggagggttccagagacaacaaggcagccggagtccagaatcggtggctacaggaccggagctccgggcgggtcctacagagacagttacgacagttacgctacacacaagcgggtgaaagcccgttccggctcaagatcgtccgttccaatggctggtgtgtttaaagaattgtgggagcttcgcgtgaacgttaatgggtagtaaaggcacctgcctggtattcccacttgtaagtagtcattgtcggttcgatctgtgtcaaacccagcctgaccgcttctgacgccgggatggcctcgtgtactagacttgtgtctgttttaagggaagtcgctgttattttgaggtttcaaacatttgaagcattacttttgaccacgagccatgagttttcaaaaaaatcgggggttgtgtgggtttttggtttttgntttagtttttggttgcgttgccttttttttttagtggggttggccccatgaagtgggtgccccactcacttctctgagatcgaacggactgtgaatccgctctttgtcggaagctgagcaagctgtggcttttttccaactccgtgtgacgtttcctgagtgtagtgtggtaggaccccggcgggtgtggcagcaactgccctggagccccagcccctgcgtccatctgtgctgtgcgccccacagtagacgtgcagacgtccctgagaggttcttgaagatgtttatttatattgtccttttttactggaagacagctagcggcgaatactcgcgagtcggattagtaggtcacttcagcatgtgggctgcaggaattccttggttcgcacgatttctcgttgcggcttttcatgaagccggttaaaaagagccgtgtgcacattgatgtgttgttgctgatgaagtcccgcttgccgattgggaccagcacgacttcctatgggtgagggctcctgcgagggcagacctgagcagagagagaaggtggagaaggcaggggtctgaaagccttccctggggcctgacagagctaagaaagggaggcccagcagaactggcgctggtcaggggtaggggagccaggcgggggaccgggagcgggccagttcaggccctcagggcagccctgggaggcttcttggcaggtggttgggccaagagggctggaattggtgcgggcaagcttaacagggacagtggacggtgcaacctgacgctgaccttggacttgcctcagctaaagcagggcatagagcaaggccgtggatcccagggggaccttcaaa

SEQ ID NO: 576035 - DNA, 908 bp, Homo sapiens
gggctttgctcttacccaggctgagtgcagtggcagaatcatagctcagtgcagactcagactcctgggctcaagccatccttccacgtcagcctcccaggtagctgggactacaggcacacaccacaacacctggctaattttttaaattttttgtagagatgaggtctcactgtgtgcccacggtgatctcgaactcctagcctcaagcgatcctcctgcttcggtctcccaaagatgttgggattacaggcatgagccaccactcctggccaggagtctatatgtatactgtggatactagatcctcatgtgattgcaaaaactttatttatttatttattcattttgaaatggaactcttgctctgtcgccaggctggagtgcaatggcgtgatctcggctcactgcaactaccacctcctgggttcaagcgattcgcctgcgtcagccgtcctgagtagctgggactaccaggcgcgcacaacacgcccagcataattttgtattccagtaagagacgggatttcactatgtatggctgggatggtcttgatctcttgacctcgtgatccaccacttcgggctcccatagtgctgggattacacggtgtgagcaacccgcactccaggctgactttgccaaacacctttctttccaatactgttggtgcacctactcgtggcataggtgtcctctgaaggcacaacccgtgaatctggcatgacgtacaggcacagttcatctgacatcgcctttggtccgcttatgcattatggcgggcacattttccaaaagccatacttacttccagatcccagagaattacaccaggttctaatacggcatcgtaacattccgcgcatggccttccacctggaccagcgacacacaatggtctgcagca

SEQ ID NO: 576036 - DNA, 102 bp, Homo sapiens
tgctagatccagtctctcacaaacagtgtatgccagtggaatgtggttagtattgagccccattgtgttgtgtgtaaactttaattagtgtacggacagctg

SEQ ID NO: 576037 - DNA, 380 bp, Homo sapiens
tacatgggatactctggaagagatgttaacaccaaggaagagaatcctgatagaactgtagtgaaagtctagagggattacaccactgaagatgccattgttatggaaaaagctgtggaagccatcaggcctgaaacaataaattcctggtggagaaaactctgtccagatgtgcgtgacttcataggatttatgacagagctggttaaggaaatcatgaaagagattgtggatatggcaaaaaaggtgaagggtgaagagttttaaggtacagatcttggagaaattcaagagctaatagacaccacacctgaggaattaatagaagatcacttgaggccaggagttcgagaccaacctgggcaaaatggtgaaacctc

SEQ ID NO: 576038 - DNA, 928 bp, Homo sapiens
  misc_feature (928)..(928): n is a, c, g, or t
gaggccgtctgcactctccccggcgccgctctccgtgcctcgccctgtcctgccgccaccgccgccgccgcagagtcgccatgcagatcccgcgcgccgctcttctcccgctgctgctgctgctgctggctggtgccctgcctcggcgcagctgtccctggtgacctgagactgctctgagactgccttttgacctgcctgggtgcccataacctgcaggatgctgactgcatgtgcatgagctctagtagtgtgcagccagacagatgatactcagttgtgactgagaatgagactacacaataacctatagacaaaaactgttgaccagattgtgcgcccgacataaacagctgtaccgaaaaattgattgacacctgagacagagcagggatccaataccgaacccgttgcaagacagtcgttaacgacacttcgatgtgcacaacacgtggtcaactgaaaattgaattccccacaaaagagtttatggctagacaaataaaacaattagttacttgtatacattccggcgggaacagttgtgttggccacaaaaagaataactgaaagcgctaggaccgtgggaaaattacaacatatataccagaaccattagcggtgacagacaccacaagcaatatcaccaaggataaaaaccaatcaaaaaacggaaatgacacagatgctaagcccgagttgctaccgacatacgaatcggtggaatcattggcgcccgatatacacagaaagagatagatacaggcaacaaccacaatgtgcaacactatggagaatccaagatcgaaaaaaaccatgtaagcacacataaatggattgggactcacatccagaatcgaacaatataacacaccaggaagtacaaaacacagtatatgaaacacattatgaaaataagacactggtn

SEQ ID NO: 576039 - DNA, 536 bp, Homo sapiens
ggatgaagagtatgaagtaagccgagattgcgccgatgcactccagcctgggtgacagagggagactccgtctcaaaaaaaaaaaaaaaaaaaaaaaaaaaaacaggccaaaaaatgcaataaacaaaagaggaaatacaaatggaaataaatacttaaaaagatatacagcctcataaggaatggaactacagattaaaacaagatggagatattttccaatagatcagagtggcaaagggtaaaaagatgggcagaatccagcaaagatggagggaaacagacacaactcatgcacgtgtaatgggagtgcaaattcatacaattgattgggaaggcaggtaagcaatatgtaccaaaatcatacttgctcggggtgtatcaggattggaccacaagtcgggctaacacatgaaatttataggccaccagtggtggctcacgcctgtaatctcagcactttggaaggctgaggtgagaggactgcttaagcccaggagttcagaccatctggggaacacagtgagaccctgtct

SEQ ID NO: 576040 - DNA, 838 bp, Homo sapiens
  misc_feature (127)..(127): n is a, c, g, or t
  misc_feature (189)..(189): n is a, c, g, or t
  misc_feature (202)..(202): n is a, c, g, or t
  misc_feature (206)..(206): n is a, c, g, or t
  misc_feature (218)..(218): n is a, c, g, or t
  misc_feature (226)..(226): n is a, c, g, or t
  misc_feature (235)..(235): n is a, c, g, or t
  misc_feature (268)..(268): n is a, c, g, or t
  misc_feature (272)..(272): n is a, c, g, or t
  misc_feature (274)..(275): n is a, c, g, or t
  misc_feature (277)..(277): n is a, c, g, or t
  misc_feature (289)..(289): n is a, c, g, or t
  misc_feature (307)..(307): n is a, c, g, or t
  misc_feature (337)..(337): n is a, c, g, or t
  misc_feature (371)..(371): n is a, c, g, or t
  misc_feature (379)..(379): n is a, c, g, or t
  misc_feature (391)..(391): n is a, c, g, or t
  misc_feature (398)..(398): n is a, c, g, or t
  misc_feature (400)..(400): n is a, c, g, or t
  misc_feature (410)..(410): n is a, c, g, or t
  misc_feature (417)..(417): n is a, c, g, or t
  misc_feature (427)..(427): n is a, c, g, or t
  misc_feature (458)..(459): n is a, c, g, or t
  misc_feature (487)..(487): n is a, c, g, or t
  misc_feature (513)..(513): n is a, c, g, or t
  misc_feature (544)..(544): n is a, c, g, or t
  misc_feature (553)..(553): n is a, c, g, or t
  misc_feature (576)..(576): n is a, c, g, or t
  misc_feature (612)..(613): n is a, c, g, or t
  misc_feature (619)..(619): n is a, c, g, or t
  misc_feature (621)..(621): n is a, c, g, or t
  misc_feature (625)..(625): n is a, c, g, or t
  misc_feature (632)..(632): n is a, c, g, or t
  misc_feature (649)..(649): n is a, c, g, or t
  misc_feature (656)..(656): n is a, c, g, or t
  misc_feature (674)..(674): n is a, c, g, or t
  misc_feature (677)..(677): n is a, c, g, or t
  misc_feature (680)..(680): n is a, c, g, or t
  misc_feature (762)..(762): n is a, c, g, or t
  misc_feature (792)..(792): n is a, c, g, or t
tggcgctttgtgcggctccaggcctccgtgtggcctcccgacagcctgacaagctatcatggcagcggggcccaagctccactatcccaacggaagaggccggatggcgtccgtgagaggggttttngctgccgccggagtcgagtttgatgaagaatttctggaaacaaaagaacagttgtacaagtngcaggatggtaancacntgctgttccaanaagtgccnatggttganattgacgggatgaagttggtacagacccgaagnattntnnantacatagcaganaagcacaatctctttggnaagaacctcaaggagagaaccctgattganatgtacgtggaggggacactggatctgctggaantgcttatnatgcatcctttnttaaaancngatgatcagnaaaaggnagtggttaanatggcccagaaggctataattagatactttnntgtgtttgaaaagattttaaggggtcanggacaaagctttcttgttggtaatcngctgagccttgcagatgtgattttactccanaccattttngctctagaagagaaaattcctantatcctgtctgcatttcctttcctccaggaatactnngtgaantnagtnatatcantacaattaagagattanttgaaantggaagaaagaagaagantanaantgatgaaatttatgtgagaaaagtataaaaaatatttaggaaataaaaaaaaaaataaatgtgtgagtgaaagtgtgttaanagagatggtattgtataaagtaatgtattnatggttaaagatatgtaatggtgatatatatgtattaagttgggta

SEQ ID NO: 576041 - DNA, 1206 bp, Homo sapiens
atctctcgattcatctttggttggctttagttattttactctattggtagtgttcttgaatcctcgtggctagaattttttggactatttggtccgtacgtccttttttcggaatgtccttcctaattatcgtggcttatcttaccatccattccatggtttggttacaccctatcgcggtgtttacttccgtggctccctcccgtgatgtgttatcttattcttggacggtcttacgggatgtgtactcggttgtattggtgtttggatcaattgtggcgtctggtttgtgtcttgattgaccatagtctggactttattctttcttaaagtggttttcccttttgtttgacccagggaggacttttctactgatcctttgtatcccagtcgtataactaaagtaattatttttgaatacctgtttgggtctactatctctatatctcgtatggatatctagttggccctggtactatgttggttagtctttccgctagtatttattgttgtactatttgtatagatgttttcctctggatattaccctttgctatctacagtcgttcatgttgcatgcaggtatgatcgatcttacttatgtatctcatgtagcatatggctttattcttgattttctatgccagtgtgtctctgtaattttactggcctactactaggttatcttgatatatatgtatagttatgttgctagtttaattctggtcctaggtgcctatactaccttggtattgtcatgtcttgctctaagtactctataactgttccatgtggataaccttaataggtagctatatctaatatcctagtctttgtgcatataaatataggtaataagatacagaggctgttagatacaaggtaggattgctcctaagaaactaattttttataagagaatcactggtctaacattttacttactgagggataatagccaaaataggcaaataatggtataatatattagtaaacattatagtataatgtctgtagatagtgtagtttgtaatatattctacatcatgtataaatatgtaaaactatgggttatttttattaaatgtattttaaaataaaaatttaattctggtttttctgattagagtgcaaatagtgagaaaagttaaatactcggggaaatgtcagaattgaaaatgttaaccgggagcctataattcatgg

SEQ ID NO: 576042 - DNA, 897 bp, Homo sapiens
gccgccgcccggcccgcaaaccttcgtgcccggcccgtcctcgcccccgcctcgccaccgcctcggcccgcaaggttgccccctccccaccgcaacatgtccgagtccaagagcggccccgagtatgcttcgttacgcgctacatgggcgccacggaccgacaatggtaccgtatcagcagacacctgggcagctgacctatggacacagccaagagcaggtaaccgtgcattgcgagtcatgtactgatcatgacggaacggagcagatcatgaagtccatacatcccagaagagatcataggactaggcatcatcagccatcaacggccatgaaatgagatggcaggatcccatcagatcgccacactcaccatgaagtgagccgacaatcagaccatcataacaaagcagcatatccacacaagatgagacagcaccagagcccaatgaagccagatgagccatgaagcaggcccagagcaagccaggcaaacagcccaatcagaaaaatcgaagggagaagaacagcatgagagtagcgaggtaggacacacaggcaccaagggaaaggccaccagagatactatcccgatgagagcagttgagtcacatcgaagttctgtatccagtcctttgctgaccagagagggttaggacagggccatacataacggggtactacagatacggatcaggccgcatccagtcctcatccacaacaaggatagacccctatctccagagcccgagcaaaaggcacagacaataattaatgtagaagacaacaccgatcatccatacaagaaacgaacgagacaagaaaaactacgccacagaggacggaagcccaccaggaagtgggcataggacataacacatggcccaaatagccaat

SEQ ID NO: 576043 - DNA, 135 bp, Homo sapiens
cacacgcgttcgggaggcttggaaacatcactctagctgcgtcccagggcacggttcaacagtttgcatcctcaactgcagctcctcccagccaaaaccacagaatttgatcctaagtttctaactactttaaaa

SEQ ID NO: 576044 - DNA, 171 bp, Homo sapiens
  misc_feature (23)..(23): n is a, c, g, or t
  misc_feature (50)..(50): n is a, c, g, or t
  misc_feature (52)..(52): n is a, c, g, or t
  misc_feature (135)..(135): n is a, c, g, or t
ttaggctgtgtgtaatggctgcncgcgtttccttaaaagtcgggaggccncnaattaggttaccaatctgttcatttcaaaccggagcagtcatcactatagaagtgggagatggatttttgcctcgaatatccnagacccaataacgtaatcttaggtcgttcacggcct

SEQ ID NO: 576045 - DNA, 401 bp, Homo sapiens
  misc_feature (34)..(34): n is a, c, g, or t
  misc_feature (42)..(42): n is a, c, g, or t
  misc_feature (183)..(183): n is a, c, g, or t
  misc_feature (185)..(185): n is a, c, g, or t
  misc_feature (188)..(188): n is a, c, g, or t
  misc_feature (325)..(325): n is a, c, g, or t
  misc_feature (374)..(374): n is a, c, g, or t
aaaattgaaaacccctggtcgaatcagggccctnctggaacnccggcgcctaacatgaaccgaccccacgcgttacaagtaccgtttgacgcaagatgggcatcgacctgtttccgctgctggtcgtgctgttcgactggggaagcaagtacctcgtcaacgacggggtcgcggttcagcagnantgncgcgagagcggtcgggtgcttgaatccgtggtcgtcgacaggactgactgcggccgattaccgtggatcgcgtcttgctcaaggcagggccggtcgcgtcggccgccgtgcatgaacgtgtcgagcaggtgcgtgantgcgcgaaagtgcctcgggcagctgaccgctctcgtaccgttggaacanagcggaatcgtcccgagtaccggccat

SEQ ID NO: 576046 - DNA, 418 bp, Homo sapiens
agctctacaaaaaataaaataaaataaaataattaaccaggtgtgatgcacattttaacttgcatattagtctaagactctgggaaattttctcctcctgtatcttcttgtgtcctaaacaaactgtttgagtcctgtctattcttcctcacatatggatttccaaacacttctctccatttccacgaccacaaaaccattgaggcaggtacattactgggcaggggaggggcagccaggggccagctttcacctgtgtgagctgtagtgtggtggcacactagagccagctgtagtaccagctacttagaaggctgaagtaggagaactgcttgagcccagaggcttgaggctgcagtgaactatgatggtgccactgcagcaaagcctgggtaacagagcaagaccctgtctctta

SEQ ID NO: 576047 - DNA, 101 bp, Homo sapiens
gtatgtggaagggctcctacgtccgcgaaggccagccgctggtgcagataacgacgtgttgctgcgcgcccagtgtgcagcagcagcaggcgggcgtgcag

SEQ ID NO: 576048 - DNA, 985 bp, Homo sapiens
gtatttacaaacagcattcagagcatctagtgcattaaatgccaaaaaaaaaaatacattatcagtgattgaaacgttacatgtacccaaaaaccataatcatctctgggcagaaaatgctgagatcaatgaatattctgtgtgcctatattgacgtagtgagtactagagagtctgtattaataatcggactataataattagtattaattagcttggcaaactgatggccatcaaggtaaatatattatttggccaaagtgctgggacttccaaaacgtcacccccttatttaaatgtgtgctcatgacccactcatgacacagcatctgcaatattatctaaaaaaatgccctgcaggtgtcacggggcgaggtattttaaggccatgacaaatcaactgagtacaaaagccccctacttggggggtttggggaagtcctctttaaatggaaaacaatttacaggacccttgcggctataacagacaacttctcgtaactgggattgaaattccaatcacgaaacgttcaatagtacttcagcgcccaaaatttcatatgaatatatcagaatacatctggacgatttgccactacaccaatctctttaaccaccccaaggcacagcttagacgtgtgttgacgtacaacaagctgaccagccccttaatatcagttggaccccacattatgagggaatgccattacgactaccatttcagccagacaacattataactcactaatggacgaggatagtaagtcacaactatggactagtggaccataggcatatacacacacctatatttgcctctcaccaccacacacatcactaaaggtggtatatgacaccggtactcagggcctacgccagagcggaggaatgagcgccacagagccagacacgtacagtatgtgacagatccggacagaagtcgagaaggaagaaacgacatagtcaaagaatggaagcacattac

SEQ ID NO: 576049 - DNA, 335 bp, Homo sapiens
ccccccaggagacaaccttaggctcatgagaacacaggttttgccgcgagacaaccttgaggggtctattaaagggcacctttatagtaccagaaaggtggcgccttgtgagagtataggacgagtgcttgcacagagatcctaagaggcggaaaccaacttaatggtctaccaaccaaccccgtggaaggcagcctcagactcgaggaaacgattacaaagtgccatgacagagggtgctgtgttcctacggaaacctaagagaatctatgaataaaggaaggctttattgggtcagaacatgtaaatataaatcggccagccacttcagccat

SEQ ID NO: 576050 - DNA, 726 bp, Homo sapiens
ccagctctgggggatgccaaggctggtggattatgaggtcaggagttcgagaccagcctggctaggatgacgaagccccgtctctactaaaaatacaaaaattagccgggcgtgatggtgggcacctgtagtcccagttaattgggaggctggggcaggagaatcacttgaacccgggaggcagaggttgcggtgagccggtatcacaccactgcactccagcctgggcaacagagcgagactccgtctcaaaaaaaaaaaaaaaaagaaaaacaacggggctatgatagcgcattgtcttgtaattcccaaccacctctggaggctgaggcaggagaatctcctgtgagccccgggatgtggaggttgcagtgagccgagaatcaggtccctgaactccagccggggcaacagcagtgagcactctgtctcaaaaacaaaacaaaaaaaaaaaagtgcgggccagcgggggcctcaccattgtgttaaatccacagcacttgtgggggaggccacggtgggacatggtattccacagagggtcagggagcatccggagacccatcctcgggtctaaaccacgggtaaaaaacccggcgcctacaactaaaagaatacccagaaaaaattaaacccgggcagttgggtggccaaggcctcctggggggtcccccaggtaatctaggaaaggaggagcgcaggaaaagggtctggaccccggggagc

SEQ ID NO: 576051 - DNA, 127 bp, Homo sapiens
  misc_feature (127)..(127): n is a, c, g, or t
tagtctttctccgttgtcctctttcctgatccttttagctctctctctttctcctgcccttctttcttctctgcatccgggggggccatcttggtcgttgatgagtgttgtgcagggcgaccacggn

SEQ ID NO: 576052 - DNA, 132 bp, Homo sapiens
gccgaccatctcaacatctcccgcactccctcctttgccttgtgctgagcactctaggagtggagtgcgggaggtgtttgagatggccactcgggctggcctccaggtccgcaagaacaagcgtcggatggg

SEQ ID NO: 576053 - DNA, 259 bp, Homo sapiens
gtagggtgacgctcactccatccatcagattcatccagtcttctccgtgtatgcttcctgcacctgtgttgtcggagtggttgatcctctgccgcaggctcttcaggtcatcgttcttcttctccagctgatcccgtaggcatgcacacctggctcttgtgctgccgggaggagacgcggttagtgtgcatgtgtctcggagttagcttgccgtgccctcgtgtatctgccgtccggatgacctccgttgatggacatt

SEQ ID NO: 576054 - DNA, 536 bp, Homo sapiens
ctaacaaaaatgtatcttttcttataatcaccctccaaaaattatacaacaccgaccaaaaaaaaatattgccagtattgaaaactccacaaaaaaaacccccgtcacaataacaaaaaaaaataaatctttccctctaaaaaaaaaaaaaaaaatcccccagaaaatttcaatgggaaaacaagcataaaaatcatactcgtggaaacaaacaactcccccaaacaaaacgaacgttttttcttctccctcgccacgaaaacaaaaacacctctgaaattttctaaggaaaacaacaaagaactcctaacccggggccatgctaaaaaatacctcacaaaattattccgtaaaacccccccctctaaaaaaacaaaacaaaacctaaaaatttcacagccaaaaaaaaagatcaccaaaaaaatccatacactccccccccaaaaaaagttgccacctcaattcccaaaaaattaacgacagacaacaaactttaacctgctcgtcccataaggggcccctccccatcacaaccg

SEQ ID NO: 576055 - DNA, 299 bp, Homo sapiens
tctctttgtcaggatcgtgcacttgctctgtacaacgcaggcggtgagaagatattagaaggaagcacctgctactagtgctactccagcagtatttgaacacatggaacagtgtgcggtgaaaacttgccacaatggtgggttctgtgagtgctgggactgtggaatacctgtacagccgggatggcagcttctactttctggaattgaatcctcggctgcaggtcgaagcacccttgtacagagatggtggctgatgtcaatctccctgctgcacacgctccagattgcggtgtttg

SEQ ID NO: 576056 - DNA, 1388 bp, Homo sapiens
gagagactctttgaaagtaaagaaggtcatcagcatggagaaattttgacccagcgttccaggatgacatgctgaagaacaacaggactacgtggatgtcccatcactgcgaaacgcagatgtgctatggagaagtaggcagatgctcattccatcctcgttaactacggccacagtcagcagaatgacactggcacacacaggcatatgacgtatcaagcaatatggcacgagtaataccagtactcaaactcgtcaactacatgtcccagaaaccttctcaacttgtctcctcctctgtacagacacatgaacagggctcatagtggcacggaaactcctatgttctgtgcagagcaactgcggaagaaaacatttattgtacccgattcaagaccttcacaagactacgaggcaatcaatgctaccgctggcacgatggcaccgtctataagctgctacccactccctgctgcggtacagcccttgatgttctcgtccagcctcccgtatcgttcatcccactagaaactgaaactcgactacaatgcgcgagagaagaccccaatatcacacttgttgaacccagtggtcggctagagagccccttgtaggctccattgcgtaggtacgaccctttcggcaaatcaaccattcgcaacctagcacactttccacaccattgcgcggagacgcacaggccctgtaacttagagacctcgctacacttgacactcgctcgcgggaaccaccgccagtgtcacaatagggtatcgcaagcaatagcgctttgcaatgcctccaatacaccattgacaccttcaaccatccatagcggggaccgtacccgccccacctccttcgaacctcgttaacccccacggtcgtagcgcggccaaacgccccttgtccaaggcgcatccgctctcgcccgactctccgcgtttgccaccccacttccccagctgcaccccagacacacctaccacccacggggcggcgcccacctagagcgcccccgtcgttgccaccctgctccccggggtaccactgccggcggcccaacacaagcccacctttacccattagcccctgcatttccggcgccacgggtaagcctgcgctgaccgctcacgacacacaaactcgcaagcaacaagcaaacacccaaccagcagatcgctacgcgacaccccaacgacccccgctagcggcagaccgcgcacgaccccgcgaccgcgatcgccgacaaccacgcgcctatcacaccactccacagacacaccaacccaaagcacactacacaaaccgccccaccggccgggtaaccaccgataccacgccgcggccccccacgaccaccccacgccgacacaccaccccggccc

SEQ ID NO: 576057 - DNA, 711 bp, Homo sapiens
gaggacggtgaatcaattcagcaccgaggatgggatattccatggtcagaaacactgcccggacgtggagggcatgttccgtggcctcgcccacgcaggacggaaccctcatcacatgtgtaggatactggtgatatctcagagatctggctatgacaaaggacatagacacatcctctgaatccagtcctgaggacatctgagagtggtgcccattgccgcagtgttatagcgaatggcgccaagacccatggacaaccccatgtggtagctcacgaggtggcaaagagaatgcttcgaagatatggcgacctgacagcgtctcgtagatgcgtaaccctgtgcttctagtgcccaatcaatcggtgcgaatatgactagtgactgtggaccgtgggcggagttaccaatcctggtagacacagaccataccacgtttctctcgcaagggaattcaacatagaaaggcctacggtcatgacgatggccagtacgggggttaacacactcaagcggatccccggtggttccatttgacatcccataggatagagccgctcatgcagaccctaagtcctaattaatcgcgttagcaagtacacgaatcccttcatgcgaaggaggtaactccaatctaaatcagtgccaatgcaccccctgcacttccaggggaaggtaaacatccaagtcgacttgtgggggaacaggatc

SEQ ID NO: 576058 - DNA, 580 bp, Homo sapiens
tagcccgaatgtatatgccgatgcgtatagggacaggaggtacggctcgtgcagatgcccagcaaaatcggtcgatgagtgaccgtccccttcttagccagattgatcgctttcttagcatcagaggctgagatcaggcggacaatctcagattttcgcttctcgccgtgggggctgacgaatcggttgctcgtcagctgttgcagctgcctacccaaagtttcgtacatggtgcggacgtagtaggtattggccttctcttccagccgtaccctggaatggttttgcctgtagtagagactcatcgctctggcgacgtgctttagctgaaactgcaatgaagcgtcgctgaccagcccggatgcctgcatattcactgcgccggttcgtcggagttgatgccaggccaacggccagattttgccgaccgcaaactcgtcggtcagcgtcggcgtcaccaaccgagccaattcgaaatcttccggcgtaatgcgcaattgctcacggtcgaacagcttgtcgaaccactgaagcacatggcatagctcggaatcgatggccgaatcgtgcggttgatctt

SEQ ID NO: 576059 - DNA, 1110 bp, Homo sapiens
  misc_feature (371)..(371): n is a, c, g, or t
  misc_feature (397)..(397): n is a, c, g, or t
atagctaattaaacctcatggtccacctgccttggcctcccaaagtgctgctattaaagtgatatagccagctgccgttggagagatatagttttgataataacagctttccatcctatagaactatagattaggcatgagccactgtgcctggccccattcatgagttttaaattgcttacccttttgagtagtgtgatgaaatctcctgctgacctactccttctagccagggaaatgaattatccctttatccagcctatccacactgtagatgctacgtgcctattcgtcacttagtagctggttgtcttggttatcagattgactgttgtggtacctcagtgcttgtgttcaactaaccttgattntacttaataacatccccaaagtgcangagtattgtggctaatttataaattaagcttcattgtaggtatgtatatataggaaaagcaatagtatatatagaggtccatactatctatggtttcataaatccactggatgttctagaccatattcccacaccttaggacacttctgcataaagatggtttccgttctaacatctgagactctagggtcatacctggattgggcagttactctgtggccgattggaattttaaacctaatcttacataagcgattttcatagggagggttacaaaaccgtgtggaattagggccccccggagcatttcttaaccaacagggaaccccttttgggcccttgacaaggttacccgggggaaacctttacggttaaattccgcggaattggacggaacccctttctctaaccctcctggttttcccaggtttccttgtctggaattccttaatataggtcaagagtcttcacccgtgcaaacgccttgcctcggcactttccttcaaccctttgcccctctctggaaccagggcccctctatccaggtcttttccacctagcgcggagttcttcgccttcggccgcccccttttcagatccccgcctccgctcccctggccacacctctcggcgcttgtcactcttctgcgccgccccttctcgcgcatcttcactcgccccttctctccactaggccgtttctacccaccccg

SEQ ID NO: 576060 - DNA, 388 bp, Homo sapiens
agagggaaaaactcctgcttctgatacccagagaccatcactaaaccactaagactatagactcacacatgctccctgatgcaaaacgcaaatagaagctcctatcagagtctacctcactccaaagaagtgcccccgtgatgagtcagactggcatcatcaaacacaccccaacaccaaaaccttaagccatcgataaggcagtggggctcaccaaactcctgaaacagcaaatccccacagtcttcctgggtccttggccaaactgccttggtgagtgggaaggacacaggtaattctctccactttacagatctaactactcaaccaatgcacagaggggaagcacaaaggccaggagtctaggagaggtcccgtggtcccagat

SEQ ID NO: 576061 - DNA, 359 bp, Homo sapiens
cccagatcacacaacccagccggggaaaggcattcactggtcctgaccaacagctgtagaatgagagtggctgacaatctatgtcgtctggagtcaataacagctctacaatcttgctgtcctaatcctaccataaggagccaatgctaacgtacacatactgaccatataagcaggtcctcaaaatgaaaagggaataaacactgagtacatggggacacttataaggaagacaagagaaatacataagtatgctgcttacaacatgcatcaatgtacctgctttatccacactaattcgaatacttacccacaaactgtgtatcatatatcactttcaaaaattcccatgtcccatg

SEQ ID NO: 576062 - DNA, 198 bp, Homo sapiens
  misc_feature (122)..(122): n is a, c, g, or t
  misc_feature (167)..(167): n is a, c, g, or t
ttcactgccaccagtgatctttcaaaaatacaaatgagaccaaatatagtggctcacacctgtaatcgcagcaccttgggaggctgaggcccaaggatcgcttgaacccaggtaggtgaggntgcagcaagccatggtgccccccctgccctccaaacatgggcaancagagtgaggccccatctcaaaaaaaaaaaa

SEQ ID NO: 576063 - DNA, 347 bp, Homo sapiens
tgactcccagcacatccaagaatgcagttaactgataagatactgtggcgagctatatccgcagttcccaggaattcgtctgattgataacgcccaaagcctcgtgtctatcatcttgtaatagtcttaaagcccctgcacctggaactgtttactttcctgtaaccatttatccttttaacttttttgcctactttacttctgtaaaattgttttaactagaccccccctcccctttttaaaccaaagtataaaaggaaatcttgccccttcttcggggccaagggaaatttgggcctttgccattttcttggccccgggtaaaataaccgaattcttaatccttc

SEQ ID NO: 576064 - DNA, 120 bp, Homo sapiens
ccaggagtaggaacgaagggctaggaggcccctacagtaagtagtaaacctagagtaccgatacacacgcaatagataaacctatactagtaatactagcgggtcctagcagtatacaat

SEQ ID NO: 576065 - DNA, 521 bp, Homo sapiens
acatgcctggctccgagagtgtggctgttggcatgtataagataggctcagagcgaaggctcacggtataagttggtgggagagagtaatatctgggcagctccataggctggctggatcgctcgatgggatgcgacaatagaatagtcattcaaggaaggctggctagagactaagggcacacctgagtcgagagaatagagctcttagtccaagtaacagaaactgaacttttcagttctatacatatattttacatagttaatgctatcccagtattgaaagcaatcagtaaacacgggtcggtaacatcaaatataaaatgccatgtgatcagcatcaaatgcagatccacttgtacttagtgcggggcccttgtatcagtgaggtgttacctttggttggcttagctaagtatacgtttactttcttcgtccttgaaacaagctagaaatgtagaacagagttataacgagctcagattcatttcattgcacactgatttggactgcactgacggg

SEQ ID NO: 576066 - DNA, 994 bp, Homo sapiens
gcctcagcctcccaaggagctggtactgcaggcacacgccaccacgtctggctaatttgtgtagttgattgagtagaaatggggtttcaccagtgttggccaggcatggatctcgaattcctgtcctcatggtccaccgtacctcaggcctcccaagagatgctgggacttataaggcgtgagccaccggcacccagaccatttcttattcttgttctttttttgggtcaaatgtgtgcttggtgcaaaattagcctccttgtgtttccctagaatgcacggtattaagaacgggttcgaagctgggaagtttccacactgtgacgatgaattcgggagtgcctcaatttgtcacctcttcagctcgacaacgccaggcttatagactacgcgcgatggttcatccaaaacacgtcctgggagaaaccggcagagggagtcaagcaaacctgtcctgggcgctgttataggggagaataatagctgggacatttggaaacttatgtgcgggtggaacagtgtagaaatgttaccttgacatgtattttgcggtgaaatctcgtgcagttgaattgccttggtgcatacgcgaacacgtgctaatgtgggcactccctatacatgtctcccgagggtctctggacgtttcgggacacttggcttttcaagacaggtccacacacaaattcagctgaacgcccagaatgctccttatacacaattatggcggacatcacccgttaatttcaacaggagcctcctaagaggttctttacacaagaccagatcacaagacgaacaaccaaacacaccaagacaaagaacagacgagcgccacaacaacgggggtgcgcggcccgcagcgcatccattaagagaggaattctcccccgcaactgagaaggggggggcccccccaaacgagatatccaagcccagggtcgtaaccaccgcagagaaaatatccctctcgtgggtactaccccacagaggg

SEQ ID NO: 576067 - DNA, 201 bp, Homo sapiens
cccgtgattattaaacaagtacctatttttttctctattctctgctatttgtttaaatgaataaagtccaaagtcagatcttggtctagtttacctagtaagtatttttagtactcttagtaaatacttgtgatttttataatacaaaagggtcttgactcttaatgcagttttatagaattgtttttgaatttaaattaa

SEQ ID NO: 576068 - DNA, 165 bp, Homo sapiens
  misc_feature (140)..(140): n is a, c, g, or t
caacgctgctcgagcagcagcctctgaggtgtcctggccagtgtccttccacctgtccacaggcatggggacacatcttcgccaacctcttacaggggcccttttttggcaaaaaggaaattgcgcatcctcatggtggncctggatgctgcagggaagaccacg

SEQ ID NO: 576069 - DNA, 820 bp, Homo sapiens
  misc_feature (19)..(19): n is a, c, g, or t
  misc_feature (27)..(29): n is a, c, g, or t
tttttatattaaatgtganttttaaannntttaaatcaggacacattgaggcagttctaggctatgactttgatgtgcgtacaaggaagacactaaatttattatttcacctccgtgggatttcagggcatgcgaagtccaaaatcacactgcagaagaaacggggcttacgccattggaaacctcaaggaaaactccttattccagaccttccttggaagaaacctttgagatggaaatgaatgaaagtgacatgatgttagagacatctatgacagaccacagcacgtgacttcttttctttggtcctggctccactgtaccatggtagggtagaattccttcacatcctctgcatgacttaagactgacccacttcataacgtgactccaaactgcttctatacatttatgaacagagacccgccttaagagactggactgcacaccatatgctacaaatgagttctgaatatatgaacctacacattttttatacataagtgacatatttatggtataccatcaaaaaaaaataattatgccttatgtggactccacagagtagctattctagtctttgtcccttttctgtatggttaattcatgatccttgaatcactgactaattaagctacggtccgatggttgatatatactgcattatgctaattaaatggtgctattcaggatatacacaaaaaatggggacaacgctctaacgatgctgtcttcttaatgttctcattgggctgaacactttatagtcccctcttagtggattaatcctaagtctcgaacctctatttatactgtttat

SEQ ID NO: 576070 - DNA, 227 bp, Homo sapiens
atgaagacgtctagggtgccgttgatccacacaccaggcttctgcgatttgtgtcaacgcccggttgatgtagccgcgcaacgtgtcgtaggtgaactgcagctgggcgtagaccagattgtgtaccgagtccatattagataaatgagttacattggtgccatctgtacttcttctggttctactatgagtaagattccgactggaacagttggccaaacgttcca

SEQ ID NO: 576071 - DNA, 146 bp, Homo sapiens
cactgcattagccaggatggtctcgctctcctgacctcatgatctgcctgcctcggcctcccaaagtgctgggattacaggtgtgagccactgagcccggccaaatattccaatttttaaacatcaactcaggatgcttcttgacc

SEQ ID NO: 576072 - DNA, 139 bp, Homo sapiens
atggatacgctactgtaatgttcctataaatactaaaggggaacaaaacttgaaaaagccctgttcttcaaaaggtgagtggtttgagggaggcagtattatgaagtgactgctgtgttatttaaactaccagaatttt

SEQ ID NO: 576073 - DNA, 148 bp, Homo sapiens
  misc_feature (39)..(39): n is a, c, g, or t
  misc_feature (108)..(108): n is a, c, g, or t
cctctcacggaattatacctcaagtagggaaagtttccncccgaaagaccctgacttcccacctcagcctcctgagtagctgggactacaaatgctgcaccaccacanccaaggtaatacttttttatgtatgtttttgtagacggtc

SEQ ID NO: 576074 - DNA, 527 bp, Homo sapiens
tgtggatcgcccaggatctcgtgtgtacacatagaaagtgcatacacacgcacataaaggaacccagagacgtgttcggaagccagtgtggacaccctgtgatctgtgcgtacacatttgacacctgcgtacacactcacagacagaaacacagagatgtgtctggaagccagcgtggatgccctgtgatctctgcatacacgtgacacatgcatgcacaggcccatacaggagcagagagacacattcggaagccgatgtacgccctgtgatctgtgcgtacacgtgacacatgcgtacacacccactgacaagaacacagagacgtgtttggaagccagtgtggacgccctgtaatctgtgtgtacacaacgtgacacatgcgtgcacacccactgacaagaacagagacccattcggaagccagtgtgggtgccctgtgatctgatctgtgtgtacaccatgtgacacgtgcatccacacccactgacaagcacacaagagacacatttgaaagccagcgtgga

SEQ ID NO: 576075 - DNA, 949 bp, Homo sapiens
gcaagaagccagtgtcggccattggaagtgcgtcaaactaggtactacagctgatcgaaggtggcaggcaaaggccagtttttagtttcttgaacaacagttcctctagttcaagtacaccagaccacttctgctggtggtggcatatatggtagttccaccgtctatccatccaagtccacctgtggctaccttcgtgtttggacagtccagcaatcctgtgagcagctctgcctttggtaacactggctgaatccaggcagcctctcaggtcgtttggcgtatgtttctcaagataggaaactagcaaccacatccagcacaggtacagctgtcaccccatttgtcttaggtccaggagccaggcagtaataatactaccacctctggtttcggcttcggagccacaagcacatctagctctgcaggatcctcctttgcatttggaactggaccctcagcagcatctgccagtccagcatccggatgctaaccagaacccaacatgtggacaaagtcaaggatgacagaccagaccaatcacccaggcttcggatctatatcatcttccacagcatatttaccactggttctcagactgcacacctactttagggacagtgtcaagccagagcagaccctgtgttggacagcaacctaagtagcctggataaggctccggaacagatcctaaatccaagtcgagacaccaagaggcaggcgcaactcacaaagttcaacaccagaaaccacaggcccacaggaagggcccaacctccggcgccaacatctagacacaccaggtgacactacaccaagaatctcgaccagggggacatcacacgatacacaaacgcaacacatacccgagaggcaatggggacacagagatgcgaaccggagaaaacggcacagaggacgaggatacgagcaacaaacacgcggacac

SEQ ID NO: 576076 - DNA, 217 bp, Homo sapiens
  misc_feature (44)..(44): n is a, c, g, or t
  misc_feature (207)..(207): n is a, c, g, or t
cgatacaagtaccttaatgcacaccaatgctcaaatgactctantggcacggcggggactgctatcaccatccctcactcctgcagggaaggggctgccctactaaaaccccagcgggcccagtgctgtgtccagaacaggtccttatattactgcagcccacaatggaactactgagtaggagccaaaacaggagggggggggaanacgtggcatt

SEQ ID NO: 576077 - DNA, 173 bp, Homo sapiens
ccaatggctgttgatggtgggtttggggacactggagactgggaaggtcgctggacccatgtaaagagttcctcgagcgatctggacctacacacaccctgatttcgacccgagcactgatctctccagttcttgtagaacatgtaagtctagtcattgacctgcgcttagat

SEQ ID NO: 576078 - DNA, 445 bp, Homo sapiens
gattacaggacatcttcaggaagccaggattgcgtagctaaactgaaaagcaccatccatggactctccaaagcaaacgtgtatcttctcagcactagaatctgtccagcagatgtttcctgtggccacattccaacaggattggcacttcatgcatgtttcccccagtttccatcattcacagcatcaccttgatagcatccaaattttgcatcccttggttcaggtgtcaacccaagtcattctcccactccttgcagtttccaggcatgcgccagcacatttccaggtcctctgcgagttttctcagctgtgcggttttatactgcagaacccatccagggcactcaatcgaggcgtttcatcattatttgtcccattcaaccaggcactctgcagttgacagtccatcaatcctccatctggttgtctgcattctttgaca

SEQ ID NO: 576079 - DNA, 852 bp, Homo sapiens
  misc_feature (22)..(22): n is a, c, g, or t
  misc_feature (169)..(169): n is a, c, g, or t
  misc_feature (196)..(197): n is a, c, g, or t
  misc_feature (199)..(201): n is a, c, g, or t
  misc_feature (210)..(212): n is a, c, g, or t
  misc_feature (214)..(214): n is a, c, g, or t
  misc_feature (228)..(228): n is a, c, g, or t
  misc_feature (246)..(246): n is a, c, g, or t
  misc_feature (250)..(250): n is a, c, g, or t
  misc_feature (269)..(269): n is a, c, g, or t
  misc_feature (286)..(286): n is a, c, g, or t
  misc_feature (289)..(289): n is a, c, g, or t
  misc_feature (292)..(292): n is a, c, g, or t
  misc_feature (310)..(310): n is a, c, g, or t
  misc_feature (328)..(328): n is a, c, g, or t
  misc_feature (335)..(335): n is a, c, g, or t
  misc_feature (378)..(378): n is a, c, g, or t
  misc_feature (418)..(419): n is a, c, g, or t
  misc_feature (544)..(544): n is a, c, g, or t
  misc_feature (547)..(547): n is a, c, g, or t
  misc_feature (556)..(556): n is a, c, g, or t
  misc_feature (560)..(560): n is a, c, g, or t
  misc_feature (576)..(576): n is a, c, g, or t
  misc_feature (578)..(578): n is a, c, g, or t
  misc_feature (581)..(581): n is a, c, g, or t
  misc_feature (584)..(584): n is a, c, g, or t
  misc_feature (590)..(590): n is a, c, g, or t
  misc_feature (607)..(607): n is a, c, g, or t
  misc_feature (618)..(618): n is a, c, g, or t
  misc_feature (621)..(621): n is a, c, g, or t
  misc_feature (623)..(624): n is a, c, g, or t
  misc_feature (629)..(629): n is a, c, g, or t
  misc_feature (635)..(635): n is a, c, g, or t
  misc_feature (643)..(644): n is a, c, g, or t
  misc_feature (650)..(650): n is a, c, g, or t
  misc_feature (652)..(653): n is a, c, g, or t
  misc_feature (658)..(659): n is a, c, g, or t
  misc_feature (683)..(683): n is a, c, g, or t
  misc_feature (685)..(685): n is a, c, g, or t
  misc_feature (710)..(710): n is a, c, g, or t
  misc_feature (719)..(719): n is a, c, g, or t
  misc_feature (768)..(768): n is a, c, g, or t
  misc_feature (849)..(849): n is a, c, g, or t
gagttaaagggttaagtacatnggtctttatttaaacactgattttttttttaaatatatacacacaaaacttagttcagcaaggcttcatgatatacaccaattccaaaataaaacaatcaaatggtccaggtgtagaatgccagattccttttatcatctgcgaggnaaagagaagccggatgcggaagagtgnngnnnggcgggggnnngntctgcccagaaganctgccgcctcctggcacngcangcgctccaggcgcctgggnccctgttcatatctggngtnggnggggggctcccatcggcngctttgggactgaaaggnccaaggntgtcaccagctcccggatggggggggggctgtcttgtttttgntgtgggagggggtttgggtggagaaaagattcaggcacannaccacaggggaccagagtggagagaagacagagagttctgccgaggccttggtcttcctgtctttccaatcttgccttccccaactctccctgcttcctgggaccatcggtaggggtggggagcngcngtcacaaancccnctggggagggaggcananccncantccacntcccatgctgccctcanattcactgganagngnnggggnacaggntgaagccnnggccantnnaagannagacaattgaaattgattctctcntntgtacccagcataggaatagtgaanctgctacantggaggctgcgttcccatgacttcctcctccgctctccttgtctggganttgctggttccaggggtgcatatagggagggggcgggggccacaaccccgagacggtgaggaaagcttccgaccccctgtnaac

SEQ ID NO: 576080 - DNA, 458 bp, Homo sapiens
  misc_feature (2)..(2): n is a, c, g, or t
  misc_feature (445)..(445): n is a, c, g, or t
gntggagacgggggtctcaggagagtcggcaaccctccagcccaacacccttcaccacagggggggaggaggctggcaccgcaggagatcttggtctccctttgggccacggataccttgggccttatctgacaacagctacccctcgatccttccctcccaccccaggggcggggcagcgggctggagcttggtgtccacctggctcgggaggtggagacccccatcggagcaacatcctctctcttggttcctcggatccctgggcatcgtcacaaacccagaggtgcataataaaaactggcggagtcaatatcccggtaaggcttttcattttcatttaaaaagtaaaaggtggcggggcgttgcagctcattcccgtaatcccagcacttggggagtgcgaggcagaaggatggctggaggtcaggagttggagaccagnctgagcaatatag

SEQ ID NO: 576081 - DNA, 597 bp, Homo sapiens
  misc_feature (160)..(160): n is a, c, g, or t
aaaaaccgggaagccccccccagtggctgggagttgttttagcccaccctgtatgatttagttccaaaaattagaaaagctgtaaacgacccgcctgagggaaaaaggaaagtggaatctctggggccccttttcagggtcccccccccaaaaacccgcnacatttttgccctctttttccaaggggaagccctccgcagagaactctttgaattttgttttaaaaaaggctttgccgcccaaaacccggttgccaaatggaaaaaaccaggattttaaaacttttgctgcccccggggccttcaaacccggggcccccactttggggggaaatgcattttccgggggccccaaaacaaactggaaatgggccgcctccttgagggccccccctgtggctgttgtgggtttttttggtttagggtggggcgcccccccctgggctttgggctttgcagggttctgcctgtcccccccccccccttctgggggcaacgaacagggcccccggccccagttggggcccggtttttttgggggagggttccccgtttttcccctggggtttggaaaaaaaaaatcttttaatctccccga

SEQ ID NO: 576082 - DNA, 416 bp, Homo sapiens
  misc_feature (125)..(125): n is a, c, g, or t
ccaaggcctgggactgccttcagtcctcctctctccctctcgggctgcagtgtcgggagcagccggcgccaccgctttgccgtaaccactttaaccacttcctttttcacgactgcacggcactnactggccttccgccggcacagacagcagattcgccctggtccggtcgctcccggctccttccatggcccctgaccgaattttgtctgctcatcaggaaaccaaagtggcgtctgaagatcagtgtttttctaattagcagagactttacttcagtgaaacagaactgtttagaaacctgggtgattttcgtggtgttctgtggggagctattttgctatgacttctggccagtgtactttattttaaatttagttttgaataaatcatgcatcaaaatttgaaaaaaaaaa

SEQ ID NO: 576083 - DNA, 1119 bp, Homo sapiens
ggaacctttcccgctttcggtgttaggggcccttggccccttctggcgatccaagtgacgaaaggattcttaacggcactgagggtgcttgggtacctcatgcctggggcgaagcactgggagactcggatggggacaggaagggttgactgtggatccggttctttaatccttggagaacatgaaattgatgaaatgcttgattgaacggccctgaagaacggttttctcaggaagatccgttctggtggacggaatcgtggaacggtcagtaaccacgttggacgggtattgtgtcaaggccaatcggcgttcttgcgcaatcaggacagctagattcgagtccctacctctacggacagcaatcctgggaggatccagtcagaccagcgcgtcatcagtcaaggctgaacagtccatgtgggaaacactttcccaggtggaccagtttgaagtgggacatgtacagagaaggagaattcaccagagaagttcagccctgaaagctgtgctacggatgcttgcggtctttgggccgagcggagttctgtcaccaccataggcatacagcatactcgtgggacagcatgacgcatggcatgcaagaatgacgctagcgccgttcacgcgagaaccgctctgcatcacagtggagatttgccatcctggaaccacgggcgatgctggaccacgtggtgcccaacatgctggagactctgacagatcgcttgatgatggagaagaagaatccgcgaccaggacaggaacacgaggcggatgaaggcagtcttgccaacagcggccccggcctggtaaccagccgatcacgcacacggctcccgcggagcatgcgtcaggagacttgggccgacgctctctctccatcttctcggcaaggacagaggcgaggggacaacccagcgcaatccgtgaggatacgggcgggggtggagtcggcggtcttccaggtggaccctccgccggcacagcagttccatttgaagagccccaatcctgccccccaccccaccctccatacccctccccagtctgctggggtcaggaagaaaccttattttaaggttgtgttttgtttataaatacagaggaccagacagg

SEQ ID NO: 576084 - DNA, 350 bp, Homo sapiens
tttccctttgcaacttatcccccacagggggggaaacaggatttttccatttgaaaatttatttgaaggggggtcccgccccccggtaaaaacaggtcaaaataaattttttggatcaaggccccgaaaggaaggaatacggtggggccccctaaaggttaaatttgaggtttcattaaaaaaaaattggcttcaatggtttattttttaaatggtaaggttcaaaaacaaattgtgttttaagccccttccccccggattgtaaaacaaattttgtgttaaaaagccagggggacagggtcaaaaaggaaaagggttttacggggtttttaaaaaaaccctttgggtta

SEQ ID NO: 576085 - DNA, 150 bp, Homo sapiens
aaagtctacatgaatcaagtgtgtgatgacacaatcacttctcgcatgaactcatttgtgcaactcgcggactgagatcgctacaaatatgactgaactaatgagacagcacatgctgcaattccatttctgactctctccgtaattcca

SEQ ID NO: 576086 - DNA, 1866 bp, Homo sapiens
  misc_feature (199)..(199): n is a, c, g, or t
  misc_feature (256)..(256): n is a, c, g, or t
  misc_feature (276)..(276): n is a, c, g, or t
  misc_feature (286)..(286): n is a, c, g, or t
gcgagagtgcgtcggggtttccatgtttcagcagtgcttggacgggaatccgggatgtctactgtatacctccatcccggccgggcggccgtaattaggtcggccctccgtcgatcgtcctatcatccggctaccctacgcgcagtagcctccggaggacccccggctgtcggctaccacgttgcactggtgcatggcnagcggcctggcaggccgtctgcctcgtccttgagtctgccgtccatgaaaagaaccngctggtccatgcgtcagcantgtcgtagcntaggatactatctcaccacaggacgtgcgataatggaccggactactcacagctcggtcaagactcacaactcttggacgcctcgtaacggactttgtcgtacctggttctaccccttgtcgcactgtactctcagctaccatgttatgaccctcggcgaagtggcacttgctgtgggcctttatagaaagggtacatcgtgtaggggcgcatagaaggtcagcaatctccttcgttttcaagcaccattctacgttacaattaggagcggaaggaggcgtggaaaccaagtaggcaattgaaaggcaattaaaccattggaactgggaaacgggtccgtcgttcgatggacaccccccacatcgggatggggctcgggacccagaaggaaatacattgtcccgtatccgacggggagttgagtgctaggggaatacaacgcaagaaacctgatagtattcgcacggttgtgtgacagacaggccggggacttttgtagagttgccgataggggcgccaggttgggtttgccacgtttccaaaccactttctaggggacacacacacctcataggtcggatggaacgacggtacctaagcctctatctttgaccattggtgggaaaccttaagaaagctttataaaccagtggtgcccacaaacattggaaaccgcattattagagttgggaacgccccccccaaatattataggttggtttgcaccttttccaattttagatagaacacaccaaattttaacccctggaacacttagaagaccaggcggtggaaaagcgcccattcaaaacaagcaaacttgtggggttgaacacaactggttgaaacaaaatcttatggacgccaaagcaatgtgggaagcaggccccggaaagttcttgggacatatggagaggggaatatattcatacttaatggaacaaaatgcaacaccccctggggacagaccacggtgattaaacttgagaaatgggtaaaaaggccttcgggagcataaagttttcccccaatagggactgaggggtgtgaaacacactcccaccagctgtgggtcacacccacaacgcgacagtagcactagacattgttttggggaggtgattaccctattaacactattatctaaataacgtgtggtacccacaacacattcaccagctaagagattcttggagatttgttgaccagattccctttcaaataaaggaaactgtggtaccccggggctaacaaacacagcataaagctaacgcaacctcgcgaggacttatttgggctgggcaaacaaggagaattaaggagcgaggttcaatcgtagttagacaacagttttgttacaggaggaaaacgcaggaccaaagaggcggaatataactgggtcagtagactagtacaccagtacatatgatgtcagccagataagcggtggaatataagtgagagctagcgctaacgtcactgctgcgttagtttctcgttatcatctagtcttgtgaccatactaagtatcactactagctaataactcgtcaacattaatactagatgagacagaacgc

SEQ ID NO: 576087 - DNA, 313 bp, Homo sapiens
  misc_feature (26)..(26): n is a, c, g, or t
  misc_feature (28)..(29): n is a, c, g, or t
ttggaaaatcccagttagaacccccntnncccctcaattctgatcagggttcctcatccctctaccatccaaggtgatgtttgatcacccttgacctattttcagcaagaaaccccctttactcctgaagttccttcttagtaattttttatccagtgaccccaagctttttgttccttggctataaattcccacttgcccatgctgtatttagagttgagcccactctttctctcctaattcagaatcccattgccatggttgctatacctatcctgatggtccggaataaaatctgtcttactgtgcttta

SEQ ID NO: 576088 - DNA, 866 bp, Homo sapiens
tagaagtactaaaaattacaatgtattagtaagtttaatatttggacagggcatggtggctcacacctgtaatcccagcactttgggaggccgaggctggcagatcacaaaattaagagatcaagaccatcctggcaacatggtgaaaccctgtttggtctaaaaattcacaaaatttagctgcggtgtgtggtggtgtgccgtgtagtcgcagctgactcgtggggatggcgtgcaggcagagatgactcgctttgcaagccgaggaggcgggcgttgcgggtgagccaagatcatgccattggactccagcctgtgagagagttgaaacccccgtctcaaaaataattaataaataagttactattttaaaagtggttaatcatttatgtattcgccagtaaaattactttaaaagatattttaacaaaagtctcatatcctggtacttcagtttaggtgtgtgaatactatccctatacattaccctaaaactcagaattattggtttattttttcatacaatgtggggaagggaacatgggagtatgcacatgggatcattactccattctggggttgtggaaacaagaaaatgtgaaccttctgtttagagggtagctaactagcttggtgggggattaaaaagtgtaatacatggacttttgcactctgaagttggcaatctggaaaggggggttctggaagacactatttttacgaaccttaaaatatgttggcgtgtggtgtggcgaacagggtcttaaattttatggcaaagaaatttatccgggtttataaaccgtctttgaacttgactagtcaggaaagattgttaatgtaaaagggggtggaaggtaggacaa

SEQ ID NO: 576089 - DNA, 543 bp, Homo sapiens
  misc_feature (321)..(321): n is a, c, g, or t
ggcaggccacgatgcagaaggagcctctgcaaatgggtgctcatcagaacgcgtgattctctttcatggcagaatgctctgtggactcggttctccaggcctgattccccgactccatccttttcaggggttatttaaaaatctgccttagattctatagtggaagacaagcatttcacgaaagagttacctggatcagccatgctcagttgtgacgcctgaataactgtctactttatcttcattgaaccattcactctgtgttaaggcaacagattttcaatgtggtttcatatcaaacagatcatgtggggattaacnttgcctttttccccaaaaaataaattctcaggcaagcatttctttaaagctattaagggagtatatccttgagtacttattgcaactgggccaagtaataagcaaatggttcttataatggctacctgatttctatgacactgtgttgtgacaacgccaaaattctaggatgtagaacatctgggaaagttcatttcctggggattcacttctccagggatt

SEQ ID NO: 576090 - DNA, 905 bp, Homo sapiens
agtaggacgccatcagtgtaaatagagcttaaagtcatggttcggctgcgataaaaattgttctaacttgggttcaatatttgtagtgaaggtatctgtttgtcatttctttctcacgttataaataaaaatactatgctggccgggcgcggtggctcacacctgtaatcccagcactttgggaggccaatgtgggtggatcatgaggtcaggacgttcaagaccagcctggccaagatggtgaaaccccgtctctagtaaagataacaataaaattagctgggcttgatggcatgcgcctgtaatcccagctactcaaactaaccataatactaactaactctcactgacatagagtccggggcaatgttgacccaccatctaccgccaacagaagcctaatatccagggcgaccactctactgaaacatatcctcagcccgcaagtctttaacactacgcaggttctggactgcacagtcgcatctccttggcggaatacctgcggtatgggggggcagcacactggtagccccctttcctttagtgcgggcccgacatacccattcaccagaagatatctacgtctctacagcatccttgcggcatatatcaagcacgacgtgaaacgacagcgaccgtgactatattttacaccggcacctacgcgttggcgacaaaaccaccacgcattgaatgaagcccgcgatctctccctcacattcggggaacatcaccacgaggacttgctttatacgagtcaaaagaggactgcgccttcccacccactgttgttaaccagaacgcccctggtggacggcgagtgaccaccccaaccgagtggaacaagaaacgaccttgcgtgctatgtccttagtggcagagctggccataatcccaccgct

SEQ ID NO: 576091 - DNA, 365 bp, Homo sapiens
aagcatagtgctgggaggtcctagaaagagcagttaggccaggaacagaaatctaaggcatccaaattggaaaggaggaagtcaaattatctctgtttgccaatgatatgattttatatgtatgaatagaaaaccctaaagattccaccaagggccaggtacggtggctcacgcctttaatcccagcactatgggaggcgaggtgggaggattgcttgaggccaggagttcaagactagcctgggcaacatagtgagaccccatctctacaaaataaaaaaatagccggggcatggtggtgtgtgcctatagtcctagctactcaggaggctgaggttggagcactgcttgaggatggtccgggg

SEQ ID NO: 576092 - DNA, 210 bp, Homo sapiens
tggcgaaagtagatgatggtcatcagaggcggggaaggtaactggggggatgaagataacagtggggctgggtaatgggtacaaaaatatagtttgaatgaatacagatatagtattcagtagtgcaataggatggctatagttaacaatattttatcgtgtattttaaaataactaaaagagtgaaattgcaatattcctgatagaaaa

SEQ ID NO: 576093 - DNA, 136 bp, Homo sapiens
gcaccggtgatcgcctattactgacagtctcatcgtagctctaaaacgcctcacgtactccactgcggaatacactccatagactcacctcttctggcgttcacaatgcctccctaactctattcttgatcgtgag

SEQ ID NO: 576094 - DNA, 376 bp, Homo sapiens
  misc_feature (14)..(14): n is a, c, g, or t
  misc_feature (121)..(121): n is a, c, g, or t
aaaaaaaaaaaaanagggccaacactttttttgtttggagggaaccgggagtggtttttataaaaagctggggagtccccgttttaaaaattcggcagtttggcgtttaaaaaaggccccncagtaaaatttttttatatgtaactttcataattagaaacattttgtgcattctgtgagcagtttaagttggaagcttaagttttgcccctgaaccctggtatcaagggaagaaacaggctaataaaaatttttttttaacctgaaaaacgttttagaaaaatgatcagctttcatttcagcattgtaaattatctttcaaactggtcatttactaaaaccaagccattaaaattggttgtttccttgccattca

SEQ ID NO: 576095 - DNA, 405 bp, Homo sapiens
  misc_feature (163)..(165): n is a, c, g, or t
ggaaggcgaaggatactcgtttggaccccgagtcaaaccgagagggcctgcgagcctgctttgagtggaacctgcacccaggcatcgcaccagagaagagctggcccaggcatcgacattctagagcccaggttccaaatttggtttcagaatgagaggtcannnccagctaagggcagcaccggcggaatcttggccctggcccgggagacgcggcccgcaagaaggcaggagaaagcggaccgccatcaccagatcccagaaagccttgctcctccgagactttgagaaggattgctttccatgtattgccgccagagaagagctggcctgaaagacgggactccgggagtcaggattctgatctggtttcagaatcgaagggccaggcacctgggacagctg

SEQ ID NO: 576096 - DNA, 865 bp, Homo sapiens
  misc_feature (47)..(47): n is a, c, g, or t
  misc_feature (129)..(129): n is a, c, g, or t
  misc_feature (131)..(131): n is a, c, g, or t
  misc_feature (147)..(147): n is a, c, g, or t
  misc_feature (149)..(150): n is a, c, g, or t
  misc_feature (166)..(166): n is a, c, g, or t
  misc_feature (174)..(174): n is a, c, g, or t
  misc_feature (182)..(182): n is a, c, g, or t
  misc_feature (187)..(187): n is a, c, g, or t
  misc_feature (197)..(199): n is a, c, g, or t
  misc_feature (204)..(204): n is a, c, g, or t
  misc_feature (206)..(206): n is a, c, g, or t
  misc_feature (209)..(209): n is a, c, g, or t
  misc_feature (217)..(219): n is a, c, g, or t
  misc_feature (231)..(234): n is a, c, g, or t
  misc_feature (239)..(239): n is a, c, g, or t
  misc_feature (246)..(246): n is a, c, g, or t
  misc_feature (250)..(250): n is a, c, g, or t
  misc_feature (254)..(254): n is a, c, g, or t
  misc_feature (256)..(256): n is a, c, g, or t
  misc_feature (259)..(259): n is a, c, g, or t
  misc_feature (261)..(262): n is a, c, g, or t
  misc_feature (267)..(267): n is a, c, g, or t
  misc_feature (271)..(271): n is a, c, g, or t
  misc_feature (275)..(275): n is a, c, g, or t
  misc_feature (277)..(277): n is a, c, g, or t
  misc_feature (279)..(279): n is a, c, g, or t
  misc_feature (281)..(282): n is a, c, g, or t
  misc_feature (284)..(284): n is a, c, g, or t
  misc_feature (292)..(293): n is a, c, g, or t
  misc_feature (301)..(301): n is a, c, g, or t
  misc_feature (304)..(307): n is a, c, g, or t
  misc_feature (310)..(310): n is a, c, g, or t
  misc_feature (312)..(312): n is a, c, g, or t
  misc_feature (325)..(326): n is a, c, g, or t
  misc_feature (329)..(330): n is a, c, g, or t
  misc_feature (333)..(333): n is a, c, g, or t
  misc_feature (336)..(336): n is a, c, g, or t
  misc_feature (341)..(341): n is a, c, g, or t
  misc_feature (343)..(345): n is a, c, g, or t
  misc_feature (351)..(351): n is a, c, g, or t
  misc_feature (362)..(364): n is a, c, g, or t
  misc_feature (379)..(379): n is a, c, g, or t
  misc_feature (382)..(384): n is a, c, g, or t
  misc_feature (386)..(388): n is a, c, g, or t
  misc_feature (390)..(390): n is a, c, g, or t
  misc_feature (398)..(398): n is a, c, g, or t
  misc_feature (400)..(400): n is a, c, g, or t
  misc_feature (403)..(404): n is a, c, g, or t
  misc_feature (412)..(412): n is a, c, g, or t
  misc_feature (419)..(419): n is a, c, g, or t
  misc_feature (421)..(425): n is a, c, g, or t
  misc_feature (428)..(428): n is a, c, g, or t
  misc_feature (432)..(432): n is a, c, g, or t
  misc_feature (435)..(435): n is a, c, g, or t
  misc_feature (437)..(437): n is a, c, g, or t
  misc_feature (439)..(439): n is a, c, g, or t
  misc_feature (443)..(443): n is a, c, g, or t
  misc_feature (445)..(445): n is a, c, g, or t
  misc_feature (447)..(447): n is a, c, g, or t
  misc_feature (451)..(451): n is a, c, g, or t
  misc_feature (453)..(453): n is a, c, g, or t
  misc_feature (465)..(465): n is a, c, g, or t
  misc_feature (467)..(467): n is a, c, g, or t
  misc_feature (487)..(487): n is a, c, g, or t
  misc_feature (491)..(491): n is a, c, g, or t
  misc_feature (494)..(494): n is a, c, g, or t
  misc_feature (496)..(496): n is a, c, g, or t
  misc_feature (498)..(498): n is a, c, g, or t
  misc_feature (502)..(504): n is a, c, g, or t
  misc_feature (506)..(506): n is a, c, g, or t
  misc_feature (516)..(516): n is a, c, g, or t
  misc_feature (523)..(523): n is a, c, g, or t
  misc_feature (531)..(531): n is a, c, g, or t
  misc_feature (541)..(541): n is a, c, g, or t
  misc_feature (549)..(549): n is a, c, g, or t
  misc_feature (551)..(551): n is a, c, g, or t
  misc_feature (554)..(557): n is a, c, g, or t
  misc_feature (792)..(792): n is a, c, g, or t
  misc_feature (859)..(859): n is a, c, g, or t
tattatagacacgtgtttaacaacatatccagtgtacattttaatanttggcattatcaccacaggtagctttaattatataatcaacacttaataaatttccctacacatgtacatcaaatgtaaatngnggaatatccaatttancnntcctccttcaaactanctgttaanttactctntcttntttttttttnnnttttntnggnagtttttnnnggtgctctttannnnccgcngccggcncttnggcngngcngnnatgcnattncttncntncnntntgatgcgnngtgtttcntgnnnnccnanttgccataggccnngtnnttnccntagtncnnntctttnctgtgtagaannnctccccttcccgtgnatnnntnnncngctttctntntcnngttatgtntggcgtntnnnnngtngttnctntntntatntncntatncntatatatataantntgcctgttctagagtataantatnctntntncttnnntntttcccgtgnccgaccnttatttcntctggtttcngttttgtncnttnnnntacatctggcagttggggtctcccctgatctctggagacccagggatcctcttcccattccaagggtagacgcaccagcagagtcccgcctctccatccatggatgtctcacactgtctgctgtgataaaatccattcttgttgcagtttggcaggtaaaatttggaaatttcttctcctgatgtctcctgtgccttggctaaactctctacgactctgtagagttctattcggnagggctccttccattttttgatgttggtgacatggagagccttcgagccatcataggtactgatggngtccca

SEQ ID NO: 576097 - DNA, 829 bp, Homo sapiens
tatgctgtataccatgggttagcaaacaacagcacacaggccaaatctggcccactgcctgtttttgtaaaaataaattttactggaacacagccactctcattcatttacatcatatcaatggctgctttcgtgctacagtggcagggctgaatagctgccacagagactatggcctgcaaagccaaaagtatatactgtctggccctttacagaaaaagtgtgctgacgtccatcatatagtagtcacttgttttgacgatctttcccccttattagattgtgagttccaggggcagaagctggttctcttcatttttaatatctctctacaaaaatagagtgcttagtgaatgttgaatcaatgaatgatatatggtgacaaggaactgggtgaatggaagaagctctgctttacaaggaaatacaggagaaagtggagcagaagatgctgggtagattgctaaggtacagaaatgtggcaggaaggtgaggaacctgggaataaataggtgttgcctatagggtcctttcctagaaagtttgggaacttgcaaaggcagtctggagtactctgttggttttagaaacatatacctttacaaaatgaaacctgttttctaccagcttggattctgaatgttactaagatattaaaacagacttatgtggagccacaagggtttgatccacatggaaaattcttgtcaacggaaagagtggaaatcctgttacaagttcagtgtcgaggctactattgaaaagggtaaactccccgggcccaaatttcgtgaaatctcataaagggaagccccacaatgtcatgcct

SEQ ID NO: 576098 - DNA, 1075 bp, Homo sapiens
ggccgggtgacccactccggcgtgctgcgtccccgagcttggtactggctcagccctgtctcccccgaagcctggccgccctgctgcccgctgcccctcagtctggtggatgccctgcagccccccattgtggccctgctgtgcagctcccactgacctgtctgtgcctgcgcacctgccactggtcctgtcctgctgcctgtgcccctgatacctgcgtcctgtgctgccggtgtggtgcacccccatcgcggtggtcagcttgtgctagcccatcgctgctgtgccaccttcgattggttgctgctgcacgttcctgacatcgagaggcatcgctggagacatgcacaagacagcccactggatggaccacctggaagccattcgcagaggtggacttcccagtgtggcaccacggggatctgggacgccgccattcagccagctgcgaaaggggttgcatacagggggtcctattactggtgggacaacctataggaggatacgcaaaatcgcgggtcccccactatgaccagtccagacctcatttggcgaagcgactacagacgaccatcagtcaacagtggagagcgattccctgaggcagccccaccgattgacaagcacctgaaccggaccaacccacaggtggggtagtcgcagtcggccatagagcacaaaagccagtagggcacttggcagccctttatgggcgaacacatggtgatggttacacgacagagaacgtttggagacaatagggaactgcacaatgcttgccaacgaaccgccagtaatcaggttgtcgtgaaatagtttcgcaagcgttggtcaagaagagcggtgttggaaaggtggctggtggaaaccagctgttggacacgcgatgtgaccgcgagagtgatccacgatagtcggagttagaaaagatcccggtgatagggggcgggacatggaacaccacgcattggggtcagagacgacgcggggaaactccaaggagttggatgcaccggacgagggggcgaagggggaattggcgacgtagcgaaagtgtgagcgagagacgtgatgg

SEQ ID NO: 576099 - DNA, 714 bp, Homo sapiens
ccaggctggtgcgcgagagggacgcgtacaaggagaaatacgagaagttggtgagcagcggcttccgagaaaacggctcgagcagcgacaacccgtcctctcccgagtttttcatgtgagtctgacacgcgattccagctagccaccctgataagtgctccgcgggggtccggctcgggtgtgggcttgctagttctagagccatgctcgccaccacctcaccacccccacccccaccgagtttggcccccttggccccctacacacacacaaacccacacgcacacaccacacacacacacacacacacacacaccccacaccctgctcaagtttgtggtggtggtggctgttttaaactggggagggaatgggtgtctggctcatggattgccaatctaaaattctgcataacttgctagcttgttttttttttgttttttacacccccccagcccacccccagacttacacaatgttcaatgatctcatcataattcgttatgttaaacttttatcaccttttaaacctacatcattcacatattttgttcttctgttttcccctcaagtcataaactggtgttcattttctatatgtcattctctgtattttaataaaatttgtttttttaatttaccttttatacttactctttacccacctttttcaacctccaactcactgcttttaaccattttttccacattaaa

SEQ ID NO: 576100 - DNA, 682 bp, Homo sapiens
gcactccatatgctggctgaggagaatgcagtgatccagtgccagtgcccacctgctgatacccgagccaagcgcttcactaccctggtggccagagtctgaaaccggttgttccagattccactgcagaaacttggacgacagagaagttttcgaatggtgtacagacagaactactaactacgacaaaaactaaggacacattgcgtgctatgacaaatgaacagtggagatttctagtggaaggaggcacattgagaatacatgtagtgcccttactttatcatactctgagtggaaggattctcgagactcttcataccgaggacattgaacgacaacagacaggtcccaagcgggagggactatttcaccgaaaatgacactgtacttgtacaaatcaacacatgtggatatcgatagacaaaaacttatgctcaaggctcaagatgtcttccgaccaggcacaggacatctccacagtgtgcttcctccacgtgcttcctccaccatacccgtgaacagtatgacacagtcatgtcactggctctcttaaattataggtaataatgaatgagttgaaaaccacgtgccgcatactgtcatggaacatcggactaagacgcaattcacagaacgatagtcgaacaagccagctcctgcacaaaagagccccagtcag

SEQ ID NO: 576101 - DNA, 819 bp, Homo sapiens
ttcgatcagagcatacccctgatggaaacagaaagatgtggataaaaggccacgttttaagacaacaagtccacaaagagcaaagaggacagaaagaagaagcaaaattcatatgccctttctctccttgctcaggcgatttaacagccaccctgggtgaagggcaccattagctcctgctatggatgaggaagctgagacttagaaagtttaagcaagctgccatcagatacagctgatgggtgtacatttatattctgggcacggtcttcattctggcaccattgtcaatccagtggagcatctggtgtgttcagaggtttatagccggttcagtcccgacagttgccccctctaagctggaaatcactggtcctactagtctggataggagaactgcagctttgtttgacctgggggagatggtctgacttcaagttcctggacctgcagggaactgcaggacatagcgggcagaagagcccaggcagtggtttccgtttaggaagaggttgtctcatgatagagaagcacggtcttgctgcaccatgctggaaagctctgtccagcctcctgttctctgtccagcctcctgttctctgtccagcctcctgttctctgtctagtgggtgcaattgagtttctcccacccgtaaagaggcgattaagtcctaacccccggaacctgtgagtgcgaccttatttggagagagggtctttgcagatgtaattaattaaggccaacaagatggaacttaggatagcccttaagtccagtgactgacatccttattagaaggggagaggacacagccacag

SEQ ID NO: 576102 - DNA, 177 bp, Homo sapiens
acatacaggaaataacgcgagatctgtctacctgcccctagactacggaccctgccgggcctacttctccgtaactactacgacaggtacacgcagagctgacgacagttcctgtacgggggctgcgagagcaacgccaacaattttctacacctggaaggcttgcgacgtatgctt

SEQ ID NO: 576103 - DNA, 509 bp, Homo sapiens
caccccaccaaacagtgccctaagtcctaatgcaatactctttcctcttcaacgctgtgtctcccccatgggctggaacacagctctctccaatcctttcctctattctggagatcggcgaactacagcccaattcagccctccattgcctgtttagataagttgtactagaacacagctgtgcccatttgtttacgtacagtttatagctacttctgtggtataacagcagagttgggtagttgcaactgagaccatacaacccacaaagctaaaaatatttactgtctggccctttacagaaaaagttcgccaactcctgctctattccatggcaagagtccgactagtttgaatttaaaattcagtgtgttagctagatggaaagagtttttcaaagtgtaattatatctgacaaacaatttttgagtacaattctgtgccaggccatgtgctgttatggaagtttcataaataaattaaaaaatcattgccctcctgggtccctg

SEQ ID NO: 576104 - DNA, 778 bp, Homo sapiens
  misc_feature (617)..(617): n is a, c, g, or t
tgagcactggctgccagccttgtgtagcccactggcacagccatcccacccttggttccaacctgtatgcaaagcaggaaagggcttagagggggctgggtaattctaacaatgccagtgacaagtctgctggtggacgtcatctgtggcaatagtcagattgcgaattagcatcgtagtaaatggctggcataattccacggggcagagtttaaattgtggccgttgtgatgaacagggttagggtttatgctgccaatgtagatatttgtgcctccaaaatgttcaacagggtttgtatcgaagctccaaagtaatccttccaggaggagcagtctgaaggtgtccacttaagcatgggagtggtgcagggagtgcatagggggcaaaagtgatttaaggttaactcatccagaattcattagataggtgttcatccaacgtgaatctgcagagagaatcctagcctctgaaaaagaatttgtcacatcatttcctctattcacagaaatagttatatagaatgcgtagagccaggagcctcaacagacctaaagtgaatattagaaggcaacacaacgttagtggtcatgaggcccagattcttagaagctgancgctgaatatcaggcccaagtgctactattactactgtaagtccttaaagtgggaatctaaggctttcgggctccatttcatctgtacgtgcgatataatcttacctccaggttgggcggaagttggtccctcgcctcttttggacctaaccacgccgtgg

SEQ ID NO: 576105 - DNA, 151 bp, Homo sapiens
tggtgagagaactgacaccagacgattactggaatgtgcccaatctcagctgcacatcaaatgtacctgggatgaggtgtggtggagctttgaatctaccactattcagggcacacacctagaagctctggtttcatttgtttcatttgat

SEQ ID NO: 576106 - DNA, 308 bp, Homo sapiens
cccgggggttttggggaaaaaaaaattcccaaattttcccaaatttggtttgggaaaggagaaaaaggccaggtttttttcccaatggtttttccgttcttttaaaaaggtttttaaaacgggggttaaaggggttttgttgcccgggccggggaaaataaacccccctttgggggccccttaaaagggggaaaacccggtaaaaaaggtaaaagggggccccctgcccctgggcggggggttttttgggttttttaaacccatttttttttttttccagggaaaaaaccaaggtttttttccttgga

SEQ ID NO: 576107 - DNA, 254 bp, Homo sapiens
tactgtagtagttgttggggcccacggacccactctcgcttcttggcgtactctgtcatcttttcgggtgtgttgaagaagatggatccgggtgggctcagttgaaaaggattttctgcgtaggccttctcaatgtcacccagcgatctcatcccttatagtgtcgagcagagatgtcaatgaaggaaggtgtagctctcggcgggcatgttacccttggccatgaacactttgttgtagctgccctccatcag

SEQ ID NO: 576108 - DNA, 956 bp, Homo sapiens
  misc_feature (26)..(26): n is a, c, g, or t
  misc_feature (103)..(104): n is a, c, g, or t
  misc_feature (139)..(139): n is a, c, g, or t
  misc_feature (148)..(148): n is a, c, g, or t
  misc_feature (151)..(151): n is a, c, g, or t
  misc_feature (153)..(153): n is a, c, g, or t
  misc_feature (155)..(155): n is a, c, g, or t
  misc_feature (159)..(159): n is a, c, g, or t
  misc_feature (166)..(166): n is a, c, g, or t
  misc_feature (233)..(233): n is a, c, g, or t
  misc_feature (261)..(261): n is a, c, g, or t
  misc_feature (332)..(332): n is a, c, g, or t
  misc_feature (334)..(334): n is a, c, g, or t
  misc_feature (458)..(458): n is a, c, g, or t
  misc_feature (488)..(488): n is a, c, g, or t
  misc_feature (513)..(513): n is a, c, g, or t
  misc_feature (549)..(549): n is a, c, g, or t
  misc_feature (595)..(595): n is a, c, g, or t
  misc_feature (751)..(751): n is a, c, g, or t
  misc_feature (756)..(756): n is a, c, g, or t
  misc_feature (782)..(782): n is a, c, g, or t
  misc_feature (944)..(944): n is a, c, g, or t
ttataattatagattatagatttttntaagttaataatatgcagtgtgttggggcgctgcgtgtttaacatttaacattcatgagtaaacaaaaatggccggnnggtaaatatcttgccaaggtggttcttggtttttngctttttgngtntnanaggnggggggngggtaggggtgagggggttttcccgcacgaactcttgtcaatgagaaatccctcagccccttttgtnttgggtctcacagctccagaagtgagcngggccagaacgaagccatcctagagtccccaaggacagccctcccgtggaccccggctagggcccccagantntcatcctcaggagtgcgccagtctgggcctgcgtgccggcggggtctgcagccacaggtcccgcgagttccggacacttccaggacgtggtctcctggtgagacagctcctccgggtaccagtntcgactcctccgggcagcgacaacaaagtntgcggtctactcaggcctccttgtnatccaccaagccctctctggcttcattggtactgcngcagtgctgggcactagtatctcctggcgtctctgttgcacctgangttccacggctggatggtgttccttcctggtttcaccaaggcctcccacaccagagtctcatctttcttgtctttcacttgcagcctgatccctgatcccaagtggccaacgtagaactccgagaacagctggtcttctccagggcttcgatagcngaccnccagttccttggagagccacaaagcnagggaggtgcacagcttccacagctccaggctcagccttgatgtccagcagaggccctgccaccatccagctgtgctgtggggttgatctcacccaggaactggtcccacacacagaattcaatctcaacggtcaccgcttctctcatcacaaagcagaganccgtgttgggca

SEQ ID NO: 576109 - DNA, 1399 bp, Homo sapiens
  misc_feature (483)..(483): n is a, c, g, or t
  misc_feature (577)..(577): n is a, c, g, or t
aaggagtagctcagacactgaatcgatgcaactatctgttctatgtagtggtggcctatctggtccaagagatgtcagactacagtgtggctggagacccatagcgaactgccgaaccatcatcagatccagcagtcctcggtagtaacaacagcagacgtagagctgtacttgcagttgataatcgaagcttcgtcttagggacagtttgcttgtcagaaacaccgatagggcgtgcagcacggactcctagccatactgtgttgaactctgtgatagcctacctatggtctgtctcgtgcttatgctagctgaacgatggggggtcaacgcaagcgcctggccgtgcgggcattcgcccaggagccatcctatcaaaatgttctgaaccgtgctgatgaagcgtgaggcgtgtatgacagcaatgagatgcacgcgagtatctacacacgcggagcgtggcattctgtgcttgtactgtgnctcccgtgaacgtattgcgtcccacaaacgtgaactccaagtcccgggaggatcaagacccaagaggcagatagcacaggtagaccgcccgtgntaacccggaatggcgccaggagaggccgtcaaacaccgaagccccagaataggtgttagcgaaactggccctgagaggaacaattattgactattggagcatagacgccttgcctgtgacacactcgcgtacgcaacattgagacccctgtcctaaagcaattgaaacagaggttggtgactcggaatcgggacatgtgttccagacgggagagcggcacggacaaccattgggtctccgaggtctgcgacactcgcaggcacggagatctggaggaatttcgagggctacagaaaactgtcgtccttctaaatatatagggtcaccccaccacaacatcaaaacaatcacattcaaaggcccacgcgacataaagtaaatctttcccgatattagcgacatctgttcgcgggacgttacccacagacagaagacgaaaattgggagcggaaaaagcatacgagggcttggcacaatacgatgggaacaatcttccacccgaaccgcttaccgagcagggcgactatgagcaaacattttgttccacgggccacagttcgcatttgcacctattggtcggaaaagacacaggcgcacacaggcgggacaaaattgccaaggggcacgacatcgtgtcaaaaaggtctccaaataactacccagacggccaacagagtccatgcgcgggaccattagattgcccaggcgcagccgcaaaaggggcgcgtttacacatgggacaacactgggtgtatatcacgtgggccctcgaggcatacaacattgttgcaccataggacacgtgggcggtaacaaagagag

SEQ ID NO: 576110 - DNA, 715 bp, Homo sapiens
  misc_feature (715)..(715): n is a, c, g, or t
taggtaggaggctgggtttaaccggcgcgcaggctcgggccgctcccctttcctgcgctgcgtccggagcggccccggtgccgccaccgcctgtccccctcccgaggcccgggctcgctgacggcagagggctccgtcggcccaaacctgatgccttggtgctgccctgctgtgtcctgggtgcatgcctccactcctgccccccatgtcacctgccgtccctccgtgcccctcgacagtggcgtgccctttccctctcgctatctcctgtgctcccctgctcgcccgtcttcgcggtcatacacacatgcacacacacacaacataaaaacacaccaactatcccacatcaacccctcatccctacacacatatcacaaaacaactcccaacaccaccccacaccacgccacgcacaccaccaacaacccaacacacacaacacataaccacacaacacacaccatatacacactcactccatcgccacgcacacgacacagacaaccctagcccccacacacaccatgacgcccacacacaaacccacacctccacacgcgacaaacacagatcagagaaaaagaccggagcgcaaccacccccacgcccaaagcacacagaccacccacacgcatcacagagcccacccgccccaaccagacgccccacacccaccacccaccacgcacccccacacaaggaacaagccggn

SEQ ID NO: 576111 - DNA, 294 bp, Homo sapiens
gaattcggcacgaggttaacacagaccaaacacatgcacgctgcccccaaatttaaaaacgttaggcaccaaacagaaagtaaagaaaaccagaaagtagtgatgcaccgatgacattttttggccgatatggatatcctatattttccttgccaaaaaaacaataccgataaccgatgtttaaaatttttgcggccttttaagcattctaatacagttaaatagttaacccacacacacagcattctaaggcactgcatctcagtgcaagaggagtcactacagtcccaggtt

SEQ ID NO: 576112 - DNA, 200 bp, Homo sapiens
tgatgagaggactggaggaggcttgagaccatgattctctgttagtagaaactaagctctcaagaatccagtgacttgctaacaacccctcccccgcataagttagagacacagcaggggcaaaacctgtatctaatttttcagccagtgttcactaacagagtatccgtatatctcgcagtcttcggtgacagttattt

SEQ ID NO: 576113 - DNA, 607 bp, Homo sapiens
ggccataatcgtgtcttgtaccaagccgtgtctcagagctctgtcaccctggagtatgtgaagggcgtagacaacggatttgggccagattaccagctggccatgaaggctggtcccatctagagtgcagaagatgtcgcgtcccatctacaagcgcgtgcttgaccgggaattcaacgatggcatcttagagaatcgttgcactcggggccaatgtcacgggaccctggatgtgtgaccactgtgtagctggcaatgcctgcggtttatatcaacgtatgcctggagcgggataccgttcaagacaaggtgcgcgaagctgagcgctgagtacatcttgcagtgctttaggcggaattacaccatggacaacggtgtggccacatccagggtgcagctccatggcccttaagctcactgatcgggtatgcccccatgttagactagggtggagacccgagggattgcataccgtttagatcagtagcgagggcttcttgggggccaattgtttgggaacttgggtaaagttgtccacagaaatttttttatccgaaggcccccttgtttccggcattgctttgtccccctattttggtccttccgg

SEQ ID NO: 576114 - DNA, 364 bp, Homo sapiens
  misc_feature (37)..(37): n is a, c, g, or t
gcttccccaaccatttcttcttggataccatcaagtnacagctccacttggcaaataatagctgttacttgatggtatccaagaagaaatggttggtgatggataccagcatgtatcagttatgattgccaggtggagctgtcaggtaatttgagtgcagctctggattcagatgaagcattaagattgtcttcctcggattctccatcgggtgtagagtttttaaactataaatggcatttcaagtcttctgaaacagcatggctgtatgtgcgtggtccatagcacagtacatgcagcatctaataagagtttccattgtagaatgtgttcacatacttgaataaagtcaaatctttaattg

SEQ ID NO: 576115 - DNA, 186 bp, Homo sapiens
  misc_feature (37)..(37): n is a, c, g, or t
  misc_feature (131)..(131): n is a, c, g, or t
  misc_feature (181)..(181): n is a, c, g, or t
gcttccccaaccatttcttcttggataccatcaagtnacagctccacttggcaaataatagctgttacttgatggtatccaagaagaaatggttggtgatggataaattcagaaatgcttccccaaaggtnggtgggttttttaaaaagtttcaggtcacaacccttgcagaaagcactgnttgcc

SEQ ID NO: 576116 - DNA, 399 bp, Homo sapiens
  misc_feature (308)..(308): n is a, c, g, or t
gtttgccttctctttcctcactaagggctctcagttatccacgccaaggctccagcaggtctgtccaccagtgtggtccctacgccacactccggtaggggtcgtcaatgccgaaagcagcaaggcgaccttccctagtccctaagacgtgccttggatgcgcctcgtactcagggatatcaccagacgaggcaagatgagatgcagaaggagcagctgagaacgcatgaagaggacaccagcaaggcccatggtccgaagagcgcaaagaggacactggcgccaagggagagaggacgggcctgccnctcatctcgactacctcagccggccgctccctgagagatcttggctcagtatgttaggaggggccaggcagcggggcagggacagggagcc

SEQ ID NO: 576117 - DNA, 227 bp, Homo sapiens
tcacgtgtatctattgttgacactctgtaatctcatctgtgacagtgttcacaggagagattgaggcccaaggttaattggttcgcctctcacaccctataatacgtcccaccttgaaataatttaagcccaaagttttaatgtttagagcaatccagtagcttctccactgctcatttcattaacattaatctcaccatagtgtcaatttctgtgccgcgatttca

SEQ ID NO: 576118 - DNA, 222 bp, Homo sapiens
gtcaaaggcacagtcattacgctcccccggggcgggctgtggggggggatgggtcacatgggcaacaaggggctatgccaggtggccgggcctctgaaaaacgtaacttatcattggtattttcacacaggcacggaaaagggtcagctattcttttttttttttttttttttttttttttttttttttttttttttttttttttttttttttttttttttt

SEQ ID NO: 576119 - DNA, 269 bp, Homo sapiens
cttgcgtagaatatgggtctcactctgtcacccaggtgggagtacaggggcttgatctcggctcaccacagcctcaacctcttgagctcaagcagtcctcccacctcagtctcctcagtagttggaactataggcacacactaccctaccttgcccagccaatttaaacgttttttaaaagaggcagatcctcactattttgcccagtctggtctcaaactctgtgcctcaatgtgttaatggtcgtgtaatctctcatgtcatacatg

SEQ ID NO: 576120 - DNA, 131 bp, Homo sapiens
taacgtctgacgactgggatatagagttgtcattccttgcttgtgccttctcaatatttccagcacctcctgatgcagagaagactctcagaactggaggagccatgggggtcttcccagcttgctcaaga

SEQ ID NO: 576121 - DNA, 160 bp, Homo sapiens
ctagaggaggcgctatacacccactgctgtcactgttctcatccaggctgccatcagcttcttcagccctcctcatacactttctccccacaaaggtgggagctccttgtgcagaagttcttcatttccccttatcagcttgacttgtcgcctctttgga

SEQ ID NO: 576122 - DNA, 432 bp, Homo sapiens
aagcccagccccgtttttttatccccagtgcctggtgacgccacatcctacaagggggaggggccagagcacaaggagcccaggaagggttgggtcttgaaggaggggccaaggtctggttccttttaaaacctgcccggcagggtaggggagggtcccgtcctggacaggcctgggatggaccggcaggagcggaaaagggcacggggggattggaaggccctgccctagaagagttgaactggggggaggcaggcccagcccccgcccgggctaaggttgcccctccccttccccggctcggaggaaagaaaagcaaaaaaatgtggggaagggtgggctgtttggatttgttcccttgggtttttttttcctgcccaatttttgttatttccatcccacatgaaatgaaaaaaaaaggtttttttatta

SEQ ID NO: 576123 - DNA, 894 bp, Homo sapiens
agcctacctcgcacaatcctgatcatctcgacattcctttgaaatgacccgatagaatgcaccacatgaaaccatcctaattatctgccaggctcatccatgttcatcttacacatttacgtctctcaattaaatgactccttcatgatggggtcgcaacgtcttgtcagctaccagtaccgaatatgatccattaagtatgtacgcagaaagtccttcctaatataaatctcagatgtcgtcaatagtattgagctgaatcccataactgtatccaaatagtgcgtcgagcccgtataccttaattctatatcgcaacaggaaggaatgctaagcctcgcaaatagctcgggttcatgccatccaccactggctttcatgatggaggtctgaccacacgcataaaccgggtttactctgccaaaattgtggcgcattggttcgaagccatctagaagtcacaaatacgcctcatcatccgcatcatccatcagccagcgatgaaatcatccttggtgctctagttctacctaaggccctaattgtactcgacctcaattcaggctaactcccccatatctaacaagtagacaagttaacactgagtagtttcgaaccataacaaagacgtcgaggcgccagttggcttgcacccaaccagcttgattcggaacctacaagcgaggctaacttcctgagacttaagtatccccctttgtgtaagccccacgccgatgttggtggaccggaattccaccgtcacctccacctgggctcacacattccttcccacgaactcgcttcgcaccccggcgcaaaactactaccaccttacatctcgacggtcccctcgccttcacaccgccgctgacactggcttcggcaaactgcttc

SEQ ID NO: 576124 - DNA, 115 bp, Homo sapiens
tggcgtcgtttacattaacagctataaccatcactgcgcgtcgttttacactaacagctataaccatgcactggcccgtcgtatttacacttaacagctatttaccatgcactgg

SEQ ID NO: 576125 - DNA, 1529 bp, Homo sapiens
agatccgtgtccaccccgtgccgaagatgactcccgatgactcccagtgttacgagtgaggttcaagcagtcctgtccatcccaagaccactaagtccagattccagagcctccagtctttctgacacagttctcctcccgaaagcaatgcaagtttcaggcacctgcaagcagcagcactgcgtggaatgtacgagcaagcatagacatatctcttctggagcgtctcattggccaaaacagccaggatgtatacaaaatcagcatgaccattccagattgcatccataattgcaaaccaacaaacgtcagatctcaggaaacatatgcactcatatatacatggacaagcagtactatagataagacactcacatatcaaatccacactcctctcaacatcctcaaggcgcaaacatcatgcatagcaagagcctcaaggcgccacacgcacacaccaccacaggcaccacaacgcgagcccaagccaccaacgcaagacacaacgcacaccacccactcaaagcgcagcaaccagccacccaccagacacgcccaaaaaagcacagcgcgcacagcaaaccccgtacaccagaaccccacgcgggagacaagacacccgactcgccccacacaacatgaccaaaaagcgatgcacagatggccacacagcgccatgccacacacaaccagagagacaccgaccacacacagccccacccatccctccccgaccacgcgcggcacacggacacgccccacaccagcccgaccccgcaaacaacacaccaccaccagcacctgtactgcgccaccgcaccctgcgcacaccacccacacaccaggaccccacgccccacagcacccccccacccggccccctgcccaggcacgcggcagcccccccccctccccccgcccccacagcggacccaacccacgaacgcacaaacaactcccacccaccacccaccagccacgacccccctggcagcgactagacaacaaacaacaagcataacacaccacagaaccgcagcaagcacaccgatcaacacacacagaccaagaccgcacacacaagccactaatccacacggcgcagccaaacaaccgaacacggcagcccaacgtcagcgacaaggcacacaagaaaacgatggtcacccccaaccaccgaccgcacacaccagacggagcgcagccaccagccagcactcagccaacaccaatggcaccacacgacctacgcacgacaccagccacccagagcccgcaaccacaacagcacaaaccaacacccatcccgcccgccccgcgcgcgagcccaccgcacacaccagcccaccgcagacacaccacgcacacaccgaggaaaccaccaacatgaacagcaagccgaacgcacacgcagaaccacgcaccgcacccaacaccaagacgcacatgaccacacagccagcacccacaaccaccaacccccgcaaccacccaacccaccacagcgcgcaaccagcagaccacgcagc

SEQ ID NO: 576126 - DNA, 1121 bp, Homo sapiens
  misc_feature (464)..(464): n is a, c, g, or t
  misc_feature (474)..(474): n is a, c, g, or t
  misc_feature (485)..(485): n is a, c, g, or t
  misc_feature (488)..(488): n is a, c, g, or t
  misc_feature (491)..(491): n is a, c, g, or t
  misc_feature (493)..(493): n is a, c, g, or t
  misc_feature (502)..(502): n is a, c, g, or t
  misc_feature (509)..(509): n is a, c, g, or t
  misc_feature (537)..(537): n is a, c, g, or t
  misc_feature (540)..(540): n is a, c, g, or t
  misc_feature (544)..(544): n is a, c, g, or t
  misc_feature (546)..(546): n is a, c, g, or t
  misc_feature (554)..(554): n is a, c, g, or t
  misc_feature (570)..(570): n is a, c, g, or t
  misc_feature (574)..(574): n is a, c, g, or t
  misc_feature (576)..(576): n is a, c, g, or t
  misc_feature (585)..(585): n is a, c, g, or t
  misc_feature (593)..(593): n is a, c, g, or t
  misc_feature (601)..(601): n is a, c, g, or t
  misc_feature (897)..(897): n is a, c, g, or t
cggccgccctgggagccggcccggccgcggccccggcccccgccccggccgcctcgctggctccggttcagtttaatgatgtcgtccagagacatgtccattttgtcggccatggcgggcgcggaatcgggcatcggctcgagcccgcgcgtcagcacgccggcacgtcacttccggcgccgcgtgaggccttccggtgccacggcctcggagcggctgctgattggccgctggcggacggctgcgcgcgcgggacggggtgaggcggggaggcgcgtgcgcactggcgtgcgagactcggcgggcgctgttgagggagtcgggccgcgactgtggtcgtttttataccttcccgcgcggacgccggcgctgccaacggaagggcgggtagggcgagacggagtttcgtcatgttggccaggcccatttgagatctttgaagatatcctcaacgtgaggctctnctgccatganggtgaagatangtnctngnacggcgtgnccacttngctcttggtggccaacgatgagaacttngcntctncnggatggcntttacggatctgcctnactncnggtgcccgngacgactncccctgtntggggccagtgctcccactgtcttccacatgcgttgcgtcctcaagtggttgccgcacagtgtgggtgcctgctagcatggcccattgtggccgccggggaatggagtgtcaaggaggtggaggcccgacctggctctcgcttgaaggggccatccttgagactccttcctcatgctggcgccgatggctgctggggaacagcgccctgaggctgcaacaggtggaaccaaggggctggagctgcggtttgttgccatcactatttttgaccttttgccatatgtgaaattcattnagttactcaattcttgtggaaaacaacctgtaaaaaaaattgtcggcggccgcgcaaaaagtttaaccactcttgtgggcgccgccggaggtgggaatggctatgtccaaggaccgggggattgcggtgttccccaaaaacgcgggggcggtttgaaacatggtcggtcttgtccagcgcatccccgcgcgcgtaagaccagaacaccagaaaaaaacagagat

SEQ ID NO: 576127 - DNA, 169 bp, Homo sapiens
aaatggcattagcttatcatatttatgatcattacacaatgacgaatcctggatggtttcgaccgctcgtgaaccggttgcgcagcagcgcattccgatctagattacgccttgtgaatgacggcgttgaggactcattggccattgggccgcccagcaaacgaaaatt

SEQ ID NO: 576128 - DNA, 572 bp, Homo sapiens
  misc_feature (493)..(493): n is a, c, g, or t
cggccgccctgggagccggcccggccgcggccccggcccccgccccggccgcctcgctggctccggttcagtttaatgatgtcgtccagagacatgtccattttgtcggccatggcgggcgcggaatcgggcatcggctcgagcccgcgcgtcagcacgccggcacgtcacttccggcgccgcgtgaggccttccggtgccacggcctcggagcggctgctgattggccgctggcggacggctgcgcgcgcgggacggggtgaggcggggaggcgcgtgcgcactggcgtgcgagactcggcgggcgctgttgagggagtcgggccgcgactgtggtcgtttttataccttcccgcgcggacgccggcgctgccaacggaagggcgggtagggcggtgcgtgattaggttggcgaaggtgcgagggcgcagggggtggggcggcggccgttggaggcggagcctacgcgcccctccctccccgcacgctccgnccgatcggccagggctgggggcgctgggggcgctacgggcgcggcgggtgcctgggagctgctgggagtccttgtttcc

SEQ ID NO: 576129 - DNA, 110 bp, Homo sapiens
gaaccccatctctacgagaaaaatacaagaggttagctgggtatggtggggagcgcctgtggtcacagctacttgggaggctgagctgggaggattgcttgaacctggga

SEQ ID NO: 576130 - DNA, 148 bp, Homo sapiens
tcgagagcatggtgatgggacagttctgtatcttacattgtggggggtacaaagacacacgtgataaaatgcatcgagtttttatttgtttgtttgggacggagttttgctctgtcgcccaggctggagtgcagtggcgcgatctcgg

SEQ ID NO: 576131 - DNA, 334 bp, Homo sapiens
aataattaaaggagtagcattctattgattgtaacacagagaataaatgattgaggggatgaataccccatctttcatgatgtaatttttatgccttgcatgcctgtatcaaaacatctcatggacctcatgaatatatacacctactatgtatccaataaaagtaaaaactaaaaatttaaaaagattttaagacagaataacttcattagtcaaaaaaaatgacgtttttcccagaaatagaaaaacaatcctgtaatgtatacagaaccacaaaagccccaggatagcccaagctttattgagcaaaaagaatgaaactggagaaaaaaaa

SEQ ID NO: 576132 - DNA, 364 bp, Homo sapiens
tttgggtcgtaggaacctggtatgagtttcaataaatcaggaggtgcttccgtttcaccatcacttacttctacttcagtaacaacttttacttcttacacacttaaataataaagtacaacaccctgtttatcaagttaactatcccaccgatcttcagttgtagattcttctacctcaattcgaactggaggataattagcaagtcatttccccattactaccggataagcagtacttgcatcacatcctataataacttcaacttcaacattattcactctttcaaccgaaaatcaaacatcctaacgggttcaatatactccctctctgattctttttaatgctctcttctctactattc

SEQ ID NO: 576133 - DNA, 430 bp, Homo sapiens
  misc_feature (15)..(15): n is a, c, g, or t
  misc_feature (21)..(21): n is a, c, g, or t
  misc_feature (54)..(54): n is a, c, g, or t
  misc_feature (69)..(69): n is a, c, g, or t
  misc_feature (97)..(97): n is a, c, g, or t
  misc_feature (144)..(144): n is a, c, g, or t
  misc_feature (149)..(149): n is a, c, g, or t
  misc_feature (151)..(151): n is a, c, g, or t
  misc_feature (184)..(184): n is a, c, g, or t
  misc_feature (229)..(229): n is a, c, g, or t
  misc_feature (236)..(236): n is a, c, g, or t
  misc_feature (258)..(258): n is a, c, g, or t
  misc_feature (262)..(262): n is a, c, g, or t
  misc_feature (267)..(267): n is a, c, g, or t
  misc_feature (275)..(275): n is a, c, g, or t
  misc_feature (311)..(311): n is a, c, g, or t
  misc_feature (313)..(313): n is a, c, g, or t
  misc_feature (322)..(322): n is a, c, g, or t
  misc_feature (329)..(329): n is a, c, g, or t
  misc_feature (336)..(336): n is a, c, g, or t
  misc_feature (349)..(349): n is a, c, g, or t
  misc_feature (359)..(359): n is a, c, g, or t
  misc_feature (370)..(370): n is a, c, g, or t
agggaatttaaagcnaattcntgggtgggcgggaattttgggggaatatagttnttaggttccagcttntaccatgcaggagagaacacagaaggantgatgtatgttggtggatccatgtatgtgtccagcacagcggcctgntggantntgagaactgggaaagatcagagcaagccttgcnttttattttcgggaaaccagaatatgtttggggtggtaggagccncacaganttttttgagccccctcactcanttcnttccncctgtgcntttcctttgagagtgaaggtgggtggagttgaccananaaagggganagaattngggaaanacccaaagtgttngtaatttttntttgtcctttnacctacagaaatggtcacatgttttatttaaatagcctaataaacacatttggagcctgt

SEQ ID NO: 576134 - DNA, 154 bp, Homo sapiens
  misc_feature (70)..(70): n is a, c, g, or t
gggcggcgaggcggagctggagaattacatcgagcacgtgctgctccggcgcccgtgactgcccttcccnggtcccgccggcggcacgagggggcaggccagggtaatatcggggcgggcgcggtgggggctggggcgcggccgggggtggtgg

SEQ ID NO: 576135 - DNA, 104 bp, Homo sapiens
cctcggtaccagggttgtggttaccctacagagtatacttgaactatttgcatcaacagtatctggagctgtaatttttcaagtaactagactctgagacaggc

SEQ ID NO: 576136 - DNA, 436 bp, Homo sapiens
gcactttgggaggctgaggcagacggatcacctgagacttgaggtcaggatttcgagaccagcctggccatcatgatgaaaccccatctctgctaaaaatataaaaattagccaggcatggtggtgcacacctgtaatcccagctacttgggaagttgaggcacgagaatcacttgaacctgggaggcggatgttgaagtgagctgagattgcaccactgcactccagtctgggtgagagtgagactcagtcttaaaaaaatatgcctttttgaagcacgtacattttgtaacgaactgaagctcttattatattattagttttgatttaatgttttcagcccatctcctttcatatttctgggagacagcatgtttccctacacctcttgcattccatcctcaacacccaactgtctcgatgcaatgaacacttt

SEQ ID NO: 576137 - DNA, 149 bp, Homo sapiens
cacgagggtgactttgaatctccttctcacttggagtggaagttgtaggattctgcccctaggaaatgtaccatccttctgaataattggaccctgtaagagctggtccaggggactgaactcccggcatctttacagagcaaagcatt

SEQ ID NO: 576138 - DNA, 373 bp, Homo sapiens
attaggcgctctgcgtctctctatttagtgacaatcgtattttgaaatcctgccgccagatttgggaagctcactatagttgcagatactcagccttcgcggataacgacctgatctcgctgcctaaggaaatcggggtagcttaccccgcttaaagagctccacattcaggggaaccgcctcaccgttctgtccccagaactaggaaacttggattttactggccatatgcaggtcttcaaaccagataacaatccctggtgtgacccccattgcagaccagttccagcttgccgtgtcccatgtttttgagtatatccgttctgagacatactaatacctctactgcagacacatgcaggcctacgctgaa

SEQ ID NO: 576139 - DNA, 148 bp, Homo sapiens
gatttcgcaagtcgacgcgtagaggatccccagccgtaaagtgaaatgataaattgaatgagtatggaacctagcaaagctgttccacagaatgcatctaatgcaagatggacctatgccaaataccacacagtgttatcacggtggt

SEQ ID NO: 576140 - DNA, 180 bp, Homo sapiens
cacgaggtgggcgcctatcttataacagcttgcgcatatcttcagacagccctgattttgagtcagtgcacggagggcttgacccatccacacctttaggccacacctctcccttcctgtcagccagcctggctcagcaagggtaatactgtgaggcacccaggtttggtgccaactggc

SEQ ID NO: 576141 - DNA, 137 bp, Homo sapiens
gtagaatcctcagcatataccatcattggctgatacaagaagaatagatccgataaatatttagtcaagtccataatgtctaccaatcaaggctgccgggagcatctgaagtgagcaaagcagtcattacgagctca

SEQ ID NO: 576142 - DNA, 197 bp, Homo sapiens
cgggggggaaaaaataacccccctttttttccccccgggggggggggttttatttggggggaaaatcgccccccggggggggttttttttgggggggattttccccttttgggggggggtttaaaaaaagccccccccccccctccccttttttaaattttgggtttttttttttaaagggggtttgtttcccccca

SEQ ID NO: 576143 - DNA, 557 bp, Homo sapiens
cgagggttcactgtctcttacttttaaccactgcaattgaccttgccctgaagagtcggccatgacaccgccaggacgagtagaccctatggagctttaatttattgaatcgccccccagtactcttgccaacccacagcgtcctttgacgtacacaaacactgcccttctaaaatttcgggttggggcgacctcggagcagaaccccacctccgagcagtacatgctaagacttcaccagtcacaagcggactaactatactcaattgatcccataacttgacccacggcacacagttaccctagggatccacagcgcaatcctattctagagtccatatcaaccatagggtttacgacctcgatgttggatcaggacatcccgatggtgcacccgcttatttaaggttcgtttgttccacgactccacctccctacgtgatctgagttcaaaccgcgatgttttcccggtcggtttcatcctaccttccaattcctccctgtacgaaaggaacaagagaaataaggcctacttcacataagcgccttcccccgta

SEQ ID NO: 576144 - DNA, 390 bp, Homo sapiens
  misc_feature (9)..(9): n is a, c, g, or t
attcgcggncgcgtcgactttttggtagagacagtgtctcactatgttgaccaggctggtcttgaacacaccaggcctaaagtgatcctcctgcctcagccttccaaaatgcaaggattacaggtgtgagccactgtgcctggcctatacttcctttcttaatcaactttgtttttatttatttatttatttatttatttatttatttattgagacagggtctcgctctcttgccctggctggagtacagtagtgcactcttggctcactgtagcctcgacctccggggctcaagtgatcctcctgccttagccccacaagtagtgggactataggcacacaccaccatgcccatctaaggtcgacgcgggcgcgaatttagtagtagta

SEQ ID NO: 576145 - DNA, 414 bp, Homo sapiens
accatttgaccactttcctggagcagctaccgagttccaggtgctgtgccaggtgctgggatccaggggtcagccccagccaggggcagggcagtgggccgcatgcatgtggacaagggtaagttgtaaatatacaatttacaatacatattacaaggaggacctgggtgaaggggtgagcaaatgagtgagtgcctgcctctctgccaggcagccagtcagccacaggacagagacacaagagaagtccctgcagggtgaagaggctgcagatgggacaggacatcctgacagggaaacaggacacacacgggcgccgcccaggctaaagggctcaaaacgcagggaagcggcccccgacagcttatcctaacatttgtagaagcagccacagcaacaaagggcacaacaaaa

SEQ ID NO: 576146 - DNA, 185 bp, Homo sapiens
ggagaattatcacccgaggtcttaatcaagaggaaatatattcacctatttgagtgaaaatcagctataggggtatcaggcatgggtgcgatccagagcattcaaatgaacccccaagcgagttgatttctctctactcgtcagctctcgtttttggtctgctcagactgtattcacacgaagct

SEQ ID NO: 576147 - DNA, 231 bp, Homo sapiens
tcggtacctctttaaatgcatagcactcccttactgtgaaataaaactgtctgtctcttgctggttggctctcctcttagcaatgctgggcttgctcatgaatgtttcagagacctgtggacttgactggactccatgtgagttgcttgtacttggaatgcagtcatgacacatctgaatgtcctactgacatgtcacaattgtccttggataggaaatgggggatcttgt

SEQ ID NO: 576148 - DNA, 184 bp, Homo sapiens
gaattcattctaactagcatgtggatagtccagtctatcccagcaccatttattgcagagtgtcctttccccaatgtacttagtggctttgttgaaaatgagttggaggtaaatgtgtggattaaatactgggctctctattctgttccactggtctgagtctgtatcaacctgcatggggaac

SEQ ID NO: 576149 - DNA, 467 bp, Homo sapiens
taaatcaaaacccaaaacacttataatattaagcattgaaataaatgtcagccatatgcacatttttttaaattaataaaaacaagataattgcccaatttttggccaattactgagtaacagcagttgtggtggtgggttaaatcagggaataaatatttgcaaagataaaactgtaaggagcccctcctccccccatacagctcaaaacaatcacaaatatggtgggctcattgagcactttcctacgacatcatttattgttggacatttgtatgattattggatgctttattacaatcatttgtatccattcattttttaaggcactttttccagttcagggtcatcaagggtggctggaggctatcctggaagctcggggtgcaaggcggcaaccccccctggacaggaccccgtcccatcacagcacactcacccacacccacccaaaaacagggtttgta

SEQ ID NO: 576150 - DNA, 770 bp, Homo sapiens
  misc_feature (99)..(99): n is a, c, g, or t
atttctcgctggttcattcacgtgtcaaacaagattttaaaaagcagattccattttcactgtgtagttgaatttactagtctggaagaagacaggttntgatgtattcaatttctttttaaactccgacttcaataggccttaatgtaaacatcaaacatagcaagtacacatctgcacagtcagcattagtatccctacccgtacgcctggaaagtgtaattatggccgggaacagtggctcgggcctgtagtcccagcactttgggaggccgaggcgggccgatcacggggtcaggagttcgagaccggctggccggcgtggtggagccctgtctctgctgagaatgcaaggaattagctgggcgtagtggcgggcgcctgtagtcccagctgcttggggggctggggcgggagagtcgcttgagcctgggaggcggaggtttgcagttgagccgagatctgcgccactgaatccagcccagtgacagagctgagaactcctgtcttaacgaaaaaaaaacacccaacacataaaacacaaactgtgttcgggggcgccacatggggcccctggagaaaaaccttttcattagaacaatcctggtgtggggccggggggccccaagaataggtaaatccgaacaacggtgtcaacagcgggggcgcaaaggaaacccgggggcctgaaacaagtgcggggcggattcccacacccaatataaaaaaggccgggggaaaaccagcacgggtcgggaacaaatcgcaat

SEQ ID NO: 576151 - DNA, 140 bp, Homo sapiens
atcgacgagtgttctctcctcgtctttcgtctctcgtcacacatcgcacacatattacacacagaaatgtaaggttccatcactggtaaacaaaatcatcctgactgaaaggctgggctttttgttttggctatttggtg

SEQ ID NO: 576152 - DNA, 866 bp, Homo sapiens
tgactgtggttggactgacctgactgccagatggtgggactgtggtcctggagcaggggactacttggaaatgataaaggcaaaactcaacagatccctggagctgcgcttgtggtggagctggacccatgaaagttacctggaccttttgttttgagagacagggtttctttctgcagtctcaaactcctagccttgattgatcctcctgccttggcctcccaaagtgctgggactacaggtgcagtgctaagcacacctggtctaattttcttttcttcatttctgttcctttgtttatgttatttttatgacggagtggcgagtgtctggtccttgggtggccacagggtttgggcattggcagtggggtgctaagttctcgggctccttctagggaggtcgctcttcgaccctcgtggggttggaatctcatttgctctggcgctagaggacttctaccaaggtgaggctgggggagtacatagggcccttgttttccaatgaccgggcgcataattgtcgggtgttatacacgaaaacagcgggggtttcgtccatgttgggtgccaagagttggttctagaatgggctatattactctagggtgtgcacaccggtgtgtgtccatcgcaaaggggggggtagtacatggttgtgcagcctttggtgccgcagtgatcaaggttccttgatggggcaagaaggtgcggggaacttggggggtttagggactcgcatgggtcccaggaacacgtttgtgggtgtctggggaccggatatggggacatcaggggccggtcacccaatgtccactggccggggcacgctagtcaccacgggaaacccgggggggggggttttac

SEQ ID NO: 576153 - DNA, 319 bp, Homo sapiens
aatctaaatagtacattctttctttattaattgtaactatttttggccaggggctcacgcctgtaatcctagcactttggaaggccgaggtggcagattgcttgagctcaggagtttgacaccagcctgggcaacatggtgaaaccctgtctctgtgaaaacataaaaaaaatataattagctgggtgtggtggcacatgcctgtagtcccagctactttgggggctgaggcaagaggatcacttgaaaccaggaagtcgaggctgcagtgagcagagatggcgccactgcactccagcctagtagacaaagggaaaca

SEQ ID NO: 576154 - DNA, 503 bp, Homo sapiens
  misc_feature (16)..(16): n is a, c, g, or t
  misc_feature (65)..(68): n is a, c, g, or t
  misc_feature (73)..(73): n is a, c, g, or t
  misc_feature (106)..(106): n is a, c, g, or t
  misc_feature (109)..(109): n is a, c, g, or t
  misc_feature (112)..(112): n is a, c, g, or t
  misc_feature (118)..(118): n is a, c, g, or t
  misc_feature (163)..(163): n is a, c, g, or t
  misc_feature (169)..(169): n is a, c, g, or t
  misc_feature (171)..(171): n is a, c, g, or t
  misc_feature (183)..(183): n is a, c, g, or t
  misc_feature (185)..(185): n is a, c, g, or t
  misc_feature (225)..(225): n is a, c, g, or t
  misc_feature (255)..(255): n is a, c, g, or t
  misc_feature (294)..(294): n is a, c, g, or t
  misc_feature (302)..(302): n is a, c, g, or t
  misc_feature (334)..(334): n is a, c, g, or t
  misc_feature (337)..(337): n is a, c, g, or t
  misc_feature (386)..(386): n is a, c, g, or t
  misc_feature (399)..(399): n is a, c, g, or t
  misc_feature (408)..(408): n is a, c, g, or t
  misc_feature (485)..(485): n is a, c, g, or t
tttttttctttacaangtaatacacactttctgtacttggcactcaaaaattgccatttttttcnnnntctanttcagaaaacaacttttttttttaataggcctnttntantacaanaatactcctgccctcgcacatacagtttctcttatcttatatatntttatntntataattttgtngntctttaaacataggttttgtgctatatgtcttttaagttnattgatttttcttattcttgaaataatgtnttctttcacgcagctcaattagaaacaagaaagactacngtagaaanatttttttcttttgccttcaagacacagctcnacnaagaaacgtggtttttttttttcttttttcttttttttttttgcaagcnctcttagcttgtncattcagancagacatcacatgtaaatatttatacacagggaggtgggaggggagggcacacgatgcgttgctgcgcccccgcctnctctcactcctcttctaa

SEQ ID NO: 576155 - DNA, 614 bp, Homo sapiens
agggcgagagcttcgcgggctcggtgcaaattccaggtggcacaactggtgctggtgtgagctgactcccgacatccatatctgcggcatctgcaagcagcagttaaacaacctggatgcctttgtagcatcacaagcaaagtgagctgccagctgacaggcacatccgcacgaagcccccagtcgacggtccagtttgtatcggaggaaacagtgcctgacacccagactcagaaccaacagccagaagccatcacctcggagagcccagatcaatcacaggtttcagctccagaattatgtttttgaacactggctatcaaacattacgctgtcccacggaaagtaactgaataccagacagccactgtcaatctctctccctgccaagtcacgcaccaaaaagcccacaaaaccacctgcttcagaaaaggcttaactgtagctatccaggttgccaattcaagactagcttatggcaatgacaggacatggcagcggcatttaaaaattcacacgggagacaaagcccataagtgtgacgtctgtggcatgtgctttacccgcgcaagacaagctgaaactcacatgcggtgccacaggggcgtgaagcc

SEQ ID NO: 576156 - DNA, 593 bp, Homo sapiens
  misc_feature (9)..(9): n is a, c, g, or t
  misc_feature (79)..(79): n is a, c, g, or t
  misc_feature (131)..(131): n is a, c, g, or t
  misc_feature (140)..(140): n is a, c, g, or t
  misc_feature (214)..(214): n is a, c, g, or t
  misc_feature (257)..(257): n is a, c, g, or t
  misc_feature (273)..(273): n is a, c, g, or t
  misc_feature (339)..(339): n is a, c, g, or t
  misc_feature (341)..(342): n is a, c, g, or t
  misc_feature (349)..(349): n is a, c, g, or t
  misc_feature (362)..(362): n is a, c, g, or t
  misc_feature (390)..(390): n is a, c, g, or t
  misc_feature (396)..(396): n is a, c, g, or t
  misc_feature (447)..(447): n is a, c, g, or t
  misc_feature (524)..(524): n is a, c, g, or t
  misc_feature (537)..(537): n is a, c, g, or t
  misc_feature (558)..(560): n is a, c, g, or t
  misc_feature (562)..(565): n is a, c, g, or t
  misc_feature (593)..(593): n is a, c, g, or t
caggggagnactaaggacctggtcttgggccagcagacgcagaagcagggagtgcagaccccggtcaaacaggtgtgtngcccaggcggctcagatgcaggtaatcatacatgttatgatggctgatggtnccatctgantgcacaaagccagggtcggcatctaggaagtgggcccgagggtgggccagccagtgccgcccgtcacccacgcncgttcacctgtcggttcgttctgccgaagtgggtggggatgtnggcctcgcgcgagacncaggcccagcaccacaacccgggcctggggctgtagctcatgcaccagtggcacaatggccttgangnnaccgagngacgctgctctgntgtgtgtgcgtggttgtaggtgcccacncagacnaccacaatcttgggccggatgtgtgccagctccccattctccagccgccanagtacatgctgtggtgcccgctgcaccaccaatgccaaagtcaagctgcatgcagaggagagaagagctcgcgccanaactcgcactggngcatgagcgggaccaaggagnnngnnnngaagaagactgcgggttccttatttttn

SEQ ID NO: 576157 - DNA, 938 bp, Homo sapiens
  misc_feature (16)..(16): n is a, c, g, or t
  misc_feature (24)..(24): n is a, c, g, or t
  misc_feature (400)..(400): n is a, c, g, or t
agcggtccgattccgncacttggngagtgagacgctgatgggaggatggacatactggtgtctgagtgctccgcgcggctgctgcagcaggaagaagagattaaatctctgactgctgaaattgaccggttgaaaaactgtggctgtttaggagcttctccaaatttggagcagttcccacagcacagcacacacatcttcaaacacattcaacagtcatcagcactagacatcattcgttcgcaaagcagttcttccagcgcgagcacacatgtgcaaccagaacccgagactcacacacacatcatagcattcaaccattattagcgcctacaagaggtctttgtcatgcaattaggctgcatatcagatttggaaatctctctctagtacacaagtnagcagccagtttgggctacagtgtaatagtgctatgggtatttctcagatgctcaaaaccaaggaacagaaagttaatccaagagaaattgctgaacaaacattaccaaacacctacccagacaatgactgtattgaaaaacgtggaaattgctggtcctggttctgattactgtccaacttacggaagaggatatagtatcagaacaatgtgaccagtcttctagtgcacatgggagttcaaaataacctgtctcttgggacaagaatacacaacacggttatagctagacaggactccgcctaagtaatagctcaacagagatgcatagtagggcgacagaggtcaaaaaagcataggcagcagagtatacgaccgaccatcaggcaattggcacgggatgaccgtgcaccaggctacatcgagaaggagacagggggacgccagaacgacatgggcaagcgccagcggcagacaagtacaaagacatatacaggaacacctcctactggggaacaaggcaacaacaggaatcaaa

SEQ ID NO: 576158 - DNA, 95 bp, Homo sapiens
  misc_feature (7)..(7): n is a, c, g, or t
  misc_feature (51)..(51): n is a, c, g, or t
gatccanaaataagtttaacttacggaggcttctagttctaaagatgcaangtaagatgccaaagcagtggaaagattgaagtcaaacagtcggg

SEQ ID NO: 576159 - DNA, 400 bp, Homo sapiens
aatgtcggtgaagtattcgcttctgctcaccaccgtcgaacagacggatcggcgtgccttccaccaggttcaggatcagctgggtaatggcgcgggagctgccgatacgcgccgagtccagacggtccaggcgcgggcccatccagttgaatggacggaacagggtgaacttcaggcccttgtcgccgtaggcccagatcacgcggtccagcagttgcttggagacggagtagatccagcgttgcttgttgaccgggcccaccaccaggttggaggtgtcttcgtcgaaatactggtcttggcacatgccatagacttcggaggtcgacgggaaaatcacgcgcttgttgtacttgacgcagtagcgcaccagcttgaggtttcttcgaagccagttcga

SEQ ID NO: 576160 - DNA, 685 bp, Homo sapiens
  misc_feature (16)..(16): n is a, c, g, or t
  misc_feature (24)..(24): n is a, c, g, or t
agcggtccgattccgncacttggngagtgagacgctgatgggaggatggacatactggtgtctgagtgctccgcgcggctgctgcagcaggaagaagagattaaatctctgactgctgaaattgaccggttgaaaaactgtggctgtttaggagcttctccaaatttggagcagttacaagaagaaaatgtatacattacatgtatcgagcgtgagatattctgtcgagagaggtcttccagcgcagaaaggagacagaaagcgaactaaacaactatgcattaacattattagccgccatacagagaggtctattggtcatgcatacttagaggcttgcatatcacagcatttggaagagtcctcgctctgctacatgacaccaaggtcagacaggacaacgtggtggggactatcaggtgtaataggtgactatggggtatttgtcaggatgatgtagttgtcactgacgtcttggctggtttgacttgtatatgaaggtgattcattgatcgatcagttgcgcattttagcacgaaaggtgattgcatagttacaaagattgctatcccttatgctggaaacgggatatattgacgtcatggtatgaatcaaagttgagcatcaggaagtggcaggagggtataagatcaagcattatgtaggcctgggactaaaggtggga

SEQ ID NO: 576161 - DNA, 296 bp, Homo sapiens
atggacttgaggtcaggagttcgagaccagcctggccaacatggtgaaacccagtctctactaaaaatacaaaaattagccgggcgtggtggtggtggtggtgggcgcctgtaatcccagctactcgggaggctgagacaggggactagcttgaaccggggaggcggaggttgcagtgagccgagatcgcgccactgctctccagcctaggtgacacaacgagattccgtctcaaaaagcaaaaacaaaaaaacaaaacaaagccccactcctccccacgtccccacctgcacgcc

SEQ ID NO: 576162 - DNA, 492 bp, Homo sapiens
  misc_feature (401)..(401): n is a, c, g, or t
cttacaaaaatacgtgtttgttatttgagaaagcatgtttaaaaattgcagatgagaaatattgtcgttaataattatgtactgtcttaatgtgggcacttcatttgttagtataatactagataatagcagcctagttctttaggatttgacgattcaaatttttttttgttttttgtttttgtttttttttgagacagagtcttgctctgttgcccaggctggcgtgcagtggtgtgatctcggttcactaaaccctcccccacttaaggagattaaaagaatttctcctctctaaccctccggagttgttagtactacaggggggcgaccatttccggttatttttttgtatttttagtaaaaacgggggtttaccgtgttaagcaggatgaactcgnatctccagacctcgtgatttaccccccttgctctcccaagtggtgggaatacaggcgtgagccaccatgcccagcctcaatatgtttttaa

SEQ ID NO: 576163 - DNA, 882 bp, Homo sapiens
  misc_feature (16)..(16): n is a, c, g, or t
  misc_feature (24)..(24): n is a, c, g, or t
  misc_feature (344)..(344): n is a, c, g, or t
agcggtccgattccgncacttggngagtgagacgctgatgggaggatggacatactggtgtctgagtgctccgcgcggctgctgcagcaggaagaagagattaaatctctgactgctgaaattgaccggttgaaaaactgtggctgtttaggagcttctccaaatttggagcagttacaagaagaaatttaaattaaagtatcgactgaatattcttcgaaagagtctcaggcagaaggacaacccacctaaaatatgattacattattagcgcctacaagaggtctttgtcatgcaattaggctgcatatcagatttggaaatctctctctagtacacaagtnagcagccagtttgggctacagtgtaatagtgctatgggtatttctcagatgctcaaaaccaaggaacagaaagttaatccaagagaaattgctgaacaaacattaccaaacacctacccagacaatgactgtattgaaaaacgtggaaattgctggtcctggttctgattactgtccaacttacggaagaggatatagtatcagaacaatgtgaccagtcttctagtgcacatgggagttcaaaataacctgtctcttgggacaagaatacacaacacggttatagctagacaggactccgcctaagtaatagctcaacagagatgcatagtagggcgacagaggtcaaaaaagcataggcagcagagtatacgaccgaccatcaggcaattggcacgggatgaccgtgcaccaggctacatcgagaaggagacagggggacgccagaacgacatgggcaagcgccagcggcagacaagtacaaagacatatacaggaacacctcctactggggaacaaggcaacaacaggaatcaaa

SEQ ID NO: 576164 - DNA, 412 bp, Homo sapiens
  misc_feature (296)..(296): n is a, c, g, or t
  misc_feature (412)..(412): n is a, c, g, or t
ttttaaaggcagggggcccctcaaccccccgggcccatagactgaatacctgtcccagtggccctgttaggaaatgggcagaacagtaggaggtgagcagccaagcattactgcctgagctcccacctcctgtcagattagtggcagcattagattctcataggagcagaaaccctattgtgaactgtgcatacgagggatctaggttgcatgctccctatgagaatctaatgactgatgatctgagtggaacagttccatctcaaaaccatttccctgcaccctccattcacggnaaaattgtcttccacaaaaccagtcccaggtgctaaaaagggactactgttgtaaaggaataagtccctttgctattattatttttattaagatggagccagtctccgtctattan

SEQ ID NO: 576165 - DNA, 156 bp, Homo sapiens
tacggtttgcagcgtgaatgctggagattgtaatgggtatagagacatatcatatagtaatgctagggtgagtggtacgaagttttttcatagcgatgtgtatgaaattggtcgtagcgtgaatcggggagggtagcgtagctcgtaattcagtaa

SEQ ID NO: 576166 - DNA, 560 bp, Homo sapiens
  misc_feature (29)..(29): n is a, c, g, or t
  misc_feature (32)..(32): n is a, c, g, or t
  misc_feature (34)..(34): n is a, c, g, or t
  misc_feature (42)..(42): n is a, c, g, or t
  misc_feature (57)..(57): n is a, c, g, or t
  misc_feature (59)..(59): n is a, c, g, or t
  misc_feature (63)..(63): n is a, c, g, or t
  misc_feature (66)..(66): n is a, c, g, or t
  misc_feature (75)..(75): n is a, c, g, or t
  misc_feature (85)..(85): n is a, c, g, or t
  misc_feature (99)..(99): n is a, c, g, or t
  misc_feature (108)..(108): n is a, c, g, or t
  misc_feature (115)..(115): n is a, c, g, or t
  misc_feature (121)..(121): n is a, c, g, or t
  misc_feature (139)..(139): n is a, c, g, or t
  misc_feature (148)..(148): n is a, c, g, or t
  misc_feature (166)..(166): n is a, c, g, or t
  misc_feature (173)..(173): n is a, c, g, or t
  misc_feature (176)..(176): n is a, c, g, or t
  misc_feature (187)..(187): n is a, c, g, or t
  misc_feature (191)..(191): n is a, c, g, or t
  misc_feature (207)..(207): n is a, c, g, or t
  misc_feature (214)..(214): n is a, c, g, or t
  misc_feature (217)..(217): n is a, c, g, or t
  misc_feature (220)..(220): n is a, c, g, or t
  misc_feature (225)..(225): n is a, c, g, or t
  misc_feature (230)..(230): n is a, c, g, or t
  misc_feature (234)..(234): n is a, c, g, or t
  misc_feature (237)..(237): n is a, c, g, or t
  misc_feature (249)..(249): n is a, c, g, or t
  misc_feature (251)..(251): n is a, c, g, or t
  misc_feature (254)..(254): n is a, c, g, or t
  misc_feature (262)..(262): n is a, c, g, or t
  misc_feature (282)..(282): n is a, c, g, or t
  misc_feature (317)..(317): n is a, c, g, or t
  misc_feature (321)..(321): n is a, c, g, or t
  misc_feature (328)..(328): n is a, c, g, or t
  misc_feature (355)..(355): n is a, c, g, or t
  misc_feature (358)..(358): n is a, c, g, or t
  misc_feature (362)..(362): n is a, c, g, or t
  misc_feature (381)..(381): n is a, c, g, or t
  misc_feature (386)..(386): n is a, c, g, or t
  misc_feature (404)..(404): n is a, c, g, or t
  misc_feature (416)..(416): n is a, c, g, or t
  misc_feature (421)..(421): n is a, c, g, or t
  misc_feature (441)..(441): n is a, c, g, or t
  misc_feature (460)..(460): n is a, c, g, or t
  misc_feature (467)..(467): n is a, c, g, or t
  misc_feature (476)..(476): n is a, c, g, or t
  misc_feature (495)..(495): n is a, c, g, or t
  misc_feature (498)..(498): n is a, c, g, or t
  misc_feature (530)..(530): n is a, c, g, or t
tacacacaagaacagcatttatttttcangcncncaacacangtccaagcccacggncncccngcngggccccgngcggggcccngggaacagaggggngagaaaccnctaagcngggcgnggccagggccagtttcgncccccagcncagagcctgggggccgcngtcaccnagngagtgtttgcngaanacacagaagggcatgnggggggngcnggntgggnagggnagcnggnataaggggggcngnggntgagaccnagaggggcttgtcccccccnggaagccccccagtcgccgggttcctggtcccccntgcngagggcngccgactctgggaacagggaacccccntcngccncagagaacttgcctagggngtggngacggccaccagcccccngaacagtggccncaacncccccctgtcctgagccccngggcttctggcagcttggngcctgcngcctgaggncaggctgaacggcctgggnccncgtgtctttgtccaagcgccccgagggcgccngccctgccccgtgatcaggttaaggcctgg

SEQ ID NO: 576167 - DNA, 276 bp, Homo sapiens
  misc_feature (78)..(79): n is a, c, g, or t
agtattccagtaaaaaaagtagcgtcggtgtgcttacgcaattgggaaggatttggtattttattgatcacccccatnnagttgatgtggtttggtgagtctttatcgccaatgaaaattggtggattagtattactgatcaccggtatggattgattaaatcaggaacgaaaaaagcaaccgtgcgcggttctgcgcaaaaagtaaaacaagtggcagaacacgcagtaaatgttgcaaaatcaggggctttaccacgtagtgaagccaagtcgg

SEQ ID NO: 576168 - DNA, 210 bp, Homo sapiens
  misc_feature (9)..(10): n is a, c, g, or t
  misc_feature (13)..(13): n is a, c, g, or t
  misc_feature (16)..(17): n is a, c, g, or t
  misc_feature (19)..(21): n is a, c, g, or t
  misc_feature (102)..(102): n is a, c, g, or t
cgacttgannacnctnngnnnagcgacagggctctaggaaggaagaacaggaaggggacatgagagtgtgtcaggaaggggagaaggggcatcagctccctnggtgggcccagcccacctgcagtctcactgcctctattagaggtgatgggctgtcgggctagtcgggggggctagccggagctgtcgggcgagtcggtgggggcatcg

SEQ ID NO: 576169 - DNA, 342 bp, Homo sapiens
atgggtaaggaaagaatggtacctgctctcattaaaatgttaagcagtcattggttgggcacagtggctcatgcctataaccccagccctttgggaggccaaggcaggtggatcagttgaggtcaggagttccagaccagcctgaccaacatggtgaaaccccctctttactaaaaatacaaaagaaaaaaaaaatccaggcatggtggtgcacgcctgtaatctcagctacttgggaggctgagacggaagaatcgcttgaacctggggggcggaggttgcagtgagccaagattgcccccctgcacttcagcctgggtgacagagtgagactgcatctca

SEQ ID NO: 576170 - DNA, 307 bp, Homo sapiens
cacgaggaagaggcgccggatgtggtggcagagggagctgctcggaagcaacacctcgcaagggttcacccctttcgccaccccctccccagaggcatttcgcctccccggaggacgcagcccgcccaactcccatgagctgagcaagttttcgtccgtctccacagccagccacaggagtgttctaggcagattttgttctcactgatttaggacctctggccaggatttggtcagtgggacattgggataagaaggtctccaaagcccatgtgttcaatggggcgttatcgagcacggtggcaat

SEQ ID NO: 576171 - DNA, 285 bp, Homo sapiens
cactaatgaatagaactagcaacataactttgcacaggcagagccaaagctaagacccccgcaaaccagactgagctacctcaagacacagctaaaagagcacacccgtctcatgtagccaacacatcagtgggcaagcatttataggtagaggcgacaaacctacctgagcctggtgatagctggttgtccacagatagaatcttacggtaacaactttcaaattggcccacagaagcctctacaatcccctagctaaatttaactggtcagtccaaagaggaa

SEQ ID NO: 576172 - DNA, 292 bp, Homo sapiens
agccggacgacacataaagaacaccatagaatgagtaagtccaaagtgcgatagcacagtagggtgactatggttaacaagaatgtatactgcagttcaaaatagctagaaatgaagaatgggaatgttcccaacataaggaaggaataaatgttcaaggtgatggatatctcaattaccctgatttgatcatcgcacattgtatacgtgtatcaaaatatcacatgaaccccccaaatgtgtacaactatattatgtcccaattaaaagaatcctgacattctatggttgt

SEQ ID NO: 576173 - DNA, 381 bp, Homo sapiens
ggagggcggggggcccattgtggctcacggcggcctcaattttcggggctcaagaaatcctcccccctcagcttccagagtggctgggactacgggtgcatgccacaccctgttatttttttttcccccaataaagaggaggtcttgctatgccctccagtctggtcttgaactaatgtgatcccccccccttggccccccaaggtgttgggtttagggggttgggcccccaaccccagcccccatttttactttgggtaaacttttttttccaggcttttgttggtgtggcaggtgaaaatcttttttaaaaaatgttctataattatacccactattccttgtgggctttttaaaataatttttaaggtctttcgggta

SEQ ID NO: 576174 - DNA, 391 bp, Homo sapiens
  misc_feature (27)..(27): n is a, c, g, or t
  misc_feature (56)..(56): n is a, c, g, or t
gatggagtctcactctgtcacccaggntggagggcagtggtgcaattttggctcantgcaacctccacctcccgggttcaagtgattctcctgcctcagcctcccaactggctggaattacaggcacatgccaccacgcctggctaatttttgtgtttttagcacagacagggtttcatcatgttggccaggctggtcttgaacacctgacctcaagtgatccgcccacctcagcctcccaaagtgctgggattacagacatgagcccccgtgcccagcccacattgaaacaatatattatgaatatattatgaatatattgggctaaacacatttttttcccctgttttctttttcttcttaaatgtggctattaaaattttaaaatcca

SEQ ID NO: 576175 - DNA, 315 bp, Homo sapiens
tatcagctccgtacccctccataatgtgtgcccattctaaagcagcctttatccttccttccagccatatactctcacatcttctcttagagattgctctccctgaatcttcacttctcttgcttctagctcctttctatcagcacttaaaactgataaagcctctcttaccttaatacaacaagaacaacaataaaagctccacatttcccttaactctaaattcttctccaatcctagaatttcatcagccctgaaggtgcagctaagagctgcgagctcttcacagtgaggttttgggcacacattatggag

SEQ ID NO: 576176 - DNA, 222 bp, Homo sapiens
  misc_feature (176)..(176): n is a, c, g, or t
cgaggatcccacgccatcatagcgacgtatatatagatgcgtacacagatgatctcatcctgagtacagctaactggttctagatagacgtacttcaaatcttatcgtgaatggaatactgtttcttgtgatgaatttcatattgtaagtgcctagttataattcaggctgatcangtgtgactacttgaagaaaataactgctggctatactagggaaaat

SEQ ID NO: 576177 - DNA, 923 bp, Homo sapiens
gaatggcataattttttaatgaccagactgctttgaggatttgaagttgactttatagagcctataaaaagcctgttggaaaaattagcctgataccttgtctacacagtttccttacaaggttcctgaccttgcggtagtaaagaatgtcactctctggcaggcccaggagcctcaggatattttgggaaccttgacaagagaggagtgtatccaatttatacaggaattacaagtgcagtctgattgtgaatccttgtcttggcttcttagccttgagagtttttaaaagttgaatgtgaaattccttatgaaaaagttccaacaaagccaaactttaaaagagcctatatgtggtcaatcactatttttgctgtactttatgcaaataatcaggccaaatataataaaactaaaacttattttgcaaataaattggtcctgttatgatttgcctttaatagaaaagggggactggagagagaagaattatgtttcagaagaaaatgatagcatacctgttgttagattctagctttgtccattgtttttaagttgtaattatttgcctacatttgaactaaatcttggaattctttcctggctacaagtctccaagctaacatttaaatttttttctcctatgttctgacttggaaaagtaggaagttaaactatgcttttcttgaaagcctgcagactggagcagacaattgaataaactattgggaaaaatcactacagcaattttttaaacagttatggcttgtgtgttgggatacccgaagtcctgggacctgtttattaaccgggactcgtgttattatgagaacgggttaatgtttttccggaattacctgtttttttgtgaactttaaattggggtaaaaaggggggtattggcaggctaagaaggaaaagaa

SEQ ID NO: 576178 - DNA, 153 bp, Homo sapiens
acgaggaggagagctactcggacgacgataggtcatcccacatcgacgttgagtgacatataattgaaccaggagcaggtgcagatctcatcaaacaggccacgacttatggcatggccgacggtgacttcgtcaggatgctccggaaatgac

SEQ ID NO: 576179 - DNA, 174 bp, Homo sapiens
gggggggggggcccccctccaaggttttttttttctccaaaaaaaaaaaaaaaaaaaaaaaataaaattgagttagtccccccgtgcaagagctcctcgcgccccgaggggtgaaggccttatcgcgggcactggaataaagcttcggtaaaaagtgtcattggtaatcagaaa

SEQ ID NO: 576180 - DNA, 84 bp, Homo sapiens
agaaaggcttttggcggggggtttaaattcccagttttttgggggggggcccaaaattaaatgggggtttttttccccccccca

SEQ ID NO: 576181 - DNA, 159 bp, Homo sapiens
gactaggagcattggctcataaccttgacagaatttggaaacattttcataaagctccacggcgagttttaaagaagcatatgtagcatgattttgtaggagaggaaaaagattgatttaaactaggatttaaactcatgcaagcaacgacgagtatca

SEQ ID NO: 576182 - DNA, 131 bp, Homo sapiens
  misc_feature (44)..(44): n is a, c, g, or t
  misc_feature (113)..(113): n is a, c, g, or t
agcctcccaaagccctgggattataggcatgagcactgcgcccnacctcctttaactcattttaagataaagctgtgatttcgtacttgaagtccttttaatatctgtaactngttgaccagaacctgtat

SEQ ID NO: 576183 - DNA, 152 bp, Homo sapiens
gcagcatggttcgagtaagcacaaacctctgcgccaggaaaagacaaggctaattggcccaactgccctggagtcatcaatcctggagaatgtaaaattggcatcatgcctggccatattcacaaataggtagtattggcaatttgtccaaa

SEQ ID NO: 576184 - DNA, 877 bp, Homo sapiens
  misc_feature (591)..(591): n is a, c, g, or t
catcctcgaagaagcagagaatgcaaggtgcatatctgctgtaatctacctagccctcttctgcttaatatgatccattattgaatcttctcagattaaaatccattcctatatcatctacctttcccaaagtgtgtgcctgtaaacctacctgtggaagtggcaagttaactgatttttggtgtcatttttataccaatccttatggtcaaagcctttgtgctatcaatgtatttaaacctgagtggctatatgtccacttacattgtttcaacatgtttgctccaattaaattatctttaacatctttgagtgccaagaatggctaagtaactgtacatatgtggacagacgagtaattgccatgcaagcagttcataagccaaaatgtaatgagcttagtatataaccatttagattatacacctcaccattttgtatcatcatgcaaaccctcctgaagtcgatagaagaggatccaatttgcggaccttttttcctccttttgacacctgagcacaattttttttccttcatatttatacccacttgtggaaattcagtaaacccccattctgaccacttcataantggttacagtcagcgacgatgtatctcatcaacttcaaatatgcttatcctatacttaggtcactcacgggctcacactaggtgagtgcatttacaacctcgtggactttgctgggacacacacttcaggattgtttccttttggcaccggcagttcaagtgcacgagcgaaatcgcggtttgccggacgataaaggctggccaatatttggacacagcacacacacaagcgggggcataattgcacacagtctcaacaatgggctcattgcaaaacccctcgtga

SEQ ID NO: 576185 - DNA, 538 bp, Homo sapiens
gcacgagtaggaacaggccactgccttccagatcccagagtggaagagccagcttataccttcagccttgaaaagccacaggcattcgactccaacccatgagggcagccatgtgagctgcacccagcagagtcataggggtctgactgtccaagaccttgggagcacacccctcgtaccagtgtggcctggatgtgggacatggagtcatgggagattattttggagctttaagatttaatgtctgccctactgggttgcagatttctgtggggcctgttgccccttatttttggcctatttctccattttgaagtggaaatgtttatcagtctttatttcatcattgtatcttggaagaacataacttgttttctttttttttttgatttttcaaggtaatattctcaatattatttattatttattgatagcacatgacttcaagagagttaacacatttgagtttaaaaaatgatttgcttgtaagtaaaaaatagaatgtaacatacagaatagaaatctatatagagaaaat

SEQ ID NO: 576186 - DNA, 233 bp, Homo sapiens
cccctactcacatacacacacacctagccagctgtcaggcagaatgaatctattctgtgataagaaatgtgtgggaactctcgtttattgaagaggctcaattttacttgggacaaaagagatttccaaaagcaaaaacccacggaacacgtattgtaatttttgaggcaggggcttcattaggggttggaggcaaattttccccctcaaaaccacactctaagggttaaaaa

SEQ ID NO: 576187 - DNA, 338 bp, Homo sapiens
gtaaataactaaaagacacaagaacaaatggctatagatggactaagacagtaacttccggctgggtccatgaattatatagtatctgcatcttaaggttagcattaagtaatctcagattatttcagagagtacattaggaaacgggattatctatcccatatatgttttaaaatattcccagtacctattaaatccaaaatgttctaggaataattttccaatcactaattcataaatactagtgataccgtgctgcttgttagctaacaacaggttgaacagagacactccagtgtccctctgtttatgcaggttcacatgtatttaaggcggcg

SEQ ID NO: 576188 - DNA, 282 bp, Homo sapiens
gtcattattggctacttcggtcacacaagctagaagaaccctagctctcccatgggcaggcacctgacattcgcagcgcagttccttgccattaccatactatgtatgcctcctcttggagaattaagagctgggctaaatgctccactccaggataaggctgagcagtcctagttctctagacggcctcttacataaagattggattaaggtacgtgaacgggtgcagactgtaaagattttaaaaaataaagtagaacccagagaaaatgtcaaagctgc

SEQ ID NO: 576189 - DNA, 159 bp, Homo sapiens
ggggatggggcacacagcagggcacaggcagcagcaagggcaaggcagggcaagcagcaaagcacaggcaagcaaacaggcaacagcatggccctggactagcagcacacacagcccagcaggatgcatccagagtccagccagccaggcagcaggctc

SEQ ID NO: 576190 - DNA, 1130 bp, Homo sapiens
  misc_feature (892)..(892): n is a, c, g, or t
ctcacagagcgccccaggctgcctggatgaggagaccagcagggccctgtcggcaccaagggccgacgccaaggcctacagtgaccccagcacaggggagccggccacctacggcgagctccagcagcggtgccggcccgaccagctgaccgggctgagcctgctgccgctctcagaaaaggctgctcgggcccggcaggaggagctctactcagagctgcaggcccgtgagacctttgaaaagaccccggttgaggtccccgtgggtggcttcaagggcaggacggtgacggtgtgggagctcatcagctctgagtacttcactgcggagcagcggcaggagctgttgcgtcagttccgcacgggcaaggtcaccgtggagaaggtcatcaagattctcattaccatcgtggaggaggtggagaccctgcggcaggagaggctgtccttcagcggcctccgtgcccctgtgccagccagcgagctcctggcttccggggtcctcagcagagcccagtttgagcagctcaaggacggcaagacgacggtcaaggacctttcggagctgggctccgtgcggacgctgctgcagggcagtggctgcctcgccggcatctacctggaggacaccaaggagaaggtgtccatctacgaggccatgcgccggggcctgctgagagccacaacggctgcgctcctgctggaggcgcaggcggccactggcttcctggtggaccccgtgcggaaccagcgcctgtatgtccacgaggccgtgaaggcgggcgtggtgggccccgagcttcacgagcagctgctgtctgcgagaaggccgtcacggtacagagacccctactcgggcagcaccatctccctcttccaaggcatgcagaanggccttggttctccggcagcacggatccggctgttggagggccatgatcccacggcgggtcatcgaacccgtgcaagccccggtgcctgtggacgtgctacagcgggtattcgtgagagtgacggtctgcggcccggagacagggttttggccaccggtgaacccgtaaggttggcgggggggcccaaggcgccctgccggagggagggggggcccccgtccggcgagtttgatctcc

SEQ ID NO: 576191 - DNA, 989 bp, Homo sapiens
gaggctgtagggagagaattgcttgaacccaggaggcagaggttgctgtgagccaagatcacgccagtggagtccaggctggttgagagagggagactctggcttacgaaacaaggatcaggtagactaggagagaccgtgagttgtggccgtcagacgtcctgtgtaaaagcttgtttgagaaacgtcgccgattgtggtgccagcggaatcgcagagtgacgttggcggaatagtggcgatcacaggaagagggctcaagggaaacccggtgtgggggaaaacgggagggacggcgtcaccgtatagcaaaagacaggcgggggggggtaaccgatggacgattcgggcctcgcatgacccgggagcggggctaggaagagacacatcaagggggagatttgaaaggcgcgggtaatcctgggagggaggatatcaatatattacaaatggtggcgccgtgggtctggtggaaaactggagaaaagcgacattatctgccccattggaattgagctcgggcaagacatagtgggttaccacaggtgaaaacacagacgattcattgcacacaggtgacgggtggcaattgaacagagtctgggggactgcaagggcctggattgaaaagctattggcaggttctccacagctcaaaagcaatcatcacaggggagagactggactaaacgcaaggctgggttgaagggtcataaaggccatgcaagataaccaaagaataggcggagccaccccaataatgctccacctccagggagaagtaatcgcagaaatgcgaggccaaagggagttgagagaagagcgcctacagccctcgggtctctggaaggcctggcgaagaccgggaccatatacatgaggcgacaaggaaagcggtcgaacaagacaaaaagcagccaggcagacggcccagaggacgggagccagagacacaccgtgggaaacaagagaaaaagagccacaacagg

SEQ ID NO: 576192 - DNA, 418 bp, Homo sapiens
aagatttttctgaaattttttctttgcctttgacgcacatgcggatccaggggatgcatctgatactccaaatgagccttgtggacaagaactctattttgaatggttgtctatggaacatgcttcctctccggcctcgagctggaagggggtgagcacgatcacctggccgaccacgaatcgctcccccccaataataccggccatccactggacgcctgtcagggggttcatattttctaacacggcattaaagaatgccttgttaagaaccaatacccagtatccggcctccactgttttcccaccttctcccacattcctatctcagttcttgccagtttctcgattcgtatccgatctttcgctccaattgggggtcccctccgccattctgtcttattacgcctgttgttcg

SEQ ID NO: 576193 - DNA, 193 bp, Homo sapiens
ccaggtgggggcctggtggaggagggttagctcattgagggtgtttcaacgccagatagggagaaattcaggccagtcctgctgccctgaagggaagcaaccgccatgctggaagggccaacagccagcagggaggttgtacccagtcccagccaccaggagctgaattctgccataacctcgtaagccggga

SEQ ID NO: 576194 - DNA, 670 bp, Homo sapiens
tcaagctcttatcgaagcaagaaggaagaggagaaacagtattaacaggaacttgatagtgggattatattgggatggaacagcacccagaagctccgagcatttcgtgggcatgatgggagaagattgatttcgcagacacagcgcaccaagtatgacaggaggttcaaggtgtgtaaagcgagaactgacttcctctacccctaaagtgcttgtactttactcggacgagaaaaagtcaaacagggtcccagaggagggtcctggtgaaagacgtcctgaatcggaaaatcgagatagaacggatcttgttggtcttcgttacttgccagggaggatgacattattatactccatgagcaagagtatgacagtgtgcttgaatctgtcttcaaaactgaattcctaagcctcttagcaaagcgttacgaggagaagacccagaagcaactacctctgaaattcagcaatacgcttgaactgaagttgaaaaaggaaaactggggcccctggagtgcagggggctcccggcaagtgcagttccaccaagggtttggggacctggctgtcctcaagcccagtaacaaagtgctgcaggtcagcatcggacctggacgtgccaagaactcccgtcctaccagaaggaacatacccagaatacggttatcca

SEQ ID NO: 576195 - DNA, 629 bp, Homo sapiens
  misc_feature (394)..(394): n is a, c, g, or t
aggcattgagcggtatcccaccgtcagcagcggcgccgatacaagcttcgacagcctgcgcatacgcggtttcgatcgccagcaatgacttccatctggatggcattcgcgacgacagccagtacgtacgtgacctgcataacatcgagcgtatcgaagtgctcaagggaccggccgccgtgctttacgggcgaggcggccagggacgggatcgtcgaccgggtgagcaaagtggcaagcccagggcaaaagtccagcatcgaagcccaaggcgggagcaacgatgagcgcagcctgtatgccgaccgtgagtaccgaccccaccgataacatcagcctgcgcctgaacatgggcaaccaggacaacaatagctttcgcgatggcgtcagcggnaaccgccagttgttcgcgccgtcgatgagctggcagctcactccagagctgaactggctggtgcaatacgaatacagccgctacaaccgcaccccagaccgtggcattcctggtgtcaatgggcgctcgggggatgtcagccgcagcaccacttacttgatcacggcgattacatagacgataagtcccagtcgctgcgatccagacttgcctacgagctcaacgccgagtggca

SEQ ID NO: 576196 - DNA, 205 bp, Homo sapiens
ctgtcagaaccagggtgtaccctcccaggtcaagtgatctcctgcccacgctccaagtagctggggctacagggcgtgcacgaaccagctaattttgtatttttagtagagacggggttcactatgttggctagcatagcctcaatctcttgacctcgtgatctgactgcctcggcctcccaaagtactgggattgtagacgtga

SEQ ID NO: 576197 - DNA, 250 bp, Homo sapiens
atatgcataagttcctttgtatgtcatcctgcttaaatgtagtccttctcagtggttggtgtacaacttagtgtagtctgtaatgttagcatacacttgcatggctagagatggacggaggacgatagtaagcagctataggtcttgtagcataggagctactgagactactttgcttctcacagctcactgctgaaacagcttatcatataatctcaactctcttgtagtgccttgaaatctttcactt

SEQ ID NO: 576198 - DNA, 118 bp, Homo sapiens
cggctgcggacgggacttaagaccattgctgagtgcctgcagatagctcatcaatgctgccagggctcctctaactcctatgccattgagaagaaggacgagctgtcgccgccggccg

SEQ ID NO: 576199 - DNA, 162 bp, Homo sapiens
acacagagaaattctctagttctgaatactgtgaaaccgctgctgatcagtcatttcgtgtaaccctcacgagatgtccccagagtaggatgcactgagtcagagctaagggaagtgttggacaagctgctggaactcttggcccggacagcacctcgggaa

SEQ ID NO: 576200 - DNA, 127 bp, Homo sapiens
gccggacgactcactgtcactcccgccgactggcttctctccgtcgtgtagaggggcaggcggggtgggcacaggccagccagcagctcctcagggtgacccttctctgggtcttgctggtgggaag

SEQ ID NO: 576201 - DNA, 237 bp, Homo sapiens
ccggaccggtaacacttacgtaaatatttaatatgctgcctggcacataaatactcaatgtaagtattatgtggactggcaggaaaagacattccttgccaggcacagtggctcacacctgtacatcccagcactttggcatgccaaggcagcaggatctcatgaggtcaggtgtttgagacagatccatctggcgtccacatagctgagatcctcaccctcttataatatcacaac

SEQ ID NO: 576202 - DNA, 426 bp, Homo sapiens
gtttgtctccccccaaaatgagaactttcataaaataatagcatcacatttgttctagtatgatcgggttcagggggcacttttgtttaaaaaccccattcttagggacttaggtctcttaacgtatcactttacgtagaactagaatttcccgtcttggtatagcctgcttttgtgatcttggagttgtagaggttttattttacacttcattcttagttaccacttatggagtattcactttgtggattatctgtggcaaatttgtgtcttcctgcgggctttccccatcaccacaggagcctcaaggccctcttagtttgctgctatttggcctggattttctttttcaagtcagaggttgcagtgagccgagatttgccactgcactccagcctgggcgacagagcgagacaccctctcaaa

SEQ ID NO: 576203 - DNA, 549 bp, Homo sapiens
tgcatgcttgtcctctcggctgggcgtcgccgagcctggcgttacttcaaggagcagtttctggacagtgagacgaggatgtgacttcgcgctggttcgaatccaaacacgagtcatgattttggcaaattcgtactcagtaccaggctagttgtacggtgacgaggagaaagataaaggtttgcagacaagccaggatgcacgcttttatgctctgtcggccagtttcgagcctttcagcaacaaaggccagacgctggtggtgcagttcacggtgaaacatgagcagaacatcgactgtgggggcggctatgtgaagctgtttcctaatagtttggaccagacagacatgcacggagactcagaatacaacatcatgtttggtcccgacatctgtggccctggcaccaagaaggttcatgtcatcttcaactacaagggcaagaacgtgctgatcaacaaggacatccgttgcaaggatgatgagtttacacacctgtacacactgattgtgcggccagacaacacctatgaggtgaagattgacaa

SEQ ID NO: 576204 - DNA, 762 bp, Homo sapiens
tattaaggactagcattgaccatctcacttctaggaatacgagtagatcgctcacacctcatatcctccctactatgcctagaaggaataatactatcgctgttcattatagctactctcagtaacccgtcgaacatccacgtccctcttagccaagtattgtgccgtatgccagtactagtcattgccgcctgcgaaggcagcggtgggcctagcccatacatagtctcaagtctccaacacgatatgggctagcactacgtaccataagcgtaaacctactccaatgctaaaactaatcgtcccaacagattatattactaccactgagatgactttccaaaaaagacatgattggaagtcaacacaaacactcgcatcgagcctaattatgatgcatcatccctctactattttggaacgcaaatcaacaacagagctatttagctgttccccaagctttgcctccgagcccgtaagaaaccccctccgtaatactaaactagctggactcctacccgtcaagaagtcatggcaaggccaaggcggagttatccagttgaatcactagtcacgaaaaaaaacctctagcgtctctatactaatgtgccctagaatttccttaatgatagcattcccagcacaggaataatcggtattgaaatcttttggaaacaagttatccccgtggtataaaaccgagaggcaccgccgaaggcgggaggggcatactccatgtaaccagggccctcccaaacgggg

SEQ ID NO: 576205 - DNA, 701 bp, Homo sapiens
acacatgacgccagataaaatgtcagtgcactcagagtgtacaaattgtcgtttatcctcttatggggatatcatttaaaaacttaatggggttaatggtagtgttgatccctaaccctacaaagagccttcctaattcccctcgcttgtgtggagcaaaccattataccttatttccagcaagcaaagtgcttggaccttcttgcttcagtcatcagccagcaagagggaacaaaactgtctttggcatttggccgctgagatatggcattgcactggttaataatgccaagctaatttatagcaagatattgatcaaatatagacaacgttgatatcaacctcacaagggctctcaaagtataatctttctatagccaactgctaatgcgaatttacaccatatttcatttaccatgatttcaaaatcagtttccatactaacccttggctggagaaacttaaaattatgccaaatgcagaaaccacaaaacaattcgacatgggggtagcaaccattggttacctattctactccttggcaaaccccctggtggcatctcatttggctcaattccacttcattgaaagtcatcatccttcattggccaatgtacttttggatacagtaggctaaagcaagtgggcatctctggtggccaaggccattgccataagttaaacctagtaaaacctttgtc

SEQ ID NO: 576206 - DNA, 850 bp, Homo sapiens
  misc_feature (714)..(714): n is a, c, g, or t
ctggcccctttcttccatttggggagaaaggcaccagcgcctatgtttcagcggatgatcgcaggggtggcgcctccttttcaaagaccccaaggtatcttcaacagagttgttttctttagagcgggtcacagagctcctgagcattttcgcgagttcccacagttgtaagaaagcaatattggtacgccctctagagtccctggaaattccgatttctcttctataggcgagatagcgcaccatttgtacaccccaaatacgctcttttcagacaatggtggtaattggcagactcgggtactttcccgtttcggactgacattcctcaccccctcggacttcaatgcacgactcatatatagtggcccctcagtaaatggtgccctaaatggaaatgttcacagccctttccatacttgtgacgccccacatcattttagcgcttctgtccaagtatgtcctcccgctaccattcgtatacgtcttgccgcccttgactgagccccaacagtattcattttgggcccatcctggatgatcccggatcgagcattctaaagtcccataatcttacccagtccagttatttccccgacccctgtgtcaccctttgtgagtgatgtcacatgcacgggacgctgtgtaattctcctgagagtggtttcaatttatcccgtgcttgcccataccctctctatcctgtctcacagnatatcttcctctgactaaatcctatttttttcataagagttatgggatagggaaatgaacttttccctcattcacctccaccatggactttttaacctgaatttttcgatcctaaattaaattccccttgctttta

SEQ ID NO: 576207 - DNA, 80 bp, Homo sapiens
  misc_feature (29)..(29): n is a, c, g, or t
  misc_feature (55)..(55): n is a, c, g, or t
gatttacttggtataaggaacagggtggnatccagccttctgtaacttgggtttnttccctggcctggctgtggacggag

SEQ ID NO: 576208 - DNA, 1407 bp, Homo sapiens
cccgaattaaacaaccacgcttttttgatacacgtacgattatgtcttgcttgatgaagccaaccaccaactcgctcctttttgttgtgttcctccgctaccattataaggacaccacgcgcgcctcatcgatcaccacccttccctctcattatattttattatccagcccggcccgcgggcgtctagatatactctatatttttactcactcactagcacactattgtcttcatctgctcacgctctgctcatctgttttgtgtgtaccgatctccacaattcaatctacattcagttgtgtttgttcatctacaaaccaacccgtacgatttgttatctattctgcccctggtgatcgttcgcgaagttagattgtgcgcgcatccacttccacatcgattgtatttcttttctgttggtttctgcgtgtcggtggcccccccccccggcggtgagtatgataggcgaatccccccttccttgttcttgtatcttttcttgtggtggggccacgacccccctcgttttctgcgctgctaggggtgaggggcatgcttttttcactcctctctttgcgtcgtcttcgcatgttcggttgctggagtctctgtcggttttcccactgctcagagtagttggttggtttctcttcctttcctctccgctgcctctcgcggtggtgatttttttcgcacgtcgcggagagataggaactctcccgccgcgcgtgtgggtgggtatcactcttcattgtttatttcttcaccgcaacattctcttctttctgatttacacgcacgcgctccaggtttatgatcgtactaccctctccccccctccccaaagagaataagatacaaaaaatatttttcttctccccctctccccctcctcaacactctcgttgtgcgttcgatagctctcacactacgaagctcacacctctccattctcctgtgcggcgtgcatcacataatataagtaataatactcttcgcgcgggcgcttacaactaccatcggattttttttttctggacgcaaagcacccctctttttgttttgtttcttactccaccccagacaggaagttctcttatatattatatgtttgttataggacaagcccccgcgtcttttctcttcccatgagtaatcgttattattcttaatcaaggactgtaagacgctggtgttgttaaaacatcccattagaacataccacccccccctgcgcgagtattttgtctgctcctccaccccacaaccacaactcctctcgacagtagatgtctctcccaccccccctccccactttttttttgttgagaaccactcctttttttttttatacaaaattttttttatccccccccctcccccccccccccatttttttttttta

SEQ ID NO: 576209 - DNA, 874 bp, Homo sapiens
  misc_feature (115)..(115): n is a, c, g, or t
gctctcactagagtgacatggtgataacagttggtgataacgggcatttgtctttgtatgctggacgcgggtgtaagaacacatgctcgcgtcacaaactgtgcggggtatacanagcccgtgcggcgaggccaagatagtgggatttccgctgtacgctaaagaattattgtgtatagagacctttggttattcaatgctcgcgccaatgtggttcccggggatattccgcaagttctttgggtccgacccatgtgaagacaacttgtccagaaacccaataagggggacacttggcaactccatctaagcctgcagggttttccgcagcgccaaagccgaggtggacgcaggctggccccccaggcgcagaacccctgtcccaaactgccgggcagatctcttcatggacgccgcaggccccggacaaagggcacaaaggggggatcccaaccgacaccacgaaagagcctgtgtacaacaaggttgcagccagacgaaacttctcgcaagtcaaaaggcgtgatgactgggtactcacgcaagtatgtgggaaagtgccccccttggacccctgggacgcacagtagcacctcaaccatgccgacaagaaaggcggtggaccacaccgagaggacacacacaattgcgcataagactggaggttcatgtcctcaagtcatggaccaaaggagagctattccaggtattgccagtcgcgccttcaacagtccacaaaatgcatcagtccaggtccggtggctcccgcctcgttaaccctacggctcgggaggccgaagtgggaggatcccctggaacccagaggtcccctggacccaaaccagcctgggccacaccaaaaaccggattgtac

SEQ ID NO: 576210 - DNA, 334 bp, Homo sapiens
aaataccttaggagagaaagctgattaatcgtgtttcttgaaattgcacagattccttgttacgtccctgatagctcagtcatgactgtcaattagcttgtgtccccctcatttgggtgcagaatttaaagtccacacacacaggcagtaagatgatatagatcaggacgtcatcactcggtttcggatgttaaaatgtctaggtgggtaagcggcgattggagatcacacaaccttgtgccacaaagaggaattcccaggccagagggagacattttattgccatgttatgatctcatcattgagttgaaaggcaatcttgtttcattttgga

SEQ ID NO: 576211 - DNA, 916 bp, Homo sapiens
agagctcaccccaggcgctagtatgtgttcgcggtctcccccggggcgtcgcccgcccggtgttcaccccgagtggtatctttcggacggggccatccagaggctcgagggttgtcgacgccctggtccccgagcgcccccggagccgcggcctccgccgggggtttcccgccctcccccccttttgcccccggtccccgccttgggggtccacggccccacatcagcgacagtcttgcgtcgccgtgagcgacaagggtgttgcgcccctcttggctataaaagcggtcgaggatcccccccaattctttccttctgcgtcacccccccctcggtgtcagaattgggtccccgggcaggcccccctttctggggcattttccgaccgataccccgtcgggggccgctttcacgtgtgctcatatgaggccccgcaccccaccggggggcgttctctcaaacccggggtgcccaaacatgctttcctgagcggttgccacaaggcgcaccacacagttggccccgcacaacagttcctcgaacgggttgcaacacgcaaccatttgtcccccccaggagaacgcgcctccccccccctttatatccactggttgcggacaaaccagtcttctccaaaaaccctgtttgtaccaaatgcccccaacataaagttatcacccataacactggtttttaagacaaacccagagcgcctactcgcacccccccccaaacgagtaaccagataactttctattgacccccacactatcgctttatattctatggctgcgcaccccttgtcaagttatacagttttgaaaacaccactctttttcaggagcacacccacctgcccccaactttgccccaaacatcgggaccccctcaaaacagttaaaacccccacataaca

SEQ ID NO: 576212 - DNA, 141 bp, Homo sapiens
ctggtatctaaaatttcatggttcaatgatgtggcaagtattatagaaaaataatgatttattctgtttttctcttttctttcttttttttttagactgtgtctgccctgtgcccagtctggagtgcagtggtgtgatctc

SEQ ID NO: 576213 - DNA, 722 bp, Homo sapiens
cgcggtggcacgtgcctgcaatcccagctactcgtcaggccgaggcaggagaatcacctgaacctgggaggcagaggttgcagtgagccgagatcgtgccactgtactccagtctgggtgacagagcgagattgtgtctcaaaaaaagggaatggggaagcgtgcaactggtctcagtatttcccaacctcgccaccataattacattcgggcctggagcatcctccggggctggggctgtcctgaccacgtgcgaggcgcgtgagcagcatcccatgtcgcgtccgcccactccgagtgcgcgagggcaccacatagtcagtgacaaggcgaggacatattccccagtgtcttctcccagttgtccccgtgcatggggcgaggaatcacccggagcttcaaaaccaggtgatttaatcgagagcttctgtagaaaatgaccggtagttgggggagcttgcaagcgaagggtttgggtggattacatgaggtaagcaaacgtaaagctctcggcacaatgtgtgtgaccctctgtgaaatcagcgtatttcatcagtaagccgcggctttcccctacgcatgtctctgggcttggggatgggtcttactgcggaacgcgcaatcaggtccttagtggcaaataaaataactgtgtattttccaaatggtcatgtcttagatcttgtggatgacagtacaattgtcattagacaagggaatgg

SEQ ID NO: 576214 - DNA, 168 bp, Homo sapiens
ggttgtccgtgtttgtgactgggttatgttgtgtggcattctagttgatatcagattggttgtgcttcctagaaatatttcttcttctagccttatgtgctttggaactcacacatgtattacctatgacatgactctgataagtatcatgcatctgtgtgggtggct

SEQ ID NO: 576215 - DNA, 162 bp, Homo sapiens
gtggtggtagtacacaacctgtatcttttgtcaaaattcatagaactgtacactaacaaagtttattattactctgtgtaaattatacctccataaacctgactttttaataaaattaagagggctggccaggtgtggtggctcacgcctgtaattctagga

SEQ ID NO: 576216 - DNA, 130 bp, Homo sapiens
aattatcacttctcattcttccatctaccacaatttgactcctgcccactttgtcccataaaatcaccacaaaccccttatttctatagtcaataggcaattttcagcatttatatttctttggtttttc

SEQ ID NO: 576217 - DNA, 388 bp, Homo sapiens
  misc_feature (53)..(53): n is a, c, g, or t
ccggacagctatccggttcaatccacgtggaatggaacggaatggaatggtanggaatggaatggaatggaatggaatggagtggaatttaatggaatacaccagagtccaatggaatagaatggaatggaatggagtggaatcaaccacaatggaatgggatggaatggaatggaatcaaccagagtggaatagaattgaatggaatggaatggaatgaaatcaacccgagcggaatggaatggaatggaatggaatggaatggaatggaatggaatggaatggaatggaatcaaccagagtggaatggaattgaatggaatggaatggaatggaatcaacccgagtggaatggaatggaaccggatagcttgccgcggaccgagct

SEQ ID NO: 576218 - DNA, 426 bp, Homo sapiens
gcaggtgttatcatcatcgcatcgatgttagcatgattatccattgtgagtacgctcgtctagttgtcacttagatctagctaagagtggcgcaagtggagtgtatcttgacaaaaagcccatctcgggccgggtgtggtggctcacgcctgtaatcccagcactttgggaggccaaggcgggcagatcacgaggtcaggagatccagaccatcctggctaccatggtgaaatccgcgtctctactaaaaatacaaaaattagctgggcgtggtggcacgcgcctgtaatcccagctactcgggaggctgaggcaggagaattgcttgaatccgggaggtggaggttgcagtgagctgagatcgcaccactgcactccagcctgggtgacagagcgagactccatctcaaaaacaacacacaacca

SEQ ID NO: 576219 - DNA, 220 bp, Homo sapiens
  misc_feature (29)..(30): n is a, c, g, or t
  misc_feature (84)..(84): n is a, c, g, or t
tatttactatagaaagtagtagacatttnnttgaattgttattctctatatcaagttgtacataaaatacaatggttacatttnaaagaaatttggtgaaggtaggctgggcaccatggctcacacctgtaatctcagcactttgggaggctgaggtgggaggatcacttaagcccaggagttcaagaccccctgggaaacatagtgaaccccatctcta

SEQ ID NO: 576220 - DNA, 710 bp, Homo sapiens
tggctttgtcacccaaagggattacgggagctgaaattgccccattgcctccacttggaggaaaaagggaaattcctctaaaaaaacaaaaaaaatatggtacttcaaaaaattattcttcatggctattttaaaataactagaaataattgtgggaattaaggtggcatacagccgtgagaatattggttgtccacccttgggtaaagtattaaagaaaaatatgtgcttggttaaaaaaaaaaaaaaaaaaaaaaaaaaaaaaaaaaaaaaaaaaaaaaaaaaaaaaaaaaaaaaaaaaaaaaaaaaaaaaaaaagagaggggggggcgccacaaaaaacatccccggaggacacccaaatatatcaccaaccaacacatatttgaagaagcagaagcatcacacaagaggtgcgagtcaacaataaaaacgagagcgaggtgcgccgcgcgtcattaacaaacagacgtgaggagagggaaacaacccacttatttagggcttatatgtgtgtcgaggcgagccccacacctagtgggggggaggcagacaaatactggcgacaccccctccacgagaggaatgtcacacgctccagaggacaaaacaacagcgggtagaagacgtggaaaccaccaacagatagctgcctgcggcagaagggtcgacggaagatagtcaagaaacataccggaggggaaataaagt

SEQ ID NO: 576221 - DNA, 207 bp, Homo sapiens
ggctgagacatgaatcttcgcgaataatccttaaatatacttggtaagcaaaacaaaagctttttgtttacatagttcttgggattttactgttcctaattttattctgaaactcaattttaccccagaccagagtccccatattcatcctggggaggggtgccgtgtgcgaatccgcattcttgggcgtggtagtgagctgggtga

SEQ ID NO: 576222 - DNA, 98 bp, Homo sapiens
  misc_feature (86)..(86): n is a, c, g, or t
  misc_feature (89)..(89): n is a, c, g, or t
acctaccccctcctccgtttcacaccttgcaaacctctttacttgggctgaatatttagtgtaattacatctcagctttgagggcntcnttggacaaa

SEQ ID NO: 576223 - DNA, 305 bp, Homo sapiens
gggacccccattcatctcattcaatcatctcatcatttaatctcatcatttgcacctcactcttttattctcatcatgctcatctcatcattccatctcattccatcattccattccatcacttaatctcatttcatctcatctcattccagttccatgggctaccgttaggggctatggaaactcctaaacctcagggtatagaagttccaataggcacacttcccaggatcaaggctctgaccggtaatcagctagtattccatagttttagaagttccaatagccccgggaatggctatgga

SEQ ID NO: 576224 - DNA, 405 bp, Homo sapiens
agccactcagatacatattcgcacctagacatgaactgagatatgattacactttgttatcagagagatctttcagacactgtctccttttctcggagcgttctgcctccagactacctcgatcctcctcttcaactgcgtgttcttctccttctctctgttcgatctcactgtattgttcttccagttcatcaatcttgttgcggcgccggtcattctcatcacggcatatggcgaactgcctccttccactgctcctcactggccgtcgaatcccacagtgctgtggtcagccgtgcattgctctcccgaagggtctgcagctcgatctcccacttcttcacgttggctgcgctctgcgtcaaggcaatcttcagcttgtcattctcagacttcaggtgtgtg

SEQ ID NO: 576225 - DNA, 111 bp, Homo sapiens
gcagcaggtgtaggacgtggtggatggcgggtgacaatcggtcgaagttttcagcatttcgcccacaagctttggtggttataagcggggacgcggatccatcgtaggagc

SEQ ID NO: 576226 - DNA, 399 bp, Homo sapiens
  misc_feature (256)..(256): n is a, c, g, or t
aggactgtgaggaggacacaggggaggatggtgaggaggacataggggagggctgtgaggaggacacagggatggatggtgaggaggacacagggaaggacagtaaggagaacacaggggaggacagtgaggaggacacaggggaggacagtgaggaggacagtgaggaggacataggagaggacagtgaggaggacataggagaggatagtgaggaggacacagggcaggacggtgagggggacacaggggaggncagtaaggaggacagtgaggaagacatgggagggcagtgaggaggacacaagggaggacagaggggagggcatagaggaggatggtgagaaggacacaggggaaaggggaaagggggtcgacgcggccgcgaatttagtagta

SEQ ID NO: 576227 - DNA, 328 bp, Homo sapiens
cccccatccgggccctgggtcatttcacagaaaaaaagcctcctccctcccgacccgcccccccactggagagggggcacaggggcgggggaggtttcctgttttgtgaaaggccgacccccggattccattaaggcccccccccagcccctccctttattcccattccccaacctaaagccgggcccggctcccagttgaatttggtgggaatccccgggctgcaaattttccaaaccaatcgtgggatctttattgactttttttttttttttgaaagcaatgactgttttttacttttaaggaaaataaacattttttagaacca

SEQ ID NO: 576228 - DNA, 220 bp, Homo sapiens
gatcttatggaggttgcctgagcggctttgtccctggacaagttcttgaacgccatgtcagtgtattccttaagcccagaaaaataccacacactctgctctgaagcacaggtgacggggcttggaagtggagagtaatttgtacaagcaggatgtgttgatttttttaaataaaatgccttttacacaatgcctccggctgttgtgtctggaggaggca

SEQ ID NO: 576229 - DNA, 776 bp, Homo sapiens
tggcgacagtcggggttgcgatgcggccggggcctgtggcggcagtgtccgctgcaggacgggagcctgtggtgtggcgtcgtgccctcgcagtggagggccgtccagggtcatcctgcgtgggatgacgaaaatgttgccagacggccagcattgccactgccagtgcatcctgcccagtgccaggaatcatgtggactgcccaatgtgtgcatgactggatgtgccccctggttgcctgtcagctgtgcatgcccctgtcccagtacgacatacccagtgctcgcagcctttcttcggagagtggaggccatggtcatccgagagctgaacaagaattggcagagccacgcgtatgatggcttcgaggttgaactggaccgagcagcagcagatggtgtcttgtctgtataccctgggctaccctggcagccaagcgcagggtcttgcatgtgaccagcatctcctggaactccacttggctctgtggtggcctgtgccctacgtgcggatggaccatggggactggagcactgcttaagtccttcgtgtgtgcctggaacctggaccggcgagactgcgtcccagcaaccgtcggcgtgtggaggtcccagcgctgtactgtgtctggcttcaccccagcaggcatccacgtagcagagggtgacagtggtgagtgtggtgtggaactaccgtttgaggacgttatgtgggaaggcctgaggataacaaagactttccagtgttgtccgctgacagacgtacagttgatggca

SEQ ID NO: 576230 - DNA, 169 bp, Homo sapiens
  misc_feature (26)..(26): n is a, c, g, or t
  misc_feature (32)..(32): n is a, c, g, or t
  misc_feature (82)..(82): n is a, c, g, or t
  misc_feature (89)..(89): n is a, c, g, or t
  misc_feature (143)..(143): n is a, c, g, or t
gaaaggccccgtctctactaaaaatngcaaanttggccgggcatggtgggcacatgcctgtagtcccgtgtactcgggaggnctggggnggaggaatcggcttggaacccgggagggcggaggattggcagtgaggctgaggnccacagccattggcactccagtctgg

SEQ ID NO: 576231 - DNA, 101 bp, Homo sapiens
cgtggagctcacacttatatccccgcgcttgtagagctgaggtgagaggatggcttaagccgtgagttcaaggttgcagtgagctgagatggtgcccccta

SEQ ID NO: 576232 - DNA, 133 bp, Homo sapiens
agttatcactgcatttatggacaccgggcttctgctgggctttgcagagctgctattggctcttccagctggagaaggactgtgccacatgcacccctttgctgatcttttctgcctctgttaccctagcatg

SEQ ID NO: 576233 - DNA, 3706 bp, Homo sapiens
  misc_feature (2094)..(2094): n is a, c, g, or t
  misc_feature (2120)..(2120): n is a, c, g, or t
ggaaactaaccctcacaaagggtttgaggagcttcctgctgtgtgtccttaaacagtgcgtgcctcttaagtctctacaacacttttttaaagggcattgaattggacattggtttaatttttacctacgctccctataatctcaggaggtaaccattatttaatcagaattacccttgctctgtttatctgtgaggcctcagacacaacggtggttcagccctctccctaagcagtagcaagctgagtaatggcacacatatgtctaggatagccagcattcaggaaaattgctgtgaacctcctgtttttaattttaatatagaaaaagtctttcaggtttgtgacacgaagacagatttagcttcccacttgtcagcaaatttgtaaaaacctcaaaacaaatgaatatttggaattcactctaagagatacaaatcctgaatttctaactatcttctcaaatattactgaggccagcaagatgcaagtgttctacaaaataatgaactgttctaagtgacagtgttgatgctggaagtggaatgttatgttttcgctcagctgtattcattcagaaagtttttcttgaacatctgccacatgaggtgcagagaatactgccaggtgctagtttttccagtatttgacttctgattactatttccttttctcatctttagtttttcaagattttgctttaccaaaatagtaaagcctttatcatcagcttatattgaataatgttgtaattggtttcaatcaaagtttctcctcaggtacttgggggcccctagccttctaaggaactcccaggcacctacttaacaaggccagctacacactcagtatgtgataagccccatgatggatgaaggttagaattcaaagacctggttggagtcctagatgtggagacaggatgatcaggtcacacttgttagatgactaacactatcagtagaagctcttgagagattttcctaacgcagcaagatttctgtgagtagaggtatcctgggaggtatcctgggaggcagcctattgacttgaccaagtaagctgatcaggtggcctcctctacccactaaagaaatgtgtaaacactagcaataattgctttatcttaaactcctggacatactcagttcttccattccactgttctattgccaataccttttgttgttttcttcacactcctcttggcagcaaatgtctgaaagtatttcaattgtgtaatgttaaggggttttttcatagcttcagaaaagagggcagcaaatatgaagccttaagttcaaaataagtcattctacctagaaatacagaccccagagcacattgcatgaaaatacctgtactctgcagttcctcaaagcagtattcttcctgaaaagccaaacaccacacctattttcctatttgctaagaatcagaataagcacgttgtaaatagtatccaaagcagattctaaaatgacatagtaagaagccagattcaaattgtaaccaaagaagacaatagaaatcccactttaccccactgtcatcagttagaacacccttgcaaaaactgtaaccacttaagcaattcatctgatcccagaagatcataccttcttttgaaagtataggacagatatcagtgggaaacgtcggcgttctgagcaacacaggataaatgtaggagggccttaaaaaataaatctcaattcatacactggagcagcaaaaaactgagcaggaaagaaccttggtgtcttctttgagttgcctggacagtatttatgaaacaaaaaactaaatgccccccatttggggacggggggaggggttcagacctctaacctggattcagagccttagaggccgagagggaatctggaatctggtattactgagatcctaggtaaaagaaccagcctggcagtctttcccacctcattggtccgtgcttttatttttaaaccctttgacctggtagaaataaacttgcctgcctgctcttaaatgccagacagttggaagcaaatgccgagggaaaggtgcccagagccatgcttgataggactttgaatattttctccttanttgtacgttgcttgtatttagacttnagatgctatggaggtctatcccatgccatgccaatgtgaattgctttgcttcagtaacaatcagaagaccagtccaacagaaaataacttgtcataattccaccttagattctagacctctcatacctgcagtgtacagaatatgtacatgttccaatggaattcactatttttggctttagtgtcaaagagattggttctacaaggttcatctgatttcccataacaagtaaattttataatcctatgattctaaattcaatccccaatatagattctaagcatcaaatcaaaatcacagacaaaggggaactggtcgagaggggtcttagttatttcaaatccatgaccaaagtgtccaaagacatgaaactcttatacctgctgagcatttcactttactatacaaaatgtcagctacccagttgcatcctgtgacatgatcagactgtcaatgtggaccagtggccaggagcatatttatgggccatttctgttcatcattctttacagagcattgaggtttcccactgaaacagcttctttagtcagacgtctatagattttacataaatttacatttaaatgcattaagttagatggcccaattgagcatctgaatgaatatagtgggggttggtggtggtgcaaattctgctggctttatgttatggttttcttcgtgttttttcttggttttgtctggcttcttctggcaagtgccctaaaagactggaacactgtataaagtcatagacatagaaccatatgggaaagcccagatgaaaaaatggaagaataaaatcaagttgtcaaagttccagcaacagccctgacttcttcaggaatccaagcaaattgaaagccaagacaaaatgtacaaatggtgcccatgccattcatttgactgtgggtggccctctagtctagggctctcttagtgaatggttgtggaaatatgatttttctaagttccttccttttccttttgatagatgagtttgagatgatggagtaggagtggggccctcaggcacttctggtaaagacattccacctgcaagcagcattttgagtaaagcactgctgtggtttgccgatttatggtccatttaatgttaggctaaagcacctttaatcatttttgttgttttaagataatgtatttgtgaagtggataaacactggaaatagggtgcttcttctggaaagttcagtgtaaaacacaaacaaggctttggcgggtttatctggctttataaacaagtctgaaaaatggatgaaagctaaatatataaagcagttggttgtctatcttttatcatttttactcagatctgtatttaacacttatttatttgttagtttttacattcaaaagaaatacactttgaactttggctaacattgtaggatattttttaattgtttctacatttttaaagcatgattcatcatttttgtaaacttagatcattttttaattgtcttttcttttccaatagaccagttaccactcatgtgtctgcagaacctctttattgtattcctataataaatgtaaaatatttgtagcaaaaaaaaaa

SEQ ID NO: 576234 - DNA, 249 bp, Homo sapiens
cgggattttttttatttttaaaaaaaatccccccccccccccggaaaataaagggtttaaaaaaaatttagggcttttttaaaaaaaaaaattctttttttggataaaacttaaatttttgcaaaaaccttaaattaaaacaaaattccccccaaaatttttaaaaaaactttttttttaaaatttaaaaaaagggggaaaaactaaaggcccttctgggtcctttaagggtccccccaatttttggga

SEQ ID NO: 576235 - DNA, 3808 bp, Homo sapiens
  misc_feature (2024)..(2026): n is a, c, g, or t
  misc_feature (2035)..(2035): n is a, c, g, or t
  misc_feature (2037)..(2037): n is a, c, g, or t
  misc_feature (2047)..(2047): n is a, c, g, or t
  misc_feature (2054)..(2054): n is a, c, g, or t
  misc_feature (2196)..(2196): n is a, c, g, or t
  misc_feature (2222)..(2222): n is a, c, g, or t
ggaaactaaccctcacaaagggtttgaggagcttcctgctgtgtgtccttaaacagtgcgtgcctcttaagtctctacaacacttttttaaagggcattgaattggacattggtttaatttttacctacgctccctataatctcaggaggtaaccattatttaatcagaattacccttgctctgtttatctgtgaggcctcagacacaacggtggttcagccctctccctaagcagtagcaagctgagtaatggcacacatatgtctaggatagccagcattcaggaaaattgctgtgaacctcctgtttttaattttaatatagaaaaagtctttcaggtttgtgacacgaagacagatttagcttcccacttgtcagcaaatttgtaaaaacctcaaaacaaatgaatatttggaattcactctaagagatacaaatcctgaatttctaactatcttctcaaatattactgaggccagcaagatgcaagtgttctacaaaataatgaactgttctaagtgacagtgttgatgctggaagtggaatgttatgttttcgctcagctgtattcattcagaaagtttttcttgaacatctgccacatgaggtgcagagaatactgccaggtgctagtttttccagtatttgacttctgattactatttccttttctcatctttagtttttcaagattttgctttaccaaaatagtaaagcctttatcatcagcttatattgaataatgttgtaattggtttcaatcaaagtttctcctcaggtacttgggggcccctagccttctaaggaactcccaggcacctacttaacaaggccagctacacactcagtatgtgataagccccatgatggatgaaggttagaattcaaagacctggttggagtcctagatgtggagacaggatgatcaggtcacacttgttagatgactaacactatcagtagaagctcttgagagattttcctaacgcagcaagatttctgtgagtagaggtatcctgggaggtatcctgggaggcagcctattgacttgaccaagtaagctgatcaggtggcctcctctacccactaaagaaatgtgtaaacactagcaataattgctttatcttaaactcctggacatactcagttcttccattccactgttctattgccaataccttttgttgttttcttcacactcctcttggcagcaaatgtctgaaagtatttcaattgtgtaatgttaaggggttttttcatagcttcagaaaagagggcagcaaatatgaagccttaagttcaaaataagtcattctacctagaaatacagaccccagagcacattgcatgaaaatacctgtactctgcagttcctcaaagcagtattcttcctgaaaagccaaacaccacacctattttcctatttgctaagaatcagaataagcacgttgtaaatagtatccaaagcagattctaaaatgacatagtaagaagccagattcaaattgtaaccaaagaagacaatagaaatcccactttaccccactgtcatcagttagaacacccttgcaaaaactgtaaccacttaagcaattcatctgatcccagaagatcataccttcttttgaaagtataggacagatatcagtgggaaacgtcggcgttctgagcaacacaggataaatgtaggagggccttaaaaaataaatctcaattcatacactggagcagcaaaaaactgagcaggaaaggaaacagaatccaaagtcatttttcatatagctgttgtcaaatagtataaccttggtgtcttctttgagttgcctggacagtatttatgaaacaaaaaactaaatgccccccatttggggacggggggaggggttcagacctctaacctggattcagagccttagaggccgagagggaatctggaatctggtattactgagatcctaggtaaaagaaccagcctggcagtctttcccacctcattggtccgtgcttttatttttaaacccannngaaagaaananacacaccctnttatgtnggaatttcccttttacaaataatttgacctggtagaaataaacttgcctgcctgctcttaaatgccagacagttggaagcaaatgccgagggaaaggtgcccagagccatgcttgataggactttgaatattttctccttanttgtacgttgcttgtatttagacttnagatgctatggaggtctatcccatgccatgccaatgtgaattgctttgcttcagtaacaatcagaagaccagtccaacagaaaataacttgtcataattccaccttagattctagacctctcatacctgcagtgtacagaatatgtacatgttccaatggaattcactatttttggctttagtgtcaaagagattggttctacaaggttcatctgatttcccataacaagtaaattttataatcctatgattctaaattcaatccccaatatagattctaagcatcaaatcaaaatcacagacaaaggggaactggtcgagaggggtcttagttatttcaaatccatgaccaaagtgtccaaagacatgaaactcttatacctgctgagcatttcactttactatacaaaatgtcagctacccagttgcatcctgtgacatgatcagactgtcaatgtggaccagtggccaggagcatatttatgggccatttctgttcatcattctttacagagcattgaggtttcccactgaaacagcttctttagtcagacgtctatagattttacataaatttacatttaaatgcattaagttagatggcccaattgagcatctgaatgaatatagtgggggttggtggtggtgcaaattctgctggctttatgttatggttttcttcgtgttttttcttggttttgtctggcttcttctggcaagtgccctaaaagactggaacactgtataaagtcatagacatagaaccatatgggaaagcccagatgaaaaaatggaagaataaaatcaagttgtcaaagttccagcaacagccctgacttcttcaggaatccaagcaaattgaaagccaagacaaaatgtacaaatggtgcccatgccattcatttgactgtgggtggccctctagtctagggctctcttagtgaatggttgtggaaatatgatttttctaagttccttccttttccttttgatagatgagtttgagatgatggagtaggagtggggccctcaggcacttctggtaaagacattccacctgcaagcagcattttgagtaaagcactgctgtggtttgccgatttatggtccatttaatgttaggctaaagcacctttaatcatttttgttgttttaagataatgtatttgtgaagtggataaacactggaaatagggtgcttcttctggaaagttcagtgtaaaacacaaacaaggctttggcgggtttatctggctttataaacaagtctgaaaaatggatgaaagctaaatatataaagcagttggttgtctatcttttatcatttttactcagatctgtatttaacacttatttatttgttagtttttacattcaaaagaaatacactttgaactttggctaacattgtaggatattttttaattgtttctacatttttaaagcatgattcatcatttttgtaaacttagatcattttttaattgtcttttcttttccaatagaccagttaccactcatgtgtctgcagaacctctttattgtattcctataataaatgtaaaatatttgtagcaaaaaaaaaa

SEQ ID NO: 576236 - DNA, 619 bp, Homo sapiens
acgccctatacgcacgacccacagcgctggggcaaactgagcgcaggaacagcggttctgccctcccagagcctccactctgggatgccagaatggaaacgccagaggcgcaacctgcagaactcatccagctcttactgtctcacatgtacactacggcggacaactgaacgccagcgcacgaagcacacgagcggagcaaactgctccagggccctcacacgggcaggcactccatggcagctgcgagcaaaccacgcggcatcctgcacccgcagcggccccactcaacttgctacactagagcactacacatgcgcacaagaggcgtttaacagaccctctctaggacacaactgtttctgctttgagcaataatttctaacctgaggccaagcatgtcccactgccccttgggcttggctggggtagtagtcctgagccaagcactccaatatcatgccccactcaactggcctagcaagctgcctgtacttaggggaaacagatggacgctcttgggcccagccagctgggcctgggacttctgcctctgccgcctccagagtggcctggcagctttgccagaggctgtggacgcgagggtagtaggagcttt

SEQ ID NO: 576237 - DNA, 178 bp, Homo sapiens
gattagctccttctcacacaacgtagcttctcctttactggattcagctccaggtagacagagctatccattacattcgtgtacaactagactgatgatttaagaatttgttggaccatttggaagaaaagtgtctttgaagattaggtgtgccccacaagtgctcagtgagcgaatg

SEQ ID NO: 576238 - DNA, 103 bp, Homo sapiens
gagggaaagatgacacagattataaccaagcgatttatagcaaggactaacccctataccttctgcataatgaattaactataaataactgttgtcaaggatg

SEQ ID NO: 576239 - DNA, 108 bp, Homo sapiens
cacgatgactacgggcagcaccctcagcaggataagcgtaactacacgcaggttattcagaacaccattatcgcacatattgataatggcgcagtgaaagctctctgc

SEQ ID NO: 576240 - DNA, 494 bp, Homo sapiens
tgcgcagcaacctgctatgacgcctcgccttttgaaaatcgacacacctgagtcctacgacctgtcctgtcacctcaatgacctgaccgacgcgtggaaactctatgccggtgcaacctggacactgctggatgcccgcctgaaagacatcaccgtcaagaacgaaggcgtcagctggcgcatactttggcggcgcgcttgccccaggcctggccagcacatatcaatgtgaatgaccatgaacgtgtgcactgacactctgggcctacgccgtggtgtacttctgtaccatgctcaccaaagcacatgtgggtacttgcgtaccggcctgacattcgaccatgtcgcctaccaacaacacggatcgctcaccgcgcatcccgaccggcgaccgtactatcttcagcctgggcctgggctaccaggtcatggataacatgaccatcacctggctactcctacctgaaggaagaggacgtcaaagatcttcggga

SEQ ID NO: 576241 - DNA, 533 bp, Homo sapiens
gggtggcctttccaatgccggctgccacctcaggcttgggtgctggggagggctccaggctgcctacatctcaccaccggagcctgagctgccggggctatgggcacagggtgccgggcagtctgggctctcgctgctgcccagcttctttccagcctggcgaatccatctgctcaggctggcacttctgcaaagcccggcagcacagtgtgtgaacagcgtggccacaaggcgggactgccggaccccccgacgcacgccatgttctggcagagcgtggcctgagctgctgctccgggcctcaccctcgcccgtgaggagcagatagcaggcacccacctcgggactgttggaagatggcacacgctaacgcatagggctggaggcagcaccagagaaagacacagttgtgcggtgcttgcggacgaggacgaggatggacgaggaggtgtcggaccccacctctgcggctgctcagctgcggcagctccgggaccacttgcctccaccctcatctgccagcccctccagca

SEQ ID NO: 576242 - DNA, 380 bp, Homo sapiens
aagtgagagaaactaagtttatatgagtgtcacgaatacttgcttcagcttcagatgtctagacttgaggcaattctgacattagaacctatgtccatcttcttgcattacactaaactgcctcttcaggatgagggagagctccctttcatggctaaggcaacctcttctgtctattaatgcacattctttattaattctttcttttatttaactgaaatctgtctcccattaacatctctcattggtcctgattctggcctcaggatggatcatcagagcttatgctcttctctttccttttgccggtatgtttgctaccactgctgccataatggcctctgccatcttttaccttgtttctgtgtggaggggtaccg

SEQ ID NO: 576243 - DNA, 960 bp, Homo sapiens
gctttctctcgccgcgccgtcttgaagccgcgcgggctcgtgagcagcgcgaggcgccaaggtgcctcgcttcgccggagccgtgccgccgcggagggaagccggctcgggcgcgcacgctcgtcggagccccgggcgccgggttgagcctgttgaccagggccggtgggctcaggctgtccgctctgggctcggggcctcggcccgtgcaattcacacctcccgccccttcggattccttcccctctgtttttattcttcctgctccagttgcggatcggtttcgcaattgtttgcaattcgtccgggggccctgggtggtttttcccaattttcccgaggcccccttctttctgtgagtactatttaacccctcttgattttggggaccaggggcctcggcaaaaggggcggttgggcagcgtcccatcctgggacgacagacaggaaggctgagggtcctggagggagggacggaaggaattcgggcggacttgtggggggaaggaagacacccaagggcaacccttttctggtaaatctcccagttcgcggcccggactctttgggaaaatcacttcgagcagggcaaagacaattgccgggcaccggggcaaaggacaggagcggcccgtgggtggacaggggcgcgggggggcacaggtgccagaggggataagaccgacggagtacgggtcgacatagttggatcaccggtccgacgataccacgcagggcatacggccggaactgatgactggtgtcgacacaaaacgcggacacagggtacggacaggagtatatcagatccagggagagcttggaaacgcgaggattccaaggggggaaaaatgtttgtaaatcctacgggaagacaatttgtgacaaatatagcacaaaaggattggagggagcaagagcggagttctacacatggggggatgatggaaaacgcaatat

SEQ ID NO: 576244 - DNA, 263 bp, Homo sapiens
tcggactcacacgcccttggttacaaccaaaaaaagagatgtccggtctgctttcatctcctctggccttttctctaccaaaaatcttgtatcttacctgaggctacagaaggagaacttccaggaatgtgacaggagagcagatactgacgggatgtggtagcatgggagaagagcaggggattgaccatgcaggggtagcagcagttggtggacaaagttccccagggcacacattggtatattccttggtgagattgcag

SEQ ID NO: 576245 - DNA, 1355 bp, Homo sapiens
  misc_feature (522)..(522): n is a, c, g, or t
agtctcctgcgagcctgcgtcgaaacgagggatgtcgttgtccagagaagtgttagcgttctgatagcatgagagagtaggatgaggaaggggacgccactcagacgactgatatcgtggaggttgcataacgacatcccgtttgcattagcgaacgaaggaccagatctacacattctcaaggacacgagcgaaggagtatcgcttccacccactgctgtgtctaggatcggatgcgatctaatgtccgaggactcgagggcaagatgcatgcgagcacgttgcgatgaggaaggtcgccacagatgacgagacgctaagtgcaaggtatgcctcgcgcgcaggttcgcaagcaaaggggtgcacacgcaacgttgcagaaggctcgcacccattccagtctgcgtatactgtggtacgagagcgtggatccatcggtggcatcgatgggcacagcatataggcgcaagaattctggtcaaaacaaagcaatccatctctatgtggggtcaatgtctcgcntctgtcacggggacagagatgaacccgcacaagctctgattctcacagatatccctggggagcagcataaggagagagagatagaactgttgtagggatactaaaagggatacattgtgcataggtgtgctcatagtattgtcgcatgatgcatctgtaattaaacaatgggcgttcgtaaaactcggaatttgtacagatttgggaatgcaaccatcaaactacagattctttgagatatgttcgtcatatgggcccaatttgggcgtaaagaaggtaaaacataaataatcctcttaggtctcaattgattaaggtctccttcgttccacgaagaggagtaaaggtgaggggggcaatacacaccggaggttataggcaagtctaatggggaaacctaatcggggtgggccggatggttaaaagacttagttactactaattaaatcacattgaagaggggtaaaattggaacggtacatggtttaggtttcgaaaagggaatcaacattttaaaattggaaggttgtattgggcaatgtggacatatggttttaaaattgtaggggccttacgttacacaagaccgatacttcgaaaaccaaaaaaacgcaaagcgtttggtaagggagaggggcgttccgcgggtaaaatcgacatagagaggtgggatatggcgtaaacttcgggggcgaacaaaattgtggggtttgagaagtggaggagctccttattaaaggtatacacgagaggaacatataggcgggagcacacgggagaaattggcctagtgaagcacgtattggaaatacccctggaaaaacaggggaaat

SEQ ID NO: 576246 - DNA, 336 bp, Homo sapiens
acatggaggggcgggaaagcattatgcagcggttcgcagggtcagtcagccccatgaactcctatctacttcaagcagccggtgcagccaccaggacggggtgagggccgtgactacctgcactgtggtctagacctgctgcagaggaagctgcggtccctgtggcgaaggccattcaaattgtcactgatgtgctgacgcccgcccagctgattgtgttgtccacgtcaagcggctgcgcctaaccaggacgtggggatgacatgccccggagcaggacaattatcgcaccatcaccgggaatgttgcaaaacaggacgcagccccaggctgggg

SEQ ID NO: 576247 - DNA, 679 bp, Homo sapiens
ccctgctagtaatggtagttccagtggaccaacctgtgatgaatatgcccaaaaggtacgacaacaattccacgatgccaaattcatggcaagacattgatctggatccaggctgctacattgaatagagaacagattcagaatatgcacagttagcacagtataacatgtcattttcagttgttggtgacaaagaggaatcagtggcactgcttaatatccgcacaatgagacaataaggtccacggggaacgcaccatttctgaaactatcgaagcggctacagcagcgtcaatagagttcctgcagcattacaggcagaagaagaattttaatgaaaaaattacccagatctggctccatggaaaaggaggaatcagcgtttccgtagaatattgactcttgtactctgaacaatgtcaatttatattgaacttggaggagtgtctgtgcataacgtctgaactaggtcaaccctcgcacggcgtaactactttcttgacctagtcagtttttacacaatgtgcagtttgacaggagttaattaaaagagacgccaataaaatgagttttactcatctcagtatctgagtactggaagtgaaacatgagggatgctttagtgtaatgtgggagacttttttgtaatcttaatgcacctggaaactactccaggcat

SEQ ID NO: 576248 - DNA, 130 bp, Homo sapiens
  misc_feature (49)..(49): n is a, c, g, or t
atccctgcagagaagagacgagatgggccggccaggcaccttctaggtnacgaccacatctacacgttgtcgtcacagcccatgcatttgtataatcttcttcattgtattacccttcataatctggagg

SEQ ID NO: 576249 - DNA, 135 bp, Homo sapiens
  misc_feature (116)..(116): n is a, c, g, or t
ttttaaaggtagtgtaacctaagtgtgcaatgttcacacctacagtagtgtgcaacaatgttttaggccttcacattcactcactgttcacacacagactcatccacgacaacttncagccatgttaagtgccct

SEQ ID NO: 576250 - DNA, 288 bp, Homo sapiens
tcacaataggcacagaaaaaaatggcgtcggtactggaacatgtacatttgtctggtggttattccttaatacagtataacagttatttacatggcatttacatggtattacgtattataagtgatctagggatgattaaaataatacgggatgtacacaggttatatgcaaatagtccaccatttaatatcagggactggagcatccatagatgtgggtatccatagggggtcctagaaccaaggccccacagatatggagggacaccggtgcatgtggggagcggg

SEQ ID NO: 576251 - DNA, 951 bp, Homo sapiens
  misc_feature (20)..(20): n is a, c, g, or t
  misc_feature (76)..(78): n is a, c, g, or t
  misc_feature (126)..(126): n is a, c, g, or t
  misc_feature (135)..(135): n is a, c, g, or t
  misc_feature (171)..(171): n is a, c, g, or t
  misc_feature (228)..(228): n is a, c, g, or t
  misc_feature (274)..(274): n is a, c, g, or t
  misc_feature (283)..(283): n is a, c, g, or t
  misc_feature (318)..(319): n is a, c, g, or t
  misc_feature (321)..(321): n is a, c, g, or t
  misc_feature (394)..(394): n is a, c, g, or t
  misc_feature (401)..(401): n is a, c, g, or t
  misc_feature (454)..(454): n is a, c, g, or t
  misc_feature (476)..(476): n is a, c, g, or t
  misc_feature (486)..(486): n is a, c, g, or t
  misc_feature (489)..(490): n is a, c, g, or t
  misc_feature (494)..(494): n is a, c, g, or t
  misc_feature (496)..(496): n is a, c, g, or t
  misc_feature (499)..(499): n is a, c, g, or t
  misc_feature (519)..(519): n is a, c, g, or t
  misc_feature (522)..(522): n is a, c, g, or t
  misc_feature (536)..(536): n is a, c, g, or t
  misc_feature (539)..(539): n is a, c, g, or t
  misc_feature (554)..(554): n is a, c, g, or t
  misc_feature (560)..(560): n is a, c, g, or t
  misc_feature (562)..(562): n is a, c, g, or t
  misc_feature (564)..(564): n is a, c, g, or t
  misc_feature (567)..(567): n is a, c, g, or t
  misc_feature (633)..(633): n is a, c, g, or t
  misc_feature (636)..(636): n is a, c, g, or t
  misc_feature (641)..(641): n is a, c, g, or t
  misc_feature (728)..(728): n is a, c, g, or t
  misc_feature (828)..(828): n is a, c, g, or t
  misc_feature (842)..(842): n is a, c, g, or t
  misc_feature (882)..(882): n is a, c, g, or t
atcccctttggcccctgctnccaggttctccttgtccccctttccttgccttcatcccatgttctgtccccctaannntccctccaggcagggaaaaaaggccaggtgctaaaaaatgagcctttntaaagcacntgagcagcggaaggcagacaggcgccagagcacagnactcccttttccagcagctgtggtgggggaggttcccctccagtttgtcaagagttnaaggaggctctgtggccaggtgacctggctgccttccactccttgnaccacagtntaaacatggagtggccgctgacaaggcgctccagnncnagagccagcgtcttcatggggaagatgaatggacctgagtagctgaaggaaggcccctccctacccaaaaacntggaggnttctcagcctcaatttccctgtctgtacagctgagggctctgcctgtccccantgtatcagtatggaaccccagntgggtccctnatnnagtncnacnccccccaccgccagcagtgntcntccagccacacccntcntgctccccccacccntagccntngnccntggctggcctgccccgctccacaggccaccagatgggctcctgagaccctccccaggctgcttacngcncattntgctgggggtagagatgaggggagggagtaagttaaaccttggactagcaagtagaagcctggggggatgcgtgtgcctcagtttcntcctccacaactgaatatagtggctgaaaactggggagatacttgatggcgcgaatgtccgttttttctcccttcccacctcctgcaggaagcaggacgngggcaggcagcacntggtaggcacagctgctttgcccctcctccccttcccttntggaagtcttggggcctcagtgcttgcaacagccggccttgggcaaataaaagattaggttgtttacta

SEQ ID NO: 576252 - DNA, 199 bp, Homo sapiens
aggggagatcaagcgtggaccttcggggtaccggcagctcatcgactcaggccaactccttcgtggcacgcgctcatacaggctccggagcggttgcaaggcacacatactcggtgcagtcgacatctggagcatgggcctgtccctggtggagctgccgtcaggaaggtaccccatccccccgcccgacgccaaagag

SEQ ID NO: 576253 - DNA, 117 bp, Homo sapiens
atgagttttcaaacagcacgagatctgatcatgacattccaaggagattacacgtcatccatcactcatagactcgttacaggggagatcctctagtagtcgatcatgcagcgcatg

SEQ ID NO: 576254 - DNA, 133 bp, Homo sapiens
ttttaagtgttattcacatatttaaaacatatgatggtatagatatgatgtggatataaagtcgagataaaggagggatggtttaagaaattagtgcatcaattcttaaacaatacttcctttatctcgaggg

SEQ ID NO: 576255 - DNA, 160 bp, Homo sapiens
agctgatatcttcgccagtatgcagcagttacgagattgctatgtcaccatgacaatgtaacctagaatgtcgacaggatgcaaaagagtgtctgtagttcgaatggaaattatgcatagaggtacacccagagcaaatagcatggatttccgaactctt

SEQ ID NO: 576256 - DNA, 446 bp, Homo sapiens
ggcgggtgtggccgcgctctattaaagctggtcctttttttaagagttttcacctgataccttgcgggccgtactgtagataacattccaaaagaaatactactttgcacccaccacgcgaaaaaaagatgaacatagtctctttgtgcatctgctcctctcctcgtaaagctgatagcctttcttcggagcaattatcgtccgcttgcaaggcttctttttcagcgcggggccccgggtctttttctaccatttcatctattttatgcggaattcttttttctcagcctgtcccttctgttggatttcctcttgttttccctctgctacctagaaaaataagaaaattcagttatttaacaaacctaactctgttttaagagcgagccccaggaatgcctttattcacttaaacttctaagaaaagtttgttctgtagaaaagaa

SEQ ID NO: 576257 - DNA, 478 bp, Homo sapiens
  misc_feature (9)..(9): n is a, c, g, or t
  misc_feature (24)..(24): n is a, c, g, or t
  misc_feature (47)..(47): n is a, c, g, or t
  misc_feature (63)..(63): n is a, c, g, or t
  misc_feature (467)..(467): n is a, c, g, or t
  misc_feature (469)..(470): n is a, c, g, or t
aaaaagcantgcctgtcaacaatnacattattattaccttcccttantagtcattttgagttnaggtgtaagtgggaacttagaacaaaaggaaagaccctagctttgtggaacgtctgaattcctcctctgcaaaaatggtgatgatgcctgccctgccccacttcattagatccagagataaataatgtataagaaaacactttagcccaggtgctgtggttcactcctgtagtaccagcactttggggttctgaggcaagaggatcacttgaggctaggagttcaagactagcctgagcaacatagcaagaccccatctctaaaaccataaaatacagtagccgggcgtggtagtgtgctcctgtagtcccagctgctcaggaggatcacttgagcccaggtgttcgaggctgcagtgatctgtgatggtgccactgtcctccatcctggttgccagagtgagnannctgtctcc

SEQ ID NO: 576258 - DNA, 1009 bp, Homo sapiens
gacgctttgcccctgaagacacggaattcgtccgtggcccgtgcttgtgcccatgcctgtttctagtgccagccactaagttgaggtctggtcccatgtgcgtccttcatcgggatgctagacggccttcccgccaaggcatggatggccatggatggtctgatggagtctccttcacatgatagtcttgtcttcaatgcccgtcctctggagctaattgtgataacttatcctttgggcttgcggtgtatgcaagcctcagcgcgagtcctcccccgggcaaataggctcctgacgggtccctctggggccgtcctctcctgcctgcgtcagtgcagcatgggtcccctggagacagtgcggatggtcggggccatgtggccggtccctcaccccacatctgtggatcgtgggccccccacttcccccccaagggggccctgcccaccaccaccttcccggtgacccatgatgaccacatttaataccaatattgggtttggtgggtgacggcgccacctccagtgccaggggcacgtgctgtgagcttcctgggagcccaggttgttgctcactgctctcccgtatcgtgagcaccacctctgctgttccctgctgtagatcctaaggccaggggctgcttgtttttgtggagaccgtgtgtgttcattctcatgatgctagctcctccccagaggaccccagcgcacgtcccgggacgattgtcaggaataaggaaaggtcacacagggcacagtggacagtcatcccagtcgatctacgctgataggtgaccatgacctgatgaggagaaagaaacagtgaccacgcggagagtgagatgtgcgggatctgtctagacgagttctcccagtgaactatatagtagctttggcgttcactccactgttgttactcgttactgagtttcctagacctggggtggagtgttctacccaggaggaaggggggtcccgacactgtgtcacatgtggtggccatttgcagc

SEQ ID NO: 576259 - DNA, 965 bp, Homo sapiens
  misc_feature (260)..(260): n is a, c, g, or t
ctgtcctccaccccactgggtgggattgtgtccttctgatgctcgctatcgatacacaagtggtagccgagcagtggtggtggcacacacaaaaggtagtcaatattgtctcgcctctcaaatgagtcctcctccgcccccggtaggttataaacactgtgggggaccaacaccatcgttttggtgtgtctcataatgccatgcttgcgctgtgtatcccagtgtgggtgcgtatctatgttgattggacgacgtggtgngcaccaccactcgcttgctgggatcctcccttctgtgggcttccactcatgcgtggtccccacctacgctagctgtgctttgtctctccctcggagggatcacacccactctcttgcattggcacacacgcggagatccacacgcacgtgcttgctcacatagagatcacacaccacgcagtctgtacccacctgggcagcgatctgtgctcgctcgcgggacggccggggtttaccactctcttctgccacaccacaacccacgattccagagaggcgtgcgtgtgtgtagagacacacgtgggtggccacggacacactctgctgggagccaaaaacacaaggagtgtctgtggtgaggagacacccccgtccgctcggtggtccaaacacggctgggcacccaccacgactcactacacaccacaacgtgtctgtccaccagaacacccaccgctatgctgctgggcacaactgttgtgccatccaccaaggagcacgctccacttgtccgaccacacggggggtcacacgacgcacacaactgtgtgtgtggggacaaaccgccgccgcggcgcgtgtctccaccgcggtgtgtgccgcgccacacccaccaccacacggagaacccgtgagcacccgcggacaacacacaacgccgcgcggggagaaacaacggccccattacccccccgtggccccaca

SEQ ID NO: 576260 - DNA, 548 bp, Homo sapiens
  misc_feature (353)..(353): n is a, c, g, or t
  misc_feature (378)..(378): n is a, c, g, or t
  misc_feature (388)..(388): n is a, c, g, or t
  misc_feature (413)..(413): n is a, c, g, or t
cccgtgataccgaaagcggaagatggtaatttttttttacggatgatatggcaggatgattggttctgatcttaccggctagtggtcatttttaaaaaacttgtaccctcttatctgaaatcctgtttctggaatttggccattttaagtgattttgtttgccctcttctataatattcctacttcccataataatgactgatttatttgtaattcaggtatttataaacctattggctacaaagactttgttaaacattatccagtggttttcgtgaaatggaattatgtttatttttatgggatttgggtaaattttaaattgtctagaaaactgaaatttcagttgcagntgtggaattcaagtttttcaattgngggaaatttnctgccccccccaccagatttttggngggtaaataaattttgccaaaaggagaaacatgggggggacactcactaatttatcttgggtggggaggtatggcataataaggagaaagaagggttaaattttctttggatttggttccttccggatcccgggg

SEQ ID NO: 576261 - DNA, 438 bp, Homo sapiens
caggtttactccaattccaagagatatcgagaccttcctctgggtcataagaggctttctctggttcatcaatgctatgggttcattatcaagaaccagagggcagctgggcatggtggctcacgcctgtaatcccagcactttgagaggccaaggcaggcagatcacttgaggccaggagtttgagaccagcctggccaacatagcgagactccatctctactaaaaatacaaaattacctaggcatggtagtgcacgcctgtaatctcagcctcttgggaagccgaggcatgagaattgctttaacctgggaggtggaggtttcagtgagctgaaattgtgccactgcactccagcctgggcaacagagtgagattccgtctcaaggaaaaaaaaaaagaacctgaattagaccccccagtgtgcccagggagagg

SEQ ID NO: 576262 - DNA, 539 bp, Homo sapiens
gttgtggtcgcccccgctgggtgtgtggccaactggggggggtttctcttgttgggtcgctttttgtgggaaggcccctctctgttgtggtggggctgtatttgcggtggattagtttgtgagcaggtgttgtttcgtacccccccttgtcgctcccgctgtgtttgccgcgagtgtctctataagagtgggtccccactcggcctcttgtaaaaagttttgtggcgcaccgttgttttgcttctcccccgttggtattttgttccccgtctggttggtgccccgctccgtgggtgtgtctcttttgaggcgtttgctgttctgaccgccccttcttttgtgtaccccattgcggtgttgacccgggcggcttgttgtactggggaatttgtgttctttgcccacacttttaaaaagtgtttatactcccgcgggagtaattccccccattttgtagaattttctgtcgggggtccccacgcccttataagtaagttttgtaaaaagtatccccccctttcttgggatcatttcagtac

SEQ ID NO: 576263 - DNA, 874 bp, Homo sapiens
gagcacaagattccatgcccatacgcgctgcatggccattcgccgccatcatgtacgtgcccgcgctgggactgggagttcctggcctccacgcgcctcacctccgagctcaacttcctgctgcaggacgatcgacaactgttaccacacgggacggccgcgggccgcgcgcccaagatcgaacgcgatcgtcctggcggcatcacggagcgcgagagcgcgagatcatcaaacgcggaaggagagagcccggagcagaacctgtcgagaagtactggagcgccgggcgacagaaacttactggccaagctgtacctggcgcggacgtgctgatcctgctgctgagcgccgtgccatctcctactgtgacctactacgccacgcagaagcagaacgagttcactgcgcgctgggcgcgtccccggaggggcggaggtgcggggcccgcggtgcgcgtgagctgcaagctcccgtccgtgcaatgcagcgcatcatcgccgggcgtggacatcgtgctgctgtgcgtatgaactcatctcctcgtaactcatcacctctcattccgcagagcaattatctcgaaagtgcccaggtggcataagagcgcggagtgggccatccagtctggaatacatctggctgtctgcaggaacgtgccattaagtcgtcacggtggctcatccaagagagcgactctgtgacagtgacggcctgtggctggcatcccagagcaccaagggcgagggtaacggccgcaacgggacaggccgacccgtctcgcccgaaggtccaccttcaccagcagctttctaacggaaaccggacgcgatcgcggaccatgggcggtcacgacaaccaacacgtcaagcagtaa

SEQ ID NO: 576264 - DNA, 183 bp, Homo sapiens
  misc_feature (9)..(9): n is a, c, g, or t
  misc_feature (14)..(14): n is a, c, g, or t
  misc_feature (19)..(19): n is a, c, g, or t
  misc_feature (27)..(29): n is a, c, g, or t
  misc_feature (69)..(69): n is a, c, g, or t
  misc_feature (100)..(101): n is a, c, g, or t
  misc_feature (118)..(118): n is a, c, g, or t
  misc_feature (136)..(136): n is a, c, g, or t
  misc_feature (139)..(139): n is a, c, g, or t
  misc_feature (144)..(144): n is a, c, g, or t
  misc_feature (162)..(162): n is a, c, g, or t
  misc_feature (175)..(175): n is a, c, g, or t
tattgtggnttaanttttnttttggtnnntagtgttaaacaaaattaaagttgcatacattagtaacanaactcaacatccttaatttggtatagatgtnntatatttttttgttctnttgttgttttgttaaatnacnataantaaaatgctttataaaantgttatgttgtantttaattt

SEQ ID NO: 576265 - DNA, 347 bp, Homo sapiens
agctgtatattgtaagaaaaacaagagaccgcaaccgaggtcgcccttcagatcaagaccgttcgacatctgtatgctgaagtggagcggctgattatttcaatgcacccctatcagcttcccgaaattattgcgattccaatcgtagatggcttacccgcttacctgcaatggatcagagaacaaacaggaaattaattctatgcagcattccaaccggaagatcaaagtctttttaccttactggcattttgtttccgcattttgccgatccctattgatcagcgcgtgtctggtctggatgccggacgctgccgcggatgactttctggatcctgaagtcgcgt

SEQ ID NO: 576266 - DNA, 353 bp, Homo sapiens
  misc_feature (28)..(28): n is a, c, g, or t
  misc_feature (59)..(59): n is a, c, g, or t
  misc_feature (236)..(236): n is a, c, g, or t
cctgccctaatttcactcctcagaagtnaaggcaggtaaactggggctcccactgggtnactctgaagagggttgtggctctggttccttattaaacccagggcccaggtgcagggctcacacctgtaatcccagcactttgggaaggtcacttgagctcaggagttcaagaccagcctgggcaacatagtgagaccttgtctctggaaaacaattagctgggcatggtggtacanacctgtagtcccagctacttgggaggctgaggcgggaggatgctttagcccaggaggttgaggctcctgtgaaccctgatggcaccactgcactccagcctgggtgacagggtgaga

SEQ ID NO: 576267 - DNA, 1225 bp, Homo sapiens
cttagattcccatgaggaagcatcgtaggaaatcatggaacaaggtttggtaatggaagagtgtggactaggcagttgccgtcgactgaaggttctactggccaagggaacattctcggagacagaaaattcaagtcgaagtagactatgcttcgtgactgataaggatggcctgctgatgtcggccagatctgggcagaccattctaaagaaaaagatctgaggtcggtctcatagaaggctctctcctcgctggtcaccccactatattcatggcgagttccaacatgtcaatggatcaggcaagagcgctatcggtggagagacgcctagtgtagtctaccgaggacaacggagtcttgcactgtggtgcctagccacacggacgtgacaactaccaggttgcgtgcagcaggtcctggcggtgtgctcctctcaagcaggaaggaacttatcttactgccagaagtcctttgctcaatagcacagggtcatactgcacacatgtaagatgctactcgtctagggcttacagtcacacttgggaggtcccatgcactggagtcgaacgtgttttggaatcatgctgatacggttggagagttatgactcgaaacaggttggtccaagaggcacctatctcacgatatagctagagagttggggcttcttggccggggatttgccccacttgcatgggatgtgccaacagccgagtcctgcgtcagtactccaggtggtggcacatatctcggcgtggccaaatgactccaagcaaacgccagctagagactaccgttctgtgggaaaccggggccgacaaggatgctcacagaatcatccgagtgtcagtagggtcgttcaggctttccagtgttagagagaagcgggattgttaccggatcccttgaaggacccttcgttgcaaggcaacttctctggaattgcccgggctggaggtatatttgacaatgcggtgggctgagaagcttgaggacaacaacgccaaagtggtctcccgtgcgatatggaaacatacgcgacagaggggagcacgtatatcaccctgggagatcatgcaccggcacggtgtggacaaccatgtatacatactaggaagaaggaacacacacgggaggtaaaaccaacacccaaggacggtgtgggacaccaaacaacatatagaccggaacagaacaccctgggacatcgacgacacacaaaa

SEQ ID NO: 576268 - DNA, 119 bp, Homo sapiens
ctaggataaagattccaggaaggagcgagtgcatctggtgattaaggtagcaggcggctcggcttggcaaccacctaaatcgttaggcgcgccttccttagatagaggctaccggcatt

SEQ ID NO: 576269 - DNA, 328 bp, Homo sapiens
ctagctattacgggtcctttaaaatttaagtcaggtgcagtggctcacacttgtagccccagcatttgagagccctaggtggggaggattgcttgacgccaggagatagaggctgcagtgagctatgattgggccactgtactgcagcctgggtgacaagacaaccccgtggtctttgaaggaaatatatataaagtcatatcctttgtacattgctcgaaccacagtagtttctctcattcagtaaaagcccgtcattaagagctccataattctctttatctcagctgggattaaccccttggtgtcttcagtctttcttccggcc

SEQ ID NO: 576270 - DNA, 230 bp, Homo sapiens
atgagcagccccagatataattggagggttttctttcctggagatggaatctcgctctgtggcccaggcctgtatggagtgcagtggtgtgatctcagctccgtgcaacctccacctcccgggttcaagcaattctcctgcctcagcctcccaagtagctggggctacaggcgcacactgccacgactggctaattttttgtattttagtagagacggggtttcaccatg

SEQ ID NO: 576271 - DNA, 142 bp, Homo sapiens
aaagacagacgcgtatggggtaatataaaatctggaatcaatatattaggtgtctggggcaattatactggcaaattctaccaggtaataaaaggggagtagggtgcccataacccagaggtttcttcggtgtaaggggaaa

SEQ ID NO: 576272 - DNA, 131 bp, Homo sapiens
aggccacctcgagaatcgcgcatcaggtgggactgcgacagacagcgcaaaattgccagcgtggtgaactcgaagtaggtcagcgcctcgccaccgcgtgccacctcgaccggggggtccggcgtgtctga

SEQ ID NO: 576273 - DNA, 378 bp, Homo sapiens
tgagatccagccacagcactccagcctgggtgacagagcaagactctgtctcaaaaaaaaaaaaaaaaaaaaatccaagattaggcagggcatggtggctcacacctataatcccagcactttgggaggctgaggcaggcggatcaccatgttggccaggctggtctcaaactcctagcttcaagtgatccagctgccttggcctcccaaagtgctgggattacaggcatgaaccaccgtcccaccattggtgggtttttttggattgctttggttttagacctttctctttaaattttttggaaaatatattgagtttaaaaacccaaattacccctttaatttagctagccacggcacttccgcctgggtgcttga

SEQ ID NO: 576274 - DNA, 865 bp, Homo sapiens
ccaaagggtctgtcaaagggttccgcacggaacctcccttcggtgtccctggaggtccggggttcgccatgggccccgccccgcccggtgttaccggtattgtaagacaaccgtaccccaagtctcgcttctgccgaggtgtccctgatgcccagattcgcaattttgacctggggcggaaaaaggccaaagtggatgagtttccgctttgtggccacatggtgtcagatggataatgagcagctgtccttctgaagccctggaaggctgcccgaaatttgtggcccaataagtaacacatggtaaaaaagttgtggcacaaagaatggcttccacaaatccgggtgtcggcgtctcaccccgttccacacgtcaatctcgcaatccaacaaagaatgttgtcctgtgcctggggctgaacacaggctctcacaaacacggcacatgtcgagggtggccctttggagaaagccccacgggcacactgtgggccacaggggttctacacacattggccaacagttaatcaatgtccacatccgcaccacaagctgcaggaccaaaggaggcacatgtgaattgagggccctgcgcacgggccacaagttcaaagtttcctggccgccacagagaagagtccaccacatttcacaagaagtggggcttcaccacagttcaaatgctgatgaaatttgaagaacactggtggctgtaaaagcggctcatcccacgatggctgtggggtcaaagtacaatccccacgtcgtggccctttggagcaagatggcgggccctgcaatcatgagggcttccaaagtgctgcccccctcttaatactcacccataaattttacttcctgtccca

SEQ ID NO: 576275 - DNA, 171 bp, Homo sapiens
acctgatgggaccgagagctcacagacgcacattaagatagacatatatagcatactatccatgactggaggaggaggtggaggtgtacttgatggtagagaactgccgcctccaacagagctgaggccacccccaaatggatctgccactgacatggaaactgaagacca

SEQ ID NO: 576276 - DNA, 129 bp, Homo sapiens
gtataaatcctagcataagcccaactctcacttacccatccacagcaccagacccagatagcataggtgtcctaccccagcacagacatagcaccctagccccatagccaacttgacatactacagcat

SEQ ID NO: 576277 - DNA, 299 bp, Homo sapiens
acgtctgccctcggaggatgagatgttgactgcctgtctggctttctgttgactggcctcgggagctggagctgctgggagcctggtgagcttccctagtctgggagtaggctgtctggctgaagtcatccatcaggttgaagaagcacttgatacagatgagaaggagatgctgctctttttgtgccgggatgttgctatagatgtggttccacctaatgtcagggaccttctggatacgtttgagcaggtcaaatcgcctcactctgtagagcagctcagccaagtccccgacagac

SEQ ID NO: 576278 - DNA, 321 bp, Homo sapiens
ttcatcaggatccccgcggagagctgccctcagcaacttggctgttgatttgaaactgtgtaggtgtatttttcagtgagctggaatgtcttagacaagccttgatgatatgtctatttgtgggcttttaactgtagtttcagggaccacttaagacgagattagatgggctcttctggatttgtttcctcatttgtcacaggtgtcttgtgattgataatcatgagcgacgtgaaattgcattgaatttcaagggaatttagtatgtatatcgtgccttagaaacacatctgttgtcttgtctgtgtttggtcgatatta

SEQ ID NO: 576279 - DNA, 153 bp, Homo sapiens
gggcggggatggggagaaatagggagtaactgctaatggatacagagtgtttttttgggtgataaaaatgttctagaatcggtgatagttgcacaacctatacttaaatttactggatcatacatgttaaaattgtgaattgtatggcatgta

SEQ ID NO: 576280 - DNA, 138 bp, Homo sapiens
tacgcccgtgaggttgtgcaccctgagtatagctctcccccaccagcacggagggcagccgatgcctggggcataaggactcttccccttgccatcctctatccttcctggctccagccggaggacgagacctctgcc

SEQ ID NO: 576281 - DNA, 372 bp, Homo sapiens
agaggatccccctggtcaccacgcatggcaagctattggatttaggggtgagtgctcaattggtaccgcaccgtgggcagacggaacactttcattgggactccctactgtatgtgctccataggtcatcgcctgtgatgataacccttatgccacctataattactggagtgatattcggtctctaggaatcacagccatcgatgatgcagagggagccccccctactctgtgacttgcaccccatgcgtggattgccaattggccaatccatgcatcggccaccgcgcccggctgaacaagttattgtagatcttcaaattcctatttcaatatccatctaggaatttgaatatctctccataatgcgtt

SEQ ID NO: 576282 - DNA, 570 bp, Homo sapiens
tcaggaggcatgttacttagggggcttgttccagcatgggagggaagtaatgtgtatcagcttgagctgtgtgaatgaaaaaggaaaaactatctcgaaccctcaatctgctcaaactgtgacttgaaaagacttttttaagagatagccacttaagcagctgggcaactcattcttttgttcactggcagatggcaaaacctcagagcacaatggtgagcattttggtcagacatgtcccacacacttttatctgcaccctgaagtaggatccaggatttgcagcgcatccttcccttatcctttcgccctcttcccccttttcaaactggtgtaagttactagagcttgtaaaagtataagaactaaggaattctgctctcttgttttcttgctctgagcttggaaatacccaccacattgttaagcaaatgttctctttaccagtagtgggtaaacaaagacatgagtgagttttctgctacacctaatttaagatgtagaaaatcaaagccacagagcagggtcagtcagctctaggtctgatttatgagcatttagaacaacaac

SEQ ID NO: 576283 - DNA, 985 bp, Homo sapiens
  misc_feature (713)..(713): n is a, c, g, or t
tggccaaaaaaacaaatctaaaccaatgcctttttaaaaacagggactctcaaaatcctgctacccagtttccccaataaaaggggcccaaaattcaggaccccttaaaaacaactgacaaaaagtgtcaaacccagagggccacccttcctgtgcatagatgtgaagcagcagcacatttgactcttccattttctatctcttgattagggagacagaaaagaggcattcttcgaaccagaattagaaaacaccaagggcgtgggtgctcccataaaaaaaaacagatgtgggctttcaaagaaaacacataggagaagacccacagagcgtgtactcaattttagctggtaaaacaattaatctccaattattgccaaccagggcgatatctgagcacacccagctttctctaaactcaatagtctagtggacacctccattcctcttctcgagaactactttgggtacgtggggctcaaacagcctttgtgcttttcataatactctatcactttcaccacgtgctcctggggccaaaaagctcctttccgttaatcattggggccccctagagcggtggcgcgatactccacgttcccctccccaatctgtctctataggttgctttaacaacacacgacaagcttcttcttccacactcgacacactcacaacacaccccagggtgccctttataaccccaacagtgngctagataattgcgtgcgctttccaattcccccataaaaattaaccaagttcttccccataacctattaaatagggctattaaccaacggtcctcacacaaacttgaaatacccgcttctccccaaccaaatttttattccccttaaccgggccgagtagcaacatccggaaagccccggaaatatattttacgagcaacactccttaccacctttaaacattcggctcttacacttttcgaacttgcactcagcagccatctctcgcgtta

SEQ ID NO: 576284 - DNA, 791 bp, Homo sapiens
ggggcccgcgttggtgcctcctgaggcggccccctggatgaacgagatctgtggaaccctgggagccttgaggtaaccgaagcagctcggttgcgccagggcctgagctgctgctgtgacggcctctgctaatattcgattttagacacgagcatactatctgcagttgatgacccgggcttgactggtgcatacagctggacgccccctgagaatctcgcagacttttgtggctgccgtctatcaccaatcaaccttcatatctcgctctacatggtaatgctggtttgcacgactggtgatacgacaaagacccgcaagctgagcagggccttcgcgatcgcccctatcctgtgtcctgtctagctctctagagtcactcaccattctctgtctctctgagagcttccgtgcttgctcgacagctgcttcaccgcagcgccatgctgagccagcccaggctggatgagcctggacacccccggcggcctacatgcctgggcctcgcgctcctgggtactgggcgtcgtgctcgtgctcttccagcttctttgccctgtgggttcgctcggaactttcctagggttattacttcgggatcctcaaggaggcgagagtgacccgtgttccccttcaacatcctggacaaccccatgtactggggaagcacagcaactacctgggcttgggccatcatgcacgccagcccacgggcctgctctgacggtgctggtggcctcacctcataatggtctcctattagaagagccttacggtgagattaccgcgaa

SEQ ID NO: 576285 - DNA, 871 bp, Homo sapiens
  misc_feature (22)..(22): n is a, c, g, or t
  misc_feature (37)..(37): n is a, c, g, or t
  misc_feature (217)..(217): n is a, c, g, or t
tgaggatgacgcggcatggcangaactgcacgagggngcgtctacactaccacgagaagaagaaggacacagggctcggctatgggacccagaacatcgatgagccggatgcgtgaggattcgatgttgttgttttttccttgagctttgcagatcctgttgtcaccccagatggctacctgtatgagcgtgaggccatcctgagtacattctgcancagaagaaggagattgcccggcagatgaaggcctacgagaagcagcggggcacccgcgcgaggagcagaaggagcttcagcgggcggctcgcaggacatgtgcggggcttcctggagaaggagtcggtatcgtgagccggcccctcaaccctttcacagccaaggccctctcgggcaccagcccagatgatgtccaacctgggcccagtgtgggtcctccaagtagggacaggacaaagtgctgcccagtttctggatcccgtcgctgatgcccgaagcaaggccaccaagctggagaagccgtcccgcacggtgacctgcccatgtcagggaagcccctgcgcattgttcggacctgacgccgttgcactttcacaccgtagacagctccgtggaccggcggtggggctcatcacccgcaggagcgctacgtgtgtgccggggacccgcgacagctgagcaaagcacccctgcgctgtgctgggggcctctgggctggtgtcaccctcgaatgcgtggagaagctgtcggaggccttgggggcctgtgactgaggacaccttccgacggactcatctgctggcgggggccggtcgggccggggagtgagggaaagggggtcggcgttgtgggccaacggggtggcgcaaaaag

SEQ ID NO: 576286 - DNA, 309 bp, Homo sapiens
cagatatgatctcctcctcgagcctcccacagtgctggaattacagtacgataagccagcgtgcccagctcacattgtgcgttaagcactaaatgctgttcagaggcaggattcttcagcagatcaactaccggaagcggcatcggtgtcattgtctttgttctgtgttatgggttgagccggtaggtcttagggcggagtcaggatgaggaaggtggtgttctgcagggataagcggatattggcactgaaacaatcgacaggctgcctgaattccaggcagggtgaggcacgaggatgactggagag

SEQ ID NO: 576287 - DNA, 394 bp, Homo sapiens
agtctttctacttttgtaataataggaagttagtaggactcacttctctgattaataagcaatttgcagcacacagcgttccactgcggggtttcacgctcacctgaaaacacctgttcccaacctacttcttggtgcaagttgaccaaatcgttttaagtggtaactctttctaacctgaacagggttggtttctggttaacaaaaccgttaattctagtgccttacctggactgtaaccgtcctgagagtgagtgttcacaatgggaagataattagccgaggtgttttgtattctgtctgatttaaaagcatgtataacccttgttgtcatttataaataccttttgagtgatgttcctttatgagctgtttgtgaacctgttggctgcag

SEQ ID NO: 576288 - DNA, 825 bp, Homo sapiens
  misc_feature (22)..(22): n is a, c, g, or t
  misc_feature (37)..(37): n is a, c, g, or t
  misc_feature (171)..(171): n is a, c, g, or t
tgaggatgacgcggcatggcangaactgcacgagggngcgtctacactaccacgagaagaagaaggacacagggctcggctatgggacccagaacatcgatgagccgatcctgttgtcaccccagatggctacctgtatgagcgtgaggccatcctgagtacattctgcancagaagaaggagattgcccggcagatgaaggcctacgagaagcagcggggcacccgcgcgaggagcagaaggagcttcagcgggcggctcgcaggacatgtgcggggcttcctggagaaggagtcggtatcgtgagccggcccctcaaccctttcacagccaaggccctctcgggcaccagcccagatgatgtccaacctgggcccagtgtgggtcctccaagtagggacaggacaaagtgctgcccagtttctggatcccgtcgctgatgcccgaagcaaggccaccaagctggagaagccgtcccgcacggtgacctgcccatgtcagggaagcccctgcgcattgttcggacctgacgccgttgcactttcacaccgtagacagctccgtggaccggcggtggggctcatcacccgcaggagcgctacgtgtgtgccggggacccgcgacagctgagcaaagcacccctgcgctgtgctgggggcctctgggctggtgtcaccctcgaatgcgtggagaagctgtcggaggccttgggggcctgtgactgaggacaccttccgacggactcatctgctggcgggggccggtcgggccggggagtgagggaaagggggtcggcgttgtgggccaacggggtggcgcaaaaag

SEQ ID NO: 576289 - DNA, 572 bp, Homo sapiens
caaaatgcaccttgttctgacaatcacatttgtagtaaaatgcaaaaaaatagtctcccagtttgcttttccctgtagttggcataaatatctagcacactagtcagaataaaactgttgaaaataacacacaaggagagagttagttcatcatgaagtgccttgatgtgccttctttcagaacttgtcactctggaaaaaagtcagacgtgaacacaattcttctggccccagtggatatctagagccgacagtggggtggtccactctcaagaggcaattagagaatgcattgtctgcagaggatttaagaacaataataaaaccagctaaaagttggtctgctttatgttgttaccatgagccagtgattctgaacaattttagtgttcacatattcctccctgaaggggtcgttggtgtcctatgtccaccctccttgttaagccattgtctggcaccccacccaagtgggggcagatgtagaataaacctctgactttaatatataagaggttgtaaaacattatgaactgattctctagggtaaggaaggtcctatggatgtcgtc

SEQ ID NO: 576290 - DNA, 197 bp, Homo sapiens
atagcgagacttacgtgggctgcccgctggggctggcaggtagggagccgacagccgcccttcgtatttgtgtcctgtctggccgtgcctgtctggctatgcgtgcgtcctcagcactgaaggacttggctggtgggtggggcactgggctctggcacctctccccacacctgtctcaaccactggtccgcctcgct

SEQ ID NO: 576291 - DNA, 379 bp, Homo sapiens
  misc_feature (364)..(364): n is a, c, g, or t
agccctaggtttctttttaaattaagaaataatacaattaaagggcaaaaaaccctgtatcagcatagcctttctgtatttaagaaacttaagcagccgggcatggtggctcacgcctgtaatcccagcactttgggaggccgaggcggatcataaggtcaggagatcaagaccatcctggctaacacggtgaaaccccgtctctactaaaagtacaaaaaattagctgggtgtggtggtgggcgcctgtagtcccagctactcgggaggctgaggcaggagaatcgcttgaacctgagaggcggaggttgcagtgagccaaaattgcaccactgcacactgcactccatcctgggcgacagtntgagactctgtctca

SEQ ID NO: 576292 - DNA, 773 bp, Homo sapiens
gtggtggtatttatagcttggctttgtactcctcactgtttctgcctacgccacaaatatccatgtttgcctctgagaaatctgtgtggactgaaagcgctgctggctggtgaaatgtaataaagtgtgtatgcttgctagaaaattatttcttggacaataggaacagtcattgatctgtaaatcctggctcttaacagtgagtggccaaggacttgatcagtccatttctcggtccctcagtgcttgtaaaatataagtagcactgcatttgtgatgttgaatatgactctagtgactatgtaggaggcacctctgtgaggagatgctgcttcagtgtacaaagatgctcatggcctgagtcagttgagtcttctttcaggaaaccacttcagagtgaaatatccagggtttccccggcctggacatgtccagcctgtccagggaggacacagtccctggtaagtgccacctcgtgtgggtgagatttcctcctgcgtgatgaactcatcgccatgctctgctgtctcattccatcgagttctccctccctgcttctctgctctcctctgacctcgtccgttctccgctgtccacggatttcatgagcacgttccatgccatcacttggcacccagaagatgtggatggcccctccgggaaatggtgggcgtgattggcggggggtctccagaaatcatccctgctctatgggcttgcaaggtgtgggcaggcattcctgagctgaaagggaagccatgctggcttccggg

SEQ ID NO: 576293 - DNA, 564 bp, Homo sapiens
gtacacgtatctgaaaactggagggcttcaaggctctcatcgcatgctcagtacagcggggctcaggtccgagtgctcctccgcaccaacccaacttccaattatggccacaacaaccgcaccccatgaatttctccgcaaatttcctgccggcaaggtcccagcattatgagggtgatgatggattctgtgtgtttgagagcaacgccattgcctactatgtgagcaatgaggagctgcggggaagtactccagaggacagcagaccaggtggtgcagtgggtgagacttgctgattccgatatagtgccccagacagaacctgggtgtaacccagcttgggcatcatgcaccacaacaaacaggccactgagaatgcaaaggaggaacgtgacggcgaattactggggatagcttggatgcttacttgcagacgaggacattttctggtgggacgaagagtgaccatggctgacactcacagatgtctgcaccctgattgtggatctactaacaggttctaagcctacttaaccgacaggactttccaatacaacgctgatc

SEQ ID NO: 576294 - DNA, 545 bp, Homo sapiens
ggcaggctgaatgtgtgtgtgtgggtgtgtatgtgtggagtgtgagtgtgtgtttccatggtaggactccagtcccagctgctgcctaggctcctgtgggtcctgtgggtccccctcccctgttcaccttccccaacagggctatagtttaagggtgtcccaggccttggctggttggctgggcccagctcctgggggctgggcagggcagggcagggccgggtccacttccattgttagcagttgtttgcagaattttctcttttaccatatcactctcttttagtatctcagccacagaagtggagtggttattcttgattgattgtattaagacttcttcaatagtgaaaaggcacgtatataaaataatcttatagttaactccaccatccccctatgcagggtgtcatatcaccatccacatccacatccttgttgagttactggccctcgtcctccctgactctcatctgactccccaaaccaacactaaccacgtgcatcccaggggtctctccagggaagggggatataggagatga

SEQ ID NO: 576295 - DNA, 656 bp, Homo sapiens
  misc_feature (377)..(377): n is a, c, g, or t
  misc_feature (493)..(493): n is a, c, g, or t
  misc_feature (501)..(501): n is a, c, g, or t
  misc_feature (508)..(508): n is a, c, g, or t
taggaggccaggatgacggcaaacggcagcagcaggatgaccacgcgggcggcgaacatctggttctcggtagtgtctccgtcgcctccgcaggccagcttgagcaacgccggcagctcacagatgaagtggtccagcaggcggggcgcgcacagcggccgctcagccaggagcgcggtttgcgcaaccgagttggtgaggccgcttagccaggaggcgctggccagcgtgcgacataggcgcggggagacgagccccgcatagcgcagcggccggcacactgcggccgcgcggtccagagccatcaccgccaggaggacgcattcggccgaacccagagccagcgatgcgcacagctgggccgtgcagtggctgcncgggagcagagcgcttgtccggcaggttggccacaccggcggaaccaacgctagtaatgaagcccgggtctaccaaggccaggtggagaggaagtatacattggccttttcaagcnccggtcgngcaccgncaggagcacagcggccaattgccggtaagtcaagaggtaccccagagccagggccaataggaccgcttgaggaaggccatcggagaaccccaccggagaagggttcttttggctctaattgccctagggaggcttccgatggttgggc

SEQ ID NO: 576296 - DNA, 368 bp, Homo sapiens
gagaggatccccagttggccagagtagaagcacggttgcagagactgagaagggtaatgggtgcatgagaagatgtggatggttaatgggtacaaaaaagttattaacagaaagagtgaataaggcccaatatttgatagcacaacagggtgactactgtcagtaataatttaattgtacatttaaaaataactaaaagaggccaggcatggtggctcaggcttgtaatctcagcacttggggaggccgaggcaggcagatcacttgaggtcagtagttcaagaccagcctggccaacatagtgaaaccctgtctctacaaaaatacaaaaattagccaagcgtggtggcgggcacctgtaatcccag

SEQ ID NO: 576297 - DNA, 259 bp, Homo sapiens
gggcacaagatcgaaatccctctcaaaaaaaaaagaaagaaaaagaaaaagaatggattaataagagggctgtagtcattcttcctattcaacaaattttaatgggtcaaccacggtttcaggctcttggttctgcatggggtaagttctggcccttttggtggagctaagttaagtaaggggagattaaataatcacccagatacatggtagaattacagctatatatgggtggtgaatggaaggaggaggaggaatg

SEQ ID NO: 576298 - DNA, 506 bp, Homo sapiens
tgggcttgacccaggatttaaaaactggaacggtgaaggtgacagcagtcggtgggagcgagcatcccccaaagttcacaatggtgggccgaggactttggattggcacattggttggttttttaaatagtcattccaaattatgagatgcgtttgtccacaggaagtcccttgccatcctaaaagccaccccatttctctctaaggagaatgggcccagtcctctcccaagtccacacaggggaggtgatagcattggcttccgtggtaaattcatgtaatggcaaaattttttaaatcttcgccttaatactttttaatttggtttaatttggaatgatgagccttcgggccccccctttcccccttttttggtcccccaaactttgagaatgtatgagaggctttgggtcctcccgtgggaagtgggtggaggcagccgagggcttcaccgtgttacactgcacttgagacaccagctgtgaataaagagtgcacacctttag

SEQ ID NO: 576299 - DNA, 452 bp, Homo sapiens
tataatcgggcgctacgttgttaacaggggaagagaattatcataggggagatcaagtggaaagtgggaatcaattctctaggggaactaaaacagaagatggccaaagggtggcaaggaagtgacagcaacatctgcttacaagaagacatctgaaaccttatcccagggcgggacagaaggcctcagcgtgctttttcgtctggtggggtcagtcatcaccaaaaagctggaagatgtaaaagtgcaagccattttcacattcctttggtatacgttccattcagcattcaattagcatgcctgctatgagaaactccccaacttttaaatcatttgaagaacaggtcgaaaacttaaagtctaaagtagggggaaccaagcctgctggtggtgattttggagaagtcttgaattcggctgcaaatgctagtgccaccaccacggagcct

SEQ ID NO: 576300 - DNA, 218 bp, Homo sapiens
cctgataccgaacctgaaagactggctacctcctggggcctttattctgggattatgggcacttattatcatgtctttcttcaaaacttatcgcaattaagcatatgaagttcattttttagggttgacgatgaatgaagaatgcatggaggactgcaaacttggataataatttatgtcattatatatttttaaaaatgtgctcctcttgcatgaat

SEQ ID NO: 576301 - DNA, 445 bp, Homo sapiens
cccacttaagaccccagagccacacagcgccttcatttatttccttagaagataaggtgtgaatgtatgtattattagagtccgaaagctttgtataccggactgtttcccacccacgctggtgagaagacaacatcattgcagaatgattttttttgtgcgggacaatcaagggtactaaaaaaacagtattacggtttatttggagttaactcccttagtaattgctacagcttccataattaactggaggtcagcagtaaaataattttgtgattataacagtaagccaggttcaccagaggaaatgtggaatacctaagtataaagcagcaaagaaatgtcacctgtagtcccattattcagcgggtgagtatataacaacgaaatactttttcatttaccaagtattgtgtcttgcatggattaactcctttattctaac

SEQ ID NO: 576302 - DNA, 106 bp, Homo sapiens
cttctagctcggtaccccacaccacctgagtcacaccaccacaccacctgagtcacctgagtcaataaagtgattggcttagtgggcgaaatattatgctttgttg

SEQ ID NO: 576303 - DNA, 210 bp, Homo sapiens
gactggacgatctctagcaggatccccttgatgaggaatctgtatctagaatgtataacgaacttttaaacactcaatcacaggagcctgggttgtggtggctcatgcctgtaatctcaggcactttgtgaggctgacagtgggagtgatcacctagaagtcaggagttttgagaccagtccttggagtttcatatgcctacatgtagtg

SEQ ID NO: 576304 - DNA, 619 bp, Homo sapiens
tcccttctaacattttgttttgggaggctcttcggggatttggaaaagtatactctgggagtgttaaataaagttttttcccaaaattaaaaaaaaaaaaaaaaaaaaaaaaaaaaaaaaaaaaagaaaaaaaagaaaaaaaaaaaaaaaaaaaaaaaaaaaaagacaaaaaaaaagaaagaaaaagaaacacaaaaaaatagaaaacacggcgggggaccagacaacaaacacacacaggaagcagtgccctaatgagatccctgcgcagcgccatgacatccaagaaggaagaaacaatccacacccagcggcgcacgcgacaccaaaaacaagcacagcagaatggggaaatgaacaagatggacgcagctcgcagcagaaggacgaccacagcagccaatacaacagagaagccactaatcgaaaggaggaccaaaaaataaccatggcgcgcagaaacccaataatcaaccaaatagacaaaaagaaccccacggaagcaaaataaaaccttcaaaccatgacaagacaagtcatccaagaccaacagcccaccaagagagccacgaacccaaagcaaagaccaaccaaacaaggacagcatcacagacaaaca

SEQ ID NO: 576305 - DNA, 157 bp, Homo sapiens
ccccccccccctttttttttggggggcgggttttcaaaaaatttttttttttccccctccccccccggggggaaaaacaaaacaaaggccccttttttttatggaaagggggttttttttaaaaaaaacccaaaaaaaaccccaggcgggtttttta

SEQ ID NO: 576306 - DNA, 142 bp, Homo sapiens
agaatagatttagttatttgtattgcttgatgaataaagcctatccttgaaagctctgcatcatgggcatgtgagctcagtggtatcttggaggacagtgcactgagcctcttgcccatgaatcagagctttcaaggatagg

SEQ ID NO: 576307 - DNA, 235 bp, Homo sapiens
ctgagatggtgccactgcactccagcctgggcaacaaagcgagactctgtctcaaaaaaaaaatttgtgaaggcttctctgatttttttttcccaacagttgtcctgaatctttagcatgtccagtaatttttaaataccttttaataatggtagtaaaaccttaaaattagtgatcttaaccatatttaagtgtccaatagtgtcactattcaaccctatttttcacaacatat

SEQ ID NO: 576308 - DNA, 780 bp, Homo sapiens
gcatgctcagaaaggaaaggctttaaaaacttgaaagaactcggcaaatcggtaccccgcctgttttacccttacatcaccgtctggcatcaccagctattagaggcaccgcctttcccacgtgacatcatgtttagacggccgcggtacctctaaccgtgcatataggtcagcatgaatcacttgttccttaaatagggacctgtaaggagttgctccacgagggttcagctgtctcttacttttaatccatgtgacaatttgacctgtcccgctgaagaggcgggcatgacacagcaagacgagaagaccctatggagctttaatctatattaatgcaaactgtacctaacgaacccacaggtcttctatactacccaaacgcgtgcattgaaaatgttcggtttggggcgacctcggagcagaaccctacctccgagcagtacatgctaagacgttcaccagtcaaagcgaactactatactcaattagatccaataacgttgatcacaacgggacaagttaccgtagggataacagcgcaatcatattctagagtccatatctactataggagtgtacgacctccgatgttggatcaggacatcccgagggtgcagccgctattaaaggttcgtttgttcaacgattaaagtcctacgtgatctgagttcagaccggagtaatccaggtcggtttctcctctatcttcaaattcctccctgtacgaaaggacaagagaaataaggcgtagttgcacaaagcgattgccccctgaat

SEQ ID NO: 576309 - DNA, 178 bp, Homo sapiens
ccgccccgcaagatgatcaaaaggctctctctccgaccagcgcccaggcaatttcggccaccttggccctggcagatccacaatgaggtaattgacgaccaaggacgggccggagcctccacggctgcccgggtgtcttcgccgcgtgtgtattttctgccttttggacttgagatgc

SEQ ID NO: 576310 - DNA, 138 bp, Homo sapiens
atatatgcaatagaagagcatctgccaaccacagaattataaaacatccaaaaagtatgtttgcgacatactaagtactttggtggtggtgtatgagtgaccagaccgagaagtggtagataagattgcggtgtttgg

SEQ ID NO: 576311 - DNA, 409 bp, Homo sapiens
  misc_feature (180)..(180): n is a, c, g, or t
tggaaaggatcaaccatatacaatgtccatttcctgccctctaacctggcaggggagcaagcccagccaaggagttacagaaactgaggcttggccaggcgtggtgctcacacctgcaatctcagcactgggaggccaaggtgggcagatcgcttgagcccaggagtttgagaccagccngaggaacatggcgaaaccccatctctacaaaaaatacagaaattagccaagtgtggtggcacgtgtctgtagtttcagctactcaggaggcttaggtgggaggatcacctgagcctgggaggtagaggttgcaatgagcagagattgctctccagccagggagacagagtgagaccctgtcccaaaataaataaataaataagaataaaatttaaaaaagaaaaaaaaa

SEQ ID NO: 576312 - DNA, 269 bp, Homo sapiens
cccccaccctccaacgaggaagagaatgtgaagcttggcccattgtgaagcacaaggagcagatctgagtgggcaggggccatttccccattccgttgccttggcttgagcatccattgattgttccaaggggcatttcccaagagggcccttacacggtccacctttttaaggtaagggctccttatctaccctcaccccacgggaaagcccttccaggattaccactagggccttgcccaaataggacctcagggcatagcccttaa

SEQ ID NO: 576313 - DNA, 359 bp, Homo sapiens
tccgggtgtttaataaccttcataagtttcccacggctcagactctgggcaaggggtctggggcttccctggactgatggggaggcggatgctacggcccacaacgctcgagcatgaccctgcgacaggtgaccggctttacggtccgcgaccgtagcgccatccagtacgtcacagcgtcatgatgtaccatagactcggcgtaaccaggcctgtcccacgaggaacagactcacacatctgaccagccgttcattgaagctcctagtccgtgcggctgactatggtataacgagctgtcccaccagacagatgtctacagaacgtgcctaatgctccgctctgattgcgtcgctctc

SEQ ID NO: 576314 - DNA, 1197 bp, Homo sapiens
ccgacctctgtttgtgagcgcctccataggtggtgtgcaccactagagtaggcggagggactgtctgtgggtcgttatataatttcttcttcggggcccccacccaccgggtgtttgctgccgcgccccccttttgatgggtgcgccgacgaaagtgggtgagtttgatatgtcccccggatccgtctccacaccagcgggcgtccgccctcttttctgatgaggaggtgagccctcgtgtcaacacggggggttgttctcaaccgcccagtggtagacggttgcagagagccacaaaatacgttgtttatccaagaggggaagggtgtctaaagaggccccccccttgtcacacccccttggggcaaagaaaggaagtcctcttgggggggcccacagtgccgcgggtctaagtgtgttctcctccttgggaggggcgcaccaacgaaaccactttttgtgtgagccgcccccctttcttgtgggccccccccgcgttggcgcctggtgaggcacatattttgggtcgaggacaccgcaaacgacacttggcccctctgtgggggggttttcccaagagctgggcccacccctgtgtcctggccccgcgacccgcggagagggctctctgtgggggtataccccccagccacgggggtgtagggcccccataccccctctgcgagcccccagagtgtgtcccccaaccacggaaccccccgacgccccccctcggggatgtttccctcttctcccctcccgactatccctctggacgcgttttctggcccgctctttccccacagctgggctcttgtgatatctcttgtgatatcccctctctttggggccgtgaagcccagacccgagttctcccccacaggcgcacccccacattttgtgggggacaccctgtgatatttttttagacacaacaatctccccattctccccacacatggtccctctcccccttctcccatagctgcccaacattcttaacaccgccatatgtcgactcttgtgcttgtcttgtttatgttcttgtgtaataaaatggaaattttttggagatgaccccctcccctgtgcccggctggttccttcttccccttttccccctggtcaccggcgtacttcaatggaaccaggacccactaagggaccttcgattaaccacaaaaaagaccaataata

SEQ ID NO: 576315 - DNA, 346 bp, Homo sapiens
  misc_feature (71)..(72): n is a, c, g, or t
  misc_feature (90)..(90): n is a, c, g, or t
  misc_feature (147)..(147): n is a, c, g, or t
  misc_feature (189)..(189): n is a, c, g, or t
  misc_feature (244)..(244): n is a, c, g, or t
  misc_feature (254)..(254): n is a, c, g, or t
  misc_feature (270)..(270): n is a, c, g, or t
ccgtctgggaggaaaaagttggatcaagccagagggaaagaggaacttttgccgccgttgactccccatgnnggatctttgagagacaantttgttgacttggccatcagcaacggacttcactgtggaggatgtggagaccgttcnacttcgtttccgtccatcactcgtctacaccaaaaaacattnggatctgactttcgatcttctcgacaagactttgaagggattgtaatcatttttncttttgtttnctctttaaagctgtanccattttatcttcttcgctgaccatctagcttgttattatttcaaaatataattaataaattaaatattcatttat

SEQ ID NO: 576316 - DNA, 232 bp, Homo sapiens
tcttggattgcttggttaaaaacaccatcaacatcaacaaccattctcctaaccagtcctacaaaaccagatcacataaacaaaatgctgggccggacatggtggcatcacgcctgtaatcccagcactttaggaggtcgaggcaggaggaatgcttgacgcccaggacgtttgacgaccccggcctgggacagcactacgtgagaccccactcatctcacaacacaaaacc

SEQ ID NO: 576317 - DNA, 125 bp, Homo sapiens
cgcgtgtggaagagctgatcggtgcgccgatcgacattattcaacgggcccggaccgcaacgagaccatcgttctgcgtcacccgttcgcgtaataagctgttgatgtgaaaagcaaagggctcc

SEQ ID NO: 576318 - DNA, 861 bp, Homo sapiens
gacagccgagggcactatggcttctggagttacagtgaatgatagaagtcatcaaagtttttaatgatgatgaaagtaaggaaatcttctacacaagaggtagaatcaaaaagagaaagaaagcagttctcttctgtttaagcgatgactgaaagaataaataattgtagaggaagcaaagcagatcttggtgggtgactattggtgatactgtagaggatcgcctacacatctttgtgaagttgctacctctgaatgattgccgatatgctttgtacgatgccaagtagaaaaaaggagtctaagaagagaagacctagtattatagtattctgggcatccgttgaaagtgcacctttagaaaagcaggatgagtttatgctagctctaaagatgccattgaaagaagaacattgtacaggtattaaacatgagtggcaagtaaatggttggatgatattaaggaccggtcgaacttggagagaaatgggaggcaagtagtagttcacttggaggaaaacattataaaatgacagtcaagtgccatctggatcttagcgagcttccatttctccagctcagtgcatcgaatagtattaggtggggcaagggtcgtatttccccctttcactgggccttccaactcatgaatgaggactcgtatttactttaagaggctataagtgattgccttaaactggggaaaactgggtctttttttagaaccaggaagccgtcggggcatttagcacacacggttttgctcctggggagcccaacggtgtggccgcgtggaccagaaaggcaggggcacaagagcggaaaaccggggaaggacacaaatataggaaacgaggagaa

SEQ ID NO: 576319 - DNA, 364 bp, Homo sapiens
  misc_feature (110)..(110): n is a, c, g, or t
  misc_feature (310)..(310): n is a, c, g, or t
tgggcatggctgctcacgcctgtagtcccaacactttgggaggctggggcaggaggatggcttgaggcaggagttcatgaccagcctggacaacatagcaagaccctgtnactaaaaaaaaagaagcagcagctgtgtgtggtgctatgtgcctgtagtcccagctacttgggagcctgaggtgggaggattgcttgagtttgaggctgcagtgacctgtgattgtaccactgcactctattcagcctggttgacggaggaagactctgtctgcaacaacaaacaaacaaacaacaagtgatattgggantaacttagttcgtgcatatgtttttttttaaaaaagagagaacctttgacccac

SEQ ID NO: 576320 - DNA, 138 bp, Homo sapiens
ttagcttggcagttgcttttgatttgattgttttaatgacaatgggtatactaccctatattactcaggttgaaactatttcatttctacacaactattttaaaaattgcctactaggtgaaacataacaataaaact

SEQ ID NO: 576321 - DNA, 273 bp, Homo sapiens
cgtcgacgaaaaaggccagcagacgggctgcctacgactagtatctcttctttgggaaaggatgattaggatatatcactcaatgagttaggaaggggtgtgggcagcgaggtgctgtggaagtttcaggtagtttcggtcccaggcagcactttctacctaaaggggaagaaatgctggtcttactgcaggacagcctcttcacagggtcctcagacttcacgtactccattgctttctccttgtgtgcccttctgcctctttctagtcgac

SEQ ID NO: 576322 - DNA, 1028 bp, Homo sapiens
cagtgccttttgttcccgcgtgatctctccctgttctctctctttcgcagatcggccttctctcgtctcggtgactcctcggggtttctcgaattctggggccaacatgggctccagcaggtcgtgcatgccgcttgtcccttcggggagccttttgtcctatgggccagacctccctgttggccagcgccatccgggggacctggtaccacccactttctggagactgctcctcatttccggggaatttggcctttggttctcccagggggcctcctgagattcaggacagttcgtgcccattaagggccaagtgctcccgtctggtcccttgccccatgtgaagtcactgtgccagcccaggacactggtctcggcccgagaagacctcctttttccaggctttaggtatcacccctaaatctccaggggcacccttgaaatcctgagtgatgtgcagctgatcaagactggagaccaagtgggaccccgcgaagccacgctgctgaacatgcgtcaacatttcccccttgtcctttgggctggtcatccagcacggtgttcgaccatggcagcatttacacaccctgaagtgcttgatatcaccacgaggaaactctgcactttctcgcttcctggaggggtgtccgcacatgttgcccgtgtctgttctgcacgatttggctatccccacctgttgcactcacgtatccccacttctatcactccaccgggtacccaacgagtcctggccttgtctgtggagacggattacaccttcccccttgctgaaaaggtcaaggcctttcttggctgatccatctgcctttgtggctgctgcccctgtggctgctgccaccacagctgctcctgctgctgctgcagccccagctaaggttgaagcccaggaagattcggaggagtcggacgaggatatgggatttggtctctttgactaatcacccaaaagccacccacttagccagttttatttgccaaacacaggaaatataaggcttacttcttta

SEQ ID NO: 576323 - DNA, 367 bp, Homo sapiens
  misc_feature (347)..(347): n is a, c, g, or t
  misc_feature (356)..(356): n is a, c, g, or t
gagggaagggagcggatgctgagagagctcaggaagtgccataggaccactcaccacaccctgttgtcttgaatccctagtgcccacacgcataccactctccagccccagggtccatgcctggacaaggtccaggtcctactcttggagtcctgtgagggcctgtctcccttactgataataatcccccagactcaagggaatccaagggacctgctgatctggcaaccggactcaacctcccaccaccccaacaggtaaagaaaccaaggcacagagaggttaggttcccttctgagggccacacaggaataagttgtacagccaggataaatacccacatactntctcctgangcctggctctt

SEQ ID NO: 576324 - DNA, 166 bp, Homo sapiens
ccgaacatgacatataggcaggatattagtataccaaagcagtaagaatacatatatatatatatatttttttctactctctacactctgtcacccaggttggagtgcaatggcacgatctcagctcactgtagcctctgcctcctggattcaagtgattctcctg

SEQ ID NO: 576325 - DNA, 264 bp, Homo sapiens
aactgggccccttttttttgaaaaaaccaactgaaaaaaaaatgcttccttaaggggtggcagcctttttaacccaaaccttttaaattgggcagaacaaaaaaataaaatcaaaggctggttttggccagatattagggtttcccgccttcatgtgggaatcaaaagcaaaaacaaaataatgtttaaccattttgggcccaaaccttttttggaatgaaactgaaacttaatgaataaaaaaattccttggtccttttttta

SEQ ID NO: 576326 - DNA, 230 bp, Homo sapiens
gtattactttcgagaagtgacgtttctgctctgtcacccaggctggagtgtgtggacaatctcggctcactgcaacctccgcctcccaggttcaagcgattctcctgccccagcctcccgaaaagctggggctacaggacacgcaccaacactgcccggactaacttattttttggtacttttcaggtacgagactgggttttcacccatgactggacaaggctggatct

SEQ ID NO: 576327 - DNA, 373 bp, Homo sapiens
ccgttatcattgaggaggtggaaggatcacttgagccccagaagatgaggttgcaggctgggcatggtggctcacgcctgtaatctcagcactttgggaggccaaggtgggcggatcacctgaggtcaggagttcgagaccagcttgggcaacatagcgagaccttacctccacaaaaaattaaaaaaattacccaggcatggtggtgcttgcctgtagtcccagctactcaggaggctgagttgggaggatcgcttgaacccaggagtccaaggctgcagtaaactatgatcacaccactgcactccagcctgggggacagtatgagacccggtctcaagaaaagaaaagaaagaaagaaattcaccattac

SEQ ID NO: 576328 - DNA, 141 bp, Homo sapiens
tcgagagatggcacgaccctgtatttccctctgcctttacaggcccacgcaccccttcaatgcccaggctggcaggttctggcactgtggatctgcatagtgcatgccactgtcaccggaggtctgagtcggtggcctgag

SEQ ID NO: 576329 - DNA, 376 bp, Homo sapiens
gcgcctcccacttggcttgcgtggctagctgctacaacgattgctttgtatgccacccctactggctggcaactttttcggcaatttgctgcgacgcgagcgcaactgtccctttgtggggacggcgagcttcgcggaccggttctgaccacctccgtgataaagatggactgtgggctgtccttgcctggatctccatcctagccatccgcaagcaaagtgtggagagatcattctcaaagatcattggcaaaagcatggccgggaattacttcaccaggtataattacgaggaggtggaagctgagggcgcaaacaaaatgatgaaggacttggaggtcctgatgatggatcgctcctttgtggtgaagcagtt

SEQ ID NO: 576330 - DNA, 2436 bp, Homo sapiens
tttaagttctcttgcacacccagttcccaggcatggctctccaatctcagctccctcctttctctccggattttaggtggttatgatggatgaccaacctctgacctttgactttcgtactgaggtctcagcctttgcagcttctccctccaaagcagcttttcttctgattcctgatctcagttcagtgctcaaaatagcctctccttattttctcctggtgtcagtgttaggcctgaataacatctcatgctgttcgttaaacagatgtctgctgccaaaaagttgttctgatagaaaatccaaaatcatcgaccccaaaagccaagtctgtcattgggctaaagtgccattcctactaatcctttgcctcacctgattcatttggaataaagggccaggagcttgagtcacccccatgccaggacctctgttgctatttgctggctgctggagaggtggggtcttgcgggccctggagaggtggggtcttgtggggcagagctggagcagatgctgcatccagcagtaagcatgagaatgagcactcacagttttgggtcctgtgctggacactgtgcaagtcctgtgcatatatcacctgttgcatttcccacagtgacccaatgaagtagatactgttatctttaccattttatagatgagcaacctgaggcttcaccagaattgcacagtgagaatgtggcgtggcctggattctcacgtcgggagtcggattgcaaagccttactgggcctcgccgcgccccatggctgtcagcgcattccatgctgacctggccgtgtatgcgtgcgtgtgcacgcatgtgtgtgcgtacgtgcacgtgtgtacatgtgtgtgtgcttgtgtgcacaccacatgtgccgtgtccataggtctgtcatcatatcaggtaggactaggtcggctcatagcttggaagggctttggagacagccactctcctaacagatgggagaagttgttttgattcttactaaggtcccagaatcctattgatggctttgctgagtattgaaaggctggccttaaattaggtttgaaactgaatttggtaataggacaggatgtgttaaggaagggaaacatacagggagctgcctgctctggcagctgttgaaagtgagcaggccacggtgcctgcagtgggagtggggcagcaggcgtgtcaccttgggccagagcacatgtcttgtacacggttgcaccaatgcgtgaggatgtaggtccccaagagccaagagaaggggagctttgttgaatacgtgatattggagaaagctttggcccaaaagaacaaatttagattcgttctctctgcaatacaaatgtattccagtgggtcaaaatgttaattattattaatttctttttttgtttcttgagtcagggtctcgctctgtctcccaggctggagtgcagtggcgccatctaggcttactgcagccttgacctcccgggttcgggtgattctcttgcctcaccctcccgagtagctgggattacaggcacacacctccgtgcccagctaatttttgtacttttagtggagatgggatttcactctgttggccaggatggtcttgatctcctgacctcgtgatccgcccacctcggcctcccaaagtgttgggattacaagcataagccaccatgcccagcagagaattcaaaattcttaacaggatacttataaataaactgtgtaagaaagaagtataaatagtctaaaccagaagaaaaacatttaacttttttttttttcttctgagatggagtttcactcctgttgcccaggctggagtgcagtgacatgatctcagctcactgcaacctccacctccctggttcaagcgattctcctgcctcagcctcccaagtagctgggattacaggcgcccgccaccacacccggctaatttttgtatgtttagaagagatggggtttcaccacattggccaggctggtcttgaacccctgaccttcaggtgattcgcctgccttggcctcccaaagtgctgggattacaggcatgagccatcgtgcccggcaacatttaaacttgactttccatttaataccggtttttttaggtggggcatgatggctctgcaatcccagcactttgggaggctgagaggggtggatcacttgaagccaggagtttgagagcagcctggccaacgtagcgaaaccttatctctactaaaaatataaaaatgagccaggtgtggtggcatatgcctgtgatccccatgacttgggaggctgaggcacaggaattgcttgaacccaggaggcggaggttgcaatgagccgagagcgcgccattgcactccagtctgggtgacaggagtgagaccctcaaaaagaaacccgtttttgtgatgtgttgtcattcttcctgagaattc

SEQ ID NO: 576331 - DNA, 195 bp, Homo sapiens
acgacaggtccagcgccctcaggtctggcaaccactgctacactcagcctcatgagccacttcagaccagccaggatgtcttcccgggccctgccagaccctggtcacattccctctgctggtctgtgctgctctcagaaggccacacgcgcccgcattccactcagccaggatgcagctgcgtttcacttccga

SEQ ID NO: 576332 - DNA, 312 bp, Homo sapiens
acgaccatctccaacctgtatctccttttctccctggagttagtgatacttccatctgcctattcattgacagtaataatttattatcacctttgactgtttttctttctcatttctcacatacaatcatcaaccaagagctgcagattctgtaaactgtttcttcatgttagttgttgagtcaaatatctctcccactaaattatgagttgatacattacgaggagcccatctattatatctttgtttactatgcacagtgcctgacacacagaaggtgttatttttgctattggtgggtcagaagataag

SEQ ID NO: 576333 - DNA, 1506 bp, Homo sapiens
tttttttttttggccccagttcaatgaaggggaccattttatgtaaggctctccagagggcccagggggcctgtgggcgaggaaggctgtgccctttaaaggaaaaaaacaaccttttattgtgacacctttctttcttgtgggacacccgaggttgtgtggggtgtgtacaccacaacttctctctctcttgtgccggccagaggtgtcgacaccagacacccacagagagggtgtagaagaggcagacaccttataaaacacatgtgtgccgcggcaagatatcatatctgtgtgtctccgccagagtgtagcgctatatatctctgtggggacacaaccttgtgtcgggagatagaagacagagcgctctcaagattagtgtggcccacactctcttcgacagaggtcccgcacacacacaacacagagtgtgtgcagagcgtgtgtggacactctctcttctctgtgggaacagtgtgtgtgtcatagtctctgtgagagacaagaatgtgtgcgcgggccactatctctctctccaccacgcgctgttgtgtgtgatgacaccggcaacacactatattatctacaacaacgcgcgctgtgagctgatgagtctaccgaggtgtgcgtaataatattcaccccctctactctgtgatcatcctctagtactgcaacatcttatgtcgtgcgtcctcatgtgaaggacactattctcctctcttccacagagtggagttgtcgtcttcacccttgtgtcgcgctcctttcaagacactcctcttcacagcgcgctgtgctagactgtagggtactaatgtgtcgccaccagagttgtagagaggggcgtcttcttttcatcacaccaaccacgaaggatcaattctcctgctgggacacgcatagttggtcttgctggacggccgctcggttctataccgaagctacttccttcgcgatggcgctgcccggccccccctgtcttgccggcccctgtgttgatcacgcagaccacaccacacgtaaggacgggcggtggtcgctcggtaggcctcccgcctggggctctctctactcaattgaacgcacgcaacggatctcaattctatcagcttttccgcccccggcctctactcgtcctgagtatgaatagggtcagggggggagcgcccaccccccccacgaaaataagcaggtgcctcctatttaaatcgaccgcccggcagcccgtgtcatattacacccccccgacaagaaaggactgctcgattacataaccatgcacgcttggtgacgtcatatacccccaacaacctccacgcgtagtcagcggtatgggtgagagcgatatctcatctacctccctcaccacctcgcagatttcaaatagcatcaagagtcggtggtcgatgattaagagcgagcaaatagtgttagatatcaccaggaggaacactatatagctctgcttatctatctattattagcactatgatcagagcg

SEQ ID NO: 576334 - DNA, 144 bp, Homo sapiens
ggtgcaagaacggaggctgatattggagctttccgtcaatggtccgcaaccgccttcgcattttgagcgccgtggctttgccgctcgctctgctggcatgcgcaaagcgcgatgacgatcgcaatctcgattcgctggataacg

SEQ ID NO: 576335 - DNA, 447 bp, Homo sapiens
  misc_feature (280)..(280): n is a, c, g, or t
ctcgaggccaagatcgagcgtggtgcggatcaggtaaccgccacgggccagctgttccttactgatccccgcgcgcgacaggtactcctgcacataatcgcagaaaaaggcgcgatcgccggcggcgatgcagcccctgggcagttcgttgggctgcggcagaattcccagcggctgggtcttggccgcgcgcagcgcgtcggcctcgccggggatgttctcgatcatcgtgtcgagcaccaggttgcgccgggccagggcgccctcggggttggtgtangggttgagcgcgctggtcgactgcaccatgccggccagcagagccgcctgctgccagttcaggtcgattgcgttgaccccgaagtaggtccgggcagcgtcctggatgccgaacgagttgtttccgaacgagaccaggttcaggtagcgggtgaggatctccggttt

SEQ ID NO: 576336 - DNA, 397 bp, Homo sapiens
atgtccggccaggaagcacacagtgtcggcctgcacacgtccctgttgcaccaggggcaacaggcgctcacgtatgtcactgagtccgcgctcggagccctaacgggccccgtcctggtacaaggacaggagctactgcagatcataggcatcgcgaagaagcagcatagtcagcttgcacaggtcagagtcgaagagcacctacagctccagagtgctatgtccaagcatggcttgcacctcgcacaggtactgctccaggagactgcacacgtcctccatgtccgcgcccatcagggcttgctacacctgcagcaccttgtacaaccgtgctcgcgtatcctactccaacagggtcagttgttcctccagttacgatttgtaggccctctactcc

SEQ ID NO: 576337 - DNA, 310 bp, Homo sapiens
gtataacagattcatcatactggaaaatgagattttacagataaaagttttagtactgtaagttaaatactcaaaactggtggtattcttcatactcacctgacctttatcttcaatcactactcgacatagagctttggcttgtcttccttcagaagactggtggccgttttctcttaatgtgttatgttcattcatattcacatgtcttcttggcttgctgtttacagaattttactcactttaaaaaatgctgacagcctttgccgtatttgcttaccctcttgtgcactgctgcttacttattaca

SEQ ID NO: 576338 - DNA, 250 bp, Homo sapiens
  misc_feature (215)..(215): n is a, c, g, or t
  misc_feature (221)..(222): n is a, c, g, or t
  misc_feature (224)..(224): n is a, c, g, or t
  misc_feature (228)..(231): n is a, c, g, or t
  misc_feature (235)..(236): n is a, c, g, or t
actcatgagggcagcgcctcttaaaggccccacctctgaatactgcaacattggtgtttaaatttcgatgcgagttttgtagtggacagacattcaaaccattgcattgtattagcttcagaacttctcaagtgcacacagagatgatatgattttagcttctgtcactgccactgtggaatgttttagtgcttttcctctctacccagttctcngcaggnncnaccnnnnaccnngccccctgctctca

SEQ ID NO: 576339 - DNA, 345 bp, Homo sapiens
  misc_feature (7)..(7): n is a, c, g, or t
  misc_feature (11)..(11): n is a, c, g, or t
  misc_feature (30)..(30): n is a, c, g, or t
  misc_feature (35)..(35): n is a, c, g, or t
  misc_feature (98)..(98): n is a, c, g, or t
  misc_feature (127)..(127): n is a, c, g, or t
  misc_feature (145)..(145): n is a, c, g, or t
  misc_feature (187)..(187): n is a, c, g, or t
  misc_feature (212)..(212): n is a, c, g, or t
  misc_feature (253)..(255): n is a, c, g, or t
  misc_feature (257)..(257): n is a, c, g, or t
  misc_feature (260)..(260): n is a, c, g, or t
  misc_feature (297)..(299): n is a, c, g, or t
  misc_feature (320)..(320): n is a, c, g, or t
cctcaanaggncattatccgctccctgaantgtcnatgtgagtgagccctgctgatctgggagtacacaaggcagcaggctgttctcgcacggagatncaaagccatgatgtgcctcccttagtganctgctgctgctgttcagncttttttaaaaaaacctatttggactaaagaaacagattctnaaatttattgtgataatttgtattncttttttcttgcaatttaatgccaaaagtttgccatgtgcnnnanacntattactatatattttcccctttaataaacacttttnnnaattgtattcttcctttaatnaaatattttaagcaattgtggaaat

SEQ ID NO: 576340 - DNA, 653 bp, Homo sapiens
atttgttcaagtgtaatgggaggctctggagacctaggccagccccctgagctgcagcctcatggacacgccattcagaagcacgtgtcagtgctctggtcagcttctgtcatgagacacaactttccatgtgaactaagaggataatgacaattgagtgtgacctggaggtcaggcctgcacagctgatttgggaaagatgagtctgggccagatgaaggtaaatgaaactgacgaagggacaaggaaaaccccaaaacagaacgtgaaggatggcaactgctggaaggcggtcaaagcctgtgtgtgaagtaggagaaatctggatgggcttagtccttcttcccttcagaccgcagggtaactaattggcaatttcttttaacactcagcagctacataaatgttttatgtattcacaacaaagtctgtggcaaattgaaactttgatgattatgaaacaccaaagaaagccttattagacaagatgggtttcgtctttcttaaaaaaaaaaaaaaaatgcttttgaatggaactgttgctcatcataacattcaactaaaagtgtgttcctacgtcttgatccttggggctgtaatagtgaagtttaccattagcacgggctggggtagccgccttgaacagttccaca

SEQ ID NO: 576341 - DNA, 1013 bp, Homo sapiens
ggcttgtctttcgcggaatcaccatggcggctgggacccagtacacgtatcctgaaaactggagtgtgccttcaaggctctcatcgctgctcagtacagctggcggctcacggtccgcgtgcgtctccgcaccaccccacttccatatttggccaaaccaacccgaacccctgaatttctccgcaaatttcctgccggcaaggtcccagcatgttgagcggtgatgatggattctgtgctgctttgaccagcaacgccattgcctactatgtgcagcaactgaggagctgcggggaagtactccacgaggcagcagcccaggtggtgcagtgggtgagctctagctgattcctgatctagtgcccccagccagtacctagggtgtacccaccttgggcatcatgcaccacaacaaacaggccactgagacagtgccacaggacggaacgtgacggcgaacttcctgccgcatgactgcgatgctctacctcgacccgcacgacggcaccttccttggtgccgccgaccgagttgacactcgcgtgaaatcacacgatgatccgcaaccccggtcggggctccctataagccaggatacaaagaagccatcacaacagcaggggcaatacccaagaacacacgcacggtccatccaacagcaataaaccaagaccacagaaccaggcctaggccaggcccaaggcaaacgaggtgcgaccacgccgccagcctggacgccaacacacgctggagagaacccaaactaaacaaggacgaccccggacaacaaaggctacggcgccgagaacccaatgcccagcgttgggcggaagcgtcaaaaacgagcggctgcccagggtcaccaccaagcaaacggagtacttgacacagccggtttacagcacacaggccaaggcacaaacgaatcaacccccacaactagcgcggcagcaacccaacacacagacaaattaacacacacacggaaaccaacccagccatgaagacaggat

SEQ ID NO: 576342 - DNA, 1909 bp, Homo sapiens
taccacacactgcttctgaattcttggcacacacaaagctgacctgctagcgatcacgcgctgatagaccccggcaactgctacacgctgtctctggctgcaccacacgcactgacctatcctacaaacgcgcctgcaccactacacatagcgaacccataactgcgcggccagcacgcacgctactacgccacctagaccccacgcatgcctagacactgaaacacaaacctcacccccactctgcgcgcacgcgcctctgcacgcgctaaccacgcgcgcgcacagctgcgcctacctgcctgctctctctctctccacgcctgcgcacacgcccacgccatcaatgcacgcctgcgcgctgcaccacgcgcactgcctctacgcactaaacagcgccatcctaccctctacgcgcgctgctccacctctgactccacctctctgcaccgaacgcacgtgcacccaccaccctcccctctagcccacgccctctgcgcctaacacgcgcgcgcctgccttcggccacgccgccccacccttgcgccacgcgcaacccacctcactacccacaaaccctagatctcacccccatctgcgcgccccttgcactcttccatgccacctactcactccctcgtccgccactgccgccccacgccttcatacctctgacctactccctaccgtctcgctctccttaacatcgacggagaaacaacggtactcaactagcataaactacttacgccaccgcagccggcaccctcggcgcagacacctcacacgccctccgtcccatcaccaaactaacactccgccctctctgcccccctcggatcgcggcacagcaccactactctgagcacaacacacccaccgcctcctctcccgtcccatccctctcccccccaccatactcctcaaactactcacacacaaccactacccaaccatcgtaccactccctacatcatccttccacccttcccctctccaccctatccccttactgccaacccacgccgcacaacctcacgcaacaaccacttcgccgcacccaccctcatcccccctccccttcccccctcactacaccgcatcattcctacttcgcacccaacactcgacaccctaacaactctatcaacccaccaacacacacacacatctagaccacccaactcctcctttctacccgtcttagtctctcccaacccacatctacatcctcttcccctcgccaccccccctccccatctcctctacccactccagcgccctcctgcgcctctcccccatccccccctcttctatccctctctacgaccacacctctacccgcctatcctcgccatatctcaaacataccctaaaccccctctatatgacacactacacaatcatgcacttctctttcacctgtaccaccctacattggcacccatcatctctcacccagccacaccccaccctcagcgcactaacactgccccttgatccacccacacacagacctgcccgccccccgcacaccaccactctacacccacgcacccagacctcgcacatctatcgcccgccgcactctccccaccagcctgccccccactatcccatcctactccgctctctaacacccaacagacacacacccacaacctacacactgctacactaccttaacatcatccaccacagaccatttcaaatcccacaactatcccactatacaattaccacactcacacacccccacatcactcacaccccctcacccacttcatcccacaacatctatcttatccttatacccactccacaccctccctcaccgccctctcccgccccttctcccccctccctcctccccctcgctcccctccccaccttactcaccccccccatc

SEQ ID NO: 576343 - DNA, 208 bp, Homo sapiens
tactgctggtcgctctagagcgatccccttacatccccacgatcactgagataaatgcatatctagattgcttccttaggagaggctaatcagaaactcaaaaggagcgtaaccatttgtctctatatctacctatgacctgtgaagcccctctcccctaattttgctatcaaggttgtcccgtcctttccagcaccgatgccaatgc

SEQ ID NO: 576344 - DNA, 365 bp, Homo sapiens
  misc_feature (23)..(23): n is a, c, g, or t
  misc_feature (26)..(26): n is a, c, g, or t
  misc_feature (91)..(91): n is a, c, g, or t
  misc_feature (122)..(122): n is a, c, g, or t
  misc_feature (216)..(216): n is a, c, g, or t
  misc_feature (218)..(218): n is a, c, g, or t
  misc_feature (239)..(239): n is a, c, g, or t
  misc_feature (356)..(356): n is a, c, g, or t
  misc_feature (362)..(362): n is a, c, g, or t
cgccgcgaggacggccggccgcncantgcacctgatgaagaagcgggagaagcagcgcgacagatggagcagatgaagcagcgcatcgcgnaggagaacatcatgaaatccaacattgacangaagttctctgcgcactacgagcggtggaggcagagctcaagtccagcaccgtgggtctcgtgaccgtgaatgacatgaaggccaagcaggagncnctggtgaaggagcgggagaancagctggccaagaaggagcagttcaaggagctgcagatgaagctggagaagcttcgagagaaggagcgtaagaaggaagccaagcggaagatctccagcctgtccttcaccctggangaggangaa

SEQ ID NO: 576345 - DNA, 400 bp, Homo sapiens
  misc_feature (103)..(103): n is a, c, g, or t
tagtgttatagcagtgctgttgcgcgtggggaggaactgtgaaccctgctgcactgctgctaggaatgtgggatggggccgggcgcgttggtcactgcctgtnatcccagcactttgagaggccgaggtgtgtggatcacgaggtcaggagttcaagaccagcttgtgcaacatggtgaacacccatctctactaagaatatcaaaattagctggacctggtggtgggcacctattatcccagctacttgggaggctgaggccgagcattgcttgaacccgggaggcttatgcggggcagtgagctgagatcgcaccacttgtactccagcctggggcgacagagcgagactcttgtctcaaaacaaacaaaaaaagccccgaaactttacattgtagac

SEQ ID NO: 576346 - DNA, 244 bp, Homo sapiens
agcatgtagagagactatagacatttcgcatcgcattgataggcctgagaatgcagccacgaattagtaaagcgtgaaagcccgacagccatcaccttacagattccagatcatattacttcacactctctcagacccgattggaccattctatcaccctatctaaggtccaggtctgccggaaggtccaggtctgccacaaggtcctggtatgccatactggtccaggtttgccagacggggc

SEQ ID NO: 576347 - DNA, 401 bp, Homo sapiens
  misc_feature (258)..(258): n is a, c, g, or t
gtggtatcccattaaaactcttgttgaaactacagttaacctcctgacaatccagatgatgctcctgctacagcggcacgatggataccaacccgtctctcaagaataccccaaaaattaagtttttctttttccaaggtgcccacgccacccctatgtcacgcctgaagtagttattgagaaagtcgtccctttccccttttctataaccaaatagacaggaatggaagattctcctcggggcctgaaagcttgcgngatgaataactcctcctcctcaggcccagtcccaaggtacaaacttgcaccagcaggcaagataggcagaggcagggaagagagctgggtgggaagacacgttaccccctggaaggttcaaggaggggaggtcgcctgggtta

SEQ ID NO: 576348 - DNA, 1056 bp, Homo sapiens
ccccgcgtcctgttgcgcgtggtgacgggcacctggttggtccctggtatactctggtagcgctgacgtaaagctggagctgcttgagtagcttgcatcctgctactgcgacgttgtgatgagcagcggatcatgccactgtctacgatgctaggtgatctagactctgtttcagaagacaaatgaataagtaaatacaacatatacataacactagttggtctccaattgtaatcagaggcaatgggcgccccgatcattgcaccttattttgacctaatattagttgcttgtgtgccaccgctccacatcctcgggtgatgggctcccgtagtccatgcacattatacaacgtcacgttgatcgtctgtgatcactgcccacgttctccatcgcgtacgttccgtagctgcgacattgttgctgagtacgtggtatgggcaggaaatagggaggtagggaattggagtcaagtgctcatcacgtcatctttcatcagagaaaagttacattcctccatctgctgagatgtcctttctcgttggcaacgctagaggatcatgctctctactctattaccccctttacttctggttgtcctacatctccattttaaactggtgggtccctctaattgacatgtacttagtttattctccttttgggggcaagcatcgctgatccatcaactcacgactaactttaacgctcgttctcccctgttcagatgctggcctaaactgtgagtgtgccttacttcattccttattacgtacgtacaccacttgtttctcttagacctagttatcggcaattcagctgggtctcggacttacgggtggatgcaaaaccttgttaatccccagttcctttctgggccaggccgaagggtggggtgaagctccattgtaatgtccaggcagcttaatgaacgagcctggggcacacctgggtggaagaccctgttctttatccgaacatggctatgtttttaatcgtccatagtggggacttcacctgttctgcccgacttggcgatgtcgaaggaggaacacc

SEQ ID NO: 576349 - DNA, 296 bp, Homo sapiens
tttttttttgataagtctcagatttatgttcgcgactccagaatagtaactgtagaaagaattgtcatatcacctgctagcctgagaatctcatctgatgtcaacggtaagatagcacaggcgcagtaggggcgatctgcttacctgcagcagatgaatcgtctcgaagggtatccctgaacttactctccgttgagcacgcttaatctggttcaagcagtccagggtcacactttccagcgcccttagagagctgcgctaactttcccaagcttgattcccgggcgagcactccc

SEQ ID NO: 576350 - DNA, 117 bp, Homo sapiens
gtggtacatatgtaggtacctacttagtacgttgtgttgtgttgttaggatgggtttgaagtcatccaattgcttacagaggtgttggttagctagaatacatgttctatctcacct

SEQ ID NO: 576351 - DNA, 158 bp, Homo sapiens
  misc_feature (90)..(90): n is a, c, g, or t
  misc_feature (109)..(109): n is a, c, g, or t
tgcgagacgatagtgacctgactaaatcgcgaccatggtgaacggtagacagtgagggtggtgacaccggatgaggcgtgtcagcgggcngacagttacgcaccagccncgtggttaagtaaccatagccgggacctgaatcctagagccaaagcgag

SEQ ID NO: 576352 - DNA, 187 bp, Homo sapiens
catcagccccgagtagctggaacgaggtgccgcacagccggtaattaggtagtagagatggggttcagtggtagccaggatggtcttgatctccggacctcgtgatccacctgcctcgacctcccaaagtgctgggattacaggtgtgaggcaccgtgcctgtccactaattcatattttaaaagag

SEQ ID NO: 576353 - DNA, 592 bp, Homo sapiens
atcatagcctgcacagctaaaatatttataaaccggccctttacagaaagatgtgtgcagatccttcttttacagcccgtgctgtagatattctggcagtacaactcgctagtctatgataatgttcattcattcccatcataaatgtaatcattctaaataggtgtcttctgatgtcatcgctgttacctgattttaaactttttcttcatcttcaacattatcaaagttcatccttatacctcttgccttgatttcggagagtttccaatttatcacttattaaggcagcgattgcttttgcatctctggtatttatctgctcttcttgaaaatttctctttgctctttcgtagaaataaaacttaacagttggataggccctgatcccagctttctggcatgtctgagcataagcctgacagtctacttttccagctttcacttttcctttaatcatcctagccaagagctcaaattctggagcaaaattctggcaaggtccacaccaaggagcatagaaatcaatcacccaatgatttttcccttgtagaactttttcactgaaagtctgaggtgtcagatctgtgga

SEQ ID NO: 576354 - DNA, 275 bp, Homo sapiens
aggttgcacgcatgagccatcatgctcagcctctgttcatctttctacattgaggttttgtttttgtttcttcatattgtaaaatctctgatgacttatcttcaagtttactgatccaaatcaaatccactgttgaggccatctcatgaatttttcattttagttattgtgcttcttcacttgattccatttgggttcttttaaatattgtctattttataaatcacccattattatacccttcccttaatttttaaaacatggcttttctttag

SEQ ID NO: 576355 - DNA, 962 bp, Homo sapiens
agcgggttctcaacatcagagggtccaggcccgaccctgacagagtatgggggctccgggaagcagagcgctgcgatggagtggtctgctgggcctctacttcctcagccacatccccatcaccctgatcatggacctgcagggcggtgatggcgtgcgagctctacccaagttgcaacgcttggagagaaagcctgtctgtacagctgcgtagtggctcaaaggagattcacaatacctcacgtgttttacatggagcccccaggcctggctatttaaggtactttctgattattgaccagcagctcaggtgtattcaggcgtgccttatcttttaccctcattagcaacggttagtgccttcctcaataggttggataaatggtgggggaaacatcccattaattgactcacgtaaatcaggtcccacaaatctgtcaggcgacaggtatctccaaagcggaagtggcgatggatccccatacgctcttgtagtggagaatgctaccatggactcttggtggtaaatacgccagagtagatctttgcctagaacgggacatcacgtgtggcgtcacgctcactgtctgtggtcaccaggcctgcactgctgccggcacgtcgtactgggaataagtaccatatgtcggtgaactacatgaaagccctgcacgacatacatgtgaatgcaaatgacgctatggttccctcttggggtgagttcccgccagacacgaccttggattctctcttttatgcggcctatatactattcctcatggcgtcaggcctatgtatccatacaagagctgtactaaacgctggaaggaaacagcggctaaatccctataatgttgcttactcatacttcaacctctctctacctgtgcccatctcactcaactgctcttctacacacagcgtgacccccgcccaccaactccacatgccaaacacactgc

SEQ ID NO: 576356 - DNA, 818 bp, Homo sapiens
gctgaggcgtgagtatctagctgactgggcctgggaacgtaaaagtcattctttgtcctccaagggttaatcactgacaggcaggagatatgggtgtcatatgtacctggttttaagtcctgcctctgccccttggtgttaggtgtcttttttattgttatattttgttattgcgaaaatcggagtatcatggcatcggtgataacccaaggatggggtaacagggggccgagactacagggcattcactggcagcattcaaccactcctgtgggcccaaagcaactccctcgccagatgtcaggcctccgtgaggttagcgtgaggactacaggttgcaacgccaccacctcgcgtggcccaggccttcgttaccaaactccttttctagagacaatgtggaataccaatctaccgactgtggctcgtgtattacacgcgtgggcccacatataacgagcgcctctcgatcggctaccaatctatctatatattacataatttaaatgttaccacagcgtggacaccaaagtgcttatctttacccacaccgtggggtacaacaagtgccacacgctaacagtgggctctggggaatttccgcacagagacagagcaccgggggtttctaagagttcccttaaatttcacacaccaactgtttaccctagccgtgtgtgtgagaacctgtcgtggaaaggatcaactacagcagatatacagtgggggggctcaaatataaatcgtggttacccatggggcacagcattctaccctcgataagggggcccattggggtgagagacgtcgcaaattag

SEQ ID NO: 576357 - DNA, 744 bp, Homo sapiens
gctctttcccttcggtgtgccactgaagatcctggtgtcgccatgggcgccgcccgcccgtggtaccggtatgtaagaacaagcggtacccaaagtctcgcttctgccgaggtgtccctgatgccaagattcgcattttgacctggggcggaaaacggcaaaagtgatgagttccgcttggtggccacatggtgtcagatgaatatgagcagttgtcctctgaagccctggaggttgcccgaattgtgtgccaataagtacatggtaaaaacgtgtgtggcaaagatggcttccatatccgggtgcggctccaccctttccaatgtcatcgggatcaacaagatgttgtcctgtgctggggttgacaggctccaaacaggcatgcgaggtgcctttgaaaagccccagggcactgtggccaggttcacaatgtgccaagttatcatgttccatccgcacaatgttgcagaacaagggagcatgtgattggaggccctgcggagggccaagttcccagtttcctgggccgcccagaagatccacatctcaaagaagtgggggctttcaccaagttccaattgtggatgattttgaacgacctggtgtgtctgaaaagcggtcatccaagatggtgtggggtcaagtacatccccaggtggtggcctctggacaagtggggggccttgaatcatgagggttcatgtgtggccccttttaatattaccataatttattctgtctctt

SEQ ID NO: 576358 - DNA, 1991 bp, Homo sapiens
ggcaggcgacggccgatgttcgtgcccatcgtggccaccggtacccgcttgaggcgccattcgagccttgcacgggagcgatacttggatggcatggagatctggcatgcaggcattgacgtcaatctggcccgtcgtagctgagtaatgtctcaccttgtgtaaggatgcgccatggccatccatggcaacccccgagaagctcctctcgctggttcgtggcgtgcgtctccggtcaacgagcggcataggagacgtggtctacaacgggactgactcgcgcagcttcagttctcgtccagcacgtagtggactctgcgcagcctagtgtctactagcaggatagcgcagcgacacgatttctggcgcagtcaactgaagaccgaaactcgacggctaggagcacgcgcacagctggagattggcttcgtgcgaatttgatggaacacactcgaaacaacggggacgcggataagccttacaggcaatgtgcagaatggcgctaagggagatgcgtaataggcgcgtacgccaataagattaatccgtgtatctacgcaatgtggcatctaattcgctttgaggttgttgcacagattccaggcagtcttattcgaagtacaaattaactacatccaggccttatcctgaatgggaagatcaatgcgaggcgtaggtgttaatgctagacgctggagtgacaaacccacagtgggatcttcgcagacgggggttcgcacccacaggtttacgtggcgccttagggtggaaaaggggtagggcggccatgttcccactgaacgaacgaactacaaatagacggatgagtactacaaattctgcaattcggatcagcccgatgcagggagcacaaacacacgcaaaagaaatatatccacggtgtagagcacagactggaccttcgagccgtcggcacactattagacggaacgtagattagggcggacaatgaggagagaggacacatcgcacccagccagatccaaaaggagcaccagagaccaaatagaggaggacaagaggacgaactaaaccagaaaacacaaccaaggcaacacaggcagaccacgtcgcaaaacttaggactcacaaatctcccagcggcgatagtcacacacaaaaggcgacctaaacacaggaatcgcacaccctagcgacgacaccacaacagctccctagagcagcacacgaaaagaacacgaacgatgcgcaccaaaaagcaagggaaggaccgggcgacaaatcacaacttatcacaaattcgtgcgaaactgtacgaacacgtcactagctataggatcaagagcagacgcaaagcagatataacaaacacccgaccgtgaagagatagttagccgtataacaagactgacgcgcaacccacaataggaacgtagacaggaaaattgcgacattcggacacgtcgcaagcaccacacagaggaggcaacagagacaggcacacagcacagacaaaccagaagcgagcaccattacgatatgaaagaaaacacatggacaaaacaacaaggaggaaaactaccagaagataacgagcaacctaacaacatataagacaatatcgaacacacaacaacaaagatagacatatagaaagatatcacacacataaacaacacacatattacgtcacaccaaatattcaatgataacaaactaaacaataagattgctaacatacattacaaattcaatcactactgaccccaagacaacgcagaactctaaacaaactgtattaagcaacggcctcacaaacagcgacaacggaaaaaaaacataagcgataacaaacgataatcctcaacttactcaataacacacatttcactaatcgcatatgaacatatatcatgtaccaatttgacaagagaatcactacaaacacaaagcacacaactaacagagacttatcataaacacagcaaatcgaacatcagccataacaa

SEQ ID NO: 576359 - DNA, 273 bp, Homo sapiens
  misc_feature (7)..(7): n is a, c, g, or t
  misc_feature (61)..(61): n is a, c, g, or t
  misc_feature (67)..(67): n is a, c, g, or t
  misc_feature (147)..(147): n is a, c, g, or t
acggttnagcaattacccaggggtaccattagtggtgccttccaggataagacattgttgnatacanggtcttgcggatatcaatgtcacactccatgaaacaacttacaatagcatcatgaagtgtgacattgatatccgcaagancctgtatgccagcagattccataccaatgaagctattgtaagttgtttcatggatgccagcagattccataccaatgaaggagggctggaagagtgtctcaggacagcggaagcgctcatcactat

SEQ ID NO: 576360 - DNA, 223 bp, Homo sapiens
  misc_feature (7)..(7): n is a, c, g, or t
  misc_feature (61)..(61): n is a, c, g, or t
  misc_feature (67)..(67): n is a, c, g, or t
  misc_feature (147)..(147): n is a, c, g, or t
  misc_feature (173)..(173): n is a, c, g, or t
  misc_feature (175)..(175): n is a, c, g, or t
  misc_feature (178)..(178): n is a, c, g, or t
acggttnagcaattacccaggggtaccattagtggtgccttccaggataagacattgttgnatacanggtcttgcggatatcaatgtcacactccatgaaacaacttacaatagcatcatgaagtgtgacattgatatccgcaagancctgtatgccaacaatgtcttatctngnggnacactatgtaccctggtttttctgatcggtattgcagagggaatt

SEQ ID NO: 576361 - DNA, 447 bp, Homo sapiens
  misc_feature (36)..(36): n is a, c, g, or t
  misc_feature (74)..(74): n is a, c, g, or t
  misc_feature (99)..(99): n is a, c, g, or t
  misc_feature (108)..(108): n is a, c, g, or t
  misc_feature (204)..(204): n is a, c, g, or t
  misc_feature (282)..(282): n is a, c, g, or t
  misc_feature (285)..(285): n is a, c, g, or t
  misc_feature (287)..(287): n is a, c, g, or t
  misc_feature (291)..(291): n is a, c, g, or t
  misc_feature (293)..(295): n is a, c, g, or t
  misc_feature (297)..(297): n is a, c, g, or t
  misc_feature (299)..(301): n is a, c, g, or t
  misc_feature (305)..(306): n is a, c, g, or t
  misc_feature (308)..(308): n is a, c, g, or t
  misc_feature (310)..(311): n is a, c, g, or t
  misc_feature (314)..(315): n is a, c, g, or t
  misc_feature (320)..(320): n is a, c, g, or t
  misc_feature (323)..(323): n is a, c, g, or t
  misc_feature (326)..(326): n is a, c, g, or t
  misc_feature (328)..(328): n is a, c, g, or t
  misc_feature (335)..(336): n is a, c, g, or t
  misc_feature (340)..(341): n is a, c, g, or t
  misc_feature (416)..(416): n is a, c, g, or t
gctgtgtgcatcagtggagatgtgagaccgtaaganattatccaggacttgctggcccatgcggggctttttcngactgcacggagagggcacctgggnccttttggnacccatacaggtccctggctgttggccctgatacacacggaaaacctttttcatggcggtggaaacagctgcggtgtgaaattcctcctgcgtcancagcgagcacctggtggtacggtggtcactggggtctgcccttccaaggccagcccatatacttgatatgtcagcttnatntnacanannntntnnncaanntncnnaanntgccngangtncntggctgnnaggnncccagcccaacgctgtagttcctgcagcagcggccttgcgctgaagctgctctgagggctcccaggtcacggacnggaactcccacagtcctgccagcagacctga

SEQ ID NO: 576362 - DNA, 767 bp, Homo sapiens
  misc_feature (219)..(219): n is a, c, g, or t
agcgtgggtatttctcaactgtgactaactcctaagtactcctaattataactgcctttagatcacacgataagtattcacctgtgtagcctagagcgttcatgagattttctcaccccatcattcgttccccttattatatagacaggactgtttccgctatgtgtgactacatgacctacgtgtgagactagtgaagactacacttgacaccatagntgctacattgctaggtatggtaatctacttcttagaaaattggtacttgactcaagatatccgttaccttgcagaattcgacaggatacttgacttatattagacaactcgatttgagcctaatgttgactgttcttacatttgcataatatacgcacttttgggttgatgaggttgccctcatgtctgtagttaccagaagagagcttgcaaagtaggtctttaactattcttgagcccactggaacgggtcagattcctgagacacaggctacctcttgattcgacgacgtctcaatatctatccgcatgggaagttcaagtagcgaggtgactttcaccatatccttctgaggcgttataacttcccttctatttcacaaaagagccagtgttcttttaagggtagccccttattcttacaaaagccagatttaaaagcgaccttgtagttcttgccccttctacacgacacggctacaggaaactttcgatctcatcgatcgccatactctagactacagatacctttgcacaacggtaccctc

SEQ ID NO: 576363 - DNA, 238 bp, Homo sapiens
gcacaagcaaaactctcatatgattccattgcttaaatttattcctgggagatctgctgtgtagtaccaaaattggaaatgacgaaaagaaaaaaccaataatttatagatgaatcaaagaatgatttgttcggcagcttgcaatcctcgaacttcaagaaagtcgttaattgacattttggtctccagtttttattgctctgatgtcaccacatctgtacccttctgtcgtcttctc

SEQ ID NO: 576364 - DNA, 133 bp, Homo sapiens
gtattgctccaccgcatcagcctgggtgacgagtgagactgtgtcacaaaaacacaaaaaaaaaaataacccaaacaccacccactttagggaaaaaaatttttccaggactcactggcgctgaaattggggg

SEQ ID NO: 576365 - DNA, 959 bp, Homo sapiens
agcgggcttttcccaccccctagcgccgctgggcctgcaggtctctgtcgagcagcggacgccggtctctgttccgcaggatgagggtaaaactgattattatgctcggaaacgcttggtgatacaagataaaaataaatacaacacacccaaatacaggatgatagttcgtgtgacaaacagagatatcatttgtcagattgcttatgcccgtatagagggggatatgatagtctgcgcagcgtatgcacacgaactgccaaaatatggtgtgaaggttggcctgacaaattatgctgcagcatattgtactggcctgctgctggcccgcaggcttctcaataggtttggcatggacaagatctatgaaggccaagtggaggtgactggtgatgaatacaatgtggaaagcattgatggtcagccaggtgccttcacctgctatttggatgcaggccttgccagaactaccactggcaataaagtttttggtgccctgaagggagctgtggatggaggcttgtctatccctcacagtaccaaacgattccctggttatgattctgaaagcaaggaatttaatgcagaagtacatcggaagcacatcatgggccagaatgttgcagattacatgcgctacttaatggaagaagatgaagatgcttacaagaaacagttctctcaatacataaagaacagcgtaactccagacatgatggaggagatgtataagaaagctcatgctgctatacgagagaatccagtctatgaaaagaagcccaagaaagaagttaaaaagaagaggtggaaccgtcccaaaatgtcccttgctcagaagaaggatcgggtagctcaaaagaaggcaagcttcctcagagctcaggagcgggctgctgagagctaaacccagcaattttctatgattttttcagatatagataataaacttatgaacagca

SEQ ID NO: 576366 - DNA, 865 bp, Homo sapiens
  misc_feature (3)..(5): n is a, c, g, or t
  misc_feature (7)..(8): n is a, c, g, or t
gcnnncnnctactactactaaattggcggccgctcgacaaataaatacaacacacccaaatacaggatgatagttcgtgtgacaaacagagatatcatttgtcagattgcttatgcccgtatagagggggatatgatagtctgcgcagcgtatgcacacgaactgccaaaatatggtgtgaaggttggcctgacaaattatgctgcagcatattgtactggcctgctgctggcccgcaggcttctcaataggtttggcatggacaagatctatgaaggccaagtggaggtgactggtgatgaatacaatgtggaaagcattgatggtcagccaggtgccttcacctgctatttggatgcaggccttgccagaactaccactggcaataaagtttttggtgccctgaagggagctgtggatggaggcttgtctatccctcacagtaccaaacgattccctggttatgattctgaaagcaaggaatttaatgcagaagtacatcggaagcacatcatgggccagaatgttgcagattacatgcgctacttaatggaagaagatgaagatgcttacaagaaacagttctctcaatacataaagaacagcgtaactccagacatgatggaggagatgtataagaaagctcatgctgctatacgagagaatccagtctatgaaaagaagcccaagaaagaagttaaaaagaagaggtggaaccgtcccaaaatgtcccttgctcagaagaaggatcgggtagctcaaaagaaggcaagcttcctcagagctcaggagcgggctgctgagagctaaacccagcaattttctatgattttttcagatatagataataaacttatgaacagca

SEQ ID NO: 576367 - DNA, 772 bp, Homo sapiens
tacctcccgcgcagtgaggttggcacagccaaccgtctgtggctcgcttggttcccttagtcccgagcgctcgcccaactgcagattcctttcccgtgcagacatggacttctgcgccactcaccagcaccgccgtgacaagatgtggacatacatgggctggaacaggcctggattgatccagaacattctccgacgggaagaacttgaaaaaactttggtggaatcttccatttgtgggaacgcccatctgcattgcctttaattttcggggcaacgactacaaacacactgtcggaatgtgcgggtccctcctttttgaccactggccttgtggccaagtgccagccgaccactcaatccattgccttttcacaagcgtcaaaccttacccaagggcgagaaacattcttgggggctctctggaaacggccacacgcaggggccttgacacccgcattgttcccataagctgaaacccaccaggctttgtgtgcggcgctctccctttggacggggcaagggacacgacttccagggccgctggggagacaatcatttgggccacactcacatttgcggattccaggtttccatttcgacccatgtgcaccccatcttaattgagcgcacccctcacaggtcccttttcttaattgggcatggcgaaccgtccaatttcctatggtaggcccaaagaaagggaacgttgttggcccaataatttctccccaatgtgggcttgggaagcacggtatttggcccgcaaaaa

SEQ ID NO: 576368 - DNA, 907 bp, Homo sapiens
agcgggcttttcccaccccctagcgccgctgggcctgcaggtctctgtcgagcagcggacgccggtctctgttccgcaggatggggtttgttaaagttgttaagaataaggcctactttaagagataccaagtgaaatttagaagacgacgagagggtaaaactagagggggatatgatagtctgcgcagcgtatgcacacgaactgccaaaatatggtgtgaaggttggcctgacaaattatgctgcagcatattgtactggcctgctgctggcccgcaggcttctcaataggtttggcatggacaagatctatgaaggccaagtggaggtgactggtgatgaatacaatgtggaaagcattgatggtcagccaggtgccttcacctgctatttggatgcaggccttgccagaactaccactggcaataaagtttttggtgccctgaagggagctgtggatggaggcttgtctatccctcacagtaccaaacgattccctggttatgattctgaaagcaaggaatttaatgcagaagtacatcggaagcacatcatgggccagaatgttgcagattacatgcgctacttaatggaagaagatgaagatgcttacaagaaacagttctctcaatacataaagaacagcgtaactccagacatgatggaggagatgtataagaaagctcatgctgctatacgagagaatccagtctatgaaaagaagcccaagaaagaagttaaaaagaagaggtggaaccgtcccaaaatgtcccttgctcagaagaaggatcgggtagctcaaaagaaggcaagcttcctcagagctcaggagcgggctgctgagagctaaacccagcaattttctatgattttttcagatatagataataaacttatgaacagca

SEQ ID NO: 576369 - DNA, 1576 bp, Homo sapiens
  misc_feature (799)..(799): n is a, c, g, or t
agcgggcttttcccaccccctagcgccgctgggcctgcaggtctctgtcgagcagcggacgccggtctctgttccgcaggatggggtttgttaaagttgttaagaataaggcctactttaagagataccaagtgaaatttagaagacgacgagagggtaaaactgattattatgctcggaaacgcttggtgatacaagataaaaataaatacaacacacccaaatacaggatgatagttcgtgtgacaaacagagatatcatttgtcagattgcttatgcccgtatagagggggatatgatagtctgcgcagcgtatgcacacgaactgccaaaatatggtgtgaaggttggcctgacaaattatgctgcagcatattgtactggcctgctgctggcccgcaggcttctcaataggtttggcatggacaagatctatgaaggccaagtggaggtgactggtgatgaatacaatgtggaaagcattgatggtcagccaggtgccttcacctgctatttggatgcaggccttgccagaactaccactggcaataaagtttttggtgccctgaagggagctgtggatggaggcttgtctatccctcacagtaccaaacgattccctggttatgattctgaaagcaaggaatttaatgcagaagtacatcggaagcacatcatgggccagaatgttgcagattacatgcgctacttaatggaagaagatgaagatgcttacaagaaacagttctctcaatacataaagaacagccttaatggaaaaaaaaaaaaaaaaaaaanaaaaaaaaaaaaaaaaaaaaaaaaaaaaaaaaaaaagaaaaaaaaaaaaaaaaaaaagaaaaaaaaaaaaaaaaagaaaaagccacgccaaaccgcaaaaaaggaaaaaaaacagaacagagaagagaagggaggagaaggagaaagagaaaggcgggcgaggagacggaagaaacaagagagggaggcgagggggggagcgagagcgtagcgaaccggcgagagaaggaaggcagcacgaaggggacagaagggagaaaggaacagagcgaaggggtgcagtgctggcggcgtagcgggagaggagaaaggggagtagacaagagaagggaagaagaggagacagaaggaagactaagcagaagacaagacgaggaagagaaagggaagcagaggaagactacagaggggaaaagagggagaggacgggagacacaaaaaggagacggacagaacaagagagaaagacgacggagagactgagacgacggcaggaaaagaacggagcaagaaagacgaaaagcagggcgggagagacacaaacacgcaagaaaaagaagagcacaagagaaggaaagtgatgatggtggttgagaggagagggagggtgggagaggcgatgggggagagaggaaggcgagggtggggggaaagaaggggaggaaaggaggtaggaaggcggaggcgaaagtcgagggaggcgagatgggagaggcgagggaggaggagatgagagagagatggaagggaagtagaaggagggaaagaaagagggaa

SEQ ID NO: 576370 - DNA, 969 bp, Homo sapiens
agcgggcttttcccaccccctagcgccgctgggcctgcaggtctctgtcgagcagcggacgccggtctctgttccgcaggatggggtttgttaaagttgttaagaataaggcctactttaagagataccaagtgaaatttagaagacgacgagagggtaaaactgattattatgctcggaaacgcttggtgatacaagataaaaataaatacaacacacccaaatacaggatgatagttcgtgtgacaacagcgtatgcacacgaactgccaaaatatggtgtgaaggttggcctgacaaattatgctgcagcatattgtactggcctgctgctggcccgcaggcttctcaataggtttggcatggacaagatctatgaaggccaagtggaggtgactggtgatgaatacaatgtggaaagcattgatggtcagccaggtgccttcacctgctatttggatgcaggccttgccagaactaccactggcaataaagtttttggtgccctgaagggagctgtggatggaggcttgtctatccctcacagtaccaaacgattccctggttatgattctgaaagcaaggaatttaatgcagaagtacatcggaagcacatcatgggccagaatgttgcagattacatgcgctacttaatggaagaagatgaagatgcttacaagaaacagttctctcaatacataaagaacagcgtaactccagacatgatggaggagatgtataagaaagctcatgctgctatacgagagaatccagtctatgaaaagaagcccaagaaagaagttaaaaagaagaggtggaaccgtcccaaaatgtcccttgctcagaagaaggatcgggtagctcaaaagaaggcaagcttcctcagagctcaggagcgggctgctgagagctaaacccagcaattttctatgattttttcagatatagataataaacttatgaacagca

SEQ ID NO: 576371 - DNA, 1514 bp, Homo sapiens
  misc_feature (737)..(737): n is a, c, g, or t
agcgggcttttcccaccccctagcgccgctgggcctgcaggtctctgtcgagcagcggacgccggtctctgttccgcaggatggggtttgttaaagttgttaagaataaggcctactttaagagataccaagtgaaatttagaagacgacgagagggtaaaactgattattatgctcggaaacgcttggtgatacaagataaaaataaatacaacacacccaaatacaggatgatagttcgtgtgacaaacagagatatcatttgtcagattgcttatgcccgtatagagggggatatgatagtctgcgcagcgtatgcacacgaactgccaaaatatggtgtgaaggttggcctgacaaattatgctgcagcatattgtactggcctgctgctggcccgcaggcttctcaataggtttggcatggacaagatctatgaaggccaagtggaggtgactggtgatgaatacaatgtggaaagcattgatggtcagccaggtgccttcacctgctatttggatgcaggccttgccagaactaccactggcaataaagtttttggtgccctgaagggagctgtggatggaggcttgtctatccctcacagtaccaaacgattccctggttatgattctgaaagcaaggaatttaatgcagaagtacatcggaagcacatcatgggccagaatgttgcagattacatgcgctcttaatggaaaaaaaaaaaaaaaaaaaanaaaaaaaaaaaaaaaaaaaaaaaaaaaaaaaaaaaagaaaaaaaaaaaaaaaaaaaagaaaaaaaaaaaaaaaaagaaaaagccacgccaaaccgcaaaaaaggaaaaaaaacagaacagagaagagaagggaggagaaggagaaagagaaaggcgggcgaggagacggaagaaacaagagagggaggcgagggggggagcgagagcgtagcgaaccggcgagagaaggaaggcagcacgaaggggacagaagggagaaaggaacagagcgaaggggtgcagtgctggcggcgtagcgggagaggagaaaggggagtagacaagagaagggaagaagaggagacagaaggaagactaagcagaagacaagacgaggaagagaaagggaagcagaggaagactacagaggggaaaagagggagaggacgggagacacaaaaaggagacggacagaacaagagagaaagacgacggagagactgagacgacggcaggaaaagaacggagcaagaaagacgaaaagcagggcgggagagacacaaacacgcaagaaaaagaagagcacaagagaaggaaagtgatgatggtggttgagaggagagggagggtgggagaggcgatgggggagagaggaaggcgagggtggggggaaagaaggggaggaaaggaggtaggaaggcggaggcgaaagtcgagggaggcgagatgggagaggcgagggaggaggagatgagagagagatggaagggaagtagaaggagggaaagaaagagggaa

SEQ ID NO: 576372 - DNA, 791 bp, Homo sapiens
agcgggcttttcccaccccctagcgccgctgggcctgcaggtctctgtcgagcagcggacgccggtctctgttccgcaggatggggtttgttaaagttgttaagaataaggcctactttaagagataccaagtgaaatttagaagacgacgagagggtaaaactgattattatgctcggaaacgcttggtgatacaagataaaaataaatacaacacacccaaatacaggatgatagttcgtgtgacaaacagagatatcatttgtcagattgcttatgcccgtatagagggggatatgatagtctgcgcagcgtatgcacacgaactgccaaaatatggtgtgaaggttggcctgacaaattatgctgcagcatattgtactggcctgctgctggcccgcaggcttctcaataggtttggcatggacaagatctatgaaggccaagtggaggtgactggtgatgaatacaatgtggaaagcattgatggtcagccaggtgccttcacctgctatttggatgcaggccttgccagaactaccactggcaataaagtttttggtgccctgaagggagctgtggatggaggcttgtctatccctcacagtaccaaacgattccctggttatgattctgaaagcaaggaatttaatgcagaagtacatcggaagccctcaggggcccaagtggcgattactgcgccacttactggaccaatgacctctctcaaaacagttccccaccttagaaggatcccacacctggggatgtcagcctccggtacacccgcc

SEQ ID NO: 576373 - DNA, 1002 bp, Homo sapiens
agcgggcttttcccaccccctagcgccgctgggcctgcaggtctctgtcgagcagcggacgccggtctctgttccgcaggatggggtttgttaaagttgttaagaataaggcctactttaagagataccaagtgaaatttagaagacgacgagagggtaaaactgattattatgctcggaaacgcttggtgatacaagataaaaataaatacaacacacccaaatacaggatgatagttcgtgtgacaaacagagatatcatttgtcagattgcttatgcccgtatagagggggatatgatagtctgcgcagcgtatgcacacgaactgccaaaatatggtgtgaaggttggcctgacaaattatgctgcagccaagtggaggtgactggtgatgaatacaatgtggaaagcattgatggtcagccaggtgccttcacctgctatttggatgcaggccttgccagaactaccactggcaataaagtttttggtgccctgaagggagctgtggatggaggcttgtctatccctcacagtaccaaacgattccctggttatgattctgaaagcaaggaatttaatgcagaagtacatcggaagcacatcatgggccagaatgttgcagattacatgcgctacttaatggaagaagatgaagatgcttacaagaaacagttctctcaatacataaagaacagcgtaactccagacatgatggaggagatgtataagaaagctcatgctgctatacgagagaatccagtctatgaaaagaagcccaagaaagaagttaaaaagaagaggtggaaccgtcccaaaatgtcccttgctcagaagaaggatcgggtagctcaaaagaaggcaagcttcctcagagctcaggagcgggctgctgagagctaaacccagcaattttctatgattttttcagatatagataataaacttatgaacagcaactaaaaaaaaaaaaccaaactcgagactagttctctctctcc

SEQ ID NO: 576374 - DNA, 120 bp, Homo sapiens
gtataactcacatcatcttcacaaagcagtttctctgttccccatgattctcctataaggtaagggtacctgagctcgcaattctgtaatcacaggtcatatgctagtttacctgtgtag

SEQ ID NO: 576375 - DNA, 183 bp, Homo sapiens
atgtggtcatatcacaggaatactatgcagcactgaaactgatgagtcatgtccttgtagggacatggctgaattggagacatcattctcagttgaaactatcacatggcacactcaatagccgccatctgctgccctacttctagccttgacagttcatcaagttatgtcctcacatggtca

SEQ ID NO: 576376 - DNA, 722 bp, Homo sapiens
ccagtctgggctacagagagaggctgtctcaaaaaataaattaagtagccgggcatggtggctgatgcctgtaatcccagcactttgggaggccaagtggaggtgactggtgatgaatacaatgtggaaagcattgatggtcagccaggtgccttcacctgctatttggatgcaggccttgccagaactaccactggcaataaagtttttggtgccctgaagggagctgtggatggaggcttgtctatccctcacagtaccaaacgattccctggttatgattctgaaagcaaggaatttaatgcagaagtacatcggaagcacatcatgggccagaatgttgcagattacatgcgctacttaatggaagaagatgaagatgcttacaagaaacagttctctcaatacataaagaacagcgtaactccagacatgatggaggagatgtataagaaagctcatgctgctatacgagagaatccagtctatgaaaagaagcccaagaaagaagttaaaaagaagaggtggaaccgtcccaaaatgtcccttgctcagaagaaggatcgggtagctcaaaagaaggcaagcttcctcagagctcaggagcgggctgctgagagctaaacccagcaattttctatgattttttcagatatagataataaacttatgaacagcaactaaaaaaaaaaaaccaaactcgagactagttctctctctcc

SEQ ID NO: 576377 - DNA, 724 bp, Homo sapiens
  misc_feature (398)..(398): n is a, c, g, or t
  misc_feature (433)..(433): n is a, c, g, or t
  misc_feature (493)..(493): n is a, c, g, or t
  misc_feature (535)..(535): n is a, c, g, or t
ggtcgcattgtggcctttttctccttcggacggtgcactgtgcgtggcaaagcgtagacaaggacgatgccaggtattggtgacgtcgagatcgcaagcttgtgactggcctacttgacctcgaagtgaccacactaggagccttcgtgatccatgtgagaacgggcaggcatggcgataccttgttgtgggaagcgtctagttgggacaccaatagccaggcacgtcctggagatgtccgtacaagggcgcatgtgaactgacttcaacgcgactaggttccgttgatcgggcactgtacctgtaggcctggctgatggtctctagctggtgctcagctcgttcatgctcggaaacatgagcgcaggaccacatgggaccagtaccagcatcgtaancccgtcgccatctgcccctatcctcttgcctccanccataattcgctccggtcgcagccggcatgttgcctatcgcaggaggaacacactatgantgcacgtccaatgtgcccactcgttgcccattacagcagggnttatgtggcccgacgatctgtggtcccgttcgcaagctaaggtatctctgagaattctagtcacgatcttctcgtagagtagccccctaggaacctctagtctcccctttgggctcgagacattcgaccaagaatttcgcataaatatcttgttgcaacaggcatggcctggcatggttatggcagagg

SEQ ID NO: 576378 - DNA, 458 bp, Homo sapiens
  misc_feature (3)..(5): n is a, c, g, or t
  misc_feature (7)..(8): n is a, c, g, or t
gcnnncnnctactactactaaattggcggccgctcgacccaaacgattccctggttatgattctgaaagcaaggaatttaatgcagaagtacatcggaagcacatcatgggccagaatgttgcagattacatgcgctacttaatggaagaagatgaagatgcttacaagaaacagttctctcaatacataaagaacagcgtaactccagacatgatggaggagatgtataagaaagctcatgctgctatacgagagaatccagtctatgaaaagaagcccaagaaagaagttaaaaagaagaggtggaaccgtcccaaaatgtcccttgctcagaagaaggatcgggtagctcaaaagaaggcaagcttcctcagagctcaggagcgggctgctgagagctaaacccagcaattttctatgattttttcagatatagataataaacttatgaacagca

SEQ ID NO: 576379 - DNA, 265 bp, Homo sapiens
cggtcgacagcttctgagtactgggatataggcgccgcacatgcccagctaaatttttgtatttttagtagagatggggtttcaccctgttggccaggctagtctcaaactcttgacctcaggcgattcacccacctcggctcccaaattgttgggattacaggcatgagccaccggccccggcctgaccctttacccttgaatacttcattgcgccctaataacaagggctttcccttacgtaaccaccgtgcagtgcttaggt

SEQ ID NO: 576380 - DNA, 590 bp, Homo sapiens
  misc_feature (89)..(89): n is a, c, g, or t
  misc_feature (117)..(117): n is a, c, g, or t
  misc_feature (206)..(206): n is a, c, g, or t
actttaattcaaaagctagaaatgataaagcttagtgaggaaggcatattgaaagccgagacagccaaaaggctagggctcttgcaccnacagccagggtagtgaatgcaagggaanagtccttgaaggaaagtaaaaatgctactccagtgaacaccgaatgataagaaagcgaaggaggcttattgctggtaaagtaacgtttncatgttctggatagaagatcaaaccagacataacattcccttaagccaacgcctaatcgagtgcaaggccctaactctcttcaagtctacgaaggctgagaggtaaagaagctgcagaagaaaagttggaagttagcagaggttggttcatgatgtttaaggaaataagccatcttcagagcataaaattgtaaggtgaagcagcaaatgctggtgaagcagctgcagcaagttatcaaaaagatctagctaaggccaggtgcagtggctcatgcctgtaatcctagcactttgggaggatgaggcgggcggatcatgaggtcaggagatcgggaccatcctggctaacacagtgaaaccccgtctctactaaaaaaaagatac

SEQ ID NO: 576381 - DNA, 218 bp, Homo sapiens
acctggactcccggggggggttgtgggtacagagaatcgcttcccccaagcctgcccctctgcctcattttcctgtagctcctctggttctgtttgctcattggcctgctgtgttcatccaaggtgggtcctcccagaagtgagtgggcctttccctcgcatcccttggtggcactggggcatgctgtgccttgccctagcctactgctctgagtgca

SEQ ID NO: 576382 - DNA, 340 bp, Homo sapiens
  misc_feature (83)..(83): n is a, c, g, or t
atgtgattttaaacctttttaaaacaaatgtgaaaaagtcagttttaaaaatttcgtggtagaaagttaggcatttgtaacanggaaagagagaagactaataatctcaatttagaagtaaatcattgagatagaaaaagattcccattgactgtagacttcttcccattttgtctccccttccgcaagtttccccttcaggcatggataaaggaaccaaagtgatttgttgttgttccaacctgggctttgtgactttggttagggccacaaccttcttccctcctttcccccttcaatttggaaataaatttctgtatatggtgcaaaaaaaaggaaa

SEQ ID NO: 576383 - DNA, 173 bp, Homo sapiens
tgtcactccacctacctcacatactgctaacagtggacacagacacattcaggtgccattatgcagaaagagatgccagaggctcttgaagatcacaaaggggaggagtgaagaaatcctgcatctcagtccctcacaagacagctgtctcaggctacaaaaacggtgagaga

SEQ ID NO: 576384 - DNA, 353 bp, Homo sapiens
  misc_feature (174)..(174): n is a, c, g, or t
cgttctccccgttgccagttcgctgagggtgggagtaggaacaaaagtttaaggctgaggcactgccatgccctggatgtaacaaccaggaaaatcatgttaatcaaaggaaaacaaaaattccttctagactctggcaatactgcacttcttaaacgaaaaatcaaattgganaacaaagacggttgtctgcccacagtgttctcaggaataacaggatgcccctgtcccactggagaagcgggcagcttcttgcaggtcaagagtttcttttgattcagcccctgggaccccatttaattcacaaagggggaaggaaacgggggtacccggagcttccgaatttcggaaat

SEQ ID NO: 576385 - DNA, 384 bp, Homo sapiens
tctgagaggatgtggtgtcggacacactacgtgtgaggcgattctacgggaatcaacaggggatcaagttactgcaccgctgcagacagtaggaccttctcactcagagacttcttcctcctactacccttggcatcctttgcctccttggcaaggttagggaggctagtaggcatggtactcttggcactgggccgtctagacttcttgcccattggggtgtgcttcaggctgaggaaagatctgtagggcccacagatgacaggtgagagagcagaagtcaacacggtgcctggagggcttggggtcacattgtattcatccagacggcgcacaatgtcatggtgcatgcgatcccgagccacatcccggggaagacgatcc

SEQ ID NO: 576386 - DNA, 680 bp, Homo sapiens
  misc_feature (35)..(35): n is a, c, g, or t
  misc_feature (59)..(59): n is a, c, g, or t
  misc_feature (105)..(105): n is a, c, g, or t
gccgagttcgaaataagccttggttaaaggaacanaagctgcagcaccccaccgctganggcgctctagctctagtggatccgcaggttgcatgaattcggctcnaggccaatctttccttgctagcctgatgtggtcttgacggcctatagaatatgtacacctctgcacaaaatgtacgtcaatctcagattcttcagaccctcattgtctgagtccattggctcgcgtcatgagtacagatataggaaagtgtcagccatttatgcacaactccatgtagctgaagacgagcatgattaggcctcccttcgtaagacacgtctggtctagataactcttgatcgtgcttcctggccgccacaaacatatcattcatgggatttcctcgggctcagtctttcccccggacagttcgcgaatagatgctaccctgacacaaaatcccctatgagtcccaagcagcagggcatgctaacctcagaagtatgcaccctcagtcacaatgtcagaaagcccaggtttcccaaaggcattaggtttcccccctgcgttgtgctgatatcatggcatccgaaattaaatgtggaatgtgtcagaaacattatgttcgccaatctatggccagtcgcagtttatttttcatgctttcagctacctggatatgtcttatttgaaac

SEQ ID NO: 576387 - DNA, 309 bp, Homo sapiens
agacgccagcatgaggcgtctgcactcagccgctctgtcgcctatagactatcgcgggccacagctgctgatgcaccggggcttcactcagtactaaggctggcgcagcacgaactggtccagctaagcagccagtgtgccagagacaggtgttgcagtataaattaacactccattcgctacagctggctatgtttgttttgagactcacagtcccattgtcaccaaggccttggccttggggatcagcttgctctgtggtggcagagaagacctcactttggtggagggaatgaagggagcctcgct

SEQ ID NO: 576388 - DNA, 1205 bp, Homo sapiens
gcattcgaggagcgcgcgggcacagtgttgcctggtgaccgagcgggtgcatcagtactccagaacttggacggcatgatgatgactctgctgctgtttgtggtggcatgcgtgctgatccatgagcgtaggactgggcaggtccgtggagggaccatgacggtctcagacgaatgacgcgtccagcgaacagtgtccaatactcagggtaagctaacgatagcgtcaactagaggacattctaaacatgcttgtcacacgagggttgcacaacagagtacatctgacgtctcagtaagataaagaacgcagacacgatacgatgcgtcaaagtactacttgtcgtcatgccataaccgtatgaaccgcaaagtcccaatggaacggtaaagcaaaacgacgcgaatttgcgccctatctcgcaggagcgctatgtgggaacttccaggcatgaacgacacatgccttgacatgggaaagtcttcacccaaggggacggtagttgccaaagtagatagaacgccaatgcattcgcgctccccgtccttggggtacaggaatgttagctataagggccccttgcccattgtacaagacccaatagcagcctccgttgaccaacttgtacaccggttttccttagcggagcaaactgccagcatacagttggcccaccgaagaaagtttgggctcgttccaagggaggccccgttgcggctcttggggccgcggcccctaggacttttggcaaagaggaagggtatcccccgtgtgaaaccctcatggcaaggccttacagcgccccctttttcctttacccgttggccgtttggcggagttcggaacactttgggtgctgggaatcccgaccaactgtccggaagcttcgccgccgtagcccttacgggaagggaacacctggaaccccggggcccacgggccaccggaaatgcggccaagcccagtttgacctttgtaggagtttggttcccacattaggccaacacggggaagctccaaccttttttccaaagagctgcactggctgaggcgtgggttaccccaaatggcgaagtttcctcatttaaaaggaacccggggaaatgtccatttccgttttaccacaaagcgggaagccacagacggagattcttcccttttccaatactccggcataggtaggggaataaggacacacccaccag

SEQ ID NO: 576389 - DNA, 134 bp, Homo sapiens
cagatcttactaatgctgtcctactgcatactcgcaatctccagttatcttagcatactcacgtctcggaatctgctatggttgtgattaacacgataccagctgagccactgaggcagattggctgctgctac

SEQ ID NO: 576390 - DNA, 450 bp, Homo sapiens
ggttactgctgactggttcttggtcatgttcggttggtcaaagataaattttttgtttgagagatgaatgcaaaggaaaaaaaggttttccaaagtccatgtgaaattgtctcccattttttggcttttgagggggttcagtttgggttgcttgtctgtttccgggttggggggaaagttggttgggtgggagggagccaggttgggatggagggagtttacaggaagcagacagggccaacgtcgaagccgaattcctggtctggggcaccaacgtccaagggggccacatcgatgatgggcaggcgggaggtcttggtggttttgtattcaatcactgtcttgccccaggctccggtgtgactcgtgcagccatcgacagtgacgctgtaggtgaagcggctgttgccctcggcgcggatctcgatctcgttggagccctggaggagc

SEQ ID NO: 576391 - DNA, 439 bp, Homo sapiens
  misc_feature (210)..(210): n is a, c, g, or t
  misc_feature (264)..(264): n is a, c, g, or t
  misc_feature (280)..(280): n is a, c, g, or t
  misc_feature (312)..(312): n is a, c, g, or t
  misc_feature (321)..(321): n is a, c, g, or t
  misc_feature (328)..(329): n is a, c, g, or t
  misc_feature (352)..(352): n is a, c, g, or t
  misc_feature (410)..(410): n is a, c, g, or t
gtagaactgattgtctaaaccagacacacataggagtgtgctccattggtcttgtggagagtgctgcacattaacccctccctcaactgtgcaatccacttgagactggcttctctaagccacagttgttatctgctgtgtaaagtcctgggatgccagcactgtggcttcttagagagggcagatgctttgtatatcgagctgcagcantcatcgtagaaaatgctacaaagctgtctctcttcccctctctcagtttccctntttcatcaagatgaangcgttgggtaagactaagtgattaacaatcantatgattanactagannaaacctagaatttttggtgtccntttatcataggggttaagttttaagatgtagaactgattgcccagaagtgatgactancctgtgtttactcctttggcttgtttgtg

SEQ ID NO: 576392 - DNA, 124 bp, Homo sapiens
atatgtgttggtgattgagactagtagataattgcttctagaactgtttcatcatcccccaaaagaaagccttcggtacgaattttaattagctgagattctgcactctgggcgaattttgtat

SEQ ID NO: 576393 - DNA, 909 bp, Homo sapiens
acgtcgacccacgcgctcgctgggacttgctgcgactccatcttgagtgaggactaggaaaaatgaggctgggacttgctgcgactccatcttgagtgaggactaggaaaaatgaggctggggctttatcaggctgcattcccagaaagtgaggcgttcacagttaagggaacagattgataatgtttactaagcagacctagacttgggagtgtgctgatatcctgatatcttcagaacagaagcatccctaattttgctttaaaggtaataatatcaattcttgcaaaatacagtaattaggaaaattctttatcacaaaccccagtggcagagcacgtgtcctcatgatctttgatcttttttcatcctatatataaacgagtattatacctagggtggacacgttcctccttactttccggaacgtcctaactctgtctatggagcagctgttctgtcaccactttactttcttttctttttttttccttttttttttttctggaggacagagtctcgctctgtcgccaggctggagttgcacttggcacaacctcagttcactgcaacctccgtttcccaggtccgggggattctcctggcctcagcctcctgagtagctggatttgcttgccacgccaccacgcccagttaattttggtggtcgtctagtgtgacgacggggttttggaccattgtttgggcccaggcttggtcctcgatactccgtgacctcgcggtgatccccacccgcctaggcctcccaaagtgctgggatacacaggaaacgagcccaccgcacccagactaactttactttcttaattaaacctgggtttgtgcttcgcaaaacccaaaaaacaatacatatacaactaatcaacctcaaacacaaaataaaaaaaa

SEQ ID NO: 576394 - DNA, 361 bp, Homo sapiens
aacagtatgccaggtacacaggaggctgaggtgggaggatcacctgagcctgggagatggaggctgcagtaagatatgatcatgccactgcattccagcctgggcgacaaggcgagactccgtctcaaaaaaaataaaaagcatccagaagagccgtgcacggtggtggtgcctgtggtgccagctactcagaggctcgggtggaaggattgctcccagatggggcaacatagcttggccaacatggtgaaaccttgtctctactaaaaatacaaaaaattagccgggcgtaggtggcgggcacctgtagtcccagctcctccagaggctgaggcaggagaattgcttggacccgggaggt

SEQ ID NO: 576395 - DNA, 103 bp, Homo sapiens
tcacgaagcacaggctgctcataggaaaggttacaaaagtaaaggaactcggcaaatcttaccccgcctattttagaccaacccctgttcggttgagcggaga

SEQ ID NO: 576396 - DNA, 91 bp, Homo sapiens
cacggatttgctggtgcagtacaactaggcttaatagggacatgccactgcactccagcctgcgcgacagagcaagactccatctgcaaaa

SEQ ID NO: 576397 - DNA, 146 bp, Homo sapiens
tagttcctggcctgcgtctggatgctatccggggggcatcggggtcgtgtgggaacaagccttgctgttgccgccagtgttggtcgtgttgtcttgctggccagcaatgcaccttcgcacgatgcttgcgatcgctgtgacttcca

SEQ ID NO: 576398 - DNA, 404 bp, Homo sapiens
  misc_feature (361)..(361): n is a, c, g, or t
  misc_feature (396)..(396): n is a, c, g, or t
aatgttgctttatataataggtctgtttctcttaagtgtgcaaaataaatttttgtaaattgagctatacttaagatattgttaaagaaccatgaagtggctctttgtgtaatttgctgtgtaaaaatcttaatctgatttcttataagtttttctgcattttaactgcaacctgttcatcataatctaatagatagtggtttaagagcatagaatctgtagtcagactgcctggggttcaaatccaggctcttccatttagctaccagctttatgcttggttgtaggatcctgttaaggtagggaataatagtagttactttaaaaggttattgagaaaatctagagagttaatgccatnaaaaagtgtttaggaatcctgcctgggccaccctnaccggtat

SEQ ID NO: 576399 - DNA, 218 bp, Homo sapiens
cttcctgcttctggccccatcacaagatcctgagaccaagaagagccgtgtgaagctgccctccggctccaggaaggttatctcgctcagccaagagagctgtggttcgagtgtggtggctggagatggccgagtggacaaacccatcttgaagtgctggacgggcgtaccacaaatatgaggcagaagcaggaagcaggaagcggcagaagcaggaa

SEQ ID NO: 576400 - DNA, 1292 bp, Homo sapiens
  misc_feature (294)..(294): n is a, c, g, or t
ttttaaataccagctttacataaagtgattgttgactctggctctgttgtctgacaccgtttccagaaagataagtcaactctgttcagggctacaccaagagtaggaacgcaagacgctggtggagtgctcacccttcttaccaaggagctaatagtacgaaatcttgctgtgactcttagactcagctaagagcacatggcttcgcagcacacgtaggacgtacgacgaccctataggccccagggacgagtagagacgcagcgttcatgcgtacgacaacatggtcatcancacctgattccaaatttccccctgccacgcctctactcgccttcaacctcctacgccctacactgcggcgcaactgcgcctacacaacgcgcttgcgcctgagcttgcccttctcgtcccacctcccgtttttcccacgccgttccccacgtacgaccgcccccctgttcctctgcccgccctaattcgctgcaccctgtgccgcacaagggcgaacccttgacccgagcagacccacccttaagcgccttgttccccttctcgagcgtgcccctttggactcccccactttgccggaacgtcttgtcgcaagacacacacttctccttgggcgctttactaaccaacgtcccacaggcgcaacgcgccggtcaacggcaaacacacccgtactcacccttgggcgacgcccctacgcgcccagaagcccacacgcccaacgaccctcttactcctggcccctatatccctttgacacacgccttcggcccccattacgcgcagtatcgcgcacgcgcgccgctcttaacacaatggtctgggcaccccctttaccttaggagcggccattggggcgccccctttataccgggcaaaccaacatcaaggcgcgacagtttatcccgaaatctatgccccaagagcgttagtgtaaacgctttcgtctacgagcaacggtatactgtccccccgtttgtattagcccgcaaaaggggcggtctgaagaatcgtacactgcagacgacgaatatgaccagggctccctccgagaagaggaggagtccacgtccgacaactggtgtctgtcagctggcgccgctaacatagatgttttggggagagctttatagatgttaccccccgccaaagtagtggggctggtgatttctcaccgtaataagagggcggggggagtacccacgtagttattccgcccaagaaatattgtttggtggtgcccccgcatatgttgcgggtcgcgccaccccccagcaaat

SEQ ID NO: 576401 - DNA, 2198 bp, Homo sapiens
gtgagggcgcgatggggagtgagcggcgtgtgccggtggcatgctccgatgccctcccgcgggtaaggagcccccgacggtgcctgcgaggccccttgatgcggggcctgccctcgtctcgccgctccgcgcccgctgcccgctgggaatgatgacgaaggaacaattccagccaagcggggaccatcaggatggaaaccatgcagcctgaacctgctccgagaagtgtcggctgggtccggacaattctgcgggaaagggattttcaagggagatcttggaaaaacaccgctatgtggtgctgacaatggggacccagactctacatctctgagaagcgagggtaaccagatgatcaaaaactattccacagaggtatctgaccctgagttgacctatgcagaggtgtgaagagctccggaaggtccaagacgcaggtacgcaggacgaaatccatagcaaggttactctttgaccgatccaaagagcccggtacagacggcaccgagactgatcttccttggaggtgagttccagacgagaaaggaatcgtgaatacagtgacctacaagttctgcaattcagccgagcacatgaaccgtatcttggatgagggtcaccgagaggaggacagctatcttggccaatccaattgaaaaagggacaaatcatgcatctacgacagcaacaaggggagcacccttactttgcggtgctacccagcttatacaccggtaggagttgtcagcactgggcgattaatccaagagggacccatatcccttaggaaacagcctttttttattagaattcaggctcccatgccaagcttggccacagaatagaccgggagtcggagaaggaacagccaggctggaagattacgttagagctaagcggctaccaccattgacgacgcccgataaagatacacaattgatatagattattgcatgtgatgactctaagaatgcaggataggagggcagaggacaaagaggcaggaacaggaacggccaggacgagcgaggcacgcgggcataagcgaacaaagcgggcgagcagacgacgagagagaagcgagcgaggagaaggagactagacgagcagcagacgcagcgagaccggcagacgacagagaggcggcagaccgagcaccgcaaagcagcgagagcgagcgcaaggccaggaaggagagcacagcgcggaagagatgacgagaggcgaacaacaccgacagagcaacgcgcagcacgacaagagtgagacagaccgagacaaacacacggcgacaggaaggaaggaacagggcaggagccagagagagaaacagaagcgagcgcggacacaccacgcagcacaccacgcacacgtaggaggacacagacacagagagcagcgagaacggacgagcagcaggacagagaaccgagaagacagcaaagcagaagacaatagacgagatcagaacgcagcacgcgacgagcaacacgaagacagaggaagcgcagacgaagaacgcacagaagcggcacgaacacgggagagcaagcagcgcgacgaacaaaaagcaggcgcacgaggcacgacgtagggagcaaggccgaacggagagcgagcggagaccaaaccgggcaggagcgacgagagcggaagaagcgaggaggcaccgacagcgacgacgcgaggcagagaagcaggcagagagagaagagggacacatcgcagcacgacgaggagaagaggagagcggaggcaaagacagtcgaggcacaggcaaagaggaacgaggtagcagcgagaggcgagccacgaaagagagcagaaccgagccgagctggcgagcaggagcgaagaagcaagggggaggagacgcgcacagcgagagggaagaaggacagagggaagagcaagacgagagagacgagcgaggacgacgcacggggagcgcatgagcgagagagcgaggagaggggagagaggacggagcgagcggaagactaggacaagacgaggagagccacggacggaagcagcatgaagagaggagcggcggagcgagaagagacaagcggggacgggcagaacccgaagcggaagggcaaccggcagacagaggaaagaacgagcggcacgagagagaggaaagagcgcagcagagcacgagggagcagcagaggacaggatgcaggacgagg

SEQ ID NO: 576402 - DNA, 232 bp, Homo sapiens
cttactctaaatcactggtcattttatagacccctgactttctggaaataaaatgtgtgattagcttttactctgagtcatatctcccacctgctgttagaggttattcattcattatttagagggcctctattgcccggtgccaggtgttattctataatcatcactttatgaagaataaaatctgtctttcctgccttcaaagttctcgtttgaatatttgctactacca

SEQ ID NO: 576403 - DNA, 1744 bp, Homo sapiens
  misc_feature (50)..(50): n is a, c, g, or t
  misc_feature (61)..(61): n is a, c, g, or t
caaatcagctgatgaggcaatacactttgcgcagatagctaggaagtttngagaagtaccnttttatgtcagaaagtaacagattaaaggtttttatgggttccaaattggttagtcacttaggtatgcaattataaatgcaaaatagtgccagatctttaactgtatatcagggtcagtttttgttcatgcccaaatcactacaccttcctcattggccttggagtcctactattttgtgccttcatttgtgttacatacatagctgcaagcaaaccatttttcccctttcttttattcaaacaataatttttgaaacaaaaaagaggaaggaaatcagtggcagaaataatcctgctgttattggtgtttgtttaataaaaataatgggacttttttcttaactttttattagctcttcctaagggaaatgtcacatattattatttaattgtacttgtcttaggaagagcaaaaaaaaaaaaaaaaacaaaaaaaaaaaaaaaaaaaaaaaaaaaaaaaaaaaaaaaaaaaaaaaaaaaaaaaaaaaaaaaaagggggggggggcgcgcgcgacagaaaatcacaccacagaggagcggcgcaccaccaaaagacgccgcaccccaccgcaggtcgtgcgagaggacaaaagagggggcgcgccccaataaggggcgcgcgaatatatataacacgcacaagggggcggcggcgagagtcaataaaaacacagaaactaggaggggcggagacacagcggcggcgcaaaggaggcagagagcatactagagagaagagaacgacaccccaccccacggaggggggaagagagaggaaaaacacgagaggagagaacaacaaaaacaaaacaaacagacagagattataaaacacgcacacgcagcggagcgagacaacacacacaccaaacctctaaggcaaggcgaacatagaaagggcggagcaccacaaacacaaaacgcgcacgccaccacatacagactgcgaggaacgcgcaacaaagcaaagcagaaaaagagacccaaaccgcagagacgaaaacaaccaatgaacaacacaaaccagacaaaatacacaccccaagcgaagccgggggacagattactgttacggataacaaaatacacactcacaccagataagatagaaaaaataaacaataagaacaaaaccatccaacagaagaaataccagaacgcaaacaacaacacacaccaagtacgacatacacacaaaacaacacacacaaagagagcaaaaataaacaccaaacacagcaacaaacaaaacacagacaacagcacacgacagaaaacgacaaaacgaaaacgaaaatagaaaacaaagaaactaacatccgcaagacacgagtaagacaccaaaagcaaaggaaaagacagcaacaaatgaccaacaacaacagagcgacaaagaagaaacaaaacaggatcagcgagccgacaagcagaacgaaaacacgacgaacgcaacaccagacacctaggcacacggcgcagacaaagcagagaacgcagtacgctgaaaaaggacaaagcaacaccggaaagaaaagcgacaaacacaatcgaacaaaaacgaacagaagagaacagatgaaacagcaagacagagaacgacacaacgagcagggaagggaggagcaaagacgaagaagcagaaggaaggaaagaacaagtatgaagacacgaggatgcacagt

SEQ ID NO: 576404 - DNA, 406 bp, Homo sapiens
  misc_feature (3)..(5): n is a, c, g, or t
  misc_feature (7)..(8): n is a, c, g, or t
gcnnncnnctactactactaaattggcggccgctcgacacatcggaagcacatcatgggccagaatgttgcagattacatgcgctacttaatggaagaagatgaagatgcttacaagaaacagttctctcaatacataaagaacagcgtaactccagacatgatggaggagatgtataagaaagctcatgctgctatacgagagaatccagtctatgaaaagaagcccaagaaagaagttaaaaagaagaggtggaaccgtcccaaaatgtcccttgctcagaagaaggatcgggtagctcaaaagaaggcaagcttcctcagagctcaggagcgggctgctgagagctaaacccagcaattttctatgattttttcagatatagataataaacttatgaacagca

SEQ ID NO: 576405 - DNA, 531 bp, Homo sapiens
  misc_feature (50)..(50): n is a, c, g, or t
  misc_feature (61)..(61): n is a, c, g, or t
caaatcagctgatgaggcaatacactttgcgcagatagctaggaagtttngagaagtaccnttttatgtcagaaagtaacagattaaaggtttttatgggttccaaattggttagtcacttaggtatgcaattataaatgcaaaatagtgccagatctttaactgtatatcagggtcagtttttgttcatgcccaaatcactacaccttcctcattggccttggagtcctactattttgtgccttcatttgtgttacatacatagctgcaagcaaaccatttttcccctttcttttattcaaacaataatttttgaaacaaaaaagaggaaggaaatcagtggcagaaataatcctgctgttattggtgtttgtttaataaaaataatgggacttttttcttaactttttattagctcttcctaagggaaatgtcacatattattatttaattgtacttgtctttttttactttaagagcataaactcgtttttattttgcacacttttctcatttcctgagaatttacca

SEQ ID NO: 576406 - DNA, 81 bp, Homo sapiens
  misc_feature (6)..(6): n is a, c, g, or t
ataacnacgcccaactggcttgttttattggagaaggggacgcagaataaacaacgtgagacagctgggtcactcatgatc

SEQ ID NO: 576407 - DNA, 387 bp, Homo sapiens
cctttctcctgttccaaaccccaacccatcatattccttagaacaaagggtcttttctgccaaggagggaccagaggtcagggatggctgtggaggctgagggtcccttggaatctctgtggtgggcaggtggagtggggagtgtgcagagcgactatttctttgttctgaggaatggagaggtggctggctttgtgtgcaggactaggagtgcagtggagaggagagctgggggaagcccaggagggagctgagagggctgacggtgttggaggagagtggaagaatggggggtcctccctggttgcctgacgcttctgcggacatagacaaaaattctaggggtcgtgaaggttaaggaagagagttgcagggggatgaagcacc

SEQ ID NO: 576408 - DNA, 150 bp, Homo sapiens
ggtaccttattttcttctttatgaggaggaagaggaggatatggtggtggaggacctggttatgacaactatggaggaggaaattatggaagaggaagatgaagaagagtcagagtccgaggcaaaatcagtcaaggtgaaaattaagct

SEQ ID NO: 576409 - DNA, 362 bp, Homo sapiens
agcgggcttttcccaccccctagcgccgctgggcctgcaggtctctgtcgagcagcggacgccggtctctgttccgcaggatggggtttgttaaagttgttaagaataaggcctactttaagagataccaagtgaaatttagaagacgacgagagggtaaaactgattattatgctcggaaacgcttggtgatacaagataaaaataaatacaacacacccaaatacaggatgatagttcgtgtgacaaacagagatatcatttgtcagattgcttatgcccgtatagagggggatatgatagtctgcgcagcgtatgcacacgactgcaaatatggtgtgagtgctgcaatatgctgcagc

SEQ ID NO: 576410 - DNA, 226 bp, Homo sapiens
agagtgtcactgatgctttatttacatgcgtcacctgaaaagaagcccaagaaagaagttaaaaagaagaggtggaaccgtcccaaaatgtcccttgctcagaagaaggatcgggtagctcaaaagaaggcaagcttcctcagagctcaggagcgggctgctgagagctaaacccagcaattttctatgattttttcagatatagataataaacttatgaacagca

SEQ ID NO: 576411 - DNA, 725 bp, Homo sapiens
  misc_feature (210)..(210): n is a, c, g, or t
gtccctcagttaaaaggctcactagctcactagccaagaaatttttattttctggaaagcaattatttttttttgggaaagtcctaggttctttgggaaattggaatgtcccaatattaaagcaacttctggagcctaagaaactttaaattaacttttccctaaaatggtcccaacatttactatacaatatttctttggaagactatnaactgggacatgggcagacactggctttggaacaaaaaccacgcctagtgaatggactggagtcacagtcctttagggctggcccagtcattctattagatgactaagggaaacctagaaaaagattacaggttcaccctggtcagggtcaacttggtgacacgacacgaagtttattcaactggtaagagggtaacattgacggtggagctggtttacagcatcttagtttggaccatgaaacttggtctatagaattactggtgtagctggtgccgtacgatttaatttcctcacatttattttatttaacaggtcttatttaatgtccgggtgaaactactatagtgggattcgtcggccatcttaattttcgccacagaagagacctatttgggaatattcaccaggttaataaattctcacaaataagctgggacttgtgtatcacaacaagttccggacagcttaacgaataaaatggcccgggtgtagtagcagtggacaaatgctgg

SEQ ID NO: 576412 - DNA, 267 bp, Homo sapiens
gatttttagtttttaatgctgtctttgcttaatataaaatatgtgttgcctatggctccccaaattgtgtggggagtctctaaatgttcctcctgaagggtccattattgaaagtgggtaaggggcacaatgctattttttgttgataggttgggttttatggacccctatggggtttaaaagaaatctgttaaatggtttccaggagttaacactttttttttgataatttggaataaagtttgttttttaagcccaaaaaaaaaa

SEQ ID NO: 576413 - DNA, 180 bp, Homo sapiens
cctggtgtcagttcagaggccttactgggccatgctcctctgccctctgcagcacttgctttgcaaggttcctctggagggtccccgaatgtgcgcatatatcttgggccagccactgcatgaccaagctggttaaacttgtgggagctcagccactaaacagcgaagttgagtgcctcg

SEQ ID NO: 576414 - DNA, 951 bp, Homo sapiens
gctgaggagtgcgggaagtgctgtgcagtggttgaaggggtgattgctgactagcggggagggagtgggcagctgatgtgtgagtggctggctgaatgaatgtgtgccctgtgtgctcctgtgtgcgcgctgtggtgtcatgctgtgtggtgcaagtgcgtgagtgcggagtgctggcctcgtgaggtgtggtgcctgtcgtggtgcgtggagctgggtggctgcagccagtgccgtggaacctgcactgcttcgagtgcgcccagcgcggggtcacctacgtggatatcaccgtgggcagcttcgtgtgcaccacctgctccggcctcctgagagggctgaacccccctcatcgtgtcaagtcaatctccatgacaactttcactgagcctgaagtagtattcctgcaatcccgtggaaatgaggtttgccggaagatttggttgggtctgtctgatgctcggacatctttagtaccagattccagggatcctcagaaagtgaaggagtttctccaggaaaagctatgagaagaagagatggtatgtccccccagaccaagtcaagggtgcccacttataccaaaggcagtgcctccaccccttgtgcagggctccatcccagaagggaagccccttcgggacacttctgggtgatccttgcacctgtctctctacaggttgctgccttccactcgagccagcccgtcagtcagtctcacgctcggacattccagggccggagcactcaggcacttcccatcctctgtcagagaagccaggtaatgacttcgtgcgttgagaatcgcgttggaacgccgttttgttggcccccgaatggcccagggttatagctgagttccgtgcgctacaggtggccaagagttccaatgaggggttgccacagttagtggattaacggtgcccgggtcattaggctggagcagcctcg

SEQ ID NO: 576415 - DNA, 557 bp, Homo sapiens
  misc_feature (216)..(216): n is a, c, g, or t
  misc_feature (283)..(283): n is a, c, g, or t
  misc_feature (351)..(351): n is a, c, g, or t
tatctttaaggttagatatatttgatgtgcctgttttatactttacatatatgtgtatatacatctatatgggtgtatgtatgtgtatacatgtaaatgtatcaatgttgatattacatagtatagtattttagaacatagactttactatttattagctgtgtgacttggcaagttacctgatctttttgtgtatctgtttttccatctgccaanaatggggagtaataatctatattttcccttataggggtataatgagcgattaaaataggactaaaantaaatattttaagtgctctggcactatcgtaaattgatatatagtgaaagtgtgtaataatttactgnttatctcgtttcctttgaagattgtattaatttttatagcaagtcacttatctaaggtgcgccttttataaattgcagataattgattcttttccacgatctgcaaaatgagtaataacgctggctcactgggtagcaaaaataagaaagaaaggagtctatcgagcatgtatctttcaagcaaagaaagaaaacaaaaaaaaacc

SEQ ID NO: 576416 - DNA, 743 bp, Homo sapiens
tacacatacatttcatcctcagtgagtaggtgccatgtctttatcaaggcttttgatgcagatgctatgctttcacttctcatggtcgatactttttgaatcttaaagtctgattgttcagatatctagaaaaggcgatgtctggctttgctctgccctctgactcactgtgctggttcatctttaggcctggagcaggctaccagaactactggctaatgagagatgaccgaccttgctagtgacatgtacaaatggccacatctgctatattgactatcattactgcttattaatagttcattaaacggagcttactgaattactattattttggctttaaatatatatgtgtcacttacgtagctctatgtccaaacgcgtgttctcaaacttgggacccgatcaccaatccctgttggttcgtcagctccttgctctccctctcatctctgctctcagctatatcacccgcctctccgctggatccatcacgtcgtcccctctcctctaacctccatccgctcccaactttctccgacctcgctccatatcgtccattcctcctgtcactcccttctcccaccttctactctcttgtcctctactcaacccgttgctcacgatctttagccctgctccaaggcttccaccctctcctcaacaccatccctctccttcacctctcattcttccctatctcccctctcctcccgcgtctaccctcgctcccctcctcccct

SEQ ID NO: 576417 - DNA, 138 bp, Homo sapiens
gcatcagtctctcacttctctccttcccttaggcacagactggtcaagttaactcctcatgttcggagtacattcttggcccatctgcagatctgctcctatatttcagacaatgccgtgccaagtggagactgttct

SEQ ID NO: 576418 - DNA, 486 bp, Homo sapiens
  misc_feature (37)..(37): n is a, c, g, or t
  misc_feature (43)..(43): n is a, c, g, or t
  misc_feature (67)..(67): n is a, c, g, or t
  misc_feature (100)..(100): n is a, c, g, or t
  misc_feature (131)..(131): n is a, c, g, or t
  misc_feature (147)..(147): n is a, c, g, or t
  misc_feature (226)..(226): n is a, c, g, or t
  misc_feature (242)..(242): n is a, c, g, or t
aagggttgggggtgttggtccccccccaaaagtcctnaaggtnaaaaatgggggtccccccgtgttnaaaaggtggggccccgggtaaggggtgggtggnaatggtgggggggggggaattccttaagggntggatttggatgctgnccctcttgggtgctggccctcaatggataagtgagctcctcagggaaatctgggtggtttaaaaagggtgtggggtgcntcccctcggacccccnacctcttgctccccactcctgcccatgtgacaggcctgctccctgctagccttctgccatgattgtaagcttcctgagacctcaccagaaacagatgccagtgccatgcttcctgtacagcctgcagaactgtgagccaattaaacctcttttcttataaattacccaaactcagatatttctttatagcaatgcaaaaatggtctgacacaccctatgaccagtcattgaatatattctccac

SEQ ID NO: 576419 - DNA, 1178 bp, Homo sapiens
  misc_feature (312)..(312): n is a, c, g, or t
cgtggaggaggagaaggtccggtacttcgggaaaggctacatggtggtgctccggcttgggacgggcttctcccaccccctcacgcagagtgcagtcatgggccaccgcagtgatgtggaagccatcgccaatgctcatcaccagcttcctggagctgcactgcctcgagagccccacagagctgtctcagagcagcgacagtgaggccggtgaccctgcaagccagagctgacagccccactgtgcctgagcccgtgcaccgcccacaggacccatggcacattcccggtgtgcctgagcccgtgcaccgnccacaggacccgtggcacattcccggtgtgcctgagcccgtgcaccggccacaggacccgtggcacattcccggtgtgcctgagcccgtgcaccggccacaggacccgtggcacattcccggtgtgcctgagcccgtgcaccggccacaaggacccgtggcacattcccggtgtgcctgagcccgtgcaccggccacaggacccgtggcacatgcccggtgtgcctgagcccgtgcaccgccacaggacccgtgggcttggcttcagttggaggctccagccgagttggcctattgcctgctcatgctgcttgcttgcacactgcactgaagcaggcagggccagacccagggacatccagaagtttctccattcgtgagggccgaggactggccgttctgcaagccgggaagatcacgcagcccgggaaccctggattgggccacaagaagacacccggggaactagaaaggagggcacaggcgggacctatgggtcaaaacagcggatgatgggtcccgacacaagggtcacacaccgtggggacatccaccgggtcagaggtctcaagggacgcggggggaacctccaggcgcacgaagcggtgatcaccagtctacacctgagagagggcgcgcacaccgagacacacaccttgtgtacaaagagatgagggagacacgatgccaccagccctaaaagaacgtccccaacaagccagtaataggaccaaaaaagcaagtcatgatatggagcacacgagacgatcatctagcagacgctgcagtagtcaaatctactctcatcgtctgccgctgccgggctcgtcccccgcgcgctcgatctgcgcacaagaagaaggggaa

SEQ ID NO: 576420 - DNA, 214 bp, Homo sapiens
gtaagttgttgcgcgacaactgcgttcattaggacttgcggcggatatggacctcggcgttcatgcgcacgccgatggtcccatacagctcatgatggacgaaattgttgctgcacacgccgaggaaccacaccccttggtgcacaaatctcgatggacgaagttgtgcaacaacttcgtccactaggacttgtatggacattcggcgtgtgca

SEQ ID NO: 576421 - DNA, 146 bp, Homo sapiens
ctcaaggcttatacttctcaaggcttatacttctcaaggctttatacttctcaaggctttatacttctcaaggctttatacttctcaaggctttatacttcataccggggaaagaaaggagcgtggaggaagtataaagcgtggag

SEQ ID NO: 576422 - DNA, 182 bp, Homo sapiens
  misc_feature (99)..(99): n is a, c, g, or t
  misc_feature (160)..(160): n is a, c, g, or t
ggtactacttgtcctatcctcggtcctaccctggcacgtgaatagggcttactcaccccttcatggaggctcgggcggctactcggtatgttcaaactnagacacgaaaaccagaactgcatcaggatatggtggtaccatggagacgattaagtagtanagttggagtcaaacactggatg

SEQ ID NO: 576423 - DNA, 617 bp, Homo sapiens
gtatatagaatcaacctaaaaatatatgaacagatgaatggatcaagaaaatgtagtctgtatacacaatggaatactattgggcatattaaagaatgaaatcatgtcattggcaacagcatggattgaagtggaggtcattatgttaagtgaagtaaggcaggcacagaaagacaactttagcatgttctcacttacgtgtgagagctcaaacatgctgatctcatggagatagagagtacagtgataaataccagagacttggaaaggtgtgtgagtggggaggacgggaactgaaagagacggtcggtcaatgggtaccagttagatagaacagtatgagttctaatttttgatacgacgtaatgttgacctactagttaaccacaaatgtattatatatttccagtagctagaagactagaacttgaaattttcccaatatgtatagaaatgataaatactcaaggtgatggataccccaaataccctgacttgatcataacacattctgtggcatgaaacaaagtatcacatgtatcccatacatatgtaacaatcatatgtggtcactaaacatgattagtattgtcagttgcacaacattaaaacataaa

SEQ ID NO: 576424 - DNA, 144 bp, Homo sapiens
ctcccatggcccaaagcctgtcccaggagcaagatgctggctgactggcttgagtgggaggcatggtggtcccaggagcttccggggaagctctggcacagccgagagtcaaaagactacagcatccctgagagcagggagagg

SEQ ID NO: 576425 - DNA, 403 bp, Homo sapiens
  misc_feature (46)..(46): n is a, c, g, or t
  misc_feature (68)..(68): n is a, c, g, or t
  misc_feature (71)..(72): n is a, c, g, or t
  misc_feature (126)..(126): n is a, c, g, or t
  misc_feature (136)..(136): n is a, c, g, or t
  misc_feature (143)..(143): n is a, c, g, or t
  misc_feature (150)..(150): n is a, c, g, or t
  misc_feature (205)..(205): n is a, c, g, or t
  misc_feature (210)..(210): n is a, c, g, or t
  misc_feature (225)..(225): n is a, c, g, or t
  misc_feature (233)..(233): n is a, c, g, or t
  misc_feature (253)..(253): n is a, c, g, or t
  misc_feature (295)..(295): n is a, c, g, or t
  misc_feature (314)..(314): n is a, c, g, or t
  misc_feature (326)..(326): n is a, c, g, or t
  misc_feature (335)..(335): n is a, c, g, or t
  misc_feature (341)..(341): n is a, c, g, or t
  misc_feature (399)..(399): n is a, c, g, or t
ccacccaatgtgaaccaactgtatctcactgccccccggcccctcncgtcgacaaaaacaaaatgtgngtnnccaacgtaacgtgagtactggttagtattaggggccaccaacgcccatagctgntaaaaaaccnggcatcnagaacgnacacaacaaataggccaaagattcagccgggggatgggcccgggaccgcgaacgnaaagnggagtaggccatgcnacattgtntatacatacccggggaaagngaaatcaaagaataatagctaccaaattactgttgtaatagnaaattatacaataagaccnataaagtgtctntgtaaatcngtcacncacacacaagcacccagaccgtgaccagtgcgcgaaacacccacagccacccacaccnacag

SEQ ID NO: 576426 - DNA, 141 bp, Homo sapiens
  misc_feature (96)..(96): n is a, c, g, or t
ggcttgacttcacagtttattcagagcaggtgcaggtgacctggtgggcagggtgcccaggaggggcagggtgcgtgatttcgctgggttccttgnggtctgaggcaggaactccatttttttttctcctgcgacacagaa

SEQ ID NO: 576427 - DNA, 694 bp, Homo sapiens
  misc_feature (22)..(22): n is a, c, g, or t
  misc_feature (114)..(114): n is a, c, g, or t
  misc_feature (165)..(165): n is a, c, g, or t
  misc_feature (179)..(179): n is a, c, g, or t
  misc_feature (181)..(182): n is a, c, g, or t
  misc_feature (226)..(226): n is a, c, g, or t
  misc_feature (229)..(229): n is a, c, g, or t
  misc_feature (233)..(233): n is a, c, g, or t
  misc_feature (257)..(257): n is a, c, g, or t
  misc_feature (266)..(266): n is a, c, g, or t
  misc_feature (274)..(274): n is a, c, g, or t
  misc_feature (278)..(278): n is a, c, g, or t
  misc_feature (290)..(290): n is a, c, g, or t
  misc_feature (320)..(320): n is a, c, g, or t
  misc_feature (325)..(325): n is a, c, g, or t
  misc_feature (333)..(333): n is a, c, g, or t
  misc_feature (338)..(338): n is a, c, g, or t
  misc_feature (404)..(405): n is a, c, g, or t
  misc_feature (409)..(409): n is a, c, g, or t
  misc_feature (413)..(413): n is a, c, g, or t
  misc_feature (416)..(416): n is a, c, g, or t
  misc_feature (418)..(418): n is a, c, g, or t
  misc_feature (438)..(438): n is a, c, g, or t
  misc_feature (457)..(457): n is a, c, g, or t
  misc_feature (459)..(459): n is a, c, g, or t
  misc_feature (476)..(476): n is a, c, g, or t
  misc_feature (504)..(506): n is a, c, g, or t
  misc_feature (528)..(528): n is a, c, g, or t
  misc_feature (576)..(576): n is a, c, g, or t
  misc_feature (580)..(580): n is a, c, g, or t
  misc_feature (588)..(588): n is a, c, g, or t
  misc_feature (600)..(600): n is a, c, g, or t
  misc_feature (611)..(611): n is a, c, g, or t
  misc_feature (614)..(615): n is a, c, g, or t
  misc_feature (626)..(627): n is a, c, g, or t
  misc_feature (632)..(632): n is a, c, g, or t
  misc_feature (668)..(668): n is a, c, g, or t
taaaatgtaattcaggattttntttctctagcctggcttctcactggtatcatgaaggtcatggcacagacaataactgttccaaatatatgacgtattgttcctgtgctttcnaggctgggtagataccctatatactctgtttttcccattatcccaactgantagtattataatanannccctcccctgcccccaccaagtacatagcctcaatccaaaacgnganagcnggatcactcacctcttcccaatcnacacctttnaactcgtnttanaaacaataaganatgacctgccctctccattacactcgttgnttctnacacacanaatancaaacaaaaccaatttacgtgatgcccatgtctttatacttccacactctggaacaaacacacttnnaaanaatnatntnttttatttttaaaattgcgntgaaaaaattgataatatntntaagtataaaataattnaaaaagcatgccagttgcgcaaatattnnnttatgcagcacttttcacttgnactgaataattgtggatatatttaattaattaaattgagattttgtgnacantttatttngtgtcatattantatactttacnatnnattcttatcannatttntaatttattacatccccccttcccgaaatttaaatnttgtatcgtttaaaaataatttaatt

SEQ ID NO: 576428 - DNA, 141 bp, Homo sapiens
taaattagccaggcgtggtgacacaaaccggtggtgccagctattcaggatacagtggggaggatcactggagaccaggaagtcaaggctgcagggggccatgttcacacctctgcactcaggcctgggtgacagagtgaa

SEQ ID NO: 576429 - DNA, 124 bp, Homo sapiens
atttgtcgtgatgaaattgagtggccctaagatagaggagacacctgttagttgtaaggagaagatggttaggtctactgaggctccagggtgatagtagttccctggcagatccgcttgccgt

SEQ ID NO: 576430 - DNA, 689 bp, Homo sapiens
cgaatattatgaggcgtgtaccggtttttatttcaggtacggggctagaggatgagcgtcttagttactgtggccgtgggcgtacaactacaccgcgcggttacccctgtacccgcgccatccgtcctggcgctccggatgagtcaatgaggggcagggcccgaggagtggtcttcccaagaacccctggtggcctcccaaggccggtgctgtgtacctcctccccgacaaaaggggaaactgaggccccgaggggagtgggaagagccggctggacgtcaggcccagccgctggtgcagtggtccgtcccctctgccggggtgggcccctcgggttacgcgttgtcctcgggacaagagactggcggtgtgatgccgcgcctcttcggcctttcgctgggctaagccggacctccatgcagactgtcaaacccccctagggtcggcacagcctctctgcggggaggcttagtgcccctctatagagaaacggcttaggcaacggctgtgcccggggcctttgcaacagcgggctgaaggggggcaaggagacctcgcagagctattacttcccccgaccccgatctccgactcctgactttggaacgccccaaagctgcttatccggtagccctacaaagtgtcggtcattgtgccacgttcttggaaccgtggactcattttctcct

SEQ ID NO: 576431 - DNA, 900 bp, Homo sapiens
gggggggttgacggcttctggcgggtggctgtgtgttgaagtgcgagagcttgcttggcccgtgtcgcttctgtcccaagaaccgtgaccggagagtgagtggcacgaggtgtcgctgtctgtgggtgctgtctgtcttccactgtacactgtctgtctgttgatggatgctgcagtcctggactcttccctgcaaccccttccgtgctccctttcctgcactgcctctgaggctggctggctggccacctgatgacatgcagctgcaccttctggcacatcccttcgctcctttgttctgctggtatcaaaaaggattagctaactttcactaatcactctactacaactacttacacactctacattaacatacatactttactttacatttatataacttcacactatttattgtaactcatctcatccaattaagaaacacaataagaaatattataacactaatataatatacataaaacactacataatattatcattaaccacactcgaaaacaatatttatattcttaaataaatcatatgatcctcaacatcttcttcaaaataaaccatttaataaatttatcattaatcaaacaataaatatctacttaccatctacttatagaattaattaatagtttctctctaatcctacatactcaaaccaatactaaatcactacttacttatttctatactttcatctttatatatataattctactattttattctatcatctattacatcgaacaatataccttctcaccaactctaatttgaaatatttattatttacatattacttcacatctaactacctacatctcttatgcttatacaaattattttcattatatgttatctaatcttcaaacattcttaattaca

SEQ ID NO: 576432 - DNA, 853 bp, Homo sapiens
  misc_feature (805)..(805): n is a, c, g, or t
catttttattactaccctactctcataaccaggatttctatcgacgagcaaattcttgtatctaatctctgctatctccgctctcttcctgaacccgtactactttccatacgatcaacaatatcatatctggtcggcacatctatctatttcgcgtatatagcataactgctacgccgcgccgcgattgcatcaaccgctattccagttactcatttagttatgtttatgctgtcttctacttacattccaccgccggccgtttaaaataccaggagcctctctgactaaacaatgtaaaatagacaatatccacacatcttaattcgtcttgggaataactcatgtaacttcggcatagattccgcatcgctttttataaatggtaaatacaccctaaaccggctgaaagttcaaaatatactcgtcacctgaccatattcttcaacttctctgttattatcattctttcagattaattgttttatctgtacaaacctactaattataatattcattatttctcttcctacatgaccctctggatcttctacttttcaagaaaaaacaattttatacttcccccgctttaccaaagttaattaaattaatccccttttcgcgtcaaatataggctttctatacattgctgagttatttatccctatatcaaccaatagcattcacccgttttatttcctgtccttagtgtctgaagatgctcaccagttttttgtgcacagtaaggcagcatgctaaaatgcttttgttcagttctgtatatttgaaaatagcagtgtgttcnctgatggttacctgcagtggcaccctgtacaaaaataaaacttattgc

SEQ ID NO: 576433 - DNA, 102 bp, Homo sapiens
ccccctcagcttgatactatcaagtgatctgactgcctccgcctcccaaagtgttgggattacatgtgtgagccactgcgtccaggccctatcttaactatt

SEQ ID NO: 576434 - DNA, 144 bp, Homo sapiens
tgcaccaagagaagtacacggagcagaatctaactgcatcccatgtaaatgtgtacatccattttattcctcactcgcctctaagacttatcatttaactttacattgtttcacttttaagaatccatgaagggagagggggat

SEQ ID NO: 576435 - DNA, 168 bp, Homo sapiens
caggagaatcatgtgaacccgggaggcagaggttgcagtgagccgagattgtaccactatactccagcccggcggacagtgcaagagaatccatctcaaaacaaacaaacaaaacctgtaggctcttagtgttagaaggagtcttagaagtcccccagtccagaattg

SEQ ID NO: 576436 - DNA, 296 bp, Homo sapiens
  misc_feature (288)..(288): n is a, c, g, or t
ttgcggtacgacgtcgcccgacacacgccagctatttctggagggcggacgcgacgccgacgtcttctaccgcaagtgttggtcccatgacaaggtcgtgcgctccatccacggagtgaactgcaccggctcgtgctcatggaagatctacgtcaaggaaggaatcatcacctgggagtcccagcagactgactacccctccaccggcccggacatgcccgactacgagccgcgaggatgcccgcgtggcgcgtcattcagctggtacgagtactcccaggtcgtggntggagcat

SEQ ID NO: 576437 - DNA, 663 bp, Homo sapiens
  misc_feature (271)..(271): n is a, c, g, or t
ggaacgttcagggcagagataatgccttcatggagaggccagcaaggttgaaagttattcctccacatcggccaaaaaccccggaaccttcggaatgagcgcaccggcctaaagtgaagcaagttgctagtagaacaaaattttatcaccgtcaggtaacagctgtagatgccactacaatcttaagtgtgaagctcacacatggcaatagcgatcatgcaagccatgcttgttagaggcgcctcagacaattccacatgaggcaagtctncagctcgtgacatagccattcagatgcggtggtgctcagcaagctaatgacaagaatggcagcttatctgacacgctctcccagtggtatccagtagctctaaatgttcaatatatgtaactcattaacccgagcactgcgctctttgtcagtcgtggaggtcaggtctcagcacggtatgtctagcttgtccaaagaagcttaatagtaaatgtcaggtaaacgatgccaacgatccgtttaaccttcccaagaaaagaatcatcttatgtggacctctttggccaacatcatagagtaaggcagagttgagttaatagttcttgaaatcagaacagttcaatggatcctgcacatccctaaataggtcacatatgtttagtgcgcaataa

SEQ ID NO: 576438 - DNA, 2011 bp, Homo sapiens
  misc_feature (947)..(947): n is a, c, g, or t
  misc_feature (1922)..(1922): n is a, c, g, or t
tggaaaatgggaacacaaaatttttttcttttggggtgggaaaaaaaaattaggggggtgggtggggtacaggaccccaattccctctaacccctctcccaaaacacaaaaaaaacaagaagggccacacaaagggcctccctctctgtgccaagggagaaagcacgaaaggctcaggggacgggcggggaaatgtgcagtggtggatgtcgcgcaacagtgtggacaactagtgtgggacatgtgtgtgtgtgtgtagtgcgaggagaacaggtgtggtgtgtgtgtgcacagtggtgtgagccttggtggcccgagaggtagagaggtgtgaaaataaatgggtggtgtaaactagcattagggagtagatacaccggggggaggaaacatgacatagtgagaaggacgaatctgcacgagagatagtgtagcaatcgtgggcgaccccccgacaagaaacaaccacaagggaggggacaccaccacaacccacaccacgacgagtagaaaacagtggcgcgacatacgacacatgtgaagaagaactgatggacgcgaaacgcagggaatacaccaccccaccacaacatgattgtagaaagaccacacaacaacacaggagaggtggaggaaagccacaccacccacaacaccacgactgatgtagaccccaagctgggaaagaagcccaaggaggcgtgatcagcgaaggaaacacaccacagccgaagccggttgacataaactaacacaccgcactccggaagtccatcgtatgctagcaagctcacagacagcacaggtggctgaggagctaattgcacagaacacaccacgccgaagagagaaacgaacattcacacaaccaccatagacagcaaccgaagaggagagggagcgaaccatcacgcttagagagtggtgcgcagagacgaccacaccgnatagatagataacgaacgacacccacaccaactaaaacgacgaataccgagaagagaaaggacacagacagagagcatagtgttgaaagtcagggcaactgcgagacatcaacgtctagcatagataaagaagcgaagaataggacagaacagaacccatgaaacaaacgcgaaggcagagacaacaaccgactagtagcgatacacccaacataagatggagcgagggaccctacacaagagcggaaagatacacgaggctagactgttgatcgaaccacatagaagagccgcacccacaaggaggcgaccacccccacttagagtgcggcaccacaacaccaccgatccacaagactgagcgacagaagcaacgagcagaactacaagaacaaaggcgacgcccacacaagcggagaacaacacctaccgtcagtgagtgcgcgaacgcacacacagaagtagacatgatagaagaacgaggagcagacaaacacaagagctggaaggagagacaccatagaaggtacagacaccaacgaaaaagacgactcgccaccaacaaacaacaacactcacactgaagaaagtacaaagaacgaacacaaacaagagaagagaaaacaaagacctaaacgagagagacatagacaatcaaacacaaacaacagagttgaggcaagcactgaaacaaagtagcgcaccccactccaacgaagggaagggtagaaaccccaacacaaatgtgatcgaacaaaggaggagagcgagcgagcgaccaaattgcatgaataggcacacacaatagagcagacacaaccggacccacacaagctacacaaaagagcggagagacgacgatccacgagagcaacaaaggaagccaataccaaccacggagaatcaccacaccgaagcagaaaacacatcgcgactaaacacaccaacaggcagaaaacataagccacaccacgnagaggccaaccggacaaagacggaagccagacaaccagaagaaagaaaaagacgaacaactagacaagacgaacaagaaaaaagacggt

SEQ ID NO: 576439 - DNA, 388 bp, Homo sapiens
tcgagctgatagaaatctcatcatctgtgcagccatcttaaagcgacactatgaccagagggaggattatccttgacctttgaagaccaatactaaactgaaatttaaaatgttcttcgggggagaagggagctatgacttacactttggtaatcatttgcttcctgacacttaggctgtctgctactctgaattgcctcggaaagagtctagaaccattttgtccttgacatccattcatctctttctaagggaatcagaggccatgagcccgtatatacttcaactcaagaagactgcgttaattctagcggtgcaacatataaccattcaagctataacagcagaggctcctagacccgccacaggcgcgggggtactgagcgcg

SEQ ID NO: 576440 - DNA, 1005 bp, Homo sapiens
ggccggagcatgcgggcggcggtggaggcgtgcgcccggtgagcgtctcttcgcttccctcggggtcttgctcggacctcggccaccgggctgggatccccacggactcgtgcgtgcagcatgggcggcgtcggggagccgggaccgcgtggagggacccgcgcagccgggggcgccggttgcccaccttctgctgggagcagatccgctgcgcacgacctagccctgggtgacaatgtggtgtggtctatctgagtcgcctgctgtctactactatctagtcgctgggcacagcgtgcacccagggggcagccgcctcatcggccaccacggtgctgaggacgccacgtgatgccttccgtgccttccatcaggatctcaacttttgtgcggcaagttcctacagcccctgttgagttggagagctggctccggaagaatccagccaggatggatcccttgaatgcgcagtctggtcgatggacttgcgagccctgcgaccaggcagaccgaggcacatgaagctgtttgatgccagtcccaccttctttgcgtttcctactgggccacatccttggccatggaggtgctggtccctggctccttatctacctccgtgggtcctggctggtgtgcccagtgccctggccgccttcatcctggccatctctcagggctcagtgcctggtgtctgccgcatgaccgtggggcatgcctccatcttctgtatgtcctggtggaatcacgttggcccagaagtcgtgatggggcagtacagggcttctccgcccactgggtgggaacttacggccattcgagcagccatgccaaggcccagcatctttccacagaaggacccaggaccgttacgggtgtggcagccacgtcttcctccattgtgggagttgatcgcaatgtatgggaagaatgcaaggcgatacgtaaccctacaaaacaggatgcgaacgtgtactattcctgaaagggccgggggtgagatcacct

SEQ ID NO: 576441 - DNA, 145 bp, Homo sapiens
gggccttcctgttctcgtggggtagcagtgagtgtggcacccctcacgcgcgctggctcagagcctgctctccagcctcgctattctctcaaccctgtctttcagactcagctcattcctggtcttcaccatgcgtggattgcca

SEQ ID NO: 576442 - DNA, 140 bp, Homo sapiens
tcgagatcatgcactgtactccatgcctgggcgaccgagcaagactccctctctaaagaaaaaaaaagaaaaacaaagaaataccaatacaaggagtcataggactatctgtgaaccattatatttcactgacagaagga

SEQ ID NO: 576443 - DNA, 451 bp, Homo sapiens
  misc_feature (99)..(99): n is a, c, g, or t
  misc_feature (415)..(415): n is a, c, g, or t
tcccaattcattccagcgtaagctcagaggtgctgctgcttcggggcaggacctgagcgtccgctgggtgcgtgtcttgcgcttctgtaggcctctgcnttgagggtgcgtgcccagaggggctttgaagctttgggtgtggggtgggtgctctggaaatgtgctggctggcaggttacccttcttggaagggtatggctgagccaccttttggctccctctggccttgaacagcctcttaggcgttagacaccaagagaatgcgtccttgttaagattcccagttggagcactaggcgaggctttcgaggggagcgtcctggacatgttcaaggagaatggttggaagagaagggctcctgggctctagcgcggcctgggaagacccagagggcagtgtcagctcccgggtttnttgctgggcacggagaaggggaagctgtctttctgt

SEQ ID NO: 576444 - DNA, 894 bp, Homo sapiens
gaacgcgcacaacgaactgtgactctagtaaagcctgtctcgaagcgggcgaggacggagcgtaccatgatagactatgcagagaaagatgaatataatatcaagcatgaaaaaggacaaaacaaaggaagaacacacaaggatacaacgaagcaaaacacagaagacgaaacagaagcaacacagagacaagagacggcaccagccacacagaaccacaaccaagacagcagcaaagagcgaacagccacacagcagagacaaagaccaacaaggacaccagagaccaagacacactgaaaaaaaaagccacaaaacagaaggacaaaatacaacaagacaaaaaacccaagaagcgcacaaaaagccaaacagacagaaaaaaccggcacgcccacgaccaccccaacgcgcacacatcacacccaccacggcaacaacacaaaccaccaaagaatccacagaaagaaaacaccaacagacgggacaacacaccaagccacaagaggagggcacagaagaacaaaaaaccagcagctaaaacaagctgagaccgacacagaaagcgagacccaaaaacgagaagaccgaaaaccacagaacacgaacacacggatacacaaccacaagcccgcaaagagacaaagcggcacgcagggcaacaacgacaaagaaacgagccaacgcgtggtacacaacagcagccaccaaaacgaacacaaacaacgaagcacacaaccacaccacccaagtacacaacaacgacgcacctcaacaacaaccaccagcacagacaccgaaacatgacacaagaaaacgaaaacaaacaccagcacgtgaacacagaaaacacccatgacacaaaaccaaccacacacaaacacacacaagcgc

SEQ ID NO: 576445 - DNA, 234 bp, Homo sapiens
gtatacccacaacatgaaagaaatggtgctacccagctcagcctgggactttgaattaggacacaaaaccctctagcttggaactgaatatgctgcacttttcagaccctgccttctgatggatcagctggcaccacccagaccagtaaactggctcatctggtcttctggcccccacccaggaaccaactcagtgcaagaggatagcttcaactccttatgatttcatccccg

SEQ ID NO: 576446 - DNA, 349 bp, Homo sapiens
aaaaaaaaaaaaaaaaaaaaaaaaaaaaaaaaaaaaaaaaaaaaaaaaaaaaaaaaactcgaaaaaaaaaaaaaaaaaaaaaaaaaaaaaaaaaaaaaaaaaaaaaaaaaaaaaaaaattcatgggccgaggtttaacaacggggggacgggaaaaacctgggggtacccaaattaaaccgcctggaaggaaatccccttttggccagcgggggaaaaaccaaaggggcccgaaccgatggcctttccaaacagttgcccacccggaagggcaaagggaaaatggaaagcgtaaaaatttggtaaaaattcgggtttttggtaaacccagctaatttttccatgggccg

SEQ ID NO: 576447 - DNA, 196 bp, Homo sapiens
cacctgaccgactccagcaccgtgctctgacacatagtgctccagccaacagagccatttttatttcgatgagatggaggatttaggagactctcagtcatttgaggctagttcagtccaaccaaccactattcagttttgttctaaaagcatgacacatagcgagcaacgttcagttcacaggctctccaagatc

SEQ ID NO: 576448 - DNA, 115 bp, Homo sapiens
cacacggatgcagacaagttacataagttgctgcagatcatagcactgcatacagtggtggcacccggacgctctgatttcagagcttctgttcttaactgtgattgtctcctga

SEQ ID NO: 576449 - DNA, 166 bp, Homo sapiens
  misc_feature (6)..(6): n is a, c, g, or t
  misc_feature (44)..(44): n is a, c, g, or t
  misc_feature (81)..(81): n is a, c, g, or t
  misc_feature (136)..(136): n is a, c, g, or t
  misc_feature (153)..(153): n is a, c, g, or t
caaaanttactctgcaaaattaatatatgatttacctgctgttntcataagatttccaaatagacaaactcggtatgcttnggatttgctttacattctaagtggatttggaggttcaggcaggcgccaaggagtnagccgaagtttcatcangcggagatgttgg

SEQ ID NO: 576450 - DNA, 231 bp, Homo sapiens
ggctcccacttggttgctaggaatggggagggtgacagggaaagggggaataactagttatgagtatggggtttctttgggggtgataaaaatgttctaaaatggtggtaatggttgcacaactctgtgaatacactaaaaacccttaaatggtacacttttttttttgggggccacggacgtgtgcacccaggggggaggccgggatccgagcttcgaatcgaagtcagg

SEQ ID NO: 576451 - DNA, 106 bp, Homo sapiens
ggccctcaccaagacccgggccggtaggcctaaccggctaacattactggcaggccacctactcatgcacctaatgggaagcgccaccctagcaaatagtaattcg

SEQ ID NO: 576452 - DNA, 388 bp, Homo sapiens
aaggctgaataatattctgttgtgtgtatataccacattttctttatccgttcatccatttatgaacacttagtttcatttccagaccttggctattgttaataatgctgcagtgaacacaggagtgtgaatttgtctttgagatcctgatttcaattcttttggataaatacccagagtaggattgttggatcatatggcgattctatatttaatttagttttggaaacttctgttgtgtttttcttagtgaaacactattttgcattctcaccaacagtgtacaagggttccaatttctccgtatccttaccaagacttgttatctttttttttttttttttttttgattcagaaatatatgaaatctgcatagtcttaatttgta

SEQ ID NO: 576453 - DNA, 341 bp, Homo sapiens
actgctctcgtggtgaacatctgtacttcggagtagtagagcccttactgtctctgtagctgggagacttggtatccattcctgcaatggactgattctgcatttgctgacgtaggagcttttgctgaagtggccaaggtgaccttagcacaggctggcttggtagagattgggcaggctgagcagatggttgttgctgctgctgctgctgctgttgtctgctgttgttgttgctgctgctgctgctgttgttgctgctgctgctgatgttgggctgcccttgagctctgctgctgttgctgtagttgcgctgcacttgaactctgctgttgtctgctggt

SEQ ID NO: 576454 - DNA, 202 bp, Homo sapiens
tctagagcgtaaaaggacgcccagggagacgtaaaaacaaaaaacaggatataggcaggaaacacaaattctgagggagaggaaagggacagttgagtaagacgtctgggggaactgagaagcctgaggtgatgggagctctgccttaggcctcctcttcggcctcctcaccgaaatcctgctactcgtcttgcgggtgctg

SEQ ID NO: 576455 - DNA, 275 bp, Homo sapiens
  misc_feature (20)..(20): n is a, c, g, or t
  misc_feature (37)..(37): n is a, c, g, or t
ccaatccagtttcatcaganatcacattcataccccnaagtggtttttcaaatgaattcatatcccaaatccacatgtcccacatctcggctacgggcagggccgggccaggccgagaggtgcccccgaccctgggtcgggacaaagaggctgccgcagcaagttaaagacaactcgggctgttgcgcgtcgagcaggtcacggggtgggaggagatggaggagccctcacagcggatcggctcccgggccgagcgcggggccgccccaacccgg

SEQ ID NO: 576456 - DNA, 527 bp, Homo sapiens
ccttggggctccatcagtgagtagtaggagcgaaagttgaggtggtcccgcccacagagagggggatgtcagagcgcagttgcttttccacatgctgaaagaagtcatggtcctcaggggacgtgaatggcacaaggatgccatttcctccagagagggtggtatagacaagtgattctgagcctccaggaatcagggtggtcttctgcaaggacagcaccgtctccccgagatggtagtacatgatcacctctgccttcggggaggccccattgagcaagccacggtcccacagggcttggtggccggtaggatcctcatctacttcatcatgggggtggggggggagcctcaccatatttttgtggccaattttgtctgccccagccagagtgtcatagtccaggaggcgggctgtagtgaccgatggggggtaggtatcatcagcaaagatgataagcgggtttacattaggcgtgtagcgaacccagatgaactttgcttggacatcagatacaattaccgta

SEQ ID NO: 576457 - DNA, 613 bp, Homo sapiens
gacacacaacccgttgaggaagctatgcctgtgcccccgccggggcctaaacagcgtcattcctaccccctgtgggcacgttcacactcgtatattacaatagtctgcccgcagggtatgcccctaatttatagtcggcgccagcctggggtgcaaggcaaaaactgacccgtctcaagcatacgcgcatgtgctttcaaggccccttagccccttctgagggggtttctcatcccaccaccgcggatagaggcacccaccaacgatgtgtctaatgtctaaagcgattggtgggcgggggcaaccaccaaagcgggggtcgacccccccccggagccccggcctgggaccaagcccagcacgatgtgatgtcaggagacagcggcgcaatcacagcgcagggcacccaccccgccccaagcttggacaggctcactctctcaggggcaccctcgggcgacgaagtaacacccactctcgggggcgcccgcgcagatgaagaagccacggaagcccgaagggaacagacaggatctgtagagccgcagagacaaagatgtgacgacaggggcgggggtccaaaaaaaacgttatttccccaacaaacatgaca

SEQ ID NO: 576458 - DNA, 431 bp, Homo sapiens
  misc_feature (44)..(44): n is a, c, g, or t
  misc_feature (335)..(335): n is a, c, g, or t
  misc_feature (387)..(387): n is a, c, g, or t
  misc_feature (414)..(414): n is a, c, g, or t
  misc_feature (421)..(421): n is a, c, g, or t
gagatggagtcttgctctgtcgccaggctggagcgcagtggttncgatctcagctcacggcaaccttcgcctcccaggttcaagtgattctcctatcccagcctcctgagtagctgggactacaggctcctgccaccatgcccagctaattttttgtattttagtagaaacggggttttaccatgttaaccaggatggtctcgatttcctaacctcgtgatccgcccacctcagcctcccaaagtgctgggatttcaagcatgagccactgcgcctgggccaggggcaaattcttaaggctaaatttgcttcttgaaaactgggaaagaattttnaccattgtggaaacaacttttcaaagttaaaatcctcagcttcaggggggancccacccccaacatttgtattctaatnttttttnatctggggaa

SEQ ID NO: 576459 - DNA, 112 bp, Homo sapiens
atcccatggcatgtagtgaggacagtcacgagtttaagtgggtctcttttgggtcatgttccggaccttggaggagatatttttgggtgtatgaagttttagcgcgtgttgt

SEQ ID NO: 576460 - DNA, 168 bp, Homo sapiens
acttaaaaaaaaaaggagagtagaaagcctagaggattatgggataccattaagccaaataaatatctccagcaaggtgaagggaaaggtgagaaaaacatatttaatcgaaataataacagaaagacgagagagacatccaagtcgaagaaagctcaaattatatcc

SEQ ID NO: 576461 - DNA, 187 bp, Homo sapiens
  misc_feature (170)..(170): n is a, c, g, or t
gttacccgggtctgggtatgggcaggggggttatagtagaagagcgatggtgagagctaaggtcggggcggatcacctgaggttaggagttcgagaccagcctgcccaaaaaggtgaaaccccgtctctactaaaaatacaaaaaattagctgggcatggtggctgggtngcctatagtcccagcgt

SEQ ID NO: 576462 - DNA, 402 bp, Homo sapiens
  misc_feature (270)..(270): n is a, c, g, or t
  misc_feature (273)..(273): n is a, c, g, or t
cccccccccgggggttttttagggggtttttggggggttttttccccttttttcccgggggggccttttccccttgggcccagggggggggggggggaagagggggttttccccggggggggggccacaaaaaccccctttttttttggttttcccgggcccgggggcccccccccaaaagggggggggtttttttgtggggggccaaaaggggggctttgggggggcccccccccccccgggggtttttgtttccctaaggggttttanaanaagccccctttttttccccccaaaattggggggggggccccccttttttttttttttttttttttttgggggggggtttaaccggggggggggccatgggggggggccttttattttttttttttttta

SEQ ID NO: 576463 - DNA, 809 bp, Homo sapiens
gttcaaccattgtggaagtcagtgtggcgattcctcagggatctagaactagaaataccatttgacccagccatcccattactgggtatatacccaaaggactataaatcatgctgctataaagacacatgcacacgtatgtttattgcggcattattgacaatagcaaagacttggaaccaacccaaatgcccaacaatgatagactggattaagaaaatgtggcacatatacaccatggaatactatgcagccattaaaaatgatgagttcgtgtcctttgtagggacatggatgaaattggaaatcatcattctcagtaaactatcgcaagaacaaaaaaccaaacaccacatattctcactcataggtgggaattgaacagtgagatcacatggacacaggaaggggaatatcacactctgggggctgttgtggggtggggggaggagggagggatagcattgggagatatacctaatgctagatgacgagttagtgggtgcagcgcaccagcatggcacatgtatacatatgtaactaacctgcacaatgtgcacatgtaccctaaaacttaaagtataatacaaaaatacactaacatacacaaatatatataccaaaaggaacatacctcaacgtaataaaagccatataaacatggtccacagctagtatcataccaaatgggggaaaaactgaaagcctttcctctaagatcttgaacacaacaagaatgcccactgtcaccactgttattcaccatagtactggaaaatcctagatagaagcaatcagattaacctatg

SEQ ID NO: 576464 - DNA, 923 bp, Homo sapiens
gggcgtcatgtgccatttctattttcatcttagaagatttcctcagcaaaccgactgagagatgtggtagcaagcttcagtatttgcctcgcttcccttttcatatttacagaattaaagacaagcctcaagtagctcagtaagctctgcattctcaatagccaaggcacccagcaggccaacatgtgtcagaggcgctagttctaatgctggctattatatggcacgtgagagcatggtttgagaatctatggagtggtgcgcacatgttcccggatgagatacggtggaaaaggcaaaaactatttaccctgcctttgcagagctgtggttatgtgaaccgcaggaaggctgttgacgcctgtttccagcatggtgtgtcatggtcacgctgggcgaaggagcgtggaaggggagatttgtcccctcagtcgtgagacggctgcgggtcgagaatagttcccccgagtgttcctgcgtgttgcgactttgaacctggcagagactaatagtgcagggagactgctggaggtcctgactcgaccatacaccggcttcctcccagccgctggtgtgcggacacactaagatctgcattaggctagaggtgcaagtgggctgattgatacttttgccttcatcatacctggtatgtctggtccttggacctttgatgaccactgggaatcccggtcacagccggctgagaacaggagggggacccgtccgaaggcagaaaatgggctaatgcctggaccggggatgtccaaggggcccgggacacacacacgtctttaccacggcccgggcttttggtgggcgcagggcaaagagggccctctaaaaccggacgggacccccaactccgggacaccttgggcacaaggtttggcggcgcacttctcccaaatatacaaccccgt

SEQ ID NO: 576465 - DNA, 348 bp, Homo sapiens
tctgggctcagaatcgtggataagtaccacttaccccactacccccttatataccacaagggactcagagccagcaggtaaactactcccctaccctacccccaccaaaacctggaaaatcacagacagcctttttacagctcctcttgcacggcccccttacttctggaaggcagtcagagatgtataagctcttctggagctcctccttcttcccagtcactcatacttgtactactcaatcagcctggcgatccgtgtcatctctgatgctgggaagtcctccccttggactaagatcttccccatgatcttcatgtattgatcagcgctaggtaccgagctcga

SEQ ID NO: 576466 - DNA, 660 bp, Homo sapiens
taaggcccattggagtatttggtttccaattagggaaatagtgggtattaggattaggattgtggtgaagtatagtacggatgctactgtgtccaatgatggtaaaagggtagcttacgggtgtgttcctcgcgaatttcagggttaaaagtgaggaggtctggcggctaggaagttcaaataaaggtgatgggactatagggggcgaaatattagtgccttggtgtgttgggactatagtggaggagtggggatatatgggctaggagtgaggaatggatagatacaatagggggaccaaagggacccgccccccccctacgcttggggtgccaagggggacgcgggactcgagaggaagacatcggggggcacgcgcgacacataaggggaaaattactccaatccggggcgcctcgagcattccgctcggcgggcgacacggcgcggcggtcccaaaagaagggcgctgctccggcgcccccaaacgcggggcctacctattccaccatccacgcggcccccgagggggaacggccgccggccccccctcccacgcgcacggcggcccccccggggggtcgacgaacacaaatccgagcggggtcacacaacgggcccccccaaaacgggggagccacactcgcggcccaccacaca

SEQ ID NO: 576467 - DNA, 1408 bp, Homo sapiens
gctgtcggagaggtcagacgcgcgaggggtgcagttttcttttcttcttttttctcttctttttatttttcttattttgttctgtagttttcttctttctcttttttctctttttttttttttctcgtcgcgtgcttggttgtattagcacgtgttgtttcatctttttttgttgttcactcctctctttgtgttctttttatattctctcttgtgtttttcccttcttctttgttttgtttttctgctctgctgtgtttttttttttcttctcgtgtcctctttgtttcttgtttctctcgtatttttttgtgtccctccttttttatcacttcttgtttcttccatctatttctgttttgtttttttttttcgtttttttttttgcttgtgttttttttttcgtcccatcttccttcgtgcgttcttttttttttgcttcttctttttattctttttttgttgttttgttgttctttttgttctttttttttttttttttttattgtttcttttctgctgtgtttctctttttttgttgtgttctcttccgcttgtttgtctttttgttctcttttttttttgtttttttttcttcacactcgtgtttgtctttcttttgtggtgttggtgttgctttgtttttctttcgctctcagttcatgtctttgttttttttgtttgtttttgtcttcgcctctttctcttctttactatatgtgttctctccgtgtgtctgtcgtgtcgttctttagagttgtatttgttttttctccttcctctctcctttgtgtgggtgtctctctcactataataataagtagcttctctctctttttttttttccctctccctcttgcgcccgcctctctcctcttctttttcttctccgctctctctctctttcttttttttttctgctccccccctcctcttttcttccctcccctccccccctctctctctctcttttttgttgttttcgcgcgccctctcttgtcgtcgtgtggtgagaggtgtgtgtgtgagatgtaatattatttttacactgctccgctctctctttccacccccctctctcttctcctcttctgcggcgcgcgcgccccctcccatagagaaagaatatatatatatagatagagagagtatttctctctcctacactacatatataatatagactagagagaagaagttattttttgtgctccctacaacgtgtgtgctgctctctatatatatatattctccgccgcccagccgggcggagaagagagagagagagagaaaaaaaaagaggaggagagagagaaaaagagagagagagaggaggagagagagagagagaggagagagagagagagagaaaaaaacttctctttcttttctctctcccacacacaca

SEQ ID NO: 576468 - DNA, 111 bp, Homo sapiens
ctggtactaagatcctcaactagtcaaggaatgcaatcaatatatgatatactataccagtagatgtatatttaaaatgaaatactgtgtgggcaggtataagaactgaag

SEQ ID NO: 576469 - DNA, 113 bp, Homo sapiens
tgatgagctatgactgtgccactgccctctatcctgggaatagggcgggacctctctcttgagacagagtctcgctctgttgcccaggctggagtgcagtggcacgatcttgg

SEQ ID NO: 576470 - DNA, 99 bp, Homo sapiens
ccgcctactactactactactgctcgaattcaagcttctaacgatgtacggggacatggaaataaagtatatccgctgccctgggcccctgcgaaaaaa

SEQ ID NO: 576471 - DNA, 147 bp, Homo sapiens
ccacgcgtccgggaaaatgtttatttctcaattaaacattccctttaaacacaaggaatgagttctaaatcttcataaagatgaattaaaactcattccttgtgtttaaagggaatgtttaattgagaaataaacatttgtgtacaa

SEQ ID NO: 576472 - DNA, 575 bp, Homo sapiens
  misc_feature (317)..(317): n is a, c, g, or t
  misc_feature (329)..(329): n is a, c, g, or t
  misc_feature (387)..(387): n is a, c, g, or t
  misc_feature (458)..(458): n is a, c, g, or t
  misc_feature (483)..(483): n is a, c, g, or t
  misc_feature (511)..(511): n is a, c, g, or t
  misc_feature (552)..(552): n is a, c, g, or t
tcaagctatgctctacctgaaaggggcacagggtcgccgcttcatctccgaccagagccggagaaaggacctctccgaccggccactgccggaaagacgaagcccaaatccccaactactaactattccggaggcagcaaccatcttactggcgtcccttcagaaatcaccagaagatgaagaaaaaaactttgatcaaaccagattctggaagacagtctgcttaactggtgaaaatatactggattatgtgtaattatggttctattctctgtgaaaacatgaaccatgtgaataaaacctttggacccttttanttcattttgtantcttaagaacacacacagatagtttattctttcagaacaaatatatataggctgctangcgagacatcatctcttcattgctcagtctgttagtgacaaaatgtttcagatcacctggtgctacctggngttctagatattatatatagctgancaaggtcttcttactaagcagactgctntctagtggtttttttcattgacactgcattgtttcccacanatcctccgtcttacaccagatgg

SEQ ID NO: 576473 - DNA, 435 bp, Homo sapiens
ttgcattcgcatttggagatgtcaaaatggagacaatatgcttggagacatcttaagtctcagcttaaatcctttccactaaattttggctgttagtccttctggaagctgctactgtctcaggaactgagtttcctcatctataaaatgaggtactcatacatatctcctacatttgttataggtttataagagataatatatgcaattcacgtagcacagggcatatagaatatgctcaataaaagatgtggtcatgtttgttatattctataagtttttataaaaatagctagctcttattgagtctctgcttcatgctaagtgcttcacataggtgacttcatttacttctcataactctgtgaaataagtattattcctattcccatttattgatgaatttaaatgacttgacaaagttgacatagtaaa

SEQ ID NO: 576474 - DNA, 691 bp, Homo sapiens
tactgggtaaagtatgctaagagtcttgccttgttcagggaggaggataagatattgaaaatttcagactttgaaacatatataattaaatgtgtatggtaaaactttaaggtaattatgaatagaaaagaacatcaatctataggttctaaaccaacaaaggagaaagcagaatatagaaaatctcaccaacctaagagaagacaggaaagacaaaaaaaaaattgaaagaagacaggaaagaagaaaaaaacctaagagaagataagaaagaaagaaacataaattagaaaactaaattaacaatggacagcaagtaagttcaaattattgactggctaactacaataaattgtaagcctgattaaatgtgtctattaacaaattgggagcaatatcagattagcaatttctcaaagtattcagttataagctattttcaaaagacccacttaggccaaaccacacaaattaaagagatgacacaaagacttaccacaaaatgctaaccaaaagaaaggtgggtggtgtcacagtacggcaactggaatctcagggaaatatatgtaatagggatagacgcagatcatctactggatctcacgacaccgactacatattcatgaacctataatgcccctaaaaacataaccttgaaattcaaaaccatgtaaacgcaaacctaggaaag

SEQ ID NO: 576475 - DNA, 1071 bp, Homo sapiens
ggtggaaggagactggcacagagtctagagaggctgagctaagctggtggaaacccagtgctggtatgagggccctgtaagctgtccctttgggacaggtgtgccatggcaggggacccaacacgagcgccaaggtataaacgctggcattgcgggtgcgcggcttaaaggatgcggaggagtgtgacattaggcagagtagcactagtgcttagcggtgtaggccaggctaacgtttcttggctctgcctgcagttaggcactctgagtacctgttcagctatgcccacctaaaaggatcttttactctttcatggcacaggatctcttggcaataaccggggttctcatcattagagctagaatgtctcaaggatgtggagcaatgggacgacggtgacaggactcgctgaaccactctcaggcgtgatacatactagccaatcttcccctttatatatagcgctcagagaatattactccagcgctgaacttgccatgtcaaaagcttgatcgtactaaatgcacttgattataatgtcaggacagcatccacttttcgcccatacccatgcaggcgtcctgcaagaattatcaatccgagagtagaagcactaatcaggacagtgacctggcctggaggcgacccgtaagagaagactatgtctcaatacgaaagtgtcagacgcacgcatgtgtgaatccgcagaggcccataagtgagtggcactgcttgtagccattgggcctcgggtaggcgccattggactgcacataggcaccgaaccaaagggtcgctatttaccacaacaaaaggaacgcaaatcgtaacaaatgcacggaggacgaccgcaacgataaacagcattaatggagaaaggagcgaatagcccaaagaggctatgacgaaaaggcgattaagattagggccactatatggagtatgtgcaaataacaagagcacccgactacttcgagggatttccagagtgatacccaatttgcccgttgcaatacaattaattccatggtgacgcagacttcacaagcagaaacgacacatttaccgca

SEQ ID NO: 576476 - DNA, 187 bp, Homo sapiens
atggcacacacagcacacacactagcacacagcacacacgaacacagcacacacagcacacacacaagcacagcacacacatcacacagcacacgcacacacagcacacacacgcgaacacaacacaacatacccccagcaggcgtgacggctccgtttactgatgctccgtttactgacccgctta

SEQ ID NO: 576477 - DNA, 416 bp, Homo sapiens
  misc_feature (52)..(52): n is a, c, g, or t
  misc_feature (129)..(129): n is a, c, g, or t
  misc_feature (294)..(294): n is a, c, g, or t
  misc_feature (308)..(308): n is a, c, g, or t
cggccgcgcgacacgtctgcgagaagacgacagagggaagccaagaaggggnccaggctcccaccatagagactgtggtgctgtacacggagagacccgtctgacagatcagggcagaggatcattgancgagacagaaagcgacatcctggttcacccagaattgacaccaaagatgttaaaaggataacttcacagtaaatcatttctcctgaaatagaggaagattctttacgttgttgtgcttgtttttaaatcatcagtatagtttaacacattctttctaagcagttntgtgtgggataatntgaagaatatattatgagtaaactccgaaaattttgtttatccaaaggctcaatggattatgtttctattatatacaaggttttaagtaaacataaaatttccagaac

SEQ ID NO: 576478 - DNA, 1561 bp, Homo sapiens
gcagtgtaactgcgtgggttggtttgtgtagagaggccgtgagcgagccctgttgtacggacgtgcacctgcatgcctgttctgtccctcccgggagacccccgacgctgtcgccgtactgagtcgccatggaatgtgcagaaagagtgcacagcgcatcatgacccatgtcaggtgtgtgaagatgtatacactccctgcaatgacagtcgacggtggcctaactggctatgacaaccgaggatgatctatgcaaagctgtacgcatgagtcatagcggacagactgcccaggagaactcatacctactcgagaacaagtgtggagtgcccatcgatgcccgaaggtgtacgtattgccctgtgcactggtcacttcccctcattctttggaacgcccagtcgaccgatgcaagactccagaacactggattgaagagccgtaaggtatcgtacatgtgatcattgaatgaatcataaggtagagaactcctacaggtaagtgtgattgatgacgaactagccatggtatatacgtgggtaagcctaaagtgatggaactaccgattagatgggacagggcgtgcctagaactagagtccatgaacgcgtaaataaacctcattccacgtagtcagtggtctattgattgccaactcaccgagtgtggtacacgccacgtgcggcacaataacgagtgtatcaacgtgacaccctgtcgcaacaatagctgaaaacagcgtacatgctagtgaaccaaagtcgtcctattacagtacggcaacaagtgacagaggtagtagacactgacaatgtgtggcacagttgttagtcatgcacactggaagaatactatagtgaatataatggctgactgaataggtatgataagactagtatagagaggtgacaacgcaatcgaaacgagcaatgagtgaaagtgtggtattaaacaatatactgatatacgagatttaggccacgaaagttagtggcacctttggaacattagcacacactgtccatacatctgagagtatgacacaaatgagagctatgaaatgaggtggtagcgtacacgaagtatagatcgtcataatactgcatttagttggacacatgaactgtatctactactgacaattagaattaggcaagaacagtcacatattcgtaagtagacatgctcatcccattatgtagacattatcgatatcaacaccgctgtgagtaggtagacgcttactcgttgacatcgtggtgtcatgcagagggcagctagcatggtagtacggaacagtgatcggaaacggatgaccagtcggactagaacagtggagcacggtgtggtagtgaagacaatgaacatagtgcatagcgaagacgacgatgagctcgcggtgtagagtaggcgagaatgtagtaggttgtctgtgcgctctttatcaataatggttaacacagcgtagagtcagctgtgtacagtaatagagtaggggagatagagagtaactagagtggaacgtaactgtaagaggagacaagagaaagaccgtagtgtg

SEQ ID NO: 576479 - DNA, 899 bp, Homo sapiens
  misc_feature (1)..(1): n is a, c, g, or t
  misc_feature (4)..(5): n is a, c, g, or t
ntanncctgcagaatggagtgtagcatggtacttagcactagataacaaacgatttgatgaagaatctcatcggtcacaccgtgggcgcatataataaccgccttttcccctgagtgtttgttcgcaaggtatgtgttttgttccaaaacccgggattagaggctcattttgtggggacgcgggatgtaattttcgaaacccgaaatctcttccggtcccaaaaaacggtctttcttcaggttcaaagccttcttctctaatagaaccgtgcctcaccatatattcttttatatgttgtgggcccttttctctgacataattcggtccccgcccgccgggccaaccggtttatagccgccggagcagccacccccccttggttaggacaagcgtcatatcagcccccggcctttccaggcccccgcccacagggggttagaacaaccaagggacgccgtcccaggtcggatatgttcccccggggggggccaaagacacgtgaatctttgcggagttaccccgaaaatcaggacaaaaacgaccgacaggagaggttcacccgtggtatcgtcaaatatcggcgtgtgtgcgccacaaagaagggtgattcaggctttttcgctccacttaacagggatcgcttaggttagtgagtgatctgttacgggagctttctgtggtcgcacaaccacaacaaagggagatttgtcaaccaaccgattggtaccaccatgagcgctgctattctcttgttgggtgagaaacgaggatcagggctttatgaatgtcgaacaccacacggatgggtcaaacaagtgtgtaagacgcacatctctttctttggcctccaatttttgaatgtggtattcattcttcagtacaagaagagtgcggccca

SEQ ID NO: 576480 - DNA, 269 bp, Homo sapiens
tctcatcctcatcatccagttctcgaagccgctcacgatccccatccccccggctttagaagtgacaggaggcggcggtacagttcttatcgttcacatttcctttaccaaaaggcaagagtgctacaaaaggagcgtgccataaaagaaagaagggtggtcttcattggaaagattacctggccgattgactcgatcagagctgaaacagaggttcttcgtttttggagagattgaggagtgccaccatccacttccgtgtccaagga

SEQ ID NO: 576481 - DNA, 236 bp, Homo sapiens
taggctaatgggtcccaaagtgccagtggcacaagctacacatcgcagccccgtatagcctgccggcagtggcacacaatctgatgggaataacatcctggtggcacgaagtagcaaagtgactgatggctcccagggccttcaggacagtgacagtgccggcactggaccccatatggcagccgtgtgtacccgtggaaaccagcaatgcaacttacacagtgctcaccacctgt

SEQ ID NO: 576482 - DNA, 159 bp, Homo sapiens
aaccgggggggtttttagggggttccccccccccccccctcccccggggggcccccccaaattttttttcccctttggggggggggggggccccccccgggggccctttttttttgtgttttttttttaaaaaaaattttttttttttggggcccccca

SEQ ID NO: 576483 - DNA, 1009 bp, Homo sapiens
ggccatattagcagcggttattcggtgagcggctggtggtttattcttccgcggagcttaagggctccgtggacatctcaggtcttcagggctcttccatctggaactatactcaagttcagaaaacatgtctcgaagatatgactccaggaccactatattcttctccagaagggtcgctatataccaagcttgacatatcgccaatggaaagctaatttggaacatgcagggcaacctggtaccggcgaacatttcaagcacacatggatgggtgtatcttgctttgcaagcagcagagaacgccaacatcgcacgaaagacattctttgcactgaaaagtcgtttcattgcctcttggaacacaccaagtttgtatgtacaaccttccaagtggcagggaccagtgggcctttgccagcttggtgggacgagggccacttaaacggtctcgtggaattgccttacaatggcttcctggagcattaaacttggacaccttaaaggggcctctacttgggtctccaaacacgggtacatcccactctaccacgcttattccagcgaaggcccaaattaagcattgctgcacgccaagaatgagggcatttacaaggccgaccttgctgctggaactacttcccaacaccagaagccgtttaatttaccaccaaacttctcggcgcagcgcaaaaaaaccggttcccccatttagcgggcaggttcgccaactttggcctcgcttcaccactttggcgctcggggggcacttaaaggccacccctaattgcgggcgcttcatccaagggccgttccttaatgtccagagcaaggtgggaaccccccttcaggttgcggcacacacatttaaccgcgggcgcgggcactcggcggcgacgagggccccaacaccacaattgcggcaattgggcgcccacaagatccagctaagcgcgggcattggaccagcccaaggcggttcccaaactgggttcgaacaccaccgccc

SEQ ID NO: 576484 - DNA, 405 bp, Homo sapiens
ttagttggcgtgaaggcccaccgagggcgttagctcagcaagtcaggctggagggcaggcccggtgcttgctagcacgccatgtgactctggacgagaccctcccctgtctgggctcggcaccttgtctgtggcctgagatccatgtgaacgtacagcaggaggtgaggcaagggagagtagggtctggaggcagggaatctaaggcccattcacactgacttccctaaaacttaatcccaagggaagaccccaattgttccatggcccaagtaaacaaaaaggaccgggaggctactttccttttgcaaccccctctttttctacacggcaggatgaaaaaacttgcaagaaacctctagattcgtccccctaccacaattgggttgggccctcacgccagggt

SEQ ID NO: 576485 - DNA, 497 bp, Homo sapiens
ccttgcgattacattagactcatcctggttaaccaggacactctcctaatcagctgattagcaaccttaattccatctgcaaccttaaatcccctttacgtgtaacaaaacatgttctgttacacgtaaaggggatttaaggttgcagaacatgttttgttgtcacaagcaagtaaaagaactactctgagccttttttctgttacgtaaacattaggaagcaggatcacaactggagttaaaagacattcagataacacaggcatgatgacctgcatttgcaagggcattgaagaacaactttgggctagaattctttttgcttcttttcttttcttcctcttccccttcttctttgcttcccttcaccctttccttgtttctctctcctccttgtactcttctgttactcttcttcttccacctttttttctcctgctgctccttttaatagcaagcaagatcttgtccaaagggcaagatcactcctagctccc

SEQ ID NO: 576486 - DNA, 1140 bp, Homo sapiens
  misc_feature (266)..(266): n is a, c, g, or t
  misc_feature (521)..(521): n is a, c, g, or t
  misc_feature (873)..(873): n is a, c, g, or t
caagtatcctcgtttgattatgttaagaaaaaagaaagaagagggtgttattgattcatctgacaatagaaatcgttgcgtgaagcagaaatactgggatgtaataagccgatgggccctctgtgttcataactagacatggtctgttttgtaatggacgaagattacgagaacagattaagaaatacgaggcgccaatttccgtactgatgttgtgtacacgagacgagacgagacaacaagcgccaacaggattaccattgctntactatcggttctatggtgcacgactgctgtcgagtaaggccacattgggcagtgcacatgacttcaagccatgtaatactactcgataggattgcacagcattactctatgaaagggaggatcgtacggatagtcacgacactcttatatgaaggaacgaggtcatgcatgcagtactgggtacggcataagatggccctgctgaagaacactatgtgctccgagaaggaaccttggccgaaaggagacttcgntgtcaaagcagtaaccatgttataaacatggtgtgaaggtaggcagaggaaggaatcttctggtggcgaagaagaagatgaagatgagaacattgaggtggtgtattcgaaggctgccagtgtaccgaaagttgagactgtaaagtcagacgaacaaggatgacgacatcgatattggatgccatttaaagggatggatgcgaactagcttaacagtataatggtgcaaattttcctccattatcagccagaagtgccacatgtatgtgcaagggtaaaatgggttaaagtgcatgtttaaatttacactaagaaatctattactgtgaagtggtcctggtgaattaagacncatggagaacatcttagggagtccatacacatcaagtgagcagatggttagttggctaattaaaggcatggtctcttttggaaaatctagtgtggggacacattgggggccacttatacgggttacacatacaggtgacaagggcgaccacaacagttgggctgaagacataagggaaaagggccctaataaagggggcactaaccggagagaactgtggccccacatgggcggagaaaagcccagagaaaagtggtaagcaaaagt

SEQ ID NO: 576487 - DNA, 255 bp, Homo sapiens
ctgacgattagctccgaaagatctcaaatcataccgttggggtcctgcaggctccagctcttcttccctaggtcaaagccactatcatctgatgtgttagggataggttcagaatggcaaaaataaatcagctcccaatgggagcccacggaactaagtagggtcccaagaaaaaaaacgggagctatttcacagagctgagctactgccaaatatcattcctcaaaccctttaatagagggtaaatattagggg

SEQ ID NO: 576488 - DNA, 360 bp, Homo sapiens
tctcttgacgtgttcatttgtcgtcttagtgctatcatgctgggtcaggtcggggcctaagccaccttcttgggaatgttccactggcccttatcactggggctgtaacctgtatcctcacccttctatttctttcccttcaagtgtatgatcgtactcatggcttttggccttgggtttagtgcatatgcctctaaatcctggcgcaaagatattatttggacactgtccagtattctctttgtccagcagatttctaagatcagttccaccataatccctgggttccaagcctcttctgtatttcagcttcttcgagcaaatttctttggaggattactattggttttgccttcctca

SEQ ID NO: 576489 - DNA, 1001 bp, Homo sapiens
ttggtgtcctcccctggcttggactttgtttcgggcgtaattgtgcagatatcatttatgggggtcatcgtatgtgctttggaacacgggaaacatccatttttgcgccgaagcggttgtgtgaactctatttgtgtggaatctctctgacaggtggagccaaatttagacctacagattgaggtgctggtgatttggaaatctgtttgaatatgctgctatggaagatcctacatctccgtattcaggtagtaggttttcctgactatgtaatgataggttctttgtcctcgataatttccggagtttgtccaacagatccgtgttaaggctagatggtgtggctgattcatgagtgacatctgagtaacccttcagaaactatgatgtaactgtctgcagtgatagaagcatatgagggcatgcacattacaatctatttgcaggagtggacaaatggacactcctagattgatctggtatgaaatttacgcaagccaaagcagaggttgtgctttaaatggaagtgggtggatagaaagatccttaggtactacgaaactcttgtagtacgctgacccgaacggggaatacaataattatctacctggttaaccactgctagatggtcaagaataatgccctttaacctgttgctaattggattatagataaatataatatgcgtctttgttcacaatatcctatgatttgtgttgagatctagggctctagtgttcagaattcatgaaattatccatggtacacactagttattaaattacataacttcaaagataacattgttattcttaagccttatacctaatcattgtaacttcgcatgtatccatacctggatttgggatgagaatacttataagatcttctccattggtaataactggaagtgaagtaggttttgttgcttgtacagtggtcagatgatggacaccactatcttttattttgccgattacatcttaactcgcgcgggtgcc

SEQ ID NO: 576490 - DNA, 393 bp, Homo sapiens
cccaaagtgttgggattaccagcgtgagccactgcacccagcctatttatttattttgagacagggtcctattctgttgccaggctggagtgcagtggtgcagtcaacctcctaggttgaagtgatcctcctaccttagctccggagtagttgggactacaggcgcatgccatcatgctcagctaatttttgtattttttgtagagacagggtttcactatgttgcccaagctggtctcaaactctggtgctcaagtgatctgccctcctaggcctcccaacgtgctaggattacaggcataagccaccatgctcggcccatttaaaccatttttaagggtacaatttagtggcattacttaggtccacaatgttatacaactaccatcgcta

SEQ ID NO: 576491 - DNA, 475 bp, Homo sapiens
  misc_feature (68)..(68): n is a, c, g, or t
tcagctttgatctgagttttattagcctatgcctttgttccctctctcctttaggggaacagacgggnttacggctggtctccccatccctctgtcagctgcaggcgggtggcgggcggccgctctgataaggcctggtccctgcccctgtgcctctgtggggtgccggcacagcaagcctgggacctggccgccgcacctccgccaggtcaccgggaggcctggggggcaggtaccctcaggttagggggactctgggatacagacccctgcaagcccgtggcctcctatttctcccatcccacctccctccctctgcctgatgactcccatgggtggggcttctgccttcccaaggccctgtgcctcagtttccttacctaaagaacagggtgctaatggagacaagggagaccaggagacagctcagccaggggccaaaccagcagctattgctatggaggttcactcgtgc

SEQ ID NO: 576492 - DNA, 841 bp, Homo sapiens
  misc_feature (48)..(48): n is a, c, g, or t
  misc_feature (92)..(92): n is a, c, g, or t
  misc_feature (96)..(96): n is a, c, g, or t
  misc_feature (140)..(140): n is a, c, g, or t
  misc_feature (156)..(156): n is a, c, g, or t
  misc_feature (162)..(162): n is a, c, g, or t
  misc_feature (178)..(178): n is a, c, g, or t
  misc_feature (184)..(184): n is a, c, g, or t
  misc_feature (203)..(203): n is a, c, g, or t
  misc_feature (206)..(206): n is a, c, g, or t
  misc_feature (216)..(216): n is a, c, g, or t
  misc_feature (220)..(221): n is a, c, g, or t
  misc_feature (257)..(257): n is a, c, g, or t
  misc_feature (297)..(297): n is a, c, g, or t
  misc_feature (318)..(318): n is a, c, g, or t
  misc_feature (326)..(326): n is a, c, g, or t
  misc_feature (328)..(328): n is a, c, g, or t
  misc_feature (340)..(340): n is a, c, g, or t
  misc_feature (344)..(344): n is a, c, g, or t
  misc_feature (350)..(350): n is a, c, g, or t
  misc_feature (360)..(360): n is a, c, g, or t
  misc_feature (405)..(405): n is a, c, g, or t
  misc_feature (413)..(413): n is a, c, g, or t
  misc_feature (419)..(419): n is a, c, g, or t
  misc_feature (424)..(424): n is a, c, g, or t
  misc_feature (440)..(440): n is a, c, g, or t
  misc_feature (482)..(482): n is a, c, g, or t
  misc_feature (489)..(489): n is a, c, g, or t
  misc_feature (514)..(514): n is a, c, g, or t
  misc_feature (645)..(645): n is a, c, g, or t
  misc_feature (648)..(648): n is a, c, g, or t
  misc_feature (655)..(655): n is a, c, g, or t
  misc_feature (657)..(658): n is a, c, g, or t
  misc_feature (660)..(660): n is a, c, g, or t
  misc_feature (669)..(669): n is a, c, g, or t
  misc_feature (680)..(681): n is a, c, g, or t
  misc_feature (684)..(684): n is a, c, g, or t
  misc_feature (686)..(686): n is a, c, g, or t
  misc_feature (688)..(690): n is a, c, g, or t
  misc_feature (692)..(693): n is a, c, g, or t
  misc_feature (696)..(696): n is a, c, g, or t
  misc_feature (705)..(705): n is a, c, g, or t
  misc_feature (707)..(708): n is a, c, g, or t
  misc_feature (710)..(710): n is a, c, g, or t
  misc_feature (712)..(712): n is a, c, g, or t
  misc_feature (714)..(714): n is a, c, g, or t
  misc_feature (720)..(720): n is a, c, g, or t
  misc_feature (724)..(724): n is a, c, g, or t
  misc_feature (727)..(727): n is a, c, g, or t
  misc_feature (731)..(731): n is a, c, g, or t
  misc_feature (742)..(742): n is a, c, g, or t
  misc_feature (747)..(748): n is a, c, g, or t
  misc_feature (751)..(753): n is a, c, g, or t
  misc_feature (774)..(774): n is a, c, g, or t
  misc_feature (778)..(778): n is a, c, g, or t
  misc_feature (790)..(790): n is a, c, g, or t
actgcacagctctcttctctcgccgccgcccgagcgcacccttcagcncgcgcgccggccgtgagtcctcggtgctcgcccgccggccaganaaanagcccgcccgaccccgtcccgaccctggccgccccgagcggacntggagcaaaatgatgnttcaanacccaggccaggtctntgcctnggaagtgagtgcttctgcnatngtcccctgantgtnncctcctgggtaactggtgtttgaggattttgctaanctgacgccctttgtcaaggaagagctgaggtttgccatcnagaacaagcacctctgccacnggatgtcntntgagctggaatnagtnactgtnagcgaaaganccctcggggtgtccatcaaaaaagccgaggtagcccctgaagaanatgaaagnaaaaanaggcnacgagaaagaaataanattgcagatgcaaagtgccgaaaaaagaagaaggagaagacngagtgcntgcagaaagtgagtgccttctagcnttacccttcctctcgctcacgccatgttttcaccagcttcatgtggctataagaagaagagttagaaaactccctacttggttatagtttcccaagaagggccttgtagctggtagcagaaatgccacttncanaatcacnanntnccaaaccanttaaaacaatnnatntnannntnnatntataaaaananntntntnaattcntctnatncctnactcccaccancctcnnccnnntcatacatgtccatcagcttncagnctgcaggacatnccaccccacttaaacacccttcacttcactcttttcctcacaaaaccaacc

SEQ ID NO: 576493 - DNA, 153 bp, Homo sapiens
aagagatctgtttagggacacaggaggccaaggacacaaaaaagcaaaagaactagcatgctttttcaatggatgtctatttttacagggctggctctcagattattgttatagctttaaataaaaggcccgttttgtcatttcggaaaaaaa

SEQ ID NO: 576494 - DNA, 187 bp, Homo sapiens
ggccagggaccaagtatgtttctctgcctagggcctgcataaaccagggctctcaagggtcactgagggggccgagggtggtctctcctggaaaaggcgaatagtctctggggggaagcatccccaagttggacctcagagatgtccccgataccagctggcaattaaacaaccaaacgttccggga

SEQ ID NO: 576495 - DNA, 406 bp, Homo sapiens
tccattagagcttcatccagctgactaggagcactgtgttgatattttttctgcctgggttgctctctactccagctcatcacatagtgggattctctggccaaaacgaagaaggggagattgaatttgggctcacgttagcagtctcttccatacatgcctgctcagaggattaaaggctacagaagggcttgagtcaccttgctctgagaaggatacagaatgcttgaggtttatggcactgtgccttgccttgagtgtctcttacatgctgcgcccaagagtccctattctgagttgcaggtgtctcgtaagactcctctgctaattcgcacacatttactttagggcccttattccatggctgtctccttttaaatgcccttaaaggactctggtttgaggc

SEQ ID NO: 576496 - DNA, 545 bp, Homo sapiens
  misc_feature (228)..(228): n is a, c, g, or t
  misc_feature (388)..(388): n is a, c, g, or t
atcaacatggctcttaaatcccttctcatcactcctttatctcttttctcttgcagtttatttttgaagaagctgggtcacttgactgtggagtctgtccaagtctgaagttttattttttttgcatccccaagtggtgtttaacagactcattgggtttacaatttgggagttgaatccggaggctttacttctagttggcttttgccaagactactttttaggaantgctatgttcttcctttggaaagcacataaggtctggctgtctctttttttagtgatgttgctgtttggtcaataagttaaggtggaatcagcctgatttgttcttcgcttttaaaacaaaacaaaacaaaaaacaataacaacaacaaaaaacaccctntctcctttgtcactaataaggaatatgcagagtgagacttgagattctgtgaatagcctccctgataacatcttgctcaacagtttcagcgtccattgacaattcttttttttatattttttattttaataaagacagggtctatgttaaaaaaaaa

SEQ ID NO: 576497 - DNA, 478 bp, Homo sapiens
  misc_feature (20)..(20): n is a, c, g, or t
  misc_feature (38)..(38): n is a, c, g, or t
  misc_feature (41)..(41): n is a, c, g, or t
  misc_feature (43)..(44): n is a, c, g, or t
  misc_feature (47)..(51): n is a, c, g, or t
  misc_feature (56)..(56): n is a, c, g, or t
  misc_feature (59)..(59): n is a, c, g, or t
  misc_feature (62)..(62): n is a, c, g, or t
  misc_feature (87)..(87): n is a, c, g, or t
  misc_feature (103)..(103): n is a, c, g, or t
  misc_feature (110)..(110): n is a, c, g, or t
  misc_feature (116)..(117): n is a, c, g, or t
  misc_feature (172)..(172): n is a, c, g, or t
  misc_feature (223)..(223): n is a, c, g, or t
  misc_feature (281)..(281): n is a, c, g, or t
  misc_feature (288)..(288): n is a, c, g, or t
  misc_feature (387)..(387): n is a, c, g, or t
  misc_feature (389)..(389): n is a, c, g, or t
  misc_feature (401)..(401): n is a, c, g, or t
  misc_feature (417)..(417): n is a, c, g, or t
  misc_feature (442)..(442): n is a, c, g, or t
tctcttttcacactgtattntgattaatggataaatgnatnanntannnnnctggnggnctncctgcacactctggggagccagggncccagcaccctccagnacagganatctgnnatgcctggctgctggagtacatgtgttcacaagggttactcctcaaaacccccanttctcactcatgtccccaactcaaggctataaaacaacaaaatggaaaaanaatgttctgctgcgtccccaccgtaacctccctggcctcccctctctcagggagcagntcacagntcaccatggggaattctagcccccactggtgggatgttactaacaccattctggttattttggcgtctttatttttggtgggatgtgttttttcacgtntntgtttgtgtgtntgtgtgtgtgtgtttnttttctgtgacctcctgtccccatngtacgtcccaccccctccccaaatcccctatccctc

SEQ ID NO: 576498 - DNA, 210 bp, Homo sapiens
aagaagattgcggatattgaaaggagggttgtcactaaaatgcagaatggggatgtgacctggaaattagagggcctaccttttctgccacttgtcccagaacacacagggccactgggcttatcacatgccaaagtcctgataataaatcagcctcttgccacgatactcccctcaatctagggggtctcggatcctgctaattgggta

SEQ ID NO: 576499 - DNA, 671 bp, Homo sapiens
gctctgtcgagagatgtgggcagctggtcaggatggccattcgggctcagcacagcaacggggcgcagactcagactggggaagcaaacgaggggctggacaggccaggagagcctgtcggacagtgatcctgagatgtgggagttgctgcgagaggtgagaaggacagtgcatgtgtctgtggccgtgtgagcgtcattgcctcaagagaacttcgtgcagccgagctgcgcttggaggcccgtggggtcctgtcttgaaggataagtactcggaggggttatccttggcaagagatacgtatgggggatgcagaggtggctggcatgacatttgagctgggttgtgcctatgcgcctggtgccttgggaagccttttgaggctggatcctgcccaggtgggggagtccaatgtccagccccttagtccggggtcccgcagccatactggccgtctagactaggcctttcttgcaggacttagcgaaccgggatcatggggctggaccttgcccggatggggggccagtctcacccgaggggtacattgttcttgacgtcaagagcggatatcaggcacggtcccatcttcttccgagtctattggccctataagctcaatcgccaaaaattgggctcatttgactacaaccaggtttgggcctgaatgg

SEQ ID NO: 576500 - DNA, 944 bp, Homo sapiens
gagcgcgcccgttgcaagatggcggcggccatgctgggccccggggctgtgtgtgcgcagcgggcggcggcgcggcccggaaggctggcgcggcgacggcgttagcccggccctcggcccctctttgcggccgctccctccgcctattccctccttgctcgagatggatctgcccgtgggccccggcgcggcggggcccagcaacgtcccggccttcctgaccaagctgtggaccctcgtgagcgacccggacaccgacgcgctcatctgctggagcccgagcgggaacagcttccacgtgttcgaccagggccagtttgccaaggaggtgctgcccagtacttcaagcacaacaagcatggccaggcttcgtgcggcaggctcaacattgtatggcttccggaaagtggtccacatcgagcaggggcggcctggtcaagccagaggagagacgacacggagtctcccagcaagccatgctttcctgcgtggccaaggagcaagctcctttgagaaccattcaagaggaacagtgaccaggtgtgtccacccttgaaggagtgacagacggtaacacgatccgccaggaacagcgtcaaccaacgctgcctgaccggaccgttgcaggctgatgacaggggacagcaggagttgcaattgggacttcccaatgcgtccttgtgccaactgagaagccatgtaacgcaaatttgcgagggcattacataggtgcgagccggggcgacgagatggggccaaggcccatattcggcgcgcggaacgatccacatttgcccccagcggcaactagaacagggttccgtcgagccacagcgctcgcattccgaagttcccctggagttgtcgcaacttgggttgcaacgtgtcccaaaaaccgggaattacccttgcgggggttacagatcaagaagacggattccacg

SEQ ID NO: 576501 - DNA, 398 bp, Homo sapiens
aggtatactacagtccatcgtatctcgtaagttcgacacagaaatgttccaggtatcgtgattaaacccataattaaaagtaactccgaagagatcaggaccagggtcacgccatggttcatcttctacagaatccaaatctacctctaaaagtggaactccatgaatgcttccaggtgcatcaaggtctactcctttgagtattgtccgtgtagtcccataaactcttgcccctgtcttgatgttcagatttacaggtgatgtagcataactcccatactgtggtgctcccgttataatgtctcctatagtgagatgaacatcatcttcatcatcatcgctgtcactatcactatcatcttcggtctcagtcactttcggtatcggtacaccattta

SEQ ID NO: 576502 - DNA, 509 bp, Homo sapiens
  misc_feature (434)..(434): n is a, c, g, or t
  misc_feature (498)..(498): n is a, c, g, or t
gtcgtttaaacctaggagtctgagaatcctggcaacgtaccgagaactcatctctaggaaaaataagaaaattaggccgggcgcggtggcgcgtgcctgtagtcccagctactcgggaggctgaggctgggaggatcgcttgagcccaggagttctgggctgtagtgcgctatgccgatcgggtgtccgcactaagttcggcatcaatatggtgacctcccgggagcgggggaccaccaggttgcctaaggaggggtgaaccggcccaggtcggaaacggagcaggtcaaaactcccgtgctgatcagtagtgggatcgcgcctgtgaatagccactgcactccagcctgggcaacatagcgagaccccgtctctataaaaaacttaaaaattagctgggtgtagtagtgaacgcctgtagtcccagctacttnggaggctgaggcaggaggatcacttgatcccggggaggttgaggctaacatgagccgagatcanaccaccgcatt

SEQ ID NO: 576503 - DNA, 565 bp, Homo sapiens
  misc_feature (285)..(285): n is a, c, g, or t
  misc_feature (303)..(303): n is a, c, g, or t
  misc_feature (305)..(306): n is a, c, g, or t
  misc_feature (312)..(312): n is a, c, g, or t
  misc_feature (314)..(314): n is a, c, g, or t
  misc_feature (342)..(342): n is a, c, g, or t
  misc_feature (373)..(373): n is a, c, g, or t
  misc_feature (513)..(513): n is a, c, g, or t
gagcgcgcccgttgcaagatggcggcggccatgctgggccccggggctgtgtgtgcgcagcgggcggcggcgcggcccggaaggctggcgcggcgacggcgttagcccggccctcggcccctctttgcggccgctccctccgcctattccctccttgctcgagatggatctgcccgtgggccccggcgcggcggggcccagcaacgtcccggccttcctgaccaagctgtggaccctcgtgagcgacccggacaccgacgcgctcatctgctggagcccggtgangagcgcgcgggcgggccngnngggacngngaggagcagggccgcggcggacgggggnagggctgcggggaggggcctgcgcacttcancttacgcgcggtgagcctgccctgcccccgccagagaagggcgcgggtcccgagcctgctcagacccagagccttaagttgggaaagcggctacgagacccacactcggttcaacccctgccccagcgaagtttccctgngatggggagaatggggcgtctcttgtattgggcttctgctaactgttgggcg

SEQ ID NO: 576504 - DNA, 482 bp, Homo sapiens
ccttgatgtcctgcgaccagtctgggcaacactgtgagaccctacaaaaaataaaataattctctacttaataaaaaattagccaggcgtggtggtgcatgcctgtaattccagttactcaggaggctgaggcacaagaattgcttgaacctgtaggcagaggttgtggtgagccaagattgcaccactgcactccagcctgggtgacagagtgagactctgtctcagaaaaaaaaaataaataaataaatacaaataataaattagctgagctctggtgtgtcatgctagccaggtttatacccctgtggctgaagagctacatcatcttatattaacatgtaatactcatttattggtacaaaccttcaagccatatagccatatttagttccaaagctggcctgagtctttatcccttctatggcatttttggggcagttttgaattcctagcctagacagctccccaaggtctgcaag

SEQ ID NO: 576505 - DNA, 572 bp, Homo sapiens
  misc_feature (501)..(501): n is a, c, g, or t
tgtttatcgatcccacacgtgatgaaaattgaagcacaattcattcaccctccaaagtatctcaagctagaaatatcttcctccgcagatccccgtaccctgatatggaaagatctttagatgtactaagtgaaagatgccaagttagtgacatatatttatagcatgttccctaccctgtcaatgaaattccgtctaccctgagagcctctgtggaaaccttaaccccagctctctctctttgtgaaaggaatatatgaaatcagatatgtgggtctcccctttcagaaccggaccagccttaatttaagaagaactgtgggccgggcgcggtggcgcgtgcctgtagtcccagctactcgggaggctgaggctgggaggatcgcttgagcccaggagttctgggctgtagtgcgctatgccgatcgggtgtccgcactaagttcggcatcaatatggtgacctcccgggagcgggggaccaccaggttgcctaaggagnggtgaaccgacccagtcggaaacgacagtcaactccgtgctgatcatagtgaaccctgtgatacatcatcg

SEQ ID NO: 576506 - DNA, 399 bp, Homo sapiens
  misc_feature (105)..(105): n is a, c, g, or t
  misc_feature (135)..(135): n is a, c, g, or t
gcacacgggtgggcagatcgcttgagtacaggagttccagaccagcctgggtaaaatggtgaaaccgcgtctctgcaaaagattagctgggcatggcggcatgcnctgtagttcagctgctcaggaggctgaggngggaggattgcctgagtctggagaagtcgaggctgccctgattgccactgcactcaaaaaaaaaaaaaacaacaacaaccaaaaaaactggccaggcgtggtggctcatgcctgtagtcccaaagtgctgggattacaggcgtgagccaccgtgcccggcctgggtgacccatttaaatcacttttgatgatcctggggtatgtgacattttaaaataatatgtatatatggaaggaaataaaaaactataaaaaaggaaaaaa

SEQ ID NO: 576507 - DNA, 83 bp, Homo sapiens
tctagcaggatgcccactcctccactccacctcttcctgcagctgtttttgtaccaaaaatattatattactgtcttcatctt

SEQ ID NO: 576508 - DNA, 194 bp, Homo sapiens
taaaaattgtgaataggctgggtgtggcggctcacgcctgtaatcccagcactgtgggaggctgaggtgggagatctcttgagccctggaattcaagaccagtctagtctgggaaacacagcaagacccgccttgctgggcgcggtggctcacgcctgtaatcccagcacttggggaggctgggcgtgcagtgg

SEQ ID NO: 576509 - DNA, 161 bp, Homo sapiens
caatggaatttttggacggggcaagctacgtacatttatggcagaaaaaaagtgcaactgacatactacaaagagattttttaagtttaaacacaagtttggactctttgtggatttcttatttttttttattgtgtcctttttgtgtgcttaaaattagc

SEQ ID NO: 576510 - DNA, 507 bp, Homo sapiens
  misc_feature (203)..(203): n is a, c, g, or t
  misc_feature (210)..(210): n is a, c, g, or t
cgcacgatggcgcgtccttggtcactgtaacctccacctcccgggttcaagtgattcttctgcctcagcctcccgagtagctgggaccacaggcatgcgccaccatgcccggataattttgtatttttagtagagacagggtttctccatgttggtcaggctgttctcaaactcccaatctcaggtgatctacctgcctcggnctcccanagtgctaggattacaggtgcgaaccaccacgcccagcccgaaacacattttttgtttgttcattgttttgttttcgagacagggtctcgctcttttgcccatgctggaatgcagtgcgctatgccgatcgggtgtccgcactaagttcggcatcaatatggtgacctcccgggagcgggggaccaccaggttgcctaaggtatggctgcaccaggtcacacgtatcgggcatcgtaacagtccaattccctcgctgtcaacatcgtgactgcgattgcggatacatttacatcagga

SEQ ID NO: 576511 - DNA, 447 bp, Homo sapiens
  misc_feature (184)..(184): n is a, c, g, or t
  misc_feature (219)..(219): n is a, c, g, or t
  misc_feature (234)..(234): n is a, c, g, or t
  misc_feature (242)..(242): n is a, c, g, or t
  misc_feature (245)..(245): n is a, c, g, or t
  misc_feature (254)..(254): n is a, c, g, or t
  misc_feature (265)..(265): n is a, c, g, or t
  misc_feature (279)..(279): n is a, c, g, or t
  misc_feature (288)..(288): n is a, c, g, or t
ttctaagcatgttaattttacctgggatagacaggactttattttttatttttattttgtttgagacggagtctcgctgtgttgcccagcctggagtgcagtggcgcgatctcggctcactgcaacctgcgcctcccgggctcaggcgattctccttcctcagcctccagagtagctgggagtncaggtgcccgctgccacgcccggctgatttttgtntttttggtagagacngggtttcnccntgttggtcnggctggtctcnaactcctaagctcnggtgatccncccgccttggcctcccaaagtgctgggattacaggcgtgagccaccgtgcccggcctgggtgacccatttaaatcacttttgatgatcctggggtatgtgacattttaaaataatatgtatatatggaaggaaataaaaaactataaaaaaggaaaaaa

SEQ ID NO: 576512 - DNA, 310 bp, Homo sapiens
  misc_feature (235)..(235): n is a, c, g, or t
  misc_feature (299)..(299): n is a, c, g, or t
agaggagtccccaacatgcgaacggactgatcgaccaccaggttgcctaaggaggggtgaaccggcccaggtcggaaacggagcaggtcaaaactcccgtgctgatcagtagtgggatcgcgcctgtgaatagccactgcactccagcctgggcaacatagcgagaccccgtctctataaaaaacttaaaaattagctgggtgtagtagtgaacgcctgtagtcccagctacttnggaggctgaggcaggaggatcacttgatcccggggaggttgaggctaacatgagccgagatcanaccaccgcatt

SEQ ID NO: 576513 - DNA, 593 bp, Homo sapiens
  misc_feature (323)..(323): n is a, c, g, or t
ccattgtaaacatgtatttgattttacataaaatatttactttaaaatgagttaatatttatagtctaaaaatgtgaaaatacatatatggtcatagtctgaaagacatatatacacagtaagctttatacctaaataagaacatgggaagtaagaaagataactagcacaaaaatccaaactggctgttttactccattgaaagttgcatttaattttgagttgactgagaaaggaataagatgggatatactataattcttattatgaaatgaggtaactgtactagttattaagaaggaatattaaggctgggtgcggtngtcacgcctgtaatctcagcactttgggaggccgaggtgggcagatcacttgaggtcaggagtttgaaaccagcctgaccaacatggtggaatcccgtctctactaaaagtgcaaaaattagccaggcgtggtggtgggcacctgtaatcccagccactctgtaggctgaggcgggagaatcacttgaatctgggaggcggaggttgcagtgagccaacgttgtgccactgcactccagtctgggtgacagagtgagactccattaaaga

SEQ ID NO: 576514 - DNA, 496 bp, Homo sapiens
  misc_feature (318)..(318): n is a, c, g, or t
  misc_feature (320)..(320): n is a, c, g, or t
  misc_feature (324)..(325): n is a, c, g, or t
  misc_feature (328)..(328): n is a, c, g, or t
  misc_feature (331)..(332): n is a, c, g, or t
  misc_feature (336)..(336): n is a, c, g, or t
  misc_feature (350)..(350): n is a, c, g, or t
  misc_feature (352)..(352): n is a, c, g, or t
  misc_feature (360)..(360): n is a, c, g, or t
  misc_feature (378)..(378): n is a, c, g, or t
  misc_feature (381)..(383): n is a, c, g, or t
gtcgtttaaacctaggagtctgagaatcctggcaacgtaccgagaactcatctctaggaaaaataagaaaattaggccgggcgcggtggcgcgtgcctgtagtcccagctactcgggaggctgaggctgggaggatcgcttgagcccaggagttctgggctgtagtgcgctatgccgatcgggtgtccgcactaagttcggcatcaatatggtgacctcccgggagcgggggaccaccaggttgcctaaggaggggtgaaccggcccaggtcggaaacggagcaggtcaaaactcccgtgctgatcagtagtggctantncagnngcngannatantcactgcagcctcnanctcctagnctcaagtgatcctcctgnctnnnctcccaagtaggattacaagcatgcgccgacgatgcccagaattcagaaccttgtctatcactctccccttcaacctagatgtgaaaacaggattaaactcaacccggaaaac

SEQ ID NO: 576515 - DNA, 571 bp, Homo sapiens
  misc_feature (323)..(323): n is a, c, g, or t
ccattgtaaacatgtatttgattttacataaaatatttactttaaaatgagttaatatttatagtctaaaaatgtgaaaatacatatatggtcatagtctgaaagacatatatacacagtaagctttatacctaaataagaacatgggaagtaagaaagataactagcacaaaaatccaaactggctgttttactccattgaaagttgcatttaattttgagttgactgagaaaggaataagatgggatatactataattcttattatgaaatgaggtaactgtactagttattaagaaggaatattaaggctgggtgcggtngtcacgcctgtaatctcagcactttgggaggccgaggtgggcagatcacttgaggtcaggagtttgaaaccagcctgaccaacatggtggaatcccgtctctactaaaagtgcaaaaattagccagactggagtgcagtggcacaacgttggctcactgcaacctccgcctcccagattcaagtgattctcctgcctcagcctacagagtggctgggattacaggtgcccaccaccagcgtcgatcgg

SEQ ID NO: 576516 - DNA, 551 bp, Homo sapiens
  misc_feature (184)..(184): n is a, c, g, or t
  misc_feature (475)..(475): n is a, c, g, or t
  misc_feature (543)..(543): n is a, c, g, or t
cgacagtatagaatcgagctggtacccgagctgctcatggtgctgagcgatcatgggtgccacctagattacggctgggtctacctttcccagcccactgactcaaatgttgaatctcctgtggcaagaccctcgacagacacacccaggaacaatacttggcatccttcaatccaatcaagtngacactcagtattaaccatcacagtggtagactccctgcagagcactgtctctgtaattccagtgccttgggaggccaaggtgggaagatggttcaagccctggagtttgagaacagcttgggcaacgtgtcgagactccatctctccaaaaaaatacaaaaattagccagtggtgatggtgtatgcctgtgatcccagctacttgggaagctgaggtggtatgggtcacctgagcctgggaggtcgagcctgcaagtgaattgagtcggtgccactgcactccagcctgngtgacacagtgggacccttttgcattaatctccctgggagctgtagactggagctgctcctattcggncatttggc

SEQ ID NO: 576517 - DNA, 595 bp, Homo sapiens
  misc_feature (179)..(179): n is a, c, g, or t
  misc_feature (520)..(520): n is a, c, g, or t
  misc_feature (584)..(584): n is a, c, g, or t
tcagaatgatgtgcagttaaacttacggccaggcttggtggctcacacctgcaatcccagcactttggaggccgaggtggggggatcacctgaggtcaggagtttaagatcagcctgaccaacatggtgaaaccctgtctctactaaaaatacaaaaattagccgggcgtggtggcacntgcctgtagtcccagctactcgggaggctgaggctgggaggatcgcttgagcccaggagttctgggctgtagtgcgctatgccgatcgggtgtccgcactaagttcggcatcaatatggtgacctcccgggagcgggggaccaccaggttgcctaaggaggggtgaaccggcccaggtcggaaacggagcaggtcaaaactcccgtgctgatcagtagtgggatcgcgcctgtgaatagccactgcactccagcctgggcaacatagcgagaccccgtctctataaaaaacttaaaaattagctgggtgtagtagtgaacgcctgtagtcccagctacttnggaggctgaggcaggaggatcacttgatcccggggaggttgaggctaacatgagccgagatcanaccaccgcatt

SEQ ID NO: 576518 - DNA, 180 bp, Homo sapiens
gcgtcgacatggaggagaaaaaagaggaatagagagtgaaaaggaaagaagggcagaaagaaaagagaaggaggagagaagaggaagagaaagatagaggaaaagaagaagataagagaaagaggaggaggaggaagaagttggagaagatggaggaggaagaagagggagaaaatgaga

SEQ ID NO: 576519 - DNA, 614 bp, Homo sapiens
  misc_feature (198)..(198): n is a, c, g, or t
  misc_feature (539)..(539): n is a, c, g, or t
  misc_feature (603)..(603): n is a, c, g, or t
gtggcttagaattttatttttggtttacatctcaactatcacagcagccgggcgcggtggctcacacctgcaatcccagcactttggaggccgaggtggggggatcacctgaggtcaggagtttaagatcagcctgaccaacatggtgaaaccctgtctctactaaaaatacaaaaattagccgggcgtggtggcacntgcctgtagtcccagctactcgggaggctgaggctgggaggatcgcttgagcccaggagttctgggctgtagtgcgctatgccgatcgggtgtccgcactaagttcggcatcaatatggtgacctcccgggagcgggggaccaccaggttgcctaaggaggggtgaaccggcccaggtcggaaacggagcaggtcaaaactcccgtgctgatcagtagtgggatcgcgcctgtgaatagccactgcactccagcctgggcaacatagcgagaccccgtctctataaaaaacttaaaaattagctgggtgtagtagtgaacgcctgtagtcccagctacttnggaggctgaggcaggaggatcacttgatcccggggaggttgaggctaacatgagccgagatcanaccaccgcatt

SEQ ID NO: 576520 - DNA, 1999 bp, Homo sapiens
  misc_feature (819)..(819): n is a, c, g, or t
  misc_feature (890)..(890): n is a, c, g, or t
  misc_feature (1800)..(1800): n is a, c, g, or t
agcgagcgcagagcggtttggtcgttcgttgggcggtgttggtttttcgctcgctcgacctgcgcgctcttcctcgcggcagcgcgaacgcggccgcggcggctccggagcaaagctggccctaacaaccttcggccgcttggcgctgacaacgaaacaactgcgcccgcacacccaaagccacgaacctgccctcgcctacagctaccacccgcgctgcgcgcaaaaagcccccacccgaccaacaacacgcatgggcgagcaacgaaacacgcccgacccagcgcaaacacacgcggcctcccccatccataacccgagaccgcgcggcctgcacacgcaaaagacacatccactcgaccgttaacacgggtcacccgggtgaaacacaggatggggcagaccttttcagcacgcaaggcactctccggttcagccttttacttcaagcaacaggctccgcaaccccggacgccatagggcatccaattccccggggcaacacgaccatggacccccttttcccaagcaaaggggaatttaggggtctggaacggggggaacggaaacttcagaccagatccaaacggggaaccttttttccaacacaacaacccccggaacccccgtgggaacgcggcttataattccaacgcaaaggaccggtccaaggacccccaaatattcccggaggacatatggacccggtccctggggcccaacgggagcaaacgcgggacgcttaaacgaaccgggaaaacacggccccgaggattaagccccccattgggcgggacgtgagcgagagggcacttcccnttgagcgcttacttccagggcaaaacaagccggccaaactttaataccgtcccaaagaaaggacgcgcgcnttgtggaacttgagcattggggccgcccgcaaaagagttatcgagccagaatagccaaggaaacccactgttaaagaaacagggggaaacaggaggcaaaacagaggtcttttgcacgaaaacagcagccacgaaatacatatgccaaaaagattgtgggagccacgcgccctagaggagaagcaaccagggcagcatgcccgaaagagattttgcagccccagagagggcaccatttagttgggcgcacgccgacccccacttatccgcgaggaccccaccccggtgcgcggcaaaaccattttataaacccgcaggagggaacgcagcgagcccacaaaagcaccaacaacgagcaaaacgcggcaaaagggcacccccctgatactataacaacaaccgcggccagctttgcgccgaaacaacacgagcaggggggagcaccaaaaagcggcaccactacataccatcaccatgcactaaacccttctggggcgggagcccccgagaggcaactttaacacgacccatcagacgagggtgctcttaaacacgaggcctcttgcaacacaagccacaacgcttgtttctaccaccattgtggggggctttcacacgaaccaacacacaaaacggatttaaagacccgccttttatcatcaccagcggagacggagcatcatactattctgctcaacaacaaaccgatctcattctccgacgacggggcagctttggcgggacacaaacccacccagatctgcaactgatacatgcacatcaatccacgactaccagacgacgagcgcgcttatatcacacacacggcggccgaaaaaacagaagaacagaacgctttctgaggaggcagctatggacgtcaactctgaaagcactgttttaacacagnacgcttttgtacacaaccttctgtgggaggctctgtctcctggggagccccgcacgacacactgttctgttctgacggcggcagctcttaacagacccgcctgtattatattattaaacacaacaggggcgactcttttacccgcaacaattattattcttccccacgcaagagtagtgtagccccgcattcgagttaa

SEQ ID NO: 576521 - DNA, 259 bp, Homo sapiens
ggtctgccccagcactccactgaacctgctaaagatgccagtgttgctaaattcagtgggctcttcattcttcatcttatttgacaactcagtagcactgaacacagctgaccactctttctcataacagtctttactggactttggtaaatcaagatctgttggtttttctcttacctctttggtaactccagtcttagttaagccaccttcctcttcccgctttttggacccttttcctactctcctatactctcaa

SEQ ID NO: 576522 - DNA, 181 bp, Homo sapiens
catccgggggggggttttttttccctttccccccttaaaaaaataggtttttgggttttgggggggggggtggaaccccccccttttgcctttgtgggggttaaacttttcccctccgcttttttccctttttttttttaaaaaaaaaaaagggtttgctgggtttccgcttttttcttta

SEQ ID NO: 576523 - DNA, 353 bp, Homo sapiens
cacagatacgggttgagcctctctcctaacacacgacatcgctcacctcagtagccaacttggagtagcttgtaatgggatagcgataggacccctgtgctctgaccttatgagaaacctatgatcattttcttcagctatttgaatagagacttcatggagtactgcatggaatggactgagctcctgggctgaacatggaccacactgtgacacggaggccatgggaatagggagcacaaggcggtactgcttttggattgtatcacatgtgaatcctaggttttatcgatgcgcacgcagtgagtgcttttgagtatggaagccagtgaggggggtgatcgccttttggg

SEQ ID NO: 576524 - DNA, 622 bp, Homo sapiens
  misc_feature (206)..(206): n is a, c, g, or t
  misc_feature (547)..(547): n is a, c, g, or t
  misc_feature (611)..(611): n is a, c, g, or t
ttgctctgaggtctcctcctgggtcaagcgattctcatgccccagactccctagctgtaatcacagcggtgcaccaccacgcctggataatttttagtattttggggtagagaccatgtaagtcacgcttgtctcgaactcctgaccaacatggtgaaaccctgtctctactaaaaatacaaaaattagccgggcgtggtggcacntgcctgtagtcccagctactcgggaggctgaggctgggaggatcgcttgagcccaggagttctgggctgtagtgcgctatgccgatcgggtgtccgcactaagttcggcatcaatatggtgacctcccgggagcgggggaccaccaggttgcctaaggaggggtgaaccggcccaggtcggaaacggagcaggtcaaaactcccgtgctgatcagtagtgggatcgcgcctgtgaatagccactgcactccagcctgggcaacatagcgagaccccgtctctataaaaaacttaaaaattagctgggtgtagtagtgaacgcctgtagtcccagctacttnggaggctgaggcaggaggatcacttgatcccggggaggttgaggctaacatgagccgagatcanaccaccgcatt

SEQ ID NO: 576525 - DNA, 126 bp, Homo sapiens
cattatagtagggtaaaatcactgttcacgcaggtctaacccagctccagtacctcattcagtgggtgcaacaatcccaaccgcttggtgaattctagcttcacaagtgcataggcaagcagccga

SEQ ID NO: 576526 - DNA, 265 bp, Homo sapiens
ttatttgtgccactgcactccagcgtgggggacagagcaagaccctggtcgtcagaaaaagtaagaacgtcaacaaaggatagtagaactggaaaaggggccgggtgcggtggctcatgcctgtaatcccagcacattgggaggccaaggtgggcggatcacgaggtcaagagatcgagaccatcttggccaacatggtgaaaccccatctgtactaaaaatacaaaaattacctgggcctggtgacacatgcctgtaatcccag

SEQ ID NO: 576527 - DNA, 454 bp, Homo sapiens
  misc_feature (33)..(33): n is a, c, g, or t
  misc_feature (35)..(35): n is a, c, g, or t
  misc_feature (38)..(38): n is a, c, g, or t
  misc_feature (379)..(379): n is a, c, g, or t
  misc_feature (443)..(443): n is a, c, g, or t
accttctctggtggtatcctccgccgggcgcgntngcntgcctgtagtcccagctactcgggaggctgaggctgggaggatcgcttgagcccaggagttctgggctgtagtgcgctatgccgatcgggtgtccgcactaagttcggcatcaatatggtgacctcccgggagcgggggaccaccaggttgcctaaggaggggtgaaccggcccaggtcggaaacggagcaggtcaaaactcccgtgctgatcagtagtgggatcgcgcctgtgaatagccactgcactccagcctgggcaacatagcgagaccccgtctctataaaaaacttaaaaattagctgggtgtagtagtgaacgcctgtagtcccagctacttnggaggctgaggcaggaggatcacttgatcccggggaggttgaggctaacatgagccgagatcanaccaccgcatt

SEQ ID NO: 576528 - DNA, 545 bp, Homo sapiens
  misc_feature (129)..(130): n is a, c, g, or t
  misc_feature (266)..(266): n is a, c, g, or t
  misc_feature (342)..(342): n is a, c, g, or t
atgcaagaactgcaagagaccatttactaagatactcaatttactggagagaaagctgctcacatggagatgattagtgtcttctggtgttttaagtagatattcacaatatttgagatcactgcattnncaacaggaagtgaatacaaaactataagagtagtaccataggtaccacagttaattctatgcaggtatgatttaatactgcatctttctgtttgtttacatttctgtaaactgcaaaaggcaccatgtatggactntgtaggcacaccttttgattaattttcattaccgatttgggttttttgggtaaaaattataaaagactaattttcnccctgtattttatgctttcatgacataacccttttcttaattggagcaagggtggcaagcttcctgggtcaccctggagaggtgtttaaattggtggcacattttgcaaaaacctttcaaattattttttgaaaaaaaaccctttggttaaatgggatttcgcagggtaaaaaaacctgcctgtttaaaaagcaaacctttat

SEQ ID NO: 576529 - DNA, 492 bp, Homo sapiens
  misc_feature (417)..(417): n is a, c, g, or t
  misc_feature (481)..(481): n is a, c, g, or t
cccgggtacactagagggatagccgtcaataataaaaaaaaaaaaaaaaaaaggataaactgggtatgctagcacatgcctgtagtcccagctactcgggaggctgaggctgggaggatcgcttgagcccaggagttctgggctgtagtgcgctatgccgatcgggtgtccgcactaagttcggcatcaatatggtgacctcccgggagcgggggaccaccaggttgcctaaggaggggtgaaccggcccaggtcggaaacggagcaggtcaaaactcccgtgctgatcagtagtgggatcgcgcctgtgaatagccactgcactccagcctgggcaacatagcgagaccccgtctctataaaaaacttaaaaattagctgggtgtagtagtgaacgcctgtagtcccagctacttnggaggctgaggcaggaggatcacttgatcccggggaggttgaggctaacatgagccgagatcanaccaccgcatt

SEQ ID NO: 576530 - DNA, 841 bp, Homo sapiens
ggaaaaaggacacaaatggaaaaacatttcatgctcatggataggaagaatcaatatcgtgaaaataaccacactgcccaaagtaatttatagattcaatgctatttccatcaagctaccactgactttcttcgcagaattagaaaaaactactttaaatttcatatggagccaaaaaacccatatagccaacacagttgtaagcaaaaagaacaaagctggaagtgtcacagtagacttcaaactatactaaaaggctatagaagccaaaatagcatgatactgataccaaaacagacatatagaccaatggaacagaacagagacctcagaaataactacacatctacagccatcatcatgatctttgacaaacctgataaaaacaagcaacgggaacaaggattccctatttattcaaatggtgctgggaaaactggctagccgtatgcataaaatgaaattggaccccttccttacacttatacaaaaattaacttaagatggattacacgacttaaatgtaaaacccaaaacataaaaacctaaaagaaaaactaggcaataccattcaggacctaggcatggggcaaagacttcatgattaaaacgccaaagcaatgcaaaaaaaacctgaatgacaaaggggatcccttaaactaaagagcttctgcccgcacaaaaagaaaaacaaacaacacaaaaattgggcgcccggccccaaaattaaaccgctgggcgcggccagataaaacggacgggtcacagaaccgccaaacggggtcaccaaaaccgggcgggctcaaacacgatcgcgtggaaaacgcaagcacgcgcaacc

SEQ ID NO: 576531 - DNA, 372 bp, Homo sapiens
cacgaggccgcagcgtgttccgcctgatgctggagttgaacgagcggctggggaccagctacgtgatcgccacccacgacccggagatcgcggccggcgcccagcgcgttctccggctggaggaaggggtgctggtaccggcgaaggccgcttattgagcctacggtaaatggttgacgaaccatttaccgctgttctgttcccttctcctcggccgggtcctcgatcttcagcacgccggcctgcaccgcctcggtgtaccaggcttcatcctggagggcctgggtgaccacgaaattgggtgccgagcgcttgatgaggcgcggtccgacgaagcccgccaggaagaccaggatcccgagccacagttgg

SEQ ID NO: 576532 - DNA, 116 bp, Homo sapiens
cgggtgatggtcccacccctgactccgtcatcacacaccgacccgttcgttgtctcagccccgcgctgataatatggacggggtgatgctcccagtccgctgagtccggtcattca

SEQ ID NO: 576533 - DNA, 830 bp, Homo sapiens
aagcagtgctatcaacgcagagtgcccattacggccgggcgtggtaacaaaaattagctgggcatggtggcacatgcctgtaatcccagctactcaggaggctgaggcaggagaatcacatgaagccgggaggccagaggtttcagtgagccgagtgcaccgttgggagactctgtctcaaataaaataaaatcttggccttctagtaagatactttctgaaacccaaaaatatctgggacaaatggtctgaacacaagtcttgagtgccatggggagcacagaagggatatcttatgcacactgatgatgcactagacgaaacctgagactccacatgtgtgatactcacacggtcagacttccacaagagctgcagggcacgagccagggttaccacagacacttcgctctacacgtgacagcaatgtctggatacaacagcagtcacaacaaagcacatgaattacttgcaaccttagggggtaaacataagttggtgttttcttgggaactggtaagaattcttgcgggattcacacgcgcgtccggcataagggacacagggatggccgggcaattggggttcgtgcactacaattacatggtgaaaccattgacgagtggaggcactcctggaacgggtgggtaatacgctcaaaagaaggatttttgctgccaagatcaatgcttccgtaaacagccaaggtggcaaggtgacaggtaatgacataggacaatctggtgctggtggcaacaccacacacccaatcacaaactaagacattataacaggtatgagctcaagtacaagtgttatgtgggctacat

SEQ ID NO: 576534 - DNA, 275 bp, Homo sapiens
tgtagggcaatagtaggaagtaaaagtggggccacagatttttctttgtttaggattaaaaaaaaaaaaaggcttatttatatggggatagaaaaagcccagtaaagaaaagagaattggcgggaggtatgtgccccggaatgaaacccattcacaggtggaggggcgggcctttgggctaaggaggggaattggcccacaaccacaggtctatcacacatgggaagagagggagtctatgggccaaaggtgtacagggctcatggggagacccc
